United States Patent Application Publication US 2005/0244851 A1 - sequence listing, part 37

SEQ ID NO: 1429783 - DNA, 25 bp, Homo sapien
tagaaatcagaatgaaggctgacac

SEQ ID NO: 1429784 - DNA, 25 bp, Homo sapien
ttgcagggacataccgctggttctc

SEQ ID NO: 1429785 - DNA, 25 bp, Homo sapien
gacataccgctggttctctatctcc

SEQ ID NO: 1429786 - DNA, 25 bp, Homo sapien
cataccgctggttctctatctcctt

SEQ ID NO: 1429787 - DNA, 25 bp, Homo sapien
agggacataccgctggttctctatc

SEQ ID NO: 1429788 - DNA, 25 bp, Homo sapien
caccaagacccatctttgatgatga

SEQ ID NO: 1429789 - DNA, 25 bp, Homo sapien
tgaaaaatgatctagaactgtgctc

SEQ ID NO: 1429790 - DNA, 25 bp, Homo sapien
tttgtggaacaccaaggacagcaag

SEQ ID NO: 1429791 - DNA, 25 bp, Homo sapien
tgtgctctagcaggcccgtaaccat

SEQ ID NO: 1429792 - DNA, 25 bp, Homo sapien
aaacagaccacatgttcctttcaca

SEQ ID NO: 1429793 - DNA, 25 bp, Homo sapien
cacaacagtgtctgagagtgcttgc

SEQ ID NO: 1429794 - DNA, 25 bp, Homo sapien
gcctcattcctacaaacagaccaca

SEQ ID NO: 1429795 - DNA, 25 bp, Homo sapien
ctcatcatctagactttgagcatcc

SEQ ID NO: 1429796 - DNA, 25 bp, Homo sapien
ttccttcctcaacaccaaggacagc

SEQ ID NO: 1429797 - DNA, 25 bp, Homo sapien
tatttccttcctcaacaccaaggac

SEQ ID NO: 1429798 - DNA, 25 bp, Homo sapien
caaggacagcatccaattccattga

SEQ ID NO: 1429799 - DNA, 25 bp, Homo sapien
gacagcatccaattccattgagaat

SEQ ID NO: 1429800 - DNA, 25 bp, Homo sapien
tggagtttccaacactgtgggccat

SEQ ID NO: 1429801 - DNA, 25 bp, Homo sapien
aatgctatcaagcatttggatcttt

SEQ ID NO: 1429802 - DNA, 25 bp, Homo sapien
ttggatctttttggagtggagtttc

SEQ ID NO: 1429803 - DNA, 25 bp, Homo sapien
ttcatgcctccaaatgctatcaagc

SEQ ID NO: 1429804 - DNA, 25 bp, Homo sapien
cctcgacattcatgtgacccgattg

SEQ ID NO: 1429805 - DNA, 25 bp, Homo sapien
ccatctgtcacaatgtcagttcctg

SEQ ID NO: 1429806 - DNA, 25 bp, Homo sapien
tgtcacaatgtcagttcctgctggg

SEQ ID NO: 1429807 - DNA, 25 bp, Homo sapien
gattgtgtcagcgtcacttgtcccc

SEQ ID NO: 1429808 - DNA, 25 bp, Homo sapien
ggaactgtcaagtggagttcagcag

SEQ ID NO: 1429809 - DNA, 25 bp, Homo sapien
caaggaactgtcaagtggagttcag

SEQ ID NO: 1429810 - DNA, 25 bp, Homo sapien
tcagcagtgagagtacgcagtgggg

SEQ ID NO: 1429811 - DNA, 25 bp, Homo sapien
aactgtcaagtggagttcagcagtg

SEQ ID NO: 1429812 - DNA, 25 bp, Homo sapien
ctgagggttatgggctgtgaggtac

SEQ ID NO: 1429813 - DNA, 25 bp, Homo sapien
tggggctcttcatggacagcagctg

SEQ ID NO: 1429814 - DNA, 25 bp, Homo sapien
cacatcaacccaaaagggcttcagg

SEQ ID NO: 1429815 - DNA, 25 bp, Homo sapien
caacaggcttgttctaggtgcctcc

SEQ ID NO: 1429816 - DNA, 25 bp, Homo sapien
aggcaaccaggaacccaacaggctt

SEQ ID NO: 1429817 - DNA, 25 bp, Homo sapien
atacgcacccactagctgcccggtg

SEQ ID NO: 1429818 - DNA, 25 bp, Homo sapien
ctgcccggtggtactcaacatctag

SEQ ID NO: 1429819 - DNA, 25 bp, Homo sapien
tcaacatctagggcattgagcaggg

SEQ ID NO: 1429820 - DNA, 25 bp, Homo sapien
ggaaatatcgcccaagaagtctatc

SEQ ID NO: 1429821 - DNA, 25 bp, Homo sapien
ctgagggcgagtctctgggctacca

SEQ ID NO: 1429822 - DNA, 25 bp, Homo sapien
agaattcgtgacactgagggcgagt

SEQ ID NO: 1429823 - DNA, 25 bp, Homo sapien
actgagggcgagtctctgggctacc

SEQ ID NO: 1429824 - DNA, 25 bp, Homo sapien
gagtgaaagagaattcgtgacactg

SEQ ID NO: 1429825 - DNA, 25 bp, Homo sapien
gaaatttagattctttcttctcctc

SEQ ID NO: 1429826 - DNA, 25 bp, Homo sapien
aaatttagattctttcttctcctct

SEQ ID NO: 1429827 - DNA, 25 bp, Homo sapien
ggataacttccaagcctagagtggc

SEQ ID NO: 1429828 - DNA, 25 bp, Homo sapien
tggccctaggataacttccaagcct

SEQ ID NO: 1429829 - DNA, 25 bp, Homo sapien
cctaggataacttccaagcctagag

SEQ ID NO: 1429830 - DNA, 25 bp, Homo sapien
ttatggccctaggataacttccaag

SEQ ID NO: 1429831 - DNA, 25 bp, Homo sapien
agaagtgccttcctcctcaagatcc

SEQ ID NO: 1429832 - DNA, 25 bp, Homo sapien
gctatttcagaagtgccttcctcct

SEQ ID NO: 1429833 - DNA, 25 bp, Homo sapien
cgggagttgcagctatttcagaagt

SEQ ID NO: 1429834 - DNA, 25 bp, Homo sapien
tcagaagtgccttcctcctcaagat

SEQ ID NO: 1429835 - DNA, 25 bp, Homo sapien
caagagttgtatgagggctatttgc

SEQ ID NO: 1429836 - DNA, 25 bp, Homo sapien
taatatgactttggtgcagacagcc

SEQ ID NO: 1429837 - DNA, 25 bp, Homo sapien
ttatcaatgaattcagtaatatgac

SEQ ID NO: 1429838 - DNA, 25 bp, Homo sapien
gctccacttaggataattatcaatg

SEQ ID NO: 1429839 - DNA, 25 bp, Homo sapien
gaggtacagccatactcagaaggcc

SEQ ID NO: 1429840 - DNA, 25 bp, Homo sapien
catccaggcaagtgtttgccactgt

SEQ ID NO: 1429841 - DNA, 25 bp, Homo sapien
tcagaaggcctactggcacccatat

SEQ ID NO: 1429842 - DNA, 25 bp, Homo sapien
tactggactagggtcaggctcactc

SEQ ID NO: 1429843 - DNA, 25 bp, Homo sapien
gaataagtagtgtccccgtaggtga

SEQ ID NO: 1429844 - DNA, 25 bp, Homo sapien
aaggaagctggcaagaataagtagt

SEQ ID NO: 1429845 - DNA, 25 bp, Homo sapien
aagctggcaagaataagtagtgtcc

SEQ ID NO: 1429846 - DNA, 25 bp, Homo sapien
tggcaagaataagtagtgtccccgt

SEQ ID NO: 1429847 - DNA, 25 bp, Homo sapien
caacggggtgtgcaaagagaatctc

SEQ ID NO: 1429848 - DNA, 25 bp, Homo sapien
tagccaacggggtgtgcaaagagaa

SEQ ID NO: 1429849 - DNA, 25 bp, Homo sapien
ctgggtagccaacggggtgtgcaaa

SEQ ID NO: 1429850 - DNA, 25 bp, Homo sapien
gagaatctcagaatagcaacatgga

SEQ ID NO: 1429851 - DNA, 25 bp, Homo sapien
catcgctggccctgtgctgcgctat

SEQ ID NO: 1429852 - DNA, 25 bp, Homo sapien
tggccctgtgctgcgctatccagtc

SEQ ID NO: 1429853 - DNA, 25 bp, Homo sapien
cctgtgctgcgctatccagtccaag

SEQ ID NO: 1429854 - DNA, 25 bp, Homo sapien
agctgccatcgctggccctgtgctg

SEQ ID NO: 1429855 - DNA, 25 bp, Homo sapien
tgacaatcaacctctttatcgtgag

SEQ ID NO: 1429856 - DNA, 25 bp, Homo sapien
tttgcctgcctcgacaccattattg

SEQ ID NO: 1429857 - DNA, 25 bp, Homo sapien
cactgggctaggatgtaggtgtctt

SEQ ID NO: 1429858 - DNA, 25 bp, Homo sapien
ggccgtcattacagagccctggtgt

SEQ ID NO: 1429859 - DNA, 25 bp, Homo sapien
agagagtgaacagcactgactcagg

SEQ ID NO: 1429860 - DNA, 25 bp, Homo sapien
ttcctagtgaccaggtacagtctta

SEQ ID NO: 1429861 - DNA, 25 bp, Homo sapien
cccagagagtgaacagcactgactc

SEQ ID NO: 1429862 - DNA, 25 bp, Homo sapien
tagtgaccaggtacagtcttaaggt

SEQ ID NO: 1429863 - DNA, 25 bp, Homo sapien
gaagacaagtgacctcctagagttt

SEQ ID NO: 1429864 - DNA, 25 bp, Homo sapien
taacacatcgttaggtgaggaagac

SEQ ID NO: 1429865 - DNA, 25 bp, Homo sapien
gaagcacaaagtgtggtcacccaag

SEQ ID NO: 1429866 - DNA, 25 bp, Homo sapien
tgatggatgtttgcagggaacccgt

SEQ ID NO: 1429867 - DNA, 25 bp, Homo sapien
ggcagaaatagtggctcccatcaca

SEQ ID NO: 1429868 - DNA, 25 bp, Homo sapien
ggctctccaacatggcgtaagaaac

SEQ ID NO: 1429869 - DNA, 25 bp, Homo sapien
cgtaagaaacgaagctttgcctgca

SEQ ID NO: 1429870 - DNA, 25 bp, Homo sapien
gcctgcatgtataaactgggtaatt

SEQ ID NO: 1429871 - DNA, 25 bp, Homo sapien
taggatgactaacgccatctgtggg

SEQ ID NO: 1429872 - DNA, 25 bp, Homo sapien
caaggccttggatttctaagaacca

SEQ ID NO: 1429873 - DNA, 25 bp, Homo sapien
gcaaatgaggctggatcccgactca

SEQ ID NO: 1429874 - DNA, 25 bp, Homo sapien
tgtcaatgtatctgcaactcgtcag

SEQ ID NO: 1429875 - DNA, 25 bp, Homo sapien
gagaggctgtcttctgcgtaatctt

SEQ ID NO: 1429876 - DNA, 25 bp, Homo sapien
gaatttctgcaacggcaatttggca

SEQ ID NO: 1429877 - DNA, 25 bp, Homo sapien
tgagcttcatgggatggcacccaca

SEQ ID NO: 1429878 - DNA, 25 bp, Homo sapien
ttatggagtcttcgtagtatcagcc

SEQ ID NO: 1429879 - DNA, 25 bp, Homo sapien
tgtcctatacaggtatcaagaacaa

SEQ ID NO: 1429880 - DNA, 25 bp, Homo sapien
cagctgctgatagcccactgttgac

SEQ ID NO: 1429881 - DNA, 25 bp, Homo sapien
tatagtcagatctggtaggcccaaa

SEQ ID NO: 1429882 - DNA, 25 bp, Homo sapien
cacatatgatttttgactccccaaa

SEQ ID NO: 1429883 - DNA, 25 bp, Homo sapien
tgcaagactaagcagtgtggctcct

SEQ ID NO: 1429884 - DNA, 25 bp, Homo sapien
tacagggtgagctacggatgagcca

SEQ ID NO: 1429885 - DNA, 25 bp, Homo sapien
caactgtacctagcatataccaggc

SEQ ID NO: 1429886 - DNA, 25 bp, Homo sapien
tacaagacagtgaggtaaccttgcc

SEQ ID NO: 1429887 - DNA, 25 bp, Homo sapien
aaagacttcagggaagagaccacca

SEQ ID NO: 1429888 - DNA, 25 bp, Homo sapien
taaagtgactgacttgcatcagagg

SEQ ID NO: 1429889 - DNA, 25 bp, Homo sapien
cttagaagttaagaggatctgtccc

SEQ ID NO: 1429890 - DNA, 25 bp, Homo sapien
gcataccaaattgaaggagcagcag

SEQ ID NO: 1429891 - DNA, 25 bp, Homo sapien
tctttgattctagctgttagggccc

SEQ ID NO: 1429892 - DNA, 25 bp, Homo sapien
tgtgcacaaaactaggaccaagagg

SEQ ID NO: 1429893 - DNA, 25 bp, Homo sapien
cagggccctgcggtatcatctttga

SEQ ID NO: 1429894 - DNA, 25 bp, Homo sapien
gaacatcaatttgcaaaggcctgag

SEQ ID NO: 1429895 - DNA, 25 bp, Homo sapien
tcgggctagcacaaacctcttgagg

SEQ ID NO: 1429896 - DNA, 25 bp, Homo sapien
tcttgccttctaagtgcccggtgga

SEQ ID NO: 1429897 - DNA, 25 bp, Homo sapien
tagacccagactttccacctgatga

SEQ ID NO: 1429898 - DNA, 25 bp, Homo sapien
tgtgcagtctgctattagacccaga

SEQ ID NO: 1429899 - DNA, 25 bp, Homo sapien
atgagcctgggacgtgtgtttattc

SEQ ID NO: 1429900 - DNA, 25 bp, Homo sapien
ctgggagattgagaaaaagagagca

SEQ ID NO: 1429901 - DNA, 25 bp, Homo sapien
agatgagcctgggacgtgtgtttat

SEQ ID NO: 1429902 - DNA, 25 bp, Homo sapien
aagtttcagtcctgggagatgagcc

SEQ ID NO: 1429903 - DNA, 25 bp, Homo sapien
gatagcgacgctgagctaggcgatt

SEQ ID NO: 1429904 - DNA, 25 bp, Homo sapien
gctaggcgatttggccgattcaggc

SEQ ID NO: 1429905 - DNA, 25 bp, Homo sapien
gatttggccgattcaggctagtggc

SEQ ID NO: 1429906 - DNA, 25 bp, Homo sapien
cgacgctgagctaggcgatttggcc

SEQ ID NO: 1429907 - DNA, 25 bp, Homo sapien
ctgggatgataaacctaggtctcct

SEQ ID NO: 1429908 - DNA, 25 bp, Homo sapien
gctaagtctacccagattgctgagg

SEQ ID NO: 1429909 - DNA, 25 bp, Homo sapien
tgacactgcacccacactactgata

SEQ ID NO: 1429910 - DNA, 25 bp, Homo sapien
tgaggaacagggaacttagcttctc

SEQ ID NO: 1429911 - DNA, 25 bp, Homo sapien
ctgaggcacctgagatgggttgtaa

SEQ ID NO: 1429912 - DNA, 25 bp, Homo sapien
aggcacctgagatgggttgtaaaga

SEQ ID NO: 1429913 - DNA, 25 bp, Homo sapien
tgaggcacctgagatgggttgtaaa

SEQ ID NO: 1429914 - DNA, 25 bp, Homo sapien
gcacctgagatgggttgtaaagagg

SEQ ID NO: 1429915 - DNA, 25 bp, Homo sapien
tcccccgctggatgcggatcctcgg

SEQ ID NO: 1429916 - DNA, 25 bp, Homo sapien
ccgctggatgcggatcctcggcctt

SEQ ID NO: 1429917 - DNA, 25 bp, Homo sapien
gctggatgcggatcctcggccttca

SEQ ID NO: 1429918 - DNA, 25 bp, Homo sapien
tggatgcggatcctcggccttcacc

SEQ ID NO: 1429919 - DNA, 25 bp, Homo sapien
aggcactaacatccggcagaggtgg

SEQ ID NO: 1429920 - DNA, 25 bp, Homo sapien
tggagaaggcactaacatccggcag

SEQ ID NO: 1429921 - DNA, 25 bp, Homo sapien
agaaggcactaacatccggcagagg

SEQ ID NO: 1429922 - DNA, 25 bp, Homo sapien
cctggagaaggcactaacatccggc

SEQ ID NO: 1429923 - DNA, 25 bp, Homo sapien
ttcgatcgaaaccagctgaaccagc

SEQ ID NO: 1429924 - DNA, 25 bp, Homo sapien
ttcttggtgggcttcgatcgaaacc

SEQ ID NO: 1429925 - DNA, 25 bp, Homo sapien
gatgcgttcttggtgggcttcgatc

SEQ ID NO: 1429926 - DNA, 25 bp, Homo sapien
tgggcttcgatcgaaaccagctgaa

SEQ ID NO: 1429927 - DNA, 25 bp, Homo sapien
atcctccttggctgaactggcggaa

SEQ ID NO: 1429928 - DNA, 25 bp, Homo sapien
atgctccttcccatctccgagcttg

SEQ ID NO: 1429929 - DNA, 25 bp, Homo sapien
ggaactctcagaaatacttcgtggt

SEQ ID NO: 1429930 - DNA, 25 bp, Homo sapien
cctctctgggcagtatttcggggag

SEQ ID NO: 1429931 - DNA, 25 bp, Homo sapien
cagtgggactgttgtctcaggatca

SEQ ID NO: 1429932 - DNA, 25 bp, Homo sapien
ggactgttgtctcaggatcatattg

SEQ ID NO: 1429933 - DNA, 25 bp, Homo sapien
aaggcagtgggactgttgtctcagg

SEQ ID NO: 1429934 - DNA, 25 bp, Homo sapien
tgtctcaggatcatattgtactgaa

SEQ ID NO: 1429935 - DNA, 25 bp, Homo sapien
tgaaggtcgcaggataaggacagag

SEQ ID NO: 1429936 - DNA, 25 bp, Homo sapien
caggataaggacagagcccaagccc

SEQ ID NO: 1429937 - DNA, 25 bp, Homo sapien
aaggtcgcaggataaggacagagcc

SEQ ID NO: 1429938 - DNA, 25 bp, Homo sapien
gtcgcaggataaggacagagcccaa

SEQ ID NO: 1429939 - DNA, 25 bp, Homo sapien
ttggaaatgacctcttggccatcag

SEQ ID NO: 1429940 - DNA, 25 bp, Homo sapien
tggaaatgacctcttggccatcagg

SEQ ID NO: 1429941 - DNA, 25 bp, Homo sapien
ctggtagatgggtctcaggaactga

SEQ ID NO: 1429942 - DNA, 25 bp, Homo sapien
aggcctcggtgtccctgtctgccct

SEQ ID NO: 1429943 - DNA, 25 bp, Homo sapien
agcatttcctcccagactgttcctc

SEQ ID NO: 1429944 - DNA, 25 bp, Homo sapien
tgccagtccctggtagatgggtctc

SEQ ID NO: 1429945 - DNA, 25 bp, Homo sapien
caggtctgctcaggtgtcagccaca

SEQ ID NO: 1429946 - DNA, 25 bp, Homo sapien
agccttgacatccagaaaagtcctg

SEQ ID NO: 1429947 - DNA, 25 bp, Homo sapien
gccacagagctgagcggtacccagg

SEQ ID NO: 1429948 - DNA, 25 bp, Homo sapien
tcagagtagccttgacatccagaaa

SEQ ID NO: 1429949 - DNA, 25 bp, Homo sapien
agtttacagaggctccccacttcag

SEQ ID NO: 1429950 - DNA, 25 bp, Homo sapien
tcattatccatgtgtgaggacctcc

SEQ ID NO: 1429951 - DNA, 25 bp, Homo sapien
aaaagatcttttgacgcatagggcc

SEQ ID NO: 1429952 - DNA, 25 bp, Homo sapien
gaggacctcctttgtgaacagtcac

SEQ ID NO: 1429953 - DNA, 25 bp, Homo sapien
cataaattactttgtctcgtagaat

SEQ ID NO: 1429954 - DNA, 25 bp, Homo sapien
tagaatcagatcctgagcgtcagct

SEQ ID NO: 1429955 - DNA, 25 bp, Homo sapien
tatatgctcagttcatcattttggg

SEQ ID NO: 1429956 - DNA, 25 bp, Homo sapien
tcctgagcgtcagctatgtatatgc

SEQ ID NO: 1429957 - DNA, 25 bp, Homo sapien
ctgttgttgttcctccggctcccga

SEQ ID NO: 1429958 - DNA, 25 bp, Homo sapien
cccgaaatatctgagcgagtaggat

SEQ ID NO: 1429959 - DNA, 25 bp, Homo sapien
tccggctcccgaaatatctgagcga

SEQ ID NO: 1429960 - DNA, 25 bp, Homo sapien
tgagcgagtaggatgaggatcccca

SEQ ID NO: 1429961 - DNA, 25 bp, Homo sapien
ggaagtcttttaagcaattgcccca

SEQ ID NO: 1429962 - DNA, 25 bp, Homo sapien
cagcagcttttgcaattgtcagaac

SEQ ID NO: 1429963 - DNA, 25 bp, Homo sapien
gtccactgtgatccattgttcctag

SEQ ID NO: 1429964 - DNA, 25 bp, Homo sapien
tacatgaaagtgacactggtccact

SEQ ID NO: 1429965 - DNA, 25 bp, Homo sapien
ctgttccatgtctaggggtgggaag

SEQ ID NO: 1429966 - DNA, 25 bp, Homo sapien
aacgccctggctccaatcccactca

SEQ ID NO: 1429967 - DNA, 25 bp, Homo sapien
gttccatgtctaggggtgggaagag

SEQ ID NO: 1429968 - DNA, 25 bp, Homo sapien
ccaacgccctggctccaatcccact

SEQ ID NO: 1429969 - DNA, 25 bp, Homo sapien
tccgaagttgcgctagccaatctgg

SEQ ID NO: 1429970 - DNA, 25 bp, Homo sapien
ccagaggatctgacagcttcagttt

SEQ ID NO: 1429971 - DNA, 25 bp, Homo sapien
cgaagttgcgctagccaatctggct

SEQ ID NO: 1429972 - DNA, 25 bp, Homo sapien
cactgcgtctttctaaaaccagagg

SEQ ID NO: 1429973 - DNA, 25 bp, Homo sapien
gaggccataatctgccagacgggaa

SEQ ID NO: 1429974 - DNA, 25 bp, Homo sapien
tgagttccactaatagcacagggtg

SEQ ID NO: 1429975 - DNA, 25 bp, Homo sapien
caccaatggcttcgcagtaatgcaa

SEQ ID NO: 1429976 - DNA, 25 bp, Homo sapien
taatgcaaagcctgggacacgaggc

SEQ ID NO: 1429977 - DNA, 25 bp, Homo sapien
tctgacagtactcgaagatttccgt

SEQ ID NO: 1429978 - DNA, 25 bp, Homo sapien
gggcggcccagcatctgacagtact

SEQ ID NO: 1429979 - DNA, 25 bp, Homo sapien
cgtcctctggattgcctcagttgtt

SEQ ID NO: 1429980 - DNA, 25 bp, Homo sapien
tactcgaagatttccgtcctctgga

SEQ ID NO: 1429981 - DNA, 25 bp, Homo sapien
ggagccatgtaacactccgggagca

SEQ ID NO: 1429982 - DNA, 25 bp, Homo sapien
caaacacgggtccatacattggatg

SEQ ID NO: 1429983 - DNA, 25 bp, Homo sapien
tttgagcaaactcgcacaaaagagg

SEQ ID NO: 1429984 - DNA, 25 bp, Homo sapien
tgctgagccagaaatcaaacacggg

SEQ ID NO: 1429985 - DNA, 25 bp, Homo sapien
gctatggccaacagagaatgtcacc

SEQ ID NO: 1429986 - DNA, 25 bp, Homo sapien
tcattgtagggatgctagggcccca

SEQ ID NO: 1429987 - DNA, 25 bp, Homo sapien
gcctctagggagcaaatcgttctgt

SEQ ID NO: 1429988 - DNA, 25 bp, Homo sapien
caaagttagcttgtggagccagggt

SEQ ID NO: 1429989 - DNA, 25 bp, Homo sapien
ggcccccgccaatgctgtaatgtgg

SEQ ID NO: 1429990 - DNA, 25 bp, Homo sapien
tgaggcccccgccaatgctgtaatg

SEQ ID NO: 1429991 - DNA, 25 bp, Homo sapien
cccacggggcatctccttgcacaga

SEQ ID NO: 1429992 - DNA, 25 bp, Homo sapien
caatgctgtaatgtggggcccacgg

SEQ ID NO: 1429993 - DNA, 25 bp, Homo sapien
caatcccaaataagggagccggcgg

SEQ ID NO: 1429994 - DNA, 25 bp, Homo sapien
ccaaataagggagccggcggtagct

SEQ ID NO: 1429995 - DNA, 25 bp, Homo sapien
ctgcacagataacaatcccaaataa

SEQ ID NO: 1429996 - DNA, 25 bp, Homo sapien
gataacaatcccaaataagggagcc

SEQ ID NO: 1429997 - DNA, 25 bp, Homo sapien
caacaagggctaaaacagtcccttg

SEQ ID NO: 1429998 - DNA, 25 bp, Homo sapien
tggatccataaaacccaacaagggc

SEQ ID NO: 1429999 - DNA, 25 bp, Homo sapien
gatccataaaacccaacaagggcta

SEQ ID NO: 1430000 - DNA, 25 bp, Homo sapien
atggatccataaaacccaacaaggg

SEQ ID NO: 1430001 - DNA, 25 bp, Homo sapien
gtttcctttctcccaggtcgcatac

SEQ ID NO: 1430002 - DNA, 25 bp, Homo sapien
tgtttcctttctcccaggtcgcata

SEQ ID NO: 1430003 - DNA, 25 bp, Homo sapien
agatagcagaagtgagctgcctcca

SEQ ID NO: 1430004 - DNA, 25 bp, Homo sapien
agatggtctgtcttcacggtgtagt

SEQ ID NO: 1430005 - DNA, 25 bp, Homo sapien
gagccatgagatagcagaagtgagc

SEQ ID NO: 1430006 - DNA, 25 bp, Homo sapien
gcacgtgagccatgagatagcagaa

SEQ ID NO: 1430007 - DNA, 25 bp, Homo sapien
gggtccccagcctgattcgacagaa

SEQ ID NO: 1430008 - DNA, 25 bp, Homo sapien
gcacgctgatacagctctgggtccc

SEQ ID NO: 1430009 - DNA, 25 bp, Homo sapien
atcacagccaagtgaggcctccagt

SEQ ID NO: 1430010 - DNA, 25 bp, Homo sapien
ccaatggcaacaatcgcacgctgat

SEQ ID NO: 1430011 - DNA, 25 bp, Homo sapien
ccagatagctagagacaaaactcag

SEQ ID NO: 1430012 - DNA, 25 bp, Homo sapien
catacatacattcacagggatattg

SEQ ID NO: 1430013 - DNA, 25 bp, Homo sapien
tgacattgctcacttactatttttc

SEQ ID NO: 1430014 - DNA, 25 bp, Homo sapien
cacagggatattggaaaatggataa

SEQ ID NO: 1430015 - DNA, 25 bp, Homo sapien
cagctaggacgatgcagaggcagca

SEQ ID NO: 1430016 - DNA, 25 bp, Homo sapien
taagcagcgtggtggaaatgtacaa

SEQ ID NO: 1430017 - DNA, 25 bp, Homo sapien
aaatcaagccaagtggcccagctag

SEQ ID NO: 1430018 - DNA, 25 bp, Homo sapien
tacaaagccccgcatcaatggtgtt

SEQ ID NO: 1430019 - DNA, 25 bp, Homo sapien
gtctgcagtgggtcattgagcgcca

SEQ ID NO: 1430020 - DNA, 25 bp, Homo sapien
tcctccccgacatgagctggaagag

SEQ ID NO: 1430021 - DNA, 25 bp, Homo sapien
ggaatcctccccgacatgagctgga

SEQ ID NO: 1430022 - DNA, 25 bp, Homo sapien
gtcattgagcgccagcgtgctggtg

SEQ ID NO: 1430023 - DNA, 25 bp, Homo sapien
agccatcccgatctcccactccctg

SEQ ID NO: 1430024 - DNA, 25 bp, Homo sapien
cctccacgccaagcccacagcactc

SEQ ID NO: 1430025 - DNA, 25 bp, Homo sapien
gagccacagcagtttatctggaagc

SEQ ID NO: 1430026 - DNA, 25 bp, Homo sapien
cacagcagtttatctggaagctctt

SEQ ID NO: 1430027 - DNA, 25 bp, Homo sapien
gcctcttttgttaagtcctgactca

SEQ ID NO: 1430028 - DNA, 25 bp, Homo sapien
tggcctcttttgttaagtcctgact

SEQ ID NO: 1430029 - DNA, 25 bp, Homo sapien
cctcttttgttaagtcctgactcac

SEQ ID NO: 1430030 - DNA, 25 bp, Homo sapien
ggcctcttttgttaagtcctgactc

SEQ ID NO: 1430031 - DNA, 25 bp, Homo sapien
acaaagcatggccccacaagtggtt

SEQ ID NO: 1430032 - DNA, 25 bp, Homo sapien
aagcatggccccacaagtggttctt

SEQ ID NO: 1430033 - DNA, 25 bp, Homo sapien
atcttgctggacaggaacaaagcat

SEQ ID NO: 1430034 - DNA, 25 bp, Homo sapien
aaagcatggccccacaagtggttct

SEQ ID NO: 1430035 - DNA, 25 bp, Homo sapien
caagttcctgtgcttaggtgctgct

SEQ ID NO: 1430036 - DNA, 25 bp, Homo sapien
cactcacaagttcctgtgcttaggt

SEQ ID NO: 1430037 - DNA, 25 bp, Homo sapien
ttcctgtgcttaggtgctgctgcat

SEQ ID NO: 1430038 - DNA, 25 bp, Homo sapien
cttccactcacaagttcctgtgctt

SEQ ID NO: 1430039 - DNA, 25 bp, Homo sapien
tgaatttctccacgatctgcgcagg

SEQ ID NO: 1430040 - DNA, 25 bp, Homo sapien
ggccagtcctcatcggtcaggttga

SEQ ID NO: 1430041 - DNA, 25 bp, Homo sapien
ggatctctcccgtgagcaggttcgg

SEQ ID NO: 1430042 - DNA, 25 bp, Homo sapien
cattagcagctcagcgatgtcagac

SEQ ID NO: 1430043 - DNA, 25 bp, Homo sapien
attctggcgacaaaggagaaccaag

SEQ ID NO: 1430044 - DNA, 25 bp, Homo sapien
ggcaaaacgtcataatatccacctt

SEQ ID NO: 1430045 - DNA, 25 bp, Homo sapien
ctggcgacaaaggagaaccaagagc

SEQ ID NO: 1430046 - DNA, 25 bp, Homo sapien
ctgctttctgctggcaaaacgtcat

SEQ ID NO: 1430047 - DNA, 25 bp, Homo sapien
tcctcctaagtgtgcaagtgctggc

SEQ ID NO: 1430048 - DNA, 25 bp, Homo sapien
caagttaggcttagtaccccagtgt

SEQ ID NO: 1430049 - DNA, 25 bp, Homo sapien
cagagagggctaactgacctgtcca

SEQ ID NO: 1430050 - DNA, 25 bp, Homo sapien
gactcatagacaagcctcgggtagg

SEQ ID NO: 1430051 - DNA, 25 bp, Homo sapien
cctcttgctcttcggaatcattaag

SEQ ID NO: 1430052 - DNA, 25 bp, Homo sapien
ctcctcttgctcttcggaatcatta

SEQ ID NO: 1430053 - DNA, 25 bp, Homo sapien
gctcttcggaatcattaagaataac

SEQ ID NO: 1430054 - DNA, 25 bp, Homo sapien
tcttgctcttcggaatcattaagaa

SEQ ID NO: 1430055 - DNA, 25 bp, Homo sapien
gcaagagcatcccattcctggagat

SEQ ID NO: 1430056 - DNA, 25 bp, Homo sapien
ggtaagcagtgtgccagcattccag

SEQ ID NO: 1430057 - DNA, 25 bp, Homo sapien
tttgtgtttaagactgtggccaccc

SEQ ID NO: 1430058 - DNA, 25 bp, Homo sapien
cagtcaagtctagtgtcagacccca

SEQ ID NO: 1430059 - DNA, 25 bp, Homo sapien
tcctggcccgaaactcacaggaaca

SEQ ID NO: 1430060 - DNA, 25 bp, Homo sapien
gaacttcatgggtgctttgggacca

SEQ ID NO: 1430061 - DNA, 25 bp, Homo sapien
cgaaactcacaggaacatgagggat

SEQ ID NO: 1430062 - DNA, 25 bp, Homo sapien
acaagggctgcttgcccgtcagtgg

SEQ ID NO: 1430063 - DNA, 25 bp, Homo sapien
tagaagaagcccatgttccctgctc

SEQ ID NO: 1430064 - DNA, 25 bp, Homo sapien
gaaccaaagttgacctctctgccca

SEQ ID NO: 1430065 - DNA, 25 bp, Homo sapien
tgtcagaatacaatgcgtgggcttg

SEQ ID NO: 1430066 - DNA, 25 bp, Homo sapien
gacaatgatccatcgtaaggctgac

SEQ ID NO: 1430067 - DNA, 25 bp, Homo sapien
actgactgagctcatagctgctgga

SEQ ID NO: 1430068 - DNA, 25 bp, Homo sapien
ggttggactcactagccaatgatgg

SEQ ID NO: 1430069 - DNA, 25 bp, Homo sapien
aagctgggggatcatcccgctccgg

SEQ ID NO: 1430070 - DNA, 25 bp, Homo sapien
agaccagactcacgctgctggagaa

SEQ ID NO: 1430071 - DNA, 25 bp, Homo sapien
attaaaccaaattgctagtcccctg

SEQ ID NO: 1430072 - DNA, 25 bp, Homo sapien
ccagctggcgcatacaataagattt

SEQ ID NO: 1430073 - DNA, 25 bp, Homo sapien
aacacctaacacctgatgacagcgt

SEQ ID NO: 1430074 - DNA, 25 bp, Homo sapien
tagaaaaggtttcaagccctgcttc

SEQ ID NO: 1430075 - DNA, 25 bp, Homo sapien
gctgtctttacaagggttcctactg

SEQ ID NO: 1430076 - DNA, 25 bp, Homo sapien
tcctgtccagagttggaagcagggc

SEQ ID NO: 1430077 - DNA, 25 bp, Homo sapien
ccggccactcctgtccagagttgga

SEQ ID NO: 1430078 - DNA, 25 bp, Homo sapien
gaagcagggctgtctttacaagggt

SEQ ID NO: 1430079 - DNA, 25 bp, Homo sapien
agatgcttgagcaaaactctcttcc

SEQ ID NO: 1430080 - DNA, 25 bp, Homo sapien
gatgcttgagcaaaactctcttccc

SEQ ID NO: 1430081 - DNA, 25 bp, Homo sapien
cagatgcttgagcaaaactctcttc

SEQ ID NO: 1430082 - DNA, 25 bp, Homo sapien
tcttcgtgccagatataaggactcc

SEQ ID NO: 1430083 - DNA, 25 bp, Homo sapien
caaggtacttttgctctcggtaatc

SEQ ID NO: 1430084 - DNA, 25 bp, Homo sapien
tccaaatggactgtgctggttttca

SEQ ID NO: 1430085 - DNA, 25 bp, Homo sapien
ggtctcactatttgttccaaatgga

SEQ ID NO: 1430086 - DNA, 25 bp, Homo sapien
caagacaggtcacttcctgtttctg

SEQ ID NO: 1430087 - DNA, 25 bp, Homo sapien
atcaagacaggtcacttcctgtttc

SEQ ID NO: 1430088 - DNA, 25 bp, Homo sapien
aaaatcaagacaggtcacttcctgt

SEQ ID NO: 1430089 - DNA, 25 bp, Homo sapien
acaaaatcaagacaggtcacttcct

SEQ ID NO: 1430090 - DNA, 25 bp, Homo sapien
tcagggtgaagtgatacactcttac

SEQ ID NO: 1430091 - DNA, 25 bp, Homo sapien
cctcagggtgaagtgatacactctt

SEQ ID NO: 1430092 - DNA, 25 bp, Homo sapien
tcctcagggtgaagtgatacactct

SEQ ID NO: 1430093 - DNA, 25 bp, Homo sapien
tgggtgcatatctgctgtcctcagg

SEQ ID NO: 1430094 - DNA, 25 bp, Homo sapien
cactgttacttggtcaaagactata

SEQ ID NO: 1430095 - DNA, 25 bp, Homo sapien
ctgttacttggtcaaagactatata

SEQ ID NO: 1430096 - DNA, 25 bp, Homo sapien
ttcactgttacttggtcaaagacta

SEQ ID NO: 1430097 - DNA, 25 bp, Homo sapien
ttacttggtcaaagactatataatc

SEQ ID NO: 1430098 - DNA, 25 bp, Homo sapien
gtaccatcatctatgcatacaaagg

SEQ ID NO: 1430099 - DNA, 25 bp, Homo sapien
gatgaagtacaaactacccatagtg

SEQ ID NO: 1430100 - DNA, 25 bp, Homo sapien
tcttctcaggacatctaggaggagt

SEQ ID NO: 1430101 - DNA, 25 bp, Homo sapien
gaggagtgtttctgctatggtctcg

SEQ ID NO: 1430102 - DNA, 25 bp, Homo sapien
ccagaggcttcttggagacttttcc

SEQ ID NO: 1430103 - DNA, 25 bp, Homo sapien
atccccaaatcccagaggcttcttg

SEQ ID NO: 1430104 - DNA, 25 bp, Homo sapien
ccccaaatcccagaggcttcttgga

SEQ ID NO: 1430105 - DNA, 25 bp, Homo sapien
aggcttcttggagacttttccatac

SEQ ID NO: 1430106 - DNA, 25 bp, Homo sapien
tgtgggtgtccatgatagtaataac

SEQ ID NO: 1430107 - DNA, 25 bp, Homo sapien
ttcctccctcattgtgggagactga

SEQ ID NO: 1430108 - DNA, 25 bp, Homo sapien
gggagactgatagctctgatatgaa

SEQ ID NO: 1430109 - DNA, 25 bp, Homo sapien
taacttccataagcatattcctccc

SEQ ID NO: 1430110 - DNA, 25 bp, Homo sapien
tattcatacgcatttaggagagttg

SEQ ID NO: 1430111 - DNA, 25 bp, Homo sapien
aaagaacaacctattcatacgcatt

SEQ ID NO: 1430112 - DNA, 25 bp, Homo sapien
catttaggagagttgcattcattcc

SEQ ID NO: 1430113 - DNA, 25 bp, Homo sapien
gcattcattccaagccctaaagcca

SEQ ID NO: 1430114 - DNA, 25 bp, Homo sapien
gataaccaccttcgtaatagtcaac

SEQ ID NO: 1430115 - DNA, 25 bp, Homo sapien
tccagacacaggctgatgccagtcc

SEQ ID NO: 1430116 - DNA, 25 bp, Homo sapien
aatagtcaactccagacacaggctg

SEQ ID NO: 1430117 - DNA, 25 bp, Homo sapien
cttgaatacaactgattgcgataac

SEQ ID NO: 1430118 - DNA, 25 bp, Homo sapien
gaaaccctcggtctggatcctttga

SEQ ID NO: 1430119 - DNA, 25 bp, Homo sapien
tgaaacctctctccattgtgccaag

SEQ ID NO: 1430120 - DNA, 25 bp, Homo sapien
gatgatgtccatctctccgaaaccc

SEQ ID NO: 1430121 - DNA, 25 bp, Homo sapien
gggctcccacggttgtcttgccatt

SEQ ID NO: 1430122 - DNA, 25 bp, Homo sapien
ttgagtaagttgtgcagttatttta

SEQ ID NO: 1430123 - DNA, 25 bp, Homo sapien
tgggttttgagtaagttgtgcagtt

SEQ ID NO: 1430124 - DNA, 25 bp, Homo sapien
gagtaagttgtgcagttattttatc

SEQ ID NO: 1430125 - DNA, 25 bp, Homo sapien
ggttttgagtaagttgtgcagttat

SEQ ID NO: 1430126 - DNA, 25 bp, Homo sapien
ccaactgcaaaggtgcaacacccaa

SEQ ID NO: 1430127 - DNA, 25 bp, Homo sapien
tggaccaagtaagcagaatgagaag

SEQ ID NO: 1430128 - DNA, 25 bp, Homo sapien
ggctggtggaactcaaaaccatttg

SEQ ID NO: 1430129 - DNA, 25 bp, Homo sapien
gtccccagatagtctcattaggcag

SEQ ID NO: 1430130 - DNA, 25 bp, Homo sapien
gctgctccagggacctggcccaaga

SEQ ID NO: 1430131 - DNA, 25 bp, Homo sapien
cccaccttccttcagcgctgctcca

SEQ ID NO: 1430132 - DNA, 25 bp, Homo sapien
agggacctggcccaagagtgcctcc

SEQ ID NO: 1430133 - DNA, 25 bp, Homo sapien
caccttccttcagcgctgctccagg

SEQ ID NO: 1430134 - DNA, 25 bp, Homo sapien
cttgggctgtgaagtttggctctct

SEQ ID NO: 1430135 - DNA, 25 bp, Homo sapien
tgtgaagtttggctctctaatggct

SEQ ID NO: 1430136 - DNA, 25 bp, Homo sapien
tggctctctaatggctgcactgttg

SEQ ID NO: 1430137 - DNA, 25 bp, Homo sapien
ctaatggctgcactgttgtttttaa

SEQ ID NO: 1430138 - DNA, 25 bp, Homo sapien
actgtgatttaatgactggttactc

SEQ ID NO: 1430139 - DNA, 25 bp, Homo sapien
atgactggttactcttgcaaagggc

SEQ ID NO: 1430140 - DNA, 25 bp, Homo sapien
tctaggtcaggtttgccaggaatcc

SEQ ID NO: 1430141 - DNA, 25 bp, Homo sapien
cctcaggcttcatcctaatccttta

SEQ ID NO: 1430142 - DNA, 25 bp, Homo sapien
gaatgccaagttctactggccacct

SEQ ID NO: 1430143 - DNA, 25 bp, Homo sapien
gaaaccaagaattccctgtggagta

SEQ ID NO: 1430144 - DNA, 25 bp, Homo sapien
gcacaggtggagataagtttgaaca

SEQ ID NO: 1430145 - DNA, 25 bp, Homo sapien
tctaaatcagggaaaaagaggtgaa

SEQ ID NO: 1430146 - DNA, 25 bp, Homo sapien
tgcccctaaatcaggagttgctgct

SEQ ID NO: 1430147 - DNA, 25 bp, Homo sapien
cgattgcccctaaatcaggagttgc

SEQ ID NO: 1430148 - DNA, 25 bp, Homo sapien
atcgattgcccctaaatcaggagtt

SEQ ID NO: 1430149 - DNA, 25 bp, Homo sapien
gattgcccctaaatcaggagttgct

SEQ ID NO: 1430150 - DNA, 25 bp, Homo sapien
cggaatggcttaataggcagctcct

SEQ ID NO: 1430151 - DNA, 25 bp, Homo sapien
tcagcagcagtttcccatcggaatg

SEQ ID NO: 1430152 - DNA, 25 bp, Homo sapien
tgtaaactgtgttgccacgtcagct

SEQ ID NO: 1430153 - DNA, 25 bp, Homo sapien
gtgttgccacgtcagctgcccagaa

SEQ ID NO: 1430154 - DNA, 25 bp, Homo sapien
tgctgaatcttaaatggatctgggt

SEQ ID NO: 1430155 - DNA, 25 bp, Homo sapien
gaatcctaaagatgtcttctgctta

SEQ ID NO: 1430156 - DNA, 25 bp, Homo sapien
tgaatcttaaatggatctgggtttt

SEQ ID NO: 1430157 - DNA, 25 bp, Homo sapien
gctgaatcttaaatggatctgggtt

SEQ ID NO: 1430158 - DNA, 25 bp, Homo sapien
tgtgtatgaagtacatacaagtgtg

SEQ ID NO: 1430159 - DNA, 25 bp, Homo sapien
cttaatggctgtgtatgaagtacat

SEQ ID NO: 1430160 - DNA, 25 bp, Homo sapien
agcagaaggcacatatgtattgggt

SEQ ID NO: 1430161 - DNA, 25 bp, Homo sapien
gaagcagaaggcacatatgtattgg

SEQ ID NO: 1430162 - DNA, 25 bp, Homo sapien
gactccacctttatgggcagggcat

SEQ ID NO: 1430163 - DNA, 25 bp, Homo sapien
gggacactgccgcccaaatattgca

SEQ ID NO: 1430164 - DNA, 25 bp, Homo sapien
ctgggagataagacgcctcccagta

SEQ ID NO: 1430165 - DNA, 25 bp, Homo sapien
cctaactgggagataagacgcctcc

SEQ ID NO: 1430166 - DNA, 25 bp, Homo sapien
ccagaagagcgtcagccataggcct

SEQ ID NO: 1430167 - DNA, 25 bp, Homo sapien
cagaagagcgtcagccataggcctc

SEQ ID NO: 1430168 - DNA, 25 bp, Homo sapien
agccagaagagcgtcagccataggc

SEQ ID NO: 1430169 - DNA, 25 bp, Homo sapien
gccagaagagcgtcagccataggcc

SEQ ID NO: 1430170 - DNA, 25 bp, Homo sapien
gggtatcagaaaaggggtgtctgca

SEQ ID NO: 1430171 - DNA, 25 bp, Homo sapien
cagagagggaaaggggtatcagaaa

SEQ ID NO: 1430172 - DNA, 25 bp, Homo sapien
atcagaaaaggggtgtctgcactct

SEQ ID NO: 1430173 - DNA, 25 bp, Homo sapien
agaaaaggggtgtctgcactctctc

SEQ ID NO: 1430174 - DNA, 25 bp, Homo sapien
tcaggacgggcacggtaaagctcat

SEQ ID NO: 1430175 - DNA, 25 bp, Homo sapien
tttctgagttgcaagtaccgctccc

SEQ ID NO: 1430176 - DNA, 25 bp, Homo sapien
cctaactaggctagggtcaggacgg

SEQ ID NO: 1430177 - DNA, 25 bp, Homo sapien
tccttagaggaccagggattcttcc

SEQ ID NO: 1430178 - DNA, 25 bp, Homo sapien
taagtaccttcccattgttgcgcaa

SEQ ID NO: 1430179 - DNA, 25 bp, Homo sapien
gaagagattgctccttgcctgaggg

SEQ ID NO: 1430180 - DNA, 25 bp, Homo sapien
cagtacatacttaaggcccagtgga

SEQ ID NO: 1430181 - DNA, 25 bp, Homo sapien
gaaatgctagctcaagggctctgaa

SEQ ID NO: 1430182 - DNA, 25 bp, Homo sapien
gacttctattacagagaatactggg

SEQ ID NO: 1430183 - DNA, 25 bp, Homo sapien
caaaattttgaacatccattatttt

SEQ ID NO: 1430184 - DNA, 25 bp, Homo sapien
tactgggggaaagcataatcttgtt

SEQ ID NO: 1430185 - DNA, 25 bp, Homo sapien
ttctgtgacttctattacagagaat

SEQ ID NO: 1430186 - DNA, 25 bp, Homo sapien
gccacttctgttgtaactgtagctg

SEQ ID NO: 1430187 - DNA, 25 bp, Homo sapien
cacttctgttgtaactgtagctgct

SEQ ID NO: 1430188 - DNA, 25 bp, Homo sapien
tctgttgtaactgtagctgcttcta

SEQ ID NO: 1430189 - DNA, 25 bp, Homo sapien
ccatgtccagttgccacttctgttg

SEQ ID NO: 1430190 - DNA, 25 bp, Homo sapien
aacagactctcagtggtgttaagga

SEQ ID NO: 1430191 - DNA, 25 bp, Homo sapien
tagctacttcagatagactagggac

SEQ ID NO: 1430192 - DNA, 25 bp, Homo sapien
taaaagtgataaggctctgagtgag

SEQ ID NO: 1430193 - DNA, 25 bp, Homo sapien
taaaatgcatggctttagaccagag

SEQ ID NO: 1430194 - DNA, 25 bp, Homo sapien
gactagggacgctttcctcctggat

SEQ ID NO: 1430195 - DNA, 25 bp, Homo sapien
cgaattagggcgatactggtttcac

SEQ ID NO: 1430196 - DNA, 25 bp, Homo sapien
cacagaatgacttagggagcattac

SEQ ID NO: 1430197 - DNA, 25 bp, Homo sapien
gtttgcgaattagggcgatactggt

SEQ ID NO: 1430198 - DNA, 25 bp, Homo sapien
ctttcctggtttgcgaattagggcg

SEQ ID NO: 1430199 - DNA, 25 bp, Homo sapien
cacgctttaaggaggttcaaccctg

SEQ ID NO: 1430200 - DNA, 25 bp, Homo sapien
tacaggccctgtaagactcacgctt

SEQ ID NO: 1430201 - DNA, 25 bp, Homo sapien
gcacatttgtatgccagagcaccag

SEQ ID NO: 1430202 - DNA, 25 bp, Homo sapien
tggaaaacctgtgtgatacgggctt

SEQ ID NO: 1430203 - DNA, 25 bp, Homo sapien
tatcattcttgcttcatgatgttat

SEQ ID NO: 1430204 - DNA, 25 bp, Homo sapien
cttatatcattcttgcttcatgatg

SEQ ID NO: 1430205 - DNA, 25 bp, Homo sapien
tatatcattcttgcttcatgatgtt

SEQ ID NO: 1430206 - DNA, 25 bp, Homo sapien
ttatatcattcttgcttcatgatgt

SEQ ID NO: 1430207 - DNA, 25 bp, Homo sapien
gaaaagcatgacaagtggccaaggc

SEQ ID NO: 1430208 - DNA, 25 bp, Homo sapien
cattgtaggatcagctataggaggc

SEQ ID NO: 1430209 - DNA, 25 bp, Homo sapien
tgaacacaatagtggccttgcctct

SEQ ID NO: 1430210 - DNA, 25 bp, Homo sapien
tcaatgatgttaggagatgcatcct

SEQ ID NO: 1430211 - DNA, 25 bp, Homo sapien
gaggaattcctcaaactgggtctag

SEQ ID NO: 1430212 - DNA, 25 bp, Homo sapien
gggaactgaaaaagctcaactccat

SEQ ID NO: 1430213 - DNA, 25 bp, Homo sapien
tcctctggacagattacaggaccaa

SEQ ID NO: 1430214 - DNA, 25 bp, Homo sapien
ggttaaataccgtgtcaagctgaca

SEQ ID NO: 1430215 - DNA, 25 bp, Homo sapien
tagctggatgcacccttgctggcag

SEQ ID NO: 1430216 - DNA, 25 bp, Homo sapien
accattctgacatatagctggatgc

SEQ ID NO: 1430217 - DNA, 25 bp, Homo sapien
atatagctggatgcacccttgctgg

SEQ ID NO: 1430218 - DNA, 25 bp, Homo sapien
aaaccattctgacatatagctggat

SEQ ID NO: 1430219 - DNA, 25 bp, Homo sapien
tagtgagtaggttctcaaaagatct

SEQ ID NO: 1430220 - DNA, 25 bp, Homo sapien
gatagtgagtaggttctcaaaagat

SEQ ID NO: 1430221 - DNA, 25 bp, Homo sapien
tgatagtgagtaggttctcaaaaga

SEQ ID NO: 1430222 - DNA, 25 bp, Homo sapien
ggggctttctccagcacttctcctt

SEQ ID NO: 1430223 - DNA, 25 bp, Homo sapien
agattatgaacttaggaagcaggaa

SEQ ID NO: 1430224 - DNA, 25 bp, Homo sapien
gccgtagtgagccatggagccatga

SEQ ID NO: 1430225 - DNA, 25 bp, Homo sapien
atttaactacctcaaccactttgtg

SEQ ID NO: 1430226 - DNA, 25 bp, Homo sapien
gggcaatgtcattccataggttgta

SEQ ID NO: 1430227 - DNA, 25 bp, Homo sapien
caaggaattatctacgctgctggct

SEQ ID NO: 1430228 - DNA, 25 bp, Homo sapien
gatgggcgagttttaccagctgtct

SEQ ID NO: 1430229 - DNA, 25 bp, Homo sapien
tgcttgccaggacgacatgagaaat

SEQ ID NO: 1430230 - DNA, 25 bp, Homo sapien
taatagctgaacaatgccctctgca

SEQ ID NO: 1430231 - DNA, 25 bp, Homo sapien
cttgctgttctcgttgatgctgatg

SEQ ID NO: 1430232 - DNA, 25 bp, Homo sapien
acttgctgttctcgttgatgctgat

SEQ ID NO: 1430233 - DNA, 25 bp, Homo sapien
ttgctgttctcgttgatgctgatgc

SEQ ID NO: 1430234 - DNA, 25 bp, Homo sapien
gatgtctcctcccaccatgtcgatg

SEQ ID NO: 1430235 - DNA, 25 bp, Homo sapien
ctgcggagagcctccaggcagatgt

SEQ ID NO: 1430236 - DNA, 25 bp, Homo sapien
atgtcgatggccacattcaccccgc

SEQ ID NO: 1430237 - DNA, 25 bp, Homo sapien
tgcggagagcctccaggcagatgtc

SEQ ID NO: 1430238 - DNA, 25 bp, Homo sapien
tgcatcgccagcttgcacttctcgt

SEQ ID NO: 1430239 - DNA, 25 bp, Homo sapien
ctggactgcgcacccctctgcatcg

SEQ ID NO: 1430240 - DNA, 25 bp, Homo sapien
ttgcacttctcgtcacttccagcag

SEQ ID NO: 1430241 - DNA, 25 bp, Homo sapien
ttcaggctgccctgactgtagttca

SEQ ID NO: 1430242 - DNA, 25 bp, Homo sapien
ccataagttatagggaggacagcag

SEQ ID NO: 1430243 - DNA, 25 bp, Homo sapien
ctaagtcgtaaaggctgctcagtaa

SEQ ID NO: 1430244 - DNA, 25 bp, Homo sapien
gagtgtatgtacctaagtcgtaaag

SEQ ID NO: 1430245 - DNA, 25 bp, Homo sapien
tgacttacagattgagtgtatgtac

SEQ ID NO: 1430246 - DNA, 25 bp, Homo sapien
aaaaagagataacagtgacttacag

SEQ ID NO: 1430247 - DNA, 25 bp, Homo sapien
tcagccatacaattaaagtttcttg

SEQ ID NO: 1430248 - DNA, 25 bp, Homo sapien
tcagtgacgcattcttcagccatac

SEQ ID NO: 1430249 - DNA, 25 bp, Homo sapien
tggtcagtgacgcattcttcagcca

SEQ ID NO: 1430250 - DNA, 25 bp, Homo sapien
agtttcttgtgccaataactctatc

SEQ ID NO: 1430251 - DNA, 25 bp, Homo sapien
gcctgtctccaatactgtcccagaa

SEQ ID NO: 1430252 - DNA, 25 bp, Homo sapien
tgtgcctgtctccaatactgtccca

SEQ ID NO: 1430253 - DNA, 25 bp, Homo sapien
ctctttaactgtcctgacatctgtg

SEQ ID NO: 1430254 - DNA, 25 bp, Homo sapien
tttaactgtcctgacatctgtgcct

SEQ ID NO: 1430255 - DNA, 25 bp, Homo sapien
cggcagatcaaaatatcaccaaagt

SEQ ID NO: 1430256 - DNA, 25 bp, Homo sapien
tcctgatattgatcacggcagatca

SEQ ID NO: 1430257 - DNA, 25 bp, Homo sapien
gatcacggcagatcaaaatatcacc

SEQ ID NO: 1430258 - DNA, 25 bp, Homo sapien
ggcctttcctgatattgatcacggc

SEQ ID NO: 1430259 - DNA, 25 bp, Homo sapien
ttgcggaccgctgtgctagacaacc

SEQ ID NO: 1430260 - DNA, 25 bp, Homo sapien
tgagcagacaaagcaagcataccgc

SEQ ID NO: 1430261 - DNA, 25 bp, Homo sapien
tactagagtggtcaataggcaaggc

SEQ ID NO: 1430262 - DNA, 25 bp, Homo sapien
tgttagttaacaggctccatgctgg

SEQ ID NO: 1430263 - DNA, 25 bp, Homo sapien
ttaccgggctggtttcagggaggca

SEQ ID NO: 1430264 - DNA, 25 bp, Homo sapien
cgtatgttcacatggaaacacggag

SEQ ID NO: 1430265 - DNA, 25 bp, Homo sapien
cagaggcgtatgttcacatggaaac

SEQ ID NO: 1430266 - DNA, 25 bp, Homo sapien
gaggcagaggccgaataattcgatt

SEQ ID NO: 1430267 - DNA, 25 bp, Homo sapien
aaggaagcaaaggatgaggtccatg

SEQ ID NO: 1430268 - DNA, 25 bp, Homo sapien
ggaaggaagcaaaggatgaggtcca

SEQ ID NO: 1430269 - DNA, 25 bp, Homo sapien
ggaagcaaaggatgaggtccatgta

SEQ ID NO: 1430270 - DNA, 25 bp, Homo sapien
ggtggaaggaagcaaaggatgaggt

SEQ ID NO: 1430271 - DNA, 25 bp, Homo sapien
tgcacatacaaagtcgtgtgcaaat

SEQ ID NO: 1430272 - DNA, 25 bp, Homo sapien
tcagaattctctgtttctaaggcaa

SEQ ID NO: 1430273 - DNA, 25 bp, Homo sapien
gtcgtgtgcaaatcagaattctctg

SEQ ID NO: 1430274 - DNA, 25 bp, Homo sapien
caaagtcgtgtgcaaatcagaattc

SEQ ID NO: 1430275 - DNA, 25 bp, Homo sapien
cccctcgcttcagaactgggaactt

SEQ ID NO: 1430276 - DNA, 25 bp, Homo sapien
ttagaccttggaaagggcttcagcc

SEQ ID NO: 1430277 - DNA, 25 bp, Homo sapien
gaaagaggcctataggcgtgttttg

SEQ ID NO: 1430278 - DNA, 25 bp, Homo sapien
gctatcccaggacgaagttgccctc

SEQ ID NO: 1430279 - DNA, 25 bp, Homo sapien
gcgcaaatcgcagcgcggtagtgcc

SEQ ID NO: 1430280 - DNA, 25 bp, Homo sapien
cagctctgcgcaaatcgcagcgcgg

SEQ ID NO: 1430281 - DNA, 25 bp, Homo sapien
ttcttcagctctgcgcaaatcgcag

SEQ ID NO: 1430282 - DNA, 25 bp, Homo sapien
ctctgcgcaaatcgcagcgcggtag

SEQ ID NO: 1430283 - DNA, 25 bp, Homo sapien
aaacgaccgcgcgagctccctgttg

SEQ ID NO: 1430284 - DNA, 25 bp, Homo sapien
aggcctcctggcgacgcgccctggc

SEQ ID NO: 1430285 - DNA, 25 bp, Homo sapien
tccctgttgggcctctctggaggtg

SEQ ID NO: 1430286 - DNA, 25 bp, Homo sapien
ttctacggccgccgagaccaaacga

SEQ ID NO: 1430287 - DNA, 25 bp, Homo sapien
cttggaagcagtagtgacctgggca

SEQ ID NO: 1430288 - DNA, 25 bp, Homo sapien
cagtcatcacttaagcaggtaccag

SEQ ID NO: 1430289 - DNA, 25 bp, Homo sapien
cagcaggcatttgggctgcattcct

SEQ ID NO: 1430290 - DNA, 25 bp, Homo sapien
cacccagatgggccaacttggaagc

SEQ ID NO: 1430291 - DNA, 25 bp, Homo sapien
ccagtggacagccgtcaccatcact

SEQ ID NO: 1430292 - DNA, 25 bp, Homo sapien
agtggacagccgtcaccatcacttc

SEQ ID NO: 1430293 - DNA, 25 bp, Homo sapien
tcccagtggacagccgtcaccatca

SEQ ID NO: 1430294 - DNA, 25 bp, Homo sapien
ggacagccgtcaccatcacttcctg

SEQ ID NO: 1430295 - DNA, 25 bp, Homo sapien
caccttgtcgtttataatgctgcag

SEQ ID NO: 1430296 - DNA, 25 bp, Homo sapien
aaatgtcatcaaagcgacgaggtac

SEQ ID NO: 1430297 - DNA, 25 bp, Homo sapien
gatagacccattcggcagtgccttt

SEQ ID NO: 1430298 - DNA, 25 bp, Homo sapien
tgacctgatgattcacttcaccttg

SEQ ID NO: 1430299 - DNA, 25 bp, Homo sapien
taagctgactcggatgactgcaaac

SEQ ID NO: 1430300 - DNA, 25 bp, Homo sapien
tgactgcaaaccaggattcctgaga

SEQ ID NO: 1430301 - DNA, 25 bp, Homo sapien
agaaggcatcgtggaaaaggtggga

SEQ ID NO: 1430302 - DNA, 25 bp, Homo sapien
agggagtggcccctaagctgactcg

SEQ ID NO: 1430303 - DNA, 25 bp, Homo sapien
taaacaagcaaagccataggaatca

SEQ ID NO: 1430304 - DNA, 25 bp, Homo sapien
ataaacaagcaaagccataggaatc

SEQ ID NO: 1430305 - DNA, 25 bp, Homo sapien
aataaacaagcaaagccataggaat

SEQ ID NO: 1430306 - DNA, 25 bp, Homo sapien
aatcctttcaaactgaggtctgttt

SEQ ID NO: 1430307 - DNA, 25 bp, Homo sapien
taccagcttcccttgaaatcctttc

SEQ ID NO: 1430308 - DNA, 25 bp, Homo sapien
ccagcttcccttgaaatcctttcaa

SEQ ID NO: 1430309 - DNA, 25 bp, Homo sapien
tccatttaccagcttcccttgaaat

SEQ ID NO: 1430310 - DNA, 25 bp, Homo sapien
ttacaagctgacaagtgctttcggg

SEQ ID NO: 1430311 - DNA, 25 bp, Homo sapien
tatattcgtggatgaaacaaacaca

SEQ ID NO: 1430312 - DNA, 25 bp, Homo sapien
tgagcactgaccacatgctaggtag

SEQ ID NO: 1430313 - DNA, 25 bp, Homo sapien
tgaaggaggcaggttgcaattcagt

SEQ ID NO: 1430314 - DNA, 25 bp, Homo sapien
ctttattactcagcaggtcactaga

SEQ ID NO: 1430315 - DNA, 25 bp, Homo sapien
ttccagtctcacatggaggcaccaa

SEQ ID NO: 1430316 - DNA, 25 bp, Homo sapien
cacatggaggcaccaatgctgcctg

SEQ ID NO: 1430317 - DNA, 25 bp, Homo sapien
aaacagcagctaaattgtccacaga

SEQ ID NO: 1430318 - DNA, 25 bp, Homo sapien
gtcatgacggcttcaggaaccttga

SEQ ID NO: 1430319 - DNA, 25 bp, Homo sapien
tcaggaaccttgaggtgtcctgttt

SEQ ID NO: 1430320 - DNA, 25 bp, Homo sapien
ctcagtcatgacggcttcaggaacc

SEQ ID NO: 1430321 - DNA, 25 bp, Homo sapien
ggaaccttgaggtgtcctgtttgat

SEQ ID NO: 1430322 - DNA, 25 bp, Homo sapien
catgatgggtattgttggagcagcc

SEQ ID NO: 1430323 - DNA, 25 bp, Homo sapien
atgatgggtattgttggagcagcca

SEQ ID NO: 1430324 - DNA, 25 bp, Homo sapien
tgatgggtattgttggagcagccag

SEQ ID NO: 1430325 - DNA, 25 bp, Homo sapien
tcatcacacaaggatcttccagcag

SEQ ID NO: 1430326 - DNA, 25 bp, Homo sapien
acagacatcctctcatcacacaagg

SEQ ID NO: 1430327 - DNA, 25 bp, Homo sapien
ctttggcattagtggagggtgtctc

SEQ ID NO: 1430328 - DNA, 25 bp, Homo sapien
ggagggtgtctcttctacaacagac

SEQ ID NO: 1430329 - DNA, 25 bp, Homo sapien
tcaattgggagctagaattacgcac

SEQ ID NO: 1430330 - DNA, 25 bp, Homo sapien
gaattacgcacagggaccccacaag

SEQ ID NO: 1430331 - DNA, 25 bp, Homo sapien
tccttactcctaatgatcaatgtct

SEQ ID NO: 1430332 - DNA, 25 bp, Homo sapien
caatgcttctactttcaattgggag

SEQ ID NO: 1430333 - DNA, 25 bp, Homo sapien
gaactatatagtctcccaagccaca

SEQ ID NO: 1430334 - DNA, 25 bp, Homo sapien
tagttctcagcagatcaagcaaagc

SEQ ID NO: 1430335 - DNA, 25 bp, Homo sapien
cgtatgcaatcttaactggtttccc

SEQ ID NO: 1430336 - DNA, 25 bp, Homo sapien
caaatattactatgggtctacctcc

SEQ ID NO: 1430337 - DNA, 25 bp, Homo sapien
tctagaatataagcgccacaaaagc

SEQ ID NO: 1430338 - DNA, 25 bp, Homo sapien
tatttgccggcaggaatgaattcag

SEQ ID NO: 1430339 - DNA, 25 bp, Homo sapien
gttgttcagaagtattccattcaga

SEQ ID NO: 1430340 - DNA, 25 bp, Homo sapien
gaattcaggtatttgcaaaagagga

SEQ ID NO: 1430341 - DNA, 25 bp, Homo sapien
tgctaccctgatgaatcagaccaga

SEQ ID NO: 1430342 - DNA, 25 bp, Homo sapien
tgtgctcgtgtataaatagcaatgt

SEQ ID NO: 1430343 - DNA, 25 bp, Homo sapien
gatgaatcagaccagatgtttctct

SEQ ID NO: 1430344 - DNA, 25 bp, Homo sapien
tgagagctacaaagatagggctgtg

SEQ ID NO: 1430345 - DNA, 25 bp, Homo sapien
aggaggacggctaacaagctaatgc

SEQ ID NO: 1430346 - DNA, 25 bp, Homo sapien
tccatgcattgagttggaagtccag

SEQ ID NO: 1430347 - DNA, 25 bp, Homo sapien
tcctcgtgaaagctaactaggtctg

SEQ ID NO: 1430348 - DNA, 25 bp, Homo sapien
gacagtgtcaatacgaattcaaagc

SEQ ID NO: 1430349 - DNA, 25 bp, Homo sapien
gatgttatgaattccaatgatagta

SEQ ID NO: 1430350 - DNA, 25 bp, Homo sapien
aatatgtagatcacctttgggagct

SEQ ID NO: 1430351 - DNA, 25 bp, Homo sapien
gattcttgatgttatgaattccaat

SEQ ID NO: 1430352 - DNA, 25 bp, Homo sapien
tctccggggacttgggtctgattct

SEQ ID NO: 1430353 - DNA, 25 bp, Homo sapien
tactaaaaaagcaggattactggcg

SEQ ID NO: 1430354 - DNA, 25 bp, Homo sapien
aaaatgctctaggtctactcagtgc

SEQ ID NO: 1430355 - DNA, 25 bp, Homo sapien
tactatgtccaaggcacggtttaag

SEQ ID NO: 1430356 - DNA, 25 bp, Homo sapien
ctaaactggtgaaactctccttggg

SEQ ID NO: 1430357 - DNA, 25 bp, Homo sapien
tgctgttgcaaaccaatgacaagtt

SEQ ID NO: 1430358 - DNA, 25 bp, Homo sapien
gttcagcttcagcgcggacagggcg

SEQ ID NO: 1430359 - DNA, 25 bp, Homo sapien
caagttcagcttcagcgcggacagg

SEQ ID NO: 1430360 - DNA, 25 bp, Homo sapien
gctgttgcaaaccaatgacaagttc

SEQ ID NO: 1430361 - DNA, 25 bp, Homo sapien
tgtaagataaagcagcttcttcgat

SEQ ID NO: 1430362 - DNA, 25 bp, Homo sapien
ggcgctcccccttgggtgactgtaa

SEQ ID NO: 1430363 - DNA, 25 bp, Homo sapien
tcccccttgggtgactgtaagataa

SEQ ID NO: 1430364 - DNA, 25 bp, Homo sapien
gctcccccttgggtgactgtaagat

SEQ ID NO: 1430365 - DNA, 25 bp, Homo sapien
tgtccgacttttcctgcctgcggcg

SEQ ID NO: 1430366 - DNA, 25 bp, Homo sapien
gattgcttcagcctatcaccctggg

SEQ ID NO: 1430367 - DNA, 25 bp, Homo sapien
ttcgttactcgagtgcacacgcggc

SEQ ID NO: 1430368 - DNA, 25 bp, Homo sapien
cgggacaggccggatgaataattcg

SEQ ID NO: 1430369 - DNA, 25 bp, Homo sapien
tgagggaacgggcactcggagcttc

SEQ ID NO: 1430370 - DNA, 25 bp, Homo sapien
tcaggctgagggaacgggcactcgg

SEQ ID NO: 1430371 - DNA, 25 bp, Homo sapien
ggaacgggcactcggagcttctgag

SEQ ID NO: 1430372 - DNA, 25 bp, Homo sapien
aacgggcactcggagcttctgaggc

SEQ ID NO: 1430373 - DNA, 25 bp, Homo sapien
aatgctgatgtcctccccaattcat

SEQ ID NO: 1430374 - DNA, 25 bp, Homo sapien
gctagctgtatggacttttctgcca

SEQ ID NO: 1430375 - DNA, 25 bp, Homo sapien
ggtgcaagggagctagctgtatgga

SEQ ID NO: 1430376 - DNA, 25 bp, Homo sapien
caattaggatgtggaatatgctatg

SEQ ID NO: 1430377 - DNA, 25 bp, Homo sapien
tgctgtcaggcgagagatgatttat

SEQ ID NO: 1430378 - DNA, 25 bp, Homo sapien
ggaatagctagcactgtcgcctgga

SEQ ID NO: 1430379 - DNA, 25 bp, Homo sapien
taagcttagaaattgttagtcggcc

SEQ ID NO: 1430380 - DNA, 25 bp, Homo sapien
aaatacaacaagggagggccacgag

SEQ ID NO: 1430381 - DNA, 25 bp, Homo sapien
caaggctcctggtgtttacatgcta

SEQ ID NO: 1430382 - DNA, 25 bp, Homo sapien
cactgtacccagaggacgtctgtat

SEQ ID NO: 1430383 - DNA, 25 bp, Homo sapien
ggaacttaacatcctggctgaggtg

SEQ ID NO: 1430384 - DNA, 25 bp, Homo sapien
tctgtatagtcctgtggaaaggccc

SEQ ID NO: 1430385 - DNA, 25 bp, Homo sapien
agctgactgggtgtactctacagga

SEQ ID NO: 1430386 - DNA, 25 bp, Homo sapien
cagagattcttagaaccaagatccc

SEQ ID NO: 1430387 - DNA, 25 bp, Homo sapien
ggactttctccctccgttctgctga

SEQ ID NO: 1430388 - DNA, 25 bp, Homo sapien
ttaccacagatgactgtcagctgac

SEQ ID NO: 1430389 - DNA, 25 bp, Homo sapien
ggctggccagtctgcatacagcgta

SEQ ID NO: 1430390 - DNA, 25 bp, Homo sapien
atacagcgtagcagtttctgatgcc

SEQ ID NO: 1430391 - DNA, 25 bp, Homo sapien
ttatttcagagtagtgccaagactt

SEQ ID NO: 1430392 - DNA, 25 bp, Homo sapien
gagtagtgccaagactttctcttgg

SEQ ID NO: 1430393 - DNA, 25 bp, Homo sapien
aggtacaagccaagagatatgcgga

SEQ ID NO: 1430394 - DNA, 25 bp, Homo sapien
gatatgcggaagtcttattggtcct

SEQ ID NO: 1430395 - DNA, 25 bp, Homo sapien
tattggtcctacttgtgtcacgttt

SEQ ID NO: 1430396 - DNA, 25 bp, Homo sapien
taactattaaatggtccaagagatc

SEQ ID NO: 1430397 - DNA, 25 bp, Homo sapien
gagacaccagtagttcaggcaattt

SEQ ID NO: 1430398 - DNA, 25 bp, Homo sapien
tagttcaggcaatttaaccagtaac

SEQ ID NO: 1430399 - DNA, 25 bp, Homo sapien
caccagtagttcaggcaatttaacc

SEQ ID NO: 1430400 - DNA, 25 bp, Homo sapien
caggcaatttaaccagtaactggtt

SEQ ID NO: 1430401 - DNA, 25 bp, Homo sapien
tctctctctgttcttcctttccttc

SEQ ID NO: 1430402 - DNA, 25 bp, Homo sapien
tttctctctctgttcttcctttcct

SEQ ID NO: 1430403 - DNA, 25 bp, Homo sapien
ctctctgttcttcctttccttccat

SEQ ID NO: 1430404 - DNA, 25 bp, Homo sapien
tctctctgttcttcctttccttcca

SEQ ID NO: 1430405 - DNA, 25 bp, Homo sapien
gtgatgacattgataccagctgcat

SEQ ID NO: 1430406 - DNA, 25 bp, Homo sapien
tgatgacattgataccagctgcatc

SEQ ID NO: 1430407 - DNA, 25 bp, Homo sapien
gatgacattgataccagctgcatca

SEQ ID NO: 1430408 - DNA, 25 bp, Homo sapien
tgacattgataccagctgcatcatt

SEQ ID NO: 1430409 - DNA, 25 bp, Homo sapien
tacttcttgggtatgtgcacatttc

SEQ ID NO: 1430410 - DNA, 25 bp, Homo sapien
tgagtctggccagctatttcctttg

SEQ ID NO: 1430411 - DNA, 25 bp, Homo sapien
ccctggggaaagtgagatatcttgc

SEQ ID NO: 1430412 - DNA, 25 bp, Homo sapien
agtcctaggttgttggcactgcccc

SEQ ID NO: 1430413 - DNA, 25 bp, Homo sapien
gcaccaaggtcttgggcctgtagtg

SEQ ID NO: 1430414 - DNA, 25 bp, Homo sapien
gaagcttggtcaatttccggtaatg

SEQ ID NO: 1430415 - DNA, 25 bp, Homo sapien
ggtcaatttccggtaatgatgaatt

SEQ ID NO: 1430416 - DNA, 25 bp, Homo sapien
acaggagaagcttggtcaatttccg

SEQ ID NO: 1430417 - DNA, 25 bp, Homo sapien
gcttatcggtggcagagacatccga

SEQ ID NO: 1430418 - DNA, 25 bp, Homo sapien
ggcgtaataacatgacaccagctct

SEQ ID NO: 1430419 - DNA, 25 bp, Homo sapien
tggtcaacagccgatcacttcgagc

SEQ ID NO: 1430420 - DNA, 25 bp, Homo sapien
gagttgtcactccaagactaggcaa

SEQ ID NO: 1430421 - DNA, 25 bp, Homo sapien
taacattgtggtgccttgctatccc

SEQ ID NO: 1430422 - DNA, 25 bp, Homo sapien
tattggactgttagtgataccgcag

SEQ ID NO: 1430423 - DNA, 25 bp, Homo sapien
cacagtgaacaaggtcagttgctag

SEQ ID NO: 1430424 - DNA, 25 bp, Homo sapien
tgaacatatgttgtccacagtgaac

SEQ ID NO: 1430425 - DNA, 25 bp, Homo sapien
tgtgctgtgttgccccggtttgaat

SEQ ID NO: 1430426 - DNA, 25 bp, Homo sapien
gtggctattgagagcacagtcatgc

SEQ ID NO: 1430427 - DNA, 25 bp, Homo sapien
tggctattgagagcacagtcatgca

SEQ ID NO: 1430428 - DNA, 25 bp, Homo sapien
gtgttgccccggtttgaatgcagtg

SEQ ID NO: 1430429 - DNA, 25 bp, Homo sapien
ttttcaatgtcaatgtaacctacaa

SEQ ID NO: 1430430 - DNA, 25 bp, Homo sapien
caaagctatcaaatagcttgcaaga

SEQ ID NO: 1430431 - DNA, 25 bp, Homo sapien
aatgtaacctacaaattcaacttct

SEQ ID NO: 1430432 - DNA, 25 bp, Homo sapien
tggccgtgtgaactaaaattagtaa

SEQ ID NO: 1430433 - DNA, 25 bp, Homo sapien
gtggatagcacaaggtgaatttgga

SEQ ID NO: 1430434 - DNA, 25 bp, Homo sapien
ttggctggtggatagcacaaggtga

SEQ ID NO: 1430435 - DNA, 25 bp, Homo sapien
tggagctgtctccaatctttttgtt

SEQ ID NO: 1430436 - DNA, 25 bp, Homo sapien
ttctttgacattccggtaaagttca

SEQ ID NO: 1430437 - DNA, 25 bp, Homo sapien
gtgggtttcacactactaaaatata

SEQ ID NO: 1430438 - DNA, 25 bp, Homo sapien
acgacaggtgggtttcacactacta

SEQ ID NO: 1430439 - DNA, 25 bp, Homo sapien
gcatattacattgatgacgacaggt

SEQ ID NO: 1430440 - DNA, 25 bp, Homo sapien
ttagggatttaaatgggagggcata

SEQ ID NO: 1430441 - DNA, 25 bp, Homo sapien
cattctgtctggaaggataccttta

SEQ ID NO: 1430442 - DNA, 25 bp, Homo sapien
gaaagaaaatgcatacccgtaacta

SEQ ID NO: 1430443 - DNA, 25 bp, Homo sapien
tgctgggtagtggaaaatggcacca

SEQ ID NO: 1430444 - DNA, 25 bp, Homo sapien
tcatcttgcttggacaggtttaagc

SEQ ID NO: 1430445 - DNA, 25 bp, Homo sapien
tgcatgtcattacataggaacttta

SEQ ID NO: 1430446 - DNA, 25 bp, Homo sapien
tttaatagatagaatcaggggttca

SEQ ID NO: 1430447 - DNA, 25 bp, Homo sapien
ataggcaggccggatgggggatgga

SEQ ID NO: 1430448 - DNA, 25 bp, Homo sapien
ggggatggacccatgaggtcaagag

SEQ ID NO: 1430449 - DNA, 25 bp, Homo sapien
caggcttcttacatgcaggcaggag

SEQ ID NO: 1430450 - DNA, 25 bp, Homo sapien
ccatttcccgcattagggattataa

SEQ ID NO: 1430451 - DNA, 25 bp, Homo sapien
gaccaaggttgcatggtgttaaacc

SEQ ID NO: 1430452 - DNA, 25 bp, Homo sapien
actatcctgatgacaggaccaaggt

SEQ ID NO: 1430453 - DNA, 25 bp, Homo sapien
tctcttactgatatagggaattcta

SEQ ID NO: 1430454 - DNA, 25 bp, Homo sapien
gtaatttctcgcttttgtgtcatgc

SEQ ID NO: 1430455 - DNA, 25 bp, Homo sapien
gaatggtcagttctttgcacagtga

SEQ ID NO: 1430456 - DNA, 25 bp, Homo sapien
gtaaaagctaccctttatcatcagc

SEQ ID NO: 1430457 - DNA, 25 bp, Homo sapien
gagtaggagatagccagccagttct

SEQ ID NO: 1430458 - DNA, 25 bp, Homo sapien
ggagatccagcatccacgatataga

SEQ ID NO: 1430459 - DNA, 25 bp, Homo sapien
gcttctctagctaacattggccgtg

SEQ ID NO: 1430460 - DNA, 25 bp, Homo sapien
ccttctggcattggagtagggagac

SEQ ID NO: 1430461 - DNA, 25 bp, Homo sapien
tttccacacgggctgcacaaatctg

SEQ ID NO: 1430462 - DNA, 25 bp, Homo sapien
catggataccgagagattactgtgt

SEQ ID NO: 1430463 - DNA, 25 bp, Homo sapien
gatactcagaagaggcgggattgca

SEQ ID NO: 1430464 - DNA, 25 bp, Homo sapien
cggtaccacacgtccaaagttagat

SEQ ID NO: 1430465 - DNA, 25 bp, Homo sapien
gatcagtgcagtcgccatgcgaggt

SEQ ID NO: 1430466 - DNA, 25 bp, Homo sapien
tcttgcaggaaatcttcgtaaaggg

SEQ ID NO: 1430467 - DNA, 25 bp, Homo sapien
cagttacagattccattattgtcga

SEQ ID NO: 1430468 - DNA, 25 bp, Homo sapien
tattcacagatttatcaacctgcct

SEQ ID NO: 1430469 - DNA, 25 bp, Homo sapien
tgtgctctggcatacctttatgaat

SEQ ID NO: 1430470 - DNA, 25 bp, Homo sapien
taagccttcgtttctctgaagccta

SEQ ID NO: 1430471 - DNA, 25 bp, Homo sapien
aatatgtatacctcttaagccttcg

SEQ ID NO: 1430472 - DNA, 25 bp, Homo sapien
acttagactctactacatcatggga

SEQ ID NO: 1430473 - DNA, 25 bp, Homo sapien
cacctccatctgtggataaacagga

SEQ ID NO: 1430474 - DNA, 25 bp, Homo sapien
ggaatgaggaacaaaactatctgag

SEQ ID NO: 1430475 - DNA, 25 bp, Homo sapien
gaattttactgagctcctccacagg

SEQ ID NO: 1430476 - DNA, 25 bp, Homo sapien
tagcttgtgatagttcgaggattaa

SEQ ID NO: 1430477 - DNA, 25 bp, Homo sapien
gaggagacacagagcgaatgaccgt

SEQ ID NO: 1430478 - DNA, 25 bp, Homo sapien
tgaagtcacaggtgggagctgttca

SEQ ID NO: 1430479 - DNA, 25 bp, Homo sapien
tgaccgtaaatgtgggaggaaagcc

SEQ ID NO: 1430480 - DNA, 25 bp, Homo sapien
ttctaagcatctgtaggtcatctgc

SEQ ID NO: 1430481 - DNA, 25 bp, Homo sapien
aacaactttagtcatttgacatttt

SEQ ID NO: 1430482 - DNA, 25 bp, Homo sapien
gaaccttttaggtgttatacatatg

SEQ ID NO: 1430483 - DNA, 25 bp, Homo sapien
gaaattcagaactatggtgttttag

SEQ ID NO: 1430484 - DNA, 25 bp, Homo sapien
tagtgtatactttgtctacttatgt

SEQ ID NO: 1430485 - DNA, 25 bp, Homo sapien
tcatgaccatccataatgtggattt

SEQ ID NO: 1430486 - DNA, 25 bp, Homo sapien
caataactaataggctcaaaagccc

SEQ ID NO: 1430487 - DNA, 25 bp, Homo sapien
cattttgtttcaacagaggcagtaa

SEQ ID NO: 1430488 - DNA, 25 bp, Homo sapien
ctctgatgctgttattcttagagtc

SEQ ID NO: 1430489 - DNA, 25 bp, Homo sapien
actgccctacacgtcaaactctggg

SEQ ID NO: 1430490 - DNA, 25 bp, Homo sapien
agccaggtatcactgccctacacgt

SEQ ID NO: 1430491 - DNA, 25 bp, Homo sapien
tgaatcctcgccatgtgctgctttt

SEQ ID NO: 1430492 - DNA, 25 bp, Homo sapien
gtatcactgccctacacgtcaaact

SEQ ID NO: 1430493 - DNA, 25 bp, Homo sapien
gagtgagtcgccattcaagaaacag

SEQ ID NO: 1430494 - DNA, 25 bp, Homo sapien
ccaatagagaagagagcatcagtag

SEQ ID NO: 1430495 - DNA, 25 bp, Homo sapien
ggctcacactggtttcaggaggaaa

SEQ ID NO: 1430496 - DNA, 25 bp, Homo sapien
tactgagtcctagataccaatagag

SEQ ID NO: 1430497 - DNA, 25 bp, Homo sapien
cattcctaataatgcgagtagggag

SEQ ID NO: 1430498 - DNA, 25 bp, Homo sapien
tgaaccctggagaatcctaatttcc

SEQ ID NO: 1430499 - DNA, 25 bp, Homo sapien
tcactggccagttcttacctattgg

SEQ ID NO: 1430500 - DNA, 25 bp, Homo sapien
tggaaactttcagctgtttagtagg

SEQ ID NO: 1430501 - DNA, 25 bp, Homo sapien
gtcattcagtaaagaaagcgtgtta

SEQ ID NO: 1430502 - DNA, 25 bp, Homo sapien
tcattcagtaaagaaagcgtgttac

SEQ ID NO: 1430503 - DNA, 25 bp, Homo sapien
tagtcattcagtaaagaaagcgtgt

SEQ ID NO: 1430504 - DNA, 25 bp, Homo sapien
ctagtcattcagtaaagaaagcgtg

SEQ ID NO: 1430505 - DNA, 25 bp, Homo sapien
caacaccagactgatgagcgcgctg

SEQ ID NO: 1430506 - DNA, 25 bp, Homo sapien
tgttgtaggaaaaacggatcgtgtc

SEQ ID NO: 1430507 - DNA, 25 bp, Homo sapien
ggatcgtgtccctggattcagccaa

SEQ ID NO: 1430508 - DNA, 25 bp, Homo sapien
tacagcatgcaggtccgcaatggca

SEQ ID NO: 1430509 - DNA, 25 bp, Homo sapien
ttcagtaggtagagaccaagcatct

SEQ ID NO: 1430510 - DNA, 25 bp, Homo sapien
ggttggacagctaatctgatttggg

SEQ ID NO: 1430511 - DNA, 25 bp, Homo sapien
gagcgagacatgagcctgtaggttc

SEQ ID NO: 1430512 - DNA, 25 bp, Homo sapien
taggaactgttgtgtgagcgagaca

SEQ ID NO: 1430513 - DNA, 25 bp, Homo sapien
gcaacaatgtttctcgaataagttg

SEQ ID NO: 1430514 - DNA, 25 bp, Homo sapien
ctcgaataagttgatgttgatttta

SEQ ID NO: 1430515 - DNA, 25 bp, Homo sapien
gaaagcaacaatgtttctcgaataa

SEQ ID NO: 1430516 - DNA, 25 bp, Homo sapien
tgtttctcgaataagttgatgttga

SEQ ID NO: 1430517 - DNA, 25 bp, Homo sapien
ttgttttttcaatgcgtcagttgaa

SEQ ID NO: 1430518 - DNA, 25 bp, Homo sapien
gggccgataatttgagatactttgt

SEQ ID NO: 1430519 - DNA, 25 bp, Homo sapien
ttttcaatgcgtcagttgaaggatt

SEQ ID NO: 1430520 - DNA, 25 bp, Homo sapien
tgggggccgataatttgagatactt

SEQ ID NO: 1430521 - DNA, 25 bp, Homo sapien
gactcaatgaccaccttcaggaaag

SEQ ID NO: 1430522 - DNA, 25 bp, Homo sapien
tacacctgtgaggaaatgaccttct

SEQ ID NO: 1430523 - DNA, 25 bp, Homo sapien
cagcagcacattaacctgagttaca

SEQ ID NO: 1430524 - DNA, 25 bp, Homo sapien
tattaacttaagcagacagcagcac

SEQ ID NO: 1430525 - DNA, 25 bp, Homo sapien
ggcacatgtcgagttcttcctaatc

SEQ ID NO: 1430526 - DNA, 25 bp, Homo sapien
tgcacctgggtgactaggacacttg

SEQ ID NO: 1430527 - DNA, 25 bp, Homo sapien
tattaggaaatgtagccccacttag

SEQ ID NO: 1430528 - DNA, 25 bp, Homo sapien
caagaaaggaaatgtatgccggaat

SEQ ID NO: 1430529 - DNA, 25 bp, Homo sapien
catttcagtctaaattgttcgtgac

SEQ ID NO: 1430530 - DNA, 25 bp, Homo sapien
tgttcacttcgaagctgacccattt

SEQ ID NO: 1430531 - DNA, 25 bp, Homo sapien
cgaagctgacccatttcagtctaaa

SEQ ID NO: 1430532 - DNA, 25 bp, Homo sapien
tcgtgacctaatgtaagctttaaga

SEQ ID NO: 1430533 - DNA, 25 bp, Homo sapien
tagatacattctgacaaagctgacc

SEQ ID NO: 1430534 - DNA, 25 bp, Homo sapien
caaatcaagctgtgagcactgtgcg

SEQ ID NO: 1430535 - DNA, 25 bp, Homo sapien
gggtaagaaacactagtccaaatca

SEQ ID NO: 1430536 - DNA, 25 bp, Homo sapien
gatggaattccctatttcgacctca

SEQ ID NO: 1430537 - DNA, 25 bp, Homo sapien
gctttcaagattccaaaagggtgcc

SEQ ID NO: 1430538 - DNA, 25 bp, Homo sapien
tcagaaattggtctttcatctcttc

SEQ ID NO: 1430539 - DNA, 25 bp, Homo sapien
catctcttctgggtccatcagagtt

SEQ ID NO: 1430540 - DNA, 25 bp, Homo sapien
agttgagatggtaaagtctgctttc

SEQ ID NO: 1430541 - DNA, 25 bp, Homo sapien
ctttagattctgaactcagatgttg

SEQ ID NO: 1430542 - DNA, 25 bp, Homo sapien
ttctgaactcagatgttgggcctcc

SEQ ID NO: 1430543 - DNA, 25 bp, Homo sapien
aactcagatgttgggcctccgtggc

SEQ ID NO: 1430544 - DNA, 25 bp, Homo sapien
agattctgaactcagatgttgggcc

SEQ ID NO: 1430545 - DNA, 25 bp, Homo sapien
gtggcctgatattggtgactgcccc

SEQ ID NO: 1430546 - DNA, 25 bp, Homo sapien
tattgcaaatacaaccaggagtaag

SEQ ID NO: 1430547 - DNA, 25 bp, Homo sapien
gcctgatattggtgactgcccctga

SEQ ID NO: 1430548 - DNA, 25 bp, Homo sapien
caaccaggagtaaggtggcctgata

SEQ ID NO: 1430549 - DNA, 25 bp, Homo sapien
gctccaaagggcctaatgtccttat

SEQ ID NO: 1430550 - DNA, 25 bp, Homo sapien
ttcagtagcctgtgctccaaagggc

SEQ ID NO: 1430551 - DNA, 25 bp, Homo sapien
attttgtctgccagctacacaaagc

SEQ ID NO: 1430552 - DNA, 25 bp, Homo sapien
cagggaccctcaatatcgccatctc

SEQ ID NO: 1430553 - DNA, 25 bp, Homo sapien
agaggaactccccaagatgcttggg

SEQ ID NO: 1430554 - DNA, 25 bp, Homo sapien
ctaatttccagcgacgcagacaggc

SEQ ID NO: 1430555 - DNA, 25 bp, Homo sapien
gggtggaggtcctaatttccagcga

SEQ ID NO: 1430556 - DNA, 25 bp, Homo sapien
gcctggtcgccccaagagaggaact

SEQ ID NO: 1430557 - DNA, 25 bp, Homo sapien
ccctctgagtgagccgcgctgctga

SEQ ID NO: 1430558 - DNA, 25 bp, Homo sapien
cctaagccaaatgagtccgagatgc

SEQ ID NO: 1430559 - DNA, 25 bp, Homo sapien
gaggccagaagagtcgcagttactt

SEQ ID NO: 1430560 - DNA, 25 bp, Homo sapien
ttgtcctctgggtcacggctgggct

SEQ ID NO: 1430561 - DNA, 25 bp, Homo sapien
agctgcaagttcagtggcccaattc

SEQ ID NO: 1430562 - DNA, 25 bp, Homo sapien
cagtggcccaattccaggaaaaggg

SEQ ID NO: 1430563 - DNA, 25 bp, Homo sapien
tgagagaccgtacggcctctcctgg

SEQ ID NO: 1430564 - DNA, 25 bp, Homo sapien
ctgagagaccgtacggcctctcctg

SEQ ID NO: 1430565 - DNA, 25 bp, Homo sapien
agccagccttgccacttccccagac

SEQ ID NO: 1430566 - DNA, 25 bp, Homo sapien
tgcaagccagccttgccacttcccc

SEQ ID NO: 1430567 - DNA, 25 bp, Homo sapien
tgaagacccagatccagccaagggc

SEQ ID NO: 1430568 - DNA, 25 bp, Homo sapien
tggcccttctaagaggggcttatgg

SEQ ID NO: 1430569 - DNA, 25 bp, Homo sapien
aactctgctgatgcccggtgtccag

SEQ ID NO: 1430570 - DNA, 25 bp, Homo sapien
gcctggcctgggagttgtttcctct

SEQ ID NO: 1430571 - DNA, 25 bp, Homo sapien
ggcaactctgctgatgcccggtgtc

SEQ ID NO: 1430572 - DNA, 25 bp, Homo sapien
gcctgggagttgtttcctctgtcat

SEQ ID NO: 1430573 - DNA, 25 bp, Homo sapien
gggagtaggtcatatagatgccaag

SEQ ID NO: 1430574 - DNA, 25 bp, Homo sapien
ccaagagctgtgcacagtcctctca

SEQ ID NO: 1430575 - DNA, 25 bp, Homo sapien
ggtcatatagatgccaagagctgtg

SEQ ID NO: 1430576 - DNA, 25 bp, Homo sapien
gagtacacttttggggagtaggtca

SEQ ID NO: 1430577 - DNA, 25 bp, Homo sapien
actggaccagctcagagatccggag

SEQ ID NO: 1430578 - DNA, 25 bp, Homo sapien
gtctcactcatgatggatctcaagg

SEQ ID NO: 1430579 - DNA, 25 bp, Homo sapien
cattgaggtagaggccaatccaggc

SEQ ID NO: 1430580 - DNA, 25 bp, Homo sapien
actcatgatggatctcaaggcctcc

SEQ ID NO: 1430581 - DNA, 25 bp, Homo sapien
gtctgaccactgatctggaccacag

SEQ ID NO: 1430582 - DNA, 25 bp, Homo sapien
tgtcatcacttggtcaaatcgcatg

SEQ ID NO: 1430583 - DNA, 25 bp, Homo sapien
cagggccgaggaccatgtcatcact

SEQ ID NO: 1430584 - DNA, 25 bp, Homo sapien
tgcaggtcggccagatccgtgtggt

SEQ ID NO: 1430585 - DNA, 25 bp, Homo sapien
agggcttcgtggagatgaggtgccc

SEQ ID NO: 1430586 - DNA, 25 bp, Homo sapien
ggcttcgtggagatgaggtgcccga

SEQ ID NO: 1430587 - DNA, 25 bp, Homo sapien
gcttcgtggagatgaggtgcccgac

SEQ ID NO: 1430588 - DNA, 25 bp, Homo sapien
gggcttcgtggagatgaggtgcccg

SEQ ID NO: 1430589 - DNA, 25 bp, Homo sapien
catggcgtaccgatggtggatttcc

SEQ ID NO: 1430590 - DNA, 25 bp, Homo sapien
ggatttcccgcaaagatgcccgaag

SEQ ID NO: 1430591 - DNA, 25 bp, Homo sapien
agcccacgtatgatcttcccaacag

SEQ ID NO: 1430592 - DNA, 25 bp, Homo sapien
cagctggagccttgcgcatggcgta

SEQ ID NO: 1430593 - DNA, 25 bp, Homo sapien
gaccaagcctgaaatatgaatgtga

SEQ ID NO: 1430594 - DNA, 25 bp, Homo sapien
tccctgccccgtcatttgctattga

SEQ ID NO: 1430595 - DNA, 25 bp, Homo sapien
tgctattgaaaaccaaccctgggcc

SEQ ID NO: 1430596 - DNA, 25 bp, Homo sapien
gagatagaaatagaggccacagaga

SEQ ID NO: 1430597 - DNA, 25 bp, Homo sapien
cctatgctgggtaatttcagccaag

SEQ ID NO: 1430598 - DNA, 25 bp, Homo sapien
cagcccctatgctgggtaatttcag

SEQ ID NO: 1430599 - DNA, 25 bp, Homo sapien
cacagtagcagaggaagggcttctg

SEQ ID NO: 1430600 - DNA, 25 bp, Homo sapien
gccaagtgtacagcgtggcacagaa

SEQ ID NO: 1430601 - DNA, 25 bp, Homo sapien
aaattcaggtagcttctggccccac

SEQ ID NO: 1430602 - DNA, 25 bp, Homo sapien
ttgcgtcgaagaagaggccaatcca

SEQ ID NO: 1430603 - DNA, 25 bp, Homo sapien
tctgtgtagtgcagccggcagtgct

SEQ ID NO: 1430604 - DNA, 25 bp, Homo sapien
tgagggagtagagcttccacaggcc

SEQ ID NO: 1430605 - DNA, 25 bp, Homo sapien
caaagagctttcagccacactcggg

SEQ ID NO: 1430606 - DNA, 25 bp, Homo sapien
tatcacctggtataggcaacttagg

SEQ ID NO: 1430607 - DNA, 25 bp, Homo sapien
gaggtgcctttcctacatgctgcag

SEQ ID NO: 1430608 - DNA, 25 bp, Homo sapien
ttgttcttgaagagccggccacctc

SEQ ID NO: 1430609 - DNA, 25 bp, Homo sapien
aacccttcaagctaaatgccccagg

SEQ ID NO: 1430610 - DNA, 25 bp, Homo sapien
tgaggaggcacttgccaaggagaac

SEQ ID NO: 1430611 - DNA, 25 bp, Homo sapien
ggagcctctagtcagttccatggcc

SEQ ID NO: 1430612 - DNA, 25 bp, Homo sapien
taattgattttaggacggtgtccac

SEQ ID NO: 1430613 - DNA, 25 bp, Homo sapien
tccccctcaggctcacccacggctc

SEQ ID NO: 1430614 - DNA, 25 bp, Homo sapien
gctccctttctccgagaacccttgc

SEQ ID NO: 1430615 - DNA, 25 bp, Homo sapien
tctccccctcaggctcacccacggc

SEQ ID NO: 1430616 - DNA, 25 bp, Homo sapien
ccctcaggctcacccacggctccct

SEQ ID NO: 1430617 - DNA, 25 bp, Homo sapien
cagacccccacaacgcccgtccctg

SEQ ID NO: 1430618 - DNA, 25 bp, Homo sapien
cccacaacgcccgtccctgtccaca

SEQ ID NO: 1430619 - DNA, 25 bp, Homo sapien
gtccacaccccggtgatgtccttcc

SEQ ID NO: 1430620 - DNA, 25 bp, Homo sapien
ccctgtccacaccccggtgatgtcc

SEQ ID NO: 1430621 - DNA, 25 bp, Homo sapien
ccttctggacgctggctgagtactg

SEQ ID NO: 1430622 - DNA, 25 bp, Homo sapien
tgcgcggccgtctctttgaggaatg

SEQ ID NO: 1430623 - DNA, 25 bp, Homo sapien
ccccgctagaaagaaagctgctgga

SEQ ID NO: 1430624 - DNA, 25 bp, Homo sapien
tgaggaatgtcttagccccgctaga

SEQ ID NO: 1430625 - DNA, 25 bp, Homo sapien
agagcagcagcgcccggggcagcat

SEQ ID NO: 1430626 - DNA, 25 bp, Homo sapien
gagagcagcagcgcccggggcagca

SEQ ID NO: 1430627 - DNA, 25 bp, Homo sapien
ctgctgcgcagaaggagagcagcag

SEQ ID NO: 1430628 - DNA, 25 bp, Homo sapien
ctgcgcagaaggagagcagcagcgc

SEQ ID NO: 1430629 - DNA, 25 bp, Homo sapien
ctgtctgggcgatggctgggtgctg

SEQ ID NO: 1430630 - DNA, 25 bp, Homo sapien
actgtctgggcgatggctgggtgct

SEQ ID NO: 1430631 - DNA, 25 bp, Homo sapien
ccagtgtctgtcgctgccagcaggg

SEQ ID NO: 1430632 - DNA, 25 bp, Homo sapien
ggagatgcggcctggaggatgcgga

SEQ ID NO: 1430633 - DNA, 25 bp, Homo sapien
agtgtctgtcgctgccagcagggtg

SEQ ID NO: 1430634 - DNA, 25 bp, Homo sapien
agatgcggcctggaggatgcggaag

SEQ ID NO: 1430635 - DNA, 25 bp, Homo sapien
cagctttgggatttggactggcctc

SEQ ID NO: 1430636 - DNA, 25 bp, Homo sapien
agctttgggatttggactggcctcc

SEQ ID NO: 1430637 - DNA, 25 bp, Homo sapien
ctttgggatttggactggcctcctt

SEQ ID NO: 1430638 - DNA, 25 bp, Homo sapien
gctttgggatttggactggcctcct

SEQ ID NO: 1430639 - DNA, 25 bp, Homo sapien
tgcattcccaatgtgggagctgcgt

SEQ ID NO: 1430640 - DNA, 25 bp, Homo sapien
tcggagcaggcacagtggaaacagc

SEQ ID NO: 1430641 - DNA, 25 bp, Homo sapien
ggagctgcgtttcccacagtgcttt

SEQ ID NO: 1430642 - DNA, 25 bp, Homo sapien
gctaaagttgtgtgccgtggccgca

SEQ ID NO: 1430643 - DNA, 25 bp, Homo sapien
agggaccgccacaggagcacctgtc

SEQ ID NO: 1430644 - DNA, 25 bp, Homo sapien
aaaagctggcttcagggacagtgca

SEQ ID NO: 1430645 - DNA, 25 bp, Homo sapien
cacctgtccctaaagcctcctccac

SEQ ID NO: 1430646 - DNA, 25 bp, Homo sapien
catacttctgaactgggtccagagc

SEQ ID NO: 1430647 - DNA, 25 bp, Homo sapien
gcagggccactgaaacacattgaaa

SEQ ID NO: 1430648 - DNA, 25 bp, Homo sapien
ccagcaggcaaaccattgactctaa

SEQ ID NO: 1430649 - DNA, 25 bp, Homo sapien
aaaccattgactctaaggacccaca

SEQ ID NO: 1430650 - DNA, 25 bp, Homo sapien
tgtgacagtggttccctgtatccca

SEQ ID NO: 1430651 - DNA, 25 bp, Homo sapien
tctccaacagggacaaagggaggaa

SEQ ID NO: 1430652 - DNA, 25 bp, Homo sapien
ggctgggtgaactgcaggtctccaa

SEQ ID NO: 1430653 - DNA, 25 bp, Homo sapien
tgaactgcaggtctccaacagggac

SEQ ID NO: 1430654 - DNA, 25 bp, Homo sapien
ggagctggcatcccaacagccaggg

SEQ ID NO: 1430655 - DNA, 25 bp, Homo sapien
gaaggaaggtcaagagaggaaggtc

SEQ ID NO: 1430656 - DNA, 25 bp, Homo sapien
ctgagaaggaaggtcaagagaggaa

SEQ ID NO: 1430657 - DNA, 25 bp, Homo sapien
tgagaaggaaggtcaagagaggaag

SEQ ID NO: 1430658 - DNA, 25 bp, Homo sapien
agaaggaaggtcaagagaggaaggt

SEQ ID NO: 1430659 - DNA, 25 bp, Homo sapien
cagacagagggctgatttggtatgc

SEQ ID NO: 1430660 - DNA, 25 bp, Homo sapien
tcaacagtcttagaggatgtgtaga

SEQ ID NO: 1430661 - DNA, 25 bp, Homo sapien
tgtgtgcagtgacaaggccaggcaa

SEQ ID NO: 1430662 - DNA, 25 bp, Homo sapien
gatgtgtagatttccgtccagtcca

SEQ ID NO: 1430663 - DNA, 25 bp, Homo sapien
tcagagtcccatgtagggaggagcc

SEQ ID NO: 1430664 - DNA, 25 bp, Homo sapien
taaacagaaacacatcgggcttcct

SEQ ID NO: 1430665 - DNA, 25 bp, Homo sapien
cacatgttgccacccagaagagtaa

SEQ ID NO: 1430666 - DNA, 25 bp, Homo sapien
caaatgagtgcagcttgctctagcg

SEQ ID NO: 1430667 - DNA, 25 bp, Homo sapien
gtgtcctcatgggtcaccaaccagg

SEQ ID NO: 1430668 - DNA, 25 bp, Homo sapien
cctgagaattcacgacatggcacga

SEQ ID NO: 1430669 - DNA, 25 bp, Homo sapien
gagttacctctgcacacctgggcat

SEQ ID NO: 1430670 - DNA, 25 bp, Homo sapien
gacatggcacgaagtagacatcctt

SEQ ID NO: 1430671 - DNA, 25 bp, Homo sapien
tcttatgtccagcatatcaacgtgg

SEQ ID NO: 1430672 - DNA, 25 bp, Homo sapien
gtcagttaggttctcagttgcaaag

SEQ ID NO: 1430673 - DNA, 25 bp, Homo sapien
ggaacatgcggccagctctgtcagt

SEQ ID NO: 1430674 - DNA, 25 bp, Homo sapien
agcaacaatgttcggagccacctcg

SEQ ID NO: 1430675 - DNA, 25 bp, Homo sapien
tgtaaaagagtcaatggccaggctg

SEQ ID NO: 1430676 - DNA, 25 bp, Homo sapien
ccagatgtaaaagagtcaatggcca

SEQ ID NO: 1430677 - DNA, 25 bp, Homo sapien
aggaggtaaaccagatgtaaaagag

SEQ ID NO: 1430678 - DNA, 25 bp, Homo sapien
tcaagggaaggaggtaaaccagatg

SEQ ID NO: 1430679 - DNA, 25 bp, Homo sapien
tggatgccaaccagcagtcagtatc

SEQ ID NO: 1430680 - DNA, 25 bp, Homo sapien
aacttggctcaatctgagtcattgc

SEQ ID NO: 1430681 - DNA, 25 bp, Homo sapien
ggatgccaaccagcagtcagtatct

SEQ ID NO: 1430682 - DNA, 25 bp, Homo sapien
cagtatctccgggttctgaaaaact

SEQ ID NO: 1430683 - DNA, 25 bp, Homo sapien
gcaggaatcaagttcaggtggcttc

SEQ ID NO: 1430684 - DNA, 25 bp, Homo sapien
gtggggcctagcatttggcatctcc

SEQ ID NO: 1430685 - DNA, 25 bp, Homo sapien
ggtggggcctagcatttggcatctc

SEQ ID NO: 1430686 - DNA, 25 bp, Homo sapien
tttgccctgcagaacagatgccctt

SEQ ID NO: 1430687 - DNA, 25 bp, Homo sapien
ccagctggttctctagcattttgcc

SEQ ID NO: 1430688 - DNA, 25 bp, Homo sapien
ccatgcagcatggttctccagctgg

SEQ ID NO: 1430689 - DNA, 25 bp, Homo sapien
gatgcccttgctgccaaattgccca

SEQ ID NO: 1430690 - DNA, 25 bp, Homo sapien
tgcagaatgtaaagctggggttgcc

SEQ ID NO: 1430691 - DNA, 25 bp, Homo sapien
cctgcagaatgtaaagctggggttg

SEQ ID NO: 1430692 - DNA, 25 bp, Homo sapien
ctgtcctgcagaatgtaaagctggg

SEQ ID NO: 1430693 - DNA, 25 bp, Homo sapien
gtcctgcagaatgtaaagctggggt

SEQ ID NO: 1430694 - DNA, 25 bp, Homo sapien
tatgctgcaggctttggcaagcgca

SEQ ID NO: 1430695 - DNA, 25 bp, Homo sapien
gcatatcaagtacaagcgtaaacag

SEQ ID NO: 1430696 - DNA, 25 bp, Homo sapien
tggcaagcgcatatcaagtacaagc

SEQ ID NO: 1430697 - DNA, 25 bp, Homo sapien
gtacaagcgtaaacagctggtcagc

SEQ ID NO: 1430698 - DNA, 25 bp, Homo sapien
gaagactcataaagagctttgagag

SEQ ID NO: 1430699 - DNA, 25 bp, Homo sapien
caaggctctgtaaccaatcaatcgg

SEQ ID NO: 1430700 - DNA, 25 bp, Homo sapien
cgtatttgggaagcgctatctgtag

SEQ ID NO: 1430701 - DNA, 25 bp, Homo sapien
aatcaatcggccagccggccaagga

SEQ ID NO: 1430702 - DNA, 25 bp, Homo sapien
ctaaagagtgtgcagtaacagaatc

SEQ ID NO: 1430703 - DNA, 25 bp, Homo sapien
gagtgtgcagtaacagaatcctcac

SEQ ID NO: 1430704 - DNA, 25 bp, Homo sapien
ctataaaggaccctaaagagtgtgc

SEQ ID NO: 1430705 - DNA, 25 bp, Homo sapien
ggaccctaaagagtgtgcagtaaca

SEQ ID NO: 1430706 - DNA, 25 bp, Homo sapien
gacatggccgcaacaccccaccatg

SEQ ID NO: 1430707 - DNA, 25 bp, Homo sapien
cccaccatgagatgtgagctcagca

SEQ ID NO: 1430708 - DNA, 25 bp, Homo sapien
atggccgcaacaccccaccatgaga

SEQ ID NO: 1430709 - DNA, 25 bp, Homo sapien
tgcccgtgggatggggcagcgacat

SEQ ID NO: 1430710 - DNA, 25 bp, Homo sapien
ggaggacacagtcatgagtcagaag

SEQ ID NO: 1430711 - DNA, 25 bp, Homo sapien
gaggacacagtcatgagtcagaagc

SEQ ID NO: 1430712 - DNA, 25 bp, Homo sapien
ggacacagtcatgagtcagaagctg

SEQ ID NO: 1430713 - DNA, 25 bp, Homo sapien
aggaggacacagtcatgagtcagaa

SEQ ID NO: 1430714 - DNA, 25 bp, Homo sapien
tggaaaggaaggtacgttccagcat

SEQ ID NO: 1430715 - DNA, 25 bp, Homo sapien
ttggaaaggaaggtacgttccagca

SEQ ID NO: 1430716 - DNA, 25 bp, Homo sapien
tcccagtgatgacaagagtataaaa

SEQ ID NO: 1430717 - DNA, 25 bp, Homo sapien
tgggatagagaggctctcaggctcc

SEQ ID NO: 1430718 - DNA, 25 bp, Homo sapien
ctcccacagcggtgtgggatagaga

SEQ ID NO: 1430719 - DNA, 25 bp, Homo sapien
tgagtctgactccaattcctgttgg

SEQ ID NO: 1430720 - DNA, 25 bp, Homo sapien
gctgcatagtcgctctcgctgaaag

SEQ ID NO: 1430721 - DNA, 25 bp, Homo sapien
aaaatgggcaggtatcaaggcggct

SEQ ID NO: 1430722 - DNA, 25 bp, Homo sapien
gaaagccttcctccctcgatatgga

SEQ ID NO: 1430723 - DNA, 25 bp, Homo sapien
caaccgcaaggatctggcatgtgtc

SEQ ID NO: 1430724 - DNA, 25 bp, Homo sapien
tgcagcatttaatcccacttcccag

SEQ ID NO: 1430725 - DNA, 25 bp, Homo sapien
tgtcctcatccgttcacatgcagca

SEQ ID NO: 1430726 - DNA, 25 bp, Homo sapien
acccagggcctgagtcatacatcca

SEQ ID NO: 1430727 - DNA, 25 bp, Homo sapien
ccaaggcttgacaggatgctctaaa

SEQ ID NO: 1430728 - DNA, 25 bp, Homo sapien
ctcgcggctctcgtgcagatgctgg

SEQ ID NO: 1430729 - DNA, 25 bp, Homo sapien
agccgagacgtagacctggaagcct

SEQ ID NO: 1430730 - DNA, 25 bp, Homo sapien
cagggaatcatttgcccaatccgaa

SEQ ID NO: 1430731 - DNA, 25 bp, Homo sapien
cagagcttcgcatatcctggcggga

SEQ ID NO: 1430732 - DNA, 25 bp, Homo sapien
cagccacgcagcacctaggatgctt

SEQ ID NO: 1430733 - DNA, 25 bp, Homo sapien
ccttgtggacagctttggagcatgc

SEQ ID NO: 1430734 - DNA, 25 bp, Homo sapien
gcatcttaaggcacaccaccggttt

SEQ ID NO: 1430735 - DNA, 25 bp, Homo sapien
ccgtgcaccctctgacggtgttgga

SEQ ID NO: 1430736 - DNA, 25 bp, Homo sapien
tctgcttcaattctggtgctgctta

SEQ ID NO: 1430737 - DNA, 25 bp, Homo sapien
tggtgctgcttaagccgattatcat

SEQ ID NO: 1430738 - DNA, 25 bp, Homo sapien
cttctctgcttcaattctggtgctg

SEQ ID NO: 1430739 - DNA, 25 bp, Homo sapien
ctggtgctgcttaagccgattatca

SEQ ID NO: 1430740 - DNA, 25 bp, Homo sapien
ccagatcagtatggagcttggattg

SEQ ID NO: 1430741 - DNA, 25 bp, Homo sapien
gagagttggcaaaggcctgactgaa

SEQ ID NO: 1430742 - DNA, 25 bp, Homo sapien
agaaactggattccagggagagaac

SEQ ID NO: 1430743 - DNA, 25 bp, Homo sapien
taagctggtggccagatcagtatgg

SEQ ID NO: 1430744 - DNA, 25 bp, Homo sapien
gctgcagagattatggccagatttt

SEQ ID NO: 1430745 - DNA, 25 bp, Homo sapien
tgtcatagtgctgcagagattatgg

SEQ ID NO: 1430746 - DNA, 25 bp, Homo sapien
cataaacccacaatcttccagtgtg

SEQ ID NO: 1430747 - DNA, 25 bp, Homo sapien
tccagtgtgggcattatggccgtca

SEQ ID NO: 1430748 - DNA, 25 bp, Homo sapien
gttgtctgaggggcatgtgagttga

SEQ ID NO: 1430749 - DNA, 25 bp, Homo sapien
gggcataagggtcgcactcagcacc

SEQ ID NO: 1430750 - DNA, 25 bp, Homo sapien
gcataagggtcgcactcagcaccca

SEQ ID NO: 1430751 - DNA, 25 bp, Homo sapien
caggggcataagggtcgcactcagc

SEQ ID NO: 1430752 - DNA, 25 bp, Homo sapien
tcagctgactggtgttctgttttct

SEQ ID NO: 1430753 - DNA, 25 bp, Homo sapien
gttttctgtacgcatatccactgac

SEQ ID NO: 1430754 - DNA, 25 bp, Homo sapien
tgccaattgagctgtaaggtgaact

SEQ ID NO: 1430755 - DNA, 25 bp, Homo sapien
gcaaagacagcaaggtcagctgact

SEQ ID NO: 1430756 - DNA, 25 bp, Homo sapien
ctttgtcccgcgctttgagcttttt

SEQ ID NO: 1430757 - DNA, 25 bp, Homo sapien
tgagcttttttcaggcttcaccact

SEQ ID NO: 1430758 - DNA, 25 bp, Homo sapien
tgctccccatacacccacaggtgca

SEQ ID NO: 1430759 - DNA, 25 bp, Homo sapien
tctgcctttgtcccgcgctttgagc

SEQ ID NO: 1430760 - DNA, 25 bp, Homo sapien
tgtcttcaggacatcatactcgcac

SEQ ID NO: 1430761 - DNA, 25 bp, Homo sapien
actctgatctgcaagctgcctccct

SEQ ID NO: 1430762 - DNA, 25 bp, Homo sapien
aatgagaattcatgtaggccatctg

SEQ ID NO: 1430763 - DNA, 25 bp, Homo sapien
ttttccagcccttccagaatgagaa

SEQ ID NO: 1430764 - DNA, 25 bp, Homo sapien
tctccgtcagtcctctgtgtgtgca

SEQ ID NO: 1430765 - DNA, 25 bp, Homo sapien
tgcttgggctttctccgtcagtcct

SEQ ID NO: 1430766 - DNA, 25 bp, Homo sapien
tgggctttctccgtcagtcctctgt

SEQ ID NO: 1430767 - DNA, 25 bp, Homo sapien
ggctttctccgtcagtcctctgtgt

SEQ ID NO: 1430768 - DNA, 25 bp, Homo sapien
taacacagcagaatcagacaaaagc

SEQ ID NO: 1430769 - DNA, 25 bp, Homo sapien
aataatccctcaggtgtgaaaaggt

SEQ ID NO: 1430770 - DNA, 25 bp, Homo sapien
tttcctttaacacagcagaatcaga

SEQ ID NO: 1430771 - DNA, 25 bp, Homo sapien
aaagcaaaaataatccctcaggtgt

SEQ ID NO: 1430772 - DNA, 25 bp, Homo sapien
tccactaaagtcagatggactctga

SEQ ID NO: 1430773 - DNA, 25 bp, Homo sapien
tcactggacgatgccactcaaaaga

SEQ ID NO: 1430774 - DNA, 25 bp, Homo sapien
tcttcactggacgatgccactcaaa

SEQ ID NO: 1430775 - DNA, 25 bp, Homo sapien
ccatggctccactaaagtcagatgg

SEQ ID NO: 1430776 - DNA, 25 bp, Homo sapien
tctgtagtcaggaacccaggcactg

SEQ ID NO: 1430777 - DNA, 25 bp, Homo sapien
taggaaaaggactgacgttctccag

SEQ ID NO: 1430778 - DNA, 25 bp, Homo sapien
caatcgagctagcaagagacacttc

SEQ ID NO: 1430779 - DNA, 25 bp, Homo sapien
catggcgacaggcttcaatcgagct

SEQ ID NO: 1430780 - DNA, 25 bp, Homo sapien
ataggaccttgactggcggatggct

SEQ ID NO: 1430781 - DNA, 25 bp, Homo sapien
agctgataggaccttgactggcgga

SEQ ID NO: 1430782 - DNA, 25 bp, Homo sapien
atgttgttgaagctggacctccaac

SEQ ID NO: 1430783 - DNA, 25 bp, Homo sapien
caggagctgataggaccttgactgg

SEQ ID NO: 1430784 - DNA, 25 bp, Homo sapien
tctctgatacttctgaaccggccat

SEQ ID NO: 1430785 - DNA, 25 bp, Homo sapien
aactgctcagaggtgtgtgacttca

SEQ ID NO: 1430786 - DNA, 25 bp, Homo sapien
catcacagtgggtctttgacggccc

SEQ ID NO: 1430787 - DNA, 25 bp, Homo sapien
tcctgatgaaatgctgcgcaaacgc

SEQ ID NO: 1430788 - DNA, 25 bp, Homo sapien
cctaggagagggtctgttgcgtcac

SEQ ID NO: 1430789 - DNA, 25 bp, Homo sapien
tttagttgtcgtatagatcagttca

SEQ ID NO: 1430790 - DNA, 25 bp, Homo sapien
ccccaactgccatcagcatttgttg

SEQ ID NO: 1430791 - DNA, 25 bp, Homo sapien
ctcaaagtgaagactattgtctggg

SEQ ID NO: 1430792 - DNA, 25 bp, Homo sapien
aaacacactatgtgtagcaagaacc

SEQ ID NO: 1430793 - DNA, 25 bp, Homo sapien
tctctgactagagaaaaaaggaata

SEQ ID NO: 1430794 - DNA, 25 bp, Homo sapien
ctctctgactagagaaaaaaggaat

SEQ ID NO: 1430795 - DNA, 25 bp, Homo sapien
tttgcaggagatagatgacctgcat

SEQ ID NO: 1430796 - DNA, 25 bp, Homo sapien
caggagatagatgacctgcatttca

SEQ ID NO: 1430797 - DNA, 25 bp, Homo sapien
ttcaatggagatgaccttttgcagg

SEQ ID NO: 1430798 - DNA, 25 bp, Homo sapien
ggagatgaccttttgcaggagatag

SEQ ID NO: 1430799 - DNA, 25 bp, Homo sapien
ctgtctctataaattgagaatggca

SEQ ID NO: 1430800 - DNA, 25 bp, Homo sapien
actgaattagctttcaattctgtct

SEQ ID NO: 1430801 - DNA, 25 bp, Homo sapien
agcctatggtcccttaaaagccagc

SEQ ID NO: 1430802 - DNA, 25 bp, Homo sapien
tgaggtcatggacccagcctatggt

SEQ ID NO: 1430803 - DNA, 25 bp, Homo sapien
gctcaggttcaggaatcttcgctga

SEQ ID NO: 1430804 - DNA, 25 bp, Homo sapien
gctgagcagtgtgagattccctgtg

SEQ ID NO: 1430805 - DNA, 25 bp, Homo sapien
aggaatcttcgctgagactgggccc

SEQ ID NO: 1430806 - DNA, 25 bp, Homo sapien
tgctgatgcttcccggaaactgctg

SEQ ID NO: 1430807 - DNA, 25 bp, Homo sapien
gactctattgctggtaaattttgcc

SEQ ID NO: 1430808 - DNA, 25 bp, Homo sapien
gagaattaccatttctctccaaaag

SEQ ID NO: 1430809 - DNA, 25 bp, Homo sapien
tagagggtataagggagtagaatat

SEQ ID NO: 1430810 - DNA, 25 bp, Homo sapien
cataattctcttcaagggccttggg

SEQ ID NO: 1430811 - DNA, 25 bp, Homo sapien
ttttgcatagcatattacaactgag

SEQ ID NO: 1430812 - DNA, 25 bp, Homo sapien
ataatgaatatgatgaaagagaaac

SEQ ID NO: 1430813 - DNA, 25 bp, Homo sapien
cagacaaggcattaactttgaagag

SEQ ID NO: 1430814 - DNA, 25 bp, Homo sapien
gagatttaacacactctattgataa

SEQ ID NO: 1430815 - DNA, 25 bp, Homo sapien
gtgtacaggttcacagtcactcagg

SEQ ID NO: 1430816 - DNA, 25 bp, Homo sapien
tgtgtacaggttcacagtcactcag

SEQ ID NO: 1430817 - DNA, 25 bp, Homo sapien
ttgtgataaaagtgctctggtaaag

SEQ ID NO: 1430818 - DNA, 25 bp, Homo sapien
tggaatccataaagcaacatacaga

SEQ ID NO: 1430819 - DNA, 25 bp, Homo sapien
gccactgctttcatttatcaaggaa

SEQ ID NO: 1430820 - DNA, 25 bp, Homo sapien
tagtagcgaccagcttcaccatgtt

SEQ ID NO: 1430821 - DNA, 25 bp, Homo sapien
tttagtgtatccatggccttgctca

SEQ ID NO: 1430822 - DNA, 25 bp, Homo sapien
acaacataagagttccgttcctcag

SEQ ID NO: 1430823 - DNA, 25 bp, Homo sapien
tatttgggacttgaagcaactaaca

SEQ ID NO: 1430824 - DNA, 25 bp, Homo sapien
tattggcagatgtagggaccctgcc

SEQ ID NO: 1430825 - DNA, 25 bp, Homo sapien
ctagcgtccccaactagagtaaaag

SEQ ID NO: 1430826 - DNA, 25 bp, Homo sapien
ccctatttgagagaaggaggttgaa

SEQ ID NO: 1430827 - DNA, 25 bp, Homo sapien
gaggttgaagggcattctagcgtcc

SEQ ID NO: 1430828 - DNA, 25 bp, Homo sapien
tgacttaactttgcgttggggtgct

SEQ ID NO: 1430829 - DNA, 25 bp, Homo sapien
tgcacattgcctagagaaagaactg

SEQ ID NO: 1430830 - DNA, 25 bp, Homo sapien
taggccacccatttagtagactctg

SEQ ID NO: 1430831 - DNA, 25 bp, Homo sapien
gacttctaaaaacaccgctggcgtg

SEQ ID NO: 1430832 - DNA, 25 bp, Homo sapien
gacatcacggcggatttcacagagg

SEQ ID NO: 1430833 - DNA, 25 bp, Homo sapien
ctgcgggcaccgatcaccggcggca

SEQ ID NO: 1430834 - DNA, 25 bp, Homo sapien
ctcctttcagcaggcgccgggcggt

SEQ ID NO: 1430835 - DNA, 25 bp, Homo sapien
accgatcaccggcggcagttgggct

SEQ ID NO: 1430836 - DNA, 25 bp, Homo sapien
gtggggttgcggatggctgcgcgcg

SEQ ID NO: 1430837 - DNA, 25 bp, Homo sapien
tgatttggaagaaacgcgagccacg

SEQ ID NO: 1430838 - DNA, 25 bp, Homo sapien
ggttaagaccctgacggctgcagct

SEQ ID NO: 1430839 - DNA, 25 bp, Homo sapien
taggtaggctcataaacaccgtgct

SEQ ID NO: 1430840 - DNA, 25 bp, Homo sapien
caaacacttgcaaagccgggagatc

SEQ ID NO: 1430841 - DNA, 25 bp, Homo sapien
gagttgacttgggtatttttctgtg

SEQ ID NO: 1430842 - DNA, 25 bp, Homo sapien
ttgggtatttttctgtgtccaccat

SEQ ID NO: 1430843 - DNA, 25 bp, Homo sapien
gttgacttgggtatttttctgtgtc

SEQ ID NO: 1430844 - DNA, 25 bp, Homo sapien
gacttgggtatttttctgtgtccac

SEQ ID NO: 1430845 - DNA, 25 bp, Homo sapien
cttatgccattcaaaatcttcatcc

SEQ ID NO: 1430846 - DNA, 25 bp, Homo sapien
gaaaagtcttatgccattcaaaatc

SEQ ID NO: 1430847 - DNA, 25 bp, Homo sapien
agtcttatgccattcaaaatcttca

SEQ ID NO: 1430848 - DNA, 25 bp, Homo sapien
gttgaaaagtcttatgccattcaaa

SEQ ID NO: 1430849 - DNA, 25 bp, Homo sapien
tgagttaaaccctatttagctgtgg

SEQ ID NO: 1430850 - DNA, 25 bp, Homo sapien
tcaaagtttcgctgacttcatgaaa

SEQ ID NO: 1430851 - DNA, 25 bp, Homo sapien
ttttcacccacacggctgaatttga

SEQ ID NO: 1430852 - DNA, 25 bp, Homo sapien
cagaaataattctgtaacgtaggga

SEQ ID NO: 1430853 - DNA, 25 bp, Homo sapien
tcacatacgtttccgtagaacactc

SEQ ID NO: 1430854 - DNA, 25 bp, Homo sapien
taaaggttctgcaaggtcttagctg

SEQ ID NO: 1430855 - DNA, 25 bp, Homo sapien
tagaacactctcattgttctcctcc

SEQ ID NO: 1430856 - DNA, 25 bp, Homo sapien
ttataaacacttaacatccagttaa

SEQ ID NO: 1430857 - DNA, 25 bp, Homo sapien
ggtctgagataagacccatttggaa

SEQ ID NO: 1430858 - DNA, 25 bp, Homo sapien
gtctgagataagacccatttggaat

SEQ ID NO: 1430859 - DNA, 25 bp, Homo sapien
tgctggagcgtccagtgcctgcact

SEQ ID NO: 1430860 - DNA, 25 bp, Homo sapien
ggtggatcaccacaggtccatggtc

SEQ ID NO: 1430861 - DNA, 25 bp, Homo sapien
tgcactacggtggatcaccacaggt

SEQ ID NO: 1430862 - DNA, 25 bp, Homo sapien
tccagtgcctgcactacggtggatc

SEQ ID NO: 1430863 - DNA, 25 bp, Homo sapien
ctggtttcaccactattgatatttt

SEQ ID NO: 1430864 - DNA, 25 bp, Homo sapien
ttgatattttctaattgtggtagat

SEQ ID NO: 1430865 - DNA, 25 bp, Homo sapien
gatattttctaattgtggtagatgt

SEQ ID NO: 1430866 - DNA, 25 bp, Homo sapien
tattttctaattgtggtagatgtac

SEQ ID NO: 1430867 - DNA, 25 bp, Homo sapien
cttctgacaagagcttcacactgaa

SEQ ID NO: 1430868 - DNA, 25 bp, Homo sapien
ttctgacaagagcttcacactgaat

SEQ ID NO: 1430869 - DNA, 25 bp, Homo sapien
tgctttggtcttctgctgccaaacc

SEQ ID NO: 1430870 - DNA, 25 bp, Homo sapien
actgctttggtcttctgctgccaaa

SEQ ID NO: 1430871 - DNA, 25 bp, Homo sapien
ctttggtcttctgctgccaaaccat

SEQ ID NO: 1430872 - DNA, 25 bp, Homo sapien
gacaactgctttggtcttctgctgc

SEQ ID NO: 1430873 - DNA, 25 bp, Homo sapien
ggaagtggaccctgtgttaagatgt

SEQ ID NO: 1430874 - DNA, 25 bp, Homo sapien
gcagcatgtgttaggaagtggaccc

SEQ ID NO: 1430875 - DNA, 25 bp, Homo sapien
gttaagatgtaactcctttgtcctc

SEQ ID NO: 1430876 - DNA, 25 bp, Homo sapien
gaaatggcagcatgtgttaggaagt

SEQ ID NO: 1430877 - DNA, 25 bp, Homo sapien
gagcatccaactccttgaactccca

SEQ ID NO: 1430878 - DNA, 25 bp, Homo sapien
gcagctgccagcgatgctgagcatc

SEQ ID NO: 1430879 - DNA, 25 bp, Homo sapien
agctgccagcgatgctgagcatcca

SEQ ID NO: 1430880 - DNA, 25 bp, Homo sapien
actcccacttgatggtggtgggcat

SEQ ID NO: 1430881 - DNA, 25 bp, Homo sapien
aaaacaaagggactggcgttatgca

SEQ ID NO: 1430882 - DNA, 25 bp, Homo sapien
tgcatctatccactataagcatggg

SEQ ID NO: 1430883 - DNA, 25 bp, Homo sapien
gtgttcctatcattttaacatcctg

SEQ ID NO: 1430884 - DNA, 25 bp, Homo sapien
taacatcctgagtatgatagtatct

SEQ ID NO: 1430885 - DNA, 25 bp, Homo sapien
gcttatacaattgaagggactggca

SEQ ID NO: 1430886 - DNA, 25 bp, Homo sapien
aactggcaggtctcttacttgagta

SEQ ID NO: 1430887 - DNA, 25 bp, Homo sapien
gactctctgccttctatactgtttg

SEQ ID NO: 1430888 - DNA, 25 bp, Homo sapien
gtttaggcactagtcttgaagcaga

SEQ ID NO: 1430889 - DNA, 25 bp, Homo sapien
tgtagaccaatggaccaaaataaag

SEQ ID NO: 1430890 - DNA, 25 bp, Homo sapien
ttagcataaaatagacatgtagacc

SEQ ID NO: 1430891 - DNA, 25 bp, Homo sapien
agacatcatagagtgtaatcacaca

SEQ ID NO: 1430892 - DNA, 25 bp, Homo sapien
tcttgacagtggatctggacaataa

SEQ ID NO: 1430893 - DNA, 25 bp, Homo sapien
attggcaatcctcaattccacaatg

SEQ ID NO: 1430894 - DNA, 25 bp, Homo sapien
cattagactgagaattggcaatcct

SEQ ID NO: 1430895 - DNA, 25 bp, Homo sapien
ttttatagtatgaagaacattagac

SEQ ID NO: 1430896 - DNA, 25 bp, Homo sapien
aagaacattagactgagaattggca

SEQ ID NO: 1430897 - DNA, 25 bp, Homo sapien
taatatagtgttccttgcctactgc

SEQ ID NO: 1430898 - DNA, 25 bp, Homo sapien
gaatgtaagcccctatttgtcttgg

SEQ ID NO: 1430899 - DNA, 25 bp, Homo sapien
ttttgtttttggtgcctcagctggc

SEQ ID NO: 1430900 - DNA, 25 bp, Homo sapien
tctctagccctctgtagaatgtgag

SEQ ID NO: 1430901 - DNA, 25 bp, Homo sapien
cccatttagtccagaatagagtcta

SEQ ID NO: 1430902 - DNA, 25 bp, Homo sapien
tgcttcaggaggtcaggtgttctag

SEQ ID NO: 1430903 - DNA, 25 bp, Homo sapien
ggtgttctaggcaatgatggcctcc

SEQ ID NO: 1430904 - DNA, 25 bp, Homo sapien
acttattcttgactggacacagtgg

SEQ ID NO: 1430905 - DNA, 25 bp, Homo sapien
aaaaccagtttaagatgaccacagg

SEQ ID NO: 1430906 - DNA, 25 bp, Homo sapien
tccttccaggaatcttataacagat

SEQ ID NO: 1430907 - DNA, 25 bp, Homo sapien
tctttggttctgaaggaagtggaga

SEQ ID NO: 1430908 - DNA, 25 bp, Homo sapien
gatttggtgtaacagttagatgccc

SEQ ID NO: 1430909 - DNA, 25 bp, Homo sapien
tattaaggcaaggtcacctctaagc

SEQ ID NO: 1430910 - DNA, 25 bp, Homo sapien
tttggactaagctatgcccctgtgg

SEQ ID NO: 1430911 - DNA, 25 bp, Homo sapien
aagacactgtgagactaagcgttac

SEQ ID NO: 1430912 - DNA, 25 bp, Homo sapien
tctcagtatcgggaaaacagccaac

SEQ ID NO: 1430913 - DNA, 25 bp, Homo sapien
tgcagtaattgacgacagatgaaac

SEQ ID NO: 1430914 - DNA, 25 bp, Homo sapien
tgtcatttaaattggcgagtgtctc

SEQ ID NO: 1430915 - DNA, 25 bp, Homo sapien
cactagacgttagagcaatcttaga

SEQ ID NO: 1430916 - DNA, 25 bp, Homo sapien
aaaataactaggttgtggatacaca

SEQ ID NO: 1430917 - DNA, 25 bp, Homo sapien
ccgcctctgtattcggcccagaaaa

SEQ ID NO: 1430918 - DNA, 25 bp, Homo sapien
ggtgcttgcttctgtaatggcctcc

SEQ ID NO: 1430919 - DNA, 25 bp, Homo sapien
tgctcttaaggagtatgacccgcct

SEQ ID NO: 1430920 - DNA, 25 bp, Homo sapien
tagaatgtgcacaggcattgtacca

SEQ ID NO: 1430921 - DNA, 25 bp, Homo sapien
tggtaagttcccaggcgcagtctat

SEQ ID NO: 1430922 - DNA, 25 bp, Homo sapien
gtccagtgtggtgaattgtttacca

SEQ ID NO: 1430923 - DNA, 25 bp, Homo sapien
gatattttccagtccaagccagtat

SEQ ID NO: 1430924 - DNA, 25 bp, Homo sapien
tttcaggttccagacgaaagctgct

SEQ ID NO: 1430925 - DNA, 25 bp, Homo sapien
tgttttcacaccataactgcattgg

SEQ ID NO: 1430926 - DNA, 25 bp, Homo sapien
tctgaagaagttgacagagccgtct

SEQ ID NO: 1430927 - DNA, 25 bp, Homo sapien
tataaatcccactgaccgaatgccc

SEQ ID NO: 1430928 - DNA, 25 bp, Homo sapien
ttctgaataacagtccaacccccag

SEQ ID NO: 1430929 - DNA, 25 bp, Homo sapien
actttgatggagttatgtagcgcac

SEQ ID NO: 1430930 - DNA, 25 bp, Homo sapien
tgtagcgcacatggtagcaaagtct

SEQ ID NO: 1430931 - DNA, 25 bp, Homo sapien
tgcatctactacaggctaaggactg

SEQ ID NO: 1430932 - DNA, 25 bp, Homo sapien
taaggactgttttaggctcaaggga

SEQ ID NO: 1430933 - DNA, 25 bp, Homo sapien
cataacaaaggtagtggtagaacca

SEQ ID NO: 1430934 - DNA, 25 bp, Homo sapien
cagtaataggaatttcttggtgcca

SEQ ID NO: 1430935 - DNA, 25 bp, Homo sapien
tatggtctagcagattatccctttg

SEQ ID NO: 1430936 - DNA, 25 bp, Homo sapien
tttaccctttttgtgcaagcaccta

SEQ ID NO: 1430937 - DNA, 25 bp, Homo sapien
acacagctggtagcctatggagtct

SEQ ID NO: 1430938 - DNA, 25 bp, Homo sapien
gaactaacatttgagtgccaggcac

SEQ ID NO: 1430939 - DNA, 25 bp, Homo sapien
gaaaacagagttacaccagttggca

SEQ ID NO: 1430940 - DNA, 25 bp, Homo sapien
gaggacattattcttagccagacta

SEQ ID NO: 1430941 - DNA, 25 bp, Homo sapien
gatgtatttaagttcaattcttgat

SEQ ID NO: 1430942 - DNA, 25 bp, Homo sapien
gagatgtatttaagttcaattcttg

SEQ ID NO: 1430943 - DNA, 25 bp, Homo sapien
atgtatttaagttcaattcttgata

SEQ ID NO: 1430944 - DNA, 25 bp, Homo sapien
agatgtatttaagttcaattcttga

SEQ ID NO: 1430945 - DNA, 25 bp, Homo sapien
agcattgtttcataaggcataaaaa

SEQ ID NO: 1430946 - DNA, 25 bp, Homo sapien
gagcattgtttcataaggcataaaa

SEQ ID NO: 1430947 - DNA, 25 bp, Homo sapien
atataacatcgcaaaatgaataagc

SEQ ID NO: 1430948 - DNA, 25 bp, Homo sapien
gtacatatataacatcgcaaaatga

SEQ ID NO: 1430949 - DNA, 25 bp, Homo sapien
caggtaccaggaatgtgtatgcaca

SEQ ID NO: 1430950 - DNA, 25 bp, Homo sapien
gaagaatagcacacctagggtccag

SEQ ID NO: 1430951 - DNA, 25 bp, Homo sapien
catctgtggcacgagggtatcttct

SEQ ID NO: 1430952 - DNA, 25 bp, Homo sapien
acacatgggtgtcttgtcgggaaaa

SEQ ID NO: 1430953 - DNA, 25 bp, Homo sapien
tttgaaatgaggttgtaaaatgatg

SEQ ID NO: 1430954 - DNA, 25 bp, Homo sapien
ttgaaatgaggttgtaaaatgatgt

SEQ ID NO: 1430955 - DNA, 25 bp, Homo sapien
aaagtcttctatgcgttgggttaat

SEQ ID NO: 1430956 - DNA, 25 bp, Homo sapien
tctcttcatagttgctatattgcca

SEQ ID NO: 1430957 - DNA, 25 bp, Homo sapien
ctcttcatagttgctatattgccag

SEQ ID NO: 1430958 - DNA, 25 bp, Homo sapien
aagtcttctatgcgttgggttaatt

SEQ ID NO: 1430959 - DNA, 25 bp, Homo sapien
ctagtagagagaagaaacgaaagtc

SEQ ID NO: 1430960 - DNA, 25 bp, Homo sapien
tttaatccagcagagaaagcgttgt

SEQ ID NO: 1430961 - DNA, 25 bp, Homo sapien
tcagtgaatccagaaacttgctgcc

SEQ ID NO: 1430962 - DNA, 25 bp, Homo sapien
gcagctgacccagattgtatataca

SEQ ID NO: 1430963 - DNA, 25 bp, Homo sapien
ggaccgttgaatccaagctgtaaga

SEQ ID NO: 1430964 - DNA, 25 bp, Homo sapien
cagtgtttgatgtgcataatgccag

SEQ ID NO: 1430965 - DNA, 25 bp, Homo sapien
gaaaatttactgtcggtctctgaca

SEQ ID NO: 1430966 - DNA, 25 bp, Homo sapien
gaccaagcagttttatgagaactct

SEQ ID NO: 1430967 - DNA, 25 bp, Homo sapien
gtctctgacatgaaaccgtattttg

SEQ ID NO: 1430968 - DNA, 25 bp, Homo sapien
gaggcacattcctttacaaccagtg

SEQ ID NO: 1430969 - DNA, 25 bp, Homo sapien
gggtgccagtgttgcctaacagaag

SEQ ID NO: 1430970 - DNA, 25 bp, Homo sapien
gaagcactattggtacaggaggaaa

SEQ ID NO: 1430971 - DNA, 25 bp, Homo sapien
tcttctagaagatttatgaggagcc

SEQ ID NO: 1430972 - DNA, 25 bp, Homo sapien
gccacatgatgatgttccatggctg

SEQ ID NO: 1430973 - DNA, 25 bp, Homo sapien
aaagtaatgtgtccgcaagtgggag

SEQ ID NO: 1430974 - DNA, 25 bp, Homo sapien
gagccatgatagctgtgggtgtgga

SEQ ID NO: 1430975 - DNA, 25 bp, Homo sapien
tgatcaagcggagcctcaaaggtca

SEQ ID NO: 1430976 - DNA, 25 bp, Homo sapien
tttcagcagtattgcctgcaccatc

SEQ ID NO: 1430977 - DNA, 25 bp, Homo sapien
ttgttttcagcagtattgcctgcac

SEQ ID NO: 1430978 - DNA, 25 bp, Homo sapien
tatgtgtgtttgcggttgggttttg

SEQ ID NO: 1430979 - DNA, 25 bp, Homo sapien
gttttcagcagtattgcctgcacca

SEQ ID NO: 1430980 - DNA, 25 bp, Homo sapien
caatcagccggattcgggagatgtt

SEQ ID NO: 1430981 - DNA, 25 bp, Homo sapien
ctgagacggtacatgaggcaatgac

SEQ ID NO: 1430982 - DNA, 25 bp, Homo sapien
caatgactgaaattgtggctgtggc

SEQ ID NO: 1430983 - DNA, 25 bp, Homo sapien
agaccacttcctgagacggtacatg

SEQ ID NO: 1430984 - DNA, 25 bp, Homo sapien
gaaaaacaggtgctcggctttccag

SEQ ID NO: 1430985 - DNA, 25 bp, Homo sapien
agaggctcgggaaaaacaggtgctc

SEQ ID NO: 1430986 - DNA, 25 bp, Homo sapien
ctcgggaaaaacaggtgctcggctt

SEQ ID NO: 1430987 - DNA, 25 bp, Homo sapien
aaagaaatcttggccactcagaggg

SEQ ID NO: 1430988 - DNA, 25 bp, Homo sapien
ccagagacagcgtggtctgatgcag

SEQ ID NO: 1430989 - DNA, 25 bp, Homo sapien
ggcggcccagagacagcgtggtctg

SEQ ID NO: 1430990 - DNA, 25 bp, Homo sapien
cagagggcggcccagagacagcgtg

SEQ ID NO: 1430991 - DNA, 25 bp, Homo sapien
gagggcggcccagagacagcgtggt

SEQ ID NO: 1430992 - DNA, 25 bp, Homo sapien
gggaccagttcacgctgtgatattg

SEQ ID NO: 1430993 - DNA, 25 bp, Homo sapien
atattggttcctccctccacaatag

SEQ ID NO: 1430994 - DNA, 25 bp, Homo sapien
gttcacgctgtgatattggttcctc

SEQ ID NO: 1430995 - DNA, 25 bp, Homo sapien
cctccacaatagaggcaggcgcagg

SEQ ID NO: 1430996 - DNA, 25 bp, Homo sapien
tggtcccaccatgactgtccttgag

SEQ ID NO: 1430997 - DNA, 25 bp, Homo sapien
aagacggcatcagccgccacttggt

SEQ ID NO: 1430998 - DNA, 25 bp, Homo sapien
tcatccagggaagctctgcagactt

SEQ ID NO: 1430999 - DNA, 25 bp, Homo sapien
cagacttttccctctaacttcaaag

SEQ ID NO: 1431000 - DNA, 25 bp, Homo sapien
tccccctgcccatggctgttccttc

SEQ ID NO: 1431001 - DNA, 25 bp, Homo sapien
ctccccctgcccatggctgttcctt

SEQ ID NO: 1431002 - DNA, 25 bp, Homo sapien
ccctgcccatggctgttccttcttt

SEQ ID NO: 1431003 - DNA, 25 bp, Homo sapien
tgcccatggctgttccttctttctg

SEQ ID NO: 1431004 - DNA, 25 bp, Homo sapien
tgcttacacggcttgggaagacttg

SEQ ID NO: 1431005 - DNA, 25 bp, Homo sapien
gacttggaggcacttctcattctca

SEQ ID NO: 1431006 - DNA, 25 bp, Homo sapien
tccagaggccgtcaacagcttgggt

SEQ ID NO: 1431007 - DNA, 25 bp, Homo sapien
caaattagcaaacggcccaggaggt

SEQ ID NO: 1431008 - DNA, 25 bp, Homo sapien
aaatggaagtggtaagtcgatgctc

SEQ ID NO: 1431009 - DNA, 25 bp, Homo sapien
ggcttggccacaatcagctccagct

SEQ ID NO: 1431010 - DNA, 25 bp, Homo sapien
agtggtaagtcgatgctccgcacag

SEQ ID NO: 1431011 - DNA, 25 bp, Homo sapien
gcctcacccaggtcacacaaatgga

SEQ ID NO: 1431012 - DNA, 25 bp, Homo sapien
tatttaaaggctctgatctattttt

SEQ ID NO: 1431013 - DNA, 25 bp, Homo sapien
caaacataatgtggagtaaacacgc

SEQ ID NO: 1431014 - DNA, 25 bp, Homo sapien
cacgtgcacttcaggtgcaggagac

SEQ ID NO: 1431015 - DNA, 25 bp, Homo sapien
gtggagtaaacacgcgcatgcacac

SEQ ID NO: 1431016 - DNA, 25 bp, Homo sapien
taatgtggagtaaacacgcgcatgc

SEQ ID NO: 1431017 - DNA, 25 bp, Homo sapien
acatatgccccgagccttccaacca

SEQ ID NO: 1431018 - DNA, 25 bp, Homo sapien
ttccaaccagaatccacaggcagca

SEQ ID NO: 1431019 - DNA, 25 bp, Homo sapien
gcctttgctgatccttgttcctgaa

SEQ ID NO: 1431020 - DNA, 25 bp, Homo sapien
ctccatagcctttgctgatccttgt

SEQ ID NO: 1431021 - DNA, 25 bp, Homo sapien
cccgaaggaaggctggttcaaatgc

SEQ ID NO: 1431022 - DNA, 25 bp, Homo sapien
catagttgacgttaaagcttccccg

SEQ ID NO: 1431023 - DNA, 25 bp, Homo sapien
tgtgtcaatcttcccactggactgg

SEQ ID NO: 1431024 - DNA, 25 bp, Homo sapien
tggactgggatcctgcacaggccag

SEQ ID NO: 1431025 - DNA, 25 bp, Homo sapien
aagatgtagggggtctggtccacca

SEQ ID NO: 1431026 - DNA, 25 bp, Homo sapien
ttccttgtcacatctttctcatcct

SEQ ID NO: 1431027 - DNA, 25 bp, Homo sapien
tcttccttgtcacatctttctcatc

SEQ ID NO: 1431028 - DNA, 25 bp, Homo sapien
gtatgtctaagccccactggaagga

SEQ ID NO: 1431029 - DNA, 25 bp, Homo sapien
ggtgcctctcttgtgttccccggag

SEQ ID NO: 1431030 - DNA, 25 bp, Homo sapien
tgccagaggtccttctagtgaccgt

SEQ ID NO: 1431031 - DNA, 25 bp, Homo sapien
ccagaggcgattggccccggtgcct

SEQ ID NO: 1431032 - DNA, 25 bp, Homo sapien
tgtgttccccggagcgcccgttgag

SEQ ID NO: 1431033 - DNA, 25 bp, Homo sapien
cataaggctaaaaatgcgaggtcta

SEQ ID NO: 1431034 - DNA, 25 bp, Homo sapien
cttgggaagtgtcattatacctggc

SEQ ID NO: 1431035 - DNA, 25 bp, Homo sapien
ccttaaatggtggttctgtactgac

SEQ ID NO: 1431036 - DNA, 25 bp, Homo sapien
gctgtgaaatacctggaacttggga

SEQ ID NO: 1431037 - DNA, 25 bp, Homo sapien
tacaggtgtaaaccagcatgtttgg

SEQ ID NO: 1431038 - DNA, 25 bp, Homo sapien
taggataaattgttagtgtctgtct

SEQ ID NO: 1431039 - DNA, 25 bp, Homo sapien
tactcaccaaaccttcagagtttta

SEQ ID NO: 1431040 - DNA, 25 bp, Homo sapien
aagtcttacctcctatactcaccaa

SEQ ID NO: 1431041 - DNA, 25 bp, Homo sapien
ggtgttcggtcctcgtgggcttcat

SEQ ID NO: 1431042 - DNA, 25 bp, Homo sapien
gggtgttcggtcctcgtgggcttca

SEQ ID NO: 1431043 - DNA, 25 bp, Homo sapien
cacccacaggtctaaatcggggtag

SEQ ID NO: 1431044 - DNA, 25 bp, Homo sapien
tgggggtcgtggggcagcacccaca

SEQ ID NO: 1431045 - DNA, 25 bp, Homo sapien
actttgctgtgaattgcacaattca

SEQ ID NO: 1431046 - DNA, 25 bp, Homo sapien
gaattgcacaattcacacagtaatg

SEQ ID NO: 1431047 - DNA, 25 bp, Homo sapien
gagattgattcctgactactttgct

SEQ ID NO: 1431048 - DNA, 25 bp, Homo sapien
ttgcacaattcacacagtaatgtag

SEQ ID NO: 1431049 - DNA, 25 bp, Homo sapien
ctgtgctgtctgcaggcatagagca

SEQ ID NO: 1431050 - DNA, 25 bp, Homo sapien
caggcatagagcagagcaagcctgt

SEQ ID NO: 1431051 - DNA, 25 bp, Homo sapien
ctcagtgctgtgctgtctgcaggca

SEQ ID NO: 1431052 - DNA, 25 bp, Homo sapien
aggcatagagcagagcaagcctgtg

SEQ ID NO: 1431053 - DNA, 25 bp, Homo sapien
tgcatcttgttgaggtgctgttcca

SEQ ID NO: 1431054 - DNA, 25 bp, Homo sapien
cgtggccggccaagattttaagcct

SEQ ID NO: 1431055 - DNA, 25 bp, Homo sapien
tgtgcccactcatctatggactcag

SEQ ID NO: 1431056 - DNA, 25 bp, Homo sapien
cagtcttgtttggagttctgaaccc

SEQ ID NO: 1431057 - DNA, 25 bp, Homo sapien
ggtgaaactgggaacaactactcag

SEQ ID NO: 1431058 - DNA, 25 bp, Homo sapien
gagcaactctagtgtgccagcacag

SEQ ID NO: 1431059 - DNA, 25 bp, Homo sapien
gaaagatgagtcctatacgtggcaa

SEQ ID NO: 1431060 - DNA, 25 bp, Homo sapien
gtaaatgaccacacctcaatgatgg

SEQ ID NO: 1431061 - DNA, 25 bp, Homo sapien
aaagccatccttgcctcctgtgtag

SEQ ID NO: 1431062 - DNA, 25 bp, Homo sapien
gtaacatccatggttgcacaaatag

SEQ ID NO: 1431063 - DNA, 25 bp, Homo sapien
taaaactggccacgtattgagtgtt

SEQ ID NO: 1431064 - DNA, 25 bp, Homo sapien
acaggcatgggacggttcagtaaca

SEQ ID NO: 1431065 - DNA, 25 bp, Homo sapien
ggcttcctctaacaggttggcggga

SEQ ID NO: 1431066 - DNA, 25 bp, Homo sapien
gaagttgatctgcaaacgcgaggca

SEQ ID NO: 1431067 - DNA, 25 bp, Homo sapien
tgcctaacgctcctgactgagacgg

SEQ ID NO: 1431068 - DNA, 25 bp, Homo sapien
cctagcggagtgattgacagtggcc

SEQ ID NO: 1431069 - DNA, 25 bp, Homo sapien
ggtaatcctgataaggcctggcaga

SEQ ID NO: 1431070 - DNA, 25 bp, Homo sapien
tgaagagactcccatagcacattgc

SEQ ID NO: 1431071 - DNA, 25 bp, Homo sapien
aatacactctaggtttgcaggctgg

SEQ ID NO: 1431072 - DNA, 25 bp, Homo sapien
cacatcagtgaagccaagtcatgcc

SEQ ID NO: 1431073 - DNA, 25 bp, Homo sapien
taagtctcagagacagaacacgtgg

SEQ ID NO: 1431074 - DNA, 25 bp, Homo sapien
tgggaaccaagacaagcagcagaat

SEQ ID NO: 1431075 - DNA, 25 bp, Homo sapien
ggagccatggtttcatcacttagca

SEQ ID NO: 1431076 - DNA, 25 bp, Homo sapien
gaaagcagtttagcctcagtgtcca

SEQ ID NO: 1431077 - DNA, 25 bp, Homo sapien
aacagaacacaacttggcaaacctt

SEQ ID NO: 1431078 - DNA, 25 bp, Homo sapien
ggcaaaccttgtgagaagacagaga

SEQ ID NO: 1431079 - DNA, 25 bp, Homo sapien
cacaacttggcaaaccttgtgagaa

SEQ ID NO: 1431080 - DNA, 25 bp, Homo sapien
cttggcaaaccttgtgagaagacag

SEQ ID NO: 1431081 - DNA, 25 bp, Homo sapien
cagttcacagtcagacaacagacgg

SEQ ID NO: 1431082 - DNA, 25 bp, Homo sapien
ggagagctggtttctctggccctca

SEQ ID NO: 1431083 - DNA, 25 bp, Homo sapien
ttaatgggcacgacagcaatgcacg

SEQ ID NO: 1431084 - DNA, 25 bp, Homo sapien
ttagcaatgcacacagtgcccgatg

SEQ ID NO: 1431085 - DNA, 25 bp, Homo sapien
caagggtggcctctcagcagtttct

SEQ ID NO: 1431086 - DNA, 25 bp, Homo sapien
tacttagcatgctcggagacctcag

SEQ ID NO: 1431087 - DNA, 25 bp, Homo sapien
tgacactaaagcgttcccagtcctg

SEQ ID NO: 1431088 - DNA, 25 bp, Homo sapien
gctttgaatcatgacctgccacagg

SEQ ID NO: 1431089 - DNA, 25 bp, Homo sapien
gaagtatgggatcttcttatcttga

SEQ ID NO: 1431090 - DNA, 25 bp, Homo sapien
ttatcttgatcccacagggtgaagc

SEQ ID NO: 1431091 - DNA, 25 bp, Homo sapien
gtatgggatcttcttatcttgatcc

SEQ ID NO: 1431092 - DNA, 25 bp, Homo sapien
tgggaagaagtatgggatcttctta

SEQ ID NO: 1431093 - DNA, 25 bp, Homo sapien
gattactggagaatacactggccga

SEQ ID NO: 1431094 - DNA, 25 bp, Homo sapien
tactcctacggatcccagactgaag

SEQ ID NO: 1431095 - DNA, 25 bp, Homo sapien
tatatatcgtgcacccactgtaggc

SEQ ID NO: 1431096 - DNA, 25 bp, Homo sapien
ggtcatagcagatccttagggcaca

SEQ ID NO: 1431097 - DNA, 25 bp, Homo sapien
tgtaatggctagatccccagagggt

SEQ ID NO: 1431098 - DNA, 25 bp, Homo sapien
acttgaggtggaggcatcactggcc

SEQ ID NO: 1431099 - DNA, 25 bp, Homo sapien
gaatttattcccctgagagtctgtg

SEQ ID NO: 1431100 - DNA, 25 bp, Homo sapien
tgctgaagaaacctgtagctcctgc

SEQ ID NO: 1431101 - DNA, 25 bp, Homo sapien
gaaaaggcttggaagtgtcatcact

SEQ ID NO: 1431102 - DNA, 25 bp, Homo sapien
gcttggaagtgtcatcactggctgt

SEQ ID NO: 1431103 - DNA, 25 bp, Homo sapien
ccttggaaaaggcttggaagtgtca

SEQ ID NO: 1431104 - DNA, 25 bp, Homo sapien
aaggcttggaagtgtcatcactggc

SEQ ID NO: 1431105 - DNA, 25 bp, Homo sapien
agcccagtgtctttttgattaagcg

SEQ ID NO: 1431106 - DNA, 25 bp, Homo sapien
ttttgattaagcgtggtgtaaagaa

SEQ ID NO: 1431107 - DNA, 25 bp, Homo sapien
gattaagcgtggtgtaaagaagcct

SEQ ID NO: 1431108 - DNA, 25 bp, Homo sapien
agcctgtgatgccagaccacccacc

SEQ ID NO: 1431109 - DNA, 25 bp, Homo sapien
tgctgtagagaagcaacagatgaga

SEQ ID NO: 1431110 - DNA, 25 bp, Homo sapien
tgaaagagaacccatcagcatgctg

SEQ ID NO: 1431111 - DNA, 25 bp, Homo sapien
cgtcgtcattacagaggttcctctg

SEQ ID NO: 1431112 - DNA, 25 bp, Homo sapien
tgggtggcaccagattcgcctcttg

SEQ ID NO: 1431113 - DNA, 25 bp, Homo sapien
tgtctctttgctttcgaggcagtgc

SEQ ID NO: 1431114 - DNA, 25 bp, Homo sapien
cgtatttcttatggggctgattctc

SEQ ID NO: 1431115 - DNA, 25 bp, Homo sapien
tctttgctttcgaggcagtgctggg

SEQ ID NO: 1431116 - DNA, 25 bp, Homo sapien
cctggtgaagcatgtctctttggca

SEQ ID NO: 1431117 - DNA, 25 bp, Homo sapien
tagccggggcaggtatggaacaaca

SEQ ID NO: 1431118 - DNA, 25 bp, Homo sapien
ccgagtcttggaaggaagtataggt

SEQ ID NO: 1431119 - DNA, 25 bp, Homo sapien
tcttggaaggaagtataggtagccg

SEQ ID NO: 1431120 - DNA, 25 bp, Homo sapien
agatgacgaggaggcggctctccca

SEQ ID NO: 1431121 - DNA, 25 bp, Homo sapien
cttcagaaatgctggagtcatggaa

SEQ ID NO: 1431122 - DNA, 25 bp, Homo sapien
gggcctatcggcagggctccacttc

SEQ ID NO: 1431123 - DNA, 25 bp, Homo sapien
caaaagagggcctatcggcagggct

SEQ ID NO: 1431124 - DNA, 25 bp, Homo sapien
cagaaatgctggagtcatggaacat

SEQ ID NO: 1431125 - DNA, 25 bp, Homo sapien
tctcataagttcataaaccttaggg

SEQ ID NO: 1431126 - DNA, 25 bp, Homo sapien
gacctgagacaggtcaatacctgga

SEQ ID NO: 1431127 - DNA, 25 bp, Homo sapien
tatggtgacattccataggtagcaa

SEQ ID NO: 1431128 - DNA, 25 bp, Homo sapien
cctcaggctgttccattcgatatcc

SEQ ID NO: 1431129 - DNA, 25 bp, Homo sapien
cactaggcagttacgagctgcaaga

SEQ ID NO: 1431130 - DNA, 25 bp, Homo sapien
tccagcatgagcagtataagtgtct

SEQ ID NO: 1431131 - DNA, 25 bp, Homo sapien
taagtgtctccagtcatcaatctac

SEQ ID NO: 1431132 - DNA, 25 bp, Homo sapien
taggcaagactctctggtgctgtcc

SEQ ID NO: 1431133 - DNA, 25 bp, Homo sapien
ggtaatccagcaaattcccgtatgg

SEQ ID NO: 1431134 - DNA, 25 bp, Homo sapien
taagtactccattgcagaagaaatc

SEQ ID NO: 1431135 - DNA, 25 bp, Homo sapien
tcccgtatggcatgtattcagtcac

SEQ ID NO: 1431136 - DNA, 25 bp, Homo sapien
tcttctcggttgcattctcggaggt

SEQ ID NO: 1431137 - DNA, 25 bp, Homo sapien
tcaggtctagttcggcaataatctt

SEQ ID NO: 1431138 - DNA, 25 bp, Homo sapien
aatttgacaatttttcaggtctagt

SEQ ID NO: 1431139 - DNA, 25 bp, Homo sapien
tattagtgtacattcaaacactcca

SEQ ID NO: 1431140 - DNA, 25 bp, Homo sapien
gtacattcaaacactccaaaccact

SEQ ID NO: 1431141 - DNA, 25 bp, Homo sapien
taccagattaggatgcttgatttcc

SEQ ID NO: 1431142 - DNA, 25 bp, Homo sapien
ctaaaagttgtaccagattaggatg

SEQ ID NO: 1431143 - DNA, 25 bp, Homo sapien
gttgtaccagattaggatgcttgat

SEQ ID NO: 1431144 - DNA, 25 bp, Homo sapien
aagttgtaccagattaggatgcttg

SEQ ID NO: 1431145 - DNA, 25 bp, Homo sapien
gcattgtcagcaatggcactagggt

SEQ ID NO: 1431146 - DNA, 25 bp, Homo sapien
tcatctcaatttgctgatgtgcttg

SEQ ID NO: 1431147 - DNA, 25 bp, Homo sapien
gcaatggcactagggttaatcatct

SEQ ID NO: 1431148 - DNA, 25 bp, Homo sapien
tctcaatttgctgatgtgcttggca

SEQ ID NO: 1431149 - DNA, 25 bp, Homo sapien
tgtatttcttccagacgccaacgta

SEQ ID NO: 1431150 - DNA, 25 bp, Homo sapien
ggacacaccatagactgtaggctta

SEQ ID NO: 1431151 - DNA, 25 bp, Homo sapien
taggcttattacacttgggtgctgg

SEQ ID NO: 1431152 - DNA, 25 bp, Homo sapien
gtagtgtaatgttgtcaccagccca

SEQ ID NO: 1431153 - DNA, 25 bp, Homo sapien
tgtagtgatacacacgtccctcgta

SEQ ID NO: 1431154 - DNA, 25 bp, Homo sapien
tggttgtaaccaaggactcgtagct

SEQ ID NO: 1431155 - DNA, 25 bp, Homo sapien
tcgtacctgagcgagatggacagct

SEQ ID NO: 1431156 - DNA, 25 bp, Homo sapien
tgcactgcgtgacacaggtccatgg

SEQ ID NO: 1431157 - DNA, 25 bp, Homo sapien
cacggaccacagagttttcagcaag

SEQ ID NO: 1431158 - DNA, 25 bp, Homo sapien
ggaagccaagtcaatcaaaagcaca

SEQ ID NO: 1431159 - DNA, 25 bp, Homo sapien
taacttgccccgatacttgcagcac

SEQ ID NO: 1431160 - DNA, 25 bp, Homo sapien
gaatgggcagttaggactcccaaaa

SEQ ID NO: 1431161 - DNA, 25 bp, Homo sapien
agtggctccgagcaagttctccttg

SEQ ID NO: 1431162 - DNA, 25 bp, Homo sapien
ctgatagcctcatttagtgcctggg

SEQ ID NO: 1431163 - DNA, 25 bp, Homo sapien
gattagggtcactctcagtggctcc

SEQ ID NO: 1431164 - DNA, 25 bp, Homo sapien
cacaaccatagggacgatgcaaagc

SEQ ID NO: 1431165 - DNA, 25 bp, Homo sapien
gaattcacggtgagttcaacagcga

SEQ ID NO: 1431166 - DNA, 25 bp, Homo sapien
cacggtgagttcaacagcgaaacat

SEQ ID NO: 1431167 - DNA, 25 bp, Homo sapien
ggaagggaattcacggtgagttcaa

SEQ ID NO: 1431168 - DNA, 25 bp, Homo sapien
aacagcgaaacatttgtttgaattc

SEQ ID NO: 1431169 - DNA, 25 bp, Homo sapien
ctggactactgcctccagtcttgtc

SEQ ID NO: 1431170 - DNA, 25 bp, Homo sapien
tggactactgcctccagtcttgtct

SEQ ID NO: 1431171 - DNA, 25 bp, Homo sapien
agtgaagtgtcctgatctctgccat

SEQ ID NO: 1431172 - DNA, 25 bp, Homo sapien
ctgttaagtcgggtagagcagattc

SEQ ID NO: 1431173 - DNA, 25 bp, Homo sapien
gaaggagaactgtcccaaggaccat

SEQ ID NO: 1431174 - DNA, 25 bp, Homo sapien
tctgccataactattaggtggaagg

SEQ ID NO: 1431175 - DNA, 25 bp, Homo sapien
ctctgcccagaagcacaaaagttaa

SEQ ID NO: 1431176 - DNA, 25 bp, Homo sapien
ccagaagcacaaaagttaaactgtt

SEQ ID NO: 1431177 - DNA, 25 bp, Homo sapien
agaagcacaaaagttaaactgttct

SEQ ID NO: 1431178 - DNA, 25 bp, Homo sapien
acctctgcccagaagcacaaaagtt

SEQ ID NO: 1431179 - DNA, 25 bp, Homo sapien
tcaaagtcttctattacagataaag

SEQ ID NO: 1431180 - DNA, 25 bp, Homo sapien
tattacagataaaggaagagcacat

SEQ ID NO: 1431181 - DNA, 25 bp, Homo sapien
tacagataaaggaagagcacatttt

SEQ ID NO: 1431182 - DNA, 25 bp, Homo sapien
tggattcaaagtcttctattacaga

SEQ ID NO: 1431183 - DNA, 25 bp, Homo sapien
tgaccctcgtgctatccctttagag

SEQ ID NO: 1431184 - DNA, 25 bp, Homo sapien
gatgtcacccaaagctcttagatgc

SEQ ID NO: 1431185 - DNA, 25 bp, Homo sapien
gcatgtgcaacagagtagatagcta

SEQ ID NO: 1431186 - DNA, 25 bp, Homo sapien
ggacacagagtagatacatgaccct

SEQ ID NO: 1431187 - DNA, 25 bp, Homo sapien
ctcgggaggctaatactttgaaata

SEQ ID NO: 1431188 - DNA, 25 bp, Homo sapien
tctacaacttttttatactcctcaa

SEQ ID NO: 1431189 - DNA, 25 bp, Homo sapien
aatatactggtaaggctggggcctg

SEQ ID NO: 1431190 - DNA, 25 bp, Homo sapien
agcccaggcgcagtcttaaaacctt

SEQ ID NO: 1431191 - DNA, 25 bp, Homo sapien
cacaaaaccaagctgactggcctca

SEQ ID NO: 1431192 - DNA, 25 bp, Homo sapien
aactcagaacctttagcctcaaatg

SEQ ID NO: 1431193 - DNA, 25 bp, Homo sapien
tactcactttgcagaaccacaagct

SEQ ID NO: 1431194 - DNA, 25 bp, Homo sapien
tctcctactcctaaagtgaaggtgg

SEQ ID NO: 1431195 - DNA, 25 bp, Homo sapien
tccattcctcaaggggtaaaagtca

SEQ ID NO: 1431196 - DNA, 25 bp, Homo sapien
tagactaatttgcaagagtggctca

SEQ ID NO: 1431197 - DNA, 25 bp, Homo sapien
tggcaataaactgggatttccacaa

SEQ ID NO: 1431198 - DNA, 25 bp, Homo sapien
acatgactgtcccagacttcagatg

SEQ ID NO: 1431199 - DNA, 25 bp, Homo sapien
cagatgccatttctgattgattggc

SEQ ID NO: 1431200 - DNA, 25 bp, Homo sapien
ggcacaccaattcacccatttgttg

SEQ ID NO: 1431201 - DNA, 25 bp, Homo sapien
cacagaatcggttgaggtggacagt

SEQ ID NO: 1431202 - DNA, 25 bp, Homo sapien
agacaaaaggactctttgagacatc

SEQ ID NO: 1431203 - DNA, 25 bp, Homo sapien
attatatccacagaatcggttgagg

SEQ ID NO: 1431204 - DNA, 25 bp, Homo sapien
tgaggtggacagtttggccataaag

SEQ ID NO: 1431205 - DNA, 25 bp, Homo sapien
aagggagccaagggatggacatctt

SEQ ID NO: 1431206 - DNA, 25 bp, Homo sapien
agggagccaagggatggacatcttg

SEQ ID NO: 1431207 - DNA, 25 bp, Homo sapien
gggagccaagggatggacatcttgt

SEQ ID NO: 1431208 - DNA, 25 bp, Homo sapien
gaagggagccaagggatggacatct

SEQ ID NO: 1431209 - DNA, 25 bp, Homo sapien
ggcatcttggtaggcaatagcttac

SEQ ID NO: 1431210 - DNA, 25 bp, Homo sapien
catagcctggtggttaaggcagtac

SEQ ID NO: 1431211 - DNA, 25 bp, Homo sapien
tgtaacaagctatgcaaagaagccc

SEQ ID NO: 1431212 - DNA, 25 bp, Homo sapien
catttttataacaggcagcatagcc

SEQ ID NO: 1431213 - DNA, 25 bp, Homo sapien
gattaatagactctgtacatcggtt

SEQ ID NO: 1431214 - DNA, 25 bp, Homo sapien
taagatgattgttttagaccaactg

SEQ ID NO: 1431215 - DNA, 25 bp, Homo sapien
acagttgtctagaccaagagaaacc

SEQ ID NO: 1431216 - DNA, 25 bp, Homo sapien
tacatcggttattctagagtttcag

SEQ ID NO: 1431217 - DNA, 25 bp, Homo sapien
gaaatagaatcaaatgcacacagga

SEQ ID NO: 1431218 - DNA, 25 bp, Homo sapien
caacacatggttattctgaaatccc

SEQ ID NO: 1431219 - DNA, 25 bp, Homo sapien
cacatattagggtttgtactaggac

SEQ ID NO: 1431220 - DNA, 25 bp, Homo sapien
cacacaggatttagcatacaaaaag

SEQ ID NO: 1431221 - DNA, 25 bp, Homo sapien
ggacgtatccaatcagaatgttagc

SEQ ID NO: 1431222 - DNA, 25 bp, Homo sapien
taattaagcctaggcacagaacaag

SEQ ID NO: 1431223 - DNA, 25 bp, Homo sapien
caaagtgtcctttgtgagggaggaa

SEQ ID NO: 1431224 - DNA, 25 bp, Homo sapien
cccaagtgaagtgctggacgtatcc

SEQ ID NO: 1431225 - DNA, 25 bp, Homo sapien
tacattgggatgctataggcaggag

SEQ ID NO: 1431226 - DNA, 25 bp, Homo sapien
ataactaaaagagtccaggcgtggt

SEQ ID NO: 1431227 - DNA, 25 bp, Homo sapien
tctcagttaggacaaaggacatttc

SEQ ID NO: 1431228 - DNA, 25 bp, Homo sapien
taaggcaaccaaacctagactcaag

SEQ ID NO: 1431229 - DNA, 25 bp, Homo sapien
ctttctgaaagtcctctaataagag

SEQ ID NO: 1431230 - DNA, 25 bp, Homo sapien
cgcatagtcccgtcccagagtagag

SEQ ID NO: 1431231 - DNA, 25 bp, Homo sapien
ctgaagctgccattcactttctttc

SEQ ID NO: 1431232 - DNA, 25 bp, Homo sapien
tagaggacagaccatccagggtccc

SEQ ID NO: 1431233 - DNA, 25 bp, Homo sapien
tttctgcagccgcatagtcccgtcc

SEQ ID NO: 1431234 - DNA, 25 bp, Homo sapien
ctgggtgaagatattgaagccggtc

SEQ ID NO: 1431235 - DNA, 25 bp, Homo sapien
catgctgggtgaagatattgaagcc

SEQ ID NO: 1431236 - DNA, 25 bp, Homo sapien
gaagatattgaagccggtctctgtg

SEQ ID NO: 1431237 - DNA, 25 bp, Homo sapien
ttgaagccggtctctgtggtgcgcc

SEQ ID NO: 1431238 - DNA, 25 bp, Homo sapien
ccctgctctcgcgtactcccgcgcc

SEQ ID NO: 1431239 - DNA, 25 bp, Homo sapien
cgccgacccctggtcacattcctcc

SEQ ID NO: 1431240 - DNA, 25 bp, Homo sapien
ctgctctcgcgtactcccgcgcccc

SEQ ID NO: 1431241 - DNA, 25 bp, Homo sapien
cccgccgacccctggtcacattcct

SEQ ID NO: 1431242 - DNA, 25 bp, Homo sapien
ctcgggctcctggcgctgctccggt

SEQ ID NO: 1431243 - DNA, 25 bp, Homo sapien
tcctggcgctgctccggtctctccc

SEQ ID NO: 1431244 - DNA, 25 bp, Homo sapien
gcgctgctccggtctctccctccca

SEQ ID NO: 1431245 - DNA, 25 bp, Homo sapien
gggctcctggcgctgctccggtctc

SEQ ID NO: 1431246 - DNA, 25 bp, Homo sapien
ctgggccaccggcggctccgcaccc

SEQ ID NO: 1431247 - DNA, 25 bp, Homo sapien
tgggccaccggcggctccgcacccg

SEQ ID NO: 1431248 - DNA, 25 bp, Homo sapien
gccatctttaaaccaccgagcgctg

SEQ ID NO: 1431249 - DNA, 25 bp, Homo sapien
ttaaaccaccgagcgctgggaaagc

SEQ ID NO: 1431250 - DNA, 25 bp, Homo sapien
atctttaaaccaccgagcgctggga

SEQ ID NO: 1431251 - DNA, 25 bp, Homo sapien
aaccaccgagcgctgggaaagcgtg

SEQ ID NO: 1431252 - DNA, 25 bp, Homo sapien
gcaccaagcaactcactcaaagaaa

SEQ ID NO: 1431253 - DNA, 25 bp, Homo sapien
aactcactcaaagaaactgcttctc

SEQ ID NO: 1431254 - DNA, 25 bp, Homo sapien
caactcactcaaagaaactgcttct

SEQ ID NO: 1431255 - DNA, 25 bp, Homo sapien
actcactcaaagaaactgcttctct

SEQ ID NO: 1431256 - DNA, 25 bp, Homo sapien
ccttctgccatgagacaaagcagca

SEQ ID NO: 1431257 - DNA, 25 bp, Homo sapien
aaaccaagttcgacaccctgttgct

SEQ ID NO: 1431258 - DNA, 25 bp, Homo sapien
gaatgtgtcccctaaagcttatgtg

SEQ ID NO: 1431259 - DNA, 25 bp, Homo sapien
gagttgatgctggaaaaagttagac

SEQ ID NO: 1431260 - DNA, 25 bp, Homo sapien
tactgatgacaagaaggcggctggg

SEQ ID NO: 1431261 - DNA, 25 bp, Homo sapien
cctgagggcccgcaattccaatgga

SEQ ID NO: 1431262 - DNA, 25 bp, Homo sapien
ggaggtggtgttcttactgatgaca

SEQ ID NO: 1431263 - DNA, 25 bp, Homo sapien
atggagtggccatggtgtactccat

SEQ ID NO: 1431264 - DNA, 25 bp, Homo sapien
ctggacccatacagtataatacccc

SEQ ID NO: 1431265 - DNA, 25 bp, Homo sapien
ccatacagtataatacccccaaagg

SEQ ID NO: 1431266 - DNA, 25 bp, Homo sapien
cttcagtcacagggaaccctaattt

SEQ ID NO: 1431267 - DNA, 25 bp, Homo sapien
gggactggacccatacagtataata

SEQ ID NO: 1431268 - DNA, 25 bp, Homo sapien
gaatagtgggctatatctatgaaga

SEQ ID NO: 1431269 - DNA, 25 bp, Homo sapien
gtgaatagtgggctatatctatgaa

SEQ ID NO: 1431270 - DNA, 25 bp, Homo sapien
tgaatagtgggctatatctatgaag

SEQ ID NO: 1431271 - DNA, 25 bp, Homo sapien
agtgaatagtgggctatatctatga

SEQ ID NO: 1431272 - DNA, 25 bp, Homo sapien
taaactcgactggatgctgagggcc

SEQ ID NO: 1431273 - DNA, 25 bp, Homo sapien
tagaagaggccaaacggagcagatc

SEQ ID NO: 1431274 - DNA, 25 bp, Homo sapien
gcaatcacagttgtagaagaggcca

SEQ ID NO: 1431275 - DNA, 25 bp, Homo sapien
gcagatctgccaatgacagccagta

SEQ ID NO: 1431276 - DNA, 25 bp, Homo sapien
gagttgtcgcagtcccgttttggct

SEQ ID NO: 1431277 - DNA, 25 bp, Homo sapien
caccaataggatgctcagccggagg

SEQ ID NO: 1431278 - DNA, 25 bp, Homo sapien
tgttgtcgccggtatcatgatgtcc

SEQ ID NO: 1431279 - DNA, 25 bp, Homo sapien
catgatgtccgggtgagaagcttcc

SEQ ID NO: 1431280 - DNA, 25 bp, Homo sapien
caagtttgttagcatttctgaatct

SEQ ID NO: 1431281 - DNA, 25 bp, Homo sapien
gttagcatttctgaatctcctgcat

SEQ ID NO: 1431282 - DNA, 25 bp, Homo sapien
tgaacaagtttgttagcatttctga

SEQ ID NO: 1431283 - DNA, 25 bp, Homo sapien
ctcctgcatctttaaaaatggacat

SEQ ID NO: 1431284 - DNA, 25 bp, Homo sapien
ggtggtcatctattggtatctgctg

SEQ ID NO: 1431285 - DNA, 25 bp, Homo sapien
agtgttatagaataagtattgccat

SEQ ID NO: 1431286 - DNA, 25 bp, Homo sapien
cattcattcagtcacgtaacctacc

SEQ ID NO: 1431287 - DNA, 25 bp, Homo sapien
aacaaagcaattagacaataagtcc

SEQ ID NO: 1431288 - DNA, 25 bp, Homo sapien
tctcaactgtggaatctgttcaggg

SEQ ID NO: 1431289 - DNA, 25 bp, Homo sapien
taatttcccatgctgtcagaatcag

SEQ ID NO: 1431290 - DNA, 25 bp, Homo sapien
ctctgaatttgtactagcttggcaa

SEQ ID NO: 1431291 - DNA, 25 bp, Homo sapien
ttttacccagcatcttagtggtctc

SEQ ID NO: 1431292 - DNA, 25 bp, Homo sapien
gcgtccacagagcagagttctttct

SEQ ID NO: 1431293 - DNA, 25 bp, Homo sapien
tctgtgaaaggaggagattcaggaa

SEQ ID NO: 1431294 - DNA, 25 bp, Homo sapien
tcatcactgctaggatctgtgaaag

SEQ ID NO: 1431295 - DNA, 25 bp, Homo sapien
ttcaggaaatgtaagcgtccacaga

SEQ ID NO: 1431296 - DNA, 25 bp, Homo sapien
tatcttggtatgctgtgagtactgg

SEQ ID NO: 1431297 - DNA, 25 bp, Homo sapien
acaaatacaataggtgcctttggca

SEQ ID NO: 1431298 - DNA, 25 bp, Homo sapien
gagattcaaatctgctgccatgtta

SEQ ID NO: 1431299 - DNA, 25 bp, Homo sapien
tctgctgtagtacacgaatatgcct

SEQ ID NO: 1431300 - DNA, 25 bp, Homo sapien
gccaccatgcccgctaaatttttgt

SEQ ID NO: 1431301 - DNA, 25 bp, Homo sapien
ggcctcccagagtgctggagccacc

SEQ ID NO: 1431302 - DNA, 25 bp, Homo sapien
tcggcctcccagagtgctggagcca

SEQ ID NO: 1431303 - DNA, 25 bp, Homo sapien
caccatgcccgctaaatttttgtat

SEQ ID NO: 1431304 - DNA, 25 bp, Homo sapien
ttttttaatggaagatagctcatac

SEQ ID NO: 1431305 - DNA, 25 bp, Homo sapien
aatagtgctctggagtacctagaac

SEQ ID NO: 1431306 - DNA, 25 bp, Homo sapien
cttgctccagaatcagttttttaat

SEQ ID NO: 1431307 - DNA, 25 bp, Homo sapien
tacctagaactacaagtgcctacca

SEQ ID NO: 1431308 - DNA, 25 bp, Homo sapien
tttatttgattagatcgccctctgc

SEQ ID NO: 1431309 - DNA, 25 bp, Homo sapien
ttatttgattagatcgccctctgct

SEQ ID NO: 1431310 - DNA, 25 bp, Homo sapien
gatcgccctctgctggatattcatg

SEQ ID NO: 1431311 - DNA, 25 bp, Homo sapien
ttttatttgattagatcgccctctg

SEQ ID NO: 1431312 - DNA, 25 bp, Homo sapien
aggtggcaaaccaggtgcaatgtta

SEQ ID NO: 1431313 - DNA, 25 bp, Homo sapien
ccaggtgcaatgttatgattctgca

SEQ ID NO: 1431314 - DNA, 25 bp, Homo sapien
gagagcgtgtttaaatctgttaacg

SEQ ID NO: 1431315 - DNA, 25 bp, Homo sapien
tgaggtggagagagcgtgtttaaat

SEQ ID NO: 1431316 - DNA, 25 bp, Homo sapien
tttcttctgtatatggagttagcac

SEQ ID NO: 1431317 - DNA, 25 bp, Homo sapien
tcttctgtatatggagttagcacac

SEQ ID NO: 1431318 - DNA, 25 bp, Homo sapien
ttctgtatatggagttagcacacat

SEQ ID NO: 1431319 - DNA, 25 bp, Homo sapien
ttttcttctgtatatggagttagca

SEQ ID NO: 1431320 - DNA, 25 bp, Homo sapien
gcctccacctccgttgttatagcta

SEQ ID NO: 1431321 - DNA, 25 bp, Homo sapien
gttgttatagctattatagctgcca

SEQ ID NO: 1431322 - DNA, 25 bp, Homo sapien
aaaatctgccactgtcatagctact

SEQ ID NO: 1431323 - DNA, 25 bp, Homo sapien
cctccgttgttatagctattatagc

SEQ ID NO: 1431324 - DNA, 25 bp, Homo sapien
tggcttccataaccctgtccaacac

SEQ ID NO: 1431325 - DNA, 25 bp, Homo sapien
gcttccataaccctgtccaacactt

SEQ ID NO: 1431326 - DNA, 25 bp, Homo sapien
ctggcttccataaccctgtccaaca

SEQ ID NO: 1431327 - DNA, 25 bp, Homo sapien
ccctggcttccataaccctgtccaa

SEQ ID NO: 1431328 - DNA, 25 bp, Homo sapien
ctgcttcctccggagtaaccagggc

SEQ ID NO: 1431329 - DNA, 25 bp, Homo sapien
gcttcctccggagtaaccagggcca

SEQ ID NO: 1431330 - DNA, 25 bp, Homo sapien
ccaccatcattaccaaacccattat

SEQ ID NO: 1431331 - DNA, 25 bp, Homo sapien
tccataaccaccatcattaccaaac

SEQ ID NO: 1431332 - DNA, 25 bp, Homo sapien
atcacttcattttttccatactgtt

SEQ ID NO: 1431333 - DNA, 25 bp, Homo sapien
ctgcctcagtcatgatttcaatcac

SEQ ID NO: 1431334 - DNA, 25 bp, Homo sapien
caatcacttcattttttccatactg

SEQ ID NO: 1431335 - DNA, 25 bp, Homo sapien
ttgccactgcctcagtcatgatttc

SEQ ID NO: 1431336 - DNA, 25 bp, Homo sapien
ctctgagctgtgactgaaaaaggaa

SEQ ID NO: 1431337 - DNA, 25 bp, Homo sapien
aaaggaatcaagagggaagtttgca

SEQ ID NO: 1431338 - DNA, 25 bp, Homo sapien
gagctgtgactgaaaaaggaatcaa

SEQ ID NO: 1431339 - DNA, 25 bp, Homo sapien
gtgctctgagctgtgactgaaaaag

SEQ ID NO: 1431340 - DNA, 25 bp, Homo sapien
gcagcagccagtctgaaggattcaa

SEQ ID NO: 1431341 - DNA, 25 bp, Homo sapien
tcaaattgggaagcagcgtcacggg

SEQ ID NO: 1431342 - DNA, 25 bp, Homo sapien
caccaagcttcggttgtgtacaaga

SEQ ID NO: 1431343 - DNA, 25 bp, Homo sapien
tgtaagatggagatggcagcagcca

SEQ ID NO: 1431344 - DNA, 25 bp, Homo sapien
gcttgagggttacccaggcagaaaa

SEQ ID NO: 1431345 - DNA, 25 bp, Homo sapien
tgaatgccaataaccaatttagagt

SEQ ID NO: 1431346 - DNA, 25 bp, Homo sapien
ggcacatagcttatttgtagcttga

SEQ ID NO: 1431347 - DNA, 25 bp, Homo sapien
gaactcaaacagttaaatgaccaca

SEQ ID NO: 1431348 - DNA, 25 bp, Homo sapien
tgaacacaccccagatatcactgcg

SEQ ID NO: 1431349 - DNA, 25 bp, Homo sapien
catgcaaggacggtgctctcaacat

SEQ ID NO: 1431350 - DNA, 25 bp, Homo sapien
ttgtaacagccactagaaaagccat

SEQ ID NO: 1431351 - DNA, 25 bp, Homo sapien
cactgcgttatagagctgatgtggc

SEQ ID NO: 1431352 - DNA, 25 bp, Homo sapien
tctctttaagtcacagcgatggctg

SEQ ID NO: 1431353 - DNA, 25 bp, Homo sapien
tgaggcccagtgattataagacacg

SEQ ID NO: 1431354 - DNA, 25 bp, Homo sapien
tttgaactctgcagacaagactggc

SEQ ID NO: 1431355 - DNA, 25 bp, Homo sapien
tagggagtcaggtgcattagctcac

SEQ ID NO: 1431356 - DNA, 25 bp, Homo sapien
tagcctcagaaatcccaactctaga

SEQ ID NO: 1431357 - DNA, 25 bp, Homo sapien
ctagcctcagaaatcccaactctag

SEQ ID NO: 1431358 - DNA, 25 bp, Homo sapien
gcctcagaaatcccaactctagagt

SEQ ID NO: 1431359 - DNA, 25 bp, Homo sapien
agcctcagaaatcccaactctagag

SEQ ID NO: 1431360 - DNA, 25 bp, Homo sapien
caaacctccctatggatgaaccagg

SEQ ID NO: 1431361 - DNA, 25 bp, Homo sapien
tgtcagctccattgcgtagaaggct

SEQ ID NO: 1431362 - DNA, 25 bp, Homo sapien
tgagccttgtcccttagaatgtgcc

SEQ ID NO: 1431363 - DNA, 25 bp, Homo sapien
tcatggacccacattagctgaggtg

SEQ ID NO: 1431364 - DNA, 25 bp, Homo sapien
tgcaggcgtattggcagaatgacct

SEQ ID NO: 1431365 - DNA, 25 bp, Homo sapien
taggagagtccaaactgcagagcgc

SEQ ID NO: 1431366 - DNA, 25 bp, Homo sapien
gccatggtggcccttgaatttctaa

SEQ ID NO: 1431367 - DNA, 25 bp, Homo sapien
ttttgagcccaacaatctgcagtat

SEQ ID NO: 1431368 - DNA, 25 bp, Homo sapien
gatatgagagccatttggattccac

SEQ ID NO: 1431369 - DNA, 25 bp, Homo sapien
ctgcctttgacttatttggatatga

SEQ ID NO: 1431370 - DNA, 25 bp, Homo sapien
cctgcatagtttagagatttgcctg

SEQ ID NO: 1431371 - DNA, 25 bp, Homo sapien
ggatttccatatttcggcacccctg

SEQ ID NO: 1431372 - DNA, 25 bp, Homo sapien
gaaagggacatctgaaccaagttcc

SEQ ID NO: 1431373 - DNA, 25 bp, Homo sapien
ccatatggcaaccaaaggaagggca

SEQ ID NO: 1431374 - DNA, 25 bp, Homo sapien
tgtgacaagcccaatgataggtgct

SEQ ID NO: 1431375 - DNA, 25 bp, Homo sapien
atgtgacttttctatggcaggcccc

SEQ ID NO: 1431376 - DNA, 25 bp, Homo sapien
gaggtatcgaagctgaacggcagca

SEQ ID NO: 1431377 - DNA, 25 bp, Homo sapien
gtgcctgacagaatctcagctgcca

SEQ ID NO: 1431378 - DNA, 25 bp, Homo sapien
tttaggatttagtggctcaacaggt

SEQ ID NO: 1431379 - DNA, 25 bp, Homo sapien
caggcaattcagtaggtcaaatggc

SEQ ID NO: 1431380 - DNA, 25 bp, Homo sapien
cccagctggcaacctcacatcttta

SEQ ID NO: 1431381 - DNA, 25 bp, Homo sapien
ctgaagcccagctggcaacctcaca

SEQ ID NO: 1431382 - DNA, 25 bp, Homo sapien
tttggcttgtctttgcgcttcagcc

SEQ ID NO: 1431383 - DNA, 25 bp, Homo sapien
ctttggcttgtctttgcgcttcagc

SEQ ID NO: 1431384 - DNA, 25 bp, Homo sapien
cccaaatacaggtcactgaatccaa

SEQ ID NO: 1431385 - DNA, 25 bp, Homo sapien
tacaggtcactgaatccaaggcaac

SEQ ID NO: 1431386 - DNA, 25 bp, Homo sapien
tctccactttgattccccaaataca

SEQ ID NO: 1431387 - DNA, 25 bp, Homo sapien
aaatacaggtcactgaatccaaggc

SEQ ID NO: 1431388 - DNA, 25 bp, Homo sapien
tgctgtctgtggactagagggagct

SEQ ID NO: 1431389 - DNA, 25 bp, Homo sapien
gaccctggccgtgaatgagcttgct

SEQ ID NO: 1431390 - DNA, 25 bp, Homo sapien
gagctgcttgtgaagcagttcttgc

SEQ ID NO: 1431391 - DNA, 25 bp, Homo sapien
gccttggtaagaatcaaagccaccg

SEQ ID NO: 1431392 - DNA, 25 bp, Homo sapien
gaatttcagtgagggatcgatgtgc

SEQ ID NO: 1431393 - DNA, 25 bp, Homo sapien
caaggaattgcacagctttagatac

SEQ ID NO: 1431394 - DNA, 25 bp, Homo sapien
tgcatcttgggcgatgctcttcctc

SEQ ID NO: 1431395 - DNA, 25 bp, Homo sapien
ggagacgcttcatagtggtttgcac

SEQ ID NO: 1431396 - DNA, 25 bp, Homo sapien
tgaaaaggtatctccagagtttgga

SEQ ID NO: 1431397 - DNA, 25 bp, Homo sapien
tggagacgaaggtcaaccttgtggt

SEQ ID NO: 1431398 - DNA, 25 bp, Homo sapien
caaccttgtggtaggtatccaggca

SEQ ID NO: 1431399 - DNA, 25 bp, Homo sapien
tctccagagtttggagacgaaggtc

SEQ ID NO: 1431400 - DNA, 25 bp, Homo sapien
taattactctttcatactcttgtac

SEQ ID NO: 1431401 - DNA, 25 bp, Homo sapien
ttactctttcatactcttgtacaac

SEQ ID NO: 1431402 - DNA, 25 bp, Homo sapien
tgtcccagtcggaatataattactc

SEQ ID NO: 1431403 - DNA, 25 bp, Homo sapien
aagcagatgtcccagtcggaatata

SEQ ID NO: 1431404 - DNA, 25 bp, Homo sapien
tatcttgtggcagtcatgcaggtgc

SEQ ID NO: 1431405 - DNA, 25 bp, Homo sapien
gaccttgctcaaatataactgcctg

SEQ ID NO: 1431406 - DNA, 25 bp, Homo sapien
tgtttcctctccctaattggcttct

SEQ ID NO: 1431407 - DNA, 25 bp, Homo sapien
catcttaagtgaccagatctgagag

SEQ ID NO: 1431408 - DNA, 25 bp, Homo sapien
tcaggcctgcataactgtctgaagg

SEQ ID NO: 1431409 - DNA, 25 bp, Homo sapien
gaagctgcctgagaagtttcgtgga

SEQ ID NO: 1431410 - DNA, 25 bp, Homo sapien
caggcatctgtaaccacctgtgggc

SEQ ID NO: 1431411 - DNA, 25 bp, Homo sapien
gaaagcagagtgacatgggagcacc

SEQ ID NO: 1431412 - DNA, 25 bp, Homo sapien
agaagccactcacaggcccctaagc

SEQ ID NO: 1431413 - DNA, 25 bp, Homo sapien
ctttacgcagaaccagatggaaaaa

SEQ ID NO: 1431414 - DNA, 25 bp, Homo sapien
acaggcccctaagccggaggatttg

SEQ ID NO: 1431415 - DNA, 25 bp, Homo sapien
gcagaaccagatggaaaaagggaag

SEQ ID NO: 1431416 - DNA, 25 bp, Homo sapien
gttctccttgtgcggagtcctgccg

SEQ ID NO: 1431417 - DNA, 25 bp, Homo sapien
tcgccggagcctcggacctcatcca

SEQ ID NO: 1431418 - DNA, 25 bp, Homo sapien
tccggagcccgacggctcgggccca

SEQ ID NO: 1431419 - DNA, 25 bp, Homo sapien
tcatccacgtccaccaccgtggcgg

SEQ ID NO: 1431420 - DNA, 25 bp, Homo sapien
gagtcgctgcgggtccgcgtggcgt

SEQ ID NO: 1431421 - DNA, 25 bp, Homo sapien
agcgcagtccctgtggagtcgctgc

SEQ ID NO: 1431422 - DNA, 25 bp, Homo sapien
tccctgtggagtcgctgcgggtccg

SEQ ID NO: 1431423 - DNA, 25 bp, Homo sapien
ctgcgggtccgcgtggcgtgcccgg

SEQ ID NO: 1431424 - DNA, 25 bp, Homo sapien
tagctaatctgtccagggagaatac

SEQ ID NO: 1431425 - DNA, 25 bp, Homo sapien
tcagttgtagctaatctgtccaggg

SEQ ID NO: 1431426 - DNA, 25 bp, Homo sapien
ggagaatactggcttcattacactt

SEQ ID NO: 1431427 - DNA, 25 bp, Homo sapien
gaatactggcttcattacacttgta

SEQ ID NO: 1431428 - DNA, 25 bp, Homo sapien
tgttccccattgctggtcagcattt

SEQ ID NO: 1431429 - DNA, 25 bp, Homo sapien
tataggaaactgctaaactgccttc

SEQ ID NO: 1431430 - DNA, 25 bp, Homo sapien
ccacttgtactgaaggacgtcttgc

SEQ ID NO: 1431431 - DNA, 25 bp, Homo sapien
ggagtacagttgctaaattgtcaga

SEQ ID NO: 1431432 - DNA, 25 bp, Homo sapien
tagaacttgttggagcccactgcag

SEQ ID NO: 1431433 - DNA, 25 bp, Homo sapien
gccaggggcttatagagaaaacgcc

SEQ ID NO: 1431434 - DNA, 25 bp, Homo sapien
gaaaacgcccatctccctgggagag

SEQ ID NO: 1431435 - DNA, 25 bp, Homo sapien
actgccgcctcaggtgggtccctaa

SEQ ID NO: 1431436 - DNA, 25 bp, Homo sapien
gatcagtccataagaaaggtgcttg

SEQ ID NO: 1431437 - DNA, 25 bp, Homo sapien
atgatttgatgccagaagacacagc

SEQ ID NO: 1431438 - DNA, 25 bp, Homo sapien
gaaatattgcagctccatcttgtgt

SEQ ID NO: 1431439 - DNA, 25 bp, Homo sapien
taaatagtgggccagttctacagct

SEQ ID NO: 1431440 - DNA, 25 bp, Homo sapien
ccaatcaaggagcatagctgtatga

SEQ ID NO: 1431441 - DNA, 25 bp, Homo sapien
tagctgtatgaactaaatctatgta

SEQ ID NO: 1431442 - DNA, 25 bp, Homo sapien
ttttccaagattccaatcaaggagc

SEQ ID NO: 1431443 - DNA, 25 bp, Homo sapien
tctatgtactttgaatttagcccca

SEQ ID NO: 1431444 - DNA, 25 bp, Homo sapien
gccgagggttagttggtaatactgc

SEQ ID NO: 1431445 - DNA, 25 bp, Homo sapien
tcataagggcattggccgagggtta

SEQ ID NO: 1431446 - DNA, 25 bp, Homo sapien
tttggtgtcataagggcattggccg

SEQ ID NO: 1431447 - DNA, 25 bp, Homo sapien
gttggtaatactgcccggatagctg

SEQ ID NO: 1431448 - DNA, 25 bp, Homo sapien
ctccattgacgccaacaggaaggtg

SEQ ID NO: 1431449 - DNA, 25 bp, Homo sapien
agtctccattgacgccaacaggaag

SEQ ID NO: 1431450 - DNA, 25 bp, Homo sapien
tctccattgacgccaacaggaaggt

SEQ ID NO: 1431451 - DNA, 25 bp, Homo sapien
tcagtctccattgacgccaacagga

SEQ ID NO: 1431452 - DNA, 25 bp, Homo sapien
gctcctgttgcagcttcattttgat

SEQ ID NO: 1431453 - DNA, 25 bp, Homo sapien
tagcacagatgtaagagcacccagt

SEQ ID NO: 1431454 - DNA, 25 bp, Homo sapien
gcagcttcattttgattatagcaca

SEQ ID NO: 1431455 - DNA, 25 bp, Homo sapien
cagtgaattcgtggtctccagatgg

SEQ ID NO: 1431456 - DNA, 25 bp, Homo sapien
gaaagatgatcagaccggaacaggt

SEQ ID NO: 1431457 - DNA, 25 bp, Homo sapien
tcctcgagcattaaccgggttgacc

SEQ ID NO: 1431458 - DNA, 25 bp, Homo sapien
aagtgacagcttatcccctctcagg

SEQ ID NO: 1431459 - DNA, 25 bp, Homo sapien
catatagagatgcttcggaagtgcg

SEQ ID NO: 1431460 - DNA, 25 bp, Homo sapien
atttcagacaagaaatctagcgcac

SEQ ID NO: 1431461 - DNA, 25 bp, Homo sapien
gaaggtgatttcagacaagaaatct

SEQ ID NO: 1431462 - DNA, 25 bp, Homo sapien
aaagaaggtgatttcagacaagaaa

SEQ ID NO: 1431463 - DNA, 25 bp, Homo sapien
ggtgatttcagacaagaaatctagc

SEQ ID NO: 1431464 - DNA, 25 bp, Homo sapien
cagtgcgggccggaaataggaacac

SEQ ID NO: 1431465 - DNA, 25 bp, Homo sapien
tctttccagtggatagcgacacacc

SEQ ID NO: 1431466 - DNA, 25 bp, Homo sapien
ttcaggtttctcctcgtgtcgaggc

SEQ ID NO: 1431467 - DNA, 25 bp, Homo sapien
gcgacacaccctggtccctaagatt

SEQ ID NO: 1431468 - DNA, 25 bp, Homo sapien
gcgccaatcaggtcgcgcggtacct

SEQ ID NO: 1431469 - DNA, 25 bp, Homo sapien
ctgtagggcgcaaagtcccctgtac

SEQ ID NO: 1431470 - DNA, 25 bp, Homo sapien
gtggcttcacttggcccgcgtgcat

SEQ ID NO: 1431471 - DNA, 25 bp, Homo sapien
gcgctgtttgactgcgtggcttcac

SEQ ID NO: 1431472 - DNA, 25 bp, Homo sapien
gcgccgccttcagcgtagcagttcc

SEQ ID NO: 1431473 - DNA, 25 bp, Homo sapien
ttctctgcgctttcagccgggccgg

SEQ ID NO: 1431474 - DNA, 25 bp, Homo sapien
gtgtctgcagcgacccgcttctctg

SEQ ID NO: 1431475 - DNA, 25 bp, Homo sapien
cgggccgtgccgaaggcgctctact

SEQ ID NO: 1431476 - DNA, 25 bp, Homo sapien
aatgcgccgccgtcggtcagtgagt

SEQ ID NO: 1431477 - DNA, 25 bp, Homo sapien
tgccggcaactgtgggcagccttga

SEQ ID NO: 1431478 - DNA, 25 bp, Homo sapien
cgccgtcggtcagtgagtccggatt

SEQ ID NO: 1431479 - DNA, 25 bp, Homo sapien
cagtgagtccggattcgtgccggca

SEQ ID NO: 1431480 - DNA, 25 bp, Homo sapien
gtgacggggacgcagtcatccaacc

SEQ ID NO: 1431481 - DNA, 25 bp, Homo sapien
cggggacgcagtcatccaacctgca

SEQ ID NO: 1431482 - DNA, 25 bp, Homo sapien
gggacgcagtcatccaacctgcagg

SEQ ID NO: 1431483 - DNA, 25 bp, Homo sapien
gacggggacgcagtcatccaacctg

SEQ ID NO: 1431484 - DNA, 25 bp, Homo sapien
aggaccgacgtctgcgcagttgcgt

SEQ ID NO: 1431485 - DNA, 25 bp, Homo sapien
gcttcaatcccgcatgttcgctttg

SEQ ID NO: 1431486 - DNA, 25 bp, Homo sapien
caaacaataactgcgggcttcaatc

SEQ ID NO: 1431487 - DNA, 25 bp, Homo sapien
acatgttttatgtcgtgtgggagac

SEQ ID NO: 1431488 - DNA, 25 bp, Homo sapien
acagggtcatgctggcgtccagagg

SEQ ID NO: 1431489 - DNA, 25 bp, Homo sapien
gatctgcattcagtgacctcatcag

SEQ ID NO: 1431490 - DNA, 25 bp, Homo sapien
agagatctgcattcagtgacctcat

SEQ ID NO: 1431491 - DNA, 25 bp, Homo sapien
catcaggcagatcggcagcggccct

SEQ ID NO: 1431492 - DNA, 25 bp, Homo sapien
ctgactccgtttccacttcaaaagg

SEQ ID NO: 1431493 - DNA, 25 bp, Homo sapien
tctgactccgtttccacttcaaaag

SEQ ID NO: 1431494 - DNA, 25 bp, Homo sapien
tgactccgtttccacttcaaaagga

SEQ ID NO: 1431495 - DNA, 25 bp, Homo sapien
cacagtggtgggagcaagaagctgg

SEQ ID NO: 1431496 - DNA, 25 bp, Homo sapien
gcccacagtggtgggagcaagaagc

SEQ ID NO: 1431497 - DNA, 25 bp, Homo sapien
agctgggttgggctctcaggtaggg

SEQ ID NO: 1431498 - DNA, 25 bp, Homo sapien
aagctgggttgggctctcaggtagg

SEQ ID NO: 1431499 - DNA, 25 bp, Homo sapien
tagcaaagccgtgctcagagaacat

SEQ ID NO: 1431500 - DNA, 25 bp, Homo sapien
tttctgtctctattagcaaagccgt

SEQ ID NO: 1431501 - DNA, 25 bp, Homo sapien
gtctctattagcaaagccgtgctca

SEQ ID NO: 1431502 - DNA, 25 bp, Homo sapien
tctattagcaaagccgtgctcagag

SEQ ID NO: 1431503 - DNA, 25 bp, Homo sapien
ttggcaaatttgtgtagaggtgaag

SEQ ID NO: 1431504 - DNA, 25 bp, Homo sapien
tctgttcctccgtccaggactgact

SEQ ID NO: 1431505 - DNA, 25 bp, Homo sapien
gcagctcctttctagaccatttcct

SEQ ID NO: 1431506 - DNA, 25 bp, Homo sapien
aggactgacttttagcaggtatgca

SEQ ID NO: 1431507 - DNA, 25 bp, Homo sapien
aatgccctcccaacacaggtcaatg

SEQ ID NO: 1431508 - DNA, 25 bp, Homo sapien
ccagaattttacgatggccctctaa

SEQ ID NO: 1431509 - DNA, 25 bp, Homo sapien
caggtcaatgtaacagcatcccaga

SEQ ID NO: 1431510 - DNA, 25 bp, Homo sapien
taacagcatcccagaattttacgat

SEQ ID NO: 1431511 - DNA, 25 bp, Homo sapien
cctcactgaggcgccctgtgagagc

SEQ ID NO: 1431512 - DNA, 25 bp, Homo sapien
gcctcactgaggcgccctgtgagag

SEQ ID NO: 1431513 - DNA, 25 bp, Homo sapien
tctgagaaagcaccggtattcgcag

SEQ ID NO: 1431514 - DNA, 25 bp, Homo sapien
gagaaagcaccggtattcgcaggca

SEQ ID NO: 1431515 - DNA, 25 bp, Homo sapien
tgagaaagcaccggtattcgcaggc

SEQ ID NO: 1431516 - DNA, 25 bp, Homo sapien
agaaagcaccggtattcgcaggcat

SEQ ID NO: 1431517 - DNA, 25 bp, Homo sapien
caagctccagatcaaggtcacctgc

SEQ ID NO: 1431518 - DNA, 25 bp, Homo sapien
tcctggtacactcctttcaaagagc

SEQ ID NO: 1431519 - DNA, 25 bp, Homo sapien
ctcctggactctgggcagcggttct

SEQ ID NO: 1431520 - DNA, 25 bp, Homo sapien
ttcaaagagccgtacctgggtgtta

SEQ ID NO: 1431521 - DNA, 25 bp, Homo sapien
ggatggcagtcagcactcactgaga

SEQ ID NO: 1431522 - DNA, 25 bp, Homo sapien
tacaggctggataaacgacgagttg

SEQ ID NO: 1431523 - DNA, 25 bp, Homo sapien
cccaaagtgatgaggtgatttgccc

SEQ ID NO: 1431524 - DNA, 25 bp, Homo sapien
ttggttcggcaagtgaggcagacct

SEQ ID NO: 1431525 - DNA, 25 bp, Homo sapien
taagcttttgagtgcattgagaacc

SEQ ID NO: 1431526 - DNA, 25 bp, Homo sapien
tcgagtctgcagcttcgccagtttc

SEQ ID NO: 1431527 - DNA, 25 bp, Homo sapien
tcgctggactgcaaaaaggagcacc

SEQ ID NO: 1431528 - DNA, 25 bp, Homo sapien
ttggttgggacactcctctggcagc

SEQ ID NO: 1431529 - DNA, 25 bp, Homo sapien
gccagccctaactgggccaagtgca

SEQ ID NO: 1431530 - DNA, 25 bp, Homo sapien
gcaaacatgtttgtcagactctcct

SEQ ID NO: 1431531 - DNA, 25 bp, Homo sapien
gaaataacatcattcgtacgtcctg

SEQ ID NO: 1431532 - DNA, 25 bp, Homo sapien
tatggcggcagcagcttcaacaagc

SEQ ID NO: 1431533 - DNA, 25 bp, Homo sapien
ggctggtggtcttcctgcctgtgta

SEQ ID NO: 1431534 - DNA, 25 bp, Homo sapien
ccaggctggtggtcttcctgcctgt

SEQ ID NO: 1431535 - DNA, 25 bp, Homo sapien
tggtggtcttcctgcctgtgtagct

SEQ ID NO: 1431536 - DNA, 25 bp, Homo sapien
ctggtggtcttcctgcctgtgtagc

SEQ ID NO: 1431537 - DNA, 25 bp, Homo sapien
catgcttgctggcaagtcacggccc

SEQ ID NO: 1431538 - DNA, 25 bp, Homo sapien
gaatgcaagagaggtgctggccgtc

SEQ ID NO: 1431539 - DNA, 25 bp, Homo sapien
gcctcatgcttgctggcaagtcacg

SEQ ID NO: 1431540 - DNA, 25 bp, Homo sapien
ttgctggcaagtcacggccctgacc

SEQ ID NO: 1431541 - DNA, 25 bp, Homo sapien
caggagtctccgtgttgcatgaagt

SEQ ID NO: 1431542 - DNA, 25 bp, Homo sapien
agtgtgcagtaagcccaatccgtgc

SEQ ID NO: 1431543 - DNA, 25 bp, Homo sapien
gacgtgctcctacgctgaagtgtgc

SEQ ID NO: 1431544 - DNA, 25 bp, Homo sapien
tactctaatggtgaaccgacgtgct

SEQ ID NO: 1431545 - DNA, 25 bp, Homo sapien
caggcactgtttatctccgcgaggg

SEQ ID NO: 1431546 - DNA, 25 bp, Homo sapien
tccgcgagggtcctcagtgaattga

SEQ ID NO: 1431547 - DNA, 25 bp, Homo sapien
aaaaccatggcagttaggaagcaac

SEQ ID NO: 1431548 - DNA, 25 bp, Homo sapien
tgaattgagtcgttccaaagatgaa

SEQ ID NO: 1431549 - DNA, 25 bp, Homo sapien
gctacccagaacagagtttgcttgc

SEQ ID NO: 1431550 - DNA, 25 bp, Homo sapien
tgagaatccagtatgtgacaaagtg

SEQ ID NO: 1431551 - DNA, 25 bp, Homo sapien
acttagaacttcaccagatgtgggt

SEQ ID NO: 1431552 - DNA, 25 bp, Homo sapien
tgagccaccaccagatattaaagcc

SEQ ID NO: 1431553 - DNA, 25 bp, Homo sapien
gcagggtccagtaggcctgcgactt

SEQ ID NO: 1431554 - DNA, 25 bp, Homo sapien
ggtccagtaggcctgcgacttcagc

SEQ ID NO: 1431555 - DNA, 25 bp, Homo sapien
gtaggcctgcgacttcagccctgct

SEQ ID NO: 1431556 - DNA, 25 bp, Homo sapien
cagtaggcctgcgacttcagccctg

SEQ ID NO: 1431557 - DNA, 25 bp, Homo sapien
gaaagcttcaaacggcatctcatgt

SEQ ID NO: 1431558 - DNA, 25 bp, Homo sapien
catctcatgtaatattgtgtctgca

SEQ ID NO: 1431559 - DNA, 25 bp, Homo sapien
tgcaattggagggttctcggtctca

SEQ ID NO: 1431560 - DNA, 25 bp, Homo sapien
aactccaggtgaaagcttcaaacgg

SEQ ID NO: 1431561 - DNA, 25 bp, Homo sapien
tgggacgttagtattggcaaagcac

SEQ ID NO: 1431562 - DNA, 25 bp, Homo sapien
tattctggtaatggccaactaatct

SEQ ID NO: 1431563 - DNA, 25 bp, Homo sapien
ggcacatcatcagcatctataagaa

SEQ ID NO: 1431564 - DNA, 25 bp, Homo sapien
aagcaatccctgttatacagaaagg

SEQ ID NO: 1431565 - DNA, 25 bp, Homo sapien
agcaaaatgcaattgagtttgaaag

SEQ ID NO: 1431566 - DNA, 25 bp, Homo sapien
gctttgtgttgatgcgtcctcaggc

SEQ ID NO: 1431567 - DNA, 25 bp, Homo sapien
ggagcaactgcctggagctttgtgt

SEQ ID NO: 1431568 - DNA, 25 bp, Homo sapien
cctgtgctctctgatgaaccaggag

SEQ ID NO: 1431569 - DNA, 25 bp, Homo sapien
tctttttggttcatgtaactgcgct

SEQ ID NO: 1431570 - DNA, 25 bp, Homo sapien
gcgcttagccaaaggcaaatttagt

SEQ ID NO: 1431571 - DNA, 25 bp, Homo sapien
cagcctgttgcttcccaagtctaaa

SEQ ID NO: 1431572 - DNA, 25 bp, Homo sapien
gccccatacaatgtgactcagcctg

SEQ ID NO: 1431573 - DNA, 25 bp, Homo sapien
cattaggtatttcacaacttaacac

SEQ ID NO: 1431574 - DNA, 25 bp, Homo sapien
tagaaatgaattttaacagccctgt

SEQ ID NO: 1431575 - DNA, 25 bp, Homo sapien
caaatttaggcccacatcattaggt

SEQ ID NO: 1431576 - DNA, 25 bp, Homo sapien
ctgaatgaggcaaatttaggcccac

SEQ ID NO: 1431577 - DNA, 25 bp, Homo sapien
tagtgatatgaacttgtccgccaac

SEQ ID NO: 1431578 - DNA, 25 bp, Homo sapien
taaagggtcaaaaccatctcagcgg

SEQ ID NO: 1431579 - DNA, 25 bp, Homo sapien
ttttgaagtgccagagacctgccta

SEQ ID NO: 1431580 - DNA, 25 bp, Homo sapien
gaaagtacttctcaactagccgggc

SEQ ID NO: 1431581 - DNA, 25 bp, Homo sapien
tatgcgacatactggttccttgaca

SEQ ID NO: 1431582 - DNA, 25 bp, Homo sapien
gcacaggtcagcaggccaatataat

SEQ ID NO: 1431583 - DNA, 25 bp, Homo sapien
ccttgacagatctgaggtagcacag

SEQ ID NO: 1431584 - DNA, 25 bp, Homo sapien
gtggatgtaacgctagcatctaaga

SEQ ID NO: 1431585 - DNA, 25 bp, Homo sapien
tatactggattgacagtgatatcac

SEQ ID NO: 1431586 - DNA, 25 bp, Homo sapien
ggtatgcccctacactcaattgagc

SEQ ID NO: 1431587 - DNA, 25 bp, Homo sapien
atcagtaaagatccctgtatcttct

SEQ ID NO: 1431588 - DNA, 25 bp, Homo sapien
gaagcttccttcgaagtcccaaatg

SEQ ID NO: 1431589 - DNA, 25 bp, Homo sapien
tttaagaacatttgagtacagctgc

SEQ ID NO: 1431590 - DNA, 25 bp, Homo sapien
gagtatcttcctgtgcaatgttgct

SEQ ID NO: 1431591 - DNA, 25 bp, Homo sapien
tataccttctgtaaccaactctgtg

SEQ ID NO: 1431592 - DNA, 25 bp, Homo sapien
tatcaacctccttccatataaatgg

SEQ ID NO: 1431593 - DNA, 25 bp, Homo sapien
aaggcacccctgttcttctatgcta

SEQ ID NO: 1431594 - DNA, 25 bp, Homo sapien
aaaaggcacccctgttcttctatgc

SEQ ID NO: 1431595 - DNA, 25 bp, Homo sapien
ggcacccctgttcttctatgctact

SEQ ID NO: 1431596 - DNA, 25 bp, Homo sapien
tagaaaaggcacccctgttcttcta

SEQ ID NO: 1431597 - DNA, 25 bp, Homo sapien
cagtaccaggtgtgaaattcggctc

SEQ ID NO: 1431598 - DNA, 25 bp, Homo sapien
gaaggattcgaagtggtgtaccaca

SEQ ID NO: 1431599 - DNA, 25 bp, Homo sapien
tcccgagctgctgtaaatatgatgg

SEQ ID NO: 1431600 - DNA, 25 bp, Homo sapien
ttgaccgtgtcactgtcctgccagg

SEQ ID NO: 1431601 - DNA, 25 bp, Homo sapien
tttattaatctgtctcatggtgtcc

SEQ ID NO: 1431602 - DNA, 25 bp, Homo sapien
gtgtttgttgtggatgacttccagc

SEQ ID NO: 1431603 - DNA, 25 bp, Homo sapien
ggtgtcctgtgcattctctttaatt

SEQ ID NO: 1431604 - DNA, 25 bp, Homo sapien
ttattaatctgtctcatggtgtcct

SEQ ID NO: 1431605 - DNA, 25 bp, Homo sapien
ggcagtacactaatgacagtatgta

SEQ ID NO: 1431606 - DNA, 25 bp, Homo sapien
ccaaaccaaagaatgatttgactaa

SEQ ID NO: 1431607 - DNA, 25 bp, Homo sapien
tatttttaggcagtacactaatgac

SEQ ID NO: 1431608 - DNA, 25 bp, Homo sapien
cagtatgtatacctttatatctctc

SEQ ID NO: 1431609 - DNA, 25 bp, Homo sapien
tgagatgctccagttccgtcactcg

SEQ ID NO: 1431610 - DNA, 25 bp, Homo sapien
tcactcgcttccttagggagggcca

SEQ ID NO: 1431611 - DNA, 25 bp, Homo sapien
tcacttggagaatggctgggatctg

SEQ ID NO: 1431612 - DNA, 25 bp, Homo sapien
tcctgcgcctgagaatttactgatg

SEQ ID NO: 1431613 - DNA, 25 bp, Homo sapien
gttccctaagtccactgtcggccat

SEQ ID NO: 1431614 - DNA, 25 bp, Homo sapien
ttgaggttccctaagtccactgtcg

SEQ ID NO: 1431615 - DNA, 25 bp, Homo sapien
gaggttccctaagtccactgtcggc

SEQ ID NO: 1431616 - DNA, 25 bp, Homo sapien
cctcttgaggttccctaagtccact

SEQ ID NO: 1431617 - DNA, 25 bp, Homo sapien
cccaagtcccaacagactcatgctt

SEQ ID NO: 1431618 - DNA, 25 bp, Homo sapien
gcttcccatggacccaggaaataag

SEQ ID NO: 1431619 - DNA, 25 bp, Homo sapien
tttgtgttctatctcttcagagttg

SEQ ID NO: 1431620 - DNA, 25 bp, Homo sapien
caagtcccaacagactcatgcttcc

SEQ ID NO: 1431621 - DNA, 25 bp, Homo sapien
atcacttgagcctgggaggcagagg

SEQ ID NO: 1431622 - DNA, 25 bp, Homo sapien
ttcactccagcctgggcgacagagc

SEQ ID NO: 1431623 - DNA, 25 bp, Homo sapien
tagtcccagctgctgaggtgggagg

SEQ ID NO: 1431624 - DNA, 25 bp, Homo sapien
ttgcagtgaggcaagatcacaccac

SEQ ID NO: 1431625 - DNA, 25 bp, Homo sapien
accttcacaacacttcgagaggcca

SEQ ID NO: 1431626 - DNA, 25 bp, Homo sapien
cattcagatcactttatgtattaac

SEQ ID NO: 1431627 - DNA, 25 bp, Homo sapien
attcagatcactttatgtattaact

SEQ ID NO: 1431628 - DNA, 25 bp, Homo sapien
ttaaccttcacaacacttcgagagg

SEQ ID NO: 1431629 - DNA, 25 bp, Homo sapien
ctaaggaggacgatcctttgagccc

SEQ ID NO: 1431630 - DNA, 25 bp, Homo sapien
gaggctaaggaggacgatcctttga

SEQ ID NO: 1431631 - DNA, 25 bp, Homo sapien
gctaaggaggacgatcctttgagcc

SEQ ID NO: 1431632 - DNA, 25 bp, Homo sapien
ggctaaggaggacgatcctttgagc

SEQ ID NO: 1431633 - DNA, 25 bp, Homo sapien
agaaactggtatcttggccctgaaa

SEQ ID NO: 1431634 - DNA, 25 bp, Homo sapien
ggccctgaaacaagtagttacaatc

SEQ ID NO: 1431635 - DNA, 25 bp, Homo sapien
cctgctatgaaaacgagtaacaaat

SEQ ID NO: 1431636 - DNA, 25 bp, Homo sapien
aatgatgccattttaggctctaggg

SEQ ID NO: 1431637 - DNA, 25 bp, Homo sapien
ttttcagggaactaccacttcagga

SEQ ID NO: 1431638 - DNA, 25 bp, Homo sapien
caagaacacgtgactactgagggca

SEQ ID NO: 1431639 - DNA, 25 bp, Homo sapien
gctgtgggacctaaccatgacactt

SEQ ID NO: 1431640 - DNA, 25 bp, Homo sapien
tattaagcataccacaagcaccctg

SEQ ID NO: 1431641 - DNA, 25 bp, Homo sapien
taaaatgggcctaaacattgtgaca

SEQ ID NO: 1431642 - DNA, 25 bp, Homo sapien
attgtgacaaaaatctgccttcggt

SEQ ID NO: 1431643 - DNA, 25 bp, Homo sapien
tgtccttcatcaggagagatttaag

SEQ ID NO: 1431644 - DNA, 25 bp, Homo sapien
gacttatactacaggctcaacctca

SEQ ID NO: 1431645 - DNA, 25 bp, Homo sapien
aattccatggagactcagggttgcc

SEQ ID NO: 1431646 - DNA, 25 bp, Homo sapien
tggatgccatggactcatttctgcc

SEQ ID NO: 1431647 - DNA, 25 bp, Homo sapien
gcaattttcaagctgtgtccccaaa

SEQ ID NO: 1431648 - DNA, 25 bp, Homo sapien
tgtggactgccacatattctttgga

SEQ ID NO: 1431649 - DNA, 25 bp, Homo sapien
cagtactatgagtattctgctccca

SEQ ID NO: 1431650 - DNA, 25 bp, Homo sapien
catggcacccggcatgaggtgttat

SEQ ID NO: 1431651 - DNA, 25 bp, Homo sapien
tctaaagcagaccaagaaatctcca

SEQ ID NO: 1431652 - DNA, 25 bp, Homo sapien
aaagtatggtctagagagcacctgc

SEQ ID NO: 1431653 - DNA, 25 bp, Homo sapien
gataaactaactagtcttcagtcaa

SEQ ID NO: 1431654 - DNA, 25 bp, Homo sapien
gagttgtaggatagtgaaattcttc

SEQ ID NO: 1431655 - DNA, 25 bp, Homo sapien
tcgaaagcactctctcaaagtaaat

SEQ ID NO: 1431656 - DNA, 25 bp, Homo sapien
tcttcattaaagagttagtgataaa

SEQ ID NO: 1431657 - DNA, 25 bp, Homo sapien
ttcaggtttcacaacatgtagcaag

SEQ ID NO: 1431658 - DNA, 25 bp, Homo sapien
tatgatttgttgcacaccaacagcc

SEQ ID NO: 1431659 - DNA, 25 bp, Homo sapien
gagagaacctccattgtaagagaca

SEQ ID NO: 1431660 - DNA, 25 bp, Homo sapien
tccttgctaaaagagccctggtcag

SEQ ID NO: 1431661 - DNA, 25 bp, Homo sapien
gcaaacatggatcctaggccgggta

SEQ ID NO: 1431662 - DNA, 25 bp, Homo sapien
taaagccacgtaagtatggacaggt

SEQ ID NO: 1431663 - DNA, 25 bp, Homo sapien
taggatccagctataacgaggctgc

SEQ ID NO: 1431664 - DNA, 25 bp, Homo sapien
tcaatggaggcaatgtggcctaccc

SEQ ID NO: 1431665 - DNA, 25 bp, Homo sapien
cctcagtctagatgaacaggctggc

SEQ ID NO: 1431666 - DNA, 25 bp, Homo sapien
ttgggctacctacacaaaagcctct

SEQ ID NO: 1431667 - DNA, 25 bp, Homo sapien
caggctggctggaatactaactaaa

SEQ ID NO: 1431668 - DNA, 25 bp, Homo sapien
tatgtataggccacggaagcagatc

SEQ ID NO: 1431669 - DNA, 25 bp, Homo sapien
caacaagttcagtttggtacaacca

SEQ ID NO: 1431670 - DNA, 25 bp, Homo sapien
cagggttaaaaccagctactcgaga

SEQ ID NO: 1431671 - DNA, 25 bp, Homo sapien
gatggcaagctttctcaaaggtcca

SEQ ID NO: 1431672 - DNA, 25 bp, Homo sapien
caaccagtggcctagttctaaacta

SEQ ID NO: 1431673 - DNA, 25 bp, Homo sapien
cagcaatgtgacagcaagagacaac

SEQ ID NO: 1431674 - DNA, 25 bp, Homo sapien
gcaactcagtctctgaactcaggga

SEQ ID NO: 1431675 - DNA, 25 bp, Homo sapien
gtgacagagagagacgcccaaacac

SEQ ID NO: 1431676 - DNA, 25 bp, Homo sapien
tcagggaccgatccagtttataatg

SEQ ID NO: 1431677 - DNA, 25 bp, Homo sapien
ggcactcttgccgttgtaacacacg

SEQ ID NO: 1431678 - DNA, 25 bp, Homo sapien
cagagtcctcttgatcgtggatcca

SEQ ID NO: 1431679 - DNA, 25 bp, Homo sapien
tcaggacccaattgctgtgaagaag

SEQ ID NO: 1431680 - DNA, 25 bp, Homo sapien
gaagagtctgggaatgcgtcacata

SEQ ID NO: 1431681 - DNA, 25 bp, Homo sapien
tgtaaatgataaaacttcagacgac

SEQ ID NO: 1431682 - DNA, 25 bp, Homo sapien
aatgataaaacttcagacgactcat

SEQ ID NO: 1431683 - DNA, 25 bp, Homo sapien
ctgtaaatgataaaacttcagacga

SEQ ID NO: 1431684 - DNA, 25 bp, Homo sapien
taaatgataaaacttcagacgactc

SEQ ID NO: 1431685 - DNA, 25 bp, Homo sapien
cctgggaaaatgctcctggcaagat

SEQ ID NO: 1431686 - DNA, 25 bp, Homo sapien
tattggtaggagtcaagagaaagcc

SEQ ID NO: 1431687 - DNA, 25 bp, Homo sapien
gagaaagccctaaagctccaagtgc

SEQ ID NO: 1431688 - DNA, 25 bp, Homo sapien
caatggccacgaacgggagaatgaa

SEQ ID NO: 1431689 - DNA, 25 bp, Homo sapien
tcacaaagccaaaggatactcttcc

SEQ ID NO: 1431690 - DNA, 25 bp, Homo sapien
tacaggataaacttccaggagtcct

SEQ ID NO: 1431691 - DNA, 25 bp, Homo sapien
tgtaaaaatctttacggctgggcac

SEQ ID NO: 1431692 - DNA, 25 bp, Homo sapien
tattggcggtgggagaaatcacccc

SEQ ID NO: 1431693 - DNA, 25 bp, Homo sapien
taacaaacgtcacagaaatgccgct

SEQ ID NO: 1431694 - DNA, 25 bp, Homo sapien
cactttgttaacatagtacctccac

SEQ ID NO: 1431695 - DNA, 25 bp, Homo sapien
ttatcctgggagagatactttgaga

SEQ ID NO: 1431696 - DNA, 25 bp, Homo sapien
gatgtccttgtctcattactggtga

SEQ ID NO: 1431697 - DNA, 25 bp, Homo sapien
aagaaagttataagtcagcctccag

SEQ ID NO: 1431698 - DNA, 25 bp, Homo sapien
tatcctctaaggtcagactgcctag

SEQ ID NO: 1431699 - DNA, 25 bp, Homo sapien
gataatgtgcaatactggcaaccac

SEQ ID NO: 1431700 - DNA, 25 bp, Homo sapien
gactgcctagacctgaatgactgct

SEQ ID NO: 1431701 - DNA, 25 bp, Homo sapien
caaggttgcgtaacaaaccagcaga

SEQ ID NO: 1431702 - DNA, 25 bp, Homo sapien
taaacattactgaagacaggcactc

SEQ ID NO: 1431703 - DNA, 25 bp, Homo sapien
cttaaatgagtcacgcaaggttgcg

SEQ ID NO: 1431704 - DNA, 25 bp, Homo sapien
caagttgtggactgcacgttcagca

SEQ ID NO: 1431705 - DNA, 25 bp, Homo sapien
ctcgtttactgtttgagtgaggcca

SEQ ID NO: 1431706 - DNA, 25 bp, Homo sapien
tcgtttactgtttgagtgaggccag

SEQ ID NO: 1431707 - DNA, 25 bp, Homo sapien
cgtttactgtttgagtgaggccagg

SEQ ID NO: 1431708 - DNA, 25 bp, Homo sapien
gtttactgtttgagtgaggccaggc

SEQ ID NO: 1431709 - DNA, 25 bp, Homo sapien
cgagtattctctccgctccacaccg

SEQ ID NO: 1431710 - DNA, 25 bp, Homo sapien
aaatcgtaaaactgttagtatcagg

SEQ ID NO: 1431711 - DNA, 25 bp, Homo sapien
ctgttagtatcaggagagcccttcg

SEQ ID NO: 1431712 - DNA, 25 bp, Homo sapien
tcaggagagcccttcgagtattctc

SEQ ID NO: 1431713 - DNA, 25 bp, Homo sapien
ggtaaatgcgcgaccaaaccgcaga

SEQ ID NO: 1431714 - DNA, 25 bp, Homo sapien
caggcatctctgtaagacgtcgacc

SEQ ID NO: 1431715 - DNA, 25 bp, Homo sapien
gaggtcccatgcaatctcatgctga

SEQ ID NO: 1431716 - DNA, 25 bp, Homo sapien
taaacctcagtttgctcgtgtgtca

SEQ ID NO: 1431717 - DNA, 25 bp, Homo sapien
tgctaaggacactgggaaggacatg

SEQ ID NO: 1431718 - DNA, 25 bp, Homo sapien
ttccagggaaactgcgcaacagcct

SEQ ID NO: 1431719 - DNA, 25 bp, Homo sapien
catggtcaacgtagcagtcgatcaa

SEQ ID NO: 1431720 - DNA, 25 bp, Homo sapien
aacactgctgcttggtataaaaccg

SEQ ID NO: 1431721 - DNA, 25 bp, Homo sapien
gagaacctagggtccataaagccat

SEQ ID NO: 1431722 - DNA, 25 bp, Homo sapien
caccaccggcaggagaacctagggt

SEQ ID NO: 1431723 - DNA, 25 bp, Homo sapien
tacacagcagcgacgacgcaggcgg

SEQ ID NO: 1431724 - DNA, 25 bp, Homo sapien
agccctcaagacacaccatgggccc

SEQ ID NO: 1431725 - DNA, 25 bp, Homo sapien
gatcgactaaagctacgtcaacaac

SEQ ID NO: 1431726 - DNA, 25 bp, Homo sapien
cttcgcgatcgactaaagctacgtc

SEQ ID NO: 1431727 - DNA, 25 bp, Homo sapien
aaagctacgtcaacaactatggcgg

SEQ ID NO: 1431728 - DNA, 25 bp, Homo sapien
cgggcagaggcggtgcgggaaggat

SEQ ID NO: 1431729 - DNA, 25 bp, Homo sapien
gaagtgtacggcgacttcgagcccc

SEQ ID NO: 1431730 - DNA, 25 bp, Homo sapien
aatgaagacgcgaaggactacccgc

SEQ ID NO: 1431731 - DNA, 25 bp, Homo sapien
ggctagaagagttccggtccgattc

SEQ ID NO: 1431732 - DNA, 25 bp, Homo sapien
tactaccttcggtctaggcagcgga

SEQ ID NO: 1431733 - DNA, 25 bp, Homo sapien
tggaaagatggtcgtgtggagcgac

SEQ ID NO: 1431734 - DNA, 25 bp, Homo sapien
gaaagatggtcgtgtggagcgaccc

SEQ ID NO: 1431735 - DNA, 25 bp, Homo sapien
gagtggaaagatggtcgtgtggagc

SEQ ID NO: 1431736 - DNA, 25 bp, Homo sapien
aagatggtcgtgtggagcgacccgg

SEQ ID NO: 1431737 - DNA, 25 bp, Homo sapien
gacagcgaattactgcagggtcggt

SEQ ID NO: 1431738 - DNA, 25 bp, Homo sapien
ggtggtccctgccaaaaatctgcca

SEQ ID NO: 1431739 - DNA, 25 bp, Homo sapien
ttctttaacgctcgcgggccagagt

SEQ ID NO: 1431740 - DNA, 25 bp, Homo sapien
taaatggacaaaagggatgctgaca

SEQ ID NO: 1431741 - DNA, 25 bp, Homo sapien
tgagttagttattaatcaaccaaaa

SEQ ID NO: 1431742 - DNA, 25 bp, Homo sapien
aatctgagttagttattaatcaacc

SEQ ID NO: 1431743 - DNA, 25 bp, Homo sapien
aaatctgagttagttattaatcaac

SEQ ID NO: 1431744 - DNA, 25 bp, Homo sapien
tctgagttagttattaatcaaccaa

SEQ ID NO: 1431745 - DNA, 25 bp, Homo sapien
gaaaccactgctgttcaagagttcc

SEQ ID NO: 1431746 - DNA, 25 bp, Homo sapien
aaccggtggtggctacttcctctga

SEQ ID NO: 1431747 - DNA, 25 bp, Homo sapien
gtagaagtgactggacaaccccaaa

SEQ ID NO: 1431748 - DNA, 25 bp, Homo sapien
tctgagtgaacaaattgctgatgcc

SEQ ID NO: 1431749 - DNA, 25 bp, Homo sapien
taagaatggccagaatgcagctgtg

SEQ ID NO: 1431750 - DNA, 25 bp, Homo sapien
gcagctgtggtacaccgctttgagt

SEQ ID NO: 1431751 - DNA, 25 bp, Homo sapien
ttgtgaccatgaaaacgcggccttc

SEQ ID NO: 1431752 - DNA, 25 bp, Homo sapien
cgctttgagtcatttcccgcaggct

SEQ ID NO: 1431753 - DNA, 25 bp, Homo sapien
gaagatttcattttccgcgcatcca

SEQ ID NO: 1431754 - DNA, 25 bp, Homo sapien
caagtcctctagtgcaacgccatag

SEQ ID NO: 1431755 - DNA, 25 bp, Homo sapien
gagaccatgcttattgccctccagt

SEQ ID NO: 1431756 - DNA, 25 bp, Homo sapien
ggagtgcctcaagccaagatagtga

SEQ ID NO: 1431757 - DNA, 25 bp, Homo sapien
caaaccgagtctagagaattttgag

SEQ ID NO: 1431758 - DNA, 25 bp, Homo sapien
gaaggagtgtgaagcctccatctat

SEQ ID NO: 1431759 - DNA, 25 bp, Homo sapien
gaatccaatattgcacaaaccgagt

SEQ ID NO: 1431760 - DNA, 25 bp, Homo sapien
cataggacaatgcatgtgggaagga

SEQ ID NO: 1431761 - DNA, 25 bp, Homo sapien
ttcagtcttgatgcaaaactcagca

SEQ ID NO: 1431762 - DNA, 25 bp, Homo sapien
tttcagtcttgatgcaaaactcagc

SEQ ID NO: 1431763 - DNA, 25 bp, Homo sapien
gatcagcaacaggttccatcatgtg

SEQ ID NO: 1431764 - DNA, 25 bp, Homo sapien
gagattctgagccactgatgagccc

SEQ ID NO: 1431765 - DNA, 25 bp, Homo sapien
tctcagggctgagtagcatccatca

SEQ ID NO: 1431766 - DNA, 25 bp, Homo sapien
caagctatggcttttcacaatggtc

SEQ ID NO: 1431767 - DNA, 25 bp, Homo sapien
gcttaatggttggtgtaatggttaa

SEQ ID NO: 1431768 - DNA, 25 bp, Homo sapien
ccagatacttggttaaacaccagtg

SEQ ID NO: 1431769 - DNA, 25 bp, Homo sapien
acaatttgggcgtacttggtggagc

SEQ ID NO: 1431770 - DNA, 25 bp, Homo sapien
tagcaaggtcataggacccagatac

SEQ ID NO: 1431771 - DNA, 25 bp, Homo sapien
taatcatgtgataacttctccggag

SEQ ID NO: 1431772 - DNA, 25 bp, Homo sapien
tctaccctgcagacgtcagacttgc

SEQ ID NO: 1431773 - DNA, 25 bp, Homo sapien
cagctgggaactggaataatctgga

SEQ ID NO: 1431774 - DNA, 25 bp, Homo sapien
gagctgcaacatcaacttccatggg

SEQ ID NO: 1431775 - DNA, 25 bp, Homo sapien
gaagatgacatctcttggctggttt

SEQ ID NO: 1431776 - DNA, 25 bp, Homo sapien
agtaccttagcttatgcagccaaaa

SEQ ID NO: 1431777 - DNA, 25 bp, Homo sapien
tttgaaaaagtaccttagcttatgc

SEQ ID NO: 1431778 - DNA, 25 bp, Homo sapien
gcaagaagatgacatctcttggctg

SEQ ID NO: 1431779 - DNA, 25 bp, Homo sapien
tatacttaatgctagatgacaagtt

SEQ ID NO: 1431780 - DNA, 25 bp, Homo sapien
gatatacttaatgctagatgacaag

SEQ ID NO: 1431781 - DNA, 25 bp, Homo sapien
acttaatgctagatgacaagttagt

SEQ ID NO: 1431782 - DNA, 25 bp, Homo sapien
gtgggtgcagcgcaccagcatggta

SEQ ID NO: 1431783 - DNA, 25 bp, Homo sapien
cagaataacaaatcccctagaaaag

SEQ ID NO: 1431784 - DNA, 25 bp, Homo sapien
tacagatcagacttggcatctaggc

SEQ ID NO: 1431785 - DNA, 25 bp, Homo sapien
cctagaaaagtacaagactaagcca

SEQ ID NO: 1431786 - DNA, 25 bp, Homo sapien
gcatctaggcttgacatttccttag

SEQ ID NO: 1431787 - DNA, 25 bp, Homo sapien
gaaatactgatagtagataccgctc

SEQ ID NO: 1431788 - DNA, 25 bp, Homo sapien
taatccactatgaaggagacaaagg

SEQ ID NO: 1431789 - DNA, 25 bp, Homo sapien
gatcatgatgtataagatacatgca

SEQ ID NO: 1431790 - DNA, 25 bp, Homo sapien
gacaaaggtccttagaatctaacat

SEQ ID NO: 1431791 - DNA, 25 bp, Homo sapien
tggagacacttcacacgtatgcagg

SEQ ID NO: 1431792 - DNA, 25 bp, Homo sapien
cagtgagcacctagcggaagatggc

SEQ ID NO: 1431793 - DNA, 25 bp, Homo sapien
taaacttcgacgcaccaaacatggc

SEQ ID NO: 1431794 - DNA, 25 bp, Homo sapien
taaacagaactgtaaccctcgcgaa

SEQ ID NO: 1431795 - DNA, 25 bp, Homo sapien
cctccgtgtcagttgttgggctgta

SEQ ID NO: 1431796 - DNA, 25 bp, Homo sapien
ggctgtaatggcgactgggccgccc

SEQ ID NO: 1431797 - DNA, 25 bp, Homo sapien
ttgttgggctgtaatggcgactggg

SEQ ID NO: 1431798 - DNA, 25 bp, Homo sapien
tcctcctccgtgtcagttgttgggc

SEQ ID NO: 1431799 - DNA, 25 bp, Homo sapien
ttaggccttatccagtcagctagag

SEQ ID NO: 1431800 - DNA, 25 bp, Homo sapien
ctgtttttccgggactggataggat

SEQ ID NO: 1431801 - DNA, 25 bp, Homo sapien
gatgcttttgagtcgcttccttagg

SEQ ID NO: 1431802 - DNA, 25 bp, Homo sapien
ccgggactggataggatgcttttga

SEQ ID NO: 1431803 - DNA, 25 bp, Homo sapien
tttaaaactataattataggctgca

SEQ ID NO: 1431804 - DNA, 25 bp, Homo sapien
gtgcttcatgagaatagatatcata

SEQ ID NO: 1431805 - DNA, 25 bp, Homo sapien
tgagaatagatatcataaaactgat

SEQ ID NO: 1431806 - DNA, 25 bp, Homo sapien
ttaaaactataattataggctgcat

SEQ ID NO: 1431807 - DNA, 25 bp, Homo sapien
tgcggctggcctgtaaattatgtat

SEQ ID NO: 1431808 - DNA, 25 bp, Homo sapien
tgtgaatggaataccctccacctgg

SEQ ID NO: 1431809 - DNA, 25 bp, Homo sapien
tacccagaagatagctgtgaatgga

SEQ ID NO: 1431810 - DNA, 25 bp, Homo sapien
caggttgcattatgttttggttcca

SEQ ID NO: 1431811 - DNA, 25 bp, Homo sapien
ccctgaggtagttgattggtcatga

SEQ ID NO: 1431812 - DNA, 25 bp, Homo sapien
agggtgaaggacatctacgactgtt

SEQ ID NO: 1431813 - DNA, 25 bp, Homo sapien
ttgtcaccagcaaaatgggttctga

SEQ ID NO: 1431814 - DNA, 25 bp, Homo sapien
tacgactgtttgtgctccctgaggt

SEQ ID NO: 1431815 - DNA, 25 bp, Homo sapien
tcattagacctgaaacaaagccagg

SEQ ID NO: 1431816 - DNA, 25 bp, Homo sapien
tgatggctcaagaagtagagtgaca

SEQ ID NO: 1431817 - DNA, 25 bp, Homo sapien
taatagcctggaggcctcttatcaa

SEQ ID NO: 1431818 - DNA, 25 bp, Homo sapien
ggtactcagtgttctctccatgaaa

SEQ ID NO: 1431819 - DNA, 25 bp, Homo sapien
tgtcaggctaacaggaataagtggt

SEQ ID NO: 1431820 - DNA, 25 bp, Homo sapien
taagtggtagccttgctttctgagc

SEQ ID NO: 1431821 - DNA, 25 bp, Homo sapien
tagttgagcagcaccaagtggactg

SEQ ID NO: 1431822 - DNA, 25 bp, Homo sapien
ctactgaagactgggctcaaaggac

SEQ ID NO: 1431823 - DNA, 25 bp, Homo sapien
cagatactcaggaccatctcaggca

SEQ ID NO: 1431824 - DNA, 25 bp, Homo sapien
gttaaacctccatcttgaagcttct

SEQ ID NO: 1431825 - DNA, 25 bp, Homo sapien
tgtgcttgttttgcgctatggaaca

SEQ ID NO: 1431826 - DNA, 25 bp, Homo sapien
tcagagatgctgttacttgaatgat

SEQ ID NO: 1431827 - DNA, 25 bp, Homo sapien
cctggttagaagcatgatacaagac

SEQ ID NO: 1431828 - DNA, 25 bp, Homo sapien
tagactccagctgctacattagagc

SEQ ID NO: 1431829 - DNA, 25 bp, Homo sapien
gaatgtggatactcttaggcgtgaa

SEQ ID NO: 1431830 - DNA, 25 bp, Homo sapien
aagagatgctctcctgggacctcag

SEQ ID NO: 1431831 - DNA, 25 bp, Homo sapien
gctccaccgtgaacacaggcgatgt

SEQ ID NO: 1431832 - DNA, 25 bp, Homo sapien
gagacagtgcaggaggttcagcccc

SEQ ID NO: 1431833 - DNA, 25 bp, Homo sapien
gcgatgtgactgcaagtgccccact

SEQ ID NO: 1431834 - DNA, 25 bp, Homo sapien
ccctacaagggcagtagatccgctc

SEQ ID NO: 1431835 - DNA, 25 bp, Homo sapien
tgggtgtgtatgaggaccattgaca

SEQ ID NO: 1431836 - DNA, 25 bp, Homo sapien
tgtatgaggaccattgacacatgag

SEQ ID NO: 1431837 - DNA, 25 bp, Homo sapien
ggtgtgtatgaggaccattgacaca

SEQ ID NO: 1431838 - DNA, 25 bp, Homo sapien
tgtgtatgaggaccattgacacatg

SEQ ID NO: 1431839 - DNA, 25 bp, Homo sapien
aacaaggactccagaggcggacaat

SEQ ID NO: 1431840 - DNA, 25 bp, Homo sapien
cacacaaggtccaatgtgagaaggg

SEQ ID NO: 1431841 - DNA, 25 bp, Homo sapien
gcggacaatgccagcgctggccaat

SEQ ID NO: 1431842 - DNA, 25 bp, Homo sapien
ctttgcagcatcagggtttgggtca

SEQ ID NO: 1431843 - DNA, 25 bp, Homo sapien
tcattggccagaaggtcttcaaatt

SEQ ID NO: 1431844 - DNA, 25 bp, Homo sapien
caaatttcccaggagggcagtcctt

SEQ ID NO: 1431845 - DNA, 25 bp, Homo sapien
ctcattcattggccagaaggtcttc

SEQ ID NO: 1431846 - DNA, 25 bp, Homo sapien
cattcattggccagaaggtcttcaa

SEQ ID NO: 1431847 - DNA, 25 bp, Homo sapien
agacaactgtggcttatggtactaa

SEQ ID NO: 1431848 - DNA, 25 bp, Homo sapien
gatttctcctgtcagttcttcagca

SEQ ID NO: 1431849 - DNA, 25 bp, Homo sapien
ccctttcaagaggaggcctaggagg

SEQ ID NO: 1431850 - DNA, 25 bp, Homo sapien
ggtgtgatgggactacaccatggac

SEQ ID NO: 1431851 - DNA, 25 bp, Homo sapien
cagaacacatccgtgctcccacaga

SEQ ID NO: 1431852 - DNA, 25 bp, Homo sapien
agaacacatccgtgctcccacagat

SEQ ID NO: 1431853 - DNA, 25 bp, Homo sapien
accagaacacatccgtgctcccaca

SEQ ID NO: 1431854 - DNA, 25 bp, Homo sapien
aacacatccgtgctcccacagatga

SEQ ID NO: 1431855 - DNA, 25 bp, Homo sapien
tggacaatgctgaccctgacagccg

SEQ ID NO: 1431856 - DNA, 25 bp, Homo sapien
gacaatgctgaccctgacagccgcc

SEQ ID NO: 1431857 - DNA, 25 bp, Homo sapien
ggacaatgctgaccctgacagccgc

SEQ ID NO: 1431858 - DNA, 25 bp, Homo sapien
tatatcatcgtatgcagccctcatg

SEQ ID NO: 1431859 - DNA, 25 bp, Homo sapien
aaaaggttaaggatcttgctcaaga

SEQ ID NO: 1431860 - DNA, 25 bp, Homo sapien
tgcccgccaagcttacctcgtggga

SEQ ID NO: 1431861 - DNA, 25 bp, Homo sapien
cgtgggagcccttgacatatatcat

SEQ ID NO: 1431862 - DNA, 25 bp, Homo sapien
tggaacatcttcctcgggcctcaga

SEQ ID NO: 1431863 - DNA, 25 bp, Homo sapien
tttggcacttctgagtggacaccct

SEQ ID NO: 1431864 - DNA, 25 bp, Homo sapien
tcagtcgccagccagaccaccacat

SEQ ID NO: 1431865 - DNA, 25 bp, Homo sapien
tattcgtccattgttccatttcttg

SEQ ID NO: 1431866 - DNA, 25 bp, Homo sapien
ggtggagtgccatgacgatgacaaa

SEQ ID NO: 1431867 - DNA, 25 bp, Homo sapien
gccatgacgatgacaaacatttact

SEQ ID NO: 1431868 - DNA, 25 bp, Homo sapien
ccgcagagcaaatggtggagtgcca

SEQ ID NO: 1431869 - DNA, 25 bp, Homo sapien
gggcattgtccccagaccgcagagc

SEQ ID NO: 1431870 - DNA, 25 bp, Homo sapien
ccagggtagcccaagaagaagcagt

SEQ ID NO: 1431871 - DNA, 25 bp, Homo sapien
gaatccacatagaggcttggtcccc

SEQ ID NO: 1431872 - DNA, 25 bp, Homo sapien
catctggctagatgaaggaagggaa

SEQ ID NO: 1431873 - DNA, 25 bp, Homo sapien
catttgctgaatgtcaccctccagg

SEQ ID NO: 1431874 - DNA, 25 bp, Homo sapien
gccagcagagacatcctgtaggcat

SEQ ID NO: 1431875 - DNA, 25 bp, Homo sapien
aggagccacaagaagagcatgcagg

SEQ ID NO: 1431876 - DNA, 25 bp, Homo sapien
tcgtttcaaggagccacaagaagag

SEQ ID NO: 1431877 - DNA, 25 bp, Homo sapien
aggcagaaagaacagcggggacggg

SEQ ID NO: 1431878 - DNA, 25 bp, Homo sapien
tgggctttcctaggccttcagaaca

SEQ ID NO: 1431879 - DNA, 25 bp, Homo sapien
ggctttcctaggccttcagaacata

SEQ ID NO: 1431880 - DNA, 25 bp, Homo sapien
gctttcctaggccttcagaacatac

SEQ ID NO: 1431881 - DNA, 25 bp, Homo sapien
gggctttcctaggccttcagaacat

SEQ ID NO: 1431882 - DNA, 25 bp, Homo sapien
ttgtctccttaatttctaggcccat

SEQ ID NO: 1431883 - DNA, 25 bp, Homo sapien
tacaacactgtttaacaacagagac

SEQ ID NO: 1431884 - DNA, 25 bp, Homo sapien
caacagagacatttgaaggtacaaa

SEQ ID NO: 1431885 - DNA, 25 bp, Homo sapien
tcaagcactcagcatgttcagtaga

SEQ ID NO: 1431886 - DNA, 25 bp, Homo sapien
cgctgcagtacttccaacccataga

SEQ ID NO: 1431887 - DNA, 25 bp, Homo sapien
tacttccaacccatagaatccagcg

SEQ ID NO: 1431888 - DNA, 25 bp, Homo sapien
ggaccgtccattctggttccagagg

SEQ ID NO: 1431889 - DNA, 25 bp, Homo sapien
tagaatccagcgttactagaggacc

SEQ ID NO: 1431890 - DNA, 25 bp, Homo sapien
caattggctaacacataatttctct

SEQ ID NO: 1431891 - DNA, 25 bp, Homo sapien
gaggagagttagcaaggtactaaca

SEQ ID NO: 1431892 - DNA, 25 bp, Homo sapien
gacagatatgaacacatgaagggag

SEQ ID NO: 1431893 - DNA, 25 bp, Homo sapien
taatttctctatgcagcttaagact

SEQ ID NO: 1431894 - DNA, 25 bp, Homo sapien
tgtaagttccacgtccctagagtct

SEQ ID NO: 1431895 - DNA, 25 bp, Homo sapien
gctgggaaccccgaatgttggaatc

SEQ ID NO: 1431896 - DNA, 25 bp, Homo sapien
tggaatcgccctgacaaccttatga

SEQ ID NO: 1431897 - DNA, 25 bp, Homo sapien
gacaaccgtctgaggagcaccttct

SEQ ID NO: 1431898 - DNA, 25 bp, Homo sapien
gttcccctttagatggtcatggtca

SEQ ID NO: 1431899 - DNA, 25 bp, Homo sapien
tggtggtcgcagaccaagcgtccct

SEQ ID NO: 1431900 - DNA, 25 bp, Homo sapien
ttctcacatctaattcacaacgtct

SEQ ID NO: 1431901 - DNA, 25 bp, Homo sapien
acaacgtctcatcgctccgcgggag

SEQ ID NO: 1431902 - DNA, 25 bp, Homo sapien
ggtcgtctattccaacggactcctc

SEQ ID NO: 1431903 - DNA, 25 bp, Homo sapien
aggccaaacaacctccgcgaggcta

SEQ ID NO: 1431904 - DNA, 25 bp, Homo sapien
cggactcctcttccgttggatacgg

SEQ ID NO: 1431905 - DNA, 25 bp, Homo sapien
ctacaacagccgaaatccgggtcgt

SEQ ID NO: 1431906 - DNA, 25 bp, Homo sapien
gggaacccgggtcgcgctgctccga

SEQ ID NO: 1431907 - DNA, 25 bp, Homo sapien
gctcggcgggcgctccattccttta

SEQ ID NO: 1431908 - DNA, 25 bp, Homo sapien
ctgaggcgggaacccgggtcgcgct

SEQ ID NO: 1431909 - DNA, 25 bp, Homo sapien
tccattcctttaccggactgtacac

SEQ ID NO: 1431910 - DNA, 25 bp, Homo sapien
agttcttcgcctcctggtgcggcca

SEQ ID NO: 1431911 - DNA, 25 bp, Homo sapien
atcgccttcgccccgacgtggaagg

SEQ ID NO: 1431912 - DNA, 25 bp, Homo sapien
gacgctgctgcaggcggacacggtg

SEQ ID NO: 1431913 - DNA, 25 bp, Homo sapien
cgcggtcggcgctctattcgccttc

SEQ ID NO: 1431914 - DNA, 25 bp, Homo sapien
tgacaccttaccgtttcctgggcca

SEQ ID NO: 1431915 - DNA, 25 bp, Homo sapien
ccttccctgcgagaggtctcctttg

SEQ ID NO: 1431916 - DNA, 25 bp, Homo sapien
tcctctcgtccagggacccatgtca

SEQ ID NO: 1431917 - DNA, 25 bp, Homo sapien
tgggccagccttgtggcagtcctct

SEQ ID NO: 1431918 - DNA, 25 bp, Homo sapien
cctcttttcctgagcagcttgcaga

SEQ ID NO: 1431919 - DNA, 25 bp, Homo sapien
tcctgagcagcttgcagattggttt

SEQ ID NO: 1431920 - DNA, 25 bp, Homo sapien
ttcctgagcagcttgcagattggtt

SEQ ID NO: 1431921 - DNA, 25 bp, Homo sapien
cctcctcttttcctgagcagcttgc

SEQ ID NO: 1431922 - DNA, 25 bp, Homo sapien
gatgagggttaccacttccaaacag

SEQ ID NO: 1431923 - DNA, 25 bp, Homo sapien
gtctagatactgacccattctgctc

SEQ ID NO: 1431924 - DNA, 25 bp, Homo sapien
ggatgagggttaccacttccaaaca

SEQ ID NO: 1431925 - DNA, 25 bp, Homo sapien
ttagttttcctatgagttgcatgtc

SEQ ID NO: 1431926 - DNA, 25 bp, Homo sapien
cagagcctggtgcagagtaggagcc

SEQ ID NO: 1431927 - DNA, 25 bp, Homo sapien
cagcacagagcctggtgcagagtag

SEQ ID NO: 1431928 - DNA, 25 bp, Homo sapien
gcacagagcctggtgcagagtagga

SEQ ID NO: 1431929 - DNA, 25 bp, Homo sapien
agcctggtgcagagtaggagcccac

SEQ ID NO: 1431930 - DNA, 25 bp, Homo sapien
aaggcattttgtccatccagtgacg

SEQ ID NO: 1431931 - DNA, 25 bp, Homo sapien
aaatgacagcgtgagtgtagaacct

SEQ ID NO: 1431932 - DNA, 25 bp, Homo sapien
tgctggtgccgtggatcctcttgac

SEQ ID NO: 1431933 - DNA, 25 bp, Homo sapien
cagcgtgagtgtagaaccttctgct

SEQ ID NO: 1431934 - DNA, 25 bp, Homo sapien
gaggtgaggtcagtaaaaaaccaga

SEQ ID NO: 1431935 - DNA, 25 bp, Homo sapien
cctgccatgagaacctgtactagct

SEQ ID NO: 1431936 - DNA, 25 bp, Homo sapien
aaataatatgttgatgtttctctgg

SEQ ID NO: 1431937 - DNA, 25 bp, Homo sapien
actagctcatgggacacggagggta

SEQ ID NO: 1431938 - DNA, 25 bp, Homo sapien
aactttggtggatgctcacggggca

SEQ ID NO: 1431939 - DNA, 25 bp, Homo sapien
gatgctcacggggcacctgacctgg

SEQ ID NO: 1431940 - DNA, 25 bp, Homo sapien
ggtggaactttggtggatgctcacg

SEQ ID NO: 1431941 - DNA, 25 bp, Homo sapien
tttggtggatgctcacggggcacct

SEQ ID NO: 1431942 - DNA, 25 bp, Homo sapien
actaccagtatctctggccccagga

SEQ ID NO: 1431943 - DNA, 25 bp, Homo sapien
gctctgcccactaccagtatctctg

SEQ ID NO: 1431944 - DNA, 25 bp, Homo sapien
ttccccgcagttcctggattccaga

SEQ ID NO: 1431945 - DNA, 25 bp, Homo sapien
ctttaccccagtcactcaagctctg

SEQ ID NO: 1431946 - DNA, 25 bp, Homo sapien
gcagtctgcagagacttcaacatcc

SEQ ID NO: 1431947 - DNA, 25 bp, Homo sapien
tggaggccggccctgtatctcgccg

SEQ ID NO: 1431948 - DNA, 25 bp, Homo sapien
tgaggagaccaacagtgcagtctgc

SEQ ID NO: 1431949 - DNA, 25 bp, Homo sapien
tatctcgccgccctggactgtgctg

SEQ ID NO: 1431950 - DNA, 25 bp, Homo sapien
cttccaaggctctcaaataggaggc

SEQ ID NO: 1431951 - DNA, 25 bp, Homo sapien
cagtgcagggcatcaacagcttaat

SEQ ID NO: 1431952 - DNA, 25 bp, Homo sapien
cccagtgcagggcatcaacagctta

SEQ ID NO: 1431953 - DNA, 25 bp, Homo sapien
acagcttaattaacgtctgaacagc

SEQ ID NO: 1431954 - DNA, 25 bp, Homo sapien
agagacatagccctgttgccctgcc

SEQ ID NO: 1431955 - DNA, 25 bp, Homo sapien
ctgggccctgaagggcgggccagct

SEQ ID NO: 1431956 - DNA, 25 bp, Homo sapien
gtccccatcaggttggagccagagc

SEQ ID NO: 1431957 - DNA, 25 bp, Homo sapien
tcaggtccccatcaggttggagcca

SEQ ID NO: 1431958 - DNA, 25 bp, Homo sapien
cccatcaggttggagccagagccca

SEQ ID NO: 1431959 - DNA, 25 bp, Homo sapien
aggtccccatcaggttggagccaga

SEQ ID NO: 1431960 - DNA, 25 bp, Homo sapien
tgcgggcctacttgctgggtgccca

SEQ ID NO: 1431961 - DNA, 25 bp, Homo sapien
ccactgcgggcctacttgctgggtg

SEQ ID NO: 1431962 - DNA, 25 bp, Homo sapien
accgcactcaccactgcaggcgtgg

SEQ ID NO: 1431963 - DNA, 25 bp, Homo sapien
tgggtgcccagcaccgcactcacca

SEQ ID NO: 1431964 - DNA, 25 bp, Homo sapien
agaacggctcgggagcagtatttcc

SEQ ID NO: 1431965 - DNA, 25 bp, Homo sapien
taccaagaacggctcgggagcagta

SEQ ID NO: 1431966 - DNA, 25 bp, Homo sapien
ctttaccaagaacggctcgggagca

SEQ ID NO: 1431967 - DNA, 25 bp, Homo sapien
tcaaggcctttaccaagaacggctc

SEQ ID NO: 1431968 - DNA, 25 bp, Homo sapien
ctggagtcccatcatgacacgtggc

SEQ ID NO: 1431969 - DNA, 25 bp, Homo sapien
ggagtcccatcatgacacgtggccc

SEQ ID NO: 1431970 - DNA, 25 bp, Homo sapien
gaggctcattgacgccctggagtcc

SEQ ID NO: 1431971 - DNA, 25 bp, Homo sapien
tgctgacgtgcagacactgcgggag

SEQ ID NO: 1431972 - DNA, 25 bp, Homo sapien
aagggaggctcctacctgggtagag

SEQ ID NO: 1431973 - DNA, 25 bp, Homo sapien
cgaagagtacctggctctgatcttt

SEQ ID NO: 1431974 - DNA, 25 bp, Homo sapien
gaggagattgatggattctttgcga

SEQ ID NO: 1431975 - DNA, 25 bp, Homo sapien
gagaaataacgaagagtacctggct

SEQ ID NO: 1431976 - DNA, 25 bp, Homo sapien
tcagagagccccacgttaagaaacg

SEQ ID NO: 1431977 - DNA, 25 bp, Homo sapien
tatacacattgaccaaagggcccct

SEQ ID NO: 1431978 - DNA, 25 bp, Homo sapien
gaaagaaaatgctacccagttggga

SEQ ID NO: 1431979 - DNA, 25 bp, Homo sapien
caagaacgtgctggctcagtgcaaa

SEQ ID NO: 1431980 - DNA, 25 bp, Homo sapien
ggaatccaggtccttctataccgct

SEQ ID NO: 1431981 - DNA, 25 bp, Homo sapien
caagatagctcccactgtttggaaa

SEQ ID NO: 1431982 - DNA, 25 bp, Homo sapien
cagagactctctgggctcaccaggg

SEQ ID NO: 1431983 - DNA, 25 bp, Homo sapien
tataccgcttacctgcagagactct

SEQ ID NO: 1431984 - DNA, 25 bp, Homo sapien
ttgaagactgaaaggatgcgcatcc

SEQ ID NO: 1431985 - DNA, 25 bp, Homo sapien
aaccaggtttataccaggctgcggc

SEQ ID NO: 1431986 - DNA, 25 bp, Homo sapien
tgaaaagggcgacagtgcccgctct

SEQ ID NO: 1431987 - DNA, 25 bp, Homo sapien
cgctcttggtggacctctagtgtga

SEQ ID NO: 1431988 - DNA, 25 bp, Homo sapien
ccccgtgaatcagaggaactgccag

SEQ ID NO: 1431989 - DNA, 25 bp, Homo sapien
gctgcactcacaaatgtcaggctgg

SEQ ID NO: 1431990 - DNA, 25 bp, Homo sapien
cagcatatgagacaggtccctgccc

SEQ ID NO: 1431991 - DNA, 25 bp, Homo sapien
tggcttcagccatgatgacgaatgc

SEQ ID NO: 1431992 - DNA, 25 bp, Homo sapien
ggagaccagcaggtgcaaaggacaa

SEQ ID NO: 1431993 - DNA, 25 bp, Homo sapien
attcagcccatagcacaggctggag

SEQ ID NO: 1431994 - DNA, 25 bp, Homo sapien
caaatttcctcttcctgcaaggaca

SEQ ID NO: 1431995 - DNA, 25 bp, Homo sapien
ttctgagaggctggggattagggct

SEQ ID NO: 1431996 - DNA, 25 bp, Homo sapien
tggccaccccgtgaactttgttctg

SEQ ID NO: 1431997 - DNA, 25 bp, Homo sapien
tgcccgtgtgggacgtggaagccac

SEQ ID NO: 1431998 - DNA, 25 bp, Homo sapien
caatgaacgcctggatgtgcccgtg

SEQ ID NO: 1431999 - DNA, 25 bp, Homo sapien
aagccaccctcaacttcctcaaggc

SEQ ID NO: 1432000 - DNA, 25 bp, Homo sapien
agtgggcatagggcagctcagtccc

SEQ ID NO: 1432001 - DNA, 25 bp, Homo sapien
tgggcatagggcagctcagtccctg

SEQ ID NO: 1432002 - DNA, 25 bp, Homo sapien
tggcctcttagcaccacattcctgt

SEQ ID NO: 1432003 - DNA, 25 bp, Homo sapien
tttttcagcttatttgaagtcctgc

SEQ ID NO: 1432004 - DNA, 25 bp, Homo sapien
gatgtgggtctctagtgccttgccc

SEQ ID NO: 1432005 - DNA, 25 bp, Homo sapien
ccaggtgaggcaagccatggttgct

SEQ ID NO: 1432006 - DNA, 25 bp, Homo sapien
ttccggacaatgaagaagcctttgc

SEQ ID NO: 1432007 - DNA, 25 bp, Homo sapien
ttctggaagtcgtgctggtctccca

SEQ ID NO: 1432008 - DNA, 25 bp, Homo sapien
ggctcctgggttggactccctctct

SEQ ID NO: 1432009 - DNA, 25 bp, Homo sapien
tctttagctgcagcgccttgctggg

SEQ ID NO: 1432010 - DNA, 25 bp, Homo sapien
aggaacccacaatcaggaggcaacc

SEQ ID NO: 1432011 - DNA, 25 bp, Homo sapien
gcaccaaggccgctgaataagcctg

SEQ ID NO: 1432012 - DNA, 25 bp, Homo sapien
gggctctcggcaacatcgataaacc

SEQ ID NO: 1432013 - DNA, 25 bp, Homo sapien
agggctctcggcaacatcgataaac

SEQ ID NO: 1432014 - DNA, 25 bp, Homo sapien
ctctcggcaacatcgataaaccagc

SEQ ID NO: 1432015 - DNA, 25 bp, Homo sapien
gctctcggcaacatcgataaaccag

SEQ ID NO: 1432016 - DNA, 25 bp, Homo sapien
gagccctcaaatctgggccctgggt

SEQ ID NO: 1432017 - DNA, 25 bp, Homo sapien
tggagataaactacccacctaccag

SEQ ID NO: 1432018 - DNA, 25 bp, Homo sapien
ccttgtccccatgtgtcattggaga

SEQ ID NO: 1432019 - DNA, 25 bp, Homo sapien
cagattgttgtaccatgctgggcaa

SEQ ID NO: 1432020 - DNA, 25 bp, Homo sapien
tgctcagacttcctcacggcatggt

SEQ ID NO: 1432021 - DNA, 25 bp, Homo sapien
tctaggcacagttcatttggcaagt

SEQ ID NO: 1432022 - DNA, 25 bp, Homo sapien
cagggtggccttttcatgtgctagc

SEQ ID NO: 1432023 - DNA, 25 bp, Homo sapien
gctccgtgcagggtatctaggcaca

SEQ ID NO: 1432024 - DNA, 25 bp, Homo sapien
tattgatgaggtcctctgctctcag

SEQ ID NO: 1432025 - DNA, 25 bp, Homo sapien
gcaccgcctcaagtattttttagga

SEQ ID NO: 1432026 - DNA, 25 bp, Homo sapien
ggaagatgtcctggccaagaagtcc

SEQ ID NO: 1432027 - DNA, 25 bp, Homo sapien
ggaccaagtttttctaactcgtgca

SEQ ID NO: 1432028 - DNA, 25 bp, Homo sapien
ctgcctggtttcaaaccaaggacct

SEQ ID NO: 1432029 - DNA, 25 bp, Homo sapien
cgtgttaggtgaatgtgataaccag

SEQ ID NO: 1432030 - DNA, 25 bp, Homo sapien
tgttaggtgaatgtgataaccagta

SEQ ID NO: 1432031 - DNA, 25 bp, Homo sapien
ttaggtgaatgtgataaccagtaca

SEQ ID NO: 1432032 - DNA, 25 bp, Homo sapien
ggccagaactccagcgttattccag

SEQ ID NO: 1432033 - DNA, 25 bp, Homo sapien
catagaaagtgcataggccagaact

SEQ ID NO: 1432034 - DNA, 25 bp, Homo sapien
taacaggcccagtcgtctaacgagg

SEQ ID NO: 1432035 - DNA, 25 bp, Homo sapien
actgtgaggatctagccagctgccc

SEQ ID NO: 1432036 - DNA, 25 bp, Homo sapien
aagatgcgctcaggtttcttccatt

SEQ ID NO: 1432037 - DNA, 25 bp, Homo sapien
acccagggaagatgcgctcaggttt

SEQ ID NO: 1432038 - DNA, 25 bp, Homo sapien
cccagggaagatgcgctcaggtttc

SEQ ID NO: 1432039 - DNA, 25 bp, Homo sapien
tgccttcagatgctaagcctgcgcc

SEQ ID NO: 1432040 - DNA, 25 bp, Homo sapien
gtgccttcagatgctaagcctgcgc

SEQ ID NO: 1432041 - DNA, 25 bp, Homo sapien
cagctggctgagacgggcctgtgga

SEQ ID NO: 1432042 - DNA, 25 bp, Homo sapien
gctgagacgggcctgtggatcaggg

SEQ ID NO: 1432043 - DNA, 25 bp, Homo sapien
ctgatcaacatgaaggacaggaggg

SEQ ID NO: 1432044 - DNA, 25 bp, Homo sapien
tggctgagacgggcctgtggatcag

SEQ ID NO: 1432045 - DNA, 25 bp, Homo sapien
gaagcagggtaaatctgtctctgtc

SEQ ID NO: 1432046 - DNA, 25 bp, Homo sapien
agcagggtaaatctgtctctgtccc

SEQ ID NO: 1432047 - DNA, 25 bp, Homo sapien
gactgaagcagggtaaatctgtctc

SEQ ID NO: 1432048 - DNA, 25 bp, Homo sapien
gactcaagatgcttgtccctctggg

SEQ ID NO: 1432049 - DNA, 25 bp, Homo sapien
cagggccgccatggaggtccaggct

SEQ ID NO: 1432050 - DNA, 25 bp, Homo sapien
tgcatcttcagatgcggcgctccag

SEQ ID NO: 1432051 - DNA, 25 bp, Homo sapien
tgtgcaggttcatgtctggcctgtg

SEQ ID NO: 1432052 - DNA, 25 bp, Homo sapien
gctactgtgggggtccaggctcggg

SEQ ID NO: 1432053 - DNA, 25 bp, Homo sapien
cctaggcagaggtggggcgaggacc

SEQ ID NO: 1432054 - DNA, 25 bp, Homo sapien
accccaaagagaagccgaggaggtg

SEQ ID NO: 1432055 - DNA, 25 bp, Homo sapien
agagaagccgaggaggtgatgtgaa

SEQ ID NO: 1432056 - DNA, 25 bp, Homo sapien
ggcgaggaccccaaagagaagccga

SEQ ID NO: 1432057 - DNA, 25 bp, Homo sapien
tggggcccatggagtcatcctgggt

SEQ ID NO: 1432058 - DNA, 25 bp, Homo sapien
ggggcccatggagtcatcctgggtg

SEQ ID NO: 1432059 - DNA, 25 bp, Homo sapien
tgacatctcctcctcagtgtgaggt

SEQ ID NO: 1432060 - DNA, 25 bp, Homo sapien
catctcctcctcagtgtgaggtggg

SEQ ID NO: 1432061 - DNA, 25 bp, Homo sapien
tgtgcagctgacatctcctcctcag

SEQ ID NO: 1432062 - DNA, 25 bp, Homo sapien
agctgacatctcctcctcagtgtga

SEQ ID NO: 1432063 - DNA, 25 bp, Homo sapien
ctttgcttcgtataagcaaggtgtc

SEQ ID NO: 1432064 - DNA, 25 bp, Homo sapien
gcttcgtataagcaaggtgtctgtt

SEQ ID NO: 1432065 - DNA, 25 bp, Homo sapien
tgtcccctttgcttcgtataagcaa

SEQ ID NO: 1432066 - DNA, 25 bp, Homo sapien
cgtataagcaaggtgtctgttgcca

SEQ ID NO: 1432067 - DNA, 25 bp, Homo sapien
ctaggctggaaggacacgtatgtct

SEQ ID NO: 1432068 - DNA, 25 bp, Homo sapien
catggcaagccctttcgctggttaa

SEQ ID NO: 1432069 - DNA, 25 bp, Homo sapien
gtccatgcatctcgtaaatacagta

SEQ ID NO: 1432070 - DNA, 25 bp, Homo sapien
tctgccagaaactcgcgttgaggag

SEQ ID NO: 1432071 - DNA, 25 bp, Homo sapien
gaatgtgaacgcctcctggatcatg

SEQ ID NO: 1432072 - DNA, 25 bp, Homo sapien
caaatcttctttcgccggcgtgacg

SEQ ID NO: 1432073 - DNA, 25 bp, Homo sapien
tgtgccgatgcaacgtaagacaccc

SEQ ID NO: 1432074 - DNA, 25 bp, Homo sapien
gatcatgcttgaggcgagccgagta

SEQ ID NO: 1432075 - DNA, 25 bp, Homo sapien
gaagttggagagcgcgtctctcgcc

SEQ ID NO: 1432076 - DNA, 25 bp, Homo sapien
gcgggaagttggagagcgcgtctct

SEQ ID NO: 1432077 - DNA, 25 bp, Homo sapien
ctggcgggaagttggagagcgcgtc

SEQ ID NO: 1432078 - DNA, 25 bp, Homo sapien
ttggagagcgcgtctctcgcccctg

SEQ ID NO: 1432079 - DNA, 25 bp, Homo sapien
gttctcagcccctgcaaagacggaa

SEQ ID NO: 1432080 - DNA, 25 bp, Homo sapien
agaaaccctgcaaaggtgcaccgag

SEQ ID NO: 1432081 - DNA, 25 bp, Homo sapien
gcccctgcaaagacggaaacagaaa

SEQ ID NO: 1432082 - DNA, 25 bp, Homo sapien
gcaccgagtccttaagctgcttgta

SEQ ID NO: 1432083 - DNA, 25 bp, Homo sapien
gtgctttcatggctgtggtccgtag

SEQ ID NO: 1432084 - DNA, 25 bp, Homo sapien
ttcatggctgtggtccgtaggtgac

SEQ ID NO: 1432085 - DNA, 25 bp, Homo sapien
tgctttcatggctgtggtccgtagg

SEQ ID NO: 1432086 - DNA, 25 bp, Homo sapien
ctttcatggctgtggtccgtaggtg

SEQ ID NO: 1432087 - DNA, 25 bp, Homo sapien
cccaatgaaggacgatggtctctgc

SEQ ID NO: 1432088 - DNA, 25 bp, Homo sapien
cagagacaactttgatgttcgacgt

SEQ ID NO: 1432089 - DNA, 25 bp, Homo sapien
gatgagtgacactctgattgtctca

SEQ ID NO: 1432090 - DNA, 25 bp, Homo sapien
tgttcgacgtcagggagtcgctttg

SEQ ID NO: 1432091 - DNA, 25 bp, Homo sapien
ccgagtttcgtgaccttggttggag

SEQ ID NO: 1432092 - DNA, 25 bp, Homo sapien
ctctggctgttaggctgttggtgct

SEQ ID NO: 1432093 - DNA, 25 bp, Homo sapien
gcccagggaggcaatgtctaatcta

SEQ ID NO: 1432094 - DNA, 25 bp, Homo sapien
gaatgtgaatggattgtagcctccc

SEQ ID NO: 1432095 - DNA, 25 bp, Homo sapien
ggccttccgggacagtaggctctta

SEQ ID NO: 1432096 - DNA, 25 bp, Homo sapien
gccttccgggacagtaggctcttaa

SEQ ID NO: 1432097 - DNA, 25 bp, Homo sapien
accgacagctcgtccccgccacctc

SEQ ID NO: 1432098 - DNA, 25 bp, Homo sapien
tacagctgtccctacggcccgcacc

SEQ ID NO: 1432099 - DNA, 25 bp, Homo sapien
gtcgctccgacagccctacagctgt

SEQ ID NO: 1432100 - DNA, 25 bp, Homo sapien
gggcctcgtcgctccgacagcccta

SEQ ID NO: 1432101 - DNA, 25 bp, Homo sapien
ttccgagccgcctccaaaactctcc

SEQ ID NO: 1432102 - DNA, 25 bp, Homo sapien
tacgggtacggcgagagccttccga

SEQ ID NO: 1432103 - DNA, 25 bp, Homo sapien
agcagtccctccacgcgtcggggcc

SEQ ID NO: 1432104 - DNA, 25 bp, Homo sapien
ctccccgcggacctcagcagtccct

SEQ ID NO: 1432105 - DNA, 25 bp, Homo sapien
caagacaggagttcactcaaacgct

SEQ ID NO: 1432106 - DNA, 25 bp, Homo sapien
caaacgctggtgctgttcgctcttc

SEQ ID NO: 1432107 - DNA, 25 bp, Homo sapien
gtcgagttgcagatccgagtccccg

SEQ ID NO: 1432108 - DNA, 25 bp, Homo sapien
ggtaatgtcccagcgcaggtcgagt

SEQ ID NO: 1432109 - DNA, 25 bp, Homo sapien
ccttcgcgggtagccggctttgcgc

SEQ ID NO: 1432110 - DNA, 25 bp, Homo sapien
atgggcggctcacgatcctgggcac

SEQ ID NO: 1432111 - DNA, 25 bp, Homo sapien
gctttgcgcttactgcgtcccgcag

SEQ ID NO: 1432112 - DNA, 25 bp, Homo sapien
taaatgagcgtttgctgcgcaccca

SEQ ID NO: 1432113 - DNA, 25 bp, Homo sapien
gcacgagaggccgcggctggactgg

SEQ ID NO: 1432114 - DNA, 25 bp, Homo sapien
cgcacgagaggccgcggctggactg

SEQ ID NO: 1432115 - DNA, 25 bp, Homo sapien
acgagaggccgcggctggactggga

SEQ ID NO: 1432116 - DNA, 25 bp, Homo sapien
cacgagaggccgcggctggactggg

SEQ ID NO: 1432117 - DNA, 25 bp, Homo sapien
accaagatttggcaactttgtcatt

SEQ ID NO: 1432118 - DNA, 25 bp, Homo sapien
tccacatgttcggagagaccaagat

SEQ ID NO: 1432119 - DNA, 25 bp, Homo sapien
catccacatgttcggagagaccaag

SEQ ID NO: 1432120 - DNA, 25 bp, Homo sapien
acatgttcggagagaccaagatttg

SEQ ID NO: 1432121 - DNA, 25 bp, Homo sapien
cacaagtagggatgggcgccatcaa

SEQ ID NO: 1432122 - DNA, 25 bp, Homo sapien
taaataggggccatgttgcctggag

SEQ ID NO: 1432123 - DNA, 25 bp, Homo sapien
catcctcacaagtagggatgggcgc

SEQ ID NO: 1432124 - DNA, 25 bp, Homo sapien
ccacatcctcacaagtagggatggg

SEQ ID NO: 1432125 - DNA, 25 bp, Homo sapien
cgctggcataattgctgtgtgaggc

SEQ ID NO: 1432126 - DNA, 25 bp, Homo sapien
ccaagccgctggcataattgctgtg

SEQ ID NO: 1432127 - DNA, 25 bp, Homo sapien
gcctccacgggagagtcatgacatc

SEQ ID NO: 1432128 - DNA, 25 bp, Homo sapien
tgcagggattcttatgagggctcca

SEQ ID NO: 1432129 - DNA, 25 bp, Homo sapien
tcttcaagtaagtcagaacggtccg

SEQ ID NO: 1432130 - DNA, 25 bp, Homo sapien
acagagattccccagtgcgctggct

SEQ ID NO: 1432131 - DNA, 25 bp, Homo sapien
tgcctcaagtgtgcagactgccaga

SEQ ID NO: 1432132 - DNA, 25 bp, Homo sapien
gagcgtctactgcaaggaggacttc

SEQ ID NO: 1432133 - DNA, 25 bp, Homo sapien
catgtccacatccagaggcgtctct

SEQ ID NO: 1432134 - DNA, 25 bp, Homo sapien
agcctgcttcaagggccttagaggc

SEQ ID NO: 1432135 - DNA, 25 bp, Homo sapien
ccttagaggcttgcaagagttgctt

SEQ ID NO: 1432136 - DNA, 25 bp, Homo sapien
cagctgcttttaggttcatgtccac

SEQ ID NO: 1432137 - DNA, 25 bp, Homo sapien
gtcagacctcagaccccactggttt

SEQ ID NO: 1432138 - DNA, 25 bp, Homo sapien
ggatgtccgagtcagacctcagacc

SEQ ID NO: 1432139 - DNA, 25 bp, Homo sapien
ctggtccagtgtggcggctcaggga

SEQ ID NO: 1432140 - DNA, 25 bp, Homo sapien
tgctggatgtccgagtcagacctca

SEQ ID NO: 1432141 - DNA, 25 bp, Homo sapien
agtctgcaacccttcccacccggtg

SEQ ID NO: 1432142 - DNA, 25 bp, Homo sapien
ctccctgtagtctgcaacccttccc

SEQ ID NO: 1432143 - DNA, 25 bp, Homo sapien
cccgccaggtgagccttccacccca

SEQ ID NO: 1432144 - DNA, 25 bp, Homo sapien
tgtagtctgcaacccttcccacccg

SEQ ID NO: 1432145 - DNA, 25 bp, Homo sapien
acttcccttgttcccggcactgctc

SEQ ID NO: 1432146 - DNA, 25 bp, Homo sapien
ttagccacggtcacttcccttgttc

SEQ ID NO: 1432147 - DNA, 25 bp, Homo sapien
gcactgctctgcttcatgaaatgac

SEQ ID NO: 1432148 - DNA, 25 bp, Homo sapien
gttcccggcactgctctgcttcatg

SEQ ID NO: 1432149 - DNA, 25 bp, Homo sapien
caacccgagatgaagaccaggtggc

SEQ ID NO: 1432150 - DNA, 25 bp, Homo sapien
catctggccacggattcagtgctga

SEQ ID NO: 1432151 - DNA, 25 bp, Homo sapien
gtttgggccattgactctgtgatgg

SEQ ID NO: 1432152 - DNA, 25 bp, Homo sapien
cctcagtgggtggattcatagccct

SEQ ID NO: 1432153 - DNA, 25 bp, Homo sapien
tggaaggaggccgggaggtcaggac

SEQ ID NO: 1432154 - DNA, 25 bp, Homo sapien
tgtaatatctcaaaagtggaaggag

SEQ ID NO: 1432155 - DNA, 25 bp, Homo sapien
cttgtaatatctcaaaagtggaagg

SEQ ID NO: 1432156 - DNA, 25 bp, Homo sapien
taatatctcaaaagtggaaggaggc

SEQ ID NO: 1432157 - DNA, 25 bp, Homo sapien
ggaaattgtactctgtggttgttgc

SEQ ID NO: 1432158 - DNA, 25 bp, Homo sapien
gcgatgttggtgtggacacagagga

SEQ ID NO: 1432159 - DNA, 25 bp, Homo sapien
tgtggcgatcctggtaactggcagc

SEQ ID NO: 1432160 - DNA, 25 bp, Homo sapien
tccacaggggcatgtggcgatcctg

SEQ ID NO: 1432161 - DNA, 25 bp, Homo sapien
ggatggaggccgctgtgtcgcaggg

SEQ ID NO: 1432162 - DNA, 25 bp, Homo sapien
tagcgggatggaggccgctgtgtcg

SEQ ID NO: 1432163 - DNA, 25 bp, Homo sapien
gccagaggctcccggtagcgggatg

SEQ ID NO: 1432164 - DNA, 25 bp, Homo sapien
tcccggtagcgggatggaggccgct

SEQ ID NO: 1432165 - DNA, 25 bp, Homo sapien
tgccagtctgcaggccgtaggtggg

SEQ ID NO: 1432166 - DNA, 25 bp, Homo sapien
ctgccagtctgcaggccgtaggtgg

SEQ ID NO: 1432167 - DNA, 25 bp, Homo sapien
ctgtccgccaagggcaggtaggcag

SEQ ID NO: 1432168 - DNA, 25 bp, Homo sapien
gtccgccaagggcaggtaggcagcg

SEQ ID NO: 1432169 - DNA, 25 bp, Homo sapien
ccgccaagggcaggtaggcagcgtc

SEQ ID NO: 1432170 - DNA, 25 bp, Homo sapien
tccgccaagggcaggtaggcagcgt

SEQ ID NO: 1432171 - DNA, 25 bp, Homo sapien
cttgggagcccgggagctgctccca

SEQ ID NO: 1432172 - DNA, 25 bp, Homo sapien
ttgggagcccgggagctgctcccat

SEQ ID NO: 1432173 - DNA, 25 bp, Homo sapien
taacgatcagatggtccggatagtg

SEQ ID NO: 1432174 - DNA, 25 bp, Homo sapien
taaggtaacgatcagatggtccgga

SEQ ID NO: 1432175 - DNA, 25 bp, Homo sapien
cgatcagatggtccggatagtggct

SEQ ID NO: 1432176 - DNA, 25 bp, Homo sapien
tttaaggtaacgatcagatggtccg

SEQ ID NO: 1432177 - DNA, 25 bp, Homo sapien
ggaccaggcccacagtcatttgtgc

SEQ ID NO: 1432178 - DNA, 25 bp, Homo sapien
gaagccacgagcttctccacagggc

SEQ ID NO: 1432179 - DNA, 25 bp, Homo sapien
tccccggaggccttcgtgtctctgg

SEQ ID NO: 1432180 - DNA, 25 bp, Homo sapien
gggtcccattagagccagtgtctag

SEQ ID NO: 1432181 - DNA, 25 bp, Homo sapien
agtttgtcactctggtccccggagg

SEQ ID NO: 1432182 - DNA, 25 bp, Homo sapien
tgacaggatttctgtaggagtggtc

SEQ ID NO: 1432183 - DNA, 25 bp, Homo sapien
tctgtaggagtggtctgtgccaccg

SEQ ID NO: 1432184 - DNA, 25 bp, Homo sapien
ctgtgccaccgctgcactgggccat

SEQ ID NO: 1432185 - DNA, 25 bp, Homo sapien
ggctaagagcataggtgacaggatt

SEQ ID NO: 1432186 - DNA, 25 bp, Homo sapien
ttttctctcagtaagcacccccgat

SEQ ID NO: 1432187 - DNA, 25 bp, Homo sapien
tcccgctcgggggagtttgctcaca

SEQ ID NO: 1432188 - DNA, 25 bp, Homo sapien
ctcgggggagtttgctcacagctga

SEQ ID NO: 1432189 - DNA, 25 bp, Homo sapien
cacccccgatgcgtctcccgctcgg

SEQ ID NO: 1432190 - DNA, 25 bp, Homo sapien
ctgtagtgagaagggcagatgaggt

SEQ ID NO: 1432191 - DNA, 25 bp, Homo sapien
tgtagtgagaagggcagatgaggtg

SEQ ID NO: 1432192 - DNA, 25 bp, Homo sapien
tcaatagccaagagtaaggaagaca

SEQ ID NO: 1432193 - DNA, 25 bp, Homo sapien
ggtccccaccgactgccttcaatag

SEQ ID NO: 1432194 - DNA, 25 bp, Homo sapien
gggctggtccccaccgactgccttc

SEQ ID NO: 1432195 - DNA, 25 bp, Homo sapien
gttccatggcagctccacgcacagg

SEQ ID NO: 1432196 - DNA, 25 bp, Homo sapien
tgtccaagtgcctgaacagaagact

SEQ ID NO: 1432197 - DNA, 25 bp, Homo sapien
gtgcctgaacagaagactagaacct

SEQ ID NO: 1432198 - DNA, 25 bp, Homo sapien
gaacagaagactagaacctccactg

SEQ ID NO: 1432199 - DNA, 25 bp, Homo sapien
cagctatggcttctgtccaagtgcc

SEQ ID NO: 1432200 - DNA, 25 bp, Homo sapien
gttctacatcctcaggttcggccat

SEQ ID NO: 1432201 - DNA, 25 bp, Homo sapien
ctgtgtgctttgttctacatcctca

SEQ ID NO: 1432202 - DNA, 25 bp, Homo sapien
gggaggtctagaaccatccagagcc

SEQ ID NO: 1432203 - DNA, 25 bp, Homo sapien
ggtctagaaccatccagagccgact

SEQ ID NO: 1432204 - DNA, 25 bp, Homo sapien
gaatttataattccgtaggccaagc

SEQ ID NO: 1432205 - DNA, 25 bp, Homo sapien
tacatttttcagcacgagcactgcc

SEQ ID NO: 1432206 - DNA, 25 bp, Homo sapien
tattagtccccatcattgcaagaag

SEQ ID NO: 1432207 - DNA, 25 bp, Homo sapien
tgtgtgtagcagtgccgaaccagcg

SEQ ID NO: 1432208 - DNA, 25 bp, Homo sapien
taaatatgcacagaagggacagact

SEQ ID NO: 1432209 - DNA, 25 bp, Homo sapien
tgggccacagtagttccgggatgac

SEQ ID NO: 1432210 - DNA, 25 bp, Homo sapien
gactttattccgtgtgtcctccagg

SEQ ID NO: 1432211 - DNA, 25 bp, Homo sapien
ctcccaagatcagggcaggccgtgt

SEQ ID NO: 1432212 - DNA, 25 bp, Homo sapien
gaagacagagttctgaggcccacct

SEQ ID NO: 1432213 - DNA, 25 bp, Homo sapien
gacactgttgggtgtgcaagctcac

SEQ ID NO: 1432214 - DNA, 25 bp, Homo sapien
ggtgactttacagcccacgagtggg

SEQ ID NO: 1432215 - DNA, 25 bp, Homo sapien
tctataagagcgtcaagaggagccg

SEQ ID NO: 1432216 - DNA, 25 bp, Homo sapien
gccaggccgaggccttaggaaagtc

SEQ ID NO: 1432217 - DNA, 25 bp, Homo sapien
gatctttcttgaggccttggcaact

SEQ ID NO: 1432218 - DNA, 25 bp, Homo sapien
ggatctttcttgaggccttggcaac

SEQ ID NO: 1432219 - DNA, 25 bp, Homo sapien
tgaacagatgactgggttccagcct

SEQ ID NO: 1432220 - DNA, 25 bp, Homo sapien
cagctatgaacagatgactgggttc

SEQ ID NO: 1432221 - DNA, 25 bp, Homo sapien
gcccacacagctatgaacagatgac

SEQ ID NO: 1432222 - DNA, 25 bp, Homo sapien
gggacactggcctactcccatagtc

SEQ ID NO: 1432223 - DNA, 25 bp, Homo sapien
tttgcaaagaatcataactgttctc

SEQ ID NO: 1432224 - DNA, 25 bp, Homo sapien
caggtactgagttctcaaatgtgga

SEQ ID NO: 1432225 - DNA, 25 bp, Homo sapien
tgcatgttatgaatcctcaggttgt

SEQ ID NO: 1432226 - DNA, 25 bp, Homo sapien
gaatcataactgttctcaggtactg

SEQ ID NO: 1432227 - DNA, 25 bp, Homo sapien
gattgggaaagtcaatctcatctgg

SEQ ID NO: 1432228 - DNA, 25 bp, Homo sapien
gaaagtcaatctcatctgggctgtt

SEQ ID NO: 1432229 - DNA, 25 bp, Homo sapien
tcttggcaggattgggaaagtcaat

SEQ ID NO: 1432230 - DNA, 25 bp, Homo sapien
caggattgggaaagtcaatctcatc

SEQ ID NO: 1432231 - DNA, 25 bp, Homo sapien
tacagatgtctaagagtggtcctca

SEQ ID NO: 1432232 - DNA, 25 bp, Homo sapien
tccctgaccatatgggcctgcttgc

SEQ ID NO: 1432233 - DNA, 25 bp, Homo sapien
gggtccctgggctgacctatcattg

SEQ ID NO: 1432234 - DNA, 25 bp, Homo sapien
tattagtacacgagccacaagggac

SEQ ID NO: 1432235 - DNA, 25 bp, Homo sapien
gctgccatattggtgtgtctgaccc

SEQ ID NO: 1432236 - DNA, 25 bp, Homo sapien
ggacctgggaatttagtctttgcag

SEQ ID NO: 1432237 - DNA, 25 bp, Homo sapien
tgggttggcctctggatatcaggct

SEQ ID NO: 1432238 - DNA, 25 bp, Homo sapien
tgtctgacccatgcttggctgcaag

SEQ ID NO: 1432239 - DNA, 25 bp, Homo sapien
aatggaagtcctccgctgattccta

SEQ ID NO: 1432240 - DNA, 25 bp, Homo sapien
cattattttcaatggaagtcctccg

SEQ ID NO: 1432241 - DNA, 25 bp, Homo sapien
aaagtacgccaatgtgaatttccat

SEQ ID NO: 1432242 - DNA, 25 bp, Homo sapien
tttaaggatcgaaagtacgccaatg

SEQ ID NO: 1432243 - DNA, 25 bp, Homo sapien
ggaccaccgctgcagattgcctgag

SEQ ID NO: 1432244 - DNA, 25 bp, Homo sapien
ggttttcattgcaggtgactgaggc

SEQ ID NO: 1432245 - DNA, 25 bp, Homo sapien
tacaaaccagagaatatgaacctgt

SEQ ID NO: 1432246 - DNA, 25 bp, Homo sapien
actctgatggcaagaggtggttttc

SEQ ID NO: 1432247 - DNA, 25 bp, Homo sapien
tttggattccaaacctgcagtctgt

SEQ ID NO: 1432248 - DNA, 25 bp, Homo sapien
agacacatttggattccaaacctgc

SEQ ID NO: 1432249 - DNA, 25 bp, Homo sapien
acacatttggattccaaacctgcag

SEQ ID NO: 1432250 - DNA, 25 bp, Homo sapien
atttggattccaaacctgcagtctg

SEQ ID NO: 1432251 - DNA, 25 bp, Homo sapien
cagccatatcggctgatgccagtct

SEQ ID NO: 1432252 - DNA, 25 bp, Homo sapien
tgccagtcttccagagttccccatc

SEQ ID NO: 1432253 - DNA, 25 bp, Homo sapien
atcccttgtagggtgaaatatttgg

SEQ ID NO: 1432254 - DNA, 25 bp, Homo sapien
gagttccccatcccttgtagggtga

SEQ ID NO: 1432255 - DNA, 25 bp, Homo sapien
ctcaattggaggacagttttggtca

SEQ ID NO: 1432256 - DNA, 25 bp, Homo sapien
tttgaaggagttggtttagatgagc

SEQ ID NO: 1432257 - DNA, 25 bp, Homo sapien
cctagctgactcaattggaggacag

SEQ ID NO: 1432258 - DNA, 25 bp, Homo sapien
gcaagtctacccctctgaaagcttt

SEQ ID NO: 1432259 - DNA, 25 bp, Homo sapien
gaagagtaatttagggagcagccct

SEQ ID NO: 1432260 - DNA, 25 bp, Homo sapien
gaaacgctgtcctgaatggtgctgc

SEQ ID NO: 1432261 - DNA, 25 bp, Homo sapien
cagtcccatggtcagaaagccagaa

SEQ ID NO: 1432262 - DNA, 25 bp, Homo sapien
tgtgcacccatctaccatcaggaag

SEQ ID NO: 1432263 - DNA, 25 bp, Homo sapien
tgcaaactggaatttagccagctgg

SEQ ID NO: 1432264 - DNA, 25 bp, Homo sapien
gcaaactggaatttagccagctgga

SEQ ID NO: 1432265 - DNA, 25 bp, Homo sapien
ctggaatttagccagctggaattta

SEQ ID NO: 1432266 - DNA, 25 bp, Homo sapien
aactggaatttagccagctggaatt

SEQ ID NO: 1432267 - DNA, 25 bp, Homo sapien
cattgcctatcacatgaagtgatgg

SEQ ID NO: 1432268 - DNA, 25 bp, Homo sapien
ggtgagaaggcattgcctatcacat

SEQ ID NO: 1432269 - DNA, 25 bp, Homo sapien
cttaaatgagatcagcagagtagga

SEQ ID NO: 1432270 - DNA, 25 bp, Homo sapien
aaatgagatcagcagagtaggaaag

SEQ ID NO: 1432271 - DNA, 25 bp, Homo sapien
caaacatagacacttctcttgaggt

SEQ ID NO: 1432272 - DNA, 25 bp, Homo sapien
tcatgatttttgcttgagaagtctg

SEQ ID NO: 1432273 - DNA, 25 bp, Homo sapien
tgtgctgcagtggtcatgatttttg

SEQ ID NO: 1432274 - DNA, 25 bp, Homo sapien
cctcgttttttggtgtgctgcagtg

SEQ ID NO: 1432275 - DNA, 25 bp, Homo sapien
tggaatggaaacagcaacagggact

SEQ ID NO: 1432276 - DNA, 25 bp, Homo sapien
tccactgtggaaaaactacagcgtg

SEQ ID NO: 1432277 - DNA, 25 bp, Homo sapien
gagaagatccaaagcagtggcactg

SEQ ID NO: 1432278 - DNA, 25 bp, Homo sapien
gggacagaaacacctcatcagagtc

SEQ ID NO: 1432279 - DNA, 25 bp, Homo sapien
tccgcagtcggtgttccattgcttt

SEQ ID NO: 1432280 - DNA, 25 bp, Homo sapien
cgcagtcggtgttccattgctttcc

SEQ ID NO: 1432281 - DNA, 25 bp, Homo sapien
gcagtcggtgttccattgctttcct

SEQ ID NO: 1432282 - DNA, 25 bp, Homo sapien
ccgcagtcggtgttccattgctttc

SEQ ID NO: 1432283 - DNA, 25 bp, Homo sapien
cacagggaagtacatagttcagcca

SEQ ID NO: 1432284 - DNA, 25 bp, Homo sapien
cactgatcaagctctgtatggatga

SEQ ID NO: 1432285 - DNA, 25 bp, Homo sapien
ctcagagaaagcagacgtgggcttc

SEQ ID NO: 1432286 - DNA, 25 bp, Homo sapien
ggtcttttaaatgatcagctcctgc

SEQ ID NO: 1432287 - DNA, 25 bp, Homo sapien
gcgcattaaccactttctgtatcgg

SEQ ID NO: 1432288 - DNA, 25 bp, Homo sapien
tctgtatcggtagttaaaggcactg

SEQ ID NO: 1432289 - DNA, 25 bp, Homo sapien
gagtggatgccaagcttcgttcaga

SEQ ID NO: 1432290 - DNA, 25 bp, Homo sapien
caattaaagtgattccctggagtgg

SEQ ID NO: 1432291 - DNA, 25 bp, Homo sapien
caggactaagctttgggctccacaa

SEQ ID NO: 1432292 - DNA, 25 bp, Homo sapien
tggaaaccgagattgctacgcaagt

SEQ ID NO: 1432293 - DNA, 25 bp, Homo sapien
tagtgcgtataaatgtggctgctgc

SEQ ID NO: 1432294 - DNA, 25 bp, Homo sapien
taacttgtgaacaccctgacctggt

SEQ ID NO: 1432295 - DNA, 25 bp, Homo sapien
aaactgaaggcatcatcctggtgac

SEQ ID NO: 1432296 - DNA, 25 bp, Homo sapien
aaagtcagtgaattccccagatgga

SEQ ID NO: 1432297 - DNA, 25 bp, Homo sapien
ttcaagagtggcatacctggctggg

SEQ ID NO: 1432298 - DNA, 25 bp, Homo sapien
gacttaagctaaacagcaggttgca

SEQ ID NO: 1432299 - DNA, 25 bp, Homo sapien
cacagaactgattttattagccaat

SEQ ID NO: 1432300 - DNA, 25 bp, Homo sapien
aactgattttattagccaatacata

SEQ ID NO: 1432301 - DNA, 25 bp, Homo sapien
cagaactgattttattagccaatac

SEQ ID NO: 1432302 - DNA, 25 bp, Homo sapien
agaactgattttattagccaataca

SEQ ID NO: 1432303 - DNA, 25 bp, Homo sapien
tatgctattacagactgcagttttc

SEQ ID NO: 1432304 - DNA, 25 bp, Homo sapien
gaagccttatgctattacagactgc

SEQ ID NO: 1432305 - DNA, 25 bp, Homo sapien
aatggaagccttatgctattacaga

SEQ ID NO: 1432306 - DNA, 25 bp, Homo sapien
gccttatgctattacagactgcagt

SEQ ID NO: 1432307 - DNA, 25 bp, Homo sapien
gccttgccagttgtgtgccgctgca

SEQ ID NO: 1432308 - DNA, 25 bp, Homo sapien
ttgccagttgtgtgccgctgcagca

SEQ ID NO: 1432309 - DNA, 25 bp, Homo sapien
gttgtgtgccgctgcagcaccaaag

SEQ ID NO: 1432310 - DNA, 25 bp, Homo sapien
ttaagccttgccagttgtgtgccgc

SEQ ID NO: 1432311 - DNA, 25 bp, Homo sapien
atcctggtctcggagagtggggtca

SEQ ID NO: 1432312 - DNA, 25 bp, Homo sapien
ggcagccatcctggtctcggagagt

SEQ ID NO: 1432313 - DNA, 25 bp, Homo sapien
ggtctcggagagtggggtcagcacc

SEQ ID NO: 1432314 - DNA, 25 bp, Homo sapien
aatatccagaaactcacaggcagag

SEQ ID NO: 1432315 - DNA, 25 bp, Homo sapien
gaaatcctgtagaacactggaaact

SEQ ID NO: 1432316 - DNA, 25 bp, Homo sapien
tggtgtagagacaactgggactcac

SEQ ID NO: 1432317 - DNA, 25 bp, Homo sapien
gaactatagcttcacacaacatggg

SEQ ID NO: 1432318 - DNA, 25 bp, Homo sapien
gcagagaaacccctttagatgtcag

SEQ ID NO: 1432319 - DNA, 25 bp, Homo sapien
ggatcactgatatgaaatctttctt

SEQ ID NO: 1432320 - DNA, 25 bp, Homo sapien
tacaaacaaccagtttttgatttca

SEQ ID NO: 1432321 - DNA, 25 bp, Homo sapien
tttgagatagaagcttggatcactg

SEQ ID NO: 1432322 - DNA, 25 bp, Homo sapien
aacaaccagtttttgatttcactga

SEQ ID NO: 1432323 - DNA, 25 bp, Homo sapien
gactgcacgtgcaaggaaaagcctt

SEQ ID NO: 1432324 - DNA, 25 bp, Homo sapien
acagatggtgctttgcgtggaagac

SEQ ID NO: 1432325 - DNA, 25 bp, Homo sapien
gctcatgaggatacaaagcctgccc

SEQ ID NO: 1432326 - DNA, 25 bp, Homo sapien
taacagtgtggaggtaacagaacag

SEQ ID NO: 1432327 - DNA, 25 bp, Homo sapien
ttataccaatatactcttcagcaag

SEQ ID NO: 1432328 - DNA, 25 bp, Homo sapien
tataccaatatactcttcagcaagg

SEQ ID NO: 1432329 - DNA, 25 bp, Homo sapien
gacgtacagtagtagaataccggcc

SEQ ID NO: 1432330 - DNA, 25 bp, Homo sapien
taacctgcgattggctctgacctag

SEQ ID NO: 1432331 - DNA, 25 bp, Homo sapien
aataccggcctctagttaacctgcg

SEQ ID NO: 1432332 - DNA, 25 bp, Homo sapien
tagttttaatcggaaggagccagga

SEQ ID NO: 1432333 - DNA, 25 bp, Homo sapien
ctacagcattgtggagtggagtctc

SEQ ID NO: 1432334 - DNA, 25 bp, Homo sapien
tgacaagggagcatatcagtggagc

SEQ ID NO: 1432335 - DNA, 25 bp, Homo sapien
tggagtctccacatcactgacctgg

SEQ ID NO: 1432336 - DNA, 25 bp, Homo sapien
tgtcatgttggaagtcagtctctgc

SEQ ID NO: 1432337 - DNA, 25 bp, Homo sapien
ataatgtagagctgtttggccttca

SEQ ID NO: 1432338 - DNA, 25 bp, Homo sapien
cataatgtagagctgtttggccttc

SEQ ID NO: 1432339 - DNA, 25 bp, Homo sapien
taatgtagagctgtttggccttcat

SEQ ID NO: 1432340 - DNA, 25 bp, Homo sapien
tatccaaggcttgtctggtccaaag

SEQ ID NO: 1432341 - DNA, 25 bp, Homo sapien
cacgacaagtccagaaggctatcca

SEQ ID NO: 1432342 - DNA, 25 bp, Homo sapien
tccaaagctgtccaagagcctaggc

SEQ ID NO: 1432343 - DNA, 25 bp, Homo sapien
gagcctaggcatggaatcaggcacc

SEQ ID NO: 1432344 - DNA, 25 bp, Homo sapien
ctctgcagcaattctttcttatttt

SEQ ID NO: 1432345 - DNA, 25 bp, Homo sapien
atgtactctgcagcaattctttctt

SEQ ID NO: 1432346 - DNA, 25 bp, Homo sapien
tactctgcagcaattctttcttatt

SEQ ID NO: 1432347 - DNA, 25 bp, Homo sapien
tgtactctgcagcaattctttctta

SEQ ID NO: 1432348 - DNA, 25 bp, Homo sapien
ccttatttgaaaaaccatacatctg

SEQ ID NO: 1432349 - DNA, 25 bp, Homo sapien
tgataaatagctactgtaaacatga

SEQ ID NO: 1432350 - DNA, 25 bp, Homo sapien
gtattactgattattcatccctttt

SEQ ID NO: 1432351 - DNA, 25 bp, Homo sapien
tccacatgggctacaacagtaaaag

SEQ ID NO: 1432352 - DNA, 25 bp, Homo sapien
tacctaagtgaattgggctacaata

SEQ ID NO: 1432353 - DNA, 25 bp, Homo sapien
tgctacagcatatctggacaaagag

SEQ ID NO: 1432354 - DNA, 25 bp, Homo sapien
gctacatctgattgtttaaaccagg

SEQ ID NO: 1432355 - DNA, 25 bp, Homo sapien
cagctgctcaagtcaagaatttggg

SEQ ID NO: 1432356 - DNA, 25 bp, Homo sapien
gactgataagcagacacatataaag

SEQ ID NO: 1432357 - DNA, 25 bp, Homo sapien
tccctatccttgaaaattttcaagc

SEQ ID NO: 1432358 - DNA, 25 bp, Homo sapien
tcaagcttagatgcacgactgataa

SEQ ID NO: 1432359 - DNA, 25 bp, Homo sapien
cacatataaagaggttctaggccgg

SEQ ID NO: 1432360 - DNA, 25 bp, Homo sapien
ttgccaaagcaaccactaaagttag

SEQ ID NO: 1432361 - DNA, 25 bp, Homo sapien
gccaaagcaaccactaaagttagct

SEQ ID NO: 1432362 - DNA, 25 bp, Homo sapien
caaagcaaccactaaagttagcttt

SEQ ID NO: 1432363 - DNA, 25 bp, Homo sapien
tgccaaagcaaccactaaagttagc

SEQ ID NO: 1432364 - DNA, 25 bp, Homo sapien
gaccagctgtcggatatcagagcag

SEQ ID NO: 1432365 - DNA, 25 bp, Homo sapien
cagtggagagattaactgctaccac

SEQ ID NO: 1432366 - DNA, 25 bp, Homo sapien
tgcactgacctcctctatgcagtct

SEQ ID NO: 1432367 - DNA, 25 bp, Homo sapien
agcctgtaaagacactgctggcacc

SEQ ID NO: 1432368 - DNA, 25 bp, Homo sapien
tccatcaacggatgtgttggaagag

SEQ ID NO: 1432369 - DNA, 25 bp, Homo sapien
ccaagtatgctgtgttgggcaaata

SEQ ID NO: 1432370 - DNA, 25 bp, Homo sapien
cacatcaggacacttttcaaagcca

SEQ ID NO: 1432371 - DNA, 25 bp, Homo sapien
ttattggagcttcacataaggtttt

SEQ ID NO: 1432372 - DNA, 25 bp, Homo sapien
tcagggcgctaccttaaagagcaga

SEQ ID NO: 1432373 - DNA, 25 bp, Homo sapien
ttcccaagccatgcagataaatgcc

SEQ ID NO: 1432374 - DNA, 25 bp, Homo sapien
gagcagagaactagacctcagtcca

SEQ ID NO: 1432375 - DNA, 25 bp, Homo sapien
tatattgagaggatgtcagggcgct

SEQ ID NO: 1432376 - DNA, 25 bp, Homo sapien
tgtaacgggcaaagcaaagactgca

SEQ ID NO: 1432377 - DNA, 25 bp, Homo sapien
taaccttgccaatcagagtaagcag

SEQ ID NO: 1432378 - DNA, 25 bp, Homo sapien
taagctcatgggattaagtcggcaa

SEQ ID NO: 1432379 - DNA, 25 bp, Homo sapien
catgtgtccttgaacctatggtgca

SEQ ID NO: 1432380 - DNA, 25 bp, Homo sapien
aaatttagcaacactaggcatagcc

SEQ ID NO: 1432381 - DNA, 25 bp, Homo sapien
ttgaccatttctagaacttactctg

SEQ ID NO: 1432382 - DNA, 25 bp, Homo sapien
caagttagttcttttaaggcagatg

SEQ ID NO: 1432383 - DNA, 25 bp, Homo sapien
gaaaccatcaatgagccaccagttc

SEQ ID NO: 1432384 - DNA, 25 bp, Homo sapien
aactatgacggcaacacaatgcagg

SEQ ID NO: 1432385 - DNA, 25 bp, Homo sapien
gaagataatgctacacagattcctg

SEQ ID NO: 1432386 - DNA, 25 bp, Homo sapien
gaattctagaagcactgagtcagta

SEQ ID NO: 1432387 - DNA, 25 bp, Homo sapien
taaagtattggtacagcagtcccct

SEQ ID NO: 1432388 - DNA, 25 bp, Homo sapien
gttatttacagatgctgggtattag

SEQ ID NO: 1432389 - DNA, 25 bp, Homo sapien
tgtctgtccctgtttttttgtccac

SEQ ID NO: 1432390 - DNA, 25 bp, Homo sapien
atctttgccagtttctatgtccagg

SEQ ID NO: 1432391 - DNA, 25 bp, Homo sapien
tgtgcagaggctcttaagttaatta

SEQ ID NO: 1432392 - DNA, 25 bp, Homo sapien
ttccaagtgtcatgggtacagactg

SEQ ID NO: 1432393 - DNA, 25 bp, Homo sapien
tccaagtgtcatgggtacagactga

SEQ ID NO: 1432394 - DNA, 25 bp, Homo sapien
caagtgtcatgggtacagactgaac

SEQ ID NO: 1432395 - DNA, 25 bp, Homo sapien
tctttccaagtgtcatgggtacaga

SEQ ID NO: 1432396 - DNA, 25 bp, Homo sapien
tatgaatttcaatccgatagactgc

SEQ ID NO: 1432397 - DNA, 25 bp, Homo sapien
gcctggtcctagcaaaagacttttg

SEQ ID NO: 1432398 - DNA, 25 bp, Homo sapien
ctctccctgactggattaattagaa

SEQ ID NO: 1432399 - DNA, 25 bp, Homo sapien
cagaccgggactttgacctcaatta

SEQ ID NO: 1432400 - DNA, 25 bp, Homo sapien
cacagctaacatcgtaccaaatggg

SEQ ID NO: 1432401 - DNA, 25 bp, Homo sapien
cagtactggaagtgttagtgagagc

SEQ ID NO: 1432402 - DNA, 25 bp, Homo sapien
tcaaaatcagataagggctcaacaa

SEQ ID NO: 1432403 - DNA, 25 bp, Homo sapien
tgatcaaatgggacttatcccaggg

SEQ ID NO: 1432404 - DNA, 25 bp, Homo sapien
tactttctctgtgaaataggaggta

SEQ ID NO: 1432405 - DNA, 25 bp, Homo sapien
tctactttctctgtgaaataggagg

SEQ ID NO: 1432406 - DNA, 25 bp, Homo sapien
ctttctctgtgaaataggaggtatt

SEQ ID NO: 1432407 - DNA, 25 bp, Homo sapien
ttattctactttctctgtgaaatag

SEQ ID NO: 1432408 - DNA, 25 bp, Homo sapien
tatttaatgccacataactatacac

SEQ ID NO: 1432409 - DNA, 25 bp, Homo sapien
gttagagtttcagttgggggagatg

SEQ ID NO: 1432410 - DNA, 25 bp, Homo sapien
gctggtgatgggcacacacaataca

SEQ ID NO: 1432411 - DNA, 25 bp, Homo sapien
ggtgatgggcacacacaatacaaat

SEQ ID NO: 1432412 - DNA, 25 bp, Homo sapien
agttccttatgtcctcgatcacagg

SEQ ID NO: 1432413 - DNA, 25 bp, Homo sapien
tgtgactagttccttatgtcctcga

SEQ ID NO: 1432414 - DNA, 25 bp, Homo sapien
gcaacactgtgactagttccttatg

SEQ ID NO: 1432415 - DNA, 25 bp, Homo sapien
gttgcagcaacactgtgactagttc

SEQ ID NO: 1432416 - DNA, 25 bp, Homo sapien
tgtaaatatctgttttctaataagc

SEQ ID NO: 1432417 - DNA, 25 bp, Homo sapien
ctgtaaatatctgttttctaataag

SEQ ID NO: 1432418 - DNA, 25 bp, Homo sapien
ttttctaataagcttacacaaaatc

SEQ ID NO: 1432419 - DNA, 25 bp, Homo sapien
tatctgttttctaataagcttacac

SEQ ID NO: 1432420 - DNA, 25 bp, Homo sapien
gagcattataaagaaaatcacacac

SEQ ID NO: 1432421 - DNA, 25 bp, Homo sapien
tacacacttaaaatcagcaactact

SEQ ID NO: 1432422 - DNA, 25 bp, Homo sapien
acacttaaaatcagcaactactgga

SEQ ID NO: 1432423 - DNA, 25 bp, Homo sapien
gcaactactggatcttgatctcttt

SEQ ID NO: 1432424 - DNA, 25 bp, Homo sapien
tgtgtgatacacacttaaaatcagc

SEQ ID NO: 1432425 - DNA, 25 bp, Homo sapien
gttttccctgcagtaatcaaatata

SEQ ID NO: 1432426 - DNA, 25 bp, Homo sapien
tccctgcagtaatcaaatatatttt

SEQ ID NO: 1432427 - DNA, 25 bp, Homo sapien
acatttttcgatttgatggctttgg

SEQ ID NO: 1432428 - DNA, 25 bp, Homo sapien
gatggctttggttatatggtcaatg

SEQ ID NO: 1432429 - DNA, 25 bp, Homo sapien
gagtatcttaccttctacaaccaag

SEQ ID NO: 1432430 - DNA, 25 bp, Homo sapien
tcatcaccaaatatgctaggcacag

SEQ ID NO: 1432431 - DNA, 25 bp, Homo sapien
tttatacaatgtcaccatctagtgg

SEQ ID NO: 1432432 - DNA, 25 bp, Homo sapien
cactcttgggcttacttgttaaata

SEQ ID NO: 1432433 - DNA, 25 bp, Homo sapien
tactaaactgatctacctgaaaggg

SEQ ID NO: 1432434 - DNA, 25 bp, Homo sapien
gtgggctctagggtacataaactcc

SEQ ID NO: 1432435 - DNA, 25 bp, Homo sapien
tctcatggcaagacatataaagtcc

SEQ ID NO: 1432436 - DNA, 25 bp, Homo sapien
caggaagtataaccaaaagacggag

SEQ ID NO: 1432437 - DNA, 25 bp, Homo sapien
gaggttgaaaaatggactctgatca

SEQ ID NO: 1432438 - DNA, 25 bp, Homo sapien
tggaggtagtctttctaggataaaa

SEQ ID NO: 1432439 - DNA, 25 bp, Homo sapien
aagggtctgcttgatctacggatct

SEQ ID NO: 1432440 - DNA, 25 bp, Homo sapien
gactctgatcaatggtaattcacca

SEQ ID NO: 1432441 - DNA, 25 bp, Homo sapien
cttggtttaatccctggaagaggca

SEQ ID NO: 1432442 - DNA, 25 bp, Homo sapien
caccaggtactgttcgaggatgtct

SEQ ID NO: 1432443 - DNA, 25 bp, Homo sapien
gaaaaacagctgatcgcaaaaccag

SEQ ID NO: 1432444 - DNA, 25 bp, Homo sapien
gaatgccagcggtttggctccataa

SEQ ID NO: 1432445 - DNA, 25 bp, Homo sapien
tgtagctcctaacatcagctcctgg

SEQ ID NO: 1432446 - DNA, 25 bp, Homo sapien
tcatgatatagagaactaataactg

SEQ ID NO: 1432447 - DNA, 25 bp, Homo sapien
ctaataactggcccaccaaaacctg

SEQ ID NO: 1432448 - DNA, 25 bp, Homo sapien
caccaaaacctgtatttgcttcttt

SEQ ID NO: 1432449 - DNA, 25 bp, Homo sapien
tgatggtttcttcatgatatagaga

SEQ ID NO: 1432450 - DNA, 25 bp, Homo sapien
ccaacattgagaccaccaaagtcat

SEQ ID NO: 1432451 - DNA, 25 bp, Homo sapien
cttcaattcatccttctcacctaac

SEQ ID NO: 1432452 - DNA, 25 bp, Homo sapien
ttcaattcatccttctcacctaaca

SEQ ID NO: 1432453 - DNA, 25 bp, Homo sapien
tgcagaaaactgaaattggacccct

SEQ ID NO: 1432454 - DNA, 25 bp, Homo sapien
catatgcagaaaactgaaattggac

SEQ ID NO: 1432455 - DNA, 25 bp, Homo sapien
ataacaccacgtatctacaaccatc

SEQ ID NO: 1432456 - DNA, 25 bp, Homo sapien
tatgcagaaaactgaaattggaccc

SEQ ID NO: 1432457 - DNA, 25 bp, Homo sapien
tccccagtatggcatatcaaaaact

SEQ ID NO: 1432458 - DNA, 25 bp, Homo sapien
ccccagtatggcatatcaaaaactg

SEQ ID NO: 1432459 - DNA, 25 bp, Homo sapien
cccagtatggcatatcaaaaactga

SEQ ID NO: 1432460 - DNA, 25 bp, Homo sapien
ctgtcagataagaagtagtatatac

SEQ ID NO: 1432461 - DNA, 25 bp, Homo sapien
cacccttccattatgagtctacaag

SEQ ID NO: 1432462 - DNA, 25 bp, Homo sapien
cactaaagatgcgtgactgggttta

SEQ ID NO: 1432463 - DNA, 25 bp, Homo sapien
ggcatttgttatttctcctggagac

SEQ ID NO: 1432464 - DNA, 25 bp, Homo sapien
cctggaaactctggataataaagcc

SEQ ID NO: 1432465 - DNA, 25 bp, Homo sapien
tagctgaagtacttcatcaggcatt

SEQ ID NO: 1432466 - DNA, 25 bp, Homo sapien
ttgttggtctagagagaaacttccc

SEQ ID NO: 1432467 - DNA, 25 bp, Homo sapien
aaagccagagggtagttgttggtct

SEQ ID NO: 1432468 - DNA, 25 bp, Homo sapien
acctggccagcaattattttattag

SEQ ID NO: 1432469 - DNA, 25 bp, Homo sapien
tattagataaatattacaataactt

SEQ ID NO: 1432470 - DNA, 25 bp, Homo sapien
cacacctggccagcaattattttat

SEQ ID NO: 1432471 - DNA, 25 bp, Homo sapien
tcaagaaagtaaaactttaagcatg

SEQ ID NO: 1432472 - DNA, 25 bp, Homo sapien
gaggattccaacctggatctagttt

SEQ ID NO: 1432473 - DNA, 25 bp, Homo sapien
gggcttgaatcaccaagtgctttcc

SEQ ID NO: 1432474 - DNA, 25 bp, Homo sapien
gaatcaccaagtgctttccaagctt

SEQ ID NO: 1432475 - DNA, 25 bp, Homo sapien
tttaactactgcgatatattcctgc

SEQ ID NO: 1432476 - DNA, 25 bp, Homo sapien
tacaatatggaatatccaaaatggc

SEQ ID NO: 1432477 - DNA, 25 bp, Homo sapien
ctacaatatggaatatccaaaatgg

SEQ ID NO: 1432478 - DNA, 25 bp, Homo sapien
aatagatcagcttacacaaactcag

SEQ ID NO: 1432479 - DNA, 25 bp, Homo sapien
gctgtcaaacagaactcaatcccac

SEQ ID NO: 1432480 - DNA, 25 bp, Homo sapien
gagcttccttttgggtcatctaccc

SEQ ID NO: 1432481 - DNA, 25 bp, Homo sapien
aaccagtgtttctcgatttccctga

SEQ ID NO: 1432482 - DNA, 25 bp, Homo sapien
agaagcttggtttaggagtattaca

SEQ ID NO: 1432483 - DNA, 25 bp, Homo sapien
tccttcaaaatcaaagaagcttggt

SEQ ID NO: 1432484 - DNA, 25 bp, Homo sapien
ggagtattacaatttccaactttga

SEQ ID NO: 1432485 - DNA, 25 bp, Homo sapien
tttccttcaaaatcaaagaagcttg

SEQ ID NO: 1432486 - DNA, 25 bp, Homo sapien
gcctactttggcttactgcataaaa

SEQ ID NO: 1432487 - DNA, 25 bp, Homo sapien
aactgtgataaacggttgcacttcg

SEQ ID NO: 1432488 - DNA, 25 bp, Homo sapien
tgcacttcgaagttagtagactata

SEQ ID NO: 1432489 - DNA, 25 bp, Homo sapien
tgtatattcagtaaccataggttgg

SEQ ID NO: 1432490 - DNA, 25 bp, Homo sapien
tactcagtacatccagtttaagaac

SEQ ID NO: 1432491 - DNA, 25 bp, Homo sapien
gctatgagtgtgtaactgccctcca

SEQ ID NO: 1432492 - DNA, 25 bp, Homo sapien
aaaatacgtaactatgtcaagaggc

SEQ ID NO: 1432493 - DNA, 25 bp, Homo sapien
cctgagcaacgaaacaagatcctgt

SEQ ID NO: 1432494 - DNA, 25 bp, Homo sapien
tgggaaatgtggtgaaacccagacc

SEQ ID NO: 1432495 - DNA, 25 bp, Homo sapien
atcctcattttgtaaaggttcttgg

SEQ ID NO: 1432496 - DNA, 25 bp, Homo sapien
tatcctcattttgtaaaggttcttg

SEQ ID NO: 1432497 - DNA, 25 bp, Homo sapien
caactggtctcctcgatctcagggc

SEQ ID NO: 1432498 - DNA, 25 bp, Homo sapien
acctgaatcaggccttgcaggtgcg

SEQ ID NO: 1432499 - DNA, 25 bp, Homo sapien
gcaggtgcgcggcagccttctcaaa

SEQ ID NO: 1432500 - DNA, 25 bp, Homo sapien
cctggcatacaggtacaagagctgc

SEQ ID NO: 1432501 - DNA, 25 bp, Homo sapien
gctgaggactaaggttccgcctgcc

SEQ ID NO: 1432502 - DNA, 25 bp, Homo sapien
cctccttggattgggtgtaaggccg

SEQ ID NO: 1432503 - DNA, 25 bp, Homo sapien
aggagagaaagtgccgtcagctgta

SEQ ID NO: 1432504 - DNA, 25 bp, Homo sapien
gctgaaattagcagtcccgagctcc

SEQ ID NO: 1432505 - DNA, 25 bp, Homo sapien
ccgtgtaacgggctggctggattat

SEQ ID NO: 1432506 - DNA, 25 bp, Homo sapien
tacatattgaccagatgatggcggc

SEQ ID NO: 1432507 - DNA, 25 bp, Homo sapien
gatatccaccgtcttctgggcactg

SEQ ID NO: 1432508 - DNA, 25 bp, Homo sapien
catggagctaggtttgggttctgcc

SEQ ID NO: 1432509 - DNA, 25 bp, Homo sapien
gtaactgattgtgcgatccattagt

SEQ ID NO: 1432510 - DNA, 25 bp, Homo sapien
aactgattgtgcgatccattagttg

SEQ ID NO: 1432511 - DNA, 25 bp, Homo sapien
actgattgtgcgatccattagttgt

SEQ ID NO: 1432512 - DNA, 25 bp, Homo sapien
ctgattgtgcgatccattagttgta

SEQ ID NO: 1432513 - DNA, 25 bp, Homo sapien
catttcatcagtcaaagtgagtcac

SEQ ID NO: 1432514 - DNA, 25 bp, Homo sapien
gacagtgacgtgcagtcttactaca

SEQ ID NO: 1432515 - DNA, 25 bp, Homo sapien
cacacaatctcgaaggcagcagtaa

SEQ ID NO: 1432516 - DNA, 25 bp, Homo sapien
ttcactcaggtaggacttaggtcac

SEQ ID NO: 1432517 - DNA, 25 bp, Homo sapien
ttattcataaccttctccgctggca

SEQ ID NO: 1432518 - DNA, 25 bp, Homo sapien
tattcataaccttctccgctggcat

SEQ ID NO: 1432519 - DNA, 25 bp, Homo sapien
accttctccgctggcattcaggtac

SEQ ID NO: 1432520 - DNA, 25 bp, Homo sapien
tcataaccttctccgctggcattca

SEQ ID NO: 1432521 - DNA, 25 bp, Homo sapien
gcagagcaaggagactcaacagtac

SEQ ID NO: 1432522 - DNA, 25 bp, Homo sapien
cagtaccacatgatgaggtgagagc

SEQ ID NO: 1432523 - DNA, 25 bp, Homo sapien
ttccagaagacatcgcaggcagagc

SEQ ID NO: 1432524 - DNA, 25 bp, Homo sapien
tgaggtgagagcctgagaatagcaa

SEQ ID NO: 1432525 - DNA, 25 bp, Homo sapien
ggcaaaggacctgagaaaggcttct

SEQ ID NO: 1432526 - DNA, 25 bp, Homo sapien
tcagtaagggataaactgctgttag

SEQ ID NO: 1432527 - DNA, 25 bp, Homo sapien
taagggataaactgctgttaggcaa

SEQ ID NO: 1432528 - DNA, 25 bp, Homo sapien
agtaagggataaactgctgttaggc

SEQ ID NO: 1432529 - DNA, 25 bp, Homo sapien
tacgaatgtaattgtaacctggatg

SEQ ID NO: 1432530 - DNA, 25 bp, Homo sapien
cctgcctttgctattcattgtggaa

SEQ ID NO: 1432531 - DNA, 25 bp, Homo sapien
cagctctgggttgattcgttcaaca

SEQ ID NO: 1432532 - DNA, 25 bp, Homo sapien
ggaaacaccgttgccctttaatgca

SEQ ID NO: 1432533 - DNA, 25 bp, Homo sapien
cataggaaatttgttctcgaggata

SEQ ID NO: 1432534 - DNA, 25 bp, Homo sapien
tctggtgaagcataggaaatttgtt

SEQ ID NO: 1432535 - DNA, 25 bp, Homo sapien
gcattgtctggtgaagcataggaaa

SEQ ID NO: 1432536 - DNA, 25 bp, Homo sapien
attgattgcattgtctggtgaagca

SEQ ID NO: 1432537 - DNA, 25 bp, Homo sapien
ctcctgagacctggtgacagcaaaa

SEQ ID NO: 1432538 - DNA, 25 bp, Homo sapien
tggtgacagcaaaaacatttcctcg

SEQ ID NO: 1432539 - DNA, 25 bp, Homo sapien
caaaaacatttcctcgacgtgactt

SEQ ID NO: 1432540 - DNA, 25 bp, Homo sapien
cagcaaaaacatttcctcgacgtga

SEQ ID NO: 1432541 - DNA, 25 bp, Homo sapien
ccatgggcaacggattgaatactga

SEQ ID NO: 1432542 - DNA, 25 bp, Homo sapien
gattgaaacctggaccagaggtgaa

SEQ ID NO: 1432543 - DNA, 25 bp, Homo sapien
tcaagattggtaggccatgggcaac

SEQ ID NO: 1432544 - DNA, 25 bp, Homo sapien
tgaatactgatagcaagggaggcca

SEQ ID NO: 1432545 - DNA, 25 bp, Homo sapien
tctcaggacaatccagggcaacctt

SEQ ID NO: 1432546 - DNA, 25 bp, Homo sapien
aattttgtctaacccggctggatgc

SEQ ID NO: 1432547 - DNA, 25 bp, Homo sapien
gctggatgcagccaaattatgggct

SEQ ID NO: 1432548 - DNA, 25 bp, Homo sapien
gggtgatgtaaaatccacagggtgc

SEQ ID NO: 1432549 - DNA, 25 bp, Homo sapien
cagagctattgtttgatgctgtgca

SEQ ID NO: 1432550 - DNA, 25 bp, Homo sapien
agcccacagagccttttacttcttt

SEQ ID NO: 1432551 - DNA, 25 bp, Homo sapien
cccgcttgtggttcagcggcttcaa

SEQ ID NO: 1432552 - DNA, 25 bp, Homo sapien
tctgacttgctagtttcagaaccat

SEQ ID NO: 1432553 - DNA, 25 bp, Homo sapien
cagtcaggacaagagagcaggtttg

SEQ ID NO: 1432554 - DNA, 25 bp, Homo sapien
gagagcaggtttgaacgtcttcggc

SEQ ID NO: 1432555 - DNA, 25 bp, Homo sapien
ggtttgaacgtcttcggctcctaga

SEQ ID NO: 1432556 - DNA, 25 bp, Homo sapien
tgcagtcaggacaagagagcaggtt

SEQ ID NO: 1432557 - DNA, 25 bp, Homo sapien
ctttggtggtaaagttcactctgtt

SEQ ID NO: 1432558 - DNA, 25 bp, Homo sapien
gatgaccaaggtacctcctcacaca

SEQ ID NO: 1432559 - DNA, 25 bp, Homo sapien
ttgattcccttgtcatgggccccga

SEQ ID NO: 1432560 - DNA, 25 bp, Homo sapien
tgggctgcttctactgcaaagggca

SEQ ID NO: 1432561 - DNA, 25 bp, Homo sapien
attcttagtctccagccatctgctt

SEQ ID NO: 1432562 - DNA, 25 bp, Homo sapien
aggagctctccaactgaggtttggc

SEQ ID NO: 1432563 - DNA, 25 bp, Homo sapien
ggaagtgccaactagaaagcccaat

SEQ ID NO: 1432564 - DNA, 25 bp, Homo sapien
ttagaggcactggaagtgccaacta

SEQ ID NO: 1432565 - DNA, 25 bp, Homo sapien
gaaagcccaatctctcagctaaagg

SEQ ID NO: 1432566 - DNA, 25 bp, Homo sapien
tatgtgcaagtaggtcacaacctct

SEQ ID NO: 1432567 - DNA, 25 bp, Homo sapien
tcaaagctatagtcgaatgcagatt

SEQ ID NO: 1432568 - DNA, 25 bp, Homo sapien
gatgccgagatggtgcctagactca

SEQ ID NO: 1432569 - DNA, 25 bp, Homo sapien
tcagtcatgttgatggatgccgaga

SEQ ID NO: 1432570 - DNA, 25 bp, Homo sapien
ccatcctctgtaagcgctcttagta

SEQ ID NO: 1432571 - DNA, 25 bp, Homo sapien
aaggcatacacgcattgtctgatag

SEQ ID NO: 1432572 - DNA, 25 bp, Homo sapien
caataccttcttggataggtggaaa

SEQ ID NO: 1432573 - DNA, 25 bp, Homo sapien
ggtggaaattgagctatgtcaaggc

SEQ ID NO: 1432574 - DNA, 25 bp, Homo sapien
agaaatgatcttctcagttggaaca

SEQ ID NO: 1432575 - DNA, 25 bp, Homo sapien
tcaaacacagtgttctgcccctttc

SEQ ID NO: 1432576 - DNA, 25 bp, Homo sapien
tcagttggaacactcctgtcaaaca

SEQ ID NO: 1432577 - DNA, 25 bp, Homo sapien
tcctgtcaaacacagtgttctgccc

SEQ ID NO: 1432578 - DNA, 25 bp, Homo sapien
ctggtgtggagattgccttaaggtc

SEQ ID NO: 1432579 - DNA, 25 bp, Homo sapien
tgagtctgaggttttcgccaaaggc

SEQ ID NO: 1432580 - DNA, 25 bp, Homo sapien
caaaggccacgaaatagcccttcat

SEQ ID NO: 1432581 - DNA, 25 bp, Homo sapien
taaggtcagggctttcagctccttg

SEQ ID NO: 1432582 - DNA, 25 bp, Homo sapien
ggtgacaagaagtttactgctcctt

SEQ ID NO: 1432583 - DNA, 25 bp, Homo sapien
ttccgtagagggtcactcaagggtg

SEQ ID NO: 1432584 - DNA, 25 bp, Homo sapien
tagatgcatgtttgcacaggtggta

SEQ ID NO: 1432585 - DNA, 25 bp, Homo sapien
tcatggcaggccagttagatgcatg

SEQ ID NO: 1432586 - DNA, 25 bp, Homo sapien
caagctggtattctttgtttccgca

SEQ ID NO: 1432587 - DNA, 25 bp, Homo sapien
tggtttcttacagcactgtctccct

SEQ ID NO: 1432588 - DNA, 25 bp, Homo sapien
tcctgctgccaaggtcaatatactg

SEQ ID NO: 1432589 - DNA, 25 bp, Homo sapien
atatactgctgcaaatgcttcccaa

SEQ ID NO: 1432590 - DNA, 25 bp, Homo sapien
taactgcagtaacaacactgctgct

SEQ ID NO: 1432591 - DNA, 25 bp, Homo sapien
tgtaaatataaacgtcttgtgtgga

SEQ ID NO: 1432592 - DNA, 25 bp, Homo sapien
cccagacaggcggtagaaagcagct

SEQ ID NO: 1432593 - DNA, 25 bp, Homo sapien
cgtcttgtgtggattattgttgcta

SEQ ID NO: 1432594 - DNA, 25 bp, Homo sapien
ccacaaggggcggagtcttaagaag

SEQ ID NO: 1432595 - DNA, 25 bp, Homo sapien
caaggggcggagtcttaagaagcgt

SEQ ID NO: 1432596 - DNA, 25 bp, Homo sapien
gcccacaaggggcggagtcttaaga

SEQ ID NO: 1432597 - DNA, 25 bp, Homo sapien
cacaaggggcggagtcttaagaagc

SEQ ID NO: 1432598 - DNA, 25 bp, Homo sapien
ggcggttaccatggcgatgacgtcc

SEQ ID NO: 1432599 - DNA, 25 bp, Homo sapien
cacccccttcgtcagggcggtgtag

SEQ ID NO: 1432600 - DNA, 25 bp, Homo sapien
taccatggcgatgacgtccagaggg

SEQ ID NO: 1432601 - DNA, 25 bp, Homo sapien
gcggtgtaggcggttaccatggcga

SEQ ID NO: 1432602 - DNA, 25 bp, Homo sapien
gaggaagcaatacatccagtatgag

SEQ ID NO: 1432603 - DNA, 25 bp, Homo sapien
tggaggaagcaatacatccagtatg

SEQ ID NO: 1432604 - DNA, 25 bp, Homo sapien
aagcaatacatccagtatgaggtac

SEQ ID NO: 1432605 - DNA, 25 bp, Homo sapien
ggaagcaatacatccagtatgaggt

SEQ ID NO: 1432606 - DNA, 25 bp, Homo sapien
tggctccctgtgcccgggcagactt

SEQ ID NO: 1432607 - DNA, 25 bp, Homo sapien
ggcagactttgacccgctgccgcgg

SEQ ID NO: 1432608 - DNA, 25 bp, Homo sapien
accatctcgccagtcctgacgtcca

SEQ ID NO: 1432609 - DNA, 25 bp, Homo sapien
tgggaggactcggaggggccaccat

SEQ ID NO: 1432610 - DNA, 25 bp, Homo sapien
gcaatggccatgaaagaatcttcct

SEQ ID NO: 1432611 - DNA, 25 bp, Homo sapien
gaagcaacaagacgaaaccaaaaga

SEQ ID NO: 1432612 - DNA, 25 bp, Homo sapien
gagggccttctaagcacagagaagc

SEQ ID NO: 1432613 - DNA, 25 bp, Homo sapien
tagatagccttaggagagggccttc

SEQ ID NO: 1432614 - DNA, 25 bp, Homo sapien
ttcttgttgaggtcttttagaacgc

SEQ ID NO: 1432615 - DNA, 25 bp, Homo sapien
tattggtgctgaagtagtgatgtga

SEQ ID NO: 1432616 - DNA, 25 bp, Homo sapien
tggcagtagtatttctaattagcat

SEQ ID NO: 1432617 - DNA, 25 bp, Homo sapien
tttggaggtagtgatattggtgctg

SEQ ID NO: 1432618 - DNA, 25 bp, Homo sapien
taaaacactggacttataacaggat

SEQ ID NO: 1432619 - DNA, 25 bp, Homo sapien
aacactggacttataacaggatctg

SEQ ID NO: 1432620 - DNA, 25 bp, Homo sapien
aaacactggacttataacaggatct

SEQ ID NO: 1432621 - DNA, 25 bp, Homo sapien
tgtcctttatctgttatgccctggt

SEQ ID NO: 1432622 - DNA, 25 bp, Homo sapien
tcctttatctgttatgccctggtga

SEQ ID NO: 1432623 - DNA, 25 bp, Homo sapien
cctttatctgttatgccctggtgat

SEQ ID NO: 1432624 - DNA, 25 bp, Homo sapien
ctctgtcctttatctgttatgccct

SEQ ID NO: 1432625 - DNA, 25 bp, Homo sapien
gatcgtttagccatacatcatgtag

SEQ ID NO: 1432626 - DNA, 25 bp, Homo sapien
tcatctttaaagaggcactgtgggc

SEQ ID NO: 1432627 - DNA, 25 bp, Homo sapien
gcaaaggacctagcatgtcgtagaa

SEQ ID NO: 1432628 - DNA, 25 bp, Homo sapien
tattctgccccttagtcaactgttg

SEQ ID NO: 1432629 - DNA, 25 bp, Homo sapien
tactcaatcgtagtgcaattaccag

SEQ ID NO: 1432630 - DNA, 25 bp, Homo sapien
tgccaggaaccaattcaggatctca

SEQ ID NO: 1432631 - DNA, 25 bp, Homo sapien
tatctatggatggatcttgctcgca

SEQ ID NO: 1432632 - DNA, 25 bp, Homo sapien
caggatctcacgttgcatttggttg

SEQ ID NO: 1432633 - DNA, 25 bp, Homo sapien
ctaatgactgatgtgttgaaatatt

SEQ ID NO: 1432634 - DNA, 25 bp, Homo sapien
ttcatatatgagtttttctgtgaac

SEQ ID NO: 1432635 - DNA, 25 bp, Homo sapien
cactaatgactgatgtgttgaaata

SEQ ID NO: 1432636 - DNA, 25 bp, Homo sapien
tttcactaatgactgatgtgttgaa

SEQ ID NO: 1432637 - DNA, 25 bp, Homo sapien
cactagtcatcagaggagtaaagat

SEQ ID NO: 1432638 - DNA, 25 bp, Homo sapien
caaatactgttgaagaagaggagga

SEQ ID NO: 1432639 - DNA, 25 bp, Homo sapien
gaacacagactggtggttgtccgtg

SEQ ID NO: 1432640 - DNA, 25 bp, Homo sapien
tagtgatgggtacatgactctgcgt

SEQ ID NO: 1432641 - DNA, 25 bp, Homo sapien
caaattagaatttattataacttgt

SEQ ID NO: 1432642 - DNA, 25 bp, Homo sapien
cacccaatacttacaaattagaatt

SEQ ID NO: 1432643 - DNA, 25 bp, Homo sapien
aagacacccaatacttacaaattag

SEQ ID NO: 1432644 - DNA, 25 bp, Homo sapien
gacacccaatacttacaaattagaa

SEQ ID NO: 1432645 - DNA, 25 bp, Homo sapien
gcagtacatgtctgataaccccagg

SEQ ID NO: 1432646 - DNA, 25 bp, Homo sapien
cctgaatgacatacgtagagaactg

SEQ ID NO: 1432647 - DNA, 25 bp, Homo sapien
caaaagctggcgttgctacaagtaa

SEQ ID NO: 1432648 - DNA, 25 bp, Homo sapien
tacactgtgccataaaggaagtctc

SEQ ID NO: 1432649 - DNA, 25 bp, Homo sapien
ctgtagtcccagctactcaggaggc

SEQ ID NO: 1432650 - DNA, 25 bp, Homo sapien
aattagccgggagtagtggcgcatg

SEQ ID NO: 1432651 - DNA, 25 bp, Homo sapien
ccaggaggaagaggttgcagtgagc

SEQ ID NO: 1432652 - DNA, 25 bp, Homo sapien
tgagttgggagaattgcttgaaccc

SEQ ID NO: 1432653 - DNA, 25 bp, Homo sapien
tgtcccttggcccaaatggaagagg

SEQ ID NO: 1432654 - DNA, 25 bp, Homo sapien
cagtgttaacaatttagtgaccctt

SEQ ID NO: 1432655 - DNA, 25 bp, Homo sapien
cttggtaggttaaaggttgcattat

SEQ ID NO: 1432656 - DNA, 25 bp, Homo sapien
aagtccagtggaccaggcatttctt

SEQ ID NO: 1432657 - DNA, 25 bp, Homo sapien
tgagttgcccctagaaaacagcctt

SEQ ID NO: 1432658 - DNA, 25 bp, Homo sapien
gagcctaaggtagtccatacaggaa

SEQ ID NO: 1432659 - DNA, 25 bp, Homo sapien
tatggtgccatcaacctaaggagga

SEQ ID NO: 1432660 - DNA, 25 bp, Homo sapien
ttatcgtcaaatcaaagccaccctc

SEQ ID NO: 1432661 - DNA, 25 bp, Homo sapien
aagtgattggtcactaaactctgtc

SEQ ID NO: 1432662 - DNA, 25 bp, Homo sapien
ggttaaatgcacaatgtggtactgt

SEQ ID NO: 1432663 - DNA, 25 bp, Homo sapien
gtttctagatggttgtataaagcaa

SEQ ID NO: 1432664 - DNA, 25 bp, Homo sapien
tgaagttcccttcttgataagtagg

SEQ ID NO: 1432665 - DNA, 25 bp, Homo sapien
ggacaagctcctttaggctggacag

SEQ ID NO: 1432666 - DNA, 25 bp, Homo sapien
ggcgccgtatttccaacgttcagag

SEQ ID NO: 1432667 - DNA, 25 bp, Homo sapien
taaggaacccgaatctgcataggtg

SEQ ID NO: 1432668 - DNA, 25 bp, Homo sapien
tgtgagttggaaggaccatctccct

SEQ ID NO: 1432669 - DNA, 25 bp, Homo sapien
ggaaagtgatctgctcgagagcccc

SEQ ID NO: 1432670 - DNA, 25 bp, Homo sapien
cttggaaataggtgaggctcggtca

SEQ ID NO: 1432671 - DNA, 25 bp, Homo sapien
gggtttccctcacgcctctggagag

SEQ ID NO: 1432672 - DNA, 25 bp, Homo sapien
gagaaagcaagctccgtcggtttgg

SEQ ID NO: 1432673 - DNA, 25 bp, Homo sapien
ctggggagtaagttgcttctggaga

SEQ ID NO: 1432674 - DNA, 25 bp, Homo sapien
cagtgttcactaagtggcagctgag

SEQ ID NO: 1432675 - DNA, 25 bp, Homo sapien
tcagtgttcactaagtggcagctga

SEQ ID NO: 1432676 - DNA, 25 bp, Homo sapien
tgttcactaagtggcagctgagagc

SEQ ID NO: 1432677 - DNA, 25 bp, Homo sapien
tctggctctgtcctgatctctgctt

SEQ ID NO: 1432678 - DNA, 25 bp, Homo sapien
tagagcgaccagtgggggatgtgga

SEQ ID NO: 1432679 - DNA, 25 bp, Homo sapien
gagcgaccagtgggggatgtggact

SEQ ID NO: 1432680 - DNA, 25 bp, Homo sapien
ctagagcgaccagtgggggatgtgg

SEQ ID NO: 1432681 - DNA, 25 bp, Homo sapien
agagcgaccagtgggggatgtggac

SEQ ID NO: 1432682 - DNA, 25 bp, Homo sapien
cagtctttgcgaggctcctggtcca

SEQ ID NO: 1432683 - DNA, 25 bp, Homo sapien
gtccacaaggctgagaggtcctgga

SEQ ID NO: 1432684 - DNA, 25 bp, Homo sapien
agaggttgaacccagcctcagtctt

SEQ ID NO: 1432685 - DNA, 25 bp, Homo sapien
tctcgtttccccagctgtctggtgt

SEQ ID NO: 1432686 - DNA, 25 bp, Homo sapien
cctgtctgcgccctgttcaagttgc

SEQ ID NO: 1432687 - DNA, 25 bp, Homo sapien
cgtgactacagaaaggcctgtgggc

SEQ ID NO: 1432688 - DNA, 25 bp, Homo sapien
ctgccacagtgttgaggagcgtgac

SEQ ID NO: 1432689 - DNA, 25 bp, Homo sapien
tctgcgccctgttcaagttgccttc

SEQ ID NO: 1432690 - DNA, 25 bp, Homo sapien
ctccctcgatgagggaagggcccag

SEQ ID NO: 1432691 - DNA, 25 bp, Homo sapien
cttcctccctcgatgagggaagggc

SEQ ID NO: 1432692 - DNA, 25 bp, Homo sapien
cacacttcctccctcgatgagggaa

SEQ ID NO: 1432693 - DNA, 25 bp, Homo sapien
cctccctcgatgagggaagggccca

SEQ ID NO: 1432694 - DNA, 25 bp, Homo sapien
tcaggtaagataggaaccggccatt

SEQ ID NO: 1432695 - DNA, 25 bp, Homo sapien
aagggctgcgctcttgccatcgtgc

SEQ ID NO: 1432696 - DNA, 25 bp, Homo sapien
tgccatcgtgcagcactgccacaag

SEQ ID NO: 1432697 - DNA, 25 bp, Homo sapien
gcttcaggccaactggacataaagg

SEQ ID NO: 1432698 - DNA, 25 bp, Homo sapien
cctggaaggactcataagagagaag

SEQ ID NO: 1432699 - DNA, 25 bp, Homo sapien
gacattgaaatagggggccgcgctc

SEQ ID NO: 1432700 - DNA, 25 bp, Homo sapien
caggctctctctgtaccagctctgg

SEQ ID NO: 1432701 - DNA, 25 bp, Homo sapien
caaaagggatctgtgcctggaagga

SEQ ID NO: 1432702 - DNA, 25 bp, Homo sapien
cgcagattgccttaggatcccggta

SEQ ID NO: 1432703 - DNA, 25 bp, Homo sapien
tgggaacgcagattgccttaggatc

SEQ ID NO: 1432704 - DNA, 25 bp, Homo sapien
cagattgccttaggatcccggtaac

SEQ ID NO: 1432705 - DNA, 25 bp, Homo sapien
aacgcagattgccttaggatcccgg

SEQ ID NO: 1432706 - DNA, 25 bp, Homo sapien
gaggagcacagcaatcagggcaacg

SEQ ID NO: 1432707 - DNA, 25 bp, Homo sapien
ctagcgcaagtgaaagggtgtgaca

SEQ ID NO: 1432708 - DNA, 25 bp, Homo sapien
gcaatcagggcaacgctggctccag

SEQ ID NO: 1432709 - DNA, 25 bp, Homo sapien
caccaaatccacttcggaggctcag

SEQ ID NO: 1432710 - DNA, 25 bp, Homo sapien
gctatctagggactctcagccacca

SEQ ID NO: 1432711 - DNA, 25 bp, Homo sapien
tggccactgcgagtcagctcaaact

SEQ ID NO: 1432712 - DNA, 25 bp, Homo sapien
aaaagacactctgctcattcctgag

SEQ ID NO: 1432713 - DNA, 25 bp, Homo sapien
tttataggacggctcacagaacgca

SEQ ID NO: 1432714 - DNA, 25 bp, Homo sapien
cacgtcgtaaagagtgtgagtaagg

SEQ ID NO: 1432715 - DNA, 25 bp, Homo sapien
gtctggcagaggcacgtcgtaaaga

SEQ ID NO: 1432716 - DNA, 25 bp, Homo sapien
ctgttcttgtctccgggccccagtg

SEQ ID NO: 1432717 - DNA, 25 bp, Homo sapien
taagggctcagcaaggaggcatggg

SEQ ID NO: 1432718 - DNA, 25 bp, Homo sapien
ccattgacaggagggcctattgact

SEQ ID NO: 1432719 - DNA, 25 bp, Homo sapien
tttctatcctatggaagccaccttt

SEQ ID NO: 1432720 - DNA, 25 bp, Homo sapien
tgaccaattggccacctcctgtttt

SEQ ID NO: 1432721 - DNA, 25 bp, Homo sapien
cagctgccattcctaaggactccca

SEQ ID NO: 1432722 - DNA, 25 bp, Homo sapien
cagcgggcctggagattcgctttcc

SEQ ID NO: 1432723 - DNA, 25 bp, Homo sapien
acaaatgccctctgacagccgtgga

SEQ ID NO: 1432724 - DNA, 25 bp, Homo sapien
cagctgtcaccggaaggctccgagt

SEQ ID NO: 1432725 - DNA, 25 bp, Homo sapien
tctcctgccaaaggaggcttcacgg

SEQ ID NO: 1432726 - DNA, 25 bp, Homo sapien
ggtctgagatcaggacctgctggag

SEQ ID NO: 1432727 - DNA, 25 bp, Homo sapien
gatgatgaagttaccccaaagagcg

SEQ ID NO: 1432728 - DNA, 25 bp, Homo sapien
tggaccctcactgttgaggacagcc

SEQ ID NO: 1432729 - DNA, 25 bp, Homo sapien
cccagcatatgtgacggcgaggaca

SEQ ID NO: 1432730 - DNA, 25 bp, Homo sapien
gagatgaggccaccaggctatgcca

SEQ ID NO: 1432731 - DNA, 25 bp, Homo sapien
ctgcagctagcaaagcctgtggctt

SEQ ID NO: 1432732 - DNA, 25 bp, Homo sapien
aggcccaagcaagaccacttctgca

SEQ ID NO: 1432733 - DNA, 25 bp, Homo sapien
aggctatgccaggtctcaccaggcc

SEQ ID NO: 1432734 - DNA, 25 bp, Homo sapien
tgaaattagaagcttaggccgggcg

SEQ ID NO: 1432735 - DNA, 25 bp, Homo sapien
cgtgacccatgacctgcttggaaaa

SEQ ID NO: 1432736 - DNA, 25 bp, Homo sapien
ttaagtctgtgaggcatcggtcatc

SEQ ID NO: 1432737 - DNA, 25 bp, Homo sapien
tggaaaatcccaccctgtccgatga

SEQ ID NO: 1432738 - DNA, 25 bp, Homo sapien
aacaggtcattgtactctgccgccc

SEQ ID NO: 1432739 - DNA, 25 bp, Homo sapien
ttcacctgtcgatgtgagtgcacac

SEQ ID NO: 1432740 - DNA, 25 bp, Homo sapien
agacagggaccagcgtgatccgcat

SEQ ID NO: 1432741 - DNA, 25 bp, Homo sapien
tccctttttgctcccttgtaggcag

SEQ ID NO: 1432742 - DNA, 25 bp, Homo sapien
tatatgagcctgtgagaacagcagg

SEQ ID NO: 1432743 - DNA, 25 bp, Homo sapien
ccacgcacatgaagcctggcgagtg

SEQ ID NO: 1432744 - DNA, 25 bp, Homo sapien
catcatgggcgctggatggcacaca

SEQ ID NO: 1432745 - DNA, 25 bp, Homo sapien
gctggctttcacatccgactctata

SEQ ID NO: 1432746 - DNA, 25 bp, Homo sapien
ggctgtcatatttgtgtcacgaatt

SEQ ID NO: 1432747 - DNA, 25 bp, Homo sapien
tcagttgcgaaacctacccgagtct

SEQ ID NO: 1432748 - DNA, 25 bp, Homo sapien
ggtttatcattagtccccacctgca

SEQ ID NO: 1432749 - DNA, 25 bp, Homo sapien
cgtgacgtcagtgtctggcctagct

SEQ ID NO: 1432750 - DNA, 25 bp, Homo sapien
caccaacccgtagacagggagggca

SEQ ID NO: 1432751 - DNA, 25 bp, Homo sapien
tccccgtgccaccaacccgtagaca

SEQ ID NO: 1432752 - DNA, 25 bp, Homo sapien
agggagggcaagcagtgaaaggtcc

SEQ ID NO: 1432753 - DNA, 25 bp, Homo sapien
tgccaccaacccgtagacagggagg

SEQ ID NO: 1432754 - DNA, 25 bp, Homo sapien
gcggaaacagatcctggcagcatct

SEQ ID NO: 1432755 - DNA, 25 bp, Homo sapien
agttagaccatggaggaggcgcact

SEQ ID NO: 1432756 - DNA, 25 bp, Homo sapien
tgtcaatccgtgtcctgaggcagag

SEQ ID NO: 1432757 - DNA, 25 bp, Homo sapien
tcctttggttgatgcctgagagccg

SEQ ID NO: 1432758 - DNA, 25 bp, Homo sapien
taggaagctacagcaagggccaagt

SEQ ID NO: 1432759 - DNA, 25 bp, Homo sapien
tattaaccaggaaccaggcctaggc

SEQ ID NO: 1432760 - DNA, 25 bp, Homo sapien
catgcaaaggtgtgggtattcccgg

SEQ ID NO: 1432761 - DNA, 25 bp, Homo sapien
gactacacggagcagaaagtggcac

SEQ ID NO: 1432762 - DNA, 25 bp, Homo sapien
gcgggctcgcgggagttttgcaaac

SEQ ID NO: 1432763 - DNA, 25 bp, Homo sapien
cagggcaccggctgttagagccgcg

SEQ ID NO: 1432764 - DNA, 25 bp, Homo sapien
tgcctttgagaaacgcacggctggg

SEQ ID NO: 1432765 - DNA, 25 bp, Homo sapien
cagggccttcgtgccaaggccgctt

SEQ ID NO: 1432766 - DNA, 25 bp, Homo sapien
cgcaggccggctcgaattttggaaa

SEQ ID NO: 1432767 - DNA, 25 bp, Homo sapien
tacggcaacactgcgagagagagac

SEQ ID NO: 1432768 - DNA, 25 bp, Homo sapien
tacgcaaatgttccagagctctgtt

SEQ ID NO: 1432769 - DNA, 25 bp, Homo sapien
taaatcaccctgaatccatacggca

SEQ ID NO: 1432770 - DNA, 25 bp, Homo sapien
caagcactcgtttctctggcgaggc

SEQ ID NO: 1432771 - DNA, 25 bp, Homo sapien
gcatgagggtcacagtaagcagctc

SEQ ID NO: 1432772 - DNA, 25 bp, Homo sapien
cacattccgtgctaggcatgagggt

SEQ ID NO: 1432773 - DNA, 25 bp, Homo sapien
tctgccaaagcgacacagtccatgt

SEQ ID NO: 1432774 - DNA, 25 bp, Homo sapien
ctactagggagaaggctgaagcaca

SEQ ID NO: 1432775 - DNA, 25 bp, Homo sapien
gagaaggctgaagcacaagtatcac

SEQ ID NO: 1432776 - DNA, 25 bp, Homo sapien
tactagggagaaggctgaagcacaa

SEQ ID NO: 1432777 - DNA, 25 bp, Homo sapien
tagggagaaggctgaagcacaagta

SEQ ID NO: 1432778 - DNA, 25 bp, Homo sapien
tgaggccgccttctccaacaagctc

SEQ ID NO: 1432779 - DNA, 25 bp, Homo sapien
aaggctctcactgaggccgccttct

SEQ ID NO: 1432780 - DNA, 25 bp, Homo sapien
caggggaatgcaccaaggctctcac

SEQ ID NO: 1432781 - DNA, 25 bp, Homo sapien
aatgcaccaaggctctcactgaggc

SEQ ID NO: 1432782 - DNA, 25 bp, Homo sapien
aggcttctgtatttgccctgggcgg

SEQ ID NO: 1432783 - DNA, 25 bp, Homo sapien
aaggttctgagttgctgcgctgctg

SEQ ID NO: 1432784 - DNA, 25 bp, Homo sapien
cagaaggttctgagttgctgcgctg

SEQ ID NO: 1432785 - DNA, 25 bp, Homo sapien
agaggcttctgtatttgccctgggc

SEQ ID NO: 1432786 - DNA, 25 bp, Homo sapien
gagcaccgctctcatgggttcatgt

SEQ ID NO: 1432787 - DNA, 25 bp, Homo sapien
tatagactctacagagagcaccgct

SEQ ID NO: 1432788 - DNA, 25 bp, Homo sapien
catgggttcatgtgtacctgtctgg

SEQ ID NO: 1432789 - DNA, 25 bp, Homo sapien
tgtctggtggccttgttccgtgtgt

SEQ ID NO: 1432790 - DNA, 25 bp, Homo sapien
tcggagctactgaaaggtacctgct

SEQ ID NO: 1432791 - DNA, 25 bp, Homo sapien
gacttttgtacatactgttgtcctg

SEQ ID NO: 1432792 - DNA, 25 bp, Homo sapien
taagctgagttactctgatcggagc

SEQ ID NO: 1432793 - DNA, 25 bp, Homo sapien
gagtaacagtatctctaagctgagt

SEQ ID NO: 1432794 - DNA, 25 bp, Homo sapien
cacagcccttaatctcacgaggtga

SEQ ID NO: 1432795 - DNA, 25 bp, Homo sapien
gacccatcagtctgtttaactctgg

SEQ ID NO: 1432796 - DNA, 25 bp, Homo sapien
caaagtccacagaattgaaaagcca

SEQ ID NO: 1432797 - DNA, 25 bp, Homo sapien
tgaagccaaatggtacaaagtccac

SEQ ID NO: 1432798 - DNA, 25 bp, Homo sapien
taagcctctgggtcataaaacttgg

SEQ ID NO: 1432799 - DNA, 25 bp, Homo sapien
cctgagtcaggtctacaatggccac

SEQ ID NO: 1432800 - DNA, 25 bp, Homo sapien
taaatcagtgaggtaagcacgccga

SEQ ID NO: 1432801 - DNA, 25 bp, Homo sapien
tggaggcccttcaaattaacactgg

SEQ ID NO: 1432802 - DNA, 25 bp, Homo sapien
ttaatgcaaatctaaggatcatccc

SEQ ID NO: 1432803 - DNA, 25 bp, Homo sapien
gcttttagctttcatcaacaggcat

SEQ ID NO: 1432804 - DNA, 25 bp, Homo sapien
gagcggagtgtaaacatggatgtca

SEQ ID NO: 1432805 - DNA, 25 bp, Homo sapien
tatatatcaaacattagagcggagt

SEQ ID NO: 1432806 - DNA, 25 bp, Homo sapien
gaggaatgcacccaaaaagacaagg

SEQ ID NO: 1432807 - DNA, 25 bp, Homo sapien
aatgagaagtcaaagctagaactct

SEQ ID NO: 1432808 - DNA, 25 bp, Homo sapien
actctatccagatgttgctgttctt

SEQ ID NO: 1432809 - DNA, 25 bp, Homo sapien
tgcaaatcacaaaaaagggtgaaaa

SEQ ID NO: 1432810 - DNA, 25 bp, Homo sapien
gtagcaatcaccctcaaaacgcaag

SEQ ID NO: 1432811 - DNA, 25 bp, Homo sapien
caggagctgacctgtggcgacatca

SEQ ID NO: 1432812 - DNA, 25 bp, Homo sapien
gctatgccaatgcagaaccctcttg

SEQ ID NO: 1432813 - DNA, 25 bp, Homo sapien
tcaagtcggcaaggatcaggagctg

SEQ ID NO: 1432814 - DNA, 25 bp, Homo sapien
ccagaagctcgtattcctgacaggt

SEQ ID NO: 1432815 - DNA, 25 bp, Homo sapien
tcctcagcaaacgaggtcccggaag

SEQ ID NO: 1432816 - DNA, 25 bp, Homo sapien
gttctcctccgaactggacaggcgg

SEQ ID NO: 1432817 - DNA, 25 bp, Homo sapien
gagtctgtaagtccctcctcagcaa

SEQ ID NO: 1432818 - DNA, 25 bp, Homo sapien
tcctcccctcggttcatatgcagga

SEQ ID NO: 1432819 - DNA, 25 bp, Homo sapien
tccaggataggaatgtgagtagacg

SEQ ID NO: 1432820 - DNA, 25 bp, Homo sapien
tcagtgcagcagtatgtttccagga

SEQ ID NO: 1432821 - DNA, 25 bp, Homo sapien
tgagtagacggcaatgtcacacgtg

SEQ ID NO: 1432822 - DNA, 25 bp, Homo sapien
gatgagcacaaccaacaggactgca

SEQ ID NO: 1432823 - DNA, 25 bp, Homo sapien
caaagaggatggctatggcacacca

SEQ ID NO: 1432824 - DNA, 25 bp, Homo sapien
gcacaaccaacaggactgcaaagag

SEQ ID NO: 1432825 - DNA, 25 bp, Homo sapien
agaagaggatgagcacaaccaacag

SEQ ID NO: 1432826 - DNA, 25 bp, Homo sapien
agattacctcaaggagcatctcagt

SEQ ID NO: 1432827 - DNA, 25 bp, Homo sapien
gcaacccccaccagataaagaagag

SEQ ID NO: 1432828 - DNA, 25 bp, Homo sapien
agggaacattcagattacctcaagg

SEQ ID NO: 1432829 - DNA, 25 bp, Homo sapien
tctacagtcagggaacattcagatt

SEQ ID NO: 1432830 - DNA, 25 bp, Homo sapien
cactggtcatatgagatacttttgc

SEQ ID NO: 1432831 - DNA, 25 bp, Homo sapien
agtgctctccaattcgtgagagaaa

SEQ ID NO: 1432832 - DNA, 25 bp, Homo sapien
ggtcatatgagatacttttgcaagt

SEQ ID NO: 1432833 - DNA, 25 bp, Homo sapien
ctccaattcgtgagagaaatcttcc

SEQ ID NO: 1432834 - DNA, 25 bp, Homo sapien
agctcatgtcctatcctctctggaa

SEQ ID NO: 1432835 - DNA, 25 bp, Homo sapien
tatacttcgagtatctgctcagaga

SEQ ID NO: 1432836 - DNA, 25 bp, Homo sapien
caaaaattcccacaggttacagagg

SEQ ID NO: 1432837 - DNA, 25 bp, Homo sapien
tctgttcaatatagcaggagagtca

SEQ ID NO: 1432838 - DNA, 25 bp, Homo sapien
ccctccgatgcgctgggacatgttc

SEQ ID NO: 1432839 - DNA, 25 bp, Homo sapien
ttcagcaccccgatgctgccagaga

SEQ ID NO: 1432840 - DNA, 25 bp, Homo sapien
ccgatgcgctgggacatgttcttca

SEQ ID NO: 1432841 - DNA, 25 bp, Homo sapien
gctcccctccgatgcgctgggacat

SEQ ID NO: 1432842 - DNA, 25 bp, Homo sapien
gacaatggttgaaagcacacgtgca

SEQ ID NO: 1432843 - DNA, 25 bp, Homo sapien
cacacgtgcagatgaccattgagac

SEQ ID NO: 1432844 - DNA, 25 bp, Homo sapien
gatttactctggttggctgacgtcc

SEQ ID NO: 1432845 - DNA, 25 bp, Homo sapien
gaaatcaaaggaccagaccgttgcc

SEQ ID NO: 1432846 - DNA, 25 bp, Homo sapien
ctgctgctcctcaatgaaatgagaa

SEQ ID NO: 1432847 - DNA, 25 bp, Homo sapien
ggtccagacgcccatatttatctgt

SEQ ID NO: 1432848 - DNA, 25 bp, Homo sapien
gctcctcaatgaaatgagaattggc

SEQ ID NO: 1432849 - DNA, 25 bp, Homo sapien
gctctctggagctctcggtccagac

SEQ ID NO: 1432850 - DNA, 25 bp, Homo sapien
caacctgattccgaagatctagagt

SEQ ID NO: 1432851 - DNA, 25 bp, Homo sapien
tggaacttcagcaacccataggttc

SEQ ID NO: 1432852 - DNA, 25 bp, Homo sapien
cagtcaacctgattccgaagatcta

SEQ ID NO: 1432853 - DNA, 25 bp, Homo sapien
aacccataggttccagtcaacctga

SEQ ID NO: 1432854 - DNA, 25 bp, Homo sapien
ttggttctgtctgaaaacccttcca

SEQ ID NO: 1432855 - DNA, 25 bp, Homo sapien
gaaaacccttccaacagccccatga

SEQ ID NO: 1432856 - DNA, 25 bp, Homo sapien
tctgtctgaaaacccttccaacagc

SEQ ID NO: 1432857 - DNA, 25 bp, Homo sapien
tgaaaacccttccaacagccccatg

SEQ ID NO: 1432858 - DNA, 25 bp, Homo sapien
gactgcgaggggtgaactccatcaa

SEQ ID NO: 1432859 - DNA, 25 bp, Homo sapien
tcttctcagactgcgaggggtgaac

SEQ ID NO: 1432860 - DNA, 25 bp, Homo sapien
ctcagactgcgaggggtgaactcca

SEQ ID NO: 1432861 - DNA, 25 bp, Homo sapien
gaggggtgaactccatcaaatggcc

SEQ ID NO: 1432862 - DNA, 25 bp, Homo sapien
cctggcacaacgtggcaaggcccat

SEQ ID NO: 1432863 - DNA, 25 bp, Homo sapien
tggcacctggcacaacgtggcaagg

SEQ ID NO: 1432864 - DNA, 25 bp, Homo sapien
gcacctggcacaacgtggcaaggcc

SEQ ID NO: 1432865 - DNA, 25 bp, Homo sapien
ctggcacctggcacaacgtggcaag

SEQ ID NO: 1432866 - DNA, 25 bp, Homo sapien
agctaatgcctgcacagatgaagtt

SEQ ID NO: 1432867 - DNA, 25 bp, Homo sapien
tctttcagctaatgcctgcacagat

SEQ ID NO: 1432868 - DNA, 25 bp, Homo sapien
ttcagctaatgcctgcacagatgaa

SEQ ID NO: 1432869 - DNA, 25 bp, Homo sapien
ttttctttcagctaatgcctgcaca

SEQ ID NO: 1432870 - DNA, 25 bp, Homo sapien
tgtactaggcattgtgcttatgaag

SEQ ID NO: 1432871 - DNA, 25 bp, Homo sapien
tactaggcattatgtactaggcatt

SEQ ID NO: 1432872 - DNA, 25 bp, Homo sapien
gcattgtgcttatgaagagagttca

SEQ ID NO: 1432873 - DNA, 25 bp, Homo sapien
tatatactaggcattatgtactagg

SEQ ID NO: 1432874 - DNA, 25 bp, Homo sapien
tacaggacccactagctactgagca

SEQ ID NO: 1432875 - DNA, 25 bp, Homo sapien
ccaggcatcatcagtacggtggtgc

SEQ ID NO: 1432876 - DNA, 25 bp, Homo sapien
cacattaaaggagagggaaacagca

SEQ ID NO: 1432877 - DNA, 25 bp, Homo sapien
taaaatgtggtcagtgcaaccgagg

SEQ ID NO: 1432878 - DNA, 25 bp, Homo sapien
acttgccgagtacttgtaatgaagg

SEQ ID NO: 1432879 - DNA, 25 bp, Homo sapien
tactcaattcagttgcatcaaggtt

SEQ ID NO: 1432880 - DNA, 25 bp, Homo sapien
caattcagttgcatcaaggttaaat

SEQ ID NO: 1432881 - DNA, 25 bp, Homo sapien
tcttatactcaattcagttgcatca

SEQ ID NO: 1432882 - DNA, 25 bp, Homo sapien
gactcctgatcacctttactaagac

SEQ ID NO: 1432883 - DNA, 25 bp, Homo sapien
tctggttaggaagcatagcccctgc

SEQ ID NO: 1432884 - DNA, 25 bp, Homo sapien
gacaccaatcattctcagacttcct

SEQ ID NO: 1432885 - DNA, 25 bp, Homo sapien
aaacacttagggctatctgaccaca

SEQ ID NO: 1432886 - DNA, 25 bp, Homo sapien
ttatacgtggtcagttggaagcgct

SEQ ID NO: 1432887 - DNA, 25 bp, Homo sapien
gaagcgctggtcacaacctagggct

SEQ ID NO: 1432888 - DNA, 25 bp, Homo sapien
cgtgggaactccaatttatacgtgg

SEQ ID NO: 1432889 - DNA, 25 bp, Homo sapien
ttaaattaattcgatctatggaggg

SEQ ID NO: 1432890 - DNA, 25 bp, Homo sapien
ggtacaagtaagagcaacaaacatt

SEQ ID NO: 1432891 - DNA, 25 bp, Homo sapien
tatagtacaggatttgtcacacact

SEQ ID NO: 1432892 - DNA, 25 bp, Homo sapien
tctatttatcccgaatggcacagac

SEQ ID NO: 1432893 - DNA, 25 bp, Homo sapien
gtcacacactgtataagaatttggc

SEQ ID NO: 1432894 - DNA, 25 bp, Homo sapien
gatcccactctatgctccggaggtt

SEQ ID NO: 1432895 - DNA, 25 bp, Homo sapien
tctagatcccactctatgctccgga

SEQ ID NO: 1432896 - DNA, 25 bp, Homo sapien
tatgctccggaggttatttctcagc

SEQ ID NO: 1432897 - DNA, 25 bp, Homo sapien
cccactctatgctccggaggttatt

SEQ ID NO: 1432898 - DNA, 25 bp, Homo sapien
tctgaaacaatccctgggcagtgtt

SEQ ID NO: 1432899 - DNA, 25 bp, Homo sapien
tcattgttcctttcatgtcagcctt

SEQ ID NO: 1432900 - DNA, 25 bp, Homo sapien
ctcattgttcctttcatgtcagcct

SEQ ID NO: 1432901 - DNA, 25 bp, Homo sapien
catgtcagcctttagactttcagtg

SEQ ID NO: 1432902 - DNA, 25 bp, Homo sapien
ttcatgtcagcctttagactttcag

SEQ ID NO: 1432903 - DNA, 25 bp, Homo sapien
caaaaatgcttcacgcaaacttcca

SEQ ID NO: 1432904 - DNA, 25 bp, Homo sapien
aacagctatttcaactcacaactca

SEQ ID NO: 1432905 - DNA, 25 bp, Homo sapien
ttttccatgaagtgacaggttcacc

SEQ ID NO: 1432906 - DNA, 25 bp, Homo sapien
gaaaccagtttgtcattctctccag

SEQ ID NO: 1432907 - DNA, 25 bp, Homo sapien
cactgagtgtgaagccaaggaatcc

SEQ ID NO: 1432908 - DNA, 25 bp, Homo sapien
gaataaagctcagcaccctacaggc

SEQ ID NO: 1432909 - DNA, 25 bp, Homo sapien
gcatgggtggattctagtagcactg

SEQ ID NO: 1432910 - DNA, 25 bp, Homo sapien
tccttaagtatgcaagaagcaaagc

SEQ ID NO: 1432911 - DNA, 25 bp, Homo sapien
gcaaagaggtctctctaagtggaaa

SEQ ID NO: 1432912 - DNA, 25 bp, Homo sapien
aaggtggaaactgccagcaatggct

SEQ ID NO: 1432913 - DNA, 25 bp, Homo sapien
gggaatcccatctcaatagcaagca

SEQ ID NO: 1432914 - DNA, 25 bp, Homo sapien
tcttccaatatcatttcagtgttag

SEQ ID NO: 1432915 - DNA, 25 bp, Homo sapien
tggtgcacttgacactatggcccat

SEQ ID NO: 1432916 - DNA, 25 bp, Homo sapien
tttttggtgcacttgacactatggc

SEQ ID NO: 1432917 - DNA, 25 bp, Homo sapien
tttggtgcacttgacactatggccc

SEQ ID NO: 1432918 - DNA, 25 bp, Homo sapien
ttttggtgcacttgacactatggcc

SEQ ID NO: 1432919 - DNA, 25 bp, Homo sapien
caattaaagagtatgtaggccgggc

SEQ ID NO: 1432920 - DNA, 25 bp, Homo sapien
cactgctggagtactaaggctaagg

SEQ ID NO: 1432921 - DNA, 25 bp, Homo sapien
cacagtcactgtattgagtctggca

SEQ ID NO: 1432922 - DNA, 25 bp, Homo sapien
ggaagccacatacaactactgactg

SEQ ID NO: 1432923 - DNA, 25 bp, Homo sapien
aatgatccaatagatcccaggacag

SEQ ID NO: 1432924 - DNA, 25 bp, Homo sapien
atgtaaaatgacatacatggctggc

SEQ ID NO: 1432925 - DNA, 25 bp, Homo sapien
ttatattttactgcggctactagaa

SEQ ID NO: 1432926 - DNA, 25 bp, Homo sapien
tttaatgtccaaatttaaatgtgca

SEQ ID NO: 1432927 - DNA, 25 bp, Homo sapien
ccccgtcaacgcgaactacaaagct

SEQ ID NO: 1432928 - DNA, 25 bp, Homo sapien
gtcaacgcgaactacaaagctcagg

SEQ ID NO: 1432929 - DNA, 25 bp, Homo sapien
ccgtcaacgcgaactacaaagctca

SEQ ID NO: 1432930 - DNA, 25 bp, Homo sapien
tcaacgcgaactacaaagctcagga

SEQ ID NO: 1432931 - DNA, 25 bp, Homo sapien
caaagaaggggtcctccatggacat

SEQ ID NO: 1432932 - DNA, 25 bp, Homo sapien
acaaagaaggggtcctccatggaca

SEQ ID NO: 1432933 - DNA, 25 bp, Homo sapien
cacaaagaaggggtcctccatggac

SEQ ID NO: 1432934 - DNA, 25 bp, Homo sapien
actggccgaatcccggactcgggcg

SEQ ID NO: 1432935 - DNA, 25 bp, Homo sapien
cttagtctgggtgaagccgagcagc

SEQ ID NO: 1432936 - DNA, 25 bp, Homo sapien
ggccgctggtccagcactcgctcag

SEQ ID NO: 1432937 - DNA, 25 bp, Homo sapien
agctgcccgcgccttagtctgggtg

SEQ ID NO: 1432938 - DNA, 25 bp, Homo sapien
tatgatgctacaggaaactcctaga

SEQ ID NO: 1432939 - DNA, 25 bp, Homo sapien
tgggaagagtatgggaagctcccct

SEQ ID NO: 1432940 - DNA, 25 bp, Homo sapien
aaagagctcctcttataccttaaag

SEQ ID NO: 1432941 - DNA, 25 bp, Homo sapien
gcctctgtctacattcagtgtccta

SEQ ID NO: 1432942 - DNA, 25 bp, Homo sapien
gaggaacagattgtccactagggag

SEQ ID NO: 1432943 - DNA, 25 bp, Homo sapien
gggtctttgtcctcacatatgcagg

SEQ ID NO: 1432944 - DNA, 25 bp, Homo sapien
gatgtgcatatagaccaagatgtgg

SEQ ID NO: 1432945 - DNA, 25 bp, Homo sapien
tttgcacttgtagctatgaggaaca

SEQ ID NO: 1432946 - DNA, 25 bp, Homo sapien
aagcagttgctcctgacctatttgc

SEQ ID NO: 1432947 - DNA, 25 bp, Homo sapien
gaaagcagttgctcctgacctattt

SEQ ID NO: 1432948 - DNA, 25 bp, Homo sapien
gctcctgacctatttgcccaccagc

SEQ ID NO: 1432949 - DNA, 25 bp, Homo sapien
gcagttgctcctgacctatttgccc

SEQ ID NO: 1432950 - DNA, 25 bp, Homo sapien
ggtcccctggatataagatttctga

SEQ ID NO: 1432951 - DNA, 25 bp, Homo sapien
gcctggacataagatttggggtccc

SEQ ID NO: 1432952 - DNA, 25 bp, Homo sapien
gacataagatttggggtcccctgga

SEQ ID NO: 1432953 - DNA, 25 bp, Homo sapien
atttggggtcccctggatataagat

SEQ ID NO: 1432954 - DNA, 25 bp, Homo sapien
accaaggctctcattgaggccacct

SEQ ID NO: 1432955 - DNA, 25 bp, Homo sapien
tgcaccaaggctctcattgaggcca

SEQ ID NO: 1432956 - DNA, 25 bp, Homo sapien
ggaatgcaccaaggctctcattgag

SEQ ID NO: 1432957 - DNA, 25 bp, Homo sapien
aggctctcattgaggccaccttctc

SEQ ID NO: 1432958 - DNA, 25 bp, Homo sapien
aaaacccataatgccactcagcaag

SEQ ID NO: 1432959 - DNA, 25 bp, Homo sapien
caggataaaacccataatgccactc

SEQ ID NO: 1432960 - DNA, 25 bp, Homo sapien
gcatgagcggcttgccatgcaacag

SEQ ID NO: 1432961 - DNA, 25 bp, Homo sapien
tgagcacagcccgtgcatgagcggc

SEQ ID NO: 1432962 - DNA, 25 bp, Homo sapien
tccgccttgcccccactccgtgttg

SEQ ID NO: 1432963 - DNA, 25 bp, Homo sapien
aaggttctgagtccctaagctgagc

SEQ ID NO: 1432964 - DNA, 25 bp, Homo sapien
tcctctccgccttgcccccactccg

SEQ ID NO: 1432965 - DNA, 25 bp, Homo sapien
ttctgagtccctaagctgagctgct

SEQ ID NO: 1432966 - DNA, 25 bp, Homo sapien
aggtgcagtggcagcggccagacct

SEQ ID NO: 1432967 - DNA, 25 bp, Homo sapien
ggcaggtgcagtggcagcggccaga

SEQ ID NO: 1432968 - DNA, 25 bp, Homo sapien
aggcaggtgcagtggcagcggccag

SEQ ID NO: 1432969 - DNA, 25 bp, Homo sapien
ctgaggcaggtgcagtggcagcggc

SEQ ID NO: 1432970 - DNA, 25 bp, Homo sapien
tactgttaaaagactgaatggtcat

SEQ ID NO: 1432971 - DNA, 25 bp, Homo sapien
ggcagcccttcaccttactgttaaa

SEQ ID NO: 1432972 - DNA, 25 bp, Homo sapien
caccttactgttaaaagactgaatg

SEQ ID NO: 1432973 - DNA, 25 bp, Homo sapien
ccttcaccttactgttaaaagactg

SEQ ID NO: 1432974 - DNA, 25 bp, Homo sapien
aatggacctgtatcccatttccctt

SEQ ID NO: 1432975 - DNA, 25 bp, Homo sapien
tcctccatccacaaatggacctgta

SEQ ID NO: 1432976 - DNA, 25 bp, Homo sapien
tacaaagataattgaggctctcaga

SEQ ID NO: 1432977 - DNA, 25 bp, Homo sapien
caaagataattgaggctctcagaag

SEQ ID NO: 1432978 - DNA, 25 bp, Homo sapien
tatatcttcctctacgtgggctgaa

SEQ ID NO: 1432979 - DNA, 25 bp, Homo sapien
ggattccaacctaggaagccagcct

SEQ ID NO: 1432980 - DNA, 25 bp, Homo sapien
aattcattgcttgaccaaccccggg

SEQ ID NO: 1432981 - DNA, 25 bp, Homo sapien
taataaaaaagacggcagcacagag

SEQ ID NO: 1432982 - DNA, 25 bp, Homo sapien
tcttaggtgatcgagggtgtgccca

SEQ ID NO: 1432983 - DNA, 25 bp, Homo sapien
tgggcaagatctacaactcgcgggt

SEQ ID NO: 1432984 - DNA, 25 bp, Homo sapien
cctttaagagcctgctccgcgggac

SEQ ID NO: 1432985 - DNA, 25 bp, Homo sapien
tcgtgattggcggtcgagaagccta

SEQ ID NO: 1432986 - DNA, 25 bp, Homo sapien
caggcggcggccagagaagccgagg

SEQ ID NO: 1432987 - DNA, 25 bp, Homo sapien
aagctgcctggagccgcgtggaggg

SEQ ID NO: 1432988 - DNA, 25 bp, Homo sapien
ggcgtcttccccgaggtatctcgtg

SEQ ID NO: 1432989 - DNA, 25 bp, Homo sapien
aagccgagggtaccgccggaggctg

SEQ ID NO: 1432990 - DNA, 25 bp, Homo sapien
ggtcagaagtactacacagtgcttt

SEQ ID NO: 1432991 - DNA, 25 bp, Homo sapien
gactccagtctttgttgtataaagg

SEQ ID NO: 1432992 - DNA, 25 bp, Homo sapien
gaaaaagcttgacgaacttcacaga

SEQ ID NO: 1432993 - DNA, 25 bp, Homo sapien
agcccgaagtggaaagaccttatgg

SEQ ID NO: 1432994 - DNA, 25 bp, Homo sapien
tgaatgtctcacaccaaccggatga

SEQ ID NO: 1432995 - DNA, 25 bp, Homo sapien
tgcagtgtgactagaaacgatgcca

SEQ ID NO: 1432996 - DNA, 25 bp, Homo sapien
gttctggacaagagccttcccaatg

SEQ ID NO: 1432997 - DNA, 25 bp, Homo sapien
ggagggacctagtctcttgatcaaa

SEQ ID NO: 1432998 - DNA, 25 bp, Homo sapien
cgatgggaactaatgatggaaagcc

SEQ ID NO: 1432999 - DNA, 25 bp, Homo sapien
catcatttgttcttggcgatgggaa

SEQ ID NO: 1433000 - DNA, 25 bp, Homo sapien
caactttggtggaaagcttctcaga

SEQ ID NO: 1433001 - DNA, 25 bp, Homo sapien
tatcactgggttagtctgagtctct

SEQ ID NO: 1433002 - DNA, 25 bp, Homo sapien
ggcaggtgaaatagagtattggcta

SEQ ID NO: 1433003 - DNA, 25 bp, Homo sapien
gagtattggctatcagcttttggaa

SEQ ID NO: 1433004 - DNA, 25 bp, Homo sapien
atcaccggatgctgcccacttatgg

SEQ ID NO: 1433005 - DNA, 25 bp, Homo sapien
ggactgcattcctgaaagggcctct

SEQ ID NO: 1433006 - DNA, 25 bp, Homo sapien
tatcagatgccaagacaaggctcct

SEQ ID NO: 1433007 - DNA, 25 bp, Homo sapien
ccatccatttagcaccaaggcagtc

SEQ ID NO: 1433008 - DNA, 25 bp, Homo sapien
agaattcagggatgtgcggaaagcc

SEQ ID NO: 1433009 - DNA, 25 bp, Homo sapien
cccagcccaatcgttctatcagatg

SEQ ID NO: 1433010 - DNA, 25 bp, Homo sapien
tccagaatccaagataccatccatg

SEQ ID NO: 1433011 - DNA, 25 bp, Homo sapien
tttctagccagtcacaggatctgcc

SEQ ID NO: 1433012 - DNA, 25 bp, Homo sapien
gatacttccttcagcgctgtagctg

SEQ ID NO: 1433013 - DNA, 25 bp, Homo sapien
gttgatccacatctggttcgttctt

SEQ ID NO: 1433014 - DNA, 25 bp, Homo sapien
gagaactgtgagtgggaatgctaca

SEQ ID NO: 1433015 - DNA, 25 bp, Homo sapien
aggagagaactgtgagtgggaatgc

SEQ ID NO: 1433016 - DNA, 25 bp, Homo sapien
agaactgtgagtgggaatgctacag

SEQ ID NO: 1433017 - DNA, 25 bp, Homo sapien
gagagaactgtgagtgggaatgcta

SEQ ID NO: 1433018 - DNA, 25 bp, Homo sapien
cccaacttggcttgtggccagatgc

SEQ ID NO: 1433019 - DNA, 25 bp, Homo sapien
tgggtaggggagtatacatcctaga

SEQ ID NO: 1433020 - DNA, 25 bp, Homo sapien
gagcccgaacgtgggctacaaggca

SEQ ID NO: 1433021 - DNA, 25 bp, Homo sapien
cgccaattccatcataatagcaggg

SEQ ID NO: 1433022 - DNA, 25 bp, Homo sapien
atgctgcctccagccatacgaacta

SEQ ID NO: 1433023 - DNA, 25 bp, Homo sapien
taacttatttgcaggcttctgggcc

SEQ ID NO: 1433024 - DNA, 25 bp, Homo sapien
gccatacgaactatctgcagtttag

SEQ ID NO: 1433025 - DNA, 25 bp, Homo sapien
cagtttaggtaacttatttgcaggc

SEQ ID NO: 1433026 - DNA, 25 bp, Homo sapien
ctccccacaccttctccactgtata

SEQ ID NO: 1433027 - DNA, 25 bp, Homo sapien
gcagacttttctacttgatgtaatg

SEQ ID NO: 1433028 - DNA, 25 bp, Homo sapien
tttgcttgaccagactgtaccctct

SEQ ID NO: 1433029 - DNA, 25 bp, Homo sapien
gggccaatgaatccttgcagacttt

SEQ ID NO: 1433030 - DNA, 25 bp, Homo sapien
tgttcacgtttctttgcttgaccag

SEQ ID NO: 1433031 - DNA, 25 bp, Homo sapien
aaacaagtcaggtgtaggctccgct

SEQ ID NO: 1433032 - DNA, 25 bp, Homo sapien
aacaagtcaggtgtaggctccgctc

SEQ ID NO: 1433033 - DNA, 25 bp, Homo sapien
tgccgtgcaaggtggaaacccttcc

SEQ ID NO: 1433034 - DNA, 25 bp, Homo sapien
gcctctttgttcacgggatgcctcg

SEQ ID NO: 1433035 - DNA, 25 bp, Homo sapien
aagcaggcctctttgttcacgggat

SEQ ID NO: 1433036 - DNA, 25 bp, Homo sapien
caaccaacagacaaaacgcgcgagt

SEQ ID NO: 1433037 - DNA, 25 bp, Homo sapien
tccccttcctattggcatcttcttt

SEQ ID NO: 1433038 - DNA, 25 bp, Homo sapien
ctccccttcctattggcatcttctt

SEQ ID NO: 1433039 - DNA, 25 bp, Homo sapien
tctccccttcctattggcatcttct

SEQ ID NO: 1433040 - DNA, 25 bp, Homo sapien
cctctccccttcctattggcatctt

SEQ ID NO: 1433041 - DNA, 25 bp, Homo sapien
ccagccaggctttggttcattgtca

SEQ ID NO: 1433042 - DNA, 25 bp, Homo sapien
caggctttggttcattgtcagtgtc

SEQ ID NO: 1433043 - DNA, 25 bp, Homo sapien
ctgccagccaggctttggttcattg

SEQ ID NO: 1433044 - DNA, 25 bp, Homo sapien
tcacttaatacccgaatacctagaa

SEQ ID NO: 1433045 - DNA, 25 bp, Homo sapien
aggcgccagggatggagcgggtggg

SEQ ID NO: 1433046 - DNA, 25 bp, Homo sapien
caggcgccagggatggagcgggtgg

SEQ ID NO: 1433047 - DNA, 25 bp, Homo sapien
ggcgccagggatggagcgggtggga

SEQ ID NO: 1433048 - DNA, 25 bp, Homo sapien
catctctcgtttaccatctttggca

SEQ ID NO: 1433049 - DNA, 25 bp, Homo sapien
tagggactctcaggacttgtaagcc

SEQ ID NO: 1433050 - DNA, 25 bp, Homo sapien
agtccaggtatctgtagggactctc

SEQ ID NO: 1433051 - DNA, 25 bp, Homo sapien
ttgggcagcctggaattggccctgg

SEQ ID NO: 1433052 - DNA, 25 bp, Homo sapien
gcaaaccaaatgagggccagaggca

SEQ ID NO: 1433053 - DNA, 25 bp, Homo sapien
tggtggggttcagctagaaagccct

SEQ ID NO: 1433054 - DNA, 25 bp, Homo sapien
tggcctgaacccagggtcctcaatg

SEQ ID NO: 1433055 - DNA, 25 bp, Homo sapien
gccctggcaggtatcatatgcaaac

SEQ ID NO: 1433056 - DNA, 25 bp, Homo sapien
tcaacctctgtgttggactgtttgg

SEQ ID NO: 1433057 - DNA, 25 bp, Homo sapien
gtcaacctctgtgttggactgtttg

SEQ ID NO: 1433058 - DNA, 25 bp, Homo sapien
ctgtcaacctctgtgttggactgtt

SEQ ID NO: 1433059 - DNA, 25 bp, Homo sapien
aacctctgtgttggactgtttggtt

SEQ ID NO: 1433060 - DNA, 25 bp, Homo sapien
gaacaccctacagcttgcaacaggt

SEQ ID NO: 1433061 - DNA, 25 bp, Homo sapien
ctggtgaacaccctacagcttgcaa

SEQ ID NO: 1433062 - DNA, 25 bp, Homo sapien
ttcctggtgaacaccctacagcttg

SEQ ID NO: 1433063 - DNA, 25 bp, Homo sapien
ggtgaacaccctacagcttgcaaca

SEQ ID NO: 1433064 - DNA, 25 bp, Homo sapien
tcctaactgggagtgggattcaaca

SEQ ID NO: 1433065 - DNA, 25 bp, Homo sapien
gcggacagttctcaccgacatctct

SEQ ID NO: 1433066 - DNA, 25 bp, Homo sapien
aggcatccagaaatgctgagcggac

SEQ ID NO: 1433067 - DNA, 25 bp, Homo sapien
tgggattcaacagaggtagaaacgc

SEQ ID NO: 1433068 - DNA, 25 bp, Homo sapien
tcatggtcttgatttctaggcaggc

SEQ ID NO: 1433069 - DNA, 25 bp, Homo sapien
catgaagctcgggttggcagctcat

SEQ ID NO: 1433070 - DNA, 25 bp, Homo sapien
gcagctcataaaccagggagttccc

SEQ ID NO: 1433071 - DNA, 25 bp, Homo sapien
gcccagcatgctcttagaagaccag

SEQ ID NO: 1433072 - DNA, 25 bp, Homo sapien
gatgcaaaggcagtccgtctggtaa

SEQ ID NO: 1433073 - DNA, 25 bp, Homo sapien
tccagatgcaaaggcagtccgtctg

SEQ ID NO: 1433074 - DNA, 25 bp, Homo sapien
tcagaggcccgtccagatgcaaagg

SEQ ID NO: 1433075 - DNA, 25 bp, Homo sapien
ctgggaaggtcagaggcccgtccag

SEQ ID NO: 1433076 - DNA, 25 bp, Homo sapien
tgctgaatcccatgacttgtttagg

SEQ ID NO: 1433077 - DNA, 25 bp, Homo sapien
catgacttgtttagggaacggggct

SEQ ID NO: 1433078 - DNA, 25 bp, Homo sapien
gctggttcctgtgtactgtggctta

SEQ ID NO: 1433079 - DNA, 25 bp, Homo sapien
gggagaaagccttttgctgaatccc

SEQ ID NO: 1433080 - DNA, 25 bp, Homo sapien
gagacagggcattcagtttgcctga

SEQ ID NO: 1433081 - DNA, 25 bp, Homo sapien
gcagccagaggttgaggctttgtct

SEQ ID NO: 1433082 - DNA, 25 bp, Homo sapien
tctttggaatcctgttgggcagggt

SEQ ID NO: 1433083 - DNA, 25 bp, Homo sapien
agagcaagacttgcctcagggcccc

SEQ ID NO: 1433084 - DNA, 25 bp, Homo sapien
tggaagaggtaaggcctgtcccagg

SEQ ID NO: 1433085 - DNA, 25 bp, Homo sapien
gcaactgtagtcattgtttgacaaa

SEQ ID NO: 1433086 - DNA, 25 bp, Homo sapien
aatagtgttttaagtcgaggagaca

SEQ ID NO: 1433087 - DNA, 25 bp, Homo sapien
aattggagttttggatgcttggcaa

SEQ ID NO: 1433088 - DNA, 25 bp, Homo sapien
agaacagaccgtggggctctgctga

SEQ ID NO: 1433089 - DNA, 25 bp, Homo sapien
tcctacggtaggattgtcacaaagt

SEQ ID NO: 1433090 - DNA, 25 bp, Homo sapien
acggtaggattgtcacaaagtggcc

SEQ ID NO: 1433091 - DNA, 25 bp, Homo sapien
cagaggcacaattcctacggtagga

SEQ ID NO: 1433092 - DNA, 25 bp, Homo sapien
tgtgtctctccagaggcacaattcc

SEQ ID NO: 1433093 - DNA, 25 bp, Homo sapien
ctatgcccctttctttttagctctc

SEQ ID NO: 1433094 - DNA, 25 bp, Homo sapien
gctctctgaagtgtggatgctgcag

SEQ ID NO: 1433095 - DNA, 25 bp, Homo sapien
tctttttagctctctgaagtgtgga

SEQ ID NO: 1433096 - DNA, 25 bp, Homo sapien
cctttctttttagctctctgaagtg

SEQ ID NO: 1433097 - DNA, 25 bp, Homo sapien
ttttcagctggcaagcgtgctccct

SEQ ID NO: 1433098 - DNA, 25 bp, Homo sapien
tggactagcttgaaggcccagcagg

SEQ ID NO: 1433099 - DNA, 25 bp, Homo sapien
tgaggcttggacacatggtgacacc

SEQ ID NO: 1433100 - DNA, 25 bp, Homo sapien
gcacagcctgttccatagaaagagc

SEQ ID NO: 1433101 - DNA, 25 bp, Homo sapien
ggttagcccaaaatctgccaagtca

SEQ ID NO: 1433102 - DNA, 25 bp, Homo sapien
tcctggagcccgctcagagttgagc

SEQ ID NO: 1433103 - DNA, 25 bp, Homo sapien
tttgcaaatgaacgcacgactgagg

SEQ ID NO: 1433104 - DNA, 25 bp, Homo sapien
gcataaggccttatcagggtctgtc

SEQ ID NO: 1433105 - DNA, 25 bp, Homo sapien
aaggtcaccagatgtggccagcgga

SEQ ID NO: 1433106 - DNA, 25 bp, Homo sapien
gtcaccagatgtggccagcggacag

SEQ ID NO: 1433107 - DNA, 25 bp, Homo sapien
aggctgcggctcagaagatccctga

SEQ ID NO: 1433108 - DNA, 25 bp, Homo sapien
cagaagatccctgagcaaggtcacc

SEQ ID NO: 1433109 - DNA, 25 bp, Homo sapien
gcagagatcttgggagatgtctgtt

SEQ ID NO: 1433110 - DNA, 25 bp, Homo sapien
cttgggagatgtctgttcgtgtgca

SEQ ID NO: 1433111 - DNA, 25 bp, Homo sapien
ctgacagcaagcagagatcttggga

SEQ ID NO: 1433112 - DNA, 25 bp, Homo sapien
cagcaagcagagatcttgggagatg

SEQ ID NO: 1433113 - DNA, 25 bp, Homo sapien
gcagacaggctcacagctgagccac

SEQ ID NO: 1433114 - DNA, 25 bp, Homo sapien
ctgcagacaggctcacagctgagcc

SEQ ID NO: 1433115 - DNA, 25 bp, Homo sapien
tgcagacaggctcacagctgagcca

SEQ ID NO: 1433116 - DNA, 25 bp, Homo sapien
cagagactgcgactgtgcaggccat

SEQ ID NO: 1433117 - DNA, 25 bp, Homo sapien
gtgattcttggccttacattctgca

SEQ ID NO: 1433118 - DNA, 25 bp, Homo sapien
cccagtggcactggaaccttggatg

SEQ ID NO: 1433119 - DNA, 25 bp, Homo sapien
ggcactggaaccttggatgccccgg

SEQ ID NO: 1433120 - DNA, 25 bp, Homo sapien
gtttaagggtcagctctagttctac

SEQ ID NO: 1433121 - DNA, 25 bp, Homo sapien
tagttctacccagttttctgtagtc

SEQ ID NO: 1433122 - DNA, 25 bp, Homo sapien
ggtcagctctagttctacccagttt

SEQ ID NO: 1433123 - DNA, 25 bp, Homo sapien
cacagtttaagggtcagctctagtt

SEQ ID NO: 1433124 - DNA, 25 bp, Homo sapien
gggccccttgtagggcagcagtggg

SEQ ID NO: 1433125 - DNA, 25 bp, Homo sapien
tcctcacatcacttcgcggccccca

SEQ ID NO: 1433126 - DNA, 25 bp, Homo sapien
ggagagaaccagcaattcccgaggg

SEQ ID NO: 1433127 - DNA, 25 bp, Homo sapien
tcccgagggcccattctgtgctttc

SEQ ID NO: 1433128 - DNA, 25 bp, Homo sapien
tggctcagggtgtggatattggtta

SEQ ID NO: 1433129 - DNA, 25 bp, Homo sapien
tctgctggatgggtttggctcaggg

SEQ ID NO: 1433130 - DNA, 25 bp, Homo sapien
tggatattggttaggtgtggataca

SEQ ID NO: 1433131 - DNA, 25 bp, Homo sapien
agcctagctggacccctgccgctct

SEQ ID NO: 1433132 - DNA, 25 bp, Homo sapien
tgtggcagagaaggttgataaaggg

SEQ ID NO: 1433133 - DNA, 25 bp, Homo sapien
tggcagagaaggttgataaaggggc

SEQ ID NO: 1433134 - DNA, 25 bp, Homo sapien
gtggcagagaaggttgataaagggg

SEQ ID NO: 1433135 - DNA, 25 bp, Homo sapien
ctgtggcagagaaggttgataaagg

SEQ ID NO: 1433136 - DNA, 25 bp, Homo sapien
gggcagtgcgtgttgctaggagaac

SEQ ID NO: 1433137 - DNA, 25 bp, Homo sapien
tcttgcttccagagctggtaggtga

SEQ ID NO: 1433138 - DNA, 25 bp, Homo sapien
ctggctggtgtaatccaagcaccaa

SEQ ID NO: 1433139 - DNA, 25 bp, Homo sapien
gcgtgttgctaggagaacaatgact

SEQ ID NO: 1433140 - DNA, 25 bp, Homo sapien
ggcgcacaaagtgggtgttgccctt

SEQ ID NO: 1433141 - DNA, 25 bp, Homo sapien
tgcggtattaccaggggcgcacaaa

SEQ ID NO: 1433142 - DNA, 25 bp, Homo sapien
ctgcggtattaccaggggcgcacaa

SEQ ID NO: 1433143 - DNA, 25 bp, Homo sapien
cacaaagtgggtgttgccctttgtt

SEQ ID NO: 1433144 - DNA, 25 bp, Homo sapien
ggactgcacactaacacctttctaa

SEQ ID NO: 1433145 - DNA, 25 bp, Homo sapien
ttgaacctgcctcttaaccatgatg

SEQ ID NO: 1433146 - DNA, 25 bp, Homo sapien
agagatgaagcactttccccaccac

SEQ ID NO: 1433147 - DNA, 25 bp, Homo sapien
taaccttcataacatcccggtgagg

SEQ ID NO: 1433148 - DNA, 25 bp, Homo sapien
tgaaacggtgctgtatattcctgga

SEQ ID NO: 1433149 - DNA, 25 bp, Homo sapien
tccaggttgctcaagaagccatgca

SEQ ID NO: 1433150 - DNA, 25 bp, Homo sapien
gcagaaatttggctggctcaagtgt

SEQ ID NO: 1433151 - DNA, 25 bp, Homo sapien
gctcaagtgttccaggttgctcaag

SEQ ID NO: 1433152 - DNA, 25 bp, Homo sapien
gaagggtcctgagtggaggactaaa

SEQ ID NO: 1433153 - DNA, 25 bp, Homo sapien
gaacagggagcgctgggctgatggg

SEQ ID NO: 1433154 - DNA, 25 bp, Homo sapien
tgatgggggaaaatgagggtcgaga

SEQ ID NO: 1433155 - DNA, 25 bp, Homo sapien
gcctgcattatttgtaggctcagag

SEQ ID NO: 1433156 - DNA, 25 bp, Homo sapien
cctccaggctcttgtaggccgcctc

SEQ ID NO: 1433157 - DNA, 25 bp, Homo sapien
gactagcagtcccttcggtgttacg

SEQ ID NO: 1433158 - DNA, 25 bp, Homo sapien
ctccgccgccgattccgcagatggc

SEQ ID NO: 1433159 - DNA, 25 bp, Homo sapien
caggctcttgtaggccgcctccgcc

SEQ ID NO: 1433160 - DNA, 25 bp, Homo sapien
agcctgcagcttcccggacccccag

SEQ ID NO: 1433161 - DNA, 25 bp, Homo sapien
ctggggccccttccgcgagcctggg

SEQ ID NO: 1433162 - DNA, 25 bp, Homo sapien
tgactggggcggtgcgtccagcctg

SEQ ID NO: 1433163 - DNA, 25 bp, Homo sapien
ggcgctgactggggcggtgcgtcca

SEQ ID NO: 1433164 - DNA, 25 bp, Homo sapien
ctggacgaggctcagggtcacttac

SEQ ID NO: 1433165 - DNA, 25 bp, Homo sapien
agagacagaggtgggtgggtgggga

SEQ ID NO: 1433166 - DNA, 25 bp, Homo sapien
agagagacagaggtgggtgggtggg

SEQ ID NO: 1433167 - DNA, 25 bp, Homo sapien
agacagaggtgggtgggtggggacg

SEQ ID NO: 1433168 - DNA, 25 bp, Homo sapien
gagacagaggtgggtgggtggggac

SEQ ID NO: 1433169 - DNA, 25 bp, Homo sapien
tctgacaaggcggtggttcttttcc

SEQ ID NO: 1433170 - DNA, 25 bp, Homo sapien
ggaggacgctcggagctctgacaag

SEQ ID NO: 1433171 - DNA, 25 bp, Homo sapien
acgctcggagctctgacaaggcggt

SEQ ID NO: 1433172 - DNA, 25 bp, Homo sapien
gggaaggggaggacgctcggagctc

SEQ ID NO: 1433173 - DNA, 25 bp, Homo sapien
gacgcagaggcacaggttacctagt

SEQ ID NO: 1433174 - DNA, 25 bp, Homo sapien
ggtgtacaccctcagcgtttatggc

SEQ ID NO: 1433175 - DNA, 25 bp, Homo sapien
cacagaccccgttttacagcggagg

SEQ ID NO: 1433176 - DNA, 25 bp, Homo sapien
cactaccgtggttagtgaagccagc

SEQ ID NO: 1433177 - DNA, 25 bp, Homo sapien
tgaacgcgctctccctcgcagccgc

SEQ ID NO: 1433178 - DNA, 25 bp, Homo sapien
ttcctcttggtccactctatccctc

SEQ ID NO: 1433179 - DNA, 25 bp, Homo sapien
cagatgagcgttctagagaaatgaa

SEQ ID NO: 1433180 - DNA, 25 bp, Homo sapien
cacgttctccagatgagcgttctag

SEQ ID NO: 1433181 - DNA, 25 bp, Homo sapien
tccagggcaagctgctgtgagtctc

SEQ ID NO: 1433182 - DNA, 25 bp, Homo sapien
cagatgtgtctgctgagattctagc

SEQ ID NO: 1433183 - DNA, 25 bp, Homo sapien
ttgactttgttgcacagcccttggg

SEQ ID NO: 1433184 - DNA, 25 bp, Homo sapien
tcccaaggcggaccacatccattgt

SEQ ID NO: 1433185 - DNA, 25 bp, Homo sapien
tgtggacccttgcacggatccttcc

SEQ ID NO: 1433186 - DNA, 25 bp, Homo sapien
gcacggatccttcccaaggagcctg

SEQ ID NO: 1433187 - DNA, 25 bp, Homo sapien
tggctgttggaggatcaccctgagc

SEQ ID NO: 1433188 - DNA, 25 bp, Homo sapien
tgcatggctggttgagatttcagct

SEQ ID NO: 1433189 - DNA, 25 bp, Homo sapien
cccagcttggcactacaccctgcca

SEQ ID NO: 1433190 - DNA, 25 bp, Homo sapien
caccctgccaccacgagttgtactc

SEQ ID NO: 1433191 - DNA, 25 bp, Homo sapien
acgagttgtactcccttgcacccct

SEQ ID NO: 1433192 - DNA, 25 bp, Homo sapien
acaggccccagcttggcactacacc

SEQ ID NO: 1433193 - DNA, 25 bp, Homo sapien
gaggctgtcagctctctgcaggagg

SEQ ID NO: 1433194 - DNA, 25 bp, Homo sapien
tgtcagctctctgcaggaggctgca

SEQ ID NO: 1433195 - DNA, 25 bp, Homo sapien
ctgcagggaggctgtcagctctctg

SEQ ID NO: 1433196 - DNA, 25 bp, Homo sapien
ctggtgagcagagaaaagagctgca

SEQ ID NO: 1433197 - DNA, 25 bp, Homo sapien
cactgtcttcctgtgatcaagggag

SEQ ID NO: 1433198 - DNA, 25 bp, Homo sapien
ggcttagtgtccttaccttcctgaa

SEQ ID NO: 1433199 - DNA, 25 bp, Homo sapien
gattcggtcactacggactggctta

SEQ ID NO: 1433200 - DNA, 25 bp, Homo sapien
aacttgcggtggacaatgccgggct

SEQ ID NO: 1433201 - DNA, 25 bp, Homo sapien
aaacatggatggaatcatcgggtac

SEQ ID NO: 1433202 - DNA, 25 bp, Homo sapien
cctgagcatggagaaacatggatgg

SEQ ID NO: 1433203 - DNA, 25 bp, Homo sapien
ctgagcatggagaaacatggatgga

SEQ ID NO: 1433204 - DNA, 25 bp, Homo sapien
gcctgagcatggagaaacatggatg

SEQ ID NO: 1433205 - DNA, 25 bp, Homo sapien
ggctgtgttctgattcccctgagca

SEQ ID NO: 1433206 - DNA, 25 bp, Homo sapien
aggcacattggagaactgacgatga

SEQ ID NO: 1433207 - DNA, 25 bp, Homo sapien
gaggcctctgccttgcatctcagtg

SEQ ID NO: 1433208 - DNA, 25 bp, Homo sapien
ggagaactgacgatgaccttactgg

SEQ ID NO: 1433209 - DNA, 25 bp, Homo sapien
ctcgctggaagtcattagcttggta

SEQ ID NO: 1433210 - DNA, 25 bp, Homo sapien
ccgtaaaaccattggcagctcctgg

SEQ ID NO: 1433211 - DNA, 25 bp, Homo sapien
cattagcttggtaactcctgggcag

SEQ ID NO: 1433212 - DNA, 25 bp, Homo sapien
tgggcagcctgcttaaacccgtaaa

SEQ ID NO: 1433213 - DNA, 25 bp, Homo sapien
tgcttgctagatccaaacagtgctg

SEQ ID NO: 1433214 - DNA, 25 bp, Homo sapien
gatggtataaggtccctgagtgtgt

SEQ ID NO: 1433215 - DNA, 25 bp, Homo sapien
taagaggagtatcttgcagggctgt

SEQ ID NO: 1433216 - DNA, 25 bp, Homo sapien
caagagaagttggtgctcggacttt

SEQ ID NO: 1433217 - DNA, 25 bp, Homo sapien
tgtctccatggacactgctgagaac

SEQ ID NO: 1433218 - DNA, 25 bp, Homo sapien
tctccatggacactgctgagaacag

SEQ ID NO: 1433219 - DNA, 25 bp, Homo sapien
gatgtctccatggacactgctgaga

SEQ ID NO: 1433220 - DNA, 25 bp, Homo sapien
aggatgtctccatggacactgctga

SEQ ID NO: 1433221 - DNA, 25 bp, Homo sapien
tgctgcccggtgaggccttctgcca

SEQ ID NO: 1433222 - DNA, 25 bp, Homo sapien
ttctggagatgccagacctgttact

SEQ ID NO: 1433223 - DNA, 25 bp, Homo sapien
gaatcacagatgctgcccggtgagg

SEQ ID NO: 1433224 - DNA, 25 bp, Homo sapien
cagacctgttactaacacggccttc

SEQ ID NO: 1433225 - DNA, 25 bp, Homo sapien
agaggaggcactatgatcttctggt

SEQ ID NO: 1433226 - DNA, 25 bp, Homo sapien
gtcttggtttggccacttgaagggc

SEQ ID NO: 1433227 - DNA, 25 bp, Homo sapien
ggcactatgatcttctggtcttggt

SEQ ID NO: 1433228 - DNA, 25 bp, Homo sapien
gaagggccaccttggtgacagtcat

SEQ ID NO: 1433229 - DNA, 25 bp, Homo sapien
gcattacaccggggccatgcctggc

SEQ ID NO: 1433230 - DNA, 25 bp, Homo sapien
ctgggcattacaccggggccatgcc

SEQ ID NO: 1433231 - DNA, 25 bp, Homo sapien
cacatgctcctcgcatacgctggct

SEQ ID NO: 1433232 - DNA, 25 bp, Homo sapien
acatgctcctcgcatacgctggctt

SEQ ID NO: 1433233 - DNA, 25 bp, Homo sapien
gatgaaaaaccgatgcacagggacc

SEQ ID NO: 1433234 - DNA, 25 bp, Homo sapien
agtcacgggtgggaatatcatcaag

SEQ ID NO: 1433235 - DNA, 25 bp, Homo sapien
ccatgagggatagaggtccatgcct

SEQ ID NO: 1433236 - DNA, 25 bp, Homo sapien
tgctgtggccttgagaatagtcacg

SEQ ID NO: 1433237 - DNA, 25 bp, Homo sapien
cagggtctaagagatgggtgagggt

SEQ ID NO: 1433238 - DNA, 25 bp, Homo sapien
ctaagtagcagggtctaagagatgg

SEQ ID NO: 1433239 - DNA, 25 bp, Homo sapien
tagcagggtctaagagatgggtgag

SEQ ID NO: 1433240 - DNA, 25 bp, Homo sapien
gtagcagggtctaagagatgggtga

SEQ ID NO: 1433241 - DNA, 25 bp, Homo sapien
tgatgacatggtagctttaatggtg

SEQ ID NO: 1433242 - DNA, 25 bp, Homo sapien
aaactaggggaattcctcttgcatc

SEQ ID NO: 1433243 - DNA, 25 bp, Homo sapien
tgagggtggtaatgtcccaaactag

SEQ ID NO: 1433244 - DNA, 25 bp, Homo sapien
tctggaatagatacttgatgacatg

SEQ ID NO: 1433245 - DNA, 25 bp, Homo sapien
tgttgggccacaaaactctccagct

SEQ ID NO: 1433246 - DNA, 25 bp, Homo sapien
agccaaagcagaagagccaccggcc

SEQ ID NO: 1433247 - DNA, 25 bp, Homo sapien
tccagctttgtcagtattcttcaaa

SEQ ID NO: 1433248 - DNA, 25 bp, Homo sapien
actgccccagccaaagcagaagagc

SEQ ID NO: 1433249 - DNA, 25 bp, Homo sapien
gaggcgccctgaagataggtgccca

SEQ ID NO: 1433250 - DNA, 25 bp, Homo sapien
ccctcagagtttggtggtaagaggt

SEQ ID NO: 1433251 - DNA, 25 bp, Homo sapien
tgggccctgtgcatatactcatgaa

SEQ ID NO: 1433252 - DNA, 25 bp, Homo sapien
gaggttcacccaagtctgagaggcc

SEQ ID NO: 1433253 - DNA, 25 bp, Homo sapien
ttaaaccagtcaagggcggagtggc

SEQ ID NO: 1433254 - DNA, 25 bp, Homo sapien
ccaaaggaatcaagccaagagatgc

SEQ ID NO: 1433255 - DNA, 25 bp, Homo sapien
caagaggtgacctttaatgtgggcg

SEQ ID NO: 1433256 - DNA, 25 bp, Homo sapien
tcagctataataccatccaagaggt

SEQ ID NO: 1433257 - DNA, 25 bp, Homo sapien
tgagaactggcagtgctcggagatg

SEQ ID NO: 1433258 - DNA, 25 bp, Homo sapien
gagaactggcagtgctcggagatgg

SEQ ID NO: 1433259 - DNA, 25 bp, Homo sapien
agaactggcagtgctcggagatggg

SEQ ID NO: 1433260 - DNA, 25 bp, Homo sapien
tcttcagttccagtcagatccaggt

SEQ ID NO: 1433261 - DNA, 25 bp, Homo sapien
caggtaccaagagcctttgaggccc

SEQ ID NO: 1433262 - DNA, 25 bp, Homo sapien
gtgacacttttcaccctggacccag

SEQ ID NO: 1433263 - DNA, 25 bp, Homo sapien
gctttgctccatcaccccatgaggt

SEQ ID NO: 1433264 - DNA, 25 bp, Homo sapien
tttctccacacatcgctccagggtc

SEQ ID NO: 1433265 - DNA, 25 bp, Homo sapien
aacctccatagtctgctgcctcttg

SEQ ID NO: 1433266 - DNA, 25 bp, Homo sapien
taacctccatagtctgctgcctctt

SEQ ID NO: 1433267 - DNA, 25 bp, Homo sapien
gaggtcagaaaggaagcggaaaagc

SEQ ID NO: 1433268 - DNA, 25 bp, Homo sapien
atccctttctgagtcaggtagaaat

SEQ ID NO: 1433269 - DNA, 25 bp, Homo sapien
ggccagtgggactgacaatagctgt

SEQ ID NO: 1433270 - DNA, 25 bp, Homo sapien
caatagctgttctaggaggtcagaa

SEQ ID NO: 1433271 - DNA, 25 bp, Homo sapien
agagagatgtctttttgcccttaaa

SEQ ID NO: 1433272 - DNA, 25 bp, Homo sapien
gtgttttgtgaaagtgagaattagg

SEQ ID NO: 1433273 - DNA, 25 bp, Homo sapien
gggctatgcctcacaccagagagat

SEQ ID NO: 1433274 - DNA, 25 bp, Homo sapien
agaattagggtaggggctatgcctc

SEQ ID NO: 1433275 - DNA, 25 bp, Homo sapien
ttggaattgtccaagctggtgtaga

SEQ ID NO: 1433276 - DNA, 25 bp, Homo sapien
gctttcaaaacactcatgggcttcc

SEQ ID NO: 1433277 - DNA, 25 bp, Homo sapien
aggaaggctcttggaattgtccaag

SEQ ID NO: 1433278 - DNA, 25 bp, Homo sapien
gaaggcctgttgcacgtctccagga

SEQ ID NO: 1433279 - DNA, 25 bp, Homo sapien
ctgtttcagcaacttggtcttcttc

SEQ ID NO: 1433280 - DNA, 25 bp, Homo sapien
agcctgagctagagatgtgttcacc

SEQ ID NO: 1433281 - DNA, 25 bp, Homo sapien
ttgtttcctgcaccagcgcagttcc

SEQ ID NO: 1433282 - DNA, 25 bp, Homo sapien
tgtgttcaccagcaggagtttgttt

SEQ ID NO: 1433283 - DNA, 25 bp, Homo sapien
tcaaagacccagtttccacagatgg

SEQ ID NO: 1433284 - DNA, 25 bp, Homo sapien
ttctttcaaagacccagtttccaca

SEQ ID NO: 1433285 - DNA, 25 bp, Homo sapien
cagtggacattccgtgggtcatttt

SEQ ID NO: 1433286 - DNA, 25 bp, Homo sapien
aaagacccagtttccacagatggag

SEQ ID NO: 1433287 - DNA, 25 bp, Homo sapien
ctccagattgcattgtcaaagccat

SEQ ID NO: 1433288 - DNA, 25 bp, Homo sapien
ttagattgccaaccgctgacctttg

SEQ ID NO: 1433289 - DNA, 25 bp, Homo sapien
catttcctccagattgcattgtcaa

SEQ ID NO: 1433290 - DNA, 25 bp, Homo sapien
cctgttctgctctatgggtcttaga

SEQ ID NO: 1433291 - DNA, 25 bp, Homo sapien
tctatatggatagctagctgtttca

SEQ ID NO: 1433292 - DNA, 25 bp, Homo sapien
tatgccttaatctatttctggaccc

SEQ ID NO: 1433293 - DNA, 25 bp, Homo sapien
tttccctattagattcccttggcac

SEQ ID NO: 1433294 - DNA, 25 bp, Homo sapien
ggaccctcacttcaattccattggt

SEQ ID NO: 1433295 - DNA, 25 bp, Homo sapien
tgattggcttagtggtacaagaagg

SEQ ID NO: 1433296 - DNA, 25 bp, Homo sapien
gcctttattctcatatcacagaatt

SEQ ID NO: 1433297 - DNA, 25 bp, Homo sapien
ctttattctcatatcacagaattcc

SEQ ID NO: 1433298 - DNA, 25 bp, Homo sapien
acatctttccatggagatttcttgg

SEQ ID NO: 1433299 - DNA, 25 bp, Homo sapien
cagctggcttcttgtagtgttgcta

SEQ ID NO: 1433300 - DNA, 25 bp, Homo sapien
actctgagggaaagttagcagcaac

SEQ ID NO: 1433301 - DNA, 25 bp, Homo sapien
ctattatgggattactggaaatggc

SEQ ID NO: 1433302 - DNA, 25 bp, Homo sapien
aaactgagcatcaagcagcaggacc

SEQ ID NO: 1433303 - DNA, 25 bp, Homo sapien
gaagccctgtctagacatccagtgt

SEQ ID NO: 1433304 - DNA, 25 bp, Homo sapien
gctgtcagcaatgttctgccagtgg

SEQ ID NO: 1433305 - DNA, 25 bp, Homo sapien
tggatgtcaacagctgagggcagtt

SEQ ID NO: 1433306 - DNA, 25 bp, Homo sapien
gaccacagtgttgtcaagggaagac

SEQ ID NO: 1433307 - DNA, 25 bp, Homo sapien
aggttctgagcctcactatggccac

SEQ ID NO: 1433308 - DNA, 25 bp, Homo sapien
atgtgtctgtcttgcgccccgcatg

SEQ ID NO: 1433309 - DNA, 25 bp, Homo sapien
atggaccttggagatccgtagttgg

SEQ ID NO: 1433310 - DNA, 25 bp, Homo sapien
ttggagatccgtagttggccctaac

SEQ ID NO: 1433311 - DNA, 25 bp, Homo sapien
tggcccccgcgcttctacgtgttgg

SEQ ID NO: 1433312 - DNA, 25 bp, Homo sapien
cacttagggtgtgagtgttgcgccc

SEQ ID NO: 1433313 - DNA, 25 bp, Homo sapien
gctcgaggatgcagggttctcacca

SEQ ID NO: 1433314 - DNA, 25 bp, Homo sapien
tcgagccgctgggttttcgcaagcc

SEQ ID NO: 1433315 - DNA, 25 bp, Homo sapien
tgagcttgcagcgaagtttccgtga

SEQ ID NO: 1433316 - DNA, 25 bp, Homo sapien
cctttggaggcgactcgggactgct

SEQ ID NO: 1433317 - DNA, 25 bp, Homo sapien
tgtctatggagttgcgggtcagagc

SEQ ID NO: 1433318 - DNA, 25 bp, Homo sapien
ttttgatccggcttgagtctccttg

SEQ ID NO: 1433319 - DNA, 25 bp, Homo sapien
tctccttgtgcgagagtggttgtgc

SEQ ID NO: 1433320 - DNA, 25 bp, Homo sapien
tcaccgtgttggaacattgatgcat

SEQ ID NO: 1433321 - DNA, 25 bp, Homo sapien
tcagagcagatgattcaggctgtgg

SEQ ID NO: 1433322 - DNA, 25 bp, Homo sapien
gggcttgtcgtaatggttcaccgtg

SEQ ID NO: 1433323 - DNA, 25 bp, Homo sapien
tgcagtcgtgtctgtgagtctggct

SEQ ID NO: 1433324 - DNA, 25 bp, Homo sapien
aggatgcagacttcatagcctttgc

SEQ ID NO: 1433325 - DNA, 25 bp, Homo sapien
gggaagagacgtccaggcctccttc

SEQ ID NO: 1433326 - DNA, 25 bp, Homo sapien
gcaggaattgggaagagacgtccag

SEQ ID NO: 1433327 - DNA, 25 bp, Homo sapien
ccagagcggacagaggttagcttag

SEQ ID NO: 1433328 - DNA, 25 bp, Homo sapien
gctcgaatggattctaaatataacc

SEQ ID NO: 1433329 - DNA, 25 bp, Homo sapien
tagagtattctttggctccagtgga

SEQ ID NO: 1433330 - DNA, 25 bp, Homo sapien
tggacaaaataacctggttgctcga

SEQ ID NO: 1433331 - DNA, 25 bp, Homo sapien
gccctggtaggagcttttagagtat

SEQ ID NO: 1433332 - DNA, 25 bp, Homo sapien
gctcattcgtggtgagtggagaaaa

SEQ ID NO: 1433333 - DNA, 25 bp, Homo sapien
tgctggtggagcgttctgtctgtca

SEQ ID NO: 1433334 - DNA, 25 bp, Homo sapien
gatggcaaggaggtcacttctactc

SEQ ID NO: 1433335 - DNA, 25 bp, Homo sapien
tctgcctcttagcatcatgaatgag

SEQ ID NO: 1433336 - DNA, 25 bp, Homo sapien
ctgggaaagcgggcaaggacccaca

SEQ ID NO: 1433337 - DNA, 25 bp, Homo sapien
tgggaaagcgggcaaggacccacag

SEQ ID NO: 1433338 - DNA, 25 bp, Homo sapien
gctctcagatcccttaaacctgtgg

SEQ ID NO: 1433339 - DNA, 25 bp, Homo sapien
agccttcttcatgtggtctcctcaa

SEQ ID NO: 1433340 - DNA, 25 bp, Homo sapien
caaaagccaaatctaactctttctc

SEQ ID NO: 1433341 - DNA, 25 bp, Homo sapien
ccttcttcatgtggtctcctcaatc

SEQ ID NO: 1433342 - DNA, 25 bp, Homo sapien
gctgggctttgaagacccaaaagcc

SEQ ID NO: 1433343 - DNA, 25 bp, Homo sapien
gcagctgcagcctattggcttgatt

SEQ ID NO: 1433344 - DNA, 25 bp, Homo sapien
tcggagacagttgggtaaatctgat

SEQ ID NO: 1433345 - DNA, 25 bp, Homo sapien
gctgcagcctattggcttgatttgt

SEQ ID NO: 1433346 - DNA, 25 bp, Homo sapien
ctggcattcggagacagttgggtaa

SEQ ID NO: 1433347 - DNA, 25 bp, Homo sapien
aaggcctgccagagcctgtgaactt

SEQ ID NO: 1433348 - DNA, 25 bp, Homo sapien
cagagcctgtgaacttgaggtgttc

SEQ ID NO: 1433349 - DNA, 25 bp, Homo sapien
cctgtgaacttgaggtgttctgtta

SEQ ID NO: 1433350 - DNA, 25 bp, Homo sapien
acttgaggtgttctgttactctgac

SEQ ID NO: 1433351 - DNA, 25 bp, Homo sapien
gccacaggagaaaacgaatgtctgt

SEQ ID NO: 1433352 - DNA, 25 bp, Homo sapien
ggtgtcacgagccttgctctggctg

SEQ ID NO: 1433353 - DNA, 25 bp, Homo sapien
aaacgaatgtctgtggtgtcacgag

SEQ ID NO: 1433354 - DNA, 25 bp, Homo sapien
gagaaaacgaatgtctgtggtgtca

SEQ ID NO: 1433355 - DNA, 25 bp, Homo sapien
tgaatgcccccgctagttttatgag

SEQ ID NO: 1433356 - DNA, 25 bp, Homo sapien
gcccccgctagttttatgagtcaaa

SEQ ID NO: 1433357 - DNA, 25 bp, Homo sapien
aatgcccccgctagttttatgagtc

SEQ ID NO: 1433358 - DNA, 25 bp, Homo sapien
ccccgctagttttatgagtcaaatt

SEQ ID NO: 1433359 - DNA, 25 bp, Homo sapien
gattgattgactcctgatttccttg

SEQ ID NO: 1433360 - DNA, 25 bp, Homo sapien
gataccagtgttgcagatgggctgc

SEQ ID NO: 1433361 - DNA, 25 bp, Homo sapien
tagaaagtgcaaggatgcagatacc

SEQ ID NO: 1433362 - DNA, 25 bp, Homo sapien
aagccaagccgtgtgacctctggga

SEQ ID NO: 1433363 - DNA, 25 bp, Homo sapien
ccagagcacggccatcgctggaaca

SEQ ID NO: 1433364 - DNA, 25 bp, Homo sapien
tcatgctagatgttccactcctttg

SEQ ID NO: 1433365 - DNA, 25 bp, Homo sapien
tttctccccggagagtggagcaccc

SEQ ID NO: 1433366 - DNA, 25 bp, Homo sapien
gccatcgctggaacatcatgctaga

SEQ ID NO: 1433367 - DNA, 25 bp, Homo sapien
cagctggacaagcctctcatttcca

SEQ ID NO: 1433368 - DNA, 25 bp, Homo sapien
ttttggtcccgtgtcctcagatgga

SEQ ID NO: 1433369 - DNA, 25 bp, Homo sapien
cctcgagacccctttaggaccattg

SEQ ID NO: 1433370 - DNA, 25 bp, Homo sapien
tcctgatacatgaaccctgtctcct

SEQ ID NO: 1433371 - DNA, 25 bp, Homo sapien
cttgtctgtgggcattgacacctct

SEQ ID NO: 1433372 - DNA, 25 bp, Homo sapien
ggaccattggcaaggtccccgtgcc

SEQ ID NO: 1433373 - DNA, 25 bp, Homo sapien
ctcctgcaccactcaggagacacag

SEQ ID NO: 1433374 - DNA, 25 bp, Homo sapien
cctcctgcaccactcaggagacaca

SEQ ID NO: 1433375 - DNA, 25 bp, Homo sapien
tacattcagaatgcaccagcctgtt

SEQ ID NO: 1433376 - DNA, 25 bp, Homo sapien
tgttggacattagcccatccttgaa

SEQ ID NO: 1433377 - DNA, 25 bp, Homo sapien
gtcaccataacaacataggcacatg

SEQ ID NO: 1433378 - DNA, 25 bp, Homo sapien
ccagcctgttaaattgctgttggac

SEQ ID NO: 1433379 - DNA, 25 bp, Homo sapien
cacaaggtaagttggaggatgcaca

SEQ ID NO: 1433380 - DNA, 25 bp, Homo sapien
gacttgctggtgtatccacttctca

SEQ ID NO: 1433381 - DNA, 25 bp, Homo sapien
aataaagatagtagacttagaaaag

SEQ ID NO: 1433382 - DNA, 25 bp, Homo sapien
aaaagcatgagtttcattgacttgc

SEQ ID NO: 1433383 - DNA, 25 bp, Homo sapien
tccatttcctatttttgccaggttc

SEQ ID NO: 1433384 - DNA, 25 bp, Homo sapien
ggttctctgtagaacctgcttccat

SEQ ID NO: 1433385 - DNA, 25 bp, Homo sapien
tgggtccacccctcattctcttttg

SEQ ID NO: 1433386 - DNA, 25 bp, Homo sapien
tttcctatttttgccaggttctctg

SEQ ID NO: 1433387 - DNA, 25 bp, Homo sapien
ttaagggcttgcctggacccatggc

SEQ ID NO: 1433388 - DNA, 25 bp, Homo sapien
taattggaggaattcgctttggcct

SEQ ID NO: 1433389 - DNA, 25 bp, Homo sapien
caaatgagccaaaggcgttttcctc

SEQ ID NO: 1433390 - DNA, 25 bp, Homo sapien
tgaagacacgtgcagaaaaggaagt

SEQ ID NO: 1433391 - DNA, 25 bp, Homo sapien
tgcttttagctcctttaaccatctt

SEQ ID NO: 1433392 - DNA, 25 bp, Homo sapien
cttctgcttttagctcctttaacca

SEQ ID NO: 1433393 - DNA, 25 bp, Homo sapien
agctcctttaaccatctttctcttc

SEQ ID NO: 1433394 - DNA, 25 bp, Homo sapien
tctcttctgcttttagctcctttaa

SEQ ID NO: 1433395 - DNA, 25 bp, Homo sapien
gatggagttattaattgtcagtcca

SEQ ID NO: 1433396 - DNA, 25 bp, Homo sapien
tgaattaataatatgccagcaggaa

SEQ ID NO: 1433397 - DNA, 25 bp, Homo sapien
ctggagaggcccgatgaattaataa

SEQ ID NO: 1433398 - DNA, 25 bp, Homo sapien
cagagagatggagttattaattgtc

SEQ ID NO: 1433399 - DNA, 25 bp, Homo sapien
tctcaaggtcctaattagcatgctg

SEQ ID NO: 1433400 - DNA, 25 bp, Homo sapien
tgacagcttcggttttatccagagc

SEQ ID NO: 1433401 - DNA, 25 bp, Homo sapien
ttcagaagttccttcagggatccct

SEQ ID NO: 1433402 - DNA, 25 bp, Homo sapien
atccggcacagagtggagagccctg

SEQ ID NO: 1433403 - DNA, 25 bp, Homo sapien
cagaggtaagtaatttcaccatttt

SEQ ID NO: 1433404 - DNA, 25 bp, Homo sapien
ccaaaataggagttcttttgagatg

SEQ ID NO: 1433405 - DNA, 25 bp, Homo sapien
aaaataggagttcttttgagatggc

SEQ ID NO: 1433406 - DNA, 25 bp, Homo sapien
aactcagaggtaagtaatttcacca

SEQ ID NO: 1433407 - DNA, 25 bp, Homo sapien
cccttggtttcaggaaggtctctgc

SEQ ID NO: 1433408 - DNA, 25 bp, Homo sapien
ccttggtttcaggaaggtctctgca

SEQ ID NO: 1433409 - DNA, 25 bp, Homo sapien
ttagtgtggcttcctgcatcgccga

SEQ ID NO: 1433410 - DNA, 25 bp, Homo sapien
tgtggcttcctgcatcgccgatcga

SEQ ID NO: 1433411 - DNA, 25 bp, Homo sapien
tgccatctttagtgtggcttcctgc

SEQ ID NO: 1433412 - DNA, 25 bp, Homo sapien
catcgccgatcgaccaagtggcaga

SEQ ID NO: 1433413 - DNA, 25 bp, Homo sapien
tcagcaagcactggagaccggcatg

SEQ ID NO: 1433414 - DNA, 25 bp, Homo sapien
tggagaccggcatgtttgcatttcc

SEQ ID NO: 1433415 - DNA, 25 bp, Homo sapien
ctcagcaagcactggagaccggcat

SEQ ID NO: 1433416 - DNA, 25 bp, Homo sapien
tggagtcccctggggttgctcccac

SEQ ID NO: 1433417 - DNA, 25 bp, Homo sapien
ttggagtcccctggggttgctccca

SEQ ID NO: 1433418 - DNA, 25 bp, Homo sapien
tctgcttggagtcccctggggttgc

SEQ ID NO: 1433419 - DNA, 25 bp, Homo sapien
gcttggagtcccctggggttgctcc

SEQ ID NO: 1433420 - DNA, 25 bp, Homo sapien
tctagaagtctttgggactgaaagc

SEQ ID NO: 1433421 - DNA, 25 bp, Homo sapien
aaaagatgatcaagtgccatgctga

SEQ ID NO: 1433422 - DNA, 25 bp, Homo sapien
tcatgtttacagcttcttggcttgg

SEQ ID NO: 1433423 - DNA, 25 bp, Homo sapien
tgcccttggacactctcgtatcttg

SEQ ID NO: 1433424 - DNA, 25 bp, Homo sapien
ggttgcacttccaaggttcttacat

SEQ ID NO: 1433425 - DNA, 25 bp, Homo sapien
cttaattcccgaagaatctgggcca

SEQ ID NO: 1433426 - DNA, 25 bp, Homo sapien
tgggccattgttttttaagcttgta

SEQ ID NO: 1433427 - DNA, 25 bp, Homo sapien
tgttggactcttcttaattcccgaa

SEQ ID NO: 1433428 - DNA, 25 bp, Homo sapien
gactgaggttcggatggttaccatt

SEQ ID NO: 1433429 - DNA, 25 bp, Homo sapien
cctgtgggactgaggttcggatggt

SEQ ID NO: 1433430 - DNA, 25 bp, Homo sapien
ggttcggatggttaccattgactaa

SEQ ID NO: 1433431 - DNA, 25 bp, Homo sapien
tggttaccattgactaaaatgggaa

SEQ ID NO: 1433432 - DNA, 25 bp, Homo sapien
ctgactggctgcaagtcatggagag

SEQ ID NO: 1433433 - DNA, 25 bp, Homo sapien
tcaatctttccatacctcctcctca

SEQ ID NO: 1433434 - DNA, 25 bp, Homo sapien
cctcagggggaagaagtccttgctt

SEQ ID NO: 1433435 - DNA, 25 bp, Homo sapien
gcttcaagtaactgactggctgcaa

SEQ ID NO: 1433436 - DNA, 25 bp, Homo sapien
ttagctgtggggccgtgggatgtgg

SEQ ID NO: 1433437 - DNA, 25 bp, Homo sapien
agctgtggggccgtgggatgtggca

SEQ ID NO: 1433438 - DNA, 25 bp, Homo sapien
gttagctgtggggccgtgggatgtg

SEQ ID NO: 1433439 - DNA, 25 bp, Homo sapien
tagctgtggggccgtgggatgtggc

SEQ ID NO: 1433440 - DNA, 25 bp, Homo sapien
ctggtcagctcggacaacttctgca

SEQ ID NO: 1433441 - DNA, 25 bp, Homo sapien
tggtgctggtcagctcggacaactt

SEQ ID NO: 1433442 - DNA, 25 bp, Homo sapien
ggtcagctcggacaacttctgcagg

SEQ ID NO: 1433443 - DNA, 25 bp, Homo sapien
tgctggtcagctcggacaacttctg

SEQ ID NO: 1433444 - DNA, 25 bp, Homo sapien
taggaaacgaaagatcagattcaga

SEQ ID NO: 1433445 - DNA, 25 bp, Homo sapien
caaaaatatcttgcctgaagtgatc

SEQ ID NO: 1433446 - DNA, 25 bp, Homo sapien
cctgaagtgatcgagcctttttagg

SEQ ID NO: 1433447 - DNA, 25 bp, Homo sapien
cagaaagcaaggagatggttctcaa

SEQ ID NO: 1433448 - DNA, 25 bp, Homo sapien
cttccttgagctgaactgattgtct

SEQ ID NO: 1433449 - DNA, 25 bp, Homo sapien
tgaagggaaggttgaggacaggctt

SEQ ID NO: 1433450 - DNA, 25 bp, Homo sapien
catggtgcagatcctaaggagtcca

SEQ ID NO: 1433451 - DNA, 25 bp, Homo sapien
gctgaactgattgtctccagaatgg

SEQ ID NO: 1433452 - DNA, 25 bp, Homo sapien
caacatcattctgtgagctgggtct

SEQ ID NO: 1433453 - DNA, 25 bp, Homo sapien
tcaggttttagatgcacgcgtgcgt

SEQ ID NO: 1433454 - DNA, 25 bp, Homo sapien
agtgagctggtgactgtcttcaggt

SEQ ID NO: 1433455 - DNA, 25 bp, Homo sapien
tgtgcgcgcgcacttgaggtattgc

SEQ ID NO: 1433456 - DNA, 25 bp, Homo sapien
tagagtctggatatattcttgcctc

SEQ ID NO: 1433457 - DNA, 25 bp, Homo sapien
ccttcggcaccatctgtagagtctg

SEQ ID NO: 1433458 - DNA, 25 bp, Homo sapien
cctcttggaactgtagaatcatcat

SEQ ID NO: 1433459 - DNA, 25 bp, Homo sapien
gaaatctctattctctagctcaaat

SEQ ID NO: 1433460 - DNA, 25 bp, Homo sapien
gttttctgagtcaagaggccgtggg

SEQ ID NO: 1433461 - DNA, 25 bp, Homo sapien
ccgggctgaacgagctttgcaaggt

SEQ ID NO: 1433462 - DNA, 25 bp, Homo sapien
tgctcctgccggttgttctcaccct

SEQ ID NO: 1433463 - DNA, 25 bp, Homo sapien
tcctgctgcactttgccttggctga

SEQ ID NO: 1433464 - DNA, 25 bp, Homo sapien
gggctgcaggataaatgctttgaaa

SEQ ID NO: 1433465 - DNA, 25 bp, Homo sapien
ctcgatgatacactgcagtagaggg

SEQ ID NO: 1433466 - DNA, 25 bp, Homo sapien
cttcacacctgattgcagctcgatg

SEQ ID NO: 1433467 - DNA, 25 bp, Homo sapien
gcagctcgatgatacactgcagtag

SEQ ID NO: 1433468 - DNA, 25 bp, Homo sapien
aaatgcctggccgtgttcgtggagc

SEQ ID NO: 1433469 - DNA, 25 bp, Homo sapien
gagggttctgccctctacttggaaa

SEQ ID NO: 1433470 - DNA, 25 bp, Homo sapien
ccgacaccttactagggcggcggcg

SEQ ID NO: 1433471 - DNA, 25 bp, Homo sapien
cactggggacacctctctgcaggga

SEQ ID NO: 1433472 - DNA, 25 bp, Homo sapien
catgccgccctctacatagattggg

SEQ ID NO: 1433473 - DNA, 25 bp, Homo sapien
tggagacccgtttgggcactagtgt

SEQ ID NO: 1433474 - DNA, 25 bp, Homo sapien
gaaatctttagtgtccctgggtgca

SEQ ID NO: 1433475 - DNA, 25 bp, Homo sapien
ggtacctagcatggaatgtatcccc

SEQ ID NO: 1433476 - DNA, 25 bp, Homo sapien
agcttatctcttaacctgggccctc

SEQ ID NO: 1433477 - DNA, 25 bp, Homo sapien
gggccaagactccttgcaccatagc

SEQ ID NO: 1433478 - DNA, 25 bp, Homo sapien
gagtgagtgcaaagaagtccagaag

SEQ ID NO: 1433479 - DNA, 25 bp, Homo sapien
ccataggagtgagtgcaaagaagtc

SEQ ID NO: 1433480 - DNA, 25 bp, Homo sapien
agggtggagcggcttgctgagaggc

SEQ ID NO: 1433481 - DNA, 25 bp, Homo sapien
tggagcggcttgctgagaggcatta

SEQ ID NO: 1433482 - DNA, 25 bp, Homo sapien
cttgctgagaggcattagaaagccc

SEQ ID NO: 1433483 - DNA, 25 bp, Homo sapien
agaggcattagaaagccctcttggc

SEQ ID NO: 1433484 - DNA, 25 bp, Homo sapien
tactttatgccatgatctggagaaa

SEQ ID NO: 1433485 - DNA, 25 bp, Homo sapien
tatgccatgatctggagaaaatgtg

SEQ ID NO: 1433486 - DNA, 25 bp, Homo sapien
ctttatgccatgatctggagaaaat

SEQ ID NO: 1433487 - DNA, 25 bp, Homo sapien
tctactttatgccatgatctggaga

SEQ ID NO: 1433488 - DNA, 25 bp, Homo sapien
ctgctggcgagtgagtgtgactctc

SEQ ID NO: 1433489 - DNA, 25 bp, Homo sapien
tagttccggtggctgaacctcaggg

SEQ ID NO: 1433490 - DNA, 25 bp, Homo sapien
cagcagaggcccgtggaatggtctc

SEQ ID NO: 1433491 - DNA, 25 bp, Homo sapien
gaaggaacgatggtggtcagctgct

SEQ ID NO: 1433492 - DNA, 25 bp, Homo sapien
cagcaccaagaccagagcaactggt

SEQ ID NO: 1433493 - DNA, 25 bp, Homo sapien
gcaccaagaccagagcaactggtga

SEQ ID NO: 1433494 - DNA, 25 bp, Homo sapien
ccaagaccagagcaactggtgagca

SEQ ID NO: 1433495 - DNA, 25 bp, Homo sapien
caccaagaccagagcaactggtgag

SEQ ID NO: 1433496 - DNA, 25 bp, Homo sapien
aatctggatcctaactgaactctgg

SEQ ID NO: 1433497 - DNA, 25 bp, Homo sapien
agccaacccacatgcttgtttatgg

SEQ ID NO: 1433498 - DNA, 25 bp, Homo sapien
cacatcatgatgctgaatctggatc

SEQ ID NO: 1433499 - DNA, 25 bp, Homo sapien
gaacaatggtcaaaagatcaagcca

SEQ ID NO: 1433500 - DNA, 25 bp, Homo sapien
ctttgggaaattgcaggaaaaactg

SEQ ID NO: 1433501 - DNA, 25 bp, Homo sapien
ggcccactactttgggaaattgcag

SEQ ID NO: 1433502 - DNA, 25 bp, Homo sapien
taggcagtcagactcagtggttgcc

SEQ ID NO: 1433503 - DNA, 25 bp, Homo sapien
ttggattgaagagcctcgcctaggc

SEQ ID NO: 1433504 - DNA, 25 bp, Homo sapien
tttcaggctccctttacaatcacag

SEQ ID NO: 1433505 - DNA, 25 bp, Homo sapien
tacaatcacagtagctgttaactgc

SEQ ID NO: 1433506 - DNA, 25 bp, Homo sapien
gtagctgttaactgctgaaagggac

SEQ ID NO: 1433507 - DNA, 25 bp, Homo sapien
caacaaccccctctagagcaaggat

SEQ ID NO: 1433508 - DNA, 25 bp, Homo sapien
gactttcctggctgtgccgtacaaa

SEQ ID NO: 1433509 - DNA, 25 bp, Homo sapien
ggactttcctggctgtgccgtacaa

SEQ ID NO: 1433510 - DNA, 25 bp, Homo sapien
tttcctggctgtgccgtacaaagta

SEQ ID NO: 1433511 - DNA, 25 bp, Homo sapien
gcaggactttcctggctgtgccgta

SEQ ID NO: 1433512 - DNA, 25 bp, Homo sapien
ggaaaatgccaccaggagctctaac

SEQ ID NO: 1433513 - DNA, 25 bp, Homo sapien
tgagttttctgtacagcctttgttt

SEQ ID NO: 1433514 - DNA, 25 bp, Homo sapien
tctgtacagcctttgttttgccctc

SEQ ID NO: 1433515 - DNA, 25 bp, Homo sapien
ttttgccctctggaaaatgccacca

SEQ ID NO: 1433516 - DNA, 25 bp, Homo sapien
ttagatatttgaacagtcctcttgc

SEQ ID NO: 1433517 - DNA, 25 bp, Homo sapien
caggaatgaccaaaccatgattgtc

SEQ ID NO: 1433518 - DNA, 25 bp, Homo sapien
gcaggaatgaccaaaccatgattgt

SEQ ID NO: 1433519 - DNA, 25 bp, Homo sapien
tttaagaagttggcaggaatgacca

SEQ ID NO: 1433520 - DNA, 25 bp, Homo sapien
ttaagaagttggcaggaatgaccaa

SEQ ID NO: 1433521 - DNA, 25 bp, Homo sapien
gaatgtttctgagagggatcctcct

SEQ ID NO: 1433522 - DNA, 25 bp, Homo sapien
gaggcccagactgttgtgtcatggt

SEQ ID NO: 1433523 - DNA, 25 bp, Homo sapien
tgtaatgcattatcaaaggaccgtg

SEQ ID NO: 1433524 - DNA, 25 bp, Homo sapien
taaggctcggtaaatggatgaggcc

SEQ ID NO: 1433525 - DNA, 25 bp, Homo sapien
tgttcagctgctgattcaggactga

SEQ ID NO: 1433526 - DNA, 25 bp, Homo sapien
ttagattcgtcagcaaactcacact

SEQ ID NO: 1433527 - DNA, 25 bp, Homo sapien
tgatcactgggggtgcctcagaact

SEQ ID NO: 1433528 - DNA, 25 bp, Homo sapien
cattttcttagattcgtcagcaaac

SEQ ID NO: 1433529 - DNA, 25 bp, Homo sapien
atgagtttagatctaggtgcttgtc

SEQ ID NO: 1433530 - DNA, 25 bp, Homo sapien
taatgagtttagatctaggtgcttg

SEQ ID NO: 1433531 - DNA, 25 bp, Homo sapien
ctactttaatgagtttagatctagg

SEQ ID NO: 1433532 - DNA, 25 bp, Homo sapien
ctttaatgagtttagatctaggtgc

SEQ ID NO: 1433533 - DNA, 25 bp, Homo sapien
gcaatattggcagctacacattctt

SEQ ID NO: 1433534 - DNA, 25 bp, Homo sapien
cttgaattgaataagctgatgcaat

SEQ ID NO: 1433535 - DNA, 25 bp, Homo sapien
acattcttcatatgacacctctttt

SEQ ID NO: 1433536 - DNA, 25 bp, Homo sapien
ttcaccctgtagtctccacagagat

SEQ ID NO: 1433537 - DNA, 25 bp, Homo sapien
tctttgcactgaatgagcaatgctt

SEQ ID NO: 1433538 - DNA, 25 bp, Homo sapien
ctttgcactgaatgagcaatgcttg

SEQ ID NO: 1433539 - DNA, 25 bp, Homo sapien
ttctttgcactgaatgagcaatgct

SEQ ID NO: 1433540 - DNA, 25 bp, Homo sapien
tttgcactgaatgagcaatgcttgt

SEQ ID NO: 1433541 - DNA, 25 bp, Homo sapien
cccttcagaggtgtctctaatcgag

SEQ ID NO: 1433542 - DNA, 25 bp, Homo sapien
taatcgaggcaaggggcagtttcca

SEQ ID NO: 1433543 - DNA, 25 bp, Homo sapien
cagaggtgtctctaatcgaggcaag

SEQ ID NO: 1433544 - DNA, 25 bp, Homo sapien
tggatgtcccttcagaggtgtctct

SEQ ID NO: 1433545 - DNA, 25 bp, Homo sapien
cgaatgctttctgcttgccatagct

SEQ ID NO: 1433546 - DNA, 25 bp, Homo sapien
cgattcatgcaatgtagagatgagg

SEQ ID NO: 1433547 - DNA, 25 bp, Homo sapien
ttagctgcactgtttccgattcatg

SEQ ID NO: 1433548 - DNA, 25 bp, Homo sapien
gcttgagcgagtgttttagctgcac

SEQ ID NO: 1433549 - DNA, 25 bp, Homo sapien
cagtctttccatctagagaaccagg

SEQ ID NO: 1433550 - DNA, 25 bp, Homo sapien
cctagcaatgcccatcagcaaagag

SEQ ID NO: 1433551 - DNA, 25 bp, Homo sapien
agagcgtttcctagcaatgcccatc

SEQ ID NO: 1433552 - DNA, 25 bp, Homo sapien
cactttcaggcccaaatgccacggg

SEQ ID NO: 1433553 - DNA, 25 bp, Homo sapien
aatcagggagagagtttcccaatct

SEQ ID NO: 1433554 - DNA, 25 bp, Homo sapien
tcctcttgttatttggaaatcaggg

SEQ ID NO: 1433555 - DNA, 25 bp, Homo sapien
ttggaaatcagggagagagtttccc

SEQ ID NO: 1433556 - DNA, 25 bp, Homo sapien
ttcctcttgttatttggaaatcagg

SEQ ID NO: 1433557 - DNA, 25 bp, Homo sapien
attggccatctgaatccaccttcca

SEQ ID NO: 1433558 - DNA, 25 bp, Homo sapien
tgattggccatctgaatccaccttc

SEQ ID NO: 1433559 - DNA, 25 bp, Homo sapien
cactgtggccttagcattcccacct

SEQ ID NO: 1433560 - DNA, 25 bp, Homo sapien
tgtggccttagcattcccacctctt

SEQ ID NO: 1433561 - DNA, 25 bp, Homo sapien
tgggttttcactgacacacgggtac

SEQ ID NO: 1433562 - DNA, 25 bp, Homo sapien
ccaagagcgtggatgggttttcact

SEQ ID NO: 1433563 - DNA, 25 bp, Homo sapien
ttgaattgtcctcccaagagcgtgg

SEQ ID NO: 1433564 - DNA, 25 bp, Homo sapien
tatgtggcaccgctctttgctcttg

SEQ ID NO: 1433565 - DNA, 25 bp, Homo sapien
cctgaccctggtctcggtagcatcg

SEQ ID NO: 1433566 - DNA, 25 bp, Homo sapien
atgccagcccttgcagctgaccggc

SEQ ID NO: 1433567 - DNA, 25 bp, Homo sapien
cctggtctcggtagcatcgtgtggc

SEQ ID NO: 1433568 - DNA, 25 bp, Homo sapien
cagtggtgaggactgcccacatctg

SEQ ID NO: 1433569 - DNA, 25 bp, Homo sapien
agatggtggctgcatcaagtccaga

SEQ ID NO: 1433570 - DNA, 25 bp, Homo sapien
tgaaatgtggttctggactgaggca

SEQ ID NO: 1433571 - DNA, 25 bp, Homo sapien
gacattcttggcagcggggagatgg

SEQ ID NO: 1433572 - DNA, 25 bp, Homo sapien
tgaggcactgcttcatcctcagtga

SEQ ID NO: 1433573 - DNA, 25 bp, Homo sapien
cctgatctaaccagcaggtgctgct

SEQ ID NO: 1433574 - DNA, 25 bp, Homo sapien
ccactcagtcataggcaattcagcc

SEQ ID NO: 1433575 - DNA, 25 bp, Homo sapien
tgcttctgaaaggaccatggaatca

SEQ ID NO: 1433576 - DNA, 25 bp, Homo sapien
gaatcagcatctgccttactcccag

SEQ ID NO: 1433577 - DNA, 25 bp, Homo sapien
tagcatggctgtcccgtgttcctga

SEQ ID NO: 1433578 - DNA, 25 bp, Homo sapien
tctcggctgtgaaggttctcctggg

SEQ ID NO: 1433579 - DNA, 25 bp, Homo sapien
tgctccacagtagaggtctcggctg

SEQ ID NO: 1433580 - DNA, 25 bp, Homo sapien
cagcattctttgcagggagggccct

SEQ ID NO: 1433581 - DNA, 25 bp, Homo sapien
cagaagaaccttttaagctgtcagt

SEQ ID NO: 1433582 - DNA, 25 bp, Homo sapien
ccagaagaaccttttaagctgtcag

SEQ ID NO: 1433583 - DNA, 25 bp, Homo sapien
tccagaagaaccttttaagctgtca

SEQ ID NO: 1433584 - DNA, 25 bp, Homo sapien
agccagtacctacaactccaatgtg

SEQ ID NO: 1433585 - DNA, 25 bp, Homo sapien
ggcattctttgttcgtgcccaagca

SEQ ID NO: 1433586 - DNA, 25 bp, Homo sapien
tgcccaagcactgctagacgttact

SEQ ID NO: 1433587 - DNA, 25 bp, Homo sapien
agtgagtgtttgttggcattctttg

SEQ ID NO: 1433588 - DNA, 25 bp, Homo sapien
gatgttcgattgatccagctgtcgg

SEQ ID NO: 1433589 - DNA, 25 bp, Homo sapien
ctgcttaacggcctgtggatgttcg

SEQ ID NO: 1433590 - DNA, 25 bp, Homo sapien
ttgatccagctgtcgggccatgggc

SEQ ID NO: 1433591 - DNA, 25 bp, Homo sapien
acggcctgtggatgttcgattgatc

SEQ ID NO: 1433592 - DNA, 25 bp, Homo sapien
tctcattctgaagctcagcacagtt

SEQ ID NO: 1433593 - DNA, 25 bp, Homo sapien
ccagtcctgtgtacaggaggggccg

SEQ ID NO: 1433594 - DNA, 25 bp, Homo sapien
tcattctgaagctcagcacagtttg

SEQ ID NO: 1433595 - DNA, 25 bp, Homo sapien
attctgaagctcagcacagtttggg

SEQ ID NO: 1433596 - DNA, 25 bp, Homo sapien
ctttggaaagattgtgagctttctc

SEQ ID NO: 1433597 - DNA, 25 bp, Homo sapien
tactcccattgagtcaattagcatg

SEQ ID NO: 1433598 - DNA, 25 bp, Homo sapien
tcagataccactggtagagctgacc

SEQ ID NO: 1433599 - DNA, 25 bp, Homo sapien
tgagctcagatgttttcagatacca

SEQ ID NO: 1433600 - DNA, 25 bp, Homo sapien
taccactggtagagctgaccatcca

SEQ ID NO: 1433601 - DNA, 25 bp, Homo sapien
aaggtgagagcatccttggctgcag

SEQ ID NO: 1433602 - DNA, 25 bp, Homo sapien
agccaaggtgagagcatccttggct

SEQ ID NO: 1433603 - DNA, 25 bp, Homo sapien
cagtgtcaggataggtggttctggg

SEQ ID NO: 1433604 - DNA, 25 bp, Homo sapien
catccttggctgcagaggtatggcg

SEQ ID NO: 1433605 - DNA, 25 bp, Homo sapien
ctcttcctgcgagggcagtgcagca

SEQ ID NO: 1433606 - DNA, 25 bp, Homo sapien
ggccctccaggaacgtatcttctct

SEQ ID NO: 1433607 - DNA, 25 bp, Homo sapien
ttcctcctctttagaactggccggc

SEQ ID NO: 1433608 - DNA, 25 bp, Homo sapien
taatagggtaggactgggcttctgt

SEQ ID NO: 1433609 - DNA, 25 bp, Homo sapien
atggatttagaagaactggctgtgc

SEQ ID NO: 1433610 - DNA, 25 bp, Homo sapien
tcctcatggtctttcacacctttgc

SEQ ID NO: 1433611 - DNA, 25 bp, Homo sapien
tatgatatctggtgaaagttccaca

SEQ ID NO: 1433612 - DNA, 25 bp, Homo sapien
ctttgcatgacgcacttactggcac

SEQ ID NO: 1433613 - DNA, 25 bp, Homo sapien
aactacaaatatgatatctggtgaa

SEQ ID NO: 1433614 - DNA, 25 bp, Homo sapien
ctcaggctgaggaatactccattgt

SEQ ID NO: 1433615 - DNA, 25 bp, Homo sapien
cagggactcaggctgaggaatactc

SEQ ID NO: 1433616 - DNA, 25 bp, Homo sapien
caggctgaggaatactccattgtct

SEQ ID NO: 1433617 - DNA, 25 bp, Homo sapien
ggactcaggctgaggaatactccat

SEQ ID NO: 1433618 - DNA, 25 bp, Homo sapien
ttcaacaagtacccgtgcagtcgcc

SEQ ID NO: 1433619 - DNA, 25 bp, Homo sapien
ttttcaacaagtacccgtgcagtcg

SEQ ID NO: 1433620 - DNA, 25 bp, Homo sapien
tttcaacaagtacccgtgcagtcgc

SEQ ID NO: 1433621 - DNA, 25 bp, Homo sapien
cttttcaacaagtacccgtgcagtc

SEQ ID NO: 1433622 - DNA, 25 bp, Homo sapien
gaattcctggagcatccttatctgg

SEQ ID NO: 1433623 - DNA, 25 bp, Homo sapien
cctggagcatccttatctggtctgc

SEQ ID NO: 1433624 - DNA, 25 bp, Homo sapien
ttcctggagcatccttatctggtct

SEQ ID NO: 1433625 - DNA, 25 bp, Homo sapien
aattcctggagcatccttatctggt

SEQ ID NO: 1433626 - DNA, 25 bp, Homo sapien
tcacataaaaggtcctatgtaaaaa

SEQ ID NO: 1433627 - DNA, 25 bp, Homo sapien
agcttccaccctcgtgcatgtctct

SEQ ID NO: 1433628 - DNA, 25 bp, Homo sapien
ttcacataaaaggtcctatgtaaaa

SEQ ID NO: 1433629 - DNA, 25 bp, Homo sapien
ttatggtccaagctggaagcttcca

SEQ ID NO: 1433630 - DNA, 25 bp, Homo sapien
gctccattttccctcatattttggc

SEQ ID NO: 1433631 - DNA, 25 bp, Homo sapien
ggttccacttgaccgtcccaaagca

SEQ ID NO: 1433632 - DNA, 25 bp, Homo sapien
tctccaccatcccatttctgtgagc

SEQ ID NO: 1433633 - DNA, 25 bp, Homo sapien
ggaagaaccttttggtgatgaacca

SEQ ID NO: 1433634 - DNA, 25 bp, Homo sapien
aagtgggcagcaatcgtgtttgacc

SEQ ID NO: 1433635 - DNA, 25 bp, Homo sapien
gactgacgtgctggccgcattgaga

SEQ ID NO: 1433636 - DNA, 25 bp, Homo sapien
gaggagtatttcagcgccaagtacc

SEQ ID NO: 1433637 - DNA, 25 bp, Homo sapien
caagtacctaacatgggagtgagct

SEQ ID NO: 1433638 - DNA, 25 bp, Homo sapien
gattgttatggagtcttcattacat

SEQ ID NO: 1433639 - DNA, 25 bp, Homo sapien
taggggctaccagataacactttgg

SEQ ID NO: 1433640 - DNA, 25 bp, Homo sapien
gggatgggcacagaacattcatatc

SEQ ID NO: 1433641 - DNA, 25 bp, Homo sapien
tatcctctccgggagtgccagtctc

SEQ ID NO: 1433642 - DNA, 25 bp, Homo sapien
gaattggagccacccaaatgcctgc

SEQ ID NO: 1433643 - DNA, 25 bp, Homo sapien
tgggctcagtcccaagagaactttc

SEQ ID NO: 1433644 - DNA, 25 bp, Homo sapien
tagaagaggctctggtatcaagcca

SEQ ID NO: 1433645 - DNA, 25 bp, Homo sapien
gaatatgaccgagcagcatggtgcg

SEQ ID NO: 1433646 - DNA, 25 bp, Homo sapien
tacgtaagacgctgatactgggcct

SEQ ID NO: 1433647 - DNA, 25 bp, Homo sapien
taatagcccaaacgcagaagcactg

SEQ ID NO: 1433648 - DNA, 25 bp, Homo sapien
gaaagcactgcagatgcggtcacct

SEQ ID NO: 1433649 - DNA, 25 bp, Homo sapien
ccaaagttgtcccaacagaggaggc

SEQ ID NO: 1433650 - DNA, 25 bp, Homo sapien
tcatagccaggtctaccccaaatag

SEQ ID NO: 1433651 - DNA, 25 bp, Homo sapien
gtacatcatagccaggtctacccca

SEQ ID NO: 1433652 - DNA, 25 bp, Homo sapien
tagccaggtctaccccaaatagagc

SEQ ID NO: 1433653 - DNA, 25 bp, Homo sapien
taataagcactgcctgtagcaccag

SEQ ID NO: 1433654 - DNA, 25 bp, Homo sapien
tctggaatagcaaagaaggatacct

SEQ ID NO: 1433655 - DNA, 25 bp, Homo sapien
tgttagatcccatgaagtacctatg

SEQ ID NO: 1433656 - DNA, 25 bp, Homo sapien
tctctttaggaagtgattgccatca

SEQ ID NO: 1433657 - DNA, 25 bp, Homo sapien
tctgaggttatagtaccagctgtct

SEQ ID NO: 1433658 - DNA, 25 bp, Homo sapien
ccctagactttataccaggctgtgc

SEQ ID NO: 1433659 - DNA, 25 bp, Homo sapien
aaaccagtcatagattgtcacccag

SEQ ID NO: 1433660 - DNA, 25 bp, Homo sapien
ccagcattggaaatctgaacgaatc

SEQ ID NO: 1433661 - DNA, 25 bp, Homo sapien
cctacaagtttgtcagagatgagaa

SEQ ID NO: 1433662 - DNA, 25 bp, Homo sapien
ctgcagggtgcaccggttctagcct

SEQ ID NO: 1433663 - DNA, 25 bp, Homo sapien
ggtgcaccggttctagcctcaaata

SEQ ID NO: 1433664 - DNA, 25 bp, Homo sapien
tctgcagggtgcaccggttctagcc

SEQ ID NO: 1433665 - DNA, 25 bp, Homo sapien
cagggtgcaccggttctagcctcaa

SEQ ID NO: 1433666 - DNA, 25 bp, Homo sapien
tccttcggggcccatggtcaggcca

SEQ ID NO: 1433667 - DNA, 25 bp, Homo sapien
ctctgtccttcggggcccatggtca

SEQ ID NO: 1433668 - DNA, 25 bp, Homo sapien
ggggcccatggtcaggccattccct

SEQ ID NO: 1433669 - DNA, 25 bp, Homo sapien
catggtcaggccattccctctttgt

SEQ ID NO: 1433670 - DNA, 25 bp, Homo sapien
tcagcactgcatgttgaccaggcgg

SEQ ID NO: 1433671 - DNA, 25 bp, Homo sapien
tccttagggcagcatccactgtggt

SEQ ID NO: 1433672 - DNA, 25 bp, Homo sapien
cagtcacggtgtttgaatggcagct

SEQ ID NO: 1433673 - DNA, 25 bp, Homo sapien
tctaaaacgtgcaagtcatgcccca

SEQ ID NO: 1433674 - DNA, 25 bp, Homo sapien
agaatacactggtgggtgctcccct

SEQ ID NO: 1433675 - DNA, 25 bp, Homo sapien
gaaactgaatctttcagggccacat

SEQ ID NO: 1433676 - DNA, 25 bp, Homo sapien
catcgttgtcgtcattagcaccaca

SEQ ID NO: 1433677 - DNA, 25 bp, Homo sapien
acatacaagtgcattccccaaaccc

SEQ ID NO: 1433678 - DNA, 25 bp, Homo sapien
catgtgtccagaagactcctttggg

SEQ ID NO: 1433679 - DNA, 25 bp, Homo sapien
cccaggagccttcttttgctcatgt

SEQ ID NO: 1433680 - DNA, 25 bp, Homo sapien
aaatctgagtgtttacatcctccag

SEQ ID NO: 1433681 - DNA, 25 bp, Homo sapien
tcctttgggaacctaatggaagctg

SEQ ID NO: 1433682 - DNA, 25 bp, Homo sapien
aaacctccttgacaactcctcggag

SEQ ID NO: 1433683 - DNA, 25 bp, Homo sapien
atggctgggagtggccgattaaaac

SEQ ID NO: 1433684 - DNA, 25 bp, Homo sapien
tggccgattaaaacctccttgacaa

SEQ ID NO: 1433685 - DNA, 25 bp, Homo sapien
gacaactcctcggagactgaagacc

SEQ ID NO: 1433686 - DNA, 25 bp, Homo sapien
acagaggaaggacatagctgcctag

SEQ ID NO: 1433687 - DNA, 25 bp, Homo sapien
agaggaaggacatagctgcctagcc

SEQ ID NO: 1433688 - DNA, 25 bp, Homo sapien
actcatatacccttgtcctgtcttc

SEQ ID NO: 1433689 - DNA, 25 bp, Homo sapien
cactggcaatcaaaggggagacaga

SEQ ID NO: 1433690 - DNA, 25 bp, Homo sapien
gactgctaagtcctgagattcctcc

SEQ ID NO: 1433691 - DNA, 25 bp, Homo sapien
caaaggtcttagtgtggcaggagta

SEQ ID NO: 1433692 - DNA, 25 bp, Homo sapien
tgacaagtagaaggcatggaggcaa

SEQ ID NO: 1433693 - DNA, 25 bp, Homo sapien
gaatatggatcccattccagagcca

SEQ ID NO: 1433694 - DNA, 25 bp, Homo sapien
tctctttccacatgtaccttgccag

SEQ ID NO: 1433695 - DNA, 25 bp, Homo sapien
agtagtctaatctcactctctttcc

SEQ ID NO: 1433696 - DNA, 25 bp, Homo sapien
aactgagaaggctcctagtagtcta

SEQ ID NO: 1433697 - DNA, 25 bp, Homo sapien
tccacatgtaccttgccagctgcat

SEQ ID NO: 1433698 - DNA, 25 bp, Homo sapien
ttcctattttcataggcaccaggaa

SEQ ID NO: 1433699 - DNA, 25 bp, Homo sapien
agctgatgttcctaaagaatcctca

SEQ ID NO: 1433700 - DNA, 25 bp, Homo sapien
cctattttcataggcaccaggaaga

SEQ ID NO: 1433701 - DNA, 25 bp, Homo sapien
gatgttcctaaagaatcctcaagtt

SEQ ID NO: 1433702 - DNA, 25 bp, Homo sapien
gtgaagtttctcttcggcactgaga

SEQ ID NO: 1433703 - DNA, 25 bp, Homo sapien
gaagtttctcttcggcactgagaat

SEQ ID NO: 1433704 - DNA, 25 bp, Homo sapien
tttatagcctacacaagcttctggt

SEQ ID NO: 1433705 - DNA, 25 bp, Homo sapien
cccagttttatagcctacacaagct

SEQ ID NO: 1433706 - DNA, 25 bp, Homo sapien
ggttgcatatttcagcacccaatga

SEQ ID NO: 1433707 - DNA, 25 bp, Homo sapien
gcatatttcagcacccaatgatcca

SEQ ID NO: 1433708 - DNA, 25 bp, Homo sapien
acttggttgcatatttcagcaccca

SEQ ID NO: 1433709 - DNA, 25 bp, Homo sapien
tttcagcacccaatgatccaaaaga

SEQ ID NO: 1433710 - DNA, 25 bp, Homo sapien
ctgataaggattccctcagttgctg

SEQ ID NO: 1433711 - DNA, 25 bp, Homo sapien
gataaggattccctcagttgctggg

SEQ ID NO: 1433712 - DNA, 25 bp, Homo sapien
tccctcagttgctggggtcacatcc

SEQ ID NO: 1433713 - DNA, 25 bp, Homo sapien
gattccctcagttgctggggtcaca

SEQ ID NO: 1433714 - DNA, 25 bp, Homo sapien
gctgggtctccggaaaactgcctgc

SEQ ID NO: 1433715 - DNA, 25 bp, Homo sapien
ccggaaaactgcctgcagcactgat

SEQ ID NO: 1433716 - DNA, 25 bp, Homo sapien
tgcctgcagcactgatccacaagca

SEQ ID NO: 1433717 - DNA, 25 bp, Homo sapien
gcagcactgatccacaagcagggat

SEQ ID NO: 1433718 - DNA, 25 bp, Homo sapien
tgtctcagggtccttcttgctgtga

SEQ ID NO: 1433719 - DNA, 25 bp, Homo sapien
tgctgtgagggctcccacttgtaat

SEQ ID NO: 1433720 - DNA, 25 bp, Homo sapien
aatactcagggccttggtgactcat

SEQ ID NO: 1433721 - DNA, 25 bp, Homo sapien
ggggtggcggacactgtctcagggt

SEQ ID NO: 1433722 - DNA, 25 bp, Homo sapien
gacctggacaaagcaaaggacctga

SEQ ID NO: 1433723 - DNA, 25 bp, Homo sapien
gctgggaagacctggacaaagcaaa

SEQ ID NO: 1433724 - DNA, 25 bp, Homo sapien
ctggacaaagcaaaggacctgaggg

SEQ ID NO: 1433725 - DNA, 25 bp, Homo sapien
gaagacctggacaaagcaaaggacc

SEQ ID NO: 1433726 - DNA, 25 bp, Homo sapien
tgccaacaggcaaaccattgctgcc

SEQ ID NO: 1433727 - DNA, 25 bp, Homo sapien
ccatgctgcctgaccataagataga

SEQ ID NO: 1433728 - DNA, 25 bp, Homo sapien
tggccaaggaatggcccatgctgcc

SEQ ID NO: 1433729 - DNA, 25 bp, Homo sapien
gataatctccatagagtggccaagg

SEQ ID NO: 1433730 - DNA, 25 bp, Homo sapien
ccccattctcatccatgacagttga

SEQ ID NO: 1433731 - DNA, 25 bp, Homo sapien
tatgccccattctcatccatgacag

SEQ ID NO: 1433732 - DNA, 25 bp, Homo sapien
atgacagttgatgggaaagaatcac

SEQ ID NO: 1433733 - DNA, 25 bp, Homo sapien
ccatgacagttgatgggaaagaatc

SEQ ID NO: 1433734 - DNA, 25 bp, Homo sapien
ttgacacagttgctggatggcttct

SEQ ID NO: 1433735 - DNA, 25 bp, Homo sapien
tccaacttattgacacagttgctgg

SEQ ID NO: 1433736 - DNA, 25 bp, Homo sapien
actgaaagaacagggtccaacttat

SEQ ID NO: 1433737 - DNA, 25 bp, Homo sapien
gaacagggtccaacttattgacaca

SEQ ID NO: 1433738 - DNA, 25 bp, Homo sapien
gagtgtgtgtcactcctccaccacc

SEQ ID NO: 1433739 - DNA, 25 bp, Homo sapien
gtgtgtgtcactcctccaccaccat

SEQ ID NO: 1433740 - DNA, 25 bp, Homo sapien
gagcctccggttgcctgtgactgga

SEQ ID NO: 1433741 - DNA, 25 bp, Homo sapien
taggggccatttcctgatgcagagc

SEQ ID NO: 1433742 - DNA, 25 bp, Homo sapien
gccatccaatggcaatcttgtgtaa

SEQ ID NO: 1433743 - DNA, 25 bp, Homo sapien
tgactggaaccgcagtgccatccaa

SEQ ID NO: 1433744 - DNA, 25 bp, Homo sapien
acctgtagttttcctagtgctcctg

SEQ ID NO: 1433745 - DNA, 25 bp, Homo sapien
ctttctgcacctgtagttttcctag

SEQ ID NO: 1433746 - DNA, 25 bp, Homo sapien
gctcctgaacaggaagcctcacaag

SEQ ID NO: 1433747 - DNA, 25 bp, Homo sapien
agtgctcctgaacaggaagcctcac

SEQ ID NO: 1433748 - DNA, 25 bp, Homo sapien
aaattaagaactatgggccagggat

SEQ ID NO: 1433749 - DNA, 25 bp, Homo sapien
gaaaaatgaaagtgaccctcctatc

SEQ ID NO: 1433750 - DNA, 25 bp, Homo sapien
gtccttcttaataaatgtcgattgg

SEQ ID NO: 1433751 - DNA, 25 bp, Homo sapien
gaagccttgccagaagcaaatatta

SEQ ID NO: 1433752 - DNA, 25 bp, Homo sapien
tatggtttgcctgataagctctcgg

SEQ ID NO: 1433753 - DNA, 25 bp, Homo sapien
tattaggtacaatctgagtaaagca

SEQ ID NO: 1433754 - DNA, 25 bp, Homo sapien
caaatgtggctgctatattaggtac

SEQ ID NO: 1433755 - DNA, 25 bp, Homo sapien
tctcggcaatcatacatccctgagg

SEQ ID NO: 1433756 - DNA, 25 bp, Homo sapien
agcctcaggtggtcactgggcccca

SEQ ID NO: 1433757 - DNA, 25 bp, Homo sapien
tcaaaaggcaccctcaggggccatc

SEQ ID NO: 1433758 - DNA, 25 bp, Homo sapien
tccttgttccctttctgggtgcagc

SEQ ID NO: 1433759 - DNA, 25 bp, Homo sapien
gcctcgcctggcaggaatgtttcca

SEQ ID NO: 1433760 - DNA, 25 bp, Homo sapien
tttcccgtttgactgttctgcaggc

SEQ ID NO: 1433761 - DNA, 25 bp, Homo sapien
cctttcccgtttgactgttctgcag

SEQ ID NO: 1433762 - DNA, 25 bp, Homo sapien
ctcttgatggttctttcgggatagg

SEQ ID NO: 1433763 - DNA, 25 bp, Homo sapien
tctttcgggatagggctgtcctttc

SEQ ID NO: 1433764 - DNA, 25 bp, Homo sapien
cagacttacataaggcatatgcaga

SEQ ID NO: 1433765 - DNA, 25 bp, Homo sapien
tacataaggcatatgcagagaaata

SEQ ID NO: 1433766 - DNA, 25 bp, Homo sapien
ggcacagacttacataaggcatatg

SEQ ID NO: 1433767 - DNA, 25 bp, Homo sapien
gtggcacagacttacataaggcata

SEQ ID NO: 1433768 - DNA, 25 bp, Homo sapien
cgccagcatggcgttgaggcccagt

SEQ ID NO: 1433769 - DNA, 25 bp, Homo sapien
agctttggcaggctgatgtctttca

SEQ ID NO: 1433770 - DNA, 25 bp, Homo sapien
gggagaaaatgggagtacagccagc

SEQ ID NO: 1433771 - DNA, 25 bp, Homo sapien
gagaggtgggctgctttatgctgct

SEQ ID NO: 1433772 - DNA, 25 bp, Homo sapien
ccaatcttgttgagatgttggattt

SEQ ID NO: 1433773 - DNA, 25 bp, Homo sapien
ccttcctgtcttgcccctcctttca

SEQ ID NO: 1433774 - DNA, 25 bp, Homo sapien
gcccattttccaatcttgttgagat

SEQ ID NO: 1433775 - DNA, 25 bp, Homo sapien
ttcacagcccattttccaatcttgt

SEQ ID NO: 1433776 - DNA, 25 bp, Homo sapien
ctgtcccgctcagacccacagccag

SEQ ID NO: 1433777 - DNA, 25 bp, Homo sapien
tttctcactgtcccgctcagaccca

SEQ ID NO: 1433778 - DNA, 25 bp, Homo sapien
cccacagccagtctcgccagcaact

SEQ ID NO: 1433779 - DNA, 25 bp, Homo sapien
cacagccagtctcgccagcaactgt

SEQ ID NO: 1433780 - DNA, 25 bp, Homo sapien
ttaaaatggagactggttgagatta

SEQ ID NO: 1433781 - DNA, 25 bp, Homo sapien
cacaggaaagtactttacacaatta

SEQ ID NO: 1433782 - DNA, 25 bp, Homo sapien
gagattaacctcttttcagattgct

SEQ ID NO: 1433783 - DNA, 25 bp, Homo sapien
gactggttgagattaacctcttttc

SEQ ID NO: 1433784 - DNA, 25 bp, Homo sapien
gcacatcactgagcaggagaacatt

SEQ ID NO: 1433785 - DNA, 25 bp, Homo sapien
agcacatcactgagcaggagaacat

SEQ ID NO: 1433786 - DNA, 25 bp, Homo sapien
cagcacatcactgagcaggagaaca

SEQ ID NO: 1433787 - DNA, 25 bp, Homo sapien
ctaatctggaacagcaataaattct

SEQ ID NO: 1433788 - DNA, 25 bp, Homo sapien
ccatcagcgaagatcgctgagcggc

SEQ ID NO: 1433789 - DNA, 25 bp, Homo sapien
atcagcgaagatcgctgagcggcgc

SEQ ID NO: 1433790 - DNA, 25 bp, Homo sapien
cagcgaagatcgctgagcggcgccc

SEQ ID NO: 1433791 - DNA, 25 bp, Homo sapien
gaagatcgctgagcggcgcccgcct

SEQ ID NO: 1433792 - DNA, 25 bp, Homo sapien
tccaagtacaggtctttccactgta

SEQ ID NO: 1433793 - DNA, 25 bp, Homo sapien
tcgaaattcagccaatgtatcaact

SEQ ID NO: 1433794 - DNA, 25 bp, Homo sapien
aactctcctagaaagttccattatc

SEQ ID NO: 1433795 - DNA, 25 bp, Homo sapien
cactgtactaccatcgagttctggg

SEQ ID NO: 1433796 - DNA, 25 bp, Homo sapien
ctcaaaaatcctcctagccttaggc

SEQ ID NO: 1433797 - DNA, 25 bp, Homo sapien
gtgatccttctagcctcaggctacc

SEQ ID NO: 1433798 - DNA, 25 bp, Homo sapien
atcctcctagccttaggctcaagtg

SEQ ID NO: 1433799 - DNA, 25 bp, Homo sapien
aaaatcctcctagccttaggctcaa

SEQ ID NO: 1433800 - DNA, 25 bp, Homo sapien
tgagttcctccaaaaacggcgttgc

SEQ ID NO: 1433801 - DNA, 25 bp, Homo sapien
taagatgagaagtgccgtttgccta

SEQ ID NO: 1433802 - DNA, 25 bp, Homo sapien
gcaataccatgtgagtgggcccacc

SEQ ID NO: 1433803 - DNA, 25 bp, Homo sapien
tccaagtagtgaggtcgacgatgct

SEQ ID NO: 1433804 - DNA, 25 bp, Homo sapien
aactcagaggcaatgcggaaggccc

SEQ ID NO: 1433805 - DNA, 25 bp, Homo sapien
tgtgcattcgtatgtgctgggccaa

SEQ ID NO: 1433806 - DNA, 25 bp, Homo sapien
cgcagtcagcgcacttgaaaggcct

SEQ ID NO: 1433807 - DNA, 25 bp, Homo sapien
tctggacacgggtagggtttctcgc

SEQ ID NO: 1433808 - DNA, 25 bp, Homo sapien
ctgaaaggcccgcccgccccgcagg

SEQ ID NO: 1433809 - DNA, 25 bp, Homo sapien
gaaaggcccgcccgccccgcaggca

SEQ ID NO: 1433810 - DNA, 25 bp, Homo sapien
tgaaaggcccgcccgccccgcaggc

SEQ ID NO: 1433811 - DNA, 25 bp, Homo sapien
tgctgttccgcgcttttgccaggac

SEQ ID NO: 1433812 - DNA, 25 bp, Homo sapien
tcttgcgtgggaaggtcccagttgc

SEQ ID NO: 1433813 - DNA, 25 bp, Homo sapien
cctgggctggtgtatgtgtctcttg

SEQ ID NO: 1433814 - DNA, 25 bp, Homo sapien
cgccggcccgcctggttctgtactt

SEQ ID NO: 1433815 - DNA, 25 bp, Homo sapien
gagttccctgcggacgtgtctacac

SEQ ID NO: 1433816 - DNA, 25 bp, Homo sapien
tttgtgcgcacagagatactttcca

SEQ ID NO: 1433817 - DNA, 25 bp, Homo sapien
taacaatttgtgtgcgagaccactg

SEQ ID NO: 1433818 - DNA, 25 bp, Homo sapien
gagtatccatcatcacccgcaggta

SEQ ID NO: 1433819 - DNA, 25 bp, Homo sapien
cctgggagtccacttgtgccatgat

SEQ ID NO: 1433820 - DNA, 25 bp, Homo sapien
catctgggtgtcatgagcttcctca

SEQ ID NO: 1433821 - DNA, 25 bp, Homo sapien
tcctctgaggaggagtatcctgctt

SEQ ID NO: 1433822 - DNA, 25 bp, Homo sapien
gcttctattgcctactcctctgagg

SEQ ID NO: 1433823 - DNA, 25 bp, Homo sapien
tttctgcaggcatcaaagccccttg

SEQ ID NO: 1433824 - DNA, 25 bp, Homo sapien
gcaggcatcaaagccccttgtgttt

SEQ ID NO: 1433825 - DNA, 25 bp, Homo sapien
ctggggtgaaaagccgtggctttct

SEQ ID NO: 1433826 - DNA, 25 bp, Homo sapien
aaaagccgtggctttctgcaggcat

SEQ ID NO: 1433827 - DNA, 25 bp, Homo sapien
tccctgctttcattgacccagattg

SEQ ID NO: 1433828 - DNA, 25 bp, Homo sapien
ggccaaggaaccttggctacagggc

SEQ ID NO: 1433829 - DNA, 25 bp, Homo sapien
tttcattgacccagattgccctccg

SEQ ID NO: 1433830 - DNA, 25 bp, Homo sapien
ctgggccaaggaaccttggctacag

SEQ ID NO: 1433831 - DNA, 25 bp, Homo sapien
gggagcctccttagggtggcacaca

SEQ ID NO: 1433832 - DNA, 25 bp, Homo sapien
ccccagtgaatatgtcctgctttct

SEQ ID NO: 1433833 - DNA, 25 bp, Homo sapien
caggagactctcttttcagatgagg

SEQ ID NO: 1433834 - DNA, 25 bp, Homo sapien
gcatgctctcgaccaccaggaagac

SEQ ID NO: 1433835 - DNA, 25 bp, Homo sapien
cagcaacaggaaccagttaggtaca

SEQ ID NO: 1433836 - DNA, 25 bp, Homo sapien
tctctcacgctttgtgtccagtcca

SEQ ID NO: 1433837 - DNA, 25 bp, Homo sapien
ggtacaaatcagcagagatggtgtc

SEQ ID NO: 1433838 - DNA, 25 bp, Homo sapien
ggcttctgtgacacgtgggctctca

SEQ ID NO: 1433839 - DNA, 25 bp, Homo sapien
cttttgcaggactgtgagttgcaga

SEQ ID NO: 1433840 - DNA, 25 bp, Homo sapien
tgaggggttgggattcccagaattc

SEQ ID NO: 1433841 - DNA, 25 bp, Homo sapien
tgtgaggggttgggattcccagaat

SEQ ID NO: 1433842 - DNA, 25 bp, Homo sapien
taaaatagctcccatagccacgtta

SEQ ID NO: 1433843 - DNA, 25 bp, Homo sapien
tcagaatgtgatccagaaaagcagg

SEQ ID NO: 1433844 - DNA, 25 bp, Homo sapien
caagaggatccttggtagccatcca

SEQ ID NO: 1433845 - DNA, 25 bp, Homo sapien
caggcagcagagacatacctctagg

SEQ ID NO: 1433846 - DNA, 25 bp, Homo sapien
actagcccgcatcccaacatggttg

SEQ ID NO: 1433847 - DNA, 25 bp, Homo sapien
gagcttcagctatctttggcaagaa

SEQ ID NO: 1433848 - DNA, 25 bp, Homo sapien
gtccatatggtacgggctttgagct

SEQ ID NO: 1433849 - DNA, 25 bp, Homo sapien
ctttggcaagaaagtacctaattct

SEQ ID NO: 1433850 - DNA, 25 bp, Homo sapien
gagctttactatgtcagtgtttttc

SEQ ID NO: 1433851 - DNA, 25 bp, Homo sapien
ttgagctttactatgtcagtgtttt

SEQ ID NO: 1433852 - DNA, 25 bp, Homo sapien
tgagctttactatgtcagtgttttt

SEQ ID NO: 1433853 - DNA, 25 bp, Homo sapien
gctccctggaacattgccgctggga

SEQ ID NO: 1433854 - DNA, 25 bp, Homo sapien
ttggctccctggaacattgccgctg

SEQ ID NO: 1433855 - DNA, 25 bp, Homo sapien
ccctggaacattgccgctgggagcc

SEQ ID NO: 1433856 - DNA, 25 bp, Homo sapien
ctttggctccctggaacattgccgc

SEQ ID NO: 1433857 - DNA, 25 bp, Homo sapien
gccacgggtgtgaagcaagtttctt

SEQ ID NO: 1433858 - DNA, 25 bp, Homo sapien
caactgctgcactgaacgtaaccag

SEQ ID NO: 1433859 - DNA, 25 bp, Homo sapien
tgtctagctcggctgcctgaacaca

SEQ ID NO: 1433860 - DNA, 25 bp, Homo sapien
tcttcatagcactctggccacgggt

SEQ ID NO: 1433861 - DNA, 25 bp, Homo sapien
cacaacctatatgggcagtactggg

SEQ ID NO: 1433862 - DNA, 25 bp, Homo sapien
gggatagacctaagttctcgctttg

SEQ ID NO: 1433863 - DNA, 25 bp, Homo sapien
taagttctcgctttgccaagtccct

SEQ ID NO: 1433864 - DNA, 25 bp, Homo sapien
agctgcaggtttgctctcacacaac

SEQ ID NO: 1433865 - DNA, 25 bp, Homo sapien
gcttcctggcactatgcagacactt

SEQ ID NO: 1433866 - DNA, 25 bp, Homo sapien
acctgggaattcattgtaaggctga

SEQ ID NO: 1433867 - DNA, 25 bp, Homo sapien
aattcattgtaaggctgacatccag

SEQ ID NO: 1433868 - DNA, 25 bp, Homo sapien
agagcttcctggcactatgcagaca

SEQ ID NO: 1433869 - DNA, 25 bp, Homo sapien
taacatctgccctagagctcggctg

SEQ ID NO: 1433870 - DNA, 25 bp, Homo sapien
ccatggctagcatcgttggctgtaa

SEQ ID NO: 1433871 - DNA, 25 bp, Homo sapien
tctggaatccgcagagccagtgggc

SEQ ID NO: 1433872 - DNA, 25 bp, Homo sapien
cgaatacaagatgcggtttcaggat

SEQ ID NO: 1433873 - DNA, 25 bp, Homo sapien
ggctctctccaaagccaatctgatt

SEQ ID NO: 1433874 - DNA, 25 bp, Homo sapien
ggagaggtactcctcacaccctgtc

SEQ ID NO: 1433875 - DNA, 25 bp, Homo sapien
tggctgctgtaccacaagacctttt

SEQ ID NO: 1433876 - DNA, 25 bp, Homo sapien
tctgattcagggagccgtggctgct

SEQ ID NO: 1433877 - DNA, 25 bp, Homo sapien
gacaggccttctacaagagctttct

SEQ ID NO: 1433878 - DNA, 25 bp, Homo sapien
gagacaggccttctacaagagcttt

SEQ ID NO: 1433879 - DNA, 25 bp, Homo sapien
gtggagacaggccttctacaagagc

SEQ ID NO: 1433880 - DNA, 25 bp, Homo sapien
caggccttctacaagagctttcttc

SEQ ID NO: 1433881 - DNA, 25 bp, Homo sapien
caggtggatgactgtccatggtgct

SEQ ID NO: 1433882 - DNA, 25 bp, Homo sapien
ccatgattagaagacaggtggatga

SEQ ID NO: 1433883 - DNA, 25 bp, Homo sapien
cgctcgtgcctccatgattagaaga

SEQ ID NO: 1433884 - DNA, 25 bp, Homo sapien
atatttctagcgctcgtgcctccat

SEQ ID NO: 1433885 - DNA, 25 bp, Homo sapien
tctgaacaggattgagaagctcact

SEQ ID NO: 1433886 - DNA, 25 bp, Homo sapien
taagcccagaacatggcagccaggt

SEQ ID NO: 1433887 - DNA, 25 bp, Homo sapien
ctagggcagacagagaatgatacac

SEQ ID NO: 1433888 - DNA, 25 bp, Homo sapien
caagactacctggaaatcgccacag

SEQ ID NO: 1433889 - DNA, 25 bp, Homo sapien
aaatgaagtgcgctggggacaaaga

SEQ ID NO: 1433890 - DNA, 25 bp, Homo sapien
caaagagggaaactttacactctag

SEQ ID NO: 1433891 - DNA, 25 bp, Homo sapien
tcatgagctgtgtgagaggcggctc

SEQ ID NO: 1433892 - DNA, 25 bp, Homo sapien
agggaaactttacactctagcaatt

SEQ ID NO: 1433893 - DNA, 25 bp, Homo sapien
catcccctttctccaggtggaaatc

SEQ ID NO: 1433894 - DNA, 25 bp, Homo sapien
caagatgattcaacttcattctact

SEQ ID NO: 1433895 - DNA, 25 bp, Homo sapien
ctttctccaggtggaaatctgaggg

SEQ ID NO: 1433896 - DNA, 25 bp, Homo sapien
attcaacttcattctactctcatcc

SEQ ID NO: 1433897 - DNA, 25 bp, Homo sapien
ggtggaggatggtgaatcattttcc

SEQ ID NO: 1433898 - DNA, 25 bp, Homo sapien
caaatagcaaagggtttcctgttca

SEQ ID NO: 1433899 - DNA, 25 bp, Homo sapien
attggccctcttggaatctttgtgc

SEQ ID NO: 1433900 - DNA, 25 bp, Homo sapien
tccatactggaacaagtgagaggtg

SEQ ID NO: 1433901 - DNA, 25 bp, Homo sapien
agctcttataagtccatttaggtgg

SEQ ID NO: 1433902 - DNA, 25 bp, Homo sapien
gggctgcggaagatgcccagaatcc

SEQ ID NO: 1433903 - DNA, 25 bp, Homo sapien
ttaggtggtttagggctgcggaaga

SEQ ID NO: 1433904 - DNA, 25 bp, Homo sapien
ccaagtcactgacgcatttaaggaa

SEQ ID NO: 1433905 - DNA, 25 bp, Homo sapien
gaggggcagaattccgatacactgc

SEQ ID NO: 1433906 - DNA, 25 bp, Homo sapien
cacgcgggtttccagcagcgtataa

SEQ ID NO: 1433907 - DNA, 25 bp, Homo sapien
cgggtttccagcagcgtataatcat

SEQ ID NO: 1433908 - DNA, 25 bp, Homo sapien
gaagcacgcgggtttccagcagcgt

SEQ ID NO: 1433909 - DNA, 25 bp, Homo sapien
taaagaagctctgtagaacttaggc

SEQ ID NO: 1433910 - DNA, 25 bp, Homo sapien
cttaggctacaagactacaacctgt

SEQ ID NO: 1433911 - DNA, 25 bp, Homo sapien
ggaatgtgcctctgctgacttgtac

SEQ ID NO: 1433912 - DNA, 25 bp, Homo sapien
ggaacccagtacaaatcacatgcaa

SEQ ID NO: 1433913 - DNA, 25 bp, Homo sapien
tctcatatctgtgctagcagggcaa

SEQ ID NO: 1433914 - DNA, 25 bp, Homo sapien
gaaagataaatgcaaggagggcacc

SEQ ID NO: 1433915 - DNA, 25 bp, Homo sapien
ccagtgaagatcaatgtaggagaga

SEQ ID NO: 1433916 - DNA, 25 bp, Homo sapien
acattcccctctaccttaacagtgg

SEQ ID NO: 1433917 - DNA, 25 bp, Homo sapien
tgttgaggctacacgccagctggtg

SEQ ID NO: 1433918 - DNA, 25 bp, Homo sapien
tattccctaggcagcaccctaggct

SEQ ID NO: 1433919 - DNA, 25 bp, Homo sapien
cctcggttttgcctctggtgtgtca

SEQ ID NO: 1433920 - DNA, 25 bp, Homo sapien
gtgtcactgtagaggaatcacctct

SEQ ID NO: 1433921 - DNA, 25 bp, Homo sapien
cttcattgaatgctctagaaggagg

SEQ ID NO: 1433922 - DNA, 25 bp, Homo sapien
gcaagccctgtcctggtaatggaat

SEQ ID NO: 1433923 - DNA, 25 bp, Homo sapien
aatgctctagaaggaggtcccctcc

SEQ ID NO: 1433924 - DNA, 25 bp, Homo sapien
ttgcagcttcattgaatgctctaga

SEQ ID NO: 1433925 - DNA, 25 bp, Homo sapien
gtcggaggaggcaagtggaaaaggc

SEQ ID NO: 1433926 - DNA, 25 bp, Homo sapien
caggtcggaggaggcaagtggaaaa

SEQ ID NO: 1433927 - DNA, 25 bp, Homo sapien
tcagactgcaggtcggaggaggcaa

SEQ ID NO: 1433928 - DNA, 25 bp, Homo sapien
gactgcaggtcggaggaggcaagtg

SEQ ID NO: 1433929 - DNA, 25 bp, Homo sapien
tttcctccagtgtatacaaagtgct

SEQ ID NO: 1433930 - DNA, 25 bp, Homo sapien
tctttcctccagtgtatacaaagtg

SEQ ID NO: 1433931 - DNA, 25 bp, Homo sapien
ctttcctccagtgtatacaaagtgc

SEQ ID NO: 1433932 - DNA, 25 bp, Homo sapien
caaactgagagttaatcgtagtctc

SEQ ID NO: 1433933 - DNA, 25 bp, Homo sapien
tcccagatgtcatgaaagctgtctt

SEQ ID NO: 1433934 - DNA, 25 bp, Homo sapien
cctatccctggagatgagagtctca

SEQ ID NO: 1433935 - DNA, 25 bp, Homo sapien
cagaaagcctggtaactggtggttc

SEQ ID NO: 1433936 - DNA, 25 bp, Homo sapien
tactggagttggtcagaagtcctgg

SEQ ID NO: 1433937 - DNA, 25 bp, Homo sapien
gttcaagtcttaactcttaaccatg

SEQ ID NO: 1433938 - DNA, 25 bp, Homo sapien
gatgggaaggttaacaccaccctgc

SEQ ID NO: 1433939 - DNA, 25 bp, Homo sapien
ccatgtacaaatcatttatatgcca

SEQ ID NO: 1433940 - DNA, 25 bp, Homo sapien
ggaacacccgtggtacttcctgcca

SEQ ID NO: 1433941 - DNA, 25 bp, Homo sapien
ctcatgcatgatcgggaattttccc

SEQ ID NO: 1433942 - DNA, 25 bp, Homo sapien
cacagcccttcggaagaatcttgga

SEQ ID NO: 1433943 - DNA, 25 bp, Homo sapien
caactcttaggagtacgtgcaccag

SEQ ID NO: 1433944 - DNA, 25 bp, Homo sapien
ttgcgcctgccaacccaaaaggaag

SEQ ID NO: 1433945 - DNA, 25 bp, Homo sapien
ctttgcgcctgccaacccaaaagga

SEQ ID NO: 1433946 - DNA, 25 bp, Homo sapien
aaggaagaacaggtccgcggtgcat

SEQ ID NO: 1433947 - DNA, 25 bp, Homo sapien
gtgcatctgtggcctaatgaggagc

SEQ ID NO: 1433948 - DNA, 25 bp, Homo sapien
caacccagggcaagtggagataaga

SEQ ID NO: 1433949 - DNA, 25 bp, Homo sapien
cagggcaagtggagataagatagtc

SEQ ID NO: 1433950 - DNA, 25 bp, Homo sapien
gaacaacccagggcaagtggagata

SEQ ID NO: 1433951 - DNA, 25 bp, Homo sapien
cccagggcaagtggagataagatag

SEQ ID NO: 1433952 - DNA, 25 bp, Homo sapien
tttgatagtctatacagctggtgtc

SEQ ID NO: 1433953 - DNA, 25 bp, Homo sapien
tagtctatacagctggtgtctggac

SEQ ID NO: 1433954 - DNA, 25 bp, Homo sapien
gatagtctatacagctggtgtctgg

SEQ ID NO: 1433955 - DNA, 25 bp, Homo sapien
cagctttgatagtctatacagctgg

SEQ ID NO: 1433956 - DNA, 25 bp, Homo sapien
ggcagctcactttgaggtaaggagt

SEQ ID NO: 1433957 - DNA, 25 bp, Homo sapien
caggcagctcactttgaggtaagga

SEQ ID NO: 1433958 - DNA, 25 bp, Homo sapien
ggcaggcagctcactttgaggtaag

SEQ ID NO: 1433959 - DNA, 25 bp, Homo sapien
ccaaggcaggcagctcactttgagg

SEQ ID NO: 1433960 - DNA, 25 bp, Homo sapien
tgcggtgagctgagaatgtgtcact

SEQ ID NO: 1433961 - DNA, 25 bp, Homo sapien
gcactccagcctgggtgacagagct

SEQ ID NO: 1433962 - DNA, 25 bp, Homo sapien
ccagcctgggtgacagagctagact

SEQ ID NO: 1433963 - DNA, 25 bp, Homo sapien
actccagcctgggtgacagagctag

SEQ ID NO: 1433964 - DNA, 25 bp, Homo sapien
gtcggagcttgcagtgaacctagat

SEQ ID NO: 1433965 - DNA, 25 bp, Homo sapien
gagtcggagcttgcagtgaacctag

SEQ ID NO: 1433966 - DNA, 25 bp, Homo sapien
gggagtcggagcttgcagtgaacct

SEQ ID NO: 1433967 - DNA, 25 bp, Homo sapien
ggagtcggagcttgcagtgaaccta

SEQ ID NO: 1433968 - DNA, 25 bp, Homo sapien
cgaagattgcaatgagtcgagatca

SEQ ID NO: 1433969 - DNA, 25 bp, Homo sapien
aacctggtgacggagagagactctg

SEQ ID NO: 1433970 - DNA, 25 bp, Homo sapien
gaggcgaagattgcaatgagtcgag

SEQ ID NO: 1433971 - DNA, 25 bp, Homo sapien
acctggtgacggagagagactctgt

SEQ ID NO: 1433972 - DNA, 25 bp, Homo sapien
tgcccccgaccgtgtctctttcttg

SEQ ID NO: 1433973 - DNA, 25 bp, Homo sapien
cactgcccccgaccgtgtctctttc

SEQ ID NO: 1433974 - DNA, 25 bp, Homo sapien
gccactgcccccgaccgtgtctctt

SEQ ID NO: 1433975 - DNA, 25 bp, Homo sapien
cccgaccgtgtctctttcttgtagc

SEQ ID NO: 1433976 - DNA, 25 bp, Homo sapien
ctttcatactaaaggaagattggag

SEQ ID NO: 1433977 - DNA, 25 bp, Homo sapien
tattgttcactatccgaggtccaac

SEQ ID NO: 1433978 - DNA, 25 bp, Homo sapien
agaccagagctttcatactaaagga

SEQ ID NO: 1433979 - DNA, 25 bp, Homo sapien
tcacatcttgactgttactgagtac

SEQ ID NO: 1433980 - DNA, 25 bp, Homo sapien
aagctgcctttcagatccaaaattg

SEQ ID NO: 1433981 - DNA, 25 bp, Homo sapien
gcctttcagatccaaaattgctctt

SEQ ID NO: 1433982 - DNA, 25 bp, Homo sapien
cacatgcagctggtgttgtacagag

SEQ ID NO: 1433983 - DNA, 25 bp, Homo sapien
agtactaaaaggcacaatctgcaag

SEQ ID NO: 1433984 - DNA, 25 bp, Homo sapien
aagcatattttgatccatcaaccca

SEQ ID NO: 1433985 - DNA, 25 bp, Homo sapien
catattttgatccatcaacccaatg

SEQ ID NO: 1433986 - DNA, 25 bp, Homo sapien
ttgatccatcaacccaatgtcctgg

SEQ ID NO: 1433987 - DNA, 25 bp, Homo sapien
ttttgatccatcaacccaatgtcct

SEQ ID NO: 1433988 - DNA, 25 bp, Homo sapien
aatcagttagtgactctaccatcaa

SEQ ID NO: 1433989 - DNA, 25 bp, Homo sapien
catcaaaatctaaaggtacctttct

SEQ ID NO: 1433990 - DNA, 25 bp, Homo sapien
cataatgtaggacatcacatagcat

SEQ ID NO: 1433991 - DNA, 25 bp, Homo sapien
aatacttgagagctcttggaaacca

SEQ ID NO: 1433992 - DNA, 25 bp, Homo sapien
ttaattgggcgtagtggtacatgcc

SEQ ID NO: 1433993 - DNA, 25 bp, Homo sapien
gctgaagcatgaggctgaagcatga

SEQ ID NO: 1433994 - DNA, 25 bp, Homo sapien
taaagaaggaaattaggccagttgc

SEQ ID NO: 1433995 - DNA, 25 bp, Homo sapien
gaagcatgagaactgctttaatctg

SEQ ID NO: 1433996 - DNA, 25 bp, Homo sapien
aatgtgaatgctattgttgtttact

SEQ ID NO: 1433997 - DNA, 25 bp, Homo sapien
tgatttattgtgtcgtttaagtccc

SEQ ID NO: 1433998 - DNA, 25 bp, Homo sapien
aaacctagttgatttattgtgtcgt

SEQ ID NO: 1433999 - DNA, 25 bp, Homo sapien
tgtttactagagtgttctatacatg

SEQ ID NO: 1434000 - DNA, 25 bp, Homo sapien
tggaggtaggcccaggacacagtag

SEQ ID NO: 1434001 - DNA, 25 bp, Homo sapien
ggaggtaggcccaggacacagtaga

SEQ ID NO: 1434002 - DNA, 25 bp, Homo sapien
accatgatgcagcatgtggaggtag

SEQ ID NO: 1434003 - DNA, 25 bp, Homo sapien
taaaaatgagcatcgaggactttcc

SEQ ID NO: 1434004 - DNA, 25 bp, Homo sapien
ggaatgaaccacgtgaaaagccagg

SEQ ID NO: 1434005 - DNA, 25 bp, Homo sapien
aaaagccaggtacgagagttccaga

SEQ ID NO: 1434006 - DNA, 25 bp, Homo sapien
aagcaaagatcggtgcactcagggc

SEQ ID NO: 1434007 - DNA, 25 bp, Homo sapien
taatagcttcatagcattcctctct

SEQ ID NO: 1434008 - DNA, 25 bp, Homo sapien
caccagattgcgttttggctgtgag

SEQ ID NO: 1434009 - DNA, 25 bp, Homo sapien
ggctgtgagattttcaatccgctgt

SEQ ID NO: 1434010 - DNA, 25 bp, Homo sapien
tcaatccgctgtctccaggtctttt

SEQ ID NO: 1434011 - DNA, 25 bp, Homo sapien
gtggctgaactaccaagcatttttc

SEQ ID NO: 1434012 - DNA, 25 bp, Homo sapien
ggctgaactaccaagcatttttctg

SEQ ID NO: 1434013 - DNA, 25 bp, Homo sapien
aggtggctgaactaccaagcatttt

SEQ ID NO: 1434014 - DNA, 25 bp, Homo sapien
cctcttgagggttctgctaaggggg

SEQ ID NO: 1434015 - DNA, 25 bp, Homo sapien
ggatcaatgcttggagcaaaatgca

SEQ ID NO: 1434016 - DNA, 25 bp, Homo sapien
gaagagcaaaggcaactgatggatc

SEQ ID NO: 1434017 - DNA, 25 bp, Homo sapien
gcagaggtttttggcaccgtttgta

SEQ ID NO: 1434018 - DNA, 25 bp, Homo sapien
accgtttgtatctccagtgtcctga

SEQ ID NO: 1434019 - DNA, 25 bp, Homo sapien
gatggattgagctcattttcttcca

SEQ ID NO: 1434020 - DNA, 25 bp, Homo sapien
ctaactagagcacatttcagaatca

SEQ ID NO: 1434021 - DNA, 25 bp, Homo sapien
ctggaaaaagatggattgagctcat

SEQ ID NO: 1434022 - DNA, 25 bp, Homo sapien
gagttattgaatggtacatgctcct

SEQ ID NO: 1434023 - DNA, 25 bp, Homo sapien
ggtttttgtagctcacaccttgaac

SEQ ID NO: 1434024 - DNA, 25 bp, Homo sapien
gatcttgaacttcaccatactgtag

SEQ ID NO: 1434025 - DNA, 25 bp, Homo sapien
atcccagttggctgttgcggttttt

SEQ ID NO: 1434026 - DNA, 25 bp, Homo sapien
gaacttcaccatactgtaggttaac

SEQ ID NO: 1434027 - DNA, 25 bp, Homo sapien
tttgtgacaaagaaacgccctgcta

SEQ ID NO: 1434028 - DNA, 25 bp, Homo sapien
ctttgtgacaaagaaacgccctgct

SEQ ID NO: 1434029 - DNA, 25 bp, Homo sapien
gcttctgtatgacataactcctcct

SEQ ID NO: 1434030 - DNA, 25 bp, Homo sapien
tactagggttgaggtatgagcttct

SEQ ID NO: 1434031 - DNA, 25 bp, Homo sapien
tgcacattcaccctgcatctctgct

SEQ ID NO: 1434032 - DNA, 25 bp, Homo sapien
tctctgctcttttactagggttgag

SEQ ID NO: 1434033 - DNA, 25 bp, Homo sapien
aggggaccaaatgggtgctggccat

SEQ ID NO: 1434034 - DNA, 25 bp, Homo sapien
gaggggaccaaatgggtgctggcca

SEQ ID NO: 1434035 - DNA, 25 bp, Homo sapien
agaggggaccaaatgggtgctggcc

SEQ ID NO: 1434036 - DNA, 25 bp, Homo sapien
tgctgtgacactctgagaggggacc

SEQ ID NO: 1434037 - DNA, 25 bp, Homo sapien
caaactctggacaaacaggcatgga

SEQ ID NO: 1434038 - DNA, 25 bp, Homo sapien
caggcatggactctatgtagggtaa

SEQ ID NO: 1434039 - DNA, 25 bp, Homo sapien
taggttgtgctctgacttttcccaa

SEQ ID NO: 1434040 - DNA, 25 bp, Homo sapien
tagggtaacaacttctatggcaggc

SEQ ID NO: 1434041 - DNA, 25 bp, Homo sapien
tggagttgcaacagatacctcggtg

SEQ ID NO: 1434042 - DNA, 25 bp, Homo sapien
gctttagcatctggagttgcaacag

SEQ ID NO: 1434043 - DNA, 25 bp, Homo sapien
ctggctttagcatctggagttgcaa

SEQ ID NO: 1434044 - DNA, 25 bp, Homo sapien
caacagatacctcggtgcctgaaac

SEQ ID NO: 1434045 - DNA, 25 bp, Homo sapien
atagatactcttgggctacagtgcc

SEQ ID NO: 1434046 - DNA, 25 bp, Homo sapien
gaagcaatagatactcttgggctac

SEQ ID NO: 1434047 - DNA, 25 bp, Homo sapien
gggctacagtgccttggttgtagca

SEQ ID NO: 1434048 - DNA, 25 bp, Homo sapien
gatactcttgggctacagtgccttg

SEQ ID NO: 1434049 - DNA, 25 bp, Homo sapien
gttctcccaactgttgtgtgggttc

SEQ ID NO: 1434050 - DNA, 25 bp, Homo sapien
tgttctcccaactgttgtgtgggtt

SEQ ID NO: 1434051 - DNA, 25 bp, Homo sapien
actatgttctcccaactgttgtgtg

SEQ ID NO: 1434052 - DNA, 25 bp, Homo sapien
tatgttctcccaactgttgtgtggg

SEQ ID NO: 1434053 - DNA, 25 bp, Homo sapien
ttagtcagtccaaatccctctccag

SEQ ID NO: 1434054 - DNA, 25 bp, Homo sapien
tcaattagtcagtccaaatccctct

SEQ ID NO: 1434055 - DNA, 25 bp, Homo sapien
catataaagttgttggtggagataa

SEQ ID NO: 1434056 - DNA, 25 bp, Homo sapien
cctctccagccgcatctgatccata

SEQ ID NO: 1434057 - DNA, 25 bp, Homo sapien
tcaaggcttcaatggatatcccctc

SEQ ID NO: 1434058 - DNA, 25 bp, Homo sapien
ccagaccaggaaggatgattgtaag

SEQ ID NO: 1434059 - DNA, 25 bp, Homo sapien
gattgtaagtttatctttcctacaa

SEQ ID NO: 1434060 - DNA, 25 bp, Homo sapien
tcctacaaggataaaggcccaagtc

SEQ ID NO: 1434061 - DNA, 25 bp, Homo sapien
tcaaggttaaatactggccagagca

SEQ ID NO: 1434062 - DNA, 25 bp, Homo sapien
tggaaacaccttgcatgatctctgc

SEQ ID NO: 1434063 - DNA, 25 bp, Homo sapien
gatgcctacttttggatggaaacac

SEQ ID NO: 1434064 - DNA, 25 bp, Homo sapien
tcagtagtaccgttcagagaagacc

SEQ ID NO: 1434065 - DNA, 25 bp, Homo sapien
gtctctgttcaggaacagtccacca

SEQ ID NO: 1434066 - DNA, 25 bp, Homo sapien
tcaggaacagtccaccatgtaatcc

SEQ ID NO: 1434067 - DNA, 25 bp, Homo sapien
cagataggtctctgttcaggaacag

SEQ ID NO: 1434068 - DNA, 25 bp, Homo sapien
tgttcaggaacagtccaccatgtaa

SEQ ID NO: 1434069 - DNA, 25 bp, Homo sapien
tgccaggtgaccactctgtaaggta

SEQ ID NO: 1434070 - DNA, 25 bp, Homo sapien
catctcttacaatacctgccctcca

SEQ ID NO: 1434071 - DNA, 25 bp, Homo sapien
cactctgtaaggtatttctctggcc

SEQ ID NO: 1434072 - DNA, 25 bp, Homo sapien
ggccttaaatgaccatctcttacaa

SEQ ID NO: 1434073 - DNA, 25 bp, Homo sapien
cactgtccatggaagaagatgtttc

SEQ ID NO: 1434074 - DNA, 25 bp, Homo sapien
cagcaaactccagtggacctgtagc

SEQ ID NO: 1434075 - DNA, 25 bp, Homo sapien
aactccagtggacctgtagcagagg

SEQ ID NO: 1434076 - DNA, 25 bp, Homo sapien
gcaaactccagtggacctgtagcag

SEQ ID NO: 1434077 - DNA, 25 bp, Homo sapien
tccagcaaactccagtggacctgta

SEQ ID NO: 1434078 - DNA, 25 bp, Homo sapien
gagattgagaccgttctagctaaca

SEQ ID NO: 1434079 - DNA, 25 bp, Homo sapien
ggagattgagaccgttctagctaac

SEQ ID NO: 1434080 - DNA, 25 bp, Homo sapien
gattgagaccgttctagctaacacg

SEQ ID NO: 1434081 - DNA, 25 bp, Homo sapien
ttgagaccgttctagctaacacggt

SEQ ID NO: 1434082 - DNA, 25 bp, Homo sapien
tcttctgcaattccttggccccatg

SEQ ID NO: 1434083 - DNA, 25 bp, Homo sapien
cagggctctgctaagggtctgaaca

SEQ ID NO: 1434084 - DNA, 25 bp, Homo sapien
gactttaggagcatgtcacagcacc

SEQ ID NO: 1434085 - DNA, 25 bp, Homo sapien
catttaacagttgtcctgggaccag

SEQ ID NO: 1434086 - DNA, 25 bp, Homo sapien
ggtgctcaggcccaggaattgtgaa

SEQ ID NO: 1434087 - DNA, 25 bp, Homo sapien
gattggaggacaattcaggcaacac

SEQ ID NO: 1434088 - DNA, 25 bp, Homo sapien
tcttgtctcatagtacacacaggga

SEQ ID NO: 1434089 - DNA, 25 bp, Homo sapien
tgtttgatgatagagcttgccaccc

SEQ ID NO: 1434090 - DNA, 25 bp, Homo sapien
caggagatgcttatgttggacaacc

SEQ ID NO: 1434091 - DNA, 25 bp, Homo sapien
ttccctaatggagcactggttacca

SEQ ID NO: 1434092 - DNA, 25 bp, Homo sapien
atttcaccgacttgatgtatggacc

SEQ ID NO: 1434093 - DNA, 25 bp, Homo sapien
taattagaagcgactctgtgatcgc

SEQ ID NO: 1434094 - DNA, 25 bp, Homo sapien
tcaaaaaactggattcacccacaga

SEQ ID NO: 1434095 - DNA, 25 bp, Homo sapien
cctctgctcatatcttcacagattt

SEQ ID NO: 1434096 - DNA, 25 bp, Homo sapien
aaactggattcacccacagagtctg

SEQ ID NO: 1434097 - DNA, 25 bp, Homo sapien
aaaaactggattcacccacagagtc

SEQ ID NO: 1434098 - DNA, 25 bp, Homo sapien
acaggatgagatgaagtcagcaaaa

SEQ ID NO: 1434099 - DNA, 25 bp, Homo sapien
caggatgagatgaagtcagcaaaat

SEQ ID NO: 1434100 - DNA, 25 bp, Homo sapien
ctggaacacacaggatgagatgaag

SEQ ID NO: 1434101 - DNA, 25 bp, Homo sapien
gaacacacaggatgagatgaagtca

SEQ ID NO: 1434102 - DNA, 25 bp, Homo sapien
tcatagtatgagagtagagataggg

SEQ ID NO: 1434103 - DNA, 25 bp, Homo sapien
tcatgtgtactaaaatcactggctt

SEQ ID NO: 1434104 - DNA, 25 bp, Homo sapien
caacagccctttgtggacagctctg

SEQ ID NO: 1434105 - DNA, 25 bp, Homo sapien
ttctcactctgtgctgacaacagcc

SEQ ID NO: 1434106 - DNA, 25 bp, Homo sapien
ccccagtcacaacaagtgtattttc

SEQ ID NO: 1434107 - DNA, 25 bp, Homo sapien
atccccagtcacaacaagtgtattt

SEQ ID NO: 1434108 - DNA, 25 bp, Homo sapien
cagtcacaacaagtgtattttcttc

SEQ ID NO: 1434109 - DNA, 25 bp, Homo sapien
ctcatccccagtcacaacaagtgta

SEQ ID NO: 1434110 - DNA, 25 bp, Homo sapien
tacatgtacaacgattcaactattg

SEQ ID NO: 1434111 - DNA, 25 bp, Homo sapien
tcagaatatcacatggtccccaaaa

SEQ ID NO: 1434112 - DNA, 25 bp, Homo sapien
catatgtaagggctaaaaaagtgga

SEQ ID NO: 1434113 - DNA, 25 bp, Homo sapien
ttgttatagcagtaggtagttaggc

SEQ ID NO: 1434114 - DNA, 25 bp, Homo sapien
cagtccttccgggctggctttaatg

SEQ ID NO: 1434115 - DNA, 25 bp, Homo sapien
tgggtccagtccttccgggctggct

SEQ ID NO: 1434116 - DNA, 25 bp, Homo sapien
tccagtccttccgggctggctttaa

SEQ ID NO: 1434117 - DNA, 25 bp, Homo sapien
gtccttccgggctggctttaatgca

SEQ ID NO: 1434118 - DNA, 25 bp, Homo sapien
gcacactcccccagaaaagcctttc

SEQ ID NO: 1434119 - DNA, 25 bp, Homo sapien
actcccccagaaaagcctttctcat

SEQ ID NO: 1434120 - DNA, 25 bp, Homo sapien
tgtcgctgctgccaggggcacactc

SEQ ID NO: 1434121 - DNA, 25 bp, Homo sapien
tgctgccaggggcacactcccccag

SEQ ID NO: 1434122 - DNA, 25 bp, Homo sapien
gacacaagcttggtctatgccttca

SEQ ID NO: 1434123 - DNA, 25 bp, Homo sapien
tagttcttcagtcatgcttggtgcc

SEQ ID NO: 1434124 - DNA, 25 bp, Homo sapien
aggagcaaaactgggctcttcgtag

SEQ ID NO: 1434125 - DNA, 25 bp, Homo sapien
ctctaaatggctgccccgatgggac

SEQ ID NO: 1434126 - DNA, 25 bp, Homo sapien
gcccctggcaaggttaagctgaaga

SEQ ID NO: 1434127 - DNA, 25 bp, Homo sapien
gctgcagtcctttaggccacgcaaa

SEQ ID NO: 1434128 - DNA, 25 bp, Homo sapien
tgtaaagcactaacatccttcggca

SEQ ID NO: 1434129 - DNA, 25 bp, Homo sapien
gatgtagatcatgccacagctggcc

SEQ ID NO: 1434130 - DNA, 25 bp, Homo sapien
tgatccagaggcacgaatgctctca

SEQ ID NO: 1434131 - DNA, 25 bp, Homo sapien
cctgatccagaggcacgaatgctct

SEQ ID NO: 1434132 - DNA, 25 bp, Homo sapien
tccagaggcacgaatgctctcatca

SEQ ID NO: 1434133 - DNA, 25 bp, Homo sapien
gatccagaggcacgaatgctctcat

SEQ ID NO: 1434134 - DNA, 25 bp, Homo sapien
catgtggccccagtgacaaatctac

SEQ ID NO: 1434135 - DNA, 25 bp, Homo sapien
gacgtgaagatgttctcactgagca

SEQ ID NO: 1434136 - DNA, 25 bp, Homo sapien
tatagaggacataagctgtgtcagc

SEQ ID NO: 1434137 - DNA, 25 bp, Homo sapien
cagctgagcgggcttgctcatggct

SEQ ID NO: 1434138 - DNA, 25 bp, Homo sapien
ttcaggattcacgtccaggccacaa

SEQ ID NO: 1434139 - DNA, 25 bp, Homo sapien
cacaaggtagatggcgatgctgctc

SEQ ID NO: 1434140 - DNA, 25 bp, Homo sapien
taaacatgcgtgtaagtcactacac

SEQ ID NO: 1434141 - DNA, 25 bp, Homo sapien
tgctcgctggagaatccaacacagg

SEQ ID NO: 1434142 - DNA, 25 bp, Homo sapien
ccattagtggtagccgtagaggaat

SEQ ID NO: 1434143 - DNA, 25 bp, Homo sapien
tctgcagagcagtatatgtggaagg

SEQ ID NO: 1434144 - DNA, 25 bp, Homo sapien
tggtggtcctactgagcgtgatttc

SEQ ID NO: 1434145 - DNA, 25 bp, Homo sapien
aaagaacacactggcctggtgcgtg

SEQ ID NO: 1434146 - DNA, 25 bp, Homo sapien
aacagacccccaactgcaggagcag

SEQ ID NO: 1434147 - DNA, 25 bp, Homo sapien
tgcaggagcaggctcctgttgggaa

SEQ ID NO: 1434148 - DNA, 25 bp, Homo sapien
tcctgttgggaaggggagacactga

SEQ ID NO: 1434149 - DNA, 25 bp, Homo sapien
tagcaacagacccccaactgcagga

SEQ ID NO: 1434150 - DNA, 25 bp, Homo sapien
acctccaccccagttagctgccctt

SEQ ID NO: 1434151 - DNA, 25 bp, Homo sapien
cttgtaggaaccactatgaatggcc

SEQ ID NO: 1434152 - DNA, 25 bp, Homo sapien
ttgttccttgtaggaaccactatga

SEQ ID NO: 1434153 - DNA, 25 bp, Homo sapien
gaaccactatgaatggcctcttccc

SEQ ID NO: 1434154 - DNA, 25 bp, Homo sapien
ggtcacttgattcccaaggttcttg

SEQ ID NO: 1434155 - DNA, 25 bp, Homo sapien
tcttcctcggagttaagctgagaaa

SEQ ID NO: 1434156 - DNA, 25 bp, Homo sapien
ccatgtttgcactgcaccgttcttg

SEQ ID NO: 1434157 - DNA, 25 bp, Homo sapien
cttggttgatttcttcctcggagtt

SEQ ID NO: 1434158 - DNA, 25 bp, Homo sapien
ccaagagggtcttacaggaacccat

SEQ ID NO: 1434159 - DNA, 25 bp, Homo sapien
tgttttccgaaaatagaccaatcca

SEQ ID NO: 1434160 - DNA, 25 bp, Homo sapien
taactctccaagatcacatttaccc

SEQ ID NO: 1434161 - DNA, 25 bp, Homo sapien
tgtctgtcctggaaaacacttctgc

SEQ ID NO: 1434162 - DNA, 25 bp, Homo sapien
gcagggtttttgctcttgccaaaaa

SEQ ID NO: 1434163 - DNA, 25 bp, Homo sapien
tcataggccggcaaaggagtgtgaa

SEQ ID NO: 1434164 - DNA, 25 bp, Homo sapien
tgtgagacaacaaaccagtgtggct

SEQ ID NO: 1434165 - DNA, 25 bp, Homo sapien
gggcaacaccacaaggcgcttcata

SEQ ID NO: 1434166 - DNA, 25 bp, Homo sapien
caagtgcatagattagacagccaga

SEQ ID NO: 1434167 - DNA, 25 bp, Homo sapien
gccccaaaactgtgaatagagtgag

SEQ ID NO: 1434168 - DNA, 25 bp, Homo sapien
gaaccaaggaagagaggtgtcccca

SEQ ID NO: 1434169 - DNA, 25 bp, Homo sapien
gagagctaatcccaccgttttcaaa

SEQ ID NO: 1434170 - DNA, 25 bp, Homo sapien
gaatttcaagagatgcggatgctcc

SEQ ID NO: 1434171 - DNA, 25 bp, Homo sapien
tccagtgtgattgatgcctctcctc

SEQ ID NO: 1434172 - DNA, 25 bp, Homo sapien
tcaaagcacgtaacagatggatggt

SEQ ID NO: 1434173 - DNA, 25 bp, Homo sapien
taaattgaatcccacagatggagtg

SEQ ID NO: 1434174 - DNA, 25 bp, Homo sapien
gatggtacctgaaccctaattccag

SEQ ID NO: 1434175 - DNA, 25 bp, Homo sapien
gagagccttggagagaatgggcatc

SEQ ID NO: 1434176 - DNA, 25 bp, Homo sapien
ctacaatcttaatatgtcatacatg

SEQ ID NO: 1434177 - DNA, 25 bp, Homo sapien
ggtttctacaatcttaatatgtcat

SEQ ID NO: 1434178 - DNA, 25 bp, Homo sapien
ttttctctacagttaggctatgaga

SEQ ID NO: 1434179 - DNA, 25 bp, Homo sapien
ggccctggactcccgcaagagctgt

SEQ ID NO: 1434180 - DNA, 25 bp, Homo sapien
ccctggactcccgcaagagctgtgg

SEQ ID NO: 1434181 - DNA, 25 bp, Homo sapien
ctggactcccgcaagagctgtggca

SEQ ID NO: 1434182 - DNA, 25 bp, Homo sapien
cctggactcccgcaagagctgtggc

SEQ ID NO: 1434183 - DNA, 25 bp, Homo sapien
ctttcgacccctttgctgatgcaag

SEQ ID NO: 1434184 - DNA, 25 bp, Homo sapien
gacccctttgctgatgcaagtaagg

SEQ ID NO: 1434185 - DNA, 25 bp, Homo sapien
cctttgctgatgcaagtaagggtga

SEQ ID NO: 1434186 - DNA, 25 bp, Homo sapien
tcgacccctttgctgatgcaagtaa

SEQ ID NO: 1434187 - DNA, 25 bp, Homo sapien
gagcgttggcaacttgactccagtg

SEQ ID NO: 1434188 - DNA, 25 bp, Homo sapien
ccccaagcaagagtagggcagcaga

SEQ ID NO: 1434189 - DNA, 25 bp, Homo sapien
cagcagaacggcctgctagagggtt

SEQ ID NO: 1434190 - DNA, 25 bp, Homo sapien
ttgttttgaacctgccaaggcagct

SEQ ID NO: 1434191 - DNA, 25 bp, Homo sapien
cccgactgtcctctatccccgcctc

SEQ ID NO: 1434192 - DNA, 25 bp, Homo sapien
ctcagggtcaacaggtcatccttgc

SEQ ID NO: 1434193 - DNA, 25 bp, Homo sapien
ccgactgtcctctatccccgcctcc

SEQ ID NO: 1434194 - DNA, 25 bp, Homo sapien
tctcagggtcaacaggtcatccttg

SEQ ID NO: 1434195 - DNA, 25 bp, Homo sapien
tcccattccccataagattcagtgt

SEQ ID NO: 1434196 - DNA, 25 bp, Homo sapien
tcatctcccacaagcaatgtcaatg

SEQ ID NO: 1434197 - DNA, 25 bp, Homo sapien
ttcttgggtagcctcctctcccatt

SEQ ID NO: 1434198 - DNA, 25 bp, Homo sapien
actaaggactattggagaggtggcc

SEQ ID NO: 1434199 - DNA, 25 bp, Homo sapien
taaatgaacggtcggagatcgagct

SEQ ID NO: 1434200 - DNA, 25 bp, Homo sapien
gatagatttagtgactgagggccca

SEQ ID NO: 1434201 - DNA, 25 bp, Homo sapien
tgactacgccgtacagtggaggaaa

SEQ ID NO: 1434202 - DNA, 25 bp, Homo sapien
aatggcagggttctaatcagctcag

SEQ ID NO: 1434203 - DNA, 25 bp, Homo sapien
taaagcaacacaaggctcttggtag

SEQ ID NO: 1434204 - DNA, 25 bp, Homo sapien
ggtagcctgattacaatgagaatta

SEQ ID NO: 1434205 - DNA, 25 bp, Homo sapien
caaggctcttggtagcctgattaca

SEQ ID NO: 1434206 - DNA, 25 bp, Homo sapien
caatgagaattaattaagtacacta

SEQ ID NO: 1434207 - DNA, 25 bp, Homo sapien
tggagtctggacctcactacattgc

SEQ ID NO: 1434208 - DNA, 25 bp, Homo sapien
tagaaagtcctgtcgaatgatgaga

SEQ ID NO: 1434209 - DNA, 25 bp, Homo sapien
tattgcaggcactacaacaggtctc

SEQ ID NO: 1434210 - DNA, 25 bp, Homo sapien
aacaggtctcaagatacagtggtga

SEQ ID NO: 1434211 - DNA, 25 bp, Homo sapien
tgagaatcacaatcggtccactggt

SEQ ID NO: 1434212 - DNA, 25 bp, Homo sapien
tatgcacagcatcatgggagccgga

SEQ ID NO: 1434213 - DNA, 25 bp, Homo sapien
ggagcttttacccaacctcatgagg

SEQ ID NO: 1434214 - DNA, 25 bp, Homo sapien
taggaccacgccagcaagctaatag

SEQ ID NO: 1434215 - DNA, 25 bp, Homo sapien
tgttaactaatccagtgcccacctt

SEQ ID NO: 1434216 - DNA, 25 bp, Homo sapien
ctaaacctatgtggacaagtgtgtc

SEQ ID NO: 1434217 - DNA, 25 bp, Homo sapien
agttgaagcaaacaagcaattctgt

SEQ ID NO: 1434218 - DNA, 25 bp, Homo sapien
tcttgagggcctaatcccagatcac

SEQ ID NO: 1434219 - DNA, 25 bp, Homo sapien
gtttccaccacgagggcaagtccta

SEQ ID NO: 1434220 - DNA, 25 bp, Homo sapien
ggctagtcccacaagcaagagacca

SEQ ID NO: 1434221 - DNA, 25 bp, Homo sapien
caaacgtgctctgtccggatagcta

SEQ ID NO: 1434222 - DNA, 25 bp, Homo sapien
gatagctacgcctattggacaggtg

SEQ ID NO: 1434223 - DNA, 25 bp, Homo sapien
gtttcattgagaagacacgtgcgga

SEQ ID NO: 1434224 - DNA, 25 bp, Homo sapien
cattgagaagacacgtgcggatgag

SEQ ID NO: 1434225 - DNA, 25 bp, Homo sapien
ttcattgagaagacacgtgcggatg

SEQ ID NO: 1434226 - DNA, 25 bp, Homo sapien
tttcattgagaagacacgtgcggat

SEQ ID NO: 1434227 - DNA, 25 bp, Homo sapien
ttagtttctcaatggcctcctcgat

SEQ ID NO: 1434228 - DNA, 25 bp, Homo sapien
tttctcaatggcctcctcgatgtac

SEQ ID NO: 1434229 - DNA, 25 bp, Homo sapien
tagtttctcaatggcctcctcgatg

SEQ ID NO: 1434230 - DNA, 25 bp, Homo sapien
cgcttgcttagtttctcaatggcct

SEQ ID NO: 1434231 - DNA, 25 bp, Homo sapien
aagatggcagtccaaccttgtctcc

SEQ ID NO: 1434232 - DNA, 25 bp, Homo sapien
cacaggagattaaagatggccccag

SEQ ID NO: 1434233 - DNA, 25 bp, Homo sapien
tgtcaacacctaaagtacgtccaga

SEQ ID NO: 1434234 - DNA, 25 bp, Homo sapien
tgcccgacaagcagtacaaagttac

SEQ ID NO: 1434235 - DNA, 25 bp, Homo sapien
tggtatggcagcctgcaccattcca

SEQ ID NO: 1434236 - DNA, 25 bp, Homo sapien
tcagcagcccttactagcaaaagtc

SEQ ID NO: 1434237 - DNA, 25 bp, Homo sapien
ttagtgagtggtgtatcagcagccc

SEQ ID NO: 1434238 - DNA, 25 bp, Homo sapien
ctagaaacgagaagcttggccatta

SEQ ID NO: 1434239 - DNA, 25 bp, Homo sapien
gcaaaagtcctatgtacacctacct

SEQ ID NO: 1434240 - DNA, 25 bp, Homo sapien
ctgggcaggcatgacctcggcatta

SEQ ID NO: 1434241 - DNA, 25 bp, Homo sapien
atgacctcggcattagtccccgcaa

SEQ ID NO: 1434242 - DNA, 25 bp, Homo sapien
tgacctcggcattagtccccgcaat

SEQ ID NO: 1434243 - DNA, 25 bp, Homo sapien
ggcatgacctcggcattagtccccg

SEQ ID NO: 1434244 - DNA, 25 bp, Homo sapien
gctcccacaccacagtaatatggac

SEQ ID NO: 1434245 - DNA, 25 bp, Homo sapien
ctgccataggctctgtctgctccca

SEQ ID NO: 1434246 - DNA, 25 bp, Homo sapien
tctgctcccacaccacagtaatatg

SEQ ID NO: 1434247 - DNA, 25 bp, Homo sapien
ctgtctgctcccacaccacagtaat

SEQ ID NO: 1434248 - DNA, 25 bp, Homo sapien
tcagaaggcccttaagccttgccct

SEQ ID NO: 1434249 - DNA, 25 bp, Homo sapien
tgagggctgtttcgcctttactgta

SEQ ID NO: 1434250 - DNA, 25 bp, Homo sapien
gagaatcccaaagtcagagatcaga

SEQ ID NO: 1434251 - DNA, 25 bp, Homo sapien
gaatcactatccttgccttcatctg

SEQ ID NO: 1434252 - DNA, 25 bp, Homo sapien
gccctgggaagccgttggaaggcca

SEQ ID NO: 1434253 - DNA, 25 bp, Homo sapien
tccccatgagggtatactcctgctc

SEQ ID NO: 1434254 - DNA, 25 bp, Homo sapien
ccaaaccaggggtgctggttgctca

SEQ ID NO: 1434255 - DNA, 25 bp, Homo sapien
atgagggtatactcctgctccatgc

SEQ ID NO: 1434256 - DNA, 25 bp, Homo sapien
tccattatccgtttacaggtgtgcc

SEQ ID NO: 1434257 - DNA, 25 bp, Homo sapien
tgtccattatccgtttacaggtgtg

SEQ ID NO: 1434258 - DNA, 25 bp, Homo sapien
ccattatccgtttacaggtgtgcct

SEQ ID NO: 1434259 - DNA, 25 bp, Homo sapien
catgtccattatccgtttacaggtg

SEQ ID NO: 1434260 - DNA, 25 bp, Homo sapien
tgcactatggtatgaactgacccag

SEQ ID NO: 1434261 - DNA, 25 bp, Homo sapien
tataggccttcttgggatcaccgag

SEQ ID NO: 1434262 - DNA, 25 bp, Homo sapien
accgatgctgatgggagaatagtcc

SEQ ID NO: 1434263 - DNA, 25 bp, Homo sapien
gagtcaataatacgccatcagggat

SEQ ID NO: 1434264 - DNA, 25 bp, Homo sapien
gtcactgttggaaccctcagactgt

SEQ ID NO: 1434265 - DNA, 25 bp, Homo sapien
taaagtactagagccatcgaaattc

SEQ ID NO: 1434266 - DNA, 25 bp, Homo sapien
gttggaaccctcagactgtaaagta

SEQ ID NO: 1434267 - DNA, 25 bp, Homo sapien
cagcttgttagggtccttacggaag

SEQ ID NO: 1434268 - DNA, 25 bp, Homo sapien
gagctttccaagcaatgcaaataca

SEQ ID NO: 1434269 - DNA, 25 bp, Homo sapien
tttaaaacatacaggagctttccaa

SEQ ID NO: 1434270 - DNA, 25 bp, Homo sapien
ctttccaagcaatgcaaatacagcc

SEQ ID NO: 1434271 - DNA, 25 bp, Homo sapien
actcaccttcccatctctaaatatc

SEQ ID NO: 1434272 - DNA, 25 bp, Homo sapien
tgcttggtctctctagctgactgag

SEQ ID NO: 1434273 - DNA, 25 bp, Homo sapien
gccacatagcaagtacacaatatag

SEQ ID NO: 1434274 - DNA, 25 bp, Homo sapien
tctgaaggcagagacgagactctca

SEQ ID NO: 1434275 - DNA, 25 bp, Homo sapien
cagacgactagcaggatgacttact

SEQ ID NO: 1434276 - DNA, 25 bp, Homo sapien
gaagaaagaggcctaatccagaggc

SEQ ID NO: 1434277 - DNA, 25 bp, Homo sapien
ctgcagatcccacccagcatgtgct

SEQ ID NO: 1434278 - DNA, 25 bp, Homo sapien
aaacagaagaaagaggcctaatcca

SEQ ID NO: 1434279 - DNA, 25 bp, Homo sapien
agaaagaggcctaatccagaggctg

SEQ ID NO: 1434280 - DNA, 25 bp, Homo sapien
tctccagtaccatcgatccagatat

SEQ ID NO: 1434281 - DNA, 25 bp, Homo sapien
ccgggtcttgcagcgcagtccttct

SEQ ID NO: 1434282 - DNA, 25 bp, Homo sapien
gcagtccttctccagtaccatcgat

SEQ ID NO: 1434283 - DNA, 25 bp, Homo sapien
ccagggtccgggtcttgcagcgcag

SEQ ID NO: 1434284 - DNA, 25 bp, Homo sapien
cctttatttaagtgggaacttgctg

SEQ ID NO: 1434285 - DNA, 25 bp, Homo sapien
ctgcttgatgcctttatttaagtgg

SEQ ID NO: 1434286 - DNA, 25 bp, Homo sapien
tgcctttatttaagtgggaacttgc

SEQ ID NO: 1434287 - DNA, 25 bp, Homo sapien
tgatgcctttatttaagtgggaact

SEQ ID NO: 1434288 - DNA, 25 bp, Homo sapien
caaaagtcagagtgtaagtgccaac

SEQ ID NO: 1434289 - DNA, 25 bp, Homo sapien
gatcaggcccttggtagtaactcaa

SEQ ID NO: 1434290 - DNA, 25 bp, Homo sapien
ccagggtggctagaaagggaacaca

SEQ ID NO: 1434291 - DNA, 25 bp, Homo sapien
tacagtggcaaagtttctacgggca

SEQ ID NO: 1434292 - DNA, 25 bp, Homo sapien
tcttttccgtgagccgagttgcatg

SEQ ID NO: 1434293 - DNA, 25 bp, Homo sapien
gttgcatgccagcagcctagtgcca

SEQ ID NO: 1434294 - DNA, 25 bp, Homo sapien
tgctgctgcggtgccaagtttacgt

SEQ ID NO: 1434295 - DNA, 25 bp, Homo sapien
ctagtgccactctatcaactgctgc

SEQ ID NO: 1434296 - DNA, 25 bp, Homo sapien
tttggagtggcgttcgcgcctctcc

SEQ ID NO: 1434297 - DNA, 25 bp, Homo sapien
ctctttttggagtggcgttcgcgcc

SEQ ID NO: 1434298 - DNA, 25 bp, Homo sapien
caagcgtatcgttagggttgccctc

SEQ ID NO: 1434299 - DNA, 25 bp, Homo sapien
agccacagaaagtcaagcgtatcgt

SEQ ID NO: 1434300 - DNA, 25 bp, Homo sapien
agtaggcgacgaagccgaagcagct

SEQ ID NO: 1434301 - DNA, 25 bp, Homo sapien
gcgacccggaggagtctgacttctc

SEQ ID NO: 1434302 - DNA, 25 bp, Homo sapien
tctccccggagttcacagagtaggc

SEQ ID NO: 1434303 - DNA, 25 bp, Homo sapien
tcttgactcgagatctctccccgga

SEQ ID NO: 1434304 - DNA, 25 bp, Homo sapien
aaatgtccctaaagtgggcgccctg

SEQ ID NO: 1434305 - DNA, 25 bp, Homo sapien
gtccgaatctcagggcctcacggag

SEQ ID NO: 1434306 - DNA, 25 bp, Homo sapien
tatccactttgagagcagccccttc

SEQ ID NO: 1434307 - DNA, 25 bp, Homo sapien
cccgagggagttataattatccact

SEQ ID NO: 1434308 - DNA, 25 bp, Homo sapien
aggcccgggctctccattgttcggt

SEQ ID NO: 1434309 - DNA, 25 bp, Homo sapien
tgttcggtcacattggaaggccccc

SEQ ID NO: 1434310 - DNA, 25 bp, Homo sapien
aggccgtagggactgcgcgctgctg

SEQ ID NO: 1434311 - DNA, 25 bp, Homo sapien
ggcttctccactgactgcgccgagg

SEQ ID NO: 1434312 - DNA, 25 bp, Homo sapien
aagcgccttgtttgcgctccacagg

SEQ ID NO: 1434313 - DNA, 25 bp, Homo sapien
tcgaggcgtctcaaccatcgccaga

SEQ ID NO: 1434314 - DNA, 25 bp, Homo sapien
aaccaggacgattgctccgaaggcc

SEQ ID NO: 1434315 - DNA, 25 bp, Homo sapien
gttacacgccgcaatcgaggcgtct

SEQ ID NO: 1434316 - DNA, 25 bp, Homo sapien
ctgcgagccccagggcgcaggccgg

SEQ ID NO: 1434317 - DNA, 25 bp, Homo sapien
cgagccccagggcgcaggccggccc

SEQ ID NO: 1434318 - DNA, 25 bp, Homo sapien
agccccagggcgcaggccggcccaa

SEQ ID NO: 1434319 - DNA, 25 bp, Homo sapien
ccccagggcgcaggccggcccaacg

SEQ ID NO: 1434320 - DNA, 25 bp, Homo sapien
cttcggccgcaagtagtgaaaagaa

SEQ ID NO: 1434321 - DNA, 25 bp, Homo sapien
cagagcctggccaagggcgcgcccc

SEQ ID NO: 1434322 - DNA, 25 bp, Homo sapien
agcgccagccccgacgggtccaagc

SEQ ID NO: 1434323 - DNA, 25 bp, Homo sapien
ccggagaggccgcagcgtagggctg

SEQ ID NO: 1434324 - DNA, 25 bp, Homo sapien
tccaagccaccagcggcggaagcac

SEQ ID NO: 1434325 - DNA, 25 bp, Homo sapien
ggagcactcatgccggatctcaggc

SEQ ID NO: 1434326 - DNA, 25 bp, Homo sapien
gggcggcgcgcctcgcttgcgtgac

SEQ ID NO: 1434327 - DNA, 25 bp, Homo sapien
gggcaggcagccgaaaaaagaggct

SEQ ID NO: 1434328 - DNA, 25 bp, Homo sapien
cctcgcggggtagcaggggcggcgc

SEQ ID NO: 1434329 - DNA, 25 bp, Homo sapien
gcttgcgtgacaccgggccgtccgg

SEQ ID NO: 1434330 - DNA, 25 bp, Homo sapien
tcgccgagcaggcgggcgggtaaag

SEQ ID NO: 1434331 - DNA, 25 bp, Homo sapien
ctggtcgccgagcaggcgggcgggt

SEQ ID NO: 1434332 - DNA, 25 bp, Homo sapien
ggtcgccgagcaggcgggcgggtaa

SEQ ID NO: 1434333 - DNA, 25 bp, Homo sapien
tggtcgccgagcaggcgggcgggta

SEQ ID NO: 1434334 - DNA, 25 bp, Homo sapien
ggccgcagtactgctcacacgctcc

SEQ ID NO: 1434335 - DNA, 25 bp, Homo sapien
aggaggccgcagtactgctcacacg

SEQ ID NO: 1434336 - DNA, 25 bp, Homo sapien
gaggccgcagtactgctcacacgct

SEQ ID NO: 1434337 - DNA, 25 bp, Homo sapien
ggaggccgcagtactgctcacacgc

SEQ ID NO: 1434338 - DNA, 25 bp, Homo sapien
ctgcagagccgccagcagccccgca

SEQ ID NO: 1434339 - DNA, 25 bp, Homo sapien
gcagagccgccagcagccccgcacc

SEQ ID NO: 1434340 - DNA, 25 bp, Homo sapien
tgcagagccgccagcagccccgcac

SEQ ID NO: 1434341 - DNA, 25 bp, Homo sapien
gggccccgcggccattgggcgagga

SEQ ID NO: 1434342 - DNA, 25 bp, Homo sapien
caggagcccgggccgatcagctgat

SEQ ID NO: 1434343 - DNA, 25 bp, Homo sapien
gagttgccgccaggccgggaagcct

SEQ ID NO: 1434344 - DNA, 25 bp, Homo sapien
ccgatcagctgatgcggtcccgggc

SEQ ID NO: 1434345 - DNA, 25 bp, Homo sapien
accgaatttagccttttgttgcgag

SEQ ID NO: 1434346 - DNA, 25 bp, Homo sapien
tagttttacgaggagagctccctgg

SEQ ID NO: 1434347 - DNA, 25 bp, Homo sapien
ctccctggggaaatgcggaaccagg

SEQ ID NO: 1434348 - DNA, 25 bp, Homo sapien
tagccttttgttgcgagggagcctc

SEQ ID NO: 1434349 - DNA, 25 bp, Homo sapien
caaactaccgaaccataagccagag

SEQ ID NO: 1434350 - DNA, 25 bp, Homo sapien
taccgaaccataagccagagcctct

SEQ ID NO: 1434351 - DNA, 25 bp, Homo sapien
actaccgaaccataagccagagcct

SEQ ID NO: 1434352 - DNA, 25 bp, Homo sapien
accgaaccataagccagagcctctg

SEQ ID NO: 1434353 - DNA, 25 bp, Homo sapien
cctagatgtcttgacctcattgagc

SEQ ID NO: 1434354 - DNA, 25 bp, Homo sapien
taaggcgtgagtgcggttctgcagg

SEQ ID NO: 1434355 - DNA, 25 bp, Homo sapien
tctgcaggcttatggtatttctgcc

SEQ ID NO: 1434356 - DNA, 25 bp, Homo sapien
taacagagaacggaatggtaaggcg

SEQ ID NO: 1434357 - DNA, 25 bp, Homo sapien
ttccattgcatgtgctttgaagtca

SEQ ID NO: 1434358 - DNA, 25 bp, Homo sapien
ctgacaaggggttccattgcatgtg

SEQ ID NO: 1434359 - DNA, 25 bp, Homo sapien
agtgctgacaaggggttccattgca

SEQ ID NO: 1434360 - DNA, 25 bp, Homo sapien
tccattgcatgtgctttgaagtcat

SEQ ID NO: 1434361 - DNA, 25 bp, Homo sapien
caaggaagagagtgggtgcattact

SEQ ID NO: 1434362 - DNA, 25 bp, Homo sapien
ccagagagattcacaaaacctccaa

SEQ ID NO: 1434363 - DNA, 25 bp, Homo sapien
cagaaacaagttactggattttatt

SEQ ID NO: 1434364 - DNA, 25 bp, Homo sapien
tactaaggcagtgactcagtgttca

SEQ ID NO: 1434365 - DNA, 25 bp, Homo sapien
gaaaatgaaccagcagacgggacca

SEQ ID NO: 1434366 - DNA, 25 bp, Homo sapien
ccaattcttgaaagctgcggagaga

SEQ ID NO: 1434367 - DNA, 25 bp, Homo sapien
caaggagggtaccatgctcgtggct

SEQ ID NO: 1434368 - DNA, 25 bp, Homo sapien
tgtgcctgatgacgctaatgacagc

SEQ ID NO: 1434369 - DNA, 25 bp, Homo sapien
tctttgggcccagtcagcttcaagc

SEQ ID NO: 1434370 - DNA, 25 bp, Homo sapien
gatgtcatcgtcctgccatgggtag

SEQ ID NO: 1434371 - DNA, 25 bp, Homo sapien
cgtagatgatcaggaccagggtacc

SEQ ID NO: 1434372 - DNA, 25 bp, Homo sapien
gcagagaataaacgtgcagctccac

SEQ ID NO: 1434373 - DNA, 25 bp, Homo sapien
cactgtggcctgatatagtccataa

SEQ ID NO: 1434374 - DNA, 25 bp, Homo sapien
gatggcacttgcttcctcatgagca

SEQ ID NO: 1434375 - DNA, 25 bp, Homo sapien
tttgagtatcatgcccttggagacc

SEQ ID NO: 1434376 - DNA, 25 bp, Homo sapien
gagggagccagtcactatctttagt

SEQ ID NO: 1434377 - DNA, 25 bp, Homo sapien
cagttaaaaatggccaatggacttt

SEQ ID NO: 1434378 - DNA, 25 bp, Homo sapien
aaaaatggccaatggactttcccat

SEQ ID NO: 1434379 - DNA, 25 bp, Homo sapien
taaaaatggccaatggactttccca

SEQ ID NO: 1434380 - DNA, 25 bp, Homo sapien
ggaatacaggcctgtccgactgaag

SEQ ID NO: 1434381 - DNA, 25 bp, Homo sapien
gaagcgtgaagagcaatactcagga

SEQ ID NO: 1434382 - DNA, 25 bp, Homo sapien
tgtccgactgaagcgtgaagagcaa

SEQ ID NO: 1434383 - DNA, 25 bp, Homo sapien
caggcctgtccgactgaagcgtgaa

SEQ ID NO: 1434384 - DNA, 25 bp, Homo sapien
aactgccctgaggaaaagtggctcc

SEQ ID NO: 1434385 - DNA, 25 bp, Homo sapien
ggtgtagtgaactccaatgctccta

SEQ ID NO: 1434386 - DNA, 25 bp, Homo sapien
tgtgactttgtgatggagcggacca

SEQ ID NO: 1434387 - DNA, 25 bp, Homo sapien
tctacctagaatggactgcaggcat

SEQ ID NO: 1434388 - DNA, 25 bp, Homo sapien
cccaattccatatgacctccttttt

SEQ ID NO: 1434389 - DNA, 25 bp, Homo sapien
ctttgaactccccaattccatatga

SEQ ID NO: 1434390 - DNA, 25 bp, Homo sapien
tttgattgaggaaactcctcttccc

SEQ ID NO: 1434391 - DNA, 25 bp, Homo sapien
tgacctccttttttgattgaggaaa

SEQ ID NO: 1434392 - DNA, 25 bp, Homo sapien
tctgtacttggctctcttatgtctc

SEQ ID NO: 1434393 - DNA, 25 bp, Homo sapien
gtgctctaaccttgacttaagtagt

SEQ ID NO: 1434394 - DNA, 25 bp, Homo sapien
tggaaatccttttcaggtggcccag

SEQ ID NO: 1434395 - DNA, 25 bp, Homo sapien
gtttaatgggtgatttgtcgtgctc

SEQ ID NO: 1434396 - DNA, 25 bp, Homo sapien
tttatgttccgcaaacagtggcagc

SEQ ID NO: 1434397 - DNA, 25 bp, Homo sapien
gctgcccaagagatgtgctgctctg

SEQ ID NO: 1434398 - DNA, 25 bp, Homo sapien
tgtagacatggtgagccagaacctg

SEQ ID NO: 1434399 - DNA, 25 bp, Homo sapien
gagttgcacagcattcctagacagt

SEQ ID NO: 1434400 - DNA, 25 bp, Homo sapien
caccgcaccctgtgcaaaagggaat

SEQ ID NO: 1434401 - DNA, 25 bp, Homo sapien
cgcaccctgtgcaaaagggaatttt

SEQ ID NO: 1434402 - DNA, 25 bp, Homo sapien
gcaccctgtgcaaaagggaatttta

SEQ ID NO: 1434403 - DNA, 25 bp, Homo sapien
ccgcaccctgtgcaaaagggaattt

SEQ ID NO: 1434404 - DNA, 25 bp, Homo sapien
ccctaagtctatgtgattgacatca

SEQ ID NO: 1434405 - DNA, 25 bp, Homo sapien
tacttccctaagtctatgtgattga

SEQ ID NO: 1434406 - DNA, 25 bp, Homo sapien
gtctatgtgattgacatcatggcct

SEQ ID NO: 1434407 - DNA, 25 bp, Homo sapien
gacatcatggccttcgtgtccagat

SEQ ID NO: 1434408 - DNA, 25 bp, Homo sapien
gatccaagtgtcatccggaggagga

SEQ ID NO: 1434409 - DNA, 25 bp, Homo sapien
tggcccgtatgtgcaggacctcagg

SEQ ID NO: 1434410 - DNA, 25 bp, Homo sapien
cattttgagagcctccaactgatcc

SEQ ID NO: 1434411 - DNA, 25 bp, Homo sapien
aggtggcccgtatgtgcaggacctc

SEQ ID NO: 1434412 - DNA, 25 bp, Homo sapien
attctataggcaaagtaatgcaggc

SEQ ID NO: 1434413 - DNA, 25 bp, Homo sapien
aggaagatgccagcactacacatct

SEQ ID NO: 1434414 - DNA, 25 bp, Homo sapien
gcttcaaaatatgtggcgcttcctg

SEQ ID NO: 1434415 - DNA, 25 bp, Homo sapien
gcgcttcctggtgtcccgtggagat

SEQ ID NO: 1434416 - DNA, 25 bp, Homo sapien
tccaggtgctcattacaaatcagag

SEQ ID NO: 1434417 - DNA, 25 bp, Homo sapien
gaaagaacatcagacttagcaccag

SEQ ID NO: 1434418 - DNA, 25 bp, Homo sapien
tattgagtaagcttcacaaatgggc

SEQ ID NO: 1434419 - DNA, 25 bp, Homo sapien
gcaccagaaaaacgtaagacagtat

SEQ ID NO: 1434420 - DNA, 25 bp, Homo sapien
actaaaaggcggaggaaagctctgg

SEQ ID NO: 1434421 - DNA, 25 bp, Homo sapien
gaatcttagcagaatgtcctcccag

SEQ ID NO: 1434422 - DNA, 25 bp, Homo sapien
tatggaatacacgatgccagggact

SEQ ID NO: 1434423 - DNA, 25 bp, Homo sapien
gcaacctggtgagttaaaaggccca

SEQ ID NO: 1434424 - DNA, 25 bp, Homo sapien
ccagggctggccaacccactggccc

SEQ ID NO: 1434425 - DNA, 25 bp, Homo sapien
cagcacccagggctggccaacccac

SEQ ID NO: 1434426 - DNA, 25 bp, Homo sapien
gcacccagggctggccaacccactg

SEQ ID NO: 1434427 - DNA, 25 bp, Homo sapien
agggctggccaacccactggcccca

SEQ ID NO: 1434428 - DNA, 25 bp, Homo sapien
gtagacatagatcaccagatctgga

SEQ ID NO: 1434429 - DNA, 25 bp, Homo sapien
atcacactgaggcttgtttggactg

SEQ ID NO: 1434430 - DNA, 25 bp, Homo sapien
actgaggcttgtttggactgtgggt

SEQ ID NO: 1434431 - DNA, 25 bp, Homo sapien
catagatcaccagatctggaaatgt

SEQ ID NO: 1434432 - DNA, 25 bp, Homo sapien
gatgaactttagcagatcacccaca

SEQ ID NO: 1434433 - DNA, 25 bp, Homo sapien
gcagatcacccacagtgttctggta

SEQ ID NO: 1434434 - DNA, 25 bp, Homo sapien
gatcacccacagtgttctggtagaa

SEQ ID NO: 1434435 - DNA, 25 bp, Homo sapien
tcccaaattccggatgaactttagc

SEQ ID NO: 1434436 - DNA, 25 bp, Homo sapien
aatcctgatgaaatattcataccaa

SEQ ID NO: 1434437 - DNA, 25 bp, Homo sapien
taacacaaaaatgtggtagcaacac

SEQ ID NO: 1434438 - DNA, 25 bp, Homo sapien
aataacacaaaaatgtggtagcaac

SEQ ID NO: 1434439 - DNA, 25 bp, Homo sapien
cacaaaaatgtggtagcaacacaaa

SEQ ID NO: 1434440 - DNA, 25 bp, Homo sapien
acttttggaatgttcagaaggccca

SEQ ID NO: 1434441 - DNA, 25 bp, Homo sapien
cttagtcgtccacttgtcaaaactt

SEQ ID NO: 1434442 - DNA, 25 bp, Homo sapien
ggttgcagtagtctgaggatctcac

SEQ ID NO: 1434443 - DNA, 25 bp, Homo sapien
agtcgtccacttgtcaaaacttttg

SEQ ID NO: 1434444 - DNA, 25 bp, Homo sapien
ccacattccgaagcgtcctatagcg

SEQ ID NO: 1434445 - DNA, 25 bp, Homo sapien
ttttcgtgttttgatgtcggattca

SEQ ID NO: 1434446 - DNA, 25 bp, Homo sapien
ttcatttcccacattccgaagcgtc

SEQ ID NO: 1434447 - DNA, 25 bp, Homo sapien
cagattttcgtgttttgatgtcgga

SEQ ID NO: 1434448 - DNA, 25 bp, Homo sapien
ctaaatgatcatgatcatcccatcc

SEQ ID NO: 1434449 - DNA, 25 bp, Homo sapien
gatcatgatcatcccatccctccct

SEQ ID NO: 1434450 - DNA, 25 bp, Homo sapien
aatgatcatgatcatcccatccctc

SEQ ID NO: 1434451 - DNA, 25 bp, Homo sapien
tcatgatcatcccatccctcccttt

SEQ ID NO: 1434452 - DNA, 25 bp, Homo sapien
ggcctgtggcatctgcacaaagttt

SEQ ID NO: 1434453 - DNA, 25 bp, Homo sapien
ggcatctgcacaaagttttacttac

SEQ ID NO: 1434454 - DNA, 25 bp, Homo sapien
tgtggcatctgcacaaagttttact

SEQ ID NO: 1434455 - DNA, 25 bp, Homo sapien
cctgtggcatctgcacaaagtttta

SEQ ID NO: 1434456 - DNA, 25 bp, Homo sapien
ccagcaggtcactcagacagtccct

SEQ ID NO: 1434457 - DNA, 25 bp, Homo sapien
gaaagttgaaccacctcttcattac

SEQ ID NO: 1434458 - DNA, 25 bp, Homo sapien
tcctcatctggagaaagttgaacca

SEQ ID NO: 1434459 - DNA, 25 bp, Homo sapien
ccaggatggaagagacgatgaatga

SEQ ID NO: 1434460 - DNA, 25 bp, Homo sapien
ccttctttaccacatagaggaccag

SEQ ID NO: 1434461 - DNA, 25 bp, Homo sapien
ttgagctttcagatcctcaaatgag

SEQ ID NO: 1434462 - DNA, 25 bp, Homo sapien
catagaggaccagccgtccaaggtc

SEQ ID NO: 1434463 - DNA, 25 bp, Homo sapien
tttaccacatagaggaccagccgtc

SEQ ID NO: 1434464 - DNA, 25 bp, Homo sapien
tcccattgtcatcttgaaagctctg

SEQ ID NO: 1434465 - DNA, 25 bp, Homo sapien
cgacccaagctgttgcaccttccca

SEQ ID NO: 1434466 - DNA, 25 bp, Homo sapien
gctgttgcaccttcccattgtcatc

SEQ ID NO: 1434467 - DNA, 25 bp, Homo sapien
ccaagctgttgcaccttcccattgt

SEQ ID NO: 1434468 - DNA, 25 bp, Homo sapien
gcccacttgatgctcttatcaaaat

SEQ ID NO: 1434469 - DNA, 25 bp, Homo sapien
gatgctcttatcaaaatctgccagg

SEQ ID NO: 1434470 - DNA, 25 bp, Homo sapien
cttgatgctcttatcaaaatctgcc

SEQ ID NO: 1434471 - DNA, 25 bp, Homo sapien
cacttgatgctcttatcaaaatctg

SEQ ID NO: 1434472 - DNA, 25 bp, Homo sapien
tatagatgacaggacatttcgggca

SEQ ID NO: 1434473 - DNA, 25 bp, Homo sapien
catcactatcgtcagagctcaggag

SEQ ID NO: 1434474 - DNA, 25 bp, Homo sapien
tcatagaaccccaggtagatgcctc

SEQ ID NO: 1434475 - DNA, 25 bp, Homo sapien
tactggctccacgtttgcacagcaa

SEQ ID NO: 1434476 - DNA, 25 bp, Homo sapien
tagggctttgaccttaccatacaca

SEQ ID NO: 1434477 - DNA, 25 bp, Homo sapien
agcgtccatgagagctgtggcccct

SEQ ID NO: 1434478 - DNA, 25 bp, Homo sapien
tactgcgttatgcagaggtgtccag

SEQ ID NO: 1434479 - DNA, 25 bp, Homo sapien
caatcgctgcgaggataaaaggcgt

SEQ ID NO: 1434480 - DNA, 25 bp, Homo sapien
cgttttgaacagctttaatcagcaa

SEQ ID NO: 1434481 - DNA, 25 bp, Homo sapien
ggaccaggtcaacatcttcgttttg

SEQ ID NO: 1434482 - DNA, 25 bp, Homo sapien
caccttccagcaattgctggaccag

SEQ ID NO: 1434483 - DNA, 25 bp, Homo sapien
gcagcccttctaccgctggaggacg

SEQ ID NO: 1434484 - DNA, 25 bp, Homo sapien
ggaacaatgttctcagtcttctgac

SEQ ID NO: 1434485 - DNA, 25 bp, Homo sapien
tgagtgtaaattgggattctctggc

SEQ ID NO: 1434486 - DNA, 25 bp, Homo sapien
tttatctcctagcacttaatcaaag

SEQ ID NO: 1434487 - DNA, 25 bp, Homo sapien
cttaatcaaagaagctttgagtgta

SEQ ID NO: 1434488 - DNA, 25 bp, Homo sapien
attcctttggcagccgcaaagcctg

SEQ ID NO: 1434489 - DNA, 25 bp, Homo sapien
tgctcaactcagacgtctcaattat

SEQ ID NO: 1434490 - DNA, 25 bp, Homo sapien
ggaagactgcttgcagcccgagcag

SEQ ID NO: 1434491 - DNA, 25 bp, Homo sapien
agactgcttgcagcccgagcagttt

SEQ ID NO: 1434492 - DNA, 25 bp, Homo sapien
ctcaattgggtggtgtcaggaagca

SEQ ID NO: 1434493 - DNA, 25 bp, Homo sapien
ttgttctcaattgggtggtgtcagg

SEQ ID NO: 1434494 - DNA, 25 bp, Homo sapien
aggtttgttctcaattgggtggtgt

SEQ ID NO: 1434495 - DNA, 25 bp, Homo sapien
gttctcaattgggtggtgtcaggaa

SEQ ID NO: 1434496 - DNA, 25 bp, Homo sapien
tctgccgcaggagttgccatcagga

SEQ ID NO: 1434497 - DNA, 25 bp, Homo sapien
cagtgttgattatcctgggccacaa

SEQ ID NO: 1434498 - DNA, 25 bp, Homo sapien
cacaggagtgttacgaggtacaagc

SEQ ID NO: 1434499 - DNA, 25 bp, Homo sapien
gcttgctggccttgacatgactgca

SEQ ID NO: 1434500 - DNA, 25 bp, Homo sapien
tcagctcgtgggtctcatggtcaat

SEQ ID NO: 1434501 - DNA, 25 bp, Homo sapien
gtggcagtctgcaggttcatcctcg

SEQ ID NO: 1434502 - DNA, 25 bp, Homo sapien
ccctgagccgcatcaaagcatgtgg

SEQ ID NO: 1434503 - DNA, 25 bp, Homo sapien
gtaagcaggcgacttcaggaagcgt

SEQ ID NO: 1434504 - DNA, 25 bp, Homo sapien
tgttctctacccagtcgctacagtg

SEQ ID NO: 1434505 - DNA, 25 bp, Homo sapien
tgctcatccgtgactgtgacaggca

SEQ ID NO: 1434506 - DNA, 25 bp, Homo sapien
ggctctggccattgcatttgctgct

SEQ ID NO: 1434507 - DNA, 25 bp, Homo sapien
gaatgtatacaaacgcaatcccctt

SEQ ID NO: 1434508 - DNA, 25 bp, Homo sapien
tgccatgcgtttagcggccaggaga

SEQ ID NO: 1434509 - DNA, 25 bp, Homo sapien
ccaggtggcgctgtgttctttagca

SEQ ID NO: 1434510 - DNA, 25 bp, Homo sapien
gcattactcttatctttccaccagg

SEQ ID NO: 1434511 - DNA, 25 bp, Homo sapien
tgtggaatcaatcagcggtcagaaa

SEQ ID NO: 1434512 - DNA, 25 bp, Homo sapien
aggagcaggcagggtcgtgaggatt

SEQ ID NO: 1434513 - DNA, 25 bp, Homo sapien
aaggagcaggcagggtcgtgaggat

SEQ ID NO: 1434514 - DNA, 25 bp, Homo sapien
ggagcaggcagggtcgtgaggattc

SEQ ID NO: 1434515 - DNA, 25 bp, Homo sapien
cagcttggtagctgatcggatcttc

SEQ ID NO: 1434516 - DNA, 25 bp, Homo sapien
tttaggggcctcactgcaaatgaac

SEQ ID NO: 1434517 - DNA, 25 bp, Homo sapien
ctcaaagatctggtgtgccctggag

SEQ ID NO: 1434518 - DNA, 25 bp, Homo sapien
tcaggaaagcgtggaaggcagccac

SEQ ID NO: 1434519 - DNA, 25 bp, Homo sapien
tgcgggaaagaagaggaaataggtc

SEQ ID NO: 1434520 - DNA, 25 bp, Homo sapien
gcgggaaagaagaggaaataggtca

SEQ ID NO: 1434521 - DNA, 25 bp, Homo sapien
cgggaaagaagaggaaataggtcag

SEQ ID NO: 1434522 - DNA, 25 bp, Homo sapien
aggaaagcaattgcaattaatggct

SEQ ID NO: 1434523 - DNA, 25 bp, Homo sapien
aagaaaggaaagcaattgcaattaa

SEQ ID NO: 1434524 - DNA, 25 bp, Homo sapien
gggacagcagggaatacaagaagaa

SEQ ID NO: 1434525 - DNA, 25 bp, Homo sapien
ggagggacagcagggaatacaagaa

SEQ ID NO: 1434526 - DNA, 25 bp, Homo sapien
ttcttgaacaatgacctgcctttat

SEQ ID NO: 1434527 - DNA, 25 bp, Homo sapien
ttgaatagaggctggcacactaggg

SEQ ID NO: 1434528 - DNA, 25 bp, Homo sapien
caatgacctgcctttatatgttgaa

SEQ ID NO: 1434529 - DNA, 25 bp, Homo sapien
ctttatatgttgaatagaggctggc

SEQ ID NO: 1434530 - DNA, 25 bp, Homo sapien
gcagcaggtcgaacgactctctcca

SEQ ID NO: 1434531 - DNA, 25 bp, Homo sapien
agcaggtcgaacgactctctccacc

SEQ ID NO: 1434532 - DNA, 25 bp, Homo sapien
aattcagcaaccagaaatcaaagcc

SEQ ID NO: 1434533 - DNA, 25 bp, Homo sapien
cagggactctttagtcctcagtcaa

SEQ ID NO: 1434534 - DNA, 25 bp, Homo sapien
agtcaatatctctaagcctgtctcg

SEQ ID NO: 1434535 - DNA, 25 bp, Homo sapien
tggacttagggtaagcagtagtgct

SEQ ID NO: 1434536 - DNA, 25 bp, Homo sapien
ttactgccccactcgaacttgccag

SEQ ID NO: 1434537 - DNA, 25 bp, Homo sapien
agtactcccagtatcgcagcccagc

SEQ ID NO: 1434538 - DNA, 25 bp, Homo sapien
gatccccagacgtgtcttgaactct

SEQ ID NO: 1434539 - DNA, 25 bp, Homo sapien
gtgaagaaagatccccagacgtgtc

SEQ ID NO: 1434540 - DNA, 25 bp, Homo sapien
ctctccaggcaggtggtggggaagg

SEQ ID NO: 1434541 - DNA, 25 bp, Homo sapien
ggaaggcggccagggtgcggcacat

SEQ ID NO: 1434542 - DNA, 25 bp, Homo sapien
ggggaaggcggccagggtgcggcac

SEQ ID NO: 1434543 - DNA, 25 bp, Homo sapien
gtggggaaggcggccagggtgcggc

SEQ ID NO: 1434544 - DNA, 25 bp, Homo sapien
gtttagcagcctgcaagcgcccaga

SEQ ID NO: 1434545 - DNA, 25 bp, Homo sapien
tagcaggtgctagtcaactgcggtt

SEQ ID NO: 1434546 - DNA, 25 bp, Homo sapien
ccaggaagcaaaggcgcggtagcag

SEQ ID NO: 1434547 - DNA, 25 bp, Homo sapien
cagggcagcacgtagtaggcaggat

SEQ ID NO: 1434548 - DNA, 25 bp, Homo sapien
tctagtaacagcaggaaagtcacgc

SEQ ID NO: 1434549 - DNA, 25 bp, Homo sapien
tacgaggctcttaccatgatggaca

SEQ ID NO: 1434550 - DNA, 25 bp, Homo sapien
cagggctttctttgatcgcaggcaa

SEQ ID NO: 1434551 - DNA, 25 bp, Homo sapien
ctgggcactgctgaccaatcggagg

SEQ ID NO: 1434552 - DNA, 25 bp, Homo sapien
tcttcttttgctcatggaaaagcct

SEQ ID NO: 1434553 - DNA, 25 bp, Homo sapien
ctgtgttcccctgccacactttcca

SEQ ID NO: 1434554 - DNA, 25 bp, Homo sapien
agcccatgctgtcccatcttctttt

SEQ ID NO: 1434555 - DNA, 25 bp, Homo sapien
gctcatggaaaagcctggttcccac

SEQ ID NO: 1434556 - DNA, 25 bp, Homo sapien
tataacccgatagtctacctccctc

SEQ ID NO: 1434557 - DNA, 25 bp, Homo sapien
tgactgtaaggtccacttcacccca

SEQ ID NO: 1434558 - DNA, 25 bp, Homo sapien
ctccaggctcccgaactttccctgc

SEQ ID NO: 1434559 - DNA, 25 bp, Homo sapien
ctgcctgactgtaaggtccacttca

SEQ ID NO: 1434560 - DNA, 25 bp, Homo sapien
tctcctaggtattccagagcagcat

SEQ ID NO: 1434561 - DNA, 25 bp, Homo sapien
cctaggtattccagagcagcatgta

SEQ ID NO: 1434562 - DNA, 25 bp, Homo sapien
cctctcctaggtattccagagcagc

SEQ ID NO: 1434563 - DNA, 25 bp, Homo sapien
tcctaggtattccagagcagcatgt

SEQ ID NO: 1434564 - DNA, 25 bp, Homo sapien
cgtgcctgccagggaaaagcagtca

SEQ ID NO: 1434565 - DNA, 25 bp, Homo sapien
gtgcctgccagggaaaagcagtcac

SEQ ID NO: 1434566 - DNA, 25 bp, Homo sapien
gcgcgagatgccctgctccgaagct

SEQ ID NO: 1434567 - DNA, 25 bp, Homo sapien
aagctcttgtgagctccgcggcctg

SEQ ID NO: 1434568 - DNA, 25 bp, Homo sapien
acgcggcgttttggtcggctgccca

SEQ ID NO: 1434569 - DNA, 25 bp, Homo sapien
ctgcggctccggaaggcgaagctct

SEQ ID NO: 1434570 - DNA, 25 bp, Homo sapien
cgtgggcggcataaagtgctccgaa

SEQ ID NO: 1434571 - DNA, 25 bp, Homo sapien
tgttatagaacaaaacgtgggcggc

SEQ ID NO: 1434572 - DNA, 25 bp, Homo sapien
gatcaccttgaagactgggcccttg

SEQ ID NO: 1434573 - DNA, 25 bp, Homo sapien
caggactcagtggtttcggagaaac

SEQ ID NO: 1434574 - DNA, 25 bp, Homo sapien
tctaaaccactttgatgaggaccaa

SEQ ID NO: 1434575 - DNA, 25 bp, Homo sapien
catggtgacgacagcagacgaggtc

SEQ ID NO: 1434576 - DNA, 25 bp, Homo sapien
gacgaggtccctcaagtagcttgca

SEQ ID NO: 1434577 - DNA, 25 bp, Homo sapien
gaggaccaaacaggtgctactgctg

SEQ ID NO: 1434578 - DNA, 25 bp, Homo sapien
tctctagcttctcgctgagtccgca

SEQ ID NO: 1434579 - DNA, 25 bp, Homo sapien
agtgctgtctatggaccccttgccc

SEQ ID NO: 1434580 - DNA, 25 bp, Homo sapien
gtttctgctgagatagccaatccct

SEQ ID NO: 1434581 - DNA, 25 bp, Homo sapien
tctgctgctcggttatttctcttgg

SEQ ID NO: 1434582 - DNA, 25 bp, Homo sapien
cctgttcccacaactctgtaacata

SEQ ID NO: 1434583 - DNA, 25 bp, Homo sapien
tctgtaacataggacagggaagatt

SEQ ID NO: 1434584 - DNA, 25 bp, Homo sapien
caactctgtaacataggacagggaa

SEQ ID NO: 1434585 - DNA, 25 bp, Homo sapien
cccacaactctgtaacataggacag

SEQ ID NO: 1434586 - DNA, 25 bp, Homo sapien
gctgctcccttgacagagcaagttt

SEQ ID NO: 1434587 - DNA, 25 bp, Homo sapien
tcctacactcctgctcagaaaaggg

SEQ ID NO: 1434588 - DNA, 25 bp, Homo sapien
tccagccctgtattctagggatcag

SEQ ID NO: 1434589 - DNA, 25 bp, Homo sapien
cagaaaagggcttagcctggactgg

SEQ ID NO: 1434590 - DNA, 25 bp, Homo sapien
cgggctttgcagcatgtcttttagc

SEQ ID NO: 1434591 - DNA, 25 bp, Homo sapien
cttgggcggataattggctagtcca

SEQ ID NO: 1434592 - DNA, 25 bp, Homo sapien
cctggaaacgaacagcttgggcgga

SEQ ID NO: 1434593 - DNA, 25 bp, Homo sapien
tagtccaatttccagcgggctttgc

SEQ ID NO: 1434594 - DNA, 25 bp, Homo sapien
ccagcttctccaggagctcagattt

SEQ ID NO: 1434595 - DNA, 25 bp, Homo sapien
ttcccaccaggcctccagcttctcc

SEQ ID NO: 1434596 - DNA, 25 bp, Homo sapien
ctccagcttctccaggagctcagat

SEQ ID NO: 1434597 - DNA, 25 bp, Homo sapien
gcctccagcttctccaggagctcag

SEQ ID NO: 1434598 - DNA, 25 bp, Homo sapien
cttttccatacctggcagagggaag

SEQ ID NO: 1434599 - DNA, 25 bp, Homo sapien
aatctgttgtgtgctcgccgcgtga

SEQ ID NO: 1434600 - DNA, 25 bp, Homo sapien
tccatcagccaagcggtttatatgg

SEQ ID NO: 1434601 - DNA, 25 bp, Homo sapien
gacatgattccactttacacgataa

SEQ ID NO: 1434602 - DNA, 25 bp, Homo sapien
ttattgaaaggacccagagcccaac

SEQ ID NO: 1434603 - DNA, 25 bp, Homo sapien
tccaccatctcatgccgagtggcat

SEQ ID NO: 1434604 - DNA, 25 bp, Homo sapien
tcagtgccagggagactttgccacc

SEQ ID NO: 1434605 - DNA, 25 bp, Homo sapien
ctgaaatctctcatcttggtccaca

SEQ ID NO: 1434606 - DNA, 25 bp, Homo sapien
gccagtggccccatcctgaaatctc

SEQ ID NO: 1434607 - DNA, 25 bp, Homo sapien
ccttgcatggaagtgggtgcagaca

SEQ ID NO: 1434608 - DNA, 25 bp, Homo sapien
tgatccacggagaagtagacaccat

SEQ ID NO: 1434609 - DNA, 25 bp, Homo sapien
aactctggacatccttgttgctggg

SEQ ID NO: 1434610 - DNA, 25 bp, Homo sapien
gatggaaaactgtgatgcctctgcc

SEQ ID NO: 1434611 - DNA, 25 bp, Homo sapien
ttcagtcttccccattttgccctca

SEQ ID NO: 1434612 - DNA, 25 bp, Homo sapien
gcacagttaagttcacggctttccc

SEQ ID NO: 1434613 - DNA, 25 bp, Homo sapien
ttaagttcacggctttccctcacag

SEQ ID NO: 1434614 - DNA, 25 bp, Homo sapien
gttcacggctttccctcacagcaga

SEQ ID NO: 1434615 - DNA, 25 bp, Homo sapien
gcagagcgtctttcgatcaagggtc

SEQ ID NO: 1434616 - DNA, 25 bp, Homo sapien
tcacgtggccttgggtacagagaca

SEQ ID NO: 1434617 - DNA, 25 bp, Homo sapien
gaaagtcagacgcagagggcataga

SEQ ID NO: 1434618 - DNA, 25 bp, Homo sapien
gactcagaaagcatggcagagcgtc

SEQ ID NO: 1434619 - DNA, 25 bp, Homo sapien
gatcagcatctctgggtgtgcacct

SEQ ID NO: 1434620 - DNA, 25 bp, Homo sapien
tgggaattagcacgtgtcacaggct

SEQ ID NO: 1434621 - DNA, 25 bp, Homo sapien
cagctctgcctagacttgcctggac

SEQ ID NO: 1434622 - DNA, 25 bp, Homo sapien
gccaagggcaatgacgaatctcaca

SEQ ID NO: 1434623 - DNA, 25 bp, Homo sapien
aaggttgtccacgtccagatgttca

SEQ ID NO: 1434624 - DNA, 25 bp, Homo sapien
taactaggaacacccatttgaggct

SEQ ID NO: 1434625 - DNA, 25 bp, Homo sapien
tattaggcaccatgggagcactcca

SEQ ID NO: 1434626 - DNA, 25 bp, Homo sapien
tattcgacagtagagttggcagcag

SEQ ID NO: 1434627 - DNA, 25 bp, Homo sapien
tacaaatcacagagttgagcccaag

SEQ ID NO: 1434628 - DNA, 25 bp, Homo sapien
aagctgtgagatcccagtgagcaga

SEQ ID NO: 1434629 - DNA, 25 bp, Homo sapien
tggaatagagtccaagctccggcag

SEQ ID NO: 1434630 - DNA, 25 bp, Homo sapien
tcctcccagggatttacaacaagtg

SEQ ID NO: 1434631 - DNA, 25 bp, Homo sapien
ctaactgagcctcctctggctttgg

SEQ ID NO: 1434632 - DNA, 25 bp, Homo sapien
taactgagcctcctctggctttggg

SEQ ID NO: 1434633 - DNA, 25 bp, Homo sapien
ctctggctttgggacagcagatcta

SEQ ID NO: 1434634 - DNA, 25 bp, Homo sapien
tggctttgggacagcagatctaagt

SEQ ID NO: 1434635 - DNA, 25 bp, Homo sapien
agtctttctccatgaggctgtgtac

SEQ ID NO: 1434636 - DNA, 25 bp, Homo sapien
gggtaagagtctttctccatgaggc

SEQ ID NO: 1434637 - DNA, 25 bp, Homo sapien
agagtctttctccatgaggctgtgt

SEQ ID NO: 1434638 - DNA, 25 bp, Homo sapien
ctggggtaagagtctttctccatga

SEQ ID NO: 1434639 - DNA, 25 bp, Homo sapien
tctcgggtctggaagtcaatgttta

SEQ ID NO: 1434640 - DNA, 25 bp, Homo sapien
tgcaggttcttcctcgtggcttctc

SEQ ID NO: 1434641 - DNA, 25 bp, Homo sapien
ttttccttgggcttggtcaaagcaa

SEQ ID NO: 1434642 - DNA, 25 bp, Homo sapien
tcttcctcgtggcttctcgggtctg

SEQ ID NO: 1434643 - DNA, 25 bp, Homo sapien
cccgtggagcctgcacatccacaaa

SEQ ID NO: 1434644 - DNA, 25 bp, Homo sapien
ctcccgtggagcctgcacatccaca

SEQ ID NO: 1434645 - DNA, 25 bp, Homo sapien
tcccgtggagcctgcacatccacaa

SEQ ID NO: 1434646 - DNA, 25 bp, Homo sapien
ccgtggagcctgcacatccacaaac

SEQ ID NO: 1434647 - DNA, 25 bp, Homo sapien
tcactgaactccgtcttcaagaagg

SEQ ID NO: 1434648 - DNA, 25 bp, Homo sapien
ttcaagaaggcacggaatgcagcca

SEQ ID NO: 1434649 - DNA, 25 bp, Homo sapien
tgcagttgacctggtcttcttgaac

SEQ ID NO: 1434650 - DNA, 25 bp, Homo sapien
caaagatcctatgggccttagagac

SEQ ID NO: 1434651 - DNA, 25 bp, Homo sapien
tggccagggtcatttgatggattgc

SEQ ID NO: 1434652 - DNA, 25 bp, Homo sapien
actatccaccaggaccgtgcactgg

SEQ ID NO: 1434653 - DNA, 25 bp, Homo sapien
ctgggcatctgacgtccaccactat

SEQ ID NO: 1434654 - DNA, 25 bp, Homo sapien
tgggcatctgacgtccaccactatc

SEQ ID NO: 1434655 - DNA, 25 bp, Homo sapien
ctgagggtccgtaggccagaggttc

SEQ ID NO: 1434656 - DNA, 25 bp, Homo sapien
tgagggtccgtaggccagaggttcc

SEQ ID NO: 1434657 - DNA, 25 bp, Homo sapien
atagcatcaggatcacagctcttct

SEQ ID NO: 1434658 - DNA, 25 bp, Homo sapien
catcaggatcacagctcttcttttg

SEQ ID NO: 1434659 - DNA, 25 bp, Homo sapien
tagtgatgccaaaacttctttgatc

SEQ ID NO: 1434660 - DNA, 25 bp, Homo sapien
atagtgatgccaaaacttctttgat

SEQ ID NO: 1434661 - DNA, 25 bp, Homo sapien
ctaccagtgactcctgaataaagac

SEQ ID NO: 1434662 - DNA, 25 bp, Homo sapien
aaagcttgaaattctaccagtgact

SEQ ID NO: 1434663 - DNA, 25 bp, Homo sapien
gaagacattcactccactggctttt

SEQ ID NO: 1434664 - DNA, 25 bp, Homo sapien
gaccctttcttttcgaagacattca

SEQ ID NO: 1434665 - DNA, 25 bp, Homo sapien
cgtagcttcttctgtcgataatctc

SEQ ID NO: 1434666 - DNA, 25 bp, Homo sapien
ccacctcgtagcttcttctgtcgat

SEQ ID NO: 1434667 - DNA, 25 bp, Homo sapien
acctcgtagcttcttctgtcgataa

SEQ ID NO: 1434668 - DNA, 25 bp, Homo sapien
tctgcccacctcgtagcttcttctg

SEQ ID NO: 1434669 - DNA, 25 bp, Homo sapien
agtctgacttgtgagacaggcatcc

SEQ ID NO: 1434670 - DNA, 25 bp, Homo sapien
caggcatcccagtcgagtcctcatc

SEQ ID NO: 1434671 - DNA, 25 bp, Homo sapien
gagcgcggttgggtttgtctggaag

SEQ ID NO: 1434672 - DNA, 25 bp, Homo sapien
tgtgaaatcactacacgagtctgac

SEQ ID NO: 1434673 - DNA, 25 bp, Homo sapien
ggtcctgcttgcaaggccacaactt

SEQ ID NO: 1434674 - DNA, 25 bp, Homo sapien
gaaccgtgcagttcacacaggaggc

SEQ ID NO: 1434675 - DNA, 25 bp, Homo sapien
acaactttgcaagaggcatacagac

SEQ ID NO: 1434676 - DNA, 25 bp, Homo sapien
caatgggagggcttcagctaaggca

SEQ ID NO: 1434677 - DNA, 25 bp, Homo sapien
ctgcgtggcatcagtaaggccgcca

SEQ ID NO: 1434678 - DNA, 25 bp, Homo sapien
tgcgtggcatcagtaaggccgccat

SEQ ID NO: 1434679 - DNA, 25 bp, Homo sapien
cagcttacggttaacccttgggctg

SEQ ID NO: 1434680 - DNA, 25 bp, Homo sapien
tgcagggacgtcagggcaggaaata

SEQ ID NO: 1434681 - DNA, 25 bp, Homo sapien
aggaatttacccttgcacgtcctct

SEQ ID NO: 1434682 - DNA, 25 bp, Homo sapien
ctgcggggctcaggaatttaccctt

SEQ ID NO: 1434683 - DNA, 25 bp, Homo sapien
cagaccctccactacccatttgatg

SEQ ID NO: 1434684 - DNA, 25 bp, Homo sapien
gtccccgccttgtctctcttcccat

SEQ ID NO: 1434685 - DNA, 25 bp, Homo sapien
ttcccattccactgccagcccacac

SEQ ID NO: 1434686 - DNA, 25 bp, Homo sapien
aatccagcgctgcccaaattgctgc

SEQ ID NO: 1434687 - DNA, 25 bp, Homo sapien
gtcctcatggcctgagggtctttgc

SEQ ID NO: 1434688 - DNA, 25 bp, Homo sapien
gtctttggccagtcctcatggcctg

SEQ ID NO: 1434689 - DNA, 25 bp, Homo sapien
tcctcatggcctgagggtctttgcc

SEQ ID NO: 1434690 - DNA, 25 bp, Homo sapien
tgtctttggccagtcctcatggcct

SEQ ID NO: 1434691 - DNA, 25 bp, Homo sapien
aaaaagtagatctttcttttagcag

SEQ ID NO: 1434692 - DNA, 25 bp, Homo sapien
tgcatgaacacataggggcacacac

SEQ ID NO: 1434693 - DNA, 25 bp, Homo sapien
aatcctcggcgagtgaagggcatgt

SEQ ID NO: 1434694 - DNA, 25 bp, Homo sapien
agcagtcaaatcctcggcgagtgaa

SEQ ID NO: 1434695 - DNA, 25 bp, Homo sapien
tgcttgccctagtgtagtggttctc

SEQ ID NO: 1434696 - DNA, 25 bp, Homo sapien
ctgcctgcttcagttccagaaggag

SEQ ID NO: 1434697 - DNA, 25 bp, Homo sapien
acactgcctgcttcagttccagaag

SEQ ID NO: 1434698 - DNA, 25 bp, Homo sapien
ttcctgcttgccctagtgtagtggt

SEQ ID NO: 1434699 - DNA, 25 bp, Homo sapien
ggcatggttcggtgaggccctgagt

SEQ ID NO: 1434700 - DNA, 25 bp, Homo sapien
caggctctgcatctcatgaaaaggg

SEQ ID NO: 1434701 - DNA, 25 bp, Homo sapien
aatagcggctgcaacatgctgctcc

SEQ ID NO: 1434702 - DNA, 25 bp, Homo sapien
cagcgcccctagaatagcggctgca

SEQ ID NO: 1434703 - DNA, 25 bp, Homo sapien
aaaagggaaagagcgagtgagcggc

SEQ ID NO: 1434704 - DNA, 25 bp, Homo sapien
caacattgtcactatcagcaccatc

SEQ ID NO: 1434705 - DNA, 25 bp, Homo sapien
atcagaggcactcacaccacacgtg

SEQ ID NO: 1434706 - DNA, 25 bp, Homo sapien
agggccaacattgtcactatcagca

SEQ ID NO: 1434707 - DNA, 25 bp, Homo sapien
ccagggccaacattgtcactatcag

SEQ ID NO: 1434708 - DNA, 25 bp, Homo sapien
gacggaggccacttgatattataac

SEQ ID NO: 1434709 - DNA, 25 bp, Homo sapien
gatacttttccaggtgtattatgga

SEQ ID NO: 1434710 - DNA, 25 bp, Homo sapien
ctgttgcatataatggacggaggcc

SEQ ID NO: 1434711 - DNA, 25 bp, Homo sapien
aaaaattagagccaaaactgttgca

SEQ ID NO: 1434712 - DNA, 25 bp, Homo sapien
gtccccatttgaggactgcagggct

SEQ ID NO: 1434713 - DNA, 25 bp, Homo sapien
taatccactagtggactgtccccat

SEQ ID NO: 1434714 - DNA, 25 bp, Homo sapien
ggatttaatccactagtggactgtc

SEQ ID NO: 1434715 - DNA, 25 bp, Homo sapien
ctgcagggctaaagttagtactgac

SEQ ID NO: 1434716 - DNA, 25 bp, Homo sapien
tgaacacgacaaccacaagggggaa

SEQ ID NO: 1434717 - DNA, 25 bp, Homo sapien
ttgcagtttcttccccagagttggg

SEQ ID NO: 1434718 - DNA, 25 bp, Homo sapien
aatgggccggagttcctctccgttg

SEQ ID NO: 1434719 - DNA, 25 bp, Homo sapien
ttgctgcaagctggttgcctgccag

SEQ ID NO: 1434720 - DNA, 25 bp, Homo sapien
tgttcatcagggacccacggacaat

SEQ ID NO: 1434721 - DNA, 25 bp, Homo sapien
cagggacccacggacaatgtcagtg

SEQ ID NO: 1434722 - DNA, 25 bp, Homo sapien
gacccacggacaatgtcagtgtgtt

SEQ ID NO: 1434723 - DNA, 25 bp, Homo sapien
tcttgtttgttcatcagggacccac

SEQ ID NO: 1434724 - DNA, 25 bp, Homo sapien
tcagatctaaaatgtcgagaaaaaa

SEQ ID NO: 1434725 - DNA, 25 bp, Homo sapien
ctaaaatgtcgagaaaaaagttgtg

SEQ ID NO: 1434726 - DNA, 25 bp, Homo sapien
aggctcacagtcattagaccagaaa

SEQ ID NO: 1434727 - DNA, 25 bp, Homo sapien
cagtcattagaccagaaagtccatt

SEQ ID NO: 1434728 - DNA, 25 bp, Homo sapien
ggtgggcagaagaataatccaatct

SEQ ID NO: 1434729 - DNA, 25 bp, Homo sapien
taatccaatctcattgtttccattc

SEQ ID NO: 1434730 - DNA, 25 bp, Homo sapien
tagtgacttcctggtaaccgatcat

SEQ ID NO: 1434731 - DNA, 25 bp, Homo sapien
gtttccattctctctagtgacttcc

SEQ ID NO: 1434732 - DNA, 25 bp, Homo sapien
tgggctctcggacccttggatgcat

SEQ ID NO: 1434733 - DNA, 25 bp, Homo sapien
ccttgcttagtgttctgggctctcg

SEQ ID NO: 1434734 - DNA, 25 bp, Homo sapien
gagctgtcccttgcttagtgttctg

SEQ ID NO: 1434735 - DNA, 25 bp, Homo sapien
tgttctgggctctcggacccttgga

SEQ ID NO: 1434736 - DNA, 25 bp, Homo sapien
cttatgctgatcaattttagaaaac

SEQ ID NO: 1434737 - DNA, 25 bp, Homo sapien
aaaagtagaaaagactgtgcaaggg

SEQ ID NO: 1434738 - DNA, 25 bp, Homo sapien
tgcacctccatttcatgcagattct

SEQ ID NO: 1434739 - DNA, 25 bp, Homo sapien
gaaaacagcacttatggaagttgag

SEQ ID NO: 1434740 - DNA, 25 bp, Homo sapien
tctgagctactgcatttaggcaggc

SEQ ID NO: 1434741 - DNA, 25 bp, Homo sapien
taggagctctcattatctcggtctc

SEQ ID NO: 1434742 - DNA, 25 bp, Homo sapien
ggctgctcagtctaactctagaatg

SEQ ID NO: 1434743 - DNA, 25 bp, Homo sapien
taaagggcggctttctcataacaaa

SEQ ID NO: 1434744 - DNA, 25 bp, Homo sapien
cacttagcagtagggttttcaggag

SEQ ID NO: 1434745 - DNA, 25 bp, Homo sapien
tgccactcatcagaggtacttaaga

SEQ ID NO: 1434746 - DNA, 25 bp, Homo sapien
gatagaagaatattccaccaaagag

SEQ ID NO: 1434747 - DNA, 25 bp, Homo sapien
aatcagcagaccctttcagggtagg

SEQ ID NO: 1434748 - DNA, 25 bp, Homo sapien
gtttgagaactggtatgagttcttc

SEQ ID NO: 1434749 - DNA, 25 bp, Homo sapien
tctgtggtatcggtttaatgtcttc

SEQ ID NO: 1434750 - DNA, 25 bp, Homo sapien
ttactcatagttggtcttttcaggt

SEQ ID NO: 1434751 - DNA, 25 bp, Homo sapien
atgggagactctatattactgattt

SEQ ID NO: 1434752 - DNA, 25 bp, Homo sapien
gattagtctggattccctggaacaa

SEQ ID NO: 1434753 - DNA, 25 bp, Homo sapien
catgggacgcactggagtttcaaaa

SEQ ID NO: 1434754 - DNA, 25 bp, Homo sapien
caatcccagctggaaatgttttgta

SEQ ID NO: 1434755 - DNA, 25 bp, Homo sapien
gagtgatcactatcagctagaagga

SEQ ID NO: 1434756 - DNA, 25 bp, Homo sapien
catgccaggtattgaactaagccgc

SEQ ID NO: 1434757 - DNA, 25 bp, Homo sapien
aactccctaacatgcgcaaaagcgg

SEQ ID NO: 1434758 - DNA, 25 bp, Homo sapien
tgaatcaatccggtaactacgccca

SEQ ID NO: 1434759 - DNA, 25 bp, Homo sapien
gcatcagaatgctacaggccgtcaa

SEQ ID NO: 1434760 - DNA, 25 bp, Homo sapien
cgccctggcacgcgctctgcgcatg

SEQ ID NO: 1434761 - DNA, 25 bp, Homo sapien
gccgattcctccatgcgagttgctg

SEQ ID NO: 1434762 - DNA, 25 bp, Homo sapien
aagggagagacgttccggctaccat

SEQ ID NO: 1434763 - DNA, 25 bp, Homo sapien
tctctgttgtctcggtagaaggcca

SEQ ID NO: 1434764 - DNA, 25 bp, Homo sapien
gagtcacacacggtcctaagagctg

SEQ ID NO: 1434765 - DNA, 25 bp, Homo sapien
tatagaggagtttcccgaggtggct

SEQ ID NO: 1434766 - DNA, 25 bp, Homo sapien
caagatggcccgatacgacaatgga

SEQ ID NO: 1434767 - DNA, 25 bp, Homo sapien
atggtccacgtcctcccaagatggc

SEQ ID NO: 1434768 - DNA, 25 bp, Homo sapien
tggtggcagcgccaactcctttcgg

SEQ ID NO: 1434769 - DNA, 25 bp, Homo sapien
aggaggtggcggctattaaaacttg

SEQ ID NO: 1434770 - DNA, 25 bp, Homo sapien
aaaaaggcatgctatgtgttacgtg

SEQ ID NO: 1434771 - DNA, 25 bp, Homo sapien
tatggaactggctactttggacagg

SEQ ID NO: 1434772 - DNA, 25 bp, Homo sapien
tcagttcctgtgtgtagacagtaag

SEQ ID NO: 1434773 - DNA, 25 bp, Homo sapien
aaactttaacatcaattcagacgct

SEQ ID NO: 1434774 - DNA, 25 bp, Homo sapien
taattaagctttgaattgaaactac

SEQ ID NO: 1434775 - DNA, 25 bp, Homo sapien
ttctgctacgataaaaaactgttcc

SEQ ID NO: 1434776 - DNA, 25 bp, Homo sapien
tcttcaatttgggtgctggaagaac

SEQ ID NO: 1434777 - DNA, 25 bp, Homo sapien
ggttgaagaatgcttactccatagc

SEQ ID NO: 1434778 - DNA, 25 bp, Homo sapien
tttgttgagagcttcttctgctacg

SEQ ID NO: 1434779 - DNA, 25 bp, Homo sapien
tcatattaactccacctaaggtgct

SEQ ID NO: 1434780 - DNA, 25 bp, Homo sapien
tccacctaaggtgctttttgaactg

SEQ ID NO: 1434781 - DNA, 25 bp, Homo sapien
ttttgaactgttactggttctgagg

SEQ ID NO: 1434782 - DNA, 25 bp, Homo sapien
aaggtgctttttgaactgttactgg

SEQ ID NO: 1434783 - DNA, 25 bp, Homo sapien
tagctatgcttccaggatacagttc

SEQ ID NO: 1434784 - DNA, 25 bp, Homo sapien
caaaatagctatgcttccaggatac

SEQ ID NO: 1434785 - DNA, 25 bp, Homo sapien
ttccaaaatagctatgcttccagga

SEQ ID NO: 1434786 - DNA, 25 bp, Homo sapien
aaatagctatgcttccaggatacag

SEQ ID NO: 1434787 - DNA, 25 bp, Homo sapien
tgcagttttctagagtcatgtgacc

SEQ ID NO: 1434788 - DNA, 25 bp, Homo sapien
caaccgtcccttgttgtatcaaaga

SEQ ID NO: 1434789 - DNA, 25 bp, Homo sapien
tgtctgtaattgtcaaagcagcccc

SEQ ID NO: 1434790 - DNA, 25 bp, Homo sapien
caaagatagatgcattagtttcaca

SEQ ID NO: 1434791 - DNA, 25 bp, Homo sapien
ctgtcacgagaaggttcagaagtaa

SEQ ID NO: 1434792 - DNA, 25 bp, Homo sapien
gtcacgagaaggttcagaagtaatc

SEQ ID NO: 1434793 - DNA, 25 bp, Homo sapien
tcacgagaaggttcagaagtaatca

SEQ ID NO: 1434794 - DNA, 25 bp, Homo sapien
cacgagaaggttcagaagtaatcat

SEQ ID NO: 1434795 - DNA, 25 bp, Homo sapien
tctgtcaacaaagcaagatttgcag

SEQ ID NO: 1434796 - DNA, 25 bp, Homo sapien
tccactataacaattatccaaagcc

SEQ ID NO: 1434797 - DNA, 25 bp, Homo sapien
caaatcaccatgctgttggagaagt

SEQ ID NO: 1434798 - DNA, 25 bp, Homo sapien
tactgtatctccactataacaatta

SEQ ID NO: 1434799 - DNA, 25 bp, Homo sapien
ctacgcctcagaattcttggaaaga

SEQ ID NO: 1434800 - DNA, 25 bp, Homo sapien
tttgctacaatatgtgttatagtct

SEQ ID NO: 1434801 - DNA, 25 bp, Homo sapien
tttcctttcctacgcctcagaattc

SEQ ID NO: 1434802 - DNA, 25 bp, Homo sapien
catttcagtagtcatcatttttgct

SEQ ID NO: 1434803 - DNA, 25 bp, Homo sapien
ggcacaatctcagcggcacgatctc

SEQ ID NO: 1434804 - DNA, 25 bp, Homo sapien
tgtcatggcttgacaggtctttttc

SEQ ID NO: 1434805 - DNA, 25 bp, Homo sapien
tgggtgtcccaacattccttgtctg

SEQ ID NO: 1434806 - DNA, 25 bp, Homo sapien
ctcatgtgggtaattatcaaggaac

SEQ ID NO: 1434807 - DNA, 25 bp, Homo sapien
taggtatgtaatggcatctcactgc

SEQ ID NO: 1434808 - DNA, 25 bp, Homo sapien
tcttcttcggtaaggtgtctattca

SEQ ID NO: 1434809 - DNA, 25 bp, Homo sapien
gattgcaactgctgagtcctatggt

SEQ ID NO: 1434810 - DNA, 25 bp, Homo sapien
gaaactgccgaacagtgctctaaag

SEQ ID NO: 1434811 - DNA, 25 bp, Homo sapien
ttaaaacgttgtgcgataggaccag

SEQ ID NO: 1434812 - DNA, 25 bp, Homo sapien
taggaccaggtattgttccatcctg

SEQ ID NO: 1434813 - DNA, 25 bp, Homo sapien
cggaggcgtaaatcttcccacattt

SEQ ID NO: 1434814 - DNA, 25 bp, Homo sapien
tactcaatgagctcgacacgtttgt

SEQ ID NO: 1434815 - DNA, 25 bp, Homo sapien
taatgtgcggtataagtttataaac

SEQ ID NO: 1434816 - DNA, 25 bp, Homo sapien
ttctaatgtgcggtataagtttata

SEQ ID NO: 1434817 - DNA, 25 bp, Homo sapien
attttttctaatgtgcggtataagt

SEQ ID NO: 1434818 - DNA, 25 bp, Homo sapien
tattttttctaatgtgcggtataag

SEQ ID NO: 1434819 - DNA, 25 bp, Homo sapien
ttcatcatcccagtctctccaaaga

SEQ ID NO: 1434820 - DNA, 25 bp, Homo sapien
tctttcttcaataagtgcagtataa

SEQ ID NO: 1434821 - DNA, 25 bp, Homo sapien
taagtgcagtataattctcacaact

SEQ ID NO: 1434822 - DNA, 25 bp, Homo sapien
atcccagtctctccaaagaaagtca

SEQ ID NO: 1434823 - DNA, 25 bp, Homo sapien
cctcaacaggatacacttccaaaag

SEQ ID NO: 1434824 - DNA, 25 bp, Homo sapien
ggcacactgtgttccagttcctcca

SEQ ID NO: 1434825 - DNA, 25 bp, Homo sapien
gtatatcagtatcttgtccctcaac

SEQ ID NO: 1434826 - DNA, 25 bp, Homo sapien
aatctcttggaatatttgcaatgtt

SEQ ID NO: 1434827 - DNA, 25 bp, Homo sapien
gatgagtcttggtatggttcacaag

SEQ ID NO: 1434828 - DNA, 25 bp, Homo sapien
cgagatgatgagtcttggtatggtt

SEQ ID NO: 1434829 - DNA, 25 bp, Homo sapien
agtcttggtatggttcacaagttac

SEQ ID NO: 1434830 - DNA, 25 bp, Homo sapien
ttgaaacgagatgatgagtcttggt

SEQ ID NO: 1434831 - DNA, 25 bp, Homo sapien
ccattttctgcaggtaaatctttag

SEQ ID NO: 1434832 - DNA, 25 bp, Homo sapien
ctctcctcagttttcgtttccccat

SEQ ID NO: 1434833 - DNA, 25 bp, Homo sapien
tggttagccacttcggcctgttttc

SEQ ID NO: 1434834 - DNA, 25 bp, Homo sapien
aggctggactctcctcagttttcgt

SEQ ID NO: 1434835 - DNA, 25 bp, Homo sapien
caggaggcttagctgacaaccgccc

SEQ ID NO: 1434836 - DNA, 25 bp, Homo sapien
aggcttagctgacaaccgccccgat

SEQ ID NO: 1434837 - DNA, 25 bp, Homo sapien
accgccccgatctcctgttgggctc

SEQ ID NO: 1434838 - DNA, 25 bp, Homo sapien
tcgcttccactgttgcaggaggctt

SEQ ID NO: 1434839 - DNA, 25 bp, Homo sapien
acaagatggggcgtgttcagagtgg

SEQ ID NO: 1434840 - DNA, 25 bp, Homo sapien
aagatggggcgtgttcagagtggta

SEQ ID NO: 1434841 - DNA, 25 bp, Homo sapien
tcagacaagatggggcgtgttcaga

SEQ ID NO: 1434842 - DNA, 25 bp, Homo sapien
agacaagatggggcgtgttcagagt

SEQ ID NO: 1434843 - DNA, 25 bp, Homo sapien
gaagacatgaatgctaggtcttttg

SEQ ID NO: 1434844 - DNA, 25 bp, Homo sapien
aagatagaggatcccaacattcagt

SEQ ID NO: 1434845 - DNA, 25 bp, Homo sapien
cattcctggagtgatatgccttagc

SEQ ID NO: 1434846 - DNA, 25 bp, Homo sapien
taaccatgctcctcaatttggcttc

SEQ ID NO: 1434847 - DNA, 25 bp, Homo sapien
aaaagaattagaatctgccaatata

SEQ ID NO: 1434848 - DNA, 25 bp, Homo sapien
aaagaattagaatctgccaatatac

SEQ ID NO: 1434849 - DNA, 25 bp, Homo sapien
caacaaaagggatagaagcttcttc

SEQ ID NO: 1434850 - DNA, 25 bp, Homo sapien
gaatacactgggattagtcttccag

SEQ ID NO: 1434851 - DNA, 25 bp, Homo sapien
gataggtatttacccataacttcat

SEQ ID NO: 1434852 - DNA, 25 bp, Homo sapien
gactccaagccatttgtctttcaac

SEQ ID NO: 1434853 - DNA, 25 bp, Homo sapien
gttcgagtccagcctgaccaactgg

SEQ ID NO: 1434854 - DNA, 25 bp, Homo sapien
cgagtccagcctgaccaactggaga

SEQ ID NO: 1434855 - DNA, 25 bp, Homo sapien
gagttcgagtccagcctgaccaact

SEQ ID NO: 1434856 - DNA, 25 bp, Homo sapien
tcgagtccagcctgaccaactggag

SEQ ID NO: 1434857 - DNA, 25 bp, Homo sapien
ttaactcctctagggcaggacgcgg

SEQ ID NO: 1434858 - DNA, 25 bp, Homo sapien
aagttttcgttgtgccctgtggatc

SEQ ID NO: 1434859 - DNA, 25 bp, Homo sapien
taacaaggtgaacgctctatacatg

SEQ ID NO: 1434860 - DNA, 25 bp, Homo sapien
ttccgacgagcttccgaccgtagtc

SEQ ID NO: 1434861 - DNA, 25 bp, Homo sapien
ccctcatacgggacacgcagactgg

SEQ ID NO: 1434862 - DNA, 25 bp, Homo sapien
gcgacaccttctcgtcccgccacat

SEQ ID NO: 1434863 - DNA, 25 bp, Homo sapien
cctcatacgggacacgcagactggg

SEQ ID NO: 1434864 - DNA, 25 bp, Homo sapien
tgcagcacttcgtcgcaatacagcg

SEQ ID NO: 1434865 - DNA, 25 bp, Homo sapien
cctctcccgtgtcctcggcctgagc

SEQ ID NO: 1434866 - DNA, 25 bp, Homo sapien
gtcctcggcctgagccgcgggcagg

SEQ ID NO: 1434867 - DNA, 25 bp, Homo sapien
tgtcctcggcctgagccgcgggcag

SEQ ID NO: 1434868 - DNA, 25 bp, Homo sapien
gcgaggggaggccaccaccgaccgc

SEQ ID NO: 1434869 - DNA, 25 bp, Homo sapien
gaggggaggccaccaccgaccgcac

SEQ ID NO: 1434870 - DNA, 25 bp, Homo sapien
cgaggggaggccaccaccgaccgca

SEQ ID NO: 1434871 - DNA, 25 bp, Homo sapien
gtgcccttcagggtggtcgcggccg

SEQ ID NO: 1434872 - DNA, 25 bp, Homo sapien
gaggcggacttctcgcctcgcctgt

SEQ ID NO: 1434873 - DNA, 25 bp, Homo sapien
tgtccgggctgatggtgcggaatga

SEQ ID NO: 1434874 - DNA, 25 bp, Homo sapien
tggtgcggaatgagtccgcgggcac

SEQ ID NO: 1434875 - DNA, 25 bp, Homo sapien
gcttcaggcccgcaacgagcggctg

SEQ ID NO: 1434876 - DNA, 25 bp, Homo sapien
gccgaggcagccgttggccactttt

SEQ ID NO: 1434877 - DNA, 25 bp, Homo sapien
caataggcgctctgcgcttcaggcc

SEQ ID NO: 1434878 - DNA, 25 bp, Homo sapien
aacgagcggctgctcgagggcgtcc

SEQ ID NO: 1434879 - DNA, 25 bp, Homo sapien
ttgggtgcggctccgtgccgaaccc

SEQ ID NO: 1434880 - DNA, 25 bp, Homo sapien
tgctcagagctaggtgggacagggc

SEQ ID NO: 1434881 - DNA, 25 bp, Homo sapien
ggagggatgtgaggcgcggcccaga

SEQ ID NO: 1434882 - DNA, 25 bp, Homo sapien
ggcgaagcgcctgggctcaggacag

SEQ ID NO: 1434883 - DNA, 25 bp, Homo sapien
tccttagggtcctcatacgtttcag

SEQ ID NO: 1434884 - DNA, 25 bp, Homo sapien
cagacgagcccaacgcaatggctct

SEQ ID NO: 1434885 - DNA, 25 bp, Homo sapien
aggtgccgcacacaccagaaggtgc

SEQ ID NO: 1434886 - DNA, 25 bp, Homo sapien
tgattatgagtcaccttccaggtca

SEQ ID NO: 1434887 - DNA, 25 bp, Homo sapien
atcaggagctttgccagttcactgg

SEQ ID NO: 1434888 - DNA, 25 bp, Homo sapien
caggagctttgccagttcactgggg

SEQ ID NO: 1434889 - DNA, 25 bp, Homo sapien
tgatcaggagctttgccagttcact

SEQ ID NO: 1434890 - DNA, 25 bp, Homo sapien
gatcaggagctttgccagttcactg

SEQ ID NO: 1434891 - DNA, 25 bp, Homo sapien
ggaccaatggggaactccgcctgga

SEQ ID NO: 1434892 - DNA, 25 bp, Homo sapien
gaccaatggggaactccgcctggac

SEQ ID NO: 1434893 - DNA, 25 bp, Homo sapien
tcacaggaccaatggggaactccgc

SEQ ID NO: 1434894 - DNA, 25 bp, Homo sapien
caggaccaatggggaactccgcctg

SEQ ID NO: 1434895 - DNA, 25 bp, Homo sapien
ctgtgtgcggctggatcttccctcc

SEQ ID NO: 1434896 - DNA, 25 bp, Homo sapien
gtgcggctggatcttccctcctgtt

SEQ ID NO: 1434897 - DNA, 25 bp, Homo sapien
gcggctggatcttccctcctgttac

SEQ ID NO: 1434898 - DNA, 25 bp, Homo sapien
gtgtgcggctggatcttccctcctg

SEQ ID NO: 1434899 - DNA, 25 bp, Homo sapien
caccagatccagagtcactgggctc

SEQ ID NO: 1434900 - DNA, 25 bp, Homo sapien
cagatccagagtcactgggctccga

SEQ ID NO: 1434901 - DNA, 25 bp, Homo sapien
agatccagagtcactgggctccgac

SEQ ID NO: 1434902 - DNA, 25 bp, Homo sapien
ccagatccagagtcactgggctccg

SEQ ID NO: 1434903 - DNA, 25 bp, Homo sapien
tggtattcaacagcctcagaatctc

SEQ ID NO: 1434904 - DNA, 25 bp, Homo sapien
gagtaggatgtggaattcaactttg

SEQ ID NO: 1434905 - DNA, 25 bp, Homo sapien
ggtcaccggcttttcatttggattc

SEQ ID NO: 1434906 - DNA, 25 bp, Homo sapien
tgcggaaggtcatgagtaggatgtg

SEQ ID NO: 1434907 - DNA, 25 bp, Homo sapien
atggtttgcacggacttgctcctgt

SEQ ID NO: 1434908 - DNA, 25 bp, Homo sapien
ttggatggtttgcacggacttgctc

SEQ ID NO: 1434909 - DNA, 25 bp, Homo sapien
ggtttgcacggacttgctcctgtcc

SEQ ID NO: 1434910 - DNA, 25 bp, Homo sapien
ggatggtttgcacggacttgctcct

SEQ ID NO: 1434911 - DNA, 25 bp, Homo sapien
aagctaggcttcagatttcttatga

SEQ ID NO: 1434912 - DNA, 25 bp, Homo sapien
tatgaagtctaggttgatctccaag

SEQ ID NO: 1434913 - DNA, 25 bp, Homo sapien
gcagggtgcagtgggcctccgcctc

SEQ ID NO: 1434914 - DNA, 25 bp, Homo sapien
cagatttcttatgaagtctaggttg

SEQ ID NO: 1434915 - DNA, 25 bp, Homo sapien
cagtacttgcccagctcttcttggt

SEQ ID NO: 1434916 - DNA, 25 bp, Homo sapien
caactccaacctcagtggactgcat

SEQ ID NO: 1434917 - DNA, 25 bp, Homo sapien
tcagcaactccaacctcagtggact

SEQ ID NO: 1434918 - DNA, 25 bp, Homo sapien
tgcccagctcttcttggttcttcca

SEQ ID NO: 1434919 - DNA, 25 bp, Homo sapien
gtcatcaatggccttgcggagcccc

SEQ ID NO: 1434920 - DNA, 25 bp, Homo sapien
acactggtgtcatcaatggccttgc

SEQ ID NO: 1434921 - DNA, 25 bp, Homo sapien
cactggtgtcatcaatggccttgcg

SEQ ID NO: 1434922 - DNA, 25 bp, Homo sapien
atcaatggccttgcggagcccctgg

SEQ ID NO: 1434923 - DNA, 25 bp, Homo sapien
gccctcaaatccttgatggtcttga

SEQ ID NO: 1434924 - DNA, 25 bp, Homo sapien
tgcagaacagtgcaggcattatcca

SEQ ID NO: 1434925 - DNA, 25 bp, Homo sapien
gaacagtgcaggcattatccacagt

SEQ ID NO: 1434926 - DNA, 25 bp, Homo sapien
cagtgcaggcattatccacagtatt

SEQ ID NO: 1434927 - DNA, 25 bp, Homo sapien
tttgctctccagcttccggttcttg

SEQ ID NO: 1434928 - DNA, 25 bp, Homo sapien
ttccggttcttggtctccaggctcc

SEQ ID NO: 1434929 - DNA, 25 bp, Homo sapien
gctctccagcttccggttcttggtc

SEQ ID NO: 1434930 - DNA, 25 bp, Homo sapien
ttttgctctccagcttccggttctt

SEQ ID NO: 1434931 - DNA, 25 bp, Homo sapien
gctttgcatgggctccttttcattc

SEQ ID NO: 1434932 - DNA, 25 bp, Homo sapien
tagaaggccaggtggtggttcaggc

SEQ ID NO: 1434933 - DNA, 25 bp, Homo sapien
gagcgggacatggagatttgggaac

SEQ ID NO: 1434934 - DNA, 25 bp, Homo sapien
gggctccttttcattctggatgcct

SEQ ID NO: 1434935 - DNA, 25 bp, Homo sapien
gtgctgctgactggcggagggccat

SEQ ID NO: 1434936 - DNA, 25 bp, Homo sapien
tggaggtggagcgagtggtgaagtt

SEQ ID NO: 1434937 - DNA, 25 bp, Homo sapien
gaggtggagcgagtggtgaagttca

SEQ ID NO: 1434938 - DNA, 25 bp, Homo sapien
gggactggtagttggtggaggtgga

SEQ ID NO: 1434939 - DNA, 25 bp, Homo sapien
cagggactggtagttggtggaggtg

SEQ ID NO: 1434940 - DNA, 25 bp, Homo sapien
tgtggcagtgggaaacactccattc

SEQ ID NO: 1434941 - DNA, 25 bp, Homo sapien
gctaagagggactccttgcttggca

SEQ ID NO: 1434942 - DNA, 25 bp, Homo sapien
gctgctaagagggactccttgcttg

SEQ ID NO: 1434943 - DNA, 25 bp, Homo sapien
tggcagtgggaaacactccattctc

SEQ ID NO: 1434944 - DNA, 25 bp, Homo sapien
ccttcccgtggaactaacattgaat

SEQ ID NO: 1434945 - DNA, 25 bp, Homo sapien
tgaataagccttgtctccgcagcat

SEQ ID NO: 1434946 - DNA, 25 bp, Homo sapien
cctgtctctggacttggataaaaat

SEQ ID NO: 1434947 - DNA, 25 bp, Homo sapien
tctctggacttggataaaaatggac

SEQ ID NO: 1434948 - DNA, 25 bp, Homo sapien
taaaactcatgatcttctggctcag

SEQ ID NO: 1434949 - DNA, 25 bp, Homo sapien
aaaactcatgatcttctggctcagg

SEQ ID NO: 1434950 - DNA, 25 bp, Homo sapien
ctaaaactcatgatcttctggctca

SEQ ID NO: 1434951 - DNA, 25 bp, Homo sapien
gcccgaaaaggaggatgtcagaatc

SEQ ID NO: 1434952 - DNA, 25 bp, Homo sapien
tggcactgagaatattccgtgactc

SEQ ID NO: 1434953 - DNA, 25 bp, Homo sapien
gaatattccgtgactcagcaggccc

SEQ ID NO: 1434954 - DNA, 25 bp, Homo sapien
agcaggcccgaaaaggaggatgtca

SEQ ID NO: 1434955 - DNA, 25 bp, Homo sapien
aatcagcggcaggaaatcgcttcac

SEQ ID NO: 1434956 - DNA, 25 bp, Homo sapien
gattctccagggaccgtgtcggccc

SEQ ID NO: 1434957 - DNA, 25 bp, Homo sapien
taaaggcaagccgaggaacacaaac

SEQ ID NO: 1434958 - DNA, 25 bp, Homo sapien
atttcgcagtgggtcgtgcgtaccc

SEQ ID NO: 1434959 - DNA, 25 bp, Homo sapien
cctcttgccgcagcccaaattggcg

SEQ ID NO: 1434960 - DNA, 25 bp, Homo sapien
cttgccgcagcccaaattggcgcga

SEQ ID NO: 1434961 - DNA, 25 bp, Homo sapien
accctcttgccgcagcccaaattgg

SEQ ID NO: 1434962 - DNA, 25 bp, Homo sapien
gccgcagcccaaattggcgcgaggc

SEQ ID NO: 1434963 - DNA, 25 bp, Homo sapien
gccttcaacgtgactgtggtggcca

SEQ ID NO: 1434964 - DNA, 25 bp, Homo sapien
caggccgacaccacctggtggcaaa

SEQ ID NO: 1434965 - DNA, 25 bp, Homo sapien
gactccgcccgaggaatactgtgtg

SEQ ID NO: 1434966 - DNA, 25 bp, Homo sapien
ggtggccaccaacacgtgtgggact

SEQ ID NO: 1434967 - DNA, 25 bp, Homo sapien
tggataatgtttacctcgcacgtag

SEQ ID NO: 1434968 - DNA, 25 bp, Homo sapien
tgctcatccatcgtaattgatacgg

SEQ ID NO: 1434969 - DNA, 25 bp, Homo sapien
taatgtttacctcgcacgtagttca

SEQ ID NO: 1434970 - DNA, 25 bp, Homo sapien
tccctccattgcctttggataatgt

SEQ ID NO: 1434971 - DNA, 25 bp, Homo sapien
ttattgttgggcacactttatattc

SEQ ID NO: 1434972 - DNA, 25 bp, Homo sapien
tgtagccctttaggaagagacagtg

SEQ ID NO: 1434973 - DNA, 25 bp, Homo sapien
tcaagacaaagtccgtctgccactt

SEQ ID NO: 1434974 - DNA, 25 bp, Homo sapien
gagacagtgtacccagaccatattt

SEQ ID NO: 1434975 - DNA, 25 bp, Homo sapien
agtccgtctgccacttgctttcctt

SEQ ID NO: 1434976 - DNA, 25 bp, Homo sapien
tggatatactgtctaatgttgtagg

SEQ ID NO: 1434977 - DNA, 25 bp, Homo sapien
actgtctaatgttgtaggtttgacc

SEQ ID NO: 1434978 - DNA, 25 bp, Homo sapien
tgttgtaggtttgaccattggttat

SEQ ID NO: 1434979 - DNA, 25 bp, Homo sapien
tgaccattggttattgaagcttgga

SEQ ID NO: 1434980 - DNA, 25 bp, Homo sapien
tttttagagaacgtctttgtggatg

SEQ ID NO: 1434981 - DNA, 25 bp, Homo sapien
tttagagaacgtctttgtggatgaa

SEQ ID NO: 1434982 - DNA, 25 bp, Homo sapien
tctcttagacccactccaatccact

SEQ ID NO: 1434983 - DNA, 25 bp, Homo sapien
agtgatcctgaaaatgtatattatg

SEQ ID NO: 1434984 - DNA, 25 bp, Homo sapien
ggaaaagcttttgacatcacctatg

SEQ ID NO: 1434985 - DNA, 25 bp, Homo sapien
gacatcacctatgtgcgtctcaagt

SEQ ID NO: 1434986 - DNA, 25 bp, Homo sapien
gagagctttgccatttacaagcgca

SEQ ID NO: 1434987 - DNA, 25 bp, Homo sapien
aagcgcacacgggaagacgggccct

SEQ ID NO: 1434988 - DNA, 25 bp, Homo sapien
gcaacgtggccttttctaccctgga

SEQ ID NO: 1434989 - DNA, 25 bp, Homo sapien
gaattcagtgacatttctcccctca

SEQ ID NO: 1434990 - DNA, 25 bp, Homo sapien
cagtggttcctgtgagaacacctac

SEQ ID NO: 1434991 - DNA, 25 bp, Homo sapien
aaccgcggcttcatcaggacaggag

SEQ ID NO: 1434992 - DNA, 25 bp, Homo sapien
tggttacttgctcactttcagtggc

SEQ ID NO: 1434993 - DNA, 25 bp, Homo sapien
aagaagaggccgtcgttcactgctg

SEQ ID NO: 1434994 - DNA, 25 bp, Homo sapien
tttccagttgggtgtagcaatcacg

SEQ ID NO: 1434995 - DNA, 25 bp, Homo sapien
ggtaatgacatacacgaacttgtgg

SEQ ID NO: 1434996 - DNA, 25 bp, Homo sapien
aaacaattatgtggtaagaggctca

SEQ ID NO: 1434997 - DNA, 25 bp, Homo sapien
tacagaagagaactcctagaagagc

SEQ ID NO: 1434998 - DNA, 25 bp, Homo sapien
tgtgttgtccttactcaaaactagg

SEQ ID NO: 1434999 - DNA, 25 bp, Homo sapien
taataagtccctaagagtgtcctga

SEQ ID NO: 1435000 - DNA, 25 bp, Homo sapien
tttgaagatatattgccagctaggg

SEQ ID NO: 1435001 - DNA, 25 bp, Homo sapien
cagctagggtagcatttatggtcca

SEQ ID NO: 1435002 - DNA, 25 bp, Homo sapien
tgccctaagtagaacactgtggtct

SEQ ID NO: 1435003 - DNA, 25 bp, Homo sapien
gtgccttctgtggaccttgccctaa

SEQ ID NO: 1435004 - DNA, 25 bp, Homo sapien
aggtgatagtgagctgttatcgtgc

SEQ ID NO: 1435005 - DNA, 25 bp, Homo sapien
taaccgagatatcgaggagatcatg

SEQ ID NO: 1435006 - DNA, 25 bp, Homo sapien
aggaagaccttaccatctggctgct

SEQ ID NO: 1435007 - DNA, 25 bp, Homo sapien
aggctgccatcatggactataaccg

SEQ ID NO: 1435008 - DNA, 25 bp, Homo sapien
gaggagatcatgaaggacattcgca

SEQ ID NO: 1435009 - DNA, 25 bp, Homo sapien
caggaacgccaggttgacaagctat

SEQ ID NO: 1435010 - DNA, 25 bp, Homo sapien
acattttgactgagcacttagggca

SEQ ID NO: 1435011 - DNA, 25 bp, Homo sapien
gatataccagagtttaccacaagtg

SEQ ID NO: 1435012 - DNA, 25 bp, Homo sapien
gaggatctttgacgccacagtggga

SEQ ID NO: 1435013 - DNA, 25 bp, Homo sapien
aatctctacagccttgctctccggg

SEQ ID NO: 1435014 - DNA, 25 bp, Homo sapien
ttccaactgtggaccttttatatgt

SEQ ID NO: 1435015 - DNA, 25 bp, Homo sapien
ggaccttttatatgtgccttcactt

SEQ ID NO: 1435016 - DNA, 25 bp, Homo sapien
tgctgcagaatgctggttgacacag

SEQ ID NO: 1435017 - DNA, 25 bp, Homo sapien
taagagggcctatcacagcatatgg

SEQ ID NO: 1435018 - DNA, 25 bp, Homo sapien
tgcaggacgtgccttaagtacaact

SEQ ID NO: 1435019 - DNA, 25 bp, Homo sapien
taaccatcgtgtacagaagaggcac

SEQ ID NO: 1435020 - DNA, 25 bp, Homo sapien
gcctggcctaattaaacatgctgcg

SEQ ID NO: 1435021 - DNA, 25 bp, Homo sapien
tggcacagcgtggaagaaaatcagg

SEQ ID NO: 1435022 - DNA, 25 bp, Homo sapien
taggtagagctgatatcaaaccctc

SEQ ID NO: 1435023 - DNA, 25 bp, Homo sapien
tcccaattgagactttagcagcgtt

SEQ ID NO: 1435024 - DNA, 25 bp, Homo sapien
tgtgatccaatgagcccaaaagagt

SEQ ID NO: 1435025 - DNA, 25 bp, Homo sapien
gctatggtgcttgctggtgcctgcc

SEQ ID NO: 1435026 - DNA, 25 bp, Homo sapien
caataaccgcttggtttgcaacctc

SEQ ID NO: 1435027 - DNA, 25 bp, Homo sapien
agaacatatgttgcaagaccctccc

SEQ ID NO: 1435028 - DNA, 25 bp, Homo sapien
caacccagggtgtgaacatgttctc

SEQ ID NO: 1435029 - DNA, 25 bp, Homo sapien
ttgcataaaactcttgcccatgact

SEQ ID NO: 1435030 - DNA, 25 bp, Homo sapien
tgcccatgactattctagcaacaaa

SEQ ID NO: 1435031 - DNA, 25 bp, Homo sapien
acataattgaaacattttgcataaa

SEQ ID NO: 1435032 - DNA, 25 bp, Homo sapien
aactcttgcccatgactattctagc

SEQ ID NO: 1435033 - DNA, 25 bp, Homo sapien
aagctctagctttgggtttcaggca

SEQ ID NO: 1435034 - DNA, 25 bp, Homo sapien
aacagtcgagtgtgctgggcagcta

SEQ ID NO: 1435035 - DNA, 25 bp, Homo sapien
tcagccctgggactagactaaggtt

SEQ ID NO: 1435036 - DNA, 25 bp, Homo sapien
gaagaacggcgtctctagaagctct

SEQ ID NO: 1435037 - DNA, 25 bp, Homo sapien
gtgactgaggtacccactagcagca

SEQ ID NO: 1435038 - DNA, 25 bp, Homo sapien
gccctcccagaggaccattccttaa

SEQ ID NO: 1435039 - DNA, 25 bp, Homo sapien
gggtgtgtgactgaggtacccacta

SEQ ID NO: 1435040 - DNA, 25 bp, Homo sapien
tccttaaggacagagttattgacaa

SEQ ID NO: 1435041 - DNA, 25 bp, Homo sapien
aggtctgctcacgtgggtcccataa

SEQ ID NO: 1435042 - DNA, 25 bp, Homo sapien
gaaatcgagccttcctcaggtctgc

SEQ ID NO: 1435043 - DNA, 25 bp, Homo sapien
aaatcatatgggcacctggtcagca

SEQ ID NO: 1435044 - DNA, 25 bp, Homo sapien
catcctatgtgtggagagcacctgg

SEQ ID NO: 1435045 - DNA, 25 bp, Homo sapien
gccagagactggatgagagacacaa

SEQ ID NO: 1435046 - DNA, 25 bp, Homo sapien
tttatgacacgactgcacgatgtgg

SEQ ID NO: 1435047 - DNA, 25 bp, Homo sapien
tctagagcatgctgggagacggaca

SEQ ID NO: 1435048 - DNA, 25 bp, Homo sapien
gcatgagaccctagtaaccagaagc

SEQ ID NO: 1435049 - DNA, 25 bp, Homo sapien
tgggacaggtaatccacaacatggc

SEQ ID NO: 1435050 - DNA, 25 bp, Homo sapien
cattgatgtacagctggcttttgag

SEQ ID NO: 1435051 - DNA, 25 bp, Homo sapien
gcttttgaggatgtagtcgatgacc

SEQ ID NO: 1435052 - DNA, 25 bp, Homo sapien
ctagccggaggcattgatgtacagc

SEQ ID NO: 1435053 - DNA, 25 bp, Homo sapien
gcctgtgagatctcactggagacca

SEQ ID NO: 1435054 - DNA, 25 bp, Homo sapien
cacaatagtctaggtgtcagaccca

SEQ ID NO: 1435055 - DNA, 25 bp, Homo sapien
aaaggactccagtgacacattttgg

SEQ ID NO: 1435056 - DNA, 25 bp, Homo sapien
gcctccacatacgtagattctaaaa

SEQ ID NO: 1435057 - DNA, 25 bp, Homo sapien
caacagacatgggatggttgatgtc

SEQ ID NO: 1435058 - DNA, 25 bp, Homo sapien
gacatgggatggttgatgtcatcct

SEQ ID NO: 1435059 - DNA, 25 bp, Homo sapien
catgggatggttgatgtcatccttc

SEQ ID NO: 1435060 - DNA, 25 bp, Homo sapien
acagacatgggatggttgatgtcat

SEQ ID NO: 1435061 - DNA, 25 bp, Homo sapien
tttgtatttgcggagtattgaggag

SEQ ID NO: 1435062 - DNA, 25 bp, Homo sapien
catgattcggtctgtgtcggctgca

SEQ ID NO: 1435063 - DNA, 25 bp, Homo sapien
tgaggagtgattcatgattcggtct

SEQ ID NO: 1435064 - DNA, 25 bp, Homo sapien
caaagtcaccaacaatcacctccat

SEQ ID NO: 1435065 - DNA, 25 bp, Homo sapien
tatttggtgctagatactgtatgac

SEQ ID NO: 1435066 - DNA, 25 bp, Homo sapien
gagaattttctaccatagtgatgtg

SEQ ID NO: 1435067 - DNA, 25 bp, Homo sapien
tgggtgccaggcaataaccttgcta

SEQ ID NO: 1435068 - DNA, 25 bp, Homo sapien
tagtgatgtgaacggactgccctct

SEQ ID NO: 1435069 - DNA, 25 bp, Homo sapien
ccctgggatgcagaaggactccagc

SEQ ID NO: 1435070 - DNA, 25 bp, Homo sapien
gaaggactccagcaggtcactacca

SEQ ID NO: 1435071 - DNA, 25 bp, Homo sapien
actaccacacagcagcaggatccgt

SEQ ID NO: 1435072 - DNA, 25 bp, Homo sapien
atctgcctcgttccagagccctggg

SEQ ID NO: 1435073 - DNA, 25 bp, Homo sapien
gagcaaagtttgcaaagggagtaag

SEQ ID NO: 1435074 - DNA, 25 bp, Homo sapien
ctgaggaaggggagcaaagtttgca

SEQ ID NO: 1435075 - DNA, 25 bp, Homo sapien
aggggagcaaagtttgcaaagggag

SEQ ID NO: 1435076 - DNA, 25 bp, Homo sapien
aggaaggggagcaaagtttgcaaag

SEQ ID NO: 1435077 - DNA, 25 bp, Homo sapien
tcttcctcgggctcatttccagacc

SEQ ID NO: 1435078 - DNA, 25 bp, Homo sapien
cttcctcgggctcatttccagacca

SEQ ID NO: 1435079 - DNA, 25 bp, Homo sapien
agggccacgagccagaatgcacact

SEQ ID NO: 1435080 - DNA, 25 bp, Homo sapien
agaggtgagaggtcactccccagca

SEQ ID NO: 1435081 - DNA, 25 bp, Homo sapien
caggaatccgggctatgtgaagccc

SEQ ID NO: 1435082 - DNA, 25 bp, Homo sapien
gctgtcctttctcggaacctaagtg

SEQ ID NO: 1435083 - DNA, 25 bp, Homo sapien
tctgtgtgaaccaagtgctcaggac

SEQ ID NO: 1435084 - DNA, 25 bp, Homo sapien
cacagacagtgaagtgccttagcct

SEQ ID NO: 1435085 - DNA, 25 bp, Homo sapien
gaatgcaatcttagcctgggaacga

SEQ ID NO: 1435086 - DNA, 25 bp, Homo sapien
taaagggagctaactacgaatgcaa

SEQ ID NO: 1435087 - DNA, 25 bp, Homo sapien
accgtgcccagattggcattctcat

SEQ ID NO: 1435088 - DNA, 25 bp, Homo sapien
caatctcttcataccgcatcaccgt

SEQ ID NO: 1435089 - DNA, 25 bp, Homo sapien
aatctcttcataccgcatcaccgtg

SEQ ID NO: 1435090 - DNA, 25 bp, Homo sapien
catcaccgtgcccagattggcattc

SEQ ID NO: 1435091 - DNA, 25 bp, Homo sapien
ggtgcagaactttttcacatggtgg

SEQ ID NO: 1435092 - DNA, 25 bp, Homo sapien
tggctctccttagggattacctggt

SEQ ID NO: 1435093 - DNA, 25 bp, Homo sapien
catggtggaatgtagcaagtgcctg

SEQ ID NO: 1435094 - DNA, 25 bp, Homo sapien
gactgagtcttcgatgtgcccttgt

SEQ ID NO: 1435095 - DNA, 25 bp, Homo sapien
accggcgggcggacacagcagatcc

SEQ ID NO: 1435096 - DNA, 25 bp, Homo sapien
ctacaaaggtgaaacgctccaccgg

SEQ ID NO: 1435097 - DNA, 25 bp, Homo sapien
cagcagatccggctgaggctttctc

SEQ ID NO: 1435098 - DNA, 25 bp, Homo sapien
acaaaggtgaaacgctccaccggcg

SEQ ID NO: 1435099 - DNA, 25 bp, Homo sapien
gggtctcgttttgtggctgtccgat

SEQ ID NO: 1435100 - DNA, 25 bp, Homo sapien
tgtggctgtccgatcacaggtgtca

SEQ ID NO: 1435101 - DNA, 25 bp, Homo sapien
tgtccgatcacaggtgtcatggaag

SEQ ID NO: 1435102 - DNA, 25 bp, Homo sapien
tcatggaaggtgtgttgacattgga

SEQ ID NO: 1435103 - DNA, 25 bp, Homo sapien
gacccagaagcaatcccactgggcc

SEQ ID NO: 1435104 - DNA, 25 bp, Homo sapien
agcaatcccactgggccaaggtgat

SEQ ID NO: 1435105 - DNA, 25 bp, Homo sapien
gcagcattcctcacagctgacccag

SEQ ID NO: 1435106 - DNA, 25 bp, Homo sapien
gaaaacacagagctgataaggcagc

SEQ ID NO: 1435107 - DNA, 25 bp, Homo sapien
gagcttctctggcccagacttatac

SEQ ID NO: 1435108 - DNA, 25 bp, Homo sapien
agcttctctggcccagacttatacc

SEQ ID NO: 1435109 - DNA, 25 bp, Homo sapien
agagcttctctggcccagacttata

SEQ ID NO: 1435110 - DNA, 25 bp, Homo sapien
cttcatgaggtcccggtggtgttcc

SEQ ID NO: 1435111 - DNA, 25 bp, Homo sapien
cggtggtgttccaacacgctgcagg

SEQ ID NO: 1435112 - DNA, 25 bp, Homo sapien
tgaggtcccggtggtgttccaacac

SEQ ID NO: 1435113 - DNA, 25 bp, Homo sapien
gtcccggtggtgttccaacacgctg

SEQ ID NO: 1435114 - DNA, 25 bp, Homo sapien
tcatagctcaggaagcatggcagat

SEQ ID NO: 1435115 - DNA, 25 bp, Homo sapien
gatctggccataccatgcgcttaga

SEQ ID NO: 1435116 - DNA, 25 bp, Homo sapien
catcatcggaaagaagtttcccttg

SEQ ID NO: 1435117 - DNA, 25 bp, Homo sapien
ggcagatctggccataccatgcgct

SEQ ID NO: 1435118 - DNA, 25 bp, Homo sapien
gaaagttatgtgatctcccagtgcc

SEQ ID NO: 1435119 - DNA, 25 bp, Homo sapien
gccagtctgcctgggtttaattcca

SEQ ID NO: 1435120 - DNA, 25 bp, Homo sapien
catggcataggcttatgagaagaga

SEQ ID NO: 1435121 - DNA, 25 bp, Homo sapien
aacctgggtgtgaaacactcttctg

SEQ ID NO: 1435122 - DNA, 25 bp, Homo sapien
caggttatccttgccaggctgcaaa

SEQ ID NO: 1435123 - DNA, 25 bp, Homo sapien
caagtggtggcccaggttatccttg

SEQ ID NO: 1435124 - DNA, 25 bp, Homo sapien
ctgagccaggcctttgtcaagtggt

SEQ ID NO: 1435125 - DNA, 25 bp, Homo sapien
ctttggacccttgaggattgtgaca

SEQ ID NO: 1435126 - DNA, 25 bp, Homo sapien
aattctggacggccagctgacacat

SEQ ID NO: 1435127 - DNA, 25 bp, Homo sapien
aatcagaattctggacggccagctg

SEQ ID NO: 1435128 - DNA, 25 bp, Homo sapien
tcagaattctggacggccagctgac

SEQ ID NO: 1435129 - DNA, 25 bp, Homo sapien
cagaattctggacggccagctgaca

SEQ ID NO: 1435130 - DNA, 25 bp, Homo sapien
gatgagacggtgccggcttgacacg

SEQ ID NO: 1435131 - DNA, 25 bp, Homo sapien
tgagacggtgccggcttgacacgag

SEQ ID NO: 1435132 - DNA, 25 bp, Homo sapien
gacggtgccggcttgacacgaggcc

SEQ ID NO: 1435133 - DNA, 25 bp, Homo sapien
agacggtgccggcttgacacgaggc

SEQ ID NO: 1435134 - DNA, 25 bp, Homo sapien
cagcccgtaagtggctctacggtca

SEQ ID NO: 1435135 - DNA, 25 bp, Homo sapien
tgaccagcccgtaagtggctctacg

SEQ ID NO: 1435136 - DNA, 25 bp, Homo sapien
cctgaccagcccgtaagtggctcta

SEQ ID NO: 1435137 - DNA, 25 bp, Homo sapien
gaccagcccgtaagtggctctacgg

SEQ ID NO: 1435138 - DNA, 25 bp, Homo sapien
gggagacaatcccgccaatcacaat

SEQ ID NO: 1435139 - DNA, 25 bp, Homo sapien
aatcccgccaatcacaataaacctt

SEQ ID NO: 1435140 - DNA, 25 bp, Homo sapien
cataggagtcgtggacaggggagac

SEQ ID NO: 1435141 - DNA, 25 bp, Homo sapien
cacaataaaccttccagttttgtgc

SEQ ID NO: 1435142 - DNA, 25 bp, Homo sapien
gctgtagctatggccctggaattta

SEQ ID NO: 1435143 - DNA, 25 bp, Homo sapien
gaaagccagcccattggcaaagctg

SEQ ID NO: 1435144 - DNA, 25 bp, Homo sapien
atttctgcacattagtagaaagcca

SEQ ID NO: 1435145 - DNA, 25 bp, Homo sapien
tagctatggccctggaatttaattt

SEQ ID NO: 1435146 - DNA, 25 bp, Homo sapien
cagagcccctggcaggcctgaattt

SEQ ID NO: 1435147 - DNA, 25 bp, Homo sapien
cccctggcaggcctgaatttcctct

SEQ ID NO: 1435148 - DNA, 25 bp, Homo sapien
aggcctgaatttcctctagttcctg

SEQ ID NO: 1435149 - DNA, 25 bp, Homo sapien
ctgagagagtaacaaacacttccca

SEQ ID NO: 1435150 - DNA, 25 bp, Homo sapien
gagagtaacacaaagtggtgcagct

SEQ ID NO: 1435151 - DNA, 25 bp, Homo sapien
tgctccctcattgttgctgatcttg

SEQ ID NO: 1435152 - DNA, 25 bp, Homo sapien
ccctgtgctggccatcagagagtaa

SEQ ID NO: 1435153 - DNA, 25 bp, Homo sapien
cattgttgctgatcttgtttgctcc

SEQ ID NO: 1435154 - DNA, 25 bp, Homo sapien
tgaatacagttggttacccagcccc

SEQ ID NO: 1435155 - DNA, 25 bp, Homo sapien
tagggaaccagctgtccaggtttgc

SEQ ID NO: 1435156 - DNA, 25 bp, Homo sapien
cttagtccccgacaaactgtgttgg

SEQ ID NO: 1435157 - DNA, 25 bp, Homo sapien
ctcatgcactgaaccaaagaagctc

SEQ ID NO: 1435158 - DNA, 25 bp, Homo sapien
gccaggacctctgttcttgggctgt

SEQ ID NO: 1435159 - DNA, 25 bp, Homo sapien
ccagagtccccactgaccctgagtg

SEQ ID NO: 1435160 - DNA, 25 bp, Homo sapien
cctgacatcctctgcacatcaggat

SEQ ID NO: 1435161 - DNA, 25 bp, Homo sapien
accctgagtgctccagttcccaggg

SEQ ID NO: 1435162 - DNA, 25 bp, Homo sapien
tgggcactttacttccctctggagg

SEQ ID NO: 1435163 - DNA, 25 bp, Homo sapien
accagggctccttctatattgttga

SEQ ID NO: 1435164 - DNA, 25 bp, Homo sapien
gatcagatgctgagtcaaacggcag

SEQ ID NO: 1435165 - DNA, 25 bp, Homo sapien
ctgggctgctgcagtaccagctgca

SEQ ID NO: 1435166 - DNA, 25 bp, Homo sapien
tgggactctaagtcagcatccttgg

SEQ ID NO: 1435167 - DNA, 25 bp, Homo sapien
attgaggtgttttcctccggtcctg

SEQ ID NO: 1435168 - DNA, 25 bp, Homo sapien
ccggtcctgcattttgggactctaa

SEQ ID NO: 1435169 - DNA, 25 bp, Homo sapien
taagtcagcatccttggcatgcctg

SEQ ID NO: 1435170 - DNA, 25 bp, Homo sapien
ctttgctgaactccctaaaatccga

SEQ ID NO: 1435171 - DNA, 25 bp, Homo sapien
tgaactccctaaaatccgatacagg

SEQ ID NO: 1435172 - DNA, 25 bp, Homo sapien
taaaatccgatacaggagcagaggt

SEQ ID NO: 1435173 - DNA, 25 bp, Homo sapien
tccctaaaatccgatacaggagcag

SEQ ID NO: 1435174 - DNA, 25 bp, Homo sapien
tcccaacagatactgcccacccatc

SEQ ID NO: 1435175 - DNA, 25 bp, Homo sapien
ccttcccaacagatactgcccaccc

SEQ ID NO: 1435176 - DNA, 25 bp, Homo sapien
ttcccaacagatactgcccacccat

SEQ ID NO: 1435177 - DNA, 25 bp, Homo sapien
ccaacagatactgcccacccatcac

SEQ ID NO: 1435178 - DNA, 25 bp, Homo sapien
gcctgcagagatggttggttccaag

SEQ ID NO: 1435179 - DNA, 25 bp, Homo sapien
ggttggttccaagcttgactgagtg

SEQ ID NO: 1435180 - DNA, 25 bp, Homo sapien
cagagatggttggttccaagcttga

SEQ ID NO: 1435181 - DNA, 25 bp, Homo sapien
gatggttggttccaagcttgactga

SEQ ID NO: 1435182 - DNA, 25 bp, Homo sapien
ctgggccttcaaaaactctgcacat

SEQ ID NO: 1435183 - DNA, 25 bp, Homo sapien
caggggaaattctcagcctcgccca

SEQ ID NO: 1435184 - DNA, 25 bp, Homo sapien
tctgggccttcaaaaactctgcaca

SEQ ID NO: 1435185 - DNA, 25 bp, Homo sapien
gggatccaccaatgctgtctaattg

SEQ ID NO: 1435186 - DNA, 25 bp, Homo sapien
cttgttctcttcaactatctccggg

SEQ ID NO: 1435187 - DNA, 25 bp, Homo sapien
gctgccattagctctgtcatttcca

SEQ ID NO: 1435188 - DNA, 25 bp, Homo sapien
ccctcctgacttataaatgctgcca

SEQ ID NO: 1435189 - DNA, 25 bp, Homo sapien
catttaatccactgaactgttgcat

SEQ ID NO: 1435190 - DNA, 25 bp, Homo sapien
tctcctcatttaatccactgaactg

SEQ ID NO: 1435191 - DNA, 25 bp, Homo sapien
caggtaccttacaggtatctcctca

SEQ ID NO: 1435192 - DNA, 25 bp, Homo sapien
tacaggtatctcctcatttaatcca

SEQ ID NO: 1435193 - DNA, 25 bp, Homo sapien
cttcatatggatttgaaaacctaca

SEQ ID NO: 1435194 - DNA, 25 bp, Homo sapien
gactgacattaccaaatattgttgg

SEQ ID NO: 1435195 - DNA, 25 bp, Homo sapien
ggtaggattgtcaaatggcaaccac

SEQ ID NO: 1435196 - DNA, 25 bp, Homo sapien
tttcccccactggttatatatcata

SEQ ID NO: 1435197 - DNA, 25 bp, Homo sapien
tgctggcaacaatcgtttcctgctc

SEQ ID NO: 1435198 - DNA, 25 bp, Homo sapien
tgagagttgccatcagtttgtgggc

SEQ ID NO: 1435199 - DNA, 25 bp, Homo sapien
tattccttcaagagtaatgcaccaa

SEQ ID NO: 1435200 - DNA, 25 bp, Homo sapien
tgcaccaaggattcagccgaagctt

SEQ ID NO: 1435201 - DNA, 25 bp, Homo sapien
tgtctctgagtgagaaaccttccac

SEQ ID NO: 1435202 - DNA, 25 bp, Homo sapien
tgctgaggcccaaacatgcaaagca

SEQ ID NO: 1435203 - DNA, 25 bp, Homo sapien
aaagactggaggatgcttagaccca

SEQ ID NO: 1435204 - DNA, 25 bp, Homo sapien
aaaaagtctccatagtgctggctgc

SEQ ID NO: 1435205 - DNA, 25 bp, Homo sapien
tccagatggaaggaaggtattctgc

SEQ ID NO: 1435206 - DNA, 25 bp, Homo sapien
gtgttttggcgagatctgagttccc

SEQ ID NO: 1435207 - DNA, 25 bp, Homo sapien
ctgctttcggagatcttgtgttttg

SEQ ID NO: 1435208 - DNA, 25 bp, Homo sapien
tcattagccagtgaacataacttcc

SEQ ID NO: 1435209 - DNA, 25 bp, Homo sapien
gccttgaagtctcaggcagccccat

SEQ ID NO: 1435210 - DNA, 25 bp, Homo sapien
ggttgaagccttgaagtctcaggca

SEQ ID NO: 1435211 - DNA, 25 bp, Homo sapien
tgaagccttgaagtctcaggcagcc

SEQ ID NO: 1435212 - DNA, 25 bp, Homo sapien
ctggttgaagccttgaagtctcagg

SEQ ID NO: 1435213 - DNA, 25 bp, Homo sapien
tcccagagttacctacttctctcaa

SEQ ID NO: 1435214 - DNA, 25 bp, Homo sapien
aatatcccagagttacctacttctc

SEQ ID NO: 1435215 - DNA, 25 bp, Homo sapien
aaattttcgaaacatatatcagaac

SEQ ID NO: 1435216 - DNA, 25 bp, Homo sapien
aaagcaaccatcttttgccaagaca

SEQ ID NO: 1435217 - DNA, 25 bp, Homo sapien
cagaatcagacgagggttcccatcc

SEQ ID NO: 1435218 - DNA, 25 bp, Homo sapien
tgaactgctaacctcgtgatgggag

SEQ ID NO: 1435219 - DNA, 25 bp, Homo sapien
cagagtgggcagtttattcatgtat

SEQ ID NO: 1435220 - DNA, 25 bp, Homo sapien
agtgccccatgaacaggaacctcaa

SEQ ID NO: 1435221 - DNA, 25 bp, Homo sapien
caagaccgagctcctgacatttcct

SEQ ID NO: 1435222 - DNA, 25 bp, Homo sapien
tcagaagcaacatgtccaagaccga

SEQ ID NO: 1435223 - DNA, 25 bp, Homo sapien
cagataccccacaccaataaatgga

SEQ ID NO: 1435224 - DNA, 25 bp, Homo sapien
tatgcttactcaacatctccacttg

SEQ ID NO: 1435225 - DNA, 25 bp, Homo sapien
agcccacaatatccccggatggcag

SEQ ID NO: 1435226 - DNA, 25 bp, Homo sapien
atggcagttacccacccttctttgc

SEQ ID NO: 1435227 - DNA, 25 bp, Homo sapien
tctttgccgttcagccattctccca

SEQ ID NO: 1435228 - DNA, 25 bp, Homo sapien
caaccaggtattcaggggtgactgc

SEQ ID NO: 1435229 - DNA, 25 bp, Homo sapien
tgggaatagggaagcgtccaccaca

SEQ ID NO: 1435230 - DNA, 25 bp, Homo sapien
ggagccctgggaatagggaagcgtc

SEQ ID NO: 1435231 - DNA, 25 bp, Homo sapien
gggaatagggaagcgtccaccacat

SEQ ID NO: 1435232 - DNA, 25 bp, Homo sapien
gccctgggaatagggaagcgtccac

SEQ ID NO: 1435233 - DNA, 25 bp, Homo sapien
atctaccatgtccagagtggtaact

SEQ ID NO: 1435234 - DNA, 25 bp, Homo sapien
gctctaatggcccatctaccatgtc

SEQ ID NO: 1435235 - DNA, 25 bp, Homo sapien
tctaatggcccatctaccatgtcca

SEQ ID NO: 1435236 - DNA, 25 bp, Homo sapien
taccatgtccagagtggtaacttcc

SEQ ID NO: 1435237 - DNA, 25 bp, Homo sapien
tcaagggagaggagtaaagcgcatc

SEQ ID NO: 1435238 - DNA, 25 bp, Homo sapien
gagtaaagcgcatcaacataaagtg

SEQ ID NO: 1435239 - DNA, 25 bp, Homo sapien
tcattgcctggtcaagggagaggag

SEQ ID NO: 1435240 - DNA, 25 bp, Homo sapien
gagaggagtaaagcgcatcaacata

SEQ ID NO: 1435241 - DNA, 25 bp, Homo sapien
gagggctcgcgcagtcctcaggctc

SEQ ID NO: 1435242 - DNA, 25 bp, Homo sapien
ggataaacacgtgtgcccgcatcca

SEQ ID NO: 1435243 - DNA, 25 bp, Homo sapien
taaacctccctaggagggctcgcgc

SEQ ID NO: 1435244 - DNA, 25 bp, Homo sapien
tcaggctccggataaacacgtgtgc

SEQ ID NO: 1435245 - DNA, 25 bp, Homo sapien
gaatcaccagccaaatccgaaatta

SEQ ID NO: 1435246 - DNA, 25 bp, Homo sapien
cgcgggcaatacacggcccacaatt

SEQ ID NO: 1435247 - DNA, 25 bp, Homo sapien
taactccttcgagctttcggcccat

SEQ ID NO: 1435248 - DNA, 25 bp, Homo sapien
gcgagtgtgtttgcgaatcccaggc

SEQ ID NO: 1435249 - DNA, 25 bp, Homo sapien
gacgcctcggaaacgcagtctgcgt

SEQ ID NO: 1435250 - DNA, 25 bp, Homo sapien
gccccggcaagtgacgcctcggaaa

SEQ ID NO: 1435251 - DNA, 25 bp, Homo sapien
ggcaagtgacgcctcggaaacgcag

SEQ ID NO: 1435252 - DNA, 25 bp, Homo sapien
ggtctggccccggcaagtgacgcct

SEQ ID NO: 1435253 - DNA, 25 bp, Homo sapien
accagctggatgagccggcccaccc

SEQ ID NO: 1435254 - DNA, 25 bp, Homo sapien
cctcccctgagtccaaaatgaaggg

SEQ ID NO: 1435255 - DNA, 25 bp, Homo sapien
ggcacacgccttcccgttcgatcgc

SEQ ID NO: 1435256 - DNA, 25 bp, Homo sapien
atgaaggggccgacctccaccagct

SEQ ID NO: 1435257 - DNA, 25 bp, Homo sapien
agataacgtgggtcttggtggtctc

SEQ ID NO: 1435258 - DNA, 25 bp, Homo sapien
atgggattgaagctgccgcaggcga

SEQ ID NO: 1435259 - DNA, 25 bp, Homo sapien
ttgaagctgccgcaggcgagcaaga

SEQ ID NO: 1435260 - DNA, 25 bp, Homo sapien
caggcgagcaagataacgtgggtct

SEQ ID NO: 1435261 - DNA, 25 bp, Homo sapien
gtgcagatgggtccttcgcggtggt

SEQ ID NO: 1435262 - DNA, 25 bp, Homo sapien
cggtggtctaggggttgcctctctt

SEQ ID NO: 1435263 - DNA, 25 bp, Homo sapien
taggggttgcctctctttttgtgtc

SEQ ID NO: 1435264 - DNA, 25 bp, Homo sapien
cagatgggtccttcgcggtggtcta

SEQ ID NO: 1435265 - DNA, 25 bp, Homo sapien
ccggctagatccgaggctgcttttg

SEQ ID NO: 1435266 - DNA, 25 bp, Homo sapien
tggactccaaggagccgctccagac

SEQ ID NO: 1435267 - DNA, 25 bp, Homo sapien
tcggtcgctctcttttcgttctggc

SEQ ID NO: 1435268 - DNA, 25 bp, Homo sapien
cttaacgcttgcagctccggctaga

SEQ ID NO: 1435269 - DNA, 25 bp, Homo sapien
aaagaaggacagatcatacagggcc

SEQ ID NO: 1435270 - DNA, 25 bp, Homo sapien
taagacagtgtttgaacagggacct

SEQ ID NO: 1435271 - DNA, 25 bp, Homo sapien
taaaggatcggaagactaagagtgc

SEQ ID NO: 1435272 - DNA, 25 bp, Homo sapien
gaaagcactcaaagacaggtccaaa

SEQ ID NO: 1435273 - DNA, 25 bp, Homo sapien
ccccacttttgtcaggtctggtggc

SEQ ID NO: 1435274 - DNA, 25 bp, Homo sapien
tcagggaatacaggccacagtcgcc

SEQ ID NO: 1435275 - DNA, 25 bp, Homo sapien
ttagggagactgtacaaggaggact

SEQ ID NO: 1435276 - DNA, 25 bp, Homo sapien
ccacagtcgccctagggttagctgg

SEQ ID NO: 1435277 - DNA, 25 bp, Homo sapien
tccttgcactggcagtctgcagatc

SEQ ID NO: 1435278 - DNA, 25 bp, Homo sapien
agtgcacaggaagtcattcctctgc

SEQ ID NO: 1435279 - DNA, 25 bp, Homo sapien
tggcagtctgcagatcaccatcatc

SEQ ID NO: 1435280 - DNA, 25 bp, Homo sapien
cttcaggccctcaagtgcacaggaa

SEQ ID NO: 1435281 - DNA, 25 bp, Homo sapien
gggatgccccactcagaatttagag

SEQ ID NO: 1435282 - DNA, 25 bp, Homo sapien
gagaatatcggtcctctaaatggca

SEQ ID NO: 1435283 - DNA, 25 bp, Homo sapien
tattactaccaccaggcaatgtgct

SEQ ID NO: 1435284 - DNA, 25 bp, Homo sapien
taggcagcaaaactagggatgcccc

SEQ ID NO: 1435285 - DNA, 25 bp, Homo sapien
ctcaggctgtgacggttcccagaag

SEQ ID NO: 1435286 - DNA, 25 bp, Homo sapien
tctcaggctgtgacggttcccagaa

SEQ ID NO: 1435287 - DNA, 25 bp, Homo sapien
ttctcaggctgtgacggttcccaga

SEQ ID NO: 1435288 - DNA, 25 bp, Homo sapien
tcaggctgtgacggttcccagaagt

SEQ ID NO: 1435289 - DNA, 25 bp, Homo sapien
gtattaaaacatgatcatcctcatc

SEQ ID NO: 1435290 - DNA, 25 bp, Homo sapien
tggtctgtactggtgtattaaaaca

SEQ ID NO: 1435291 - DNA, 25 bp, Homo sapien
cataagtattagtgcctgatactgc

SEQ ID NO: 1435292 - DNA, 25 bp, Homo sapien
aagaggcattttggtctgtactggt

SEQ ID NO: 1435293 - DNA, 25 bp, Homo sapien
caattactgcatccctcatattgca

SEQ ID NO: 1435294 - DNA, 25 bp, Homo sapien
cagttgggtttcctcaaggcaggga

SEQ ID NO: 1435295 - DNA, 25 bp, Homo sapien
gcatcctaatcattactctgagctc

SEQ ID NO: 1435296 - DNA, 25 bp, Homo sapien
tttcactgtggtgtccatcataacc

SEQ ID NO: 1435297 - DNA, 25 bp, Homo sapien
gagtgtctatccttgggcgctcatg

SEQ ID NO: 1435298 - DNA, 25 bp, Homo sapien
tgagaataatccctcactaggtggc

SEQ ID NO: 1435299 - DNA, 25 bp, Homo sapien
attgtactgccgcaagcgctgcgtg

SEQ ID NO: 1435300 - DNA, 25 bp, Homo sapien
gcaggttgtactttcgtttccgcta

SEQ ID NO: 1435301 - DNA, 25 bp, Homo sapien
ttcaactgaacattggtatagtctt

SEQ ID NO: 1435302 - DNA, 25 bp, Homo sapien
gtatagtcttattggtgcaggtctc

SEQ ID NO: 1435303 - DNA, 25 bp, Homo sapien
aaggatcttgaaagtgcctcttcac

SEQ ID NO: 1435304 - DNA, 25 bp, Homo sapien
gaaggatcttgaaagtgcctcttca

SEQ ID NO: 1435305 - DNA, 25 bp, Homo sapien
tcctaaagtactttgggatagctcc

SEQ ID NO: 1435306 - DNA, 25 bp, Homo sapien
cctatgagggctgcattcttggaag

SEQ ID NO: 1435307 - DNA, 25 bp, Homo sapien
ccttaagtgactccacaatacgaac

SEQ ID NO: 1435308 - DNA, 25 bp, Homo sapien
gacagcaggaatcaggtagccaaac

SEQ ID NO: 1435309 - DNA, 25 bp, Homo sapien
tctcatacacttcatattattattg

SEQ ID NO: 1435310 - DNA, 25 bp, Homo sapien
ttttaaaacactgcagacccgtgag

SEQ ID NO: 1435311 - DNA, 25 bp, Homo sapien
tatcagagtgatggcgctagtcagc

SEQ ID NO: 1435312 - DNA, 25 bp, Homo sapien
tagccttctaggatgtgttcccacc

SEQ ID NO: 1435313 - DNA, 25 bp, Homo sapien
gcttgtccccggcttaaatgataga

SEQ ID NO: 1435314 - DNA, 25 bp, Homo sapien
ccggggagaactatatcgattccta

SEQ ID NO: 1435315 - DNA, 25 bp, Homo sapien
accaccggggagaactatatcgatt

SEQ ID NO: 1435316 - DNA, 25 bp, Homo sapien
caccggggagaactatatcgattcc

SEQ ID NO: 1435317 - DNA, 25 bp, Homo sapien
ggggagaactatatcgattcctaac

SEQ ID NO: 1435318 - DNA, 25 bp, Homo sapien
cacagctcgttgatcccaaaaggga

SEQ ID NO: 1435319 - DNA, 25 bp, Homo sapien
ttcgagtcactctctacgcgcgagg

SEQ ID NO: 1435320 - DNA, 25 bp, Homo sapien
ctttagatggaagggaagccaacgg

SEQ ID NO: 1435321 - DNA, 25 bp, Homo sapien
ggcagctgcctatccaatccgattg

SEQ ID NO: 1435322 - DNA, 25 bp, Homo sapien
ggcaggtcggcggagactgcaaggg

SEQ ID NO: 1435323 - DNA, 25 bp, Homo sapien
catggagcaacagacaccgaggtaa

SEQ ID NO: 1435324 - DNA, 25 bp, Homo sapien
tccgaggagcctgagagacccacgg

SEQ ID NO: 1435325 - DNA, 25 bp, Homo sapien
cagtacctccggtgagtgccgaggc

SEQ ID NO: 1435326 - DNA, 25 bp, Homo sapien
caggaaactggagcttgttcttcat

SEQ ID NO: 1435327 - DNA, 25 bp, Homo sapien
cgggggaaccgcggagggcagacag

SEQ ID NO: 1435328 - DNA, 25 bp, Homo sapien
gcgggggaaccgcggagggcagaca

SEQ ID NO: 1435329 - DNA, 25 bp, Homo sapien
gagagggagaccgcaggaaactgga

SEQ ID NO: 1435330 - DNA, 25 bp, Homo sapien
gtggtttcatttggattcaaaatgt

SEQ ID NO: 1435331 - DNA, 25 bp, Homo sapien
caaaatgtatacttcctgtcctatc

SEQ ID NO: 1435332 - DNA, 25 bp, Homo sapien
atgtatacttcctgtcctatcttag

SEQ ID NO: 1435333 - DNA, 25 bp, Homo sapien
acttcctgtcctatcttaggtttca

SEQ ID NO: 1435334 - DNA, 25 bp, Homo sapien
gctgtaaattctcttgacgtctccc

SEQ ID NO: 1435335 - DNA, 25 bp, Homo sapien
tactttcagacacagattggatcta

SEQ ID NO: 1435336 - DNA, 25 bp, Homo sapien
cactctcaagtgtctcccattggga

SEQ ID NO: 1435337 - DNA, 25 bp, Homo sapien
gaaacttctgtttagccgtggcctc

SEQ ID NO: 1435338 - DNA, 25 bp, Homo sapien
tcttgaatctgggtttttccgttca

SEQ ID NO: 1435339 - DNA, 25 bp, Homo sapien
cttgaatctgggtttttccgttcat

SEQ ID NO: 1435340 - DNA, 25 bp, Homo sapien
caggtatttcttgaatctgggtttt

SEQ ID NO: 1435341 - DNA, 25 bp, Homo sapien
aatcccctacaaaagctgtgccggc

SEQ ID NO: 1435342 - DNA, 25 bp, Homo sapien
agcaacaacaatcccctacaaaagc

SEQ ID NO: 1435343 - DNA, 25 bp, Homo sapien
cccgcctcaccactctggattccag

SEQ ID NO: 1435344 - DNA, 25 bp, Homo sapien
cctacaaaagctgtgccggctttgg

SEQ ID NO: 1435345 - DNA, 25 bp, Homo sapien
tgtgaaacagccctactaccttcag

SEQ ID NO: 1435346 - DNA, 25 bp, Homo sapien
cataaaactgtttgagccgtcattg

SEQ ID NO: 1435347 - DNA, 25 bp, Homo sapien
tagggaaaattatgcctgtgaaaca

SEQ ID NO: 1435348 - DNA, 25 bp, Homo sapien
cctcaggttcaaggcccattaggga

SEQ ID NO: 1435349 - DNA, 25 bp, Homo sapien
caagaagcaacagcatggggtccag

SEQ ID NO: 1435350 - DNA, 25 bp, Homo sapien
agttggggcccaaaagacagtctga

SEQ ID NO: 1435351 - DNA, 25 bp, Homo sapien
tattcctaatgtgtgcaacatcaca

SEQ ID NO: 1435352 - DNA, 25 bp, Homo sapien
cagtatctgcgtagcccacagaggg

SEQ ID NO: 1435353 - DNA, 25 bp, Homo sapien
tcttggggcgggattcctcgcctta

SEQ ID NO: 1435354 - DNA, 25 bp, Homo sapien
ttctgactcttggggcgggattcct

SEQ ID NO: 1435355 - DNA, 25 bp, Homo sapien
gggattcctcgccttatcatcctca

SEQ ID NO: 1435356 - DNA, 25 bp, Homo sapien
ccccattctgcatgagaatttggtg

SEQ ID NO: 1435357 - DNA, 25 bp, Homo sapien
caaccagatctgtgtatcgattctt

SEQ ID NO: 1435358 - DNA, 25 bp, Homo sapien
ttttgtctgtgcaagacctgcagct

SEQ ID NO: 1435359 - DNA, 25 bp, Homo sapien
ttgtttttgtctgtgcaagacctgc

SEQ ID NO: 1435360 - DNA, 25 bp, Homo sapien
tctctccaaccagatctgtgtatcg

SEQ ID NO: 1435361 - DNA, 25 bp, Homo sapien
aaaggcataaatggtcagaacttga

SEQ ID NO: 1435362 - DNA, 25 bp, Homo sapien
gaaaggcataaatggtcagaacttg

SEQ ID NO: 1435363 - DNA, 25 bp, Homo sapien
aaaggcaagaatttcaactactcac

SEQ ID NO: 1435364 - DNA, 25 bp, Homo sapien
tcaactactcacaggtcatccaggg

SEQ ID NO: 1435365 - DNA, 25 bp, Homo sapien
tctgtggaattgagtgttgtagtcc

SEQ ID NO: 1435366 - DNA, 25 bp, Homo sapien
aactcagtctaggttctgtttaagc

SEQ ID NO: 1435367 - DNA, 25 bp, Homo sapien
ctctctgagaatgtacaaaggtatg

SEQ ID NO: 1435368 - DNA, 25 bp, Homo sapien
tagtccatgagaacctaactcagtc

SEQ ID NO: 1435369 - DNA, 25 bp, Homo sapien
gagcaagaaacaggatcagtacctg

SEQ ID NO: 1435370 - DNA, 25 bp, Homo sapien
ttcaagccttaagagccaattacag

SEQ ID NO: 1435371 - DNA, 25 bp, Homo sapien
tatttgtacttactccttgggcctg

SEQ ID NO: 1435372 - DNA, 25 bp, Homo sapien
ggctagctagcactcagagcaagaa

SEQ ID NO: 1435373 - DNA, 25 bp, Homo sapien
atcatcctgggtactcacatcattg

SEQ ID NO: 1435374 - DNA, 25 bp, Homo sapien
tcatcctgggtactcacatcattgt

SEQ ID NO: 1435375 - DNA, 25 bp, Homo sapien
cagaagggtgctaaatcttacaaac

SEQ ID NO: 1435376 - DNA, 25 bp, Homo sapien
tttcttcagctttgtagtttgtgaa

SEQ ID NO: 1435377 - DNA, 25 bp, Homo sapien
taatgtctcagtacagtatacagca

SEQ ID NO: 1435378 - DNA, 25 bp, Homo sapien
acaaacaagtaatagggcttcattt

SEQ ID NO: 1435379 - DNA, 25 bp, Homo sapien
ttgcgcagtcttcaacaaaaacttt

SEQ ID NO: 1435380 - DNA, 25 bp, Homo sapien
ctagacttctctccgagtgctttcc

SEQ ID NO: 1435381 - DNA, 25 bp, Homo sapien
tccaaatctgtagttgcgcagtctt

SEQ ID NO: 1435382 - DNA, 25 bp, Homo sapien
tctctccgagtgctttccaaatctg

SEQ ID NO: 1435383 - DNA, 25 bp, Homo sapien
aagtacacatggatttctaaaacca

SEQ ID NO: 1435384 - DNA, 25 bp, Homo sapien
tctaaaaccactgtaggaagattac

SEQ ID NO: 1435385 - DNA, 25 bp, Homo sapien
tgtaggaagattaccctgtctggct

SEQ ID NO: 1435386 - DNA, 25 bp, Homo sapien
aagattaccctgtctggctattcca

SEQ ID NO: 1435387 - DNA, 25 bp, Homo sapien
actacagatgtgcatcaccacgccc

SEQ ID NO: 1435388 - DNA, 25 bp, Homo sapien
ccaccacctcagcctcccaaagtgc

SEQ ID NO: 1435389 - DNA, 25 bp, Homo sapien
ttgcctcagcctccctagcagctgg

SEQ ID NO: 1435390 - DNA, 25 bp, Homo sapien
gactacagatgtgcatcaccacgcc

SEQ ID NO: 1435391 - DNA, 25 bp, Homo sapien
gataacaccaggattatatcccctt

SEQ ID NO: 1435392 - DNA, 25 bp, Homo sapien
tcttaagctgaggttctgttgtctg

SEQ ID NO: 1435393 - DNA, 25 bp, Homo sapien
cctctggttgggtagcctcataact

SEQ ID NO: 1435394 - DNA, 25 bp, Homo sapien
tgttgtctggttattagcatcagct

SEQ ID NO: 1435395 - DNA, 25 bp, Homo sapien
gagtcaggcagtagtttttcacctg

SEQ ID NO: 1435396 - DNA, 25 bp, Homo sapien
acttgtagtgcaccttgagtgtgta

SEQ ID NO: 1435397 - DNA, 25 bp, Homo sapien
cttagacaccatgtcccggacctgg

SEQ ID NO: 1435398 - DNA, 25 bp, Homo sapien
tcagcttagtgtgttccagccggag

SEQ ID NO: 1435399 - DNA, 25 bp, Homo sapien
gagtcttcatgactaccgtgtactt

SEQ ID NO: 1435400 - DNA, 25 bp, Homo sapien
catgtctgtggttgatagcccaagc

SEQ ID NO: 1435401 - DNA, 25 bp, Homo sapien
caccgcagtttcgtgatttggcaca

SEQ ID NO: 1435402 - DNA, 25 bp, Homo sapien
tctgtaaggtagcaactggttcgac

SEQ ID NO: 1435403 - DNA, 25 bp, Homo sapien
tagcccaacccttgcttggacagga

SEQ ID NO: 1435404 - DNA, 25 bp, Homo sapien
cttaggctcttctttttgtttctgg

SEQ ID NO: 1435405 - DNA, 25 bp, Homo sapien
ttaggctcttctttttgtttctggc

SEQ ID NO: 1435406 - DNA, 25 bp, Homo sapien
ctttggaactaggaggagctgggat

SEQ ID NO: 1435407 - DNA, 25 bp, Homo sapien
tgtcggactgcggagagctttcctc

SEQ ID NO: 1435408 - DNA, 25 bp, Homo sapien
gggctttggaactaggaggagctgg

SEQ ID NO: 1435409 - DNA, 25 bp, Homo sapien
aggagctgggatgtcggactgcgga

SEQ ID NO: 1435410 - DNA, 25 bp, Homo sapien
ttcaaggtagttgcagggaacaagc

SEQ ID NO: 1435411 - DNA, 25 bp, Homo sapien
gggtggatccgcagctcaactggtt

SEQ ID NO: 1435412 - DNA, 25 bp, Homo sapien
ctgctgagggtggatccgcagctca

SEQ ID NO: 1435413 - DNA, 25 bp, Homo sapien
tcaactggttcaaggtagttgcagg

SEQ ID NO: 1435414 - DNA, 25 bp, Homo sapien
acccaaatagcacacggtgagcctc

SEQ ID NO: 1435415 - DNA, 25 bp, Homo sapien
ttttgtctcaggcacaaacccaaat

SEQ ID NO: 1435416 - DNA, 25 bp, Homo sapien
gcccagttatcattgcccttcttca

SEQ ID NO: 1435417 - DNA, 25 bp, Homo sapien
caaacccaaatagcacacggtgagc

SEQ ID NO: 1435418 - DNA, 25 bp, Homo sapien
ctgtaggttatgtcaccctttgttt

SEQ ID NO: 1435419 - DNA, 25 bp, Homo sapien
tttcatcttacagaagaaggacttc

SEQ ID NO: 1435420 - DNA, 25 bp, Homo sapien
ttcttaagaaagctgtaggttatgt

SEQ ID NO: 1435421 - DNA, 25 bp, Homo sapien
gaccaggcttgcttcatcactttga

SEQ ID NO: 1435422 - DNA, 25 bp, Homo sapien
ccaatgggacaccacgtagctgcag

SEQ ID NO: 1435423 - DNA, 25 bp, Homo sapien
gtagctgcagccaagccctgatggc

SEQ ID NO: 1435424 - DNA, 25 bp, Homo sapien
acagagggccaatgggacaccacgt

SEQ ID NO: 1435425 - DNA, 25 bp, Homo sapien
ccacagtcaagactcccatccccat

SEQ ID NO: 1435426 - DNA, 25 bp, Homo sapien
ctgaagatctctggggttttcggtc

SEQ ID NO: 1435427 - DNA, 25 bp, Homo sapien
gcttgggcagaaaaagggttcactc

SEQ ID NO: 1435428 - DNA, 25 bp, Homo sapien
ccagcttgggcagaaaaagggttca

SEQ ID NO: 1435429 - DNA, 25 bp, Homo sapien
aagctctgtgtgcatttctagatcc

SEQ ID NO: 1435430 - DNA, 25 bp, Homo sapien
tatcatccagttcatctgagctcac

SEQ ID NO: 1435431 - DNA, 25 bp, Homo sapien
agtgcgctgcctgtgttcccgaagg

SEQ ID NO: 1435432 - DNA, 25 bp, Homo sapien
tcagtgcgctgcctgtgttcccgaa

SEQ ID NO: 1435433 - DNA, 25 bp, Homo sapien
gcgctgcctgtgttcccgaaggaaa

SEQ ID NO: 1435434 - DNA, 25 bp, Homo sapien
gctgcctgtgttcccgaaggaaacc

SEQ ID NO: 1435435 - DNA, 25 bp, Homo sapien
cacatgagcagatgggtagagccag

SEQ ID NO: 1435436 - DNA, 25 bp, Homo sapien
agccttccatagcttgtgtttcagc

SEQ ID NO: 1435437 - DNA, 25 bp, Homo sapien
ggttccccacttgcccctgtactca

SEQ ID NO: 1435438 - DNA, 25 bp, Homo sapien
caagaagaggctttgttaataagcc

SEQ ID NO: 1435439 - DNA, 25 bp, Homo sapien
gttgcagaggggcaaacccagagaa

SEQ ID NO: 1435440 - DNA, 25 bp, Homo sapien
ctgtggttgcagaggggcaaaccca

SEQ ID NO: 1435441 - DNA, 25 bp, Homo sapien
agagaaactgtcttgatccaccaca

SEQ ID NO: 1435442 - DNA, 25 bp, Homo sapien
aaactgtcttgatccaccacagatg

SEQ ID NO: 1435443 - DNA, 25 bp, Homo sapien
tagacctgttcttacgtgagcctgg

SEQ ID NO: 1435444 - DNA, 25 bp, Homo sapien
ttcagacgtggacagtaactaagga

SEQ ID NO: 1435445 - DNA, 25 bp, Homo sapien
ttcagcaactgaagaaacgagcatt

SEQ ID NO: 1435446 - DNA, 25 bp, Homo sapien
taactaaggattagattcctgagcc

SEQ ID NO: 1435447 - DNA, 25 bp, Homo sapien
gccacttgtctctcatttggtcgaa

SEQ ID NO: 1435448 - DNA, 25 bp, Homo sapien
ccacagggatcaccactggctcata

SEQ ID NO: 1435449 - DNA, 25 bp, Homo sapien
catttggtcgaaacagcttgcccac

SEQ ID NO: 1435450 - DNA, 25 bp, Homo sapien
gcctaggtaatccttcttggccagc

SEQ ID NO: 1435451 - DNA, 25 bp, Homo sapien
gacacactccatcgccttgtcgatt

SEQ ID NO: 1435452 - DNA, 25 bp, Homo sapien
tgggctcagacttcatgctcgtggc

SEQ ID NO: 1435453 - DNA, 25 bp, Homo sapien
catgctcgtggccaatgctaactgt

SEQ ID NO: 1435454 - DNA, 25 bp, Homo sapien
ttggcatacatgaaagcaatgttat

SEQ ID NO: 1435455 - DNA, 25 bp, Homo sapien
tggttccctcgaagctgaatcaagg

SEQ ID NO: 1435456 - DNA, 25 bp, Homo sapien
aacagcttgaactggagccccagga

SEQ ID NO: 1435457 - DNA, 25 bp, Homo sapien
gctgaatcaaggcttctttaaggtc

SEQ ID NO: 1435458 - DNA, 25 bp, Homo sapien
caggatcttatagtctatcagctgg

SEQ ID NO: 1435459 - DNA, 25 bp, Homo sapien
ccacatcaatagggcccacaggcat

SEQ ID NO: 1435460 - DNA, 25 bp, Homo sapien
tggcccaggccttgaccatgggctc

SEQ ID NO: 1435461 - DNA, 25 bp, Homo sapien
ccacaggcatgtaggtgggacctgg

SEQ ID NO: 1435462 - DNA, 25 bp, Homo sapien
ctggcccaggccttgaccatgggct

SEQ ID NO: 1435463 - DNA, 25 bp, Homo sapien
ctcggttaatgcttctggtaaaggc

SEQ ID NO: 1435464 - DNA, 25 bp, Homo sapien
gtagtagagcatccctcgttggaag

SEQ ID NO: 1435465 - DNA, 25 bp, Homo sapien
tgccaagtgcttgtctcggttaatg

SEQ ID NO: 1435466 - DNA, 25 bp, Homo sapien
ttggaagtaagccactgccaagtgc

SEQ ID NO: 1435467 - DNA, 25 bp, Homo sapien
tgttcttcaggatagtgtacatgca

SEQ ID NO: 1435468 - DNA, 25 bp, Homo sapien
ctggacggcactgaaggcatccagg

SEQ ID NO: 1435469 - DNA, 25 bp, Homo sapien
aatgttgaagcaaatccgggagtgg

SEQ ID NO: 1435470 - DNA, 25 bp, Homo sapien
ttcaggatagtgtacatgcagccaa

SEQ ID NO: 1435471 - DNA, 25 bp, Homo sapien
aggttggagcgtctcccctagcagg

SEQ ID NO: 1435472 - DNA, 25 bp, Homo sapien
cccaaggtgttcactttctgggcca

SEQ ID NO: 1435473 - DNA, 25 bp, Homo sapien
ggcaactgactcataaccctaccat

SEQ ID NO: 1435474 - DNA, 25 bp, Homo sapien
aatgtccccaccttttggcaactga

SEQ ID NO: 1435475 - DNA, 25 bp, Homo sapien
cttcaagccaaaaacagcctgaagg

SEQ ID NO: 1435476 - DNA, 25 bp, Homo sapien
tcaagccaaaaacagcctgaaggct

SEQ ID NO: 1435477 - DNA, 25 bp, Homo sapien
aaacagcctgaaggctgaaagacta

SEQ ID NO: 1435478 - DNA, 25 bp, Homo sapien
aaaaacagcctgaaggctgaaagac

SEQ ID NO: 1435479 - DNA, 25 bp, Homo sapien
cgaaggcctgctaaaatagcactct

SEQ ID NO: 1435480 - DNA, 25 bp, Homo sapien
actgccctgaaatcagtcctgcctg

SEQ ID NO: 1435481 - DNA, 25 bp, Homo sapien
gcctgaaagcgctcaaacccatgat

SEQ ID NO: 1435482 - DNA, 25 bp, Homo sapien
aaacccatgatctcgccttctgaac

SEQ ID NO: 1435483 - DNA, 25 bp, Homo sapien
taccaacgcagacatggcttgcaca

SEQ ID NO: 1435484 - DNA, 25 bp, Homo sapien
cgcagacatggcttgcacattctcc

SEQ ID NO: 1435485 - DNA, 25 bp, Homo sapien
caactaccaacgcagacatggcttg

SEQ ID NO: 1435486 - DNA, 25 bp, Homo sapien
caacgcagacatggcttgcacattc

SEQ ID NO: 1435487 - DNA, 25 bp, Homo sapien
tcatcccactgaccgcatcagagct

SEQ ID NO: 1435488 - DNA, 25 bp, Homo sapien
cccactgaccgcatcagagctgtgg

SEQ ID NO: 1435489 - DNA, 25 bp, Homo sapien
gccatcatcccactgaccgcatcag

SEQ ID NO: 1435490 - DNA, 25 bp, Homo sapien
ttgagaggttgacagcacacaccag

SEQ ID NO: 1435491 - DNA, 25 bp, Homo sapien
cattgctgagcaaagggctcagggc

SEQ ID NO: 1435492 - DNA, 25 bp, Homo sapien
gcaccattgctgagcaaagggctca

SEQ ID NO: 1435493 - DNA, 25 bp, Homo sapien
tgaatgcaccattgctgagcaaagg

SEQ ID NO: 1435494 - DNA, 25 bp, Homo sapien
tgagcaaagggctcagggccaacac

SEQ ID NO: 1435495 - DNA, 25 bp, Homo sapien
ctgatactgcccgatcgcctcagaa

SEQ ID NO: 1435496 - DNA, 25 bp, Homo sapien
actgatactgcccgatcgcctcaga

SEQ ID NO: 1435497 - DNA, 25 bp, Homo sapien
gatactgcccgatcgcctcagaagc

SEQ ID NO: 1435498 - DNA, 25 bp, Homo sapien
agactgatactgcccgatcgcctca

SEQ ID NO: 1435499 - DNA, 25 bp, Homo sapien
catcaagctcagcaaatgacccagg

SEQ ID NO: 1435500 - DNA, 25 bp, Homo sapien
tcaagctcagcaaatgacccaggct

SEQ ID NO: 1435501 - DNA, 25 bp, Homo sapien
ccatcaagctcagcaaatgacccag

SEQ ID NO: 1435502 - DNA, 25 bp, Homo sapien
agctcagcaaatgacccaggctgta

SEQ ID NO: 1435503 - DNA, 25 bp, Homo sapien
tctacacggctggagaaagtataat

SEQ ID NO: 1435504 - DNA, 25 bp, Homo sapien
actgtagcactgtttgtaactgcaa

SEQ ID NO: 1435505 - DNA, 25 bp, Homo sapien
gacaaacacatagaataggtaaagg

SEQ ID NO: 1435506 - DNA, 25 bp, Homo sapien
ggaattgatctacaaataggcttga

SEQ ID NO: 1435507 - DNA, 25 bp, Homo sapien
gaatacactgacctttaacttagca

SEQ ID NO: 1435508 - DNA, 25 bp, Homo sapien
aatgcctctgaagggaataaggaag

SEQ ID NO: 1435509 - DNA, 25 bp, Homo sapien
agaaaatcttagttgccctggcatc

SEQ ID NO: 1435510 - DNA, 25 bp, Homo sapien
cagaaccattggctaatgaatacac

SEQ ID NO: 1435511 - DNA, 25 bp, Homo sapien
tgaagtagcaccaccttgaggcaga

SEQ ID NO: 1435512 - DNA, 25 bp, Homo sapien
cacgtggtactcatggtggctctga

SEQ ID NO: 1435513 - DNA, 25 bp, Homo sapien
ggctctgatttccacctaaggctga

SEQ ID NO: 1435514 - DNA, 25 bp, Homo sapien
tgctcttagaaggtgatgccacaga

SEQ ID NO: 1435515 - DNA, 25 bp, Homo sapien
tacttcccaattaggctgagagcaa

SEQ ID NO: 1435516 - DNA, 25 bp, Homo sapien
tataccctgggctgacatttagtca

SEQ ID NO: 1435517 - DNA, 25 bp, Homo sapien
ttagtcaggaggcaacagttgaacc

SEQ ID NO: 1435518 - DNA, 25 bp, Homo sapien
tgctgttacccaatgaccaagaagg

SEQ ID NO: 1435519 - DNA, 25 bp, Homo sapien
ctcttggtcaggtggtttgttttag

SEQ ID NO: 1435520 - DNA, 25 bp, Homo sapien
cataagtcagtgattacaaaactgg

SEQ ID NO: 1435521 - DNA, 25 bp, Homo sapien
tttgagaactgatttggtttgtcca

SEQ ID NO: 1435522 - DNA, 25 bp, Homo sapien
ttctgcaccagtttgcacataagtc

SEQ ID NO: 1435523 - DNA, 25 bp, Homo sapien
ttgagatcccaactaccctgaagaa

SEQ ID NO: 1435524 - DNA, 25 bp, Homo sapien
tacagataatcaggaggcaagcaaa

SEQ ID NO: 1435525 - DNA, 25 bp, Homo sapien
caaaagtttgatgttcatgcccaac

SEQ ID NO: 1435526 - DNA, 25 bp, Homo sapien
ccctgggtgaccacaaataaattga

SEQ ID NO: 1435527 - DNA, 25 bp, Homo sapien
gcaattcccactcccgaggcagata

SEQ ID NO: 1435528 - DNA, 25 bp, Homo sapien
ttttggtctttgtaccagcaattcc

SEQ ID NO: 1435529 - DNA, 25 bp, Homo sapien
ggcagataatccacttcctgccaga

SEQ ID NO: 1435530 - DNA, 25 bp, Homo sapien
gggcagcggtggcatttggttgttt

SEQ ID NO: 1435531 - DNA, 25 bp, Homo sapien
tgcagtcaagacacgaacaatggac

SEQ ID NO: 1435532 - DNA, 25 bp, Homo sapien
gacacgaacaatggaccctactcct

SEQ ID NO: 1435533 - DNA, 25 bp, Homo sapien
gtcaagacacgaacaatggacccta

SEQ ID NO: 1435534 - DNA, 25 bp, Homo sapien
cttgcagtcaagacacgaacaatgg

SEQ ID NO: 1435535 - DNA, 25 bp, Homo sapien
atgttgacagaataataaaaggtca

SEQ ID NO: 1435536 - DNA, 25 bp, Homo sapien
tgttgacagaataataaaaggtcaa

SEQ ID NO: 1435537 - DNA, 25 bp, Homo sapien
ggtcaattctcatatttggtaaaac

SEQ ID NO: 1435538 - DNA, 25 bp, Homo sapien
ataaaaggtcaattctcatatttgg

SEQ ID NO: 1435539 - DNA, 25 bp, Homo sapien
tatccagttttttacccaaagctca

SEQ ID NO: 1435540 - DNA, 25 bp, Homo sapien
ggttctatttacatgttatccagtt

SEQ ID NO: 1435541 - DNA, 25 bp, Homo sapien
cagcatctacttacattgcaaaata

SEQ ID NO: 1435542 - DNA, 25 bp, Homo sapien
tcttttgacagatgatgtaccagca

SEQ ID NO: 1435543 - DNA, 25 bp, Homo sapien
gttgtcattgtcattccctattgta

SEQ ID NO: 1435544 - DNA, 25 bp, Homo sapien
ttatttaggtgagagaggttgtcat

SEQ ID NO: 1435545 - DNA, 25 bp, Homo sapien
aaatcaaaatggttatttaggtgag

SEQ ID NO: 1435546 - DNA, 25 bp, Homo sapien
gaaccagtcatatagatttataatt

SEQ ID NO: 1435547 - DNA, 25 bp, Homo sapien
ttcaagacaatgctgcctgcccggt

SEQ ID NO: 1435548 - DNA, 25 bp, Homo sapien
gccattgcagtaacatagcactgct

SEQ ID NO: 1435549 - DNA, 25 bp, Homo sapien
tgctattgtcagacgggctctcaaa

SEQ ID NO: 1435550 - DNA, 25 bp, Homo sapien
agatccacaccattcttgtccagag

SEQ ID NO: 1435551 - DNA, 25 bp, Homo sapien
tcactgtgttgtagtctgcgactca

SEQ ID NO: 1435552 - DNA, 25 bp, Homo sapien
tattgcgaaggaaagctcatgtaca

SEQ ID NO: 1435553 - DNA, 25 bp, Homo sapien
ggacagatcgtgtaaggcctacagg

SEQ ID NO: 1435554 - DNA, 25 bp, Homo sapien
tacccatccggccaagcaaaggaaa

SEQ ID NO: 1435555 - DNA, 25 bp, Homo sapien
tgataggggggttcttcagagctgc

SEQ ID NO: 1435556 - DNA, 25 bp, Homo sapien
tgttgataggggggttcttcagagc

SEQ ID NO: 1435557 - DNA, 25 bp, Homo sapien
tggtgttgataggggggttcttcag

SEQ ID NO: 1435558 - DNA, 25 bp, Homo sapien
ataggggggttcttcagagctgcct

SEQ ID NO: 1435559 - DNA, 25 bp, Homo sapien
cagcaaaggatggcccccaggaaag

SEQ ID NO: 1435560 - DNA, 25 bp, Homo sapien
caaaggatggcccccaggaaagcat

SEQ ID NO: 1435561 - DNA, 25 bp, Homo sapien
agcaaaggatggcccccaggaaagc

SEQ ID NO: 1435562 - DNA, 25 bp, Homo sapien
gcaaaggatggcccccaggaaagca

SEQ ID NO: 1435563 - DNA, 25 bp, Homo sapien
caagtgaacaccttgatagtctttc

SEQ ID NO: 1435564 - DNA, 25 bp, Homo sapien
ggtttccaggatgttaatcaaaggc

SEQ ID NO: 1435565 - DNA, 25 bp, Homo sapien
tcccagtgagatacatatgcaaaca

SEQ ID NO: 1435566 - DNA, 25 bp, Homo sapien
ccttggttctaactatcaagtgaac

SEQ ID NO: 1435567 - DNA, 25 bp, Homo sapien
catatgtcccttaggtggcagctta

SEQ ID NO: 1435568 - DNA, 25 bp, Homo sapien
cagaaggccaatcagactgtcagaa

SEQ ID NO: 1435569 - DNA, 25 bp, Homo sapien
gaaatgctggtagaacatgctggca

SEQ ID NO: 1435570 - DNA, 25 bp, Homo sapien
tctttgaaagcactagtgagttagc

SEQ ID NO: 1435571 - DNA, 25 bp, Homo sapien
gaaagcacagggaccctcaattttc

SEQ ID NO: 1435572 - DNA, 25 bp, Homo sapien
gaccctcaattttcgaacagtccca

SEQ ID NO: 1435573 - DNA, 25 bp, Homo sapien
gaaatttctggagctaatgtgaccc

SEQ ID NO: 1435574 - DNA, 25 bp, Homo sapien
aactaaggcgctcggcaccagcctt

SEQ ID NO: 1435575 - DNA, 25 bp, Homo sapien
ccggcgggaccagttcccgaggcag

SEQ ID NO: 1435576 - DNA, 25 bp, Homo sapien
ggcactcgggtgcaacctgaggaat

SEQ ID NO: 1435577 - DNA, 25 bp, Homo sapien
cggcgggaccagttcccgaggcagg

SEQ ID NO: 1435578 - DNA, 25 bp, Homo sapien
gcaggcactcgggtgcaacctgagg

SEQ ID NO: 1435579 - DNA, 25 bp, Homo sapien
tctcctgccgactgggtaggaaacg

SEQ ID NO: 1435580 - DNA, 25 bp, Homo sapien
ttccaagagtgggaccctcgcgtct

SEQ ID NO: 1435581 - DNA, 25 bp, Homo sapien
agagcgggcgatcccaaagagacag

SEQ ID NO: 1435582 - DNA, 25 bp, Homo sapien
gcaggcttccaagagtgggaccctc

SEQ ID NO: 1435583 - DNA, 25 bp, Homo sapien
cgggtcccaggagaagggcgggctg

SEQ ID NO: 1435584 - DNA, 25 bp, Homo sapien
aggttgagagggcagctccgcgccg

SEQ ID NO: 1435585 - DNA, 25 bp, Homo sapien
gctccgcgccggtgccccgcggatc

SEQ ID NO: 1435586 - DNA, 25 bp, Homo sapien
ggtgccccgcggatcctgcaggctc

SEQ ID NO: 1435587 - DNA, 25 bp, Homo sapien
ccgacgacactgtgttcttcgacat

SEQ ID NO: 1435588 - DNA, 25 bp, Homo sapien
gaacttgttctcgtcatattcatcc

SEQ ID NO: 1435589 - DNA, 25 bp, Homo sapien
ttctcgtcatattcatccacgtcca

SEQ ID NO: 1435590 - DNA, 25 bp, Homo sapien
ccatcttcttcgtccacgaacttgt

SEQ ID NO: 1435591 - DNA, 25 bp, Homo sapien
aaaggcctcttcttggcgctgcctc

SEQ ID NO: 1435592 - DNA, 25 bp, Homo sapien
caatcccgaccagcggcaaaggcct

SEQ ID NO: 1435593 - DNA, 25 bp, Homo sapien
cccaatcccgaccagcggcaaaggc

SEQ ID NO: 1435594 - DNA, 25 bp, Homo sapien
aggcctcttcttggcgctgcctcta

SEQ ID NO: 1435595 - DNA, 25 bp, Homo sapien
agcaagcccagcccagcaacccact

SEQ ID NO: 1435596 - DNA, 25 bp, Homo sapien
caagcccagcccagcaacccactac

SEQ ID NO: 1435597 - DNA, 25 bp, Homo sapien
ctcagcaagcccagcccagcaaccc

SEQ ID NO: 1435598 - DNA, 25 bp, Homo sapien
tcagcaagcccagcccagcaaccca

SEQ ID NO: 1435599 - DNA, 25 bp, Homo sapien
tgaggcgtcgccgactgccgcggct

SEQ ID NO: 1435600 - DNA, 25 bp, Homo sapien
gactgccgcggctcggaccgttctg

SEQ ID NO: 1435601 - DNA, 25 bp, Homo sapien
gctcggaccgttctgggcctgcgcg

SEQ ID NO: 1435602 - DNA, 25 bp, Homo sapien
ttccctcttccgctctgaggcgtcg

SEQ ID NO: 1435603 - DNA, 25 bp, Homo sapien
ggaaggagcgcgcaggacacagcgc

SEQ ID NO: 1435604 - DNA, 25 bp, Homo sapien
gcgggctctccgcaggcaaggggcg

SEQ ID NO: 1435605 - DNA, 25 bp, Homo sapien
ctcccttggcgcctcccacgctgcc

SEQ ID NO: 1435606 - DNA, 25 bp, Homo sapien
ttcctcctcaggttcgcgctccctt

SEQ ID NO: 1435607 - DNA, 25 bp, Homo sapien
ccagtctagggggtctcagattggc

SEQ ID NO: 1435608 - DNA, 25 bp, Homo sapien
tggcttttgctgcagccgtcaacga

SEQ ID NO: 1435609 - DNA, 25 bp, Homo sapien
ggttcccatagaaacgcttttctgc

SEQ ID NO: 1435610 - DNA, 25 bp, Homo sapien
cgcttttctgcggtccagtctaggg

SEQ ID NO: 1435611 - DNA, 25 bp, Homo sapien
aggcagagtgatgcacacccgggcg

SEQ ID NO: 1435612 - DNA, 25 bp, Homo sapien
gagtgatgcacacccgggcgcccag

SEQ ID NO: 1435613 - DNA, 25 bp, Homo sapien
cgagtgccctgcagttggtaggagt

SEQ ID NO: 1435614 - DNA, 25 bp, Homo sapien
gagtgccctgcagttggtaggagta

SEQ ID NO: 1435615 - DNA, 25 bp, Homo sapien
taataggtactcaacgtgtttctag

SEQ ID NO: 1435616 - DNA, 25 bp, Homo sapien
tgtgtgtatgtggagaaatctgtct

SEQ ID NO: 1435617 - DNA, 25 bp, Homo sapien
tttggacgaacattcagaaattgag

SEQ ID NO: 1435618 - DNA, 25 bp, Homo sapien
caaatgagtgcttaccctgatataa

SEQ ID NO: 1435619 - DNA, 25 bp, Homo sapien
gcagaagagctttttcccacacaaa

SEQ ID NO: 1435620 - DNA, 25 bp, Homo sapien
gacaggagccattggaggttctcat

SEQ ID NO: 1435621 - DNA, 25 bp, Homo sapien
tagaaaatcactggtttgctcctgc

SEQ ID NO: 1435622 - DNA, 25 bp, Homo sapien
tcaaagaggcaagtggcagcaaatg

SEQ ID NO: 1435623 - DNA, 25 bp, Homo sapien
atctgcctccttgctacttgcaaac

SEQ ID NO: 1435624 - DNA, 25 bp, Homo sapien
ttaagtgccttacgatattcctggg

SEQ ID NO: 1435625 - DNA, 25 bp, Homo sapien
cattggtggtaagtccctgagaggc

SEQ ID NO: 1435626 - DNA, 25 bp, Homo sapien
tcagccagtgctctcccagttaaaa

SEQ ID NO: 1435627 - DNA, 25 bp, Homo sapien
catatgcgttgtgcctgtcagccag

SEQ ID NO: 1435628 - DNA, 25 bp, Homo sapien
ggatataattcccagtgcaactgct

SEQ ID NO: 1435629 - DNA, 25 bp, Homo sapien
gagagcttcgcggttccatgctgag

SEQ ID NO: 1435630 - DNA, 25 bp, Homo sapien
caccaggctaccagaagaagttttt

SEQ ID NO: 1435631 - DNA, 25 bp, Homo sapien
caactgctagcatggcccttttgca

SEQ ID NO: 1435632 - DNA, 25 bp, Homo sapien
tggtaaggacaattagagcaatcga

SEQ ID NO: 1435633 - DNA, 25 bp, Homo sapien
gagcaatcgagagagaagcttagcc

SEQ ID NO: 1435634 - DNA, 25 bp, Homo sapien
taaggacaattagagcaatcgagag

SEQ ID NO: 1435635 - DNA, 25 bp, Homo sapien
gaagcttagccagtaatatggtttt

SEQ ID NO: 1435636 - DNA, 25 bp, Homo sapien
ggtactcctcatatatgggctccat

SEQ ID NO: 1435637 - DNA, 25 bp, Homo sapien
taggtactcctcatatatgggctcc

SEQ ID NO: 1435638 - DNA, 25 bp, Homo sapien
tttgctaggtactcctcatatatgg

SEQ ID NO: 1435639 - DNA, 25 bp, Homo sapien
catgatttgctaggtactcctcata

SEQ ID NO: 1435640 - DNA, 25 bp, Homo sapien
tgctagatttactgtcttctagctg

SEQ ID NO: 1435641 - DNA, 25 bp, Homo sapien
gctagatttactgtcttctagctgc

SEQ ID NO: 1435642 - DNA, 25 bp, Homo sapien
tgtaatgggttcaggactctttcac

SEQ ID NO: 1435643 - DNA, 25 bp, Homo sapien
aagtcccatgccctgtttcaagtag

SEQ ID NO: 1435644 - DNA, 25 bp, Homo sapien
gcaattgtgctgtaaagattcacct

SEQ ID NO: 1435645 - DNA, 25 bp, Homo sapien
ggctacctctaagaacactgttgat

SEQ ID NO: 1435646 - DNA, 25 bp, Homo sapien
tctcctggtctagagtaggtgccag

SEQ ID NO: 1435647 - DNA, 25 bp, Homo sapien
gcacctttctcctggtctagagtag

SEQ ID NO: 1435648 - DNA, 25 bp, Homo sapien
ggcctggcggttctgttgcctgcgt

SEQ ID NO: 1435649 - DNA, 25 bp, Homo sapien
ctggtctagagtaggtgccaggcct

SEQ ID NO: 1435650 - DNA, 25 bp, Homo sapien
gagcagagagttgacttcctccaag

SEQ ID NO: 1435651 - DNA, 25 bp, Homo sapien
gggagcagagagttgacttcctcca

SEQ ID NO: 1435652 - DNA, 25 bp, Homo sapien
gcagagagttgacttcctccaagag

SEQ ID NO: 1435653 - DNA, 25 bp, Homo sapien
cagagagttgacttcctccaagagg

SEQ ID NO: 1435654 - DNA, 25 bp, Homo sapien
tcttctcgaagcttcgccacgcctg

SEQ ID NO: 1435655 - DNA, 25 bp, Homo sapien
ttctcgaagcttcgccacgcctgtt

SEQ ID NO: 1435656 - DNA, 25 bp, Homo sapien
cttctgtcttctcgaagcttcgcca

SEQ ID NO: 1435657 - DNA, 25 bp, Homo sapien
tctgtcttctcgaagcttcgccacg

SEQ ID NO: 1435658 - DNA, 25 bp, Homo sapien
tatttcctggactcatctttccaca

SEQ ID NO: 1435659 - DNA, 25 bp, Homo sapien
gagtgagtccagctcaggattcaca

SEQ ID NO: 1435660 - DNA, 25 bp, Homo sapien
tttataacaccatgggagtgagtcc

SEQ ID NO: 1435661 - DNA, 25 bp, Homo sapien
aggactcgctttccctgatttgagg

SEQ ID NO: 1435662 - DNA, 25 bp, Homo sapien
tcaaaagtaattaggcggctgtccc

SEQ ID NO: 1435663 - DNA, 25 bp, Homo sapien
tctatcaattgcatcctttaggatt

SEQ ID NO: 1435664 - DNA, 25 bp, Homo sapien
ttgaagattgttgcaatgtgtatac

SEQ ID NO: 1435665 - DNA, 25 bp, Homo sapien
gatttgtgttaatgcccccctttca

SEQ ID NO: 1435666 - DNA, 25 bp, Homo sapien
gttctgagctgatcatccagaatga

SEQ ID NO: 1435667 - DNA, 25 bp, Homo sapien
cagctcttctgttctgagctgatca

SEQ ID NO: 1435668 - DNA, 25 bp, Homo sapien
gagccaatcatagtgcctggagtga

SEQ ID NO: 1435669 - DNA, 25 bp, Homo sapien
atcagagccaatcatagtgcctgga

SEQ ID NO: 1435670 - DNA, 25 bp, Homo sapien
cagtgttggatttattgggcactgg

SEQ ID NO: 1435671 - DNA, 25 bp, Homo sapien
ttcctgcagtgttggatttattggg

SEQ ID NO: 1435672 - DNA, 25 bp, Homo sapien
tggatgacaacactctgtagtgcta

SEQ ID NO: 1435673 - DNA, 25 bp, Homo sapien
tgtagtgctatacagatttcctagc

SEQ ID NO: 1435674 - DNA, 25 bp, Homo sapien
tgaccagggaaggtgaagagaggat

SEQ ID NO: 1435675 - DNA, 25 bp, Homo sapien
tttctctcctggatgtgtttcccat

SEQ ID NO: 1435676 - DNA, 25 bp, Homo sapien
gaggataagagacattttatcttca

SEQ ID NO: 1435677 - DNA, 25 bp, Homo sapien
tgaaatggaggctcatgccagggct

SEQ ID NO: 1435678 - DNA, 25 bp, Homo sapien
ttgcagtctggctgaaaatgtagta

SEQ ID NO: 1435679 - DNA, 25 bp, Homo sapien
gttgggggaattgggctggatgggc

SEQ ID NO: 1435680 - DNA, 25 bp, Homo sapien
cctgagttgggggaattgggctgga

SEQ ID NO: 1435681 - DNA, 25 bp, Homo sapien
ggaattgggctggatgggcacacac

SEQ ID NO: 1435682 - DNA, 25 bp, Homo sapien
gggaattgggctggatgggcacaca

SEQ ID NO: 1435683 - DNA, 25 bp, Homo sapien
caggcttgccctctggcacccattc

SEQ ID NO: 1435684 - DNA, 25 bp, Homo sapien
cttgccctctggcacccattcctgg

SEQ ID NO: 1435685 - DNA, 25 bp, Homo sapien
tgccctctggcacccattcctggtt

SEQ ID NO: 1435686 - DNA, 25 bp, Homo sapien
tctggcacccattcctggttcccac

SEQ ID NO: 1435687 - DNA, 25 bp, Homo sapien
cctccatgaagtccagcaagaagga

SEQ ID NO: 1435688 - DNA, 25 bp, Homo sapien
cctggtggtgatcatgtcattggtg

SEQ ID NO: 1435689 - DNA, 25 bp, Homo sapien
ggagtacatggctcttaaagccagg

SEQ ID NO: 1435690 - DNA, 25 bp, Homo sapien
tggtgatcatgtcattggtgagctc

SEQ ID NO: 1435691 - DNA, 25 bp, Homo sapien
tccacccttgtcatgtaagtctttt

SEQ ID NO: 1435692 - DNA, 25 bp, Homo sapien
tctttttgatctatacgtctaactc

SEQ ID NO: 1435693 - DNA, 25 bp, Homo sapien
tgtaagtctttttgatctatacgtc

SEQ ID NO: 1435694 - DNA, 25 bp, Homo sapien
gatctatacgtctaactcttatttt

SEQ ID NO: 1435695 - DNA, 25 bp, Homo sapien
ggaccccaaatactaactgttgatg

SEQ ID NO: 1435696 - DNA, 25 bp, Homo sapien
cactgagattttcctgcatacaccg

SEQ ID NO: 1435697 - DNA, 25 bp, Homo sapien
tagccaatatatccatgactagatg

SEQ ID NO: 1435698 - DNA, 25 bp, Homo sapien
tgatgaggatatgaaaccactgaga

SEQ ID NO: 1435699 - DNA, 25 bp, Homo sapien
tctggtgggagtgccccttttctcc

SEQ ID NO: 1435700 - DNA, 25 bp, Homo sapien
taatagtccaatttaggtgtttctg

SEQ ID NO: 1435701 - DNA, 25 bp, Homo sapien
tttctcaatcatataatagtccaat

SEQ ID NO: 1435702 - DNA, 25 bp, Homo sapien
tgtgataatttagggaccaaggcta

SEQ ID NO: 1435703 - DNA, 25 bp, Homo sapien
gatgtaatctctggctgagctgcta

SEQ ID NO: 1435704 - DNA, 25 bp, Homo sapien
catacagatgtgagggatgtgtgat

SEQ ID NO: 1435705 - DNA, 25 bp, Homo sapien
tgagctgctacttaccagtgatgac

SEQ ID NO: 1435706 - DNA, 25 bp, Homo sapien
tctatgactgagaattagtcctgtt

SEQ ID NO: 1435707 - DNA, 25 bp, Homo sapien
acttcaatgcctatctgtgggttct

SEQ ID NO: 1435708 - DNA, 25 bp, Homo sapien
cttcaatgcctatctgtgggttctg

SEQ ID NO: 1435709 - DNA, 25 bp, Homo sapien
atggaagctgacttcaatgcctatc

SEQ ID NO: 1435710 - DNA, 25 bp, Homo sapien
gaggaggaaatagtaagtgttcatc

SEQ ID NO: 1435711 - DNA, 25 bp, Homo sapien
ggaggaggaaatagtaagtgttcat

SEQ ID NO: 1435712 - DNA, 25 bp, Homo sapien
tgacccccatctgtcactgttagcg

SEQ ID NO: 1435713 - DNA, 25 bp, Homo sapien
ccccatctgtcactgttagcgaggt

SEQ ID NO: 1435714 - DNA, 25 bp, Homo sapien
cctggggagagttcatccacaaaaa

SEQ ID NO: 1435715 - DNA, 25 bp, Homo sapien
ctgtcactgttagcgaggtctccat

SEQ ID NO: 1435716 - DNA, 25 bp, Homo sapien
caaatctagttgtctctaactgcag

SEQ ID NO: 1435717 - DNA, 25 bp, Homo sapien
agaagtggtgggactaggactcaaa

SEQ ID NO: 1435718 - DNA, 25 bp, Homo sapien
gagatatgatttagctaattgccca

SEQ ID NO: 1435719 - DNA, 25 bp, Homo sapien
gaggtgttaaagaccttgcctcaga

SEQ ID NO: 1435720 - DNA, 25 bp, Homo sapien
cagcaaggcttctgtttgtagattg

SEQ ID NO: 1435721 - DNA, 25 bp, Homo sapien
taatgagaggtgatgttcagctagg

SEQ ID NO: 1435722 - DNA, 25 bp, Homo sapien
tccaggtgcatcgagaatgcagaca

SEQ ID NO: 1435723 - DNA, 25 bp, Homo sapien
cccacttgctgccacttgctgatta

SEQ ID NO: 1435724 - DNA, 25 bp, Homo sapien
gcacagttttaaagatctatttttc

SEQ ID NO: 1435725 - DNA, 25 bp, Homo sapien
cagttttaaagatctatttttctca

SEQ ID NO: 1435726 - DNA, 25 bp, Homo sapien
ttaggagcacagttttaaagatcta

SEQ ID NO: 1435727 - DNA, 25 bp, Homo sapien
aggagcacagttttaaagatctatt

SEQ ID NO: 1435728 - DNA, 25 bp, Homo sapien
tcctgtccttcttctgacttaaaaa

SEQ ID NO: 1435729 - DNA, 25 bp, Homo sapien
caaatccgaccttccttctattcat

SEQ ID NO: 1435730 - DNA, 25 bp, Homo sapien
catttgctgattatagctgcttcct

SEQ ID NO: 1435731 - DNA, 25 bp, Homo sapien
cagggtctttggctgctcggccaca

SEQ ID NO: 1435732 - DNA, 25 bp, Homo sapien
gcccagtggcatctacatcagatag

SEQ ID NO: 1435733 - DNA, 25 bp, Homo sapien
tgattcagcatctcaatcttgttgg

SEQ ID NO: 1435734 - DNA, 25 bp, Homo sapien
ttcgaagcaaacagttggcccagtg

SEQ ID NO: 1435735 - DNA, 25 bp, Homo sapien
tcagccccagagaatgagagatctt

SEQ ID NO: 1435736 - DNA, 25 bp, Homo sapien
gaaagcacagtatagggttctcggc

SEQ ID NO: 1435737 - DNA, 25 bp, Homo sapien
cctttcctgcaagagaacaaggagt

SEQ ID NO: 1435738 - DNA, 25 bp, Homo sapien
tgcctgccatggaggatattattca

SEQ ID NO: 1435739 - DNA, 25 bp, Homo sapien
aagtcttcactaaggttttcaccag

SEQ ID NO: 1435740 - DNA, 25 bp, Homo sapien
ggcagccctcatgcaggttgaagta

SEQ ID NO: 1435741 - DNA, 25 bp, Homo sapien
ggttcccgtgcttgctatcacagta

SEQ ID NO: 1435742 - DNA, 25 bp, Homo sapien
caaacccggaatatgaagtgcagat

SEQ ID NO: 1435743 - DNA, 25 bp, Homo sapien
ttgaagtatatgtagcctcagcctg

SEQ ID NO: 1435744 - DNA, 25 bp, Homo sapien
tggacagccgggtaatgcttttagc

SEQ ID NO: 1435745 - DNA, 25 bp, Homo sapien
ggtggacagccgggtaatgctttta

SEQ ID NO: 1435746 - DNA, 25 bp, Homo sapien
tttagctgctcgcatgcttgtcttt

SEQ ID NO: 1435747 - DNA, 25 bp, Homo sapien
gtggacagccgggtaatgcttttag

SEQ ID NO: 1435748 - DNA, 25 bp, Homo sapien
ggtgtttcccttccagtcacagtga

SEQ ID NO: 1435749 - DNA, 25 bp, Homo sapien
tgccttagaccaaagcgacacctgt

SEQ ID NO: 1435750 - DNA, 25 bp, Homo sapien
tcaacagcttaagaccgaggtttat

SEQ ID NO: 1435751 - DNA, 25 bp, Homo sapien
tttctttcacgggacagtgtaatgc

SEQ ID NO: 1435752 - DNA, 25 bp, Homo sapien
cgggtttgttcaccgttggcagtca

SEQ ID NO: 1435753 - DNA, 25 bp, Homo sapien
ctagggtgcacgggtttgttcaccg

SEQ ID NO: 1435754 - DNA, 25 bp, Homo sapien
agatggcagtgaggacttgagagga

SEQ ID NO: 1435755 - DNA, 25 bp, Homo sapien
gttcaccgttggcagtcatcagaaa

SEQ ID NO: 1435756 - DNA, 25 bp, Homo sapien
ctgatgtggttcctactttgatgac

SEQ ID NO: 1435757 - DNA, 25 bp, Homo sapien
cagatgtagttgtaagtcaggttaa

SEQ ID NO: 1435758 - DNA, 25 bp, Homo sapien
gatgacactaggagctactttacag

SEQ ID NO: 1435759 - DNA, 25 bp, Homo sapien
tattttagactcacaatttggcaac

SEQ ID NO: 1435760 - DNA, 25 bp, Homo sapien
aaactatctcggtcagctgggcacc

SEQ ID NO: 1435761 - DNA, 25 bp, Homo sapien
gagttagcaccccagctggattgga

SEQ ID NO: 1435762 - DNA, 25 bp, Homo sapien
gaggaacattctactgagggtcaga

SEQ ID NO: 1435763 - DNA, 25 bp, Homo sapien
tgatctgtagtctcgggtgttcccc

SEQ ID NO: 1435764 - DNA, 25 bp, Homo sapien
tgaaaagggttaccaatgcagcaag

SEQ ID NO: 1435765 - DNA, 25 bp, Homo sapien
cagtatccaagtgctttaacacagg

SEQ ID NO: 1435766 - DNA, 25 bp, Homo sapien
ggatcagcctccctgtaagccagtt

SEQ ID NO: 1435767 - DNA, 25 bp, Homo sapien
ggagagccagttttaagaccacctg

SEQ ID NO: 1435768 - DNA, 25 bp, Homo sapien
ctgctctggggagagactgactcac

SEQ ID NO: 1435769 - DNA, 25 bp, Homo sapien
cttgctgctctggggagagactgac

SEQ ID NO: 1435770 - DNA, 25 bp, Homo sapien
ctaagcctgcttgctgctctgggga

SEQ ID NO: 1435771 - DNA, 25 bp, Homo sapien
tgctgctctggggagagactgactc

SEQ ID NO: 1435772 - DNA, 25 bp, Homo sapien
tggccagcctgcaggctttgcagtg

SEQ ID NO: 1435773 - DNA, 25 bp, Homo sapien
actctcgctggacgggctgtgacag

SEQ ID NO: 1435774 - DNA, 25 bp, Homo sapien
tctcagggcctgagagatcggccac

SEQ ID NO: 1435775 - DNA, 25 bp, Homo sapien
tcctgcagcttgttccacggctggg

SEQ ID NO: 1435776 - DNA, 25 bp, Homo sapien
cacagtccctgtgtctttcctacag

SEQ ID NO: 1435777 - DNA, 25 bp, Homo sapien
gaaggggttctcgactctggttcca

SEQ ID NO: 1435778 - DNA, 25 bp, Homo sapien
gttctcgactctggttccagaggcc

SEQ ID NO: 1435779 - DNA, 25 bp, Homo sapien
cctgggtacccccttctgtgtctgt

SEQ ID NO: 1435780 - DNA, 25 bp, Homo sapien
tcccctcggattctcaacaggcttg

SEQ ID NO: 1435781 - DNA, 25 bp, Homo sapien
accaggactttgctccgtgtgtggt

SEQ ID NO: 1435782 - DNA, 25 bp, Homo sapien
ctccgtgtgtggtgcgctagaagct

SEQ ID NO: 1435783 - DNA, 25 bp, Homo sapien
ggtgcgctagaagctgcctctttcc

SEQ ID NO: 1435784 - DNA, 25 bp, Homo sapien
tgggggtctgttccaaacttctcat

SEQ ID NO: 1435785 - DNA, 25 bp, Homo sapien
tgcctggacaactgaactcctgtct

SEQ ID NO: 1435786 - DNA, 25 bp, Homo sapien
ggagaagaaactgtcgctgattaat

SEQ ID NO: 1435787 - DNA, 25 bp, Homo sapien
actgtcgctgattaatttccaagca

SEQ ID NO: 1435788 - DNA, 25 bp, Homo sapien
ggtaatctctgcagcgttggccatt

SEQ ID NO: 1435789 - DNA, 25 bp, Homo sapien
cctcatttgccatggggatcacaca

SEQ ID NO: 1435790 - DNA, 25 bp, Homo sapien
gtcaagggcagacctggtaatctct

SEQ ID NO: 1435791 - DNA, 25 bp, Homo sapien
gcacagtaagggcagcaaccaccct

SEQ ID NO: 1435792 - DNA, 25 bp, Homo sapien
gatgtcacggttgtctgtccagaag

SEQ ID NO: 1435793 - DNA, 25 bp, Homo sapien
cagacagggtttagcctccagaggc

SEQ ID NO: 1435794 - DNA, 25 bp, Homo sapien
aaaaaagtcacatctgcggctcaca

SEQ ID NO: 1435795 - DNA, 25 bp, Homo sapien
gcaaagtgcaggtgttcagtccaca

SEQ ID NO: 1435796 - DNA, 25 bp, Homo sapien
tggcaatcagtatcacatgggcagt

SEQ ID NO: 1435797 - DNA, 25 bp, Homo sapien
taagcttgtgtatgtagcaccaccc

SEQ ID NO: 1435798 - DNA, 25 bp, Homo sapien
tatcttttgagaaagggtgtccgcc

SEQ ID NO: 1435799 - DNA, 25 bp, Homo sapien
aatagagcatcctgactcgagtggc

SEQ ID NO: 1435800 - DNA, 25 bp, Homo sapien
tagatgcggctttgcttccgggact

SEQ ID NO: 1435801 - DNA, 25 bp, Homo sapien
tggaggtctccgtgtcactcaggta

SEQ ID NO: 1435802 - DNA, 25 bp, Homo sapien
gattcataatactccttgtactcgg

SEQ ID NO: 1435803 - DNA, 25 bp, Homo sapien
gcatgtgtcctatcccagtcggtgg

SEQ ID NO: 1435804 - DNA, 25 bp, Homo sapien
acctcacatctggacagcagtgatg

SEQ ID NO: 1435805 - DNA, 25 bp, Homo sapien
tgaaaacaagaaggtggccggacac

SEQ ID NO: 1435806 - DNA, 25 bp, Homo sapien
gctttgtgctctagctccctgctca

SEQ ID NO: 1435807 - DNA, 25 bp, Homo sapien
aagtaagccctgttagaccataatg

SEQ ID NO: 1435808 - DNA, 25 bp, Homo sapien
taggggataatggtttgacctccat

SEQ ID NO: 1435809 - DNA, 25 bp, Homo sapien
taaaggagacggatgacttggcctc

SEQ ID NO: 1435810 - DNA, 25 bp, Homo sapien
tctcagggctcctgtgcagagtaca

SEQ ID NO: 1435811 - DNA, 25 bp, Homo sapien
tgtgcagagtacatgaggtgacatc

SEQ ID NO: 1435812 - DNA, 25 bp, Homo sapien
tctctggctcctttacttgcatcct

SEQ ID NO: 1435813 - DNA, 25 bp, Homo sapien
ttcgaccaggtttgccacattgggc

SEQ ID NO: 1435814 - DNA, 25 bp, Homo sapien
gcatcttcccaaaaggattggctcc

SEQ ID NO: 1435815 - DNA, 25 bp, Homo sapien
gatgcttgttgtacatgactggcag

SEQ ID NO: 1435816 - DNA, 25 bp, Homo sapien
tccaaaagtggatccaatcgccagt

SEQ ID NO: 1435817 - DNA, 25 bp, Homo sapien
cacatccaaaagtggatccaatcgc

SEQ ID NO: 1435818 - DNA, 25 bp, Homo sapien
aaagtggatccaatcgccagtcagg

SEQ ID NO: 1435819 - DNA, 25 bp, Homo sapien
gatccaatcgccagtcaggactgcc

SEQ ID NO: 1435820 - DNA, 25 bp, Homo sapien
ttatcaacacccccactattcctgc

SEQ ID NO: 1435821 - DNA, 25 bp, Homo sapien
tttgctagctccatttatcaacacc

SEQ ID NO: 1435822 - DNA, 25 bp, Homo sapien
catttatcaacacccccactattcc

SEQ ID NO: 1435823 - DNA, 25 bp, Homo sapien
ttgctagctccatttatcaacaccc

SEQ ID NO: 1435824 - DNA, 25 bp, Homo sapien
agtgctggtgggaaacacaggacca

SEQ ID NO: 1435825 - DNA, 25 bp, Homo sapien
gtcgtaagattaaaagatctttcag

SEQ ID NO: 1435826 - DNA, 25 bp, Homo sapien
ttttcaagacggaaagtaagatgtc

SEQ ID NO: 1435827 - DNA, 25 bp, Homo sapien
aaaaggccagatgggagaatcctga

SEQ ID NO: 1435828 - DNA, 25 bp, Homo sapien
acaacacaggatgcacctttggcca

SEQ ID NO: 1435829 - DNA, 25 bp, Homo sapien
ttctacaacacaggatgcacctttg

SEQ ID NO: 1435830 - DNA, 25 bp, Homo sapien
ttccgtcctccgtgaacaacttcta

SEQ ID NO: 1435831 - DNA, 25 bp, Homo sapien
tacaacacaggatgcacctttggcc

SEQ ID NO: 1435832 - DNA, 25 bp, Homo sapien
gctgcggagccatccattgagaaag

SEQ ID NO: 1435833 - DNA, 25 bp, Homo sapien
gaacgggaacgtatgccagctctaa

SEQ ID NO: 1435834 - DNA, 25 bp, Homo sapien
tggacatcaagtagcttccaggcct

SEQ ID NO: 1435835 - DNA, 25 bp, Homo sapien
gaaatgcacccaccgaactacatgt

SEQ ID NO: 1435836 - DNA, 25 bp, Homo sapien
cacagttaaataccgcctgtgggtg

SEQ ID NO: 1435837 - DNA, 25 bp, Homo sapien
gcaggctcagagttgatgaattgcc

SEQ ID NO: 1435838 - DNA, 25 bp, Homo sapien
ctgggcccacagttaaataccgcct

SEQ ID NO: 1435839 - DNA, 25 bp, Homo sapien
ggaacaagtattccacctgggccca

SEQ ID NO: 1435840 - DNA, 25 bp, Homo sapien
tttctgctgtgctcctaagtaagtg

SEQ ID NO: 1435841 - DNA, 25 bp, Homo sapien
gggatttctgctgtgctcctaagta

SEQ ID NO: 1435842 - DNA, 25 bp, Homo sapien
gatttctgctgtgctcctaagtaag

SEQ ID NO: 1435843 - DNA, 25 bp, Homo sapien
ctgctgtgctcctaagtaagtgctc

SEQ ID NO: 1435844 - DNA, 25 bp, Homo sapien
tgtctgaaggtccctgatctgcagg

SEQ ID NO: 1435845 - DNA, 25 bp, Homo sapien
ttctgtctgaaggtccctgatctgc

SEQ ID NO: 1435846 - DNA, 25 bp, Homo sapien
tctgtctgaaggtccctgatctgca

SEQ ID NO: 1435847 - DNA, 25 bp, Homo sapien
ggttctgtctgaaggtccctgatct

SEQ ID NO: 1435848 - DNA, 25 bp, Homo sapien
aaatccagtggctaacctctaccca

SEQ ID NO: 1435849 - DNA, 25 bp, Homo sapien
ctgaagagtagaaggatgcaaaatc

SEQ ID NO: 1435850 - DNA, 25 bp, Homo sapien
cagtggctaacctctacccattttt

SEQ ID NO: 1435851 - DNA, 25 bp, Homo sapien
gaagagtagaaggatgcaaaatcca

SEQ ID NO: 1435852 - DNA, 25 bp, Homo sapien
aacgcacatcgtcttcaattacaag

SEQ ID NO: 1435853 - DNA, 25 bp, Homo sapien
actgatgctcaaaacgcacatcgtc

SEQ ID NO: 1435854 - DNA, 25 bp, Homo sapien
gctgagcctggtcaatgttatccat

SEQ ID NO: 1435855 - DNA, 25 bp, Homo sapien
gagcctggtcaatgttatccatcag

SEQ ID NO: 1435856 - DNA, 25 bp, Homo sapien
ttctcctcatcataaaactgcaatc

SEQ ID NO: 1435857 - DNA, 25 bp, Homo sapien
gcaatctgaataaagcattatttac

SEQ ID NO: 1435858 - DNA, 25 bp, Homo sapien
tcatcataaaactgcaatctgaata

SEQ ID NO: 1435859 - DNA, 25 bp, Homo sapien
ctcctcatcataaaactgcaatctg

SEQ ID NO: 1435860 - DNA, 25 bp, Homo sapien
tccagactgagtagtggctgagaaa

SEQ ID NO: 1435861 - DNA, 25 bp, Homo sapien
gcctggaggaatagggatctcgata

SEQ ID NO: 1435862 - DNA, 25 bp, Homo sapien
gcagcatttcaatattcagtgcctt

SEQ ID NO: 1435863 - DNA, 25 bp, Homo sapien
cgatttcaccccttgttagaggcct

SEQ ID NO: 1435864 - DNA, 25 bp, Homo sapien
tgagaatctagaaggccccaggcat

SEQ ID NO: 1435865 - DNA, 25 bp, Homo sapien
gagattaacaagtcaaaggtcccca

SEQ ID NO: 1435866 - DNA, 25 bp, Homo sapien
catgtggtatctataagaggcagcc

SEQ ID NO: 1435867 - DNA, 25 bp, Homo sapien
tcacaactaagagagcggcaaaccc

SEQ ID NO: 1435868 - DNA, 25 bp, Homo sapien
gacctcaatctcctgttcatacagt

SEQ ID NO: 1435869 - DNA, 25 bp, Homo sapien
tcctttctgcgtttgaggtttatca

SEQ ID NO: 1435870 - DNA, 25 bp, Homo sapien
catccacagcctcgacaatcttgac

SEQ ID NO: 1435871 - DNA, 25 bp, Homo sapien
ttcatacagtgtgcgcagcatccgg

SEQ ID NO: 1435872 - DNA, 25 bp, Homo sapien
gtagagtctccgagcctgtgccact

SEQ ID NO: 1435873 - DNA, 25 bp, Homo sapien
tgttccatacggagaggtgactaac

SEQ ID NO: 1435874 - DNA, 25 bp, Homo sapien
tccgaggaggattgaaaagcccctg

SEQ ID NO: 1435875 - DNA, 25 bp, Homo sapien
ggtgactaacctcagactcaggaaa

SEQ ID NO: 1435876 - DNA, 25 bp, Homo sapien
ctcatcaaatcccatcttgtctgga

SEQ ID NO: 1435877 - DNA, 25 bp, Homo sapien
tttagggacaactgagacatactgg

SEQ ID NO: 1435878 - DNA, 25 bp, Homo sapien
gagacatactgggagggttccattg

SEQ ID NO: 1435879 - DNA, 25 bp, Homo sapien
cttgtctggatatttagggacaact

SEQ ID NO: 1435880 - DNA, 25 bp, Homo sapien
aggtagccatagtgctctctgttgc

SEQ ID NO: 1435881 - DNA, 25 bp, Homo sapien
ggttctcgatgtcttcctgcagtgt

SEQ ID NO: 1435882 - DNA, 25 bp, Homo sapien
gatgggcaggtagccatagtgctct

SEQ ID NO: 1435883 - DNA, 25 bp, Homo sapien
atggatgaggttctcgatgtcttcc

SEQ ID NO: 1435884 - DNA, 25 bp, Homo sapien
ccaagagagggacaaagccaacaat

SEQ ID NO: 1435885 - DNA, 25 bp, Homo sapien
gagagggacaaagccaacaatcaga

SEQ ID NO: 1435886 - DNA, 25 bp, Homo sapien
gagggacaaagccaacaatcagaaa

SEQ ID NO: 1435887 - DNA, 25 bp, Homo sapien
aggatccaagagagggacaaagcca

SEQ ID NO: 1435888 - DNA, 25 bp, Homo sapien
gagtgacaagcgaggagaaggaacc

SEQ ID NO: 1435889 - DNA, 25 bp, Homo sapien
tgagtgacaagcgaggagaaggaac

SEQ ID NO: 1435890 - DNA, 25 bp, Homo sapien
agtgacaagcgaggagaaggaacct

SEQ ID NO: 1435891 - DNA, 25 bp, Homo sapien
ctgagtgacaagcgaggagaaggaa

SEQ ID NO: 1435892 - DNA, 25 bp, Homo sapien
aaaagcaaactcatggcctggaatg

SEQ ID NO: 1435893 - DNA, 25 bp, Homo sapien
caaggaattcccattctggagagca

SEQ ID NO: 1435894 - DNA, 25 bp, Homo sapien
catgaaaggatcaaaagggaggcaa

SEQ ID NO: 1435895 - DNA, 25 bp, Homo sapien
aacactcggctattcttcagcccag

SEQ ID NO: 1435896 - DNA, 25 bp, Homo sapien
aaattctgtaacgctgacagattat

SEQ ID NO: 1435897 - DNA, 25 bp, Homo sapien
aattctgtaacgctgacagattatt

SEQ ID NO: 1435898 - DNA, 25 bp, Homo sapien
ttctgtaacgctgacagattattaa

SEQ ID NO: 1435899 - DNA, 25 bp, Homo sapien
attctgtaacgctgacagattatta

SEQ ID NO: 1435900 - DNA, 25 bp, Homo sapien
tgtgacaataccagaagtatgcaat

SEQ ID NO: 1435901 - DNA, 25 bp, Homo sapien
ctgtagtgtgacaataccagaagta

SEQ ID NO: 1435902 - DNA, 25 bp, Homo sapien
tgacaataccagaagtatgcaatac

SEQ ID NO: 1435903 - DNA, 25 bp, Homo sapien
tagtgtgacaataccagaagtatgc

SEQ ID NO: 1435904 - DNA, 25 bp, Homo sapien
catagccccacctgataacttgcag

SEQ ID NO: 1435905 - DNA, 25 bp, Homo sapien
aacttgcagagttataaggcatctg

SEQ ID NO: 1435906 - DNA, 25 bp, Homo sapien
aaggcatctgtgtttaaccagacag

SEQ ID NO: 1435907 - DNA, 25 bp, Homo sapien
ccttctcatattcaaattgttcttc

SEQ ID NO: 1435908 - DNA, 25 bp, Homo sapien
gggaggtgaactcttgaccctggac

SEQ ID NO: 1435909 - DNA, 25 bp, Homo sapien
cagagacgcgcctatgaccatatgt

SEQ ID NO: 1435910 - DNA, 25 bp, Homo sapien
tcttcttgggctagaagggtggcca

SEQ ID NO: 1435911 - DNA, 25 bp, Homo sapien
tcagacatttggaagacgactggct

SEQ ID NO: 1435912 - DNA, 25 bp, Homo sapien
gcacacttggattgctcctcactca

SEQ ID NO: 1435913 - DNA, 25 bp, Homo sapien
acttggattgctcctcactcatcac

SEQ ID NO: 1435914 - DNA, 25 bp, Homo sapien
cacacttggattgctcctcactcat

SEQ ID NO: 1435915 - DNA, 25 bp, Homo sapien
cacttggattgctcctcactcatca

SEQ ID NO: 1435916 - DNA, 25 bp, Homo sapien
ctggggtgaaagatttaggaccaag

SEQ ID NO: 1435917 - DNA, 25 bp, Homo sapien
aaggtttgtggttggatggtcctgc

SEQ ID NO: 1435918 - DNA, 25 bp, Homo sapien
gaccaaggtttgtggttggatggtc

SEQ ID NO: 1435919 - DNA, 25 bp, Homo sapien
ccaaggtttgtggttggatggtcct

SEQ ID NO: 1435920 - DNA, 25 bp, Homo sapien
ataattcccaatatcaccaccagtc

SEQ ID NO: 1435921 - DNA, 25 bp, Homo sapien
cctccaactcaaaatagagtgggtt

SEQ ID NO: 1435922 - DNA, 25 bp, Homo sapien
tcccataattcccaatatcaccacc

SEQ ID NO: 1435923 - DNA, 25 bp, Homo sapien
tccctccaactcaaaatagagtggg

SEQ ID NO: 1435924 - DNA, 25 bp, Homo sapien
tggttattgcagacaatttactgcc

SEQ ID NO: 1435925 - DNA, 25 bp, Homo sapien
tatggttattgcagacaatttactg

SEQ ID NO: 1435926 - DNA, 25 bp, Homo sapien
ggtatggttattgcagacaatttac

SEQ ID NO: 1435927 - DNA, 25 bp, Homo sapien
atggttattgcagacaatttactgc

SEQ ID NO: 1435928 - DNA, 25 bp, Homo sapien
tgtctccattgtggcactacaacca

SEQ ID NO: 1435929 - DNA, 25 bp, Homo sapien
tgctgtgtctccattgtggcactac

SEQ ID NO: 1435930 - DNA, 25 bp, Homo sapien
tccattgtggcactacaaccaaaga

SEQ ID NO: 1435931 - DNA, 25 bp, Homo sapien
ttgtggcactacaaccaaagacaaa

SEQ ID NO: 1435932 - DNA, 25 bp, Homo sapien
cttccattctcgaatctgaacgtag

SEQ ID NO: 1435933 - DNA, 25 bp, Homo sapien
tcctcttccattctcgaatctgaac

SEQ ID NO: 1435934 - DNA, 25 bp, Homo sapien
ttctcgaatctgaacgtagtctggg

SEQ ID NO: 1435935 - DNA, 25 bp, Homo sapien
tagtctggggtcctcttatagaagc

SEQ ID NO: 1435936 - DNA, 25 bp, Homo sapien
aagagcaaataggtgggttgtgttt

SEQ ID NO: 1435937 - DNA, 25 bp, Homo sapien
aaagagcaaataggtgggttgtgtt

SEQ ID NO: 1435938 - DNA, 25 bp, Homo sapien
aaaagagcaaataggtgggttgtgt

SEQ ID NO: 1435939 - DNA, 25 bp, Homo sapien
atttgaagtcttcatccttctcagt

SEQ ID NO: 1435940 - DNA, 25 bp, Homo sapien
tgaagtcttcatccttctcagtcat

SEQ ID NO: 1435941 - DNA, 25 bp, Homo sapien
ttgaagtcttcatccttctcagtca

SEQ ID NO: 1435942 - DNA, 25 bp, Homo sapien
ctgatttgaagtcttcatccttctc

SEQ ID NO: 1435943 - DNA, 25 bp, Homo sapien
tctgtggattagtcaggaaattgtc

SEQ ID NO: 1435944 - DNA, 25 bp, Homo sapien
gcatgggggccacaatagttttgtt

SEQ ID NO: 1435945 - DNA, 25 bp, Homo sapien
acaggccccgagactccagcatggg

SEQ ID NO: 1435946 - DNA, 25 bp, Homo sapien
caatcagtagattgagggtctgtgg

SEQ ID NO: 1435947 - DNA, 25 bp, Homo sapien
cctgtcgtagtttcatcacatgggc

SEQ ID NO: 1435948 - DNA, 25 bp, Homo sapien
tagtctgaccatttttccctcgcag

SEQ ID NO: 1435949 - DNA, 25 bp, Homo sapien
tttccctcgcagttcgaagggctgc

SEQ ID NO: 1435950 - DNA, 25 bp, Homo sapien
caaaccgggaggttggccagtgctt

SEQ ID NO: 1435951 - DNA, 25 bp, Homo sapien
cagagaacattaccaaggtgcaaag

SEQ ID NO: 1435952 - DNA, 25 bp, Homo sapien
tggctgcagagaacattaccaaggt

SEQ ID NO: 1435953 - DNA, 25 bp, Homo sapien
gaacattaccaaggtgcaaagaagg

SEQ ID NO: 1435954 - DNA, 25 bp, Homo sapien
gctgcagagaacattaccaaggtgc

SEQ ID NO: 1435955 - DNA, 25 bp, Homo sapien
cataggcctccactccacatagtga

SEQ ID NO: 1435956 - DNA, 25 bp, Homo sapien
tctggttcatccataggcctccact

SEQ ID NO: 1435957 - DNA, 25 bp, Homo sapien
catttttcaaccactccctgaatat

SEQ ID NO: 1435958 - DNA, 25 bp, Homo sapien
actccacatagtgatagagtctctg

SEQ ID NO: 1435959 - DNA, 25 bp, Homo sapien
gaacaacaaacttagtcaccacctg

SEQ ID NO: 1435960 - DNA, 25 bp, Homo sapien
caagggaatggcagtggaatgaaca

SEQ ID NO: 1435961 - DNA, 25 bp, Homo sapien
gatggcaacactggacaacgactga

SEQ ID NO: 1435962 - DNA, 25 bp, Homo sapien
ctgtcactatagaagaggtctgcga

SEQ ID NO: 1435963 - DNA, 25 bp, Homo sapien
tttcttgtccttattggattttcca

SEQ ID NO: 1435964 - DNA, 25 bp, Homo sapien
tggattttccaattctgttaagttc

SEQ ID NO: 1435965 - DNA, 25 bp, Homo sapien
ctcttcctgttttcgttctcctttg

SEQ ID NO: 1435966 - DNA, 25 bp, Homo sapien
ttttcacccactcatcatggcccct

SEQ ID NO: 1435967 - DNA, 25 bp, Homo sapien
tgttcaactttactagggaatgcca

SEQ ID NO: 1435968 - DNA, 25 bp, Homo sapien
caccaattgatagtcccaggagcag

SEQ ID NO: 1435969 - DNA, 25 bp, Homo sapien
gccaacctggctgctgagaaacgat

SEQ ID NO: 1435970 - DNA, 25 bp, Homo sapien
tgacctttgttgcacgtatcccctg

SEQ ID NO: 1435971 - DNA, 25 bp, Homo sapien
tgtccaagtactgtctatccctcaa

SEQ ID NO: 1435972 - DNA, 25 bp, Homo sapien
tatgatgcatcaagttgtggctttc

SEQ ID NO: 1435973 - DNA, 25 bp, Homo sapien
gcacattcgtgtcacaccaagttaa

SEQ ID NO: 1435974 - DNA, 25 bp, Homo sapien
taacatcccatgaaatgccctgctt

SEQ ID NO: 1435975 - DNA, 25 bp, Homo sapien
tgagggctcccgcaagtgatccaca

SEQ ID NO: 1435976 - DNA, 25 bp, Homo sapien
ggctcagtcaacatctgtggaaaga

SEQ ID NO: 1435977 - DNA, 25 bp, Homo sapien
gactggcaaggaaggcccaaacttc

SEQ ID NO: 1435978 - DNA, 25 bp, Homo sapien
cctatggatgcagacctgttaaaaa

SEQ ID NO: 1435979 - DNA, 25 bp, Homo sapien
tgctgaaataaaggatcatcggctc

SEQ ID NO: 1435980 - DNA, 25 bp, Homo sapien
tccaaaagtactggccacctttcac

SEQ ID NO: 1435981 - DNA, 25 bp, Homo sapien
acggcatcaatggaatctcctgtcc

SEQ ID NO: 1435982 - DNA, 25 bp, Homo sapien
cacctttcacaacggcatcaatgga

SEQ ID NO: 1435983 - DNA, 25 bp, Homo sapien
ccttttccttgtttactgccatctg

SEQ ID NO: 1435984 - DNA, 25 bp, Homo sapien
tactgccatctgctacataggaaac

SEQ ID NO: 1435985 - DNA, 25 bp, Homo sapien
cataggaaacccagacaacctccat

SEQ ID NO: 1435986 - DNA, 25 bp, Homo sapien
cttccaatctgtctgctgaaaacct

SEQ ID NO: 1435987 - DNA, 25 bp, Homo sapien
gagagtccaattcccgccattagag

SEQ ID NO: 1435988 - DNA, 25 bp, Homo sapien
tctgagagtccaattcccgccatta

SEQ ID NO: 1435989 - DNA, 25 bp, Homo sapien
aattcccgccattagagacattctt

SEQ ID NO: 1435990 - DNA, 25 bp, Homo sapien
tccaattcccgccattagagacatt

SEQ ID NO: 1435991 - DNA, 25 bp, Homo sapien
ctaatcttttctgactgagagacag

SEQ ID NO: 1435992 - DNA, 25 bp, Homo sapien
ccaaaagtggggctataaccttcag

SEQ ID NO: 1435993 - DNA, 25 bp, Homo sapien
gagagacagaaaactggcccaaaag

SEQ ID NO: 1435994 - DNA, 25 bp, Homo sapien
aagtggggctataaccttcagtcac

SEQ ID NO: 1435995 - DNA, 25 bp, Homo sapien
tgtgtctttgatgcccgtcaaagct

SEQ ID NO: 1435996 - DNA, 25 bp, Homo sapien
gctgccatctgatgcctaagaaatg

SEQ ID NO: 1435997 - DNA, 25 bp, Homo sapien
tttgatgcccgtcaaagctttgaag

SEQ ID NO: 1435998 - DNA, 25 bp, Homo sapien
agaaatgaggatccagtgtgtcttt

SEQ ID NO: 1435999 - DNA, 25 bp, Homo sapien
ggtctaatatatgccattgcaaggc

SEQ ID NO: 1436000 - DNA, 25 bp, Homo sapien
tatatgccattgcaaggctagctct

SEQ ID NO: 1436001 - DNA, 25 bp, Homo sapien
ttcataagaaggtctaatatatgcc

SEQ ID NO: 1436002 - DNA, 25 bp, Homo sapien
taagaaggtctaatatatgccattg

SEQ ID NO: 1436003 - DNA, 25 bp, Homo sapien
ttcagccataaaccgaaacttctat

SEQ ID NO: 1436004 - DNA, 25 bp, Homo sapien
tttcagccataaaccgaaacttcta

SEQ ID NO: 1436005 - DNA, 25 bp, Homo sapien
aaccccgatgcaccggcagggacag

SEQ ID NO: 1436006 - DNA, 25 bp, Homo sapien
tcccagggcatcttcgtctctcccc

SEQ ID NO: 1436007 - DNA, 25 bp, Homo sapien
cgggacgtggaaccccgatgcaccg

SEQ ID NO: 1436008 - DNA, 25 bp, Homo sapien
cagggcatcttcgtctctccccggg

SEQ ID NO: 1436009 - DNA, 25 bp, Homo sapien
acactccgcgggctccgcccaatct

SEQ ID NO: 1436010 - DNA, 25 bp, Homo sapien
atggttgggcacactccgcgggctc

SEQ ID NO: 1436011 - DNA, 25 bp, Homo sapien
tggttgggcacactccgcgggctcc

SEQ ID NO: 1436012 - DNA, 25 bp, Homo sapien
cgggctccgcccaatctccacccct

SEQ ID NO: 1436013 - DNA, 25 bp, Homo sapien
ggtgtgtgcgccagattttccgcgt

SEQ ID NO: 1436014 - DNA, 25 bp, Homo sapien
atccgccagccaccggcgcgggcag

SEQ ID NO: 1436015 - DNA, 25 bp, Homo sapien
tccagagctccagcggtccggttct

SEQ ID NO: 1436016 - DNA, 25 bp, Homo sapien
tgcgcacactgacccgcgcgtccct

SEQ ID NO: 1436017 - DNA, 25 bp, Homo sapien
aagcgcgctcggcagccttcgcgga

SEQ ID NO: 1436018 - DNA, 25 bp, Homo sapien
ctgaggagaggagcagtagcgacca

SEQ ID NO: 1436019 - DNA, 25 bp, Homo sapien
cagccgaggaagtgcggcagcgtgt

SEQ ID NO: 1436020 - DNA, 25 bp, Homo sapien
tgtgcgccgcgttgcgggcgaggac

SEQ ID NO: 1436021 - DNA, 25 bp, Homo sapien
gtcctggcgcgagcgcccggctggg

SEQ ID NO: 1436022 - DNA, 25 bp, Homo sapien
gggatgcggcttgccgcggccggcc

SEQ ID NO: 1436023 - DNA, 25 bp, Homo sapien
gccgggggatgcggcttgccgcggc

SEQ ID NO: 1436024 - DNA, 25 bp, Homo sapien
ggggaagtcctggcgcgagcgcccg

SEQ ID NO: 1436025 - DNA, 25 bp, Homo sapien
ggttccgctcgtacagctgaggtct

SEQ ID NO: 1436026 - DNA, 25 bp, Homo sapien
tggccttccctagagccgcgagttg

SEQ ID NO: 1436027 - DNA, 25 bp, Homo sapien
gccttccctagagccgcgagttgtg

SEQ ID NO: 1436028 - DNA, 25 bp, Homo sapien
ctctagtccaggttccgctcgtaca

SEQ ID NO: 1436029 - DNA, 25 bp, Homo sapien
ttctcctgcttcagcgttctaagta

SEQ ID NO: 1436030 - DNA, 25 bp, Homo sapien
ttacaggcatgcactaccatgccca

SEQ ID NO: 1436031 - DNA, 25 bp, Homo sapien
gattacaggcatgcactaccatgcc

SEQ ID NO: 1436032 - DNA, 25 bp, Homo sapien
acaggcatgcactaccatgcccaac

SEQ ID NO: 1436033 - DNA, 25 bp, Homo sapien
cagtgtgggagagaatcaaccgtaa

SEQ ID NO: 1436034 - DNA, 25 bp, Homo sapien
aatacataaacaatacgggcgtggc

SEQ ID NO: 1436035 - DNA, 25 bp, Homo sapien
ttttggccactgcagctaccgtaga

SEQ ID NO: 1436036 - DNA, 25 bp, Homo sapien
catgttacctacaagagttctgggc

SEQ ID NO: 1436037 - DNA, 25 bp, Homo sapien
aatgatctttggataagaactgctt

SEQ ID NO: 1436038 - DNA, 25 bp, Homo sapien
atgatctttggataagaactgcttg

SEQ ID NO: 1436039 - DNA, 25 bp, Homo sapien
taatgatctttggataagaactgct

SEQ ID NO: 1436040 - DNA, 25 bp, Homo sapien
tcctttggagcgtctattgtctctc

SEQ ID NO: 1436041 - DNA, 25 bp, Homo sapien
cctggaggcagcagtagggggtata

SEQ ID NO: 1436042 - DNA, 25 bp, Homo sapien
gtatagggtaggagtgggtgctggc

SEQ ID NO: 1436043 - DNA, 25 bp, Homo sapien
ctctgcaccagcaacttttggggtc

SEQ ID NO: 1436044 - DNA, 25 bp, Homo sapien
tctgccaaccacatggcttgagaag

SEQ ID NO: 1436045 - DNA, 25 bp, Homo sapien
gcctgcacaccgtcctttgctgatt

SEQ ID NO: 1436046 - DNA, 25 bp, Homo sapien
gcacaccgtcctttgctgatttctc

SEQ ID NO: 1436047 - DNA, 25 bp, Homo sapien
cacagggtctgccaaccacatggct

SEQ ID NO: 1436048 - DNA, 25 bp, Homo sapien
tctccaccggatagtgcttgcttgc

SEQ ID NO: 1436049 - DNA, 25 bp, Homo sapien
ctatagagctgagttgagaaaaaca

SEQ ID NO: 1436050 - DNA, 25 bp, Homo sapien
gcctgatccttttcttagcctatgc

SEQ ID NO: 1436051 - DNA, 25 bp, Homo sapien
gtttctctttggaccgcctgatcct

SEQ ID NO: 1436052 - DNA, 25 bp, Homo sapien
acttcctttacattaagatcaggtt

SEQ ID NO: 1436053 - DNA, 25 bp, Homo sapien
cttcctttacattaagatcaggttt

SEQ ID NO: 1436054 - DNA, 25 bp, Homo sapien
tcaagctctttatggaaagctgctg

SEQ ID NO: 1436055 - DNA, 25 bp, Homo sapien
tcatcaagctctttatggaaagctg

SEQ ID NO: 1436056 - DNA, 25 bp, Homo sapien
catcaagctctttatggaaagctgc

SEQ ID NO: 1436057 - DNA, 25 bp, Homo sapien
aagctctttatggaaagctgctgta

SEQ ID NO: 1436058 - DNA, 25 bp, Homo sapien
gacaatttgatgcagacatataaat

SEQ ID NO: 1436059 - DNA, 25 bp, Homo sapien
gtttgacaatttgatgcagacatat

SEQ ID NO: 1436060 - DNA, 25 bp, Homo sapien
tttgacaatttgatgcagacatata

SEQ ID NO: 1436061 - DNA, 25 bp, Homo sapien
tgatgcagacatataaattaatttt

SEQ ID NO: 1436062 - DNA, 25 bp, Homo sapien
ccctcatgggttgcttctctgcatg

SEQ ID NO: 1436063 - DNA, 25 bp, Homo sapien
tctctgtagcacacagcgtctgtgg

SEQ ID NO: 1436064 - DNA, 25 bp, Homo sapien
tctgctgagaatatcttttggaaca

SEQ ID NO: 1436065 - DNA, 25 bp, Homo sapien
ttttttaggttgcatcccctcatgg

SEQ ID NO: 1436066 - DNA, 25 bp, Homo sapien
aggaggcaggctcctgctagaatct

SEQ ID NO: 1436067 - DNA, 25 bp, Homo sapien
caggctcctgctagaatcttagtca

SEQ ID NO: 1436068 - DNA, 25 bp, Homo sapien
ggcaggctcctgctagaatcttagt

SEQ ID NO: 1436069 - DNA, 25 bp, Homo sapien
gaggcaggctcctgctagaatctta

SEQ ID NO: 1436070 - DNA, 25 bp, Homo sapien
catttgtacaaagcctcggagttcc

SEQ ID NO: 1436071 - DNA, 25 bp, Homo sapien
taattaatagcccagcaccgccctg

SEQ ID NO: 1436072 - DNA, 25 bp, Homo sapien
cttcccactctcatgtcggctggaa

SEQ ID NO: 1436073 - DNA, 25 bp, Homo sapien
ggctggaatctctacacttcgtaca

SEQ ID NO: 1436074 - DNA, 25 bp, Homo sapien
gaggataccactcctctccggcaag

SEQ ID NO: 1436075 - DNA, 25 bp, Homo sapien
aatggaggataccactcctctccgg

SEQ ID NO: 1436076 - DNA, 25 bp, Homo sapien
tgaggggaatggaggataccactcc

SEQ ID NO: 1436077 - DNA, 25 bp, Homo sapien
taccactcctctccggcaaggtatt

SEQ ID NO: 1436078 - DNA, 25 bp, Homo sapien
aagacagctgcggtctcctcgaagc

SEQ ID NO: 1436079 - DNA, 25 bp, Homo sapien
ttaatgcgctaggagctgctcgacc

SEQ ID NO: 1436080 - DNA, 25 bp, Homo sapien
ggatacaggctctaattaatgcgct

SEQ ID NO: 1436081 - DNA, 25 bp, Homo sapien
caagtgcagcagttgggatacaggc

SEQ ID NO: 1436082 - DNA, 25 bp, Homo sapien
ctttcgttcagtgacggcgtgaaga

SEQ ID NO: 1436083 - DNA, 25 bp, Homo sapien
tgacggcgtgaagaggactgtcaca

SEQ ID NO: 1436084 - DNA, 25 bp, Homo sapien
ctgacaacaggcaacagattgcagc

SEQ ID NO: 1436085 - DNA, 25 bp, Homo sapien
gacaccggggctctttcgttcagtg

SEQ ID NO: 1436086 - DNA, 25 bp, Homo sapien
gtgcttcccagggtcctccttttca

SEQ ID NO: 1436087 - DNA, 25 bp, Homo sapien
tccaaataacttgttcctcctcgtg

SEQ ID NO: 1436088 - DNA, 25 bp, Homo sapien
aataacttgttcctcctcgtgcttc

SEQ ID NO: 1436089 - DNA, 25 bp, Homo sapien
catttccaaataacttgttcctcct

SEQ ID NO: 1436090 - DNA, 25 bp, Homo sapien
attgaaataactcattaccctcaga

SEQ ID NO: 1436091 - DNA, 25 bp, Homo sapien
gagaagcaggcaaagagtagaacaa

SEQ ID NO: 1436092 - DNA, 25 bp, Homo sapien
atcaattgaaataactcattaccct

SEQ ID NO: 1436093 - DNA, 25 bp, Homo sapien
tgcagtagtgagaagcaggcaaaga

SEQ ID NO: 1436094 - DNA, 25 bp, Homo sapien
agctctccatggaacgggcctggct

SEQ ID NO: 1436095 - DNA, 25 bp, Homo sapien
tccaagaacgcgatgctgactaaag

SEQ ID NO: 1436096 - DNA, 25 bp, Homo sapien
agccaacatgcggtctccaagaacg

SEQ ID NO: 1436097 - DNA, 25 bp, Homo sapien
caggataaacccgtgcagcaaggct

SEQ ID NO: 1436098 - DNA, 25 bp, Homo sapien
cacagtgtttgaggtaggaatgcca

SEQ ID NO: 1436099 - DNA, 25 bp, Homo sapien
tatgatggtctgtgtcccgccattc

SEQ ID NO: 1436100 - DNA, 25 bp, Homo sapien
tgtgtcccgccattcccacagtgtt

SEQ ID NO: 1436101 - DNA, 25 bp, Homo sapien
cagtgtttgaggtaggaatgccaat

SEQ ID NO: 1436102 - DNA, 25 bp, Homo sapien
cctctgcagctagattcattctctc

SEQ ID NO: 1436103 - DNA, 25 bp, Homo sapien
ctgcagctagattcattctctcaga

SEQ ID NO: 1436104 - DNA, 25 bp, Homo sapien
ctctgcagctagattcattctctca

SEQ ID NO: 1436105 - DNA, 25 bp, Homo sapien
tctgcagctagattcattctctcag

SEQ ID NO: 1436106 - DNA, 25 bp, Homo sapien
ccagtgatgacaagccatcctgcct

SEQ ID NO: 1436107 - DNA, 25 bp, Homo sapien
agcacctgccagtgatgacaagcca

SEQ ID NO: 1436108 - DNA, 25 bp, Homo sapien
gccatcctgccttatgcccaagttt

SEQ ID NO: 1436109 - DNA, 25 bp, Homo sapien
atcctgccttatgcccaagttttga

SEQ ID NO: 1436110 - DNA, 25 bp, Homo sapien
cacagttccgtgctcaccatgtggg

SEQ ID NO: 1436111 - DNA, 25 bp, Homo sapien
ttcattgtgatggtccacagttccg

SEQ ID NO: 1436112 - DNA, 25 bp, Homo sapien
gaacaccggtattctgtggcacaca

SEQ ID NO: 1436113 - DNA, 25 bp, Homo sapien
acaatatgagaaacactgtcgtggg

SEQ ID NO: 1436114 - DNA, 25 bp, Homo sapien
tgtaattttcaccttgctctaaggg

SEQ ID NO: 1436115 - DNA, 25 bp, Homo sapien
gctctaagggacaagtgcttcttcc

SEQ ID NO: 1436116 - DNA, 25 bp, Homo sapien
tctgttcccaagtgagtggctgaac

SEQ ID NO: 1436117 - DNA, 25 bp, Homo sapien
tctattttctgttcccaagtgagtg

SEQ ID NO: 1436118 - DNA, 25 bp, Homo sapien
gaaaaaatattgaatgccatttccc

SEQ ID NO: 1436119 - DNA, 25 bp, Homo sapien
aaaaatattgaatgccatttcccag

SEQ ID NO: 1436120 - DNA, 25 bp, Homo sapien
tggaaaaaatattgaatgccatttc

SEQ ID NO: 1436121 - DNA, 25 bp, Homo sapien
tcacttagaaatggaaaaaatattg

SEQ ID NO: 1436122 - DNA, 25 bp, Homo sapien
tggctaatagcttcaactgctaatg

SEQ ID NO: 1436123 - DNA, 25 bp, Homo sapien
ctggctaatagcttcaactgctaat

SEQ ID NO: 1436124 - DNA, 25 bp, Homo sapien
gatgtggtgcattaagcagaaccca

SEQ ID NO: 1436125 - DNA, 25 bp, Homo sapien
tgtcccagttgatgtggtgcattaa

SEQ ID NO: 1436126 - DNA, 25 bp, Homo sapien
cactgtgagtttggttatcacccac

SEQ ID NO: 1436127 - DNA, 25 bp, Homo sapien
cacagcaacggcaatgggaaatgac

SEQ ID NO: 1436128 - DNA, 25 bp, Homo sapien
tctctcccggttatttggcctgtgc

SEQ ID NO: 1436129 - DNA, 25 bp, Homo sapien
tctgcaggtccaaagctctgcctgt

SEQ ID NO: 1436130 - DNA, 25 bp, Homo sapien
gaacttttgtgtttagtctgtaatc

SEQ ID NO: 1436131 - DNA, 25 bp, Homo sapien
tttgtgtttagtctgtaatcagctg

SEQ ID NO: 1436132 - DNA, 25 bp, Homo sapien
tgtgtttagtctgtaatcagctgag

SEQ ID NO: 1436133 - DNA, 25 bp, Homo sapien
cttttgtgtttagtctgtaatcagc

SEQ ID NO: 1436134 - DNA, 25 bp, Homo sapien
ctccactaatgtgggcctcttttcc

SEQ ID NO: 1436135 - DNA, 25 bp, Homo sapien
gggccactggcgagctggccagagc

SEQ ID NO: 1436136 - DNA, 25 bp, Homo sapien
cttgacttcctctagacatggaact

SEQ ID NO: 1436137 - DNA, 25 bp, Homo sapien
cacagacgagcgcaattctccacta

SEQ ID NO: 1436138 - DNA, 25 bp, Homo sapien
cctgctaccaaccaaagccaggttt

SEQ ID NO: 1436139 - DNA, 25 bp, Homo sapien
atatagaatagcctgctaccaacca

SEQ ID NO: 1436140 - DNA, 25 bp, Homo sapien
atagcctgctaccaaccaaagccag

SEQ ID NO: 1436141 - DNA, 25 bp, Homo sapien
tatagaatagcctgctaccaaccaa

SEQ ID NO: 1436142 - DNA, 25 bp, Homo sapien
gcatggcctgcaggtaggcttttca

SEQ ID NO: 1436143 - DNA, 25 bp, Homo sapien
ctgcaggtaggcttttcagcttcct

SEQ ID NO: 1436144 - DNA, 25 bp, Homo sapien
aatccacccacatcattgcatggcc

SEQ ID NO: 1436145 - DNA, 25 bp, Homo sapien
ttcctctgattgtcataccaggcac

SEQ ID NO: 1436146 - DNA, 25 bp, Homo sapien
ttctggccgtctgggaagcttcagc

SEQ ID NO: 1436147 - DNA, 25 bp, Homo sapien
ctggccgtctgggaagcttcagctt

SEQ ID NO: 1436148 - DNA, 25 bp, Homo sapien
ggccgtctgggaagcttcagcttca

SEQ ID NO: 1436149 - DNA, 25 bp, Homo sapien
cttctggccgtctgggaagcttcag

SEQ ID NO: 1436150 - DNA, 25 bp, Homo sapien
agggtgtggcagaggatttttgctc

SEQ ID NO: 1436151 - DNA, 25 bp, Homo sapien
ctggaaacttgtataagtcaaagct

SEQ ID NO: 1436152 - DNA, 25 bp, Homo sapien
gaaacttgtataagtcaaagcttac

SEQ ID NO: 1436153 - DNA, 25 bp, Homo sapien
ttctggaaacttgtataagtcaaag

SEQ ID NO: 1436154 - DNA, 25 bp, Homo sapien
agaaaggacgtctggcattgggcta

SEQ ID NO: 1436155 - DNA, 25 bp, Homo sapien
gttattgcttcaagtacacgaatgc

SEQ ID NO: 1436156 - DNA, 25 bp, Homo sapien
ctggcattgggctagttattgcttc

SEQ ID NO: 1436157 - DNA, 25 bp, Homo sapien
aagtacacgaatgcccccagaggga

SEQ ID NO: 1436158 - DNA, 25 bp, Homo sapien
agcaaagtaagctgcttgtgaataa

SEQ ID NO: 1436159 - DNA, 25 bp, Homo sapien
ggagcaaagtaagctgcttgtgaat

SEQ ID NO: 1436160 - DNA, 25 bp, Homo sapien
gagcaaagtaagctgcttgtgaata

SEQ ID NO: 1436161 - DNA, 25 bp, Homo sapien
gtcgcatgcttagcatccaaaataa

SEQ ID NO: 1436162 - DNA, 25 bp, Homo sapien
gaaaatgagctgtcactaatgtgtt

SEQ ID NO: 1436163 - DNA, 25 bp, Homo sapien
cggaatttgtgaaccgtcgcatgct

SEQ ID NO: 1436164 - DNA, 25 bp, Homo sapien
tttatgttaactatcaataggcgga

SEQ ID NO: 1436165 - DNA, 25 bp, Homo sapien
gaggacaggcatcagccctcaatgt

SEQ ID NO: 1436166 - DNA, 25 bp, Homo sapien
gatgaccctttgacatgagacagtg

SEQ ID NO: 1436167 - DNA, 25 bp, Homo sapien
tatagtcaaccaccaaattcatggg

SEQ ID NO: 1436168 - DNA, 25 bp, Homo sapien
gagatgactgctccctgatatagtc

SEQ ID NO: 1436169 - DNA, 25 bp, Homo sapien
gatccatatgaagaatacctaccct

SEQ ID NO: 1436170 - DNA, 25 bp, Homo sapien
ctgatccatatgaagaatacctacc

SEQ ID NO: 1436171 - DNA, 25 bp, Homo sapien
tgaagaatacctaccctcaatgagt

SEQ ID NO: 1436172 - DNA, 25 bp, Homo sapien
ccatatgaagaatacctaccctcaa

SEQ ID NO: 1436173 - DNA, 25 bp, Homo sapien
gacctcggagtcctgatggtatcca

SEQ ID NO: 1436174 - DNA, 25 bp, Homo sapien
tccttgggacctcggagtcctgatg

SEQ ID NO: 1436175 - DNA, 25 bp, Homo sapien
ggagtcctgatggtatccactgttt

SEQ ID NO: 1436176 - DNA, 25 bp, Homo sapien
tcttccttgggacctcggagtcctg

SEQ ID NO: 1436177 - DNA, 25 bp, Homo sapien
tttgaacttattgaagaagagagcc

SEQ ID NO: 1436178 - DNA, 25 bp, Homo sapien
tgaacttattgaagaagagagcctc

SEQ ID NO: 1436179 - DNA, 25 bp, Homo sapien
atttgaacttattgaagaagagagc

SEQ ID NO: 1436180 - DNA, 25 bp, Homo sapien
ttgaacttattgaagaagagagcct

SEQ ID NO: 1436181 - DNA, 25 bp, Homo sapien
tcatttggaaggttggctgtctgga

SEQ ID NO: 1436182 - DNA, 25 bp, Homo sapien
tcagatgtttcctggctagtacagg

SEQ ID NO: 1436183 - DNA, 25 bp, Homo sapien
aggtggccaccgtctctaacaggaa

SEQ ID NO: 1436184 - DNA, 25 bp, Homo sapien
tgtctggagccctaacttgggttca

SEQ ID NO: 1436185 - DNA, 25 bp, Homo sapien
catcagggccttgatagaagatgcc

SEQ ID NO: 1436186 - DNA, 25 bp, Homo sapien
atgccggattttgacaaggagagag

SEQ ID NO: 1436187 - DNA, 25 bp, Homo sapien
tcacggaattgactcatggcatcag

SEQ ID NO: 1436188 - DNA, 25 bp, Homo sapien
ggttcacggaattgactcatggcat

SEQ ID NO: 1436189 - DNA, 25 bp, Homo sapien
aggtagagtaataatggtaagagaa

SEQ ID NO: 1436190 - DNA, 25 bp, Homo sapien
ggtagagtaataatggtaagagaag

SEQ ID NO: 1436191 - DNA, 25 bp, Homo sapien
gtagagtaataatggtaagagaagc

SEQ ID NO: 1436192 - DNA, 25 bp, Homo sapien
ccctgttttctagcacaaggtcacc

SEQ ID NO: 1436193 - DNA, 25 bp, Homo sapien
caaggtcaccttgagtcaagatgtt

SEQ ID NO: 1436194 - DNA, 25 bp, Homo sapien
atggccatgactgtgggaataaccc

SEQ ID NO: 1436195 - DNA, 25 bp, Homo sapien
ctgtgggaataaccccatctgctta

SEQ ID NO: 1436196 - DNA, 25 bp, Homo sapien
gaattgcctcagaaagttatcctgc

SEQ ID NO: 1436197 - DNA, 25 bp, Homo sapien
gctaaagtttatatgattactcctg

SEQ ID NO: 1436198 - DNA, 25 bp, Homo sapien
tactggatcctgcacatcacttcct

SEQ ID NO: 1436199 - DNA, 25 bp, Homo sapien
tcaatagcactggtactgaggagaa

SEQ ID NO: 1436200 - DNA, 25 bp, Homo sapien
ccagcccagtgtagaggaagagagc

SEQ ID NO: 1436201 - DNA, 25 bp, Homo sapien
ggaagagagctgagcatctgctaaa

SEQ ID NO: 1436202 - DNA, 25 bp, Homo sapien
agcatctgctaaagtccctccatca

SEQ ID NO: 1436203 - DNA, 25 bp, Homo sapien
aatttgtcgttccttgctgcttgta

SEQ ID NO: 1436204 - DNA, 25 bp, Homo sapien
acagcagggacatgtatgtctccat

SEQ ID NO: 1436205 - DNA, 25 bp, Homo sapien
cagggacatgtatgtctccatagct

SEQ ID NO: 1436206 - DNA, 25 bp, Homo sapien
gacatgtatgtctccatagctgtca

SEQ ID NO: 1436207 - DNA, 25 bp, Homo sapien
tatgtctccatagctgtcaaagttc

SEQ ID NO: 1436208 - DNA, 25 bp, Homo sapien
tccagctcggatggaagctctctga

SEQ ID NO: 1436209 - DNA, 25 bp, Homo sapien
tttgctgctgcaaaacgagctctga

SEQ ID NO: 1436210 - DNA, 25 bp, Homo sapien
tgaaaactcctggtgcaaatagcct

SEQ ID NO: 1436211 - DNA, 25 bp, Homo sapien
cacacagaacacagtacagctgagg

SEQ ID NO: 1436212 - DNA, 25 bp, Homo sapien
ttcctagacattagtggttgattac

SEQ ID NO: 1436213 - DNA, 25 bp, Homo sapien
ggttgattactaactcatttcatta

SEQ ID NO: 1436214 - DNA, 25 bp, Homo sapien
aattggcttttctcgtcagtgtcac

SEQ ID NO: 1436215 - DNA, 25 bp, Homo sapien
gaattggcttttctcgtcagtgtca

SEQ ID NO: 1436216 - DNA, 25 bp, Homo sapien
gcccagggaggatcttttgccccta

SEQ ID NO: 1436217 - DNA, 25 bp, Homo sapien
tttgtgcataatccgcgaggcccag

SEQ ID NO: 1436218 - DNA, 25 bp, Homo sapien
cactctgatggcgttcttttccatt

SEQ ID NO: 1436219 - DNA, 25 bp, Homo sapien
cctggccgaatgtgggaaatgatct

SEQ ID NO: 1436220 - DNA, 25 bp, Homo sapien
ggaaaaagatcaattaggtgcacac

SEQ ID NO: 1436221 - DNA, 25 bp, Homo sapien
caagaaacacccaatatgccaggga

SEQ ID NO: 1436222 - DNA, 25 bp, Homo sapien
ggtggatggcgatctctctggacca

SEQ ID NO: 1436223 - DNA, 25 bp, Homo sapien
aaattgattgagcttctgtgagggt

SEQ ID NO: 1436224 - DNA, 25 bp, Homo sapien
cgcgccgcgctcagttactggagag

SEQ ID NO: 1436225 - DNA, 25 bp, Homo sapien
ctgcgcgccgcgctcagttactgga

SEQ ID NO: 1436226 - DNA, 25 bp, Homo sapien
cgcgctcagttactggagagctggc

SEQ ID NO: 1436227 - DNA, 25 bp, Homo sapien
cgccgcgctcagttactggagagct

SEQ ID NO: 1436228 - DNA, 25 bp, Homo sapien
ttcttactccaagcggcggggagga

SEQ ID NO: 1436229 - DNA, 25 bp, Homo sapien
tcttactccaagcggcggggaggag

SEQ ID NO: 1436230 - DNA, 25 bp, Homo sapien
agtcaggattttccatgctgggatc

SEQ ID NO: 1436231 - DNA, 25 bp, Homo sapien
taacctgtctcatttgacgtttggc

SEQ ID NO: 1436232 - DNA, 25 bp, Homo sapien
tagcagtcaggattttccatgctgg

SEQ ID NO: 1436233 - DNA, 25 bp, Homo sapien
tgtctcatttgacgtttggctgcag

SEQ ID NO: 1436234 - DNA, 25 bp, Homo sapien
aatgtgtctgaatgagcttttccag

SEQ ID NO: 1436235 - DNA, 25 bp, Homo sapien
tctgcctgacagtagacttcttgct

SEQ ID NO: 1436236 - DNA, 25 bp, Homo sapien
tttaaccgtatctccagatccactg

SEQ ID NO: 1436237 - DNA, 25 bp, Homo sapien
cactgtgtcaggctcccttctgctt

SEQ ID NO: 1436238 - DNA, 25 bp, Homo sapien
tgtgggaacctttttcatacccatc

SEQ ID NO: 1436239 - DNA, 25 bp, Homo sapien
catacccatcatcatagatacaagt

SEQ ID NO: 1436240 - DNA, 25 bp, Homo sapien
aggaaaggcgattgagaagttgatt

SEQ ID NO: 1436241 - DNA, 25 bp, Homo sapien
caagtgctaagggatgtactctcaa

SEQ ID NO: 1436242 - DNA, 25 bp, Homo sapien
tttgcaacatggctatctggcatca

SEQ ID NO: 1436243 - DNA, 25 bp, Homo sapien
tatggtatggagaatggatctaatt

SEQ ID NO: 1436244 - DNA, 25 bp, Homo sapien
cagtgcagttgtagagacagtcatc

SEQ ID NO: 1436245 - DNA, 25 bp, Homo sapien
cacaaaccgcttattaaaagtccat

SEQ ID NO: 1436246 - DNA, 25 bp, Homo sapien
tgctcctttaaagggctattcagga

SEQ ID NO: 1436247 - DNA, 25 bp, Homo sapien
ttcctgattgctcctttaaagggct

SEQ ID NO: 1436248 - DNA, 25 bp, Homo sapien
ttcaggaaggactggagccttacta

SEQ ID NO: 1436249 - DNA, 25 bp, Homo sapien
tatgtctgttacattgtgctttaat

SEQ ID NO: 1436250 - DNA, 25 bp, Homo sapien
agttgtgaggccgatcaggtttcac

SEQ ID NO: 1436251 - DNA, 25 bp, Homo sapien
tgaggccgatcaggtttcaccgcct

SEQ ID NO: 1436252 - DNA, 25 bp, Homo sapien
gaggcagttgtgaggccgatcaggt

SEQ ID NO: 1436253 - DNA, 25 bp, Homo sapien
gccgatcaggtttcaccgccttttc

SEQ ID NO: 1436254 - DNA, 25 bp, Homo sapien
tcagctttgccgttactcctggagc

SEQ ID NO: 1436255 - DNA, 25 bp, Homo sapien
aagtgtctctaccatgaaaatacgg

SEQ ID NO: 1436256 - DNA, 25 bp, Homo sapien
gacctgactgcaccagaaaactatg

SEQ ID NO: 1436257 - DNA, 25 bp, Homo sapien
ggaacccgaggcattgagtctgtag

SEQ ID NO: 1436258 - DNA, 25 bp, Homo sapien
cgtggccgttgagtaaagttgtggg

SEQ ID NO: 1436259 - DNA, 25 bp, Homo sapien
tcctgaccctcactcaacatgacat

SEQ ID NO: 1436260 - DNA, 25 bp, Homo sapien
tcctcctgaccctcactcaacatga

SEQ ID NO: 1436261 - DNA, 25 bp, Homo sapien
cactggagcgtggccgttgagtaaa

SEQ ID NO: 1436262 - DNA, 25 bp, Homo sapien
caggttttaatattgacaatgtccc

SEQ ID NO: 1436263 - DNA, 25 bp, Homo sapien
aactgccacaggatagaagtgttga

SEQ ID NO: 1436264 - DNA, 25 bp, Homo sapien
acaggttttaatattgacaatgtcc

SEQ ID NO: 1436265 - DNA, 25 bp, Homo sapien
cccctgaactgccacaggatagaag

SEQ ID NO: 1436266 - DNA, 25 bp, Homo sapien
tgaccacaaatgcacctaccctttc

SEQ ID NO: 1436267 - DNA, 25 bp, Homo sapien
gtgaccacaaatgcacctacccttt

SEQ ID NO: 1436268 - DNA, 25 bp, Homo sapien
tataaagtccgcttccccatgagtg

SEQ ID NO: 1436269 - DNA, 25 bp, Homo sapien
cccatgagtgcaaggtcctctggaa

SEQ ID NO: 1436270 - DNA, 25 bp, Homo sapien
tgccaactgtatatccaaggctaac

SEQ ID NO: 1436271 - DNA, 25 bp, Homo sapien
gcatggatgaaagcatataaatgcc

SEQ ID NO: 1436272 - DNA, 25 bp, Homo sapien
gggagcattcttggaagaagtccga

SEQ ID NO: 1436273 - DNA, 25 bp, Homo sapien
gataagatttcagtgggtcaagatg

SEQ ID NO: 1436274 - DNA, 25 bp, Homo sapien
gaaagatatcaactgaatacgtggg

SEQ ID NO: 1436275 - DNA, 25 bp, Homo sapien
gaagtccgatgggatggctttggct

SEQ ID NO: 1436276 - DNA, 25 bp, Homo sapien
tgctgtggccatcccctgttggcct

SEQ ID NO: 1436277 - DNA, 25 bp, Homo sapien
tgtggccatcccctgttggcctcag

SEQ ID NO: 1436278 - DNA, 25 bp, Homo sapien
gccatcccctgttggcctcagtggt

SEQ ID NO: 1436279 - DNA, 25 bp, Homo sapien
ggtgtagcaggtctggcagcttttc

SEQ ID NO: 1436280 - DNA, 25 bp, Homo sapien
cccaagcggcaagtatgatttgtca

SEQ ID NO: 1436281 - DNA, 25 bp, Homo sapien
tagaaggatgtgattgtatggaccc

SEQ ID NO: 1436282 - DNA, 25 bp, Homo sapien
caaatgccatcgagagatgctcagg

SEQ ID NO: 1436283 - DNA, 25 bp, Homo sapien
gacttctatgaattttctcgggaga

SEQ ID NO: 1436284 - DNA, 25 bp, Homo sapien
tgcaggcatgagcttttaccatgtg

SEQ ID NO: 1436285 - DNA, 25 bp, Homo sapien
taccatgtggtggtggactgcatgc

SEQ ID NO: 1436286 - DNA, 25 bp, Homo sapien
ttaccatgtggtggtggactgcatg

SEQ ID NO: 1436287 - DNA, 25 bp, Homo sapien
ctgcaggcatgagcttttaccatgt

SEQ ID NO: 1436288 - DNA, 25 bp, Homo sapien
gctctttcaaagaaatagtagcagg

SEQ ID NO: 1436289 - DNA, 25 bp, Homo sapien
taggcactacctcaagctctttcaa

SEQ ID NO: 1436290 - DNA, 25 bp, Homo sapien
tgtaggcactacctcaagctctttc

SEQ ID NO: 1436291 - DNA, 25 bp, Homo sapien
caaagaaatagtagcagggagacca

SEQ ID NO: 1436292 - DNA, 25 bp, Homo sapien
ttcctctggccgcttccagtctcct

SEQ ID NO: 1436293 - DNA, 25 bp, Homo sapien
tcctctggccgcttccagtctcctc

SEQ ID NO: 1436294 - DNA, 25 bp, Homo sapien
ttttcctctggccgcttccagtctc

SEQ ID NO: 1436295 - DNA, 25 bp, Homo sapien
cctctggccgcttccagtctcctca

SEQ ID NO: 1436296 - DNA, 25 bp, Homo sapien
agggactccacacacgggctccttc

SEQ ID NO: 1436297 - DNA, 25 bp, Homo sapien
cacaccaaggttagcagagccaaca

SEQ ID NO: 1436298 - DNA, 25 bp, Homo sapien
tccttccacaccaaggttagcagag

SEQ ID NO: 1436299 - DNA, 25 bp, Homo sapien
ccaaggttagcagagccaacaagca

SEQ ID NO: 1436300 - DNA, 25 bp, Homo sapien
ctgtggtacagcaaatgctctgaat

SEQ ID NO: 1436301 - DNA, 25 bp, Homo sapien
gctttccatcactgtttgacgttga

SEQ ID NO: 1436302 - DNA, 25 bp, Homo sapien
tgtttgacgttgaggacaggtgtcc

SEQ ID NO: 1436303 - DNA, 25 bp, Homo sapien
ggtacagcaaatgctctgaattctg

SEQ ID NO: 1436304 - DNA, 25 bp, Homo sapien
ttatcttcaactctaagcaccacta

SEQ ID NO: 1436305 - DNA, 25 bp, Homo sapien
tatggagaaaatgtggcttgtatac

SEQ ID NO: 1436306 - DNA, 25 bp, Homo sapien
gaaaatgtggcttgtatacctgcca

SEQ ID NO: 1436307 - DNA, 25 bp, Homo sapien
tgtatacctgccattatcttcaact

SEQ ID NO: 1436308 - DNA, 25 bp, Homo sapien
aagcagccacgcgatgttgagagcc

SEQ ID NO: 1436309 - DNA, 25 bp, Homo sapien
gccctggcgggttagggatctccat

SEQ ID NO: 1436310 - DNA, 25 bp, Homo sapien
ccacgcgatgttgagagccctggcg

SEQ ID NO: 1436311 - DNA, 25 bp, Homo sapien
caaataagcagccacgcgatgttga

SEQ ID NO: 1436312 - DNA, 25 bp, Homo sapien
aattaacctctcatctgtcttgacc

SEQ ID NO: 1436313 - DNA, 25 bp, Homo sapien
gctgcctttgcaggtgctgtacagg

SEQ ID NO: 1436314 - DNA, 25 bp, Homo sapien
ctttgcaggtgctgtacagggagca

SEQ ID NO: 1436315 - DNA, 25 bp, Homo sapien
tctgcctgtttatgtttggtacaat

SEQ ID NO: 1436316 - DNA, 25 bp, Homo sapien
catgttctttttggcctagaatttc

SEQ ID NO: 1436317 - DNA, 25 bp, Homo sapien
tgcctttcttgacagggaatttatc

SEQ ID NO: 1436318 - DNA, 25 bp, Homo sapien
taactgctgacttcatagctctctg

SEQ ID NO: 1436319 - DNA, 25 bp, Homo sapien
gtgtgcccgttgcaatcagaatttg

SEQ ID NO: 1436320 - DNA, 25 bp, Homo sapien
gatatgttgtagaacctcactgaga

SEQ ID NO: 1436321 - DNA, 25 bp, Homo sapien
cctatagcattgagaactgtggaga

SEQ ID NO: 1436322 - DNA, 25 bp, Homo sapien
tgggaatggtacgaaagagctaagc

SEQ ID NO: 1436323 - DNA, 25 bp, Homo sapien
caaggagatgcactaattgcctgga

SEQ ID NO: 1436324 - DNA, 25 bp, Homo sapien
gactctcatccctacactcttttgt

SEQ ID NO: 1436325 - DNA, 25 bp, Homo sapien
cctacactcttttgttcctcatgga

SEQ ID NO: 1436326 - DNA, 25 bp, Homo sapien
tctgagctttgatccctgttcccat

SEQ ID NO: 1436327 - DNA, 25 bp, Homo sapien
ccccgcaacatagactctcatccct

SEQ ID NO: 1436328 - DNA, 25 bp, Homo sapien
tctgcagattgtgtggtgaagagaa

SEQ ID NO: 1436329 - DNA, 25 bp, Homo sapien
attgtgtggtgaagagaagttggca

SEQ ID NO: 1436330 - DNA, 25 bp, Homo sapien
gcttctgcagattgtgtggtgaaga

SEQ ID NO: 1436331 - DNA, 25 bp, Homo sapien
gattgtgtggtgaagagaagttggc

SEQ ID NO: 1436332 - DNA, 25 bp, Homo sapien
cagaacacactttagtctctgaggg

SEQ ID NO: 1436333 - DNA, 25 bp, Homo sapien
taagttggtgattcgtatcaactgg

SEQ ID NO: 1436334 - DNA, 25 bp, Homo sapien
gagaaaaggtacagacggtcagaag

SEQ ID NO: 1436335 - DNA, 25 bp, Homo sapien
ccagacattattcctaaagagctat

SEQ ID NO: 1436336 - DNA, 25 bp, Homo sapien
ttcttcacgaatgtgagcactgatt

SEQ ID NO: 1436337 - DNA, 25 bp, Homo sapien
catatttaggaccagtataactttt

SEQ ID NO: 1436338 - DNA, 25 bp, Homo sapien
gtacttggtgtattctttttcagca

SEQ ID NO: 1436339 - DNA, 25 bp, Homo sapien
tcatcatcatatttaggaccagtat

SEQ ID NO: 1436340 - DNA, 25 bp, Homo sapien
tggtacttggtgtattctttttcag

SEQ ID NO: 1436341 - DNA, 25 bp, Homo sapien
cagttttcatcactgcttaatgtca

SEQ ID NO: 1436342 - DNA, 25 bp, Homo sapien
ttaatgtcatatattccactttgct

SEQ ID NO: 1436343 - DNA, 25 bp, Homo sapien
tgcttctctcagactttaattccat

SEQ ID NO: 1436344 - DNA, 25 bp, Homo sapien
gaagatgttcattatcccagttttc

SEQ ID NO: 1436345 - DNA, 25 bp, Homo sapien
ggctttctgccagatcaaaagcctg

SEQ ID NO: 1436346 - DNA, 25 bp, Homo sapien
aggctttctgccagatcaaaagcct

SEQ ID NO: 1436347 - DNA, 25 bp, Homo sapien
cggtagcctattcattgagaaatag

SEQ ID NO: 1436348 - DNA, 25 bp, Homo sapien
ctattcattgagaaatagcccaaaa

SEQ ID NO: 1436349 - DNA, 25 bp, Homo sapien
tagcctattcattgagaaatagccc

SEQ ID NO: 1436350 - DNA, 25 bp, Homo sapien
gcctattcattgagaaatagcccaa

SEQ ID NO: 1436351 - DNA, 25 bp, Homo sapien
agctggggttcacttctatttctct

SEQ ID NO: 1436352 - DNA, 25 bp, Homo sapien
caagcccaacacttatgactttttt

SEQ ID NO: 1436353 - DNA, 25 bp, Homo sapien
cctaccttgaatttatgatcttgct

SEQ ID NO: 1436354 - DNA, 25 bp, Homo sapien
ttttcatcagctattagattcatca

SEQ ID NO: 1436355 - DNA, 25 bp, Homo sapien
ggtatgtgacggagcattttcttca

SEQ ID NO: 1436356 - DNA, 25 bp, Homo sapien
tcaggaaagggtgaatggatgccag

SEQ ID NO: 1436357 - DNA, 25 bp, Homo sapien
gtgaatggatgccagccagttccac

SEQ ID NO: 1436358 - DNA, 25 bp, Homo sapien
caacatttggtgtgtacgtctctac

SEQ ID NO: 1436359 - DNA, 25 bp, Homo sapien
tttgccatatccagacttgtacttg

SEQ ID NO: 1436360 - DNA, 25 bp, Homo sapien
tgccatatccagacttgtacttggt

SEQ ID NO: 1436361 - DNA, 25 bp, Homo sapien
ccatatccagacttgtacttggtcc

SEQ ID NO: 1436362 - DNA, 25 bp, Homo sapien
catatccagacttgtacttggtcca

SEQ ID NO: 1436363 - DNA, 25 bp, Homo sapien
aaatgctctttcaccatcaattaag

SEQ ID NO: 1436364 - DNA, 25 bp, Homo sapien
tatatggtatggtagtcacttgaca

SEQ ID NO: 1436365 - DNA, 25 bp, Homo sapien
gacatggtcactagtattccaaatc

SEQ ID NO: 1436366 - DNA, 25 bp, Homo sapien
ttttcacagctgcatgttttaacct

SEQ ID NO: 1436367 - DNA, 25 bp, Homo sapien
gcatgtcagaattctgagctgccac

SEQ ID NO: 1436368 - DNA, 25 bp, Homo sapien
tggcaagcatgtcagaattctgagc

SEQ ID NO: 1436369 - DNA, 25 bp, Homo sapien
caagcatgtcagaattctgagctgc

SEQ ID NO: 1436370 - DNA, 25 bp, Homo sapien
ctggcaagcatgtcagaattctgag

SEQ ID NO: 1436371 - DNA, 25 bp, Homo sapien
gccaatgtctacactgaggcagccc

SEQ ID NO: 1436372 - DNA, 25 bp, Homo sapien
cctcagatcccaagctaaggtcact

SEQ ID NO: 1436373 - DNA, 25 bp, Homo sapien
aaggtcactgatgtatgttcacagc

SEQ ID NO: 1436374 - DNA, 25 bp, Homo sapien
cccaagctaaggtcactgatgtatg

SEQ ID NO: 1436375 - DNA, 25 bp, Homo sapien
tacccagacccttgggccagagcag

SEQ ID NO: 1436376 - DNA, 25 bp, Homo sapien
agcagccttgtgcccccattttttt

SEQ ID NO: 1436377 - DNA, 25 bp, Homo sapien
ggtgggaggcgtaactaaatcagaa

SEQ ID NO: 1436378 - DNA, 25 bp, Homo sapien
cagaggcattcttctgacttagcta

SEQ ID NO: 1436379 - DNA, 25 bp, Homo sapien
aattacctctgcgaggatccgccca

SEQ ID NO: 1436380 - DNA, 25 bp, Homo sapien
gctaaacaagcttctggcaggaaaa

SEQ ID NO: 1436381 - DNA, 25 bp, Homo sapien
taagagaagagtcctaacacacagc

SEQ ID NO: 1436382 - DNA, 25 bp, Homo sapien
tgttctcacctcaaccctgagaggt

SEQ ID NO: 1436383 - DNA, 25 bp, Homo sapien
ccagagcgcgccatatatatgaact

SEQ ID NO: 1436384 - DNA, 25 bp, Homo sapien
tcagtgtgtctttggatggcaagca

SEQ ID NO: 1436385 - DNA, 25 bp, Homo sapien
agggcccagtcctgtcactatcccg

SEQ ID NO: 1436386 - DNA, 25 bp, Homo sapien
cagctgtccctgtcgggctgcggag

SEQ ID NO: 1436387 - DNA, 25 bp, Homo sapien
gtcactatcccgcatccacaggacg

SEQ ID NO: 1436388 - DNA, 25 bp, Homo sapien
cacaggacgagctcagctcgggtgt

SEQ ID NO: 1436389 - DNA, 25 bp, Homo sapien
tcctcattggcactgccgtgtgcat

SEQ ID NO: 1436390 - DNA, 25 bp, Homo sapien
taagaagctcttaaagctcttaaag

SEQ ID NO: 1436391 - DNA, 25 bp, Homo sapien
gaagaattttgcatataagacacaa

SEQ ID NO: 1436392 - DNA, 25 bp, Homo sapien
tatgactgcactaaaattaagaagc

SEQ ID NO: 1436393 - DNA, 25 bp, Homo sapien
cacaaaggatgtagttcttaaggat

SEQ ID NO: 1436394 - DNA, 25 bp, Homo sapien
gatgacactggtgtaggaaccactg

SEQ ID NO: 1436395 - DNA, 25 bp, Homo sapien
tgcccatccagctaacagtagtaga

SEQ ID NO: 1436396 - DNA, 25 bp, Homo sapien
catactctgggctttaggatcctgc

SEQ ID NO: 1436397 - DNA, 25 bp, Homo sapien
cactggtgaagtgtgtgcatactct

SEQ ID NO: 1436398 - DNA, 25 bp, Homo sapien
tgccctctcttcagctatccttttc

SEQ ID NO: 1436399 - DNA, 25 bp, Homo sapien
gccctctcttcagctatccttttct

SEQ ID NO: 1436400 - DNA, 25 bp, Homo sapien
cctctcttcagctatccttttctct

SEQ ID NO: 1436401 - DNA, 25 bp, Homo sapien
ccctctcttcagctatccttttctc

SEQ ID NO: 1436402 - DNA, 25 bp, Homo sapien
gtttggcagtcatggatgttgcttc

SEQ ID NO: 1436403 - DNA, 25 bp, Homo sapien
taggtttggcagtcatggatgttgc

SEQ ID NO: 1436404 - DNA, 25 bp, Homo sapien
cattaggtttggcagtcatggatgt

SEQ ID NO: 1436405 - DNA, 25 bp, Homo sapien
ggcagtcatggatgttgcttcagcc

SEQ ID NO: 1436406 - DNA, 25 bp, Homo sapien
tgcaggttggccaccttagccatgc

SEQ ID NO: 1436407 - DNA, 25 bp, Homo sapien
aggctccataataaagtcccatggg

SEQ ID NO: 1436408 - DNA, 25 bp, Homo sapien
ggtgcatgcaggttggccaccttag

SEQ ID NO: 1436409 - DNA, 25 bp, Homo sapien
taataaagtcccatgggcctactta

SEQ ID NO: 1436410 - DNA, 25 bp, Homo sapien
ggctagtccattgttctctgccttc

SEQ ID NO: 1436411 - DNA, 25 bp, Homo sapien
ctcccatcaatagctgaagtcttct

SEQ ID NO: 1436412 - DNA, 25 bp, Homo sapien
tcctgtctggctagtccattgttct

SEQ ID NO: 1436413 - DNA, 25 bp, Homo sapien
ctgccttctagaaagagggccctcc

SEQ ID NO: 1436414 - DNA, 25 bp, Homo sapien
tctagctagtcgtgcacagatgctc

SEQ ID NO: 1436415 - DNA, 25 bp, Homo sapien
gcagcccctggggatagccttcctt

SEQ ID NO: 1436416 - DNA, 25 bp, Homo sapien
caggcggtggtttaagcccagcagc

SEQ ID NO: 1436417 - DNA, 25 bp, Homo sapien
tattctggattctagctagtcgtgc

SEQ ID NO: 1436418 - DNA, 25 bp, Homo sapien
ctgcagaacgtggttatctgctcct

SEQ ID NO: 1436419 - DNA, 25 bp, Homo sapien
cagaacgtggttatctgctcctgca

SEQ ID NO: 1436420 - DNA, 25 bp, Homo sapien
aacgtggttatctgctcctgcagtc

SEQ ID NO: 1436421 - DNA, 25 bp, Homo sapien
agaacgtggttatctgctcctgcag

SEQ ID NO: 1436422 - DNA, 25 bp, Homo sapien
cctctacacagagtagggtgtggtc

SEQ ID NO: 1436423 - DNA, 25 bp, Homo sapien
tttttgagtctgcacccgaaggcac

SEQ ID NO: 1436424 - DNA, 25 bp, Homo sapien
tttgagtctgcacccgaaggcactc

SEQ ID NO: 1436425 - DNA, 25 bp, Homo sapien
actgaagaagacgtggaagcctcta

SEQ ID NO: 1436426 - DNA, 25 bp, Homo sapien
cgagggcctcctagggatcttgctc

SEQ ID NO: 1436427 - DNA, 25 bp, Homo sapien
gttctcccagctttcgagggcctcc

SEQ ID NO: 1436428 - DNA, 25 bp, Homo sapien
tctttgtcaccatcactaggagttt

SEQ ID NO: 1436429 - DNA, 25 bp, Homo sapien
tttcgagggcctcctagggatcttg

SEQ ID NO: 1436430 - DNA, 25 bp, Homo sapien
taatcctgaccataaccctatggga

SEQ ID NO: 1436431 - DNA, 25 bp, Homo sapien
gcaatttgtgcgctgtcaaacaaca

SEQ ID NO: 1436432 - DNA, 25 bp, Homo sapien
gatggagaccgtgattatccccagg

SEQ ID NO: 1436433 - DNA, 25 bp, Homo sapien
taaaaccttcaggaaaactccatga

SEQ ID NO: 1436434 - DNA, 25 bp, Homo sapien
ccacctgaatacttgggtccatttg

SEQ ID NO: 1436435 - DNA, 25 bp, Homo sapien
tgtaagttacctctcagagcctcgt

SEQ ID NO: 1436436 - DNA, 25 bp, Homo sapien
ctccacctgaatacttgggtccatt

SEQ ID NO: 1436437 - DNA, 25 bp, Homo sapien
gggtccatttgtaagttacctctca

SEQ ID NO: 1436438 - DNA, 25 bp, Homo sapien
ggcattgtgtggatacatttgtatg

SEQ ID NO: 1436439 - DNA, 25 bp, Homo sapien
agtggccaggcacctttaagttctt

SEQ ID NO: 1436440 - DNA, 25 bp, Homo sapien
cagtgtgtgactcagagcatgtctc

SEQ ID NO: 1436441 - DNA, 25 bp, Homo sapien
gatatttatggcattgtgtggatac

SEQ ID NO: 1436442 - DNA, 25 bp, Homo sapien
ccctggattgtatgctgtctgtaga

SEQ ID NO: 1436443 - DNA, 25 bp, Homo sapien
gcctggattctgttgcaaggagaca

SEQ ID NO: 1436444 - DNA, 25 bp, Homo sapien
tatttatgacgtagctacccctgtg

SEQ ID NO: 1436445 - DNA, 25 bp, Homo sapien
tgtgccagctatcactgacaaagcc

SEQ ID NO: 1436446 - DNA, 25 bp, Homo sapien
gatggttgctatgccaagccttgtt

SEQ ID NO: 1436447 - DNA, 25 bp, Homo sapien
tctctcgcacgcagtctagagatgg

SEQ ID NO: 1436448 - DNA, 25 bp, Homo sapien
ctagagatggactgagccttgcttc

SEQ ID NO: 1436449 - DNA, 25 bp, Homo sapien
cactggcagtgttgagctttggaga

SEQ ID NO: 1436450 - DNA, 25 bp, Homo sapien
ctatgtcaatttgctcttgccgaaa

SEQ ID NO: 1436451 - DNA, 25 bp, Homo sapien
gcaaataatgagattccctatctcc

SEQ ID NO: 1436452 - DNA, 25 bp, Homo sapien
tatccacatccaactgatggcacca

SEQ ID NO: 1436453 - DNA, 25 bp, Homo sapien
tcttgccgaaaagatgagcctcgat

SEQ ID NO: 1436454 - DNA, 25 bp, Homo sapien
gttctggctccggtgtttaacactg

SEQ ID NO: 1436455 - DNA, 25 bp, Homo sapien
ccggtgtttaacactggatacatct

SEQ ID NO: 1436456 - DNA, 25 bp, Homo sapien
ggatacatctttgatgtgcgaaagt

SEQ ID NO: 1436457 - DNA, 25 bp, Homo sapien
tctttgatgtgcgaaagtgagttca

SEQ ID NO: 1436458 - DNA, 25 bp, Homo sapien
ctagttgttatctctgtagggctca

SEQ ID NO: 1436459 - DNA, 25 bp, Homo sapien
ccaaagcggccacgcccacaatccg

SEQ ID NO: 1436460 - DNA, 25 bp, Homo sapien
agcaggtccagggatgatgcagccc

SEQ ID NO: 1436461 - DNA, 25 bp, Homo sapien
ggccacgcccacaatccgacagccc

SEQ ID NO: 1436462 - DNA, 25 bp, Homo sapien
gagcaggtccagggatgatgcagcc

SEQ ID NO: 1436463 - DNA, 25 bp, Homo sapien
tatccttgactttggcagtcacctt

SEQ ID NO: 1436464 - DNA, 25 bp, Homo sapien
ggaatttcatgaacgaggtctatga

SEQ ID NO: 1436465 - DNA, 25 bp, Homo sapien
caaggggggaatagtatccttgact

SEQ ID NO: 1436466 - DNA, 25 bp, Homo sapien
tgtgcctgcaataaaccttttggaa

SEQ ID NO: 1436467 - DNA, 25 bp, Homo sapien
aaggctttgggaatttaggcacacg

SEQ ID NO: 1436468 - DNA, 25 bp, Homo sapien
gggaatttaggcacacgtttctctc

SEQ ID NO: 1436469 - DNA, 25 bp, Homo sapien
cagtgccctgaggaaaaggctttgg

SEQ ID NO: 1436470 - DNA, 25 bp, Homo sapien
ttgggaatttaggcacacgtttctc

SEQ ID NO: 1436471 - DNA, 25 bp, Homo sapien
tgtttcatcacaaactgtatctttt

SEQ ID NO: 1436472 - DNA, 25 bp, Homo sapien
aaccagaacaggctttcgagtgctg

SEQ ID NO: 1436473 - DNA, 25 bp, Homo sapien
cagatgcaaccagaacaggctttcg

SEQ ID NO: 1436474 - DNA, 25 bp, Homo sapien
caggctttcgagtgctgtgatttct

SEQ ID NO: 1436475 - DNA, 25 bp, Homo sapien
tgggggtctgggacaatccgatctc

SEQ ID NO: 1436476 - DNA, 25 bp, Homo sapien
tgggctagggtttgatgtctctttt

SEQ ID NO: 1436477 - DNA, 25 bp, Homo sapien
ctttcttgtgggctagggtttgatg

SEQ ID NO: 1436478 - DNA, 25 bp, Homo sapien
ggaccactgacttgcattgaaatcc

SEQ ID NO: 1436479 - DNA, 25 bp, Homo sapien
gaatcgaggtctgctactcgtcttg

SEQ ID NO: 1436480 - DNA, 25 bp, Homo sapien
taactatagggataccgaaacagga

SEQ ID NO: 1436481 - DNA, 25 bp, Homo sapien
tgagttcgactcacatgggagaatc

SEQ ID NO: 1436482 - DNA, 25 bp, Homo sapien
catatacagagagatacgtggagaa

SEQ ID NO: 1436483 - DNA, 25 bp, Homo sapien
cagccacatacagccaccacatgtg

SEQ ID NO: 1436484 - DNA, 25 bp, Homo sapien
acatacagccaccacatgtgtcaca

SEQ ID NO: 1436485 - DNA, 25 bp, Homo sapien
tggtccagccacatacagccaccac

SEQ ID NO: 1436486 - DNA, 25 bp, Homo sapien
atacagccaccacatgtgtcacaca

SEQ ID NO: 1436487 - DNA, 25 bp, Homo sapien
taattctgaggctagcgatgcccac

SEQ ID NO: 1436488 - DNA, 25 bp, Homo sapien
tagacccagggatgagaatgcaccc

SEQ ID NO: 1436489 - DNA, 25 bp, Homo sapien
tcaaagcccggatgtgtcagaggac

SEQ ID NO: 1436490 - DNA, 25 bp, Homo sapien
cagaagacagttcccctgagaggct

SEQ ID NO: 1436491 - DNA, 25 bp, Homo sapien
caagtttgccttaggcttgttcatg

SEQ ID NO: 1436492 - DNA, 25 bp, Homo sapien
tcatggaatataagccaagtttgcc

SEQ ID NO: 1436493 - DNA, 25 bp, Homo sapien
tggcaggtccccttagggccatgtg

SEQ ID NO: 1436494 - DNA, 25 bp, Homo sapien
tataagccaagtttacctctcccca

SEQ ID NO: 1436495 - DNA, 25 bp, Homo sapien
gcagtgggcccatgtcgcttgaata

SEQ ID NO: 1436496 - DNA, 25 bp, Homo sapien
cagtagtggctacaggtgctaagca

SEQ ID NO: 1436497 - DNA, 25 bp, Homo sapien
cactgtgcgacatttggcctgcaga

SEQ ID NO: 1436498 - DNA, 25 bp, Homo sapien
tcaaaaccctaaaggagagctgtcc

SEQ ID NO: 1436499 - DNA, 25 bp, Homo sapien
ggaggaggccattgtaaatatctgc

SEQ ID NO: 1436500 - DNA, 25 bp, Homo sapien
tatttcgtgtacataagggcttctc

SEQ ID NO: 1436501 - DNA, 25 bp, Homo sapien
aactttcagggacagcccacactgt

SEQ ID NO: 1436502 - DNA, 25 bp, Homo sapien
tggatatgtggtacagcaggcaccc

SEQ ID NO: 1436503 - DNA, 25 bp, Homo sapien
gcaagaatgggcaatgcataaaata

SEQ ID NO: 1436504 - DNA, 25 bp, Homo sapien
ttccggagcctactaaaaacaatca

SEQ ID NO: 1436505 - DNA, 25 bp, Homo sapien
taaaataacgccatgagccttctct

SEQ ID NO: 1436506 - DNA, 25 bp, Homo sapien
agtttgacttgaggagatcccacag

SEQ ID NO: 1436507 - DNA, 25 bp, Homo sapien
taattgtacagtgtatgccagggcc

SEQ ID NO: 1436508 - DNA, 25 bp, Homo sapien
tgtcaactataactacctggcatgt

SEQ ID NO: 1436509 - DNA, 25 bp, Homo sapien
catggacaaacggtctcagggcact

SEQ ID NO: 1436510 - DNA, 25 bp, Homo sapien
catatggattctcccactgcactgg

SEQ ID NO: 1436511 - DNA, 25 bp, Homo sapien
cactgtcgcatgagcctgttcattt

SEQ ID NO: 1436512 - DNA, 25 bp, Homo sapien
catgagcctgttcatttctgacaag

SEQ ID NO: 1436513 - DNA, 25 bp, Homo sapien
agcatgaagccaaaagctgtttccc

SEQ ID NO: 1436514 - DNA, 25 bp, Homo sapien
tctgacaagcgttggtcccatcagc

SEQ ID NO: 1436515 - DNA, 25 bp, Homo sapien
aatcacaaaggccagccaagctgaa

SEQ ID NO: 1436516 - DNA, 25 bp, Homo sapien
gctgctgagttttatgagctgtcaa

SEQ ID NO: 1436517 - DNA, 25 bp, Homo sapien
gccagccaagctgaaagagctccct

SEQ ID NO: 1436518 - DNA, 25 bp, Homo sapien
aaggagttgataactattcctaggc

SEQ ID NO: 1436519 - DNA, 25 bp, Homo sapien
cacacacaaagctggtctcccgtac

SEQ ID NO: 1436520 - DNA, 25 bp, Homo sapien
tgccggaggccagtaacctggagtt

SEQ ID NO: 1436521 - DNA, 25 bp, Homo sapien
tctcatgccgaagaggagtcaagct

SEQ ID NO: 1436522 - DNA, 25 bp, Homo sapien
gagtcaagcttaggagacctctggt

SEQ ID NO: 1436523 - DNA, 25 bp, Homo sapien
ccctgaatgcttgttagtgacgtca

SEQ ID NO: 1436524 - DNA, 25 bp, Homo sapien
cgagcctcaacacttgatggatggg

SEQ ID NO: 1436525 - DNA, 25 bp, Homo sapien
tgcagtaatctgatggaggacacaa

SEQ ID NO: 1436526 - DNA, 25 bp, Homo sapien
gaaaaggaagctcaactccaccgag

SEQ ID NO: 1436527 - DNA, 25 bp, Homo sapien
gttcacatcacgttactaatccagc

SEQ ID NO: 1436528 - DNA, 25 bp, Homo sapien
gaatccctgacaaggatgatccagg

SEQ ID NO: 1436529 - DNA, 25 bp, Homo sapien
tggtcttcaagagccaagttgccat

SEQ ID NO: 1436530 - DNA, 25 bp, Homo sapien
gacctggtcttcaagtgcaacttgg

SEQ ID NO: 1436531 - DNA, 25 bp, Homo sapien
gaagtctcctcaccgtatgacctaa

SEQ ID NO: 1436532 - DNA, 25 bp, Homo sapien
gtggaacacctgtgtttaaggacat

SEQ ID NO: 1436533 - DNA, 25 bp, Homo sapien
gacgcgatgatcacagagagtggaa

SEQ ID NO: 1436534 - DNA, 25 bp, Homo sapien
ctgagagacgcgatgatcacagaga

SEQ ID NO: 1436535 - DNA, 25 bp, Homo sapien
ggacatggctacagaacatacattg

SEQ ID NO: 1436536 - DNA, 25 bp, Homo sapien
gagttttgagcaacattgactgact

SEQ ID NO: 1436537 - DNA, 25 bp, Homo sapien
tttgagcaacattgactgactggct

SEQ ID NO: 1436538 - DNA, 25 bp, Homo sapien
cacaaggactcagagtccctcaggg

SEQ ID NO: 1436539 - DNA, 25 bp, Homo sapien
ctttccacaaggactcagagtccct

SEQ ID NO: 1436540 - DNA, 25 bp, Homo sapien
ctcaggcaaccgagccacagggagt

SEQ ID NO: 1436541 - DNA, 25 bp, Homo sapien
gaacttggagatgatagggtgcagg

SEQ ID NO: 1436542 - DNA, 25 bp, Homo sapien
ctgcatgccactgagttgggcacca

SEQ ID NO: 1436543 - DNA, 25 bp, Homo sapien
aggtttgcaaacacgtactccaacg

SEQ ID NO: 1436544 - DNA, 25 bp, Homo sapien
ccctgcccctccagagtgctctgtt

SEQ ID NO: 1436545 - DNA, 25 bp, Homo sapien
cccctccagagtgctctgttcatac

SEQ ID NO: 1436546 - DNA, 25 bp, Homo sapien
ctgcccctccagagtgctctgttca

SEQ ID NO: 1436547 - DNA, 25 bp, Homo sapien
gcccctccagagtgctctgttcata

SEQ ID NO: 1436548 - DNA, 25 bp, Homo sapien
ggcagccactgagcacgcatgacat

SEQ ID NO: 1436549 - DNA, 25 bp, Homo sapien
cactgagcacgcatgacatgagtaa

SEQ ID NO: 1436550 - DNA, 25 bp, Homo sapien
tgacatgagtaaccattccgtcctc

SEQ ID NO: 1436551 - DNA, 25 bp, Homo sapien
gtaaccattccgtcctcttggcctg

SEQ ID NO: 1436552 - DNA, 25 bp, Homo sapien
atgttttgacttgaaacagtcagac

SEQ ID NO: 1436553 - DNA, 25 bp, Homo sapien
tgtggtttggggcatgttttgactt

SEQ ID NO: 1436554 - DNA, 25 bp, Homo sapien
gggcatgttttgacttgaaacagtc

SEQ ID NO: 1436555 - DNA, 25 bp, Homo sapien
tttgacttgaaacagtcagacccat

SEQ ID NO: 1436556 - DNA, 25 bp, Homo sapien
tatttggagttgtaagccccttctg

SEQ ID NO: 1436557 - DNA, 25 bp, Homo sapien
tttggagttgtaagccccttctgtg

SEQ ID NO: 1436558 - DNA, 25 bp, Homo sapien
atttggagttgtaagccccttctgt

SEQ ID NO: 1436559 - DNA, 25 bp, Homo sapien
aggctttcctccaggggcctgcggt

SEQ ID NO: 1436560 - DNA, 25 bp, Homo sapien
tttcataaaccgtatgaactttgct

SEQ ID NO: 1436561 - DNA, 25 bp, Homo sapien
gagaccacttttcataaaccgtatg

SEQ ID NO: 1436562 - DNA, 25 bp, Homo sapien
gcctgcggtgttcttgcgctgtgag

SEQ ID NO: 1436563 - DNA, 25 bp, Homo sapien
ctccctggtcccctgacttccttct

SEQ ID NO: 1436564 - DNA, 25 bp, Homo sapien
ttctccctgagctggagaagcccat

SEQ ID NO: 1436565 - DNA, 25 bp, Homo sapien
acttccttctccctgagctggagaa

SEQ ID NO: 1436566 - DNA, 25 bp, Homo sapien
tccttctccctgagctggagaagcc

SEQ ID NO: 1436567 - DNA, 25 bp, Homo sapien
gacaggagatgaaggacacagtctc

SEQ ID NO: 1436568 - DNA, 25 bp, Homo sapien
agacaggagatgaaggacacagtct

SEQ ID NO: 1436569 - DNA, 25 bp, Homo sapien
caggagatgaaggacacagtctctc

SEQ ID NO: 1436570 - DNA, 25 bp, Homo sapien
ggagatgaaggacacagtctctctc

SEQ ID NO: 1436571 - DNA, 25 bp, Homo sapien
tatctctctctaatcttgagtttac

SEQ ID NO: 1436572 - DNA, 25 bp, Homo sapien
ccccacagtgttggaagcactcata

SEQ ID NO: 1436573 - DNA, 25 bp, Homo sapien
aaaatactaggagagggcaggatgt

SEQ ID NO: 1436574 - DNA, 25 bp, Homo sapien
taaaaagtaagcaggtgtcggagat

SEQ ID NO: 1436575 - DNA, 25 bp, Homo sapien
ctcgcgacttctgcagctggtagga

SEQ ID NO: 1436576 - DNA, 25 bp, Homo sapien
gagcccggctggcattactcgcgac

SEQ ID NO: 1436577 - DNA, 25 bp, Homo sapien
tgtcttctacagctgcgagagggcc

SEQ ID NO: 1436578 - DNA, 25 bp, Homo sapien
tgcacacaacggaagacctgtgcct

SEQ ID NO: 1436579 - DNA, 25 bp, Homo sapien
cagcatcaataagcatgggctccac

SEQ ID NO: 1436580 - DNA, 25 bp, Homo sapien
ccaaagccttgcaaggtgggagtaa

SEQ ID NO: 1436581 - DNA, 25 bp, Homo sapien
catgcgatgtttctgacggaggttt

SEQ ID NO: 1436582 - DNA, 25 bp, Homo sapien
taacccacgaggacctctcacatgg

SEQ ID NO: 1436583 - DNA, 25 bp, Homo sapien
ctggctgcaaagtccggctcctcta

SEQ ID NO: 1436584 - DNA, 25 bp, Homo sapien
agtccggctcctctacactctgcag

SEQ ID NO: 1436585 - DNA, 25 bp, Homo sapien
tgggcaacggctagctacttcagag

SEQ ID NO: 1436586 - DNA, 25 bp, Homo sapien
agctgagacttgcacagaggtacct

SEQ ID NO: 1436587 - DNA, 25 bp, Homo sapien
ggaggatgcgctctcctctgtccct

SEQ ID NO: 1436588 - DNA, 25 bp, Homo sapien
caggatctctgccttcggttgaagc

SEQ ID NO: 1436589 - DNA, 25 bp, Homo sapien
ctctgtctccccgaagtgagggcgc

SEQ ID NO: 1436590 - DNA, 25 bp, Homo sapien
aggagggatcgacgcctctgtctcc

SEQ ID NO: 1436591 - DNA, 25 bp, Homo sapien
ctgaccaggcatcgcgagcagatga

SEQ ID NO: 1436592 - DNA, 25 bp, Homo sapien
gatgaatcctctgggcggttgtccc

SEQ ID NO: 1436593 - DNA, 25 bp, Homo sapien
cgagcagatgaatcctctgggcggt

SEQ ID NO: 1436594 - DNA, 25 bp, Homo sapien
catcgcgagcagatgaatcctctgg

SEQ ID NO: 1436595 - DNA, 25 bp, Homo sapien
gcccctcagggctgaaattgggcat

SEQ ID NO: 1436596 - DNA, 25 bp, Homo sapien
tctagctgtgcgtttgctacagggc

SEQ ID NO: 1436597 - DNA, 25 bp, Homo sapien
ccagatgggactcaacgcgggctgc

SEQ ID NO: 1436598 - DNA, 25 bp, Homo sapien
gactggattctttccgggccacaga

SEQ ID NO: 1436599 - DNA, 25 bp, Homo sapien
tcaaacttatcagccctgttcctca

SEQ ID NO: 1436600 - DNA, 25 bp, Homo sapien
aatttggccctcaaacttatcagcc

SEQ ID NO: 1436601 - DNA, 25 bp, Homo sapien
gctgagagtcaatttggccctcaaa

SEQ ID NO: 1436602 - DNA, 25 bp, Homo sapien
tgaatgataaatccggggctgggct

SEQ ID NO: 1436603 - DNA, 25 bp, Homo sapien
caggtaaccgatggacggaaaggca

SEQ ID NO: 1436604 - DNA, 25 bp, Homo sapien
gtaaccgatggacggaaaggcaagc

SEQ ID NO: 1436605 - DNA, 25 bp, Homo sapien
aatcaggtaaccgatggacggaaag

SEQ ID NO: 1436606 - DNA, 25 bp, Homo sapien
accgatggacggaaaggcaagccag

SEQ ID NO: 1436607 - DNA, 25 bp, Homo sapien
ctgcccaggctgtcgccttgtccat

SEQ ID NO: 1436608 - DNA, 25 bp, Homo sapien
ttgcagcctcgtccctcgggttctg

SEQ ID NO: 1436609 - DNA, 25 bp, Homo sapien
tggagattgtacaaagacactggca

SEQ ID NO: 1436610 - DNA, 25 bp, Homo sapien
tccctcgggttctgggtgtgccaca

SEQ ID NO: 1436611 - DNA, 25 bp, Homo sapien
tggggattctcaggacggtgaccac

SEQ ID NO: 1436612 - DNA, 25 bp, Homo sapien
tctgccagcgctattgggaggcagc

SEQ ID NO: 1436613 - DNA, 25 bp, Homo sapien
cggtgaccacgagaacaggctgatg

SEQ ID NO: 1436614 - DNA, 25 bp, Homo sapien
tgtcctgaggatgtgccctccctta

SEQ ID NO: 1436615 - DNA, 25 bp, Homo sapien
ccacaagcttgggtttctacagcct

SEQ ID NO: 1436616 - DNA, 25 bp, Homo sapien
tctacagcctaaaatgtccccagaa

SEQ ID NO: 1436617 - DNA, 25 bp, Homo sapien
taaaagtatgaggatatgcacagtg

SEQ ID NO: 1436618 - DNA, 25 bp, Homo sapien
caatccccggaggataaaatgagtt

SEQ ID NO: 1436619 - DNA, 25 bp, Homo sapien
tagaatcccctgaatctttagcaag

SEQ ID NO: 1436620 - DNA, 25 bp, Homo sapien
taagcgtcaatgaaaggcaacacct

SEQ ID NO: 1436621 - DNA, 25 bp, Homo sapien
caattttatggctgtggtgatcact

SEQ ID NO: 1436622 - DNA, 25 bp, Homo sapien
ccttgtgcataaaacgaccggctgg

SEQ ID NO: 1436623 - DNA, 25 bp, Homo sapien
tccccaaagtgaattctccatcaga

SEQ ID NO: 1436624 - DNA, 25 bp, Homo sapien
catgcagagagactaaaaatatcca

SEQ ID NO: 1436625 - DNA, 25 bp, Homo sapien
tcaaggcaagtcaagtaattaagct

SEQ ID NO: 1436626 - DNA, 25 bp, Homo sapien
cctgactcaattatatttacctgga

SEQ ID NO: 1436627 - DNA, 25 bp, Homo sapien
taagacttaaatgtggccagcacca

SEQ ID NO: 1436628 - DNA, 25 bp, Homo sapien
taattttcaagtccgtatcagaagg

SEQ ID NO: 1436629 - DNA, 25 bp, Homo sapien
taaccacagttctatcatggctctg

SEQ ID NO: 1436630 - DNA, 25 bp, Homo sapien
caacagggctgtctacaaacatcaa

SEQ ID NO: 1436631 - DNA, 25 bp, Homo sapien
ggcgatacgagccttgtggctcaaa

SEQ ID NO: 1436632 - DNA, 25 bp, Homo sapien
gctcaaattgcataccaaacatggg

SEQ ID NO: 1436633 - DNA, 25 bp, Homo sapien
acaaaatgtatatagctgttggcga

SEQ ID NO: 1436634 - DNA, 25 bp, Homo sapien
ccaaacatgggatggagtaaggctg

SEQ ID NO: 1436635 - DNA, 25 bp, Homo sapien
ggaggttcatattgcaacattacag

SEQ ID NO: 1436636 - DNA, 25 bp, Homo sapien
tgctaggttccatttcagagtagtc

SEQ ID NO: 1436637 - DNA, 25 bp, Homo sapien
gagtagtcacagctttccctatgga

SEQ ID NO: 1436638 - DNA, 25 bp, Homo sapien
taccctacaaggatataatgctagg

SEQ ID NO: 1436639 - DNA, 25 bp, Homo sapien
ccactgattagtctttatgcagaga

SEQ ID NO: 1436640 - DNA, 25 bp, Homo sapien
actgattagtctttatgcagagaac

SEQ ID NO: 1436641 - DNA, 25 bp, Homo sapien
ttagtctttatgcagagaactcact

SEQ ID NO: 1436642 - DNA, 25 bp, Homo sapien
gattagtctttatgcagagaactca

SEQ ID NO: 1436643 - DNA, 25 bp, Homo sapien
taaccacttaggtcacttagagtgt

SEQ ID NO: 1436644 - DNA, 25 bp, Homo sapien
tgatcatttgtcactaaatgaaaca

SEQ ID NO: 1436645 - DNA, 25 bp, Homo sapien
ttgcttcataaccacttaggtcact

SEQ ID NO: 1436646 - DNA, 25 bp, Homo sapien
cttaggtcacttagagtgttttgtg

SEQ ID NO: 1436647 - DNA, 25 bp, Homo sapien
tcagtaatctttccctggcctgagg

SEQ ID NO: 1436648 - DNA, 25 bp, Homo sapien
gataactacgccagtcagaacgtgg

SEQ ID NO: 1436649 - DNA, 25 bp, Homo sapien
tcagaatgccacaatactcggatgc

SEQ ID NO: 1436650 - DNA, 25 bp, Homo sapien
caacagaaatctggttcgcaggaat

SEQ ID NO: 1436651 - DNA, 25 bp, Homo sapien
gaaagcctgcttagtattaggatgt

SEQ ID NO: 1436652 - DNA, 25 bp, Homo sapien
aagcctgcttagtattaggatgtct

SEQ ID NO: 1436653 - DNA, 25 bp, Homo sapien
gcctgcttagtattaggatgtctat

SEQ ID NO: 1436654 - DNA, 25 bp, Homo sapien
cctgcttagtattaggatgtctatt

SEQ ID NO: 1436655 - DNA, 25 bp, Homo sapien
gaagctggttatctaaatctgtaca

SEQ ID NO: 1436656 - DNA, 25 bp, Homo sapien
taccccagctaacattaggattgga

SEQ ID NO: 1436657 - DNA, 25 bp, Homo sapien
tcagaagactcttgatcaaccaaat

SEQ ID NO: 1436658 - DNA, 25 bp, Homo sapien
taatatggagtctataggctggacc

SEQ ID NO: 1436659 - DNA, 25 bp, Homo sapien
tgcagttggccagcaaatatcctcc

SEQ ID NO: 1436660 - DNA, 25 bp, Homo sapien
tgacatcagtggacattagtaagcc

SEQ ID NO: 1436661 - DNA, 25 bp, Homo sapien
gcttaaatagcatcgacgcctacat

SEQ ID NO: 1436662 - DNA, 25 bp, Homo sapien
gcagaaaggtgagcatcagcactga

SEQ ID NO: 1436663 - DNA, 25 bp, Homo sapien
tgtcatctgtatcctttccatcacc

SEQ ID NO: 1436664 - DNA, 25 bp, Homo sapien
cagaggggcagtatcactgctgctc

SEQ ID NO: 1436665 - DNA, 25 bp, Homo sapien
ggcatccagtatgatacttccttct

SEQ ID NO: 1436666 - DNA, 25 bp, Homo sapien
tacctcctcatattcccggatggca

SEQ ID NO: 1436667 - DNA, 25 bp, Homo sapien
taagctctgaacaaccattggatgg

SEQ ID NO: 1436668 - DNA, 25 bp, Homo sapien
cattctggatgttgcgtgccttttc

SEQ ID NO: 1436669 - DNA, 25 bp, Homo sapien
gccaccaatggctccagcattctgg

SEQ ID NO: 1436670 - DNA, 25 bp, Homo sapien
cattggatggtttactgcttgcaac

SEQ ID NO: 1436671 - DNA, 25 bp, Homo sapien
gagctggtccagcagtcaatactac

SEQ ID NO: 1436672 - DNA, 25 bp, Homo sapien
tttatgtttagacagatccagccca

SEQ ID NO: 1436673 - DNA, 25 bp, Homo sapien
ctctttatgtttagacagatccagc

SEQ ID NO: 1436674 - DNA, 25 bp, Homo sapien
tgtttagacagatccagcccaaact

SEQ ID NO: 1436675 - DNA, 25 bp, Homo sapien
tcttcagcgtcgattgaactagcag

SEQ ID NO: 1436676 - DNA, 25 bp, Homo sapien
tgttgctgacttgacaattcaatca

SEQ ID NO: 1436677 - DNA, 25 bp, Homo sapien
aatttgtacagctcgtggaggcagc

SEQ ID NO: 1436678 - DNA, 25 bp, Homo sapien
tgcatgaacctcaacccatcttcag

SEQ ID NO: 1436679 - DNA, 25 bp, Homo sapien
ggattgcatgttggaccaactggac

SEQ ID NO: 1436680 - DNA, 25 bp, Homo sapien
catctttgaggtgaatcaaactcac

SEQ ID NO: 1436681 - DNA, 25 bp, Homo sapien
ccaactggactctcccatctttgag

SEQ ID NO: 1436682 - DNA, 25 bp, Homo sapien
ttggattgcatgttggaccaactgg

SEQ ID NO: 1436683 - DNA, 25 bp, Homo sapien
tctcagagggggtttagctccactc

SEQ ID NO: 1436684 - DNA, 25 bp, Homo sapien
taaatgctcagggttagtggccatg

SEQ ID NO: 1436685 - DNA, 25 bp, Homo sapien
tttctaaatgctcagggttagtggc

SEQ ID NO: 1436686 - DNA, 25 bp, Homo sapien
agggttagtggccatgaaatctctg

SEQ ID NO: 1436687 - DNA, 25 bp, Homo sapien
tctgatgatgcctctaggacagctc

SEQ ID NO: 1436688 - DNA, 25 bp, Homo sapien
ttttcaagggctcacgaatactttg

SEQ ID NO: 1436689 - DNA, 25 bp, Homo sapien
tggacaagtccaatcgaagttactg

SEQ ID NO: 1436690 - DNA, 25 bp, Homo sapien
catccagttctgtatattccgaggt

SEQ ID NO: 1436691 - DNA, 25 bp, Homo sapien
atcttctatgtcaaaaataatgtct

SEQ ID NO: 1436692 - DNA, 25 bp, Homo sapien
ttgtagtagagagccaaagaggtaa

SEQ ID NO: 1436693 - DNA, 25 bp, Homo sapien
tagagatgctttgatttgtagtaga

SEQ ID NO: 1436694 - DNA, 25 bp, Homo sapien
caggtaaagatatttaaacatttca

SEQ ID NO: 1436695 - DNA, 25 bp, Homo sapien
tagtgtattcaacagagtttaaaaa

SEQ ID NO: 1436696 - DNA, 25 bp, Homo sapien
ttgaatcctaaatggtagctgcatt

SEQ ID NO: 1436697 - DNA, 25 bp, Homo sapien
taaaattagtgtattcaacagagtt

SEQ ID NO: 1436698 - DNA, 25 bp, Homo sapien
cacaaggaacaaaggtttctatcct

SEQ ID NO: 1436699 - DNA, 25 bp, Homo sapien
tccttcatggcagcaaatccgcaag

SEQ ID NO: 1436700 - DNA, 25 bp, Homo sapien
catgacttccagtacgaacatcctt

SEQ ID NO: 1436701 - DNA, 25 bp, Homo sapien
cttccagtacgaacatccttcatgg

SEQ ID NO: 1436702 - DNA, 25 bp, Homo sapien
cgcaaggcactctagcatatttatt

SEQ ID NO: 1436703 - DNA, 25 bp, Homo sapien
ctgcaaattctggccttaaaggatg

SEQ ID NO: 1436704 - DNA, 25 bp, Homo sapien
taagaagtaggtactttctgcaaat

SEQ ID NO: 1436705 - DNA, 25 bp, Homo sapien
gcaaattctggccttaaaggatgtt

SEQ ID NO: 1436706 - DNA, 25 bp, Homo sapien
ttatataagaagtaggtactttctg

SEQ ID NO: 1436707 - DNA, 25 bp, Homo sapien
taatcacctgatataacatttcatg

SEQ ID NO: 1436708 - DNA, 25 bp, Homo sapien
tagcaggtctaatatccccctttaa

SEQ ID NO: 1436709 - DNA, 25 bp, Homo sapien
atagcaggtctaatatcccccttta

SEQ ID NO: 1436710 - DNA, 25 bp, Homo sapien
gcaggtctaatatccccctttaaca

SEQ ID NO: 1436711 - DNA, 25 bp, Homo sapien
ggtggctggctaatatacctcatta

SEQ ID NO: 1436712 - DNA, 25 bp, Homo sapien
catccatccaagtccgagcattcag

SEQ ID NO: 1436713 - DNA, 25 bp, Homo sapien
ctgggaagaaggcaagcaaagcatc

SEQ ID NO: 1436714 - DNA, 25 bp, Homo sapien
tggatatgcacatcaagtagaagag

SEQ ID NO: 1436715 - DNA, 25 bp, Homo sapien
tatatcactttttacgctgtccctg

SEQ ID NO: 1436716 - DNA, 25 bp, Homo sapien
agccctgtatccttggtgtaatcaa

SEQ ID NO: 1436717 - DNA, 25 bp, Homo sapien
ccttggtgtaatcaaagactaagcc

SEQ ID NO: 1436718 - DNA, 25 bp, Homo sapien
tacgctgtccctgttcaacatcatc

SEQ ID NO: 1436719 - DNA, 25 bp, Homo sapien
gtcatctccaagcaagacataggct

SEQ ID NO: 1436720 - DNA, 25 bp, Homo sapien
tgtcatctccaagcaagacataggc

SEQ ID NO: 1436721 - DNA, 25 bp, Homo sapien
tatgaatatttatagtcacgcccac

SEQ ID NO: 1436722 - DNA, 25 bp, Homo sapien
actaaattactacttcgctgtcttt

SEQ ID NO: 1436723 - DNA, 25 bp, Homo sapien
tcgtacccaatctccagtatgaata

SEQ ID NO: 1436724 - DNA, 25 bp, Homo sapien
cttttcgtacccaatctccagtatg

SEQ ID NO: 1436725 - DNA, 25 bp, Homo sapien
attgttgctcctgtgaatcgactta

SEQ ID NO: 1436726 - DNA, 25 bp, Homo sapien
cctgtgaatcgacttaaagcagcaa

SEQ ID NO: 1436727 - DNA, 25 bp, Homo sapien
gttgctcctgtgaatcgacttaaag

SEQ ID NO: 1436728 - DNA, 25 bp, Homo sapien
gctcctgtgaatcgacttaaagcag

SEQ ID NO: 1436729 - DNA, 25 bp, Homo sapien
ttctgatgccaaactttaaattaat

SEQ ID NO: 1436730 - DNA, 25 bp, Homo sapien
tgcacaagctgtacaggtatctgtc

SEQ ID NO: 1436731 - DNA, 25 bp, Homo sapien
ctggttttctgatgccaaactttaa

SEQ ID NO: 1436732 - DNA, 25 bp, Homo sapien
tctcagttcctgtccgagcttctgg

SEQ ID NO: 1436733 - DNA, 25 bp, Homo sapien
tgcgcccagccagtattaaagaact

SEQ ID NO: 1436734 - DNA, 25 bp, Homo sapien
gtttagagatggcactggtagcagt

SEQ ID NO: 1436735 - DNA, 25 bp, Homo sapien
catttccacaaatcagggaagaagg

SEQ ID NO: 1436736 - DNA, 25 bp, Homo sapien
tttgcttacgggatcctctggtgga

SEQ ID NO: 1436737 - DNA, 25 bp, Homo sapien
tgcttatctaagagagactgattac

SEQ ID NO: 1436738 - DNA, 25 bp, Homo sapien
tcatgggcaaaagcatactaagcat

SEQ ID NO: 1436739 - DNA, 25 bp, Homo sapien
gcctgcttctcatgttacggcaaaa

SEQ ID NO: 1436740 - DNA, 25 bp, Homo sapien
tctgttttaccataacgctcatagt

SEQ ID NO: 1436741 - DNA, 25 bp, Homo sapien
ttaatagcacaacagagcgattaca

SEQ ID NO: 1436742 - DNA, 25 bp, Homo sapien
ggtaatggccacctcatttaccctg

SEQ ID NO: 1436743 - DNA, 25 bp, Homo sapien
caatggctctgatcacaaaacttca

SEQ ID NO: 1436744 - DNA, 25 bp, Homo sapien
aaagactcatatttttcagaagtac

SEQ ID NO: 1436745 - DNA, 25 bp, Homo sapien
cattgtaccactgcatatattcacc

SEQ ID NO: 1436746 - DNA, 25 bp, Homo sapien
acctaactgctttgccatttggaga

SEQ ID NO: 1436747 - DNA, 25 bp, Homo sapien
cagcatgattgccagggagtgccca

SEQ ID NO: 1436748 - DNA, 25 bp, Homo sapien
gataaggaaggccactggtagtgtt

SEQ ID NO: 1436749 - DNA, 25 bp, Homo sapien
gactgatacgactacatcgttatct

SEQ ID NO: 1436750 - DNA, 25 bp, Homo sapien
tcgttatctaaattaacatctctta

SEQ ID NO: 1436751 - DNA, 25 bp, Homo sapien
gtttcaaagactgatacgactacat

SEQ ID NO: 1436752 - DNA, 25 bp, Homo sapien
gactacatcgttatctaaattaaca

SEQ ID NO: 1436753 - DNA, 25 bp, Homo sapien
ctgggagaagaaaattatgaaataa

SEQ ID NO: 1436754 - DNA, 25 bp, Homo sapien
tgggagaagaaaattatgaaataaa

SEQ ID NO: 1436755 - DNA, 25 bp, Homo sapien
agtgtgcatatcatgaataaaataa

SEQ ID NO: 1436756 - DNA, 25 bp, Homo sapien
taaatccaagaagagtcaaacctac

SEQ ID NO: 1436757 - DNA, 25 bp, Homo sapien
cttaagtgtgcatatcatgaataaa

SEQ ID NO: 1436758 - DNA, 25 bp, Homo sapien
aataaatccaagaagagtcaaacct

SEQ ID NO: 1436759 - DNA, 25 bp, Homo sapien
gtccaaagaatcaatcagtgtcaga

SEQ ID NO: 1436760 - DNA, 25 bp, Homo sapien
caaagaatcaatcagtgtcagagaa

SEQ ID NO: 1436761 - DNA, 25 bp, Homo sapien
agaatcaatcagtgtcagagaaaat

SEQ ID NO: 1436762 - DNA, 25 bp, Homo sapien
agtgtccaaagaatcaatcagtgtc

SEQ ID NO: 1436763 - DNA, 25 bp, Homo sapien
ctcgacctctacaggttaaaggcat

SEQ ID NO: 1436764 - DNA, 25 bp, Homo sapien
tggctcttggcctctaactcgacct

SEQ ID NO: 1436765 - DNA, 25 bp, Homo sapien
gtcaccgcgacttggctcttggcct

SEQ ID NO: 1436766 - DNA, 25 bp, Homo sapien
caaggcatcatcaacgtcaccgcga

SEQ ID NO: 1436767 - DNA, 25 bp, Homo sapien
gagttcatcagcagggtaagcatgt

SEQ ID NO: 1436768 - DNA, 25 bp, Homo sapien
gttcatcagcagggtaagcatgttc

SEQ ID NO: 1436769 - DNA, 25 bp, Homo sapien
agttcatcagcagggtaagcatgtt

SEQ ID NO: 1436770 - DNA, 25 bp, Homo sapien
gcctaaccccatgagataatcttcg

SEQ ID NO: 1436771 - DNA, 25 bp, Homo sapien
gataggcttccagtgacgtacttcc

SEQ ID NO: 1436772 - DNA, 25 bp, Homo sapien
tctgatgggcaaaaaccagctagct

SEQ ID NO: 1436773 - DNA, 25 bp, Homo sapien
tcttattcatgtgtaggacctcgtg

SEQ ID NO: 1436774 - DNA, 25 bp, Homo sapien
cactgacatggcagccgcgttgaca

SEQ ID NO: 1436775 - DNA, 25 bp, Homo sapien
tcacttgcgcgagaaagctaaccat

SEQ ID NO: 1436776 - DNA, 25 bp, Homo sapien
agctaaccatgcttcggtcgacagg

SEQ ID NO: 1436777 - DNA, 25 bp, Homo sapien
gagccgttccaatcgcgacaggaga

SEQ ID NO: 1436778 - DNA, 25 bp, Homo sapien
ccaagcttctgtttctcctccctac

SEQ ID NO: 1436779 - DNA, 25 bp, Homo sapien
actagtctccatcgcgctcgctggg

SEQ ID NO: 1436780 - DNA, 25 bp, Homo sapien
tgctacgcccggccggtgagacaca

SEQ ID NO: 1436781 - DNA, 25 bp, Homo sapien
cggcttcgctcatggccccgcggtt

SEQ ID NO: 1436782 - DNA, 25 bp, Homo sapien
gacaccaggcagaacgcggccgtcg

SEQ ID NO: 1436783 - DNA, 25 bp, Homo sapien
gctagccgtgccgagacggggcggg

SEQ ID NO: 1436784 - DNA, 25 bp, Homo sapien
gccaccaagccggtccccagcgcca

SEQ ID NO: 1436785 - DNA, 25 bp, Homo sapien
atgcggagtaacacggacggccgcc

SEQ ID NO: 1436786 - DNA, 25 bp, Homo sapien
gggcgggatgcggagtaacacggac

SEQ ID NO: 1436787 - DNA, 25 bp, Homo sapien
taatgaaaataatggaaattctcag

SEQ ID NO: 1436788 - DNA, 25 bp, Homo sapien
cgtaatgaaaataatggaaattctc

SEQ ID NO: 1436789 - DNA, 25 bp, Homo sapien
ccgtaatgaaaataatggaaattct

SEQ ID NO: 1436790 - DNA, 25 bp, Homo sapien
atgaaaataatggaaattctcagct

SEQ ID NO: 1436791 - DNA, 25 bp, Homo sapien
atgacaaagatactcggtgaatgtc

SEQ ID NO: 1436792 - DNA, 25 bp, Homo sapien
tcatgacaaagatactcggtgaatg

SEQ ID NO: 1436793 - DNA, 25 bp, Homo sapien
catgacaaagatactcggtgaatgt

SEQ ID NO: 1436794 - DNA, 25 bp, Homo sapien
tgacaaagatactcggtgaatgtcg

SEQ ID NO: 1436795 - DNA, 25 bp, Homo sapien
tcaactgacttcctgcgtggctgtc

SEQ ID NO: 1436796 - DNA, 25 bp, Homo sapien
ttcctgcgtggctgtcggactgatt

SEQ ID NO: 1436797 - DNA, 25 bp, Homo sapien
gacttcctgcgtggctgtcggactg

SEQ ID NO: 1436798 - DNA, 25 bp, Homo sapien
aactgacttcctgcgtggctgtcgg

SEQ ID NO: 1436799 - DNA, 25 bp, Homo sapien
tgccattgcaggctccccatccaaa

SEQ ID NO: 1436800 - DNA, 25 bp, Homo sapien
caggcacagtttgtatgagctatag

SEQ ID NO: 1436801 - DNA, 25 bp, Homo sapien
agtttgtatgagctatagcgcctca

SEQ ID NO: 1436802 - DNA, 25 bp, Homo sapien
aaatgtagccctctttaggccagca

SEQ ID NO: 1436803 - DNA, 25 bp, Homo sapien
gacaattgttgttggcttcagaccc

SEQ ID NO: 1436804 - DNA, 25 bp, Homo sapien
agttggaagtcatggttacccctgc

SEQ ID NO: 1436805 - DNA, 25 bp, Homo sapien
ttgcctgaatgcgtgggacttgaca

SEQ ID NO: 1436806 - DNA, 25 bp, Homo sapien
cctggcttcagacctactagtgtca

SEQ ID NO: 1436807 - DNA, 25 bp, Homo sapien
gctgcatttgacacattggccattc

SEQ ID NO: 1436808 - DNA, 25 bp, Homo sapien
tgcaacgtggtttgtcttaccaagg

SEQ ID NO: 1436809 - DNA, 25 bp, Homo sapien
gatgttccctaagtttgctagctca

SEQ ID NO: 1436810 - DNA, 25 bp, Homo sapien
gaagaggatcccactttactccatc

SEQ ID NO: 1436811 - DNA, 25 bp, Homo sapien
catctgtcattagcatgtttctcgg

SEQ ID NO: 1436812 - DNA, 25 bp, Homo sapien
gaccatgaccactgatctcgttata

SEQ ID NO: 1436813 - DNA, 25 bp, Homo sapien
tgtttctcggataaaactgtgcttc

SEQ ID NO: 1436814 - DNA, 25 bp, Homo sapien
tgctaacttagggaggaaaaatctc

SEQ ID NO: 1436815 - DNA, 25 bp, Homo sapien
tacagtatggaaacaagagtatggg

SEQ ID NO: 1436816 - DNA, 25 bp, Homo sapien
ccaaggttggctgtgtgagtgttta

SEQ ID NO: 1436817 - DNA, 25 bp, Homo sapien
tctgactagagcagcgaataggcac

SEQ ID NO: 1436818 - DNA, 25 bp, Homo sapien
tagacagattgcactgatggcccca

SEQ ID NO: 1436819 - DNA, 25 bp, Homo sapien
cacctcagcgtcctgtaggaattcc

SEQ ID NO: 1436820 - DNA, 25 bp, Homo sapien
agtggtttccctgcagattccttcg

SEQ ID NO: 1436821 - DNA, 25 bp, Homo sapien
cagagggctgtacctcacaattcaa

SEQ ID NO: 1436822 - DNA, 25 bp, Homo sapien
tcaagaataattgcccactgctgta

SEQ ID NO: 1436823 - DNA, 25 bp, Homo sapien
aattcctggagacgtaagcatatgc

SEQ ID NO: 1436824 - DNA, 25 bp, Homo sapien
gatgaacattttattggaatatagg

SEQ ID NO: 1436825 - DNA, 25 bp, Homo sapien
ggatgaacattttattggaatatag

SEQ ID NO: 1436826 - DNA, 25 bp, Homo sapien
gaacattttattggaatataggcac

SEQ ID NO: 1436827 - DNA, 25 bp, Homo sapien
tgaacattttattggaatataggca

SEQ ID NO: 1436828 - DNA, 25 bp, Homo sapien
taaatgccaggatatgagtgagcac

SEQ ID NO: 1436829 - DNA, 25 bp, Homo sapien
tgccaggtcctatgcaccagggata

SEQ ID NO: 1436830 - DNA, 25 bp, Homo sapien
ggaacttgagagcatacaccttggc

SEQ ID NO: 1436831 - DNA, 25 bp, Homo sapien
gaataacctcgctccaatctggaaa

SEQ ID NO: 1436832 - DNA, 25 bp, Homo sapien
caaatgccgagtccttaagagatgg

SEQ ID NO: 1436833 - DNA, 25 bp, Homo sapien
tgatagcaggatgagtaacaggccc

SEQ ID NO: 1436834 - DNA, 25 bp, Homo sapien
gaatgctttcagtcttacccaggcc

SEQ ID NO: 1436835 - DNA, 25 bp, Homo sapien
ttactaagcccaacacagtgcgtgg

SEQ ID NO: 1436836 - DNA, 25 bp, Homo sapien
gacatccgggtttggagcatcctcc

SEQ ID NO: 1436837 - DNA, 25 bp, Homo sapien
tctgttgccacaggattcaccacgg

SEQ ID NO: 1436838 - DNA, 25 bp, Homo sapien
tctgagcgccttcaaagaacccgag

SEQ ID NO: 1436839 - DNA, 25 bp, Homo sapien
cactgacactcatgaatacgggcta

SEQ ID NO: 1436840 - DNA, 25 bp, Homo sapien
ctcctttggccaacgagctagggac

SEQ ID NO: 1436841 - DNA, 25 bp, Homo sapien
tctcctttggccaacgagctaggga

SEQ ID NO: 1436842 - DNA, 25 bp, Homo sapien
ttctcttcctctgactcctggaata

SEQ ID NO: 1436843 - DNA, 25 bp, Homo sapien
gcttctcttcctctgactcctggaa

SEQ ID NO: 1436844 - DNA, 25 bp, Homo sapien
tgcttctcttcctctgactcctgga

SEQ ID NO: 1436845 - DNA, 25 bp, Homo sapien
tctcttcctctgactcctggaatac

SEQ ID NO: 1436846 - DNA, 25 bp, Homo sapien
gttatcttcaaataagttgtgtttc

SEQ ID NO: 1436847 - DNA, 25 bp, Homo sapien
tgagggtctcactacccagaactcc

SEQ ID NO: 1436848 - DNA, 25 bp, Homo sapien
taagctggacacactttcactgggc

SEQ ID NO: 1436849 - DNA, 25 bp, Homo sapien
ggctggcctggtttgaccctgtggg

SEQ ID NO: 1436850 - DNA, 25 bp, Homo sapien
atccaatcccaggcaaggcatgatt

SEQ ID NO: 1436851 - DNA, 25 bp, Homo sapien
gccctctccagcatattttaaacaa

SEQ ID NO: 1436852 - DNA, 25 bp, Homo sapien
tccaatcccaggcaaggcatgattc

SEQ ID NO: 1436853 - DNA, 25 bp, Homo sapien
tgctgctggaattgcctcttctcag

SEQ ID NO: 1436854 - DNA, 25 bp, Homo sapien
gagccattaataagccttgctgctg

SEQ ID NO: 1436855 - DNA, 25 bp, Homo sapien
ttttctgtctggctgagtggagtct

SEQ ID NO: 1436856 - DNA, 25 bp, Homo sapien
agtggagtctgggaatgtgttgaga

SEQ ID NO: 1436857 - DNA, 25 bp, Homo sapien
tcccctctatggagtgtccctgcag

SEQ ID NO: 1436858 - DNA, 25 bp, Homo sapien
gagtcctatttcagggatgctcccc

SEQ ID NO: 1436859 - DNA, 25 bp, Homo sapien
tgcagcaccaggtaacctttcttac

SEQ ID NO: 1436860 - DNA, 25 bp, Homo sapien
cctctatggagtgtccctgcagcac

SEQ ID NO: 1436861 - DNA, 25 bp, Homo sapien
ctcatagacattttcaacgtgaatc

SEQ ID NO: 1436862 - DNA, 25 bp, Homo sapien
catattggtatgatctgcaaagatg

SEQ ID NO: 1436863 - DNA, 25 bp, Homo sapien
gagtttcatcaagcaggatctgatg

SEQ ID NO: 1436864 - DNA, 25 bp, Homo sapien
tgcaaagatgaactgctcgtatttc

SEQ ID NO: 1436865 - DNA, 25 bp, Homo sapien
ccagtgccttctgcacagtgggaag

SEQ ID NO: 1436866 - DNA, 25 bp, Homo sapien
tggtttgcatgtggacgccagtgcc

SEQ ID NO: 1436867 - DNA, 25 bp, Homo sapien
tgaactagtgcctcttgaaatatct

SEQ ID NO: 1436868 - DNA, 25 bp, Homo sapien
aagtgtgatttgaactagtgcctct

SEQ ID NO: 1436869 - DNA, 25 bp, Homo sapien
gaaactgcagcggactgacagtcac

SEQ ID NO: 1436870 - DNA, 25 bp, Homo sapien
cccatgcagtgcttatagtggacag

SEQ ID NO: 1436871 - DNA, 25 bp, Homo sapien
cagcagtggccgctagatggcagaa

SEQ ID NO: 1436872 - DNA, 25 bp, Homo sapien
gcagaagaggcatggaagtcacact

SEQ ID NO: 1436873 - DNA, 25 bp, Homo sapien
caactgctcaaaagtgaacactgca

SEQ ID NO: 1436874 - DNA, 25 bp, Homo sapien
cctctccttggagatgtggggaaag

SEQ ID NO: 1436875 - DNA, 25 bp, Homo sapien
taagactcggagtttaaccttctca

SEQ ID NO: 1436876 - DNA, 25 bp, Homo sapien
aggcctctccttggagatgtgggga

SEQ ID NO: 1436877 - DNA, 25 bp, Homo sapien
caaggttccatcttcacggaatgca

SEQ ID NO: 1436878 - DNA, 25 bp, Homo sapien
tctgaagcggctcttgagatcctgc

SEQ ID NO: 1436879 - DNA, 25 bp, Homo sapien
cctgcatgtagttctgtgtcctctg

SEQ ID NO: 1436880 - DNA, 25 bp, Homo sapien
cgctcgtgaagcaggttgactttag

SEQ ID NO: 1436881 - DNA, 25 bp, Homo sapien
tgcgcccggctgcattgaagtacat

SEQ ID NO: 1436882 - DNA, 25 bp, Homo sapien
ctgtctcccaactagagtgcaggcg

SEQ ID NO: 1436883 - DNA, 25 bp, Homo sapien
tctcccaactagagtgcaggcgcga

SEQ ID NO: 1436884 - DNA, 25 bp, Homo sapien
ctcccaactagagtgcaggcgcgat

SEQ ID NO: 1436885 - DNA, 25 bp, Homo sapien
taaaggctgtcgttacacaacatac

SEQ ID NO: 1436886 - DNA, 25 bp, Homo sapien
agaaaagtacctatgcagctgctga

SEQ ID NO: 1436887 - DNA, 25 bp, Homo sapien
tggtacacacgttgcctcataatca

SEQ ID NO: 1436888 - DNA, 25 bp, Homo sapien
aaagaccacttagtcaagcgagtag

SEQ ID NO: 1436889 - DNA, 25 bp, Homo sapien
aagcagcttttctccgccggctggg

SEQ ID NO: 1436890 - DNA, 25 bp, Homo sapien
aatcccgagctcactggtcccatga

SEQ ID NO: 1436891 - DNA, 25 bp, Homo sapien
tcactgaatcccgagctcactggtc

SEQ ID NO: 1436892 - DNA, 25 bp, Homo sapien
ttctcaaagagtacacgtacttcac

SEQ ID NO: 1436893 - DNA, 25 bp, Homo sapien
gagctgaacagagcgatgatgcctg

SEQ ID NO: 1436894 - DNA, 25 bp, Homo sapien
ttacaactctggaagtggccccttg

SEQ ID NO: 1436895 - DNA, 25 bp, Homo sapien
ggataagttccatgtcccattcgtg

SEQ ID NO: 1436896 - DNA, 25 bp, Homo sapien
gactctaccacaactagctctggaa

SEQ ID NO: 1436897 - DNA, 25 bp, Homo sapien
ccttcaaggcacttaatccttctga

SEQ ID NO: 1436898 - DNA, 25 bp, Homo sapien
aaccagggtgtaggcctcctcgagg

SEQ ID NO: 1436899 - DNA, 25 bp, Homo sapien
gatccatgtcagaacggatcgttcc

SEQ ID NO: 1436900 - DNA, 25 bp, Homo sapien
ttctttgagttcacaatctgatcca

SEQ ID NO: 1436901 - DNA, 25 bp, Homo sapien
gtagctcagttgtagagcaaaacca

SEQ ID NO: 1436902 - DNA, 25 bp, Homo sapien
gagactcagcaggttcgaagtaggc

SEQ ID NO: 1436903 - DNA, 25 bp, Homo sapien
aatcagggctctgtcacgtgtaagc

SEQ ID NO: 1436904 - DNA, 25 bp, Homo sapien
gaagtaggcatttctacacccaggg

SEQ ID NO: 1436905 - DNA, 25 bp, Homo sapien
cccttcatcttaggcagcaggtctg

SEQ ID NO: 1436906 - DNA, 25 bp, Homo sapien
tgtctgaagagtgggcaggagctcc

SEQ ID NO: 1436907 - DNA, 25 bp, Homo sapien
ggagctcctccatcaccaggttact

SEQ ID NO: 1436908 - DNA, 25 bp, Homo sapien
caagccacgtcctctttctgtcatt

SEQ ID NO: 1436909 - DNA, 25 bp, Homo sapien
aagacagcccagagtcggtcagtcg

SEQ ID NO: 1436910 - DNA, 25 bp, Homo sapien
agcccagagtcggtcagtcggtgat

SEQ ID NO: 1436911 - DNA, 25 bp, Homo sapien
gacagcccagagtcggtcagtcggt

SEQ ID NO: 1436912 - DNA, 25 bp, Homo sapien
agaagacagcccagagtcggtcagt

SEQ ID NO: 1436913 - DNA, 25 bp, Homo sapien
gatacagccacattgaaggataaac

SEQ ID NO: 1436914 - DNA, 25 bp, Homo sapien
gtctgcttgacctgcttctccacag

SEQ ID NO: 1436915 - DNA, 25 bp, Homo sapien
gggatgctccaagagatacagccac

SEQ ID NO: 1436916 - DNA, 25 bp, Homo sapien
agccacattgaaggataaaccacag

SEQ ID NO: 1436917 - DNA, 25 bp, Homo sapien
ataaaaatgtagaatgttgtcttac

SEQ ID NO: 1436918 - DNA, 25 bp, Homo sapien
agttttataaaaatgtagaatgttg

SEQ ID NO: 1436919 - DNA, 25 bp, Homo sapien
tggagttttataaaaatgtagaatg

SEQ ID NO: 1436920 - DNA, 25 bp, Homo sapien
ttttataaaaatgtagaatgttgtc

SEQ ID NO: 1436921 - DNA, 25 bp, Homo sapien
actagtggaaatgcccgtgagctca

SEQ ID NO: 1436922 - DNA, 25 bp, Homo sapien
accacgagtctttcaaggcccacag

SEQ ID NO: 1436923 - DNA, 25 bp, Homo sapien
tgctctgaggtcactggtcactagt

SEQ ID NO: 1436924 - DNA, 25 bp, Homo sapien
tcataggctgcacactaagatttac

SEQ ID NO: 1436925 - DNA, 25 bp, Homo sapien
tggccgtgggtgaaaaaatccagtc

SEQ ID NO: 1436926 - DNA, 25 bp, Homo sapien
tatacttaactgctaggacttggag

SEQ ID NO: 1436927 - DNA, 25 bp, Homo sapien
aaagacaactctggagcacgtggac

SEQ ID NO: 1436928 - DNA, 25 bp, Homo sapien
caagaaactaagcatgtcactaggt

SEQ ID NO: 1436929 - DNA, 25 bp, Homo sapien
tgagctgttctctagcccatcttgg

SEQ ID NO: 1436930 - DNA, 25 bp, Homo sapien
tcacatagctagagatactttacag

SEQ ID NO: 1436931 - DNA, 25 bp, Homo sapien
cagtctgccaggcaagttattctga

SEQ ID NO: 1436932 - DNA, 25 bp, Homo sapien
aatattttcaccttaacagtctgcc

SEQ ID NO: 1436933 - DNA, 25 bp, Homo sapien
ttgcggaccctagctaaagccctgt

SEQ ID NO: 1436934 - DNA, 25 bp, Homo sapien
gaccaatgcttgcagacatgagaga

SEQ ID NO: 1436935 - DNA, 25 bp, Homo sapien
tctagtctggaagcacgaggtcatt

SEQ ID NO: 1436936 - DNA, 25 bp, Homo sapien
tctggtggtctttgtagtaggtgcc

SEQ ID NO: 1436937 - DNA, 25 bp, Homo sapien
tgcacagcttctaaaaaggcttggg

SEQ ID NO: 1436938 - DNA, 25 bp, Homo sapien
aaaggcttgggcttcaaatgtcatc

SEQ ID NO: 1436939 - DNA, 25 bp, Homo sapien
ccttctcctgtcggaagaattgcac

SEQ ID NO: 1436940 - DNA, 25 bp, Homo sapien
aagggcattcagcaagataaaacac

SEQ ID NO: 1436941 - DNA, 25 bp, Homo sapien
gggcattcagcaagataaaacactc

SEQ ID NO: 1436942 - DNA, 25 bp, Homo sapien
agaaagggcattcagcaagataaaa

SEQ ID NO: 1436943 - DNA, 25 bp, Homo sapien
gataaaacactctagatttccccat

SEQ ID NO: 1436944 - DNA, 25 bp, Homo sapien
ggttatctttcagctcagaccacag

SEQ ID NO: 1436945 - DNA, 25 bp, Homo sapien
tcagtgacgttgtgggcatctgtgt

SEQ ID NO: 1436946 - DNA, 25 bp, Homo sapien
acagaaactgggtcacgtgcctctc

SEQ ID NO: 1436947 - DNA, 25 bp, Homo sapien
ccgggttatctttcagctcagacca

SEQ ID NO: 1436948 - DNA, 25 bp, Homo sapien
gatgttttcatggaacagggagcta

SEQ ID NO: 1436949 - DNA, 25 bp, Homo sapien
caagatttggttcatgggcataaag

SEQ ID NO: 1436950 - DNA, 25 bp, Homo sapien
ttggatccccggcactctgaacaat

SEQ ID NO: 1436951 - DNA, 25 bp, Homo sapien
ctaagtagacatgggtgggctgaac

SEQ ID NO: 1436952 - DNA, 25 bp, Homo sapien
atttccccagtaaccatgtagccaa

SEQ ID NO: 1436953 - DNA, 25 bp, Homo sapien
tttccccagtaaccatgtagccaat

SEQ ID NO: 1436954 - DNA, 25 bp, Homo sapien
ccccagtaaccatgtagccaatgga

SEQ ID NO: 1436955 - DNA, 25 bp, Homo sapien
gagaacacaagtttgatctgtattt

SEQ ID NO: 1436956 - DNA, 25 bp, Homo sapien
tagattgcctacatttacaagagac

SEQ ID NO: 1436957 - DNA, 25 bp, Homo sapien
gatccttcctctacgtgacaaaaga

SEQ ID NO: 1436958 - DNA, 25 bp, Homo sapien
cactgtcaggttaaacataacccag

SEQ ID NO: 1436959 - DNA, 25 bp, Homo sapien
tacaagagacacttttaccttctgg

SEQ ID NO: 1436960 - DNA, 25 bp, Homo sapien
tagaaagcttttggcttgcaaggta

SEQ ID NO: 1436961 - DNA, 25 bp, Homo sapien
caattctagaaagcttttggcttgc

SEQ ID NO: 1436962 - DNA, 25 bp, Homo sapien
tagcaattctagaaagcttttggct

SEQ ID NO: 1436963 - DNA, 25 bp, Homo sapien
ctagcaattctagaaagcttttggc

SEQ ID NO: 1436964 - DNA, 25 bp, Homo sapien
tagaaatgtcccactaacacccaga

SEQ ID NO: 1436965 - DNA, 25 bp, Homo sapien
tcttagctggtgattgcatgagcca

SEQ ID NO: 1436966 - DNA, 25 bp, Homo sapien
cacccagacgttgttgacttgcaat

SEQ ID NO: 1436967 - DNA, 25 bp, Homo sapien
aattcaggtcagatcaggacttccc

SEQ ID NO: 1436968 - DNA, 25 bp, Homo sapien
tgagctaagcatctacctggagaga

SEQ ID NO: 1436969 - DNA, 25 bp, Homo sapien
gatcctgcatatccaaacttgtgag

SEQ ID NO: 1436970 - DNA, 25 bp, Homo sapien
tcacgtgacgactaggttctcccaa

SEQ ID NO: 1436971 - DNA, 25 bp, Homo sapien
agagggacgctcatgtattctcacg

SEQ ID NO: 1436972 - DNA, 25 bp, Homo sapien
tgaacccaggactatataacccata

SEQ ID NO: 1436973 - DNA, 25 bp, Homo sapien
gattgttccaatttgtcatcctgaa

SEQ ID NO: 1436974 - DNA, 25 bp, Homo sapien
tgctttagacaacagtgaacccagg

SEQ ID NO: 1436975 - DNA, 25 bp, Homo sapien
agcaccatgtttgatgggccaaaag

SEQ ID NO: 1436976 - DNA, 25 bp, Homo sapien
cttcatcagggttaaataggaaacg

SEQ ID NO: 1436977 - DNA, 25 bp, Homo sapien
gccttactgttggagaacagggcat

SEQ ID NO: 1436978 - DNA, 25 bp, Homo sapien
tcatcagggttaaataggaaacgcc

SEQ ID NO: 1436979 - DNA, 25 bp, Homo sapien
ctaccttaggagctagccttactgt

SEQ ID NO: 1436980 - DNA, 25 bp, Homo sapien
ctgagagtcaatgaaacaatggcca

SEQ ID NO: 1436981 - DNA, 25 bp, Homo sapien
agtcaatgaaacaatggccacagca

SEQ ID NO: 1436982 - DNA, 25 bp, Homo sapien
gagtcaatgaaacaatggccacagc

SEQ ID NO: 1436983 - DNA, 25 bp, Homo sapien
gagagtcaatgaaacaatggccaca

SEQ ID NO: 1436984 - DNA, 25 bp, Homo sapien
tgtgctgagtgccaactgcatgttc

SEQ ID NO: 1436985 - DNA, 25 bp, Homo sapien
tcagtgaaacttcgcagttcctgtg

SEQ ID NO: 1436986 - DNA, 25 bp, Homo sapien
gtgaaacttcgcagttcctgtgctg

SEQ ID NO: 1436987 - DNA, 25 bp, Homo sapien
tgcatgttcctactagaccgaggcc

SEQ ID NO: 1436988 - DNA, 25 bp, Homo sapien
ggatgagaggggagccgcgccatac

SEQ ID NO: 1436989 - DNA, 25 bp, Homo sapien
gaattccttgggcaggaccacaaag

SEQ ID NO: 1436990 - DNA, 25 bp, Homo sapien
cctcgtggaagcagaagtagccgtg

SEQ ID NO: 1436991 - DNA, 25 bp, Homo sapien
catgattgagatgcctgacgcagtc

SEQ ID NO: 1436992 - DNA, 25 bp, Homo sapien
tctgaagaagggctgccacaggtac

SEQ ID NO: 1436993 - DNA, 25 bp, Homo sapien
tgtcactgccaaacaccacttgctg

SEQ ID NO: 1436994 - DNA, 25 bp, Homo sapien
tctaaagacccacaaacggagcttc

SEQ ID NO: 1436995 - DNA, 25 bp, Homo sapien
aaccttattctcacctcagtctgat

SEQ ID NO: 1436996 - DNA, 25 bp, Homo sapien
tgtttttatgccatcaaccttattc

SEQ ID NO: 1436997 - DNA, 25 bp, Homo sapien
tagctgaacactctgtaaagaatac

SEQ ID NO: 1436998 - DNA, 25 bp, Homo sapien
gagattctaaccagtaaaatgccaa

SEQ ID NO: 1436999 - DNA, 25 bp, Homo sapien
taaagaatacacttattggccaggc

SEQ ID NO: 1437000 - DNA, 25 bp, Homo sapien
ttttctgtatcaacttagctgaaca

SEQ ID NO: 1437001 - DNA, 25 bp, Homo sapien
gggaaatgcctgtcagacaacagat

SEQ ID NO: 1437002 - DNA, 25 bp, Homo sapien
gaagaattcgacatttaggagcagc

SEQ ID NO: 1437003 - DNA, 25 bp, Homo sapien
gccaccggctggaagaattcgacat

SEQ ID NO: 1437004 - DNA, 25 bp, Homo sapien
catcttctgaggttaacaccttgcc

SEQ ID NO: 1437005 - DNA, 25 bp, Homo sapien
cttgactattcttgagcttagaggc

SEQ ID NO: 1437006 - DNA, 25 bp, Homo sapien
tagcatcaggtgtagtcctcacagt

SEQ ID NO: 1437007 - DNA, 25 bp, Homo sapien
cagtgctctgtgaagactatcttga

SEQ ID NO: 1437008 - DNA, 25 bp, Homo sapien
cagattggtctgtcagtctgaagcc

SEQ ID NO: 1437009 - DNA, 25 bp, Homo sapien
aaaatagttccaggcgccaatggtg

SEQ ID NO: 1437010 - DNA, 25 bp, Homo sapien
ttctcatagctctccacagcataat

SEQ ID NO: 1437011 - DNA, 25 bp, Homo sapien
taactacaacgtatctctccttcca

SEQ ID NO: 1437012 - DNA, 25 bp, Homo sapien
gatagctctgcttcatacaaaatag

SEQ ID NO: 1437013 - DNA, 25 bp, Homo sapien
caaagttatccatgctatttcaagg

SEQ ID NO: 1437014 - DNA, 25 bp, Homo sapien
ccctctattatgctataggaacaga

SEQ ID NO: 1437015 - DNA, 25 bp, Homo sapien
tatgccttgcatgcatgtggcactc

SEQ ID NO: 1437016 - DNA, 25 bp, Homo sapien
ggaacagaagcatatggtagaagga

SEQ ID NO: 1437017 - DNA, 25 bp, Homo sapien
cttggtcttcaaaaactgtgacgtt

SEQ ID NO: 1437018 - DNA, 25 bp, Homo sapien
gaaagccacagagtactgacgactg

SEQ ID NO: 1437019 - DNA, 25 bp, Homo sapien
ttcagtgcgcacgtgattgcagaaa

SEQ ID NO: 1437020 - DNA, 25 bp, Homo sapien
ctgacgactgtagtagggactgaag

SEQ ID NO: 1437021 - DNA, 25 bp, Homo sapien
ctagaaaaatatgaaaattagaatt

SEQ ID NO: 1437022 - DNA, 25 bp, Homo sapien
tgaggctccacctctagtcttgtga

SEQ ID NO: 1437023 - DNA, 25 bp, Homo sapien
cacctctagtcttgtgactcacagt

SEQ ID NO: 1437024 - DNA, 25 bp, Homo sapien
gtcctggataaaatcaacaagtgtt

SEQ ID NO: 1437025 - DNA, 25 bp, Homo sapien
actcacagtcctggataaaatcaac

SEQ ID NO: 1437026 - DNA, 25 bp, Homo sapien
gcgttgtatatgctggctatggcac

SEQ ID NO: 1437027 - DNA, 25 bp, Homo sapien
tatccacagagcgttgtatatgctg

SEQ ID NO: 1437028 - DNA, 25 bp, Homo sapien
gctggctatggcacgttccccacag

SEQ ID NO: 1437029 - DNA, 25 bp, Homo sapien
cttctcctctatccacagagcgttg

SEQ ID NO: 1437030 - DNA, 25 bp, Homo sapien
taacgccttggtcagaattaattgt

SEQ ID NO: 1437031 - DNA, 25 bp, Homo sapien
aacgccttggtcagaattaattgtt

SEQ ID NO: 1437032 - DNA, 25 bp, Homo sapien
ctaacgccttggtcagaattaattg

SEQ ID NO: 1437033 - DNA, 25 bp, Homo sapien
cattctggttatcagcccctgtcag

SEQ ID NO: 1437034 - DNA, 25 bp, Homo sapien
tttgctccgtccaatgtcctagaga

SEQ ID NO: 1437035 - DNA, 25 bp, Homo sapien
cagaagccttctaacttgatgggat

SEQ ID NO: 1437036 - DNA, 25 bp, Homo sapien
ccatgcttatgggacattactcaag

SEQ ID NO: 1437037 - DNA, 25 bp, Homo sapien
ttatgaagtgggtgtccttgttgtg

SEQ ID NO: 1437038 - DNA, 25 bp, Homo sapien
gctctagctgggatgtccagtacta

SEQ ID NO: 1437039 - DNA, 25 bp, Homo sapien
actatgttgagtaacagttatgaag

SEQ ID NO: 1437040 - DNA, 25 bp, Homo sapien
ctgattgctctagctgggatgtcca

SEQ ID NO: 1437041 - DNA, 25 bp, Homo sapien
taagacgagactcactctatcgccc

SEQ ID NO: 1437042 - DNA, 25 bp, Homo sapien
tttcttctggcctacaaggtttcca

SEQ ID NO: 1437043 - DNA, 25 bp, Homo sapien
tatccttgactatcagagtttaatt

SEQ ID NO: 1437044 - DNA, 25 bp, Homo sapien
ctataacccaagttaggtgttctat

SEQ ID NO: 1437045 - DNA, 25 bp, Homo sapien
aagttcgctaattctttctcctgct

SEQ ID NO: 1437046 - DNA, 25 bp, Homo sapien
ttattaagggactttgatgcattct

SEQ ID NO: 1437047 - DNA, 25 bp, Homo sapien
tgtagggcacactccgtagcgtaga

SEQ ID NO: 1437048 - DNA, 25 bp, Homo sapien
cgtagagatgcctgaaatgagcatg

SEQ ID NO: 1437049 - DNA, 25 bp, Homo sapien
tccgtagcgtagagatgcctgaaat

SEQ ID NO: 1437050 - DNA, 25 bp, Homo sapien
acagtttaatttctcctggcaggtt

SEQ ID NO: 1437051 - DNA, 25 bp, Homo sapien
taaaaaataagatccgaggctggga

SEQ ID NO: 1437052 - DNA, 25 bp, Homo sapien
gggcaataatctaacgttgatctga

SEQ ID NO: 1437053 - DNA, 25 bp, Homo sapien
tgggaatcgtggttcacccagcact

SEQ ID NO: 1437054 - DNA, 25 bp, Homo sapien
catacaatcaaagcttctgtctgtg

SEQ ID NO: 1437055 - DNA, 25 bp, Homo sapien
aacataactgtgttcccagattcca

SEQ ID NO: 1437056 - DNA, 25 bp, Homo sapien
gaccatgaaagccatatgtactcca

SEQ ID NO: 1437057 - DNA, 25 bp, Homo sapien
caaaagagtgcttatgtgctctgct

SEQ ID NO: 1437058 - DNA, 25 bp, Homo sapien
cagattccatcaccagaccatgaaa

SEQ ID NO: 1437059 - DNA, 25 bp, Homo sapien
tcttaactacctctcatgagccaga

SEQ ID NO: 1437060 - DNA, 25 bp, Homo sapien
tggttctggaggtcatacaatcttc

SEQ ID NO: 1437061 - DNA, 25 bp, Homo sapien
gatgcaatcacagtgtactacaacc

SEQ ID NO: 1437062 - DNA, 25 bp, Homo sapien
tgcctggcccttagtagctaatcct

SEQ ID NO: 1437063 - DNA, 25 bp, Homo sapien
taaggatggctccaagattctcgag

SEQ ID NO: 1437064 - DNA, 25 bp, Homo sapien
ttcataaaagcttgaagtcaggcag

SEQ ID NO: 1437065 - DNA, 25 bp, Homo sapien
gcaaactgggacataaatacaaaag

SEQ ID NO: 1437066 - DNA, 25 bp, Homo sapien
tgttttgacatcatgaagccactaa

SEQ ID NO: 1437067 - DNA, 25 bp, Homo sapien
ccacatctctagcatagtaggaaga

SEQ ID NO: 1437068 - DNA, 25 bp, Homo sapien
taatgaaagttatacaggccaagaa

SEQ ID NO: 1437069 - DNA, 25 bp, Homo sapien
caaaaacagctttggaccacatctc

SEQ ID NO: 1437070 - DNA, 25 bp, Homo sapien
tcagggagctgatagagatcataat

SEQ ID NO: 1437071 - DNA, 25 bp, Homo sapien
tttggatttgctatactctgacatt

SEQ ID NO: 1437072 - DNA, 25 bp, Homo sapien
tggatttgctatactctgacatttg

SEQ ID NO: 1437073 - DNA, 25 bp, Homo sapien
gatttgctatactctgacatttggt

SEQ ID NO: 1437074 - DNA, 25 bp, Homo sapien
ttatgtagtaatttagaatcagaat

SEQ ID NO: 1437075 - DNA, 25 bp, Homo sapien
tgtcacagaccagccataggtaagg

SEQ ID NO: 1437076 - DNA, 25 bp, Homo sapien
gaatctgagcctgttagtgagaagg

SEQ ID NO: 1437077 - DNA, 25 bp, Homo sapien
gagaaggtgcacgacttttttccca

SEQ ID NO: 1437078 - DNA, 25 bp, Homo sapien
ttcaccctgttcactagtgcagagg

SEQ ID NO: 1437079 - DNA, 25 bp, Homo sapien
ggccactgccactggttaacattgc

SEQ ID NO: 1437080 - DNA, 25 bp, Homo sapien
gccactgagcgttgatgtctgtttc

SEQ ID NO: 1437081 - DNA, 25 bp, Homo sapien
gatacaaatcactataagccactga

SEQ ID NO: 1437082 - DNA, 25 bp, Homo sapien
caccaaatcaccctggatagtgtga

SEQ ID NO: 1437083 - DNA, 25 bp, Homo sapien
taggtgttgctaacatttaggtgac

SEQ ID NO: 1437084 - DNA, 25 bp, Homo sapien
gctttgggctattcataaattccat

SEQ ID NO: 1437085 - DNA, 25 bp, Homo sapien
cactgggcattactactgtcctcat

SEQ ID NO: 1437086 - DNA, 25 bp, Homo sapien
agtcctcaggaaattatcgtgcctg

SEQ ID NO: 1437087 - DNA, 25 bp, Homo sapien
tcatttcataacaatgaatcaagac

SEQ ID NO: 1437088 - DNA, 25 bp, Homo sapien
tatttgctgagggtgctattcattt

SEQ ID NO: 1437089 - DNA, 25 bp, Homo sapien
tgtcaggaactgtgaaccaaacact

SEQ ID NO: 1437090 - DNA, 25 bp, Homo sapien
tttcattcatgcattaagcaaatat

SEQ ID NO: 1437091 - DNA, 25 bp, Homo sapien
gggttcaacgaagactccatggcag

SEQ ID NO: 1437092 - DNA, 25 bp, Homo sapien
gacaacgagtttgcctaggatgcag

SEQ ID NO: 1437093 - DNA, 25 bp, Homo sapien
gaggcagcacagctcggttaacagc

SEQ ID NO: 1437094 - DNA, 25 bp, Homo sapien
gactgtgaccatctgggaggcagca

SEQ ID NO: 1437095 - DNA, 25 bp, Homo sapien
aagtgcgagcgaagctgcggccaac

SEQ ID NO: 1437096 - DNA, 25 bp, Homo sapien
cctttttgccgctgatgaaatcatc

SEQ ID NO: 1437097 - DNA, 25 bp, Homo sapien
cctgcaagtgctaggatgaagtgcg

SEQ ID NO: 1437098 - DNA, 25 bp, Homo sapien
aagggaacggcatgacattgtcctt

SEQ ID NO: 1437099 - DNA, 25 bp, Homo sapien
tagctgccgggaatccccaggggta

SEQ ID NO: 1437100 - DNA, 25 bp, Homo sapien
gctgccgggaatccccaggggtatc

SEQ ID NO: 1437101 - DNA, 25 bp, Homo sapien
agctgccgggaatccccaggggtat

SEQ ID NO: 1437102 - DNA, 25 bp, Homo sapien
ctgccgggaatccccaggggtatct

SEQ ID NO: 1437103 - DNA, 25 bp, Homo sapien
gctctcttggcggccagttcagaaa

SEQ ID NO: 1437104 - DNA, 25 bp, Homo sapien
ctcagaactcagtccagggcaggta

SEQ ID NO: 1437105 - DNA, 25 bp, Homo sapien
tagaaacgcgggatatccccgctgc

SEQ ID NO: 1437106 - DNA, 25 bp, Homo sapien
gccagttcagaaaccgctcagaact

SEQ ID NO: 1437107 - DNA, 25 bp, Homo sapien
tgtaagcgcacttgccctcgtccag

SEQ ID NO: 1437108 - DNA, 25 bp, Homo sapien
cggatgtaagcgcacttgccctcgt

SEQ ID NO: 1437109 - DNA, 25 bp, Homo sapien
ctcggatgtaagcgcacttgccctc

SEQ ID NO: 1437110 - DNA, 25 bp, Homo sapien
ggatgtaagcgcacttgccctcgtc

SEQ ID NO: 1437111 - DNA, 25 bp, Homo sapien
tgcctgtgctgagcgcggaaactgc

SEQ ID NO: 1437112 - DNA, 25 bp, Homo sapien
cgagctgcctgtgctgagcgcggaa

SEQ ID NO: 1437113 - DNA, 25 bp, Homo sapien
tgagcgcggaaactgcccggtccgc

SEQ ID NO: 1437114 - DNA, 25 bp, Homo sapien
tgctgagcgcggaaactgcccggtc

SEQ ID NO: 1437115 - DNA, 25 bp, Homo sapien
cctggaggttgatccgacggcgaac

SEQ ID NO: 1437116 - DNA, 25 bp, Homo sapien
agctcctggaggttgatccgacggc

SEQ ID NO: 1437117 - DNA, 25 bp, Homo sapien
ctcctggaggttgatccgacggcga

SEQ ID NO: 1437118 - DNA, 25 bp, Homo sapien
tcctggaggttgatccgacggcgaa

SEQ ID NO: 1437119 - DNA, 25 bp, Homo sapien
gctctgaaattaagagcaaacttcc

SEQ ID NO: 1437120 - DNA, 25 bp, Homo sapien
ggtccgcgccttctgatgatccgtg

SEQ ID NO: 1437121 - DNA, 25 bp, Homo sapien
aacttccttcgagaggcgagagaca

SEQ ID NO: 1437122 - DNA, 25 bp, Homo sapien
acaggaggcaagaggcgtcgccttc

SEQ ID NO: 1437123 - DNA, 25 bp, Homo sapien
ggctggcaaccgaggaggtcggcca

SEQ ID NO: 1437124 - DNA, 25 bp, Homo sapien
tcttcccgccctcgcctagctggtg

SEQ ID NO: 1437125 - DNA, 25 bp, Homo sapien
cctagctggtgagctccgacgggct

SEQ ID NO: 1437126 - DNA, 25 bp, Homo sapien
ccgacgggctggcaaccgaggaggt

SEQ ID NO: 1437127 - DNA, 25 bp, Homo sapien
cagctcacatccttcgaggtggagc

SEQ ID NO: 1437128 - DNA, 25 bp, Homo sapien
ggtggagctcaagatcacgttgcct

SEQ ID NO: 1437129 - DNA, 25 bp, Homo sapien
agtgttgctgtccaagaagcaacag

SEQ ID NO: 1437130 - DNA, 25 bp, Homo sapien
atctctgtgagctggaactttccca

SEQ ID NO: 1437131 - DNA, 25 bp, Homo sapien
aagcctatagcaccaggtaatccta

SEQ ID NO: 1437132 - DNA, 25 bp, Homo sapien
cactttggacaaatctcctgccctt

SEQ ID NO: 1437133 - DNA, 25 bp, Homo sapien
actctaccctaactgcaatggccag

SEQ ID NO: 1437134 - DNA, 25 bp, Homo sapien
ggtccctctatgtctgcatgaccct

SEQ ID NO: 1437135 - DNA, 25 bp, Homo sapien
tgcctgtgtattcggttcttgctcc

SEQ ID NO: 1437136 - DNA, 25 bp, Homo sapien
ctggtttgcggaggacccagtcagc

SEQ ID NO: 1437137 - DNA, 25 bp, Homo sapien
gggctttcgcctcgcagctagggat

SEQ ID NO: 1437138 - DNA, 25 bp, Homo sapien
ggcactttgtgcagatatcgctcct

SEQ ID NO: 1437139 - DNA, 25 bp, Homo sapien
tgttcccgtgtcttcgagggtcgtg

SEQ ID NO: 1437140 - DNA, 25 bp, Homo sapien
tgttttggcatcagaagcgactccg

SEQ ID NO: 1437141 - DNA, 25 bp, Homo sapien
tgctagggcacgcaacgggtttcaa

SEQ ID NO: 1437142 - DNA, 25 bp, Homo sapien
caatatgccttggactaaactggac

SEQ ID NO: 1437143 - DNA, 25 bp, Homo sapien
taacccggattgaatgtagcagcgt

SEQ ID NO: 1437144 - DNA, 25 bp, Homo sapien
tagctgggccttgcaatactggcaa

SEQ ID NO: 1437145 - DNA, 25 bp, Homo sapien
gctcttctccattacgagcgctctt

SEQ ID NO: 1437146 - DNA, 25 bp, Homo sapien
ccttgcaatactggcaagcaggcct

SEQ ID NO: 1437147 - DNA, 25 bp, Homo sapien
gctcttcctgagagcgggttcctca

SEQ ID NO: 1437148 - DNA, 25 bp, Homo sapien
attcctaaataattgtctttcaaga

SEQ ID NO: 1437149 - DNA, 25 bp, Homo sapien
ccgaggccacgcctctagaggcggg

SEQ ID NO: 1437150 - DNA, 25 bp, Homo sapien
gccaggaccccgaggccacgcctct

SEQ ID NO: 1437151 - DNA, 25 bp, Homo sapien
taaataattgtctttcaagattgac

SEQ ID NO: 1437152 - DNA, 25 bp, Homo sapien
tgatggcagtagcttgttgtgcagt

SEQ ID NO: 1437153 - DNA, 25 bp, Homo sapien
tctgtagctgtctttgatggcagta

SEQ ID NO: 1437154 - DNA, 25 bp, Homo sapien
ctttccaagaatgaatctgtagctg

SEQ ID NO: 1437155 - DNA, 25 bp, Homo sapien
tggcagtagcttgttgtgcagtaga

SEQ ID NO: 1437156 - DNA, 25 bp, Homo sapien
agtgatgcaatctcggctctcggca

SEQ ID NO: 1437157 - DNA, 25 bp, Homo sapien
gtgatgcaatctcggctctcggcaa

SEQ ID NO: 1437158 - DNA, 25 bp, Homo sapien
cagtgatgcaatctcggctctcggc

SEQ ID NO: 1437159 - DNA, 25 bp, Homo sapien
gattgcctgagcccaggaggtcaag

SEQ ID NO: 1437160 - DNA, 25 bp, Homo sapien
ggaggctaagacgggaggattgcct

SEQ ID NO: 1437161 - DNA, 25 bp, Homo sapien
tgcctgagcccaggaggtcaaggct

SEQ ID NO: 1437162 - DNA, 25 bp, Homo sapien
gaggctaagacgggaggattgcctg

SEQ ID NO: 1437163 - DNA, 25 bp, Homo sapien
ctccccgccaatcttggacaagttg

SEQ ID NO: 1437164 - DNA, 25 bp, Homo sapien
gttgaacatggtcacccagttcttt

SEQ ID NO: 1437165 - DNA, 25 bp, Homo sapien
ttgaacatggtcacccagttctttg

SEQ ID NO: 1437166 - DNA, 25 bp, Homo sapien
aagttgaacatggtcacccagttct

SEQ ID NO: 1437167 - DNA, 25 bp, Homo sapien
caagtataatacgtgctccattgtc

SEQ ID NO: 1437168 - DNA, 25 bp, Homo sapien
tatgccgaaggaatattaggcctct

SEQ ID NO: 1437169 - DNA, 25 bp, Homo sapien
tgccctcccattcattatggtctgg

SEQ ID NO: 1437170 - DNA, 25 bp, Homo sapien
ggttttgtcaatggccagttcatgc

SEQ ID NO: 1437171 - DNA, 25 bp, Homo sapien
gctaagaagaggtagcactgaaatg

SEQ ID NO: 1437172 - DNA, 25 bp, Homo sapien
ctggcagttgatggtcatggtggta

SEQ ID NO: 1437173 - DNA, 25 bp, Homo sapien
aagaagaggtagcactgaaatggtg

SEQ ID NO: 1437174 - DNA, 25 bp, Homo sapien
tctggcagttgatggtcatggtggt

SEQ ID NO: 1437175 - DNA, 25 bp, Homo sapien
atcttggccatccattcttgttctt

SEQ ID NO: 1437176 - DNA, 25 bp, Homo sapien
ctggcttccactctactcttcagct

SEQ ID NO: 1437177 - DNA, 25 bp, Homo sapien
gctggcttccactctactcttcagc

SEQ ID NO: 1437178 - DNA, 25 bp, Homo sapien
aaagcagcatcatttggataggctc

SEQ ID NO: 1437179 - DNA, 25 bp, Homo sapien
agcatcatttggataggctctggcc

SEQ ID NO: 1437180 - DNA, 25 bp, Homo sapien
aattcaacaactagagtcatcttca

SEQ ID NO: 1437181 - DNA, 25 bp, Homo sapien
ttcaaagcagcatcatttggatagg

SEQ ID NO: 1437182 - DNA, 25 bp, Homo sapien
gaagggccaaaagtttccatcaagc

SEQ ID NO: 1437183 - DNA, 25 bp, Homo sapien
tacttcctatcttaatccatttagc

SEQ ID NO: 1437184 - DNA, 25 bp, Homo sapien
caattcctaaaaatcagttttgaga

SEQ ID NO: 1437185 - DNA, 25 bp, Homo sapien
ggtgagggcctattccttatagctg

SEQ ID NO: 1437186 - DNA, 25 bp, Homo sapien
tcttcagcccggtatgaaaacttaa

SEQ ID NO: 1437187 - DNA, 25 bp, Homo sapien
catgtttgcattgagaaattaaccc

SEQ ID NO: 1437188 - DNA, 25 bp, Homo sapien
gttttcaatagggtgtagacctcca

SEQ ID NO: 1437189 - DNA, 25 bp, Homo sapien
tccagactctaggtatatttccaac

SEQ ID NO: 1437190 - DNA, 25 bp, Homo sapien
tagtacctgatcagagttctaaact

SEQ ID NO: 1437191 - DNA, 25 bp, Homo sapien
tgttacgagaataagattgctcagg

SEQ ID NO: 1437192 - DNA, 25 bp, Homo sapien
caactgatgctactttacaacatga

SEQ ID NO: 1437193 - DNA, 25 bp, Homo sapien
cctcttttggttgatgtagtacctg

SEQ ID NO: 1437194 - DNA, 25 bp, Homo sapien
gctgtactagcacgaagagattttc

SEQ ID NO: 1437195 - DNA, 25 bp, Homo sapien
aaactctcttgggaatacgctgtac

SEQ ID NO: 1437196 - DNA, 25 bp, Homo sapien
taactgaggcacttaagatcaccca

SEQ ID NO: 1437197 - DNA, 25 bp, Homo sapien
tttttatagttacatcagcctgggc

SEQ ID NO: 1437198 - DNA, 25 bp, Homo sapien
accagctaagttagaaactgctcag

SEQ ID NO: 1437199 - DNA, 25 bp, Homo sapien
tgaatcagtttaggcagagatgtga

SEQ ID NO: 1437200 - DNA, 25 bp, Homo sapien
gatctcagtgagacttggcttcata

SEQ ID NO: 1437201 - DNA, 25 bp, Homo sapien
tacattatgacctgtaagaacattg

SEQ ID NO: 1437202 - DNA, 25 bp, Homo sapien
actattaggccatctatacagacac

SEQ ID NO: 1437203 - DNA, 25 bp, Homo sapien
gacacctgagaaccaattcttctct

SEQ ID NO: 1437204 - DNA, 25 bp, Homo sapien
gaactacagttggtatagagaacta

SEQ ID NO: 1437205 - DNA, 25 bp, Homo sapien
tttactctactgaattgaaagaaca

SEQ ID NO: 1437206 - DNA, 25 bp, Homo sapien
cagatgctgactggacatggctttc

SEQ ID NO: 1437207 - DNA, 25 bp, Homo sapien
aaatgagttcggcttactcgaaagc

SEQ ID NO: 1437208 - DNA, 25 bp, Homo sapien
cagttactgtatcttcagatgctga

SEQ ID NO: 1437209 - DNA, 25 bp, Homo sapien
catcagaggtgcatctgtgcgtaca

SEQ ID NO: 1437210 - DNA, 25 bp, Homo sapien
tgagataaatagcacaaaaactttt

SEQ ID NO: 1437211 - DNA, 25 bp, Homo sapien
ttgagataaatagcacaaaaacttt

SEQ ID NO: 1437212 - DNA, 25 bp, Homo sapien
cttgagataaatagcacaaaaactt

SEQ ID NO: 1437213 - DNA, 25 bp, Homo sapien
taataaaagggaggatgttcagtac

SEQ ID NO: 1437214 - DNA, 25 bp, Homo sapien
gatgttcagtactgacatcagtctt

SEQ ID NO: 1437215 - DNA, 25 bp, Homo sapien
aaagggaggatgttcagtactgaca

SEQ ID NO: 1437216 - DNA, 25 bp, Homo sapien
tgttgtaataaaagggaggatgttc

SEQ ID NO: 1437217 - DNA, 25 bp, Homo sapien
gtaggaagccatctgtcaatctggg

SEQ ID NO: 1437218 - DNA, 25 bp, Homo sapien
tctatttcgtctcctgtaggaagcc

SEQ ID NO: 1437219 - DNA, 25 bp, Homo sapien
catacacatacaaagttagcatgct

SEQ ID NO: 1437220 - DNA, 25 bp, Homo sapien
taatactacactacactactcagag

SEQ ID NO: 1437221 - DNA, 25 bp, Homo sapien
actgagtgatcagtattggatacac

SEQ ID NO: 1437222 - DNA, 25 bp, Homo sapien
ttctaagttcctaaggacaatgtct

SEQ ID NO: 1437223 - DNA, 25 bp, Homo sapien
tctccccaagttatattctaagttc

SEQ ID NO: 1437224 - DNA, 25 bp, Homo sapien
tacacagtgggtctttagtaatcac

SEQ ID NO: 1437225 - DNA, 25 bp, Homo sapien
ttagtacaagttctaggagcatctg

SEQ ID NO: 1437226 - DNA, 25 bp, Homo sapien
ggcacctagtcaaaggatagatatc

SEQ ID NO: 1437227 - DNA, 25 bp, Homo sapien
gcatgaaatctaatgaggcacctag

SEQ ID NO: 1437228 - DNA, 25 bp, Homo sapien
caaaaaggacaacctgggatccatc

SEQ ID NO: 1437229 - DNA, 25 bp, Homo sapien
tgtaattatctgttgtggtgtcatc

SEQ ID NO: 1437230 - DNA, 25 bp, Homo sapien
taaagctagtaagctagcgttcagt

SEQ ID NO: 1437231 - DNA, 25 bp, Homo sapien
gcagtttaaagctagtaagctagcg

SEQ ID NO: 1437232 - DNA, 25 bp, Homo sapien
agtaagctagcgttcagttagtcac

SEQ ID NO: 1437233 - DNA, 25 bp, Homo sapien
tttggtaagcagtttaaagctagta

SEQ ID NO: 1437234 - DNA, 25 bp, Homo sapien
ttgaaaactgactttgaggcgtaca

SEQ ID NO: 1437235 - DNA, 25 bp, Homo sapien
gatgcatgaattgaaaactgacttt

SEQ ID NO: 1437236 - DNA, 25 bp, Homo sapien
acatttgaagatgcatgaattgaaa

SEQ ID NO: 1437237 - DNA, 25 bp, Homo sapien
gttgacatttgaagatgcatgaatt

SEQ ID NO: 1437238 - DNA, 25 bp, Homo sapien
atccaaaccatggtgaagagattca

SEQ ID NO: 1437239 - DNA, 25 bp, Homo sapien
ccatggtgaagagattcaaatagca

SEQ ID NO: 1437240 - DNA, 25 bp, Homo sapien
ggtgaagagattcaaatagcattct

SEQ ID NO: 1437241 - DNA, 25 bp, Homo sapien
ccaaaccatggtgaagagattcaaa

SEQ ID NO: 1437242 - DNA, 25 bp, Homo sapien
aatatgttcttatggctggtcacat

SEQ ID NO: 1437243 - DNA, 25 bp, Homo sapien
tatgttcttatggctggtcacatac

SEQ ID NO: 1437244 - DNA, 25 bp, Homo sapien
atatgttcttatggctggtcacata

SEQ ID NO: 1437245 - DNA, 25 bp, Homo sapien
cacagaggtccaagttctattgctg

SEQ ID NO: 1437246 - DNA, 25 bp, Homo sapien
acagttacaaggcagctgtctatat

SEQ ID NO: 1437247 - DNA, 25 bp, Homo sapien
caaggcagctgtctatatgggtttt

SEQ ID NO: 1437248 - DNA, 25 bp, Homo sapien
gaggtccaagttctattgctgtctt

SEQ ID NO: 1437249 - DNA, 25 bp, Homo sapien
ttaatcagtttgtatcttgatgcac

SEQ ID NO: 1437250 - DNA, 25 bp, Homo sapien
aatcagtttgtatcttgatgcactg

SEQ ID NO: 1437251 - DNA, 25 bp, Homo sapien
tattaatcagtttgtatcttgatgc

SEQ ID NO: 1437252 - DNA, 25 bp, Homo sapien
tcagtttgtatcttgatgcactgtg

SEQ ID NO: 1437253 - DNA, 25 bp, Homo sapien
tctcaggtctaaattagcatcagca

SEQ ID NO: 1437254 - DNA, 25 bp, Homo sapien
taaattagcatcagcaaatttcctc

SEQ ID NO: 1437255 - DNA, 25 bp, Homo sapien
caaacgtgccttttcccaagcctct

SEQ ID NO: 1437256 - DNA, 25 bp, Homo sapien
ctctttgctaggatttctcaggtct

SEQ ID NO: 1437257 - DNA, 25 bp, Homo sapien
gaactgcttgaatctagcaggtgaa

SEQ ID NO: 1437258 - DNA, 25 bp, Homo sapien
tcagagattatccagtaaactgaat

SEQ ID NO: 1437259 - DNA, 25 bp, Homo sapien
agctgaagagctcaagtttctgact

SEQ ID NO: 1437260 - DNA, 25 bp, Homo sapien
taaataaatagaactcagagattat

SEQ ID NO: 1437261 - DNA, 25 bp, Homo sapien
gcagccttgaactactgggttcaag

SEQ ID NO: 1437262 - DNA, 25 bp, Homo sapien
cagccttgaactactgggttcaagt

SEQ ID NO: 1437263 - DNA, 25 bp, Homo sapien
catgcatgtgactcgattggtttaa

SEQ ID NO: 1437264 - DNA, 25 bp, Homo sapien
ctaagggcacaaaccactgaccaac

SEQ ID NO: 1437265 - DNA, 25 bp, Homo sapien
gtgagagaccccgagctagtggacc

SEQ ID NO: 1437266 - DNA, 25 bp, Homo sapien
taaatattgatgtagtccaacgtgg

SEQ ID NO: 1437267 - DNA, 25 bp, Homo sapien
tgctttatagttatcacttatcaag

SEQ ID NO: 1437268 - DNA, 25 bp, Homo sapien
attgctttatagttatcacttatca

SEQ ID NO: 1437269 - DNA, 25 bp, Homo sapien
ttattctaagttctgtatgattcca

SEQ ID NO: 1437270 - DNA, 25 bp, Homo sapien
tcattgctttatagttatcacttat

SEQ ID NO: 1437271 - DNA, 25 bp, Homo sapien
gatagacgtgtatgaagaaatatcc

SEQ ID NO: 1437272 - DNA, 25 bp, Homo sapien
tagaaagcgctagaggaaactaaaa

SEQ ID NO: 1437273 - DNA, 25 bp, Homo sapien
gcatatcatatttgtaggaagcttc

SEQ ID NO: 1437274 - DNA, 25 bp, Homo sapien
caaagagctttgagtagggattgcc

SEQ ID NO: 1437275 - DNA, 25 bp, Homo sapien
acagtacttctatgcctttgttgca

SEQ ID NO: 1437276 - DNA, 25 bp, Homo sapien
gaagtaggtcccctcaaaactctca

SEQ ID NO: 1437277 - DNA, 25 bp, Homo sapien
ttcacaccactgacaatggatcagg

SEQ ID NO: 1437278 - DNA, 25 bp, Homo sapien
ttccagagccactgcaaacagtact

SEQ ID NO: 1437279 - DNA, 25 bp, Homo sapien
agattaaaaaccagtattacagata

SEQ ID NO: 1437280 - DNA, 25 bp, Homo sapien
aacattttaattggagagtaaactg

SEQ ID NO: 1437281 - DNA, 25 bp, Homo sapien
tactgaaacacactaagtacactgt

SEQ ID NO: 1437282 - DNA, 25 bp, Homo sapien
ttatcaaatactgaaacacactaag

SEQ ID NO: 1437283 - DNA, 25 bp, Homo sapien
gaagtcactgacactatgccaaggt

SEQ ID NO: 1437284 - DNA, 25 bp, Homo sapien
tgacgccgggcaacatgctgtgcct

SEQ ID NO: 1437285 - DNA, 25 bp, Homo sapien
gctgctagttccttgtaatattcag

SEQ ID NO: 1437286 - DNA, 25 bp, Homo sapien
tcagttcggacaatgttacatccgt

SEQ ID NO: 1437287 - DNA, 25 bp, Homo sapien
catcagtacattggcatccattttg

SEQ ID NO: 1437288 - DNA, 25 bp, Homo sapien
tgcatcagtacattggcatccattt

SEQ ID NO: 1437289 - DNA, 25 bp, Homo sapien
atcagtacattggcatccattttgg

SEQ ID NO: 1437290 - DNA, 25 bp, Homo sapien
gcatcagtacattggcatccatttt

SEQ ID NO: 1437291 - DNA, 25 bp, Homo sapien
tctctccttcttcaagaatatcatc

SEQ ID NO: 1437292 - DNA, 25 bp, Homo sapien
cttaatattaccaagatttttctct

SEQ ID NO: 1437293 - DNA, 25 bp, Homo sapien
tctccttcttcaagaatatcatcac

SEQ ID NO: 1437294 - DNA, 25 bp, Homo sapien
tttctctccttcttcaagaatatca

SEQ ID NO: 1437295 - DNA, 25 bp, Homo sapien
tgattgtaactttgactgcatttcc

SEQ ID NO: 1437296 - DNA, 25 bp, Homo sapien
cattgattgtaactttgactgcatt

SEQ ID NO: 1437297 - DNA, 25 bp, Homo sapien
gtcattgattgtaactttgactgca

SEQ ID NO: 1437298 - DNA, 25 bp, Homo sapien
aagtcattgattgtaactttgactg

SEQ ID NO: 1437299 - DNA, 25 bp, Homo sapien
ccaaaagcatctagacattccaaag

SEQ ID NO: 1437300 - DNA, 25 bp, Homo sapien
aagcagccaatgtacagaatattag

SEQ ID NO: 1437301 - DNA, 25 bp, Homo sapien
cattccaaaggttttcgttcctcag

SEQ ID NO: 1437302 - DNA, 25 bp, Homo sapien
ggttttcgttcctcagccaaagcag

SEQ ID NO: 1437303 - DNA, 25 bp, Homo sapien
tagttgggacaaacttgtacatccg

SEQ ID NO: 1437304 - DNA, 25 bp, Homo sapien
aaacttgtacatccgtgtctgcctc

SEQ ID NO: 1437305 - DNA, 25 bp, Homo sapien
tccttaggtggtttagcagtggaag

SEQ ID NO: 1437306 - DNA, 25 bp, Homo sapien
tctgttttctgaggtatagaatagt

SEQ ID NO: 1437307 - DNA, 25 bp, Homo sapien
gcaatataactagatttagtctctc

SEQ ID NO: 1437308 - DNA, 25 bp, Homo sapien
ctgcaatataactagatttagtctc

SEQ ID NO: 1437309 - DNA, 25 bp, Homo sapien
caatataactagatttagtctctcc

SEQ ID NO: 1437310 - DNA, 25 bp, Homo sapien
tgcaatataactagatttagtctct

SEQ ID NO: 1437311 - DNA, 25 bp, Homo sapien
tgttgctgaacaaatgatacaatga

SEQ ID NO: 1437312 - DNA, 25 bp, Homo sapien
gaacaaatgatacaatgataatggg

SEQ ID NO: 1437313 - DNA, 25 bp, Homo sapien
atcagttcttctggtgattgttgct

SEQ ID NO: 1437314 - DNA, 25 bp, Homo sapien
tgatacaatgataatgggctcccat

SEQ ID NO: 1437315 - DNA, 25 bp, Homo sapien
cactggtcgacaaggtaagtgacag

SEQ ID NO: 1437316 - DNA, 25 bp, Homo sapien
actggtcgacaaggtaagtgacaga

SEQ ID NO: 1437317 - DNA, 25 bp, Homo sapien
ctggtcgacaaggtaagtgacagat

SEQ ID NO: 1437318 - DNA, 25 bp, Homo sapien
gaggtgacgacgaagcttatggcta

SEQ ID NO: 1437319 - DNA, 25 bp, Homo sapien
ttttccttagggcacaatggacaag

SEQ ID NO: 1437320 - DNA, 25 bp, Homo sapien
gcttatggctattacaagctctgaa

SEQ ID NO: 1437321 - DNA, 25 bp, Homo sapien
agtgtaaattctggaggtgacgacg

SEQ ID NO: 1437322 - DNA, 25 bp, Homo sapien
gattatctgagttcaatgagctggc

SEQ ID NO: 1437323 - DNA, 25 bp, Homo sapien
caagattatctgagttcaatgagct

SEQ ID NO: 1437324 - DNA, 25 bp, Homo sapien
ttatctgagttcaatgagctggcag

SEQ ID NO: 1437325 - DNA, 25 bp, Homo sapien
catcaagattatctgagttcaatga

SEQ ID NO: 1437326 - DNA, 25 bp, Homo sapien
gtcggagccgagtccagagccgaat

SEQ ID NO: 1437327 - DNA, 25 bp, Homo sapien
agccgagtccagagccgaatccggg

SEQ ID NO: 1437328 - DNA, 25 bp, Homo sapien
gctggagccgaggccggagtcggag

SEQ ID NO: 1437329 - DNA, 25 bp, Homo sapien
ggagtcggagccgagtccagagccg

SEQ ID NO: 1437330 - DNA, 25 bp, Homo sapien
gctcctcctccgccatattctccat

SEQ ID NO: 1437331 - DNA, 25 bp, Homo sapien
agcagctcctcctccgccatattct

SEQ ID NO: 1437332 - DNA, 25 bp, Homo sapien
gcagctcctcctccgccatattctc

SEQ ID NO: 1437333 - DNA, 25 bp, Homo sapien
agctcctcctccgccatattctcca

SEQ ID NO: 1437334 - DNA, 25 bp, Homo sapien
gagaactgacgtgaatgcccacagg

SEQ ID NO: 1437335 - DNA, 25 bp, Homo sapien
gcccacagggctggatccaaggagt

SEQ ID NO: 1437336 - DNA, 25 bp, Homo sapien
gccagaggcagcgattccagatgcc

SEQ ID NO: 1437337 - DNA, 25 bp, Homo sapien
gatgcgtgcaacagacaaaagatga

SEQ ID NO: 1437338 - DNA, 25 bp, Homo sapien
aaccgaacaaagactacagcaccca

SEQ ID NO: 1437339 - DNA, 25 bp, Homo sapien
tcggtttctacggtgcgtctccggc

SEQ ID NO: 1437340 - DNA, 25 bp, Homo sapien
ctacagcacccaggatacactgcgc

SEQ ID NO: 1437341 - DNA, 25 bp, Homo sapien
cagcacccaggatacactgcgcagt

SEQ ID NO: 1437342 - DNA, 25 bp, Homo sapien
tccagctgacttggaattagggtct

SEQ ID NO: 1437343 - DNA, 25 bp, Homo sapien
gtctggtcggttcgtgcggagcccg

SEQ ID NO: 1437344 - DNA, 25 bp, Homo sapien
cccgcggcggtttactagcagctga

SEQ ID NO: 1437345 - DNA, 25 bp, Homo sapien
gctgacgagcttgcctgtccatcca

SEQ ID NO: 1437346 - DNA, 25 bp, Homo sapien
ttgacattcgagcctttcttgtttc

SEQ ID NO: 1437347 - DNA, 25 bp, Homo sapien
cttctgtccccccgcgataaatcca

SEQ ID NO: 1437348 - DNA, 25 bp, Homo sapien
ttcttctgtccccccgcgataaatc

SEQ ID NO: 1437349 - DNA, 25 bp, Homo sapien
gacattcgagcctttcttgtttctt

SEQ ID NO: 1437350 - DNA, 25 bp, Homo sapien
gccctgcttgggcttggtccgaacc

SEQ ID NO: 1437351 - DNA, 25 bp, Homo sapien
cctgcttgggcttggtccgaacctt

SEQ ID NO: 1437352 - DNA, 25 bp, Homo sapien
gctgccctgcttgggcttggtccga

SEQ ID NO: 1437353 - DNA, 25 bp, Homo sapien
tggctgccctgcttgggcttggtcc

SEQ ID NO: 1437354 - DNA, 25 bp, Homo sapien
ccctccaatgacattcctagctttt

SEQ ID NO: 1437355 - DNA, 25 bp, Homo sapien
tgctccttttgatcacaacccctcc

SEQ ID NO: 1437356 - DNA, 25 bp, Homo sapien
tgatcacaacccctccaatgacatt

SEQ ID NO: 1437357 - DNA, 25 bp, Homo sapien
cctccaatgacattcctagcttttc

SEQ ID NO: 1437358 - DNA, 25 bp, Homo sapien
ccttcttttgagctacccgatcttt

SEQ ID NO: 1437359 - DNA, 25 bp, Homo sapien
tagctctcagcagcccgctcctgag

SEQ ID NO: 1437360 - DNA, 25 bp, Homo sapien
cagcccgctcctgagctctgaggaa

SEQ ID NO: 1437361 - DNA, 25 bp, Homo sapien
cttgccttcttttgagctacccgat

SEQ ID NO: 1437362 - DNA, 25 bp, Homo sapien
gagcaatggacattttgggacagtt

SEQ ID NO: 1437363 - DNA, 25 bp, Homo sapien
ctgagcaatggacattttgggacag

SEQ ID NO: 1437364 - DNA, 25 bp, Homo sapien
tgagcaatggacattttgggacagt

SEQ ID NO: 1437365 - DNA, 25 bp, Homo sapien
ttctgcggcgtcttttcatagactg

SEQ ID NO: 1437366 - DNA, 25 bp, Homo sapien
tctttctgcggcgtcttttcataga

SEQ ID NO: 1437367 - DNA, 25 bp, Homo sapien
tttctgcggcgtcttttcatagact

SEQ ID NO: 1437368 - DNA, 25 bp, Homo sapien
acttctttctgcggcgtcttttcat

SEQ ID NO: 1437369 - DNA, 25 bp, Homo sapien
tttcaggccagccttcataccatta

SEQ ID NO: 1437370 - DNA, 25 bp, Homo sapien
ggccagccttcataccattattttg

SEQ ID NO: 1437371 - DNA, 25 bp, Homo sapien
ctctctatacgagcagaagcagtct

SEQ ID NO: 1437372 - DNA, 25 bp, Homo sapien
atcatatccctctctatacgagcag

SEQ ID NO: 1437373 - DNA, 25 bp, Homo sapien
tttaccttctcgtcgtcttctacat

SEQ ID NO: 1437374 - DNA, 25 bp, Homo sapien
tcatttttaccttctcgtcgtcttc

SEQ ID NO: 1437375 - DNA, 25 bp, Homo sapien
ccttctcgtcgtcttctacatttca

SEQ ID NO: 1437376 - DNA, 25 bp, Homo sapien
ccaagtatagtaatcatttttacct

SEQ ID NO: 1437377 - DNA, 25 bp, Homo sapien
gcagaacagagacctgcgtctgcag

SEQ ID NO: 1437378 - DNA, 25 bp, Homo sapien
acagagacctgcgtctgcagcttga

SEQ ID NO: 1437379 - DNA, 25 bp, Homo sapien
gaacagagacctgcgtctgcagctt

SEQ ID NO: 1437380 - DNA, 25 bp, Homo sapien
ctgcagaacagagacctgcgtctgc

SEQ ID NO: 1437381 - DNA, 25 bp, Homo sapien
atctgttgtaactggttgtggtcaa

SEQ ID NO: 1437382 - DNA, 25 bp, Homo sapien
aaatgccactacacttggatcagcc

SEQ ID NO: 1437383 - DNA, 25 bp, Homo sapien
gttgtaaatgccactacacttggat

SEQ ID NO: 1437384 - DNA, 25 bp, Homo sapien
gtaaatgccactacacttggatcag

SEQ ID NO: 1437385 - DNA, 25 bp, Homo sapien
caagtactaagattatcatccaagg

SEQ ID NO: 1437386 - DNA, 25 bp, Homo sapien
acatcattcccatattctggggaat

SEQ ID NO: 1437387 - DNA, 25 bp, Homo sapien
ttcccatattctggggaatgttcca

SEQ ID NO: 1437388 - DNA, 25 bp, Homo sapien
tactcagtgaattccacatcattcc

SEQ ID NO: 1437389 - DNA, 25 bp, Homo sapien
tcattcccatattctggggaatgtt

SEQ ID NO: 1437390 - DNA, 25 bp, Homo sapien
ctcttcttattaggacactattcag

SEQ ID NO: 1437391 - DNA, 25 bp, Homo sapien
gcgtgtgccgtcatcctgggtgatt

SEQ ID NO: 1437392 - DNA, 25 bp, Homo sapien
tcagattgtattagggctcatgcca

SEQ ID NO: 1437393 - DNA, 25 bp, Homo sapien
cattctgcagtactggaggttaggg

SEQ ID NO: 1437394 - DNA, 25 bp, Homo sapien
tctggtaatgtgaaacggtctctcc

SEQ ID NO: 1437395 - DNA, 25 bp, Homo sapien
tcctcatttagttggtagccagtgg

SEQ ID NO: 1437396 - DNA, 25 bp, Homo sapien
cagaagattgtattagggcccatgc

SEQ ID NO: 1437397 - DNA, 25 bp, Homo sapien
gatttcagctcccatagattgaccc

SEQ ID NO: 1437398 - DNA, 25 bp, Homo sapien
gtgttctgatacattgatggtccca

SEQ ID NO: 1437399 - DNA, 25 bp, Homo sapien
tggatcattcgcttcatcctctgac

SEQ ID NO: 1437400 - DNA, 25 bp, Homo sapien
gctgatttttctcaatagttgtaga

SEQ ID NO: 1437401 - DNA, 25 bp, Homo sapien
atttggtggcccgtgttctgataca

SEQ ID NO: 1437402 - DNA, 25 bp, Homo sapien
tgccagatgtcagccctgatgagtt

SEQ ID NO: 1437403 - DNA, 25 bp, Homo sapien
cagccctgatgagtttgtcaaggcc

SEQ ID NO: 1437404 - DNA, 25 bp, Homo sapien
ccctgatgagtttgtcaaggccttt

SEQ ID NO: 1437405 - DNA, 25 bp, Homo sapien
gatgtcagccctgatgagtttgtca

SEQ ID NO: 1437406 - DNA, 25 bp, Homo sapien
aaccacaccacattttggatctacg

SEQ ID NO: 1437407 - DNA, 25 bp, Homo sapien
gtgcatgaattccacccattctctg

SEQ ID NO: 1437408 - DNA, 25 bp, Homo sapien
tttggatctacgtgtagttctggca

SEQ ID NO: 1437409 - DNA, 25 bp, Homo sapien
gacccttttgaactctgttgagaaa

SEQ ID NO: 1437410 - DNA, 25 bp, Homo sapien
ctgtcccgagttctgattgtcccct

SEQ ID NO: 1437411 - DNA, 25 bp, Homo sapien
tgtgaacttacatagaccatctccc

SEQ ID NO: 1437412 - DNA, 25 bp, Homo sapien
gaggtagctagtggttctctccaac

SEQ ID NO: 1437413 - DNA, 25 bp, Homo sapien
agatgtgagccacccaaaagtcagg

SEQ ID NO: 1437414 - DNA, 25 bp, Homo sapien
agagtttggctagatgcactggctc

SEQ ID NO: 1437415 - DNA, 25 bp, Homo sapien
gtagagtttggctagatgcactggc

SEQ ID NO: 1437416 - DNA, 25 bp, Homo sapien
gaaagtagagtttggctagatgcac

SEQ ID NO: 1437417 - DNA, 25 bp, Homo sapien
actaagaaagtagagtttggctaga

SEQ ID NO: 1437418 - DNA, 25 bp, Homo sapien
tattcactagttggtgtagaacctg

SEQ ID NO: 1437419 - DNA, 25 bp, Homo sapien
gactgtctgcaataaaagagaactt

SEQ ID NO: 1437420 - DNA, 25 bp, Homo sapien
tgccagattagggaaccacaccacc

SEQ ID NO: 1437421 - DNA, 25 bp, Homo sapien
gagaacttgttcaggatattcacta

SEQ ID NO: 1437422 - DNA, 25 bp, Homo sapien
ctacacttggcctttgaaacttact

SEQ ID NO: 1437423 - DNA, 25 bp, Homo sapien
cagcgaacatcctctggtttggagg

SEQ ID NO: 1437424 - DNA, 25 bp, Homo sapien
gttgtcctaatcatgtaatgcaggg

SEQ ID NO: 1437425 - DNA, 25 bp, Homo sapien
tcctgggaagaccagcgaacatcct

SEQ ID NO: 1437426 - DNA, 25 bp, Homo sapien
tggtggacacccaaatccgagctac

SEQ ID NO: 1437427 - DNA, 25 bp, Homo sapien
caccctgagggtttgtagactagtt

SEQ ID NO: 1437428 - DNA, 25 bp, Homo sapien
ccttcgtaagtgtagagttctgtga

SEQ ID NO: 1437429 - DNA, 25 bp, Homo sapien
tatggacatgttctagcccttcttc

SEQ ID NO: 1437430 - DNA, 25 bp, Homo sapien
tcccagttggcccattaggttcctg

SEQ ID NO: 1437431 - DNA, 25 bp, Homo sapien
ccaagttagccactgaatagtcatc

SEQ ID NO: 1437432 - DNA, 25 bp, Homo sapien
caatgtagttttagtccagaaccaa

SEQ ID NO: 1437433 - DNA, 25 bp, Homo sapien
ggatattaatcccatggtgcaagga

SEQ ID NO: 1437434 - DNA, 25 bp, Homo sapien
cctttaatgtgtttaaatcagcagc

SEQ ID NO: 1437435 - DNA, 25 bp, Homo sapien
tacctttaatgtgtttaaatcagca

SEQ ID NO: 1437436 - DNA, 25 bp, Homo sapien
agtacctttaatgtgtttaaatcag

SEQ ID NO: 1437437 - DNA, 25 bp, Homo sapien
acctttaatgtgtttaaatcagcag

SEQ ID NO: 1437438 - DNA, 25 bp, Homo sapien
cactcagagtttaaaagacagaccc

SEQ ID NO: 1437439 - DNA, 25 bp, Homo sapien
aatattggtaggcatgtaagcttcc

SEQ ID NO: 1437440 - DNA, 25 bp, Homo sapien
aactgcagccaaggcaagaactctg

SEQ ID NO: 1437441 - DNA, 25 bp, Homo sapien
tacttcaattggtaaagcactctgc

SEQ ID NO: 1437442 - DNA, 25 bp, Homo sapien
aaccataattacatcactaagcctg

SEQ ID NO: 1437443 - DNA, 25 bp, Homo sapien
cacaagtgtacctctactaaccata

SEQ ID NO: 1437444 - DNA, 25 bp, Homo sapien
ctaagcctgttagtttgagagggtc

SEQ ID NO: 1437445 - DNA, 25 bp, Homo sapien
tgttagcaacatctatacccaccca

SEQ ID NO: 1437446 - DNA, 25 bp, Homo sapien
catttccacacaactgatggcatga

SEQ ID NO: 1437447 - DNA, 25 bp, Homo sapien
ccactgcataaatggtgttccctac

SEQ ID NO: 1437448 - DNA, 25 bp, Homo sapien
gacttccaccgtattcagaaattca

SEQ ID NO: 1437449 - DNA, 25 bp, Homo sapien
tgttccctacagttgcaatcccagc

SEQ ID NO: 1437450 - DNA, 25 bp, Homo sapien
tgctctaggccaacaggctgtgtct

SEQ ID NO: 1437451 - DNA, 25 bp, Homo sapien
ctatgtatctgtaaagcacgctgac

SEQ ID NO: 1437452 - DNA, 25 bp, Homo sapien
cattcccacgtggaacttaggcaac

SEQ ID NO: 1437453 - DNA, 25 bp, Homo sapien
gagccataagcctgctaaggttcag

SEQ ID NO: 1437454 - DNA, 25 bp, Homo sapien
gattgtatcgttctactgtgttcag

SEQ ID NO: 1437455 - DNA, 25 bp, Homo sapien
gggtgcaattaaagtccaggtatta

SEQ ID NO: 1437456 - DNA, 25 bp, Homo sapien
tatgtacaaataaccaccaagctca

SEQ ID NO: 1437457 - DNA, 25 bp, Homo sapien
gattctgcacctccgattatgtaca

SEQ ID NO: 1437458 - DNA, 25 bp, Homo sapien
tgttaagaggggcacagcttgtcca

SEQ ID NO: 1437459 - DNA, 25 bp, Homo sapien
caactttgttacaggatcaaataca

SEQ ID NO: 1437460 - DNA, 25 bp, Homo sapien
tccacaactttgttacaggatcaaa

SEQ ID NO: 1437461 - DNA, 25 bp, Homo sapien
ttgtccacaactttgttacaggatc

SEQ ID NO: 1437462 - DNA, 25 bp, Homo sapien
ccaccaacgatgtataactttccat

SEQ ID NO: 1437463 - DNA, 25 bp, Homo sapien
caccaacgatgtataactttccatt

SEQ ID NO: 1437464 - DNA, 25 bp, Homo sapien
gatccacctaccacatagagctggc

SEQ ID NO: 1437465 - DNA, 25 bp, Homo sapien
gaatcatacatctctccacaactca

SEQ ID NO: 1437466 - DNA, 25 bp, Homo sapien
ggaacaggaatccagtcatctatgt

SEQ ID NO: 1437467 - DNA, 25 bp, Homo sapien
gagtggccatttgatccacctacca

SEQ ID NO: 1437468 - DNA, 25 bp, Homo sapien
taacatcctgaagttacgaggaaaa

SEQ ID NO: 1437469 - DNA, 25 bp, Homo sapien
taaataggggttgctcctgcaacat

SEQ ID NO: 1437470 - DNA, 25 bp, Homo sapien
tgctcctgcaacataatgcgcttac

SEQ ID NO: 1437471 - DNA, 25 bp, Homo sapien
aaaagctaaataggggttgctcctg

SEQ ID NO: 1437472 - DNA, 25 bp, Homo sapien
tggattatagcattcgactgttcga

SEQ ID NO: 1437473 - DNA, 25 bp, Homo sapien
gactgttcgaagacattcctctctg

SEQ ID NO: 1437474 - DNA, 25 bp, Homo sapien
gttctcatgggagcaagaaaggacc

SEQ ID NO: 1437475 - DNA, 25 bp, Homo sapien
gccatttgaaatcgggctcttggtg

SEQ ID NO: 1437476 - DNA, 25 bp, Homo sapien
gccgtgaaagatggcatattaaacc

SEQ ID NO: 1437477 - DNA, 25 bp, Homo sapien
ccctatcttattggattgccgtgaa

SEQ ID NO: 1437478 - DNA, 25 bp, Homo sapien
aataaactgcttagtcttggcttga

SEQ ID NO: 1437479 - DNA, 25 bp, Homo sapien
cattgaactgaaggttagccatatt

SEQ ID NO: 1437480 - DNA, 25 bp, Homo sapien
gatcgtgcgtactgcataggagaca

SEQ ID NO: 1437481 - DNA, 25 bp, Homo sapien
gctgttcccagaccagatcgtgcgt

SEQ ID NO: 1437482 - DNA, 25 bp, Homo sapien
cagaatataccatccagcacagcca

SEQ ID NO: 1437483 - DNA, 25 bp, Homo sapien
cacagccaggcacaagtaagtgtta

SEQ ID NO: 1437484 - DNA, 25 bp, Homo sapien
cagactggaacaatctgctctcgtt

SEQ ID NO: 1437485 - DNA, 25 bp, Homo sapien
taggtaagctgaaaacaatctggca

SEQ ID NO: 1437486 - DNA, 25 bp, Homo sapien
tatgatcctgaattggactccagtc

SEQ ID NO: 1437487 - DNA, 25 bp, Homo sapien
tctgagttttttcctcgagtagtca

SEQ ID NO: 1437488 - DNA, 25 bp, Homo sapien
tgcttatggccattctcacgtggtg

SEQ ID NO: 1437489 - DNA, 25 bp, Homo sapien
tagcatttggagaagagagacatcc

SEQ ID NO: 1437490 - DNA, 25 bp, Homo sapien
tccagttgaactgctacttatctgc

SEQ ID NO: 1437491 - DNA, 25 bp, Homo sapien
tttccactcatgcttagggctttgt

SEQ ID NO: 1437492 - DNA, 25 bp, Homo sapien
caaaatcaaaaggtagctacagaaa

SEQ ID NO: 1437493 - DNA, 25 bp, Homo sapien
ctgcaaaatcaaaaggtagctacag

SEQ ID NO: 1437494 - DNA, 25 bp, Homo sapien
gcaaaatcaaaaggtagctacagaa

SEQ ID NO: 1437495 - DNA, 25 bp, Homo sapien
tgcaaaatcaaaaggtagctacaga

SEQ ID NO: 1437496 - DNA, 25 bp, Homo sapien
gaccacatctgatgtacctttgttc

SEQ ID NO: 1437497 - DNA, 25 bp, Homo sapien
gagctattccacaacactgagtatc

SEQ ID NO: 1437498 - DNA, 25 bp, Homo sapien
tcctgagctattccacaacactgag

SEQ ID NO: 1437499 - DNA, 25 bp, Homo sapien
cacatctgatgtacctttgttcctg

SEQ ID NO: 1437500 - DNA, 25 bp, Homo sapien
gatgagacaactacgcctacacaat

SEQ ID NO: 1437501 - DNA, 25 bp, Homo sapien
ccagatggccagaacacatggatag

SEQ ID NO: 1437502 - DNA, 25 bp, Homo sapien
tgttgcaaatcaagacctcagcaga

SEQ ID NO: 1437503 - DNA, 25 bp, Homo sapien
ggtagcaacttcagcacctggccta

SEQ ID NO: 1437504 - DNA, 25 bp, Homo sapien
agatttacactatgacaggctgttt

SEQ ID NO: 1437505 - DNA, 25 bp, Homo sapien
ccactgttactaaagttgtgaatgc

SEQ ID NO: 1437506 - DNA, 25 bp, Homo sapien
aagaagatatgcattgcccaaggca

SEQ ID NO: 1437507 - DNA, 25 bp, Homo sapien
aaaggcagggaatgtatcattatca

SEQ ID NO: 1437508 - DNA, 25 bp, Homo sapien
aaatcagttgggatattccagccca

SEQ ID NO: 1437509 - DNA, 25 bp, Homo sapien
tgaagtctaacatgtgtccctcgca

SEQ ID NO: 1437510 - DNA, 25 bp, Homo sapien
ggataaagtataagccccattcagg

SEQ ID NO: 1437511 - DNA, 25 bp, Homo sapien
caaagactgccacctaatagactgt

SEQ ID NO: 1437512 - DNA, 25 bp, Homo sapien
gtcagaaggtaggataatggtttcc

SEQ ID NO: 1437513 - DNA, 25 bp, Homo sapien
ttacactggtaggttcactatgtgg

SEQ ID NO: 1437514 - DNA, 25 bp, Homo sapien
cctttgggagcactatacggaaacg

SEQ ID NO: 1437515 - DNA, 25 bp, Homo sapien
gctgccgggatgctagaaacctctt

SEQ ID NO: 1437516 - DNA, 25 bp, Homo sapien
tcatgcctgacacaaacaactgctt

SEQ ID NO: 1437517 - DNA, 25 bp, Homo sapien
cagctcagtagttaaggtaacatcc

SEQ ID NO: 1437518 - DNA, 25 bp, Homo sapien
tcatgtggcaaaaatactaactcta

SEQ ID NO: 1437519 - DNA, 25 bp, Homo sapien
ggttttaacatatgatccaccactt

SEQ ID NO: 1437520 - DNA, 25 bp, Homo sapien
aaacacctcagcctgtccatctagt

SEQ ID NO: 1437521 - DNA, 25 bp, Homo sapien
atctagtaggttcccatcaagcagc

SEQ ID NO: 1437522 - DNA, 25 bp, Homo sapien
caagcagcttgtgatcagctgagta

SEQ ID NO: 1437523 - DNA, 25 bp, Homo sapien
cagctgagtagtacaaggtttgaac

SEQ ID NO: 1437524 - DNA, 25 bp, Homo sapien
gcagattacacaaacgcctcaaggt

SEQ ID NO: 1437525 - DNA, 25 bp, Homo sapien
caatactggctgaagagtcgttggc

SEQ ID NO: 1437526 - DNA, 25 bp, Homo sapien
cagaacacccatgtggctacggtca

SEQ ID NO: 1437527 - DNA, 25 bp, Homo sapien
gacatattactctggcaggatccgg

SEQ ID NO: 1437528 - DNA, 25 bp, Homo sapien
ctgcccacagcggatttttcttagg

SEQ ID NO: 1437529 - DNA, 25 bp, Homo sapien
gctgcttctttacgtgtcaatacac

SEQ ID NO: 1437530 - DNA, 25 bp, Homo sapien
cattaaatcatcatcgttctctgcc

SEQ ID NO: 1437531 - DNA, 25 bp, Homo sapien
ttcttcagtcttgggtatcctagtt

SEQ ID NO: 1437532 - DNA, 25 bp, Homo sapien
gggaatccttcatgttatagcaaaa

SEQ ID NO: 1437533 - DNA, 25 bp, Homo sapien
aactgaacagttcattcagctcacc

SEQ ID NO: 1437534 - DNA, 25 bp, Homo sapien
gaaagttaacagcacataataagca

SEQ ID NO: 1437535 - DNA, 25 bp, Homo sapien
gaaaagcagaagaccaaactgaaca

SEQ ID NO: 1437536 - DNA, 25 bp, Homo sapien
tacgctgcacccagttgattacctt

SEQ ID NO: 1437537 - DNA, 25 bp, Homo sapien
cattctcccagatgctacgctgcac

SEQ ID NO: 1437538 - DNA, 25 bp, Homo sapien
tgtatataatttgccattgctgggc

SEQ ID NO: 1437539 - DNA, 25 bp, Homo sapien
cattgctgggcaagcaaacattatc

SEQ ID NO: 1437540 - DNA, 25 bp, Homo sapien
gcatcaaccttattcaacaaacggg

SEQ ID NO: 1437541 - DNA, 25 bp, Homo sapien
tggaagcttaagaaactcctcctct

SEQ ID NO: 1437542 - DNA, 25 bp, Homo sapien
aaacgggagtctcccatacaacttg

SEQ ID NO: 1437543 - DNA, 25 bp, Homo sapien
tcggtaagagatgcagctggtaaca

SEQ ID NO: 1437544 - DNA, 25 bp, Homo sapien
tagacagtaaataatcaccacaaac

SEQ ID NO: 1437545 - DNA, 25 bp, Homo sapien
ctagacagtaaataatcaccacaaa

SEQ ID NO: 1437546 - DNA, 25 bp, Homo sapien
tgtggtaaagactatgtgaagatac

SEQ ID NO: 1437547 - DNA, 25 bp, Homo sapien
taaggcttcatgaaacgcagtatct

SEQ ID NO: 1437548 - DNA, 25 bp, Homo sapien
gaactgggctctacaggagagatga

SEQ ID NO: 1437549 - DNA, 25 bp, Homo sapien
ggagaggtacaacaaattgaaatgc

SEQ ID NO: 1437550 - DNA, 25 bp, Homo sapien
gctcaattccgtcactgtagctgga

SEQ ID NO: 1437551 - DNA, 25 bp, Homo sapien
gaaagggtcagacttcagcccaaat

SEQ ID NO: 1437552 - DNA, 25 bp, Homo sapien
tagccaccctaccagagaagattgc

SEQ ID NO: 1437553 - DNA, 25 bp, Homo sapien
aaaataggcagctggccagtaggcc

SEQ ID NO: 1437554 - DNA, 25 bp, Homo sapien
acaaattcagcattgcaatcacaca

SEQ ID NO: 1437555 - DNA, 25 bp, Homo sapien
gacaaattcagcattgcaatcacac

SEQ ID NO: 1437556 - DNA, 25 bp, Homo sapien
caaattcagcattgcaatcacacaa

SEQ ID NO: 1437557 - DNA, 25 bp, Homo sapien
ctgctttactcgatccatcttcagc

SEQ ID NO: 1437558 - DNA, 25 bp, Homo sapien
atcttttaccaattccttatctgct

SEQ ID NO: 1437559 - DNA, 25 bp, Homo sapien
ttttaccaattccttatctgctttc

SEQ ID NO: 1437560 - DNA, 25 bp, Homo sapien
gctttactcgatccatcttcagctt

SEQ ID NO: 1437561 - DNA, 25 bp, Homo sapien
attatatggtttacttcaaatgtac

SEQ ID NO: 1437562 - DNA, 25 bp, Homo sapien
taaatatatgtagcaagacttggaa

SEQ ID NO: 1437563 - DNA, 25 bp, Homo sapien
aaagttacttatgataccaaagcct

SEQ ID NO: 1437564 - DNA, 25 bp, Homo sapien
gaagatattccctaattatatggtt

SEQ ID NO: 1437565 - DNA, 25 bp, Homo sapien
tttcaaataaatagggactgcagca

SEQ ID NO: 1437566 - DNA, 25 bp, Homo sapien
gagcagtgtaggcataattcaacaa

SEQ ID NO: 1437567 - DNA, 25 bp, Homo sapien
tgaggatcactatcactattaaaga

SEQ ID NO: 1437568 - DNA, 25 bp, Homo sapien
tttaacgtgagaaattccatgagga

SEQ ID NO: 1437569 - DNA, 25 bp, Homo sapien
attataagtattgtggattatgtgc

SEQ ID NO: 1437570 - DNA, 25 bp, Homo sapien
aactggccacttttcctcagggcat

SEQ ID NO: 1437571 - DNA, 25 bp, Homo sapien
gaactggccacttttcctcagggca

SEQ ID NO: 1437572 - DNA, 25 bp, Homo sapien
atgaaggcaggtgtgtcttaagctc

SEQ ID NO: 1437573 - DNA, 25 bp, Homo sapien
aaaggtgcacttcgtcagggtatga

SEQ ID NO: 1437574 - DNA, 25 bp, Homo sapien
ggtgattccaaaactatcaggcttg

SEQ ID NO: 1437575 - DNA, 25 bp, Homo sapien
gacaaaggagtgttaaaaggtgcac

SEQ ID NO: 1437576 - DNA, 25 bp, Homo sapien
tttgagccagcaagcaaccttaggc

SEQ ID NO: 1437577 - DNA, 25 bp, Homo sapien
ggactagcctaaaaacttgaacata

SEQ ID NO: 1437578 - DNA, 25 bp, Homo sapien
gaggaaatcttacagccatagagcc

SEQ ID NO: 1437579 - DNA, 25 bp, Homo sapien
tccacatttagaaccctatctgagg

SEQ ID NO: 1437580 - DNA, 25 bp, Homo sapien
ggaagcatagggcatcctagcagaa

SEQ ID NO: 1437581 - DNA, 25 bp, Homo sapien
caggatgcatatggtaatagtgggc

SEQ ID NO: 1437582 - DNA, 25 bp, Homo sapien
caatgctaagcatggaaagtaggtg

SEQ ID NO: 1437583 - DNA, 25 bp, Homo sapien
agtaagagagcctaattccaaggtt

SEQ ID NO: 1437584 - DNA, 25 bp, Homo sapien
taagagtggtactaggcttccagag

SEQ ID NO: 1437585 - DNA, 25 bp, Homo sapien
gccagctggcgttaaatgatactag

SEQ ID NO: 1437586 - DNA, 25 bp, Homo sapien
tctttggtcagtggctcaagttccg

SEQ ID NO: 1437587 - DNA, 25 bp, Homo sapien
taagcttgataagcagcctgccagc

SEQ ID NO: 1437588 - DNA, 25 bp, Homo sapien
tcaaaccaatagatatgtccactac

SEQ ID NO: 1437589 - DNA, 25 bp, Homo sapien
gaaatgtcagctgtctcaaaccaat

SEQ ID NO: 1437590 - DNA, 25 bp, Homo sapien
atcactgcacgctccatcacaaaaa

SEQ ID NO: 1437591 - DNA, 25 bp, Homo sapien
catcacaaaaatgcgcccttttgga

SEQ ID NO: 1437592 - DNA, 25 bp, Homo sapien
acggcgatcggggactccgtgccac

SEQ ID NO: 1437593 - DNA, 25 bp, Homo sapien
aggaccccgcggcccacggcgatcg

SEQ ID NO: 1437594 - DNA, 25 bp, Homo sapien
cgggcaacgtggagcgggaacaaag

SEQ ID NO: 1437595 - DNA, 25 bp, Homo sapien
cttctccccgcgcttggcaagaaaa

SEQ ID NO: 1437596 - DNA, 25 bp, Homo sapien
gcgccagtgtagcaaaggggctcca

SEQ ID NO: 1437597 - DNA, 25 bp, Homo sapien
tgatgaggacaccgcttccgcgcct

SEQ ID NO: 1437598 - DNA, 25 bp, Homo sapien
gcaacttggcaaccatggcagcgct

SEQ ID NO: 1437599 - DNA, 25 bp, Homo sapien
gcgggcttcacgtcccagagggcgg

SEQ ID NO: 1437600 - DNA, 25 bp, Homo sapien
catttctagagcttcgatgggaagc

SEQ ID NO: 1437601 - DNA, 25 bp, Homo sapien
cagaaggcggcggaagacgggagcg

SEQ ID NO: 1437602 - DNA, 25 bp, Homo sapien
atcggcccaacggaaagcgccagaa

SEQ ID NO: 1437603 - DNA, 25 bp, Homo sapien
gacgggagcggtcaagtagaaggac

SEQ ID NO: 1437604 - DNA, 25 bp, Homo sapien
cagcagctctgagcgaccgacctcc

SEQ ID NO: 1437605 - DNA, 25 bp, Homo sapien
ccgaagcagcaggcggagaaactgc

SEQ ID NO: 1437606 - DNA, 25 bp, Homo sapien
ggaactcgctcgctcgccgatacag

SEQ ID NO: 1437607 - DNA, 25 bp, Homo sapien
gagcgccaccgagaactcgcgggaa

SEQ ID NO: 1437608 - DNA, 25 bp, Homo sapien
ctgttctgacttcccctcgaggcac

SEQ ID NO: 1437609 - DNA, 25 bp, Homo sapien
tgacttcccctcgaggcacaatagc

SEQ ID NO: 1437610 - DNA, 25 bp, Homo sapien
gttctgacttcccctcgaggcacaa

SEQ ID NO: 1437611 - DNA, 25 bp, Homo sapien
tctgacttcccctcgaggcacaata

SEQ ID NO: 1437612 - DNA, 25 bp, Homo sapien
ggagctctttgtcaatgcctcttac

SEQ ID NO: 1437613 - DNA, 25 bp, Homo sapien
taggagctctttgtcaatgcctctt

SEQ ID NO: 1437614 - DNA, 25 bp, Homo sapien
ctaggagctctttgtcaatgcctct

SEQ ID NO: 1437615 - DNA, 25 bp, Homo sapien
gctctttgtcaatgcctcttaccat

SEQ ID NO: 1437616 - DNA, 25 bp, Homo sapien
acaaaacctccacaggatcaaaggg

SEQ ID NO: 1437617 - DNA, 25 bp, Homo sapien
caaaacctccacaggatcaaagggg

SEQ ID NO: 1437618 - DNA, 25 bp, Homo sapien
aaaaagcaatgctttgcctgcctcc

SEQ ID NO: 1437619 - DNA, 25 bp, Homo sapien
tccagtctgctagcttctcctgtac

SEQ ID NO: 1437620 - DNA, 25 bp, Homo sapien
tcctccagtctgctagcttctcctg

SEQ ID NO: 1437621 - DNA, 25 bp, Homo sapien
ttctcctgtactctaagtgactgac

SEQ ID NO: 1437622 - DNA, 25 bp, Homo sapien
tattgttcgggtatattaatggtgt

SEQ ID NO: 1437623 - DNA, 25 bp, Homo sapien
ctgtcgtatatttctttcatccctt

SEQ ID NO: 1437624 - DNA, 25 bp, Homo sapien
cacttgaaaatattgttcgggtata

SEQ ID NO: 1437625 - DNA, 25 bp, Homo sapien
ttggcacttgaaaatattgttcggg

SEQ ID NO: 1437626 - DNA, 25 bp, Homo sapien
gtataataaattgagaacttgatgc

SEQ ID NO: 1437627 - DNA, 25 bp, Homo sapien
tataataaattgagaacttgatgcc

SEQ ID NO: 1437628 - DNA, 25 bp, Homo sapien
ggaaattgtgttacaatgtataata

SEQ ID NO: 1437629 - DNA, 25 bp, Homo sapien
agtaggtcattggaaattgtgttac

SEQ ID NO: 1437630 - DNA, 25 bp, Homo sapien
ggtaacatatagcacaatctataca

SEQ ID NO: 1437631 - DNA, 25 bp, Homo sapien
tgtgatcgcattcaaaactggatac

SEQ ID NO: 1437632 - DNA, 25 bp, Homo sapien
tgtataaacaaaagtgtggtaacat

SEQ ID NO: 1437633 - DNA, 25 bp, Homo sapien
tctatacaattcagaaagagatctt

SEQ ID NO: 1437634 - DNA, 25 bp, Homo sapien
ataattcagttggactcttcaggaa

SEQ ID NO: 1437635 - DNA, 25 bp, Homo sapien
ccaatataattcagttggactcttc

SEQ ID NO: 1437636 - DNA, 25 bp, Homo sapien
ggtgaatgaaagttacccaatataa

SEQ ID NO: 1437637 - DNA, 25 bp, Homo sapien
ctggtgaatgaaagttacccaatat

SEQ ID NO: 1437638 - DNA, 25 bp, Homo sapien
gagggttcatgtacagttatgttgc

SEQ ID NO: 1437639 - DNA, 25 bp, Homo sapien
tccctttaatgatcagttgagggtt

SEQ ID NO: 1437640 - DNA, 25 bp, Homo sapien
tggacagacacctgcagcgaggaga

SEQ ID NO: 1437641 - DNA, 25 bp, Homo sapien
cctgcagcgaggagagtaggtgatg

SEQ ID NO: 1437642 - DNA, 25 bp, Homo sapien
tttgaaaacaagatagcctaggata

SEQ ID NO: 1437643 - DNA, 25 bp, Homo sapien
tgcaactttctaaactcctaggtgg

SEQ ID NO: 1437644 - DNA, 25 bp, Homo sapien
cccgactctgggaatgatttaaaca

SEQ ID NO: 1437645 - DNA, 25 bp, Homo sapien
aatctcaattggtaacatccccttg

SEQ ID NO: 1437646 - DNA, 25 bp, Homo sapien
gacagcttcactccaaatgtctccc

SEQ ID NO: 1437647 - DNA, 25 bp, Homo sapien
tctccctagaggtatatactatcac

SEQ ID NO: 1437648 - DNA, 25 bp, Homo sapien
atgtctccctagaggtatatactat

SEQ ID NO: 1437649 - DNA, 25 bp, Homo sapien
cctagaggtatatactatcacatac

SEQ ID NO: 1437650 - DNA, 25 bp, Homo sapien
cactttcatacacttcataaatcag

SEQ ID NO: 1437651 - DNA, 25 bp, Homo sapien
tctcactttcatacacttcataaat

SEQ ID NO: 1437652 - DNA, 25 bp, Homo sapien
tcactttcatacacttcataaatca

SEQ ID NO: 1437653 - DNA, 25 bp, Homo sapien
ctcactttcatacacttcataaatc

SEQ ID NO: 1437654 - DNA, 25 bp, Homo sapien
ctatcgagctttaagggccttctaa

SEQ ID NO: 1437655 - DNA, 25 bp, Homo sapien
ctaattatcttgacgagtttactca

SEQ ID NO: 1437656 - DNA, 25 bp, Homo sapien
ccactaggaagagggcttgattact

SEQ ID NO: 1437657 - DNA, 25 bp, Homo sapien
gaagagggcttgattactatcgagc

SEQ ID NO: 1437658 - DNA, 25 bp, Homo sapien
gaaggtcttctccaatctcatgcca

SEQ ID NO: 1437659 - DNA, 25 bp, Homo sapien
tcatgccacgcaaggctggacaagg

SEQ ID NO: 1437660 - DNA, 25 bp, Homo sapien
gctgctgtcagataagtgggacccc

SEQ ID NO: 1437661 - DNA, 25 bp, Homo sapien
tctttgttcgaaggagtgacactgc

SEQ ID NO: 1437662 - DNA, 25 bp, Homo sapien
tataaagggtggtcatcgtctttca

SEQ ID NO: 1437663 - DNA, 25 bp, Homo sapien
tcctacagcgtgttctttagaagag

SEQ ID NO: 1437664 - DNA, 25 bp, Homo sapien
aagtttcgtttctggttgaggcaag

SEQ ID NO: 1437665 - DNA, 25 bp, Homo sapien
aggcaagaggttggatatattcaga

SEQ ID NO: 1437666 - DNA, 25 bp, Homo sapien
atagataaaccgtcccttatctcca

SEQ ID NO: 1437667 - DNA, 25 bp, Homo sapien
gaatagataaaccgtcccttatctc

SEQ ID NO: 1437668 - DNA, 25 bp, Homo sapien
tagataaaccgtcccttatctccac

SEQ ID NO: 1437669 - DNA, 25 bp, Homo sapien
agataaaccgtcccttatctccaca

SEQ ID NO: 1437670 - DNA, 25 bp, Homo sapien
tggctaccttggactcttcacctcg

SEQ ID NO: 1437671 - DNA, 25 bp, Homo sapien
gactggctaccttggactcttcacc

SEQ ID NO: 1437672 - DNA, 25 bp, Homo sapien
gctgactggctaccttggactcttc

SEQ ID NO: 1437673 - DNA, 25 bp, Homo sapien
catgctgactggctaccttggactc

SEQ ID NO: 1437674 - DNA, 25 bp, Homo sapien
tcgatcagactgtttggaaaagctc

SEQ ID NO: 1437675 - DNA, 25 bp, Homo sapien
cttattctaggagagaccaagagca

SEQ ID NO: 1437676 - DNA, 25 bp, Homo sapien
tcttagagtttcctgctagagtggc

SEQ ID NO: 1437677 - DNA, 25 bp, Homo sapien
ccaagagcacagagcaagtgagcgc

SEQ ID NO: 1437678 - DNA, 25 bp, Homo sapien
acactagagaaccctaaccaaattg

SEQ ID NO: 1437679 - DNA, 25 bp, Homo sapien
ttaaggcacatactatttctccttt

SEQ ID NO: 1437680 - DNA, 25 bp, Homo sapien
actagagaaccctaaccaaattgag

SEQ ID NO: 1437681 - DNA, 25 bp, Homo sapien
tttaaggcacatactatttctcctt

SEQ ID NO: 1437682 - DNA, 25 bp, Homo sapien
taaatatgtaagtatcagtcaccga

SEQ ID NO: 1437683 - DNA, 25 bp, Homo sapien
caaatgcttacagaacaaaggagga

SEQ ID NO: 1437684 - DNA, 25 bp, Homo sapien
cagtcaccgaatttaagcctatggg

SEQ ID NO: 1437685 - DNA, 25 bp, Homo sapien
gagaagcatcctgaaactgcacata

SEQ ID NO: 1437686 - DNA, 25 bp, Homo sapien
gtattcctggacgtctgcagctcgc

SEQ ID NO: 1437687 - DNA, 25 bp, Homo sapien
tgtccacaaagattaaggttaacag

SEQ ID NO: 1437688 - DNA, 25 bp, Homo sapien
tctgtgggtgttaatcatcaacaag

SEQ ID NO: 1437689 - DNA, 25 bp, Homo sapien
gcagctcgccctggtaggagtgcac

SEQ ID NO: 1437690 - DNA, 25 bp, Homo sapien
acattttttgtcaatgctgaagagg

SEQ ID NO: 1437691 - DNA, 25 bp, Homo sapien
ggtgggtcacattttttgtcaatgc

SEQ ID NO: 1437692 - DNA, 25 bp, Homo sapien
ttggtgggtcacattttttgtcaat

SEQ ID NO: 1437693 - DNA, 25 bp, Homo sapien
cacagaaagagggagatggaatctt

SEQ ID NO: 1437694 - DNA, 25 bp, Homo sapien
ccttcattcagtggatcagcatcta

SEQ ID NO: 1437695 - DNA, 25 bp, Homo sapien
gcactgtgccctcatgcagtttacc

SEQ ID NO: 1437696 - DNA, 25 bp, Homo sapien
tctcccttcattcagtggatcagca

SEQ ID NO: 1437697 - DNA, 25 bp, Homo sapien
gtgcactgtgccctcatgcagttta

SEQ ID NO: 1437698 - DNA, 25 bp, Homo sapien
ggtgaaccacagaggaggtggaaga

SEQ ID NO: 1437699 - DNA, 25 bp, Homo sapien
tggaagatgactctgcagcctgggt

SEQ ID NO: 1437700 - DNA, 25 bp, Homo sapien
aggtggaagatgactctgcagcctg

SEQ ID NO: 1437701 - DNA, 25 bp, Homo sapien
tgagatgaaggtggtggggtgaacc

SEQ ID NO: 1437702 - DNA, 25 bp, Homo sapien
acttttgatctgtgaaagtgctttt

SEQ ID NO: 1437703 - DNA, 25 bp, Homo sapien
aaaccaaatatctctctaagctttg

SEQ ID NO: 1437704 - DNA, 25 bp, Homo sapien
taatgccatctgctcagtaaaactt

SEQ ID NO: 1437705 - DNA, 25 bp, Homo sapien
ggatcctttgaacatactgtccatt

SEQ ID NO: 1437706 - DNA, 25 bp, Homo sapien
caggattggtctgtttcaatctctg

SEQ ID NO: 1437707 - DNA, 25 bp, Homo sapien
tgactggtcttgcttggatcctttg

SEQ ID NO: 1437708 - DNA, 25 bp, Homo sapien
aggactctgactggtcttgcttgga

SEQ ID NO: 1437709 - DNA, 25 bp, Homo sapien
ctctgaaaaggactctgactggtct

SEQ ID NO: 1437710 - DNA, 25 bp, Homo sapien
tccagcatttgtgccgatactagca

SEQ ID NO: 1437711 - DNA, 25 bp, Homo sapien
ctccctagatcatccagcatggctt

SEQ ID NO: 1437712 - DNA, 25 bp, Homo sapien
gtgccgatactagcaatggacccat

SEQ ID NO: 1437713 - DNA, 25 bp, Homo sapien
catggcttccagcatttgtgccgat

SEQ ID NO: 1437714 - DNA, 25 bp, Homo sapien
taacctaagcagagattgatcatca

SEQ ID NO: 1437715 - DNA, 25 bp, Homo sapien
cccactgaaggatatgactttctga

SEQ ID NO: 1437716 - DNA, 25 bp, Homo sapien
gagaatgagctttcctagcaccaag

SEQ ID NO: 1437717 - DNA, 25 bp, Homo sapien
tagcaccaaggaatgaagcaagtct

SEQ ID NO: 1437718 - DNA, 25 bp, Homo sapien
tcctgataacggcattttccagacg

SEQ ID NO: 1437719 - DNA, 25 bp, Homo sapien
ttttcctgataacggcattttccag

SEQ ID NO: 1437720 - DNA, 25 bp, Homo sapien
cgctttttcctgataacggcatttt

SEQ ID NO: 1437721 - DNA, 25 bp, Homo sapien
gataacggcattttccagacgtcat

SEQ ID NO: 1437722 - DNA, 25 bp, Homo sapien
gggtcttccgaatactgggctgact

SEQ ID NO: 1437723 - DNA, 25 bp, Homo sapien
gtttctcctgtagcccgtgggcctc

SEQ ID NO: 1437724 - DNA, 25 bp, Homo sapien
tgggcctcggagagtgtgtccccta

SEQ ID NO: 1437725 - DNA, 25 bp, Homo sapien
taagggctctaacaatgtgggaagc

SEQ ID NO: 1437726 - DNA, 25 bp, Homo sapien
ttggatttcttgatactccaacagg

SEQ ID NO: 1437727 - DNA, 25 bp, Homo sapien
tgcaacagtcctatggtctttcacc

SEQ ID NO: 1437728 - DNA, 25 bp, Homo sapien
gtctttcaccttcgtgcctttgctt

SEQ ID NO: 1437729 - DNA, 25 bp, Homo sapien
cctttgcttatgctaacccagggca

SEQ ID NO: 1437730 - DNA, 25 bp, Homo sapien
aagtggtgcatgtccgttctactca

SEQ ID NO: 1437731 - DNA, 25 bp, Homo sapien
ctattaaagatgttcccgccctgca

SEQ ID NO: 1437732 - DNA, 25 bp, Homo sapien
tcatacttcactagctggagctcag

SEQ ID NO: 1437733 - DNA, 25 bp, Homo sapien
tagatcctcagtcctttccagcgtg

SEQ ID NO: 1437734 - DNA, 25 bp, Homo sapien
tcctgtggacgatgtgtgtactgac

SEQ ID NO: 1437735 - DNA, 25 bp, Homo sapien
tttcctgttggttgctcaaaaagta

SEQ ID NO: 1437736 - DNA, 25 bp, Homo sapien
gagatagtcttcattagagaggatc

SEQ ID NO: 1437737 - DNA, 25 bp, Homo sapien
gaaacttaaagctcagaactttgac

SEQ ID NO: 1437738 - DNA, 25 bp, Homo sapien
tctgttgatcagggattacgggaat

SEQ ID NO: 1437739 - DNA, 25 bp, Homo sapien
ttctgttgatcagggattacgggaa

SEQ ID NO: 1437740 - DNA, 25 bp, Homo sapien
ctgttgatcagggattacgggaatg

SEQ ID NO: 1437741 - DNA, 25 bp, Homo sapien
aggtagatttataggcagctcttgt

SEQ ID NO: 1437742 - DNA, 25 bp, Homo sapien
gaggtagatttataggcagctcttg

SEQ ID NO: 1437743 - DNA, 25 bp, Homo sapien
cctgggcagagttttgcttttccct

SEQ ID NO: 1437744 - DNA, 25 bp, Homo sapien
ttcctgggcagagttttgcttttcc

SEQ ID NO: 1437745 - DNA, 25 bp, Homo sapien
gataattcctcatgtcaacgttggg

SEQ ID NO: 1437746 - DNA, 25 bp, Homo sapien
tcactctgccgtgtggctgattatg

SEQ ID NO: 1437747 - DNA, 25 bp, Homo sapien
tgtccggaacccattgataattcct

SEQ ID NO: 1437748 - DNA, 25 bp, Homo sapien
gaatgcaagcacagacaacacctaa

SEQ ID NO: 1437749 - DNA, 25 bp, Homo sapien
aagtgaccagctcaacttcatgcag

SEQ ID NO: 1437750 - DNA, 25 bp, Homo sapien
tctcaagttacatattaggaatggc

SEQ ID NO: 1437751 - DNA, 25 bp, Homo sapien
gaatatctaatactatactctcaag

SEQ ID NO: 1437752 - DNA, 25 bp, Homo sapien
catgcagttaatgaccaggagactc

SEQ ID NO: 1437753 - DNA, 25 bp, Homo sapien
aatttttgtcgtgatgcaagaaggc

SEQ ID NO: 1437754 - DNA, 25 bp, Homo sapien
tcatgttcttcaaacaccaagttcg

SEQ ID NO: 1437755 - DNA, 25 bp, Homo sapien
gatgcaagaaggctaaaggctttga

SEQ ID NO: 1437756 - DNA, 25 bp, Homo sapien
caccaagttcgaatttttgtcgtga

SEQ ID NO: 1437757 - DNA, 25 bp, Homo sapien
cttccggtgtccagaactgtgggac

SEQ ID NO: 1437758 - DNA, 25 bp, Homo sapien
cggtgtccagaactgtgggacctct

SEQ ID NO: 1437759 - DNA, 25 bp, Homo sapien
ggtgtccagaactgtgggacctctc

SEQ ID NO: 1437760 - DNA, 25 bp, Homo sapien
tccggtgtccagaactgtgggacct

SEQ ID NO: 1437761 - DNA, 25 bp, Homo sapien
tgcaaagtctatataccgtatgatt

SEQ ID NO: 1437762 - DNA, 25 bp, Homo sapien
ttgcccaaaggagtcaaaaaacatg

SEQ ID NO: 1437763 - DNA, 25 bp, Homo sapien
gcccaaaggagtcaaaaaacatgtc

SEQ ID NO: 1437764 - DNA, 25 bp, Homo sapien
aaacctgcaaagtctatataccgta

SEQ ID NO: 1437765 - DNA, 25 bp, Homo sapien
ctcagaaattgaaaataatatccat

SEQ ID NO: 1437766 - DNA, 25 bp, Homo sapien
attgaaaataatatccataaaatag

SEQ ID NO: 1437767 - DNA, 25 bp, Homo sapien
gaaaataatatccataaaatagcaa

SEQ ID NO: 1437768 - DNA, 25 bp, Homo sapien
gaaattgaaaataatatccataaaa

SEQ ID NO: 1437769 - DNA, 25 bp, Homo sapien
agctgctgagagtcatttaggatgc

SEQ ID NO: 1437770 - DNA, 25 bp, Homo sapien
gagtcatttaggatgctggccacct

SEQ ID NO: 1437771 - DNA, 25 bp, Homo sapien
acctggtacctgctcccccattgtg

SEQ ID NO: 1437772 - DNA, 25 bp, Homo sapien
ctgagagtcatttaggatgctggcc

SEQ ID NO: 1437773 - DNA, 25 bp, Homo sapien
tcactggggcatgaccagcctttca

SEQ ID NO: 1437774 - DNA, 25 bp, Homo sapien
gggatatccctgagttcttcattga

SEQ ID NO: 1437775 - DNA, 25 bp, Homo sapien
cttatagtcctgagttttgggatat

SEQ ID NO: 1437776 - DNA, 25 bp, Homo sapien
gagttttgggatatccctgagttct

SEQ ID NO: 1437777 - DNA, 25 bp, Homo sapien
aaaacaaagaactctgtactggttg

SEQ ID NO: 1437778 - DNA, 25 bp, Homo sapien
taaacaccactgctttcaggccagc

SEQ ID NO: 1437779 - DNA, 25 bp, Homo sapien
caaagaactctgtactggttgtgat

SEQ ID NO: 1437780 - DNA, 25 bp, Homo sapien
gtaaacaccactgctttcaggccag

SEQ ID NO: 1437781 - DNA, 25 bp, Homo sapien
tgtagtactgagaaacggggaaaga

SEQ ID NO: 1437782 - DNA, 25 bp, Homo sapien
gaagagaaacaaggcaccttgaccc

SEQ ID NO: 1437783 - DNA, 25 bp, Homo sapien
aacttccttgtgtgattccccccag

SEQ ID NO: 1437784 - DNA, 25 bp, Homo sapien
cagtaatgcagccaaggatgtgaag

SEQ ID NO: 1437785 - DNA, 25 bp, Homo sapien
gagaaacaaggcaccttgaccctga

SEQ ID NO: 1437786 - DNA, 25 bp, Homo sapien
tgaggttgatttgtttatctgtact

SEQ ID NO: 1437787 - DNA, 25 bp, Homo sapien
cttaattttggattgggagaaggtg

SEQ ID NO: 1437788 - DNA, 25 bp, Homo sapien
cttatcatgaggttgatttgtttat

SEQ ID NO: 1437789 - DNA, 25 bp, Homo sapien
tgggagaaggtgagtagagacccat

SEQ ID NO: 1437790 - DNA, 25 bp, Homo sapien
ataaacagcctgatcccttgggagt

SEQ ID NO: 1437791 - DNA, 25 bp, Homo sapien
aaataaacagcctgatcccttggga

SEQ ID NO: 1437792 - DNA, 25 bp, Homo sapien
cagttttggggacttgtgtatcacc

SEQ ID NO: 1437793 - DNA, 25 bp, Homo sapien
ttggggacttgtgtatcaccttcaa

SEQ ID NO: 1437794 - DNA, 25 bp, Homo sapien
cacaggaacaaatcgaaagggagga

SEQ ID NO: 1437795 - DNA, 25 bp, Homo sapien
tagtgaccttctgaactgttgtggg

SEQ ID NO: 1437796 - DNA, 25 bp, Homo sapien
agtagtgaccttctgaactgttgtg

SEQ ID NO: 1437797 - DNA, 25 bp, Homo sapien
gtagtgaccttctgaactgttgtgg

SEQ ID NO: 1437798 - DNA, 25 bp, Homo sapien
tacaggtgaaagctggatcctggga

SEQ ID NO: 1437799 - DNA, 25 bp, Homo sapien
ctcatctccagtgctcgcattagct

SEQ ID NO: 1437800 - DNA, 25 bp, Homo sapien
cagtgctcgcattagcttttttctc

SEQ ID NO: 1437801 - DNA, 25 bp, Homo sapien
tcttggggcctatcgcagttttgtc

SEQ ID NO: 1437802 - DNA, 25 bp, Homo sapien
aacatgtgtttattgggctgggata

SEQ ID NO: 1437803 - DNA, 25 bp, Homo sapien
tttctcttctgaaaggggcttattc

SEQ ID NO: 1437804 - DNA, 25 bp, Homo sapien
ggcttattcattgggggagttattg

SEQ ID NO: 1437805 - DNA, 25 bp, Homo sapien
acatgtgtttattgggctgggatag

SEQ ID NO: 1437806 - DNA, 25 bp, Homo sapien
gaatagtgtacatcagcggtcctca

SEQ ID NO: 1437807 - DNA, 25 bp, Homo sapien
ggctattagcgtaaccatcacctga

SEQ ID NO: 1437808 - DNA, 25 bp, Homo sapien
tatgacaggaggtaatgctgctcac

SEQ ID NO: 1437809 - DNA, 25 bp, Homo sapien
gaggacccctggtgtacattgtacc

SEQ ID NO: 1437810 - DNA, 25 bp, Homo sapien
tctgattagcaataaaggcagcttg

SEQ ID NO: 1437811 - DNA, 25 bp, Homo sapien
gattagcaataaaggcagcttggaa

SEQ ID NO: 1437812 - DNA, 25 bp, Homo sapien
tagcaataaaggcagcttggaacat

SEQ ID NO: 1437813 - DNA, 25 bp, Homo sapien
tgtatctgattagcaataaaggcag

SEQ ID NO: 1437814 - DNA, 25 bp, Homo sapien
tctatagtgaaggattgaggcattt

SEQ ID NO: 1437815 - DNA, 25 bp, Homo sapien
aaagtgtctaatctatagtgaagga

SEQ ID NO: 1437816 - DNA, 25 bp, Homo sapien
tctaatctatagtgaaggattgagg

SEQ ID NO: 1437817 - DNA, 25 bp, Homo sapien
tagtgaaggattgaggcattttttc

SEQ ID NO: 1437818 - DNA, 25 bp, Homo sapien
tatgatctaagtcttggctctccag

SEQ ID NO: 1437819 - DNA, 25 bp, Homo sapien
ttatgatctaagtcttggctctcca

SEQ ID NO: 1437820 - DNA, 25 bp, Homo sapien
atgatctaagtcttggctctccagg

SEQ ID NO: 1437821 - DNA, 25 bp, Homo sapien
tgatctaagtcttggctctccaggg

SEQ ID NO: 1437822 - DNA, 25 bp, Homo sapien
ctgggcggttgtgaggatggccaca

SEQ ID NO: 1437823 - DNA, 25 bp, Homo sapien
cacagccctgaaggtagttatggtc

SEQ ID NO: 1437824 - DNA, 25 bp, Homo sapien
tgaaggtagttatggtcaaagccag

SEQ ID NO: 1437825 - DNA, 25 bp, Homo sapien
ttgtgtagtacatctgggcggttgt

SEQ ID NO: 1437826 - DNA, 25 bp, Homo sapien
tctgaaggatctatagggagtgccc

SEQ ID NO: 1437827 - DNA, 25 bp, Homo sapien
tctgtttgactccagggtgaaggat

SEQ ID NO: 1437828 - DNA, 25 bp, Homo sapien
ggcacaggcttcctgattgtctgcc

SEQ ID NO: 1437829 - DNA, 25 bp, Homo sapien
ggtgaaggatcctgattcctgactc

SEQ ID NO: 1437830 - DNA, 25 bp, Homo sapien
cagtgaatgtgtagcaaagagcagc

SEQ ID NO: 1437831 - DNA, 25 bp, Homo sapien
cttgaaagaaggtccaacgagttga

SEQ ID NO: 1437832 - DNA, 25 bp, Homo sapien
gttaaatccttaccagtgacaggtg

SEQ ID NO: 1437833 - DNA, 25 bp, Homo sapien
gatcagttgccgatgagttaaatcc

SEQ ID NO: 1437834 - DNA, 25 bp, Homo sapien
gatctgactgttctcccaacacctg

SEQ ID NO: 1437835 - DNA, 25 bp, Homo sapien
ttcagccatcatcctatgttcagac

SEQ ID NO: 1437836 - DNA, 25 bp, Homo sapien
ttactctgtgcggatgatgtccaag

SEQ ID NO: 1437837 - DNA, 25 bp, Homo sapien
tgttcagactgtcctttggtcatct

SEQ ID NO: 1437838 - DNA, 25 bp, Homo sapien
ttcttctttaatactcctctttgct

SEQ ID NO: 1437839 - DNA, 25 bp, Homo sapien
gttcttctttaatactcctctttgc

SEQ ID NO: 1437840 - DNA, 25 bp, Homo sapien
ttgggaaaggtgatcacactttgtg

SEQ ID NO: 1437841 - DNA, 25 bp, Homo sapien
tattttatagaggacccatggggga

SEQ ID NO: 1437842 - DNA, 25 bp, Homo sapien
cacactttgtgaggaatattttata

SEQ ID NO: 1437843 - DNA, 25 bp, Homo sapien
gactgaaggcgaaaagtgcaaagag

SEQ ID NO: 1437844 - DNA, 25 bp, Homo sapien
ggatttctaagatttgtacagttgt

SEQ ID NO: 1437845 - DNA, 25 bp, Homo sapien
ttagttggcaaatgatgttacttca

SEQ ID NO: 1437846 - DNA, 25 bp, Homo sapien
atgttcttgctccattgaaactact

SEQ ID NO: 1437847 - DNA, 25 bp, Homo sapien
tcttgctccattgaaactacttcat

SEQ ID NO: 1437848 - DNA, 25 bp, Homo sapien
tagttggcaaatgatgttacttcat

SEQ ID NO: 1437849 - DNA, 25 bp, Homo sapien
atccgtggaataatgaggctatcaa

SEQ ID NO: 1437850 - DNA, 25 bp, Homo sapien
aacaagaatccgtggaataatgagg

SEQ ID NO: 1437851 - DNA, 25 bp, Homo sapien
cctatgctcaccaacaagaatccgt

SEQ ID NO: 1437852 - DNA, 25 bp, Homo sapien
acacatttctctagccctatgctca

SEQ ID NO: 1437853 - DNA, 25 bp, Homo sapien
agcctctctgagagactggacaaaa

SEQ ID NO: 1437854 - DNA, 25 bp, Homo sapien
ggcagcctctctgagagactggaca

SEQ ID NO: 1437855 - DNA, 25 bp, Homo sapien
ctctctgagagactggacaaaagga

SEQ ID NO: 1437856 - DNA, 25 bp, Homo sapien
tagcactgtgatccaggcagcctct

SEQ ID NO: 1437857 - DNA, 25 bp, Homo sapien
gctgggcgtggtggcacacacctgt

SEQ ID NO: 1437858 - DNA, 25 bp, Homo sapien
tctgtcaaaaatacaaaaaagatta

SEQ ID NO: 1437859 - DNA, 25 bp, Homo sapien
gtctctgtcaaaaatacaaaaaaga

SEQ ID NO: 1437860 - DNA, 25 bp, Homo sapien
agttccagctacttgggaggctgag

SEQ ID NO: 1437861 - DNA, 25 bp, Homo sapien
gagctgcgaggagcaaaccttcatc

SEQ ID NO: 1437862 - DNA, 25 bp, Homo sapien
tcccttaggatacacggcagggtgg

SEQ ID NO: 1437863 - DNA, 25 bp, Homo sapien
gaaatttatcttaagcatgccagtg

SEQ ID NO: 1437864 - DNA, 25 bp, Homo sapien
gggaaaccctccttcatgacatcta

SEQ ID NO: 1437865 - DNA, 25 bp, Homo sapien
ccacactacgatactgtgtgataag

SEQ ID NO: 1437866 - DNA, 25 bp, Homo sapien
ctgtgtgataagtaatataatacgg

SEQ ID NO: 1437867 - DNA, 25 bp, Homo sapien
cttctttcccacactacgatactgt

SEQ ID NO: 1437868 - DNA, 25 bp, Homo sapien
tttcccacactacgatactgtgtga

SEQ ID NO: 1437869 - DNA, 25 bp, Homo sapien
tcaggggcactactccgggactaaa

SEQ ID NO: 1437870 - DNA, 25 bp, Homo sapien
ttcaggggcactactccgggactaa

SEQ ID NO: 1437871 - DNA, 25 bp, Homo sapien
gttcaggggcactactccgggacta

SEQ ID NO: 1437872 - DNA, 25 bp, Homo sapien
cttgtgaaaggagcaaacatctgtg

SEQ ID NO: 1437873 - DNA, 25 bp, Homo sapien
tataactgcaggtagcaggccttcc

SEQ ID NO: 1437874 - DNA, 25 bp, Homo sapien
tgcccttggatgaggatgtagctcc

SEQ ID NO: 1437875 - DNA, 25 bp, Homo sapien
ttaactcgaatgctaacagacacag

SEQ ID NO: 1437876 - DNA, 25 bp, Homo sapien
ggatgcttcaacagaaactaatgat

SEQ ID NO: 1437877 - DNA, 25 bp, Homo sapien
gactttgaagctcattgcctctagg

SEQ ID NO: 1437878 - DNA, 25 bp, Homo sapien
cattaagtcatttgctgctaaagga

SEQ ID NO: 1437879 - DNA, 25 bp, Homo sapien
tctttgaccagtaagctcatcaagg

SEQ ID NO: 1437880 - DNA, 25 bp, Homo sapien
tgtcaacgtggaatagagaaaagtc

SEQ ID NO: 1437881 - DNA, 25 bp, Homo sapien
ctgtcaacgtggaatagagaaaagt

SEQ ID NO: 1437882 - DNA, 25 bp, Homo sapien
tgttgtcatatccataggagtgttc

SEQ ID NO: 1437883 - DNA, 25 bp, Homo sapien
cgtatgttgtcatatccataggagt

SEQ ID NO: 1437884 - DNA, 25 bp, Homo sapien
tccataggagtgttccctgtgcttc

SEQ ID NO: 1437885 - DNA, 25 bp, Homo sapien
catatccataggagtgttccctgtg

SEQ ID NO: 1437886 - DNA, 25 bp, Homo sapien
ctaatagtaataccggtttctcaca

SEQ ID NO: 1437887 - DNA, 25 bp, Homo sapien
tagtaataccggtttctcacaaagc

SEQ ID NO: 1437888 - DNA, 25 bp, Homo sapien
gccgtttccctgaggcacacttaat

SEQ ID NO: 1437889 - DNA, 25 bp, Homo sapien
cttaatataatcagattgggcccat

SEQ ID NO: 1437890 - DNA, 25 bp, Homo sapien
tcagtatagatactacttacaggtg

SEQ ID NO: 1437891 - DNA, 25 bp, Homo sapien
taaaaccactcagaacctcaatact

SEQ ID NO: 1437892 - DNA, 25 bp, Homo sapien
tgatgaaggcgatgctggccaactt

SEQ ID NO: 1437893 - DNA, 25 bp, Homo sapien
ttcataagacagtcagcgtcccaac

SEQ ID NO: 1437894 - DNA, 25 bp, Homo sapien
accaccaccaaggagcctgcaccca

SEQ ID NO: 1437895 - DNA, 25 bp, Homo sapien
caccactcccaaggagcctgcaccc

SEQ ID NO: 1437896 - DNA, 25 bp, Homo sapien
accaccaagtctgcacccaccactc

SEQ ID NO: 1437897 - DNA, 25 bp, Homo sapien
cccaccactcccaaggagcctgcac

SEQ ID NO: 1437898 - DNA, 25 bp, Homo sapien
cccaccactcccaaggagcctgcac

SEQ ID NO: 1437899 - DNA, 25 bp, Homo sapien
cacccccaagaagcctgccccaact

SEQ ID NO: 1437900 - DNA, 25 bp, Homo sapien
accaccaccaaggagcctgcaccca

SEQ ID NO: 1437901 - DNA, 25 bp, Homo sapien
cactcccaaggagccttcacccacc

SEQ ID NO: 1437902 - DNA, 25 bp, Homo sapien
aaatcaatattgagggtagtattct

SEQ ID NO: 1437903 - DNA, 25 bp, Homo sapien
aagatatctttaatggctgaaatca

SEQ ID NO: 1437904 - DNA, 25 bp, Homo sapien
ttttcaggtcactgatagaatgtca

SEQ ID NO: 1437905 - DNA, 25 bp, Homo sapien
aaaaaatcaatattgagggtagtat

SEQ ID NO: 1437906 - DNA, 25 bp, Homo sapien
tcgcttcacaaatgtgcatgtcatc

SEQ ID NO: 1437907 - DNA, 25 bp, Homo sapien
cttgcacaagggccatgctaatctc

SEQ ID NO: 1437908 - DNA, 25 bp, Homo sapien
tagtatatgtgctgccaaactgagc

SEQ ID NO: 1437909 - DNA, 25 bp, Homo sapien
tgtatcattccagttttagtatatg

SEQ ID NO: 1437910 - DNA, 25 bp, Homo sapien
ttttataatacccttgactaatagc

SEQ ID NO: 1437911 - DNA, 25 bp, Homo sapien
tgtttcctatacattgtaaaagttg

SEQ ID NO: 1437912 - DNA, 25 bp, Homo sapien
tataatacccttgactaatagccat

SEQ ID NO: 1437913 - DNA, 25 bp, Homo sapien
aatgagaacaaaactgtttcctata

SEQ ID NO: 1437914 - DNA, 25 bp, Homo sapien
agcattcagcagtatatttataaac

SEQ ID NO: 1437915 - DNA, 25 bp, Homo sapien
agaaggcctgctctaaattatccag

SEQ ID NO: 1437916 - DNA, 25 bp, Homo sapien
cagtgtatggagaaacgacacaggt

SEQ ID NO: 1437917 - DNA, 25 bp, Homo sapien
taggagacgtcgctttgaacgtgct

SEQ ID NO: 1437918 - DNA, 25 bp, Homo sapien
ttgccttagtgaataaccaaagacc

SEQ ID NO: 1437919 - DNA, 25 bp, Homo sapien
caatagttctacatcagagggctaa

SEQ ID NO: 1437920 - DNA, 25 bp, Homo sapien
cagatgtctggctctttccaagata

SEQ ID NO: 1437921 - DNA, 25 bp, Homo sapien
tatggatactgatcaaacagcccta

SEQ ID NO: 1437922 - DNA, 25 bp, Homo sapien
aacctgacggctatgattactatgc

SEQ ID NO: 1437923 - DNA, 25 bp, Homo sapien
ctaacagtttcccaaggaggtgata

SEQ ID NO: 1437924 - DNA, 25 bp, Homo sapien
tgcccaacatcagaaaacctgacgg

SEQ ID NO: 1437925 - DNA, 25 bp, Homo sapien
aatgtgagaagttacactacggtac

SEQ ID NO: 1437926 - DNA, 25 bp, Homo sapien
cattgatgtgcctagtagaacagca

SEQ ID NO: 1437927 - DNA, 25 bp, Homo sapien
acaactgtccttagactgatgagca

SEQ ID NO: 1437928 - DNA, 25 bp, Homo sapien
agcaattactactcgttctgggcag

SEQ ID NO: 1437929 - DNA, 25 bp, Homo sapien
tctgggcagaccttatccaaagtct

SEQ ID NO: 1437930 - DNA, 25 bp, Homo sapien
gacatgagtataccagtttatatat

SEQ ID NO: 1437931 - DNA, 25 bp, Homo sapien
aagaatattgacatgagtataccag

SEQ ID NO: 1437932 - DNA, 25 bp, Homo sapien
acttgacaatcattacactaaaaca

SEQ ID NO: 1437933 - DNA, 25 bp, Homo sapien
cagatttgataatcttattcacagt

SEQ ID NO: 1437934 - DNA, 25 bp, Homo sapien
ctccctcccattgcatggctcacac

SEQ ID NO: 1437935 - DNA, 25 bp, Homo sapien
gcattgtggatataaaactgttggg

SEQ ID NO: 1437936 - DNA, 25 bp, Homo sapien
taatggcaataggtagagatacaac

SEQ ID NO: 1437937 - DNA, 25 bp, Homo sapien
tgggtattctacaacttcaatggaa

SEQ ID NO: 1437938 - DNA, 25 bp, Homo sapien
gtaaatatcacctgctcaacatgta

SEQ ID NO: 1437939 - DNA, 25 bp, Homo sapien
tcatgtaatccagttatgtcagaaa

SEQ ID NO: 1437940 - DNA, 25 bp, Homo sapien
tgaagtcttactcgtctgaaaggct

SEQ ID NO: 1437941 - DNA, 25 bp, Homo sapien
cacggacaccttgtctcaatgttgt

SEQ ID NO: 1437942 - DNA, 25 bp, Homo sapien
gaaaggctttggttgactactacta

SEQ ID NO: 1437943 - DNA, 25 bp, Homo sapien
tgttaaactgacgaccacggacacc

SEQ ID NO: 1437944 - DNA, 25 bp, Homo sapien
atgaataagatgtagacttgttcat

SEQ ID NO: 1437945 - DNA, 25 bp, Homo sapien
aggggaagagattttgggatagcaa

SEQ ID NO: 1437946 - DNA, 25 bp, Homo sapien
aatcaggggaagagattttgggata

SEQ ID NO: 1437947 - DNA, 25 bp, Homo sapien
ggaagagattttgggatagcaaagt

SEQ ID NO: 1437948 - DNA, 25 bp, Homo sapien
tcaggggaagagattttgggatagc

SEQ ID NO: 1437949 - DNA, 25 bp, Homo sapien
gggagatctgactcatcagatgctt

SEQ ID NO: 1437950 - DNA, 25 bp, Homo sapien
tacagatgagctagaaggaggatcc

SEQ ID NO: 1437951 - DNA, 25 bp, Homo sapien
tcctgctggctatcaatttctaggc

SEQ ID NO: 1437952 - DNA, 25 bp, Homo sapien
cagatgcttgaaccggctcttcttc

SEQ ID NO: 1437953 - DNA, 25 bp, Homo sapien
cactcataagaaatatatggtccag

SEQ ID NO: 1437954 - DNA, 25 bp, Homo sapien
tatgtaaaattcctggctcagtggc

SEQ ID NO: 1437955 - DNA, 25 bp, Homo sapien
ggctctagcccagatgagataggct

SEQ ID NO: 1437956 - DNA, 25 bp, Homo sapien
cagtaaccaaaccacgggctctagc

SEQ ID NO: 1437957 - DNA, 25 bp, Homo sapien
catttgttgtagataaagtgccagt

SEQ ID NO: 1437958 - DNA, 25 bp, Homo sapien
gtgccagtggatgtagtcaccattg

SEQ ID NO: 1437959 - DNA, 25 bp, Homo sapien
tccatcatcacctgttgctgtttca

SEQ ID NO: 1437960 - DNA, 25 bp, Homo sapien
agtcaccattggaacagattgagag

SEQ ID NO: 1437961 - DNA, 25 bp, Homo sapien
taaaacagaacctactatctgcctt

SEQ ID NO: 1437962 - DNA, 25 bp, Homo sapien
acatttttagccagaagatacttca

SEQ ID NO: 1437963 - DNA, 25 bp, Homo sapien
ttagccagaagatacttcataggtt

SEQ ID NO: 1437964 - DNA, 25 bp, Homo sapien
cagaacctactatctgcctttgatc

SEQ ID NO: 1437965 - DNA, 25 bp, Homo sapien
ctacttgtagtggagtagtgggaac

SEQ ID NO: 1437966 - DNA, 25 bp, Homo sapien
tggagtagtgggaacacttcggcca

SEQ ID NO: 1437967 - DNA, 25 bp, Homo sapien
gtgggaacacttcggccacctgact

SEQ ID NO: 1437968 - DNA, 25 bp, Homo sapien
cggccacctgactcttcttcatgag

SEQ ID NO: 1437969 - DNA, 25 bp, Homo sapien
aggaacaggggtgtttcatacattc

SEQ ID NO: 1437970 - DNA, 25 bp, Homo sapien
ctaggaacaggggtgtttcatacat

SEQ ID NO: 1437971 - DNA, 25 bp, Homo sapien
taggaacaggggtgtttcatacatt

SEQ ID NO: 1437972 - DNA, 25 bp, Homo sapien
gaaagataagatgtaaggcagtgct

SEQ ID NO: 1437973 - DNA, 25 bp, Homo sapien
ggagccagaagagatactaatgtaa

SEQ ID NO: 1437974 - DNA, 25 bp, Homo sapien
tgtatgacattacaccaggagccag

SEQ ID NO: 1437975 - DNA, 25 bp, Homo sapien
tattcctgaatacttaaactacgtg

SEQ ID NO: 1437976 - DNA, 25 bp, Homo sapien
caggtggcccaaaccggaatctagg

SEQ ID NO: 1437977 - DNA, 25 bp, Homo sapien
agggacaccagcaacctgcggcgaa

SEQ ID NO: 1437978 - DNA, 25 bp, Homo sapien
aagcaagctggccaagatcagagtg

SEQ ID NO: 1437979 - DNA, 25 bp, Homo sapien
gatcagagtgactagaacttgtttg

SEQ ID NO: 1437980 - DNA, 25 bp, Homo sapien
tacgatgtggcaccacaagagttgg

SEQ ID NO: 1437981 - DNA, 25 bp, Homo sapien
caccacaagagttggagtacttgga

SEQ ID NO: 1437982 - DNA, 25 bp, Homo sapien
gttggagtacttggaactgttctgt

SEQ ID NO: 1437983 - DNA, 25 bp, Homo sapien
gcaaatccatcagtacgatgtggca

SEQ ID NO: 1437984 - DNA, 25 bp, Homo sapien
ctacagactgccttcgggtcatctg

SEQ ID NO: 1437985 - DNA, 25 bp, Homo sapien
tcaactgaaggccacgtcctacaga

SEQ ID NO: 1437986 - DNA, 25 bp, Homo sapien
acagactgccttcgggtcatctgaa

SEQ ID NO: 1437987 - DNA, 25 bp, Homo sapien
tgaaggccacgtcctacagactgcc

SEQ ID NO: 1437988 - DNA, 25 bp, Homo sapien
caccaaatatcaacagatacagctt

SEQ ID NO: 1437989 - DNA, 25 bp, Homo sapien
taagaaatgaggcaatgaaacaaac

SEQ ID NO: 1437990 - DNA, 25 bp, Homo sapien
ctgcgtgtcaagataaaggaattac

SEQ ID NO: 1437991 - DNA, 25 bp, Homo sapien
gtcaagataaaggaattacatttgc

SEQ ID NO: 1437992 - DNA, 25 bp, Homo sapien
ccaaaaagttcatgggattgctaat

SEQ ID NO: 1437993 - DNA, 25 bp, Homo sapien
taaccatttcaatgtatgcacaact

SEQ ID NO: 1437994 - DNA, 25 bp, Homo sapien
gagagaaatacataatggaaaggga

SEQ ID NO: 1437995 - DNA, 25 bp, Homo sapien
tgcacaacttttagtaacacttgcc

SEQ ID NO: 1437996 - DNA, 25 bp, Homo sapien
atggctgttgttctctagaaacctc

SEQ ID NO: 1437997 - DNA, 25 bp, Homo sapien
tctcggtgactgaggtgctcgaggg

SEQ ID NO: 1437998 - DNA, 25 bp, Homo sapien
gatgtggtgggcgtctcggtgactg

SEQ ID NO: 1437999 - DNA, 25 bp, Homo sapien
tgttgttctctagaaacctcctgag

SEQ ID NO: 1438000 - DNA, 25 bp, Homo sapien
tagactttttatgagagcacaacag

SEQ ID NO: 1438001 - DNA, 25 bp, Homo sapien
cagaaaagagtataatgacagcacc

SEQ ID NO: 1438002 - DNA, 25 bp, Homo sapien
tgacagcacctaacaatcataaata

SEQ ID NO: 1438003 - DNA, 25 bp, Homo sapien
gggccaatctctttttaccaattca

SEQ ID NO: 1438004 - DNA, 25 bp, Homo sapien
gttttgagaatcagcagctctgtga

SEQ ID NO: 1438005 - DNA, 25 bp, Homo sapien
tgagaatcagcagctctgtgattac

SEQ ID NO: 1438006 - DNA, 25 bp, Homo sapien
cactgttttgagaatcagcagctct

SEQ ID NO: 1438007 - DNA, 25 bp, Homo sapien
tttgagaatcagcagctctgtgatt

SEQ ID NO: 1438008 - DNA, 25 bp, Homo sapien
ttctgtttctgtacctggatcagtc

SEQ ID NO: 1438009 - DNA, 25 bp, Homo sapien
cacctccacccatactttcttctgt

SEQ ID NO: 1438010 - DNA, 25 bp, Homo sapien
tgtttctgtacctggatcagtccca

SEQ ID NO: 1438011 - DNA, 25 bp, Homo sapien
tgtacctggatcagtcccatcacca

SEQ ID NO: 1438012 - DNA, 25 bp, Homo sapien
taagcctttctatatccttggaaaa

SEQ ID NO: 1438013 - DNA, 25 bp, Homo sapien
cataagcctttctatatccttggaa

SEQ ID NO: 1438014 - DNA, 25 bp, Homo sapien
gcctttctatatccttggaaaacag

SEQ ID NO: 1438015 - DNA, 25 bp, Homo sapien
agcctttctatatccttggaaaaca

SEQ ID NO: 1438016 - DNA, 25 bp, Homo sapien
ttcattactatcttcaccctcatct

SEQ ID NO: 1438017 - DNA, 25 bp, Homo sapien
ggcactaccagttccttcattacta

SEQ ID NO: 1438018 - DNA, 25 bp, Homo sapien
ttgccatcggcactaccagttcctt

SEQ ID NO: 1438019 - DNA, 25 bp, Homo sapien
catcattgccatcggcactaccagt

SEQ ID NO: 1438020 - DNA, 25 bp, Homo sapien
tgttctccatcattttcatcatcat

SEQ ID NO: 1438021 - DNA, 25 bp, Homo sapien
catgttctccatcattttcatcatc

SEQ ID NO: 1438022 - DNA, 25 bp, Homo sapien
ctcatgttctccatcattttcatca

SEQ ID NO: 1438023 - DNA, 25 bp, Homo sapien
gttctccatcattttcatcatcatc

SEQ ID NO: 1438024 - DNA, 25 bp, Homo sapien
tcttcttcatcatcactgtcaatta

SEQ ID NO: 1438025 - DNA, 25 bp, Homo sapien
cttcttcatcatcactgtcaattac

SEQ ID NO: 1438026 - DNA, 25 bp, Homo sapien
ctcttcttcatcatcactgtcaatt

SEQ ID NO: 1438027 - DNA, 25 bp, Homo sapien
tgaagtggcccaagatctatttgta

SEQ ID NO: 1438028 - DNA, 25 bp, Homo sapien
taggtgtataatctccctgggtaac

SEQ ID NO: 1438029 - DNA, 25 bp, Homo sapien
ctttgccttgaccatcctgggatga

SEQ ID NO: 1438030 - DNA, 25 bp, Homo sapien
tagagactgagaggtttcttcactg

SEQ ID NO: 1438031 - DNA, 25 bp, Homo sapien
aatcctggttgtatacctgagtctc

SEQ ID NO: 1438032 - DNA, 25 bp, Homo sapien
gaatcttgagaatcctggttgtata

SEQ ID NO: 1438033 - DNA, 25 bp, Homo sapien
tgagtctctacctctccatcagtac

SEQ ID NO: 1438034 - DNA, 25 bp, Homo sapien
acctctccatcagtactttcttctg

SEQ ID NO: 1438035 - DNA, 25 bp, Homo sapien
tcagttcctacaggtgtgacacttt

SEQ ID NO: 1438036 - DNA, 25 bp, Homo sapien
ttggtctgatgcttctatggtgcta

SEQ ID NO: 1438037 - DNA, 25 bp, Homo sapien
tcacgtgtacgctttggcaaagaag

SEQ ID NO: 1438038 - DNA, 25 bp, Homo sapien
tttccactgtatcatcagagacttg

SEQ ID NO: 1438039 - DNA, 25 bp, Homo sapien
tactgctgtggaagtagaaggccgc

SEQ ID NO: 1438040 - DNA, 25 bp, Homo sapien
tgttgagtgggttgcacaaaagctg

SEQ ID NO: 1438041 - DNA, 25 bp, Homo sapien
gaacgaacggatccacttgtgcttc

SEQ ID NO: 1438042 - DNA, 25 bp, Homo sapien
ttggcaggctcaatctgaggatgac

SEQ ID NO: 1438043 - DNA, 25 bp, Homo sapien
cacttgtgtagtgggcatcactgta

SEQ ID NO: 1438044 - DNA, 25 bp, Homo sapien
ttacttggagtagacacaacaggag

SEQ ID NO: 1438045 - DNA, 25 bp, Homo sapien
tagccctgggtgttgacttatttcc

SEQ ID NO: 1438046 - DNA, 25 bp, Homo sapien
cagttgcaggtgtaaccattgggcg

SEQ ID NO: 1438047 - DNA, 25 bp, Homo sapien
attcctctttcaccagaagctggag

SEQ ID NO: 1438048 - DNA, 25 bp, Homo sapien
agctggagttgttttcaatgtgatc

SEQ ID NO: 1438049 - DNA, 25 bp, Homo sapien
gagttgttttcaatgtgatctgtct

SEQ ID NO: 1438050 - DNA, 25 bp, Homo sapien
caatgtgatctgtctctgctgttca

SEQ ID NO: 1438051 - DNA, 25 bp, Homo sapien
gactaattcgaccttcatattggga

SEQ ID NO: 1438052 - DNA, 25 bp, Homo sapien
ttagaaggttcttgaggctcatctc

SEQ ID NO: 1438053 - DNA, 25 bp, Homo sapien
tgtctctcttgatgctccctgagtt

SEQ ID NO: 1438054 - DNA, 25 bp, Homo sapien
tattgggactttagcgcagtaatgc

SEQ ID NO: 1438055 - DNA, 25 bp, Homo sapien
cagactgaagttgcacagtctgttc

SEQ ID NO: 1438056 - DNA, 25 bp, Homo sapien
cgaagtcgtgaaagttcagactgaa

SEQ ID NO: 1438057 - DNA, 25 bp, Homo sapien
agttatctgttgtcggagctgctcc

SEQ ID NO: 1438058 - DNA, 25 bp, Homo sapien
tcttgaagatcctgacgaagtcgtg

SEQ ID NO: 1438059 - DNA, 25 bp, Homo sapien
ggagatttcttgcttctgtctcttt

SEQ ID NO: 1438060 - DNA, 25 bp, Homo sapien
ctggagatttcttgcttctgtctct

SEQ ID NO: 1438061 - DNA, 25 bp, Homo sapien
cttctgtctctttttcagataatgt

SEQ ID NO: 1438062 - DNA, 25 bp, Homo sapien
agatttcttgcttctgtctcttttt

SEQ ID NO: 1438063 - DNA, 25 bp, Homo sapien
ttttgtttcagcttggttgagcgtt

SEQ ID NO: 1438064 - DNA, 25 bp, Homo sapien
cagcttggttgagcgtttctttgag

SEQ ID NO: 1438065 - DNA, 25 bp, Homo sapien
ttggttgagcgtttctttgagttcc

SEQ ID NO: 1438066 - DNA, 25 bp, Homo sapien
cttctgcagattctctacttgactt

SEQ ID NO: 1438067 - DNA, 25 bp, Homo sapien
agaaaataatcacagctttgcaaag

SEQ ID NO: 1438068 - DNA, 25 bp, Homo sapien
gatatcaattattttggcatctaag

SEQ ID NO: 1438069 - DNA, 25 bp, Homo sapien
cctgttgtgctttaagttcttcata

SEQ ID NO: 1438070 - DNA, 25 bp, Homo sapien
gaattaagttctggttgttagtcaa

SEQ ID NO: 1438071 - DNA, 25 bp, Homo sapien
tattgagtcttgtacctacgtccaa

SEQ ID NO: 1438072 - DNA, 25 bp, Homo sapien
tctgtcaattgttgaatacgcttag

SEQ ID NO: 1438073 - DNA, 25 bp, Homo sapien
aatttcagctttaagtctaccaatt

SEQ ID NO: 1438074 - DNA, 25 bp, Homo sapien
aaaggagcttccgatattcttctgt

SEQ ID NO: 1438075 - DNA, 25 bp, Homo sapien
tacgcttagtatgaacttccttttc

SEQ ID NO: 1438076 - DNA, 25 bp, Homo sapien
gcaacataccgcttttctcactcag

SEQ ID NO: 1438077 - DNA, 25 bp, Homo sapien
tggttacgtgctttccaacgtttga

SEQ ID NO: 1438078 - DNA, 25 bp, Homo sapien
ctggttacgtgctttccaacgtttg

SEQ ID NO: 1438079 - DNA, 25 bp, Homo sapien
tctctgcctgcaacataccgctttt

SEQ ID NO: 1438080 - DNA, 25 bp, Homo sapien
tgcttgcatttgctgtagatcctgt

SEQ ID NO: 1438081 - DNA, 25 bp, Homo sapien
ttgcttgcatttgctgtagatcctg

SEQ ID NO: 1438082 - DNA, 25 bp, Homo sapien
tatgaactcattcgtaggcgggcat

SEQ ID NO: 1438083 - DNA, 25 bp, Homo sapien
catggttgccatgctacactgttca

SEQ ID NO: 1438084 - DNA, 25 bp, Homo sapien
gaagctagaatctgaaaccaggcag

SEQ ID NO: 1438085 - DNA, 25 bp, Homo sapien
tgaaagtctacctgttcctatgagc

SEQ ID NO: 1438086 - DNA, 25 bp, Homo sapien
gcagctctctttctaaaagttcaac

SEQ ID NO: 1438087 - DNA, 25 bp, Homo sapien
gcatttagactatcttgcagttcct

SEQ ID NO: 1438088 - DNA, 25 bp, Homo sapien
ctgagccacctcaaacctagtttca

SEQ ID NO: 1438089 - DNA, 25 bp, Homo sapien
gttcaaccctttgtcgataacgcag

SEQ ID NO: 1438090 - DNA, 25 bp, Homo sapien
tgagagatacattcagtggaccttg

SEQ ID NO: 1438091 - DNA, 25 bp, Homo sapien
tcgatctgatcatgaagtaatctgt

SEQ ID NO: 1438092 - DNA, 25 bp, Homo sapien
ccttcacagaggcaacgaccttgtc

SEQ ID NO: 1438093 - DNA, 25 bp, Homo sapien
tcttcacagcgacatacacatttgg

SEQ ID NO: 1438094 - DNA, 25 bp, Homo sapien
cccaagatgctttacactccaacaa

SEQ ID NO: 1438095 - DNA, 25 bp, Homo sapien
gcttgtagagcttcaacatcagcag

SEQ ID NO: 1438096 - DNA, 25 bp, Homo sapien
caaatgctgacggactgatgccatt

SEQ ID NO: 1438097 - DNA, 25 bp, Homo sapien
aacctgctccttcgcagcttgtaga

SEQ ID NO: 1438098 - DNA, 25 bp, Homo sapien
ttgttcctgacagtcacgtctggct

SEQ ID NO: 1438099 - DNA, 25 bp, Homo sapien
cttcattctgaacactagaaagtgt

SEQ ID NO: 1438100 - DNA, 25 bp, Homo sapien
tcctgacagtcacgtctggcttgct

SEQ ID NO: 1438101 - DNA, 25 bp, Homo sapien
cacgtctggcttgctgctcattact

SEQ ID NO: 1438102 - DNA, 25 bp, Homo sapien
gttgttccatgctctctatggctct

SEQ ID NO: 1438103 - DNA, 25 bp, Homo sapien
ctgttgttccatgctctctatggct

SEQ ID NO: 1438104 - DNA, 25 bp, Homo sapien
tgttgttccatgctctctatggctc

SEQ ID NO: 1438105 - DNA, 25 bp, Homo sapien
ttgttccatgctctctatggctctt

SEQ ID NO: 1438106 - DNA, 25 bp, Homo sapien
tattcttacgcacttcttctgtcac

SEQ ID NO: 1438107 - DNA, 25 bp, Homo sapien
cttctctacttccatcaacttcttt

SEQ ID NO: 1438108 - DNA, 25 bp, Homo sapien
taaacgaacttcaatattcttacgc

SEQ ID NO: 1438109 - DNA, 25 bp, Homo sapien
tctacttccatcaacttcttttcca

SEQ ID NO: 1438110 - DNA, 25 bp, Homo sapien
cttctaaactagtaaccattgcttg

SEQ ID NO: 1438111 - DNA, 25 bp, Homo sapien
gtctgtcttagctgactcacaagat

SEQ ID NO: 1438112 - DNA, 25 bp, Homo sapien
gcttgatattgttccacattgctcg

SEQ ID NO: 1438113 - DNA, 25 bp, Homo sapien
tccttgttcagggattcttctaaac

SEQ ID NO: 1438114 - DNA, 25 bp, Homo sapien
taagatgaagatttgtctctgtatc

SEQ ID NO: 1438115 - DNA, 25 bp, Homo sapien
gatgaagatttgtctctgtatccag

SEQ ID NO: 1438116 - DNA, 25 bp, Homo sapien
ccatattactgaggtgctgtttcaa

SEQ ID NO: 1438117 - DNA, 25 bp, Homo sapien
tgagaagcaacttggacttccatat

SEQ ID NO: 1438118 - DNA, 25 bp, Homo sapien
aaaattactgggtatagagtgaggc

SEQ ID NO: 1438119 - DNA, 25 bp, Homo sapien
tggcagactgtccacacaccagatt

SEQ ID NO: 1438120 - DNA, 25 bp, Homo sapien
ttactgaacataaacaccctacaga

SEQ ID NO: 1438121 - DNA, 25 bp, Homo sapien
catgcttcatcttggatggcagact

SEQ ID NO: 1438122 - DNA, 25 bp, Homo sapien
ttctagtaagtgtatgcctttgttc

SEQ ID NO: 1438123 - DNA, 25 bp, Homo sapien
gtttttctatctggctactaagcct

SEQ ID NO: 1438124 - DNA, 25 bp, Homo sapien
ttctatctggctactaagcctttgt

SEQ ID NO: 1438125 - DNA, 25 bp, Homo sapien
tagtaagtgtatgcctttgttccac

SEQ ID NO: 1438126 - DNA, 25 bp, Homo sapien
tctttgctgagaaagacgaacttca

SEQ ID NO: 1438127 - DNA, 25 bp, Homo sapien
gttcagctaacaaagactctctttg

SEQ ID NO: 1438128 - DNA, 25 bp, Homo sapien
gattagttagcagtaagttttgccc

SEQ ID NO: 1438129 - DNA, 25 bp, Homo sapien
tgtttgcagattagttagcagtaag

SEQ ID NO: 1438130 - DNA, 25 bp, Homo sapien
gctcctctcaaatcttgagtcatcg

SEQ ID NO: 1438131 - DNA, 25 bp, Homo sapien
gatttctctcatgaagtgatgttat

SEQ ID NO: 1438132 - DNA, 25 bp, Homo sapien
attgataatctgttcttgcttttga

SEQ ID NO: 1438133 - DNA, 25 bp, Homo sapien
tctctcatgaagtgatgttatttct

SEQ ID NO: 1438134 - DNA, 25 bp, Homo sapien
ctggtatgaaaaaagtaattctaca

SEQ ID NO: 1438135 - DNA, 25 bp, Homo sapien
tggtatgaaaaaagtaattctacaa

SEQ ID NO: 1438136 - DNA, 25 bp, Homo sapien
tatgaaaaaagtaattctacaagta

SEQ ID NO: 1438137 - DNA, 25 bp, Homo sapien
ttgtgatcgcaaatctgtaacttgt

SEQ ID NO: 1438138 - DNA, 25 bp, Homo sapien
ggtattttgtgatcgcaaatctgta

SEQ ID NO: 1438139 - DNA, 25 bp, Homo sapien
tttggtattttgtgatcgcaaatct

SEQ ID NO: 1438140 - DNA, 25 bp, Homo sapien
tttctcaagctgctcattttgtatt

SEQ ID NO: 1438141 - DNA, 25 bp, Homo sapien
tgtacttggacgttttggagttgat

SEQ ID NO: 1438142 - DNA, 25 bp, Homo sapien
ttggagttgatgcaagagaaacatc

SEQ ID NO: 1438143 - DNA, 25 bp, Homo sapien
ttgattcaataacaggtactggagc

SEQ ID NO: 1438144 - DNA, 25 bp, Homo sapien
caggagtggaaacagtctgtgatgt

SEQ ID NO: 1438145 - DNA, 25 bp, Homo sapien
catttgatgctgtcgtgatttgcgg

SEQ ID NO: 1438146 - DNA, 25 bp, Homo sapien
aaatacggtacatatcacgctgacg

SEQ ID NO: 1438147 - DNA, 25 bp, Homo sapien
cacgctgacgaactatggaatcaac

SEQ ID NO: 1438148 - DNA, 25 bp, Homo sapien
cagtaagggcactctcaagtttgag

SEQ ID NO: 1438149 - DNA, 25 bp, Homo sapien
taggacaagtcctctaccgctatga

SEQ ID NO: 1438150 - DNA, 25 bp, Homo sapien
agccggtctgctccctgaaatctag

SEQ ID NO: 1438151 - DNA, 25 bp, Homo sapien
ccaggttctccatgaagccggtctg

SEQ ID NO: 1438152 - DNA, 25 bp, Homo sapien
cacacaggactcaggtacttatact

SEQ ID NO: 1438153 - DNA, 25 bp, Homo sapien
gatgctgtgatattacctcagatga

SEQ ID NO: 1438154 - DNA, 25 bp, Homo sapien
gggccactaagagacgttgattttg

SEQ ID NO: 1438155 - DNA, 25 bp, Homo sapien
gatgaactacttatatcagcagagc

SEQ ID NO: 1438156 - DNA, 25 bp, Homo sapien
tcatcacgaattacgtggttacccc

SEQ ID NO: 1438157 - DNA, 25 bp, Homo sapien
tgtcctcctgcaatcgctgaatctc

SEQ ID NO: 1438158 - DNA, 25 bp, Homo sapien
agtgtcctcctgcaatcgctgaatc

SEQ ID NO: 1438159 - DNA, 25 bp, Homo sapien
gtgtcctcctgcaatcgctgaatct

SEQ ID NO: 1438160 - DNA, 25 bp, Homo sapien
cacgttcatattcctcacgctggcg

SEQ ID NO: 1438161 - DNA, 25 bp, Homo sapien
cacgctggcgtttcaaaattggtgc

SEQ ID NO: 1438162 - DNA, 25 bp, Homo sapien
gagtttccacataagcattatagag

SEQ ID NO: 1438163 - DNA, 25 bp, Homo sapien
gataaacttgctacagctttctgtg

SEQ ID NO: 1438164 - DNA, 25 bp, Homo sapien
cactatcttagctacagctgctgca

SEQ ID NO: 1438165 - DNA, 25 bp, Homo sapien
gtttcactatcttagctacagctgc

SEQ ID NO: 1438166 - DNA, 25 bp, Homo sapien
caagctcttcttcagacaatatggc

SEQ ID NO: 1438167 - DNA, 25 bp, Homo sapien
cagtaggagacatggcggcaagctc

SEQ ID NO: 1438168 - DNA, 25 bp, Homo sapien
tgtgccaacaaatacacatctagta

SEQ ID NO: 1438169 - DNA, 25 bp, Homo sapien
ctgtgccaacaaatacacatctagt

SEQ ID NO: 1438170 - DNA, 25 bp, Homo sapien
cacatctagtataatttgtaaaatt

SEQ ID NO: 1438171 - DNA, 25 bp, Homo sapien
aatacacatctagtataatttgtaa

SEQ ID NO: 1438172 - DNA, 25 bp, Homo sapien
tggattgctccacctctagaagatg

SEQ ID NO: 1438173 - DNA, 25 bp, Homo sapien
gatctttggattgctccacctctag

SEQ ID NO: 1438174 - DNA, 25 bp, Homo sapien
cctctagaagatgatcttgtattgc

SEQ ID NO: 1438175 - DNA, 25 bp, Homo sapien
ctttacgttttgtggcagaaagaag

SEQ ID NO: 1438176 - DNA, 25 bp, Homo sapien
taattttggaattgtcttcgcctgg

SEQ ID NO: 1438177 - DNA, 25 bp, Homo sapien
gagaggcttcagctgacagtatcta

SEQ ID NO: 1438178 - DNA, 25 bp, Homo sapien
caaaatgcaacagatcagtcacttc

SEQ ID NO: 1438179 - DNA, 25 bp, Homo sapien
tgatgtctcttacccacaaagaaaa

SEQ ID NO: 1438180 - DNA, 25 bp, Homo sapien
aagtttgtgtagttcctctactgcc

SEQ ID NO: 1438181 - DNA, 25 bp, Homo sapien
tctactgcccgggttagttcattgc

SEQ ID NO: 1438182 - DNA, 25 bp, Homo sapien
aaaagtttgtgtagttcctctactg

SEQ ID NO: 1438183 - DNA, 25 bp, Homo sapien
aaagtttgtgtagttcctctactgc

SEQ ID NO: 1438184 - DNA, 25 bp, Homo sapien
catttaattcattgtggaatttctc

SEQ ID NO: 1438185 - DNA, 25 bp, Homo sapien
tgtgggcatttaattcattgtggaa

SEQ ID NO: 1438186 - DNA, 25 bp, Homo sapien
gtggaatttctcttccatactggcc

SEQ ID NO: 1438187 - DNA, 25 bp, Homo sapien
gaatttctcttccatactggcctgt

SEQ ID NO: 1438188 - DNA, 25 bp, Homo sapien
ttttaatttggtcaacagatcctcc

SEQ ID NO: 1438189 - DNA, 25 bp, Homo sapien
ctcttttaatttggtcaacagatcc

SEQ ID NO: 1438190 - DNA, 25 bp, Homo sapien
gactatgtagcaattccttttcttg

SEQ ID NO: 1438191 - DNA, 25 bp, Homo sapien
tcagccatgtattctgactatgtag

SEQ ID NO: 1438192 - DNA, 25 bp, Homo sapien
ttacatttaagctctagaatctcat

SEQ ID NO: 1438193 - DNA, 25 bp, Homo sapien
taagctctagaatctcattcccttt

SEQ ID NO: 1438194 - DNA, 25 bp, Homo sapien
agtttttcattcagacgtttaacat

SEQ ID NO: 1438195 - DNA, 25 bp, Homo sapien
ttttcattcagacgtttaacatcct

SEQ ID NO: 1438196 - DNA, 25 bp, Homo sapien
catcagaagcttgaagttcatccaa

SEQ ID NO: 1438197 - DNA, 25 bp, Homo sapien
aaacatcagaagcttgaagttcatc

SEQ ID NO: 1438198 - DNA, 25 bp, Homo sapien
tgagatagtctctcattggttctaa

SEQ ID NO: 1438199 - DNA, 25 bp, Homo sapien
tagtctctcattggttctaattaag

SEQ ID NO: 1438200 - DNA, 25 bp, Homo sapien
tcttgagatagtctctcattggttc

SEQ ID NO: 1438201 - DNA, 25 bp, Homo sapien
ctgttaagtattcaagttcttgaga

SEQ ID NO: 1438202 - DNA, 25 bp, Homo sapien
tattgcgatcctgagcaatttcaag

SEQ ID NO: 1438203 - DNA, 25 bp, Homo sapien
tggcaatattgcgatcctgagcaat

SEQ ID NO: 1438204 - DNA, 25 bp, Homo sapien
ctgaatggcaatattgcgatcctga

SEQ ID NO: 1438205 - DNA, 25 bp, Homo sapien
caatattgcgatcctgagcaatttc

SEQ ID NO: 1438206 - DNA, 25 bp, Homo sapien
tggggcctggtcagaacttggatgg

SEQ ID NO: 1438207 - DNA, 25 bp, Homo sapien
tgaaggcaccccatctcgtctgatc

SEQ ID NO: 1438208 - DNA, 25 bp, Homo sapien
aaggcaccccatctcgtctgatctc

SEQ ID NO: 1438209 - DNA, 25 bp, Homo sapien
ggggcctggtcagaacttggatggg

SEQ ID NO: 1438210 - DNA, 25 bp, Homo sapien
gagtttctctagctcaagccgcaag

SEQ ID NO: 1438211 - DNA, 25 bp, Homo sapien
tagctcaagccgcaagctttgacac

SEQ ID NO: 1438212 - DNA, 25 bp, Homo sapien
tctcgggtttcattcacaagtctct

SEQ ID NO: 1438213 - DNA, 25 bp, Homo sapien
caagctttgacactctcgggtttca

SEQ ID NO: 1438214 - DNA, 25 bp, Homo sapien
tcgatctcggattgctgatcagcaa

SEQ ID NO: 1438215 - DNA, 25 bp, Homo sapien
taaatttctcatgccgccccttcag

SEQ ID NO: 1438216 - DNA, 25 bp, Homo sapien
agcttgttcagctccgtgcgctcca

SEQ ID NO: 1438217 - DNA, 25 bp, Homo sapien
aagtttgttctggacagacttgggc

SEQ ID NO: 1438218 - DNA, 25 bp, Homo sapien
aagcggagaagaaaggcgaagacca

SEQ ID NO: 1438219 - DNA, 25 bp, Homo sapien
gggccgccgcctctatcacctcgct

SEQ ID NO: 1438220 - DNA, 25 bp, Homo sapien
tggcagcggccgacggggtagaagc

SEQ ID NO: 1438221 - DNA, 25 bp, Homo sapien
ccgcccgccggagactcccgcggcg

SEQ ID NO: 1438222 - DNA, 25 bp, Homo sapien
accctcagcggcagcgtttcagcaa

SEQ ID NO: 1438223 - DNA, 25 bp, Homo sapien
tccaccctcagcggcagcgtttcag

SEQ ID NO: 1438224 - DNA, 25 bp, Homo sapien
caccctcagcggcagcgtttcagca

SEQ ID NO: 1438225 - DNA, 25 bp, Homo sapien
ctgggaaatcgagtccaccctcagc

SEQ ID NO: 1438226 - DNA, 25 bp, Homo sapien
tacgaaccctgggaacccgagctca

SEQ ID NO: 1438227 - DNA, 25 bp, Homo sapien
aggctatccctgatcctcttgcgca

SEQ ID NO: 1438228 - DNA, 25 bp, Homo sapien
gaacccgagctcagaggctatccct

SEQ ID NO: 1438229 - DNA, 25 bp, Homo sapien
gcgcgcagccgttggaagctacgaa

SEQ ID NO: 1438230 - DNA, 25 bp, Homo sapien
ccagctccacccacttcaggccttg

SEQ ID NO: 1438231 - DNA, 25 bp, Homo sapien
cacccacttcaggccttgtagggct

SEQ ID NO: 1438232 - DNA, 25 bp, Homo sapien
ccaattttccggcttccagctccac

SEQ ID NO: 1438233 - DNA, 25 bp, Homo sapien
gctccacccacttcaggccttgtag

SEQ ID NO: 1438234 - DNA, 25 bp, Homo sapien
tggctctcctatctcggccccgtaa

SEQ ID NO: 1438235 - DNA, 25 bp, Homo sapien
ctcattcttttccgggagcccaatg

SEQ ID NO: 1438236 - DNA, 25 bp, Homo sapien
ctctcagcttccgtttttctccccg

SEQ ID NO: 1438237 - DNA, 25 bp, Homo sapien
cccaatgctgcaccgccctctcagc

SEQ ID NO: 1438238 - DNA, 25 bp, Homo sapien
gggataccgccacgctctctatggc

SEQ ID NO: 1438239 - DNA, 25 bp, Homo sapien
cactagagggcatcggtcccggtag

SEQ ID NO: 1438240 - DNA, 25 bp, Homo sapien
ctcgttggcggcttctggacactga

SEQ ID NO: 1438241 - DNA, 25 bp, Homo sapien
aagccccgggatgccatggatcgtc

SEQ ID NO: 1438242 - DNA, 25 bp, Homo sapien
caaccccaccttattgatgtatcaa

SEQ ID NO: 1438243 - DNA, 25 bp, Homo sapien
agcatcactgtactctaggctggat

SEQ ID NO: 1438244 - DNA, 25 bp, Homo sapien
cagacattgtatcagcatcgtcaca

SEQ ID NO: 1438245 - DNA, 25 bp, Homo sapien
gaactctacatgtgtcatatggaag

SEQ ID NO: 1438246 - DNA, 25 bp, Homo sapien
ctacatcatcatctccccattcttt

SEQ ID NO: 1438247 - DNA, 25 bp, Homo sapien
gctacatcatcatctccccattctt

SEQ ID NO: 1438248 - DNA, 25 bp, Homo sapien
tacatcatcatctccccattctttt

SEQ ID NO: 1438249 - DNA, 25 bp, Homo sapien
agctacatcatcatctccccattct

SEQ ID NO: 1438250 - DNA, 25 bp, Homo sapien
cagcccacattagcttttgaaggga

SEQ ID NO: 1438251 - DNA, 25 bp, Homo sapien
tattcctagtatgctggattctatg

SEQ ID NO: 1438252 - DNA, 25 bp, Homo sapien
aaaagcatagctcctctatataacc

SEQ ID NO: 1438253 - DNA, 25 bp, Homo sapien
ggattctatgattggcagatttaac

SEQ ID NO: 1438254 - DNA, 25 bp, Homo sapien
cctactttttgaggctgcaagatta

SEQ ID NO: 1438255 - DNA, 25 bp, Homo sapien
taaaattggtgtaagccaagccctc

SEQ ID NO: 1438256 - DNA, 25 bp, Homo sapien
caagcgcacagcagtatgcctgagt

SEQ ID NO: 1438257 - DNA, 25 bp, Homo sapien
gagatgatgtttgtaaggcccctaa

SEQ ID NO: 1438258 - DNA, 25 bp, Homo sapien
cttatatactggtaagatcttatag

SEQ ID NO: 1438259 - DNA, 25 bp, Homo sapien
agatgttttgttacaatcatgtgat

SEQ ID NO: 1438260 - DNA, 25 bp, Homo sapien
atgttttgttacaatcatgtgatat

SEQ ID NO: 1438261 - DNA, 25 bp, Homo sapien
tatatactggtaagatcttatagat

SEQ ID NO: 1438262 - DNA, 25 bp, Homo sapien
ttagggtgaggcacaaagagtttct

SEQ ID NO: 1438263 - DNA, 25 bp, Homo sapien
gctttacattgtaggtggcccgcat

SEQ ID NO: 1438264 - DNA, 25 bp, Homo sapien
tccttgctgcgggtatctcctttca

SEQ ID NO: 1438265 - DNA, 25 bp, Homo sapien
gcagcatttacagttgcagtccttg

SEQ ID NO: 1438266 - DNA, 25 bp, Homo sapien
taaacgataagtgctttggaagaat

SEQ ID NO: 1438267 - DNA, 25 bp, Homo sapien
gagatcagatggttgaaatgattgg

SEQ ID NO: 1438268 - DNA, 25 bp, Homo sapien
ggatttaaacgataagtgctttgga

SEQ ID NO: 1438269 - DNA, 25 bp, Homo sapien
tgatgacatctgtcaagtgtttagg

SEQ ID NO: 1438270 - DNA, 25 bp, Homo sapien
aatgcttgagaaagaatagacttca

SEQ ID NO: 1438271 - DNA, 25 bp, Homo sapien
ttttagggtcttggtaatgtaatgc

SEQ ID NO: 1438272 - DNA, 25 bp, Homo sapien
tcttggtaatgtaatgcttgagaaa

SEQ ID NO: 1438273 - DNA, 25 bp, Homo sapien
taatgcttgagaaagaatagacttc

SEQ ID NO: 1438274 - DNA, 25 bp, Homo sapien
tactaataatgttgctgaagacagc

SEQ ID NO: 1438275 - DNA, 25 bp, Homo sapien
aaatgtcataatattatccacatcc

SEQ ID NO: 1438276 - DNA, 25 bp, Homo sapien
gctctgttttgtagtcaagcattgt

SEQ ID NO: 1438277 - DNA, 25 bp, Homo sapien
tatccacatcctctttgtctactaa

SEQ ID NO: 1438278 - DNA, 25 bp, Homo sapien
catttttgtcaagttagcatagccg

SEQ ID NO: 1438279 - DNA, 25 bp, Homo sapien
catagccgtgcccatactctgtgtt

SEQ ID NO: 1438280 - DNA, 25 bp, Homo sapien
cactaaagcaatatagatactacca

SEQ ID NO: 1438281 - DNA, 25 bp, Homo sapien
taataactcgattgttgcatcagtc

SEQ ID NO: 1438282 - DNA, 25 bp, Homo sapien
ggataaacatgagatattgacatag

SEQ ID NO: 1438283 - DNA, 25 bp, Homo sapien
catgagatattgacatagtgaatct

SEQ ID NO: 1438284 - DNA, 25 bp, Homo sapien
taaacatgagatattgacatagtga

SEQ ID NO: 1438285 - DNA, 25 bp, Homo sapien
aaaggataaacatgagatattgaca

SEQ ID NO: 1438286 - DNA, 25 bp, Homo sapien
ttcttctattttggtatgctctagg

SEQ ID NO: 1438287 - DNA, 25 bp, Homo sapien
ttttggtatgctctaggacatgtac

SEQ ID NO: 1438288 - DNA, 25 bp, Homo sapien
tattttggtatgctctaggacatgt

SEQ ID NO: 1438289 - DNA, 25 bp, Homo sapien
tctattttggtatgctctaggacat

SEQ ID NO: 1438290 - DNA, 25 bp, Homo sapien
cactgtctacggtatttacgaaggc

SEQ ID NO: 1438291 - DNA, 25 bp, Homo sapien
cagcttctggtgcatatcctgcata

SEQ ID NO: 1438292 - DNA, 25 bp, Homo sapien
ctatagggtattctgctgcaaggca

SEQ ID NO: 1438293 - DNA, 25 bp, Homo sapien
atctaaggaaaagcggtccccagca

SEQ ID NO: 1438294 - DNA, 25 bp, Homo sapien
ttctgctgactcgttcctttgaatc

SEQ ID NO: 1438295 - DNA, 25 bp, Homo sapien
ctttctgctgactcgttcctttgaa

SEQ ID NO: 1438296 - DNA, 25 bp, Homo sapien
tgctgactcgttcctttgaatcttt

SEQ ID NO: 1438297 - DNA, 25 bp, Homo sapien
tctgctgactcgttcctttgaatct

SEQ ID NO: 1438298 - DNA, 25 bp, Homo sapien
gaatcactgtcttgactctctaatt

SEQ ID NO: 1438299 - DNA, 25 bp, Homo sapien
tgaatcactgtcttgactctctaat

SEQ ID NO: 1438300 - DNA, 25 bp, Homo sapien
tgctaggtggaattgaatcactgtc

SEQ ID NO: 1438301 - DNA, 25 bp, Homo sapien
ccttcttgctaggtggaattgaatc

SEQ ID NO: 1438302 - DNA, 25 bp, Homo sapien
aattaggaaggtattcctcacattg

SEQ ID NO: 1438303 - DNA, 25 bp, Homo sapien
cctgtccttcaaagtcttcctccaa

SEQ ID NO: 1438304 - DNA, 25 bp, Homo sapien
gtatgtgtggcctgtccttcaaagt

SEQ ID NO: 1438305 - DNA, 25 bp, Homo sapien
tgtccttcaaagtcttcctccaaac

SEQ ID NO: 1438306 - DNA, 25 bp, Homo sapien
ctgtatgtgtggcctgtccttcaaa

SEQ ID NO: 1438307 - DNA, 25 bp, Homo sapien
tatagaaagcagttgtgcctttcct

SEQ ID NO: 1438308 - DNA, 25 bp, Homo sapien
tccccaatgtcatattggactctat

SEQ ID NO: 1438309 - DNA, 25 bp, Homo sapien
atacagacacattaatatgaagtgt

SEQ ID NO: 1438310 - DNA, 25 bp, Homo sapien
cagtggtgagaatttcatatcagat

SEQ ID NO: 1438311 - DNA, 25 bp, Homo sapien
cattagagtcgcctcagaagtcctg

SEQ ID NO: 1438312 - DNA, 25 bp, Homo sapien
aagtccattctgctagacgcctgca

SEQ ID NO: 1438313 - DNA, 25 bp, Homo sapien
gaagtcctggtgagacaatcctagg

SEQ ID NO: 1438314 - DNA, 25 bp, Homo sapien
tttcccagagattgtcagtgcacgc

SEQ ID NO: 1438315 - DNA, 25 bp, Homo sapien
cgtctaaaagccttagagccactca

SEQ ID NO: 1438316 - DNA, 25 bp, Homo sapien
caacagtcctgtttgggccagtctc

SEQ ID NO: 1438317 - DNA, 25 bp, Homo sapien
acgtctaaaagccttagagccactc

SEQ ID NO: 1438318 - DNA, 25 bp, Homo sapien
agccactcaacagtcctgtttgggc

SEQ ID NO: 1438319 - DNA, 25 bp, Homo sapien
cgtcttgaacttcaataggtttaag

SEQ ID NO: 1438320 - DNA, 25 bp, Homo sapien
taggtttaagctcagatttaaaatc

SEQ ID NO: 1438321 - DNA, 25 bp, Homo sapien
cctgtctactgaactcgtcttgaac

SEQ ID NO: 1438322 - DNA, 25 bp, Homo sapien
gagtgggtgagaatccctgtctact

SEQ ID NO: 1438323 - DNA, 25 bp, Homo sapien
taaagatatgaatgattcaaaactc

SEQ ID NO: 1438324 - DNA, 25 bp, Homo sapien
agatatgaatgattcaaaactcagg

SEQ ID NO: 1438325 - DNA, 25 bp, Homo sapien
atgattcaaaactcagggaaaaacg

SEQ ID NO: 1438326 - DNA, 25 bp, Homo sapien
tatgaatgattcaaaactcagggaa

SEQ ID NO: 1438327 - DNA, 25 bp, Homo sapien
tacatgagtgtgcatcacccagcag

SEQ ID NO: 1438328 - DNA, 25 bp, Homo sapien
gattggccccttcaggatctgctgt

SEQ ID NO: 1438329 - DNA, 25 bp, Homo sapien
aactataccaatggcccagcaggca

SEQ ID NO: 1438330 - DNA, 25 bp, Homo sapien
tctattgtggaatggaggctgcctt

SEQ ID NO: 1438331 - DNA, 25 bp, Homo sapien
catgtttccaggattggattttctt

SEQ ID NO: 1438332 - DNA, 25 bp, Homo sapien
tcctgcttttattggatctcaaaaa

SEQ ID NO: 1438333 - DNA, 25 bp, Homo sapien
tattgatttctctgtctgtgaagat

SEQ ID NO: 1438334 - DNA, 25 bp, Homo sapien
cttttattggatctcaaaaattgtg

SEQ ID NO: 1438335 - DNA, 25 bp, Homo sapien
ctaatttcgtggctgaccagaggtc

SEQ ID NO: 1438336 - DNA, 25 bp, Homo sapien
catgttcattctgagtgaaaacatc

SEQ ID NO: 1438337 - DNA, 25 bp, Homo sapien
atgttcattctgagtgaaaacatct

SEQ ID NO: 1438338 - DNA, 25 bp, Homo sapien
tgttcattctgagtgaaaacatctt

SEQ ID NO: 1438339 - DNA, 25 bp, Homo sapien
gcatgttcattctgagtgaaaacat

SEQ ID NO: 1438340 - DNA, 25 bp, Homo sapien
taagaatgtttcttctctagttccc

SEQ ID NO: 1438341 - DNA, 25 bp, Homo sapien
gaattgaatatgacccttgctgcca

SEQ ID NO: 1438342 - DNA, 25 bp, Homo sapien
tattagagataaagcaatagcctgg

SEQ ID NO: 1438343 - DNA, 25 bp, Homo sapien
tcagaagaagaaccagacaagttcc

SEQ ID NO: 1438344 - DNA, 25 bp, Homo sapien
tactagaggcatggataagaacaac

SEQ ID NO: 1438345 - DNA, 25 bp, Homo sapien
tagcttagacagaaggtctctgccc

SEQ ID NO: 1438346 - DNA, 25 bp, Homo sapien
gaccgcaaagtccatatgagatctg

SEQ ID NO: 1438347 - DNA, 25 bp, Homo sapien
gagtcacatctccactagaggcaaa

SEQ ID NO: 1438348 - DNA, 25 bp, Homo sapien
cctctatgtgtaggacagaccgcaa

SEQ ID NO: 1438349 - DNA, 25 bp, Homo sapien
ggttaagggatcgaaagcagcttga

SEQ ID NO: 1438350 - DNA, 25 bp, Homo sapien
tgtcaccgaaaactccaaatgcgtt

SEQ ID NO: 1438351 - DNA, 25 bp, Homo sapien
cgcacaacgtgcagtaaaggaaatg

SEQ ID NO: 1438352 - DNA, 25 bp, Homo sapien
agacacggtgcctctgaacgcacaa

SEQ ID NO: 1438353 - DNA, 25 bp, Homo sapien
caaccagagagccttgattccaact

SEQ ID NO: 1438354 - DNA, 25 bp, Homo sapien
gagccttgattccaactggctttgc

SEQ ID NO: 1438355 - DNA, 25 bp, Homo sapien
gagcacattcgggacattttgaaaa

SEQ ID NO: 1438356 - DNA, 25 bp, Homo sapien
ttgcttccaagagcacattcgggac

SEQ ID NO: 1438357 - DNA, 25 bp, Homo sapien
ccttggcctatgtgatgccatcaac

SEQ ID NO: 1438358 - DNA, 25 bp, Homo sapien
taaatttcagccaacagtaggtagg

SEQ ID NO: 1438359 - DNA, 25 bp, Homo sapien
caacagtgagttgacctgagattta

SEQ ID NO: 1438360 - DNA, 25 bp, Homo sapien
taaagctcagtagaggacagagcca

SEQ ID NO: 1438361 - DNA, 25 bp, Homo sapien
ttttttttgatcacaggagtcacag

SEQ ID NO: 1438362 - DNA, 25 bp, Homo sapien
tcacagatttgggaaggactttagt

SEQ ID NO: 1438363 - DNA, 25 bp, Homo sapien
tttttgatcacaggagtcacagatt

SEQ ID NO: 1438364 - DNA, 25 bp, Homo sapien
cagatttgggaaggactttagttat

SEQ ID NO: 1438365 - DNA, 25 bp, Homo sapien
gaattgccctgtccactgttttctg

SEQ ID NO: 1438366 - DNA, 25 bp, Homo sapien
ccactttctgaaaggaattgccctg

SEQ ID NO: 1438367 - DNA, 25 bp, Homo sapien
cgtttacaactgaagtgggtagtgg

SEQ ID NO: 1438368 - DNA, 25 bp, Homo sapien
tagtggggctatgccctccttagca

SEQ ID NO: 1438369 - DNA, 25 bp, Homo sapien
ccaaattaagaagttacccttgctg

SEQ ID NO: 1438370 - DNA, 25 bp, Homo sapien
aatactgatgcagaataccatgctt

SEQ ID NO: 1438371 - DNA, 25 bp, Homo sapien
atactgatgcagaataccatgcttc

SEQ ID NO: 1438372 - DNA, 25 bp, Homo sapien
tgcgatccagaaatcaggaaaccaa

SEQ ID NO: 1438373 - DNA, 25 bp, Homo sapien
caatgtagaccttaaagtgaacggt

SEQ ID NO: 1438374 - DNA, 25 bp, Homo sapien
gatggattaaaacccaattgtgaaa

SEQ ID NO: 1438375 - DNA, 25 bp, Homo sapien
tacttgaacgttgctaagagtagat

SEQ ID NO: 1438376 - DNA, 25 bp, Homo sapien
catattgcgcaccataatatataca

SEQ ID NO: 1438377 - DNA, 25 bp, Homo sapien
gagagcctctgagatatgactagca

SEQ ID NO: 1438378 - DNA, 25 bp, Homo sapien
tctctcctgtttagctttatctaca

SEQ ID NO: 1438379 - DNA, 25 bp, Homo sapien
tacataatagacatgttctgtagtg

SEQ ID NO: 1438380 - DNA, 25 bp, Homo sapien
gagtcgttacgttgtatttaatgta

SEQ ID NO: 1438381 - DNA, 25 bp, Homo sapien
tcaaagtttatcttcagaaaagatc

SEQ ID NO: 1438382 - DNA, 25 bp, Homo sapien
aagtttatcttcagaaaagatctgt

SEQ ID NO: 1438383 - DNA, 25 bp, Homo sapien
tttatcttcagaaaagatctgtcaa

SEQ ID NO: 1438384 - DNA, 25 bp, Homo sapien
atcaaagtttatcttcagaaaagat

SEQ ID NO: 1438385 - DNA, 25 bp, Homo sapien
gggctagcacataggcctatcctaa

SEQ ID NO: 1438386 - DNA, 25 bp, Homo sapien
gacaatattctttgtgggctagcac

SEQ ID NO: 1438387 - DNA, 25 bp, Homo sapien
tatggcacattcaggctaatgagac

SEQ ID NO: 1438388 - DNA, 25 bp, Homo sapien
tgtctgaggcactgaaacattcgca

SEQ ID NO: 1438389 - DNA, 25 bp, Homo sapien
cagtcctgagctgaggtttacctga

SEQ ID NO: 1438390 - DNA, 25 bp, Homo sapien
caaaatctgagtaccaggcctgcag

SEQ ID NO: 1438391 - DNA, 25 bp, Homo sapien
ggcctgcagtgcacaaggataaaaa

SEQ ID NO: 1438392 - DNA, 25 bp, Homo sapien
gaaaaggaacagcatgcaggtagcc

SEQ ID NO: 1438393 - DNA, 25 bp, Homo sapien
gatgcattggaaacatcgacagtgt

SEQ ID NO: 1438394 - DNA, 25 bp, Homo sapien
gaaatcaaacaagcttttacaggtg

SEQ ID NO: 1438395 - DNA, 25 bp, Homo sapien
taaaagtcttcacaagtatgactcc

SEQ ID NO: 1438396 - DNA, 25 bp, Homo sapien
catttaataatgcactgatacctgt

SEQ ID NO: 1438397 - DNA, 25 bp, Homo sapien
ggatacagctccacagcatcgatgt

SEQ ID NO: 1438398 - DNA, 25 bp, Homo sapien
tgatatcatctagtccggagcggga

SEQ ID NO: 1438399 - DNA, 25 bp, Homo sapien
ggacagcccttcacgttattgcaga

SEQ ID NO: 1438400 - DNA, 25 bp, Homo sapien
tggccgaggcttttctaccagaagg

SEQ ID NO: 1438401 - DNA, 25 bp, Homo sapien
aagacagagatacaaccaatgtcaa

SEQ ID NO: 1438402 - DNA, 25 bp, Homo sapien
ttttgctcaatttgctgccaacttc

SEQ ID NO: 1438403 - DNA, 25 bp, Homo sapien
tctctgtttccatttgacccctgat

SEQ ID NO: 1438404 - DNA, 25 bp, Homo sapien
tcttttgctcaatttgctgccaact

SEQ ID NO: 1438405 - DNA, 25 bp, Homo sapien
ctctggtcaatggaagcctgtgata

SEQ ID NO: 1438406 - DNA, 25 bp, Homo sapien
aagcgtttgcggtactcattaaaag

SEQ ID NO: 1438407 - DNA, 25 bp, Homo sapien
tagggcttcagcataaagcgtttgc

SEQ ID NO: 1438408 - DNA, 25 bp, Homo sapien
gatactttctgtactgcgggtggaa

SEQ ID NO: 1438409 - DNA, 25 bp, Homo sapien
aaaattcaatgggacaccagcctag

SEQ ID NO: 1438410 - DNA, 25 bp, Homo sapien
taaaactgaaactcccagcggagac

SEQ ID NO: 1438411 - DNA, 25 bp, Homo sapien
gcttgccttaggtacaaatcaggta

SEQ ID NO: 1438412 - DNA, 25 bp, Homo sapien
tatttgctggaaagatgcttaccta

SEQ ID NO: 1438413 - DNA, 25 bp, Homo sapien
gggtaattccatgttccagcaatat

SEQ ID NO: 1438414 - DNA, 25 bp, Homo sapien
tcagtttgaagtgatagccactcaa

SEQ ID NO: 1438415 - DNA, 25 bp, Homo sapien
cctgccagcaatttgcctggtgaat

SEQ ID NO: 1438416 - DNA, 25 bp, Homo sapien
gccactcaagtgttgcacataatct

SEQ ID NO: 1438417 - DNA, 25 bp, Homo sapien
ttgcacaaaataaataataaaaaca

SEQ ID NO: 1438418 - DNA, 25 bp, Homo sapien
tatttgcacaaaataaataataaaa

SEQ ID NO: 1438419 - DNA, 25 bp, Homo sapien
tgcacaaaataaataataaaaacat

SEQ ID NO: 1438420 - DNA, 25 bp, Homo sapien
ctatttgcacaaaataaataataaa

SEQ ID NO: 1438421 - DNA, 25 bp, Homo sapien
tagctattttatcagtcatgcttac

SEQ ID NO: 1438422 - DNA, 25 bp, Homo sapien
gctattttatcagtcatgcttacat

SEQ ID NO: 1438423 - DNA, 25 bp, Homo sapien
atttaatgtatatagaatgtgtgag

SEQ ID NO: 1438424 - DNA, 25 bp, Homo sapien
tgtatatagaatgtgtgagttttca

SEQ ID NO: 1438425 - DNA, 25 bp, Homo sapien
cgcagccagattgtggcatacatca

SEQ ID NO: 1438426 - DNA, 25 bp, Homo sapien
ctatcagtattagcctgcttgtctg

SEQ ID NO: 1438427 - DNA, 25 bp, Homo sapien
tcaggatgctcctgtttaagcacat

SEQ ID NO: 1438428 - DNA, 25 bp, Homo sapien
catcgcatactctgttgtgttcccg

SEQ ID NO: 1438429 - DNA, 25 bp, Homo sapien
gatcatctctgcctgagtatctttg

SEQ ID NO: 1438430 - DNA, 25 bp, Homo sapien
tgctcagggacttgaggagggtaga

SEQ ID NO: 1438431 - DNA, 25 bp, Homo sapien
gaggagggtagatcatctctgcctg

SEQ ID NO: 1438432 - DNA, 25 bp, Homo sapien
gggtagatcatctctgcctgagtat

SEQ ID NO: 1438433 - DNA, 25 bp, Homo sapien
gaggatacatctctccatcaattat

SEQ ID NO: 1438434 - DNA, 25 bp, Homo sapien
gtgggaggatacatctctccatcaa

SEQ ID NO: 1438435 - DNA, 25 bp, Homo sapien
gggaggatacatctctccatcaatt

SEQ ID NO: 1438436 - DNA, 25 bp, Homo sapien
ctgtgggaggatacatctctccatc

SEQ ID NO: 1438437 - DNA, 25 bp, Homo sapien
catccttgaaaaggcgcagtttacg

SEQ ID NO: 1438438 - DNA, 25 bp, Homo sapien
tagccagagtttcaccgtaaatatg

SEQ ID NO: 1438439 - DNA, 25 bp, Homo sapien
cgcagtttacgctgtctagccagag

SEQ ID NO: 1438440 - DNA, 25 bp, Homo sapien
caccgtaaatatgatttaagtccac

SEQ ID NO: 1438441 - DNA, 25 bp, Homo sapien
tgggcaaagaatgcaaacatcatgt

SEQ ID NO: 1438442 - DNA, 25 bp, Homo sapien
aaaaactgatgcgtgaagtgctggg

SEQ ID NO: 1438443 - DNA, 25 bp, Homo sapien
ggccctcgcttatgatctgtcttga

SEQ ID NO: 1438444 - DNA, 25 bp, Homo sapien
tctgtcttgaaaaactgatgcgtga

SEQ ID NO: 1438445 - DNA, 25 bp, Homo sapien
gcttttgtagccatagtcagcattg

SEQ ID NO: 1438446 - DNA, 25 bp, Homo sapien
cagcattgtaagttggtggactgtc

SEQ ID NO: 1438447 - DNA, 25 bp, Homo sapien
ctttgacacccaagggagtcgggca

SEQ ID NO: 1438448 - DNA, 25 bp, Homo sapien
agtcgggcaatcatcaggcacagga

SEQ ID NO: 1438449 - DNA, 25 bp, Homo sapien
cataattgcatttcgaaggaaggga

SEQ ID NO: 1438450 - DNA, 25 bp, Homo sapien
attcacaacgttccaaaatcccttg

SEQ ID NO: 1438451 - DNA, 25 bp, Homo sapien
gggaatgttattcacaacgttccaa

SEQ ID NO: 1438452 - DNA, 25 bp, Homo sapien
tgggtaagtatgtagtgcactgtgt

SEQ ID NO: 1438453 - DNA, 25 bp, Homo sapien
gttttctccatagaatcctgtccgg

SEQ ID NO: 1438454 - DNA, 25 bp, Homo sapien
tatactggtcaaatcccacactcat

SEQ ID NO: 1438455 - DNA, 25 bp, Homo sapien
ctcggttttgacatgggtgggaaca

SEQ ID NO: 1438456 - DNA, 25 bp, Homo sapien
tcctgtccgggtacaatcgcactta

SEQ ID NO: 1438457 - DNA, 25 bp, Homo sapien
tgagcgccaggaccgcgcacagcag

SEQ ID NO: 1438458 - DNA, 25 bp, Homo sapien
tggctgagcgccaggaccgcgcaca

SEQ ID NO: 1438459 - DNA, 25 bp, Homo sapien
ctgtatggctgagcgccaggaccgc

SEQ ID NO: 1438460 - DNA, 25 bp, Homo sapien
tatggctgagcgccaggaccgcgca

SEQ ID NO: 1438461 - DNA, 25 bp, Homo sapien
tgctcctgacgctcactgcaagtcg

SEQ ID NO: 1438462 - DNA, 25 bp, Homo sapien
ctgctgaggagttcctggacgtgct

SEQ ID NO: 1438463 - DNA, 25 bp, Homo sapien
gctcactgcaagtcgtatgacaatt

SEQ ID NO: 1438464 - DNA, 25 bp, Homo sapien
tttgctgtctgagggcgtctggctg

SEQ ID NO: 1438465 - DNA, 25 bp, Homo sapien
tgaattcattttgaagtgatcatca

SEQ ID NO: 1438466 - DNA, 25 bp, Homo sapien
tccttatcagacattaattgttctg

SEQ ID NO: 1438467 - DNA, 25 bp, Homo sapien
ttacaatcctgaattcattttgaag

SEQ ID NO: 1438468 - DNA, 25 bp, Homo sapien
cttccttatcagacattaattgttc

SEQ ID NO: 1438469 - DNA, 25 bp, Homo sapien
tagagagtggagatcaccccttgtc

SEQ ID NO: 1438470 - DNA, 25 bp, Homo sapien
gatccattatctcaggcaagggtcc

SEQ ID NO: 1438471 - DNA, 25 bp, Homo sapien
gagcagggttctactactcatacat

SEQ ID NO: 1438472 - DNA, 25 bp, Homo sapien
tacagaagatctttacgttagtcct

SEQ ID NO: 1438473 - DNA, 25 bp, Homo sapien
cacacatcgtcagtgaagagtgttg

SEQ ID NO: 1438474 - DNA, 25 bp, Homo sapien
tcacacatcgtcagtgaagagtgtt

SEQ ID NO: 1438475 - DNA, 25 bp, Homo sapien
acacatcgtcagtgaagagtgttgc

SEQ ID NO: 1438476 - DNA, 25 bp, Homo sapien
agattggcacccttagctgactcag

SEQ ID NO: 1438477 - DNA, 25 bp, Homo sapien
tgcgctacacctgggtgatctatca

SEQ ID NO: 1438478 - DNA, 25 bp, Homo sapien
ctgggcatagacttttggttgatga

SEQ ID NO: 1438479 - DNA, 25 bp, Homo sapien
gctgactcagagatatgcgctacac

SEQ ID NO: 1438480 - DNA, 25 bp, Homo sapien
ttcagaataccttttccaattcgga

SEQ ID NO: 1438481 - DNA, 25 bp, Homo sapien
cagaataccttttccaattcggaca

SEQ ID NO: 1438482 - DNA, 25 bp, Homo sapien
taccttttccaattcggacactgcc

SEQ ID NO: 1438483 - DNA, 25 bp, Homo sapien
aataccttttccaattcggacactg

SEQ ID NO: 1438484 - DNA, 25 bp, Homo sapien
gaatgtgcattaagtattgtcccca

SEQ ID NO: 1438485 - DNA, 25 bp, Homo sapien
atatgtatttgactccttcgttgtc

SEQ ID NO: 1438486 - DNA, 25 bp, Homo sapien
ttgaatgtgcattaagtattgtccc

SEQ ID NO: 1438487 - DNA, 25 bp, Homo sapien
tgactccttcgttgtcacatttgaa

SEQ ID NO: 1438488 - DNA, 25 bp, Homo sapien
aatgcatatccattaacgggtaagt

SEQ ID NO: 1438489 - DNA, 25 bp, Homo sapien
tccacagtcatcagtaaatgcatat

SEQ ID NO: 1438490 - DNA, 25 bp, Homo sapien
atgcatatccattaacgggtaagtt

SEQ ID NO: 1438491 - DNA, 25 bp, Homo sapien
gcatatccattaacgggtaagttac

SEQ ID NO: 1438492 - DNA, 25 bp, Homo sapien
cagttcctggcatagacttttgtca

SEQ ID NO: 1438493 - DNA, 25 bp, Homo sapien
cctacagttcctggcatagactttt

SEQ ID NO: 1438494 - DNA, 25 bp, Homo sapien
gacttttgtcacctctagtctcctc

SEQ ID NO: 1438495 - DNA, 25 bp, Homo sapien
tactatttgtctcctacagttcctg

SEQ ID NO: 1438496 - DNA, 25 bp, Homo sapien
tgtcctgggcacttttaaaacactc

SEQ ID NO: 1438497 - DNA, 25 bp, Homo sapien
aggcccccacaacaagtcacaggta

SEQ ID NO: 1438498 - DNA, 25 bp, Homo sapien
gctctccttacagcccttgctgttt

SEQ ID NO: 1438499 - DNA, 25 bp, Homo sapien
tgtactgccagtcatctggaagtgc

SEQ ID NO: 1438500 - DNA, 25 bp, Homo sapien
tctgggagaaggcttcttgtactgc

SEQ ID NO: 1438501 - DNA, 25 bp, Homo sapien
catgggagaggtgtggactggctga

SEQ ID NO: 1438502 - DNA, 25 bp, Homo sapien
gggagaggtgtggactggctgatcc

SEQ ID NO: 1438503 - DNA, 25 bp, Homo sapien
gagaggtgtggactggctgatccat

SEQ ID NO: 1438504 - DNA, 25 bp, Homo sapien
ttgacatgggagaggtgtggactgg

SEQ ID NO: 1438505 - DNA, 25 bp, Homo sapien
cttttggcaattcttgtgcttgtga

SEQ ID NO: 1438506 - DNA, 25 bp, Homo sapien
cttgtcttttggcaattcttgtgct

SEQ ID NO: 1438507 - DNA, 25 bp, Homo sapien
aatgttgtttgaggggttcttgtct

SEQ ID NO: 1438508 - DNA, 25 bp, Homo sapien
tcaacatcctgtgagaataaaatgt

SEQ ID NO: 1438509 - DNA, 25 bp, Homo sapien
ctgtcccagccctttccccgtccat

SEQ ID NO: 1438510 - DNA, 25 bp, Homo sapien
ttatggtcttggagatgtttccaac

SEQ ID NO: 1438511 - DNA, 25 bp, Homo sapien
tggtcttggagatgtttccaacata

SEQ ID NO: 1438512 - DNA, 25 bp, Homo sapien
tatggtcttggagatgtttccaaca

SEQ ID NO: 1438513 - DNA, 25 bp, Homo sapien
atggtcttggagatgtttccaacat

SEQ ID NO: 1438514 - DNA, 25 bp, Homo sapien
atttgggctatgcaaacataattgg

SEQ ID NO: 1438515 - DNA, 25 bp, Homo sapien
aagaatttgggctatgcaaacataa

SEQ ID NO: 1438516 - DNA, 25 bp, Homo sapien
ttgggctatgcaaacataattggga

SEQ ID NO: 1438517 - DNA, 25 bp, Homo sapien
aacataattgggaaggatgatggtg

SEQ ID NO: 1438518 - DNA, 25 bp, Homo sapien
tgaagcacgctatggaagtcagggc

SEQ ID NO: 1438519 - DNA, 25 bp, Homo sapien
ctatggaagtcagggcctatcttac

SEQ ID NO: 1438520 - DNA, 25 bp, Homo sapien
cataattgatcctatagactgaagc

SEQ ID NO: 1438521 - DNA, 25 bp, Homo sapien
ctaatctttgttgatggacaaacca

SEQ ID NO: 1438522 - DNA, 25 bp, Homo sapien
tctctgcctgacactaagtagctgc

SEQ ID NO: 1438523 - DNA, 25 bp, Homo sapien
tctgtgcgggtcaagtcaggcagca

SEQ ID NO: 1438524 - DNA, 25 bp, Homo sapien
tgcactttattcctggtcctgtcca

SEQ ID NO: 1438525 - DNA, 25 bp, Homo sapien
tacctcccggagacatgtcctgaag

SEQ ID NO: 1438526 - DNA, 25 bp, Homo sapien
agctgcgattgttctgtgccctgtg

SEQ ID NO: 1438527 - DNA, 25 bp, Homo sapien
ctgcttcctttgcattcagctgcga

SEQ ID NO: 1438528 - DNA, 25 bp, Homo sapien
caactttgttgctctggaattcaaa

SEQ ID NO: 1438529 - DNA, 25 bp, Homo sapien
tctctttcaactttgttgctctgga

SEQ ID NO: 1438530 - DNA, 25 bp, Homo sapien
tccttcatcgagaatatttcctcgc

SEQ ID NO: 1438531 - DNA, 25 bp, Homo sapien
gagttgtcaataagcatttccattc

SEQ ID NO: 1438532 - DNA, 25 bp, Homo sapien
ccttcattctgacaatggcactttg

SEQ ID NO: 1438533 - DNA, 25 bp, Homo sapien
tcagttggtaaaggtcgaaaggcag

SEQ ID NO: 1438534 - DNA, 25 bp, Homo sapien
ataagcatcttcagtatgtgtcggg

SEQ ID NO: 1438535 - DNA, 25 bp, Homo sapien
gcatcttcagtatgtgtcgggctgt

SEQ ID NO: 1438536 - DNA, 25 bp, Homo sapien
ttgttttttcaggattagagaagct

SEQ ID NO: 1438537 - DNA, 25 bp, Homo sapien
ttcagtatgtgtcgggctgttggca

SEQ ID NO: 1438538 - DNA, 25 bp, Homo sapien
cacccagctactttttattttgtgt

SEQ ID NO: 1438539 - DNA, 25 bp, Homo sapien
acacccagctactttttattttgtg

SEQ ID NO: 1438540 - DNA, 25 bp, Homo sapien
aatgaaaagtccttgctcacatgtc

SEQ ID NO: 1438541 - DNA, 25 bp, Homo sapien
tactaaagatctgccttggacttac

SEQ ID NO: 1438542 - DNA, 25 bp, Homo sapien
agtagagctagcatataaactcagg

SEQ ID NO: 1438543 - DNA, 25 bp, Homo sapien
cagccatggcaaactcatctatcag

SEQ ID NO: 1438544 - DNA, 25 bp, Homo sapien
ggcctctcctccatatattgtccct

SEQ ID NO: 1438545 - DNA, 25 bp, Homo sapien
tggcctctcctccatatattgtccc

SEQ ID NO: 1438546 - DNA, 25 bp, Homo sapien
gcctctcctccatatattgtcccta

SEQ ID NO: 1438547 - DNA, 25 bp, Homo sapien
ggtccattatatccatatgtcctcc

SEQ ID NO: 1438548 - DNA, 25 bp, Homo sapien
tgtcctccgtaggtaattccaccaa

SEQ ID NO: 1438549 - DNA, 25 bp, Homo sapien
tatatccatatgtcctccgtaggta

SEQ ID NO: 1438550 - DNA, 25 bp, Homo sapien
ggcttctcttttggtccattatatc

SEQ ID NO: 1438551 - DNA, 25 bp, Homo sapien
gatgctggaagtgactatcaaagtg

SEQ ID NO: 1438552 - DNA, 25 bp, Homo sapien
ttttggagtctgtatggtgaccttt

SEQ ID NO: 1438553 - DNA, 25 bp, Homo sapien
gattcatcgtatgataatggccttg

SEQ ID NO: 1438554 - DNA, 25 bp, Homo sapien
caaagtgataatcaagcaagttgga

SEQ ID NO: 1438555 - DNA, 25 bp, Homo sapien
gagttattggcaacacaatgaatgt

SEQ ID NO: 1438556 - DNA, 25 bp, Homo sapien
tttgtgtgaattatagcagcttttg

SEQ ID NO: 1438557 - DNA, 25 bp, Homo sapien
gcagctttaaacctacacttctcat

SEQ ID NO: 1438558 - DNA, 25 bp, Homo sapien
tcaaaatgagttattggcaacacaa

SEQ ID NO: 1438559 - DNA, 25 bp, Homo sapien
agaatttcaaactctcgatgatgag

SEQ ID NO: 1438560 - DNA, 25 bp, Homo sapien
gacatctcaatagtgtgtggctcca

SEQ ID NO: 1438561 - DNA, 25 bp, Homo sapien
cagccaagctattatttcccatggg

SEQ ID NO: 1438562 - DNA, 25 bp, Homo sapien
tgagacaccggagggatatgtattg

SEQ ID NO: 1438563 - DNA, 25 bp, Homo sapien
tgtgtttagggaggaatatctcttt

SEQ ID NO: 1438564 - DNA, 25 bp, Homo sapien
gacatttttatgtccccggagcatc

SEQ ID NO: 1438565 - DNA, 25 bp, Homo sapien
tattaccatatgttccaggagtcta

SEQ ID NO: 1438566 - DNA, 25 bp, Homo sapien
tgtctggtatgtgacagcgtttccc

SEQ ID NO: 1438567 - DNA, 25 bp, Homo sapien
tgctacagcttttaaggtggcgcct

SEQ ID NO: 1438568 - DNA, 25 bp, Homo sapien
ctacagcttttaaggtggcgccttt

SEQ ID NO: 1438569 - DNA, 25 bp, Homo sapien
acagcttttaaggtggcgcctttgg

SEQ ID NO: 1438570 - DNA, 25 bp, Homo sapien
agcttttaaggtggcgcctttggag

SEQ ID NO: 1438571 - DNA, 25 bp, Homo sapien
agcacttatggggaaaggtgaaagg

SEQ ID NO: 1438572 - DNA, 25 bp, Homo sapien
ccttgttttcccgtaagcacttatg

SEQ ID NO: 1438573 - DNA, 25 bp, Homo sapien
ccgtaagcacttatggggaaaggtg

SEQ ID NO: 1438574 - DNA, 25 bp, Homo sapien
cttgttttcccgtaagcacttatgg

SEQ ID NO: 1438575 - DNA, 25 bp, Homo sapien
ggctataatgcctttgtccaacatc

SEQ ID NO: 1438576 - DNA, 25 bp, Homo sapien
tctggctataatgcctttgtccaac

SEQ ID NO: 1438577 - DNA, 25 bp, Homo sapien
ttctctggctataatgcctttgtcc

SEQ ID NO: 1438578 - DNA, 25 bp, Homo sapien
ctttgtccaacatcattgtctttca

SEQ ID NO: 1438579 - DNA, 25 bp, Homo sapien
tttataagccatccctcgtgagtca

SEQ ID NO: 1438580 - DNA, 25 bp, Homo sapien
tgttcccagtgtaatccagatgcct

SEQ ID NO: 1438581 - DNA, 25 bp, Homo sapien
tagcatttaccagcgacatcggttc

SEQ ID NO: 1438582 - DNA, 25 bp, Homo sapien
tgagcaccatccttgcgcatagcat

SEQ ID NO: 1438583 - DNA, 25 bp, Homo sapien
aagtcatgagcagggtccgttaagt

SEQ ID NO: 1438584 - DNA, 25 bp, Homo sapien
cgttaagtacagttgaaaacatgca

SEQ ID NO: 1438585 - DNA, 25 bp, Homo sapien
taggctttccgatgagcccagagat

SEQ ID NO: 1438586 - DNA, 25 bp, Homo sapien
gcccagagatgaagtctaaaccttg

SEQ ID NO: 1438587 - DNA, 25 bp, Homo sapien
ggacaacagttgtacagcaaccaat

SEQ ID NO: 1438588 - DNA, 25 bp, Homo sapien
ccaatgatctagtaaacctgatgag

SEQ ID NO: 1438589 - DNA, 25 bp, Homo sapien
ctctcttaggagtatggctaaaaac

SEQ ID NO: 1438590 - DNA, 25 bp, Homo sapien
aaaacatgcaggaatttgatggtca

SEQ ID NO: 1438591 - DNA, 25 bp, Homo sapien
ctgcaatcgaaagatcatgaaagct

SEQ ID NO: 1438592 - DNA, 25 bp, Homo sapien
gatcatgaaagctagttgagcctta

SEQ ID NO: 1438593 - DNA, 25 bp, Homo sapien
catgaaagctagttgagccttaaaa

SEQ ID NO: 1438594 - DNA, 25 bp, Homo sapien
cgaaagatcatgaaagctagttgag

SEQ ID NO: 1438595 - DNA, 25 bp, Homo sapien
gcttcatccgataagttgcctttac

SEQ ID NO: 1438596 - DNA, 25 bp, Homo sapien
tgcaacaaaagtagcttcatccgat

SEQ ID NO: 1438597 - DNA, 25 bp, Homo sapien
aagtagcttcatccgataagttgcc

SEQ ID NO: 1438598 - DNA, 25 bp, Homo sapien
tcttgcaacaaaagtagcttcatcc

SEQ ID NO: 1438599 - DNA, 25 bp, Homo sapien
ccagttgtcccctttgagtaattct

SEQ ID NO: 1438600 - DNA, 25 bp, Homo sapien
ctttagtgccttctaactgctcctc

SEQ ID NO: 1438601 - DNA, 25 bp, Homo sapien
cctttagtgccttctaactgctcct

SEQ ID NO: 1438602 - DNA, 25 bp, Homo sapien
ggggcagcagatgtatcctccttgt

SEQ ID NO: 1438603 - DNA, 25 bp, Homo sapien
caggggcagcagatgtatcctcctt

SEQ ID NO: 1438604 - DNA, 25 bp, Homo sapien
aggggcagcagatgtatcctccttg

SEQ ID NO: 1438605 - DNA, 25 bp, Homo sapien
tcaggggcagcagatgtatcctcct

SEQ ID NO: 1438606 - DNA, 25 bp, Homo sapien
gaattctgagaacatagtgagttga

SEQ ID NO: 1438607 - DNA, 25 bp, Homo sapien
acctatgtaatatcgaatatgtagc

SEQ ID NO: 1438608 - DNA, 25 bp, Homo sapien
gagcacagtttgagtcttccagaat

SEQ ID NO: 1438609 - DNA, 25 bp, Homo sapien
gagttggacactggaagcgcacagc

SEQ ID NO: 1438610 - DNA, 25 bp, Homo sapien
ggcctaaaatcatactagcagtttc

SEQ ID NO: 1438611 - DNA, 25 bp, Homo sapien
tttcttgcatgtcgaaattctggcc

SEQ ID NO: 1438612 - DNA, 25 bp, Homo sapien
cttccaatgcccgtatctgaagtac

SEQ ID NO: 1438613 - DNA, 25 bp, Homo sapien
tgcttcttccaatgcccgtatctga

SEQ ID NO: 1438614 - DNA, 25 bp, Homo sapien
caggttttgatagacaaactgcaca

SEQ ID NO: 1438615 - DNA, 25 bp, Homo sapien
taggggctttcgtacaaacttgctg

SEQ ID NO: 1438616 - DNA, 25 bp, Homo sapien
aatacatcgtatttgaaatggctat

SEQ ID NO: 1438617 - DNA, 25 bp, Homo sapien
tcactttggtacagttaaattcaaa

SEQ ID NO: 1438618 - DNA, 25 bp, Homo sapien
catttgtccggctgataaagccaaa

SEQ ID NO: 1438619 - DNA, 25 bp, Homo sapien
ccggctgataaagccaaaatcaatg

SEQ ID NO: 1438620 - DNA, 25 bp, Homo sapien
ccatttgtccggctgataaagccaa

SEQ ID NO: 1438621 - DNA, 25 bp, Homo sapien
tgtccggctgataaagccaaaatca

SEQ ID NO: 1438622 - DNA, 25 bp, Homo sapien
ctgcttgaaaccataatcatatttc

SEQ ID NO: 1438623 - DNA, 25 bp, Homo sapien
tgcttgaaaccataatcatatttct

SEQ ID NO: 1438624 - DNA, 25 bp, Homo sapien
tttgattagatctaataactgtgtc

SEQ ID NO: 1438625 - DNA, 25 bp, Homo sapien
tttgtaagggtggattgagtggatt

SEQ ID NO: 1438626 - DNA, 25 bp, Homo sapien
tgtaagggtggattgagtggattgg

SEQ ID NO: 1438627 - DNA, 25 bp, Homo sapien
aagtttgtaagggtggattgagtgg

SEQ ID NO: 1438628 - DNA, 25 bp, Homo sapien
taagggtggattgagtggattggtc

SEQ ID NO: 1438629 - DNA, 25 bp, Homo sapien
ttggtgccaagaagccatcatgcag

SEQ ID NO: 1438630 - DNA, 25 bp, Homo sapien
gaaatagatcatggattggtgccaa

SEQ ID NO: 1438631 - DNA, 25 bp, Homo sapien
tgctaataagcagaactcaagtggc

SEQ ID NO: 1438632 - DNA, 25 bp, Homo sapien
catcatgcagaccacatatggtgtt

SEQ ID NO: 1438633 - DNA, 25 bp, Homo sapien
ttttatcttcatgagtttaagactt

SEQ ID NO: 1438634 - DNA, 25 bp, Homo sapien
tagccccaaatttgagaaacagggc

SEQ ID NO: 1438635 - DNA, 25 bp, Homo sapien
gaatgatagtaagtatccattgatt

SEQ ID NO: 1438636 - DNA, 25 bp, Homo sapien
tatttcaattcccatactagcccca

SEQ ID NO: 1438637 - DNA, 25 bp, Homo sapien
gagtttatatgaagtgcctctcagc

SEQ ID NO: 1438638 - DNA, 25 bp, Homo sapien
gatgtcagcctgcacatgcaaaggg

SEQ ID NO: 1438639 - DNA, 25 bp, Homo sapien
aagccgtgctgtgaaggtagatgtc

SEQ ID NO: 1438640 - DNA, 25 bp, Homo sapien
gtcgctgcataagacgaatcctgaa

SEQ ID NO: 1438641 - DNA, 25 bp, Homo sapien
atatagatgctcagtcatactgatc

SEQ ID NO: 1438642 - DNA, 25 bp, Homo sapien
aatatagatgctcagtcatactgat

SEQ ID NO: 1438643 - DNA, 25 bp, Homo sapien
tatagatgctcagtcatactgatct

SEQ ID NO: 1438644 - DNA, 25 bp, Homo sapien
ctttgagccaaagtcgatgttatca

SEQ ID NO: 1438645 - DNA, 25 bp, Homo sapien
gagccaaagtcgatgttatcaatgt

SEQ ID NO: 1438646 - DNA, 25 bp, Homo sapien
ttgagccaaagtcgatgttatcaat

SEQ ID NO: 1438647 - DNA, 25 bp, Homo sapien
ccaaagtcgatgttatcaatgttca

SEQ ID NO: 1438648 - DNA, 25 bp, Homo sapien
tactgcccatcaatgagggtaggcc

SEQ ID NO: 1438649 - DNA, 25 bp, Homo sapien
tttaacatacagattttatactgcc

SEQ ID NO: 1438650 - DNA, 25 bp, Homo sapien
agattttatactgcccatcaatgag

SEQ ID NO: 1438651 - DNA, 25 bp, Homo sapien
gtctcagctgaaggtgtttcttctt

SEQ ID NO: 1438652 - DNA, 25 bp, Homo sapien
gacctctagatcactgtactctctg

SEQ ID NO: 1438653 - DNA, 25 bp, Homo sapien
ctcttgacctctagatcactgtact

SEQ ID NO: 1438654 - DNA, 25 bp, Homo sapien
tctttccgtgttaaatgctcttctc

SEQ ID NO: 1438655 - DNA, 25 bp, Homo sapien
cttatttgacctgaatatcttatct

SEQ ID NO: 1438656 - DNA, 25 bp, Homo sapien
ggttgttggatctatgatgatgcta

SEQ ID NO: 1438657 - DNA, 25 bp, Homo sapien
gttgttggatctatgatgatgctag

SEQ ID NO: 1438658 - DNA, 25 bp, Homo sapien
ttgttggatctatgatgatgctagt

SEQ ID NO: 1438659 - DNA, 25 bp, Homo sapien
tggttgttggatctatgatgatgct

SEQ ID NO: 1438660 - DNA, 25 bp, Homo sapien
ccatttccacgagttgtgttgttag

SEQ ID NO: 1438661 - DNA, 25 bp, Homo sapien
gctgaattacccactcacatcctta

SEQ ID NO: 1438662 - DNA, 25 bp, Homo sapien
catggtggcttagaggaggtcttca

SEQ ID NO: 1438663 - DNA, 25 bp, Homo sapien
cacatgcttatatgtaccttatggg

SEQ ID NO: 1438664 - DNA, 25 bp, Homo sapien
gctcctttgcatgagctgttctgat

SEQ ID NO: 1438665 - DNA, 25 bp, Homo sapien
tctgtcttcggactgctcctttgca

SEQ ID NO: 1438666 - DNA, 25 bp, Homo sapien
cctttgcatgagctgttctgataga

SEQ ID NO: 1438667 - DNA, 25 bp, Homo sapien
tccatgtctgtcttcggactgctcc

SEQ ID NO: 1438668 - DNA, 25 bp, Homo sapien
tgccacaggggactgttaacggtac

SEQ ID NO: 1438669 - DNA, 25 bp, Homo sapien
gatgccacaggggactgttaacggt

SEQ ID NO: 1438670 - DNA, 25 bp, Homo sapien
cacaggggactgttaacggtactgt

SEQ ID NO: 1438671 - DNA, 25 bp, Homo sapien
ccacaggggactgttaacggtactg

SEQ ID NO: 1438672 - DNA, 25 bp, Homo sapien
tgtagagaacagtcttcacaccaca

SEQ ID NO: 1438673 - DNA, 25 bp, Homo sapien
cagggacctggcaatacagtgccct

SEQ ID NO: 1438674 - DNA, 25 bp, Homo sapien
gaatctgatgaaaatcgtgccttct

SEQ ID NO: 1438675 - DNA, 25 bp, Homo sapien
tacaggcttactgcgtatggccacg

SEQ ID NO: 1438676 - DNA, 25 bp, Homo sapien
gcaggcattgggcaaatacacactt

SEQ ID NO: 1438677 - DNA, 25 bp, Homo sapien
caaaaactagaggttggcctgtggt

SEQ ID NO: 1438678 - DNA, 25 bp, Homo sapien
tagaaaacagaatgctcaggaggag

SEQ ID NO: 1438679 - DNA, 25 bp, Homo sapien
ctttgtgaatatggccttgagcagc

SEQ ID NO: 1438680 - DNA, 25 bp, Homo sapien
tgatgtgctctagcacattaatcat

SEQ ID NO: 1438681 - DNA, 25 bp, Homo sapien
caaggttactgatgatgtgctctag

SEQ ID NO: 1438682 - DNA, 25 bp, Homo sapien
cactgtatttcactgcataaggatt

SEQ ID NO: 1438683 - DNA, 25 bp, Homo sapien
taagcactgtatttcactgcataag

SEQ ID NO: 1438684 - DNA, 25 bp, Homo sapien
cagtttccagtgttactcacgtaga

SEQ ID NO: 1438685 - DNA, 25 bp, Homo sapien
aagggaactgccactctgctaggaa

SEQ ID NO: 1438686 - DNA, 25 bp, Homo sapien
aaaggacggcatccacagtttccag

SEQ ID NO: 1438687 - DNA, 25 bp, Homo sapien
tgatgaaaacgcttaacaaaggtgg

SEQ ID NO: 1438688 - DNA, 25 bp, Homo sapien
ccagagctgacccttgatggaggag

SEQ ID NO: 1438689 - DNA, 25 bp, Homo sapien
cctctttctccctgtcactgggacc

SEQ ID NO: 1438690 - DNA, 25 bp, Homo sapien
agctgacccttgatggaggagagcc

SEQ ID NO: 1438691 - DNA, 25 bp, Homo sapien
tgggaccccagagctgacccttgat

SEQ ID NO: 1438692 - DNA, 25 bp, Homo sapien
agcctggccagcagcgcctccacca

SEQ ID NO: 1438693 - DNA, 25 bp, Homo sapien
gccagcagcgcctccaccatctccc

SEQ ID NO: 1438694 - DNA, 25 bp, Homo sapien
cctccaccatctccccactccgcag

SEQ ID NO: 1438695 - DNA, 25 bp, Homo sapien
agcctgagcctggccagcagcgcct

SEQ ID NO: 1438696 - DNA, 25 bp, Homo sapien
gctgaacaagcaggcacagattttt

SEQ ID NO: 1438697 - DNA, 25 bp, Homo sapien
taaggtattggatatctagtacagc

SEQ ID NO: 1438698 - DNA, 25 bp, Homo sapien
ctagtgagtacacgaaagctgaaca

SEQ ID NO: 1438699 - DNA, 25 bp, Homo sapien
ggtattggatatctagtacagccac

SEQ ID NO: 1438700 - DNA, 25 bp, Homo sapien
ccaatgcgatggaaagcagccttca

SEQ ID NO: 1438701 - DNA, 25 bp, Homo sapien
ccttcaaagtggaaagagtagcagc

SEQ ID NO: 1438702 - DNA, 25 bp, Homo sapien
gcagcagaccttccattgatggagc

SEQ ID NO: 1438703 - DNA, 25 bp, Homo sapien
tcaggttgtggcagatgttacagca

SEQ ID NO: 1438704 - DNA, 25 bp, Homo sapien
ccagctgctactattggggttatga

SEQ ID NO: 1438705 - DNA, 25 bp, Homo sapien
tgtgccagctgctactattggggtt

SEQ ID NO: 1438706 - DNA, 25 bp, Homo sapien
gctactattggggttatgatgcatt

SEQ ID NO: 1438707 - DNA, 25 bp, Homo sapien
gctgctactattggggttatgatgc

SEQ ID NO: 1438708 - DNA, 25 bp, Homo sapien
ggaatttctactaaactatcaacat

SEQ ID NO: 1438709 - DNA, 25 bp, Homo sapien
ctaaactatcaacataaaatgtcag

SEQ ID NO: 1438710 - DNA, 25 bp, Homo sapien
ctgctgtaaaacagccttgggctct

SEQ ID NO: 1438711 - DNA, 25 bp, Homo sapien
tactaaactatcaacataaaatgtc

SEQ ID NO: 1438712 - DNA, 25 bp, Homo sapien
ttgctgctaccgtaactgccaatgc

SEQ ID NO: 1438713 - DNA, 25 bp, Homo sapien
gatcctggaccagaatcacatatgt

SEQ ID NO: 1438714 - DNA, 25 bp, Homo sapien
aggcattgaaggcaactattaccat

SEQ ID NO: 1438715 - DNA, 25 bp, Homo sapien
tcacatatgttgctgctaccgtaac

SEQ ID NO: 1438716 - DNA, 25 bp, Homo sapien
taccgaaccaggtagtgcaactggg

SEQ ID NO: 1438717 - DNA, 25 bp, Homo sapien
cacagagcctatattggtggcacag

SEQ ID NO: 1438718 - DNA, 25 bp, Homo sapien
gactgttgcaaccagtactagggac

SEQ ID NO: 1438719 - DNA, 25 bp, Homo sapien
tgggaaagccatccccagtaccgaa

SEQ ID NO: 1438720 - DNA, 25 bp, Homo sapien
aggagaagcgggaagtttctgtgat

SEQ ID NO: 1438721 - DNA, 25 bp, Homo sapien
atgtcataattagtacaaggaggag

SEQ ID NO: 1438722 - DNA, 25 bp, Homo sapien
aaatgtcataattagtacaaggagg

SEQ ID NO: 1438723 - DNA, 25 bp, Homo sapien
gaagcgggaagtttctgtgatacat

SEQ ID NO: 1438724 - DNA, 25 bp, Homo sapien
ggttccaccagtaatccaatattgt

SEQ ID NO: 1438725 - DNA, 25 bp, Homo sapien
ggaggcaagaagagccttcaaatcc

SEQ ID NO: 1438726 - DNA, 25 bp, Homo sapien
tctggaagagtgtgtttatagcatg

SEQ ID NO: 1438727 - DNA, 25 bp, Homo sapien
gggatgcaaagtcattcaaggaggc

SEQ ID NO: 1438728 - DNA, 25 bp, Homo sapien
aacagcaacagtgttaccaccttcc

SEQ ID NO: 1438729 - DNA, 25 bp, Homo sapien
atcattgatcgttagcaacagcagc

SEQ ID NO: 1438730 - DNA, 25 bp, Homo sapien
atcaccatcattgatcgttagcaac

SEQ ID NO: 1438731 - DNA, 25 bp, Homo sapien
caccatcattgatcgttagcaacag

SEQ ID NO: 1438732 - DNA, 25 bp, Homo sapien
agcctcttcaatgtgaaatgagctg

SEQ ID NO: 1438733 - DNA, 25 bp, Homo sapien
ttatttcagttagggtagtcaggga

SEQ ID NO: 1438734 - DNA, 25 bp, Homo sapien
tatgttaggcatatgctgggtgtat

SEQ ID NO: 1438735 - DNA, 25 bp, Homo sapien
tgcaaagtaaatagccagagagtga

SEQ ID NO: 1438736 - DNA, 25 bp, Homo sapien
tgaagttggtcactttctcatatcc

SEQ ID NO: 1438737 - DNA, 25 bp, Homo sapien
ctttgagattgaagttggtcacttt

SEQ ID NO: 1438738 - DNA, 25 bp, Homo sapien
tttgagattgaagttggtcactttc

SEQ ID NO: 1438739 - DNA, 25 bp, Homo sapien
agttggtcactttctcatatcccat

SEQ ID NO: 1438740 - DNA, 25 bp, Homo sapien
cctagtttcttgatttgtgaatgcc

SEQ ID NO: 1438741 - DNA, 25 bp, Homo sapien
tagtttcttgatttgtgaatgcctt

SEQ ID NO: 1438742 - DNA, 25 bp, Homo sapien
ctttcctagtttcttgatttgtgaa

SEQ ID NO: 1438743 - DNA, 25 bp, Homo sapien
ttcctagtttcttgatttgtgaatg

SEQ ID NO: 1438744 - DNA, 25 bp, Homo sapien
tcagatattatcacactggcttctg

SEQ ID NO: 1438745 - DNA, 25 bp, Homo sapien
cagatattatcacactggcttctgt

SEQ ID NO: 1438746 - DNA, 25 bp, Homo sapien
atattatcacactggcttctgttac

SEQ ID NO: 1438747 - DNA, 25 bp, Homo sapien
gatattatcacactggcttctgtta

SEQ ID NO: 1438748 - DNA, 25 bp, Homo sapien
gctttttgatcctgccgtgtgccca

SEQ ID NO: 1438749 - DNA, 25 bp, Homo sapien
ctggaaccatataagcacttacttc

SEQ ID NO: 1438750 - DNA, 25 bp, Homo sapien
ctccattggagatgaattctttcaa

SEQ ID NO: 1438751 - DNA, 25 bp, Homo sapien
tataagcacttacttctgagcaggg

SEQ ID NO: 1438752 - DNA, 25 bp, Homo sapien
gccgggagcagaaagtatttgcgtc

SEQ ID NO: 1438753 - DNA, 25 bp, Homo sapien
ttaactgctcagttactttccttac

SEQ ID NO: 1438754 - DNA, 25 bp, Homo sapien
tcacatattaactgctcagttactt

SEQ ID NO: 1438755 - DNA, 25 bp, Homo sapien
catataggtttggagtaaatttctg

SEQ ID NO: 1438756 - DNA, 25 bp, Homo sapien
ttgttacatataggtttggagtaaa

SEQ ID NO: 1438757 - DNA, 25 bp, Homo sapien
gattttttaacatcaagcatgggtg

SEQ ID NO: 1438758 - DNA, 25 bp, Homo sapien
taacatcaagcatgggtgctaaatc

SEQ ID NO: 1438759 - DNA, 25 bp, Homo sapien
gcatgggtgctaaatcacaactcat

SEQ ID NO: 1438760 - DNA, 25 bp, Homo sapien
tcaagcatgggtgctaaatcacaac

SEQ ID NO: 1438761 - DNA, 25 bp, Homo sapien
accctcgttattcttcccatatacg

SEQ ID NO: 1438762 - DNA, 25 bp, Homo sapien
cctcgttattcttcccatatacggg

SEQ ID NO: 1438763 - DNA, 25 bp, Homo sapien
atcaccctcgttattcttcccatat

SEQ ID NO: 1438764 - DNA, 25 bp, Homo sapien
gaacatcaccctcgttattcttccc

SEQ ID NO: 1438765 - DNA, 25 bp, Homo sapien
ccagggaccgtcttctatgagagct

SEQ ID NO: 1438766 - DNA, 25 bp, Homo sapien
gaccgtcttctatgagagcttccag

SEQ ID NO: 1438767 - DNA, 25 bp, Homo sapien
gctccagggaccgtcttctatgaga

SEQ ID NO: 1438768 - DNA, 25 bp, Homo sapien
cttggctccagggaccgtcttctat

SEQ ID NO: 1438769 - DNA, 25 bp, Homo sapien
tggtgaatcatggtgagctgttgca

SEQ ID NO: 1438770 - DNA, 25 bp, Homo sapien
ggaaaaacagggctttcatgtattg

SEQ ID NO: 1438771 - DNA, 25 bp, Homo sapien
gcatatagagtcttagtggtatctt

SEQ ID NO: 1438772 - DNA, 25 bp, Homo sapien
tatttgtcttctcgtggctttggac

SEQ ID NO: 1438773 - DNA, 25 bp, Homo sapien
ccacagacttgcactattgactgct

SEQ ID NO: 1438774 - DNA, 25 bp, Homo sapien
tgctccccttctagggcagcatcta

SEQ ID NO: 1438775 - DNA, 25 bp, Homo sapien
gacttgcactattgactgctgtcat

SEQ ID NO: 1438776 - DNA, 25 bp, Homo sapien
agggcagcatctaaccacagacttg

SEQ ID NO: 1438777 - DNA, 25 bp, Homo sapien
tcctctctggacatagtcttgatca

SEQ ID NO: 1438778 - DNA, 25 bp, Homo sapien
tgaagatggcaaaatcatcaatcct

SEQ ID NO: 1438779 - DNA, 25 bp, Homo sapien
aagtcactcttgtctctaacccatg

SEQ ID NO: 1438780 - DNA, 25 bp, Homo sapien
cctgattcagtctattgaagtcact

SEQ ID NO: 1438781 - DNA, 25 bp, Homo sapien
tttgcatgtgtacaaggcagatgac

SEQ ID NO: 1438782 - DNA, 25 bp, Homo sapien
tgcatgtgtacaaggcagatgacag

SEQ ID NO: 1438783 - DNA, 25 bp, Homo sapien
ttgcatgtgtacaaggcagatgaca

SEQ ID NO: 1438784 - DNA, 25 bp, Homo sapien
aagcatactgtgtagcgtgccagca

SEQ ID NO: 1438785 - DNA, 25 bp, Homo sapien
ttcaagcatactgtgtagcgtgcca

SEQ ID NO: 1438786 - DNA, 25 bp, Homo sapien
caagcatactgtgtagcgtgccagc

SEQ ID NO: 1438787 - DNA, 25 bp, Homo sapien
gcatactgtgtagcgtgccagcatt

SEQ ID NO: 1438788 - DNA, 25 bp, Homo sapien
ccttgtctcccacgccatgacaggc

SEQ ID NO: 1438789 - DNA, 25 bp, Homo sapien
cccttgtctcccacgccatgacagg

SEQ ID NO: 1438790 - DNA, 25 bp, Homo sapien
tgtatatcattagtcaggttatcaa

SEQ ID NO: 1438791 - DNA, 25 bp, Homo sapien
ctttggtactgtgctatgtaaagtt

SEQ ID NO: 1438792 - DNA, 25 bp, Homo sapien
caggttatcaatgttttagtagaag

SEQ ID NO: 1438793 - DNA, 25 bp, Homo sapien
aagtaacagaggaagtgtgtccgga

SEQ ID NO: 1438794 - DNA, 25 bp, Homo sapien
caagccagttccatatatatctgag

SEQ ID NO: 1438795 - DNA, 25 bp, Homo sapien
caaaagtgctccctaattagaattt

SEQ ID NO: 1438796 - DNA, 25 bp, Homo sapien
tacacctattgaggatgatactagg

SEQ ID NO: 1438797 - DNA, 25 bp, Homo sapien
catatttcatggtaccttgcctttt

SEQ ID NO: 1438798 - DNA, 25 bp, Homo sapien
catcctgaattgcaaatcctgaagg

SEQ ID NO: 1438799 - DNA, 25 bp, Homo sapien
cagtgactgccggatgggcactctt

SEQ ID NO: 1438800 - DNA, 25 bp, Homo sapien
tgtacttggataaggcagtgactgc

SEQ ID NO: 1438801 - DNA, 25 bp, Homo sapien
ttcagtatgccattcctgtgctcca

SEQ ID NO: 1438802 - DNA, 25 bp, Homo sapien
tttttgtctcccacaccacctccca

SEQ ID NO: 1438803 - DNA, 25 bp, Homo sapien
ttttgtctcccacaccacctcccat

SEQ ID NO: 1438804 - DNA, 25 bp, Homo sapien
tgtagaaatttctagggccatcttc

SEQ ID NO: 1438805 - DNA, 25 bp, Homo sapien
ggaacatgattgaaatctcagctaa

SEQ ID NO: 1438806 - DNA, 25 bp, Homo sapien
caaagatggaggacttatattgcct

SEQ ID NO: 1438807 - DNA, 25 bp, Homo sapien
gcactgttcagcataatagtaacct

SEQ ID NO: 1438808 - DNA, 25 bp, Homo sapien
ttctagtctgaagggcaaaagtatc

SEQ ID NO: 1438809 - DNA, 25 bp, Homo sapien
gcttactacagaaatcagtcacttg

SEQ ID NO: 1438810 - DNA, 25 bp, Homo sapien
caacatgagatagtgcaagctgatt

SEQ ID NO: 1438811 - DNA, 25 bp, Homo sapien
cctttagacctagaatatcgacatc

SEQ ID NO: 1438812 - DNA, 25 bp, Homo sapien
gtttatttcctgcatcgatgttcat

SEQ ID NO: 1438813 - DNA, 25 bp, Homo sapien
ttgcaagctcttggtgctaaagtaa

SEQ ID NO: 1438814 - DNA, 25 bp, Homo sapien
acattatgttaatgtgaaaaaccca

SEQ ID NO: 1438815 - DNA, 25 bp, Homo sapien
tcttgattcaccagcaaaacaattt

SEQ ID NO: 1438816 - DNA, 25 bp, Homo sapien
aattagccagctgaattaaccctgg

SEQ ID NO: 1438817 - DNA, 25 bp, Homo sapien
ctctggagtcatgggtttgagtacc

SEQ ID NO: 1438818 - DNA, 25 bp, Homo sapien
taaccctggagattaatggagtgac

SEQ ID NO: 1438819 - DNA, 25 bp, Homo sapien
cagtttactcggctaaattagccag

SEQ ID NO: 1438820 - DNA, 25 bp, Homo sapien
tattcagagttattatgcatactca

SEQ ID NO: 1438821 - DNA, 25 bp, Homo sapien
gcatactcagattggcttgagtcag

SEQ ID NO: 1438822 - DNA, 25 bp, Homo sapien
tggcttgagtcaggtagcaattttg

SEQ ID NO: 1438823 - DNA, 25 bp, Homo sapien
gagtcaggtagcaattttgtccata

SEQ ID NO: 1438824 - DNA, 25 bp, Homo sapien
ctttttgaaatttttcacttgatct

SEQ ID NO: 1438825 - DNA, 25 bp, Homo sapien
tttgaaatttttcacttgatctttc

SEQ ID NO: 1438826 - DNA, 25 bp, Homo sapien
gatctttccatttctttacctccat

SEQ ID NO: 1438827 - DNA, 25 bp, Homo sapien
gaaatttttcacttgatctttccat

SEQ ID NO: 1438828 - DNA, 25 bp, Homo sapien
cataagaatgtgtgtaataagttcc

SEQ ID NO: 1438829 - DNA, 25 bp, Homo sapien
gacagccagaatatcttgcacaaaa

SEQ ID NO: 1438830 - DNA, 25 bp, Homo sapien
tgcacttcataagaataaactctcc

SEQ ID NO: 1438831 - DNA, 25 bp, Homo sapien
cagaattctatcaagcctggaaatc

SEQ ID NO: 1438832 - DNA, 25 bp, Homo sapien
gatcaacacctctgacctctaatgt

SEQ ID NO: 1438833 - DNA, 25 bp, Homo sapien
ccagagggatgcacttctttcattt

SEQ ID NO: 1438834 - DNA, 25 bp, Homo sapien
gtgggctgacattcttttggcagat

SEQ ID NO: 1438835 - DNA, 25 bp, Homo sapien
tcattttcctattcaggcccacagg

SEQ ID NO: 1438836 - DNA, 25 bp, Homo sapien
gggtgtggcttcctcaaagtctgaa

SEQ ID NO: 1438837 - DNA, 25 bp, Homo sapien
gtggggtgtggcttcctcaaagtct

SEQ ID NO: 1438838 - DNA, 25 bp, Homo sapien
ggtgtggcttcctcaaagtctgaac

SEQ ID NO: 1438839 - DNA, 25 bp, Homo sapien
tgggtggggtgtggcttcctcaaag

SEQ ID NO: 1438840 - DNA, 25 bp, Homo sapien
gacaattccattctcatagatacac

SEQ ID NO: 1438841 - DNA, 25 bp, Homo sapien
gccttgcttccagtacaacccttga

SEQ ID NO: 1438842 - DNA, 25 bp, Homo sapien
ggaaaagacttgcaagtactgttgg

SEQ ID NO: 1438843 - DNA, 25 bp, Homo sapien
tactgttggtgcatgtaggtgtccc

SEQ ID NO: 1438844 - DNA, 25 bp, Homo sapien
attgaggtatgctctttatatacac

SEQ ID NO: 1438845 - DNA, 25 bp, Homo sapien
gaggtatgctctttatatacacagt

SEQ ID NO: 1438846 - DNA, 25 bp, Homo sapien
gctgtggtattgtcatatagggcct

SEQ ID NO: 1438847 - DNA, 25 bp, Homo sapien
attagctgtggtattgtcatatagg

SEQ ID NO: 1438848 - DNA, 25 bp, Homo sapien
taacaggaggattaatgaccaagcc

SEQ ID NO: 1438849 - DNA, 25 bp, Homo sapien
tgaccaagccgttaagtccccaata

SEQ ID NO: 1438850 - DNA, 25 bp, Homo sapien
tgcttcgaggtcatgatcagtcaca

SEQ ID NO: 1438851 - DNA, 25 bp, Homo sapien
tccccaataaggcaatgagtcctga

SEQ ID NO: 1438852 - DNA, 25 bp, Homo sapien
ttacactgacttacagggaagttga

SEQ ID NO: 1438853 - DNA, 25 bp, Homo sapien
ctgacttacagggaagttgagcaaa

SEQ ID NO: 1438854 - DNA, 25 bp, Homo sapien
gaagttgagcaaaatttcaatgttc

SEQ ID NO: 1438855 - DNA, 25 bp, Homo sapien
ttttccttacactgacttacaggga

SEQ ID NO: 1438856 - DNA, 25 bp, Homo sapien
caggttctgtgtaggttcagagacc

SEQ ID NO: 1438857 - DNA, 25 bp, Homo sapien
ctctgagcatgaccaagacaaaggc

SEQ ID NO: 1438858 - DNA, 25 bp, Homo sapien
gaccattaaaggtgatgcattgtcc

SEQ ID NO: 1438859 - DNA, 25 bp, Homo sapien
gagatgcaaacacctggagcgtata

SEQ ID NO: 1438860 - DNA, 25 bp, Homo sapien
tctctgggagcccaatgcacggcaa

SEQ ID NO: 1438861 - DNA, 25 bp, Homo sapien
tatgtgtaacatcatgggaacagaa

SEQ ID NO: 1438862 - DNA, 25 bp, Homo sapien
gctaatgctagtgtcagatctgtga

SEQ ID NO: 1438863 - DNA, 25 bp, Homo sapien
gcaagtccgggacaactacatccat

SEQ ID NO: 1438864 - DNA, 25 bp, Homo sapien
tatataaagagtaacatctgttgtg

SEQ ID NO: 1438865 - DNA, 25 bp, Homo sapien
acttgtttatcagaatgttaaaggc

SEQ ID NO: 1438866 - DNA, 25 bp, Homo sapien
cacctgcttgtgcttaatatataaa

SEQ ID NO: 1438867 - DNA, 25 bp, Homo sapien
tgttaaaggcagtagtaagagtgat

SEQ ID NO: 1438868 - DNA, 25 bp, Homo sapien
tatttcccaagattcactcaaatcc

SEQ ID NO: 1438869 - DNA, 25 bp, Homo sapien
tttatttcccaagattcactcaaat

SEQ ID NO: 1438870 - DNA, 25 bp, Homo sapien
aactttatttcccaagattcactca

SEQ ID NO: 1438871 - DNA, 25 bp, Homo sapien
atttcccaagattcactcaaatcca

SEQ ID NO: 1438872 - DNA, 25 bp, Homo sapien
gcattgtggttacccaaggcaaaat

SEQ ID NO: 1438873 - DNA, 25 bp, Homo sapien
cagggaacaatattgcagagtcgca

SEQ ID NO: 1438874 - DNA, 25 bp, Homo sapien
gcatgagccatgaattctatttcag

SEQ ID NO: 1438875 - DNA, 25 bp, Homo sapien
caaaatcgcttcttgcagggaacaa

SEQ ID NO: 1438876 - DNA, 25 bp, Homo sapien
ttgataataccaataataagcctac

SEQ ID NO: 1438877 - DNA, 25 bp, Homo sapien
ggcttgaacttatggaaaggcttcc

SEQ ID NO: 1438878 - DNA, 25 bp, Homo sapien
tgctctagtccacctattacttaca

SEQ ID NO: 1438879 - DNA, 25 bp, Homo sapien
taacaaaggatgtgaggcttgaact

SEQ ID NO: 1438880 - DNA, 25 bp, Homo sapien
tttcatttgcaatatacacaaaagg

SEQ ID NO: 1438881 - DNA, 25 bp, Homo sapien
ttcatttgcaatatacacaaaaggt

SEQ ID NO: 1438882 - DNA, 25 bp, Homo sapien
cacaatttgctcatcagcattaaac

SEQ ID NO: 1438883 - DNA, 25 bp, Homo sapien
tttgctcatcagcattaaacacatc

SEQ ID NO: 1438884 - DNA, 25 bp, Homo sapien
caatttgctcatcagcattaaacac

SEQ ID NO: 1438885 - DNA, 25 bp, Homo sapien
gctcatcagcattaaacacatcgtc

SEQ ID NO: 1438886 - DNA, 25 bp, Homo sapien
gtttgtttcacatctatccctttca

SEQ ID NO: 1438887 - DNA, 25 bp, Homo sapien
tcagatggtttctctttaccagttt

SEQ ID NO: 1438888 - DNA, 25 bp, Homo sapien
tttcacatctatccctttcagatgg

SEQ ID NO: 1438889 - DNA, 25 bp, Homo sapien
ttagtttgtttcacatctatccctt

SEQ ID NO: 1438890 - DNA, 25 bp, Homo sapien
tcaatagaacttcacaaggaatatc

SEQ ID NO: 1438891 - DNA, 25 bp, Homo sapien
gaacttcacaaggaatatccatact

SEQ ID NO: 1438892 - DNA, 25 bp, Homo sapien
ttctagaattcaatagaacttcaca

SEQ ID NO: 1438893 - DNA, 25 bp, Homo sapien
tctagaattcaatagaacttcacaa

SEQ ID NO: 1438894 - DNA, 25 bp, Homo sapien
ctttgagagtcaattcacaattatc

SEQ ID NO: 1438895 - DNA, 25 bp, Homo sapien
gagtcaattcacaattatcatcacc

SEQ ID NO: 1438896 - DNA, 25 bp, Homo sapien
ctagaagactttgagagtcaattca

SEQ ID NO: 1438897 - DNA, 25 bp, Homo sapien
ttcacaattatcatcaccaataatg

SEQ ID NO: 1438898 - DNA, 25 bp, Homo sapien
ttagttaatgacaacttttaagaca

SEQ ID NO: 1438899 - DNA, 25 bp, Homo sapien
tgtggagcaacttgatgtcgtaatc

SEQ ID NO: 1438900 - DNA, 25 bp, Homo sapien
gatgtcgtaatctatttacgttcaa

SEQ ID NO: 1438901 - DNA, 25 bp, Homo sapien
gttactaagagacccatgttcaggg

SEQ ID NO: 1438902 - DNA, 25 bp, Homo sapien
gaagactggcatgcttcatgtttag

SEQ ID NO: 1438903 - DNA, 25 bp, Homo sapien
tattgctgatgacccctcaggtttg

SEQ ID NO: 1438904 - DNA, 25 bp, Homo sapien
ccttttacatttgctccaaagtgtg

SEQ ID NO: 1438905 - DNA, 25 bp, Homo sapien
taagtcgaatttaatcctatgatat

SEQ ID NO: 1438906 - DNA, 25 bp, Homo sapien
tcgtttgctgctgataagaatttca

SEQ ID NO: 1438907 - DNA, 25 bp, Homo sapien
caaagagcacatcgtcattatccat

SEQ ID NO: 1438908 - DNA, 25 bp, Homo sapien
catcgtcattatccatcactctgca

SEQ ID NO: 1438909 - DNA, 25 bp, Homo sapien
gagcacatcgtcattatccatcact

SEQ ID NO: 1438910 - DNA, 25 bp, Homo sapien
cccaaagagcacatcgtcattatcc

SEQ ID NO: 1438911 - DNA, 25 bp, Homo sapien
agcactgattgtagtcatcctattg

SEQ ID NO: 1438912 - DNA, 25 bp, Homo sapien
ttttgagtatacacctagcaatagg

SEQ ID NO: 1438913 - DNA, 25 bp, Homo sapien
tacctattaactatgcccacttcta

SEQ ID NO: 1438914 - DNA, 25 bp, Homo sapien
ctattgtgctgttaaatactagctc

SEQ ID NO: 1438915 - DNA, 25 bp, Homo sapien
ttctatatctactttgcagttgaaa

SEQ ID NO: 1438916 - DNA, 25 bp, Homo sapien
gtgacgtgtcgtaaaattttactgc

SEQ ID NO: 1438917 - DNA, 25 bp, Homo sapien
cccaattggtgacgtgtcgtaaaat

SEQ ID NO: 1438918 - DNA, 25 bp, Homo sapien
gttcaacctttatctgtttagccag

SEQ ID NO: 1438919 - DNA, 25 bp, Homo sapien
ttaatagacaggatgaggaaattga

SEQ ID NO: 1438920 - DNA, 25 bp, Homo sapien
taatagacaggatgaggaaattgac

SEQ ID NO: 1438921 - DNA, 25 bp, Homo sapien
gtcaactggcacagtttccagattc

SEQ ID NO: 1438922 - DNA, 25 bp, Homo sapien
ttccagtcaactggcacagtttcca

SEQ ID NO: 1438923 - DNA, 25 bp, Homo sapien
ttccacttccagtcaactggcacag

SEQ ID NO: 1438924 - DNA, 25 bp, Homo sapien
ccacttccagtcaactggcacagtt

SEQ ID NO: 1438925 - DNA, 25 bp, Homo sapien
ggaggtactattctcttcacaacac

SEQ ID NO: 1438926 - DNA, 25 bp, Homo sapien
gaggtactattctcttcacaacaca

SEQ ID NO: 1438927 - DNA, 25 bp, Homo sapien
ggtactattctcttcacaacacact

SEQ ID NO: 1438928 - DNA, 25 bp, Homo sapien
tgggaggtactattctcttcacaac

SEQ ID NO: 1438929 - DNA, 25 bp, Homo sapien
tgctgatgcttcagacgtaatacag

SEQ ID NO: 1438930 - DNA, 25 bp, Homo sapien
cttcagacgtaatacaggacgttca

SEQ ID NO: 1438931 - DNA, 25 bp, Homo sapien
tgcttcagacgtaatacaggacgtt

SEQ ID NO: 1438932 - DNA, 25 bp, Homo sapien
tgatgcttcagacgtaatacaggac

SEQ ID NO: 1438933 - DNA, 25 bp, Homo sapien
gagatggagcccattatctcaggaa

SEQ ID NO: 1438934 - DNA, 25 bp, Homo sapien
tggagatggagcccattatctcagg

SEQ ID NO: 1438935 - DNA, 25 bp, Homo sapien
agatggagcccattatctcaggaaa

SEQ ID NO: 1438936 - DNA, 25 bp, Homo sapien
tccaacagtagctcattttgttcat

SEQ ID NO: 1438937 - DNA, 25 bp, Homo sapien
gttcatatgcactgtgaagacattt

SEQ ID NO: 1438938 - DNA, 25 bp, Homo sapien
ttccaacagtagctcattttgttca

SEQ ID NO: 1438939 - DNA, 25 bp, Homo sapien
tttgttcatatgcactgtgaagaca

SEQ ID NO: 1438940 - DNA, 25 bp, Homo sapien
ctacttccccttctgtttttgactg

SEQ ID NO: 1438941 - DNA, 25 bp, Homo sapien
tccccttctgtttttgactgctgca

SEQ ID NO: 1438942 - DNA, 25 bp, Homo sapien
tacttccccttctgtttttgactgc

SEQ ID NO: 1438943 - DNA, 25 bp, Homo sapien
cttccccttctgtttttgactgctg

SEQ ID NO: 1438944 - DNA, 25 bp, Homo sapien
tgcccatagtccctcaagactcatg

SEQ ID NO: 1438945 - DNA, 25 bp, Homo sapien
taacgcgttccagtaccaagtcaaa

SEQ ID NO: 1438946 - DNA, 25 bp, Homo sapien
catctaatctcattgccctaaagtc

SEQ ID NO: 1438947 - DNA, 25 bp, Homo sapien
ttaatacctcgcctctcaatactgc

SEQ ID NO: 1438948 - DNA, 25 bp, Homo sapien
acatggtgagaggacttatacagtg

SEQ ID NO: 1438949 - DNA, 25 bp, Homo sapien
gaccacatctggtaagattcttctg

SEQ ID NO: 1438950 - DNA, 25 bp, Homo sapien
acagtgaattcaggtatctttctcc

SEQ ID NO: 1438951 - DNA, 25 bp, Homo sapien
gttatatagggtgagaactctgaag

SEQ ID NO: 1438952 - DNA, 25 bp, Homo sapien
tcatagatacctctctcgtataggt

SEQ ID NO: 1438953 - DNA, 25 bp, Homo sapien
tatctcaaaggactagaaagtgact

SEQ ID NO: 1438954 - DNA, 25 bp, Homo sapien
tatacatatgataagagcaaaagcc

SEQ ID NO: 1438955 - DNA, 25 bp, Homo sapien
gacttggcatcctgcaatcttcctt

SEQ ID NO: 1438956 - DNA, 25 bp, Homo sapien
agaataaactgtctcagttcacttt

SEQ ID NO: 1438957 - DNA, 25 bp, Homo sapien
aagaataaactgtctcagttcactt

SEQ ID NO: 1438958 - DNA, 25 bp, Homo sapien
gaataaactgtctcagttcactttt

SEQ ID NO: 1438959 - DNA, 25 bp, Homo sapien
aggccaattccggtgaagatcttca

SEQ ID NO: 1438960 - DNA, 25 bp, Homo sapien
agatcaagaggccaattccggtgaa

SEQ ID NO: 1438961 - DNA, 25 bp, Homo sapien
ggccaattccggtgaagatcttcat

SEQ ID NO: 1438962 - DNA, 25 bp, Homo sapien
caagaggccaattccggtgaagatc

SEQ ID NO: 1438963 - DNA, 25 bp, Homo sapien
ccatcactgtctaaggtaacaaggc

SEQ ID NO: 1438964 - DNA, 25 bp, Homo sapien
tcacctagttataataaggtggctc

SEQ ID NO: 1438965 - DNA, 25 bp, Homo sapien
ttggagagtctgagttgctatcgtc

SEQ ID NO: 1438966 - DNA, 25 bp, Homo sapien
tctaaggtaacaaggcatcatcccc

SEQ ID NO: 1438967 - DNA, 25 bp, Homo sapien
cactacaacaacagagctccaggat

SEQ ID NO: 1438968 - DNA, 25 bp, Homo sapien
ggataataacggtgaaccacaattg

SEQ ID NO: 1438969 - DNA, 25 bp, Homo sapien
tccaggataataacggtgaaccaca

SEQ ID NO: 1438970 - DNA, 25 bp, Homo sapien
taacggtgaaccacaattgaacaag

SEQ ID NO: 1438971 - DNA, 25 bp, Homo sapien
aatcagtgggcttaaagatatcttg

SEQ ID NO: 1438972 - DNA, 25 bp, Homo sapien
atcagtgggcttaaagatatcttga

SEQ ID NO: 1438973 - DNA, 25 bp, Homo sapien
gaatcagtgggcttaaagatatctt

SEQ ID NO: 1438974 - DNA, 25 bp, Homo sapien
taggggatggttggcttttatcaca

SEQ ID NO: 1438975 - DNA, 25 bp, Homo sapien
tttaggggatggttggcttttatca

SEQ ID NO: 1438976 - DNA, 25 bp, Homo sapien
taatttctaacattaggattctgat

SEQ ID NO: 1438977 - DNA, 25 bp, Homo sapien
ggggatggttggcttttatcacaca

SEQ ID NO: 1438978 - DNA, 25 bp, Homo sapien
ggatggaatattatgtcagagcaga

SEQ ID NO: 1438979 - DNA, 25 bp, Homo sapien
catctacgaaaaggagagtttagcg

SEQ ID NO: 1438980 - DNA, 25 bp, Homo sapien
aaatcacatgcaagacaaactctgg

SEQ ID NO: 1438981 - DNA, 25 bp, Homo sapien
tatcttcacctgatcagaggccaca

SEQ ID NO: 1438982 - DNA, 25 bp, Homo sapien
tcaagggatgtttccacactcttct

SEQ ID NO: 1438983 - DNA, 25 bp, Homo sapien
tacacagttgtaaccagtaaaacag

SEQ ID NO: 1438984 - DNA, 25 bp, Homo sapien
cactcttctttagctctattagagt

SEQ ID NO: 1438985 - DNA, 25 bp, Homo sapien
ttagctctattagagttacacagtt

SEQ ID NO: 1438986 - DNA, 25 bp, Homo sapien
tgccactgcagtcgtcgttttccag

SEQ ID NO: 1438987 - DNA, 25 bp, Homo sapien
ttaatagttctgtgatcatcatgcc

SEQ ID NO: 1438988 - DNA, 25 bp, Homo sapien
tgcagtcgtcgttttccagttaatt

SEQ ID NO: 1438989 - DNA, 25 bp, Homo sapien
aacccagatctgctcgattaccact

SEQ ID NO: 1438990 - DNA, 25 bp, Homo sapien
gcccaggttctctaacataatggag

SEQ ID NO: 1438991 - DNA, 25 bp, Homo sapien
gatagtgaacatatccattgtcccc

SEQ ID NO: 1438992 - DNA, 25 bp, Homo sapien
ttttgcatgaataaaaccacacggc

SEQ ID NO: 1438993 - DNA, 25 bp, Homo sapien
gagactcgaggtggtaaaaatgtac

SEQ ID NO: 1438994 - DNA, 25 bp, Homo sapien
caatgtacgtaaactggaactctgt

SEQ ID NO: 1438995 - DNA, 25 bp, Homo sapien
ggcaatgtacgtaaactggaactct

SEQ ID NO: 1438996 - DNA, 25 bp, Homo sapien
agaggcagaggcaatgtacgtaaac

SEQ ID NO: 1438997 - DNA, 25 bp, Homo sapien
cagaggcaatgtacgtaaactggaa

SEQ ID NO: 1438998 - DNA, 25 bp, Homo sapien
cagcacacttgtgggataatgagaa

SEQ ID NO: 1438999 - DNA, 25 bp, Homo sapien
acttgtgggataatgagaaggcttc

SEQ ID NO: 1439000 - DNA, 25 bp, Homo sapien
cacacttgtgggataatgagaaggc

SEQ ID NO: 1439001 - DNA, 25 bp, Homo sapien
tgtcccagcacacttgtgggataat

SEQ ID NO: 1439002 - DNA, 25 bp, Homo sapien
acatatacctcctgttgaagtgaca

SEQ ID NO: 1439003 - DNA, 25 bp, Homo sapien
cttgaacatatacctcctgttgaag

SEQ ID NO: 1439004 - DNA, 25 bp, Homo sapien
gccttgaacatatacctcctgttga

SEQ ID NO: 1439005 - DNA, 25 bp, Homo sapien
gaacatatacctcctgttgaagtga

SEQ ID NO: 1439006 - DNA, 25 bp, Homo sapien
tagttccaggatatctctgaaggtt

SEQ ID NO: 1439007 - DNA, 25 bp, Homo sapien
gatatctctgaaggttgagtctgtt

SEQ ID NO: 1439008 - DNA, 25 bp, Homo sapien
ccaggatatctctgaaggttgagtc

SEQ ID NO: 1439009 - DNA, 25 bp, Homo sapien
ctgaaggttgagtctgtttccatgg

SEQ ID NO: 1439010 - DNA, 25 bp, Homo sapien
catgatagcatgtgggcaaaatgta

SEQ ID NO: 1439011 - DNA, 25 bp, Homo sapien
tcacagtaatcacatgatagcatgt

SEQ ID NO: 1439012 - DNA, 25 bp, Homo sapien
gtaatcacatgatagcatgtgggca

SEQ ID NO: 1439013 - DNA, 25 bp, Homo sapien
gggcaaaatgtagccagtaacagtt

SEQ ID NO: 1439014 - DNA, 25 bp, Homo sapien
aggcaccaggtaagctgcctctaaa

SEQ ID NO: 1439015 - DNA, 25 bp, Homo sapien
ggcaccaggtaagctgcctctaaat

SEQ ID NO: 1439016 - DNA, 25 bp, Homo sapien
tcttggcagcttgctgacactcgca

SEQ ID NO: 1439017 - DNA, 25 bp, Homo sapien
gtgaaaacttagcaccaacttttga

SEQ ID NO: 1439018 - DNA, 25 bp, Homo sapien
gaaaagaatgtcactgtgcaaataa

SEQ ID NO: 1439019 - DNA, 25 bp, Homo sapien
gaaaggcagtcatacatcttggcag

SEQ ID NO: 1439020 - DNA, 25 bp, Homo sapien
ggactgatactcactatccatggtg

SEQ ID NO: 1439021 - DNA, 25 bp, Homo sapien
ggacaagaaggtgcctgtagaccat

SEQ ID NO: 1439022 - DNA, 25 bp, Homo sapien
tctatgtgatgaacctcctccagtg

SEQ ID NO: 1439023 - DNA, 25 bp, Homo sapien
tgaagggtgtgcatcagggttacct

SEQ ID NO: 1439024 - DNA, 25 bp, Homo sapien
gtagaccacaaggtccaccactctg

SEQ ID NO: 1439025 - DNA, 25 bp, Homo sapien
tagccaaatctatcaatgccagccc

SEQ ID NO: 1439026 - DNA, 25 bp, Homo sapien
ttgctgtagccaaatctatcaatgc

SEQ ID NO: 1439027 - DNA, 25 bp, Homo sapien
ttggaggtcatgtagaccacaaggt

SEQ ID NO: 1439028 - DNA, 25 bp, Homo sapien
gttaagaccatgaaaggttcttcac

SEQ ID NO: 1439029 - DNA, 25 bp, Homo sapien
ttcttgaacagttaagaccatgaaa

SEQ ID NO: 1439030 - DNA, 25 bp, Homo sapien
atctgatggacagcagacattttct

SEQ ID NO: 1439031 - DNA, 25 bp, Homo sapien
agaatctgatggacagcagacattt

SEQ ID NO: 1439032 - DNA, 25 bp, Homo sapien
caggataagagtatggataatactc

SEQ ID NO: 1439033 - DNA, 25 bp, Homo sapien
gataagagtatggataatactcttc

SEQ ID NO: 1439034 - DNA, 25 bp, Homo sapien
ggataagagtatggataatactctt

SEQ ID NO: 1439035 - DNA, 25 bp, Homo sapien
taagagtatggataatactcttcat

SEQ ID NO: 1439036 - DNA, 25 bp, Homo sapien
cttcctgtgggaggatacttctttc

SEQ ID NO: 1439037 - DNA, 25 bp, Homo sapien
gggaggatacttctttccactcatt

SEQ ID NO: 1439038 - DNA, 25 bp, Homo sapien
caccctggtgcctcttcctgtggga

SEQ ID NO: 1439039 - DNA, 25 bp, Homo sapien
tcaccctggtgcctcttcctgtggg

SEQ ID NO: 1439040 - DNA, 25 bp, Homo sapien
cagctccttgactagtttcttaata

SEQ ID NO: 1439041 - DNA, 25 bp, Homo sapien
tgtttcagctccttgactagtttct

SEQ ID NO: 1439042 - DNA, 25 bp, Homo sapien
caccagtgtttcagctccttgacta

SEQ ID NO: 1439043 - DNA, 25 bp, Homo sapien
gtttcttaatagcagtcagcatcac

SEQ ID NO: 1439044 - DNA, 25 bp, Homo sapien
acttgaagccaaggaccagttctct

SEQ ID NO: 1439045 - DNA, 25 bp, Homo sapien
gaagccaaggaccagttctctacac

SEQ ID NO: 1439046 - DNA, 25 bp, Homo sapien
gaccagttctctacactgcttttta

SEQ ID NO: 1439047 - DNA, 25 bp, Homo sapien
caaggaccagttctctacactgctt

SEQ ID NO: 1439048 - DNA, 25 bp, Homo sapien
cgttgttgggtgagaatacacattt

SEQ ID NO: 1439049 - DNA, 25 bp, Homo sapien
ggtgagaatacacatttctctcata

SEQ ID NO: 1439050 - DNA, 25 bp, Homo sapien
tgggtgagaatacacatttctctca

SEQ ID NO: 1439051 - DNA, 25 bp, Homo sapien
tgagaatacacatttctctcataca

SEQ ID NO: 1439052 - DNA, 25 bp, Homo sapien
atataccatgtatcatcagaagaag

SEQ ID NO: 1439053 - DNA, 25 bp, Homo sapien
gttcatgtaatataccatgtatcat

SEQ ID NO: 1439054 - DNA, 25 bp, Homo sapien
tctgctccatagtcacttgtcagcc

SEQ ID NO: 1439055 - DNA, 25 bp, Homo sapien
ttctgctccatagtcacttgtcagc

SEQ ID NO: 1439056 - DNA, 25 bp, Homo sapien
tgttcattaactcacatagttgtgg

SEQ ID NO: 1439057 - DNA, 25 bp, Homo sapien
cgaaaattgtctacttaacttgaag

SEQ ID NO: 1439058 - DNA, 25 bp, Homo sapien
tctaaaatcaaactactggctaaaa

SEQ ID NO: 1439059 - DNA, 25 bp, Homo sapien
cagaccaagctaattaatatgttca

SEQ ID NO: 1439060 - DNA, 25 bp, Homo sapien
ttatagtatattcttcccatgggag

SEQ ID NO: 1439061 - DNA, 25 bp, Homo sapien
actagtctgttgtcctcctaagccc

SEQ ID NO: 1439062 - DNA, 25 bp, Homo sapien
tatagtatattcttcccatgggagt

SEQ ID NO: 1439063 - DNA, 25 bp, Homo sapien
tggtttcagggccaacactagtctg

SEQ ID NO: 1439064 - DNA, 25 bp, Homo sapien
tctgtatgtaagtagagatggtggc

SEQ ID NO: 1439065 - DNA, 25 bp, Homo sapien
tccagtctgtatgtaagtagagatg

SEQ ID NO: 1439066 - DNA, 25 bp, Homo sapien
tcctctccagtctgtatgtaagtag

SEQ ID NO: 1439067 - DNA, 25 bp, Homo sapien
tatgtaagtagagatggtggcatta

SEQ ID NO: 1439068 - DNA, 25 bp, Homo sapien
cggtgcatagtagccaaaagtggac

SEQ ID NO: 1439069 - DNA, 25 bp, Homo sapien
caaaagtggacatcaccttgctggg

SEQ ID NO: 1439070 - DNA, 25 bp, Homo sapien
tgcatagtagccaaaagtggacatc

SEQ ID NO: 1439071 - DNA, 25 bp, Homo sapien
ttacggtgcatagtagccaaaagtg

SEQ ID NO: 1439072 - DNA, 25 bp, Homo sapien
agtgtagtgcctcggtaatctctgc

SEQ ID NO: 1439073 - DNA, 25 bp, Homo sapien
tgtagtgcctcggtaatctctgcta

SEQ ID NO: 1439074 - DNA, 25 bp, Homo sapien
atcagtgtagtgcctcggtaatctc

SEQ ID NO: 1439075 - DNA, 25 bp, Homo sapien
gtagtgcctcggtaatctctgctac

SEQ ID NO: 1439076 - DNA, 25 bp, Homo sapien
tccataagtggacgcctgtggccag

SEQ ID NO: 1439077 - DNA, 25 bp, Homo sapien
aaggctgaccgatgagctctccgct

SEQ ID NO: 1439078 - DNA, 25 bp, Homo sapien
ggaagagtcagagctccataagtgg

SEQ ID NO: 1439079 - DNA, 25 bp, Homo sapien
tccgctggctttcatgatggcatac

SEQ ID NO: 1439080 - DNA, 25 bp, Homo sapien
aacttctgacatcataacaattaca

SEQ ID NO: 1439081 - DNA, 25 bp, Homo sapien
tgacatcataacaattacaatgccg

SEQ ID NO: 1439082 - DNA, 25 bp, Homo sapien
ctaaacttctgacatcataacaatt

SEQ ID NO: 1439083 - DNA, 25 bp, Homo sapien
tcataacaattacaatgccgacatt

SEQ ID NO: 1439084 - DNA, 25 bp, Homo sapien
cttcttatgtgtaaatggcccattt

SEQ ID NO: 1439085 - DNA, 25 bp, Homo sapien
ttcttatgtgtaaatggcccatttt

SEQ ID NO: 1439086 - DNA, 25 bp, Homo sapien
tcttatgtgtaaatggcccattttc

SEQ ID NO: 1439087 - DNA, 25 bp, Homo sapien
tcttcttatgtgtaaatggcccatt

SEQ ID NO: 1439088 - DNA, 25 bp, Homo sapien
aaaacctgctcggggacttgataca

SEQ ID NO: 1439089 - DNA, 25 bp, Homo sapien
tttcaatgtctagccacagtggact

SEQ ID NO: 1439090 - DNA, 25 bp, Homo sapien
gtctagccacagtggactttttctc

SEQ ID NO: 1439091 - DNA, 25 bp, Homo sapien
caatgtctagccacagtggactttt

SEQ ID NO: 1439092 - DNA, 25 bp, Homo sapien
tgccagaaacgaaccactaaagagt

SEQ ID NO: 1439093 - DNA, 25 bp, Homo sapien
cactaaagagttttcgattccattt

SEQ ID NO: 1439094 - DNA, 25 bp, Homo sapien
ccattgcaccaaatgaaagctaggg

SEQ ID NO: 1439095 - DNA, 25 bp, Homo sapien
aaagctagggctttatgccagaaac

SEQ ID NO: 1439096 - DNA, 25 bp, Homo sapien
tatagctttaggtgtagaattttgg

SEQ ID NO: 1439097 - DNA, 25 bp, Homo sapien
ggtaaatgttccctgtcttcttaga

SEQ ID NO: 1439098 - DNA, 25 bp, Homo sapien
tggtttcgtgcagtttgaatatagc

SEQ ID NO: 1439099 - DNA, 25 bp, Homo sapien
tatcctacttgttctgtaacattct

SEQ ID NO: 1439100 - DNA, 25 bp, Homo sapien
tccttggtttctcatatttcctcat

SEQ ID NO: 1439101 - DNA, 25 bp, Homo sapien
tcttccttggtttctcatatttcct

SEQ ID NO: 1439102 - DNA, 25 bp, Homo sapien
ttccttggtttctcatatttcctca

SEQ ID NO: 1439103 - DNA, 25 bp, Homo sapien
tttcttccttggtttctcatatttc

SEQ ID NO: 1439104 - DNA, 25 bp, Homo sapien
attgaggagcccactactggagctg

SEQ ID NO: 1439105 - DNA, 25 bp, Homo sapien
ccagattgaggagcccactactgga

SEQ ID NO: 1439106 - DNA, 25 bp, Homo sapien
attgccagattgaggagcccactac

SEQ ID NO: 1439107 - DNA, 25 bp, Homo sapien
ttgaggagcccactactggagctgc

SEQ ID NO: 1439108 - DNA, 25 bp, Homo sapien
tcagacaccccccagttgctcctct

SEQ ID NO: 1439109 - DNA, 25 bp, Homo sapien
caactcttgccgtctgccttcaggc

SEQ ID NO: 1439110 - DNA, 25 bp, Homo sapien
cagacaccccccagttgctcctctg

SEQ ID NO: 1439111 - DNA, 25 bp, Homo sapien
agacaccccccagttgctcctctga

SEQ ID NO: 1439112 - DNA, 25 bp, Homo sapien
acaagcaaagcctcagtggagttca

SEQ ID NO: 1439113 - DNA, 25 bp, Homo sapien
tacaagcaaagcctcagtggagttc

SEQ ID NO: 1439114 - DNA, 25 bp, Homo sapien
ctacaagcaaagcctcagtggagtt

SEQ ID NO: 1439115 - DNA, 25 bp, Homo sapien
ggaatggagaacagcttccttaccc

SEQ ID NO: 1439116 - DNA, 25 bp, Homo sapien
ggggaatggagaacagcttccttac

SEQ ID NO: 1439117 - DNA, 25 bp, Homo sapien
aatggagaacagcttccttacccat

SEQ ID NO: 1439118 - DNA, 25 bp, Homo sapien
cttaggggaatggagaacagcttcc

SEQ ID NO: 1439119 - DNA, 25 bp, Homo sapien
gttaattattgatctggtggcaggg

SEQ ID NO: 1439120 - DNA, 25 bp, Homo sapien
aatagatcctgtacgcattgcatgg

SEQ ID NO: 1439121 - DNA, 25 bp, Homo sapien
cctgtacgcattgcatggcagaagc

SEQ ID NO: 1439122 - DNA, 25 bp, Homo sapien
gatggtgaaaatagatcctgtacgc

SEQ ID NO: 1439123 - DNA, 25 bp, Homo sapien
tagatagagcttctttcctagaaat

SEQ ID NO: 1439124 - DNA, 25 bp, Homo sapien
gaaatcttgaacatgatgcttcccg

SEQ ID NO: 1439125 - DNA, 25 bp, Homo sapien
gaacatgatgcttcccgtgttctca

SEQ ID NO: 1439126 - DNA, 25 bp, Homo sapien
tgattcactttttagatagagcttc

SEQ ID NO: 1439127 - DNA, 25 bp, Homo sapien
gaaatatttgctaaactcgtgggag

SEQ ID NO: 1439128 - DNA, 25 bp, Homo sapien
cgtgggagctactatatttcagtga

SEQ ID NO: 1439129 - DNA, 25 bp, Homo sapien
tgactatttgtgtagcgttctgaac

SEQ ID NO: 1439130 - DNA, 25 bp, Homo sapien
cagtaaatatgaagagactgtctcc

SEQ ID NO: 1439131 - DNA, 25 bp, Homo sapien
tcattaccgcagctttccaaggtct

SEQ ID NO: 1439132 - DNA, 25 bp, Homo sapien
gtgaaatgttgaacaacttcactgt

SEQ ID NO: 1439133 - DNA, 25 bp, Homo sapien
gatgtttggctattgtcaacttgac

SEQ ID NO: 1439134 - DNA, 25 bp, Homo sapien
tctatgttaggctttgccagcaaaa

SEQ ID NO: 1439135 - DNA, 25 bp, Homo sapien
gctgaattacttgctgtttagagtt

SEQ ID NO: 1439136 - DNA, 25 bp, Homo sapien
gagagtttcacatagaaccgttagc

SEQ ID NO: 1439137 - DNA, 25 bp, Homo sapien
ttctggctgagatctctggttgctt

SEQ ID NO: 1439138 - DNA, 25 bp, Homo sapien
tgttgcacacaaagacaattagtga

SEQ ID NO: 1439139 - DNA, 25 bp, Homo sapien
gctgggttcaggtgacggtcctctt

SEQ ID NO: 1439140 - DNA, 25 bp, Homo sapien
cagacatcagagacttagaggttgg

SEQ ID NO: 1439141 - DNA, 25 bp, Homo sapien
gcaaaggtagtaaactgttggctgc

SEQ ID NO: 1439142 - DNA, 25 bp, Homo sapien
tctgtggaaaactgatacgctcatc

SEQ ID NO: 1439143 - DNA, 25 bp, Homo sapien
gatgatcaggtggtctgaatccacc

SEQ ID NO: 1439144 - DNA, 25 bp, Homo sapien
ctttcctgtcgtgctttcttccatc

SEQ ID NO: 1439145 - DNA, 25 bp, Homo sapien
tttcttccatcctagatatgcattg

SEQ ID NO: 1439146 - DNA, 25 bp, Homo sapien
caaagctgattttgcaagatctgca

SEQ ID NO: 1439147 - DNA, 25 bp, Homo sapien
ctgaggcggatctaaggctttgaaa

SEQ ID NO: 1439148 - DNA, 25 bp, Homo sapien
cattgaatggctgatcactgggagc

SEQ ID NO: 1439149 - DNA, 25 bp, Homo sapien
ctgtaccaaaaataagcgtcttgcc

SEQ ID NO: 1439150 - DNA, 25 bp, Homo sapien
caaggcagccaaatactgtaccaaa

SEQ ID NO: 1439151 - DNA, 25 bp, Homo sapien
ctcccctcgcactgcaaagcactgg

SEQ ID NO: 1439152 - DNA, 25 bp, Homo sapien
gctctcccctcgcactgcaaagcac

SEQ ID NO: 1439153 - DNA, 25 bp, Homo sapien
cccagctctcccctcgcactgcaaa

SEQ ID NO: 1439154 - DNA, 25 bp, Homo sapien
cagctctcccctcgcactgcaaagc

SEQ ID NO: 1439155 - DNA, 25 bp, Homo sapien
ttactgacaaatgtctcaaccaaag

SEQ ID NO: 1439156 - DNA, 25 bp, Homo sapien
tgacaaatgtctcaaccaaagaact

SEQ ID NO: 1439157 - DNA, 25 bp, Homo sapien
caaatgtctcaaccaaagaactcat

SEQ ID NO: 1439158 - DNA, 25 bp, Homo sapien
ctttactgacaaatgtctcaaccaa

SEQ ID NO: 1439159 - DNA, 25 bp, Homo sapien
aaactcaatatctggaatagcgcta

SEQ ID NO: 1439160 - DNA, 25 bp, Homo sapien
aactcaatatctggaatagcgctac

SEQ ID NO: 1439161 - DNA, 25 bp, Homo sapien
aatacagagctatccatttataccg

SEQ ID NO: 1439162 - DNA, 25 bp, Homo sapien
agaacagaatacagagctatccatt

SEQ ID NO: 1439163 - DNA, 25 bp, Homo sapien
gctatccatttataccgttcagaat

SEQ ID NO: 1439164 - DNA, 25 bp, Homo sapien
cagagctatccatttataccgttca

SEQ ID NO: 1439165 - DNA, 25 bp, Homo sapien
tatctaaatacgcaagaagttctaa

SEQ ID NO: 1439166 - DNA, 25 bp, Homo sapien
tcaagtgtagagaatagcatgctga

SEQ ID NO: 1439167 - DNA, 25 bp, Homo sapien
cttcaatatttccgacttgggaact

SEQ ID NO: 1439168 - DNA, 25 bp, Homo sapien
ttttatgaggattcaagtgtagaga

SEQ ID NO: 1439169 - DNA, 25 bp, Homo sapien
atttctgacaatatcctgattcttt

SEQ ID NO: 1439170 - DNA, 25 bp, Homo sapien
tatatcttcatgttgaaaagcctca

SEQ ID NO: 1439171 - DNA, 25 bp, Homo sapien
tcagcagaataacttcttcctgaaa

SEQ ID NO: 1439172 - DNA, 25 bp, Homo sapien
gattctttttcctgtacaaagtctg

SEQ ID NO: 1439173 - DNA, 25 bp, Homo sapien
ggaaaatttttcactgtccacagcg

SEQ ID NO: 1439174 - DNA, 25 bp, Homo sapien
gggcagtgtgtgaaatatgtggaaa

SEQ ID NO: 1439175 - DNA, 25 bp, Homo sapien
tttcactgtccacagcggcactcat

SEQ ID NO: 1439176 - DNA, 25 bp, Homo sapien
atgtggaaaatttttcactgtccac

SEQ ID NO: 1439177 - DNA, 25 bp, Homo sapien
cactctggtggctaaactcactgct

SEQ ID NO: 1439178 - DNA, 25 bp, Homo sapien
ggacacttcttgtacgaacctcatt

SEQ ID NO: 1439179 - DNA, 25 bp, Homo sapien
gagacacattagtaaaaagaccatc

SEQ ID NO: 1439180 - DNA, 25 bp, Homo sapien
aacccctgttgtacagtagagtaca

SEQ ID NO: 1439181 - DNA, 25 bp, Homo sapien
gagtactttcatcactcctggtttt

SEQ ID NO: 1439182 - DNA, 25 bp, Homo sapien
tgagtactttcatcactcctggttt

SEQ ID NO: 1439183 - DNA, 25 bp, Homo sapien
ctgagtactttcatcactcctggtt

SEQ ID NO: 1439184 - DNA, 25 bp, Homo sapien
gtactttcatcactcctggttttac

SEQ ID NO: 1439185 - DNA, 25 bp, Homo sapien
ccaaggacagtgcagaaaaatcctc

SEQ ID NO: 1439186 - DNA, 25 bp, Homo sapien
caaggacagtgcagaaaaatcctca

SEQ ID NO: 1439187 - DNA, 25 bp, Homo sapien
tgtcgctgctgtttcaatatattca

SEQ ID NO: 1439188 - DNA, 25 bp, Homo sapien
cagaatgttgttgtcgctgctgttt

SEQ ID NO: 1439189 - DNA, 25 bp, Homo sapien
tatattcaaaagttgggcaataaaa

SEQ ID NO: 1439190 - DNA, 25 bp, Homo sapien
tgttgtcgctgctgtttcaatatat

SEQ ID NO: 1439191 - DNA, 25 bp, Homo sapien
gatgctctctggtctagacctacag

SEQ ID NO: 1439192 - DNA, 25 bp, Homo sapien
caactgttgttgctgatttctgcag

SEQ ID NO: 1439193 - DNA, 25 bp, Homo sapien
gcttaaaactcttcgtccaacatcg

SEQ ID NO: 1439194 - DNA, 25 bp, Homo sapien
cactaaagctttcgtaccaccttga

SEQ ID NO: 1439195 - DNA, 25 bp, Homo sapien
ccagcatttctgtatcctgtattgt

SEQ ID NO: 1439196 - DNA, 25 bp, Homo sapien
tccagcatttctgtatcctgtattg

SEQ ID NO: 1439197 - DNA, 25 bp, Homo sapien
tgtcttcactagtttcttgaatctc

SEQ ID NO: 1439198 - DNA, 25 bp, Homo sapien
gtatcctgtattgtcttcactagtt

SEQ ID NO: 1439199 - DNA, 25 bp, Homo sapien
tcctttccaggtggttattgaccat

SEQ ID NO: 1439200 - DNA, 25 bp, Homo sapien
tcttgttgattttgcggacagtctg

SEQ ID NO: 1439201 - DNA, 25 bp, Homo sapien
agattccaacttgctcccagcagag

SEQ ID NO: 1439202 - DNA, 25 bp, Homo sapien
aacagtcctttccaggtggttattg

SEQ ID NO: 1439203 - DNA, 25 bp, Homo sapien
gatgttcataacagacatctctttc

SEQ ID NO: 1439204 - DNA, 25 bp, Homo sapien
aaaagggatgttcataacagacatc

SEQ ID NO: 1439205 - DNA, 25 bp, Homo sapien
tcggtagtaaaaagggatgttcata

SEQ ID NO: 1439206 - DNA, 25 bp, Homo sapien
gtagtaaaaagggatgttcataaca

SEQ ID NO: 1439207 - DNA, 25 bp, Homo sapien
aattaccaaagccagtgcaacactg

SEQ ID NO: 1439208 - DNA, 25 bp, Homo sapien
tcaaagcagctggtcatagcaaaga

SEQ ID NO: 1439209 - DNA, 25 bp, Homo sapien
gcccagaggtctaagctgatgccca

SEQ ID NO: 1439210 - DNA, 25 bp, Homo sapien
cgctaacaggagctgtcaccatgat

SEQ ID NO: 1439211 - DNA, 25 bp, Homo sapien
tcttttgaaaagacatacctattct

SEQ ID NO: 1439212 - DNA, 25 bp, Homo sapien
taatagccatccgaatgagtatgag

SEQ ID NO: 1439213 - DNA, 25 bp, Homo sapien
tttgctctaccaattgacccatcct

SEQ ID NO: 1439214 - DNA, 25 bp, Homo sapien
catgtatgtgccgtttttgtgtctt

SEQ ID NO: 1439215 - DNA, 25 bp, Homo sapien
cagatgaagtgtatacagtatgcaa

SEQ ID NO: 1439216 - DNA, 25 bp, Homo sapien
gcagggtacaatgaacataagcttg

SEQ ID NO: 1439217 - DNA, 25 bp, Homo sapien
cagtatgcaaattgtatatgtatca

SEQ ID NO: 1439218 - DNA, 25 bp, Homo sapien
taagcttgatcatattaaaggcagt

SEQ ID NO: 1439219 - DNA, 25 bp, Homo sapien
ccagtgtatagatcatagagtttca

SEQ ID NO: 1439220 - DNA, 25 bp, Homo sapien
cataactgagataagacattttaca

SEQ ID NO: 1439221 - DNA, 25 bp, Homo sapien
tattagagaatctgggcaagcacag

SEQ ID NO: 1439222 - DNA, 25 bp, Homo sapien
tataacttactagaattttctgtcc

SEQ ID NO: 1439223 - DNA, 25 bp, Homo sapien
aataactgttcagctacaaaatttt

SEQ ID NO: 1439224 - DNA, 25 bp, Homo sapien
gttccctctagaggatgtaatgcac

SEQ ID NO: 1439225 - DNA, 25 bp, Homo sapien
taatgcacaaaagcattgccacgga

SEQ ID NO: 1439226 - DNA, 25 bp, Homo sapien
tttttatgttccctctagaggatgt

SEQ ID NO: 1439227 - DNA, 25 bp, Homo sapien
agaatgtcttctagactggtgtcag

SEQ ID NO: 1439228 - DNA, 25 bp, Homo sapien
caagttcatgtgtgtaaattgccat

SEQ ID NO: 1439229 - DNA, 25 bp, Homo sapien
atgtcattcataaaccaaaactgct

SEQ ID NO: 1439230 - DNA, 25 bp, Homo sapien
aattgccatccaatgttattgactg

SEQ ID NO: 1439231 - DNA, 25 bp, Homo sapien
caatatagtgatcggtggactcggc

SEQ ID NO: 1439232 - DNA, 25 bp, Homo sapien
tccgcttacgccaggagggatcaaa

SEQ ID NO: 1439233 - DNA, 25 bp, Homo sapien
tccgaagggattgacataaacagcc

SEQ ID NO: 1439234 - DNA, 25 bp, Homo sapien
tcattcggacacgtgcacgagtgcg

SEQ ID NO: 1439235 - DNA, 25 bp, Homo sapien
ctggatgcgagtaagccagtaggtt

SEQ ID NO: 1439236 - DNA, 25 bp, Homo sapien
atgcgagtaagccagtaggttgagg

SEQ ID NO: 1439237 - DNA, 25 bp, Homo sapien
ggatgcgagtaagccagtaggttga

SEQ ID NO: 1439238 - DNA, 25 bp, Homo sapien
gcgagtaagccagtaggttgaggtt

SEQ ID NO: 1439239 - DNA, 25 bp, Homo sapien
cagaacgaatctacataaatacaaa

SEQ ID NO: 1439240 - DNA, 25 bp, Homo sapien
cagtaaaccgtagctcagaaatctt

SEQ ID NO: 1439241 - DNA, 25 bp, Homo sapien
gatattctgtgtactgcagtaaacc

SEQ ID NO: 1439242 - DNA, 25 bp, Homo sapien
aatacaaaacagaacgaatctacat

SEQ ID NO: 1439243 - DNA, 25 bp, Homo sapien
tttccaatcctttgcatgtctggca

SEQ ID NO: 1439244 - DNA, 25 bp, Homo sapien
aagcgtttcggctgttggatttcag

SEQ ID NO: 1439245 - DNA, 25 bp, Homo sapien
gtagggcactgtagaaagaatcatt

SEQ ID NO: 1439246 - DNA, 25 bp, Homo sapien
tcttgggtttcagctctcatgtatg

SEQ ID NO: 1439247 - DNA, 25 bp, Homo sapien
agagttctgagtcacaatctctcca

SEQ ID NO: 1439248 - DNA, 25 bp, Homo sapien
tagagttctgagtcacaatctctcc

SEQ ID NO: 1439249 - DNA, 25 bp, Homo sapien
tatctgcaatactagagagatccat

SEQ ID NO: 1439250 - DNA, 25 bp, Homo sapien
aatactagagagatccattccacat

SEQ ID NO: 1439251 - DNA, 25 bp, Homo sapien
agaactatctgcaatactagagaga

SEQ ID NO: 1439252 - DNA, 25 bp, Homo sapien
ctgcaatactagagagatccattcc

SEQ ID NO: 1439253 - DNA, 25 bp, Homo sapien
actagatcaaaaaagatctttatac

SEQ ID NO: 1439254 - DNA, 25 bp, Homo sapien
gatcaaaaaagatctttataccaat

SEQ ID NO: 1439255 - DNA, 25 bp, Homo sapien
tagatcaaaaaagatctttatacca

SEQ ID NO: 1439256 - DNA, 25 bp, Homo sapien
tcaaaaaagatctttataccaatac

SEQ ID NO: 1439257 - DNA, 25 bp, Homo sapien
tgctcctatctacaaatgcattttc

SEQ ID NO: 1439258 - DNA, 25 bp, Homo sapien
tctttgaatttatgagctagaaact

SEQ ID NO: 1439259 - DNA, 25 bp, Homo sapien
tccatgatcttgctcctatctacaa

SEQ ID NO: 1439260 - DNA, 25 bp, Homo sapien
gatcttgctcctatctacaaatgca

SEQ ID NO: 1439261 - DNA, 25 bp, Homo sapien
ggtggccatgtctgccttaggttac

SEQ ID NO: 1439262 - DNA, 25 bp, Homo sapien
ctacttgacatcctgacaaactgct

SEQ ID NO: 1439263 - DNA, 25 bp, Homo sapien
tggtccagaaagagccggtggccat

SEQ ID NO: 1439264 - DNA, 25 bp, Homo sapien
cttgacatcctgacaaactgctttg

SEQ ID NO: 1439265 - DNA, 25 bp, Homo sapien
tgaattgtgatttggtcagcttcag

SEQ ID NO: 1439266 - DNA, 25 bp, Homo sapien
tgctaaggctaaaaagcttgtgtac

SEQ ID NO: 1439267 - DNA, 25 bp, Homo sapien
tgtttatgacacctcttgctaaggc

SEQ ID NO: 1439268 - DNA, 25 bp, Homo sapien
tgtacaattttctgcgcctttagga

SEQ ID NO: 1439269 - DNA, 25 bp, Homo sapien
taacggcgctgaaaattagaatcca

SEQ ID NO: 1439270 - DNA, 25 bp, Homo sapien
actgaacacctgttgtgcacagtac

SEQ ID NO: 1439271 - DNA, 25 bp, Homo sapien
cacctgttgtgcacagtacatacag

SEQ ID NO: 1439272 - DNA, 25 bp, Homo sapien
tgtgcacagtacatacagatgtttc

SEQ ID NO: 1439273 - DNA, 25 bp, Homo sapien
atttactgaacacctgttgtgcaca

SEQ ID NO: 1439274 - DNA, 25 bp, Homo sapien
ttacaataccaataccccataagct

SEQ ID NO: 1439275 - DNA, 25 bp, Homo sapien
gatatttacaataccaataccccat

SEQ ID NO: 1439276 - DNA, 25 bp, Homo sapien
ctacaatccgatatttacaatacca

SEQ ID NO: 1439277 - DNA, 25 bp, Homo sapien
tccgatatttacaataccaataccc

SEQ ID NO: 1439278 - DNA, 25 bp, Homo sapien
cagcgaggtaatctctggcttgcat

SEQ ID NO: 1439279 - DNA, 25 bp, Homo sapien
ctttgtgttcagctcagcgaggtaa

SEQ ID NO: 1439280 - DNA, 25 bp, Homo sapien
tgtgttcagctcagcgaggtaatct

SEQ ID NO: 1439281 - DNA, 25 bp, Homo sapien
tcagctcagcgaggtaatctctggc

SEQ ID NO: 1439282 - DNA, 25 bp, Homo sapien
ttatcttggggatgaggtgaatgcg

SEQ ID NO: 1439283 - DNA, 25 bp, Homo sapien
tcttggggatgaggtgaatgcgtcc

SEQ ID NO: 1439284 - DNA, 25 bp, Homo sapien
gggatgaggtgaatgcgtcctgcat

SEQ ID NO: 1439285 - DNA, 25 bp, Homo sapien
tggggatgaggtgaatgcgtcctgc

SEQ ID NO: 1439286 - DNA, 25 bp, Homo sapien
ttgaatccttgatccacatctgggt

SEQ ID NO: 1439287 - DNA, 25 bp, Homo sapien
tatgcatgcaaaactgtatttctag

SEQ ID NO: 1439288 - DNA, 25 bp, Homo sapien
agacattgtctaagtaatgtccaac

SEQ ID NO: 1439289 - DNA, 25 bp, Homo sapien
ctgggtagacattgtctaagtaatg

SEQ ID NO: 1439290 - DNA, 25 bp, Homo sapien
tagagtataacaggatttgaatttc

SEQ ID NO: 1439291 - DNA, 25 bp, Homo sapien
cattgaatcagcctttgaaagtaac

SEQ ID NO: 1439292 - DNA, 25 bp, Homo sapien
tgtagagtataacaggatttgaatt

SEQ ID NO: 1439293 - DNA, 25 bp, Homo sapien
tgaatcagcctttgaaagtaaccta

SEQ ID NO: 1439294 - DNA, 25 bp, Homo sapien
ccaaatacggattcaatttaactgc

SEQ ID NO: 1439295 - DNA, 25 bp, Homo sapien
aaagacaaatattctaacccacatg

SEQ ID NO: 1439296 - DNA, 25 bp, Homo sapien
tcataacaaaactcacaaaacacta

SEQ ID NO: 1439297 - DNA, 25 bp, Homo sapien
gaacaagaggcctttatattaagtg

SEQ ID NO: 1439298 - DNA, 25 bp, Homo sapien
aagtcactgttgtaagctttccagg

SEQ ID NO: 1439299 - DNA, 25 bp, Homo sapien
taaactctccctctgaattgcaagc

SEQ ID NO: 1439300 - DNA, 25 bp, Homo sapien
tgcaagcaatgtagctcaaagctgc

SEQ ID NO: 1439301 - DNA, 25 bp, Homo sapien
tagtctgggagaagtacttgaagcc

SEQ ID NO: 1439302 - DNA, 25 bp, Homo sapien
gaactcgcgtaccattttcatagtc

SEQ ID NO: 1439303 - DNA, 25 bp, Homo sapien
tttgctcaaggaactcaggaatcag

SEQ ID NO: 1439304 - DNA, 25 bp, Homo sapien
taagacggtagtgcttttggagaaa

SEQ ID NO: 1439305 - DNA, 25 bp, Homo sapien
gaataattcagagtctttgctcaag

SEQ ID NO: 1439306 - DNA, 25 bp, Homo sapien
ctcaggactctgaaccagaacagaa

SEQ ID NO: 1439307 - DNA, 25 bp, Homo sapien
gacagaatctaggttgtcatagtta

SEQ ID NO: 1439308 - DNA, 25 bp, Homo sapien
aggactctgaaccagaacagaactg

SEQ ID NO: 1439309 - DNA, 25 bp, Homo sapien
cttgcaactgaatcttattctcagg

SEQ ID NO: 1439310 - DNA, 25 bp, Homo sapien
caatggaaggtgataattttagcgt

SEQ ID NO: 1439311 - DNA, 25 bp, Homo sapien
aacaaacaatggaaggtgataattt

SEQ ID NO: 1439312 - DNA, 25 bp, Homo sapien
aggtgataattttagcgtaaactca

SEQ ID NO: 1439313 - DNA, 25 bp, Homo sapien
gataattttagcgtaaactcattct

SEQ ID NO: 1439314 - DNA, 25 bp, Homo sapien
tgaagtctccgaagggtgctgtccc

SEQ ID NO: 1439315 - DNA, 25 bp, Homo sapien
ggctagctgatgtagcgtctccaga

SEQ ID NO: 1439316 - DNA, 25 bp, Homo sapien
tcaatgaaataagaagcggctagct

SEQ ID NO: 1439317 - DNA, 25 bp, Homo sapien
cgtctccagagtgaccgaagagcta

SEQ ID NO: 1439318 - DNA, 25 bp, Homo sapien
acaatgtgctcaggcatccactcct

SEQ ID NO: 1439319 - DNA, 25 bp, Homo sapien
ttgagattccatgccggagttattt

SEQ ID NO: 1439320 - DNA, 25 bp, Homo sapien
ccacaatgtgctcaggcatccactc

SEQ ID NO: 1439321 - DNA, 25 bp, Homo sapien
attccatgccggagttattttccac

SEQ ID NO: 1439322 - DNA, 25 bp, Homo sapien
ccagagtagcagatagcaagaaatg

SEQ ID NO: 1439323 - DNA, 25 bp, Homo sapien
agagtagcagatagcaagaaatgtg

SEQ ID NO: 1439324 - DNA, 25 bp, Homo sapien
ctcccagagtagcagatagcaagaa

SEQ ID NO: 1439325 - DNA, 25 bp, Homo sapien
tcccagagtagcagatagcaagaaa

SEQ ID NO: 1439326 - DNA, 25 bp, Homo sapien
gcagaggagagccaaggaaatttct

SEQ ID NO: 1439327 - DNA, 25 bp, Homo sapien
tcttatgttgcggaagaattcaggg

SEQ ID NO: 1439328 - DNA, 25 bp, Homo sapien
tatttactttccagcggccaaactc

SEQ ID NO: 1439329 - DNA, 25 bp, Homo sapien
tttgctgaagggtaggtcgacgtcc

SEQ ID NO: 1439330 - DNA, 25 bp, Homo sapien
tcctcttgttatatgcactcgtggc

SEQ ID NO: 1439331 - DNA, 25 bp, Homo sapien
tatatgcactcgtggcacaattttc

SEQ ID NO: 1439332 - DNA, 25 bp, Homo sapien
aggtcctcttgttatatgcactcgt

SEQ ID NO: 1439333 - DNA, 25 bp, Homo sapien
tcttgttatatgcactcgtggcaca

SEQ ID NO: 1439334 - DNA, 25 bp, Homo sapien
ggtagatgaacagcagtacatccca

SEQ ID NO: 1439335 - DNA, 25 bp, Homo sapien
gaatgagcctaaccaaataatccag

SEQ ID NO: 1439336 - DNA, 25 bp, Homo sapien
gaagattaagacatagacatctgtg

SEQ ID NO: 1439337 - DNA, 25 bp, Homo sapien
ggaacaattaccctgtctaccacac

SEQ ID NO: 1439338 - DNA, 25 bp, Homo sapien
tgtttctggttccaactgcatattc

SEQ ID NO: 1439339 - DNA, 25 bp, Homo sapien
caactgggatttacattcctctcct

SEQ ID NO: 1439340 - DNA, 25 bp, Homo sapien
ctggttccaactgcatattcaatag

SEQ ID NO: 1439341 - DNA, 25 bp, Homo sapien
cacaactgggatttacattcctctc

SEQ ID NO: 1439342 - DNA, 25 bp, Homo sapien
acagaatcctgtgtatattattgtc

SEQ ID NO: 1439343 - DNA, 25 bp, Homo sapien
tattattgtctggaatcagtgtatg

SEQ ID NO: 1439344 - DNA, 25 bp, Homo sapien
tatgaggagttacgtaaggtatgaa

SEQ ID NO: 1439345 - DNA, 25 bp, Homo sapien
tgtatgaggagttacgtaaggtatg

SEQ ID NO: 1439346 - DNA, 25 bp, Homo sapien
ctccttcatccagtttctcatacat

SEQ ID NO: 1439347 - DNA, 25 bp, Homo sapien
tcaataaccattagacccaaacaat

SEQ ID NO: 1439348 - DNA, 25 bp, Homo sapien
gacccaaacaatgttgatttgtgcc

SEQ ID NO: 1439349 - DNA, 25 bp, Homo sapien
ttccaaatcaataaccattagaccc

SEQ ID NO: 1439350 - DNA, 25 bp, Homo sapien
ccattagacccaaacaatgttgatt

SEQ ID NO: 1439351 - DNA, 25 bp, Homo sapien
agtagaagataccatttccatttag

SEQ ID NO: 1439352 - DNA, 25 bp, Homo sapien
tagtagaagataccatttccattta

SEQ ID NO: 1439353 - DNA, 25 bp, Homo sapien
gtagaagataccatttccatttagg

SEQ ID NO: 1439354 - DNA, 25 bp, Homo sapien
ctagtagaagataccatttccattt

SEQ ID NO: 1439355 - DNA, 25 bp, Homo sapien
caaggatgatatttctgtaattgct

SEQ ID NO: 1439356 - DNA, 25 bp, Homo sapien
tgatatttctgtaattgctttccct

SEQ ID NO: 1439357 - DNA, 25 bp, Homo sapien
tatttctgtaattgctttccctttg

SEQ ID NO: 1439358 - DNA, 25 bp, Homo sapien
tcaaggatgatatttctgtaattgc

SEQ ID NO: 1439359 - DNA, 25 bp, Homo sapien
tgtgctaaatccctgccggcttctg

SEQ ID NO: 1439360 - DNA, 25 bp, Homo sapien
ttcctgtgagcgatggaagggtccc

SEQ ID NO: 1439361 - DNA, 25 bp, Homo sapien
taaaacccagcaatgaagactcagt

SEQ ID NO: 1439362 - DNA, 25 bp, Homo sapien
ctgatccgaaacagcagcaaccgct

SEQ ID NO: 1439363 - DNA, 25 bp, Homo sapien
ctggggatttagagccttcattctc

SEQ ID NO: 1439364 - DNA, 25 bp, Homo sapien
cattctctcagctttccctcaacac

SEQ ID NO: 1439365 - DNA, 25 bp, Homo sapien
gggatttagagccttcattctctca

SEQ ID NO: 1439366 - DNA, 25 bp, Homo sapien
tcattctctcagctttccctcaaca

SEQ ID NO: 1439367 - DNA, 25 bp, Homo sapien
catgcatcttatcttcggaggtagt

SEQ ID NO: 1439368 - DNA, 25 bp, Homo sapien
ggtagtgcctacacggcgtttccca

SEQ ID NO: 1439369 - DNA, 25 bp, Homo sapien
tatgtaacacgcaaaagaaagtccc

SEQ ID NO: 1439370 - DNA, 25 bp, Homo sapien
taaagggctgatcacgttctcgacc

SEQ ID NO: 1439371 - DNA, 25 bp, Homo sapien
gaagtcacggactctgatggcactg

SEQ ID NO: 1439372 - DNA, 25 bp, Homo sapien
actggcttgtcaggcaggacgaccg

SEQ ID NO: 1439373 - DNA, 25 bp, Homo sapien
tgaattgaattatatgaagccctcc

SEQ ID NO: 1439374 - DNA, 25 bp, Homo sapien
cgacgctgcagctggagtactttta

SEQ ID NO: 1439375 - DNA, 25 bp, Homo sapien
tcatcagcgatttgcacgaggcggt

SEQ ID NO: 1439376 - DNA, 25 bp, Homo sapien
taagagttacctgcgttgggaccat

SEQ ID NO: 1439377 - DNA, 25 bp, Homo sapien
tcacttgcagcaactgagggaggcg

SEQ ID NO: 1439378 - DNA, 25 bp, Homo sapien
gagaattcaagagggcaccacttcg

SEQ ID NO: 1439379 - DNA, 25 bp, Homo sapien
caatactgaacaaacgatcgcctga

SEQ ID NO: 1439380 - DNA, 25 bp, Homo sapien
tcgcctgatcgatcggtaagattag

SEQ ID NO: 1439381 - DNA, 25 bp, Homo sapien
gccattttcgtgtcccaatactgaa

SEQ ID NO: 1439382 - DNA, 25 bp, Homo sapien
cagaaatggctttgctgccgaatgc

SEQ ID NO: 1439383 - DNA, 25 bp, Homo sapien
cagcagctgcaatggcttcagccat

SEQ ID NO: 1439384 - DNA, 25 bp, Homo sapien
gctgcaatggcttcagccatatcaa

SEQ ID NO: 1439385 - DNA, 25 bp, Homo sapien
cagctgcaatggcttcagccatatc

SEQ ID NO: 1439386 - DNA, 25 bp, Homo sapien
aatggcttcagccatatcaaatatc

SEQ ID NO: 1439387 - DNA, 25 bp, Homo sapien
tccatctgacaaaagttttatgttt

SEQ ID NO: 1439388 - DNA, 25 bp, Homo sapien
ttcagtttcttccattaggaacacc

SEQ ID NO: 1439389 - DNA, 25 bp, Homo sapien
cagtttcttccattaggaacaccat

SEQ ID NO: 1439390 - DNA, 25 bp, Homo sapien
ctgcttcctccatctgacaaaagtt

SEQ ID NO: 1439391 - DNA, 25 bp, Homo sapien
tctcttcctgaagactctactgctg

SEQ ID NO: 1439392 - DNA, 25 bp, Homo sapien
tctaggttggtgatgggctctaaac

SEQ ID NO: 1439393 - DNA, 25 bp, Homo sapien
tactgctgactcctaattcttctga

SEQ ID NO: 1439394 - DNA, 25 bp, Homo sapien
attcttctgaagctaccacatctag

SEQ ID NO: 1439395 - DNA, 25 bp, Homo sapien
tccagtgggttttgcaaatttcctc

SEQ ID NO: 1439396 - DNA, 25 bp, Homo sapien
aaatttcctcgaaccagaagccaga

SEQ ID NO: 1439397 - DNA, 25 bp, Homo sapien
tggagatggataagggcatgaccag

SEQ ID NO: 1439398 - DNA, 25 bp, Homo sapien
ggataagggcatgaccaggttgcca

SEQ ID NO: 1439399 - DNA, 25 bp, Homo sapien
aatgacttacagtctggactgcagg

SEQ ID NO: 1439400 - DNA, 25 bp, Homo sapien
gagactccctactgataaatgtgtg

SEQ ID NO: 1439401 - DNA, 25 bp, Homo sapien
caagagtgcttgaaagtgtgagaga

SEQ ID NO: 1439402 - DNA, 25 bp, Homo sapien
gttctgtcctgagtagagcatccat

SEQ ID NO: 1439403 - DNA, 25 bp, Homo sapien
tgatgctccaccagtaggttcccaa

SEQ ID NO: 1439404 - DNA, 25 bp, Homo sapien
cttcctctatgatgctccaccagta

SEQ ID NO: 1439405 - DNA, 25 bp, Homo sapien
tctatgatgctccaccagtaggttc

SEQ ID NO: 1439406 - DNA, 25 bp, Homo sapien
tgctccaccagtaggttcccaatgg

SEQ ID NO: 1439407 - DNA, 25 bp, Homo sapien
gcaaagtgagaggaggcatcaactc

SEQ ID NO: 1439408 - DNA, 25 bp, Homo sapien
catatggcttgcttcggcgatggca

SEQ ID NO: 1439409 - DNA, 25 bp, Homo sapien
tcaccgccgctctgacgtaaggctt

SEQ ID NO: 1439410 - DNA, 25 bp, Homo sapien
tcttgtagattgaatgactggccct

SEQ ID NO: 1439411 - DNA, 25 bp, Homo sapien
agaaagcgtgaaatcttcctgaaga

SEQ ID NO: 1439412 - DNA, 25 bp, Homo sapien
tatgagttggaagcacggataggct

SEQ ID NO: 1439413 - DNA, 25 bp, Homo sapien
tgttgatatctactaagccagtcag

SEQ ID NO: 1439414 - DNA, 25 bp, Homo sapien
cataaaaaggtcttaccaggattct

SEQ ID NO: 1439415 - DNA, 25 bp, Homo sapien
tctgcgtaaccaaactgtgacttaa

SEQ ID NO: 1439416 - DNA, 25 bp, Homo sapien
cttctgcgtaaccaaactgtgactt

SEQ ID NO: 1439417 - DNA, 25 bp, Homo sapien
gcgtaaccaaactgtgacttaactg

SEQ ID NO: 1439418 - DNA, 25 bp, Homo sapien
tgcgtaaccaaactgtgacttaact

SEQ ID NO: 1439419 - DNA, 25 bp, Homo sapien
ttcagtacgctcatactctctcagg

SEQ ID NO: 1439420 - DNA, 25 bp, Homo sapien
tcagctttttcagtacgctcatact

SEQ ID NO: 1439421 - DNA, 25 bp, Homo sapien
ggctcctggtactctttactgcctc

SEQ ID NO: 1439422 - DNA, 25 bp, Homo sapien
tctctcaggtgtgctcttaacatca

SEQ ID NO: 1439423 - DNA, 25 bp, Homo sapien
caaaactctgcaaacgggatgcggt

SEQ ID NO: 1439424 - DNA, 25 bp, Homo sapien
gctctatacttttgagtgctgcaaa

SEQ ID NO: 1439425 - DNA, 25 bp, Homo sapien
cagctccgctttcatctgctctata

SEQ ID NO: 1439426 - DNA, 25 bp, Homo sapien
gatgcggtgcaatcctggtaatcag

SEQ ID NO: 1439427 - DNA, 25 bp, Homo sapien
tagctttacgtggtcttgctatttt

SEQ ID NO: 1439428 - DNA, 25 bp, Homo sapien
agctttacgtggtcttgctattttt

SEQ ID NO: 1439429 - DNA, 25 bp, Homo sapien
gttttagctttacgtggtcttgcta

SEQ ID NO: 1439430 - DNA, 25 bp, Homo sapien
tttagctttacgtggtcttgctatt

SEQ ID NO: 1439431 - DNA, 25 bp, Homo sapien
gtctatgtcagacttacttatacac

SEQ ID NO: 1439432 - DNA, 25 bp, Homo sapien
cgtgttttcaagacctgactgattt

SEQ ID NO: 1439433 - DNA, 25 bp, Homo sapien
gacttacttatacacagatcgggca

SEQ ID NO: 1439434 - DNA, 25 bp, Homo sapien
ctctttgtctatgtcagacttactt

SEQ ID NO: 1439435 - DNA, 25 bp, Homo sapien
tgtattttgctcattgggttttcca

SEQ ID NO: 1439436 - DNA, 25 bp, Homo sapien
tgtactgccatgtttaacactttga

SEQ ID NO: 1439437 - DNA, 25 bp, Homo sapien
ggaacatgcaggaattcagactgtt

SEQ ID NO: 1439438 - DNA, 25 bp, Homo sapien
ggttttccaaaattatgtactgcca

SEQ ID NO: 1439439 - DNA, 25 bp, Homo sapien
gaagttgtactccttattaccacta

SEQ ID NO: 1439440 - DNA, 25 bp, Homo sapien
cccaggctgctccataagttgcttg

SEQ ID NO: 1439441 - DNA, 25 bp, Homo sapien
ggggcttaaatctcccaatggtgcc

SEQ ID NO: 1439442 - DNA, 25 bp, Homo sapien
ctaaattgaagtccctaaggaaatg

SEQ ID NO: 1439443 - DNA, 25 bp, Homo sapien
gccgtggcaatcactttcactgagg

SEQ ID NO: 1439444 - DNA, 25 bp, Homo sapien
acacattttgttgccgtggcaatca

SEQ ID NO: 1439445 - DNA, 25 bp, Homo sapien
tacaaagcctgcatacaaatccaaa

SEQ ID NO: 1439446 - DNA, 25 bp, Homo sapien
caagggtggcagataacataactac

SEQ ID NO: 1439447 - DNA, 25 bp, Homo sapien
atattctgagcaatctcatcaatca

SEQ ID NO: 1439448 - DNA, 25 bp, Homo sapien
ctacacttagtttcccaaggataat

SEQ ID NO: 1439449 - DNA, 25 bp, Homo sapien
agtctccaatctaccaaccactgtg

SEQ ID NO: 1439450 - DNA, 25 bp, Homo sapien
tattctgctctggtcagcattggag

SEQ ID NO: 1439451 - DNA, 25 bp, Homo sapien
cctttgagggtatattcccacagtc

SEQ ID NO: 1439452 - DNA, 25 bp, Homo sapien
tcatttggatacgaaggctttcctt

SEQ ID NO: 1439453 - DNA, 25 bp, Homo sapien
gggaaactgacagtcactgtttcct

SEQ ID NO: 1439454 - DNA, 25 bp, Homo sapien
ggaaactgacagtcactgtttcctc

SEQ ID NO: 1439455 - DNA, 25 bp, Homo sapien
agggaaactgacagtcactgtttcc

SEQ ID NO: 1439456 - DNA, 25 bp, Homo sapien
gttgtaaatattagcgcactcaaac

SEQ ID NO: 1439457 - DNA, 25 bp, Homo sapien
taaatattagcgcactcaaaccaac

SEQ ID NO: 1439458 - DNA, 25 bp, Homo sapien
tgtaaatattagcgcactcaaacca

SEQ ID NO: 1439459 - DNA, 25 bp, Homo sapien
aaatattagcgcactcaaaccaacc

SEQ ID NO: 1439460 - DNA, 25 bp, Homo sapien
tattccaaggtccctacagtagagg

SEQ ID NO: 1439461 - DNA, 25 bp, Homo sapien
attccaaggtccctacagtagaggg

SEQ ID NO: 1439462 - DNA, 25 bp, Homo sapien
cctttcaactgtataagcacctttt

SEQ ID NO: 1439463 - DNA, 25 bp, Homo sapien
catacctttcaactgtataagcacc

SEQ ID NO: 1439464 - DNA, 25 bp, Homo sapien
tttcaactgtataagcaccttttca

SEQ ID NO: 1439465 - DNA, 25 bp, Homo sapien
tacctttcaactgtataagcacctt

SEQ ID NO: 1439466 - DNA, 25 bp, Homo sapien
aatccaaggatgttggagaagtagt

SEQ ID NO: 1439467 - DNA, 25 bp, Homo sapien
atgaatgatgaataacatttagttt

SEQ ID NO: 1439468 - DNA, 25 bp, Homo sapien
ctaatccaaggatgttggagaagta

SEQ ID NO: 1439469 - DNA, 25 bp, Homo sapien
atttagtttcacaaagtccgtgtat

SEQ ID NO: 1439470 - DNA, 25 bp, Homo sapien
taaaacagaggattccgcaatgcat

SEQ ID NO: 1439471 - DNA, 25 bp, Homo sapien
caagaacaatatttccagaacccat

SEQ ID NO: 1439472 - DNA, 25 bp, Homo sapien
caccaagaacaatatttccagaacc

SEQ ID NO: 1439473 - DNA, 25 bp, Homo sapien
catccataaaaccaccaagaacaat

SEQ ID NO: 1439474 - DNA, 25 bp, Homo sapien
aaccaccaagaacaatatttccaga

SEQ ID NO: 1439475 - DNA, 25 bp, Homo sapien
ctttggctggatgaaacactagcca

SEQ ID NO: 1439476 - DNA, 25 bp, Homo sapien
caacctctttggctggatgaaacac

SEQ ID NO: 1439477 - DNA, 25 bp, Homo sapien
ggctggatgaaacactagccatctc

SEQ ID NO: 1439478 - DNA, 25 bp, Homo sapien
ctctttggctggatgaaacactagc

SEQ ID NO: 1439479 - DNA, 25 bp, Homo sapien
ggcaaagcctgtttccctgccacgg

SEQ ID NO: 1439480 - DNA, 25 bp, Homo sapien
ccctgccacggcctctgtcagtcat

SEQ ID NO: 1439481 - DNA, 25 bp, Homo sapien
gtcttattcacggagtcatgttcat

SEQ ID NO: 1439482 - DNA, 25 bp, Homo sapien
acaaaggcaaagcctgtttccctgc

SEQ ID NO: 1439483 - DNA, 25 bp, Homo sapien
tcctcaaacactcatcggttgtttc

SEQ ID NO: 1439484 - DNA, 25 bp, Homo sapien
caaaatggctcctcaaacactcatc

SEQ ID NO: 1439485 - DNA, 25 bp, Homo sapien
tggctcctcaaacactcatcggttg

SEQ ID NO: 1439486 - DNA, 25 bp, Homo sapien
aaaatggctcctcaaacactcatcg

SEQ ID NO: 1439487 - DNA, 25 bp, Homo sapien
tgcaaccactactgtcactaatgca

SEQ ID NO: 1439488 - DNA, 25 bp, Homo sapien
tctcttgcaaccactactgtcacta

SEQ ID NO: 1439489 - DNA, 25 bp, Homo sapien
gatgtctctcttgcaaccactactg

SEQ ID NO: 1439490 - DNA, 25 bp, Homo sapien
gtctctcttgcaaccactactgtca

SEQ ID NO: 1439491 - DNA, 25 bp, Homo sapien
tcactggtggactagacagatttaa

SEQ ID NO: 1439492 - DNA, 25 bp, Homo sapien
ctatcactggtggactagacagatt

SEQ ID NO: 1439493 - DNA, 25 bp, Homo sapien
tctacaaagccagtgcttatcgttt

SEQ ID NO: 1439494 - DNA, 25 bp, Homo sapien
ttatcgtttgaacatctatcactgg

SEQ ID NO: 1439495 - DNA, 25 bp, Homo sapien
tttacttgttctccaggaaaaggca

SEQ ID NO: 1439496 - DNA, 25 bp, Homo sapien
ccatcagaacgtttattaggaggct

SEQ ID NO: 1439497 - DNA, 25 bp, Homo sapien
taagagagaaatgagtcccagttct

SEQ ID NO: 1439498 - DNA, 25 bp, Homo sapien
gggacatccccttagtaagagagaa

SEQ ID NO: 1439499 - DNA, 25 bp, Homo sapien
tttgagcaaaagcagtctttgccac

SEQ ID NO: 1439500 - DNA, 25 bp, Homo sapien
cggaagggataatagattttgagca

SEQ ID NO: 1439501 - DNA, 25 bp, Homo sapien
ccacagtctaacctctggtcagcag

SEQ ID NO: 1439502 - DNA, 25 bp, Homo sapien
ttgccacagtctaacctctggtcag

SEQ ID NO: 1439503 - DNA, 25 bp, Homo sapien
tttttcactttatgcggagatcata

SEQ ID NO: 1439504 - DNA, 25 bp, Homo sapien
ggagatcatatacacctaccacttt

SEQ ID NO: 1439505 - DNA, 25 bp, Homo sapien
tatacacctaccactttttcaggag

SEQ ID NO: 1439506 - DNA, 25 bp, Homo sapien
tatgcggagatcatatacacctacc

SEQ ID NO: 1439507 - DNA, 25 bp, Homo sapien
tggctgcatcattggctgggtccct

SEQ ID NO: 1439508 - DNA, 25 bp, Homo sapien
tttctccttttgagcgtttctccaa

SEQ ID NO: 1439509 - DNA, 25 bp, Homo sapien
cctggataattccgcaggccccttt

SEQ ID NO: 1439510 - DNA, 25 bp, Homo sapien
tcttagtaaagtattagcttcgatg

SEQ ID NO: 1439511 - DNA, 25 bp, Homo sapien
tgccttgcacagagtgtttttcaaa

SEQ ID NO: 1439512 - DNA, 25 bp, Homo sapien
tacattgcattgctcattatggcca

SEQ ID NO: 1439513 - DNA, 25 bp, Homo sapien
tgtgattgcactcttgatttgactc

SEQ ID NO: 1439514 - DNA, 25 bp, Homo sapien
atagaaccatatcatccacaaagga

SEQ ID NO: 1439515 - DNA, 25 bp, Homo sapien
tcatttacgtcttcattcagcagtg

SEQ ID NO: 1439516 - DNA, 25 bp, Homo sapien
cttcaagtaagagctcaactaaagc

SEQ ID NO: 1439517 - DNA, 25 bp, Homo sapien
gctcaactaaagctaagatactcat

SEQ ID NO: 1439518 - DNA, 25 bp, Homo sapien
tcaagtaagagctcaactaaagcta

SEQ ID NO: 1439519 - DNA, 25 bp, Homo sapien
gtaagagctcaactaaagctaagat

SEQ ID NO: 1439520 - DNA, 25 bp, Homo sapien
tgtccggttggtcttctagtaatgt

SEQ ID NO: 1439521 - DNA, 25 bp, Homo sapien
tcgaccgttgtcatgagtgtccggt

SEQ ID NO: 1439522 - DNA, 25 bp, Homo sapien
ctatcgaccgttgtcatgagtgtcc

SEQ ID NO: 1439523 - DNA, 25 bp, Homo sapien
catgagtgtccggttggtcttctag

SEQ ID NO: 1439524 - DNA, 25 bp, Homo sapien
aaaggacctaaaaattgcactgtca

SEQ ID NO: 1439525 - DNA, 25 bp, Homo sapien
aaggacctaaaaattgcactgtcat

SEQ ID NO: 1439526 - DNA, 25 bp, Homo sapien
tgcctaaaaggacctaaaaattgca

SEQ ID NO: 1439527 - DNA, 25 bp, Homo sapien
ctaaaaggacctaaaaattgcactg

SEQ ID NO: 1439528 - DNA, 25 bp, Homo sapien
gttgtgccctcactttccagagatg

SEQ ID NO: 1439529 - DNA, 25 bp, Homo sapien
tccagagatgcactagttcccttca

SEQ ID NO: 1439530 - DNA, 25 bp, Homo sapien
gaaaagtctcatactctttcggtcg

SEQ ID NO: 1439531 - DNA, 25 bp, Homo sapien
tcttcgttgaactcccgttgtgccc

SEQ ID NO: 1439532 - DNA, 25 bp, Homo sapien
ctgccaaacttcagaataacatctt

SEQ ID NO: 1439533 - DNA, 25 bp, Homo sapien
gctgccaaacttcagaataacatct

SEQ ID NO: 1439534 - DNA, 25 bp, Homo sapien
ctagctgccaaacttcagaataaca

SEQ ID NO: 1439535 - DNA, 25 bp, Homo sapien
tagctgccaaacttcagaataacat

SEQ ID NO: 1439536 - DNA, 25 bp, Homo sapien
agcaatgtagtgccagttctctgag

SEQ ID NO: 1439537 - DNA, 25 bp, Homo sapien
gcaatgtagtgccagttctctgagc

SEQ ID NO: 1439538 - DNA, 25 bp, Homo sapien
caatgtagtgccagttctctgagca

SEQ ID NO: 1439539 - DNA, 25 bp, Homo sapien
gctcctttaaggtaagaggtgctag

SEQ ID NO: 1439540 - DNA, 25 bp, Homo sapien
tggctcctttaaggtaagaggtgct

SEQ ID NO: 1439541 - DNA, 25 bp, Homo sapien
ggctcctttaaggtaagaggtgcta

SEQ ID NO: 1439542 - DNA, 25 bp, Homo sapien
tcctttaaggtaagaggtgctagtc

SEQ ID NO: 1439543 - DNA, 25 bp, Homo sapien
ccacccggatagctcctgtcttgta

SEQ ID NO: 1439544 - DNA, 25 bp, Homo sapien
ggatagctcctgtcttgtatgatga

SEQ ID NO: 1439545 - DNA, 25 bp, Homo sapien
gttcccacccggatagctcctgtct

SEQ ID NO: 1439546 - DNA, 25 bp, Homo sapien
tctctctctgctaatgacaatacca

SEQ ID NO: 1439547 - DNA, 25 bp, Homo sapien
taaaagtgtgtaggttccatgacac

SEQ ID NO: 1439548 - DNA, 25 bp, Homo sapien
aaagtgtgtaggttccatgacactc

SEQ ID NO: 1439549 - DNA, 25 bp, Homo sapien
gtgtgtaggttccatgacactcagt

SEQ ID NO: 1439550 - DNA, 25 bp, Homo sapien
agtgtgtaggttccatgacactcag

SEQ ID NO: 1439551 - DNA, 25 bp, Homo sapien
tggtccatagtgtttatcttctgca

SEQ ID NO: 1439552 - DNA, 25 bp, Homo sapien
tttgtggtccatagtgtttatcttc

SEQ ID NO: 1439553 - DNA, 25 bp, Homo sapien
tcctccacatagcaacctgaacccg

SEQ ID NO: 1439554 - DNA, 25 bp, Homo sapien
cccggacatctctctgatgtataac

SEQ ID NO: 1439555 - DNA, 25 bp, Homo sapien
gagaaggtgctacagtcaatttgca

SEQ ID NO: 1439556 - DNA, 25 bp, Homo sapien
agtgagaaggtgctacagtcaattt

SEQ ID NO: 1439557 - DNA, 25 bp, Homo sapien
tcaatttgcattgactttgtagctc

SEQ ID NO: 1439558 - DNA, 25 bp, Homo sapien
tttgcattgactttgtagctccggt

SEQ ID NO: 1439559 - DNA, 25 bp, Homo sapien
tatcttgcaacctgggtgtttccta

SEQ ID NO: 1439560 - DNA, 25 bp, Homo sapien
tttcctatttgtctgagctttgacg

SEQ ID NO: 1439561 - DNA, 25 bp, Homo sapien
tctgagctttgacgatgggcttgcc

SEQ ID NO: 1439562 - DNA, 25 bp, Homo sapien
cttcctgtatcttgcaacctgggtg

SEQ ID NO: 1439563 - DNA, 25 bp, Homo sapien
gaagttcccagttcagtctccagct

SEQ ID NO: 1439564 - DNA, 25 bp, Homo sapien
cagctcctctcaatgaactctagaa

SEQ ID NO: 1439565 - DNA, 25 bp, Homo sapien
gctcctctcaatgaactctagaaac

SEQ ID NO: 1439566 - DNA, 25 bp, Homo sapien
catcccacagaagatcctgaagttc

SEQ ID NO: 1439567 - DNA, 25 bp, Homo sapien
tatcagtctcagtgaccaatttaaa

SEQ ID NO: 1439568 - DNA, 25 bp, Homo sapien
tcagtctcagtgaccaatttaaagg

SEQ ID NO: 1439569 - DNA, 25 bp, Homo sapien
atcagtctcagtgaccaatttaaag

SEQ ID NO: 1439570 - DNA, 25 bp, Homo sapien
ctgtgtcctcattcagaactctggg

SEQ ID NO: 1439571 - DNA, 25 bp, Homo sapien
gtgtcctcattcagaactctgggaa

SEQ ID NO: 1439572 - DNA, 25 bp, Homo sapien
actctgggaatgtggagaatcccta

SEQ ID NO: 1439573 - DNA, 25 bp, Homo sapien
gaatccctaccaggacatgccacat

SEQ ID NO: 1439574 - DNA, 25 bp, Homo sapien
ccagagtgttcacccttgggagtga

SEQ ID NO: 1439575 - DNA, 25 bp, Homo sapien
aatcagcactgagagcaaatctttc

SEQ ID NO: 1439576 - DNA, 25 bp, Homo sapien
tgtgacgctgcagttcataaatcag

SEQ ID NO: 1439577 - DNA, 25 bp, Homo sapien
aatcaagtgtacagaagtgtttcag

SEQ ID NO: 1439578 - DNA, 25 bp, Homo sapien
tttctgatgttaagctgtggagaaa

SEQ ID NO: 1439579 - DNA, 25 bp, Homo sapien
tgtctgagaaactcacgtggtatat

SEQ ID NO: 1439580 - DNA, 25 bp, Homo sapien
tctgatgttaagctgtggagaaagg

SEQ ID NO: 1439581 - DNA, 25 bp, Homo sapien
agtctccattcaaacggtgtctgag

SEQ ID NO: 1439582 - DNA, 25 bp, Homo sapien
caagataaattgctggcaggattag

SEQ ID NO: 1439583 - DNA, 25 bp, Homo sapien
aacccaagataaattgctggcagga

SEQ ID NO: 1439584 - DNA, 25 bp, Homo sapien
taaattgctggcaggattagtgttt

SEQ ID NO: 1439585 - DNA, 25 bp, Homo sapien
aattgctggcaggattagtgtttgg

SEQ ID NO: 1439586 - DNA, 25 bp, Homo sapien
tgatcacactcagctgacaaataac

SEQ ID NO: 1439587 - DNA, 25 bp, Homo sapien
taaccaacttgtaatgaagtggagt

SEQ ID NO: 1439588 - DNA, 25 bp, Homo sapien
catgagctacttctatgatgatcac

SEQ ID NO: 1439589 - DNA, 25 bp, Homo sapien
tttgatgtctaatgacctctctact

SEQ ID NO: 1439590 - DNA, 25 bp, Homo sapien
agttagtttcagatccctggccggg

SEQ ID NO: 1439591 - DNA, 25 bp, Homo sapien
taagtccgagttagtttcagatccc

SEQ ID NO: 1439592 - DNA, 25 bp, Homo sapien
ctttatcaagggtcacattttcttg

SEQ ID NO: 1439593 - DNA, 25 bp, Homo sapien
tcaagtaagtccgagttagtttcag

SEQ ID NO: 1439594 - DNA, 25 bp, Homo sapien
gaacagtatttcgtcatttatgcag

SEQ ID NO: 1439595 - DNA, 25 bp, Homo sapien
ggctgaacagtatttcgtcatttat

SEQ ID NO: 1439596 - DNA, 25 bp, Homo sapien
tatttcgtcatttatgcagaccaca

SEQ ID NO: 1439597 - DNA, 25 bp, Homo sapien
cagtatttcgtcatttatgcagacc

SEQ ID NO: 1439598 - DNA, 25 bp, Homo sapien
gcaccatcacgaactgaaagctgct

SEQ ID NO: 1439599 - DNA, 25 bp, Homo sapien
ttattgtaggatggattccagcatc

SEQ ID NO: 1439600 - DNA, 25 bp, Homo sapien
tattgtaggatggattccagcatct

SEQ ID NO: 1439601 - DNA, 25 bp, Homo sapien
cagcaccatcacgaactgaaagctg

SEQ ID NO: 1439602 - DNA, 25 bp, Homo sapien
ggatgtctaatatagagggcactcc

SEQ ID NO: 1439603 - DNA, 25 bp, Homo sapien
gggcctagcagccttagctggatga

SEQ ID NO: 1439604 - DNA, 25 bp, Homo sapien
cccgagtttggtgagaggatgtcta

SEQ ID NO: 1439605 - DNA, 25 bp, Homo sapien
aataataacccgagtttggtgagag

SEQ ID NO: 1439606 - DNA, 25 bp, Homo sapien
gaaatgccataaagcattgttaata

SEQ ID NO: 1439607 - DNA, 25 bp, Homo sapien
tgacaaccttttgccagctgagcat

SEQ ID NO: 1439608 - DNA, 25 bp, Homo sapien
taaaatgacaaccttttgccagctg

SEQ ID NO: 1439609 - DNA, 25 bp, Homo sapien
aatgacaaccttttgccagctgagc

SEQ ID NO: 1439610 - DNA, 25 bp, Homo sapien
tcatgggtccacaactgcctttcca

SEQ ID NO: 1439611 - DNA, 25 bp, Homo sapien
cccaatttggtagacagatttgcac

SEQ ID NO: 1439612 - DNA, 25 bp, Homo sapien
tgttcatcctttagatcatgggtcc

SEQ ID NO: 1439613 - DNA, 25 bp, Homo sapien
gctatatgagcatgacccaatttgg

SEQ ID NO: 1439614 - DNA, 25 bp, Homo sapien
tcagtttatatggtgtggacggact

SEQ ID NO: 1439615 - DNA, 25 bp, Homo sapien
tgtctgattagaacagtatgcgttg

SEQ ID NO: 1439616 - DNA, 25 bp, Homo sapien
tggacggactgcaggaactacattt

SEQ ID NO: 1439617 - DNA, 25 bp, Homo sapien
gatattcttaacagagtcctgaaca

SEQ ID NO: 1439618 - DNA, 25 bp, Homo sapien
aaaaccgtgtctcacatttagcaga

SEQ ID NO: 1439619 - DNA, 25 bp, Homo sapien
aaatataaaaccgtgtctcacattt

SEQ ID NO: 1439620 - DNA, 25 bp, Homo sapien
gattcggcaggcaaaaaaaggaagc

SEQ ID NO: 1439621 - DNA, 25 bp, Homo sapien
gggagagagattcggcaggcaaaaa

SEQ ID NO: 1439622 - DNA, 25 bp, Homo sapien
tcatcctgcatacaactatcatttg

SEQ ID NO: 1439623 - DNA, 25 bp, Homo sapien
gacaatgtggctcttctatgtccat

SEQ ID NO: 1439624 - DNA, 25 bp, Homo sapien
ttttttcatcctgcatacaactatc

SEQ ID NO: 1439625 - DNA, 25 bp, Homo sapien
tatcatttggacaatgtggctcttc

SEQ ID NO: 1439626 - DNA, 25 bp, Homo sapien
ttccaggaaatataggtgtctttct

SEQ ID NO: 1439627 - DNA, 25 bp, Homo sapien
cttccaggaaatataggtgtctttc

SEQ ID NO: 1439628 - DNA, 25 bp, Homo sapien
ccactgtgatccggaatttgtcttc

SEQ ID NO: 1439629 - DNA, 25 bp, Homo sapien
ttcccactgtgatccggaatttgtc

SEQ ID NO: 1439630 - DNA, 25 bp, Homo sapien
tatccaaaattatgtatgtaatgga

SEQ ID NO: 1439631 - DNA, 25 bp, Homo sapien
ttgtcggccatatccaaaattatgt

SEQ ID NO: 1439632 - DNA, 25 bp, Homo sapien
tcggccatatccaaaattatgtatg

SEQ ID NO: 1439633 - DNA, 25 bp, Homo sapien
ggccatatccaaaattatgtatgta

SEQ ID NO: 1439634 - DNA, 25 bp, Homo sapien
ggaaagtccggcacccatattatga

SEQ ID NO: 1439635 - DNA, 25 bp, Homo sapien
tgccaaggactttttctttgaggat

SEQ ID NO: 1439636 - DNA, 25 bp, Homo sapien
tattatgatcaggtcctccaatgcc

SEQ ID NO: 1439637 - DNA, 25 bp, Homo sapien
ttaagccatctcgttggaaagtccg

SEQ ID NO: 1439638 - DNA, 25 bp, Homo sapien
aaattctcttcctataatctcatac

SEQ ID NO: 1439639 - DNA, 25 bp, Homo sapien
gcattgccaaagaccgcagcagagg

SEQ ID NO: 1439640 - DNA, 25 bp, Homo sapien
aatctcatacttagcattgccaaag

SEQ ID NO: 1439641 - DNA, 25 bp, Homo sapien
cccaaaagcagttcctcaggcaaaa

SEQ ID NO: 1439642 - DNA, 25 bp, Homo sapien
gcaaatccctgagtcactactgtga

SEQ ID NO: 1439643 - DNA, 25 bp, Homo sapien
cactactgtgaacggtgtacccttt

SEQ ID NO: 1439644 - DNA, 25 bp, Homo sapien
cccattgaccttcatgcgtctgctg

SEQ ID NO: 1439645 - DNA, 25 bp, Homo sapien
tctgctgaagcctgcaaatccctga

SEQ ID NO: 1439646 - DNA, 25 bp, Homo sapien
aagtaataacatattccacacccat

SEQ ID NO: 1439647 - DNA, 25 bp, Homo sapien
aacaaggaccagtcctgtttcatct

SEQ ID NO: 1439648 - DNA, 25 bp, Homo sapien
gagaacaaggaccagtcctgtttca

SEQ ID NO: 1439649 - DNA, 25 bp, Homo sapien
tgagaacaaggaccagtcctgtttc

SEQ ID NO: 1439650 - DNA, 25 bp, Homo sapien
gaacaaggaccagtcctgtttcatc

SEQ ID NO: 1439651 - DNA, 25 bp, Homo sapien
tctgtacttccatttcgataggcca

SEQ ID NO: 1439652 - DNA, 25 bp, Homo sapien
gcttgcaggtaatgtgacagtgccc

SEQ ID NO: 1439653 - DNA, 25 bp, Homo sapien
tccatttcgataggccatggcttgc

SEQ ID NO: 1439654 - DNA, 25 bp, Homo sapien
taggccatggcttgcaggtaatgtg

SEQ ID NO: 1439655 - DNA, 25 bp, Homo sapien
cctaagtccacctctgaattcatct

SEQ ID NO: 1439656 - DNA, 25 bp, Homo sapien
gcaaattccagtcccatgaaagctt

SEQ ID NO: 1439657 - DNA, 25 bp, Homo sapien
atctctcttctcgtcttcacgagag

SEQ ID NO: 1439658 - DNA, 25 bp, Homo sapien
gataacattccactctaaatgctgc

SEQ ID NO: 1439659 - DNA, 25 bp, Homo sapien
tcagcatagttcttctgttgaggag

SEQ ID NO: 1439660 - DNA, 25 bp, Homo sapien
tcttctgttgaggaggccactgaga

SEQ ID NO: 1439661 - DNA, 25 bp, Homo sapien
cactgggtgagggttcatatgagtc

SEQ ID NO: 1439662 - DNA, 25 bp, Homo sapien
tatgagtctgtggacccatgctgtg

SEQ ID NO: 1439663 - DNA, 25 bp, Homo sapien
ttctttgcaccgattctcattcttg

SEQ ID NO: 1439664 - DNA, 25 bp, Homo sapien
tttctttgcaccgattctcattctt

SEQ ID NO: 1439665 - DNA, 25 bp, Homo sapien
tctttgcaccgattctcattcttgt

SEQ ID NO: 1439666 - DNA, 25 bp, Homo sapien
ttttctttgcaccgattctcattct

SEQ ID NO: 1439667 - DNA, 25 bp, Homo sapien
tccagtgacataagttcattgagca

SEQ ID NO: 1439668 - DNA, 25 bp, Homo sapien
tgcatccagtgacataagttcattg

SEQ ID NO: 1439669 - DNA, 25 bp, Homo sapien
aatgcatccagtgacataagttcat

SEQ ID NO: 1439670 - DNA, 25 bp, Homo sapien
tgcaaatagcaaatgcatccagtga

SEQ ID NO: 1439671 - DNA, 25 bp, Homo sapien
aaaaatggagcaacactggtcagca

SEQ ID NO: 1439672 - DNA, 25 bp, Homo sapien
tcagcatttggtaccgtgaatataa

SEQ ID NO: 1439673 - DNA, 25 bp, Homo sapien
ctacaatttagaacccaactggctt

SEQ ID NO: 1439674 - DNA, 25 bp, Homo sapien
tatcaaatgtcaatcagtggaatct

SEQ ID NO: 1439675 - DNA, 25 bp, Homo sapien
ggaacaccatcaaaaacgatgacgc

SEQ ID NO: 1439676 - DNA, 25 bp, Homo sapien
acgatgacgcgatccgctagatagg

SEQ ID NO: 1439677 - DNA, 25 bp, Homo sapien
ttgtttattcgtggcctatagttgt

SEQ ID NO: 1439678 - DNA, 25 bp, Homo sapien
tattcgtggcctatagttgtttgga

SEQ ID NO: 1439679 - DNA, 25 bp, Homo sapien
ggttcatcaattaaatagacatcag

SEQ ID NO: 1439680 - DNA, 25 bp, Homo sapien
tgcagatggttcatcaattaaatag

SEQ ID NO: 1439681 - DNA, 25 bp, Homo sapien
catcaattaaatagacatcagcagg

SEQ ID NO: 1439682 - DNA, 25 bp, Homo sapien
ttaaatagacatcagcaggtttgcc

SEQ ID NO: 1439683 - DNA, 25 bp, Homo sapien
tgtagttcaccaccagataatgtct

SEQ ID NO: 1439684 - DNA, 25 bp, Homo sapien
tagttcaccaccagataatgtctgc

SEQ ID NO: 1439685 - DNA, 25 bp, Homo sapien
gtagttcaccaccagataatgtctg

SEQ ID NO: 1439686 - DNA, 25 bp, Homo sapien
gttcaccaccagataatgtctgcac

SEQ ID NO: 1439687 - DNA, 25 bp, Homo sapien
catcggtcacaaattgtgggtgagt

SEQ ID NO: 1439688 - DNA, 25 bp, Homo sapien
ggtcacaaattgtgggtgagtataa

SEQ ID NO: 1439689 - DNA, 25 bp, Homo sapien
attacatcggtcacaaattgtgggt

SEQ ID NO: 1439690 - DNA, 25 bp, Homo sapien
tacatcggtcacaaattgtgggtga

SEQ ID NO: 1439691 - DNA, 25 bp, Homo sapien
agcattctgataaatgtcgttttac

SEQ ID NO: 1439692 - DNA, 25 bp, Homo sapien
ccccagcatcaccataatttcagaa

SEQ ID NO: 1439693 - DNA, 25 bp, Homo sapien
cttcattcctggatatttatacata

SEQ ID NO: 1439694 - DNA, 25 bp, Homo sapien
tcttcattcctggatatttatacat

SEQ ID NO: 1439695 - DNA, 25 bp, Homo sapien
tttcttcattcctggatatttatac

SEQ ID NO: 1439696 - DNA, 25 bp, Homo sapien
ttttttcttcattcctggatattta

SEQ ID NO: 1439697 - DNA, 25 bp, Homo sapien
gagagttgcagagatttgcttgtgc

SEQ ID NO: 1439698 - DNA, 25 bp, Homo sapien
tgttgaagatctttcaggaggagag

SEQ ID NO: 1439699 - DNA, 25 bp, Homo sapien
gcagagatttgcttgtgctgtcatt

SEQ ID NO: 1439700 - DNA, 25 bp, Homo sapien
ctgaaagaacgaaatgttgaagatc

SEQ ID NO: 1439701 - DNA, 25 bp, Homo sapien
gtccgcctgtccacagatactgtgg

SEQ ID NO: 1439702 - DNA, 25 bp, Homo sapien
ggctaagtccgcctgtccacagata

SEQ ID NO: 1439703 - DNA, 25 bp, Homo sapien
gaaaggctaagtccgcctgtccaca

SEQ ID NO: 1439704 - DNA, 25 bp, Homo sapien
aggaaaggctaagtccgcctgtcca

SEQ ID NO: 1439705 - DNA, 25 bp, Homo sapien
gcaatgagggtctttatgggtaaca

SEQ ID NO: 1439706 - DNA, 25 bp, Homo sapien
tcagctggttgttcttaggaactgc

SEQ ID NO: 1439707 - DNA, 25 bp, Homo sapien
tcaataataatcaagacaaagagtt

SEQ ID NO: 1439708 - DNA, 25 bp, Homo sapien
agagttgacattaccatttcagcta

SEQ ID NO: 1439709 - DNA, 25 bp, Homo sapien
tatcttccgataatcaattactgaa

SEQ ID NO: 1439710 - DNA, 25 bp, Homo sapien
ggttctccaataagcttcgttataa

SEQ ID NO: 1439711 - DNA, 25 bp, Homo sapien
tcaattaattgcgtgtatcttccga

SEQ ID NO: 1439712 - DNA, 25 bp, Homo sapien
aattgcgtgtatcttccgataatca

SEQ ID NO: 1439713 - DNA, 25 bp, Homo sapien
tatttcattggaggtacttaggact

SEQ ID NO: 1439714 - DNA, 25 bp, Homo sapien
tctccatagcaagcatgaatgtgaa

SEQ ID NO: 1439715 - DNA, 25 bp, Homo sapien
aattgcatggttggaggaatataca

SEQ ID NO: 1439716 - DNA, 25 bp, Homo sapien
caaactgcctgggaattgtactgga

SEQ ID NO: 1439717 - DNA, 25 bp, Homo sapien
attcacctctaaactttcaaccagt

SEQ ID NO: 1439718 - DNA, 25 bp, Homo sapien
atcaaaattcataccattagaggga

SEQ ID NO: 1439719 - DNA, 25 bp, Homo sapien
tctaaactttcaaccagttcaatat

SEQ ID NO: 1439720 - DNA, 25 bp, Homo sapien
attcataccattagagggaaaattc

SEQ ID NO: 1439721 - DNA, 25 bp, Homo sapien
tctgaagactatgactggtgaaggg

SEQ ID NO: 1439722 - DNA, 25 bp, Homo sapien
ctaccacattctgaagactatgact

SEQ ID NO: 1439723 - DNA, 25 bp, Homo sapien
cattctgaagactatgactggtgaa

SEQ ID NO: 1439724 - DNA, 25 bp, Homo sapien
agactatgactggtgaagggaccgt

SEQ ID NO: 1439725 - DNA, 25 bp, Homo sapien
ttacttggacagctttcatgtgtcc

SEQ ID NO: 1439726 - DNA, 25 bp, Homo sapien
tcatttacttggacagctttcatgt

SEQ ID NO: 1439727 - DNA, 25 bp, Homo sapien
tttacttggacagctttcatgtgtc

SEQ ID NO: 1439728 - DNA, 25 bp, Homo sapien
catttacttggacagctttcatgtg

SEQ ID NO: 1439729 - DNA, 25 bp, Homo sapien
ggatgtcacactcatttctataggt

SEQ ID NO: 1439730 - DNA, 25 bp, Homo sapien
cacagagcataacatattcatttgg

SEQ ID NO: 1439731 - DNA, 25 bp, Homo sapien
tgaagtacttcagcacctcttggta

SEQ ID NO: 1439732 - DNA, 25 bp, Homo sapien
ctcaggaaaagcgttagccttaatt

SEQ ID NO: 1439733 - DNA, 25 bp, Homo sapien
ggaacaggtgacagttatatatcca

SEQ ID NO: 1439734 - DNA, 25 bp, Homo sapien
caggactgacattccggggagaaga

SEQ ID NO: 1439735 - DNA, 25 bp, Homo sapien
catgcaggagtgacaggactgacat

SEQ ID NO: 1439736 - DNA, 25 bp, Homo sapien
cagcgactccaggaacaggtgacag

SEQ ID NO: 1439737 - DNA, 25 bp, Homo sapien
gatgaaacgcatgcaaagggtgaac

SEQ ID NO: 1439738 - DNA, 25 bp, Homo sapien
tcggcaaaggatgaaacgcatgcaa

SEQ ID NO: 1439739 - DNA, 25 bp, Homo sapien
caaaggatgaaacgcatgcaaaggg

SEQ ID NO: 1439740 - DNA, 25 bp, Homo sapien
tgttcttcggcaaaggatgaaacgc

SEQ ID NO: 1439741 - DNA, 25 bp, Homo sapien
tttccagagtgccacagcaacaatg

SEQ ID NO: 1439742 - DNA, 25 bp, Homo sapien
ttaggaggtagatcatttctctgca

SEQ ID NO: 1439743 - DNA, 25 bp, Homo sapien
ggaaaaaggctatacaatgaattat

SEQ ID NO: 1439744 - DNA, 25 bp, Homo sapien
cagcaacaatggttcagcactgtta

SEQ ID NO: 1439745 - DNA, 25 bp, Homo sapien
tactctcgtcccatcataatgccta

SEQ ID NO: 1439746 - DNA, 25 bp, Homo sapien
cctcctatgggattttactctcgtc

SEQ ID NO: 1439747 - DNA, 25 bp, Homo sapien
ctgattttccaatcctcctatggga

SEQ ID NO: 1439748 - DNA, 25 bp, Homo sapien
ggcgagtgataccaaactctcttgt

SEQ ID NO: 1439749 - DNA, 25 bp, Homo sapien
tcgctttctagagtaatatgctcag

SEQ ID NO: 1439750 - DNA, 25 bp, Homo sapien
gctcacattcgctttctagagtaat

SEQ ID NO: 1439751 - DNA, 25 bp, Homo sapien
gcgttgctcacattcgctttctaga

SEQ ID NO: 1439752 - DNA, 25 bp, Homo sapien
agctctgcgttgctcacattcgctt

SEQ ID NO: 1439753 - DNA, 25 bp, Homo sapien
gttctcattcccaaggtaagaagtc

SEQ ID NO: 1439754 - DNA, 25 bp, Homo sapien
gaggcttcctctgtcaaggttctca

SEQ ID NO: 1439755 - DNA, 25 bp, Homo sapien
cagacggcctgatgaggatccggta

SEQ ID NO: 1439756 - DNA, 25 bp, Homo sapien
ggatccggtatccttctgaagtgga

SEQ ID NO: 1439757 - DNA, 25 bp, Homo sapien
tcagggaactgattgtttccaggac

SEQ ID NO: 1439758 - DNA, 25 bp, Homo sapien
gactggctggacaatatgttgaata

SEQ ID NO: 1439759 - DNA, 25 bp, Homo sapien
gctacagaagcagtggcaaaccagt

SEQ ID NO: 1439760 - DNA, 25 bp, Homo sapien
gcaaaccagtagtaatgaccacccc

SEQ ID NO: 1439761 - DNA, 25 bp, Homo sapien
tcaagttctccaattggtgtctaca

SEQ ID NO: 1439762 - DNA, 25 bp, Homo sapien
gccttgtgatatggatatatgtaag

SEQ ID NO: 1439763 - DNA, 25 bp, Homo sapien
ggtgtctacatcagacttgtaaaga

SEQ ID NO: 1439764 - DNA, 25 bp, Homo sapien
gaaataccttagctctctagttcag

SEQ ID NO: 1439765 - DNA, 25 bp, Homo sapien
tgtttgggcttgatcagattacaga

SEQ ID NO: 1439766 - DNA, 25 bp, Homo sapien
tacatttagtaaccagtatgccaag

SEQ ID NO: 1439767 - DNA, 25 bp, Homo sapien
cagtcagtgattgtgaaatatctcc

SEQ ID NO: 1439768 - DNA, 25 bp, Homo sapien
tatactatgctaggaagattccagt

SEQ ID NO: 1439769 - DNA, 25 bp, Homo sapien
cccggctgtagcagaggaaccctgg

SEQ ID NO: 1439770 - DNA, 25 bp, Homo sapien
caggtaacgatgagccactggatat

SEQ ID NO: 1439771 - DNA, 25 bp, Homo sapien
gcaaagccatggagttcagacctcc

SEQ ID NO: 1439772 - DNA, 25 bp, Homo sapien
gaaggttgaagtgagacaaacaaga

SEQ ID NO: 1439773 - DNA, 25 bp, Homo sapien
tgcaccgtggcatgtttatcattat

SEQ ID NO: 1439774 - DNA, 25 bp, Homo sapien
tcttctgaagttgtgacatatcccc

SEQ ID NO: 1439775 - DNA, 25 bp, Homo sapien
tcatgctactcatagatgacagagt

SEQ ID NO: 1439776 - DNA, 25 bp, Homo sapien
tgtgggaggctatccagtgcaccgt

SEQ ID NO: 1439777 - DNA, 25 bp, Homo sapien
gatttccttgtagcacgtgatagca

SEQ ID NO: 1439778 - DNA, 25 bp, Homo sapien
ggtcctgccttgacgctgatggctg

SEQ ID NO: 1439779 - DNA, 25 bp, Homo sapien
catttgagccctcagtgagtcatca

SEQ ID NO: 1439780 - DNA, 25 bp, Homo sapien
tcagcggcgttcacaacatcttcac

SEQ ID NO: 1439781 - DNA, 25 bp, Homo sapien
caacttagctcactggtgcaagagg

SEQ ID NO: 1439782 - DNA, 25 bp, Homo sapien
catagatttgaagagttacggcctt

SEQ ID NO: 1439783 - DNA, 25 bp, Homo sapien
tcagtagatgctctggataacttgc

SEQ ID NO: 1439784 - DNA, 25 bp, Homo sapien
tagtccctcacaaaagactcagcct

SEQ ID NO: 1439785 - DNA, 25 bp, Homo sapien
agtttatagcagttcataaatttat

SEQ ID NO: 1439786 - DNA, 25 bp, Homo sapien
aataacagtttatagcagttcataa

SEQ ID NO: 1439787 - DNA, 25 bp, Homo sapien
cagtttatagcagttcataaattta

SEQ ID NO: 1439788 - DNA, 25 bp, Homo sapien
taacagtttatagcagttcataaat

SEQ ID NO: 1439789 - DNA, 25 bp, Homo sapien
gattatgagtttgttctgtctttga

SEQ ID NO: 1439790 - DNA, 25 bp, Homo sapien
ggtaagaagagattgtttacacttc

SEQ ID NO: 1439791 - DNA, 25 bp, Homo sapien
taccaaatatattgccctggttttc

SEQ ID NO: 1439792 - DNA, 25 bp, Homo sapien
gttcctaccaaatatattgccctgg

SEQ ID NO: 1439793 - DNA, 25 bp, Homo sapien
tttgatgaagcacaaaaagtcatat

SEQ ID NO: 1439794 - DNA, 25 bp, Homo sapien
aaaaagtcatatatactcttatgga

SEQ ID NO: 1439795 - DNA, 25 bp, Homo sapien
agcaccaacccccacgtgttttgat

SEQ ID NO: 1439796 - DNA, 25 bp, Homo sapien
caacccccacgtgttttgatgaagc

SEQ ID NO: 1439797 - DNA, 25 bp, Homo sapien
ctgggtgctgtctatttgcttccaa

SEQ ID NO: 1439798 - DNA, 25 bp, Homo sapien
gtcaccaaatcagctgggtgctgtc

SEQ ID NO: 1439799 - DNA, 25 bp, Homo sapien
aatcagctgggtgctgtctatttgc

SEQ ID NO: 1439800 - DNA, 25 bp, Homo sapien
caccaaatcagctgggtgctgtcta

SEQ ID NO: 1439801 - DNA, 25 bp, Homo sapien
tcagacaagctcactgggaaccaca

SEQ ID NO: 1439802 - DNA, 25 bp, Homo sapien
ttgaagtggcctcctcagcattact

SEQ ID NO: 1439803 - DNA, 25 bp, Homo sapien
tatacaagtgaccttatgccaaatg

SEQ ID NO: 1439804 - DNA, 25 bp, Homo sapien
gatttttgcgtgactcctcctatgg

SEQ ID NO: 1439805 - DNA, 25 bp, Homo sapien
agtccaagatcatgatgtaagcatc

SEQ ID NO: 1439806 - DNA, 25 bp, Homo sapien
ccaagatcatgatgtaagcatctga

SEQ ID NO: 1439807 - DNA, 25 bp, Homo sapien
taagcatctgatgagggctttcgtc

SEQ ID NO: 1439808 - DNA, 25 bp, Homo sapien
aagtccaagatcatgatgtaagcat

SEQ ID NO: 1439809 - DNA, 25 bp, Homo sapien
tgagttcatttcaggggataggctc

SEQ ID NO: 1439810 - DNA, 25 bp, Homo sapien
cttaacgtaaatgacagcagttgac

SEQ ID NO: 1439811 - DNA, 25 bp, Homo sapien
cagcagttgacagtagggccctgag

SEQ ID NO: 1439812 - DNA, 25 bp, Homo sapien
ggctttgctgcttaacgtaaatgac

SEQ ID NO: 1439813 - DNA, 25 bp, Homo sapien
ccaactgagagattaatcatgagga

SEQ ID NO: 1439814 - DNA, 25 bp, Homo sapien
agagtgtgtatactctccaactgag

SEQ ID NO: 1439815 - DNA, 25 bp, Homo sapien
taatcatgaggaggaaattaagtct

SEQ ID NO: 1439816 - DNA, 25 bp, Homo sapien
ctggattctgtgtaagagtgtgtat

SEQ ID NO: 1439817 - DNA, 25 bp, Homo sapien
catgacagtttatccaactgttagg

SEQ ID NO: 1439818 - DNA, 25 bp, Homo sapien
tccaactgttaggagtattatttga

SEQ ID NO: 1439819 - DNA, 25 bp, Homo sapien
tcagcaacaatgtcaatgcctctcc

SEQ ID NO: 1439820 - DNA, 25 bp, Homo sapien
gaatgcactcctctaaaccctttaa

SEQ ID NO: 1439821 - DNA, 25 bp, Homo sapien
tacaactaaagatgcccttggttgg

SEQ ID NO: 1439822 - DNA, 25 bp, Homo sapien
cctttatggaattaccaaggatatt

SEQ ID NO: 1439823 - DNA, 25 bp, Homo sapien
ggtgctattaaactgtcgattgaga

SEQ ID NO: 1439824 - DNA, 25 bp, Homo sapien
tgtgagaggatttcattctgccact

SEQ ID NO: 1439825 - DNA, 25 bp, Homo sapien
tggaacagcgtccagtctccagttc

SEQ ID NO: 1439826 - DNA, 25 bp, Homo sapien
caacaaaatagtggtacatggtacg

SEQ ID NO: 1439827 - DNA, 25 bp, Homo sapien
tcttagaatacaggcgggaaggcac

SEQ ID NO: 1439828 - DNA, 25 bp, Homo sapien
ggagcagaactctagtcactggaac

SEQ ID NO: 1439829 - DNA, 25 bp, Homo sapien
agggtctctctatgctgcccaggtt

SEQ ID NO: 1439830 - DNA, 25 bp, Homo sapien
tttttgttggagagacagggtctct

SEQ ID NO: 1439831 - DNA, 25 bp, Homo sapien
ctacaagtgcacaccactatgccca

SEQ ID NO: 1439832 - DNA, 25 bp, Homo sapien
actacaagtgcacaccactatgccc

SEQ ID NO: 1439833 - DNA, 25 bp, Homo sapien
tgttgaaccgtatcccatgcagtgt

SEQ ID NO: 1439834 - DNA, 25 bp, Homo sapien
gcctatggtgagacaagacacaact

SEQ ID NO: 1439835 - DNA, 25 bp, Homo sapien
aaggctgcatttgctcacgtgataa

SEQ ID NO: 1439836 - DNA, 25 bp, Homo sapien
gagtcacgtcggtgtgaaaatcaac

SEQ ID NO: 1439837 - DNA, 25 bp, Homo sapien
tcaattctggatggcatgtgaaacc

SEQ ID NO: 1439838 - DNA, 25 bp, Homo sapien
aagaaaattgcctcacggtggagca

SEQ ID NO: 1439839 - DNA, 25 bp, Homo sapien
gaaatcagttcatccctgcaagggc

SEQ ID NO: 1439840 - DNA, 25 bp, Homo sapien
tatctgtcaagcatccataagtgcc

SEQ ID NO: 1439841 - DNA, 25 bp, Homo sapien
gctaagtcactaaaccaccttgcct

SEQ ID NO: 1439842 - DNA, 25 bp, Homo sapien
tcacaggcgtttttccgtagcgctg

SEQ ID NO: 1439843 - DNA, 25 bp, Homo sapien
aaagatgagcaatgtgagtaactac

SEQ ID NO: 1439844 - DNA, 25 bp, Homo sapien
tacacagccaatcttagcacaggtg

SEQ ID NO: 1439845 - DNA, 25 bp, Homo sapien
atgcaatctgggctgcaacttcgcc

SEQ ID NO: 1439846 - DNA, 25 bp, Homo sapien
gcagtgatgcaatctgggctgcaac

SEQ ID NO: 1439847 - DNA, 25 bp, Homo sapien
gcaatctgggctgcaacttcgcctc

SEQ ID NO: 1439848 - DNA, 25 bp, Homo sapien
tgatgcaatctgggctgcaacttcg

SEQ ID NO: 1439849 - DNA, 25 bp, Homo sapien
gaactctcggatacaatagataatg

SEQ ID NO: 1439850 - DNA, 25 bp, Homo sapien
ggttgaactctcggatacaatagat

SEQ ID NO: 1439851 - DNA, 25 bp, Homo sapien
gttgaactctcggatacaatagata

SEQ ID NO: 1439852 - DNA, 25 bp, Homo sapien
tctcggatacaatagataatgtaaa

SEQ ID NO: 1439853 - DNA, 25 bp, Homo sapien
cacccaggaattagcacatctccat

SEQ ID NO: 1439854 - DNA, 25 bp, Homo sapien
ccattttgctgtgggggtccaatcc

SEQ ID NO: 1439855 - DNA, 25 bp, Homo sapien
caatcctgaggtccagcaattgctc

SEQ ID NO: 1439856 - DNA, 25 bp, Homo sapien
aggtttcccatgaactaccatattt

SEQ ID NO: 1439857 - DNA, 25 bp, Homo sapien
agtagagagtagaattgaggcagga

SEQ ID NO: 1439858 - DNA, 25 bp, Homo sapien
gagtcgagcttataaaagtagagag

SEQ ID NO: 1439859 - DNA, 25 bp, Homo sapien
atgtgagtcgagcttataaaagtag

SEQ ID NO: 1439860 - DNA, 25 bp, Homo sapien
tgtgagtcgagcttataaaagtaga

SEQ ID NO: 1439861 - DNA, 25 bp, Homo sapien
ttgtcactgtactcgtactcaagga

SEQ ID NO: 1439862 - DNA, 25 bp, Homo sapien
ctgtactcgtactcaaggaagaaga

SEQ ID NO: 1439863 - DNA, 25 bp, Homo sapien
ctcgtactcaaggaagaagagctca

SEQ ID NO: 1439864 - DNA, 25 bp, Homo sapien
ggcctgtttgtcactgtactcgtac

SEQ ID NO: 1439865 - DNA, 25 bp, Homo sapien
aatgtggcttgcaatgtttactgca

SEQ ID NO: 1439866 - DNA, 25 bp, Homo sapien
cacattactaatgtggcttgcaatg

SEQ ID NO: 1439867 - DNA, 25 bp, Homo sapien
tttcttcatccacattactaatgtg

SEQ ID NO: 1439868 - DNA, 25 bp, Homo sapien
tactaatgtggcttgcaatgtttac

SEQ ID NO: 1439869 - DNA, 25 bp, Homo sapien
gaagtgactgtcaaagatatcctct

SEQ ID NO: 1439870 - DNA, 25 bp, Homo sapien
ttgtgggaagacaccaatgacccat

SEQ ID NO: 1439871 - DNA, 25 bp, Homo sapien
tgatctttcttactcagcccgtctc

SEQ ID NO: 1439872 - DNA, 25 bp, Homo sapien
gcaattgtcagcagatgtatgaagt

SEQ ID NO: 1439873 - DNA, 25 bp, Homo sapien
gcacatgaaaacaagcctcggcaga

SEQ ID NO: 1439874 - DNA, 25 bp, Homo sapien
tccagcagggtcacggaacaatggc

SEQ ID NO: 1439875 - DNA, 25 bp, Homo sapien
tatgagacttgaaatatgatgcacc

SEQ ID NO: 1439876 - DNA, 25 bp, Homo sapien
gaccaagatgcttctagtaaggacc

SEQ ID NO: 1439877 - DNA, 25 bp, Homo sapien
tagcagtgcttttagggtgagattg

SEQ ID NO: 1439878 - DNA, 25 bp, Homo sapien
ctttagcagtgcttttagggtgaga

SEQ ID NO: 1439879 - DNA, 25 bp, Homo sapien
tgcttttagggtgagattgtgttcc

SEQ ID NO: 1439880 - DNA, 25 bp, Homo sapien
tctcctttagcagtgcttttagggt

SEQ ID NO: 1439881 - DNA, 25 bp, Homo sapien
gcgtccccagcattcatacgttgca

SEQ ID NO: 1439882 - DNA, 25 bp, Homo sapien
tcacccagtccgaatgtggaacaaa

SEQ ID NO: 1439883 - DNA, 25 bp, Homo sapien
catcagaatcctgcggctgaagcgc

SEQ ID NO: 1439884 - DNA, 25 bp, Homo sapien
tacacagctactggaaggtgatgct

SEQ ID NO: 1439885 - DNA, 25 bp, Homo sapien
taaaactgaaatggtccgtgtttgc

SEQ ID NO: 1439886 - DNA, 25 bp, Homo sapien
gaccacagatcatcagtactgttgt

SEQ ID NO: 1439887 - DNA, 25 bp, Homo sapien
tatggtgttgaaaactgcagtgtcc

SEQ ID NO: 1439888 - DNA, 25 bp, Homo sapien
caacggtattgaagttcttatgacc

SEQ ID NO: 1439889 - DNA, 25 bp, Homo sapien
gttaatgagtgacacaaagtttcca

SEQ ID NO: 1439890 - DNA, 25 bp, Homo sapien
cattcaaaaggccaaggtaaacacg

SEQ ID NO: 1439891 - DNA, 25 bp, Homo sapien
gggcaacagtctggagagtataacc

SEQ ID NO: 1439892 - DNA, 25 bp, Homo sapien
catagatatgttaatgagtgacaca

SEQ ID NO: 1439893 - DNA, 25 bp, Homo sapien
ggcattgacaaccatattaagatat

SEQ ID NO: 1439894 - DNA, 25 bp, Homo sapien
cctgggcaatgacttgtaaatagga

SEQ ID NO: 1439895 - DNA, 25 bp, Homo sapien
aagctgaaattgtccttgaatcaga

SEQ ID NO: 1439896 - DNA, 25 bp, Homo sapien
aatcagagtgcagctctggttggga

SEQ ID NO: 1439897 - DNA, 25 bp, Homo sapien
ctggcactaaagatgctccttttat

SEQ ID NO: 1439898 - DNA, 25 bp, Homo sapien
ctaatcaaaatagtagctcggttga

SEQ ID NO: 1439899 - DNA, 25 bp, Homo sapien
tcggttgagtgaggataagtgacct

SEQ ID NO: 1439900 - DNA, 25 bp, Homo sapien
caaaatagtagctcggttgagtgag

SEQ ID NO: 1439901 - DNA, 25 bp, Homo sapien
tagtagctcggttgagtgaggataa

SEQ ID NO: 1439902 - DNA, 25 bp, Homo sapien
gggagactcacctaggtagccagag

SEQ ID NO: 1439903 - DNA, 25 bp, Homo sapien
cctgacaatcaatggcatgaaagat

SEQ ID NO: 1439904 - DNA, 25 bp, Homo sapien
tcttggaaatggtcctcccctttga

SEQ ID NO: 1439905 - DNA, 25 bp, Homo sapien
atggcatgaaagattgttgcagcca

SEQ ID NO: 1439906 - DNA, 25 bp, Homo sapien
tgctccatggatctttgactattag

SEQ ID NO: 1439907 - DNA, 25 bp, Homo sapien
tgactattagaatctctttaagaac

SEQ ID NO: 1439908 - DNA, 25 bp, Homo sapien
ggattccaaccagaaatcctaactg

SEQ ID NO: 1439909 - DNA, 25 bp, Homo sapien
aactgaaagatgtgtccgttgctcc

SEQ ID NO: 1439910 - DNA, 25 bp, Homo sapien
taattttgaacccaaatagatactc

SEQ ID NO: 1439911 - DNA, 25 bp, Homo sapien
cagaagtaaccacaggggttgacgg

SEQ ID NO: 1439912 - DNA, 25 bp, Homo sapien
aactggtggcttcaaatgaaaaaga

SEQ ID NO: 1439913 - DNA, 25 bp, Homo sapien
ttgccaagcttaggtgacttgaaat

SEQ ID NO: 1439914 - DNA, 25 bp, Homo sapien
ttctctaactggtttcctgcccaca

SEQ ID NO: 1439915 - DNA, 25 bp, Homo sapien
gaacctgctctgtatgcaccccatc

SEQ ID NO: 1439916 - DNA, 25 bp, Homo sapien
gtatgcaccccatcaacaggctttt

SEQ ID NO: 1439917 - DNA, 25 bp, Homo sapien
tctctaactggtttcctgcccacaa

SEQ ID NO: 1439918 - DNA, 25 bp, Homo sapien
ggatcccaggatgctgttcagtgtg

SEQ ID NO: 1439919 - DNA, 25 bp, Homo sapien
gaatacatccgtcggctcctttgcc

SEQ ID NO: 1439920 - DNA, 25 bp, Homo sapien
cctagtctgcagttgagttcctgta

SEQ ID NO: 1439921 - DNA, 25 bp, Homo sapien
gctgttcagtgtggaatacatccgt

SEQ ID NO: 1439922 - DNA, 25 bp, Homo sapien
gtgaattctgcatgaccaaggagct

SEQ ID NO: 1439923 - DNA, 25 bp, Homo sapien
gagcttgcagttctcagtttgctgc

SEQ ID NO: 1439924 - DNA, 25 bp, Homo sapien
tctgcatgaccaaggagcttgcagt

SEQ ID NO: 1439925 - DNA, 25 bp, Homo sapien
gggcccaactcctccttgtgaattc

SEQ ID NO: 1439926 - DNA, 25 bp, Homo sapien
ctgctggtgctgctagtccggggca

SEQ ID NO: 1439927 - DNA, 25 bp, Homo sapien
tggtgctgctagtccggggcaggca

SEQ ID NO: 1439928 - DNA, 25 bp, Homo sapien
tttgcagagacgctgtggggcccat

SEQ ID NO: 1439929 - DNA, 25 bp, Homo sapien
cacctttgcagagacgctgtggggc

SEQ ID NO: 1439930 - DNA, 25 bp, Homo sapien
ttccactttagctctactctgccat

SEQ ID NO: 1439931 - DNA, 25 bp, Homo sapien
gttgaatctctcctcatgtcaccag

SEQ ID NO: 1439932 - DNA, 25 bp, Homo sapien
cagtagcttcttaaattcatcaggg

SEQ ID NO: 1439933 - DNA, 25 bp, Homo sapien
tcctcaccatgttaagttgaatctc

SEQ ID NO: 1439934 - DNA, 25 bp, Homo sapien
tgccagtgggagaataaatctctat

SEQ ID NO: 1439935 - DNA, 25 bp, Homo sapien
tgtagttactctgtcttctaagagc

SEQ ID NO: 1439936 - DNA, 25 bp, Homo sapien
gaatcacagctttcatgccagtggg

SEQ ID NO: 1439937 - DNA, 25 bp, Homo sapien
tagacagtgatgtagaaggtggtca

SEQ ID NO: 1439938 - DNA, 25 bp, Homo sapien
tgaggcttaaaatgcaaggcgtgtg

SEQ ID NO: 1439939 - DNA, 25 bp, Homo sapien
caggatatttgctgggcgtttcacc

SEQ ID NO: 1439940 - DNA, 25 bp, Homo sapien
gcagtgcagaggaattacaggatat

SEQ ID NO: 1439941 - DNA, 25 bp, Homo sapien
tgagatacgtgtcttctgcacagag

SEQ ID NO: 1439942 - DNA, 25 bp, Homo sapien
taggcttggttcagacttacaggga

SEQ ID NO: 1439943 - DNA, 25 bp, Homo sapien
aatcaaatcgttcagggactcccca

SEQ ID NO: 1439944 - DNA, 25 bp, Homo sapien
cttagaacatgagcacaaggcccca

SEQ ID NO: 1439945 - DNA, 25 bp, Homo sapien
cagactttccaggtaggtaggcaaa

SEQ ID NO: 1439946 - DNA, 25 bp, Homo sapien
gtttgttatccttgtaattccacag

SEQ ID NO: 1439947 - DNA, 25 bp, Homo sapien
tgtaattccacagtgttccccggtg

SEQ ID NO: 1439948 - DNA, 25 bp, Homo sapien
gagttagacaccaagtttgttatcc

SEQ ID NO: 1439949 - DNA, 25 bp, Homo sapien
ctttagagttagacaccaagtttgt

SEQ ID NO: 1439950 - DNA, 25 bp, Homo sapien
ttctattatggtaactgtgtgtcca

SEQ ID NO: 1439951 - DNA, 25 bp, Homo sapien
taacttgtgtcagaatctccctcct

SEQ ID NO: 1439952 - DNA, 25 bp, Homo sapien
taagtaaaaccatacaccatttgtc

SEQ ID NO: 1439953 - DNA, 25 bp, Homo sapien
gatgttggacatcttcaatttgcca

SEQ ID NO: 1439954 - DNA, 25 bp, Homo sapien
aaatgttgaaattacaggcatgaga

SEQ ID NO: 1439955 - DNA, 25 bp, Homo sapien
actcaagtgatcagcttgcctaggc

SEQ ID NO: 1439956 - DNA, 25 bp, Homo sapien
tggactcaagtgatcagcttgccta

SEQ ID NO: 1439957 - DNA, 25 bp, Homo sapien
ctcccaaaatgttgaaattacaggc

SEQ ID NO: 1439958 - DNA, 25 bp, Homo sapien
tctttagctgactgctcaatatcac

SEQ ID NO: 1439959 - DNA, 25 bp, Homo sapien
tttagctgactgctcaatatcactg

SEQ ID NO: 1439960 - DNA, 25 bp, Homo sapien
ctgactgctcaatatcactgctctc

SEQ ID NO: 1439961 - DNA, 25 bp, Homo sapien
tagctgactgctcaatatcactgct

SEQ ID NO: 1439962 - DNA, 25 bp, Homo sapien
taaagagaagtgtgtgacacagtgg

SEQ ID NO: 1439963 - DNA, 25 bp, Homo sapien
ttggattcaactgttatttgtcaga

SEQ ID NO: 1439964 - DNA, 25 bp, Homo sapien
aataaagagaagtgtgtgacacagt

SEQ ID NO: 1439965 - DNA, 25 bp, Homo sapien
tttgggggtagatattggattcaac

SEQ ID NO: 1439966 - DNA, 25 bp, Homo sapien
gcagtatcataagtcgccagggtct

SEQ ID NO: 1439967 - DNA, 25 bp, Homo sapien
agtatcataagtcgccagggtctct

SEQ ID NO: 1439968 - DNA, 25 bp, Homo sapien
gaagtgcctgttgtgttctgcagta

SEQ ID NO: 1439969 - DNA, 25 bp, Homo sapien
aatctgaagtgcctgttgtgttctg

SEQ ID NO: 1439970 - DNA, 25 bp, Homo sapien
aaatccaaagactattctgcttgtt

SEQ ID NO: 1439971 - DNA, 25 bp, Homo sapien
tgctgagaaaagaagcgtgaatcct

SEQ ID NO: 1439972 - DNA, 25 bp, Homo sapien
ttcagatttggctaaagatactgct

SEQ ID NO: 1439973 - DNA, 25 bp, Homo sapien
ggaacatcaactttcatgactaaag

SEQ ID NO: 1439974 - DNA, 25 bp, Homo sapien
aggaatgaccaacccgaagaagagt

SEQ ID NO: 1439975 - DNA, 25 bp, Homo sapien
aatgaccaacccgaagaagagtgtt

SEQ ID NO: 1439976 - DNA, 25 bp, Homo sapien
tcttagagactagagcacagtcagt

SEQ ID NO: 1439977 - DNA, 25 bp, Homo sapien
agcacagtcagtcgaatagcccacc

SEQ ID NO: 1439978 - DNA, 25 bp, Homo sapien
tgagagggagtctcgcttttttgcc

SEQ ID NO: 1439979 - DNA, 25 bp, Homo sapien
tctcgcttttttgcccaggccagac

SEQ ID NO: 1439980 - DNA, 25 bp, Homo sapien
tttgagagggagtctcgcttttttg

SEQ ID NO: 1439981 - DNA, 25 bp, Homo sapien
agagggagtctcgcttttttgccca

SEQ ID NO: 1439982 - DNA, 25 bp, Homo sapien
cttggacggagcagagaaataagag

SEQ ID NO: 1439983 - DNA, 25 bp, Homo sapien
ttggacggagcagagaaataagaga

SEQ ID NO: 1439984 - DNA, 25 bp, Homo sapien
accctaaagactgtatgaaaactat

SEQ ID NO: 1439985 - DNA, 25 bp, Homo sapien
taaagttaggtgaaatttctgtaca

SEQ ID NO: 1439986 - DNA, 25 bp, Homo sapien
gcataattttacatatggaaaaccc

SEQ ID NO: 1439987 - DNA, 25 bp, Homo sapien
aagactgtatgaaaactattagaac

SEQ ID NO: 1439988 - DNA, 25 bp, Homo sapien
ggcacaaggtccaaaaggaatctct

SEQ ID NO: 1439989 - DNA, 25 bp, Homo sapien
ttaatacattcagggcaactttgcc

SEQ ID NO: 1439990 - DNA, 25 bp, Homo sapien
tagtctgacttctgacctggcaggc

SEQ ID NO: 1439991 - DNA, 25 bp, Homo sapien
cagaaatgggttgcttcaggatcac

SEQ ID NO: 1439992 - DNA, 25 bp, Homo sapien
tactcctgtgattcaggtgagaaca

SEQ ID NO: 1439993 - DNA, 25 bp, Homo sapien
gatgcagctgatattgggtccacag

SEQ ID NO: 1439994 - DNA, 25 bp, Homo sapien
tacccatggttgcacagtttgtaaa

SEQ ID NO: 1439995 - DNA, 25 bp, Homo sapien
tcaaaagtgagattaggaggatgca

SEQ ID NO: 1439996 - DNA, 25 bp, Homo sapien
cagtataaggtctcatgagatggtc

SEQ ID NO: 1439997 - DNA, 25 bp, Homo sapien
ggcctttgaacaagcacaactccca

SEQ ID NO: 1439998 - DNA, 25 bp, Homo sapien
caccacatgtagaggagggagtttc

SEQ ID NO: 1439999 - DNA, 25 bp, Homo sapien
agtggcacacatgcactgagccgtt

SEQ ID NO: 1440000 - DNA, 25 bp, Homo sapien
gggaactgccacatccgaaggccat

SEQ ID NO: 1440001 - DNA, 25 bp, Homo sapien
agggaactgccacatccgaaggcca

SEQ ID NO: 1440002 - DNA, 25 bp, Homo sapien
gaactgccacatccgaaggccatac

SEQ ID NO: 1440003 - DNA, 25 bp, Homo sapien
tcagggaactgccacatccgaaggc

SEQ ID NO: 1440004 - DNA, 25 bp, Homo sapien
gggacatgggacatctaagacttgg

SEQ ID NO: 1440005 - DNA, 25 bp, Homo sapien
tactgtgcgccttggaccactattg

SEQ ID NO: 1440006 - DNA, 25 bp, Homo sapien
ttataggccgtctctccagtgcgag

SEQ ID NO: 1440007 - DNA, 25 bp, Homo sapien
acactggtagcgtttctgtctggcg

SEQ ID NO: 1440008 - DNA, 25 bp, Homo sapien
ttcaggtgacaatcaggaatctggc

SEQ ID NO: 1440009 - DNA, 25 bp, Homo sapien
tcaggtgacaatcaggaatctggct

SEQ ID NO: 1440010 - DNA, 25 bp, Homo sapien
ggtgacaatcaggaatctggctgaa

SEQ ID NO: 1440011 - DNA, 25 bp, Homo sapien
caggtgacaatcaggaatctggctg

SEQ ID NO: 1440012 - DNA, 25 bp, Homo sapien
catgttgactcccttctttatgtcc

SEQ ID NO: 1440013 - DNA, 25 bp, Homo sapien
tctttatgtccacagaatctctcac

SEQ ID NO: 1440014 - DNA, 25 bp, Homo sapien
ttctttatgtccacagaatctctca

SEQ ID NO: 1440015 - DNA, 25 bp, Homo sapien
actcccttctttatgtccacagaat

SEQ ID NO: 1440016 - DNA, 25 bp, Homo sapien
ccagactttgacagaggccaggttc

SEQ ID NO: 1440017 - DNA, 25 bp, Homo sapien
catcttcaaaggccactgagtccat

SEQ ID NO: 1440018 - DNA, 25 bp, Homo sapien
atctctgtagagattcttctgggaa

SEQ ID NO: 1440019 - DNA, 25 bp, Homo sapien
tctgggaaggactcagcaaagccca

SEQ ID NO: 1440020 - DNA, 25 bp, Homo sapien
agattcttctgggaaggactcagca

SEQ ID NO: 1440021 - DNA, 25 bp, Homo sapien
caaaagtgagcagttccctaggtac

SEQ ID NO: 1440022 - DNA, 25 bp, Homo sapien
tccccgtggttgtgattcccgagca

SEQ ID NO: 1440023 - DNA, 25 bp, Homo sapien
tctggagacttaagcttgaaaccgc

SEQ ID NO: 1440024 - DNA, 25 bp, Homo sapien
ctgttcggaaaagggcaagctatct

SEQ ID NO: 1440025 - DNA, 25 bp, Homo sapien
cacagacagaagtaatcatgaagta

SEQ ID NO: 1440026 - DNA, 25 bp, Homo sapien
caagggatttgcaatcaccaaagaa

SEQ ID NO: 1440027 - DNA, 25 bp, Homo sapien
tattcacagacagaagtaatcatga

SEQ ID NO: 1440028 - DNA, 25 bp, Homo sapien
tcatgaagtatcacaagggatttgc

SEQ ID NO: 1440029 - DNA, 25 bp, Homo sapien
ggttactgctttctgtgacctaaga

SEQ ID NO: 1440030 - DNA, 25 bp, Homo sapien
gaagattattacaaagcaactccca

SEQ ID NO: 1440031 - DNA, 25 bp, Homo sapien
gaagatgggtacacattctccctaa

SEQ ID NO: 1440032 - DNA, 25 bp, Homo sapien
cgaatgagatcaagatgagccttcc

SEQ ID NO: 1440033 - DNA, 25 bp, Homo sapien
tgctttgaagcataatactcagacc

SEQ ID NO: 1440034 - DNA, 25 bp, Homo sapien
taacatgaactgtcagacctccagt

SEQ ID NO: 1440035 - DNA, 25 bp, Homo sapien
gcaggctgtacgaaatttattcaaa

SEQ ID NO: 1440036 - DNA, 25 bp, Homo sapien
caatattccattgagagtaacacca

SEQ ID NO: 1440037 - DNA, 25 bp, Homo sapien
gacaaccagtttaatcaagatctga

SEQ ID NO: 1440038 - DNA, 25 bp, Homo sapien
gaatatcgtttgtgcattttctagc

SEQ ID NO: 1440039 - DNA, 25 bp, Homo sapien
tagcttcatatggtagttagacaac

SEQ ID NO: 1440040 - DNA, 25 bp, Homo sapien
tctcaaataactggtatagcagata

SEQ ID NO: 1440041 - DNA, 25 bp, Homo sapien
cacatgatgcaggtagggaagaagt

SEQ ID NO: 1440042 - DNA, 25 bp, Homo sapien
cactattgccaaacgtgcactgagc

SEQ ID NO: 1440043 - DNA, 25 bp, Homo sapien
tgaatccatgcattaaagacaagac

SEQ ID NO: 1440044 - DNA, 25 bp, Homo sapien
gagccaattaggatgttgctctaag

SEQ ID NO: 1440045 - DNA, 25 bp, Homo sapien
gagctttctttgcgttctgtttttc

SEQ ID NO: 1440046 - DNA, 25 bp, Homo sapien
tttcctgagctttctttgcgttctg

SEQ ID NO: 1440047 - DNA, 25 bp, Homo sapien
cctgagctttctttgcgttctgttt

SEQ ID NO: 1440048 - DNA, 25 bp, Homo sapien
tcctgagctttctttgcgttctgtt

SEQ ID NO: 1440049 - DNA, 25 bp, Homo sapien
aaaagtcagttttagactatattag

SEQ ID NO: 1440050 - DNA, 25 bp, Homo sapien
taaaagtcagttttagactatatta

SEQ ID NO: 1440051 - DNA, 25 bp, Homo sapien
cagttttagactatattagaataaa

SEQ ID NO: 1440052 - DNA, 25 bp, Homo sapien
gtaagtcctcaatacagatcaaaga

SEQ ID NO: 1440053 - DNA, 25 bp, Homo sapien
agtcccacagctagtatacagtaag

SEQ ID NO: 1440054 - DNA, 25 bp, Homo sapien
ttatcaagcttgaccaaagtcccac

SEQ ID NO: 1440055 - DNA, 25 bp, Homo sapien
tataccaatgacttagagaccctgt

SEQ ID NO: 1440056 - DNA, 25 bp, Homo sapien
aatagtgcctaaaagctccagctaa

SEQ ID NO: 1440057 - DNA, 25 bp, Homo sapien
ccttctatacagtgtaccaatgata

SEQ ID NO: 1440058 - DNA, 25 bp, Homo sapien
tactgactcaaatcagataattctg

SEQ ID NO: 1440059 - DNA, 25 bp, Homo sapien
gattagccttaactattcttctacc

SEQ ID NO: 1440060 - DNA, 25 bp, Homo sapien
ttataggttctaaccaagttcatta

SEQ ID NO: 1440061 - DNA, 25 bp, Homo sapien
gaattcatcggttaaaaagtctcac

SEQ ID NO: 1440062 - DNA, 25 bp, Homo sapien
tatttttggattacctcctaggcag

SEQ ID NO: 1440063 - DNA, 25 bp, Homo sapien
gaaagagatttggtacataatacaa

SEQ ID NO: 1440064 - DNA, 25 bp, Homo sapien
cagcatatagtagcactgcatggtg

SEQ ID NO: 1440065 - DNA, 25 bp, Homo sapien
aaaaatctcatcctgtagaatctca

SEQ ID NO: 1440066 - DNA, 25 bp, Homo sapien
aactgcctcagctattcaaaaatct

SEQ ID NO: 1440067 - DNA, 25 bp, Homo sapien
tgtcatcacagattataggcaactg

SEQ ID NO: 1440068 - DNA, 25 bp, Homo sapien
tacatccctagaccttaacagagtg

SEQ ID NO: 1440069 - DNA, 25 bp, Homo sapien
caaaggaaacggatatagtgctaca

SEQ ID NO: 1440070 - DNA, 25 bp, Homo sapien
tatttaggagctaccctgtgcttgc

SEQ ID NO: 1440071 - DNA, 25 bp, Homo sapien
gcctggaatatcctcgcagctagat

SEQ ID NO: 1440072 - DNA, 25 bp, Homo sapien
cagaaaaacctataatggaaaagag

SEQ ID NO: 1440073 - DNA, 25 bp, Homo sapien
gaaaagagaagatttagcagtcttc

SEQ ID NO: 1440074 - DNA, 25 bp, Homo sapien
catgaaacagcttggttgaaatcaa

SEQ ID NO: 1440075 - DNA, 25 bp, Homo sapien
ctaggtattcttgttaaccaagcaa

SEQ ID NO: 1440076 - DNA, 25 bp, Homo sapien
tgtattctcgtctttaagttaatgg

SEQ ID NO: 1440077 - DNA, 25 bp, Homo sapien
catgtattctcgtctttaagttaat

SEQ ID NO: 1440078 - DNA, 25 bp, Homo sapien
atgtattctcgtctttaagttaatg

SEQ ID NO: 1440079 - DNA, 25 bp, Homo sapien
tgcctagtagtgtcttctcaaagtg

SEQ ID NO: 1440080 - DNA, 25 bp, Homo sapien
cctagtagtgtcttctcaaagtgtt

SEQ ID NO: 1440081 - DNA, 25 bp, Homo sapien
ttatttgcctagtagtgtcttctca

SEQ ID NO: 1440082 - DNA, 25 bp, Homo sapien
tttgcctagtagtgtcttctcaaag

SEQ ID NO: 1440083 - DNA, 25 bp, Homo sapien
taaagaatccttcccctatatcaga

SEQ ID NO: 1440084 - DNA, 25 bp, Homo sapien
tggtacacagaccagttgcattaga

SEQ ID NO: 1440085 - DNA, 25 bp, Homo sapien
ctgtggtacacagaccagttgcatt

SEQ ID NO: 1440086 - DNA, 25 bp, Homo sapien
attaaagaatccttcccctatatca

SEQ ID NO: 1440087 - DNA, 25 bp, Homo sapien
gctaaagtctttaacaattccataa

SEQ ID NO: 1440088 - DNA, 25 bp, Homo sapien
tggtgttctgctaaagtctttaaca

SEQ ID NO: 1440089 - DNA, 25 bp, Homo sapien
ggcagataattatgcttccttctga

SEQ ID NO: 1440090 - DNA, 25 bp, Homo sapien
caattccataatgaaaggcagataa

SEQ ID NO: 1440091 - DNA, 25 bp, Homo sapien
tctgactgaatagcacttaacatac

SEQ ID NO: 1440092 - DNA, 25 bp, Homo sapien
tggcaacttctgactgaatagcact

SEQ ID NO: 1440093 - DNA, 25 bp, Homo sapien
catactattaccttgatctgtatcc

SEQ ID NO: 1440094 - DNA, 25 bp, Homo sapien
gcacttaacatactattaccttgat

SEQ ID NO: 1440095 - DNA, 25 bp, Homo sapien
acaatggccattaaattaaatcgaa

SEQ ID NO: 1440096 - DNA, 25 bp, Homo sapien
aatggccattaaattaaatcgaatt

SEQ ID NO: 1440097 - DNA, 25 bp, Homo sapien
caatggccattaaattaaatcgaat

SEQ ID NO: 1440098 - DNA, 25 bp, Homo sapien
atcatttttctgtcagacacaatgg

SEQ ID NO: 1440099 - DNA, 25 bp, Homo sapien
gatgacatactactacatgaaattt

SEQ ID NO: 1440100 - DNA, 25 bp, Homo sapien
caaaagtagatgtttggctgggcac

SEQ ID NO: 1440101 - DNA, 25 bp, Homo sapien
attatctaacttaatggaaatctgc

SEQ ID NO: 1440102 - DNA, 25 bp, Homo sapien
tctgaaatagacttcttaaatgcat

SEQ ID NO: 1440103 - DNA, 25 bp, Homo sapien
tgggcaacatggtgaaaacccgtct

SEQ ID NO: 1440104 - DNA, 25 bp, Homo sapien
cctgggcaacatggtgaaaacccgt

SEQ ID NO: 1440105 - DNA, 25 bp, Homo sapien
gaggtcgaggcaggcggatggcttg

SEQ ID NO: 1440106 - DNA, 25 bp, Homo sapien
agctcaggagtctgagaccagcctg

SEQ ID NO: 1440107 - DNA, 25 bp, Homo sapien
agtagatgttcaatgcacactgcta

SEQ ID NO: 1440108 - DNA, 25 bp, Homo sapien
atgcacactgctaaaataacaataa

SEQ ID NO: 1440109 - DNA, 25 bp, Homo sapien
acagaatattatgccaatgagatta

SEQ ID NO: 1440110 - DNA, 25 bp, Homo sapien
tgttcaatgcacactgctaaaataa

SEQ ID NO: 1440111 - DNA, 25 bp, Homo sapien
ttactgcactgatccaatcatcttg

SEQ ID NO: 1440112 - DNA, 25 bp, Homo sapien
tttttctatgacaggccttactgca

SEQ ID NO: 1440113 - DNA, 25 bp, Homo sapien
gatccaatcatcttgattgcatgca

SEQ ID NO: 1440114 - DNA, 25 bp, Homo sapien
ttttctatgacaggccttactgcac

SEQ ID NO: 1440115 - DNA, 25 bp, Homo sapien
tgaaaatttaagcagcactgaatga

SEQ ID NO: 1440116 - DNA, 25 bp, Homo sapien
aagtgaaatatcaggaacaggaact

SEQ ID NO: 1440117 - DNA, 25 bp, Homo sapien
agtgaaatatcaggaacaggaactg

SEQ ID NO: 1440118 - DNA, 25 bp, Homo sapien
tacagtctcccattaacaggaacat

SEQ ID NO: 1440119 - DNA, 25 bp, Homo sapien
caggaacataactgacaaagtgaaa

SEQ ID NO: 1440120 - DNA, 25 bp, Homo sapien
caatcggtccttctcttaatccatc

SEQ ID NO: 1440121 - DNA, 25 bp, Homo sapien
gatgtcttcgtatcaaattcaaaca

SEQ ID NO: 1440122 - DNA, 25 bp, Homo sapien
tctgaattgctcagtgccaagcctt

SEQ ID NO: 1440123 - DNA, 25 bp, Homo sapien
ctggcgaaactgttgtgtacttgtc

SEQ ID NO: 1440124 - DNA, 25 bp, Homo sapien
gtgtacttgtcgaatcacatctgaa

SEQ ID NO: 1440125 - DNA, 25 bp, Homo sapien
gtcgaatcacatctgaattgctcag

SEQ ID NO: 1440126 - DNA, 25 bp, Homo sapien
gttcagtaacacactcactatggct

SEQ ID NO: 1440127 - DNA, 25 bp, Homo sapien
taaatggacatcctggtgggtacag

SEQ ID NO: 1440128 - DNA, 25 bp, Homo sapien
agctgcatcaaaactttgtgaaaat

SEQ ID NO: 1440129 - DNA, 25 bp, Homo sapien
tctgataatgtctcgcctaaatgga

SEQ ID NO: 1440130 - DNA, 25 bp, Homo sapien
tatcctgggctcatgcagtgttccc

SEQ ID NO: 1440131 - DNA, 25 bp, Homo sapien
tgggctcatgcagtgttcccacctc

SEQ ID NO: 1440132 - DNA, 25 bp, Homo sapien
atcctgggctcatgcagtgttccca

SEQ ID NO: 1440133 - DNA, 25 bp, Homo sapien
gctcatgcagtgttcccacctcagc

SEQ ID NO: 1440134 - DNA, 25 bp, Homo sapien
gtaagagtttgaggactactacact

SEQ ID NO: 1440135 - DNA, 25 bp, Homo sapien
gatagataatcccagaaacaaaagc

SEQ ID NO: 1440136 - DNA, 25 bp, Homo sapien
tagcaaacagtagtaaactagagtc

SEQ ID NO: 1440137 - DNA, 25 bp, Homo sapien
tgtctaatatggcaaacattgatag

SEQ ID NO: 1440138 - DNA, 25 bp, Homo sapien
ctgcttagcaaaaaatatcgtgtca

SEQ ID NO: 1440139 - DNA, 25 bp, Homo sapien
aaatatcgtgtcaagtcgggagtcc

SEQ ID NO: 1440140 - DNA, 25 bp, Homo sapien
tcgggagtcctgaaccacagagcct

SEQ ID NO: 1440141 - DNA, 25 bp, Homo sapien
tctcctggctgccacttgaaaagaa

SEQ ID NO: 1440142 - DNA, 25 bp, Homo sapien
ttcctctagccctccatttgaagat

SEQ ID NO: 1440143 - DNA, 25 bp, Homo sapien
gaaaattcctctagccctccatttg

SEQ ID NO: 1440144 - DNA, 25 bp, Homo sapien
aattcctctagccctccatttgaag

SEQ ID NO: 1440145 - DNA, 25 bp, Homo sapien
aaaattcctctagccctccatttga

SEQ ID NO: 1440146 - DNA, 25 bp, Homo sapien
aattctcaggctctaaactccatat

SEQ ID NO: 1440147 - DNA, 25 bp, Homo sapien
attctcaggctctaaactccatatt

SEQ ID NO: 1440148 - DNA, 25 bp, Homo sapien
gatttggcaccaaccctgtcggtca

SEQ ID NO: 1440149 - DNA, 25 bp, Homo sapien
tgtccctggattaatgctctgagcc

SEQ ID NO: 1440150 - DNA, 25 bp, Homo sapien
gaaggctggatattgttgcaagaca

SEQ ID NO: 1440151 - DNA, 25 bp, Homo sapien
cagaatggctgagggaatggctatt

SEQ ID NO: 1440152 - DNA, 25 bp, Homo sapien
taatacagcctcactacttgtgcag

SEQ ID NO: 1440153 - DNA, 25 bp, Homo sapien
tagcagccccccttgttaagattag

SEQ ID NO: 1440154 - DNA, 25 bp, Homo sapien
gattagttctctagctgagagttcc

SEQ ID NO: 1440155 - DNA, 25 bp, Homo sapien
aaagataatgtgtccctaaaggcaa

SEQ ID NO: 1440156 - DNA, 25 bp, Homo sapien
gaaacgcgactgtctcgagctgagg

SEQ ID NO: 1440157 - DNA, 25 bp, Homo sapien
agtcagcgtgtgtggacgtcccgaa

SEQ ID NO: 1440158 - DNA, 25 bp, Homo sapien
gactaatggcctgagcaatgcactt

SEQ ID NO: 1440159 - DNA, 25 bp, Homo sapien
gcgagggccctcaagtcaattacag

SEQ ID NO: 1440160 - DNA, 25 bp, Homo sapien
ggtggccgcagggaaccactccatg

SEQ ID NO: 1440161 - DNA, 25 bp, Homo sapien
gtggccgcagggaaccactccatgc

SEQ ID NO: 1440162 - DNA, 25 bp, Homo sapien
gcggtggccgcagggaaccactcca

SEQ ID NO: 1440163 - DNA, 25 bp, Homo sapien
cggtggccgcagggaaccactccat

SEQ ID NO: 1440164 - DNA, 25 bp, Homo sapien
ctcctcccgtgaccccaggcccagg

SEQ ID NO: 1440165 - DNA, 25 bp, Homo sapien
tcctcccgtgaccccaggcccagga

SEQ ID NO: 1440166 - DNA, 25 bp, Homo sapien
ctcccgtgaccccaggcccaggacg

SEQ ID NO: 1440167 - DNA, 25 bp, Homo sapien
gcctcctcccgtgaccccaggccca

SEQ ID NO: 1440168 - DNA, 25 bp, Homo sapien
cgaatcctttaatgagctcggtgaa

SEQ ID NO: 1440169 - DNA, 25 bp, Homo sapien
agaccccggggtcgctttccatgag

SEQ ID NO: 1440170 - DNA, 25 bp, Homo sapien
ctttaatgagctcggtgaagacccc

SEQ ID NO: 1440171 - DNA, 25 bp, Homo sapien
cggggtcgctttccatgaggcacca

SEQ ID NO: 1440172 - DNA, 25 bp, Homo sapien
accgccccgatccacctctcgctct

SEQ ID NO: 1440173 - DNA, 25 bp, Homo sapien
tcgctctcagctgccccccgcacca

SEQ ID NO: 1440174 - DNA, 25 bp, Homo sapien
cctggccacacaccgccccgatcca

SEQ ID NO: 1440175 - DNA, 25 bp, Homo sapien
gccgagctcgtcaaccacacgtcac

SEQ ID NO: 1440176 - DNA, 25 bp, Homo sapien
ctacttcccgacagcctccgggcgc

SEQ ID NO: 1440177 - DNA, 25 bp, Homo sapien
cctacttcccgacagcctccgggcg

SEQ ID NO: 1440178 - DNA, 25 bp, Homo sapien
cccgcctacttcccgacagcctccg

SEQ ID NO: 1440179 - DNA, 25 bp, Homo sapien
cgcctacttcccgacagcctccggg

SEQ ID NO: 1440180 - DNA, 25 bp, Homo sapien
ctgcagcgcgactgagcgcgggagg

SEQ ID NO: 1440181 - DNA, 25 bp, Homo sapien
cagcgcgactgagcgcgggaggacg

SEQ ID NO: 1440182 - DNA, 25 bp, Homo sapien
gcgcgactgagcgcgggaggacgct

SEQ ID NO: 1440183 - DNA, 25 bp, Homo sapien
tgcagcgcgactgagcgcgggagga

SEQ ID NO: 1440184 - DNA, 25 bp, Homo sapien
ccaccctagagacatcgaaactctt

SEQ ID NO: 1440185 - DNA, 25 bp, Homo sapien
cttgcagcacccgtagcggattcgg

SEQ ID NO: 1440186 - DNA, 25 bp, Homo sapien
cacccgtagcggattcggaagggct

SEQ ID NO: 1440187 - DNA, 25 bp, Homo sapien
gagacatcgaaactcttcccaggcc

SEQ ID NO: 1440188 - DNA, 25 bp, Homo sapien
gcggtgattcacagcgccgaggagg

SEQ ID NO: 1440189 - DNA, 25 bp, Homo sapien
gtgattcacagcgccgaggaggcaa

SEQ ID NO: 1440190 - DNA, 25 bp, Homo sapien
cgccgaggaggcaacatccgggatc

SEQ ID NO: 1440191 - DNA, 25 bp, Homo sapien
aggaggcaacatccgggatcctcgc

SEQ ID NO: 1440192 - DNA, 25 bp, Homo sapien
gggtaacggaaccagcatcgcggta

SEQ ID NO: 1440193 - DNA, 25 bp, Homo sapien
tcttttgtcgtttcccagcgctgcg

SEQ ID NO: 1440194 - DNA, 25 bp, Homo sapien
catcgcggtagggacatcctcgcta

SEQ ID NO: 1440195 - DNA, 25 bp, Homo sapien
ccagggacgcgcaaattctgaccag

SEQ ID NO: 1440196 - DNA, 25 bp, Homo sapien
ggaccgctcctgcttgtcggcatcg

SEQ ID NO: 1440197 - DNA, 25 bp, Homo sapien
ctgcttgtcggcatcgctccccaca

SEQ ID NO: 1440198 - DNA, 25 bp, Homo sapien
gctcctgcttgtcggcatcgctccc

SEQ ID NO: 1440199 - DNA, 25 bp, Homo sapien
gggaccgctcctgcttgtcggcatc

SEQ ID NO: 1440200 - DNA, 25 bp, Homo sapien
aacaaacctctatcatgggcccaat

SEQ ID NO: 1440201 - DNA, 25 bp, Homo sapien
tgagatctggcaactactagttcca

SEQ ID NO: 1440202 - DNA, 25 bp, Homo sapien
cataccacgtggcaaccagttggca

SEQ ID NO: 1440203 - DNA, 25 bp, Homo sapien
cctgtatcatgggtaaacaaacctc

SEQ ID NO: 1440204 - DNA, 25 bp, Homo sapien
taatatgcggccatgcttggccggg

SEQ ID NO: 1440205 - DNA, 25 bp, Homo sapien
cattagtactgataaaagatactgt

SEQ ID NO: 1440206 - DNA, 25 bp, Homo sapien
taatgtgtgttactagcatttcctg

SEQ ID NO: 1440207 - DNA, 25 bp, Homo sapien
gctgtagttctgatgattgtgaaac

SEQ ID NO: 1440208 - DNA, 25 bp, Homo sapien
tatatcaaagaacagaagttgggcc

SEQ ID NO: 1440209 - DNA, 25 bp, Homo sapien
gatctacctgcttaatctctgaagg

SEQ ID NO: 1440210 - DNA, 25 bp, Homo sapien
catgtttacacaattcttcagggag

SEQ ID NO: 1440211 - DNA, 25 bp, Homo sapien
gacatgaatcgactacaccggttct

SEQ ID NO: 1440212 - DNA, 25 bp, Homo sapien
tatgagactaatgcccagctactga

SEQ ID NO: 1440213 - DNA, 25 bp, Homo sapien
actggtatccgtgtatagcctggga

SEQ ID NO: 1440214 - DNA, 25 bp, Homo sapien
tgcatatcagcagtccacaaccctt

SEQ ID NO: 1440215 - DNA, 25 bp, Homo sapien
gaagacagtttttccgcaggcagtg

SEQ ID NO: 1440216 - DNA, 25 bp, Homo sapien
tctacaccacttgtcagggcacact

SEQ ID NO: 1440217 - DNA, 25 bp, Homo sapien
actaagtcaatacgtgtctacacca

SEQ ID NO: 1440218 - DNA, 25 bp, Homo sapien
tggaagatagcaagagtcacaatac

SEQ ID NO: 1440219 - DNA, 25 bp, Homo sapien
aataacataataggctcagttggca

SEQ ID NO: 1440220 - DNA, 25 bp, Homo sapien
tttattatggccgtctaaggtagct

SEQ ID NO: 1440221 - DNA, 25 bp, Homo sapien
gagcaagtatccttcattgtgaggt

SEQ ID NO: 1440222 - DNA, 25 bp, Homo sapien
taaggtagcttacacataaaacctg

SEQ ID NO: 1440223 - DNA, 25 bp, Homo sapien
taaggtccttctcgctgttatgtga

SEQ ID NO: 1440224 - DNA, 25 bp, Homo sapien
aatagttccaggatatagttgtaat

SEQ ID NO: 1440225 - DNA, 25 bp, Homo sapien
aaaacaatcctgcaagaataaacaa

SEQ ID NO: 1440226 - DNA, 25 bp, Homo sapien
acaatcctgcaagaataaacaaact

SEQ ID NO: 1440227 - DNA, 25 bp, Homo sapien
tatttcctaggtagtatgtaaatag

SEQ ID NO: 1440228 - DNA, 25 bp, Homo sapien
tggtaactgatgctattacagtagg

SEQ ID NO: 1440229 - DNA, 25 bp, Homo sapien
tagtcttatatactgcaggtttggg

SEQ ID NO: 1440230 - DNA, 25 bp, Homo sapien
gggtgattgttaaggcactatcccc

SEQ ID NO: 1440231 - DNA, 25 bp, Homo sapien
taacttgacctgttgtagccacaaa

SEQ ID NO: 1440232 - DNA, 25 bp, Homo sapien
ttttcaacttagtaataggcaggct

SEQ ID NO: 1440233 - DNA, 25 bp, Homo sapien
aaatgaatgacaggaaagtcaccca

SEQ ID NO: 1440234 - DNA, 25 bp, Homo sapien
ggcaggcttcttggaacaataagta

SEQ ID NO: 1440235 - DNA, 25 bp, Homo sapien
catacaagtataagatcatattttc

SEQ ID NO: 1440236 - DNA, 25 bp, Homo sapien
tctgtccgcctcggccttccaaagt

SEQ ID NO: 1440237 - DNA, 25 bp, Homo sapien
tcaggctggcctcgatctcgtgacc

SEQ ID NO: 1440238 - DNA, 25 bp, Homo sapien
ggtcaggctggcctcgatctcgtga

SEQ ID NO: 1440239 - DNA, 25 bp, Homo sapien
cgtgacctcgtgatctgtccgcctc

SEQ ID NO: 1440240 - DNA, 25 bp, Homo sapien
tccatacgtagccaaattagattta

SEQ ID NO: 1440241 - DNA, 25 bp, Homo sapien
tggactctctatatctggtatggcg

SEQ ID NO: 1440242 - DNA, 25 bp, Homo sapien
tcaagagccttaaagtgaaaaaatg

SEQ ID NO: 1440243 - DNA, 25 bp, Homo sapien
gcgtgactgggcataacttctgtaa

SEQ ID NO: 1440244 - DNA, 25 bp, Homo sapien
aaatctagatacagtgatgtgttat

SEQ ID NO: 1440245 - DNA, 25 bp, Homo sapien
cattttaaaacctgattgtacattg

SEQ ID NO: 1440246 - DNA, 25 bp, Homo sapien
cagtgatgtgttatacatacatgac

SEQ ID NO: 1440247 - DNA, 25 bp, Homo sapien
atacatgactgttaacatcagtaat

SEQ ID NO: 1440248 - DNA, 25 bp, Homo sapien
ttttagacatggagtgcaggtggac

SEQ ID NO: 1440249 - DNA, 25 bp, Homo sapien
tataacaagttatccaacaggttgg

SEQ ID NO: 1440250 - DNA, 25 bp, Homo sapien
cagggagcttcctaggtctgttgat

SEQ ID NO: 1440251 - DNA, 25 bp, Homo sapien
tttgtaacatgatatccaaggacca

SEQ ID NO: 1440252 - DNA, 25 bp, Homo sapien
tgatgcagtgctaaaccctccaaag

SEQ ID NO: 1440253 - DNA, 25 bp, Homo sapien
cactgtcagtaagggagctgctggc

SEQ ID NO: 1440254 - DNA, 25 bp, Homo sapien
taaaatccaggtacagaagatccct

SEQ ID NO: 1440255 - DNA, 25 bp, Homo sapien
ggcattccacgattggcactgtcag

SEQ ID NO: 1440256 - DNA, 25 bp, Homo sapien
taacctaaattatcacatgggaatg

SEQ ID NO: 1440257 - DNA, 25 bp, Homo sapien
tcagaatccccaaaagcctgaatct

SEQ ID NO: 1440258 - DNA, 25 bp, Homo sapien
gacttcaactctaacaaaatgtgtt

SEQ ID NO: 1440259 - DNA, 25 bp, Homo sapien
cctttctcaggtaatagacttcaac

SEQ ID NO: 1440260 - DNA, 25 bp, Homo sapien
gcatctggtaatctgccccaagtga

SEQ ID NO: 1440261 - DNA, 25 bp, Homo sapien
ttgatggcaaaaggccaaggaagcc

SEQ ID NO: 1440262 - DNA, 25 bp, Homo sapien
taaatccaagtaagaagcatcattg

SEQ ID NO: 1440263 - DNA, 25 bp, Homo sapien
tcctgacaaaaaccagaagcactct

SEQ ID NO: 1440264 - DNA, 25 bp, Homo sapien
gacactgtactagcaaacttattag

SEQ ID NO: 1440265 - DNA, 25 bp, Homo sapien
tcttcgtgaagacaatgcatgtatt

SEQ ID NO: 1440266 - DNA, 25 bp, Homo sapien
taaaagacattatcgggcattacca

SEQ ID NO: 1440267 - DNA, 25 bp, Homo sapien
ggtttccaccgcaatttattgttca

SEQ ID NO: 1440268 - DNA, 25 bp, Homo sapien
gagtgtcagttgcacctccaataaa

SEQ ID NO: 1440269 - DNA, 25 bp, Homo sapien
tccaataaaagtaccattgacaaat

SEQ ID NO: 1440270 - DNA, 25 bp, Homo sapien
cagttgcacctccaataaaagtacc

SEQ ID NO: 1440271 - DNA, 25 bp, Homo sapien
tttgtgaagcctatgagtgtcagtt

SEQ ID NO: 1440272 - DNA, 25 bp, Homo sapien
tatagttaacattcatgtcatggaa

SEQ ID NO: 1440273 - DNA, 25 bp, Homo sapien
caccagtcattttgtaaagagcatc

SEQ ID NO: 1440274 - DNA, 25 bp, Homo sapien
gcttttttgccattgtacagtaaga

SEQ ID NO: 1440275 - DNA, 25 bp, Homo sapien
ggtttccatattcaagcaggtccag

SEQ ID NO: 1440276 - DNA, 25 bp, Homo sapien
tcacaggcgccgtcgctaaattctc

SEQ ID NO: 1440277 - DNA, 25 bp, Homo sapien
atctggttcacaggcgccgtcgcta

SEQ ID NO: 1440278 - DNA, 25 bp, Homo sapien
cgccgtcgctaaattctccaaagat

SEQ ID NO: 1440279 - DNA, 25 bp, Homo sapien
ggatctggttcacaggcgccgtcgc

SEQ ID NO: 1440280 - DNA, 25 bp, Homo sapien
cgcactgttggaacaatatcaaaca

SEQ ID NO: 1440281 - DNA, 25 bp, Homo sapien
ctgttggaacaatatcaaacaccat

SEQ ID NO: 1440282 - DNA, 25 bp, Homo sapien
gcactgttggaacaatatcaaacac

SEQ ID NO: 1440283 - DNA, 25 bp, Homo sapien
cactgttggaacaatatcaaacacc

SEQ ID NO: 1440284 - DNA, 25 bp, Homo sapien
agctcccgccgccctgtcaagccag

SEQ ID NO: 1440285 - DNA, 25 bp, Homo sapien
ctgccgagccgctcctgctccaaac

SEQ ID NO: 1440286 - DNA, 25 bp, Homo sapien
ccctgtcaagccagcctgccgagcc

SEQ ID NO: 1440287 - DNA, 25 bp, Homo sapien
cgccgccctgtcaagccagcctgcc

SEQ ID NO: 1440288 - DNA, 25 bp, Homo sapien
gccagcgccgcgcggcgccaaatca

SEQ ID NO: 1440289 - DNA, 25 bp, Homo sapien
ccagcgccgcgcggcgccaaatcat

SEQ ID NO: 1440290 - DNA, 25 bp, Homo sapien
cgccagcgccgcgcggcgccaaatc

SEQ ID NO: 1440291 - DNA, 25 bp, Homo sapien
tgcagcgagctctactgccggacac

SEQ ID NO: 1440292 - DNA, 25 bp, Homo sapien
cggatctgcagcgagctctactgcc

SEQ ID NO: 1440293 - DNA, 25 bp, Homo sapien
gatctgcagcgagctctactgccgg

SEQ ID NO: 1440294 - DNA, 25 bp, Homo sapien
gcccggatctgcagcgagctctact

SEQ ID NO: 1440295 - DNA, 25 bp, Homo sapien
gcccgagcgctggattccagcgagt

SEQ ID NO: 1440296 - DNA, 25 bp, Homo sapien
gagcgctggattccagcgagtgcca

SEQ ID NO: 1440297 - DNA, 25 bp, Homo sapien
gcgctggattccagcgagtgccacc

SEQ ID NO: 1440298 - DNA, 25 bp, Homo sapien
cagctgagcgcgtcctcccagggct

SEQ ID NO: 1440299 - DNA, 25 bp, Homo sapien
cctttagaggggagaagcggctcac

SEQ ID NO: 1440300 - DNA, 25 bp, Homo sapien
cactcagtggtggtaataatagcct

SEQ ID NO: 1440301 - DNA, 25 bp, Homo sapien
taattaggcaattggtcgagaccca

SEQ ID NO: 1440302 - DNA, 25 bp, Homo sapien
tcttttaggtttagggacgctcata

SEQ ID NO: 1440303 - DNA, 25 bp, Homo sapien
gctcataaaggctcccaggcacttg

SEQ ID NO: 1440304 - DNA, 25 bp, Homo sapien
ggctccgtgcccagctgaagtctgg

SEQ ID NO: 1440305 - DNA, 25 bp, Homo sapien
ccctgctgctgtcgtaggcgaggac

SEQ ID NO: 1440306 - DNA, 25 bp, Homo sapien
ggcacttttccaggcggtcgcggct

SEQ ID NO: 1440307 - DNA, 25 bp, Homo sapien
tagcgtcctgcgacagtacaacatc

SEQ ID NO: 1440308 - DNA, 25 bp, Homo sapien
taattgcagagatagtcttaaccag

SEQ ID NO: 1440309 - DNA, 25 bp, Homo sapien
tcttaaccagcttctatacaatagg

SEQ ID NO: 1440310 - DNA, 25 bp, Homo sapien
tatatgccttatgactgaaactttg

SEQ ID NO: 1440311 - DNA, 25 bp, Homo sapien
tgggtcttttcatggtattagatgc

SEQ ID NO: 1440312 - DNA, 25 bp, Homo sapien
ttagtattcattgaagtgtctagtt

SEQ ID NO: 1440313 - DNA, 25 bp, Homo sapien
cattgaagtgtctagttagttcatc

SEQ ID NO: 1440314 - DNA, 25 bp, Homo sapien
catcctaccaaacctcatttgatct

SEQ ID NO: 1440315 - DNA, 25 bp, Homo sapien
caaacctcatttgatctttaattct

SEQ ID NO: 1440316 - DNA, 25 bp, Homo sapien
ttgtaatatataggccctcaagtgc

SEQ ID NO: 1440317 - DNA, 25 bp, Homo sapien
tcaggccagtgttctaggcatcatc

SEQ ID NO: 1440318 - DNA, 25 bp, Homo sapien
caagtgccacttgacaatcctttca

SEQ ID NO: 1440319 - DNA, 25 bp, Homo sapien
tattacattgttcctggcgaatcag

SEQ ID NO: 1440320 - DNA, 25 bp, Homo sapien
gattagttatttgtgtaccctttga

SEQ ID NO: 1440321 - DNA, 25 bp, Homo sapien
tgtttgatccagtcgcctttgagag

SEQ ID NO: 1440322 - DNA, 25 bp, Homo sapien
cgacttgagtattgttgcggaaaag

SEQ ID NO: 1440323 - DNA, 25 bp, Homo sapien
aatcacatagtgtcgggatgaagaa

SEQ ID NO: 1440324 - DNA, 25 bp, Homo sapien
aagaatttaggtgtctgttatctgt

SEQ ID NO: 1440325 - DNA, 25 bp, Homo sapien
gaatttaggtgtctgttatctgttt

SEQ ID NO: 1440326 - DNA, 25 bp, Homo sapien
gaagaatttaggtgtctgttatctg

SEQ ID NO: 1440327 - DNA, 25 bp, Homo sapien
ggaagaatttaggtgtctgttatct

SEQ ID NO: 1440328 - DNA, 25 bp, Homo sapien
gaaagacaggcttgatccaagagct

SEQ ID NO: 1440329 - DNA, 25 bp, Homo sapien
gatttagagtagaacacttaggcta

SEQ ID NO: 1440330 - DNA, 25 bp, Homo sapien
gctgatctgatttggtattatcccc

SEQ ID NO: 1440331 - DNA, 25 bp, Homo sapien
aatcagcattattctacactgaggg

SEQ ID NO: 1440332 - DNA, 25 bp, Homo sapien
gcattttggcagacatgcatcttaa

SEQ ID NO: 1440333 - DNA, 25 bp, Homo sapien
agagtgcagtaattggtctaatcca

SEQ ID NO: 1440334 - DNA, 25 bp, Homo sapien
tgctgtcaggaaataaacttcccgt

SEQ ID NO: 1440335 - DNA, 25 bp, Homo sapien
aggtttgcaaacttggcactccaag

SEQ ID NO: 1440336 - DNA, 25 bp, Homo sapien
tactttcgtgagaactgcattgatg

SEQ ID NO: 1440337 - DNA, 25 bp, Homo sapien
gatacattttattggcccctaacag

SEQ ID NO: 1440338 - DNA, 25 bp, Homo sapien
aaaacttgagcctgagacacattag

SEQ ID NO: 1440339 - DNA, 25 bp, Homo sapien
taaaacttgtcctacggatgtaatc

SEQ ID NO: 1440340 - DNA, 25 bp, Homo sapien
gacaggataacgctcacttgggtag

SEQ ID NO: 1440341 - DNA, 25 bp, Homo sapien
tgagtgcggaacagagaccttttgg

SEQ ID NO: 1440342 - DNA, 25 bp, Homo sapien
tttacggtggcgatacctgcctgcc

SEQ ID NO: 1440343 - DNA, 25 bp, Homo sapien
cagtattgcacgttgaaggtagcca

SEQ ID NO: 1440344 - DNA, 25 bp, Homo sapien
tccagtagtggtatatgagagattg

SEQ ID NO: 1440345 - DNA, 25 bp, Homo sapien
tagtggtatatgagagattggtgac

SEQ ID NO: 1440346 - DNA, 25 bp, Homo sapien
gtatatgagagattggtgaccaaaa

SEQ ID NO: 1440347 - DNA, 25 bp, Homo sapien
tatgagagattggtgaccaaaaatg

SEQ ID NO: 1440348 - DNA, 25 bp, Homo sapien
tgttagtcacagtacactgcttggc

SEQ ID NO: 1440349 - DNA, 25 bp, Homo sapien
tatcagttgtgggacagacggtgca

SEQ ID NO: 1440350 - DNA, 25 bp, Homo sapien
gaaagtcaatgagaagatgcacctg

SEQ ID NO: 1440351 - DNA, 25 bp, Homo sapien
ggcccctactgtgttgagaaagtca

SEQ ID NO: 1440352 - DNA, 25 bp, Homo sapien
tgtagttgcccgttctgcttgtagc

SEQ ID NO: 1440353 - DNA, 25 bp, Homo sapien
tcccgacagttgatgcattgaagct

SEQ ID NO: 1440354 - DNA, 25 bp, Homo sapien
aaaagatgctatcgaacatgcgcac

SEQ ID NO: 1440355 - DNA, 25 bp, Homo sapien
aatgcagtgctgtgttctcgtctca

SEQ ID NO: 1440356 - DNA, 25 bp, Homo sapien
aagcagccagagctaaaatgtagtg

SEQ ID NO: 1440357 - DNA, 25 bp, Homo sapien
tagtgcttcagttgtattggaaaag

SEQ ID NO: 1440358 - DNA, 25 bp, Homo sapien
tttacctctcttctttcgttgttgc

SEQ ID NO: 1440359 - DNA, 25 bp, Homo sapien
tacctctcttctttcgttgttgcct

SEQ ID NO: 1440360 - DNA, 25 bp, Homo sapien
gaatttaacgtcactgcttggctga

SEQ ID NO: 1440361 - DNA, 25 bp, Homo sapien
gaatcccacgtgattgtttgcattc

SEQ ID NO: 1440362 - DNA, 25 bp, Homo sapien
gacagagcagaatttaacgtcactg

SEQ ID NO: 1440363 - DNA, 25 bp, Homo sapien
tgcttggctgaatcccacgtgattg

SEQ ID NO: 1440364 - DNA, 25 bp, Homo sapien
ggatttaaggaagtaagccatctct

SEQ ID NO: 1440365 - DNA, 25 bp, Homo sapien
gactttgagttgcaaccagtggtca

SEQ ID NO: 1440366 - DNA, 25 bp, Homo sapien
tagggccgctaggaattatgctaag

SEQ ID NO: 1440367 - DNA, 25 bp, Homo sapien
gacaatgtacctagtcatgcaagag

SEQ ID NO: 1440368 - DNA, 25 bp, Homo sapien
gattttgaatcttctattttaggct

SEQ ID NO: 1440369 - DNA, 25 bp, Homo sapien
tttaggcttgtcagtcttggagttc

SEQ ID NO: 1440370 - DNA, 25 bp, Homo sapien
ccattatccctaaatattgataaac

SEQ ID NO: 1440371 - DNA, 25 bp, Homo sapien
ggaagaatatgtatcagccctattg

SEQ ID NO: 1440372 - DNA, 25 bp, Homo sapien
catttgcaagtatgttgatcccagc

SEQ ID NO: 1440373 - DNA, 25 bp, Homo sapien
ggtaatctttataagggcatcttgg

SEQ ID NO: 1440374 - DNA, 25 bp, Homo sapien
aaatgccatgtcctatatattctgg

SEQ ID NO: 1440375 - DNA, 25 bp, Homo sapien
cacttgtgtttgagattcacccagc

SEQ ID NO: 1440376 - DNA, 25 bp, Homo sapien
tttagaggaaaagcggtgcagttca

SEQ ID NO: 1440377 - DNA, 25 bp, Homo sapien
tatggtactaggaagactagcttca

SEQ ID NO: 1440378 - DNA, 25 bp, Homo sapien
gaaccttgctttcaaagatacatgg

SEQ ID NO: 1440379 - DNA, 25 bp, Homo sapien
cagcaaaggtctgaacggaaagaac

SEQ ID NO: 1440380 - DNA, 25 bp, Homo sapien
gggcacaattccacatctccctgtg

SEQ ID NO: 1440381 - DNA, 25 bp, Homo sapien
ggtgggcacaattccacatctccct

SEQ ID NO: 1440382 - DNA, 25 bp, Homo sapien
tgggcacaattccacatctccctgt

SEQ ID NO: 1440383 - DNA, 25 bp, Homo sapien
cacaattccacatctccctgtgagg

SEQ ID NO: 1440384 - DNA, 25 bp, Homo sapien
cacggcattcctaactgttgacaag

SEQ ID NO: 1440385 - DNA, 25 bp, Homo sapien
accagttttacatgcccttgtgtgc

SEQ ID NO: 1440386 - DNA, 25 bp, Homo sapien
tgtataacctcaaacaagatgcaga

SEQ ID NO: 1440387 - DNA, 25 bp, Homo sapien
tcactcaccgtaattcccttgaaga

SEQ ID NO: 1440388 - DNA, 25 bp, Homo sapien
catttggtgactagcttgtggactg

SEQ ID NO: 1440389 - DNA, 25 bp, Homo sapien
tatagtcacttgctgcctgagctga

SEQ ID NO: 1440390 - DNA, 25 bp, Homo sapien
cagcaatgaaaccaaaccgttgaat

SEQ ID NO: 1440391 - DNA, 25 bp, Homo sapien
cagaagtatcaaggtggaaagggaa

SEQ ID NO: 1440392 - DNA, 25 bp, Homo sapien
acttgctctccaactgtggatctgg

SEQ ID NO: 1440393 - DNA, 25 bp, Homo sapien
tgctctccaactgtggatctggatt

SEQ ID NO: 1440394 - DNA, 25 bp, Homo sapien
tcacttgctctccaactgtggatct

SEQ ID NO: 1440395 - DNA, 25 bp, Homo sapien
cttcacttgctctccaactgtggat

SEQ ID NO: 1440396 - DNA, 25 bp, Homo sapien
catgggtgaagtagtatgctgaagg

SEQ ID NO: 1440397 - DNA, 25 bp, Homo sapien
tttggagccagatatcccgaggaga

SEQ ID NO: 1440398 - DNA, 25 bp, Homo sapien
ggagactgcagggccgctagctttc

SEQ ID NO: 1440399 - DNA, 25 bp, Homo sapien
aactggaatgaactgagggagtgca

SEQ ID NO: 1440400 - DNA, 25 bp, Homo sapien
ttcttggtagtcttactgcaggaat

SEQ ID NO: 1440401 - DNA, 25 bp, Homo sapien
tgcaggaatgtggcacatggctaaa

SEQ ID NO: 1440402 - DNA, 25 bp, Homo sapien
tcttggtagtcttactgcaggaatg

SEQ ID NO: 1440403 - DNA, 25 bp, Homo sapien
cttggtagtcttactgcaggaatgt

SEQ ID NO: 1440404 - DNA, 25 bp, Homo sapien
ctagctgactgcgtcaggcagttgg

SEQ ID NO: 1440405 - DNA, 25 bp, Homo sapien
gagatgaaatctggagcttatctgc

SEQ ID NO: 1440406 - DNA, 25 bp, Homo sapien
tctaaattctgttaaaccattactc

SEQ ID NO: 1440407 - DNA, 25 bp, Homo sapien
gctgactgcgtcaggcagttggaat

SEQ ID NO: 1440408 - DNA, 25 bp, Homo sapien
gaagttctctaatatcccatctggt

SEQ ID NO: 1440409 - DNA, 25 bp, Homo sapien
ccatctggtagggatcttgactctt

SEQ ID NO: 1440410 - DNA, 25 bp, Homo sapien
gaattaccagacacctcagtctctg

SEQ ID NO: 1440411 - DNA, 25 bp, Homo sapien
tgaggaccaatcactttgctgctga

SEQ ID NO: 1440412 - DNA, 25 bp, Homo sapien
gagagggtaggagattgagttagcg

SEQ ID NO: 1440413 - DNA, 25 bp, Homo sapien
gtaggagattgagttagcgagtggg

SEQ ID NO: 1440414 - DNA, 25 bp, Homo sapien
gagggtaggagattgagttagcgag

SEQ ID NO: 1440415 - DNA, 25 bp, Homo sapien
gggtaggagattgagttagcgagtg

SEQ ID NO: 1440416 - DNA, 25 bp, Homo sapien
ttattcagtaggatccctccatttg

SEQ ID NO: 1440417 - DNA, 25 bp, Homo sapien
catgcctcaccagtgtggtgtctca

SEQ ID NO: 1440418 - DNA, 25 bp, Homo sapien
tccatttgttccttggttcttgtgc

SEQ ID NO: 1440419 - DNA, 25 bp, Homo sapien
cttcttccatgcctcaccagtgtgg

SEQ ID NO: 1440420 - DNA, 25 bp, Homo sapien
cactgtctagcttattcttgctcat

SEQ ID NO: 1440421 - DNA, 25 bp, Homo sapien
tccagccagcttcccgtctactgct

SEQ ID NO: 1440422 - DNA, 25 bp, Homo sapien
cgtctactgctctttcactgtctag

SEQ ID NO: 1440423 - DNA, 25 bp, Homo sapien
tcactgtctagcttattcttgctca

SEQ ID NO: 1440424 - DNA, 25 bp, Homo sapien
taagaagacatgacaaggcttttct

SEQ ID NO: 1440425 - DNA, 25 bp, Homo sapien
gctttggtatgttcatgtcagctgg

SEQ ID NO: 1440426 - DNA, 25 bp, Homo sapien
tgtttcaagcagcagtaaataagct

SEQ ID NO: 1440427 - DNA, 25 bp, Homo sapien
ctaacaaaggatattggaaggaagg

SEQ ID NO: 1440428 - DNA, 25 bp, Homo sapien
aatcaccagtgggaagttggcaact

SEQ ID NO: 1440429 - DNA, 25 bp, Homo sapien
taagggttagtagctcatgccaaga

SEQ ID NO: 1440430 - DNA, 25 bp, Homo sapien
ttctgggcagagctagacacttgct

SEQ ID NO: 1440431 - DNA, 25 bp, Homo sapien
gctttctccatgaagtgaggcacca

SEQ ID NO: 1440432 - DNA, 25 bp, Homo sapien
gctaactctggtttgtgatgtcaga

SEQ ID NO: 1440433 - DNA, 25 bp, Homo sapien
gcctctggccacgttgctaactctg

SEQ ID NO: 1440434 - DNA, 25 bp, Homo sapien
tgtacctgagtgcacaccagctgtg

SEQ ID NO: 1440435 - DNA, 25 bp, Homo sapien
tgggtaaggacaggctccagttcca

SEQ ID NO: 1440436 - DNA, 25 bp, Homo sapien
tttcataggtgccacaagacactct

SEQ ID NO: 1440437 - DNA, 25 bp, Homo sapien
tgtggtttcctcaaggtctttcata

SEQ ID NO: 1440438 - DNA, 25 bp, Homo sapien
agaagcttgacattactgtggtttc

SEQ ID NO: 1440439 - DNA, 25 bp, Homo sapien
gggatacagaagcttgacattactg

SEQ ID NO: 1440440 - DNA, 25 bp, Homo sapien
gagtttttcagacacagagggtttg

SEQ ID NO: 1440441 - DNA, 25 bp, Homo sapien
cagccattctccagtgcagtgttca

SEQ ID NO: 1440442 - DNA, 25 bp, Homo sapien
gttcaatactgactgtggaccgtgc

SEQ ID NO: 1440443 - DNA, 25 bp, Homo sapien
tggaccgtgctgtttcagacctgaa

SEQ ID NO: 1440444 - DNA, 25 bp, Homo sapien
actgcaggtcctgaatgtctgatgc

SEQ ID NO: 1440445 - DNA, 25 bp, Homo sapien
ggacagctgaagaaagtgattctca

SEQ ID NO: 1440446 - DNA, 25 bp, Homo sapien
aaaatgcccttagagtgtcctgtgg

SEQ ID NO: 1440447 - DNA, 25 bp, Homo sapien
gtctgatgcatcctgtagcccactg

SEQ ID NO: 1440448 - DNA, 25 bp, Homo sapien
tgtttacagacacgaagtttgcagt

SEQ ID NO: 1440449 - DNA, 25 bp, Homo sapien
cagcaatggcacagggatatattat

SEQ ID NO: 1440450 - DNA, 25 bp, Homo sapien
tcactagattgtaataaaagggttc

SEQ ID NO: 1440451 - DNA, 25 bp, Homo sapien
tacttgcacaataccactcaggttt

SEQ ID NO: 1440452 - DNA, 25 bp, Homo sapien
cttggttttcgatgagcttatttaa

SEQ ID NO: 1440453 - DNA, 25 bp, Homo sapien
cctccttggttttcgatgagcttat

SEQ ID NO: 1440454 - DNA, 25 bp, Homo sapien
tccttggttttcgatgagcttattt

SEQ ID NO: 1440455 - DNA, 25 bp, Homo sapien
agcctccttggttttcgatgagctt

SEQ ID NO: 1440456 - DNA, 25 bp, Homo sapien
cattgcctcctgcacattttacact

SEQ ID NO: 1440457 - DNA, 25 bp, Homo sapien
gtttccaacgctgtcacattccctg

SEQ ID NO: 1440458 - DNA, 25 bp, Homo sapien
tgttctcttctcatactgagggacc

SEQ ID NO: 1440459 - DNA, 25 bp, Homo sapien
ctactaggaccgttgctgcagtttc

SEQ ID NO: 1440460 - DNA, 25 bp, Homo sapien
ctgactctcctactaggaccgttgc

SEQ ID NO: 1440461 - DNA, 25 bp, Homo sapien
taaacacagtcctgatggcaggcat

SEQ ID NO: 1440462 - DNA, 25 bp, Homo sapien
tcaaggacataaacacagtcctgat

SEQ ID NO: 1440463 - DNA, 25 bp, Homo sapien
tctgtgtcatcacaaaatgcatttt

SEQ ID NO: 1440464 - DNA, 25 bp, Homo sapien
gtacagaaactatctgtgtcatcac

SEQ ID NO: 1440465 - DNA, 25 bp, Homo sapien
tccattccattaggaactgataagt

SEQ ID NO: 1440466 - DNA, 25 bp, Homo sapien
tttcacatgcaaggagccctccttt

SEQ ID NO: 1440467 - DNA, 25 bp, Homo sapien
tcactccattccattaggaactgat

SEQ ID NO: 1440468 - DNA, 25 bp, Homo sapien
gaactgataagtttttcacatgcaa

SEQ ID NO: 1440469 - DNA, 25 bp, Homo sapien
tggcaagagggatcagaagcagaga

SEQ ID NO: 1440470 - DNA, 25 bp, Homo sapien
tatagtcgtataatattgtggctgc

SEQ ID NO: 1440471 - DNA, 25 bp, Homo sapien
cgtataatattgtggctgccaatta

SEQ ID NO: 1440472 - DNA, 25 bp, Homo sapien
ctttatggctggtgaatatagtcgt

SEQ ID NO: 1440473 - DNA, 25 bp, Homo sapien
ctgcatattctaaaacagtttgcaa

SEQ ID NO: 1440474 - DNA, 25 bp, Homo sapien
gtgaaatcagcaccttcatgattca

SEQ ID NO: 1440475 - DNA, 25 bp, Homo sapien
ggtgaaatcagcaccttcatgattc

SEQ ID NO: 1440476 - DNA, 25 bp, Homo sapien
tgaaatcagcaccttcatgattcat

SEQ ID NO: 1440477 - DNA, 25 bp, Homo sapien
tgctcagaaacctgactagccgtct

SEQ ID NO: 1440478 - DNA, 25 bp, Homo sapien
gaaacctgactagccgtctggaaaa

SEQ ID NO: 1440479 - DNA, 25 bp, Homo sapien
aatgggtgctcagaaacctgactag

SEQ ID NO: 1440480 - DNA, 25 bp, Homo sapien
cctgactagccgtctggaaaaacat

SEQ ID NO: 1440481 - DNA, 25 bp, Homo sapien
tatggagccaggttgacattttgtt

SEQ ID NO: 1440482 - DNA, 25 bp, Homo sapien
tttctgcgggtaaccaccattgatg

SEQ ID NO: 1440483 - DNA, 25 bp, Homo sapien
ttacatttcctagctccacccatgg

SEQ ID NO: 1440484 - DNA, 25 bp, Homo sapien
gaagaagaatgaggactgagctctt

SEQ ID NO: 1440485 - DNA, 25 bp, Homo sapien
ggtggccagatttagccttttcatt

SEQ ID NO: 1440486 - DNA, 25 bp, Homo sapien
tattgcattgaagataaactgcctc

SEQ ID NO: 1440487 - DNA, 25 bp, Homo sapien
tccaatttaccaaaccagaatactc

SEQ ID NO: 1440488 - DNA, 25 bp, Homo sapien
aaagcaagatctgtcaggtggccag

SEQ ID NO: 1440489 - DNA, 25 bp, Homo sapien
tagttgttgtacagatgcactgcca

SEQ ID NO: 1440490 - DNA, 25 bp, Homo sapien
ttgtacagatgcactgccagattgg

SEQ ID NO: 1440491 - DNA, 25 bp, Homo sapien
ttatttgccgtgagagtctccattg

SEQ ID NO: 1440492 - DNA, 25 bp, Homo sapien
gatcatgttaacaggataatttcca

SEQ ID NO: 1440493 - DNA, 25 bp, Homo sapien
caggtgctccaaaattttccagaga

SEQ ID NO: 1440494 - DNA, 25 bp, Homo sapien
tatccatgtattgggaagttggtct

SEQ ID NO: 1440495 - DNA, 25 bp, Homo sapien
gtcttctataacctgtgtctggagg

SEQ ID NO: 1440496 - DNA, 25 bp, Homo sapien
tttccagagacccttctttagtgga

SEQ ID NO: 1440497 - DNA, 25 bp, Homo sapien
gagatgtagcaacataaactgtaag

SEQ ID NO: 1440498 - DNA, 25 bp, Homo sapien
gatgtagcaacataaactgtaagaa

SEQ ID NO: 1440499 - DNA, 25 bp, Homo sapien
tgtagcaacataaactgtaagaagt

SEQ ID NO: 1440500 - DNA, 25 bp, Homo sapien
gtagcaacataaactgtaagaagta

SEQ ID NO: 1440501 - DNA, 25 bp, Homo sapien
tgttctccggcatcttgggttatta

SEQ ID NO: 1440502 - DNA, 25 bp, Homo sapien
tattctcgtccaaggtgttccacac

SEQ ID NO: 1440503 - DNA, 25 bp, Homo sapien
tccacactgtttggcggtggtctgt

SEQ ID NO: 1440504 - DNA, 25 bp, Homo sapien
ggtggtctgtgctcagaaatctggt

SEQ ID NO: 1440505 - DNA, 25 bp, Homo sapien
tccagccagggatcagatgtttcag

SEQ ID NO: 1440506 - DNA, 25 bp, Homo sapien
ctccagccagggatcagatgtttca

SEQ ID NO: 1440507 - DNA, 25 bp, Homo sapien
cctttttccacgaaattgcacactg

SEQ ID NO: 1440508 - DNA, 25 bp, Homo sapien
tttccacgaaattgcacactgtgtg

SEQ ID NO: 1440509 - DNA, 25 bp, Homo sapien
tttcctttttccacgaaattgcaca

SEQ ID NO: 1440510 - DNA, 25 bp, Homo sapien
ccacgaaattgcacactgtgtgcat

SEQ ID NO: 1440511 - DNA, 25 bp, Homo sapien
tcttcaaacggaaagaggtcaacat

SEQ ID NO: 1440512 - DNA, 25 bp, Homo sapien
gtcaacataaacataccggtcaagg

SEQ ID NO: 1440513 - DNA, 25 bp, Homo sapien
tacattatgccgtaggtgctggatt

SEQ ID NO: 1440514 - DNA, 25 bp, Homo sapien
tgaacatagagtcctgactggtggg

SEQ ID NO: 1440515 - DNA, 25 bp, Homo sapien
tagttgcattacaccaatctctgct

SEQ ID NO: 1440516 - DNA, 25 bp, Homo sapien
caccaattgttttgagttaagggct

SEQ ID NO: 1440517 - DNA, 25 bp, Homo sapien
tggtggtggccgtcaatcatagttg

SEQ ID NO: 1440518 - DNA, 25 bp, Homo sapien
tcacatggtcatcctcttataatgg

SEQ ID NO: 1440519 - DNA, 25 bp, Homo sapien
caacaaagacctctgcattgacaaa

SEQ ID NO: 1440520 - DNA, 25 bp, Homo sapien
ggtatttcatctgccgtaatcttca

SEQ ID NO: 1440521 - DNA, 25 bp, Homo sapien
gaatttataacacttaaggcgtatg

SEQ ID NO: 1440522 - DNA, 25 bp, Homo sapien
taatcttcaatttgtgatgccaacc

SEQ ID NO: 1440523 - DNA, 25 bp, Homo sapien
tagtagtagcaattcctttcagaaa

SEQ ID NO: 1440524 - DNA, 25 bp, Homo sapien
aagggtagaatcacaacctcattaa

SEQ ID NO: 1440525 - DNA, 25 bp, Homo sapien
agggtagaatcacaacctcattaac

SEQ ID NO: 1440526 - DNA, 25 bp, Homo sapien
ggccttcacttgactcacaattaag

SEQ ID NO: 1440527 - DNA, 25 bp, Homo sapien
ttaagatacagacgacagcccttag

SEQ ID NO: 1440528 - DNA, 25 bp, Homo sapien
agcccttagatttatccggatgaaa

SEQ ID NO: 1440529 - DNA, 25 bp, Homo sapien
gactcacaattaagatacagacgac

SEQ ID NO: 1440530 - DNA, 25 bp, Homo sapien
tgtcttctagtaactccactaaaag

SEQ ID NO: 1440531 - DNA, 25 bp, Homo sapien
ctccactaaaagcttccagttcaat

SEQ ID NO: 1440532 - DNA, 25 bp, Homo sapien
ccagttcaatggatgaacttcttct

SEQ ID NO: 1440533 - DNA, 25 bp, Homo sapien
tccagttcaatggatgaacttcttc

SEQ ID NO: 1440534 - DNA, 25 bp, Homo sapien
agtagctaataacatgttgccctgc

SEQ ID NO: 1440535 - DNA, 25 bp, Homo sapien
tagctaataacatgttgccctgctt

SEQ ID NO: 1440536 - DNA, 25 bp, Homo sapien
agctaataacatgttgccctgcttc

SEQ ID NO: 1440537 - DNA, 25 bp, Homo sapien
gtagctaataacatgttgccctgct

SEQ ID NO: 1440538 - DNA, 25 bp, Homo sapien
tgcaggctcccacagaacatggatg

SEQ ID NO: 1440539 - DNA, 25 bp, Homo sapien
tgtggtaaatgttatggacataggg

SEQ ID NO: 1440540 - DNA, 25 bp, Homo sapien
tgagtattgcacttgactggtcatt

SEQ ID NO: 1440541 - DNA, 25 bp, Homo sapien
tgttttcccatcatctactatagca

SEQ ID NO: 1440542 - DNA, 25 bp, Homo sapien
ttcacgctagtgagggaaccctgca

SEQ ID NO: 1440543 - DNA, 25 bp, Homo sapien
ctagtgagggaaccctgcaccttct

SEQ ID NO: 1440544 - DNA, 25 bp, Homo sapien
ccagcttcacgctagtgagggaacc

SEQ ID NO: 1440545 - DNA, 25 bp, Homo sapien
aagagccagcttcacgctagtgagg

SEQ ID NO: 1440546 - DNA, 25 bp, Homo sapien
aacttctctagtaatgaactgtgga

SEQ ID NO: 1440547 - DNA, 25 bp, Homo sapien
cttctctagtaatgaactgtggaaa

SEQ ID NO: 1440548 - DNA, 25 bp, Homo sapien
ctctagtaatgaactgtggaaatga

SEQ ID NO: 1440549 - DNA, 25 bp, Homo sapien
agtaatgaactgtggaaatgatccc

SEQ ID NO: 1440550 - DNA, 25 bp, Homo sapien
tcttccaaagttcttaattgaagga

SEQ ID NO: 1440551 - DNA, 25 bp, Homo sapien
tgaaggacaacctgcaaggccacag

SEQ ID NO: 1440552 - DNA, 25 bp, Homo sapien
aagttcttaattgaaggacaacctg

SEQ ID NO: 1440553 - DNA, 25 bp, Homo sapien
tacatcctttgtggtaacaagttct

SEQ ID NO: 1440554 - DNA, 25 bp, Homo sapien
ttagcctttaggcattttgggaaca

SEQ ID NO: 1440555 - DNA, 25 bp, Homo sapien
tagcctttaggcattttgggaacat

SEQ ID NO: 1440556 - DNA, 25 bp, Homo sapien
ttctggatgtgcattggaaagaagg

SEQ ID NO: 1440557 - DNA, 25 bp, Homo sapien
ttcaatatggagcttttctggatgt

SEQ ID NO: 1440558 - DNA, 25 bp, Homo sapien
cattggaaagaagggaacataattt

SEQ ID NO: 1440559 - DNA, 25 bp, Homo sapien
cacaatcttctgatattcaatatgg

SEQ ID NO: 1440560 - DNA, 25 bp, Homo sapien
tcaaagcattgtaaggaaccagttg

SEQ ID NO: 1440561 - DNA, 25 bp, Homo sapien
ccctcaggctgattagcatgttgac

SEQ ID NO: 1440562 - DNA, 25 bp, Homo sapien
ctctccctcaggctgattagcatgt

SEQ ID NO: 1440563 - DNA, 25 bp, Homo sapien
taaggaaccagttgaacagaagcct

SEQ ID NO: 1440564 - DNA, 25 bp, Homo sapien
tggctacattaatgtcatagaactt

SEQ ID NO: 1440565 - DNA, 25 bp, Homo sapien
tacattaatgtcatagaacttcttc

SEQ ID NO: 1440566 - DNA, 25 bp, Homo sapien
cttggctacattaatgtcatagaac

SEQ ID NO: 1440567 - DNA, 25 bp, Homo sapien
gctacattaatgtcatagaacttct

SEQ ID NO: 1440568 - DNA, 25 bp, Homo sapien
ccaacgttgcttccaagagtttact

SEQ ID NO: 1440569 - DNA, 25 bp, Homo sapien
tgagaaatctattgacgttttccac

SEQ ID NO: 1440570 - DNA, 25 bp, Homo sapien
tgagcatccgatatgaagtccgagg

SEQ ID NO: 1440571 - DNA, 25 bp, Homo sapien
tctggattcacacttctttgagaaa

SEQ ID NO: 1440572 - DNA, 25 bp, Homo sapien
cacacagatacatgtaagcaaagta

SEQ ID NO: 1440573 - DNA, 25 bp, Homo sapien
tcatgaaggagctcaagtgtgctta

SEQ ID NO: 1440574 - DNA, 25 bp, Homo sapien
aagcaaagtatatgtgtagtgcaat

SEQ ID NO: 1440575 - DNA, 25 bp, Homo sapien
tgaaggagctcaagtgtgcttattt

SEQ ID NO: 1440576 - DNA, 25 bp, Homo sapien
ctgtgtttgtgttggtttaattttg

SEQ ID NO: 1440577 - DNA, 25 bp, Homo sapien
cattgttatgagctgaacttctatc

SEQ ID NO: 1440578 - DNA, 25 bp, Homo sapien
gtgacatttcatgcttatgatgtaa

SEQ ID NO: 1440579 - DNA, 25 bp, Homo sapien
gaacttctatcatgctaatgaacca

SEQ ID NO: 1440580 - DNA, 25 bp, Homo sapien
cttgttgggatgatattgctttgtc

SEQ ID NO: 1440581 - DNA, 25 bp, Homo sapien
tgtcttgttgggatgatattgcttt

SEQ ID NO: 1440582 - DNA, 25 bp, Homo sapien
acttgtcttgttgggatgatattgc

SEQ ID NO: 1440583 - DNA, 25 bp, Homo sapien
tacttgtcttgttgggatgatattg

SEQ ID NO: 1440584 - DNA, 25 bp, Homo sapien
aaaaagggtccagtatctgaatcag

SEQ ID NO: 1440585 - DNA, 25 bp, Homo sapien
taagaatccttctcgtgtgctttcg

SEQ ID NO: 1440586 - DNA, 25 bp, Homo sapien
acattgttgcttaatatgagaggac

SEQ ID NO: 1440587 - DNA, 25 bp, Homo sapien
tgaatcagtacattcagcccactga

SEQ ID NO: 1440588 - DNA, 25 bp, Homo sapien
ctaatgctagatgacacattagtgg

SEQ ID NO: 1440589 - DNA, 25 bp, Homo sapien
tgtatacatatgtaactaacctgca

SEQ ID NO: 1440590 - DNA, 25 bp, Homo sapien
caccagcatggcacatgtatacata

SEQ ID NO: 1440591 - DNA, 25 bp, Homo sapien
agatgacacattagtgggtgcagcg

SEQ ID NO: 1440592 - DNA, 25 bp, Homo sapien
tttttgatgtgttgtgacacaagag

SEQ ID NO: 1440593 - DNA, 25 bp, Homo sapien
gctgaacagattatgttgctcagaa

SEQ ID NO: 1440594 - DNA, 25 bp, Homo sapien
gcttggtgttgcattcttggtgtca

SEQ ID NO: 1440595 - DNA, 25 bp, Homo sapien
ttttgggattcagttgacaagttgc

SEQ ID NO: 1440596 - DNA, 25 bp, Homo sapien
cgaggcagccaaatagaggccctgc

SEQ ID NO: 1440597 - DNA, 25 bp, Homo sapien
ctgcagcatgtagtaatggagtgga

SEQ ID NO: 1440598 - DNA, 25 bp, Homo sapien
cttgctgcagcatgtagtaatggag

SEQ ID NO: 1440599 - DNA, 25 bp, Homo sapien
gtaatggagtggagcgaggcagcca

SEQ ID NO: 1440600 - DNA, 25 bp, Homo sapien
gtcagaagattcaatcagcacgctg

SEQ ID NO: 1440601 - DNA, 25 bp, Homo sapien
aatcagcacgctggcaatactgtcc

SEQ ID NO: 1440602 - DNA, 25 bp, Homo sapien
gaagattcaatcagcacgctggcaa

SEQ ID NO: 1440603 - DNA, 25 bp, Homo sapien
gtcctcccatttagagctctttaaa

SEQ ID NO: 1440604 - DNA, 25 bp, Homo sapien
aatacatcgagcattactggtttgg

SEQ ID NO: 1440605 - DNA, 25 bp, Homo sapien
tctaaatacatcgagcattactggt

SEQ ID NO: 1440606 - DNA, 25 bp, Homo sapien
tcctctaaatacatcgagcattact

SEQ ID NO: 1440607 - DNA, 25 bp, Homo sapien
tacatcgagcattactggtttggga

SEQ ID NO: 1440608 - DNA, 25 bp, Homo sapien
ctttaatatcaaataagaaaaccat

SEQ ID NO: 1440609 - DNA, 25 bp, Homo sapien
tctttaatatcaaataagaaaacca

SEQ ID NO: 1440610 - DNA, 25 bp, Homo sapien
tacgtctgacatgttgaatactcca

SEQ ID NO: 1440611 - DNA, 25 bp, Homo sapien
ctcctgaatcatttccatgtacgtc

SEQ ID NO: 1440612 - DNA, 25 bp, Homo sapien
ccatgtacgtctgacatgttgaata

SEQ ID NO: 1440613 - DNA, 25 bp, Homo sapien
gaatcatttccatgtacgtctgaca

SEQ ID NO: 1440614 - DNA, 25 bp, Homo sapien
tgctcctttgctgcacatgcaacca

SEQ ID NO: 1440615 - DNA, 25 bp, Homo sapien
gctcctttgctgcacatgcaaccat

SEQ ID NO: 1440616 - DNA, 25 bp, Homo sapien
ttcccagtaagctcctgctcctttg

SEQ ID NO: 1440617 - DNA, 25 bp, Homo sapien
tcctgctcctttgctgcacatgcaa

SEQ ID NO: 1440618 - DNA, 25 bp, Homo sapien
gaaggcatacaacaatgggatacgt

SEQ ID NO: 1440619 - DNA, 25 bp, Homo sapien
caacaatgggatacgtaggtgtcca

SEQ ID NO: 1440620 - DNA, 25 bp, Homo sapien
tgtcaaccattagtctagctgatgt

SEQ ID NO: 1440621 - DNA, 25 bp, Homo sapien
acatctaccatcttggcagctatta

SEQ ID NO: 1440622 - DNA, 25 bp, Homo sapien
ggaatacacaatgcccacctggcct

SEQ ID NO: 1440623 - DNA, 25 bp, Homo sapien
gggggaatacacaatgcccacctgg

SEQ ID NO: 1440624 - DNA, 25 bp, Homo sapien
ccctggggggaatacacaatgccca

SEQ ID NO: 1440625 - DNA, 25 bp, Homo sapien
catgtccctggggggaatacacaat

SEQ ID NO: 1440626 - DNA, 25 bp, Homo sapien
ccaatctccatgttagtgctgccaa

SEQ ID NO: 1440627 - DNA, 25 bp, Homo sapien
ccctgaggggctaccgcatggtgca

SEQ ID NO: 1440628 - DNA, 25 bp, Homo sapien
tcacacgtgactggcaggctgccat

SEQ ID NO: 1440629 - DNA, 25 bp, Homo sapien
catggtgcaggctgcgtgtaggctt

SEQ ID NO: 1440630 - DNA, 25 bp, Homo sapien
cgatgctttagcagtctgtccatca

SEQ ID NO: 1440631 - DNA, 25 bp, Homo sapien
aattggtctggggataaccgatgct

SEQ ID NO: 1440632 - DNA, 25 bp, Homo sapien
taaaaggagtatagttcaggaattg

SEQ ID NO: 1440633 - DNA, 25 bp, Homo sapien
gagtatagttcaggaattggtctgg

SEQ ID NO: 1440634 - DNA, 25 bp, Homo sapien
ttctgccctgaaaatacatcagtgt

SEQ ID NO: 1440635 - DNA, 25 bp, Homo sapien
tgccctgaaaatacatcagtgtcag

SEQ ID NO: 1440636 - DNA, 25 bp, Homo sapien
tctgccctgaaaatacatcagtgtc

SEQ ID NO: 1440637 - DNA, 25 bp, Homo sapien
ccttctgccctgaaaatacatcagt

SEQ ID NO: 1440638 - DNA, 25 bp, Homo sapien
gtttacttgctctacattcctgtgt

SEQ ID NO: 1440639 - DNA, 25 bp, Homo sapien
tcaaagagattgtccccaccttgta

SEQ ID NO: 1440640 - DNA, 25 bp, Homo sapien
accttgtaccctatttctggtactg

SEQ ID NO: 1440641 - DNA, 25 bp, Homo sapien
tctggtactgtttacttgctctaca

SEQ ID NO: 1440642 - DNA, 25 bp, Homo sapien
cacgttgtgcttaaacatttgccta

SEQ ID NO: 1440643 - DNA, 25 bp, Homo sapien
tggatttgtccaactgtcatggcca

SEQ ID NO: 1440644 - DNA, 25 bp, Homo sapien
catggccattataagcacgttgtgc

SEQ ID NO: 1440645 - DNA, 25 bp, Homo sapien
taatttttcagtcatgctggcctga

SEQ ID NO: 1440646 - DNA, 25 bp, Homo sapien
tacgaaagggtagagggagagcgga

SEQ ID NO: 1440647 - DNA, 25 bp, Homo sapien
ggccctctcctcgaaaacagaacag

SEQ ID NO: 1440648 - DNA, 25 bp, Homo sapien
gggagagcggaatctgattccgatc

SEQ ID NO: 1440649 - DNA, 25 bp, Homo sapien
cagagtccaacaaattgtccccagg

SEQ ID NO: 1440650 - DNA, 25 bp, Homo sapien
actcgtgtttctacccactagggca

SEQ ID NO: 1440651 - DNA, 25 bp, Homo sapien
ccagagtcgtcttggaaaatggaag

SEQ ID NO: 1440652 - DNA, 25 bp, Homo sapien
ggaagatttgggcacgagaacagaa

SEQ ID NO: 1440653 - DNA, 25 bp, Homo sapien
ttccaccggtatgttcctctcgacg

SEQ ID NO: 1440654 - DNA, 25 bp, Homo sapien
tactgtgaacccacttatcttccct

SEQ ID NO: 1440655 - DNA, 25 bp, Homo sapien
gtgaacccacttatcttccctttga

SEQ ID NO: 1440656 - DNA, 25 bp, Homo sapien
tcgctcagcagcgttataaacatta

SEQ ID NO: 1440657 - DNA, 25 bp, Homo sapien
aatggattcatgttatcctgtgaac

SEQ ID NO: 1440658 - DNA, 25 bp, Homo sapien
tacaaattggaccatcctcatttat

SEQ ID NO: 1440659 - DNA, 25 bp, Homo sapien
ctcatttatctcataggcttgcatt

SEQ ID NO: 1440660 - DNA, 25 bp, Homo sapien
tttactgtgctgacacctttacaaa

SEQ ID NO: 1440661 - DNA, 25 bp, Homo sapien
catttatctcataggcttgcatttc

SEQ ID NO: 1440662 - DNA, 25 bp, Homo sapien
tcttcacacttagcatacacagtga

SEQ ID NO: 1440663 - DNA, 25 bp, Homo sapien
atagcagcagttaagaattcttcac

SEQ ID NO: 1440664 - DNA, 25 bp, Homo sapien
aaaagagcaattttcagctgattga

SEQ ID NO: 1440665 - DNA, 25 bp, Homo sapien
gatggaaaagagcaattttcagctg

SEQ ID NO: 1440666 - DNA, 25 bp, Homo sapien
agtttatggaattgtctctgttgca

SEQ ID NO: 1440667 - DNA, 25 bp, Homo sapien
gaattgtctctgttgcaactcagaa

SEQ ID NO: 1440668 - DNA, 25 bp, Homo sapien
cttgagtttatggaattgtctctgt

SEQ ID NO: 1440669 - DNA, 25 bp, Homo sapien
ggaattgtctctgttgcaactcaga

SEQ ID NO: 1440670 - DNA, 25 bp, Homo sapien
agtgtatctgtttcattagactgtg

SEQ ID NO: 1440671 - DNA, 25 bp, Homo sapien
gaacactcggggattatctgcatca

SEQ ID NO: 1440672 - DNA, 25 bp, Homo sapien
acttcagtgtatctgtttcattaga

SEQ ID NO: 1440673 - DNA, 25 bp, Homo sapien
ggattatctgcatcatacttcagtg

SEQ ID NO: 1440674 - DNA, 25 bp, Homo sapien
tgttctcacttaagaactggttgcg

SEQ ID NO: 1440675 - DNA, 25 bp, Homo sapien
tatttgttctcacttaagaactggt

SEQ ID NO: 1440676 - DNA, 25 bp, Homo sapien
tctcacttaagaactggttgcgctg

SEQ ID NO: 1440677 - DNA, 25 bp, Homo sapien
cacttaagaactggttgcgctgaag

SEQ ID NO: 1440678 - DNA, 25 bp, Homo sapien
aacttttactcctccactatcttga

SEQ ID NO: 1440679 - DNA, 25 bp, Homo sapien
cactatcttgaaagaaatatcgaag

SEQ ID NO: 1440680 - DNA, 25 bp, Homo sapien
cttgtgcaacttttactcctccact

SEQ ID NO: 1440681 - DNA, 25 bp, Homo sapien
aaatatcgaagtggctcaatattca

SEQ ID NO: 1440682 - DNA, 25 bp, Homo sapien
cttcattggatttaactttccacaa

SEQ ID NO: 1440683 - DNA, 25 bp, Homo sapien
catcacacatgttatcaggctggag

SEQ ID NO: 1440684 - DNA, 25 bp, Homo sapien
gccgagatatcgctttgaaaggcac

SEQ ID NO: 1440685 - DNA, 25 bp, Homo sapien
tacttttaatctgagcgtggcccca

SEQ ID NO: 1440686 - DNA, 25 bp, Homo sapien
gatcagcacatagacacaaccctta

SEQ ID NO: 1440687 - DNA, 25 bp, Homo sapien
tctggagtctcattgcatatggttg

SEQ ID NO: 1440688 - DNA, 25 bp, Homo sapien
gttacactgcgaaaagtgactatgg

SEQ ID NO: 1440689 - DNA, 25 bp, Homo sapien
ttttcactacttattcccagggata

SEQ ID NO: 1440690 - DNA, 25 bp, Homo sapien
ggattaagaccttctgatgcattgc

SEQ ID NO: 1440691 - DNA, 25 bp, Homo sapien
gtcctccaatgtcataggcatattt

SEQ ID NO: 1440692 - DNA, 25 bp, Homo sapien
cacggtaagccagttatgctgcata

SEQ ID NO: 1440693 - DNA, 25 bp, Homo sapien
gctgcatagcagtcctccaatgtca

SEQ ID NO: 1440694 - DNA, 25 bp, Homo sapien
agctggcttagacctctggatctca

SEQ ID NO: 1440695 - DNA, 25 bp, Homo sapien
gctgctgttttgttggtgtttagtt

SEQ ID NO: 1440696 - DNA, 25 bp, Homo sapien
aaaatatacttgtggcagcaactag

SEQ ID NO: 1440697 - DNA, 25 bp, Homo sapien
caagcctgttaacttcgttattctg

SEQ ID NO: 1440698 - DNA, 25 bp, Homo sapien
cgttattctggttaagacgtgcacc

SEQ ID NO: 1440699 - DNA, 25 bp, Homo sapien
gcaactagataattcatcaagcctg

SEQ ID NO: 1440700 - DNA, 25 bp, Homo sapien
actgctgttcgttgaaaatctttct

SEQ ID NO: 1440701 - DNA, 25 bp, Homo sapien
aactgctgttcgttgaaaatctttc

SEQ ID NO: 1440702 - DNA, 25 bp, Homo sapien
tgaaaactgctgttcgttgaaaatc

SEQ ID NO: 1440703 - DNA, 25 bp, Homo sapien
aaaactgctgttcgttgaaaatctt

SEQ ID NO: 1440704 - DNA, 25 bp, Homo sapien
ttgtatataccatcaaagtaagcac

SEQ ID NO: 1440705 - DNA, 25 bp, Homo sapien
ttttgtatataccatcaaagtaagc

SEQ ID NO: 1440706 - DNA, 25 bp, Homo sapien
acatttttgtatataccatcaaagt

SEQ ID NO: 1440707 - DNA, 25 bp, Homo sapien
ttcttcaagggccctgctaatattt

SEQ ID NO: 1440708 - DNA, 25 bp, Homo sapien
gatgtactgtacatcagattctcct

SEQ ID NO: 1440709 - DNA, 25 bp, Homo sapien
aaaggaatacagatgtactgtacat

SEQ ID NO: 1440710 - DNA, 25 bp, Homo sapien
agatgtactgtacatcagattctcc

SEQ ID NO: 1440711 - DNA, 25 bp, Homo sapien
gaatacagatgtactgtacatcaga

SEQ ID NO: 1440712 - DNA, 25 bp, Homo sapien
caattgtgtcagctatatcagaaca

SEQ ID NO: 1440713 - DNA, 25 bp, Homo sapien
gctcagatccttgaggtagtggttg

SEQ ID NO: 1440714 - DNA, 25 bp, Homo sapien
tgaaagtgcagcacatcttcatact

SEQ ID NO: 1440715 - DNA, 25 bp, Homo sapien
gatccttgaggtagtggttgtgaaa

SEQ ID NO: 1440716 - DNA, 25 bp, Homo sapien
cattgtcaaactcattgactaaatc

SEQ ID NO: 1440717 - DNA, 25 bp, Homo sapien
cttgccattgtcaaactcattgact

SEQ ID NO: 1440718 - DNA, 25 bp, Homo sapien
gccattgtcaaactcattgactaaa

SEQ ID NO: 1440719 - DNA, 25 bp, Homo sapien
tgccattgtcaaactcattgactaa

SEQ ID NO: 1440720 - DNA, 25 bp, Homo sapien
ttctaatctgaatatagaatactga

SEQ ID NO: 1440721 - DNA, 25 bp, Homo sapien
caagacatcagctattaaagttatt

SEQ ID NO: 1440722 - DNA, 25 bp, Homo sapien
taatctgaatatagaatactgagta

SEQ ID NO: 1440723 - DNA, 25 bp, Homo sapien
ttacaagacatcagctattaaagtt

SEQ ID NO: 1440724 - DNA, 25 bp, Homo sapien
ggaattaggtccaacaaaatattga

SEQ ID NO: 1440725 - DNA, 25 bp, Homo sapien
tagtcccatcatctcagcattcgtt

SEQ ID NO: 1440726 - DNA, 25 bp, Homo sapien
tcaaaccatcgcctatagcctagtc

SEQ ID NO: 1440727 - DNA, 25 bp, Homo sapien
tcagcattcgttgttgggaacttac

SEQ ID NO: 1440728 - DNA, 25 bp, Homo sapien
gatccttggtgtttcaacagaagca

SEQ ID NO: 1440729 - DNA, 25 bp, Homo sapien
ttatcatcagtagcacagatccttg

SEQ ID NO: 1440730 - DNA, 25 bp, Homo sapien
tcagtagcacagatccttggtgttt

SEQ ID NO: 1440731 - DNA, 25 bp, Homo sapien
caacagaagcatcaatctgattcat

SEQ ID NO: 1440732 - DNA, 25 bp, Homo sapien
tacaagtggtgccataacgggagcc

SEQ ID NO: 1440733 - DNA, 25 bp, Homo sapien
catactggcagcaagaaatggacca

SEQ ID NO: 1440734 - DNA, 25 bp, Homo sapien
tcagctgcgatgagtaacattcttc

SEQ ID NO: 1440735 - DNA, 25 bp, Homo sapien
gaaatggaccagtggctatagttgg

SEQ ID NO: 1440736 - DNA, 25 bp, Homo sapien
atattatcttgttcacaaaatttgc

SEQ ID NO: 1440737 - DNA, 25 bp, Homo sapien
aggagatattatcttgttcacaaaa

SEQ ID NO: 1440738 - DNA, 25 bp, Homo sapien
attatcttgttcacaaaatttgctt

SEQ ID NO: 1440739 - DNA, 25 bp, Homo sapien
aaggagatattatcttgttcacaaa

SEQ ID NO: 1440740 - DNA, 25 bp, Homo sapien
ctgcataggacagttttaccatttc

SEQ ID NO: 1440741 - DNA, 25 bp, Homo sapien
gttctttgccacacgcgtctctttg

SEQ ID NO: 1440742 - DNA, 25 bp, Homo sapien
tggtggctcctctccaaacgataaa

SEQ ID NO: 1440743 - DNA, 25 bp, Homo sapien
aaactcaaggactcatgcttcttcc

SEQ ID NO: 1440744 - DNA, 25 bp, Homo sapien
aagtctaatgtgaatgttctttgcc

SEQ ID NO: 1440745 - DNA, 25 bp, Homo sapien
aaagcaaacagcagtcgaagatcca

SEQ ID NO: 1440746 - DNA, 25 bp, Homo sapien
gcaaacagcagtcgaagatccaaaa

SEQ ID NO: 1440747 - DNA, 25 bp, Homo sapien
cagcagtcgaagatccaaaatccca

SEQ ID NO: 1440748 - DNA, 25 bp, Homo sapien
aacagcagtcgaagatccaaaatcc

SEQ ID NO: 1440749 - DNA, 25 bp, Homo sapien
tataccttgaactatatatgccaca

SEQ ID NO: 1440750 - DNA, 25 bp, Homo sapien
taccttgaactatatatgccacaac

SEQ ID NO: 1440751 - DNA, 25 bp, Homo sapien
caaattatcgaatataccttgaact

SEQ ID NO: 1440752 - DNA, 25 bp, Homo sapien
tatcattcaaattatcgaatatacc

SEQ ID NO: 1440753 - DNA, 25 bp, Homo sapien
cctcaataggaatgtagtaaacttt

SEQ ID NO: 1440754 - DNA, 25 bp, Homo sapien
caataggaatgtagtaaactttgct

SEQ ID NO: 1440755 - DNA, 25 bp, Homo sapien
tattcctcaataggaatgtagtaaa

SEQ ID NO: 1440756 - DNA, 25 bp, Homo sapien
ttatattcctcaataggaatgtagt

SEQ ID NO: 1440757 - DNA, 25 bp, Homo sapien
agaacccaatgggttctaagattat

SEQ ID NO: 1440758 - DNA, 25 bp, Homo sapien
acccaatgggttctaagattatggg

SEQ ID NO: 1440759 - DNA, 25 bp, Homo sapien
agattatggggactgcatcatgact

SEQ ID NO: 1440760 - DNA, 25 bp, Homo sapien
taagattatggggactgcatcatga

SEQ ID NO: 1440761 - DNA, 25 bp, Homo sapien
ttagtaacatgatttaaggacatca

SEQ ID NO: 1440762 - DNA, 25 bp, Homo sapien
ggacatcatatttgaccgagctttt

SEQ ID NO: 1440763 - DNA, 25 bp, Homo sapien
catgatttaaggacatcatatttga

SEQ ID NO: 1440764 - DNA, 25 bp, Homo sapien
taaggacatcatatttgaccgagct

SEQ ID NO: 1440765 - DNA, 25 bp, Homo sapien
tcagagtgatatcagcacattcctc

SEQ ID NO: 1440766 - DNA, 25 bp, Homo sapien
ttcagagtgatatcagcacattcct

SEQ ID NO: 1440767 - DNA, 25 bp, Homo sapien
caggttttggatataccatggactc

SEQ ID NO: 1440768 - DNA, 25 bp, Homo sapien
agaaaatgcaggttttggatatacc

SEQ ID NO: 1440769 - DNA, 25 bp, Homo sapien
aatgcaggttttggatataccatgg

SEQ ID NO: 1440770 - DNA, 25 bp, Homo sapien
gttttggatataccatggactcttc

SEQ ID NO: 1440771 - DNA, 25 bp, Homo sapien
tggagttgtaatgtattctgcatat

SEQ ID NO: 1440772 - DNA, 25 bp, Homo sapien
ttggagttgtaatgtattctgcata

SEQ ID NO: 1440773 - DNA, 25 bp, Homo sapien
acatcactagacagatcatcaaggc

SEQ ID NO: 1440774 - DNA, 25 bp, Homo sapien
ttctactagatctatgaaaatattt

SEQ ID NO: 1440775 - DNA, 25 bp, Homo sapien
tcagtctgctttgcatagtttctct

SEQ ID NO: 1440776 - DNA, 25 bp, Homo sapien
ctgctttgcatagtttctcttcaag

SEQ ID NO: 1440777 - DNA, 25 bp, Homo sapien
gtctgctttgcatagtttctcttca

SEQ ID NO: 1440778 - DNA, 25 bp, Homo sapien
gctttgcatagtttctcttcaagtt

SEQ ID NO: 1440779 - DNA, 25 bp, Homo sapien
cccgatatggaatatgaccatctat

SEQ ID NO: 1440780 - DNA, 25 bp, Homo sapien
agtctaagttgacaaggattttggg

SEQ ID NO: 1440781 - DNA, 25 bp, Homo sapien
cttcccgatatggaatatgaccatc

SEQ ID NO: 1440782 - DNA, 25 bp, Homo sapien
gaatatgaccatctattttgagtct

SEQ ID NO: 1440783 - DNA, 25 bp, Homo sapien
cttcccacacaaagtcctgaataca

SEQ ID NO: 1440784 - DNA, 25 bp, Homo sapien
ttcccacacaaagtcctgaatacat

SEQ ID NO: 1440785 - DNA, 25 bp, Homo sapien
ccttcccacacaaagtcctgaatac

SEQ ID NO: 1440786 - DNA, 25 bp, Homo sapien
agggctacaagtgcaccccactata

SEQ ID NO: 1440787 - DNA, 25 bp, Homo sapien
tgaatgttgcaaatatagaactttg

SEQ ID NO: 1440788 - DNA, 25 bp, Homo sapien
gtggaaaggcttcacctataacatt

SEQ ID NO: 1440789 - DNA, 25 bp, Homo sapien
ccactatattcatctagtagatgca

SEQ ID NO: 1440790 - DNA, 25 bp, Homo sapien
gtttctcacacctatactcattacc

SEQ ID NO: 1440791 - DNA, 25 bp, Homo sapien
tgactgtcctgaaggtcattctctc

SEQ ID NO: 1440792 - DNA, 25 bp, Homo sapien
ctgtttctcacacctatactcatta

SEQ ID NO: 1440793 - DNA, 25 bp, Homo sapien
gtcctgaaggtcattctctcaattc

SEQ ID NO: 1440794 - DNA, 25 bp, Homo sapien
gccaactctggatattgccattttc

SEQ ID NO: 1440795 - DNA, 25 bp, Homo sapien
ctggtatgggtgtgacaaccttgcc

SEQ ID NO: 1440796 - DNA, 25 bp, Homo sapien
tctggtatgggtgtgacaaccttgc

SEQ ID NO: 1440797 - DNA, 25 bp, Homo sapien
aactctggatattgccattttcctg

SEQ ID NO: 1440798 - DNA, 25 bp, Homo sapien
tcctttgcaatgacagtcttataat

SEQ ID NO: 1440799 - DNA, 25 bp, Homo sapien
taacaactactatcctcttcctttg

SEQ ID NO: 1440800 - DNA, 25 bp, Homo sapien
aacaactactatcctcttcctttgc

SEQ ID NO: 1440801 - DNA, 25 bp, Homo sapien
gaatctgtactatgatccataatat

SEQ ID NO: 1440802 - DNA, 25 bp, Homo sapien
tctgtactatgatccataatattct

SEQ ID NO: 1440803 - DNA, 25 bp, Homo sapien
ctgtactatgatccataatattctg

SEQ ID NO: 1440804 - DNA, 25 bp, Homo sapien
tcagaatctgtactatgatccataa

SEQ ID NO: 1440805 - DNA, 25 bp, Homo sapien
gtacccattgaatgtgccaaatcca

SEQ ID NO: 1440806 - DNA, 25 bp, Homo sapien
gatcaaacaggtgtggtatacagcc

SEQ ID NO: 1440807 - DNA, 25 bp, Homo sapien
tacagccaggtacccattgaatgtg

SEQ ID NO: 1440808 - DNA, 25 bp, Homo sapien
atccaaggatcaaacaggtgtggta

SEQ ID NO: 1440809 - DNA, 25 bp, Homo sapien
tccccaggaatgtcatcggagccat

SEQ ID NO: 1440810 - DNA, 25 bp, Homo sapien
ttccccaggaatgtcatcggagcca

SEQ ID NO: 1440811 - DNA, 25 bp, Homo sapien
tttccccaggaatgtcatcggagcc

SEQ ID NO: 1440812 - DNA, 25 bp, Homo sapien
ggcacatagacccattagaatcccc

SEQ ID NO: 1440813 - DNA, 25 bp, Homo sapien
caactgaggaagtttagagggaagt

SEQ ID NO: 1440814 - DNA, 25 bp, Homo sapien
ggaagtagggtttaaggcacataga

SEQ ID NO: 1440815 - DNA, 25 bp, Homo sapien
cttctccaactgaggaagtttagag

SEQ ID NO: 1440816 - DNA, 25 bp, Homo sapien
tcaggtccaagtctcaaagatctgt

SEQ ID NO: 1440817 - DNA, 25 bp, Homo sapien
tcagttgctgctcgatcaggtccaa

SEQ ID NO: 1440818 - DNA, 25 bp, Homo sapien
tgtatgatacattgagaaggcctcc

SEQ ID NO: 1440819 - DNA, 25 bp, Homo sapien
aaagatctgtgatttgccctcaata

SEQ ID NO: 1440820 - DNA, 25 bp, Homo sapien
gcaatggagacaaaggctgttcatc

SEQ ID NO: 1440821 - DNA, 25 bp, Homo sapien
gtaggcaatggagacaaaggctgtt

SEQ ID NO: 1440822 - DNA, 25 bp, Homo sapien
gctctggaaatagtgataaaatggg

SEQ ID NO: 1440823 - DNA, 25 bp, Homo sapien
atgggtagttgtgggctgtgtaggc

SEQ ID NO: 1440824 - DNA, 25 bp, Homo sapien
acttgtcctcgtggatcattctcac

SEQ ID NO: 1440825 - DNA, 25 bp, Homo sapien
tctctcctggtatgtcatacttcat

SEQ ID NO: 1440826 - DNA, 25 bp, Homo sapien
tttttctctcctggtatgtcatact

SEQ ID NO: 1440827 - DNA, 25 bp, Homo sapien
ctggcacttgtcctcgtggatcatt

SEQ ID NO: 1440828 - DNA, 25 bp, Homo sapien
acaaagccctgagagaatagtagtt

SEQ ID NO: 1440829 - DNA, 25 bp, Homo sapien
tttggataatcaccattggcaggca

SEQ ID NO: 1440830 - DNA, 25 bp, Homo sapien
accattggcaggcaaagctaacaca

SEQ ID NO: 1440831 - DNA, 25 bp, Homo sapien
gttttggataatcaccattggcagg

SEQ ID NO: 1440832 - DNA, 25 bp, Homo sapien
ctgtctgtttagagacctggaaatg

SEQ ID NO: 1440833 - DNA, 25 bp, Homo sapien
tcataagcagatacagtgactttgc

SEQ ID NO: 1440834 - DNA, 25 bp, Homo sapien
cctatgtaaaaaggtagctgctggg

SEQ ID NO: 1440835 - DNA, 25 bp, Homo sapien
ctttgctgcagacatatctcctaca

SEQ ID NO: 1440836 - DNA, 25 bp, Homo sapien
gatcttcaggtctattagagtggga

SEQ ID NO: 1440837 - DNA, 25 bp, Homo sapien
gggtctggatcttcaggtctattag

SEQ ID NO: 1440838 - DNA, 25 bp, Homo sapien
cagagctttgtgacccatgaatgcc

SEQ ID NO: 1440839 - DNA, 25 bp, Homo sapien
aatgccaggtagatctcattggggg

SEQ ID NO: 1440840 - DNA, 25 bp, Homo sapien
gtttctcatagacaacaggacattg

SEQ ID NO: 1440841 - DNA, 25 bp, Homo sapien
tctattagtcccatttggtatagtg

SEQ ID NO: 1440842 - DNA, 25 bp, Homo sapien
tggataaaccgtctaatgctgaaag

SEQ ID NO: 1440843 - DNA, 25 bp, Homo sapien
gacttgcttagtctcttatgatact

SEQ ID NO: 1440844 - DNA, 25 bp, Homo sapien
ggggtccagagtgtcttccacagca

SEQ ID NO: 1440845 - DNA, 25 bp, Homo sapien
cagccatgttgcagcacagggagca

SEQ ID NO: 1440846 - DNA, 25 bp, Homo sapien
cctgtggatacagtcaccagcagcc

SEQ ID NO: 1440847 - DNA, 25 bp, Homo sapien
ggcagcacctgtggatacagtcacc

SEQ ID NO: 1440848 - DNA, 25 bp, Homo sapien
atgagttctgtgctaatgtggaaca

SEQ ID NO: 1440849 - DNA, 25 bp, Homo sapien
tgagttctgtgctaatgtggaacat

SEQ ID NO: 1440850 - DNA, 25 bp, Homo sapien
ccgctccggtaaattaggtgtacat

SEQ ID NO: 1440851 - DNA, 25 bp, Homo sapien
tgtacataataaccagccgtcgacc

SEQ ID NO: 1440852 - DNA, 25 bp, Homo sapien
tcacttgcagtatttaccgctccgg

SEQ ID NO: 1440853 - DNA, 25 bp, Homo sapien
taggtgtacataataaccagccgtc

SEQ ID NO: 1440854 - DNA, 25 bp, Homo sapien
ctgcagtaaccatgattgcccagtg

SEQ ID NO: 1440855 - DNA, 25 bp, Homo sapien
gtaaccatgattgcccagtgtttgc

SEQ ID NO: 1440856 - DNA, 25 bp, Homo sapien
tttcagagatactgcagtaaccatg

SEQ ID NO: 1440857 - DNA, 25 bp, Homo sapien
gcccagtgtttgctgctaagtttca

SEQ ID NO: 1440858 - DNA, 25 bp, Homo sapien
ttttcagtaccgctgaatttgctta

SEQ ID NO: 1440859 - DNA, 25 bp, Homo sapien
cagtaccgctgaatttgcttaacat

SEQ ID NO: 1440860 - DNA, 25 bp, Homo sapien
ctccttttttcagtaccgctgaatt

SEQ ID NO: 1440861 - DNA, 25 bp, Homo sapien
cttttttcagtaccgctgaatttgc

SEQ ID NO: 1440862 - DNA, 25 bp, Homo sapien
gcgcatatcccaactggcgacaatg

SEQ ID NO: 1440863 - DNA, 25 bp, Homo sapien
gctcttgtctcaaaactgcgcatat

SEQ ID NO: 1440864 - DNA, 25 bp, Homo sapien
tggcgacaatgacattaggacccat

SEQ ID NO: 1440865 - DNA, 25 bp, Homo sapien
tcaaaactgcgcatatcccaactgg

SEQ ID NO: 1440866 - DNA, 25 bp, Homo sapien
cattgggaattaattcccaaagtct

SEQ ID NO: 1440867 - DNA, 25 bp, Homo sapien
attgggaattaattcccaaagtctg

SEQ ID NO: 1440868 - DNA, 25 bp, Homo sapien
tgaaccagtatacttctctttttgg

SEQ ID NO: 1440869 - DNA, 25 bp, Homo sapien
catttgtatttctgaggcgcttttc

SEQ ID NO: 1440870 - DNA, 25 bp, Homo sapien
ttagcctctgacacaattgattcca

SEQ ID NO: 1440871 - DNA, 25 bp, Homo sapien
tggtgatctttctctttagcctctg

SEQ ID NO: 1440872 - DNA, 25 bp, Homo sapien
tacaccaggacaaatgaattgtgca

SEQ ID NO: 1440873 - DNA, 25 bp, Homo sapien
gactgattcatacctatctttgggc

SEQ ID NO: 1440874 - DNA, 25 bp, Homo sapien
gatggcatctagcactctcgtccag

SEQ ID NO: 1440875 - DNA, 25 bp, Homo sapien
cacccggccgacctatcagtagttt

SEQ ID NO: 1440876 - DNA, 25 bp, Homo sapien
attcctttgactcagctccagactg

SEQ ID NO: 1440877 - DNA, 25 bp, Homo sapien
tgagtcattcctttgactcagctcc

SEQ ID NO: 1440878 - DNA, 25 bp, Homo sapien
ctatgagtcattcctttgactcagc

SEQ ID NO: 1440879 - DNA, 25 bp, Homo sapien
cattcctttgactcagctccagact

SEQ ID NO: 1440880 - DNA, 25 bp, Homo sapien
ctctactacacaatatccagtttct

SEQ ID NO: 1440881 - DNA, 25 bp, Homo sapien
ttccaactcttaaccaataatgacg

SEQ ID NO: 1440882 - DNA, 25 bp, Homo sapien
tcttaaccaataatgacgtcctcca

SEQ ID NO: 1440883 - DNA, 25 bp, Homo sapien
ctcggaacagtgcttcagtgcttcc

SEQ ID NO: 1440884 - DNA, 25 bp, Homo sapien
cagtgcttccaactcttaaccaata

SEQ ID NO: 1440885 - DNA, 25 bp, Homo sapien
catgttgaggaagttggatattacc

SEQ ID NO: 1440886 - DNA, 25 bp, Homo sapien
gatattaccctgaaagcaattgtca

SEQ ID NO: 1440887 - DNA, 25 bp, Homo sapien
ccatattcatgttgaggaagttgga

SEQ ID NO: 1440888 - DNA, 25 bp, Homo sapien
gaagttggatattaccctgaaagca

SEQ ID NO: 1440889 - DNA, 25 bp, Homo sapien
taaaatctcaatggacggggggaca

SEQ ID NO: 1440890 - DNA, 25 bp, Homo sapien
ccacttcagaagctttctcattcca

SEQ ID NO: 1440891 - DNA, 25 bp, Homo sapien
cggggggacaggatgactgattaaa

SEQ ID NO: 1440892 - DNA, 25 bp, Homo sapien
tggattggaggtccacttttccact

SEQ ID NO: 1440893 - DNA, 25 bp, Homo sapien
tccatttcaaacgatttctcttcag

SEQ ID NO: 1440894 - DNA, 25 bp, Homo sapien
tctgttgttgcctctaattggctta

SEQ ID NO: 1440895 - DNA, 25 bp, Homo sapien
ttccacttttatctgtagcttctct

SEQ ID NO: 1440896 - DNA, 25 bp, Homo sapien
gaaaatatggtggttttgcactctg

SEQ ID NO: 1440897 - DNA, 25 bp, Homo sapien
gaaaaagacgctgcacataagcact

SEQ ID NO: 1440898 - DNA, 25 bp, Homo sapien
caaagtggcataggaaccatctgca

SEQ ID NO: 1440899 - DNA, 25 bp, Homo sapien
gaacaagcgttccttggcaaaatgg

SEQ ID NO: 1440900 - DNA, 25 bp, Homo sapien
cgagctcccaaagaccaaaactgga

SEQ ID NO: 1440901 - DNA, 25 bp, Homo sapien
ttgtcagttgattgtgcaattgaac

SEQ ID NO: 1440902 - DNA, 25 bp, Homo sapien
tgccatgtggagattaatccctttc

SEQ ID NO: 1440903 - DNA, 25 bp, Homo sapien
cagtttaatcacttcttgctcttca

SEQ ID NO: 1440904 - DNA, 25 bp, Homo sapien
tgaaggtgtcatgtagattgttgtt

SEQ ID NO: 1440905 - DNA, 25 bp, Homo sapien
agcggaagccgcctgtggtacacct

SEQ ID NO: 1440906 - DNA, 25 bp, Homo sapien
cctggtacttgcagcggaagccgcc

SEQ ID NO: 1440907 - DNA, 25 bp, Homo sapien
gaccctggtacttgcagcggaagcc

SEQ ID NO: 1440908 - DNA, 25 bp, Homo sapien
ggaagccgcctgtggtacacctggt

SEQ ID NO: 1440909 - DNA, 25 bp, Homo sapien
tcctttcctctatttaacttctcca

SEQ ID NO: 1440910 - DNA, 25 bp, Homo sapien
gctcctttcctctatttaacttctc

SEQ ID NO: 1440911 - DNA, 25 bp, Homo sapien
tgatagtactcaccatggccaggta

SEQ ID NO: 1440912 - DNA, 25 bp, Homo sapien
cttttgagttgagtagcaaatgata

SEQ ID NO: 1440913 - DNA, 25 bp, Homo sapien
tttcagtgatagtactcaccatggc

SEQ ID NO: 1440914 - DNA, 25 bp, Homo sapien
ttggaatttcagtgatagtactcac

SEQ ID NO: 1440915 - DNA, 25 bp, Homo sapien
ggcctggctggttcagttttatctt

SEQ ID NO: 1440916 - DNA, 25 bp, Homo sapien
cattcttttggcctggctggttcag

SEQ ID NO: 1440917 - DNA, 25 bp, Homo sapien
cgttttatcccattcttttggcctg

SEQ ID NO: 1440918 - DNA, 25 bp, Homo sapien
tatcccattcttttggcctggctgg

SEQ ID NO: 1440919 - DNA, 25 bp, Homo sapien
ctaattttcacccagtccctgaaga

SEQ ID NO: 1440920 - DNA, 25 bp, Homo sapien
taattttcacccagtccctgaagaa

SEQ ID NO: 1440921 - DNA, 25 bp, Homo sapien
aagaaatgcttggtagatagtaaaa

SEQ ID NO: 1440922 - DNA, 25 bp, Homo sapien
cctgaagaaatgcttggtagatagt

SEQ ID NO: 1440923 - DNA, 25 bp, Homo sapien
cctgtggaatgttgttgaaatgcat

SEQ ID NO: 1440924 - DNA, 25 bp, Homo sapien
ccgttgatgaaagagggcctgtgga

SEQ ID NO: 1440925 - DNA, 25 bp, Homo sapien
cgttgatgaaagagggcctgtggaa

SEQ ID NO: 1440926 - DNA, 25 bp, Homo sapien
ttgatgaaagagggcctgtggaatg

SEQ ID NO: 1440927 - DNA, 25 bp, Homo sapien
tacttggcaaaggattagactaagg

SEQ ID NO: 1440928 - DNA, 25 bp, Homo sapien
tagactaagggtaagcatgatcacg

SEQ ID NO: 1440929 - DNA, 25 bp, Homo sapien
atgtctgaaataggcatatgagtcc

SEQ ID NO: 1440930 - DNA, 25 bp, Homo sapien
ggtaagcatgatcacgtttgataaa

SEQ ID NO: 1440931 - DNA, 25 bp, Homo sapien
tcacattagatattctcgtaagttc

SEQ ID NO: 1440932 - DNA, 25 bp, Homo sapien
acatccaaattcaggccataagtat

SEQ ID NO: 1440933 - DNA, 25 bp, Homo sapien
gatattctcgtaagttctcagttgc

SEQ ID NO: 1440934 - DNA, 25 bp, Homo sapien
caaattcaggccataagtattagta

SEQ ID NO: 1440935 - DNA, 25 bp, Homo sapien
tgtttttaccccccatgccttcatg

SEQ ID NO: 1440936 - DNA, 25 bp, Homo sapien
tttaccccccatgccttcatgaagc

SEQ ID NO: 1440937 - DNA, 25 bp, Homo sapien
aaatgttgatttaatccctggctcc

SEQ ID NO: 1440938 - DNA, 25 bp, Homo sapien
gtttttaccccccatgccttcatga

SEQ ID NO: 1440939 - DNA, 25 bp, Homo sapien
taatctcctggttggtgcatctttc

SEQ ID NO: 1440940 - DNA, 25 bp, Homo sapien
atctttctccgattactactaaggg

SEQ ID NO: 1440941 - DNA, 25 bp, Homo sapien
tcagagctactacagagtttctggg

SEQ ID NO: 1440942 - DNA, 25 bp, Homo sapien
gggatacgtttgaacctgcactggc

SEQ ID NO: 1440943 - DNA, 25 bp, Homo sapien
gatgacaattgtgcttcaaatctcc

SEQ ID NO: 1440944 - DNA, 25 bp, Homo sapien
aaattcttctgtgaactgatgacaa

SEQ ID NO: 1440945 - DNA, 25 bp, Homo sapien
tccttacgtttttctgcaaagagtc

SEQ ID NO: 1440946 - DNA, 25 bp, Homo sapien
gcaaagagtccctgctgcctaatca

SEQ ID NO: 1440947 - DNA, 25 bp, Homo sapien
gatgcaccagcatcactcttttgaa

SEQ ID NO: 1440948 - DNA, 25 bp, Homo sapien
aggatgcaccagcatcactcttttg

SEQ ID NO: 1440949 - DNA, 25 bp, Homo sapien
gcaccagcatcactcttttgaatgt

SEQ ID NO: 1440950 - DNA, 25 bp, Homo sapien
tgcaccagcatcactcttttgaatg

SEQ ID NO: 1440951 - DNA, 25 bp, Homo sapien
agggatagcccttcgcctgcatcag

SEQ ID NO: 1440952 - DNA, 25 bp, Homo sapien
gatcggcaaaagttctgagtacgcg

SEQ ID NO: 1440953 - DNA, 25 bp, Homo sapien
tcctcgcattgacaacagtaacgtg

SEQ ID NO: 1440954 - DNA, 25 bp, Homo sapien
tgagtacgcgtggatcaaccagtct

SEQ ID NO: 1440955 - DNA, 25 bp, Homo sapien
gaggtctgattatctggatttcgaa

SEQ ID NO: 1440956 - DNA, 25 bp, Homo sapien
catcattccaaacaaactattgaca

SEQ ID NO: 1440957 - DNA, 25 bp, Homo sapien
gttgtacggtcttttggcagaggtc

SEQ ID NO: 1440958 - DNA, 25 bp, Homo sapien
agaatgatactgtacttgtagatgc

SEQ ID NO: 1440959 - DNA, 25 bp, Homo sapien
gggtccatgccaataaacactaatg

SEQ ID NO: 1440960 - DNA, 25 bp, Homo sapien
tggcacctttgctgtgaaggctatg

SEQ ID NO: 1440961 - DNA, 25 bp, Homo sapien
ggctatggtgaatcggcagatgcca

SEQ ID NO: 1440962 - DNA, 25 bp, Homo sapien
gggctgttgtaaccctcagtggcaa

SEQ ID NO: 1440963 - DNA, 25 bp, Homo sapien
gaagcacaggccttagagagctatg

SEQ ID NO: 1440964 - DNA, 25 bp, Homo sapien
ttcagatatagggtcacattgacag

SEQ ID NO: 1440965 - DNA, 25 bp, Homo sapien
gagagctatgggttgtatattggat

SEQ ID NO: 1440966 - DNA, 25 bp, Homo sapien
tattggatattcagatatagggtca

SEQ ID NO: 1440967 - DNA, 25 bp, Homo sapien
acacacactggcctgcacccactgt

SEQ ID NO: 1440968 - DNA, 25 bp, Homo sapien
acactggcctgcacccactgtctgg

SEQ ID NO: 1440969 - DNA, 25 bp, Homo sapien
acacactggcctgcacccactgtct

SEQ ID NO: 1440970 - DNA, 25 bp, Homo sapien
ggtgcgcacacacactggcctgcac

SEQ ID NO: 1440971 - DNA, 25 bp, Homo sapien
ccaaaaagtgcaggaacctagtgtt

SEQ ID NO: 1440972 - DNA, 25 bp, Homo sapien
aaaagacatttcatagcctccaagc

SEQ ID NO: 1440973 - DNA, 25 bp, Homo sapien
catctagtttctttcgtgccagcaa

SEQ ID NO: 1440974 - DNA, 25 bp, Homo sapien
tactacctggtaaactatgtacgca

SEQ ID NO: 1440975 - DNA, 25 bp, Homo sapien
gatgctgtttcttcgactgggctca

SEQ ID NO: 1440976 - DNA, 25 bp, Homo sapien
tcaaagttgagtttcctcccgagaa

SEQ ID NO: 1440977 - DNA, 25 bp, Homo sapien
cagtggatctggtcgaattaagtat

SEQ ID NO: 1440978 - DNA, 25 bp, Homo sapien
gagaatcttgaccagtgacattgca

SEQ ID NO: 1440979 - DNA, 25 bp, Homo sapien
acaacatcattcagctctattctgg

SEQ ID NO: 1440980 - DNA, 25 bp, Homo sapien
gtatctggagatgggttaatcagga

SEQ ID NO: 1440981 - DNA, 25 bp, Homo sapien
taggagagggtactttgatgatcat

SEQ ID NO: 1440982 - DNA, 25 bp, Homo sapien
tcaggatgtaggagagggtactttg

SEQ ID NO: 1440983 - DNA, 25 bp, Homo sapien
taactaacacatcatacccctggga

SEQ ID NO: 1440984 - DNA, 25 bp, Homo sapien
ccacagtagggtttgaaggagcaga

SEQ ID NO: 1440985 - DNA, 25 bp, Homo sapien
gaacacacggcttgtccaacttgga

SEQ ID NO: 1440986 - DNA, 25 bp, Homo sapien
gcaatgttcgtgagcgtgagagtca

SEQ ID NO: 1440987 - DNA, 25 bp, Homo sapien
tttctgtaggagatcagatgtatca

SEQ ID NO: 1440988 - DNA, 25 bp, Homo sapien
tgtatcactagtttctactaattga

SEQ ID NO: 1440989 - DNA, 25 bp, Homo sapien
taggagatcagatgtatcactagtt

SEQ ID NO: 1440990 - DNA, 25 bp, Homo sapien
tctgtaggagatcagatgtatcact

SEQ ID NO: 1440991 - DNA, 25 bp, Homo sapien
gaaatcacgagtccatatatacagt

SEQ ID NO: 1440992 - DNA, 25 bp, Homo sapien
tattactactaatggcaagaaatca

SEQ ID NO: 1440993 - DNA, 25 bp, Homo sapien
agaaccaactatattactactaatg

SEQ ID NO: 1440994 - DNA, 25 bp, Homo sapien
tactaatggcaagaaatcacgagtc

SEQ ID NO: 1440995 - DNA, 25 bp, Homo sapien
tttctgacctcctgtagaggttcag

SEQ ID NO: 1440996 - DNA, 25 bp, Homo sapien
tagaggttcagtcgctgctgggtta

SEQ ID NO: 1440997 - DNA, 25 bp, Homo sapien
gctgttttaccagagtgttttgggc

SEQ ID NO: 1440998 - DNA, 25 bp, Homo sapien
tatcccactgtagaaagacccaagt

SEQ ID NO: 1440999 - DNA, 25 bp, Homo sapien
tctccgcagcaagggatggtccgac

SEQ ID NO: 1441000 - DNA, 25 bp, Homo sapien
tgttgagttgcggtggttgctgcgg

SEQ ID NO: 1441001 - DNA, 25 bp, Homo sapien
gagtctttggtgtcttcccactctt

SEQ ID NO: 1441002 - DNA, 25 bp, Homo sapien
ggtccgactgatcactggatgttga

SEQ ID NO: 1441003 - DNA, 25 bp, Homo sapien
atgcacatgcaaatgaacaatttcc

SEQ ID NO: 1441004 - DNA, 25 bp, Homo sapien
tattgtacttaagagcagcattcat

SEQ ID NO: 1441005 - DNA, 25 bp, Homo sapien
tcctgaatactattgtacttaagag

SEQ ID NO: 1441006 - DNA, 25 bp, Homo sapien
gcacatgcaaatgaacaatttcctg

SEQ ID NO: 1441007 - DNA, 25 bp, Homo sapien
tcttaagtaatacgtaccaccaaca

SEQ ID NO: 1441008 - DNA, 25 bp, Homo sapien
cttgataatgtactaaaaattcact

SEQ ID NO: 1441009 - DNA, 25 bp, Homo sapien
gaaaccatattttatctaccagaac

SEQ ID NO: 1441010 - DNA, 25 bp, Homo sapien
taccatggtttaacaataatgaaca

SEQ ID NO: 1441011 - DNA, 25 bp, Homo sapien
taacagccatcttctatttgacaga

SEQ ID NO: 1441012 - DNA, 25 bp, Homo sapien
tctacaagatgaactgaaacctatg

SEQ ID NO: 1441013 - DNA, 25 bp, Homo sapien
aatagtatagtgctggatacacaac

SEQ ID NO: 1441014 - DNA, 25 bp, Homo sapien
gcatagcccctataaaaaagtgagg

SEQ ID NO: 1441015 - DNA, 25 bp, Homo sapien
ctcactcataatcgggagttaaaca

SEQ ID NO: 1441016 - DNA, 25 bp, Homo sapien
ccatgatggttttgaaaatgtggca

SEQ ID NO: 1441017 - DNA, 25 bp, Homo sapien
tatacatatgccatgatggttttga

SEQ ID NO: 1441018 - DNA, 25 bp, Homo sapien
atcacacactgcgccctgtcatagg

SEQ ID NO: 1441019 - DNA, 25 bp, Homo sapien
tactggggaaatataagtacattaa

SEQ ID NO: 1441020 - DNA, 25 bp, Homo sapien
ttaatatattacaccatttgaggaa

SEQ ID NO: 1441021 - DNA, 25 bp, Homo sapien
tattacaccatttgaggaaagggaa

SEQ ID NO: 1441022 - DNA, 25 bp, Homo sapien
ttacaatggcaaattccaggaaatt

SEQ ID NO: 1441023 - DNA, 25 bp, Homo sapien
cataagacccatctacttttgcctc

SEQ ID NO: 1441024 - DNA, 25 bp, Homo sapien
gaaaaatagcagcttatagcataat

SEQ ID NO: 1441025 - DNA, 25 bp, Homo sapien
agttatacatgcatggtttgaacag

SEQ ID NO: 1441026 - DNA, 25 bp, Homo sapien
tctgcaagaagagtcattaacagtc

SEQ ID NO: 1441027 - DNA, 25 bp, Homo sapien
ttctccttccatactaacaagatca

SEQ ID NO: 1441028 - DNA, 25 bp, Homo sapien
actgaggtttactttgggaagatct

SEQ ID NO: 1441029 - DNA, 25 bp, Homo sapien
ctccttccatactaacaagatcaag

SEQ ID NO: 1441030 - DNA, 25 bp, Homo sapien
gggaagatctgacactactcttata

SEQ ID NO: 1441031 - DNA, 25 bp, Homo sapien
gatccataagtcatctgcagtgatt

SEQ ID NO: 1441032 - DNA, 25 bp, Homo sapien
cctgtagattccaatgggaacatct

SEQ ID NO: 1441033 - DNA, 25 bp, Homo sapien
ctgagactcagtcctgtagattcca

SEQ ID NO: 1441034 - DNA, 25 bp, Homo sapien
tctgataaagtctggcataagttct

SEQ ID NO: 1441035 - DNA, 25 bp, Homo sapien
tgtccagtcccaacagaagtctcgt

SEQ ID NO: 1441036 - DNA, 25 bp, Homo sapien
agaacaaagaaacccagatcctggt

SEQ ID NO: 1441037 - DNA, 25 bp, Homo sapien
aacccagatcctggtgtagtgtcca

SEQ ID NO: 1441038 - DNA, 25 bp, Homo sapien
cagaagtctcgtgatagaaatcata

SEQ ID NO: 1441039 - DNA, 25 bp, Homo sapien
gtccaacatactgatgctaaacacc

SEQ ID NO: 1441040 - DNA, 25 bp, Homo sapien
ctgatacagcagagtgtccaacata

SEQ ID NO: 1441041 - DNA, 25 bp, Homo sapien
aacataaaggccaagttagagcctc

SEQ ID NO: 1441042 - DNA, 25 bp, Homo sapien
cataaaggccaagttagagcctctc

SEQ ID NO: 1441043 - DNA, 25 bp, Homo sapien
cagctaggttttcccgtgaatttga

SEQ ID NO: 1441044 - DNA, 25 bp, Homo sapien
tagttctcgaggtgtaacaagtatc

SEQ ID NO: 1441045 - DNA, 25 bp, Homo sapien
tattgtgatacagctaggttttccc

SEQ ID NO: 1441046 - DNA, 25 bp, Homo sapien
aatttgaggacaaacctagttctcg

SEQ ID NO: 1441047 - DNA, 25 bp, Homo sapien
gagttagctctgtgataatactgag

SEQ ID NO: 1441048 - DNA, 25 bp, Homo sapien
gaattgcatgaatctcatgttggcg

SEQ ID NO: 1441049 - DNA, 25 bp, Homo sapien
attgcatgaatctcatgttggcggg

SEQ ID NO: 1441050 - DNA, 25 bp, Homo sapien
tgtgataatactgagactggaaaac

SEQ ID NO: 1441051 - DNA, 25 bp, Homo sapien
tgtggctgactaaacaatcctagtt

SEQ ID NO: 1441052 - DNA, 25 bp, Homo sapien
taacattgggccttacctaatcaag

SEQ ID NO: 1441053 - DNA, 25 bp, Homo sapien
tgtagcaaagcatgaagctagtggc

SEQ ID NO: 1441054 - DNA, 25 bp, Homo sapien
tagtggctacatacaaaaggtactg

SEQ ID NO: 1441055 - DNA, 25 bp, Homo sapien
gaaattgaaagggtcacatcacctc

SEQ ID NO: 1441056 - DNA, 25 bp, Homo sapien
tgtggttgtccagtatgtctcctca

SEQ ID NO: 1441057 - DNA, 25 bp, Homo sapien
ccaagctgtgaggagagataagccc

SEQ ID NO: 1441058 - DNA, 25 bp, Homo sapien
taacattctagtaggtggcagggcc

SEQ ID NO: 1441059 - DNA, 25 bp, Homo sapien
tcatgcaaggtggtgggtagagaac

SEQ ID NO: 1441060 - DNA, 25 bp, Homo sapien
tgccatgtagtcttcctcggcactc

SEQ ID NO: 1441061 - DNA, 25 bp, Homo sapien
tgctctctttatccacaaccaccat

SEQ ID NO: 1441062 - DNA, 25 bp, Homo sapien
ggtgctctctttatccacaaccacc

SEQ ID NO: 1441063 - DNA, 25 bp, Homo sapien
gtgctctctttatccacaaccacca

SEQ ID NO: 1441064 - DNA, 25 bp, Homo sapien
ctccacacctgagtaagtcatctag

SEQ ID NO: 1441065 - DNA, 25 bp, Homo sapien
cactccacacctgagtaagtcatct

SEQ ID NO: 1441066 - DNA, 25 bp, Homo sapien
tccacacctgagtaagtcatctagg

SEQ ID NO: 1441067 - DNA, 25 bp, Homo sapien
actccacacctgagtaagtcatcta

SEQ ID NO: 1441068 - DNA, 25 bp, Homo sapien
aaaatatttcgcttgaatcaggaac

SEQ ID NO: 1441069 - DNA, 25 bp, Homo sapien
aatatttcgcttgaatcaggaacaa

SEQ ID NO: 1441070 - DNA, 25 bp, Homo sapien
aaaaatatttcgcttgaatcaggaa

SEQ ID NO: 1441071 - DNA, 25 bp, Homo sapien
tatttcgcttgaatcaggaacaatg

SEQ ID NO: 1441072 - DNA, 25 bp, Homo sapien
agcatggctgctttacacagtgtgg

SEQ ID NO: 1441073 - DNA, 25 bp, Homo sapien
tgttagatgaacataactgtcccca

SEQ ID NO: 1441074 - DNA, 25 bp, Homo sapien
tgcatcagaaaaggtatatgggacg

SEQ ID NO: 1441075 - DNA, 25 bp, Homo sapien
tatagggataattggcaaagcctcc

SEQ ID NO: 1441076 - DNA, 25 bp, Homo sapien
tatcgtaacgctatcaatgcatcac

SEQ ID NO: 1441077 - DNA, 25 bp, Homo sapien
tataaactctgacatgtgaccaaag

SEQ ID NO: 1441078 - DNA, 25 bp, Homo sapien
tacactcatcatgcagtaacaaggc

SEQ ID NO: 1441079 - DNA, 25 bp, Homo sapien
tgtataacacgagaacataagctct

SEQ ID NO: 1441080 - DNA, 25 bp, Homo sapien
gtcaatagagcccaccatgtagtaa

SEQ ID NO: 1441081 - DNA, 25 bp, Homo sapien
gagcccaccatgtagtaaaccattg

SEQ ID NO: 1441082 - DNA, 25 bp, Homo sapien
gaaaccaacagattgcatccagaaa

SEQ ID NO: 1441083 - DNA, 25 bp, Homo sapien
tagtaaaccattggaaaccaacaga

SEQ ID NO: 1441084 - DNA, 25 bp, Homo sapien
aaatttaaaagttatccatgcacag

SEQ ID NO: 1441085 - DNA, 25 bp, Homo sapien
gaatcataaaatgccctcagaatta

SEQ ID NO: 1441086 - DNA, 25 bp, Homo sapien
ctaagtagtagatgggttacaaaat

SEQ ID NO: 1441087 - DNA, 25 bp, Homo sapien
aacacaatgtcacaacagtggcagc

SEQ ID NO: 1441088 - DNA, 25 bp, Homo sapien
tatgcaaaagaatatcctgttaact

SEQ ID NO: 1441089 - DNA, 25 bp, Homo sapien
caatatgttatatttaggaggcaga

SEQ ID NO: 1441090 - DNA, 25 bp, Homo sapien
cctccctggctagatgaactttttg

SEQ ID NO: 1441091 - DNA, 25 bp, Homo sapien
aactggtacctacaagcctccctgg

SEQ ID NO: 1441092 - DNA, 25 bp, Homo sapien
cactgggctgttgcggtgatctgaa

SEQ ID NO: 1441093 - DNA, 25 bp, Homo sapien
caccctgtcttgtaattggagaagc

SEQ ID NO: 1441094 - DNA, 25 bp, Homo sapien
taggaggatgcaggtaccacaagag

SEQ ID NO: 1441095 - DNA, 25 bp, Homo sapien
gaaaaatcccttcgcctgtgtcttg

SEQ ID NO: 1441096 - DNA, 25 bp, Homo sapien
catcctcatagtagttatgttggca

SEQ ID NO: 1441097 - DNA, 25 bp, Homo sapien
gttatccaatagcagtactatggga

SEQ ID NO: 1441098 - DNA, 25 bp, Homo sapien
ggtctataatatgccctgagaggaa

SEQ ID NO: 1441099 - DNA, 25 bp, Homo sapien
gctgtttcagctgcaactataatta

SEQ ID NO: 1441100 - DNA, 25 bp, Homo sapien
cttgtctaatcttaagcagcaaaat

SEQ ID NO: 1441101 - DNA, 25 bp, Homo sapien
ttcatgaaggagatgacaaaaagtg

SEQ ID NO: 1441102 - DNA, 25 bp, Homo sapien
ttgtctaatcttaagcagcaaaatg

SEQ ID NO: 1441103 - DNA, 25 bp, Homo sapien
atatggagaataaggtgggtaacct

SEQ ID NO: 1441104 - DNA, 25 bp, Homo sapien
tatatggagaataaggtgggtaacc

SEQ ID NO: 1441105 - DNA, 25 bp, Homo sapien
atatatggagaataaggtgggtaac

SEQ ID NO: 1441106 - DNA, 25 bp, Homo sapien
ctatatatggagaataaggtgggta

SEQ ID NO: 1441107 - DNA, 25 bp, Homo sapien
gaatcgatgatgtatctgcaacctc

SEQ ID NO: 1441108 - DNA, 25 bp, Homo sapien
gaagatcacatgtttgaatcgatga

SEQ ID NO: 1441109 - DNA, 25 bp, Homo sapien
caggagcaatgctaggtcttcttat

SEQ ID NO: 1441110 - DNA, 25 bp, Homo sapien
tctgattggtcacttagaagatcac

SEQ ID NO: 1441111 - DNA, 25 bp, Homo sapien
aagagacagggtagggccacttgct

SEQ ID NO: 1441112 - DNA, 25 bp, Homo sapien
ggaagagacagggtagggccacttg

SEQ ID NO: 1441113 - DNA, 25 bp, Homo sapien
tacagcttgtatcttgcaagtctat

SEQ ID NO: 1441114 - DNA, 25 bp, Homo sapien
acttgctgatctacagcttgtatct

SEQ ID NO: 1441115 - DNA, 25 bp, Homo sapien
gaattcataatgtatcgaggacctg

SEQ ID NO: 1441116 - DNA, 25 bp, Homo sapien
taacaccaatcaagcagacgccaaa

SEQ ID NO: 1441117 - DNA, 25 bp, Homo sapien
gctggcaattatgctatgtacaggt

SEQ ID NO: 1441118 - DNA, 25 bp, Homo sapien
tctggaaggtccatgataaaacgac

SEQ ID NO: 1441119 - DNA, 25 bp, Homo sapien
tgtggtagacttcattcccggagca

SEQ ID NO: 1441120 - DNA, 25 bp, Homo sapien
cattgttctggcgattgctggcctt

SEQ ID NO: 1441121 - DNA, 25 bp, Homo sapien
gcatctaccgtacatcttctgccat

SEQ ID NO: 1441122 - DNA, 25 bp, Homo sapien
tgcatggaaagaggcatatgtaaaa

SEQ ID NO: 1441123 - DNA, 25 bp, Homo sapien
ggatcatgttggcacctagatcttg

SEQ ID NO: 1441124 - DNA, 25 bp, Homo sapien
catgttggcacctagatcttggatt

SEQ ID NO: 1441125 - DNA, 25 bp, Homo sapien
cagcactggatcatgttggcaccta

SEQ ID NO: 1441126 - DNA, 25 bp, Homo sapien
cactggatcatgttggcacctagat

SEQ ID NO: 1441127 - DNA, 25 bp, Homo sapien
tcccagtgcttacaagacatcatgg

SEQ ID NO: 1441128 - DNA, 25 bp, Homo sapien
tagtctgcagattcagctttatagc

SEQ ID NO: 1441129 - DNA, 25 bp, Homo sapien
gctttatagcaaactaagtcctaga

SEQ ID NO: 1441130 - DNA, 25 bp, Homo sapien
taacagtgaaaatgcaagtcccagt

SEQ ID NO: 1441131 - DNA, 25 bp, Homo sapien
tgtcgctgctctgcaggctaattct

SEQ ID NO: 1441132 - DNA, 25 bp, Homo sapien
ctgtcgctgctctgcaggctaattc

SEQ ID NO: 1441133 - DNA, 25 bp, Homo sapien
gaaccagtagtgtaataagtgtaga

SEQ ID NO: 1441134 - DNA, 25 bp, Homo sapien
ttgctgggcatatacagtttaaagc

SEQ ID NO: 1441135 - DNA, 25 bp, Homo sapien
tgccctctagaggtatgaaccagta

SEQ ID NO: 1441136 - DNA, 25 bp, Homo sapien
gctaacatggcgtatttaaactctt

SEQ ID NO: 1441137 - DNA, 25 bp, Homo sapien
cactagcgcatagaacaagaaattg

SEQ ID NO: 1441138 - DNA, 25 bp, Homo sapien
gaacaagaaattgatcatagtacaa

SEQ ID NO: 1441139 - DNA, 25 bp, Homo sapien
cattatgtcactagcgcatagaaca

SEQ ID NO: 1441140 - DNA, 25 bp, Homo sapien
tcttcatcattatgtcactagcgca

SEQ ID NO: 1441141 - DNA, 25 bp, Homo sapien
tatcttgtgaatattggaatctaca

SEQ ID NO: 1441142 - DNA, 25 bp, Homo sapien
tcatatcttgtgaatattggaatct

SEQ ID NO: 1441143 - DNA, 25 bp, Homo sapien
catatcttgtgaatattggaatcta

SEQ ID NO: 1441144 - DNA, 25 bp, Homo sapien
tcttgtgaatattggaatctacata

SEQ ID NO: 1441145 - DNA, 25 bp, Homo sapien
taatatctggacatacaaaggacaa

SEQ ID NO: 1441146 - DNA, 25 bp, Homo sapien
atatctggacatacaaaggacaatt

SEQ ID NO: 1441147 - DNA, 25 bp, Homo sapien
aatatctggacatacaaaggacaat

SEQ ID NO: 1441148 - DNA, 25 bp, Homo sapien
agcccatgctctcaaaattgtttgg

SEQ ID NO: 1441149 - DNA, 25 bp, Homo sapien
ggtaaatagtatcagtcttcaaatg

SEQ ID NO: 1441150 - DNA, 25 bp, Homo sapien
gataaactaggatggaaaggagtag

SEQ ID NO: 1441151 - DNA, 25 bp, Homo sapien
ttcttacagtgccaggatataaaat

SEQ ID NO: 1441152 - DNA, 25 bp, Homo sapien
cagtgccaggatataaaatagatta

SEQ ID NO: 1441153 - DNA, 25 bp, Homo sapien
ttaatgttattcagaaatgcccccc

SEQ ID NO: 1441154 - DNA, 25 bp, Homo sapien
gaccaattctaggattgtcagtgtt

SEQ ID NO: 1441155 - DNA, 25 bp, Homo sapien
tgtttgcctagttattacattgtca

SEQ ID NO: 1441156 - DNA, 25 bp, Homo sapien
tttcaaattcatgattacctactgt

SEQ ID NO: 1441157 - DNA, 25 bp, Homo sapien
ctatccacttcacaacggctactga

SEQ ID NO: 1441158 - DNA, 25 bp, Homo sapien
gtcctatccacttcacaacggctac

SEQ ID NO: 1441159 - DNA, 25 bp, Homo sapien
acttcacaacggctactgagaataa

SEQ ID NO: 1441160 - DNA, 25 bp, Homo sapien
tccacttcacaacggctactgagaa

SEQ ID NO: 1441161 - DNA, 25 bp, Homo sapien
ataatcacacactgaaatatctaca

SEQ ID NO: 1441162 - DNA, 25 bp, Homo sapien
aacaaaataatcacacactgaaata

SEQ ID NO: 1441163 - DNA, 25 bp, Homo sapien
aaataatcacacactgaaatatcta

SEQ ID NO: 1441164 - DNA, 25 bp, Homo sapien
caaaataatcacacactgaaatatc

SEQ ID NO: 1441165 - DNA, 25 bp, Homo sapien
gaatctgcagtacccttcgaacctg

SEQ ID NO: 1441166 - DNA, 25 bp, Homo sapien
tgaaccttgaaggtagataactcgt

SEQ ID NO: 1441167 - DNA, 25 bp, Homo sapien
tagataactcgttgggaccacattg

SEQ ID NO: 1441168 - DNA, 25 bp, Homo sapien
aggtcttgatctttaagggctgaac

SEQ ID NO: 1441169 - DNA, 25 bp, Homo sapien
cagtaggacacaaaatcaccacata

SEQ ID NO: 1441170 - DNA, 25 bp, Homo sapien
gacacaaaatcaccacataataatc

SEQ ID NO: 1441171 - DNA, 25 bp, Homo sapien
ttcagtaggacacaaaatcaccaca

SEQ ID NO: 1441172 - DNA, 25 bp, Homo sapien
taggacacaaaatcaccacataata

SEQ ID NO: 1441173 - DNA, 25 bp, Homo sapien
tatgtcgactatagtttcctcctga

SEQ ID NO: 1441174 - DNA, 25 bp, Homo sapien
gctgacacacaggacgacatgcttt

SEQ ID NO: 1441175 - DNA, 25 bp, Homo sapien
gcttttcagtttgagctctatgtcg

SEQ ID NO: 1441176 - DNA, 25 bp, Homo sapien
cacacaggacgacatgcttttcagt

SEQ ID NO: 1441177 - DNA, 25 bp, Homo sapien
tatgggtagaaccacaagagcaaca

SEQ ID NO: 1441178 - DNA, 25 bp, Homo sapien
tattcgttccagatgttggatccca

SEQ ID NO: 1441179 - DNA, 25 bp, Homo sapien
gaagcccacagtagaaaacgtcaca

SEQ ID NO: 1441180 - DNA, 25 bp, Homo sapien
caactacaaaaagcttggaggacca

SEQ ID NO: 1441181 - DNA, 25 bp, Homo sapien
tgggaataactgattgatctagtcc

SEQ ID NO: 1441182 - DNA, 25 bp, Homo sapien
gattgatctagtccaactcgtttct

SEQ ID NO: 1441183 - DNA, 25 bp, Homo sapien
taactgattgatctagtccaactcg

SEQ ID NO: 1441184 - DNA, 25 bp, Homo sapien
tagtccaactcgtttctctaaagaa

SEQ ID NO: 1441185 - DNA, 25 bp, Homo sapien
cactacggcacttgaggactttggc

SEQ ID NO: 1441186 - DNA, 25 bp, Homo sapien
tggtcgcagcaacattgagggatgc

SEQ ID NO: 1441187 - DNA, 25 bp, Homo sapien
gagggatgctttttgactccttgga

SEQ ID NO: 1441188 - DNA, 25 bp, Homo sapien
tgtaaattcttgtaaggcagcgcca

SEQ ID NO: 1441189 - DNA, 25 bp, Homo sapien
tctcagatggaatgtgtactctttt

SEQ ID NO: 1441190 - DNA, 25 bp, Homo sapien
ccagtatagcagatacaacgattgt

SEQ ID NO: 1441191 - DNA, 25 bp, Homo sapien
catagatatagtgcatgatgctaag

SEQ ID NO: 1441192 - DNA, 25 bp, Homo sapien
tttcttacacctagagaagtgggta

SEQ ID NO: 1441193 - DNA, 25 bp, Homo sapien
aaaactgtactagttgttgattgct

SEQ ID NO: 1441194 - DNA, 25 bp, Homo sapien
gaaaactgtactagttgttgattgc

SEQ ID NO: 1441195 - DNA, 25 bp, Homo sapien
aaactgtactagttgttgattgctg

SEQ ID NO: 1441196 - DNA, 25 bp, Homo sapien
aactgtactagttgttgattgctgc

SEQ ID NO: 1441197 - DNA, 25 bp, Homo sapien
caggtgaagataaggcatagtaatg

SEQ ID NO: 1441198 - DNA, 25 bp, Homo sapien
aacattgcagactgtgtacgctgaa

SEQ ID NO: 1441199 - DNA, 25 bp, Homo sapien
cgctgaatggctctgtgtagatcat

SEQ ID NO: 1441200 - DNA, 25 bp, Homo sapien
taaggcatagtaatgtagatattaa

SEQ ID NO: 1441201 - DNA, 25 bp, Homo sapien
catgtttggcaagccaacagttcag

SEQ ID NO: 1441202 - DNA, 25 bp, Homo sapien
gactgggacaaatagattccttaag

SEQ ID NO: 1441203 - DNA, 25 bp, Homo sapien
ttttccaaggcatgtttggcaagcc

SEQ ID NO: 1441204 - DNA, 25 bp, Homo sapien
gattccttaaggaaggccagaatat

SEQ ID NO: 1441205 - DNA, 25 bp, Homo sapien
tgaagggtattcgtaaaatctgttc

SEQ ID NO: 1441206 - DNA, 25 bp, Homo sapien
gatgaagggtattcgtaaaatctgt

SEQ ID NO: 1441207 - DNA, 25 bp, Homo sapien
caagatgaagggtattcgtaaaatc

SEQ ID NO: 1441208 - DNA, 25 bp, Homo sapien
tttccaagatgaagggtattcgtaa

SEQ ID NO: 1441209 - DNA, 25 bp, Homo sapien
gccagaccaggcctactcttcagaa

SEQ ID NO: 1441210 - DNA, 25 bp, Homo sapien
taatccactgattcacatcagcgcc

SEQ ID NO: 1441211 - DNA, 25 bp, Homo sapien
gacttgttaagcctagttagccacc

SEQ ID NO: 1441212 - DNA, 25 bp, Homo sapien
aatgtgattatatcatgcaaggcac

SEQ ID NO: 1441213 - DNA, 25 bp, Homo sapien
ttgtttcaaacagacttatcaatgc

SEQ ID NO: 1441214 - DNA, 25 bp, Homo sapien
aatattgtttcaaacagacttatca

SEQ ID NO: 1441215 - DNA, 25 bp, Homo sapien
taatattgtttcaaacagacttatc

SEQ ID NO: 1441216 - DNA, 25 bp, Homo sapien
tattgtttcaaacagacttatcaat

SEQ ID NO: 1441217 - DNA, 25 bp, Homo sapien
cacaaaggtagacttctgttcaccc

SEQ ID NO: 1441218 - DNA, 25 bp, Homo sapien
ccccacaaaggtagacttctgttca

SEQ ID NO: 1441219 - DNA, 25 bp, Homo sapien
cccacaaaggtagacttctgttcac

SEQ ID NO: 1441220 - DNA, 25 bp, Homo sapien
ctcggattatgtataataagcagct

SEQ ID NO: 1441221 - DNA, 25 bp, Homo sapien
agaaaaattgaacaggcgtatcctt

SEQ ID NO: 1441222 - DNA, 25 bp, Homo sapien
taagcagcttagtaatttgagagaa

SEQ ID NO: 1441223 - DNA, 25 bp, Homo sapien
tcatttccttgtgaagggttttcta

SEQ ID NO: 1441224 - DNA, 25 bp, Homo sapien
ttgatctctggttttttatgaaaaa

SEQ ID NO: 1441225 - DNA, 25 bp, Homo sapien
taaatgtattttcattcatatagaa

SEQ ID NO: 1441226 - DNA, 25 bp, Homo sapien
atgtattttcattcatatagaattc

SEQ ID NO: 1441227 - DNA, 25 bp, Homo sapien
gtattttcattcatatagaattcaa

SEQ ID NO: 1441228 - DNA, 25 bp, Homo sapien
ccctgaggcttgcaaatagaactga

SEQ ID NO: 1441229 - DNA, 25 bp, Homo sapien
ccagcagccatggttatgggaataa

SEQ ID NO: 1441230 - DNA, 25 bp, Homo sapien
gattctgttgtaagcgatttccagc

SEQ ID NO: 1441231 - DNA, 25 bp, Homo sapien
ataaggataacttcaccagcagcca

SEQ ID NO: 1441232 - DNA, 25 bp, Homo sapien
taccattatcaataagtctttcaac

SEQ ID NO: 1441233 - DNA, 25 bp, Homo sapien
ataagactatcaggtttccattaac

SEQ ID NO: 1441234 - DNA, 25 bp, Homo sapien
cattatcaataagtctttcaactcc

SEQ ID NO: 1441235 - DNA, 25 bp, Homo sapien
ccagatataagactatcaggtttcc

SEQ ID NO: 1441236 - DNA, 25 bp, Homo sapien
cagatattgacggttgaagtcgtgg

SEQ ID NO: 1441237 - DNA, 25 bp, Homo sapien
aaaaggtacaaatgtggatccgcaa

SEQ ID NO: 1441238 - DNA, 25 bp, Homo sapien
tattgacggttgaagtcgtggaaaa

SEQ ID NO: 1441239 - DNA, 25 bp, Homo sapien
tacaaatgtggatccgcaaggaact

SEQ ID NO: 1441240 - DNA, 25 bp, Homo sapien
tcaagggctacaggaaacttctgct

SEQ ID NO: 1441241 - DNA, 25 bp, Homo sapien
caagttaaccaaagtcactcaaggg

SEQ ID NO: 1441242 - DNA, 25 bp, Homo sapien
tgttcgcccaaattggccagattgg

SEQ ID NO: 1441243 - DNA, 25 bp, Homo sapien
caaaaggataacaggaaaggcaggg

SEQ ID NO: 1441244 - DNA, 25 bp, Homo sapien
tgtgaacccacctaacgtctaatgg

SEQ ID NO: 1441245 - DNA, 25 bp, Homo sapien
tacttggacatatgagagatctaac

SEQ ID NO: 1441246 - DNA, 25 bp, Homo sapien
tatgtcccttgactctagcagagct

SEQ ID NO: 1441247 - DNA, 25 bp, Homo sapien
gacattcatcgtgcaaaccaacaga

SEQ ID NO: 1441248 - DNA, 25 bp, Homo sapien
gaatcattagctcgaactgtcttct

SEQ ID NO: 1441249 - DNA, 25 bp, Homo sapien
cattagctcgaactgtcttctcagt

SEQ ID NO: 1441250 - DNA, 25 bp, Homo sapien
atcattagctcgaactgtcttctca

SEQ ID NO: 1441251 - DNA, 25 bp, Homo sapien
agaatcattagctcgaactgtcttc

SEQ ID NO: 1441252 - DNA, 25 bp, Homo sapien
atgtcccttggacaatggcactgct

SEQ ID NO: 1441253 - DNA, 25 bp, Homo sapien
tcacagtatgaattatggactgaag

SEQ ID NO: 1441254 - DNA, 25 bp, Homo sapien
aacacctccacatgtcccttggaca

SEQ ID NO: 1441255 - DNA, 25 bp, Homo sapien
tcatttgaactgtcacagtatgaat

SEQ ID NO: 1441256 - DNA, 25 bp, Homo sapien
tgtatatttactttgggcacttgtg

SEQ ID NO: 1441257 - DNA, 25 bp, Homo sapien
tcatgtgatcacgtttcaccgcagc

SEQ ID NO: 1441258 - DNA, 25 bp, Homo sapien
gaggagagagtaaacataattcagg

SEQ ID NO: 1441259 - DNA, 25 bp, Homo sapien
tacatttacatatcaggttctcaac

SEQ ID NO: 1441260 - DNA, 25 bp, Homo sapien
tcatctgctgcaagcatgtacgtga

SEQ ID NO: 1441261 - DNA, 25 bp, Homo sapien
catttcacggtgttttctggcctcc

SEQ ID NO: 1441262 - DNA, 25 bp, Homo sapien
ccagctacagagaatccaacatcat

SEQ ID NO: 1441263 - DNA, 25 bp, Homo sapien
tctgcttttatatgaccagctacag

SEQ ID NO: 1441264 - DNA, 25 bp, Homo sapien
tccgccaataccgaattttctggga

SEQ ID NO: 1441265 - DNA, 25 bp, Homo sapien
tgggacaaattgtgaagccaaatac

SEQ ID NO: 1441266 - DNA, 25 bp, Homo sapien
tgagaggtatgcaatgaaatatccc

SEQ ID NO: 1441267 - DNA, 25 bp, Homo sapien
ccctgtgtcttagggtccgccaata

SEQ ID NO: 1441268 - DNA, 25 bp, Homo sapien
tcagaaaagttgtcactatcagtga

SEQ ID NO: 1441269 - DNA, 25 bp, Homo sapien
tggttgacgaagtaaaacatggtta

SEQ ID NO: 1441270 - DNA, 25 bp, Homo sapien
ggaaccacagctcctaagagcacaa

SEQ ID NO: 1441271 - DNA, 25 bp, Homo sapien
tgcaaggcatgcaaaggaaccacag

SEQ ID NO: 1441272 - DNA, 25 bp, Homo sapien
ttaaatattgctcagaaaaaggcca

SEQ ID NO: 1441273 - DNA, 25 bp, Homo sapien
tctcaatgaaggataccgctaaaca

SEQ ID NO: 1441274 - DNA, 25 bp, Homo sapien
gatctcaatgttggtgtccccatga

SEQ ID NO: 1441275 - DNA, 25 bp, Homo sapien
tgtgacagtattcagtggagcccca

SEQ ID NO: 1441276 - DNA, 25 bp, Homo sapien
tactcagtgacactccagcttgttc

SEQ ID NO: 1441277 - DNA, 25 bp, Homo sapien
tatttactcagtgacactccagctt

SEQ ID NO: 1441278 - DNA, 25 bp, Homo sapien
ctatttactcagtgacactccagct

SEQ ID NO: 1441279 - DNA, 25 bp, Homo sapien
tttactcagtgacactccagcttgt

SEQ ID NO: 1441280 - DNA, 25 bp, Homo sapien
ctgtcgtcgttttgccatccttggt

SEQ ID NO: 1441281 - DNA, 25 bp, Homo sapien
gcacttcgctctccaaatcaaccat

SEQ ID NO: 1441282 - DNA, 25 bp, Homo sapien
aaatctcgaaacctgtacctgggag

SEQ ID NO: 1441283 - DNA, 25 bp, Homo sapien
tttgccatccttggtcccctagcag

SEQ ID NO: 1441284 - DNA, 25 bp, Homo sapien
gtgggaaacatcaaacaacaaatgg

SEQ ID NO: 1441285 - DNA, 25 bp, Homo sapien
aaaatattgcggagtacagggagag

SEQ ID NO: 1441286 - DNA, 25 bp, Homo sapien
gaaagaaaatattgcggagtacagg

SEQ ID NO: 1441287 - DNA, 25 bp, Homo sapien
ccttcctcaaagagtgggaaacatc

SEQ ID NO: 1441288 - DNA, 25 bp, Homo sapien
tcactgcaggctactaagaattggg

SEQ ID NO: 1441289 - DNA, 25 bp, Homo sapien
tgtaggaacgttaattgcctccttg

SEQ ID NO: 1441290 - DNA, 25 bp, Homo sapien
tgggtcagatttacaggacaaagtt

SEQ ID NO: 1441291 - DNA, 25 bp, Homo sapien
aacagtttctcaatcgtaccaccta

SEQ ID NO: 1441292 - DNA, 25 bp, Homo sapien
tgtaattgacaaaaaagtattgcat

SEQ ID NO: 1441293 - DNA, 25 bp, Homo sapien
tataaggagtcataaaaagatagct

SEQ ID NO: 1441294 - DNA, 25 bp, Homo sapien
tcttcacaaaaccatagtacatgga

SEQ ID NO: 1441295 - DNA, 25 bp, Homo sapien
ctgacattttaacttagccaagttt

SEQ ID NO: 1441296 - DNA, 25 bp, Homo sapien
gaaagcaacactttaccactgaaga

SEQ ID NO: 1441297 - DNA, 25 bp, Homo sapien
gaagaggcaattgtttcaggtggct

SEQ ID NO: 1441298 - DNA, 25 bp, Homo sapien
gagactatggatcatttaccatggg

SEQ ID NO: 1441299 - DNA, 25 bp, Homo sapien
tataaatggatttcaagcaatgctg

SEQ ID NO: 1441300 - DNA, 25 bp, Homo sapien
tatccagacattaaacatggaggtc

SEQ ID NO: 1441301 - DNA, 25 bp, Homo sapien
agtgaaaccttgtgattatccagac

SEQ ID NO: 1441302 - DNA, 25 bp, Homo sapien
cctagaaaccctaatggaatgtgta

SEQ ID NO: 1441303 - DNA, 25 bp, Homo sapien
tcatgagaatatgcgtagaccatac

SEQ ID NO: 1441304 - DNA, 25 bp, Homo sapien
tatctcacaccaagaagattaagga

SEQ ID NO: 1441305 - DNA, 25 bp, Homo sapien
cacaatacttgttggttaaatgaag

SEQ ID NO: 1441306 - DNA, 25 bp, Homo sapien
taaatgaagtcgtattgaagcggca

SEQ ID NO: 1441307 - DNA, 25 bp, Homo sapien
tatctgaggttcgttatctcacacc

SEQ ID NO: 1441308 - DNA, 25 bp, Homo sapien
ccttgattagatatgcaatttctcc

SEQ ID NO: 1441309 - DNA, 25 bp, Homo sapien
tcagtgtcagatgatcccattactt

SEQ ID NO: 1441310 - DNA, 25 bp, Homo sapien
tgacttttcaccctaatcatgacct

SEQ ID NO: 1441311 - DNA, 25 bp, Homo sapien
tcaatcaacgtttatgcctcttggt

SEQ ID NO: 1441312 - DNA, 25 bp, Homo sapien
tgttcttagggcacagctgcctcta

SEQ ID NO: 1441313 - DNA, 25 bp, Homo sapien
tgaaacttaccattaccgctgaagg

SEQ ID NO: 1441314 - DNA, 25 bp, Homo sapien
taatctcaattgctacggctaccaa

SEQ ID NO: 1441315 - DNA, 25 bp, Homo sapien
gcctaaccatatcaggtggcaagta

SEQ ID NO: 1441316 - DNA, 25 bp, Homo sapien
acatgtattgtatgtaacctatttt

SEQ ID NO: 1441317 - DNA, 25 bp, Homo sapien
catgtattgtatgtaacctattttt

SEQ ID NO: 1441318 - DNA, 25 bp, Homo sapien
taaagatttgcggaacaaatacata

SEQ ID NO: 1441319 - DNA, 25 bp, Homo sapien
agatttgcggaacaaatacatattt

SEQ ID NO: 1441320 - DNA, 25 bp, Homo sapien
tacttgtaaaagatcgtgtcactgg

SEQ ID NO: 1441321 - DNA, 25 bp, Homo sapien
tctttgaacacttgaaaaccgtgcc

SEQ ID NO: 1441322 - DNA, 25 bp, Homo sapien
gtctactggagacaaattcccttgg

SEQ ID NO: 1441323 - DNA, 25 bp, Homo sapien
gatcccctcgaggaaaagcatagtt

SEQ ID NO: 1441324 - DNA, 25 bp, Homo sapien
tttctgcatcggcattatttgttgt

SEQ ID NO: 1441325 - DNA, 25 bp, Homo sapien
tcttctttttctgcatcggcattat

SEQ ID NO: 1441326 - DNA, 25 bp, Homo sapien
ttctgcatcggcattatttgttgtt

SEQ ID NO: 1441327 - DNA, 25 bp, Homo sapien
tctttttctgcatcggcattatttg

SEQ ID NO: 1441328 - DNA, 25 bp, Homo sapien
gaagctttattcgagaacaggtgaa

SEQ ID NO: 1441329 - DNA, 25 bp, Homo sapien
ggagtatccaacttgtgcaaaaaga

SEQ ID NO: 1441330 - DNA, 25 bp, Homo sapien
taacatagcattaaggtggacagcc

SEQ ID NO: 1441331 - DNA, 25 bp, Homo sapien
cacacattgcgaacaacatgttggg

SEQ ID NO: 1441332 - DNA, 25 bp, Homo sapien
tataagctgagaccggtggctctct

SEQ ID NO: 1441333 - DNA, 25 bp, Homo sapien
tgagaccggtggctctcttcttaaa

SEQ ID NO: 1441334 - DNA, 25 bp, Homo sapien
aagctgagaccggtggctctcttct

SEQ ID NO: 1441335 - DNA, 25 bp, Homo sapien
gctgagaccggtggctctcttctta

SEQ ID NO: 1441336 - DNA, 25 bp, Homo sapien
tctgtgtgcttatccttgcctctct

SEQ ID NO: 1441337 - DNA, 25 bp, Homo sapien
tacagatgaaggcatagtgagacag

SEQ ID NO: 1441338 - DNA, 25 bp, Homo sapien
catgtagggattcatattaactctg

SEQ ID NO: 1441339 - DNA, 25 bp, Homo sapien
taatttgtccataatcatgtaggga

SEQ ID NO: 1441340 - DNA, 25 bp, Homo sapien
tggtctcaaagcttgcaaagatagc

SEQ ID NO: 1441341 - DNA, 25 bp, Homo sapien
tatcatttcaagcagtgtgtcggga

SEQ ID NO: 1441342 - DNA, 25 bp, Homo sapien
taccccagatgcgaataaggcagca

SEQ ID NO: 1441343 - DNA, 25 bp, Homo sapien
gaagggatagtggaataccccagat

SEQ ID NO: 1441344 - DNA, 25 bp, Homo sapien
caaataacaggtttgcagagactgg

SEQ ID NO: 1441345 - DNA, 25 bp, Homo sapien
actagctcggcatgatggcgtgcac

SEQ ID NO: 1441346 - DNA, 25 bp, Homo sapien
tgaaagttcccctggacaagttctc

SEQ ID NO: 1441347 - DNA, 25 bp, Homo sapien
caagctggcaatcatcagaggtcaa

SEQ ID NO: 1441348 - DNA, 25 bp, Homo sapien
cagagacacctatggcagtcaatga

SEQ ID NO: 1441349 - DNA, 25 bp, Homo sapien
ggacagagtttctggcagagacacc

SEQ ID NO: 1441350 - DNA, 25 bp, Homo sapien
gaagatttgctactcttacactctg

SEQ ID NO: 1441351 - DNA, 25 bp, Homo sapien
gagagctaagaacaaccctatcact

SEQ ID NO: 1441352 - DNA, 25 bp, Homo sapien
tgcaaaaagatagaatcaatcataa

SEQ ID NO: 1441353 - DNA, 25 bp, Homo sapien
tgcccaaggaaagcggcctcagtaa

SEQ ID NO: 1441354 - DNA, 25 bp, Homo sapien
cagtaatccagtaagggcagctgct

SEQ ID NO: 1441355 - DNA, 25 bp, Homo sapien
aaagtgccccagctatgcagggaaa

SEQ ID NO: 1441356 - DNA, 25 bp, Homo sapien
taaggtccaggagatcaagcagaag

SEQ ID NO: 1441357 - DNA, 25 bp, Homo sapien
gggccaaggagcgaaccgcacctgc

SEQ ID NO: 1441358 - DNA, 25 bp, Homo sapien
taaaaggctggtttagcggctgcct

SEQ ID NO: 1441359 - DNA, 25 bp, Homo sapien
gagcggagcgctgcgagagctgcgc

SEQ ID NO: 1441360 - DNA, 25 bp, Homo sapien
cgcacctgcgatccgattgtccggg

SEQ ID NO: 1441361 - DNA, 25 bp, Homo sapien
tgagatcaccaacagtagctttcct

SEQ ID NO: 1441362 - DNA, 25 bp, Homo sapien
ccatgagatgtacttaaagaagact

SEQ ID NO: 1441363 - DNA, 25 bp, Homo sapien
gaaagacaaggcattatctgtcagc

SEQ ID NO: 1441364 - DNA, 25 bp, Homo sapien
caaggcattatctgtcagcagctgc

SEQ ID NO: 1441365 - DNA, 25 bp, Homo sapien
gacctttgtccctcaatgcttccaa

SEQ ID NO: 1441366 - DNA, 25 bp, Homo sapien
cttccaatagttgcagaagcctttc

SEQ ID NO: 1441367 - DNA, 25 bp, Homo sapien
agggcatcactaagattcctgaact

SEQ ID NO: 1441368 - DNA, 25 bp, Homo sapien
catggataattagtgagggcatcac

SEQ ID NO: 1441369 - DNA, 25 bp, Homo sapien
tcgagtgactttctaaaagggtgac

SEQ ID NO: 1441370 - DNA, 25 bp, Homo sapien
aaaagggtgacctttacagatattg

SEQ ID NO: 1441371 - DNA, 25 bp, Homo sapien
tccaacatcgaatcagaggtcgagt

SEQ ID NO: 1441372 - DNA, 25 bp, Homo sapien
ggtaacagtattatccaacatcgaa

SEQ ID NO: 1441373 - DNA, 25 bp, Homo sapien
gcatctcaccttaacatcaataacc

SEQ ID NO: 1441374 - DNA, 25 bp, Homo sapien
aacccaaatgtccagacccaaatga

SEQ ID NO: 1441375 - DNA, 25 bp, Homo sapien
aaaaatggatacgttcatgtccatg

SEQ ID NO: 1441376 - DNA, 25 bp, Homo sapien
tacagcatctcaccttaacatcaat

SEQ ID NO: 1441377 - DNA, 25 bp, Homo sapien
tgtgtgcccatagtgccggccactc

SEQ ID NO: 1441378 - DNA, 25 bp, Homo sapien
gacatagtggatcatcctgtaatcc

SEQ ID NO: 1441379 - DNA, 25 bp, Homo sapien
ccagacatagtggatcatcctgtaa

SEQ ID NO: 1441380 - DNA, 25 bp, Homo sapien
gccagacatagtggatcatcctgta

SEQ ID NO: 1441381 - DNA, 25 bp, Homo sapien
ggccagacatagtggatcatcctgt

SEQ ID NO: 1441382 - DNA, 25 bp, Homo sapien
ttggcatagtatagggcattgattg

SEQ ID NO: 1441383 - DNA, 25 bp, Homo sapien
tgaaatggttccaataattgaaggg

SEQ ID NO: 1441384 - DNA, 25 bp, Homo sapien
ctgtcatttggcatagtatagggca

SEQ ID NO: 1441385 - DNA, 25 bp, Homo sapien
gattgaaatggttccaataattgaa

SEQ ID NO: 1441386 - DNA, 25 bp, Homo sapien
tttagtctgatgtctgttacagtga

SEQ ID NO: 1441387 - DNA, 25 bp, Homo sapien
tctggtcgctattgaggagcccttc

SEQ ID NO: 1441388 - DNA, 25 bp, Homo sapien
ctactgagaggcgacaatgtgctgg

SEQ ID NO: 1441389 - DNA, 25 bp, Homo sapien
tacagtgaaataccttgtctctcaa

SEQ ID NO: 1441390 - DNA, 25 bp, Homo sapien
gctcctggtcagtgtaattctaatc

SEQ ID NO: 1441391 - DNA, 25 bp, Homo sapien
ctactgatgtagctgaactcttggc

SEQ ID NO: 1441392 - DNA, 25 bp, Homo sapien
taatctcacggatatcctctgttgg

SEQ ID NO: 1441393 - DNA, 25 bp, Homo sapien
gaactaccaagcatgtggctcctgg

SEQ ID NO: 1441394 - DNA, 25 bp, Homo sapien
tggggctgaccgtatatatatgtgt

SEQ ID NO: 1441395 - DNA, 25 bp, Homo sapien
acaacattaaccagaatttagctct

SEQ ID NO: 1441396 - DNA, 25 bp, Homo sapien
ccaaccctctcatacaatttaaaga

SEQ ID NO: 1441397 - DNA, 25 bp, Homo sapien
tcagaggatgtgaaaccagtggggc

SEQ ID NO: 1441398 - DNA, 25 bp, Homo sapien
gctttattcaagaacaggtgacata

SEQ ID NO: 1441399 - DNA, 25 bp, Homo sapien
cattcatttcgagcaatgtgtcaga

SEQ ID NO: 1441400 - DNA, 25 bp, Homo sapien
tgtttgtaaatctggatatcatcca

SEQ ID NO: 1441401 - DNA, 25 bp, Homo sapien
ggtatatcccagttgtgaagaaaaa

SEQ ID NO: 1441402 - DNA, 25 bp, Homo sapien
tattgttctgccagttctctatgct

SEQ ID NO: 1441403 - DNA, 25 bp, Homo sapien
tctcaaggctcctcctaaattccca

SEQ ID NO: 1441404 - DNA, 25 bp, Homo sapien
gatcatgttattctctctcaaggct

SEQ ID NO: 1441405 - DNA, 25 bp, Homo sapien
tcctcctaaattcccacatgcagac

SEQ ID NO: 1441406 - DNA, 25 bp, Homo sapien
cttaagttggtattagacagagata

SEQ ID NO: 1441407 - DNA, 25 bp, Homo sapien
attttattggcagtgacttaacctc

SEQ ID NO: 1441408 - DNA, 25 bp, Homo sapien
caaagatgaaggcaatacgtaaaat

SEQ ID NO: 1441409 - DNA, 25 bp, Homo sapien
tgcctggcccagttgttgtcattct

SEQ ID NO: 1441410 - DNA, 25 bp, Homo sapien
tggtaactactcttcaactcttggt

SEQ ID NO: 1441411 - DNA, 25 bp, Homo sapien
ttgaggtaaccacaactactagcac

SEQ ID NO: 1441412 - DNA, 25 bp, Homo sapien
tgcacatggtgaaatgactaccaca

SEQ ID NO: 1441413 - DNA, 25 bp, Homo sapien
catgctgtacaaaaggtctctgaat

SEQ ID NO: 1441414 - DNA, 25 bp, Homo sapien
tataaataacgaaatgttcagcaca

SEQ ID NO: 1441415 - DNA, 25 bp, Homo sapien
aagatgatgacgaatgtgaatgtga

SEQ ID NO: 1441416 - DNA, 25 bp, Homo sapien
tgatgtattgaaatatgactcctct

SEQ ID NO: 1441417 - DNA, 25 bp, Homo sapien
tatagtctagtcaatgggcattagg

SEQ ID NO: 1441418 - DNA, 25 bp, Homo sapien
cttaagggttcttgataagacagag

SEQ ID NO: 1441419 - DNA, 25 bp, Homo sapien
taagggttcttgataagacagagtg

SEQ ID NO: 1441420 - DNA, 25 bp, Homo sapien
ctatgttcttaagggttcttgataa

SEQ ID NO: 1441421 - DNA, 25 bp, Homo sapien
ttcttaagggttcttgataagacag

SEQ ID NO: 1441422 - DNA, 25 bp, Homo sapien
tgtccttatcacagaacatataggt

SEQ ID NO: 1441423 - DNA, 25 bp, Homo sapien
cagaaggcctgttgaattgattacc

SEQ ID NO: 1441424 - DNA, 25 bp, Homo sapien
caaacgttgctttcacttcagacaa

SEQ ID NO: 1441425 - DNA, 25 bp, Homo sapien
gcacattgaaatattgcacgtataa

SEQ ID NO: 1441426 - DNA, 25 bp, Homo sapien
cagctggataagtatctcctctaca

SEQ ID NO: 1441427 - DNA, 25 bp, Homo sapien
gatattttaactgccctctgtcaca

SEQ ID NO: 1441428 - DNA, 25 bp, Homo sapien
cacattgcattctaagtatagatcc

SEQ ID NO: 1441429 - DNA, 25 bp, Homo sapien
aatgtgtggtctattgtcaaaatcc

SEQ ID NO: 1441430 - DNA, 25 bp, Homo sapien
caaggtcttagccaccgacagacca

SEQ ID NO: 1441431 - DNA, 25 bp, Homo sapien
ttagccaccgacagaccaggagata

SEQ ID NO: 1441432 - DNA, 25 bp, Homo sapien
gtcttagccaccgacagaccaggag

SEQ ID NO: 1441433 - DNA, 25 bp, Homo sapien
tcccaaggtcttagccaccgacaga

SEQ ID NO: 1441434 - DNA, 25 bp, Homo sapien
tagatccttctaggaaatggtgatc

SEQ ID NO: 1441435 - DNA, 25 bp, Homo sapien
taaacacaatggtggtgtagtccac

SEQ ID NO: 1441436 - DNA, 25 bp, Homo sapien
caatggtggtgtagtccacattcca

SEQ ID NO: 1441437 - DNA, 25 bp, Homo sapien
ccatctaaacaataggcctccctag

SEQ ID NO: 1441438 - DNA, 25 bp, Homo sapien
gaactaataatgactccatgtttaa

SEQ ID NO: 1441439 - DNA, 25 bp, Homo sapien
ctgttgaactaataatgactccatg

SEQ ID NO: 1441440 - DNA, 25 bp, Homo sapien
taagaggaggagatgtgcacattcc

SEQ ID NO: 1441441 - DNA, 25 bp, Homo sapien
aataatgactccatgtttaataaga

SEQ ID NO: 1441442 - DNA, 25 bp, Homo sapien
ttttctagtacataaaggatatttc

SEQ ID NO: 1441443 - DNA, 25 bp, Homo sapien
tttctagtacataaaggatatttca

SEQ ID NO: 1441444 - DNA, 25 bp, Homo sapien
cttttctagtacataaaggatattt

SEQ ID NO: 1441445 - DNA, 25 bp, Homo sapien
ttctagtacataaaggatatttcac

SEQ ID NO: 1441446 - DNA, 25 bp, Homo sapien
taaatctccatgtaagactttccct

SEQ ID NO: 1441447 - DNA, 25 bp, Homo sapien
agtcatatccctgtttacatacaaa

SEQ ID NO: 1441448 - DNA, 25 bp, Homo sapien
ggttaatggagataagtcatatccc

SEQ ID NO: 1441449 - DNA, 25 bp, Homo sapien
tatttctgttcatgtaatccacatt

SEQ ID NO: 1441450 - DNA, 25 bp, Homo sapien
gtttcaatagttaccaagatataca

SEQ ID NO: 1441451 - DNA, 25 bp, Homo sapien
actgttgtgaatttgtactgatagc

SEQ ID NO: 1441452 - DNA, 25 bp, Homo sapien
ttccagtttcaatagttaccaagat

SEQ ID NO: 1441453 - DNA, 25 bp, Homo sapien
gaatttgtactgatagcctttccag

SEQ ID NO: 1441454 - DNA, 25 bp, Homo sapien
tcgcaacgagatatttttgatcccc

SEQ ID NO: 1441455 - DNA, 25 bp, Homo sapien
gcttgccaatatcccgtctgcaaca

SEQ ID NO: 1441456 - DNA, 25 bp, Homo sapien
ttcattacaacaggaggatgcttac

SEQ ID NO: 1441457 - DNA, 25 bp, Homo sapien
cattgcatctatattccactgagga

SEQ ID NO: 1441458 - DNA, 25 bp, Homo sapien
caatgaagggtggttcctcacaggc

SEQ ID NO: 1441459 - DNA, 25 bp, Homo sapien
aagttatctcattcgatccatggag

SEQ ID NO: 1441460 - DNA, 25 bp, Homo sapien
tccatggagaaggtagccgctttta

SEQ ID NO: 1441461 - DNA, 25 bp, Homo sapien
gtgtccattttccacgattacaagt

SEQ ID NO: 1441462 - DNA, 25 bp, Homo sapien
caatgcattttggaggttctgtcca

SEQ ID NO: 1441463 - DNA, 25 bp, Homo sapien
tctccatgacgataagttgttgaat

SEQ ID NO: 1441464 - DNA, 25 bp, Homo sapien
tgacccatggatctcaaaattaagt

SEQ ID NO: 1441465 - DNA, 25 bp, Homo sapien
acaacgtatttctgctgacccatgg

SEQ ID NO: 1441466 - DNA, 25 bp, Homo sapien
ggtaccaaccaaagttatagcattg

SEQ ID NO: 1441467 - DNA, 25 bp, Homo sapien
cttcataggtttgctttacaggatg

SEQ ID NO: 1441468 - DNA, 25 bp, Homo sapien
gaaaaactgaacgacatctccttct

SEQ ID NO: 1441469 - DNA, 25 bp, Homo sapien
tagcattgaattaaatcagatccac

SEQ ID NO: 1441470 - DNA, 25 bp, Homo sapien
gagaccatccgtatgtgagacattc

SEQ ID NO: 1441471 - DNA, 25 bp, Homo sapien
gcacattcgtattgtactttgtcct

SEQ ID NO: 1441472 - DNA, 25 bp, Homo sapien
ttcctccagctgtgtagtagccagt

SEQ ID NO: 1441473 - DNA, 25 bp, Homo sapien
ttggtgtgagagaccatccgtatgt

SEQ ID NO: 1441474 - DNA, 25 bp, Homo sapien
cattatataattcaggagccaaaca

SEQ ID NO: 1441475 - DNA, 25 bp, Homo sapien
tgtgttgtggaataatttccattat

SEQ ID NO: 1441476 - DNA, 25 bp, Homo sapien
ctgtgttgtggaataatttccatta

SEQ ID NO: 1441477 - DNA, 25 bp, Homo sapien
ttccattatataattcaggagccaa

SEQ ID NO: 1441478 - DNA, 25 bp, Homo sapien
ttttgtaccctgaagcgcaaccata

SEQ ID NO: 1441479 - DNA, 25 bp, Homo sapien
taccctgaagcgcaaccataacgca

SEQ ID NO: 1441480 - DNA, 25 bp, Homo sapien
aggttggttgagaagaccatccatc

SEQ ID NO: 1441481 - DNA, 25 bp, Homo sapien
gttggttgagaagaccatccatcag

SEQ ID NO: 1441482 - DNA, 25 bp, Homo sapien
taaccattactcaggtcaggcttag

SEQ ID NO: 1441483 - DNA, 25 bp, Homo sapien
agatgtaaccattactcaggtcagg

SEQ ID NO: 1441484 - DNA, 25 bp, Homo sapien
tacatcagagatgtaaccattactc

SEQ ID NO: 1441485 - DNA, 25 bp, Homo sapien
cattactcaggtcaggcttagtgca

SEQ ID NO: 1441486 - DNA, 25 bp, Homo sapien
gaagcaccttggctctggagaccag

SEQ ID NO: 1441487 - DNA, 25 bp, Homo sapien
tgctcattggaaagtaaaagctttt

SEQ ID NO: 1441488 - DNA, 25 bp, Homo sapien
ctttcagtggtataaccagccaagc

SEQ ID NO: 1441489 - DNA, 25 bp, Homo sapien
gtggtataaccagccaagcagaaaa

SEQ ID NO: 1441490 - DNA, 25 bp, Homo sapien
tctcctgagattatcaatatgatga

SEQ ID NO: 1441491 - DNA, 25 bp, Homo sapien
catagagttctcctgagattatcaa

SEQ ID NO: 1441492 - DNA, 25 bp, Homo sapien
cctgagattatcaatatgatgataa

SEQ ID NO: 1441493 - DNA, 25 bp, Homo sapien
gagttctcctgagattatcaatatg

SEQ ID NO: 1441494 - DNA, 25 bp, Homo sapien
tgtataaattaactagactcgggta

SEQ ID NO: 1441495 - DNA, 25 bp, Homo sapien
tatgaggatatgagatttggtatgg

SEQ ID NO: 1441496 - DNA, 25 bp, Homo sapien
ttggatgagacttttgactgtgaac

SEQ ID NO: 1441497 - DNA, 25 bp, Homo sapien
ttttgccaggattgcaaggtgtccc

SEQ ID NO: 1441498 - DNA, 25 bp, Homo sapien
ttaaaagttgtacacggagagcaaa

SEQ ID NO: 1441499 - DNA, 25 bp, Homo sapien
taaaagttgtacacggagagcaaaa

SEQ ID NO: 1441500 - DNA, 25 bp, Homo sapien
ttatgacatattagtttattacatg

SEQ ID NO: 1441501 - DNA, 25 bp, Homo sapien
atgacatattagtttattacatgca

SEQ ID NO: 1441502 - DNA, 25 bp, Homo sapien
taatatttctttacactatacatac

SEQ ID NO: 1441503 - DNA, 25 bp, Homo sapien
atttctttacactatacatactgaa

SEQ ID NO: 1441504 - DNA, 25 bp, Homo sapien
atatttctttacactatacatactg

SEQ ID NO: 1441505 - DNA, 25 bp, Homo sapien
acgtactcatgattggctttaatat

SEQ ID NO: 1441506 - DNA, 25 bp, Homo sapien
aaggaatgccaagcgtatccatcac

SEQ ID NO: 1441507 - DNA, 25 bp, Homo sapien
taaggaatgccaagcgtatccatca

SEQ ID NO: 1441508 - DNA, 25 bp, Homo sapien
ataaggaatgccaagcgtatccatc

SEQ ID NO: 1441509 - DNA, 25 bp, Homo sapien
tctcaaaacccaatctggcttaagt

SEQ ID NO: 1441510 - DNA, 25 bp, Homo sapien
cttgcaggggatttgtgatttcttc

SEQ ID NO: 1441511 - DNA, 25 bp, Homo sapien
ctcttctcaaaacccaatctggctt

SEQ ID NO: 1441512 - DNA, 25 bp, Homo sapien
gatttcttccatgttatctcttctc

SEQ ID NO: 1441513 - DNA, 25 bp, Homo sapien
caactttggacctacttcgtacatc

SEQ ID NO: 1441514 - DNA, 25 bp, Homo sapien
ggtgtttctgggataaaaggaatgc

SEQ ID NO: 1441515 - DNA, 25 bp, Homo sapien
gagctgtaagtttgtagagactgta

SEQ ID NO: 1441516 - DNA, 25 bp, Homo sapien
agagactgtaaatacggtcaacaac

SEQ ID NO: 1441517 - DNA, 25 bp, Homo sapien
gcagcggttcccacttaccaggata

SEQ ID NO: 1441518 - DNA, 25 bp, Homo sapien
gaaacctcaccaagtttggcaggta

SEQ ID NO: 1441519 - DNA, 25 bp, Homo sapien
taactccacactgaatataagaagg

SEQ ID NO: 1441520 - DNA, 25 bp, Homo sapien
gatggtctcactatatccacacatg

SEQ ID NO: 1441521 - DNA, 25 bp, Homo sapien
gcaaaagctccaatagtatatctat

SEQ ID NO: 1441522 - DNA, 25 bp, Homo sapien
atagccaacaaacaacaagtttttg

SEQ ID NO: 1441523 - DNA, 25 bp, Homo sapien
aaatgcttccgcctttgtctgcaac

SEQ ID NO: 1441524 - DNA, 25 bp, Homo sapien
ttattaccaggcttttctcggtata

SEQ ID NO: 1441525 - DNA, 25 bp, Homo sapien
tagatacattaagcaagacttgcac

SEQ ID NO: 1441526 - DNA, 25 bp, Homo sapien
ggaatactgcgattacaacttcgga

SEQ ID NO: 1441527 - DNA, 25 bp, Homo sapien
aagtggagacaatctagtaactacc

SEQ ID NO: 1441528 - DNA, 25 bp, Homo sapien
tatctgatgacttccatacaaggaa

SEQ ID NO: 1441529 - DNA, 25 bp, Homo sapien
gttttaaggcctcaagaatggcaga

SEQ ID NO: 1441530 - DNA, 25 bp, Homo sapien
cagaaaggtgcttatatgtcaaaag

SEQ ID NO: 1441531 - DNA, 25 bp, Homo sapien
tgcaagtgcagttcttttgtagagt

SEQ ID NO: 1441532 - DNA, 25 bp, Homo sapien
gaatctccctattaacaacttgaag

SEQ ID NO: 1441533 - DNA, 25 bp, Homo sapien
ttcctccaagaatagcctctccata

SEQ ID NO: 1441534 - DNA, 25 bp, Homo sapien
tccaagaatagcctctccataatgc

SEQ ID NO: 1441535 - DNA, 25 bp, Homo sapien
tttcttcctccaagaatagcctctc

SEQ ID NO: 1441536 - DNA, 25 bp, Homo sapien
cctccaagaatagcctctccataat

SEQ ID NO: 1441537 - DNA, 25 bp, Homo sapien
gagaaaatggcgcactgctttctgt

SEQ ID NO: 1441538 - DNA, 25 bp, Homo sapien
gattccactagtgaatttttcctgc

SEQ ID NO: 1441539 - DNA, 25 bp, Homo sapien
tgctttctgtattactgatgcagcc

SEQ ID NO: 1441540 - DNA, 25 bp, Homo sapien
tgctttttacggaggagaaaatggc

SEQ ID NO: 1441541 - DNA, 25 bp, Homo sapien
cttgtaatcttgctcgaaaccatct

SEQ ID NO: 1441542 - DNA, 25 bp, Homo sapien
ctttttgatgctatgatatttctga

SEQ ID NO: 1441543 - DNA, 25 bp, Homo sapien
ttcttgtaatcttgctcgaaaccat

SEQ ID NO: 1441544 - DNA, 25 bp, Homo sapien
acattcttgaccttcatgctcaatc

SEQ ID NO: 1441545 - DNA, 25 bp, Homo sapien
tcacagccaggtaaagtttataggc

SEQ ID NO: 1441546 - DNA, 25 bp, Homo sapien
cagcattcaggtgataatatgcagc

SEQ ID NO: 1441547 - DNA, 25 bp, Homo sapien
tataggctctttgaattctaacagc

SEQ ID NO: 1441548 - DNA, 25 bp, Homo sapien
tatgcagctgcagtgaagtgaagaa

SEQ ID NO: 1441549 - DNA, 25 bp, Homo sapien
ctttttcgtactagccaaccacgca

SEQ ID NO: 1441550 - DNA, 25 bp, Homo sapien
tctttttcgtactagccaaccacgc

SEQ ID NO: 1441551 - DNA, 25 bp, Homo sapien
tttttcgtactagccaaccacgcac

SEQ ID NO: 1441552 - DNA, 25 bp, Homo sapien
tggatcaaacaagcagctcgatgtc

SEQ ID NO: 1441553 - DNA, 25 bp, Homo sapien
gatttctgccgaagaaagacctgcc

SEQ ID NO: 1441554 - DNA, 25 bp, Homo sapien
gtatgatcaaagcagcagatttctg

SEQ ID NO: 1441555 - DNA, 25 bp, Homo sapien
cctctataatgtgcttggatcaaac

SEQ ID NO: 1441556 - DNA, 25 bp, Homo sapien
ttacaagtaacattaatgggtagaa

SEQ ID NO: 1441557 - DNA, 25 bp, Homo sapien
agatttccaacccactagaagttct

SEQ ID NO: 1441558 - DNA, 25 bp, Homo sapien
ttccaacccactagaagttcttgaa

SEQ ID NO: 1441559 - DNA, 25 bp, Homo sapien
caagtaacattaatgggtagaaaga

SEQ ID NO: 1441560 - DNA, 25 bp, Homo sapien
gctatctttgcaggaagtatagctc

SEQ ID NO: 1441561 - DNA, 25 bp, Homo sapien
atctttgcaggaagtatagctctcc

SEQ ID NO: 1441562 - DNA, 25 bp, Homo sapien
atgagctatctttgcaggaagtata

SEQ ID NO: 1441563 - DNA, 25 bp, Homo sapien
tgagctatctttgcaggaagtatag

SEQ ID NO: 1441564 - DNA, 25 bp, Homo sapien
ttaagtcacccagcaaaatggccca

SEQ ID NO: 1441565 - DNA, 25 bp, Homo sapien
taaagacttagctatcacacacaaa

SEQ ID NO: 1441566 - DNA, 25 bp, Homo sapien
aaagcaagacagtacgagagatgta

SEQ ID NO: 1441567 - DNA, 25 bp, Homo sapien
aaatggcccaaagcactaataagaa

SEQ ID NO: 1441568 - DNA, 25 bp, Homo sapien
tggtatagaagcaaccttgaataat

SEQ ID NO: 1441569 - DNA, 25 bp, Homo sapien
cgtgttctctctagtttggtataga

SEQ ID NO: 1441570 - DNA, 25 bp, Homo sapien
cagcttttaatatagctagatattc

SEQ ID NO: 1441571 - DNA, 25 bp, Homo sapien
caacatctataccaggcttgaatct

SEQ ID NO: 1441572 - DNA, 25 bp, Homo sapien
ttgccacgtcctaaaataatgctgt

SEQ ID NO: 1441573 - DNA, 25 bp, Homo sapien
caactttggccctgtgcattcgata

SEQ ID NO: 1441574 - DNA, 25 bp, Homo sapien
gaagaactgaatccgtagggcagca

SEQ ID NO: 1441575 - DNA, 25 bp, Homo sapien
aaagcagcctgaatagttcgtacag

SEQ ID NO: 1441576 - DNA, 25 bp, Homo sapien
aaataactgcttgggtacgcactgc

SEQ ID NO: 1441577 - DNA, 25 bp, Homo sapien
tatgatttttgtagcccactgaagc

SEQ ID NO: 1441578 - DNA, 25 bp, Homo sapien
tgttcatgtcctgaaaacctgcctg

SEQ ID NO: 1441579 - DNA, 25 bp, Homo sapien
gaaactactgttgctctaaggtgga

SEQ ID NO: 1441580 - DNA, 25 bp, Homo sapien
tatgtttggcacaaatggtggctcg

SEQ ID NO: 1441581 - DNA, 25 bp, Homo sapien
gactgtattgtaatggctgcctttc

SEQ ID NO: 1441582 - DNA, 25 bp, Homo sapien
tgttctgtacatcctgaaagtagcc

SEQ ID NO: 1441583 - DNA, 25 bp, Homo sapien
taccatcagtcttctgtaagatgac

SEQ ID NO: 1441584 - DNA, 25 bp, Homo sapien
tgagggaaatgaatcttctcctcac

SEQ ID NO: 1441585 - DNA, 25 bp, Homo sapien
ctgaacaaaaatagtagcttttttg

SEQ ID NO: 1441586 - DNA, 25 bp, Homo sapien
ttttttgagggaaatgaatcttctc

SEQ ID NO: 1441587 - DNA, 25 bp, Homo sapien
tttgagggaaatgaatcttctcctc

SEQ ID NO: 1441588 - DNA, 25 bp, Homo sapien
ggatcacaacggaggcctgtttcaa

SEQ ID NO: 1441589 - DNA, 25 bp, Homo sapien
tagactggatgaaagtagcagccct

SEQ ID NO: 1441590 - DNA, 25 bp, Homo sapien
taactgcattttgtacctgaaggaa

SEQ ID NO: 1441591 - DNA, 25 bp, Homo sapien
gctttgtacaaagatgtgcccgata

SEQ ID NO: 1441592 - DNA, 25 bp, Homo sapien
taacctcatctgctttcggacaagg

SEQ ID NO: 1441593 - DNA, 25 bp, Homo sapien
tagattgaagcaccagtaccgcatg

SEQ ID NO: 1441594 - DNA, 25 bp, Homo sapien
catgaagagtcttgtacgccctgta

SEQ ID NO: 1441595 - DNA, 25 bp, Homo sapien
gaaccttccagccacgataagcaga

SEQ ID NO: 1441596 - DNA, 25 bp, Homo sapien
caattgaataattcttgcagctttc

SEQ ID NO: 1441597 - DNA, 25 bp, Homo sapien
gactcttcgccaatatttctgaatg

SEQ ID NO: 1441598 - DNA, 25 bp, Homo sapien
tgctagaaaattgattacagccaat

SEQ ID NO: 1441599 - DNA, 25 bp, Homo sapien
gaatgacgagtgctgcattaactct

SEQ ID NO: 1441600 - DNA, 25 bp, Homo sapien
atagtagtttcatattctaggagta

SEQ ID NO: 1441601 - DNA, 25 bp, Homo sapien
tagtagtttcatattctaggagtac

SEQ ID NO: 1441602 - DNA, 25 bp, Homo sapien
tatagtagtttcatattctaggagt

SEQ ID NO: 1441603 - DNA, 25 bp, Homo sapien
atgttgtttgtatgagtcgagcagc

SEQ ID NO: 1441604 - DNA, 25 bp, Homo sapien
tatttctttacgaagatccaaaagc

SEQ ID NO: 1441605 - DNA, 25 bp, Homo sapien
gtatgagtcgagcagctcttatttc

SEQ ID NO: 1441606 - DNA, 25 bp, Homo sapien
gatggcgtttgagatctgtttttag

SEQ ID NO: 1441607 - DNA, 25 bp, Homo sapien
gagctctttgtatagctctgaagta

SEQ ID NO: 1441608 - DNA, 25 bp, Homo sapien
tctaactgcagacctaaccaagtga

SEQ ID NO: 1441609 - DNA, 25 bp, Homo sapien
tgattaatcatagcaggtattccac

SEQ ID NO: 1441610 - DNA, 25 bp, Homo sapien
tcatctggaattgtatttgacatat

SEQ ID NO: 1441611 - DNA, 25 bp, Homo sapien
tcaaatggcacatagcaaggatggt

SEQ ID NO: 1441612 - DNA, 25 bp, Homo sapien
gctttaagagacatatccagagaac

SEQ ID NO: 1441613 - DNA, 25 bp, Homo sapien
cacagtttgagtagtacgctgacat

SEQ ID NO: 1441614 - DNA, 25 bp, Homo sapien
gatcaggtaacataacacacggccg

SEQ ID NO: 1441615 - DNA, 25 bp, Homo sapien
gagaaagacactgtaaaattctcca

SEQ ID NO: 1441616 - DNA, 25 bp, Homo sapien
tgagaaagacactgtaaaattctcc

SEQ ID NO: 1441617 - DNA, 25 bp, Homo sapien
agaaagacactgtaaaattctccac

SEQ ID NO: 1441618 - DNA, 25 bp, Homo sapien
ctgagaaagacactgtaaaattctc

SEQ ID NO: 1441619 - DNA, 25 bp, Homo sapien
tatgttttcactatattgttcaaag

SEQ ID NO: 1441620 - DNA, 25 bp, Homo sapien
tagaaggcacaaacagcatttaccc

SEQ ID NO: 1441621 - DNA, 25 bp, Homo sapien
tacccaatccatcaataactttatg

SEQ ID NO: 1441622 - DNA, 25 bp, Homo sapien
tcagaatggcatgatagtagagata

SEQ ID NO: 1441623 - DNA, 25 bp, Homo sapien
ctgaaaagcaaacgctattttccaa

SEQ ID NO: 1441624 - DNA, 25 bp, Homo sapien
tctctgtgcctatccacaatatcct

SEQ ID NO: 1441625 - DNA, 25 bp, Homo sapien
tccacaatatccttagatagaattg

SEQ ID NO: 1441626 - DNA, 25 bp, Homo sapien
aacgctattttccaaagcaacctga

SEQ ID NO: 1441627 - DNA, 25 bp, Homo sapien
tagcataatgtacgcacatatcaat

SEQ ID NO: 1441628 - DNA, 25 bp, Homo sapien
tgaggagaataagttttacctctac

SEQ ID NO: 1441629 - DNA, 25 bp, Homo sapien
agtgaggagaataagttttacctct

SEQ ID NO: 1441630 - DNA, 25 bp, Homo sapien
cataatgtacgcacatatcaatatt

SEQ ID NO: 1441631 - DNA, 25 bp, Homo sapien
tgaagacgacttattgccggaatcc

SEQ ID NO: 1441632 - DNA, 25 bp, Homo sapien
ttctttgagaggtcccagttctgtg

SEQ ID NO: 1441633 - DNA, 25 bp, Homo sapien
gaacttgaagaacaatgtcaacatt

SEQ ID NO: 1441634 - DNA, 25 bp, Homo sapien
gccggaatcctgagtttctttgaga

SEQ ID NO: 1441635 - DNA, 25 bp, Homo sapien
tctacggcaagatttgtaacggcaa

SEQ ID NO: 1441636 - DNA, 25 bp, Homo sapien
caaggcgcactccacattgcaagtc

SEQ ID NO: 1441637 - DNA, 25 bp, Homo sapien
cttaggaaatctcgtgaaaaagcca

SEQ ID NO: 1441638 - DNA, 25 bp, Homo sapien
ccaataagccaaggtgacgggaaag

SEQ ID NO: 1441639 - DNA, 25 bp, Homo sapien
gacaaggatcatgatcaatgagtct

SEQ ID NO: 1441640 - DNA, 25 bp, Homo sapien
gtctggaaattttagcataatcaag

SEQ ID NO: 1441641 - DNA, 25 bp, Homo sapien
tgtaaacttggacaaagcttcttca

SEQ ID NO: 1441642 - DNA, 25 bp, Homo sapien
aattcggcatctttacagaagagac

SEQ ID NO: 1441643 - DNA, 25 bp, Homo sapien
cagctgctatatcaggattccaaag

SEQ ID NO: 1441644 - DNA, 25 bp, Homo sapien
taaacatagccaaccctgtgacatc

SEQ ID NO: 1441645 - DNA, 25 bp, Homo sapien
ccaaagtaggcgattcagaataaac

SEQ ID NO: 1441646 - DNA, 25 bp, Homo sapien
tctctatacaggtgaggaacagtgg

SEQ ID NO: 1441647 - DNA, 25 bp, Homo sapien
cttccaaagatatgagttctccata

SEQ ID NO: 1441648 - DNA, 25 bp, Homo sapien
aaagatatgagttctccataagttg

SEQ ID NO: 1441649 - DNA, 25 bp, Homo sapien
ccaaagatatgagttctccataagt

SEQ ID NO: 1441650 - DNA, 25 bp, Homo sapien
tccaaagatatgagttctccataag

SEQ ID NO: 1441651 - DNA, 25 bp, Homo sapien
aacagccaattcaggactttctgac

SEQ ID NO: 1441652 - DNA, 25 bp, Homo sapien
caattcaggactttctgacgttctc

SEQ ID NO: 1441653 - DNA, 25 bp, Homo sapien
attcgaagccacaaaggattgtagg

SEQ ID NO: 1441654 - DNA, 25 bp, Homo sapien
ctctagaccaattcgaagccacaaa

SEQ ID NO: 1441655 - DNA, 25 bp, Homo sapien
cgagcagtataagctctgagagaca

SEQ ID NO: 1441656 - DNA, 25 bp, Homo sapien
tagtctgtttaacctacaccgagca

SEQ ID NO: 1441657 - DNA, 25 bp, Homo sapien
aacggcatgctgcacgacgtagtct

SEQ ID NO: 1441658 - DNA, 25 bp, Homo sapien
tttcagaagtaaacaaacggcatgc

SEQ ID NO: 1441659 - DNA, 25 bp, Homo sapien
tgtaggtgctctaggaacacttatt

SEQ ID NO: 1441660 - DNA, 25 bp, Homo sapien
ggtgctctaggaacacttattttat

SEQ ID NO: 1441661 - DNA, 25 bp, Homo sapien
ttgtaggtgctctaggaacacttat

SEQ ID NO: 1441662 - DNA, 25 bp, Homo sapien
taggtgctctaggaacacttatttt

SEQ ID NO: 1441663 - DNA, 25 bp, Homo sapien
cccaaaagaagagtagcagcattta

SEQ ID NO: 1441664 - DNA, 25 bp, Homo sapien
ctattcccaaaagaagagtagcagc

SEQ ID NO: 1441665 - DNA, 25 bp, Homo sapien
ttcccaaaagaagagtagcagcatt

SEQ ID NO: 1441666 - DNA, 25 bp, Homo sapien
tattcccaaaagaagagtagcagca

SEQ ID NO: 1441667 - DNA, 25 bp, Homo sapien
gaagtcatcaggggttaatataaaa

SEQ ID NO: 1441668 - DNA, 25 bp, Homo sapien
aagtcatcaggggttaatataaaat

SEQ ID NO: 1441669 - DNA, 25 bp, Homo sapien
ttccttccagcgttcatcataaaac

SEQ ID NO: 1441670 - DNA, 25 bp, Homo sapien
ccttccagcgttcatcataaaacat

SEQ ID NO: 1441671 - DNA, 25 bp, Homo sapien
ttttgtggtacatgtgataatatat

SEQ ID NO: 1441672 - DNA, 25 bp, Homo sapien
ggtctttaccaagtaatgagattgc

SEQ ID NO: 1441673 - DNA, 25 bp, Homo sapien
taatagatgtacacaattttgtggt

SEQ ID NO: 1441674 - DNA, 25 bp, Homo sapien
ttatacaaatcaggtcagggtactt

SEQ ID NO: 1441675 - DNA, 25 bp, Homo sapien
ttctccttgactcgctgcataaatc

SEQ ID NO: 1441676 - DNA, 25 bp, Homo sapien
tttctccttgactcgctgcataaat

SEQ ID NO: 1441677 - DNA, 25 bp, Homo sapien
catagtgctgagtgtaggtttttct

SEQ ID NO: 1441678 - DNA, 25 bp, Homo sapien
ggtacctacagcattcatagtgctg

SEQ ID NO: 1441679 - DNA, 25 bp, Homo sapien
tccacattggtacaaagaagcatat

SEQ ID NO: 1441680 - DNA, 25 bp, Homo sapien
taactggctggttgtctgggcccag

SEQ ID NO: 1441681 - DNA, 25 bp, Homo sapien
actggactgtgccacagcgataatg

SEQ ID NO: 1441682 - DNA, 25 bp, Homo sapien
tttatgaaggtcaaactggactgtg

SEQ ID NO: 1441683 - DNA, 25 bp, Homo sapien
ccacagcgataatgggttttgtcct

SEQ ID NO: 1441684 - DNA, 25 bp, Homo sapien
tatgaaggtcaaactggactgtgcc

SEQ ID NO: 1441685 - DNA, 25 bp, Homo sapien
ggatgaagcaaagaatacacgtagg

SEQ ID NO: 1441686 - DNA, 25 bp, Homo sapien
tgacatacaagaggctagaagaggt

SEQ ID NO: 1441687 - DNA, 25 bp, Homo sapien
aatgtggcctgttgccagaactgca

SEQ ID NO: 1441688 - DNA, 25 bp, Homo sapien
gaagcaccttctatgctagtgaaga

SEQ ID NO: 1441689 - DNA, 25 bp, Homo sapien
catgttcacccactgcactgttgag

SEQ ID NO: 1441690 - DNA, 25 bp, Homo sapien
tcaggaatacgtggcgaaacttcac

SEQ ID NO: 1441691 - DNA, 25 bp, Homo sapien
caagcaagttgcaccatggcattca

SEQ ID NO: 1441692 - DNA, 25 bp, Homo sapien
gatcgacgtacagagagtggcaagc

SEQ ID NO: 1441693 - DNA, 25 bp, Homo sapien
tgggggaccgccttcattcatagcc

SEQ ID NO: 1441694 - DNA, 25 bp, Homo sapien
tcatagccaagttttcacaagcttg

SEQ ID NO: 1441695 - DNA, 25 bp, Homo sapien
ttgaaacccttctgttgtgacttgt

SEQ ID NO: 1441696 - DNA, 25 bp, Homo sapien
gtgacttgtagaggctgaaattttc

SEQ ID NO: 1441697 - DNA, 25 bp, Homo sapien
gccttctttgagtggtgtccagtta

SEQ ID NO: 1441698 - DNA, 25 bp, Homo sapien
aatgtcataatctctcttactcggc

SEQ ID NO: 1441699 - DNA, 25 bp, Homo sapien
tgcatttcctagtaatatagcttgg

SEQ ID NO: 1441700 - DNA, 25 bp, Homo sapien
gaacatcatttacaagaaatgtcat

SEQ ID NO: 1441701 - DNA, 25 bp, Homo sapien
aaacagcgctgcgacacactgaagc

SEQ ID NO: 1441702 - DNA, 25 bp, Homo sapien
ctgcaacacgaaacagcgctgcgac

SEQ ID NO: 1441703 - DNA, 25 bp, Homo sapien
tctgccacctcctcgttagggttgt

SEQ ID NO: 1441704 - DNA, 25 bp, Homo sapien
ccgcggccgggaagtgggagatctt

SEQ ID NO: 1441705 - DNA, 25 bp, Homo sapien
tagggccagagacagcgtccgtgag

SEQ ID NO: 1441706 - DNA, 25 bp, Homo sapien
tcccaggagaacgtccccgaagcaa

SEQ ID NO: 1441707 - DNA, 25 bp, Homo sapien
acagcgtccgtgaggctcccaggag

SEQ ID NO: 1441708 - DNA, 25 bp, Homo sapien
ccaggagaacgtccccgaagcaaag

SEQ ID NO: 1441709 - DNA, 25 bp, Homo sapien
gagacaggaccggcggggaagacgc

SEQ ID NO: 1441710 - DNA, 25 bp, Homo sapien
agcctcgccccactcgccggttcgc

SEQ ID NO: 1441711 - DNA, 25 bp, Homo sapien
cgcgggcggcctccgctcggtcggg

SEQ ID NO: 1441712 - DNA, 25 bp, Homo sapien
ctcggtcgggctcacttcccagcag

SEQ ID NO: 1441713 - DNA, 25 bp, Homo sapien
gatccgggacttacgctgaccgctt

SEQ ID NO: 1441714 - DNA, 25 bp, Homo sapien
gaaaacaagcccaataaactcgcaa

SEQ ID NO: 1441715 - DNA, 25 bp, Homo sapien
ccaaacaagtatggcgttttgactc

SEQ ID NO: 1441716 - DNA, 25 bp, Homo sapien
tagaggtcgtgggagtgaattcggc

SEQ ID NO: 1441717 - DNA, 25 bp, Homo sapien
gcatcccctggccaatgagacggcg

SEQ ID NO: 1441718 - DNA, 25 bp, Homo sapien
tggccaatgagacggcggcgcttca

SEQ ID NO: 1441719 - DNA, 25 bp, Homo sapien
accaatcggtgagcagcatcccctg

SEQ ID NO: 1441720 - DNA, 25 bp, Homo sapien
tcctcgtcacgggaccaatcggtga

SEQ ID NO: 1441721 - DNA, 25 bp, Homo sapien
gaatgattgcatccggccgccaatc

SEQ ID NO: 1441722 - DNA, 25 bp, Homo sapien
tgaatgattgcatccggccgccaat

SEQ ID NO: 1441723 - DNA, 25 bp, Homo sapien
attgcatccggccgccaatcgctat

SEQ ID NO: 1441724 - DNA, 25 bp, Homo sapien
atgattgcatccggccgccaatcgc

SEQ ID NO: 1441725 - DNA, 25 bp, Homo sapien
tagcggaatcctggccaccgtctaa

SEQ ID NO: 1441726 - DNA, 25 bp, Homo sapien
tagaattgaaattcgtctttatatt

SEQ ID NO: 1441727 - DNA, 25 bp, Homo sapien
aacggtagcggaatcctggccaccg

SEQ ID NO: 1441728 - DNA, 25 bp, Homo sapien
ggtgagaacggtagcggaatcctgg

SEQ ID NO: 1441729 - DNA, 25 bp, Homo sapien
aaatgtggttcaataaaacctagat

SEQ ID NO: 1441730 - DNA, 25 bp, Homo sapien
ggttcaataaaacctagatatgctg

SEQ ID NO: 1441731 - DNA, 25 bp, Homo sapien
tggttcaataaaacctagatatgct

SEQ ID NO: 1441732 - DNA, 25 bp, Homo sapien
tgtggttcaataaaacctagatatg

SEQ ID NO: 1441733 - DNA, 25 bp, Homo sapien
cacaatgtggaacagctaaatgccc

SEQ ID NO: 1441734 - DNA, 25 bp, Homo sapien
tgttgctgctcctaatgagaaactc

SEQ ID NO: 1441735 - DNA, 25 bp, Homo sapien
aaataaggtcattcagtgcagggct

SEQ ID NO: 1441736 - DNA, 25 bp, Homo sapien
ttaatgcaagcaggaataccaagca

SEQ ID NO: 1441737 - DNA, 25 bp, Homo sapien
caagggctgggctagactttacagt

SEQ ID NO: 1441738 - DNA, 25 bp, Homo sapien
ttaatcagtacaatctagccagcag

SEQ ID NO: 1441739 - DNA, 25 bp, Homo sapien
tatattacgcatctcccagactagg

SEQ ID NO: 1441740 - DNA, 25 bp, Homo sapien
catgacctgccatcgcctaaaagga

SEQ ID NO: 1441741 - DNA, 25 bp, Homo sapien
tttaatgcccagacctatgtttgcc

SEQ ID NO: 1441742 - DNA, 25 bp, Homo sapien
tctgaggacttgagaaactagagaa

SEQ ID NO: 1441743 - DNA, 25 bp, Homo sapien
tgttcagtaaacagagacacatagt

SEQ ID NO: 1441744 - DNA, 25 bp, Homo sapien
aaaggctacatggtcctcaaacttg

SEQ ID NO: 1441745 - DNA, 25 bp, Homo sapien
tggcttccgactgataaactttggg

SEQ ID NO: 1441746 - DNA, 25 bp, Homo sapien
tatcaaggcccagtaatgttccaag

SEQ ID NO: 1441747 - DNA, 25 bp, Homo sapien
gaaaagctaaatccgctgctcgtgg

SEQ ID NO: 1441748 - DNA, 25 bp, Homo sapien
tcactcggagtgtcaggcatctgaa

SEQ ID NO: 1441749 - DNA, 25 bp, Homo sapien
tgaacatggtcaatgtggtatttca

SEQ ID NO: 1441750 - DNA, 25 bp, Homo sapien
aggtcgggcatcagaatgaataacc

SEQ ID NO: 1441751 - DNA, 25 bp, Homo sapien
cttgtctttccgcttaaatgttgca

SEQ ID NO: 1441752 - DNA, 25 bp, Homo sapien
acagtgctgacagttgaaaggtcgg

SEQ ID NO: 1441753 - DNA, 25 bp, Homo sapien
gagtaatagggcttagcactgcacc

SEQ ID NO: 1441754 - DNA, 25 bp, Homo sapien
tctagcctgaggtcaaaataagaag

SEQ ID NO: 1441755 - DNA, 25 bp, Homo sapien
cctcacagagttggtaaatggacca

SEQ ID NO: 1441756 - DNA, 25 bp, Homo sapien
taacacttactagccaaacattgag

SEQ ID NO: 1441757 - DNA, 25 bp, Homo sapien
atttccagacttgatttgcctttaa

SEQ ID NO: 1441758 - DNA, 25 bp, Homo sapien
catttccagacttgatttgccttta

SEQ ID NO: 1441759 - DNA, 25 bp, Homo sapien
tttccagacttgatttgcctttaaa

SEQ ID NO: 1441760 - DNA, 25 bp, Homo sapien
gcatttccagacttgatttgccttt

SEQ ID NO: 1441761 - DNA, 25 bp, Homo sapien
ttctctccaaggtgtacgcttttgt

SEQ ID NO: 1441762 - DNA, 25 bp, Homo sapien
tgtaatgaacagtgagatgatccct

SEQ ID NO: 1441763 - DNA, 25 bp, Homo sapien
caaggtgtacgcttttgtaatgaac

SEQ ID NO: 1441764 - DNA, 25 bp, Homo sapien
tgatccctacgaccaaaacattttc

SEQ ID NO: 1441765 - DNA, 25 bp, Homo sapien
ctgttctaccgtgctcatagagatg

SEQ ID NO: 1441766 - DNA, 25 bp, Homo sapien
ttattgtgctcacagagttggctct

SEQ ID NO: 1441767 - DNA, 25 bp, Homo sapien
cagagttggctctcttagcacttcc

SEQ ID NO: 1441768 - DNA, 25 bp, Homo sapien
tgttctaccgtgctcatagagatgg

SEQ ID NO: 1441769 - DNA, 25 bp, Homo sapien
catatcttttatcatcatgatgtac

SEQ ID NO: 1441770 - DNA, 25 bp, Homo sapien
catcatgatgtactcgtaagtgaag

SEQ ID NO: 1441771 - DNA, 25 bp, Homo sapien
gtgctttgtaaggtgatcatgacgg

SEQ ID NO: 1441772 - DNA, 25 bp, Homo sapien
gatcatgacggataaatgtttttcc

SEQ ID NO: 1441773 - DNA, 25 bp, Homo sapien
acgaacttccatgacgaaaactttg

SEQ ID NO: 1441774 - DNA, 25 bp, Homo sapien
acttccatgacgaaaactttgccca

SEQ ID NO: 1441775 - DNA, 25 bp, Homo sapien
tccatgacgaaaactttgcccacaa

SEQ ID NO: 1441776 - DNA, 25 bp, Homo sapien
ctatacgaacttccatgacgaaaac

SEQ ID NO: 1441777 - DNA, 25 bp, Homo sapien
tatgacagtctgtagataacaccca

SEQ ID NO: 1441778 - DNA, 25 bp, Homo sapien
caatgggctggctaaaccacatagc

SEQ ID NO: 1441779 - DNA, 25 bp, Homo sapien
tacaaggcccaccaatatgacagtc

SEQ ID NO: 1441780 - DNA, 25 bp, Homo sapien
catagcactatcattaagcggcgca

SEQ ID NO: 1441781 - DNA, 25 bp, Homo sapien
taaactggcgaccacatatatcaca

SEQ ID NO: 1441782 - DNA, 25 bp, Homo sapien
ctttctcgtactgattttccacaga

SEQ ID NO: 1441783 - DNA, 25 bp, Homo sapien
ttttccacagataaagcaagtccat

SEQ ID NO: 1441784 - DNA, 25 bp, Homo sapien
tgacgtttcaaatttccagtgtcgt

SEQ ID NO: 1441785 - DNA, 25 bp, Homo sapien
ggctgaatccacagacatggcactt

SEQ ID NO: 1441786 - DNA, 25 bp, Homo sapien
ggcgattatgatgtaccaacgtagg

SEQ ID NO: 1441787 - DNA, 25 bp, Homo sapien
catggcacttatagatatggagggc

SEQ ID NO: 1441788 - DNA, 25 bp, Homo sapien
gcaacctgaaaaggcaacacagtgt

SEQ ID NO: 1441789 - DNA, 25 bp, Homo sapien
ccgagcaaaccgtgatttaaaatgt

SEQ ID NO: 1441790 - DNA, 25 bp, Homo sapien
tgttcttcacaataggtacacttaa

SEQ ID NO: 1441791 - DNA, 25 bp, Homo sapien
cttttcttgatgctttaaccgagca

SEQ ID NO: 1441792 - DNA, 25 bp, Homo sapien
cctccaagtgtggtcttcgagtaaa

SEQ ID NO: 1441793 - DNA, 25 bp, Homo sapien
catttccaactttcactcttagtct

SEQ ID NO: 1441794 - DNA, 25 bp, Homo sapien
atcacatttccaactttcactctta

SEQ ID NO: 1441795 - DNA, 25 bp, Homo sapien
tcactcttagtcttcttaatggaaa

SEQ ID NO: 1441796 - DNA, 25 bp, Homo sapien
caactttcactcttagtcttcttaa

SEQ ID NO: 1441797 - DNA, 25 bp, Homo sapien
gcgctggtgacaaatatcacactca

SEQ ID NO: 1441798 - DNA, 25 bp, Homo sapien
tctgtgaacagttaggttagacttt

SEQ ID NO: 1441799 - DNA, 25 bp, Homo sapien
gactttgttgaatagcgctggtgac

SEQ ID NO: 1441800 - DNA, 25 bp, Homo sapien
catgcttggctaaagtcttcttgct

SEQ ID NO: 1441801 - DNA, 25 bp, Homo sapien
gtgtgaacacgggtgtggctctcat

SEQ ID NO: 1441802 - DNA, 25 bp, Homo sapien
acacgggtgtggctctcatattttc

SEQ ID NO: 1441803 - DNA, 25 bp, Homo sapien
tgaacacgggtgtggctctcatatt

SEQ ID NO: 1441804 - DNA, 25 bp, Homo sapien
tgtgaacacgggtgtggctctcata

SEQ ID NO: 1441805 - DNA, 25 bp, Homo sapien
aatgtgttacgtgatccagggtgac

SEQ ID NO: 1441806 - DNA, 25 bp, Homo sapien
tcaaacttaacagggcacttccgat

SEQ ID NO: 1441807 - DNA, 25 bp, Homo sapien
cagggtgacaacatcagtgcttgga

SEQ ID NO: 1441808 - DNA, 25 bp, Homo sapien
gaatgaccactggagttaacccctc

SEQ ID NO: 1441809 - DNA, 25 bp, Homo sapien
gattgtcttggataacagcttctga

SEQ ID NO: 1441810 - DNA, 25 bp, Homo sapien
cataagtgtcttaagtgatttataa

SEQ ID NO: 1441811 - DNA, 25 bp, Homo sapien
aaggggcgtgcccaagggtttcatg

SEQ ID NO: 1441812 - DNA, 25 bp, Homo sapien
aagtgtcttaagtgatttataaagg

SEQ ID NO: 1441813 - DNA, 25 bp, Homo sapien
gaacccaaggctcccccgctggctc

SEQ ID NO: 1441814 - DNA, 25 bp, Homo sapien
cagacgtggctgcattgtccatggc

SEQ ID NO: 1441815 - DNA, 25 bp, Homo sapien
gaaattggcctataccgggagagtg

SEQ ID NO: 1441816 - DNA, 25 bp, Homo sapien
taccctttggagaatgcagttccgt

SEQ ID NO: 1441817 - DNA, 25 bp, Homo sapien
gggagtggacaaactggctctacca

SEQ ID NO: 1441818 - DNA, 25 bp, Homo sapien
ctgaactccaagtgctacatgatat

SEQ ID NO: 1441819 - DNA, 25 bp, Homo sapien
gatatttcaagcttggtgtcttgtc

SEQ ID NO: 1441820 - DNA, 25 bp, Homo sapien
caagcttggtgtcttgtcataagca

SEQ ID NO: 1441821 - DNA, 25 bp, Homo sapien
cataagcatctagccaaggatcatt

SEQ ID NO: 1441822 - DNA, 25 bp, Homo sapien
ttgccgtgtggtttttgtatggtat

SEQ ID NO: 1441823 - DNA, 25 bp, Homo sapien
cccttgtgtctcctggaagagctgc

SEQ ID NO: 1441824 - DNA, 25 bp, Homo sapien
tgccgtgtggtttttgtatggtatg

SEQ ID NO: 1441825 - DNA, 25 bp, Homo sapien
cgtgtggtttttgtatggtatggtt

SEQ ID NO: 1441826 - DNA, 25 bp, Homo sapien
taagtgatttccataaaatgtagtt

SEQ ID NO: 1441827 - DNA, 25 bp, Homo sapien
tatattgaagttttaagtgatttcc

SEQ ID NO: 1441828 - DNA, 25 bp, Homo sapien
ttccataaaatgtagttatagccat

SEQ ID NO: 1441829 - DNA, 25 bp, Homo sapien
tttaagtgatttccataaaatgtag

SEQ ID NO: 1441830 - DNA, 25 bp, Homo sapien
tagcacacagtgttggataatctgg

SEQ ID NO: 1441831 - DNA, 25 bp, Homo sapien
tcaataaggcaaagcgtagagcagc

SEQ ID NO: 1441832 - DNA, 25 bp, Homo sapien
caccagtgagattgttacttgtacg

SEQ ID NO: 1441833 - DNA, 25 bp, Homo sapien
gagcagctgccgttgaacaagacaa

SEQ ID NO: 1441834 - DNA, 25 bp, Homo sapien
gggaacgctgtttatgttttgatca

SEQ ID NO: 1441835 - DNA, 25 bp, Homo sapien
gatcaacctttatgtccttccagtt

SEQ ID NO: 1441836 - DNA, 25 bp, Homo sapien
ccaggggaacgctgtttatgttttg

SEQ ID NO: 1441837 - DNA, 25 bp, Homo sapien
agctaccaggggaacgctgtttatg

SEQ ID NO: 1441838 - DNA, 25 bp, Homo sapien
ttcaggaagtgacattccctttctg

SEQ ID NO: 1441839 - DNA, 25 bp, Homo sapien
gttcaggaagtgacattccctttct

SEQ ID NO: 1441840 - DNA, 25 bp, Homo sapien
agttcaggaagtgacattccctttc

SEQ ID NO: 1441841 - DNA, 25 bp, Homo sapien
tcaggaagtgacattccctttctgt

SEQ ID NO: 1441842 - DNA, 25 bp, Homo sapien
tctgacttcttgcaagggagagagg

SEQ ID NO: 1441843 - DNA, 25 bp, Homo sapien
gaggctctgacttcttgcaagggag

SEQ ID NO: 1441844 - DNA, 25 bp, Homo sapien
taagcatgtgaaattgatgatggtg

SEQ ID NO: 1441845 - DNA, 25 bp, Homo sapien
tctctgtaacgggatccctgatgga

SEQ ID NO: 1441846 - DNA, 25 bp, Homo sapien
catccctgacagtaggaagattatt

SEQ ID NO: 1441847 - DNA, 25 bp, Homo sapien
cacatccctgacagtaggaagatta

SEQ ID NO: 1441848 - DNA, 25 bp, Homo sapien
acatccctgacagtaggaagattat

SEQ ID NO: 1441849 - DNA, 25 bp, Homo sapien
tccctgacagtaggaagattatttt

SEQ ID NO: 1441850 - DNA, 25 bp, Homo sapien
aaaccaaactcttgatgcaagggat

SEQ ID NO: 1441851 - DNA, 25 bp, Homo sapien
gatgcaagggatccgttttttcttc

SEQ ID NO: 1441852 - DNA, 25 bp, Homo sapien
ctcttgatgcaagggatccgttttt

SEQ ID NO: 1441853 - DNA, 25 bp, Homo sapien
caaactcttgatgcaagggatccgt

SEQ ID NO: 1441854 - DNA, 25 bp, Homo sapien
ctatcagccaacaggacagacacag

SEQ ID NO: 1441855 - DNA, 25 bp, Homo sapien
acaggacagacacagtatgaacgtc

SEQ ID NO: 1441856 - DNA, 25 bp, Homo sapien
ggacagacacagtatgaacgtccat

SEQ ID NO: 1441857 - DNA, 25 bp, Homo sapien
tatcagccaacaggacagacacagt

SEQ ID NO: 1441858 - DNA, 25 bp, Homo sapien
tgatatccatccccttctaatgatt

SEQ ID NO: 1441859 - DNA, 25 bp, Homo sapien
gatatccatccccttctaatgattt

SEQ ID NO: 1441860 - DNA, 25 bp, Homo sapien
ttgtccaacactcctgatatccatc

SEQ ID NO: 1441861 - DNA, 25 bp, Homo sapien
cttgtccaacactcctgatatccat

SEQ ID NO: 1441862 - DNA, 25 bp, Homo sapien
cactgctgtaactttcttctgcggg

SEQ ID NO: 1441863 - DNA, 25 bp, Homo sapien
catgaaatggttgcatgctgccaac

SEQ ID NO: 1441864 - DNA, 25 bp, Homo sapien
gctggagttatcaccttgtgtggga

SEQ ID NO: 1441865 - DNA, 25 bp, Homo sapien
ttcccaagagataaagcgtcctcgc

SEQ ID NO: 1441866 - DNA, 25 bp, Homo sapien
ctttgatccatcctgtctgagtgca

SEQ ID NO: 1441867 - DNA, 25 bp, Homo sapien
tgttgaactgtccttgttggtgagg

SEQ ID NO: 1441868 - DNA, 25 bp, Homo sapien
tgtctggcgcatctctcgttgttga

SEQ ID NO: 1441869 - DNA, 25 bp, Homo sapien
ggtgaggattttttagcatgcaaag

SEQ ID NO: 1441870 - DNA, 25 bp, Homo sapien
ggatgcagacctgctccaaatcatc

SEQ ID NO: 1441871 - DNA, 25 bp, Homo sapien
caggatgcagacctgctccaaatca

SEQ ID NO: 1441872 - DNA, 25 bp, Homo sapien
aggatgcagacctgctccaaatcat

SEQ ID NO: 1441873 - DNA, 25 bp, Homo sapien
ctggaaagaatgatccaaaggcttg

SEQ ID NO: 1441874 - DNA, 25 bp, Homo sapien
gaaagaatgatccaaaggcttggac

SEQ ID NO: 1441875 - DNA, 25 bp, Homo sapien
gaatgatccaaaggcttggacccac

SEQ ID NO: 1441876 - DNA, 25 bp, Homo sapien
aagaatgatccaaaggcttggaccc

SEQ ID NO: 1441877 - DNA, 25 bp, Homo sapien
ctgttatttccaattcatcctccat

SEQ ID NO: 1441878 - DNA, 25 bp, Homo sapien
cttcatctgttatttccaattcatc

SEQ ID NO: 1441879 - DNA, 25 bp, Homo sapien
tcatctgttatttccaattcatcct

SEQ ID NO: 1441880 - DNA, 25 bp, Homo sapien
atctgttatttccaattcatcctcc

SEQ ID NO: 1441881 - DNA, 25 bp, Homo sapien
taacaatggcagtttgaccacagtc

SEQ ID NO: 1441882 - DNA, 25 bp, Homo sapien
gcctactacatgtgaggaccaagtc

SEQ ID NO: 1441883 - DNA, 25 bp, Homo sapien
tgatggctcaacagggaattagtcc

SEQ ID NO: 1441884 - DNA, 25 bp, Homo sapien
tgcaattaaccggagtaaccactag

SEQ ID NO: 1441885 - DNA, 25 bp, Homo sapien
tgtgagctgtcattagccaggttca

SEQ ID NO: 1441886 - DNA, 25 bp, Homo sapien
gcaagtgcacaaccagacctagtgt

SEQ ID NO: 1441887 - DNA, 25 bp, Homo sapien
caccttgaggaacagtcaaagctcc

SEQ ID NO: 1441888 - DNA, 25 bp, Homo sapien
gaaattgctgttcaagttccggtag

SEQ ID NO: 1441889 - DNA, 25 bp, Homo sapien
taattttccacaacagaagttgtcc

SEQ ID NO: 1441890 - DNA, 25 bp, Homo sapien
tttctctgagagcaccacacaagta

SEQ ID NO: 1441891 - DNA, 25 bp, Homo sapien
tcataataatactgtcagcgttcag

SEQ ID NO: 1441892 - DNA, 25 bp, Homo sapien
gagcataactggtctttcatagagg

SEQ ID NO: 1441893 - DNA, 25 bp, Homo sapien
caatggcctgccaaatgtcattttg

SEQ ID NO: 1441894 - DNA, 25 bp, Homo sapien
ccattggatgccatctatttagtcc

SEQ ID NO: 1441895 - DNA, 25 bp, Homo sapien
tctatgactttaggagctgtcctgg

SEQ ID NO: 1441896 - DNA, 25 bp, Homo sapien
ttgaaaacatgaggacagtttatcc

SEQ ID NO: 1441897 - DNA, 25 bp, Homo sapien
gacattctgggcttctaggcaggaa

SEQ ID NO: 1441898 - DNA, 25 bp, Homo sapien
tgctccccacaggataagctgacat

SEQ ID NO: 1441899 - DNA, 25 bp, Homo sapien
caatacatctggcaatgggtagtac

SEQ ID NO: 1441900 - DNA, 25 bp, Homo sapien
cctgaagggtttatgctgtccactc

SEQ ID NO: 1441901 - DNA, 25 bp, Homo sapien
gctgtacaagccgaatgaccctgaa

SEQ ID NO: 1441902 - DNA, 25 bp, Homo sapien
cactgagcacgtttggagaattggc

SEQ ID NO: 1441903 - DNA, 25 bp, Homo sapien
tgtaaatgcgtctcctcacaacact

SEQ ID NO: 1441904 - DNA, 25 bp, Homo sapien
aacgccgtcagtggaatgtaaatgc

SEQ ID NO: 1441905 - DNA, 25 bp, Homo sapien
cagtttcaattatcaaaagatccat

SEQ ID NO: 1441906 - DNA, 25 bp, Homo sapien
catcatcagttcatgtgtcccagca

SEQ ID NO: 1441907 - DNA, 25 bp, Homo sapien
gcagtttcaattatcaaaagatcca

SEQ ID NO: 1441908 - DNA, 25 bp, Homo sapien
tgaagacaggtcgtatcactggatc

SEQ ID NO: 1441909 - DNA, 25 bp, Homo sapien
gacaggtcgtatcactggatccttt

SEQ ID NO: 1441910 - DNA, 25 bp, Homo sapien
tcactggatcctttgcagacattcc

SEQ ID NO: 1441911 - DNA, 25 bp, Homo sapien
gggagacttgaagacaggtcgtatc

SEQ ID NO: 1441912 - DNA, 25 bp, Homo sapien
gataatggacctcaacaaggctcac

SEQ ID NO: 1441913 - DNA, 25 bp, Homo sapien
catttatgttgtaggactcaggcag

SEQ ID NO: 1441914 - DNA, 25 bp, Homo sapien
taccaagacgagcaaaaagctcagg

SEQ ID NO: 1441915 - DNA, 25 bp, Homo sapien
gatgatttatactgtagcctcaagg

SEQ ID NO: 1441916 - DNA, 25 bp, Homo sapien
cattttgatttaggtggtgcagaac

SEQ ID NO: 1441917 - DNA, 25 bp, Homo sapien
tgtcaatctaatctaaggtacagga

SEQ ID NO: 1441918 - DNA, 25 bp, Homo sapien
tcaaagattcatcacaaaggatact

SEQ ID NO: 1441919 - DNA, 25 bp, Homo sapien
tctgcatgttgcatccagagctaca

SEQ ID NO: 1441920 - DNA, 25 bp, Homo sapien
tatacccctgaaataccacggatgc

SEQ ID NO: 1441921 - DNA, 25 bp, Homo sapien
tgacttgctcaaaaccactctgcct

SEQ ID NO: 1441922 - DNA, 25 bp, Homo sapien
taaagactatgtaccaaggccaaaa

SEQ ID NO: 1441923 - DNA, 25 bp, Homo sapien
gaatctcagctaataacttccaggc

SEQ ID NO: 1441924 - DNA, 25 bp, Homo sapien
tacagtccatacttataagggaaac

SEQ ID NO: 1441925 - DNA, 25 bp, Homo sapien
tatgaaggaatatttgccaagcaga

SEQ ID NO: 1441926 - DNA, 25 bp, Homo sapien
gcagattaacaaccagagtaacctt

SEQ ID NO: 1441927 - DNA, 25 bp, Homo sapien
ggcaaaatttgacaagaaccttgag

SEQ ID NO: 1441928 - DNA, 25 bp, Homo sapien
gaggagcatgctacaatttatctga

SEQ ID NO: 1441929 - DNA, 25 bp, Homo sapien
gccaggttatcaaggtccctgtcag

SEQ ID NO: 1441930 - DNA, 25 bp, Homo sapien
tacgtacccttgatatgacctgatg

SEQ ID NO: 1441931 - DNA, 25 bp, Homo sapien
tagagtgacaaacgctacctcagcc

SEQ ID NO: 1441932 - DNA, 25 bp, Homo sapien
gatcagttcatgctcaaccagatta

SEQ ID NO: 1441933 - DNA, 25 bp, Homo sapien
caaacactgggaaatctcatggtca

SEQ ID NO: 1441934 - DNA, 25 bp, Homo sapien
gtggacccctaaatagcaaaggcat

SEQ ID NO: 1441935 - DNA, 25 bp, Homo sapien
aaaaggcattattgctctgcagaac

SEQ ID NO: 1441936 - DNA, 25 bp, Homo sapien
gtttattatacagattgcattgaat

SEQ ID NO: 1441937 - DNA, 25 bp, Homo sapien
ctccatagaagcttggatgcaagat

SEQ ID NO: 1441938 - DNA, 25 bp, Homo sapien
ttgcattgaatctcaaaatgtctcc

SEQ ID NO: 1441939 - DNA, 25 bp, Homo sapien
caaaatgtctccatagaagcttgga

SEQ ID NO: 1441940 - DNA, 25 bp, Homo sapien
gaacaaaagtcgatgaatgccgccc

SEQ ID NO: 1441941 - DNA, 25 bp, Homo sapien
caagaccgggtataagcagatcatc

SEQ ID NO: 1441942 - DNA, 25 bp, Homo sapien
agtagggtcactcacattgtcagca

SEQ ID NO: 1441943 - DNA, 25 bp, Homo sapien
tgtcaaaccactagaggaaacccgc

SEQ ID NO: 1441944 - DNA, 25 bp, Homo sapien
ttcacctgagtaaggagtcttcact

SEQ ID NO: 1441945 - DNA, 25 bp, Homo sapien
tcctagtaagtccatttcacctgag

SEQ ID NO: 1441946 - DNA, 25 bp, Homo sapien
tcttgtttcaacagagtcatcactc

SEQ ID NO: 1441947 - DNA, 25 bp, Homo sapien
gctgtgtgtgctcaatgtatcaaga

SEQ ID NO: 1441948 - DNA, 25 bp, Homo sapien
catcttcatcatcatatagagcacc

SEQ ID NO: 1441949 - DNA, 25 bp, Homo sapien
ttcatcatcatatagagcaccatca

SEQ ID NO: 1441950 - DNA, 25 bp, Homo sapien
tcaaggctcttaagaggccttttta

SEQ ID NO: 1441951 - DNA, 25 bp, Homo sapien
catcatatagagcaccatcaaggct

SEQ ID NO: 1441952 - DNA, 25 bp, Homo sapien
catttaaatttcgagtctgggtgct

SEQ ID NO: 1441953 - DNA, 25 bp, Homo sapien
tatgggtgcttatggctgcaaacca

SEQ ID NO: 1441954 - DNA, 25 bp, Homo sapien
ggagacttcaaccatgacaccagag

SEQ ID NO: 1441955 - DNA, 25 bp, Homo sapien
tcttataacccctactcggaatgtg

SEQ ID NO: 1441956 - DNA, 25 bp, Homo sapien
gcctatcgcttgaagttttacaata

SEQ ID NO: 1441957 - DNA, 25 bp, Homo sapien
ctatcgcttgaagttttacaatatt

SEQ ID NO: 1441958 - DNA, 25 bp, Homo sapien
ggcctatcgcttgaagttttacaat

SEQ ID NO: 1441959 - DNA, 25 bp, Homo sapien
tggcctatcgcttgaagttttacaa

SEQ ID NO: 1441960 - DNA, 25 bp, Homo sapien
acaggtcccataatcttcttcattt

SEQ ID NO: 1441961 - DNA, 25 bp, Homo sapien
taaactggtgtatattgtacagaac

SEQ ID NO: 1441962 - DNA, 25 bp, Homo sapien
caagcttacgcttttctgagtttcc

SEQ ID NO: 1441963 - DNA, 25 bp, Homo sapien
tgtacagaactagaacaggtcccat

SEQ ID NO: 1441964 - DNA, 25 bp, Homo sapien
agtaactactattggaatgagacta

SEQ ID NO: 1441965 - DNA, 25 bp, Homo sapien
aaagtaactactattggaatgagac

SEQ ID NO: 1441966 - DNA, 25 bp, Homo sapien
ctactattggaatgagactatcaaa

SEQ ID NO: 1441967 - DNA, 25 bp, Homo sapien
taactactattggaatgagactatc

SEQ ID NO: 1441968 - DNA, 25 bp, Homo sapien
tagtcccagctttgcatgatttttt

SEQ ID NO: 1441969 - DNA, 25 bp, Homo sapien
gtcccagctttgcatgattttttgc

SEQ ID NO: 1441970 - DNA, 25 bp, Homo sapien
ttcacttcctttagtcccagctttg

SEQ ID NO: 1441971 - DNA, 25 bp, Homo sapien
tcttcacttcctttagtcccagctt

SEQ ID NO: 1441972 - DNA, 25 bp, Homo sapien
ggtaccccatcaataactgtttcaa

SEQ ID NO: 1441973 - DNA, 25 bp, Homo sapien
agaaactaccctctgcatgcaatgt

SEQ ID NO: 1441974 - DNA, 25 bp, Homo sapien
tacaaaatggtaccccatcaataac

SEQ ID NO: 1441975 - DNA, 25 bp, Homo sapien
cacaactttgccgatagctttggaa

SEQ ID NO: 1441976 - DNA, 25 bp, Homo sapien
gctgtccgtacagcaggggttgctt

SEQ ID NO: 1441977 - DNA, 25 bp, Homo sapien
ctgtccgtacagcaggggttgcttt

SEQ ID NO: 1441978 - DNA, 25 bp, Homo sapien
tgctgtgttgaacagtgcacctcct

SEQ ID NO: 1441979 - DNA, 25 bp, Homo sapien
gctgtgttgaacagtgcacctcctt

SEQ ID NO: 1441980 - DNA, 25 bp, Homo sapien
ctgtgttgaacagtgcacctccttt

SEQ ID NO: 1441981 - DNA, 25 bp, Homo sapien
ctgcaaaagaaaaacagaaacatat

SEQ ID NO: 1441982 - DNA, 25 bp, Homo sapien
tgcaaaagaaaaacagaaacatatt

SEQ ID NO: 1441983 - DNA, 25 bp, Homo sapien
cacccattgttgatatgacctcggg

SEQ ID NO: 1441984 - DNA, 25 bp, Homo sapien
cattgttgatatgacctcgggttcc

SEQ ID NO: 1441985 - DNA, 25 bp, Homo sapien
cttgactgtatgcacccattgttga

SEQ ID NO: 1441986 - DNA, 25 bp, Homo sapien
gtatgcacccattgttgatatgacc

SEQ ID NO: 1441987 - DNA, 25 bp, Homo sapien
gtattattcagccatgttctcaagg

SEQ ID NO: 1441988 - DNA, 25 bp, Homo sapien
gaaaaactccctctaagactgctaa

SEQ ID NO: 1441989 - DNA, 25 bp, Homo sapien
ggctgctcaaggctaataccctgaa

SEQ ID NO: 1441990 - DNA, 25 bp, Homo sapien
ggtccttaacttggctgagcatcag

SEQ ID NO: 1441991 - DNA, 25 bp, Homo sapien
caaattcctttgataccttagtcag

SEQ ID NO: 1441992 - DNA, 25 bp, Homo sapien
aattcctttgataccttagtcagta

SEQ ID NO: 1441993 - DNA, 25 bp, Homo sapien
tcaaattcctttgataccttagtca

SEQ ID NO: 1441994 - DNA, 25 bp, Homo sapien
tcctttgataccttagtcagtaaaa

SEQ ID NO: 1441995 - DNA, 25 bp, Homo sapien
taagagattatcgaggccaacagct

SEQ ID NO: 1441996 - DNA, 25 bp, Homo sapien
taggttttatcagacacaagtgcaa

SEQ ID NO: 1441997 - DNA, 25 bp, Homo sapien
tttcaaggactcaagcaaaatgctc

SEQ ID NO: 1441998 - DNA, 25 bp, Homo sapien
gctgccaattcaggaggccaactta

SEQ ID NO: 1441999 - DNA, 25 bp, Homo sapien
gagaaaatggataatcatattgtaa

SEQ ID NO: 1442000 - DNA, 25 bp, Homo sapien
tggataatcatattgtaacttgtct

SEQ ID NO: 1442001 - DNA, 25 bp, Homo sapien
aaatggataatcatattgtaacttg

SEQ ID NO: 1442002 - DNA, 25 bp, Homo sapien
tattgagaaaatggataatcatatt

SEQ ID NO: 1442003 - DNA, 25 bp, Homo sapien
agagaaaccccttcctgcatttagt

SEQ ID NO: 1442004 - DNA, 25 bp, Homo sapien
tagttttgccagtcgaccatcgata

SEQ ID NO: 1442005 - DNA, 25 bp, Homo sapien
tgcatttagttttgccagtcgacca

SEQ ID NO: 1442006 - DNA, 25 bp, Homo sapien
aatacatcagagaaaccccttcctg

SEQ ID NO: 1442007 - DNA, 25 bp, Homo sapien
tgagtttccttacagatccccagga

SEQ ID NO: 1442008 - DNA, 25 bp, Homo sapien
catatcaagttctagaagacagcca

SEQ ID NO: 1442009 - DNA, 25 bp, Homo sapien
tttcagggctatcttcacgtatcac

SEQ ID NO: 1442010 - DNA, 25 bp, Homo sapien
tcatcttgtaaagtgagcactaggc

SEQ ID NO: 1442011 - DNA, 25 bp, Homo sapien
ctgcttaaaaagctggaggttaatg

SEQ ID NO: 1442012 - DNA, 25 bp, Homo sapien
tggaggttaatggcagtttccagga

SEQ ID NO: 1442013 - DNA, 25 bp, Homo sapien
tgcttaaaaagctggaggttaatgg

SEQ ID NO: 1442014 - DNA, 25 bp, Homo sapien
acgcttgagcggtgctttacaaaac

SEQ ID NO: 1442015 - DNA, 25 bp, Homo sapien
tgctttacaaaactctcctcacaga

SEQ ID NO: 1442016 - DNA, 25 bp, Homo sapien
cacgcttgagcggtgctttacaaaa

SEQ ID NO: 1442017 - DNA, 25 bp, Homo sapien
ctttacaaaactctcctcacagaaa

SEQ ID NO: 1442018 - DNA, 25 bp, Homo sapien
gcgtaaggtgcagaagcaacagacc

SEQ ID NO: 1442019 - DNA, 25 bp, Homo sapien
tgattgcaaaacaattcaggctgga

SEQ ID NO: 1442020 - DNA, 25 bp, Homo sapien
ggataagtcctacttgggatctgct

SEQ ID NO: 1442021 - DNA, 25 bp, Homo sapien
ttgcatcctgattggaaaacactgt

SEQ ID NO: 1442022 - DNA, 25 bp, Homo sapien
tagccacatttgaaccgctcaatgg

SEQ ID NO: 1442023 - DNA, 25 bp, Homo sapien
catgcaggtaggattatagtggttc

SEQ ID NO: 1442024 - DNA, 25 bp, Homo sapien
gacaattcgataaactcttaagtgg

SEQ ID NO: 1442025 - DNA, 25 bp, Homo sapien
taagtggtgtcacctaccatcagct

SEQ ID NO: 1442026 - DNA, 25 bp, Homo sapien
gctagagaagaaatgactatatcac

SEQ ID NO: 1442027 - DNA, 25 bp, Homo sapien
gactatatcaccctttatcactata

SEQ ID NO: 1442028 - DNA, 25 bp, Homo sapien
tttgtttattactgctagagaagaa

SEQ ID NO: 1442029 - DNA, 25 bp, Homo sapien
tatcaccctttatcactataagctc

SEQ ID NO: 1442030 - DNA, 25 bp, Homo sapien
tatctcagtgcatctctgtaggatc

SEQ ID NO: 1442031 - DNA, 25 bp, Homo sapien
aagaaaggccctagctactccatca

SEQ ID NO: 1442032 - DNA, 25 bp, Homo sapien
tcacccgtagctgtagactgcttct

SEQ ID NO: 1442033 - DNA, 25 bp, Homo sapien
tgtgctctaagaaaggccctagcta

SEQ ID NO: 1442034 - DNA, 25 bp, Homo sapien
cagcatcaggttcctgccacgtcat

SEQ ID NO: 1442035 - DNA, 25 bp, Homo sapien
gtgcaactggcacagcatcaggttc

SEQ ID NO: 1442036 - DNA, 25 bp, Homo sapien
ttctcatactggtgcacctgaaatc

SEQ ID NO: 1442037 - DNA, 25 bp, Homo sapien
tgaaatcccatcctcagtgcaactg

SEQ ID NO: 1442038 - DNA, 25 bp, Homo sapien
ttttgcaagacatgccactaggcag

SEQ ID NO: 1442039 - DNA, 25 bp, Homo sapien
gaagcaaaagccgataattggcccc

SEQ ID NO: 1442040 - DNA, 25 bp, Homo sapien
ggttttcattcttgcagccctcagc

SEQ ID NO: 1442041 - DNA, 25 bp, Homo sapien
taattaaaaggaaaagcgctggcag

SEQ ID NO: 1442042 - DNA, 25 bp, Homo sapien
tcttccaatgatttgtttttcactc

SEQ ID NO: 1442043 - DNA, 25 bp, Homo sapien
cacatcacttggtaggttgttcaag

SEQ ID NO: 1442044 - DNA, 25 bp, Homo sapien
ggttgttcaagtcactaaatggtga

SEQ ID NO: 1442045 - DNA, 25 bp, Homo sapien
tcaagtcactaaatggtgattctaa

SEQ ID NO: 1442046 - DNA, 25 bp, Homo sapien
tcagtcccatgaaacaagaattcat

SEQ ID NO: 1442047 - DNA, 25 bp, Homo sapien
ccagctctatacctatgtttagcat

SEQ ID NO: 1442048 - DNA, 25 bp, Homo sapien
tatacctatgtttagcataaagcat

SEQ ID NO: 1442049 - DNA, 25 bp, Homo sapien
cagtcccatgaaacaagaattcatg

SEQ ID NO: 1442050 - DNA, 25 bp, Homo sapien
gctggagtgtattccaatcaggtat

SEQ ID NO: 1442051 - DNA, 25 bp, Homo sapien
gagtgtattccaatcaggtatggca

SEQ ID NO: 1442052 - DNA, 25 bp, Homo sapien
tggagtgtattccaatcaggtatgg

SEQ ID NO: 1442053 - DNA, 25 bp, Homo sapien
ggctggagtgtattccaatcaggta

SEQ ID NO: 1442054 - DNA, 25 bp, Homo sapien
taaaatgggatcacttgttatctcc

SEQ ID NO: 1442055 - DNA, 25 bp, Homo sapien
taaatttcctaattagataagggca

SEQ ID NO: 1442056 - DNA, 25 bp, Homo sapien
gataagggcattaacaagccaagaa

SEQ ID NO: 1442057 - DNA, 25 bp, Homo sapien
cacccaaatctcatgaaaagtaact

SEQ ID NO: 1442058 - DNA, 25 bp, Homo sapien
ccagggactgtaggccacttcttct

SEQ ID NO: 1442059 - DNA, 25 bp, Homo sapien
taagactgtcttgcaacatcataga

SEQ ID NO: 1442060 - DNA, 25 bp, Homo sapien
gtactcttacattggctgattaggg

SEQ ID NO: 1442061 - DNA, 25 bp, Homo sapien
gagaccactcatgacacagactata

SEQ ID NO: 1442062 - DNA, 25 bp, Homo sapien
gcactgggatgtatatgtgttgcca

SEQ ID NO: 1442063 - DNA, 25 bp, Homo sapien
aggaagcactgggatgtatatgtgt

SEQ ID NO: 1442064 - DNA, 25 bp, Homo sapien
gtatagaagagcagctgatccatgg

SEQ ID NO: 1442065 - DNA, 25 bp, Homo sapien
tgtgttgccaatacattgggtatag

SEQ ID NO: 1442066 - DNA, 25 bp, Homo sapien
tagttttcctgtaacagaagtctcc

SEQ ID NO: 1442067 - DNA, 25 bp, Homo sapien
aaacagagccattatcactacagga

SEQ ID NO: 1442068 - DNA, 25 bp, Homo sapien
gagttggaagataaaaacacctcta

SEQ ID NO: 1442069 - DNA, 25 bp, Homo sapien
taaatcataaggcagaaatacgtgt

SEQ ID NO: 1442070 - DNA, 25 bp, Homo sapien
taagttattatcagcccaaagagct

SEQ ID NO: 1442071 - DNA, 25 bp, Homo sapien
tcaagtggctccaatggaaaaagcc

SEQ ID NO: 1442072 - DNA, 25 bp, Homo sapien
ggatagcagctattatcatggcccc

SEQ ID NO: 1442073 - DNA, 25 bp, Homo sapien
gaaggcactaaaatgaactctggag

SEQ ID NO: 1442074 - DNA, 25 bp, Homo sapien
atcacgatgcgcctttcatgcagca

SEQ ID NO: 1442075 - DNA, 25 bp, Homo sapien
tttgctcgagataatcacgatgcgc

SEQ ID NO: 1442076 - DNA, 25 bp, Homo sapien
tgcagcatgttgttcacatccacgg

SEQ ID NO: 1442077 - DNA, 25 bp, Homo sapien
tcatgcagcatactggcatacagct

SEQ ID NO: 1442078 - DNA, 25 bp, Homo sapien
aaaagataattgtgtaagttacagc

SEQ ID NO: 1442079 - DNA, 25 bp, Homo sapien
gtaaaagataattgtgtaagttaca

SEQ ID NO: 1442080 - DNA, 25 bp, Homo sapien
agataattgtgtaagttacagctca

SEQ ID NO: 1442081 - DNA, 25 bp, Homo sapien
aagataattgtgtaagttacagctc

SEQ ID NO: 1442082 - DNA, 25 bp, Homo sapien
ctcgggtattgttgggagtccagtt

SEQ ID NO: 1442083 - DNA, 25 bp, Homo sapien
catcaggggcaatgaagtaggaatg

SEQ ID NO: 1442084 - DNA, 25 bp, Homo sapien
actctcgggtattgttgggagtcca

SEQ ID NO: 1442085 - DNA, 25 bp, Homo sapien
gggagtccagttacatcaggggcaa

SEQ ID NO: 1442086 - DNA, 25 bp, Homo sapien
cggtactagagcaggctgatctttc

SEQ ID NO: 1442087 - DNA, 25 bp, Homo sapien
tactagagcaggctgatctttcaga

SEQ ID NO: 1442088 - DNA, 25 bp, Homo sapien
ctagagcaggctgatctttcagaac

SEQ ID NO: 1442089 - DNA, 25 bp, Homo sapien
ggtactagagcaggctgatctttca

SEQ ID NO: 1442090 - DNA, 25 bp, Homo sapien
gatgacttggtaaagaattgcctga

SEQ ID NO: 1442091 - DNA, 25 bp, Homo sapien
gacatagctatgactcccaaaaaca

SEQ ID NO: 1442092 - DNA, 25 bp, Homo sapien
tcaccttgttatgttagtactagca

SEQ ID NO: 1442093 - DNA, 25 bp, Homo sapien
tgcctgaaggtacacgtgctcttaa

SEQ ID NO: 1442094 - DNA, 25 bp, Homo sapien
ctcaaatttacaggagtatttgcct

SEQ ID NO: 1442095 - DNA, 25 bp, Homo sapien
acactcaaatttacaggagtatttg

SEQ ID NO: 1442096 - DNA, 25 bp, Homo sapien
ggtactgggtggttatacagtgatc

SEQ ID NO: 1442097 - DNA, 25 bp, Homo sapien
tactgggtggttatacagtgatctg

SEQ ID NO: 1442098 - DNA, 25 bp, Homo sapien
taaaacatataccaagcaactgcaa

SEQ ID NO: 1442099 - DNA, 25 bp, Homo sapien
aatcattaaatccaataagaactgg

SEQ ID NO: 1442100 - DNA, 25 bp, Homo sapien
tacaactttttatcagatcacagag

SEQ ID NO: 1442101 - DNA, 25 bp, Homo sapien
tcactgaagtgcaatgtagaggtta

SEQ ID NO: 1442102 - DNA, 25 bp, Homo sapien
tttagaagcttgtaatacacttcaa

SEQ ID NO: 1442103 - DNA, 25 bp, Homo sapien
agtaatctgcaagagtatttagaag

SEQ ID NO: 1442104 - DNA, 25 bp, Homo sapien
taatctgcaagagtatttagaagct

SEQ ID NO: 1442105 - DNA, 25 bp, Homo sapien
tctgcaagagtatttagaagcttgt

SEQ ID NO: 1442106 - DNA, 25 bp, Homo sapien
cttattgcgtatactttcttttcaa

SEQ ID NO: 1442107 - DNA, 25 bp, Homo sapien
aaattctacgtacttattgcgtata

SEQ ID NO: 1442108 - DNA, 25 bp, Homo sapien
aaaattctacgtacttattgcgtat

SEQ ID NO: 1442109 - DNA, 25 bp, Homo sapien
aattctacgtacttattgcgtatac

SEQ ID NO: 1442110 - DNA, 25 bp, Homo sapien
tccatctcgggcacagtgcataaag

SEQ ID NO: 1442111 - DNA, 25 bp, Homo sapien
taaaaggaactctccccaccattgc

SEQ ID NO: 1442112 - DNA, 25 bp, Homo sapien
agctttggtctttccattagggcaa

SEQ ID NO: 1442113 - DNA, 25 bp, Homo sapien
cagtgcataaagatatactcccctt

SEQ ID NO: 1442114 - DNA, 25 bp, Homo sapien
caatgtctgtcagtacaaaggtaaa

SEQ ID NO: 1442115 - DNA, 25 bp, Homo sapien
taaacaaattgtgcctcctgacgtc

SEQ ID NO: 1442116 - DNA, 25 bp, Homo sapien
tccaaatctctgtttactttcaatg

SEQ ID NO: 1442117 - DNA, 25 bp, Homo sapien
caaaggtaaagtgctgtccaacttg

SEQ ID NO: 1442118 - DNA, 25 bp, Homo sapien
aaacattgtgccttgtttgacaatt

SEQ ID NO: 1442119 - DNA, 25 bp, Homo sapien
attaggaaacattgtgccttgtttg

SEQ ID NO: 1442120 - DNA, 25 bp, Homo sapien
taggaaacattgtgccttgtttgac

SEQ ID NO: 1442121 - DNA, 25 bp, Homo sapien
taaaatatagtaacattaggaaaca

SEQ ID NO: 1442122 - DNA, 25 bp, Homo sapien
acagaactttggcacactctgtagt

SEQ ID NO: 1442123 - DNA, 25 bp, Homo sapien
aacagaactttggcacactctgtag

SEQ ID NO: 1442124 - DNA, 25 bp, Homo sapien
cagaactttggcacactctgtagta

SEQ ID NO: 1442125 - DNA, 25 bp, Homo sapien
tagtcaaacgaagtagtggaagtag

SEQ ID NO: 1442126 - DNA, 25 bp, Homo sapien
agtcaaacgaagtagtggaagtaga

SEQ ID NO: 1442127 - DNA, 25 bp, Homo sapien
ctagtcaaacgaagtagtggaagta

SEQ ID NO: 1442128 - DNA, 25 bp, Homo sapien
cctcttgctgagtttataagtgaag

SEQ ID NO: 1442129 - DNA, 25 bp, Homo sapien
cattatagaagaccaacctcttgga

SEQ ID NO: 1442130 - DNA, 25 bp, Homo sapien
tacataacagaaagccatcaaagag

SEQ ID NO: 1442131 - DNA, 25 bp, Homo sapien
taaaaatttagttcacacttcctgc

SEQ ID NO: 1442132 - DNA, 25 bp, Homo sapien
tatcatgccttctacttattcttac

SEQ ID NO: 1442133 - DNA, 25 bp, Homo sapien
gacttaaccttagatcagctaaaaa

SEQ ID NO: 1442134 - DNA, 25 bp, Homo sapien
tctaccacattttgctactgagttt

SEQ ID NO: 1442135 - DNA, 25 bp, Homo sapien
tgtccttgaaagcataatacattca

SEQ ID NO: 1442136 - DNA, 25 bp, Homo sapien
tcttcatattggtgttccctctgga

SEQ ID NO: 1442137 - DNA, 25 bp, Homo sapien
tggtgttccctctggactctgtatt

SEQ ID NO: 1442138 - DNA, 25 bp, Homo sapien
catttcttttcaggccgcttcacaa

SEQ ID NO: 1442139 - DNA, 25 bp, Homo sapien
tcacaactccttcttcatattggtg

SEQ ID NO: 1442140 - DNA, 25 bp, Homo sapien
acacaactgataaaagcttgggctc

SEQ ID NO: 1442141 - DNA, 25 bp, Homo sapien
tctccagccagaatgctaggttcag

SEQ ID NO: 1442142 - DNA, 25 bp, Homo sapien
cagttcaacgacctaacagctgtgt

SEQ ID NO: 1442143 - DNA, 25 bp, Homo sapien
cagctgtgtaaaatcgttcatgcaa

SEQ ID NO: 1442144 - DNA, 25 bp, Homo sapien
gggtttgccaccagaatacaggtgt

SEQ ID NO: 1442145 - DNA, 25 bp, Homo sapien
caaagggtttgccaccagaatacag

SEQ ID NO: 1442146 - DNA, 25 bp, Homo sapien
aaaagacctaagcagctttttggca

SEQ ID NO: 1442147 - DNA, 25 bp, Homo sapien
gcagctttttggcaaagggtttgcc

SEQ ID NO: 1442148 - DNA, 25 bp, Homo sapien
tgattgccactctggtaagaagctg

SEQ ID NO: 1442149 - DNA, 25 bp, Homo sapien
catgattatcttgagccaaccaggc

SEQ ID NO: 1442150 - DNA, 25 bp, Homo sapien
cacacagcttatgttgcttgcaagt

SEQ ID NO: 1442151 - DNA, 25 bp, Homo sapien
caggccaaataggttctggttatcc

SEQ ID NO: 1442152 - DNA, 25 bp, Homo sapien
cactcccaggactaaaccacgaaga

SEQ ID NO: 1442153 - DNA, 25 bp, Homo sapien
tacacactcccaggactaaaccacg

SEQ ID NO: 1442154 - DNA, 25 bp, Homo sapien
atacacactcccaggactaaaccac

SEQ ID NO: 1442155 - DNA, 25 bp, Homo sapien
cacactcccaggactaaaccacgaa

SEQ ID NO: 1442156 - DNA, 25 bp, Homo sapien
gcttgtgtatgactgaaagttctca

SEQ ID NO: 1442157 - DNA, 25 bp, Homo sapien
gggcagctctggcagtctgttaaaa

SEQ ID NO: 1442158 - DNA, 25 bp, Homo sapien
aatcatctacccctcaagtgttgtt

SEQ ID NO: 1442159 - DNA, 25 bp, Homo sapien
tcctgtaagacattagttacttaga

SEQ ID NO: 1442160 - DNA, 25 bp, Homo sapien
aactttttggtcagactcatgcctg

SEQ ID NO: 1442161 - DNA, 25 bp, Homo sapien
tgcagacctctgagatgtcttaaag

SEQ ID NO: 1442162 - DNA, 25 bp, Homo sapien
caattttgatgggtttgcttccctg

SEQ ID NO: 1442163 - DNA, 25 bp, Homo sapien
tcttgaacatgagcacacaagggaa

SEQ ID NO: 1442164 - DNA, 25 bp, Homo sapien
cctctgggaatttccacaataccac

SEQ ID NO: 1442165 - DNA, 25 bp, Homo sapien
gaattgaattgaaaacaccttgaca

SEQ ID NO: 1442166 - DNA, 25 bp, Homo sapien
gctgtgggtgatcatggtaatcgaa

SEQ ID NO: 1442167 - DNA, 25 bp, Homo sapien
ggtaatcgaaccatcaacagtgagg

SEQ ID NO: 1442168 - DNA, 25 bp, Homo sapien
caaacttaaccaaacagggctaatg

SEQ ID NO: 1442169 - DNA, 25 bp, Homo sapien
tagtgaactaagtcagacacaaatg

SEQ ID NO: 1442170 - DNA, 25 bp, Homo sapien
caaacctaagcaagatctcaagaca

SEQ ID NO: 1442171 - DNA, 25 bp, Homo sapien
gattgagccataaagaggcaaaata

SEQ ID NO: 1442172 - DNA, 25 bp, Homo sapien
gatcagaccaaagataccagactgt

SEQ ID NO: 1442173 - DNA, 25 bp, Homo sapien
tgaaggacccaatcaaaatgcagaa

SEQ ID NO: 1442174 - DNA, 25 bp, Homo sapien
tgggtccaacatgcctaccattgag

SEQ ID NO: 1442175 - DNA, 25 bp, Homo sapien
aagctacttctcatgggttctcggg

SEQ ID NO: 1442176 - DNA, 25 bp, Homo sapien
aatacatccacccaaatactggagg

SEQ ID NO: 1442177 - DNA, 25 bp, Homo sapien
tcgaaaatacaggttggggccatct

SEQ ID NO: 1442178 - DNA, 25 bp, Homo sapien
atacaggttggggccatcttttctc

SEQ ID NO: 1442179 - DNA, 25 bp, Homo sapien
aatacaggttggggccatcttttct

SEQ ID NO: 1442180 - DNA, 25 bp, Homo sapien
cgaaaatacaggttggggccatctt

SEQ ID NO: 1442181 - DNA, 25 bp, Homo sapien
tgcgaatcggcgtacttttccaggg

SEQ ID NO: 1442182 - DNA, 25 bp, Homo sapien
gaaggtcgagctatgcggtttcagc

SEQ ID NO: 1442183 - DNA, 25 bp, Homo sapien
tcttaatgcaaaatgcgaatcggcg

SEQ ID NO: 1442184 - DNA, 25 bp, Homo sapien
tatgcggtttcagccggtacaaggt

SEQ ID NO: 1442185 - DNA, 25 bp, Homo sapien
ggtttcatttgagaactgttcactg

SEQ ID NO: 1442186 - DNA, 25 bp, Homo sapien
tttcgtctgtcaggaagcggtcacc

SEQ ID NO: 1442187 - DNA, 25 bp, Homo sapien
ttccttttaacatggcgttcaaatc

SEQ ID NO: 1442188 - DNA, 25 bp, Homo sapien
tcagttttgggttcatctatcgaga

SEQ ID NO: 1442189 - DNA, 25 bp, Homo sapien
cctaaagaaatcgttcacttgaatc

SEQ ID NO: 1442190 - DNA, 25 bp, Homo sapien
cagttatatgtatcagcctggtcac

SEQ ID NO: 1442191 - DNA, 25 bp, Homo sapien
ggaatacgagtatatagcctaccaa

SEQ ID NO: 1442192 - DNA, 25 bp, Homo sapien
tactgacagtatttggctaccctaa

SEQ ID NO: 1442193 - DNA, 25 bp, Homo sapien
atttcactttcaacaccaagtcaaa

SEQ ID NO: 1442194 - DNA, 25 bp, Homo sapien
ttcactttcaacaccaagtcaaagg

SEQ ID NO: 1442195 - DNA, 25 bp, Homo sapien
tttcactttcaacaccaagtcaaag

SEQ ID NO: 1442196 - DNA, 25 bp, Homo sapien
cagaggcatgacatttcactttcaa

SEQ ID NO: 1442197 - DNA, 25 bp, Homo sapien
tcggtgtggggctgtccgtccggcc

SEQ ID NO: 1442198 - DNA, 25 bp, Homo sapien
ggttacatgtcggtgtggggctgtc

SEQ ID NO: 1442199 - DNA, 25 bp, Homo sapien
ccggcggccacacagggaaagaggc

SEQ ID NO: 1442200 - DNA, 25 bp, Homo sapien
ccggccgcgcgagggtcgcgccgtc

SEQ ID NO: 1442201 - DNA, 25 bp, Homo sapien
tttctgtgacagcagcggtggcgtg

SEQ ID NO: 1442202 - DNA, 25 bp, Homo sapien
gccggtagccgccaccaaagctgag

SEQ ID NO: 1442203 - DNA, 25 bp, Homo sapien
cgtggcggcgggcccatgtcggctg

SEQ ID NO: 1442204 - DNA, 25 bp, Homo sapien
tgacagcagcggtggcgtggccgcc

SEQ ID NO: 1442205 - DNA, 25 bp, Homo sapien
ggatggcccacgtaccgctttgcca

SEQ ID NO: 1442206 - DNA, 25 bp, Homo sapien
gctttgccacctagccagaaaggca

SEQ ID NO: 1442207 - DNA, 25 bp, Homo sapien
tacctggaaaagtacctcgacctgc

SEQ ID NO: 1442208 - DNA, 25 bp, Homo sapien
ccgtgcggctcgcaagtcggagact

SEQ ID NO: 1442209 - DNA, 25 bp, Homo sapien
tgccaatcaggacagctgggcttgg

SEQ ID NO: 1442210 - DNA, 25 bp, Homo sapien
cattcacggtgcataattccagaag

SEQ ID NO: 1442211 - DNA, 25 bp, Homo sapien
actttcttcattcacggtgcataat

SEQ ID NO: 1442212 - DNA, 25 bp, Homo sapien
ccttcttctcgagactgccaatcag

SEQ ID NO: 1442213 - DNA, 25 bp, Homo sapien
gaatttggacccatgatcctgtcca

SEQ ID NO: 1442214 - DNA, 25 bp, Homo sapien
catttgcctgactgtatgcaagtga

SEQ ID NO: 1442215 - DNA, 25 bp, Homo sapien
catgatcctgtccatttgcctgact

SEQ ID NO: 1442216 - DNA, 25 bp, Homo sapien
aaggaggaatttggacccatgatcc

SEQ ID NO: 1442217 - DNA, 25 bp, Homo sapien
catattggtaacttggatccctcag

SEQ ID NO: 1442218 - DNA, 25 bp, Homo sapien
tattggtaacttggatccctcagtc

SEQ ID NO: 1442219 - DNA, 25 bp, Homo sapien
ttggtaacttggatccctcagtcat

SEQ ID NO: 1442220 - DNA, 25 bp, Homo sapien
attggtaacttggatccctcagtca

SEQ ID NO: 1442221 - DNA, 25 bp, Homo sapien
ctataacttcacttcttttcttcat

SEQ ID NO: 1442222 - DNA, 25 bp, Homo sapien
cctataacttcacttcttttcttca

SEQ ID NO: 1442223 - DNA, 25 bp, Homo sapien
ctttataacctataacttcacttct

SEQ ID NO: 1442224 - DNA, 25 bp, Homo sapien
tggatgatatcatcatgggctctga

SEQ ID NO: 1442225 - DNA, 25 bp, Homo sapien
gagcctatggatgatatcatcatgg

SEQ ID NO: 1442226 - DNA, 25 bp, Homo sapien
ggtgttgggcaaggagtaaacagag

SEQ ID NO: 1442227 - DNA, 25 bp, Homo sapien
ctgggtgttgggcaaggagtaaaca

SEQ ID NO: 1442228 - DNA, 25 bp, Homo sapien
tcccctctttctctatggacttcat

SEQ ID NO: 1442229 - DNA, 25 bp, Homo sapien
ccctctttctctatggacttcattt

SEQ ID NO: 1442230 - DNA, 25 bp, Homo sapien
cccctctttctctatggacttcatt

SEQ ID NO: 1442231 - DNA, 25 bp, Homo sapien
ctcccctctttctctatggacttca

SEQ ID NO: 1442232 - DNA, 25 bp, Homo sapien
tacagcatgctactgctactttcat

SEQ ID NO: 1442233 - DNA, 25 bp, Homo sapien
tgtgaaacgacccaatggaaactgg

SEQ ID NO: 1442234 - DNA, 25 bp, Homo sapien
gtggatcatgatgcacactcctgtc

SEQ ID NO: 1442235 - DNA, 25 bp, Homo sapien
gattgtttcgtatgtgaaacgaccc

SEQ ID NO: 1442236 - DNA, 25 bp, Homo sapien
aatcttgtgagggttgccagggtgg

SEQ ID NO: 1442237 - DNA, 25 bp, Homo sapien
tacatcctttttgcgagtctctgtg

SEQ ID NO: 1442238 - DNA, 25 bp, Homo sapien
aacacgcagctgtctttagccagag

SEQ ID NO: 1442239 - DNA, 25 bp, Homo sapien
tagccagagactgagctatccctgg

SEQ ID NO: 1442240 - DNA, 25 bp, Homo sapien
gagctatccctggaatgtccagcgt

SEQ ID NO: 1442241 - DNA, 25 bp, Homo sapien
tctggatgctctgatgtgtgctggg

SEQ ID NO: 1442242 - DNA, 25 bp, Homo sapien
ctctggatgctctgatgtgtgctgg

SEQ ID NO: 1442243 - DNA, 25 bp, Homo sapien
tgctctgatgtgtgctggggtgccc

SEQ ID NO: 1442244 - DNA, 25 bp, Homo sapien
tctgatgtgtgctggggtgcccagg

SEQ ID NO: 1442245 - DNA, 25 bp, Homo sapien
cagcttcgaggttgggctcatgaca

SEQ ID NO: 1442246 - DNA, 25 bp, Homo sapien
tgggctcatgacacaaaacgcacag

SEQ ID NO: 1442247 - DNA, 25 bp, Homo sapien
ccccacaaacagcttcgaggttggg

SEQ ID NO: 1442248 - DNA, 25 bp, Homo sapien
gacacaaaacgcacagattcacggc

SEQ ID NO: 1442249 - DNA, 25 bp, Homo sapien
tttcgggtgggtatcgccgtccatc

SEQ ID NO: 1442250 - DNA, 25 bp, Homo sapien
tggctgcgaaacctgaccgatatag

SEQ ID NO: 1442251 - DNA, 25 bp, Homo sapien
tcgctgatgagcatagaagatgaac

SEQ ID NO: 1442252 - DNA, 25 bp, Homo sapien
tcgacaggaatgagttgaaagcacc

SEQ ID NO: 1442253 - DNA, 25 bp, Homo sapien
ggaggcggcatccactcccacgtgc

SEQ ID NO: 1442254 - DNA, 25 bp, Homo sapien
aatcccacgcggttttcgcaagcgg

SEQ ID NO: 1442255 - DNA, 25 bp, Homo sapien
cctaaactgtatggcggagcttgtg

SEQ ID NO: 1442256 - DNA, 25 bp, Homo sapien
tgggtcaggcgtggaggcggcatcc

SEQ ID NO: 1442257 - DNA, 25 bp, Homo sapien
cggaggaaggcccggctttgctcca

SEQ ID NO: 1442258 - DNA, 25 bp, Homo sapien
gaaggcccggctttgctccaagccg

SEQ ID NO: 1442259 - DNA, 25 bp, Homo sapien
ggctttgctccaagccgcgtcccta

SEQ ID NO: 1442260 - DNA, 25 bp, Homo sapien
aggaaggcccggctttgctccaagc

SEQ ID NO: 1442261 - DNA, 25 bp, Homo sapien
tacggcgtgatccactccttttcct

SEQ ID NO: 1442262 - DNA, 25 bp, Homo sapien
tctccacgggaggagcggtttggac

SEQ ID NO: 1442263 - DNA, 25 bp, Homo sapien
cagtgcaaccaccattacggcgtga

SEQ ID NO: 1442264 - DNA, 25 bp, Homo sapien
tttggacgcgccccaccggatggga

SEQ ID NO: 1442265 - DNA, 25 bp, Homo sapien
cagcgcagcccgggcatccagggcc

SEQ ID NO: 1442266 - DNA, 25 bp, Homo sapien
ccaggtggcgcggcactgaacgcat

SEQ ID NO: 1442267 - DNA, 25 bp, Homo sapien
ggccaggtggcgcggcactgaacgc

SEQ ID NO: 1442268 - DNA, 25 bp, Homo sapien
agcgcagcccgggcatccagggcca

SEQ ID NO: 1442269 - DNA, 25 bp, Homo sapien
agaagccttgtggatgctgatctga

SEQ ID NO: 1442270 - DNA, 25 bp, Homo sapien
ctgggcagtggtgaatgttcatcta

SEQ ID NO: 1442271 - DNA, 25 bp, Homo sapien
tagttaaataccaattagattgtgg

SEQ ID NO: 1442272 - DNA, 25 bp, Homo sapien
taagctaaaatcttaatggtctggg

SEQ ID NO: 1442273 - DNA, 25 bp, Homo sapien
tcagggtctttagaaaattagcaca

SEQ ID NO: 1442274 - DNA, 25 bp, Homo sapien
tattgtaacttttgctcagggtctt

SEQ ID NO: 1442275 - DNA, 25 bp, Homo sapien
tagattttaaaggtgtccttctggc

SEQ ID NO: 1442276 - DNA, 25 bp, Homo sapien
taaatctcctttggtggtcgaagtg

SEQ ID NO: 1442277 - DNA, 25 bp, Homo sapien
atgtattctcagaattttgaatgtt

SEQ ID NO: 1442278 - DNA, 25 bp, Homo sapien
cagtatcccgaatacctaactatta

SEQ ID NO: 1442279 - DNA, 25 bp, Homo sapien
tcactaataaaagtttccaccatag

SEQ ID NO: 1442280 - DNA, 25 bp, Homo sapien
tatgaagcctttgggatcaacactg

SEQ ID NO: 1442281 - DNA, 25 bp, Homo sapien
ctattaagtgttggattatgaagcc

SEQ ID NO: 1442282 - DNA, 25 bp, Homo sapien
tcccattacactattgaaaccactt

SEQ ID NO: 1442283 - DNA, 25 bp, Homo sapien
tacactattgaaaccacttttctta

SEQ ID NO: 1442284 - DNA, 25 bp, Homo sapien
tattcccattacactattgaaacca

SEQ ID NO: 1442285 - DNA, 25 bp, Homo sapien
cattacactattgaaaccacttttc

SEQ ID NO: 1442286 - DNA, 25 bp, Homo sapien
gcacatcacggtccagcttcaaaat

SEQ ID NO: 1442287 - DNA, 25 bp, Homo sapien
tgcactacttgcttcccgggaaaca

SEQ ID NO: 1442288 - DNA, 25 bp, Homo sapien
tctctccaaaacgatttccccgcag

SEQ ID NO: 1442289 - DNA, 25 bp, Homo sapien
tacatttgtgccagattttacactc

SEQ ID NO: 1442290 - DNA, 25 bp, Homo sapien
gtcagtatctgtatcctgctgatgc

SEQ ID NO: 1442291 - DNA, 25 bp, Homo sapien
gtatcctgctgatgcgttatggcag

SEQ ID NO: 1442292 - DNA, 25 bp, Homo sapien
tctgtatcctgctgatgcgttatgg

SEQ ID NO: 1442293 - DNA, 25 bp, Homo sapien
tgtcccttccatgtcagtatctgta

SEQ ID NO: 1442294 - DNA, 25 bp, Homo sapien
agaaggtgtgccctgaatctgtcag

SEQ ID NO: 1442295 - DNA, 25 bp, Homo sapien
actgggttgagttggataaacagca

SEQ ID NO: 1442296 - DNA, 25 bp, Homo sapien
ttttactctgagtcttcatcggccc

SEQ ID NO: 1442297 - DNA, 25 bp, Homo sapien
tctgtcagcgagatttctgactggg

SEQ ID NO: 1442298 - DNA, 25 bp, Homo sapien
caatgggatttagatgtggtggaaa

SEQ ID NO: 1442299 - DNA, 25 bp, Homo sapien
ccagagcaatgggatttagatgtgg

SEQ ID NO: 1442300 - DNA, 25 bp, Homo sapien
agcaatgggatttagatgtggtgga

SEQ ID NO: 1442301 - DNA, 25 bp, Homo sapien
agagaacagttgcttgggcagtttt

SEQ ID NO: 1442302 - DNA, 25 bp, Homo sapien
tcatgtctagtcaggtagggcacca

SEQ ID NO: 1442303 - DNA, 25 bp, Homo sapien
gtttatgatcatgttgccacaatgg

SEQ ID NO: 1442304 - DNA, 25 bp, Homo sapien
ttaatgtaactcatagagagcctcg

SEQ ID NO: 1442305 - DNA, 25 bp, Homo sapien
tctgttgttgatcacactatgggac

SEQ ID NO: 1442306 - DNA, 25 bp, Homo sapien
aagaaacagaaaagcgacataggcc

SEQ ID NO: 1442307 - DNA, 25 bp, Homo sapien
caggaaaggagtgcaacactagtca

SEQ ID NO: 1442308 - DNA, 25 bp, Homo sapien
cacagaacatgacgagcatgctcag

SEQ ID NO: 1442309 - DNA, 25 bp, Homo sapien
catcatatctgtgttcaaggcagga

SEQ ID NO: 1442310 - DNA, 25 bp, Homo sapien
tccagttatacctgcctcgcctttg

SEQ ID NO: 1442311 - DNA, 25 bp, Homo sapien
ttttcagcactttggttgaaggtcc

SEQ ID NO: 1442312 - DNA, 25 bp, Homo sapien
tggttgaaggtcctctcactgttcc

SEQ ID NO: 1442313 - DNA, 25 bp, Homo sapien
tctcactgttccagttatacctgcc

SEQ ID NO: 1442314 - DNA, 25 bp, Homo sapien
gagtcagattcaaattccctccatc

SEQ ID NO: 1442315 - DNA, 25 bp, Homo sapien
gtcagattcaaattccctccatcac

SEQ ID NO: 1442316 - DNA, 25 bp, Homo sapien
acagtaaaatatggtgactgtgtac

SEQ ID NO: 1442317 - DNA, 25 bp, Homo sapien
tttcctgtcatgacacagtaaaata

SEQ ID NO: 1442318 - DNA, 25 bp, Homo sapien
aaagttaatggttcatgatagctgt

SEQ ID NO: 1442319 - DNA, 25 bp, Homo sapien
tcatgatagctgtagggagtaggca

SEQ ID NO: 1442320 - DNA, 25 bp, Homo sapien
gcagatgtaacaacattagacttgt

SEQ ID NO: 1442321 - DNA, 25 bp, Homo sapien
catggaagttaatgcttttagcaga

SEQ ID NO: 1442322 - DNA, 25 bp, Homo sapien
tagatggctgatgttggaagggaat

SEQ ID NO: 1442323 - DNA, 25 bp, Homo sapien
ttagatggctgatgttggaagggaa

SEQ ID NO: 1442324 - DNA, 25 bp, Homo sapien
gaatttccagaagagcctgtttctt

SEQ ID NO: 1442325 - DNA, 25 bp, Homo sapien
tggaatttccagaagagcctgtttc

SEQ ID NO: 1442326 - DNA, 25 bp, Homo sapien
tgtacaaatggaatttccagaagag

SEQ ID NO: 1442327 - DNA, 25 bp, Homo sapien
cagaagagcctgtttcttttccctc

SEQ ID NO: 1442328 - DNA, 25 bp, Homo sapien
gggagagtgtgtgatcagctctcct

SEQ ID NO: 1442329 - DNA, 25 bp, Homo sapien
aattaatgagctgtactaccacccg

SEQ ID NO: 1442330 - DNA, 25 bp, Homo sapien
ttaatgagctgtactaccacccgcc

SEQ ID NO: 1442331 - DNA, 25 bp, Homo sapien
agctctcctactcctgatgatgctg

SEQ ID NO: 1442332 - DNA, 25 bp, Homo sapien
caggacctcgcgttcgggagggcgg

SEQ ID NO: 1442333 - DNA, 25 bp, Homo sapien
caatgcgcagccaggacctcgcgtt

SEQ ID NO: 1442334 - DNA, 25 bp, Homo sapien
ggccttcgcagccaatgcgcagcca

SEQ ID NO: 1442335 - DNA, 25 bp, Homo sapien
gagggcgggtacttcctactccagc

SEQ ID NO: 1442336 - DNA, 25 bp, Homo sapien
taaggccctgctcaagtactataca

SEQ ID NO: 1442337 - DNA, 25 bp, Homo sapien
tggagaccagacagagactagtttg

SEQ ID NO: 1442338 - DNA, 25 bp, Homo sapien
taggcaggtcctagcagtaagggaa

SEQ ID NO: 1442339 - DNA, 25 bp, Homo sapien
gggcctaggaccattcttgtcagaa

SEQ ID NO: 1442340 - DNA, 25 bp, Homo sapien
gagcatgtgcttttgccagacttta

SEQ ID NO: 1442341 - DNA, 25 bp, Homo sapien
tgtaccgtgcctgttaggaaagctt

SEQ ID NO: 1442342 - DNA, 25 bp, Homo sapien
ggtgtgaaccaccttactgggctaa

SEQ ID NO: 1442343 - DNA, 25 bp, Homo sapien
caccttactgaccaagtagctagga

SEQ ID NO: 1442344 - DNA, 25 bp, Homo sapien
gaaaattaatcaataacgaagtatc

SEQ ID NO: 1442345 - DNA, 25 bp, Homo sapien
gtaagcattcagtttgtactaatat

SEQ ID NO: 1442346 - DNA, 25 bp, Homo sapien
ttgttttaactgtatagctagatga

SEQ ID NO: 1442347 - DNA, 25 bp, Homo sapien
gtaatttattcaggatgtgtgctga

SEQ ID NO: 1442348 - DNA, 25 bp, Homo sapien
caggatggcaaggagtactgagaac

SEQ ID NO: 1442349 - DNA, 25 bp, Homo sapien
ggttgtcttccagattagttgtcat

SEQ ID NO: 1442350 - DNA, 25 bp, Homo sapien
tcttccagattagttgtcattttta

SEQ ID NO: 1442351 - DNA, 25 bp, Homo sapien
tggggcagagaaggcattatttgtt

SEQ ID NO: 1442352 - DNA, 25 bp, Homo sapien
cactcctagtccgaacatgccagga

SEQ ID NO: 1442353 - DNA, 25 bp, Homo sapien
tctatcactcctagtccgaacatgc

SEQ ID NO: 1442354 - DNA, 25 bp, Homo sapien
ctagtccgaacatgccaggagccaa

SEQ ID NO: 1442355 - DNA, 25 bp, Homo sapien
ttgtcctctatcactcctagtccga

SEQ ID NO: 1442356 - DNA, 25 bp, Homo sapien
tgtggcacaggatgagggggcccac

SEQ ID NO: 1442357 - DNA, 25 bp, Homo sapien
ctgtggcacaggatgagggggccca

SEQ ID NO: 1442358 - DNA, 25 bp, Homo sapien
tggattgataggtggtgggtgggca

SEQ ID NO: 1442359 - DNA, 25 bp, Homo sapien
cttggggaaagggtggattgatagg

SEQ ID NO: 1442360 - DNA, 25 bp, Homo sapien
ggcaggattggaacctccagggtac

SEQ ID NO: 1442361 - DNA, 25 bp, Homo sapien
aaagggtggattgataggtggtggg

SEQ ID NO: 1442362 - DNA, 25 bp, Homo sapien
atttggtcctggctggccggcattg

SEQ ID NO: 1442363 - DNA, 25 bp, Homo sapien
ggatatggatttggtcctggctggc

SEQ ID NO: 1442364 - DNA, 25 bp, Homo sapien
gctggccggcattgggattccacat

SEQ ID NO: 1442365 - DNA, 25 bp, Homo sapien
tggctggccggcattgggattccac

SEQ ID NO: 1442366 - DNA, 25 bp, Homo sapien
tctcctacttccactaagtaatcat

SEQ ID NO: 1442367 - DNA, 25 bp, Homo sapien
ctacttccactaagtaatcattcag

SEQ ID NO: 1442368 - DNA, 25 bp, Homo sapien
ttccactaagtaatcattcagtgtc

SEQ ID NO: 1442369 - DNA, 25 bp, Homo sapien
acttccactaagtaatcattcagtg

SEQ ID NO: 1442370 - DNA, 25 bp, Homo sapien
aaactctcctcagaaggagcgcttg

SEQ ID NO: 1442371 - DNA, 25 bp, Homo sapien
cagattcttagtagaataattcagc

SEQ ID NO: 1442372 - DNA, 25 bp, Homo sapien
gaaagcaaagactgcctatactctt

SEQ ID NO: 1442373 - DNA, 25 bp, Homo sapien
aaacagtgttaagacaatttgtaca

SEQ ID NO: 1442374 - DNA, 25 bp, Homo sapien
taaaggatgcttagtgtatgattcc

SEQ ID NO: 1442375 - DNA, 25 bp, Homo sapien
tggctacacaattgcaagtcccttt

SEQ ID NO: 1442376 - DNA, 25 bp, Homo sapien
gtatgattccctgggttggctacac

SEQ ID NO: 1442377 - DNA, 25 bp, Homo sapien
ccttgcacaccaggattgcattttt

SEQ ID NO: 1442378 - DNA, 25 bp, Homo sapien
cagccactggggtggtaaaacttgg

SEQ ID NO: 1442379 - DNA, 25 bp, Homo sapien
gcttggccggtttttcagctcaaaa

SEQ ID NO: 1442380 - DNA, 25 bp, Homo sapien
gatcttgggcttggccggtttttca

SEQ ID NO: 1442381 - DNA, 25 bp, Homo sapien
aatgtgttcattacagccactgggg

SEQ ID NO: 1442382 - DNA, 25 bp, Homo sapien
agttgcccccctgtggattctgtga

SEQ ID NO: 1442383 - DNA, 25 bp, Homo sapien
cactgccagtcacttgctttatgtc

SEQ ID NO: 1442384 - DNA, 25 bp, Homo sapien
cagtgttttcagttgcccccctgtg

SEQ ID NO: 1442385 - DNA, 25 bp, Homo sapien
gcttttggtaaactctgaaccttca

SEQ ID NO: 1442386 - DNA, 25 bp, Homo sapien
ctcttccttcagatcactattcaga

SEQ ID NO: 1442387 - DNA, 25 bp, Homo sapien
ttccttcagatcactattcagaaga

SEQ ID NO: 1442388 - DNA, 25 bp, Homo sapien
cttccttcagatcactattcagaag

SEQ ID NO: 1442389 - DNA, 25 bp, Homo sapien
tcttccttcagatcactattcagaa

SEQ ID NO: 1442390 - DNA, 25 bp, Homo sapien
tggatatgcggattctcagccaagg

SEQ ID NO: 1442391 - DNA, 25 bp, Homo sapien
cactagtggttcgttgaagtcggcc

SEQ ID NO: 1442392 - DNA, 25 bp, Homo sapien
ttttaatgatgataccactagtggt

SEQ ID NO: 1442393 - DNA, 25 bp, Homo sapien
gctacttcactgcagctaagtgtga

SEQ ID NO: 1442394 - DNA, 25 bp, Homo sapien
tctctgttcttaaccctttcactca

SEQ ID NO: 1442395 - DNA, 25 bp, Homo sapien
cctctctgttcttaaccctttcact

SEQ ID NO: 1442396 - DNA, 25 bp, Homo sapien
tcctctctgttcttaaccctttcac

SEQ ID NO: 1442397 - DNA, 25 bp, Homo sapien
tctcctctctgttcttaaccctttc

SEQ ID NO: 1442398 - DNA, 25 bp, Homo sapien
ttcaactttggtgacaattatgtgt

SEQ ID NO: 1442399 - DNA, 25 bp, Homo sapien
tcaactttggtgacaattatgtgtc

SEQ ID NO: 1442400 - DNA, 25 bp, Homo sapien
tttcaactttggtgacaattatgtg

SEQ ID NO: 1442401 - DNA, 25 bp, Homo sapien
tgtgtattgctgtaccccttaaggg

SEQ ID NO: 1442402 - DNA, 25 bp, Homo sapien
tacaaagtgccttcaacaagactgg

SEQ ID NO: 1442403 - DNA, 25 bp, Homo sapien
tctcccagtgggtgtaacattacta

SEQ ID NO: 1442404 - DNA, 25 bp, Homo sapien
tgagaacagcccttataggtcatcc

SEQ ID NO: 1442405 - DNA, 25 bp, Homo sapien
tgttctctggttggaacagatactc

SEQ ID NO: 1442406 - DNA, 25 bp, Homo sapien
tctgctagaaggaaatagctgggaa

SEQ ID NO: 1442407 - DNA, 25 bp, Homo sapien
tcattagcttgacccctcaaagtaa

SEQ ID NO: 1442408 - DNA, 25 bp, Homo sapien
taacatttatactgagcatccatag

SEQ ID NO: 1442409 - DNA, 25 bp, Homo sapien
gaatgctttaccattcaacatagta

SEQ ID NO: 1442410 - DNA, 25 bp, Homo sapien
catatacttcaggtgttgctgttaa

SEQ ID NO: 1442411 - DNA, 25 bp, Homo sapien
aacccacaaatgcatacttaccctg

SEQ ID NO: 1442412 - DNA, 25 bp, Homo sapien
gcctcatatttcaatagtactgtaa

SEQ ID NO: 1442413 - DNA, 25 bp, Homo sapien
ttaaactaaggacatcttcaggaca

SEQ ID NO: 1442414 - DNA, 25 bp, Homo sapien
attttctgtttttgaatgagaaacg

SEQ ID NO: 1442415 - DNA, 25 bp, Homo sapien
actaaggacatcttcaggacatcat

SEQ ID NO: 1442416 - DNA, 25 bp, Homo sapien
taaactaaggacatcttcaggacat

SEQ ID NO: 1442417 - DNA, 25 bp, Homo sapien
atgtcctctggagccgtagtcctgc

SEQ ID NO: 1442418 - DNA, 25 bp, Homo sapien
ttggcgcagacttgcagacttccac

SEQ ID NO: 1442419 - DNA, 25 bp, Homo sapien
tggagccgtagtcctgcagacagct

SEQ ID NO: 1442420 - DNA, 25 bp, Homo sapien
tgctgcttggctcggacaacctcct

SEQ ID NO: 1442421 - DNA, 25 bp, Homo sapien
gaggacttcccagactatgctatct

SEQ ID NO: 1442422 - DNA, 25 bp, Homo sapien
agccaattccttcctaccactgatg

SEQ ID NO: 1442423 - DNA, 25 bp, Homo sapien
tatctaatatgatgtcaccaaccac

SEQ ID NO: 1442424 - DNA, 25 bp, Homo sapien
agcatccctgaccttgttgacttgg

SEQ ID NO: 1442425 - DNA, 25 bp, Homo sapien
ctaaaatagcacactttagaatcat

SEQ ID NO: 1442426 - DNA, 25 bp, Homo sapien
gtgaggcagggctcttcaagtacct

SEQ ID NO: 1442427 - DNA, 25 bp, Homo sapien
aatgcagtccaagaggatgtgaggc

SEQ ID NO: 1442428 - DNA, 25 bp, Homo sapien
agggctcttcaagtacctttctcct

SEQ ID NO: 1442429 - DNA, 25 bp, Homo sapien
aaaatgcagtccaagaggatgtgag

SEQ ID NO: 1442430 - DNA, 25 bp, Homo sapien
caaggcggtgacactggtgtacgct

SEQ ID NO: 1442431 - DNA, 25 bp, Homo sapien
tgaccattgatccagcagctagctc

SEQ ID NO: 1442432 - DNA, 25 bp, Homo sapien
gctagctcaggtgcatttagccaca

SEQ ID NO: 1442433 - DNA, 25 bp, Homo sapien
tgtcttccaatagattccgcttcct

SEQ ID NO: 1442434 - DNA, 25 bp, Homo sapien
ttcttcctggtagatgtgcaacgca

SEQ ID NO: 1442435 - DNA, 25 bp, Homo sapien
ctccccatagtttcaggagcttctt

SEQ ID NO: 1442436 - DNA, 25 bp, Homo sapien
tcttcctggtagatgtgcaacgcac

SEQ ID NO: 1442437 - DNA, 25 bp, Homo sapien
ctaactccccatagtttcaggagct

SEQ ID NO: 1442438 - DNA, 25 bp, Homo sapien
ccagactacttctgtaaaccgctga

SEQ ID NO: 1442439 - DNA, 25 bp, Homo sapien
agctgccattcccagactacttctg

SEQ ID NO: 1442440 - DNA, 25 bp, Homo sapien
taaaccgctgacacccttgatggtg

SEQ ID NO: 1442441 - DNA, 25 bp, Homo sapien
ttctgtaaaccgctgacacccttga

SEQ ID NO: 1442442 - DNA, 25 bp, Homo sapien
ggtcattggctgtcttccaaatcat

SEQ ID NO: 1442443 - DNA, 25 bp, Homo sapien
tgttcggtcattggctgtcttccaa

SEQ ID NO: 1442444 - DNA, 25 bp, Homo sapien
ctgttcggtcattggctgtcttcca

SEQ ID NO: 1442445 - DNA, 25 bp, Homo sapien
ttcggtcattggctgtcttccaaat

SEQ ID NO: 1442446 - DNA, 25 bp, Homo sapien
gacctaactcttttgatgttggatg

SEQ ID NO: 1442447 - DNA, 25 bp, Homo sapien
tagacacaggttgatggagccatgg

SEQ ID NO: 1442448 - DNA, 25 bp, Homo sapien
tctcttccttatcaagacctaactc

SEQ ID NO: 1442449 - DNA, 25 bp, Homo sapien
tacttctgccccttgaagtagacac

SEQ ID NO: 1442450 - DNA, 25 bp, Homo sapien
tctccagaggtgaattaagtctatg

SEQ ID NO: 1442451 - DNA, 25 bp, Homo sapien
gaattaagtctatgatcggatgttc

SEQ ID NO: 1442452 - DNA, 25 bp, Homo sapien
gcatctgcccactattgcgaagcgt

SEQ ID NO: 1442453 - DNA, 25 bp, Homo sapien
tcagtaacgccaaagggtccacatt

SEQ ID NO: 1442454 - DNA, 25 bp, Homo sapien
gcttattaagtaatgcctttagttc

SEQ ID NO: 1442455 - DNA, 25 bp, Homo sapien
aagcttattaagtaatgcctttagt

SEQ ID NO: 1442456 - DNA, 25 bp, Homo sapien
ttgaagcttattaagtaatgccttt

SEQ ID NO: 1442457 - DNA, 25 bp, Homo sapien
gaagcttattaagtaatgcctttag

SEQ ID NO: 1442458 - DNA, 25 bp, Homo sapien
cctggaataagtaataagaactgaa

SEQ ID NO: 1442459 - DNA, 25 bp, Homo sapien
aatttgacaactgagctatgtctga

SEQ ID NO: 1442460 - DNA, 25 bp, Homo sapien
accagagggaatcagttggttcctg

SEQ ID NO: 1442461 - DNA, 25 bp, Homo sapien
gactaatatcgaacatccatatcga

SEQ ID NO: 1442462 - DNA, 25 bp, Homo sapien
ttcctctgaggcagaattaagcgct

SEQ ID NO: 1442463 - DNA, 25 bp, Homo sapien
tctgaggcagaattaagcgcttcat

SEQ ID NO: 1442464 - DNA, 25 bp, Homo sapien
gtgttcctctgaggcagaattaagc

SEQ ID NO: 1442465 - DNA, 25 bp, Homo sapien
cctctgaggcagaattaagcgcttc

SEQ ID NO: 1442466 - DNA, 25 bp, Homo sapien
gggaaatcgtatctttttcctcatg

SEQ ID NO: 1442467 - DNA, 25 bp, Homo sapien
gagggaaatcgtatctttttcctca

SEQ ID NO: 1442468 - DNA, 25 bp, Homo sapien
agggaaatcgtatctttttcctcat

SEQ ID NO: 1442469 - DNA, 25 bp, Homo sapien
caaaccaccagactaaatgcaaggt

SEQ ID NO: 1442470 - DNA, 25 bp, Homo sapien
tcaaaccaccagactaaatgcaagg

SEQ ID NO: 1442471 - DNA, 25 bp, Homo sapien
tcaccttcacatttgcctgtcaaca

SEQ ID NO: 1442472 - DNA, 25 bp, Homo sapien
ctgtaaatgggttgtggttgtctcc

SEQ ID NO: 1442473 - DNA, 25 bp, Homo sapien
tatcttgtgcggatgtctctgtcag

SEQ ID NO: 1442474 - DNA, 25 bp, Homo sapien
tgaacagttggctctagaaatacct

SEQ ID NO: 1442475 - DNA, 25 bp, Homo sapien
ctctctctcctctctcagtgcccac

SEQ ID NO: 1442476 - DNA, 25 bp, Homo sapien
ctcctctctcagtgcccacctccag

SEQ ID NO: 1442477 - DNA, 25 bp, Homo sapien
ctctctcctctctcagtgcccacct

SEQ ID NO: 1442478 - DNA, 25 bp, Homo sapien
ctctctcagtgcccacctccaggac

SEQ ID NO: 1442479 - DNA, 25 bp, Homo sapien
catcactgaaaggtagactggcaaa

SEQ ID NO: 1442480 - DNA, 25 bp, Homo sapien
tagtgaaccacatgaaacgtggcca

SEQ ID NO: 1442481 - DNA, 25 bp, Homo sapien
acgcttctgtggtgctcatcactga

SEQ ID NO: 1442482 - DNA, 25 bp, Homo sapien
taaagactgcatccaatggccttgc

SEQ ID NO: 1442483 - DNA, 25 bp, Homo sapien
tgaccagtgtgatatacgagcagct

SEQ ID NO: 1442484 - DNA, 25 bp, Homo sapien
ggtccagaatgatcctccactaatg

SEQ ID NO: 1442485 - DNA, 25 bp, Homo sapien
tatagcccttctcctgccatagcaa

SEQ ID NO: 1442486 - DNA, 25 bp, Homo sapien
tgacagggcctagggttttatagcc

SEQ ID NO: 1442487 - DNA, 25 bp, Homo sapien
cctgagcccttgtcgctgggaatcc

SEQ ID NO: 1442488 - DNA, 25 bp, Homo sapien
tggcttggcagcagtctctttggtc

SEQ ID NO: 1442489 - DNA, 25 bp, Homo sapien
tcagggaccctgagcccttgtcgct

SEQ ID NO: 1442490 - DNA, 25 bp, Homo sapien
gcccttgtcgctgggaatccttatt

SEQ ID NO: 1442491 - DNA, 25 bp, Homo sapien
tgtttattacgatccaacattccaa

SEQ ID NO: 1442492 - DNA, 25 bp, Homo sapien
cttgtttattacgatccaacattcc

SEQ ID NO: 1442493 - DNA, 25 bp, Homo sapien
tttattacgatccaacattccaagc

SEQ ID NO: 1442494 - DNA, 25 bp, Homo sapien
tgtcttgtttattacgatccaacat

SEQ ID NO: 1442495 - DNA, 25 bp, Homo sapien
catccagagttgcctgtataattgc

SEQ ID NO: 1442496 - DNA, 25 bp, Homo sapien
ttaagacatcgcattttcagcatcc

SEQ ID NO: 1442497 - DNA, 25 bp, Homo sapien
cagcatccagagttgcctgtataat

SEQ ID NO: 1442498 - DNA, 25 bp, Homo sapien
tcagcatccagagttgcctgtataa

SEQ ID NO: 1442499 - DNA, 25 bp, Homo sapien
agacttgctttagatttttagccat

SEQ ID NO: 1442500 - DNA, 25 bp, Homo sapien
tattagtaacaattgctagtgttgc

SEQ ID NO: 1442501 - DNA, 25 bp, Homo sapien
ctagtgttgctagtaggattattag

SEQ ID NO: 1442502 - DNA, 25 bp, Homo sapien
gatttttagccatattagtaacaat

SEQ ID NO: 1442503 - DNA, 25 bp, Homo sapien
gagacttaggagaacaactgtgatt

SEQ ID NO: 1442504 - DNA, 25 bp, Homo sapien
ccatggattggagacttaggagaac

SEQ ID NO: 1442505 - DNA, 25 bp, Homo sapien
tttatatgcttaggaccatggattg

SEQ ID NO: 1442506 - DNA, 25 bp, Homo sapien
taggaccatggattggagacttagg

SEQ ID NO: 1442507 - DNA, 25 bp, Homo sapien
tcctataggtatgtcaagttccgca

SEQ ID NO: 1442508 - DNA, 25 bp, Homo sapien
tgtctggagatagttcctataggta

SEQ ID NO: 1442509 - DNA, 25 bp, Homo sapien
tgtcaagttccgcatcctgctctag

SEQ ID NO: 1442510 - DNA, 25 bp, Homo sapien
tagtgccgtaggttgtctgaacatc

SEQ ID NO: 1442511 - DNA, 25 bp, Homo sapien
tattctccattattgccagaggcct

SEQ ID NO: 1442512 - DNA, 25 bp, Homo sapien
caagggctcttgtaacaggacccag

SEQ ID NO: 1442513 - DNA, 25 bp, Homo sapien
ggacccagaacaagtatgaacatga

SEQ ID NO: 1442514 - DNA, 25 bp, Homo sapien
ccagaggcctcaaatcccacatagt

SEQ ID NO: 1442515 - DNA, 25 bp, Homo sapien
gaagtccaagatgtctgtgtagtac

SEQ ID NO: 1442516 - DNA, 25 bp, Homo sapien
tgaagtccaagatgtctgtgtagta

SEQ ID NO: 1442517 - DNA, 25 bp, Homo sapien
atgaagtccaagatgtctgtgtagt

SEQ ID NO: 1442518 - DNA, 25 bp, Homo sapien
cactttcaaatccttgagaattttg

SEQ ID NO: 1442519 - DNA, 25 bp, Homo sapien
ccttgagaattttgtgtagacagta

SEQ ID NO: 1442520 - DNA, 25 bp, Homo sapien
caaatccttgagaattttgtgtaga

SEQ ID NO: 1442521 - DNA, 25 bp, Homo sapien
ccccactttcaaatccttgagaatt

SEQ ID NO: 1442522 - DNA, 25 bp, Homo sapien
gcagtaacgttcaatggaaaatcca

SEQ ID NO: 1442523 - DNA, 25 bp, Homo sapien
ccattctcggatatgctaggacgca

SEQ ID NO: 1442524 - DNA, 25 bp, Homo sapien
gaactcagtagtttcatagacgctg

SEQ ID NO: 1442525 - DNA, 25 bp, Homo sapien
aagaaaaagtgctttggcagtaacg

SEQ ID NO: 1442526 - DNA, 25 bp, Homo sapien
gcaccataattgaactggagagatg

SEQ ID NO: 1442527 - DNA, 25 bp, Homo sapien
ctccagctctgaggaatgctaatta

SEQ ID NO: 1442528 - DNA, 25 bp, Homo sapien
tgctaattagccctgttaaagcacc

SEQ ID NO: 1442529 - DNA, 25 bp, Homo sapien
agatgactgccgaaggtgcaggtct

SEQ ID NO: 1442530 - DNA, 25 bp, Homo sapien
cttggtgttttgccagagaattgta

SEQ ID NO: 1442531 - DNA, 25 bp, Homo sapien
gcactagaagttttactcttggtgt

SEQ ID NO: 1442532 - DNA, 25 bp, Homo sapien
cttcagcactagaagttttactctt

SEQ ID NO: 1442533 - DNA, 25 bp, Homo sapien
tcagcactagaagttttactcttgg

SEQ ID NO: 1442534 - DNA, 25 bp, Homo sapien
gggaaagccttatgcaaagtttcat

SEQ ID NO: 1442535 - DNA, 25 bp, Homo sapien
gtttcatacagagcgtcatcaccca

SEQ ID NO: 1442536 - DNA, 25 bp, Homo sapien
agccttatgcaaagtttcatacaga

SEQ ID NO: 1442537 - DNA, 25 bp, Homo sapien
aagtttcatacagagcgtcatcacc

SEQ ID NO: 1442538 - DNA, 25 bp, Homo sapien
ccatttacagtgaacgcgtggaata

SEQ ID NO: 1442539 - DNA, 25 bp, Homo sapien
tccttcctggaatctcagtccacca

SEQ ID NO: 1442540 - DNA, 25 bp, Homo sapien
tggaatctcagtccaccagcacagt

SEQ ID NO: 1442541 - DNA, 25 bp, Homo sapien
cagtgaacgcgtggaataccttggc

SEQ ID NO: 1442542 - DNA, 25 bp, Homo sapien
tgcgagatcggtggtgataacccct

SEQ ID NO: 1442543 - DNA, 25 bp, Homo sapien
atttctgcgagatcggtggtgataa

SEQ ID NO: 1442544 - DNA, 25 bp, Homo sapien
tctgcgagatcggtggtgataaccc

SEQ ID NO: 1442545 - DNA, 25 bp, Homo sapien
tttctgcgagatcggtggtgataac

SEQ ID NO: 1442546 - DNA, 25 bp, Homo sapien
tagaataagtgtgatttggtgctga

SEQ ID NO: 1442547 - DNA, 25 bp, Homo sapien
attttagaataagtgtgatttggtg

SEQ ID NO: 1442548 - DNA, 25 bp, Homo sapien
gtccagaactgagttcacgtcctga

SEQ ID NO: 1442549 - DNA, 25 bp, Homo sapien
ctgcttggtccagaactgagttcac

SEQ ID NO: 1442550 - DNA, 25 bp, Homo sapien
cagagattaggattgcaactcttgc

SEQ ID NO: 1442551 - DNA, 25 bp, Homo sapien
agattaggattgcaactcttgcttt

SEQ ID NO: 1442552 - DNA, 25 bp, Homo sapien
tttttcagagattaggattgcaact

SEQ ID NO: 1442553 - DNA, 25 bp, Homo sapien
ttcagagattaggattgcaactctt

SEQ ID NO: 1442554 - DNA, 25 bp, Homo sapien
tcagggttatctgtgtcatctaaag

SEQ ID NO: 1442555 - DNA, 25 bp, Homo sapien
tctccacctgtaagatagcataaaa

SEQ ID NO: 1442556 - DNA, 25 bp, Homo sapien
tagaagggattaaattattgcaaat

SEQ ID NO: 1442557 - DNA, 25 bp, Homo sapien
aattactatatatcagggttatctg

SEQ ID NO: 1442558 - DNA, 25 bp, Homo sapien
tgtccaagataccatgtccgttcat

SEQ ID NO: 1442559 - DNA, 25 bp, Homo sapien
cacccatctcttaaggcccagagat

SEQ ID NO: 1442560 - DNA, 25 bp, Homo sapien
gagatactctgtccaagataccatg

SEQ ID NO: 1442561 - DNA, 25 bp, Homo sapien
tctcttaaggcccagagatactctg

SEQ ID NO: 1442562 - DNA, 25 bp, Homo sapien
tgtttctagcctattcacttctctt

SEQ ID NO: 1442563 - DNA, 25 bp, Homo sapien
tttctagcctattcacttctcttcc

SEQ ID NO: 1442564 - DNA, 25 bp, Homo sapien
gtttctagcctattcacttctcttc

SEQ ID NO: 1442565 - DNA, 25 bp, Homo sapien
ttctagcctattcacttctcttcct

SEQ ID NO: 1442566 - DNA, 25 bp, Homo sapien
gtatgcgagttggcagctgtacatc

SEQ ID NO: 1442567 - DNA, 25 bp, Homo sapien
gcgtatgcgagttggcagctgtaca

SEQ ID NO: 1442568 - DNA, 25 bp, Homo sapien
tgcgtatgcgagttggcagctgtac

SEQ ID NO: 1442569 - DNA, 25 bp, Homo sapien
ctgcgtatgcgagttggcagctgta

SEQ ID NO: 1442570 - DNA, 25 bp, Homo sapien
cttatcttaaactggacttgaggag

SEQ ID NO: 1442571 - DNA, 25 bp, Homo sapien
cttaaactggacttgaggagctggg

SEQ ID NO: 1442572 - DNA, 25 bp, Homo sapien
ctggaagtggtaggagtaagaatac

SEQ ID NO: 1442573 - DNA, 25 bp, Homo sapien
gacttgtcacttttggtaatagcca

SEQ ID NO: 1442574 - DNA, 25 bp, Homo sapien
ggcaatcagttctcattctaataaa

SEQ ID NO: 1442575 - DNA, 25 bp, Homo sapien
gagccagtgttcctaggaatatttg

SEQ ID NO: 1442576 - DNA, 25 bp, Homo sapien
tccaacactgtcctaatgtcaggga

SEQ ID NO: 1442577 - DNA, 25 bp, Homo sapien
taagctttgcagaatagagtaattg

SEQ ID NO: 1442578 - DNA, 25 bp, Homo sapien
taagtgacaaggtcataattattac

SEQ ID NO: 1442579 - DNA, 25 bp, Homo sapien
ggtcataattattactagaaaagat

SEQ ID NO: 1442580 - DNA, 25 bp, Homo sapien
tcttgacttactccaagttaagtga

SEQ ID NO: 1442581 - DNA, 25 bp, Homo sapien
cttactccaagttaagtgacaaggt

SEQ ID NO: 1442582 - DNA, 25 bp, Homo sapien
ttttgtttaattcagtgccgatgta

SEQ ID NO: 1442583 - DNA, 25 bp, Homo sapien
ttcagtgccgatgtatgagttatgt

SEQ ID NO: 1442584 - DNA, 25 bp, Homo sapien
acataaaaatacgaagccataagca

SEQ ID NO: 1442585 - DNA, 25 bp, Homo sapien
tacgaagccataagcaaccaggtgg

SEQ ID NO: 1442586 - DNA, 25 bp, Homo sapien
ggtttcatgtcacagaccatgctca

SEQ ID NO: 1442587 - DNA, 25 bp, Homo sapien
gctctgtagttcacatggatttctg

SEQ ID NO: 1442588 - DNA, 25 bp, Homo sapien
catgctcaagagctggttcatcaca

SEQ ID NO: 1442589 - DNA, 25 bp, Homo sapien
cacactttccatatacttattgtag

SEQ ID NO: 1442590 - DNA, 25 bp, Homo sapien
tgttttagtcgaaactctttatctc

SEQ ID NO: 1442591 - DNA, 25 bp, Homo sapien
ttttagtcgaaactctttatctctc

SEQ ID NO: 1442592 - DNA, 25 bp, Homo sapien
cttagattgttttagtcgaaactct

SEQ ID NO: 1442593 - DNA, 25 bp, Homo sapien
ggcttgcttcaatcgctttcctttt

SEQ ID NO: 1442594 - DNA, 25 bp, Homo sapien
tccttggcttgcttcaatcgctttc

SEQ ID NO: 1442595 - DNA, 25 bp, Homo sapien
ttggcttgcttcaatcgctttcctt

SEQ ID NO: 1442596 - DNA, 25 bp, Homo sapien
ccttggcttgcttcaatcgctttcc

SEQ ID NO: 1442597 - DNA, 25 bp, Homo sapien
ttcgttttaggaaaagtagatgcag

SEQ ID NO: 1442598 - DNA, 25 bp, Homo sapien
gcagtcccagtctcttcgttttagg

SEQ ID NO: 1442599 - DNA, 25 bp, Homo sapien
cgttttaggaaaagtagatgcagaa

SEQ ID NO: 1442600 - DNA, 25 bp, Homo sapien
tcgttttaggaaaagtagatgcaga

SEQ ID NO: 1442601 - DNA, 25 bp, Homo sapien
caatttctatagaccgcgtggcctt

SEQ ID NO: 1442602 - DNA, 25 bp, Homo sapien
gcgtggccttctggagagttcttga

SEQ ID NO: 1442603 - DNA, 25 bp, Homo sapien
ttcccagtctgacttccgaagcctg

SEQ ID NO: 1442604 - DNA, 25 bp, Homo sapien
gatttcatctctctcagtagctggt

SEQ ID NO: 1442605 - DNA, 25 bp, Homo sapien
cctctagcttgtccttggcccgttt

SEQ ID NO: 1442606 - DNA, 25 bp, Homo sapien
tcctctagcttgtccttggcccgtt

SEQ ID NO: 1442607 - DNA, 25 bp, Homo sapien
ggtagtctgctccaagcaagtggct

SEQ ID NO: 1442608 - DNA, 25 bp, Homo sapien
gtagtctgctccaagcaagtggctt

SEQ ID NO: 1442609 - DNA, 25 bp, Homo sapien
tagtctgctccaagcaagtggcttc

SEQ ID NO: 1442610 - DNA, 25 bp, Homo sapien
tgggaagtaatgggttcatttattc

SEQ ID NO: 1442611 - DNA, 25 bp, Homo sapien
aatgaggtgttgcatctacttataa

SEQ ID NO: 1442612 - DNA, 25 bp, Homo sapien
ctcttctgtatgagataaggaggta

SEQ ID NO: 1442613 - DNA, 25 bp, Homo sapien
aaggaggtataaatgaggtgttgca

SEQ ID NO: 1442614 - DNA, 25 bp, Homo sapien
atgaggtgttgcatctacttataaa

SEQ ID NO: 1442615 - DNA, 25 bp, Homo sapien
tctacttttatcagtcatggacaga

SEQ ID NO: 1442616 - DNA, 25 bp, Homo sapien
ctttagcactgtgaaatgatcagct

SEQ ID NO: 1442617 - DNA, 25 bp, Homo sapien
gtgctataaatgtcaaccaggtcag

SEQ ID NO: 1442618 - DNA, 25 bp, Homo sapien
gataagtgtcctacatacatttggg

SEQ ID NO: 1442619 - DNA, 25 bp, Homo sapien
taattgttatgtgttcaaaatcact

SEQ ID NO: 1442620 - DNA, 25 bp, Homo sapien
taggctacttaaagttgttccatag

SEQ ID NO: 1442621 - DNA, 25 bp, Homo sapien
gaatatatggaatgcagtattcttt

SEQ ID NO: 1442622 - DNA, 25 bp, Homo sapien
cactaaagcttaataatcagataat

SEQ ID NO: 1442623 - DNA, 25 bp, Homo sapien
tgcttggtataaatgtgccactctg

SEQ ID NO: 1442624 - DNA, 25 bp, Homo sapien
agtttagctcttccacagaggtgca

SEQ ID NO: 1442625 - DNA, 25 bp, Homo sapien
gaggtgcaaggagctagctacccac

SEQ ID NO: 1442626 - DNA, 25 bp, Homo sapien
tagctacccacttgatcgtccttct

SEQ ID NO: 1442627 - DNA, 25 bp, Homo sapien
tcactcagagatcagctatccatct

SEQ ID NO: 1442628 - DNA, 25 bp, Homo sapien
ctcagagatcagctatccatctgcc

SEQ ID NO: 1442629 - DNA, 25 bp, Homo sapien
gtcactcagagatcagctatccatc

SEQ ID NO: 1442630 - DNA, 25 bp, Homo sapien
cactcagagatcagctatccatctg

SEQ ID NO: 1442631 - DNA, 25 bp, Homo sapien
actgcaggtctaatgatccaaggcc

SEQ ID NO: 1442632 - DNA, 25 bp, Homo sapien
tagaaacacagctgccgatatctgg

SEQ ID NO: 1442633 - DNA, 25 bp, Homo sapien
tggttgggttatcaagccatggtta

SEQ ID NO: 1442634 - DNA, 25 bp, Homo sapien
ccaggaacaaagattaagggagcac

SEQ ID NO: 1442635 - DNA, 25 bp, Homo sapien
cttcatttctcttgtaactgtttca

SEQ ID NO: 1442636 - DNA, 25 bp, Homo sapien
tcatttctcttgtaactgtttcata

SEQ ID NO: 1442637 - DNA, 25 bp, Homo sapien
ttcttcatttctcttgtaactgttt

SEQ ID NO: 1442638 - DNA, 25 bp, Homo sapien
catttctcttgtaactgtttcatag

SEQ ID NO: 1442639 - DNA, 25 bp, Homo sapien
ggaagaaggagagaaaaactgccat

SEQ ID NO: 1442640 - DNA, 25 bp, Homo sapien
ctatggaagaaggagagaaaaactg

SEQ ID NO: 1442641 - DNA, 25 bp, Homo sapien
tggaagaaggagagaaaaactgcca

SEQ ID NO: 1442642 - DNA, 25 bp, Homo sapien
tatggaagaaggagagaaaaactgc

SEQ ID NO: 1442643 - DNA, 25 bp, Homo sapien
aaacttgctgaaggtgccaatacta

SEQ ID NO: 1442644 - DNA, 25 bp, Homo sapien
aggtgccaatactactcccacttgc

SEQ ID NO: 1442645 - DNA, 25 bp, Homo sapien
tgaaggtgccaatactactcccact

SEQ ID NO: 1442646 - DNA, 25 bp, Homo sapien
gctgaaggtgccaatactactccca

SEQ ID NO: 1442647 - DNA, 25 bp, Homo sapien
ctgatatgcacagcaaggtagctga

SEQ ID NO: 1442648 - DNA, 25 bp, Homo sapien
tgcacagcaaggtagctgaggtgca

SEQ ID NO: 1442649 - DNA, 25 bp, Homo sapien
gatatgcacagcaaggtagctgagg

SEQ ID NO: 1442650 - DNA, 25 bp, Homo sapien
tatgcacagcaaggtagctgaggtg

SEQ ID NO: 1442651 - DNA, 25 bp, Homo sapien
ctgagatattatgcagagaggcaaa

SEQ ID NO: 1442652 - DNA, 25 bp, Homo sapien
gatctgagatattatgcagagaggc

SEQ ID NO: 1442653 - DNA, 25 bp, Homo sapien
gaagctagatctgagatattatgca

SEQ ID NO: 1442654 - DNA, 25 bp, Homo sapien
cagttacagaagctagatctgagat

SEQ ID NO: 1442655 - DNA, 25 bp, Homo sapien
tggattcaccttggctggtaaacag

SEQ ID NO: 1442656 - DNA, 25 bp, Homo sapien
taatgtgctgatttcaaccaggcta

SEQ ID NO: 1442657 - DNA, 25 bp, Homo sapien
caaatgaccacggaggagggatcct

SEQ ID NO: 1442658 - DNA, 25 bp, Homo sapien
cgggtactgatatagaagaagacac

SEQ ID NO: 1442659 - DNA, 25 bp, Homo sapien
caggtcatggatctgtggcgctcaa

SEQ ID NO: 1442660 - DNA, 25 bp, Homo sapien
aatgttcgctcacaaggttcacagc

SEQ ID NO: 1442661 - DNA, 25 bp, Homo sapien
cctgaagatgctactctaagggcac

SEQ ID NO: 1442662 - DNA, 25 bp, Homo sapien
taagggcacctttgagttgtgggcc

SEQ ID NO: 1442663 - DNA, 25 bp, Homo sapien
taatctgggagtttttcactgctcc

SEQ ID NO: 1442664 - DNA, 25 bp, Homo sapien
cagtcccaaacatattgatgaggca

SEQ ID NO: 1442665 - DNA, 25 bp, Homo sapien
cagtttgactactctaaatgcttgg

SEQ ID NO: 1442666 - DNA, 25 bp, Homo sapien
tcctgctgacagtcccaaacatatt

SEQ ID NO: 1442667 - DNA, 25 bp, Homo sapien
gaaagcaaagtccattgatccaaaa

SEQ ID NO: 1442668 - DNA, 25 bp, Homo sapien
gatccaaaacaagtgtaacctgcag

SEQ ID NO: 1442669 - DNA, 25 bp, Homo sapien
atgaaagcaaagtccattgatccaa

SEQ ID NO: 1442670 - DNA, 25 bp, Homo sapien
tgatccaaaacaagtgtaacctgca

SEQ ID NO: 1442671 - DNA, 25 bp, Homo sapien
caggctctcttgcagcaactggtga

SEQ ID NO: 1442672 - DNA, 25 bp, Homo sapien
tggagttctctttaccaggctctct

SEQ ID NO: 1442673 - DNA, 25 bp, Homo sapien
caactggtgagctcatgtaggctat

SEQ ID NO: 1442674 - DNA, 25 bp, Homo sapien
tgcctgcaggtcctcagtacctgtt

SEQ ID NO: 1442675 - DNA, 25 bp, Homo sapien
tcaagggcggctcgatggtgtggat

SEQ ID NO: 1442676 - DNA, 25 bp, Homo sapien
gtgtggatgaaagaactattgggaa

SEQ ID NO: 1442677 - DNA, 25 bp, Homo sapien
aagaactattgggaatggctactga

SEQ ID NO: 1442678 - DNA, 25 bp, Homo sapien
gggaatggctactgaaagatcaaag

SEQ ID NO: 1442679 - DNA, 25 bp, Homo sapien
caatctccacccatatggaaatacc

SEQ ID NO: 1442680 - DNA, 25 bp, Homo sapien
catctttgaatgtctctgctttact

SEQ ID NO: 1442681 - DNA, 25 bp, Homo sapien
tcttctcaggattgtatctctactg

SEQ ID NO: 1442682 - DNA, 25 bp, Homo sapien
gcaggtcttctatgacgttttacag

SEQ ID NO: 1442683 - DNA, 25 bp, Homo sapien
gaatcttaactattagtttctggaa

SEQ ID NO: 1442684 - DNA, 25 bp, Homo sapien
gagaagacttgtaaggccaacatgg

SEQ ID NO: 1442685 - DNA, 25 bp, Homo sapien
caacatggactctagtttccatcct

SEQ ID NO: 1442686 - DNA, 25 bp, Homo sapien
gaagacttgtaaggccaacatggac

SEQ ID NO: 1442687 - DNA, 25 bp, Homo sapien
caatcttattgtgccccagtgcaga

SEQ ID NO: 1442688 - DNA, 25 bp, Homo sapien
taaccgaaatataccaggaactgct

SEQ ID NO: 1442689 - DNA, 25 bp, Homo sapien
tcagacctgtgtgtgaagctctaga

SEQ ID NO: 1442690 - DNA, 25 bp, Homo sapien
gacttaacgatgctatgtgggagaa

SEQ ID NO: 1442691 - DNA, 25 bp, Homo sapien
ttctcaccatctgggtggtaaacat

SEQ ID NO: 1442692 - DNA, 25 bp, Homo sapien
tggcaggtccccgtggttgtctgac

SEQ ID NO: 1442693 - DNA, 25 bp, Homo sapien
tatacagagaagttttgcaatggca

SEQ ID NO: 1442694 - DNA, 25 bp, Homo sapien
ggtgaaaaactagaacagccaggtc

SEQ ID NO: 1442695 - DNA, 25 bp, Homo sapien
ctcagcatctcctatctcatttggg

SEQ ID NO: 1442696 - DNA, 25 bp, Homo sapien
tttctgacaccccattcgataggct

SEQ ID NO: 1442697 - DNA, 25 bp, Homo sapien
catttgggatgctatgcgtccacac

SEQ ID NO: 1442698 - DNA, 25 bp, Homo sapien
ttctgacaccccattcgataggctt

SEQ ID NO: 1442699 - DNA, 25 bp, Homo sapien
cacattcctgcataaggctctttat

SEQ ID NO: 1442700 - DNA, 25 bp, Homo sapien
cctttcatgtactgtgtggtccacc

SEQ ID NO: 1442701 - DNA, 25 bp, Homo sapien
gccttttctggtgcccgcaggcacc

SEQ ID NO: 1442702 - DNA, 25 bp, Homo sapien
tctgactggtcatgctcacatctgt

SEQ ID NO: 1442703 - DNA, 25 bp, Homo sapien
ctcagcctggtaacgctttctggcc

SEQ ID NO: 1442704 - DNA, 25 bp, Homo sapien
tcagcctggtaacgctttctggcca

SEQ ID NO: 1442705 - DNA, 25 bp, Homo sapien
actcagcctggtaacgctttctggc

SEQ ID NO: 1442706 - DNA, 25 bp, Homo sapien
ccactgtggcctccagatccattgc

SEQ ID NO: 1442707 - DNA, 25 bp, Homo sapien
ctgtggcctccagatccattgctga

SEQ ID NO: 1442708 - DNA, 25 bp, Homo sapien
gaaggatgccattttgaatttgcca

SEQ ID NO: 1442709 - DNA, 25 bp, Homo sapien
aaggatgccattttgaatttgccac

SEQ ID NO: 1442710 - DNA, 25 bp, Homo sapien
aaaccagccagacatagcggtggag

SEQ ID NO: 1442711 - DNA, 25 bp, Homo sapien
taaaccagccagacatagcggtgga

SEQ ID NO: 1442712 - DNA, 25 bp, Homo sapien
gaggcccgagcccacgtaatggaga

SEQ ID NO: 1442713 - DNA, 25 bp, Homo sapien
tccggaggcccgagcccacgtaatg

SEQ ID NO: 1442714 - DNA, 25 bp, Homo sapien
gcccgagcccacgtaatggagatga

SEQ ID NO: 1442715 - DNA, 25 bp, Homo sapien
cgagcccacgtaatggagatgactg

SEQ ID NO: 1442716 - DNA, 25 bp, Homo sapien
aaatgacgccattcagtgtattggg

SEQ ID NO: 1442717 - DNA, 25 bp, Homo sapien
acgccattcagtgtattggggcttc

SEQ ID NO: 1442718 - DNA, 25 bp, Homo sapien
tgacgccattcagtgtattggggct

SEQ ID NO: 1442719 - DNA, 25 bp, Homo sapien
aatgacgccattcagtgtattgggg

SEQ ID NO: 1442720 - DNA, 25 bp, Homo sapien
gagtttccttgactcaagatcatcc

SEQ ID NO: 1442721 - DNA, 25 bp, Homo sapien
ccttgactcaagatcatcccatgaa

SEQ ID NO: 1442722 - DNA, 25 bp, Homo sapien
gaccaaggtgtagagtttccttgac

SEQ ID NO: 1442723 - DNA, 25 bp, Homo sapien
tgtagagtttccttgactcaagatc

SEQ ID NO: 1442724 - DNA, 25 bp, Homo sapien
taggtgggcgtcagcactttgccca

SEQ ID NO: 1442725 - DNA, 25 bp, Homo sapien
ctaggtgggcgtcagcactttgccc

SEQ ID NO: 1442726 - DNA, 25 bp, Homo sapien
gtcagcactttgcccagctcgtcca

SEQ ID NO: 1442727 - DNA, 25 bp, Homo sapien
ggcgtcagcactttgcccagctcgt

SEQ ID NO: 1442728 - DNA, 25 bp, Homo sapien
ggcctggaccgcttgctgaggtccc

SEQ ID NO: 1442729 - DNA, 25 bp, Homo sapien
tggcgtaggcgacatgcagcgagtg

SEQ ID NO: 1442730 - DNA, 25 bp, Homo sapien
tcgccctggcgtaggcgacatgcag

SEQ ID NO: 1442731 - DNA, 25 bp, Homo sapien
cgtcgccctggcgtaggcgacatgc

SEQ ID NO: 1442732 - DNA, 25 bp, Homo sapien
atgtttcctactggtagggtcgtat

SEQ ID NO: 1442733 - DNA, 25 bp, Homo sapien
tcctactggtagggtcgtatttcat

SEQ ID NO: 1442734 - DNA, 25 bp, Homo sapien
ttcctactggtagggtcgtatttca

SEQ ID NO: 1442735 - DNA, 25 bp, Homo sapien
gatgtttcctactggtagggtcgta

SEQ ID NO: 1442736 - DNA, 25 bp, Homo sapien
gggttcttagatatcttcaagtcag

SEQ ID NO: 1442737 - DNA, 25 bp, Homo sapien
tgactagttactggaagcaatgaca

SEQ ID NO: 1442738 - DNA, 25 bp, Homo sapien
cacagtgccaatctggtgtgacatt

SEQ ID NO: 1442739 - DNA, 25 bp, Homo sapien
ggaatgcttaggtttcacagtgcca

SEQ ID NO: 1442740 - DNA, 25 bp, Homo sapien
ctttcaatgaacagctgaattccac

SEQ ID NO: 1442741 - DNA, 25 bp, Homo sapien
atgaacagctgaattccacttccgg

SEQ ID NO: 1442742 - DNA, 25 bp, Homo sapien
agctgaattccacttccggcatgaa

SEQ ID NO: 1442743 - DNA, 25 bp, Homo sapien
gaacagctgaattccacttccggca

SEQ ID NO: 1442744 - DNA, 25 bp, Homo sapien
cccttggataaatgccacttgatca

SEQ ID NO: 1442745 - DNA, 25 bp, Homo sapien
aatgtttggtaaaatgtggtagtga

SEQ ID NO: 1442746 - DNA, 25 bp, Homo sapien
ttggtaaaatgtggtagtgaagcca

SEQ ID NO: 1442747 - DNA, 25 bp, Homo sapien
tcccttggataaatgccacttgatc

SEQ ID NO: 1442748 - DNA, 25 bp, Homo sapien
gacataacaaaatggcaggagtaag

SEQ ID NO: 1442749 - DNA, 25 bp, Homo sapien
tataagatatgataaccccaaatcc

SEQ ID NO: 1442750 - DNA, 25 bp, Homo sapien
caacaatctgttgcttacaagaaac

SEQ ID NO: 1442751 - DNA, 25 bp, Homo sapien
gaaggagtacctatacttatataac

SEQ ID NO: 1442752 - DNA, 25 bp, Homo sapien
tcagtagtctaatgatatgctggaa

SEQ ID NO: 1442753 - DNA, 25 bp, Homo sapien
tttactagcactttgttgtgacagt

SEQ ID NO: 1442754 - DNA, 25 bp, Homo sapien
aataagagcctaaagtttactagca

SEQ ID NO: 1442755 - DNA, 25 bp, Homo sapien
tagagaccaggctgactcatgtgtc

SEQ ID NO: 1442756 - DNA, 25 bp, Homo sapien
tctatcgtgtataccctctatgtgg

SEQ ID NO: 1442757 - DNA, 25 bp, Homo sapien
cccaggcttaaaagtgacacacatg

SEQ ID NO: 1442758 - DNA, 25 bp, Homo sapien
tcttgagagggcctgcaaattcaca

SEQ ID NO: 1442759 - DNA, 25 bp, Homo sapien
tggtcatctgggaattaatccttat

SEQ ID NO: 1442760 - DNA, 25 bp, Homo sapien
ccttgtatactttgacattgatcct

SEQ ID NO: 1442761 - DNA, 25 bp, Homo sapien
ccatatgaaggaggcccttgtatac

SEQ ID NO: 1442762 - DNA, 25 bp, Homo sapien
tgatcctcatatccctcaccttgtt

SEQ ID NO: 1442763 - DNA, 25 bp, Homo sapien
taaggcaaagcttcccaaccatatg

SEQ ID NO: 1442764 - DNA, 25 bp, Homo sapien
tacggagaactgtactctcacccat

SEQ ID NO: 1442765 - DNA, 25 bp, Homo sapien
cttgtactactttctggtttcccag

SEQ ID NO: 1442766 - DNA, 25 bp, Homo sapien
ctggagcatttaaacgagtacggag

SEQ ID NO: 1442767 - DNA, 25 bp, Homo sapien
ctcaacatctgcctcaaactttact

SEQ ID NO: 1442768 - DNA, 25 bp, Homo sapien
caagatgtagcaggcgaagaataca

SEQ ID NO: 1442769 - DNA, 25 bp, Homo sapien
cagcggtcatgggatgaagactgct

SEQ ID NO: 1442770 - DNA, 25 bp, Homo sapien
ttcaagatgtagcaggcgaagaata

SEQ ID NO: 1442771 - DNA, 25 bp, Homo sapien
gatgaagactgctcgtggttgctgt

SEQ ID NO: 1442772 - DNA, 25 bp, Homo sapien
gagaaggataaagccatgtccttag

SEQ ID NO: 1442773 - DNA, 25 bp, Homo sapien
aaggataaagccatgtccttagagt

SEQ ID NO: 1442774 - DNA, 25 bp, Homo sapien
ctgagaaggataaagccatgtcctt

SEQ ID NO: 1442775 - DNA, 25 bp, Homo sapien
gaaggataaagccatgtccttagag

SEQ ID NO: 1442776 - DNA, 25 bp, Homo sapien
tctgagagctggttgaacatcctcc

SEQ ID NO: 1442777 - DNA, 25 bp, Homo sapien
ctctgagagctggttgaacatcctc

SEQ ID NO: 1442778 - DNA, 25 bp, Homo sapien
tgagagctggttgaacatcctcctc

SEQ ID NO: 1442779 - DNA, 25 bp, Homo sapien
agagctggttgaacatcctcctcca

SEQ ID NO: 1442780 - DNA, 25 bp, Homo sapien
tcttttggcgcaaggcagaatgcat

SEQ ID NO: 1442781 - DNA, 25 bp, Homo sapien
cactctgctggatactcttttggcg

SEQ ID NO: 1442782 - DNA, 25 bp, Homo sapien
ggatactcttttggcgcaaggcaga

SEQ ID NO: 1442783 - DNA, 25 bp, Homo sapien
gctggatactcttttggcgcaaggc

SEQ ID NO: 1442784 - DNA, 25 bp, Homo sapien
tctctctttcatcccgacacctgga

SEQ ID NO: 1442785 - DNA, 25 bp, Homo sapien
ctggaaacaaagcactctgacatca

SEQ ID NO: 1442786 - DNA, 25 bp, Homo sapien
tttcatcccgacacctggaaacaaa

SEQ ID NO: 1442787 - DNA, 25 bp, Homo sapien
tggaaacaaagcactctgacatcat

SEQ ID NO: 1442788 - DNA, 25 bp, Homo sapien
tcttgcgttcctcacatccctttgg

SEQ ID NO: 1442789 - DNA, 25 bp, Homo sapien
tccctttggcctacagtttaattga

SEQ ID NO: 1442790 - DNA, 25 bp, Homo sapien
gaattattgatgcagtgatagcctt

SEQ ID NO: 1442791 - DNA, 25 bp, Homo sapien
ccttctaaaggcctgtcactggtga

SEQ ID NO: 1442792 - DNA, 25 bp, Homo sapien
taccaagctgatgcattctaagcaa

SEQ ID NO: 1442793 - DNA, 25 bp, Homo sapien
tttgaattggtttccagtaccaagc

SEQ ID NO: 1442794 - DNA, 25 bp, Homo sapien
ggtttccagtaccaagctgatgcat

SEQ ID NO: 1442795 - DNA, 25 bp, Homo sapien
ctaagcaataactttccatccactg

SEQ ID NO: 1442796 - DNA, 25 bp, Homo sapien
ttatggcaaaatgcacttgatatgt

SEQ ID NO: 1442797 - DNA, 25 bp, Homo sapien
tgtttgccagaacgaaactcataca

SEQ ID NO: 1442798 - DNA, 25 bp, Homo sapien
atgcacttgatatgtttgccagaac

SEQ ID NO: 1442799 - DNA, 25 bp, Homo sapien
gccagaacgaaactcatacacaaag

SEQ ID NO: 1442800 - DNA, 25 bp, Homo sapien
tagaatctgaaaccttccaaggagt

SEQ ID NO: 1442801 - DNA, 25 bp, Homo sapien
acttctttgctagatggaccccatg

SEQ ID NO: 1442802 - DNA, 25 bp, Homo sapien
ggtcatcaagtcacggtatctcagg

SEQ ID NO: 1442803 - DNA, 25 bp, Homo sapien
cctagggtcgtagaacacaaagctt

SEQ ID NO: 1442804 - DNA, 25 bp, Homo sapien
gaacagttgaggacaatccagtgag

SEQ ID NO: 1442805 - DNA, 25 bp, Homo sapien
gtcattgcatgttgggcggaagtca

SEQ ID NO: 1442806 - DNA, 25 bp, Homo sapien
cataaggtagctgtgttagaaagac

SEQ ID NO: 1442807 - DNA, 25 bp, Homo sapien
taagtactattgttgggcctccatg

SEQ ID NO: 1442808 - DNA, 25 bp, Homo sapien
ctcacctcttcattgcccagctgct

SEQ ID NO: 1442809 - DNA, 25 bp, Homo sapien
tgtgcactgggagttgtagctcacc

SEQ ID NO: 1442810 - DNA, 25 bp, Homo sapien
ttttcgtttgatgggttgattgtgc

SEQ ID NO: 1442811 - DNA, 25 bp, Homo sapien
cacatcaaccttgtcttttaggctg

SEQ ID NO: 1442812 - DNA, 25 bp, Homo sapien
tgaaccctgcgctgtttcacccagg

SEQ ID NO: 1442813 - DNA, 25 bp, Homo sapien
tctaaactactgtctggttccaggg

SEQ ID NO: 1442814 - DNA, 25 bp, Homo sapien
gagagaggtatgctttaccagggcc

SEQ ID NO: 1442815 - DNA, 25 bp, Homo sapien
cattaaaccttgcatgggagtggat

SEQ ID NO: 1442816 - DNA, 25 bp, Homo sapien
gagctggctgaaaggcatcagaaaa

SEQ ID NO: 1442817 - DNA, 25 bp, Homo sapien
tgtcctcattaccattcatttcata

SEQ ID NO: 1442818 - DNA, 25 bp, Homo sapien
taagagttgacccaagagctggctg

SEQ ID NO: 1442819 - DNA, 25 bp, Homo sapien
gaaaatggcattacctaaaatatat

SEQ ID NO: 1442820 - DNA, 25 bp, Homo sapien
agatcaaggtactggttgagccagt

SEQ ID NO: 1442821 - DNA, 25 bp, Homo sapien
agacagccgtcttcttgcatcctca

SEQ ID NO: 1442822 - DNA, 25 bp, Homo sapien
gttgagccagtgactagtgacggcc

SEQ ID NO: 1442823 - DNA, 25 bp, Homo sapien
gactagtgacggcccatcctggctt

SEQ ID NO: 1442824 - DNA, 25 bp, Homo sapien
taatccctgtctgctactataggac

SEQ ID NO: 1442825 - DNA, 25 bp, Homo sapien
tcctagggtgggttatgtttgtcca

SEQ ID NO: 1442826 - DNA, 25 bp, Homo sapien
cagattctaccactacagcaatggg

SEQ ID NO: 1442827 - DNA, 25 bp, Homo sapien
cactgctgatacttctgtgggccag

SEQ ID NO: 1442828 - DNA, 25 bp, Homo sapien
tggattgacaagatcctctggccct

SEQ ID NO: 1442829 - DNA, 25 bp, Homo sapien
cattcaggtgaacatgggtataatt

SEQ ID NO: 1442830 - DNA, 25 bp, Homo sapien
gacgtattgcctagtttacaacaga

SEQ ID NO: 1442831 - DNA, 25 bp, Homo sapien
ctctggcccttgtacattcaggtga

SEQ ID NO: 1442832 - DNA, 25 bp, Homo sapien
agttccatgtggttgcaagcgtgag

SEQ ID NO: 1442833 - DNA, 25 bp, Homo sapien
tattgtcgcacagatatgtaggtca

SEQ ID NO: 1442834 - DNA, 25 bp, Homo sapien
ttttcggtctaggatctcatgaggc

SEQ ID NO: 1442835 - DNA, 25 bp, Homo sapien
gcttgcttgattagattaggtccac

SEQ ID NO: 1442836 - DNA, 25 bp, Homo sapien
catgcctggctaagacataaggata

SEQ ID NO: 1442837 - DNA, 25 bp, Homo sapien
ccaagtatctagaggattagcaagg

SEQ ID NO: 1442838 - DNA, 25 bp, Homo sapien
ttgaaatcctagtctcttgagtagc

SEQ ID NO: 1442839 - DNA, 25 bp, Homo sapien
gggaagtcctcctgtccagtattat

SEQ ID NO: 1442840 - DNA, 25 bp, Homo sapien
cacgtaatggcacactcaactgaag

SEQ ID NO: 1442841 - DNA, 25 bp, Homo sapien
cagaggacgcagaccaactttatag

SEQ ID NO: 1442842 - DNA, 25 bp, Homo sapien
caactgaagtattaccattggtgcc

SEQ ID NO: 1442843 - DNA, 25 bp, Homo sapien
cccatctcaaaatacgcttgtgaag

SEQ ID NO: 1442844 - DNA, 25 bp, Homo sapien
gataacatagcttagagccatcact

SEQ ID NO: 1442845 - DNA, 25 bp, Homo sapien
taaaggagaccatgtagccatatca

SEQ ID NO: 1442846 - DNA, 25 bp, Homo sapien
ggtgccaggcttagagcagcaaaca

SEQ ID NO: 1442847 - DNA, 25 bp, Homo sapien
tttgacatcgttgttggtgccaggc

SEQ ID NO: 1442848 - DNA, 25 bp, Homo sapien
taaacatcattcacgtgcctgagat

SEQ ID NO: 1442849 - DNA, 25 bp, Homo sapien
tcacaatgcttttcccgccagaacg

SEQ ID NO: 1442850 - DNA, 25 bp, Homo sapien
gatactggcattgggagttcaagca

SEQ ID NO: 1442851 - DNA, 25 bp, Homo sapien
tatttggcaatatggagctcactgg

SEQ ID NO: 1442852 - DNA, 25 bp, Homo sapien
gaatgttgattgtgaccttttaaaa

SEQ ID NO: 1442853 - DNA, 25 bp, Homo sapien
tgagcttgtccacacagttcaaccc

SEQ ID NO: 1442854 - DNA, 25 bp, Homo sapien
agcttgtccacacagttcaacccac

SEQ ID NO: 1442855 - DNA, 25 bp, Homo sapien
aagcggggccacagttgcattcatt

SEQ ID NO: 1442856 - DNA, 25 bp, Homo sapien
tagggtacaatcaacggtcgatggt

SEQ ID NO: 1442857 - DNA, 25 bp, Homo sapien
gtcgatggttttgattttaattcca

SEQ ID NO: 1442858 - DNA, 25 bp, Homo sapien
tggttagccatagggtacaatcaac

SEQ ID NO: 1442859 - DNA, 25 bp, Homo sapien
tggagtagatgatggttagccatag

SEQ ID NO: 1442860 - DNA, 25 bp, Homo sapien
agtacagatacgttaactgatattc

SEQ ID NO: 1442861 - DNA, 25 bp, Homo sapien
gaaagtacagatacgttaactgata

SEQ ID NO: 1442862 - DNA, 25 bp, Homo sapien
tacagatacgttaactgatattcaa

SEQ ID NO: 1442863 - DNA, 25 bp, Homo sapien
tagaaagtacagatacgttaactga

SEQ ID NO: 1442864 - DNA, 25 bp, Homo sapien
tatttcccgtgagcttttagcaagc

SEQ ID NO: 1442865 - DNA, 25 bp, Homo sapien
tggttaccggagatcaatgcagaga

SEQ ID NO: 1442866 - DNA, 25 bp, Homo sapien
taaacagctgcaacattcgaaccat

SEQ ID NO: 1442867 - DNA, 25 bp, Homo sapien
tctgggacaattgacatgatggaca

SEQ ID NO: 1442868 - DNA, 25 bp, Homo sapien
tctgggaaaaggtctataaatgcat

SEQ ID NO: 1442869 - DNA, 25 bp, Homo sapien
cacagagactcagaacattgaacaa

SEQ ID NO: 1442870 - DNA, 25 bp, Homo sapien
aatatgcccataagtaccttaagtg

SEQ ID NO: 1442871 - DNA, 25 bp, Homo sapien
cattgtacggccataggaggaagac

SEQ ID NO: 1442872 - DNA, 25 bp, Homo sapien
caagcacaccattctatggatcagg

SEQ ID NO: 1442873 - DNA, 25 bp, Homo sapien
aacaaaattagcctcgtgaaatatt

SEQ ID NO: 1442874 - DNA, 25 bp, Homo sapien
cattctcaattctatattctgccag

SEQ ID NO: 1442875 - DNA, 25 bp, Homo sapien
ccagttttgttaagatcacctgaat

SEQ ID NO: 1442876 - DNA, 25 bp, Homo sapien
tgtgcgacattttctcaacccagtc

SEQ ID NO: 1442877 - DNA, 25 bp, Homo sapien
tcccatcccacaacaggtcccggtg

SEQ ID NO: 1442878 - DNA, 25 bp, Homo sapien
acttccagttctagggtgcatgtgc

SEQ ID NO: 1442879 - DNA, 25 bp, Homo sapien
caaacatggaaactaaaggctctac

SEQ ID NO: 1442880 - DNA, 25 bp, Homo sapien
tagccttttgaaggctggttcaaca

SEQ ID NO: 1442881 - DNA, 25 bp, Homo sapien
tttgaaggctggttcaacaaacaca

SEQ ID NO: 1442882 - DNA, 25 bp, Homo sapien
gatattagccttttgaaggctggtt

SEQ ID NO: 1442883 - DNA, 25 bp, Homo sapien
tgaaggctggttcaacaaacacaaa

SEQ ID NO: 1442884 - DNA, 25 bp, Homo sapien
caattggatagtacttacatgtccc

SEQ ID NO: 1442885 - DNA, 25 bp, Homo sapien
aatgtcaatgtaagaagtagatacc

SEQ ID NO: 1442886 - DNA, 25 bp, Homo sapien
caaatatatgttatgcaatagcagc

SEQ ID NO: 1442887 - DNA, 25 bp, Homo sapien
tacatgtcccattagctaacaggtt

SEQ ID NO: 1442888 - DNA, 25 bp, Homo sapien
caatgtataatctggagtcatttct

SEQ ID NO: 1442889 - DNA, 25 bp, Homo sapien
taacagacttgcctaaaaccccaca

SEQ ID NO: 1442890 - DNA, 25 bp, Homo sapien
ccaggagtcaatgtataatctggag

SEQ ID NO: 1442891 - DNA, 25 bp, Homo sapien
ttaggggctcagtgaaatttatggg

SEQ ID NO: 1442892 - DNA, 25 bp, Homo sapien
cattgtcagacatcagaacgggtcc

SEQ ID NO: 1442893 - DNA, 25 bp, Homo sapien
gtgtcatcacaccagtacccatgga

SEQ ID NO: 1442894 - DNA, 25 bp, Homo sapien
tctgaagagcaaggacacttaacgg

SEQ ID NO: 1442895 - DNA, 25 bp, Homo sapien
taaaactttgcagtgccttcagatc

SEQ ID NO: 1442896 - DNA, 25 bp, Homo sapien
catgttgtagtccaagaactctgac

SEQ ID NO: 1442897 - DNA, 25 bp, Homo sapien
tttgaagcagggaacagtcatgttg

SEQ ID NO: 1442898 - DNA, 25 bp, Homo sapien
gatgatttaggcagtagatttcccc

SEQ ID NO: 1442899 - DNA, 25 bp, Homo sapien
ccaaaatcaatgaagttctaggtga

SEQ ID NO: 1442900 - DNA, 25 bp, Homo sapien
ctgcgtctaatgagctgggaaggcc

SEQ ID NO: 1442901 - DNA, 25 bp, Homo sapien
ggctgaccctttttgctgcgtctaa

SEQ ID NO: 1442902 - DNA, 25 bp, Homo sapien
cttccgtgaggaaatgcagaatcag

SEQ ID NO: 1442903 - DNA, 25 bp, Homo sapien
agttggcagtgttcattcacatcca

SEQ ID NO: 1442904 - DNA, 25 bp, Homo sapien
tgaaggacccattgtccgcagcact

SEQ ID NO: 1442905 - DNA, 25 bp, Homo sapien
tacaagctggaaaaacgcagccctt

SEQ ID NO: 1442906 - DNA, 25 bp, Homo sapien
tgtctcagaggagcgtgaaggaccc

SEQ ID NO: 1442907 - DNA, 25 bp, Homo sapien
gctttgcccgtgctcaagtgacagt

SEQ ID NO: 1442908 - DNA, 25 bp, Homo sapien
accttcacaatgagttacttggtga

SEQ ID NO: 1442909 - DNA, 25 bp, Homo sapien
tgttacattgaaatgatagccacct

SEQ ID NO: 1442910 - DNA, 25 bp, Homo sapien
ttgaggtaatcaacaatactggatc

SEQ ID NO: 1442911 - DNA, 25 bp, Homo sapien
tgtttatgagaacaaacagtagctt

SEQ ID NO: 1442912 - DNA, 25 bp, Homo sapien
gaaaaatcgataacacagattagga

SEQ ID NO: 1442913 - DNA, 25 bp, Homo sapien
acacagattaggactaaaatatttc

SEQ ID NO: 1442914 - DNA, 25 bp, Homo sapien
tcgataacacagattaggactaaaa

SEQ ID NO: 1442915 - DNA, 25 bp, Homo sapien
aagtgcagaaaaatcgataacacag

SEQ ID NO: 1442916 - DNA, 25 bp, Homo sapien
tataactgtgaatcagtccatggta

SEQ ID NO: 1442917 - DNA, 25 bp, Homo sapien
cagccgggcccaatacatcttttta

SEQ ID NO: 1442918 - DNA, 25 bp, Homo sapien
tgtgcatgcctgctattctgctaag

SEQ ID NO: 1442919 - DNA, 25 bp, Homo sapien
gcattgttcacgtcaagtatataca

SEQ ID NO: 1442920 - DNA, 25 bp, Homo sapien
tatgtgtcccctactaccagaatgg

SEQ ID NO: 1442921 - DNA, 25 bp, Homo sapien
taatttgcccagagtaccacggtgg

SEQ ID NO: 1442922 - DNA, 25 bp, Homo sapien
tggaagctccattgcaacgggtatt

SEQ ID NO: 1442923 - DNA, 25 bp, Homo sapien
taaatatgaaatagcctcagggcct

SEQ ID NO: 1442924 - DNA, 25 bp, Homo sapien
tcaccagtcattgcacagtattgca

SEQ ID NO: 1442925 - DNA, 25 bp, Homo sapien
cgcagcctatcacagcatagacaag

SEQ ID NO: 1442926 - DNA, 25 bp, Homo sapien
taagtagttagttcaatggtcaaga

SEQ ID NO: 1442927 - DNA, 25 bp, Homo sapien
gggttcctgctctcacgcagcctat

SEQ ID NO: 1442928 - DNA, 25 bp, Homo sapien
gttgagtaacccatgtgcacccttc

SEQ ID NO: 1442929 - DNA, 25 bp, Homo sapien
atgttgagtaacccatgtgcaccct

SEQ ID NO: 1442930 - DNA, 25 bp, Homo sapien
tgttgagtaacccatgtgcaccctt

SEQ ID NO: 1442931 - DNA, 25 bp, Homo sapien
tgagtaacccatgtgcacccttcat

SEQ ID NO: 1442932 - DNA, 25 bp, Homo sapien
gaacaatgctgggtctacaaaagaa

SEQ ID NO: 1442933 - DNA, 25 bp, Homo sapien
tctatactactgcatcgccggagaa

SEQ ID NO: 1442934 - DNA, 25 bp, Homo sapien
cgccggagaacttgttaggaacaca

SEQ ID NO: 1442935 - DNA, 25 bp, Homo sapien
gaaacttcggcctagcaaatctatg

SEQ ID NO: 1442936 - DNA, 25 bp, Homo sapien
ctattgtgtaaagctgaagatttca

SEQ ID NO: 1442937 - DNA, 25 bp, Homo sapien
agttaatagcttctctgccatctca

SEQ ID NO: 1442938 - DNA, 25 bp, Homo sapien
gcctcctaagcttccatgtgactat

SEQ ID NO: 1442939 - DNA, 25 bp, Homo sapien
ggcaaattagctaagtcattccagg

SEQ ID NO: 1442940 - DNA, 25 bp, Homo sapien
taaaatcagctccatgtagaatcat

SEQ ID NO: 1442941 - DNA, 25 bp, Homo sapien
gctcaatttaatgatgatttcccag

SEQ ID NO: 1442942 - DNA, 25 bp, Homo sapien
tgttcactgccacagaaagttacct

SEQ ID NO: 1442943 - DNA, 25 bp, Homo sapien
ctctcaatgtttgtggtctcccaag

SEQ ID NO: 1442944 - DNA, 25 bp, Homo sapien
gattgtctccaataataggatctag

SEQ ID NO: 1442945 - DNA, 25 bp, Homo sapien
tgctatacgaataatacactcaggc

SEQ ID NO: 1442946 - DNA, 25 bp, Homo sapien
tttatacatatacagaggtcagaag

SEQ ID NO: 1442947 - DNA, 25 bp, Homo sapien
gaaatagggattgtactggtatcca

SEQ ID NO: 1442948 - DNA, 25 bp, Homo sapien
agtttctatactttctaccagctct

SEQ ID NO: 1442949 - DNA, 25 bp, Homo sapien
tgcaaaactataattaagccaacag

SEQ ID NO: 1442950 - DNA, 25 bp, Homo sapien
tattatgcaaggtagacaggtacct

SEQ ID NO: 1442951 - DNA, 25 bp, Homo sapien
gcacttatagacaagctgaatggct

SEQ ID NO: 1442952 - DNA, 25 bp, Homo sapien
catggaacagtagtcagaggccaag

SEQ ID NO: 1442953 - DNA, 25 bp, Homo sapien
tgggagcctgattcactgtcagacg

SEQ ID NO: 1442954 - DNA, 25 bp, Homo sapien
tggattcagcgagaactacctacag

SEQ ID NO: 1442955 - DNA, 25 bp, Homo sapien
cagcacatcttcaaaactgggagcc

SEQ ID NO: 1442956 - DNA, 25 bp, Homo sapien
gtatgttgtttggttaggtccttca

SEQ ID NO: 1442957 - DNA, 25 bp, Homo sapien
tatgttgtttggttaggtccttcaa

SEQ ID NO: 1442958 - DNA, 25 bp, Homo sapien
gtcgaagcgtctcatggaagccagt

SEQ ID NO: 1442959 - DNA, 25 bp, Homo sapien
cagtggcaccaagatgcttattaca

SEQ ID NO: 1442960 - DNA, 25 bp, Homo sapien
gcttattacaagtgccccgatgaga

SEQ ID NO: 1442961 - DNA, 25 bp, Homo sapien
tgtctgctggttcgcctaagtgatg

SEQ ID NO: 1442962 - DNA, 25 bp, Homo sapien
agaataagaaattctctgaaatgga

SEQ ID NO: 1442963 - DNA, 25 bp, Homo sapien
aacagcaaagcactttgattgaact

SEQ ID NO: 1442964 - DNA, 25 bp, Homo sapien
aatggaaacagcaaagcactttgat

SEQ ID NO: 1442965 - DNA, 25 bp, Homo sapien
tgattgaactaaaagaaatgacgta

SEQ ID NO: 1442966 - DNA, 25 bp, Homo sapien
ctttggaaagatgacgtgtttcttc

SEQ ID NO: 1442967 - DNA, 25 bp, Homo sapien
gatttaaatcaatctcccttcagtt

SEQ ID NO: 1442968 - DNA, 25 bp, Homo sapien
tagggtaccaccaaccaagctactc

SEQ ID NO: 1442969 - DNA, 25 bp, Homo sapien
tctgtacaactgtcattgaagattt

SEQ ID NO: 1442970 - DNA, 25 bp, Homo sapien
caactaaagatgtgtgaatgaccct

SEQ ID NO: 1442971 - DNA, 25 bp, Homo sapien
gctctagagactgcttaggaagcac

SEQ ID NO: 1442972 - DNA, 25 bp, Homo sapien
tggctgaaacgcaaggaagtgtatt

SEQ ID NO: 1442973 - DNA, 25 bp, Homo sapien
tagtcattacatatctctgcaggaa

SEQ ID NO: 1442974 - DNA, 25 bp, Homo sapien
tgtctgatcctcctattgaccaaag

SEQ ID NO: 1442975 - DNA, 25 bp, Homo sapien
aaccagtgctcccatttgataaaca

SEQ ID NO: 1442976 - DNA, 25 bp, Homo sapien
aatcttgcccgcattttctggatgg

SEQ ID NO: 1442977 - DNA, 25 bp, Homo sapien
tgtaagcggacaggaagaaaagcgt

SEQ ID NO: 1442978 - DNA, 25 bp, Homo sapien
tcattgatgaaagccaaaccccgaa

SEQ ID NO: 1442979 - DNA, 25 bp, Homo sapien
tgaatctctaataaaccactcgctg

SEQ ID NO: 1442980 - DNA, 25 bp, Homo sapien
tctaggagcgctgctttcaggcatg

SEQ ID NO: 1442981 - DNA, 25 bp, Homo sapien
gcttggcaagggctcatgaaactat

SEQ ID NO: 1442982 - DNA, 25 bp, Homo sapien
atctcagtatctagtaaccaggata

SEQ ID NO: 1442983 - DNA, 25 bp, Homo sapien
gctgctgtgatttgtttcttattac

SEQ ID NO: 1442984 - DNA, 25 bp, Homo sapien
cagtatctagtaaccaggatagaag

SEQ ID NO: 1442985 - DNA, 25 bp, Homo sapien
gtatctagtaaccaggatagaagct

SEQ ID NO: 1442986 - DNA, 25 bp, Homo sapien
tctctagcgcaataaaatcattaca

SEQ ID NO: 1442987 - DNA, 25 bp, Homo sapien
tctatttgagtgaggtgtgggtcta

SEQ ID NO: 1442988 - DNA, 25 bp, Homo sapien
gagggtatttgcatcatgttctagc

SEQ ID NO: 1442989 - DNA, 25 bp, Homo sapien
tgtgggtctagtggaaatctgcaga

SEQ ID NO: 1442990 - DNA, 25 bp, Homo sapien
taccacagtggtagatgagtaagta

SEQ ID NO: 1442991 - DNA, 25 bp, Homo sapien
ccttgggctatgattgtttacacac

SEQ ID NO: 1442992 - DNA, 25 bp, Homo sapien
tgtaatgcacagtatggcctaaata

SEQ ID NO: 1442993 - DNA, 25 bp, Homo sapien
tgtaggcatatgtagctttgagctc

SEQ ID NO: 1442994 - DNA, 25 bp, Homo sapien
gattgccttcacactcaaactgcag

SEQ ID NO: 1442995 - DNA, 25 bp, Homo sapien
ccggcctatggcctgctctatagat

SEQ ID NO: 1442996 - DNA, 25 bp, Homo sapien
tagattttgggcttgccagcttcca

SEQ ID NO: 1442997 - DNA, 25 bp, Homo sapien
aaatgcctccataaacccatgagat

SEQ ID NO: 1442998 - DNA, 25 bp, Homo sapien
tgaagatgaccatctgaatactgac

SEQ ID NO: 1442999 - DNA, 25 bp, Homo sapien
tgtcacagactccttcgtaaaattg

SEQ ID NO: 1443000 - DNA, 25 bp, Homo sapien
gactaatgcaggaaagttgtatggc

SEQ ID NO: 1443001 - DNA, 25 bp, Homo sapien
aactccttggtaaatcctgtcacag

SEQ ID NO: 1443002 - DNA, 25 bp, Homo sapien
ttgtaacctccgcatcctaggttca

SEQ ID NO: 1443003 - DNA, 25 bp, Homo sapien
ggtgtgaccttgactcattgtaacc

SEQ ID NO: 1443004 - DNA, 25 bp, Homo sapien
gcctgagcctcctcactagctggca

SEQ ID NO: 1443005 - DNA, 25 bp, Homo sapien
agtggtgtgaccttgactcattgta

SEQ ID NO: 1443006 - DNA, 25 bp, Homo sapien
tgtgtaagacttccatcccggatct

SEQ ID NO: 1443007 - DNA, 25 bp, Homo sapien
aataggctcggcatgcattgcgtgc

SEQ ID NO: 1443008 - DNA, 25 bp, Homo sapien
tgcacatagcagtggaataggctcg

SEQ ID NO: 1443009 - DNA, 25 bp, Homo sapien
cctgcctttgaatgggtaagacgtc

SEQ ID NO: 1443010 - DNA, 25 bp, Homo sapien
cactagagcgatgttccagcgcaca

SEQ ID NO: 1443011 - DNA, 25 bp, Homo sapien
taaagtatgcaacaattgtccctgg

SEQ ID NO: 1443012 - DNA, 25 bp, Homo sapien
tatggtgcccttgtcagtggagtca

SEQ ID NO: 1443013 - DNA, 25 bp, Homo sapien
tatgaacaaagcagcacactagagc

SEQ ID NO: 1443014 - DNA, 25 bp, Homo sapien
ttcataaagtcactcggaactcagc

SEQ ID NO: 1443015 - DNA, 25 bp, Homo sapien
gaatccctgttttcatgccggagag

SEQ ID NO: 1443016 - DNA, 25 bp, Homo sapien
tccatgatgcaggtgcagaatccct

SEQ ID NO: 1443017 - DNA, 25 bp, Homo sapien
cagacatcccttgctcctgtggaag

SEQ ID NO: 1443018 - DNA, 25 bp, Homo sapien
ccgtagaccatattctcttctcact

SEQ ID NO: 1443019 - DNA, 25 bp, Homo sapien
tgcaattctgtactaatgatttcca

SEQ ID NO: 1443020 - DNA, 25 bp, Homo sapien
agaatctcccgtagaccatattctc

SEQ ID NO: 1443021 - DNA, 25 bp, Homo sapien
gtcacatcttccctatgtttcctgt

SEQ ID NO: 1443022 - DNA, 25 bp, Homo sapien
gagttatatagacagaatgcagcct

SEQ ID NO: 1443023 - DNA, 25 bp, Homo sapien
cgtctagataaccaaacaggaatgc

SEQ ID NO: 1443024 - DNA, 25 bp, Homo sapien
cagtgcctaggctgacaaaactcaa

SEQ ID NO: 1443025 - DNA, 25 bp, Homo sapien
tctgcatatctaacaatctcctggg

SEQ ID NO: 1443026 - DNA, 25 bp, Homo sapien
gacgcagatgcagcgggaaggcggg

SEQ ID NO: 1443027 - DNA, 25 bp, Homo sapien
gatgacgcagatgcagcgggaaggc

SEQ ID NO: 1443028 - DNA, 25 bp, Homo sapien
gcggatgacgcagatgcagcgggaa

SEQ ID NO: 1443029 - DNA, 25 bp, Homo sapien
atgacgcagatgcagcgggaaggcg

SEQ ID NO: 1443030 - DNA, 25 bp, Homo sapien
cgtaggaagtctgtgcccgtgttct

SEQ ID NO: 1443031 - DNA, 25 bp, Homo sapien
cttgtaaaacgtaggaagtctgtgc

SEQ ID NO: 1443032 - DNA, 25 bp, Homo sapien
aaaacgtaggaagtctgtgcccgtg

SEQ ID NO: 1443033 - DNA, 25 bp, Homo sapien
atggcagaacttgtaaaacgtagga

SEQ ID NO: 1443034 - DNA, 25 bp, Homo sapien
tgcctggctcaggtatacaacgtga

SEQ ID NO: 1443035 - DNA, 25 bp, Homo sapien
tacaacgtgagtagccaaggaatga

SEQ ID NO: 1443036 - DNA, 25 bp, Homo sapien
taatattttgcagtccccttccagt

SEQ ID NO: 1443037 - DNA, 25 bp, Homo sapien
aatctaaggttttccctagcatggg

SEQ ID NO: 1443038 - DNA, 25 bp, Homo sapien
tcttgtctgcatttgcctgattttg

SEQ ID NO: 1443039 - DNA, 25 bp, Homo sapien
ggagtgctattcacagtcgcaggaa

SEQ ID NO: 1443040 - DNA, 25 bp, Homo sapien
aagcagttacgtctttgaaaagcac

SEQ ID NO: 1443041 - DNA, 25 bp, Homo sapien
taaattctgttcactgagtgggtaa

SEQ ID NO: 1443042 - DNA, 25 bp, Homo sapien
ggctgtgggatgtaaagagatcccc

SEQ ID NO: 1443043 - DNA, 25 bp, Homo sapien
tgcttatggtcagtctcaccaggta

SEQ ID NO: 1443044 - DNA, 25 bp, Homo sapien
cttcctacagaagggtgtatcacaa

SEQ ID NO: 1443045 - DNA, 25 bp, Homo sapien
caccaggtaatgtgtcatgaattca

SEQ ID NO: 1443046 - DNA, 25 bp, Homo sapien
ttttctgtatgtaccggatcacagg

SEQ ID NO: 1443047 - DNA, 25 bp, Homo sapien
taatctaattggaaaaggtccatca

SEQ ID NO: 1443048 - DNA, 25 bp, Homo sapien
cagacattgtattgatcagaagtaa

SEQ ID NO: 1443049 - DNA, 25 bp, Homo sapien
cctttttgacatccgaatttgaatt

SEQ ID NO: 1443050 - DNA, 25 bp, Homo sapien
gactcatgtcttctaagaataaaaa

SEQ ID NO: 1443051 - DNA, 25 bp, Homo sapien
ctttaataacttctcatcgccttcc

SEQ ID NO: 1443052 - DNA, 25 bp, Homo sapien
ccatccattccacaactgtgcagga

SEQ ID NO: 1443053 - DNA, 25 bp, Homo sapien
agccactgcccctttaataacttct

SEQ ID NO: 1443054 - DNA, 25 bp, Homo sapien
aataggtttggctggacttctgctc

SEQ ID NO: 1443055 - DNA, 25 bp, Homo sapien
catgaagctctttgttgtctccaat

SEQ ID NO: 1443056 - DNA, 25 bp, Homo sapien
gactgttgcattagcctcatgaagc

SEQ ID NO: 1443057 - DNA, 25 bp, Homo sapien
gctccttggctactgctgctgattc

SEQ ID NO: 1443058 - DNA, 25 bp, Homo sapien
cattcccctgttgtctgtgaccagc

SEQ ID NO: 1443059 - DNA, 25 bp, Homo sapien
tgttgtctgtgaccagccataacct

SEQ ID NO: 1443060 - DNA, 25 bp, Homo sapien
tctgtgaccagccataaccttctca

SEQ ID NO: 1443061 - DNA, 25 bp, Homo sapien
ccctgttgtctgtgaccagccataa

SEQ ID NO: 1443062 - DNA, 25 bp, Homo sapien
ccatggacaggttctacacgtgtta

SEQ ID NO: 1443063 - DNA, 25 bp, Homo sapien
cacgtgttatgtaaaaccttccatg

SEQ ID NO: 1443064 - DNA, 25 bp, Homo sapien
catatgccaggtagtcttccaggtg

SEQ ID NO: 1443065 - DNA, 25 bp, Homo sapien
gatctatataattcgagtgaactcc

SEQ ID NO: 1443066 - DNA, 25 bp, Homo sapien
ctactgaggagagctgatctggcat

SEQ ID NO: 1443067 - DNA, 25 bp, Homo sapien
tcagctgggttgatgactacattcc

SEQ ID NO: 1443068 - DNA, 25 bp, Homo sapien
taagcactgctgttatggtacaaac

SEQ ID NO: 1443069 - DNA, 25 bp, Homo sapien
tgcagtctctgttctagcacacact

SEQ ID NO: 1443070 - DNA, 25 bp, Homo sapien
aagaattagtctttgtccacacaca

SEQ ID NO: 1443071 - DNA, 25 bp, Homo sapien
aaactccagggatagaaatttacat

SEQ ID NO: 1443072 - DNA, 25 bp, Homo sapien
aaagcataagggcaatacaagtcca

SEQ ID NO: 1443073 - DNA, 25 bp, Homo sapien
gagaagagctctggatagatatgta

SEQ ID NO: 1443074 - DNA, 25 bp, Homo sapien
ttagttcacagcagtttagatgccc

SEQ ID NO: 1443075 - DNA, 25 bp, Homo sapien
cagcagataccgtgacaaccagttg

SEQ ID NO: 1443076 - DNA, 25 bp, Homo sapien
caaccagttgtgcatatgggcatcc

SEQ ID NO: 1443077 - DNA, 25 bp, Homo sapien
gcatatgggcatccaaacagcacct

SEQ ID NO: 1443078 - DNA, 25 bp, Homo sapien
aacagcacctcagttattctgaaag

SEQ ID NO: 1443079 - DNA, 25 bp, Homo sapien
cttcactcagtagtgttaactgaaa

SEQ ID NO: 1443080 - DNA, 25 bp, Homo sapien
ttcactcagtagtgttaactgaaaa

SEQ ID NO: 1443081 - DNA, 25 bp, Homo sapien
atatttttctttgcctatttctctc

SEQ ID NO: 1443082 - DNA, 25 bp, Homo sapien
tttttctttgcctatttctctcaaa

SEQ ID NO: 1443083 - DNA, 25 bp, Homo sapien
atttttctttgcctatttctctcaa

SEQ ID NO: 1443084 - DNA, 25 bp, Homo sapien
taatatttttctttgcctatttctc

SEQ ID NO: 1443085 - DNA, 25 bp, Homo sapien
ggcatcagagagaactaagggactt

SEQ ID NO: 1443086 - DNA, 25 bp, Homo sapien
gactcacagccaacaaccaaatggg

SEQ ID NO: 1443087 - DNA, 25 bp, Homo sapien
ttcacactgcttctgggcgaagaga

SEQ ID NO: 1443088 - DNA, 25 bp, Homo sapien
cacataggccaggatgacagctgtc

SEQ ID NO: 1443089 - DNA, 25 bp, Homo sapien
gaagtcagataagtccagtccatag

SEQ ID NO: 1443090 - DNA, 25 bp, Homo sapien
cataggattcagcagcgtatagaga

SEQ ID NO: 1443091 - DNA, 25 bp, Homo sapien
caaggagagaaagattgtctggact

SEQ ID NO: 1443092 - DNA, 25 bp, Homo sapien
gacttgtctcttatgaggagcagca

SEQ ID NO: 1443093 - DNA, 25 bp, Homo sapien
gatatccacagagaattacatgccc

SEQ ID NO: 1443094 - DNA, 25 bp, Homo sapien
tgaggttaggtttgagccacatgac

SEQ ID NO: 1443095 - DNA, 25 bp, Homo sapien
ttgaatcacaaagtggaaagcccct

SEQ ID NO: 1443096 - DNA, 25 bp, Homo sapien
taatgtctgacaagggatggagcaa

SEQ ID NO: 1443097 - DNA, 25 bp, Homo sapien
taatgtttctccaccttcccactca

SEQ ID NO: 1443098 - DNA, 25 bp, Homo sapien
ctaatgtttctccaccttcccactc

SEQ ID NO: 1443099 - DNA, 25 bp, Homo sapien
aatgtttctccaccttcccactcac

SEQ ID NO: 1443100 - DNA, 25 bp, Homo sapien
tgccactagcttctccagggttggg

SEQ ID NO: 1443101 - DNA, 25 bp, Homo sapien
ctgagcatggaagacgcagaaactt

SEQ ID NO: 1443102 - DNA, 25 bp, Homo sapien
tgccttctgagcatggaagacgcag

SEQ ID NO: 1443103 - DNA, 25 bp, Homo sapien
gacaggctgatgctgttcaggtgct

SEQ ID NO: 1443104 - DNA, 25 bp, Homo sapien
acaggctgatgctgttcaggtgctg

SEQ ID NO: 1443105 - DNA, 25 bp, Homo sapien
aggtgagtaaaagatggaacagttt

SEQ ID NO: 1443106 - DNA, 25 bp, Homo sapien
tgaaggtgagtaaaagatggaacag

SEQ ID NO: 1443107 - DNA, 25 bp, Homo sapien
gctatagaaactctagccacttttc

SEQ ID NO: 1443108 - DNA, 25 bp, Homo sapien
tcaatggctatagaaactctagcca

SEQ ID NO: 1443109 - DNA, 25 bp, Homo sapien
cacaggagacttaaacctcctagaa

SEQ ID NO: 1443110 - DNA, 25 bp, Homo sapien
aacacaggagacttaaacctcctag

SEQ ID NO: 1443111 - DNA, 25 bp, Homo sapien
acacaggagacttaaacctcctaga

SEQ ID NO: 1443112 - DNA, 25 bp, Homo sapien
caaacacaggagacttaaacctcct

SEQ ID NO: 1443113 - DNA, 25 bp, Homo sapien
tcttgttatcatgatgttggctggc

SEQ ID NO: 1443114 - DNA, 25 bp, Homo sapien
caatgggtcttggttgtgccttata

SEQ ID NO: 1443115 - DNA, 25 bp, Homo sapien
ccctttattatgagcgtgtgtgtca

SEQ ID NO: 1443116 - DNA, 25 bp, Homo sapien
tgtgatcacctcatagcgtcactgg

SEQ ID NO: 1443117 - DNA, 25 bp, Homo sapien
gacctttagcattgggaatgctgaa

SEQ ID NO: 1443118 - DNA, 25 bp, Homo sapien
ttaactctgaaccagtccaatgacc

SEQ ID NO: 1443119 - DNA, 25 bp, Homo sapien
cagtccaatgacctttagcattggg

SEQ ID NO: 1443120 - DNA, 25 bp, Homo sapien
tctgaaccagtccaatgacctttag

SEQ ID NO: 1443121 - DNA, 25 bp, Homo sapien
taatgggatttaatatgccatcaca

SEQ ID NO: 1443122 - DNA, 25 bp, Homo sapien
gctctgttaaccgtttctatgacat

SEQ ID NO: 1443123 - DNA, 25 bp, Homo sapien
taaagtgcttagatatagctctgtt

SEQ ID NO: 1443124 - DNA, 25 bp, Homo sapien
tcaacacaaggataataaagtgctt

SEQ ID NO: 1443125 - DNA, 25 bp, Homo sapien
gggctccatgagacttgagaattta

SEQ ID NO: 1443126 - DNA, 25 bp, Homo sapien
cattccgttgtttagcaagtctcat

SEQ ID NO: 1443127 - DNA, 25 bp, Homo sapien
gatctgttcccacctcaatgagtga

SEQ ID NO: 1443128 - DNA, 25 bp, Homo sapien
tctaaaacatgtcccatatgatctg

SEQ ID NO: 1443129 - DNA, 25 bp, Homo sapien
tatcatggttgataaaagctgtgca

SEQ ID NO: 1443130 - DNA, 25 bp, Homo sapien
gtggaaagttctgctgtatcatggt

SEQ ID NO: 1443131 - DNA, 25 bp, Homo sapien
tagtgaatgcgttctgcaccttgtg

SEQ ID NO: 1443132 - DNA, 25 bp, Homo sapien
gacctatctttataccacttattat

SEQ ID NO: 1443133 - DNA, 25 bp, Homo sapien
gacggagggagtgtgacgcactgca

SEQ ID NO: 1443134 - DNA, 25 bp, Homo sapien
aagacggagggagtgtgacgcactg

SEQ ID NO: 1443135 - DNA, 25 bp, Homo sapien
cggagggagtgtgacgcactgcaga

SEQ ID NO: 1443136 - DNA, 25 bp, Homo sapien
gagggagtgtgacgcactgcagagg

SEQ ID NO: 1443137 - DNA, 25 bp, Homo sapien
gacacatatttcttagcccagtatg

SEQ ID NO: 1443138 - DNA, 25 bp, Homo sapien
tatgcttgacaatgtatactcagca

SEQ ID NO: 1443139 - DNA, 25 bp, Homo sapien
tcattgaaagtaggttgttaaagcc

SEQ ID NO: 1443140 - DNA, 25 bp, Homo sapien
aaagggttctgcattctcattggtc

SEQ ID NO: 1443141 - DNA, 25 bp, Homo sapien
catgtcccaagtcagccaatcaggg

SEQ ID NO: 1443142 - DNA, 25 bp, Homo sapien
gatgtgatctggacctgcctaaaca

SEQ ID NO: 1443143 - DNA, 25 bp, Homo sapien
tggaaacatcattattgtgagccca

SEQ ID NO: 1443144 - DNA, 25 bp, Homo sapien
tacacatttgttttggcctcaacag

SEQ ID NO: 1443145 - DNA, 25 bp, Homo sapien
ggaaaccacataactttagaatgac

SEQ ID NO: 1443146 - DNA, 25 bp, Homo sapien
tgtttatacacatggacagcaatgt

SEQ ID NO: 1443147 - DNA, 25 bp, Homo sapien
accacataactttagaatgactgtt

SEQ ID NO: 1443148 - DNA, 25 bp, Homo sapien
cagcaatgtcataagctgcagggtt

SEQ ID NO: 1443149 - DNA, 25 bp, Homo sapien
aaagcttgagttccaaaccttagca

SEQ ID NO: 1443150 - DNA, 25 bp, Homo sapien
ttttcccacaaagcttgagttccaa

SEQ ID NO: 1443151 - DNA, 25 bp, Homo sapien
ccacaaagcttgagttccaaacctt

SEQ ID NO: 1443152 - DNA, 25 bp, Homo sapien
gtcttttcccacaaagcttgagttc

SEQ ID NO: 1443153 - DNA, 25 bp, Homo sapien
tcagcatgacttcaggtttctcatg

SEQ ID NO: 1443154 - DNA, 25 bp, Homo sapien
ttgagggtttgtgccttcagcttgt

SEQ ID NO: 1443155 - DNA, 25 bp, Homo sapien
aatttgagggtttgtgccttcagct

SEQ ID NO: 1443156 - DNA, 25 bp, Homo sapien
tttaatttgagggtttgtgccttca

SEQ ID NO: 1443157 - DNA, 25 bp, Homo sapien
tattcatggtgacaatttcacccac

SEQ ID NO: 1443158 - DNA, 25 bp, Homo sapien
cagattgtgccttctcccagcaggc

SEQ ID NO: 1443159 - DNA, 25 bp, Homo sapien
agcagattgtgccttctcccagcag

SEQ ID NO: 1443160 - DNA, 25 bp, Homo sapien
ccttgcttattcatggtgacaattt

SEQ ID NO: 1443161 - DNA, 25 bp, Homo sapien
tgctgtcttgcaggcctaaccccat

SEQ ID NO: 1443162 - DNA, 25 bp, Homo sapien
ctcctgggacgtgtaggtctgagtt

SEQ ID NO: 1443163 - DNA, 25 bp, Homo sapien
ccctcctgggacgtgtaggtctgag

SEQ ID NO: 1443164 - DNA, 25 bp, Homo sapien
tgtcttgcaggcctaaccccatggc

SEQ ID NO: 1443165 - DNA, 25 bp, Homo sapien
cacaggtttctgctactattggctc

SEQ ID NO: 1443166 - DNA, 25 bp, Homo sapien
ggcacaggtttctgctactattggc

SEQ ID NO: 1443167 - DNA, 25 bp, Homo sapien
acaggtttctgctactattggctct

SEQ ID NO: 1443168 - DNA, 25 bp, Homo sapien
aggggcacaggtttctgctactatt

SEQ ID NO: 1443169 - DNA, 25 bp, Homo sapien
atcctgagggggtgcagtctcaact

SEQ ID NO: 1443170 - DNA, 25 bp, Homo sapien
gcctccatcccacacaagatcctga

SEQ ID NO: 1443171 - DNA, 25 bp, Homo sapien
cacaagatcctgagggggtgcagtc

SEQ ID NO: 1443172 - DNA, 25 bp, Homo sapien
ccacacaagatcctgagggggtgca

SEQ ID NO: 1443173 - DNA, 25 bp, Homo sapien
tatagtgccaatgaggcctcttcct

SEQ ID NO: 1443174 - DNA, 25 bp, Homo sapien
agtgccaatgaggcctcttccttgc

SEQ ID NO: 1443175 - DNA, 25 bp, Homo sapien
tagtgccaatgaggcctcttccttg

SEQ ID NO: 1443176 - DNA, 25 bp, Homo sapien
tgccaatgaggcctcttccttgccc

SEQ ID NO: 1443177 - DNA, 25 bp, Homo sapien
gatgctttggtctttgccacggtgg

SEQ ID NO: 1443178 - DNA, 25 bp, Homo sapien
ggatgcagccaaccgaaacaagttt

SEQ ID NO: 1443179 - DNA, 25 bp, Homo sapien
ggaaaatgacctaagaccacctgca

SEQ ID NO: 1443180 - DNA, 25 bp, Homo sapien
catttcccgggtgtagaattgcaca

SEQ ID NO: 1443181 - DNA, 25 bp, Homo sapien
tccaataacattatcttcatccaag

SEQ ID NO: 1443182 - DNA, 25 bp, Homo sapien
ccaataacattatcttcatccaagg

SEQ ID NO: 1443183 - DNA, 25 bp, Homo sapien
tggtatcttgcctggaaccttgcac

SEQ ID NO: 1443184 - DNA, 25 bp, Homo sapien
tgcatccaaatggtttttgccaggg

SEQ ID NO: 1443185 - DNA, 25 bp, Homo sapien
gggtcttgtactgctgcgaagccag

SEQ ID NO: 1443186 - DNA, 25 bp, Homo sapien
aactcgcttcttcgtcattcctgag

SEQ ID NO: 1443187 - DNA, 25 bp, Homo sapien
ttcatcaagcacagataagcagatc

SEQ ID NO: 1443188 - DNA, 25 bp, Homo sapien
gccctgattccttagaaatactttc

SEQ ID NO: 1443189 - DNA, 25 bp, Homo sapien
gtagattccaagctacaaccacctg

SEQ ID NO: 1443190 - DNA, 25 bp, Homo sapien
caaccacctggatgtgttttatttc

SEQ ID NO: 1443191 - DNA, 25 bp, Homo sapien
tcgaatctgcaggtgacctctctgg

SEQ ID NO: 1443192 - DNA, 25 bp, Homo sapien
aacataggcagttatggctggcctc

SEQ ID NO: 1443193 - DNA, 25 bp, Homo sapien
gttagaatgttctattcgaatctgc

SEQ ID NO: 1443194 - DNA, 25 bp, Homo sapien
tgttccattccatgggttagaatgt

SEQ ID NO: 1443195 - DNA, 25 bp, Homo sapien
ttccatttctcaatccgctcaaatt

SEQ ID NO: 1443196 - DNA, 25 bp, Homo sapien
tgtcttgtctgaatcactgttaata

SEQ ID NO: 1443197 - DNA, 25 bp, Homo sapien
tcaatccgctcaaattcatactacc

SEQ ID NO: 1443198 - DNA, 25 bp, Homo sapien
ccttctaagatatcatgtcttgtct

SEQ ID NO: 1443199 - DNA, 25 bp, Homo sapien
tgcattgtaactctcagcttcacct

SEQ ID NO: 1443200 - DNA, 25 bp, Homo sapien
tgcttcttcatgctaactcgccgct

SEQ ID NO: 1443201 - DNA, 25 bp, Homo sapien
tcatattttatcacgcagctttcct

SEQ ID NO: 1443202 - DNA, 25 bp, Homo sapien
tccaggggccatccggacaagggtc

SEQ ID NO: 1443203 - DNA, 25 bp, Homo sapien
tcctccttggagaaaactgtgccat

SEQ ID NO: 1443204 - DNA, 25 bp, Homo sapien
tcagcagatcgaaggggctttctgg

SEQ ID NO: 1443205 - DNA, 25 bp, Homo sapien
tccatagggaattggtatctgtcat

SEQ ID NO: 1443206 - DNA, 25 bp, Homo sapien
cgtggcgatgcgtcctttttccact

SEQ ID NO: 1443207 - DNA, 25 bp, Homo sapien
tctggacactttcttcgtggcgatg

SEQ ID NO: 1443208 - DNA, 25 bp, Homo sapien
aaactcgactgaacgtgccttgggc

SEQ ID NO: 1443209 - DNA, 25 bp, Homo sapien
gcagaaatttgcattgatggatgtt

SEQ ID NO: 1443210 - DNA, 25 bp, Homo sapien
tgctcatcagcacataccgagttga

SEQ ID NO: 1443211 - DNA, 25 bp, Homo sapien
caggaaatgatgtacttgaaactca

SEQ ID NO: 1443212 - DNA, 25 bp, Homo sapien
tcacattcattaagacctaggtgag

SEQ ID NO: 1443213 - DNA, 25 bp, Homo sapien
ttcattaagacctaggtgagtgcag

SEQ ID NO: 1443214 - DNA, 25 bp, Homo sapien
tcattaagacctaggtgagtgcaga

SEQ ID NO: 1443215 - DNA, 25 bp, Homo sapien
cattcattaagacctaggtgagtgc

SEQ ID NO: 1443216 - DNA, 25 bp, Homo sapien
gatgaggacagcatgactcaaggca

SEQ ID NO: 1443217 - DNA, 25 bp, Homo sapien
catgactcaaggcaatccatgcagg

SEQ ID NO: 1443218 - DNA, 25 bp, Homo sapien
tcaaggcaatccatgcaggaagatg

SEQ ID NO: 1443219 - DNA, 25 bp, Homo sapien
gacagcatgactcaaggcaatccat

SEQ ID NO: 1443220 - DNA, 25 bp, Homo sapien
ctcccagaaggagttaaaagctgcc

SEQ ID NO: 1443221 - DNA, 25 bp, Homo sapien
tgctcccagaaggagttaaaagctg

SEQ ID NO: 1443222 - DNA, 25 bp, Homo sapien
tcccagaaggagttaaaagctgcct

SEQ ID NO: 1443223 - DNA, 25 bp, Homo sapien
ccagaaggagttaaaagctgcctgt

SEQ ID NO: 1443224 - DNA, 25 bp, Homo sapien
gctttactaactgtatcacaacagg

SEQ ID NO: 1443225 - DNA, 25 bp, Homo sapien
gagcatgtagacagctttactaact

SEQ ID NO: 1443226 - DNA, 25 bp, Homo sapien
tgtatcacaacaggtaagcatgaac

SEQ ID NO: 1443227 - DNA, 25 bp, Homo sapien
ttcatacacatcagagcatgtagac

SEQ ID NO: 1443228 - DNA, 25 bp, Homo sapien
gggattgggttacaaacaggtctgc

SEQ ID NO: 1443229 - DNA, 25 bp, Homo sapien
ctgccacagcctgccatttaaaact

SEQ ID NO: 1443230 - DNA, 25 bp, Homo sapien
agctgcctccaacaatgttgcccat

SEQ ID NO: 1443231 - DNA, 25 bp, Homo sapien
ccacagcctgccatttaaaactact

SEQ ID NO: 1443232 - DNA, 25 bp, Homo sapien
ctgcctttctaatccagtctttaaa

SEQ ID NO: 1443233 - DNA, 25 bp, Homo sapien
aactgcctttctaatccagtcttta

SEQ ID NO: 1443234 - DNA, 25 bp, Homo sapien
gggtccttcccaagcattggttgct

SEQ ID NO: 1443235 - DNA, 25 bp, Homo sapien
ttcccaagcattggttgctcttttg

SEQ ID NO: 1443236 - DNA, 25 bp, Homo sapien
gagagtctcaattcaggcattttgt

SEQ ID NO: 1443237 - DNA, 25 bp, Homo sapien
tcttgcccaagtaattcatgcctaa

SEQ ID NO: 1443238 - DNA, 25 bp, Homo sapien
tgtgttcttctctcgcattggtgct

SEQ ID NO: 1443239 - DNA, 25 bp, Homo sapien
gcattggtgctattgtcctgtgttg

SEQ ID NO: 1443240 - DNA, 25 bp, Homo sapien
gctcagagctggtaattgaggataa

SEQ ID NO: 1443241 - DNA, 25 bp, Homo sapien
accctttcctctcactatgaggatg

SEQ ID NO: 1443242 - DNA, 25 bp, Homo sapien
caagtttgtcagaaacttgctcaga

SEQ ID NO: 1443243 - DNA, 25 bp, Homo sapien
gatgcattcggtgtaaaattggttc

SEQ ID NO: 1443244 - DNA, 25 bp, Homo sapien
ggcattgaacattattccccgtgat

SEQ ID NO: 1443245 - DNA, 25 bp, Homo sapien
caaaccgtgggagatgtactttatc

SEQ ID NO: 1443246 - DNA, 25 bp, Homo sapien
taagggactgtgtacagcccagggc

SEQ ID NO: 1443247 - DNA, 25 bp, Homo sapien
tctcagtgtgagtagtccatttgcc

SEQ ID NO: 1443248 - DNA, 25 bp, Homo sapien
aaatgtgctctgtcttgtatgactt

SEQ ID NO: 1443249 - DNA, 25 bp, Homo sapien
gggaacttaaactaggatcagaggc

SEQ ID NO: 1443250 - DNA, 25 bp, Homo sapien
agctgaaaatattcctggggaactt

SEQ ID NO: 1443251 - DNA, 25 bp, Homo sapien
ccaggcacgtggcaagttgtagttt

SEQ ID NO: 1443252 - DNA, 25 bp, Homo sapien
taaaggagatttggttccactctcc

SEQ ID NO: 1443253 - DNA, 25 bp, Homo sapien
caagtggtattgacctcgttgccaa

SEQ ID NO: 1443254 - DNA, 25 bp, Homo sapien
tccatccctaaatgtgacggcaggg

SEQ ID NO: 1443255 - DNA, 25 bp, Homo sapien
gaaggttggatttgcaagtggtatt

SEQ ID NO: 1443256 - DNA, 25 bp, Homo sapien
cacaggacatgttggtcctcttgaa

SEQ ID NO: 1443257 - DNA, 25 bp, Homo sapien
gctgagagataaggcgcagactgca

SEQ ID NO: 1443258 - DNA, 25 bp, Homo sapien
catcagagaggatgaacgcatggct

SEQ ID NO: 1443259 - DNA, 25 bp, Homo sapien
gcagactgcagctttaactgctaca

SEQ ID NO: 1443260 - DNA, 25 bp, Homo sapien
catcccgtcctgtgtagcatttctg

SEQ ID NO: 1443261 - DNA, 25 bp, Homo sapien
tcaagtacttaacatgcacttttaa

SEQ ID NO: 1443262 - DNA, 25 bp, Homo sapien
caaggaaatgccataaagaaacatc

SEQ ID NO: 1443263 - DNA, 25 bp, Homo sapien
catctgtcgaatttccatatgtaga

SEQ ID NO: 1443264 - DNA, 25 bp, Homo sapien
catgttaatgcgttctatcatttga

SEQ ID NO: 1443265 - DNA, 25 bp, Homo sapien
cacatccacgccgaaggaattctta

SEQ ID NO: 1443266 - DNA, 25 bp, Homo sapien
tcttaatgtcttagctctcatgtta

SEQ ID NO: 1443267 - DNA, 25 bp, Homo sapien
ccacgccgaaggaattcttaatgtc

SEQ ID NO: 1443268 - DNA, 25 bp, Homo sapien
gaccgcactattaaagagttgctta

SEQ ID NO: 1443269 - DNA, 25 bp, Homo sapien
tgcctgtgaccgcactattaaagag

SEQ ID NO: 1443270 - DNA, 25 bp, Homo sapien
ttcccctgcctgtgaccgcactatt

SEQ ID NO: 1443271 - DNA, 25 bp, Homo sapien
tgtgaccgcactattaaagagttgc

SEQ ID NO: 1443272 - DNA, 25 bp, Homo sapien
attcgactgcatttctgccttcggg

SEQ ID NO: 1443273 - DNA, 25 bp, Homo sapien
caggtctgtggtcaaaccctggtca

SEQ ID NO: 1443274 - DNA, 25 bp, Homo sapien
tcttgtccctattcgactgcatttc

SEQ ID NO: 1443275 - DNA, 25 bp, Homo sapien
gcttgacctctttagcatgagtttc

SEQ ID NO: 1443276 - DNA, 25 bp, Homo sapien
tcttccaagttctcagccttcggaa

SEQ ID NO: 1443277 - DNA, 25 bp, Homo sapien
tcccacaattccagtctggtctctc

SEQ ID NO: 1443278 - DNA, 25 bp, Homo sapien
gtcctcacggctgaacccacatcct

SEQ ID NO: 1443279 - DNA, 25 bp, Homo sapien
caagttctcagccttcggaatgcct

SEQ ID NO: 1443280 - DNA, 25 bp, Homo sapien
aaaaacagttcccaaccatattcat

SEQ ID NO: 1443281 - DNA, 25 bp, Homo sapien
catttggtgtctttgttcttgcttc

SEQ ID NO: 1443282 - DNA, 25 bp, Homo sapien
gcttctttcttcaccagaaaaacag

SEQ ID NO: 1443283 - DNA, 25 bp, Homo sapien
taggccatttggtgtctttgttctt

SEQ ID NO: 1443284 - DNA, 25 bp, Homo sapien
aaggtttctccattaatattaacag

SEQ ID NO: 1443285 - DNA, 25 bp, Homo sapien
tataccatgcttcccaaaaggtttc

SEQ ID NO: 1443286 - DNA, 25 bp, Homo sapien
catttacatctagggtttctagttt

SEQ ID NO: 1443287 - DNA, 25 bp, Homo sapien
tagtttctttgatattataccatgc

SEQ ID NO: 1443288 - DNA, 25 bp, Homo sapien
ttctaataagcctaaaactgagcac

SEQ ID NO: 1443289 - DNA, 25 bp, Homo sapien
caggagaggtgatcctctgctcaga

SEQ ID NO: 1443290 - DNA, 25 bp, Homo sapien
aattacattattccttaccactact

SEQ ID NO: 1443291 - DNA, 25 bp, Homo sapien
aactgagcacacctgctatttctta

SEQ ID NO: 1443292 - DNA, 25 bp, Homo sapien
cagtctgattccgacgtactatagg

SEQ ID NO: 1443293 - DNA, 25 bp, Homo sapien
aacttcagtctgattccgacgtact

SEQ ID NO: 1443294 - DNA, 25 bp, Homo sapien
tctgattccgacgtactataggatc

SEQ ID NO: 1443295 - DNA, 25 bp, Homo sapien
gattccgacgtactataggatccat

SEQ ID NO: 1443296 - DNA, 25 bp, Homo sapien
tctaaatgccaatccagggtgtaca

SEQ ID NO: 1443297 - DNA, 25 bp, Homo sapien
taaatgccaatccagggtgtacact

SEQ ID NO: 1443298 - DNA, 25 bp, Homo sapien
aatgccaatccagggtgtacactga

SEQ ID NO: 1443299 - DNA, 25 bp, Homo sapien
tcatctaaatgccaatccagggtgt

SEQ ID NO: 1443300 - DNA, 25 bp, Homo sapien
gaattggttcctgactatggcccat

SEQ ID NO: 1443301 - DNA, 25 bp, Homo sapien
ggttcctgactatggcccattccaa

SEQ ID NO: 1443302 - DNA, 25 bp, Homo sapien
catgaattggttcctgactatggcc

SEQ ID NO: 1443303 - DNA, 25 bp, Homo sapien
ctcatgaattggttcctgactatgg

SEQ ID NO: 1443304 - DNA, 25 bp, Homo sapien
aatgggaaatgattccatgagcaac

SEQ ID NO: 1443305 - DNA, 25 bp, Homo sapien
caagaagtttcggagaatgggaaat

SEQ ID NO: 1443306 - DNA, 25 bp, Homo sapien
cttgggcaagaagtttcggagaatg

SEQ ID NO: 1443307 - DNA, 25 bp, Homo sapien
tgattccatgagcaacatgtcagaa

SEQ ID NO: 1443308 - DNA, 25 bp, Homo sapien
aggggtaccataggaaaacaatgtg

SEQ ID NO: 1443309 - DNA, 25 bp, Homo sapien
aagaaggcattatagactccgagtt

SEQ ID NO: 1443310 - DNA, 25 bp, Homo sapien
gactccgagttccaatggcttaggg

SEQ ID NO: 1443311 - DNA, 25 bp, Homo sapien
ttatagactccgagttccaatggct

SEQ ID NO: 1443312 - DNA, 25 bp, Homo sapien
atccgaggcccacgggagaacactg

SEQ ID NO: 1443313 - DNA, 25 bp, Homo sapien
caggacaatagggtcctgctggcca

SEQ ID NO: 1443314 - DNA, 25 bp, Homo sapien
ggccacaggtgatgtaatttagctt

SEQ ID NO: 1443315 - DNA, 25 bp, Homo sapien
caatagcctttgcagatccgaggcc

SEQ ID NO: 1443316 - DNA, 25 bp, Homo sapien
atacatatgagacacttcacaaatt

SEQ ID NO: 1443317 - DNA, 25 bp, Homo sapien
taatctgctctgtattgttccagct

SEQ ID NO: 1443318 - DNA, 25 bp, Homo sapien
aatacatatgagacacttcacaaat

SEQ ID NO: 1443319 - DNA, 25 bp, Homo sapien
tgctctgtattgttccagcttttag

SEQ ID NO: 1443320 - DNA, 25 bp, Homo sapien
catgaagttgtatgtcatccttgcg

SEQ ID NO: 1443321 - DNA, 25 bp, Homo sapien
tggaacgcttcatgaagttgtatgt

SEQ ID NO: 1443322 - DNA, 25 bp, Homo sapien
gaacgcttcatgaagttgtatgtca

SEQ ID NO: 1443323 - DNA, 25 bp, Homo sapien
atatggaacgcttcatgaagttgta

SEQ ID NO: 1443324 - DNA, 25 bp, Homo sapien
caacccgataaaggcaagttcacct

SEQ ID NO: 1443325 - DNA, 25 bp, Homo sapien
caagtcacgaatgtggccacttctg

SEQ ID NO: 1443326 - DNA, 25 bp, Homo sapien
ccttgggcaaagttcagagccagca

SEQ ID NO: 1443327 - DNA, 25 bp, Homo sapien
tatactcagaagaccacaagtcacg

SEQ ID NO: 1443328 - DNA, 25 bp, Homo sapien
gctttaagccaaagaactgcctata

SEQ ID NO: 1443329 - DNA, 25 bp, Homo sapien
tcccaaggccacgaaatttgacaag

SEQ ID NO: 1443330 - DNA, 25 bp, Homo sapien
tacaagagtctttaaagcacggact

SEQ ID NO: 1443331 - DNA, 25 bp, Homo sapien
gcacggacttacacctattggtaag

SEQ ID NO: 1443332 - DNA, 25 bp, Homo sapien
tcagctgactccacagaatgcagtg

SEQ ID NO: 1443333 - DNA, 25 bp, Homo sapien
gcatctttttcgtcgggcagaaccg

SEQ ID NO: 1443334 - DNA, 25 bp, Homo sapien
gagagcagcacacaaccatttcgca

SEQ ID NO: 1443335 - DNA, 25 bp, Homo sapien
tatttgtctgttggaagtcaggccc

SEQ ID NO: 1443336 - DNA, 25 bp, Homo sapien
aacatcttagtgaccctgaggcggc

SEQ ID NO: 1443337 - DNA, 25 bp, Homo sapien
ccgaggcggtacactctgagcgtaa

SEQ ID NO: 1443338 - DNA, 25 bp, Homo sapien
taaacctgtgcaggcacttccgggc

SEQ ID NO: 1443339 - DNA, 25 bp, Homo sapien
tcaagaaaagtaccgaagaaggctc

SEQ ID NO: 1443340 - DNA, 25 bp, Homo sapien
gtctttctgattgcccagggtagcc

SEQ ID NO: 1443341 - DNA, 25 bp, Homo sapien
aactattggattgaagggcctgacc

SEQ ID NO: 1443342 - DNA, 25 bp, Homo sapien
ggcctgacccgattcctgagggaga

SEQ ID NO: 1443343 - DNA, 25 bp, Homo sapien
ggagccttcggactgaactattgga

SEQ ID NO: 1443344 - DNA, 25 bp, Homo sapien
tccaatggacatttcgagcttaaga

SEQ ID NO: 1443345 - DNA, 25 bp, Homo sapien
tttaatacaatgttggtctatgcag

SEQ ID NO: 1443346 - DNA, 25 bp, Homo sapien
ccacttgttcttgttgatataaagg

SEQ ID NO: 1443347 - DNA, 25 bp, Homo sapien
cattccacggtagaaaccatatttg

SEQ ID NO: 1443348 - DNA, 25 bp, Homo sapien
tgagacccaaattgctggactccgc

SEQ ID NO: 1443349 - DNA, 25 bp, Homo sapien
gagacccaaattgctggactccgca

SEQ ID NO: 1443350 - DNA, 25 bp, Homo sapien
agacccaaattgctggactccgcac

SEQ ID NO: 1443351 - DNA, 25 bp, Homo sapien
ctttgaccttaagaatcagaagctc

SEQ ID NO: 1443352 - DNA, 25 bp, Homo sapien
tttgaccttaagaatcagaagctca

SEQ ID NO: 1443353 - DNA, 25 bp, Homo sapien
gcggtcccggcactctttgacctta

SEQ ID NO: 1443354 - DNA, 25 bp, Homo sapien
tctgcggtcccggcactctttgacc

SEQ ID NO: 1443355 - DNA, 25 bp, Homo sapien
gcaaaagccgaggaattctgaagca

SEQ ID NO: 1443356 - DNA, 25 bp, Homo sapien
ctgcaaaagccgaggaattctgaag

SEQ ID NO: 1443357 - DNA, 25 bp, Homo sapien
tgcaaaagccgaggaattctgaagc

SEQ ID NO: 1443358 - DNA, 25 bp, Homo sapien
caaaagccgaggaattctgaagcaa

SEQ ID NO: 1443359 - DNA, 25 bp, Homo sapien
gctgtactgaaatttaacccgtctg

SEQ ID NO: 1443360 - DNA, 25 bp, Homo sapien
cgacgctccctggtaattcctatgg

SEQ ID NO: 1443361 - DNA, 25 bp, Homo sapien
taaagcttcgatcaacacgacgctc

SEQ ID NO: 1443362 - DNA, 25 bp, Homo sapien
aatacaaagcgctcgggatgagggc

SEQ ID NO: 1443363 - DNA, 25 bp, Homo sapien
ggcgtgggcgggtagcccagccctc

SEQ ID NO: 1443364 - DNA, 25 bp, Homo sapien
ccctctgagccagggaatgaaactg

SEQ ID NO: 1443365 - DNA, 25 bp, Homo sapien
agccctctgagccagggaatgaaac

SEQ ID NO: 1443366 - DNA, 25 bp, Homo sapien
tctgagccagggaatgaaactggag

SEQ ID NO: 1443367 - DNA, 25 bp, Homo sapien
tcgggaacccagaaccattctcaaa

SEQ ID NO: 1443368 - DNA, 25 bp, Homo sapien
gggaacccagaaccattctcaaata

SEQ ID NO: 1443369 - DNA, 25 bp, Homo sapien
gcctcgggaacccagaaccattctc

SEQ ID NO: 1443370 - DNA, 25 bp, Homo sapien
ccagaaccattctcaaataacccat

SEQ ID NO: 1443371 - DNA, 25 bp, Homo sapien
cccacagcttcctttcggagagggc

SEQ ID NO: 1443372 - DNA, 25 bp, Homo sapien
tagacaccgcaaactcgggttcctc

SEQ ID NO: 1443373 - DNA, 25 bp, Homo sapien
ccacagcttcctttcggagagggct

SEQ ID NO: 1443374 - DNA, 25 bp, Homo sapien
acagcttcctttcggagagggcttt

SEQ ID NO: 1443375 - DNA, 25 bp, Homo sapien
ctattacatgtgttatagagtagta

SEQ ID NO: 1443376 - DNA, 25 bp, Homo sapien
gcaattatagtctcttagtttaaca

SEQ ID NO: 1443377 - DNA, 25 bp, Homo sapien
taatcagtactaattaaggacctaa

SEQ ID NO: 1443378 - DNA, 25 bp, Homo sapien
aaacaacgttgaataaaacaacatg

SEQ ID NO: 1443379 - DNA, 25 bp, Homo sapien
gaatagcgaggcacacccaagaaat

SEQ ID NO: 1443380 - DNA, 25 bp, Homo sapien
agtgatgatcataacttcacactgg

SEQ ID NO: 1443381 - DNA, 25 bp, Homo sapien
tcagcgtagttgagcactaatagtt

SEQ ID NO: 1443382 - DNA, 25 bp, Homo sapien
gagcgtcctgttcgtattaacctgt

SEQ ID NO: 1443383 - DNA, 25 bp, Homo sapien
gatggacccaggatacatgttgagg

SEQ ID NO: 1443384 - DNA, 25 bp, Homo sapien
caagagagtatacaggaggtccatc

SEQ ID NO: 1443385 - DNA, 25 bp, Homo sapien
ctaaacagatagagccaggtgccag

SEQ ID NO: 1443386 - DNA, 25 bp, Homo sapien
tagaaaaactattgcactggctgca

SEQ ID NO: 1443387 - DNA, 25 bp, Homo sapien
tagagtgctccgaatcccatctttg

SEQ ID NO: 1443388 - DNA, 25 bp, Homo sapien
gaattatttcacaggcccgctgctt

SEQ ID NO: 1443389 - DNA, 25 bp, Homo sapien
tctgttatgtcactgaggtcacctg

SEQ ID NO: 1443390 - DNA, 25 bp, Homo sapien
gtgccagtggcagagatttgtaacc

SEQ ID NO: 1443391 - DNA, 25 bp, Homo sapien
atttttagtacaattagacttgtag

SEQ ID NO: 1443392 - DNA, 25 bp, Homo sapien
tgtgaactcgttgctttaactgcag

SEQ ID NO: 1443393 - DNA, 25 bp, Homo sapien
taactgcagttccattagctaatcg

SEQ ID NO: 1443394 - DNA, 25 bp, Homo sapien
tcagtgtgacattgtggtgtaaatc

SEQ ID NO: 1443395 - DNA, 25 bp, Homo sapien
gctaatcggagtcctgatgtcagtg

SEQ ID NO: 1443396 - DNA, 25 bp, Homo sapien
ttggataaccacatgtgctggcatt

SEQ ID NO: 1443397 - DNA, 25 bp, Homo sapien
tgccagcatcaaactcaatggagtg

SEQ ID NO: 1443398 - DNA, 25 bp, Homo sapien
catctgctgtctaaattcctatcct

SEQ ID NO: 1443399 - DNA, 25 bp, Homo sapien
tctctcaaagaggtagctaagaaac

SEQ ID NO: 1443400 - DNA, 25 bp, Homo sapien
tctaggcgtagtaaatgagagcttc

SEQ ID NO: 1443401 - DNA, 25 bp, Homo sapien
ttcaagatctgtatatgtgtgggtc

SEQ ID NO: 1443402 - DNA, 25 bp, Homo sapien
cccacactgcttactgaatcgcttg

SEQ ID NO: 1443403 - DNA, 25 bp, Homo sapien
tgtcaaagtgttctccaaagtagct

SEQ ID NO: 1443404 - DNA, 25 bp, Homo sapien
ccattggtgtgcttaaagcgatctc

SEQ ID NO: 1443405 - DNA, 25 bp, Homo sapien
cattggtgtgcttaaagcgatctcc

SEQ ID NO: 1443406 - DNA, 25 bp, Homo sapien
attggtgtgcttaaagcgatctcct

SEQ ID NO: 1443407 - DNA, 25 bp, Homo sapien
ctccattggtgtgcttaaagcgatc

SEQ ID NO: 1443408 - DNA, 25 bp, Homo sapien
ctagggcagagcacattttcgcaca

SEQ ID NO: 1443409 - DNA, 25 bp, Homo sapien
agagcacattttcgcacaggcagcg

SEQ ID NO: 1443410 - DNA, 25 bp, Homo sapien
gccctggatcttgtcgattgagttg

SEQ ID NO: 1443411 - DNA, 25 bp, Homo sapien
gtcgattgagttgaagtcggacacg

SEQ ID NO: 1443412 - DNA, 25 bp, Homo sapien
ggtgaagacgcggatgccggcgcga

SEQ ID NO: 1443413 - DNA, 25 bp, Homo sapien
acggatgccggcacggtgggcagcc

SEQ ID NO: 1443414 - DNA, 25 bp, Homo sapien
acggtgggcagccgccgtggcgtcc

SEQ ID NO: 1443415 - DNA, 25 bp, Homo sapien
tgccggcgcgaatgccggcacggat

SEQ ID NO: 1443416 - DNA, 25 bp, Homo sapien
cagccattggtgagcagtatggcca

SEQ ID NO: 1443417 - DNA, 25 bp, Homo sapien
ggctgcagccattggtgagcagtat

SEQ ID NO: 1443418 - DNA, 25 bp, Homo sapien
tgcagccattggtgagcagtatggc

SEQ ID NO: 1443419 - DNA, 25 bp, Homo sapien
agccattggtgagcagtatggccac

SEQ ID NO: 1443420 - DNA, 25 bp, Homo sapien
cagtccccggagcggtggccggcgc

SEQ ID NO: 1443421 - DNA, 25 bp, Homo sapien
agtccccggagcggtggccggcgcg

SEQ ID NO: 1443422 - DNA, 25 bp, Homo sapien
gcgcttcgccggtgttggtgttgcc

SEQ ID NO: 1443423 - DNA, 25 bp, Homo sapien
ctgtgatgtggtgcagcgcttcgcc

SEQ ID NO: 1443424 - DNA, 25 bp, Homo sapien
agcgcttcgccggtgttggtgttgc

SEQ ID NO: 1443425 - DNA, 25 bp, Homo sapien
ctgcgggctgtgatgtggtgcagcg

SEQ ID NO: 1443426 - DNA, 25 bp, Homo sapien
tggtaggcgatgcatcgggcggccg

SEQ ID NO: 1443427 - DNA, 25 bp, Homo sapien
cgatgcatcgggcggccgccttgac

SEQ ID NO: 1443428 - DNA, 25 bp, Homo sapien
ctgtggtaggcgatgcatcgggcgg

SEQ ID NO: 1443429 - DNA, 25 bp, Homo sapien
taggcgatgcatcgggcggccgcct

SEQ ID NO: 1443430 - DNA, 25 bp, Homo sapien
cctcccgcgagccgaaaacgcccag

SEQ ID NO: 1443431 - DNA, 25 bp, Homo sapien
tcctcccgcgagccgaaaacgccca

SEQ ID NO: 1443432 - DNA, 25 bp, Homo sapien
aacgcccagttcgaaggccacgttg

SEQ ID NO: 1443433 - DNA, 25 bp, Homo sapien
cgcccagttcgaaggccacgttggg

SEQ ID NO: 1443434 - DNA, 25 bp, Homo sapien
gaaggtatccaccaggttgactacc

SEQ ID NO: 1443435 - DNA, 25 bp, Homo sapien
ggttgactacccactgctgcacctt

SEQ ID NO: 1443436 - DNA, 25 bp, Homo sapien
ggagcgcacggtccccatgcagtcg

SEQ ID NO: 1443437 - DNA, 25 bp, Homo sapien
ctggagcgcacggtccccatgcagt

SEQ ID NO: 1443438 - DNA, 25 bp, Homo sapien
ctggaggaggtgtccaagaggaaga

SEQ ID NO: 1443439 - DNA, 25 bp, Homo sapien
tggaggaggtgtccaagaggaagac

SEQ ID NO: 1443440 - DNA, 25 bp, Homo sapien
agtggacgcttctgcaacctgtccg

SEQ ID NO: 1443441 - DNA, 25 bp, Homo sapien
cagattgtagtggacgcttctgcaa

SEQ ID NO: 1443442 - DNA, 25 bp, Homo sapien
gacgcttctgcaacctgtccgttgg

SEQ ID NO: 1443443 - DNA, 25 bp, Homo sapien
tgtagtggacgcttctgcaacctgt

SEQ ID NO: 1443444 - DNA, 25 bp, Homo sapien
ctatcagccgccgccccgactccac

SEQ ID NO: 1443445 - DNA, 25 bp, Homo sapien
cacagcattccctcggagggcagcc

SEQ ID NO: 1443446 - DNA, 25 bp, Homo sapien
ccacagcattccctcggagggcagc

SEQ ID NO: 1443447 - DNA, 25 bp, Homo sapien
agcatccaaaggaagccggccacag

SEQ ID NO: 1443448 - DNA, 25 bp, Homo sapien
tgatgcgtggccaaaggtgtttccc

SEQ ID NO: 1443449 - DNA, 25 bp, Homo sapien
tagcccagtctttggcatgcggtac

SEQ ID NO: 1443450 - DNA, 25 bp, Homo sapien
gagtgtgggtcgcaataactgatgc

SEQ ID NO: 1443451 - DNA, 25 bp, Homo sapien
cggccacacgcagtacacttttaga

SEQ ID NO: 1443452 - DNA, 25 bp, Homo sapien
gaagtgcagcttgtgagggcaaaac

SEQ ID NO: 1443453 - DNA, 25 bp, Homo sapien
tcatctgaacagtgagagtaagtac

SEQ ID NO: 1443454 - DNA, 25 bp, Homo sapien
gagtaagtactaggctcttatccca

SEQ ID NO: 1443455 - DNA, 25 bp, Homo sapien
tctatgtttacaactccgggactaa

SEQ ID NO: 1443456 - DNA, 25 bp, Homo sapien
tgcaaaatcgccgatcagagctcat

SEQ ID NO: 1443457 - DNA, 25 bp, Homo sapien
cgccgatcagagctcatacccaaag

SEQ ID NO: 1443458 - DNA, 25 bp, Homo sapien
agcatcattgccctccccagctgaa

SEQ ID NO: 1443459 - DNA, 25 bp, Homo sapien
tcaaaggacaatgcaaaatcgccga

SEQ ID NO: 1443460 - DNA, 25 bp, Homo sapien
gcaatgtttagagtgtgaagtcagt

SEQ ID NO: 1443461 - DNA, 25 bp, Homo sapien
gaaatacatattgtcatgtcagttc

SEQ ID NO: 1443462 - DNA, 25 bp, Homo sapien
gtgaagtcagttacttgttgatgtt

SEQ ID NO: 1443463 - DNA, 25 bp, Homo sapien
ttgaatccatgcaatgtttagagtg

SEQ ID NO: 1443464 - DNA, 25 bp, Homo sapien
taacagatgactgctgggacatgag

SEQ ID NO: 1443465 - DNA, 25 bp, Homo sapien
tccagccatatttgtgcctgaagtg

SEQ ID NO: 1443466 - DNA, 25 bp, Homo sapien
gggccacccacagatagagaaaaga

SEQ ID NO: 1443467 - DNA, 25 bp, Homo sapien
tgagaatcaaaaagccaaggaaggg

SEQ ID NO: 1443468 - DNA, 25 bp, Homo sapien
aaagaaagtacaaatagagctacca

SEQ ID NO: 1443469 - DNA, 25 bp, Homo sapien
gaaaatggtatggattcctaaagaa

SEQ ID NO: 1443470 - DNA, 25 bp, Homo sapien
gaagggtgggctcacatttgttggg

SEQ ID NO: 1443471 - DNA, 25 bp, Homo sapien
tagtgtcattggtggaaatagtgga

SEQ ID NO: 1443472 - DNA, 25 bp, Homo sapien
gcaccatttaccctaagttcttctg

SEQ ID NO: 1443473 - DNA, 25 bp, Homo sapien
ccattgccactgcttgcaccattta

SEQ ID NO: 1443474 - DNA, 25 bp, Homo sapien
tagggatgcagtccattcccattgc

SEQ ID NO: 1443475 - DNA, 25 bp, Homo sapien
gagaccatcctggacgcctttgacc

SEQ ID NO: 1443476 - DNA, 25 bp, Homo sapien
catcgctatgatggctggtccccag

SEQ ID NO: 1443477 - DNA, 25 bp, Homo sapien
tggccctgcaggtctatggagtcga

SEQ ID NO: 1443478 - DNA, 25 bp, Homo sapien
gtccctagcagtcacggtccagatg

SEQ ID NO: 1443479 - DNA, 25 bp, Homo sapien
gtttagtgacgaccttaccaagcca

SEQ ID NO: 1443480 - DNA, 25 bp, Homo sapien
tcaaagcccctgcacttaagggtca

SEQ ID NO: 1443481 - DNA, 25 bp, Homo sapien
ggagttccatcatctcacgaggctc

SEQ ID NO: 1443482 - DNA, 25 bp, Homo sapien
gatctgcacccataaactgtatctg

SEQ ID NO: 1443483 - DNA, 25 bp, Homo sapien
tatattaacccatcagtgataaggg

SEQ ID NO: 1443484 - DNA, 25 bp, Homo sapien
acaatctgtccctagggagtgagga

SEQ ID NO: 1443485 - DNA, 25 bp, Homo sapien
ggatgttattcccttgtcaccctct

SEQ ID NO: 1443486 - DNA, 25 bp, Homo sapien
ggcttttacaatctgtccctaggga

SEQ ID NO: 1443487 - DNA, 25 bp, Homo sapien
gttattacccctgtcgatggaagag

SEQ ID NO: 1443488 - DNA, 25 bp, Homo sapien
ccttgcttatgatgaaactcttttc

SEQ ID NO: 1443489 - DNA, 25 bp, Homo sapien
cagttggacatgttagactacattg

SEQ ID NO: 1443490 - DNA, 25 bp, Homo sapien
cagtactcatttgccgtgggttttc

SEQ ID NO: 1443491 - DNA, 25 bp, Homo sapien
gactacattgaacaataatgttgag

SEQ ID NO: 1443492 - DNA, 25 bp, Homo sapien
ttttttgagatcaagatactctgtc

SEQ ID NO: 1443493 - DNA, 25 bp, Homo sapien
ttgagatcaagatactctgtcaccc

SEQ ID NO: 1443494 - DNA, 25 bp, Homo sapien
ggggttggtgcttgttcccttggca

SEQ ID NO: 1443495 - DNA, 25 bp, Homo sapien
ggtgcttgttcccttggcattctgc

SEQ ID NO: 1443496 - DNA, 25 bp, Homo sapien
ggttggtgcttgttcccttggcatt

SEQ ID NO: 1443497 - DNA, 25 bp, Homo sapien
tgcttgttcccttggcattctgcat

SEQ ID NO: 1443498 - DNA, 25 bp, Homo sapien
aaactgcaccagaagaatagaatag

SEQ ID NO: 1443499 - DNA, 25 bp, Homo sapien
tgtaaaaggaacatcaacccaaatc

SEQ ID NO: 1443500 - DNA, 25 bp, Homo sapien
aaagcttacaaacctcatgtcgtgg

SEQ ID NO: 1443501 - DNA, 25 bp, Homo sapien
tggtagcaccaattcatgacaaaac

SEQ ID NO: 1443502 - DNA, 25 bp, Homo sapien
agcaggctatggacaaactgcctcc

SEQ ID NO: 1443503 - DNA, 25 bp, Homo sapien
ctgctgtggttgaagcaggctatgg

SEQ ID NO: 1443504 - DNA, 25 bp, Homo sapien
gtggttgaagcaggctatggacaaa

SEQ ID NO: 1443505 - DNA, 25 bp, Homo sapien
tgaagcaggctatggacaaactgcc

SEQ ID NO: 1443506 - DNA, 25 bp, Homo sapien
ggcgatggtcagcacggtcactaaa

SEQ ID NO: 1443507 - DNA, 25 bp, Homo sapien
gatatatacagggagctcaggaacc

SEQ ID NO: 1443508 - DNA, 25 bp, Homo sapien
ttactcttgggcgtatatttcagag

SEQ ID NO: 1443509 - DNA, 25 bp, Homo sapien
cacaagcagtgtctgagtgttccag

SEQ ID NO: 1443510 - DNA, 25 bp, Homo sapien
ttcccacatggatgacttattctga

SEQ ID NO: 1443511 - DNA, 25 bp, Homo sapien
cccacatggatgacttattctgata

SEQ ID NO: 1443512 - DNA, 25 bp, Homo sapien
cacatggatgacttattctgatagg

SEQ ID NO: 1443513 - DNA, 25 bp, Homo sapien
ccttcccacatggatgacttattct

SEQ ID NO: 1443514 - DNA, 25 bp, Homo sapien
ctgcctgcttgcttgctttcgtgtc

SEQ ID NO: 1443515 - DNA, 25 bp, Homo sapien
tgcttgcttgctttcgtgtccttcc

SEQ ID NO: 1443516 - DNA, 25 bp, Homo sapien
gcctgcttgcttgctttcgtgtcct

SEQ ID NO: 1443517 - DNA, 25 bp, Homo sapien
tgctgcctgcttgcttgctttcgtg

SEQ ID NO: 1443518 - DNA, 25 bp, Homo sapien
tagaaatagcccaggtcattccaca

SEQ ID NO: 1443519 - DNA, 25 bp, Homo sapien
ttccaacgctggagcaaaaggtacc

SEQ ID NO: 1443520 - DNA, 25 bp, Homo sapien
gcctctgggactttgagcacaagta

SEQ ID NO: 1443521 - DNA, 25 bp, Homo sapien
gagtttcaagagactcctggcccca

SEQ ID NO: 1443522 - DNA, 25 bp, Homo sapien
gatggcagtatcaagtcaaatggat

SEQ ID NO: 1443523 - DNA, 25 bp, Homo sapien
cagtatcaagtcaaatggatagagg

SEQ ID NO: 1443524 - DNA, 25 bp, Homo sapien
aagttgatggcagtatcaagtcaaa

SEQ ID NO: 1443525 - DNA, 25 bp, Homo sapien
aaaaaagttgatggcagtatcaagt

SEQ ID NO: 1443526 - DNA, 25 bp, Homo sapien
tgtgactacatcactccaatcgctg

SEQ ID NO: 1443527 - DNA, 25 bp, Homo sapien
tcctacttctagagaccagaagtcc

SEQ ID NO: 1443528 - DNA, 25 bp, Homo sapien
ttccttccctccttcgtgtcttctc

SEQ ID NO: 1443529 - DNA, 25 bp, Homo sapien
cccaaatccaggtattagtatatac

SEQ ID NO: 1443530 - DNA, 25 bp, Homo sapien
ggctataagaagtcatagactgcca

SEQ ID NO: 1443531 - DNA, 25 bp, Homo sapien
ggcctcgtgctgacatcatcggatg

SEQ ID NO: 1443532 - DNA, 25 bp, Homo sapien
gaaaactgactcagcccaggatcat

SEQ ID NO: 1443533 - DNA, 25 bp, Homo sapien
gaaaaagtctagtgaaagctaccta

SEQ ID NO: 1443534 - DNA, 25 bp, Homo sapien
actggatgcaatgcctgattttcaa

SEQ ID NO: 1443535 - DNA, 25 bp, Homo sapien
gatattcccaaaacagtgcagggaa

SEQ ID NO: 1443536 - DNA, 25 bp, Homo sapien
taaagccatgataactggatgcaat

SEQ ID NO: 1443537 - DNA, 25 bp, Homo sapien
aatagcagtattaagatattcccaa

SEQ ID NO: 1443538 - DNA, 25 bp, Homo sapien
tcactcctgtggcttgtcattacca

SEQ ID NO: 1443539 - DNA, 25 bp, Homo sapien
tggctgtcataccatatgtgccttg

SEQ ID NO: 1443540 - DNA, 25 bp, Homo sapien
tagacataggcatatgcagaaaact

SEQ ID NO: 1443541 - DNA, 25 bp, Homo sapien
tattgcagttagagggtgataaaac

SEQ ID NO: 1443542 - DNA, 25 bp, Homo sapien
gagctagcctgttggtccatccaca

SEQ ID NO: 1443543 - DNA, 25 bp, Homo sapien
tggcaacattggaaatgagctctgt

SEQ ID NO: 1443544 - DNA, 25 bp, Homo sapien
gggagccactcttaccctaaatcag

SEQ ID NO: 1443545 - DNA, 25 bp, Homo sapien
tgagctctgtagaaacaagcggttt

SEQ ID NO: 1443546 - DNA, 25 bp, Homo sapien
ataaaaactacagggctgcgcacgg

SEQ ID NO: 1443547 - DNA, 25 bp, Homo sapien
cgaggcaggcggttttgtggcagta

SEQ ID NO: 1443548 - DNA, 25 bp, Homo sapien
caggcggttttgtggcagtaggcct

SEQ ID NO: 1443549 - DNA, 25 bp, Homo sapien
aaataaaaactacagggctgcgcac

SEQ ID NO: 1443550 - DNA, 25 bp, Homo sapien
acctgggccacccaaagtgctggga

SEQ ID NO: 1443551 - DNA, 25 bp, Homo sapien
cacctgggccacccaaagtgctggg

SEQ ID NO: 1443552 - DNA, 25 bp, Homo sapien
ccttgttggcaagactggtcttgat

SEQ ID NO: 1443553 - DNA, 25 bp, Homo sapien
cttgttggcaagactggtcttgatc

SEQ ID NO: 1443554 - DNA, 25 bp, Homo sapien
tccaccatggctaattaccagggag

SEQ ID NO: 1443555 - DNA, 25 bp, Homo sapien
cctctgccactaatgctgtgggaat

SEQ ID NO: 1443556 - DNA, 25 bp, Homo sapien
taccagggagttcgagtcattctgc

SEQ ID NO: 1443557 - DNA, 25 bp, Homo sapien
tgcgccctcttaattgttcacggag

SEQ ID NO: 1443558 - DNA, 25 bp, Homo sapien
tgtaaacactgttgcacttgaccag

SEQ ID NO: 1443559 - DNA, 25 bp, Homo sapien
gtaaacactgttgcacttgaccagc

SEQ ID NO: 1443560 - DNA, 25 bp, Homo sapien
taaacactgttgcacttgaccagcc

SEQ ID NO: 1443561 - DNA, 25 bp, Homo sapien
tatgagatgaaatctgctgtctggg

SEQ ID NO: 1443562 - DNA, 25 bp, Homo sapien
cttgcttatttcatatgagatgaaa

SEQ ID NO: 1443563 - DNA, 25 bp, Homo sapien
gagatgaaatctgctgtctgggtca

SEQ ID NO: 1443564 - DNA, 25 bp, Homo sapien
ttcatatgagatgaaatctgctgtc

SEQ ID NO: 1443565 - DNA, 25 bp, Homo sapien
gatagcacaccatgacgtcttcgta

SEQ ID NO: 1443566 - DNA, 25 bp, Homo sapien
caggacactttaggtgacagcctac

SEQ ID NO: 1443567 - DNA, 25 bp, Homo sapien
taaaaagatgaagctcagagcaggt

SEQ ID NO: 1443568 - DNA, 25 bp, Homo sapien
gaaagtttcccagtacagatagcac

SEQ ID NO: 1443569 - DNA, 25 bp, Homo sapien
gagctatgatcatgcactccagcct

SEQ ID NO: 1443570 - DNA, 25 bp, Homo sapien
ctgggtgacagaatgagatcctctc

SEQ ID NO: 1443571 - DNA, 25 bp, Homo sapien
gcctgggtgacagaatgagatcctc

SEQ ID NO: 1443572 - DNA, 25 bp, Homo sapien
cagcctgggtgacagaatgagatcc

SEQ ID NO: 1443573 - DNA, 25 bp, Homo sapien
cagaattcaaaaacccaagctggca

SEQ ID NO: 1443574 - DNA, 25 bp, Homo sapien
gacagccaaatcatggccagcaaaa

SEQ ID NO: 1443575 - DNA, 25 bp, Homo sapien
attcaaaaacccaagctggcactga

SEQ ID NO: 1443576 - DNA, 25 bp, Homo sapien
gagacagccaaatcatggccagcaa

SEQ ID NO: 1443577 - DNA, 25 bp, Homo sapien
catccggtgtaaatggtgtttcttt

SEQ ID NO: 1443578 - DNA, 25 bp, Homo sapien
cagaataaggttgctttgtagccat

SEQ ID NO: 1443579 - DNA, 25 bp, Homo sapien
tgtagccatccggtgtaaatggtgt

SEQ ID NO: 1443580 - DNA, 25 bp, Homo sapien
ttgctttgtagccatccggtgtaaa

SEQ ID NO: 1443581 - DNA, 25 bp, Homo sapien
attcattaattaaactgccataaat

SEQ ID NO: 1443582 - DNA, 25 bp, Homo sapien
atttatctacaagttttagccttca

SEQ ID NO: 1443583 - DNA, 25 bp, Homo sapien
cctttcctattgctaagatattctt

SEQ ID NO: 1443584 - DNA, 25 bp, Homo sapien
taaacttgcatacaaagcaccaaaa

SEQ ID NO: 1443585 - DNA, 25 bp, Homo sapien
gttttcggtcccacaagaggctcaa

SEQ ID NO: 1443586 - DNA, 25 bp, Homo sapien
caaacctccgtagagaaggagacgt

SEQ ID NO: 1443587 - DNA, 25 bp, Homo sapien
tccagtccacgagaagaaatacatc

SEQ ID NO: 1443588 - DNA, 25 bp, Homo sapien
caaaagcaggtaaggcagttagatc

SEQ ID NO: 1443589 - DNA, 25 bp, Homo sapien
cttaggttgttcttaattctctctg

SEQ ID NO: 1443590 - DNA, 25 bp, Homo sapien
ggttgttcttaattctctctgtgcc

SEQ ID NO: 1443591 - DNA, 25 bp, Homo sapien
taggttgttcttaattctctctgtg

SEQ ID NO: 1443592 - DNA, 25 bp, Homo sapien
aggttgttcttaattctctctgtgc

SEQ ID NO: 1443593 - DNA, 25 bp, Homo sapien
tccattgttgcctgacagaagcccc

SEQ ID NO: 1443594 - DNA, 25 bp, Homo sapien
cattcaagccacaggtagtcaaaat

SEQ ID NO: 1443595 - DNA, 25 bp, Homo sapien
tagaatcatccaacggacaaagaac

SEQ ID NO: 1443596 - DNA, 25 bp, Homo sapien
taaagataggtttgtgcttcacatc

SEQ ID NO: 1443597 - DNA, 25 bp, Homo sapien
tgtgactttaaccattcagctgcat

SEQ ID NO: 1443598 - DNA, 25 bp, Homo sapien
taaaataggcaccttgatcagctca

SEQ ID NO: 1443599 - DNA, 25 bp, Homo sapien
aaattacttctctcaaaatacccag

SEQ ID NO: 1443600 - DNA, 25 bp, Homo sapien
tcagctcacgctgtgactttaacca

SEQ ID NO: 1443601 - DNA, 25 bp, Homo sapien
gaatctactttgactaatcttgcgg

SEQ ID NO: 1443602 - DNA, 25 bp, Homo sapien
ggtgcatcacacctatggcaagaat

SEQ ID NO: 1443603 - DNA, 25 bp, Homo sapien
tattcagacatagtacacaccgata

SEQ ID NO: 1443604 - DNA, 25 bp, Homo sapien
acaacagtcaggttctttgggtgca

SEQ ID NO: 1443605 - DNA, 25 bp, Homo sapien
acagcacctggccctgaacattatt

SEQ ID NO: 1443606 - DNA, 25 bp, Homo sapien
ttttagtttagttgtttgagatgga

SEQ ID NO: 1443607 - DNA, 25 bp, Homo sapien
cacctggccctgaacattattttag

SEQ ID NO: 1443608 - DNA, 25 bp, Homo sapien
cctggccctgaacattattttagtt

SEQ ID NO: 1443609 - DNA, 25 bp, Homo sapien
aacctagtgacacagcgggactctg

SEQ ID NO: 1443610 - DNA, 25 bp, Homo sapien
caacctagtgacacagcgggactct

SEQ ID NO: 1443611 - DNA, 25 bp, Homo sapien
cctagtgacacagcgggactctgtc

SEQ ID NO: 1443612 - DNA, 25 bp, Homo sapien
ctccaacctagtgacacagcgggac

SEQ ID NO: 1443613 - DNA, 25 bp, Homo sapien
caaaactcaagtcaggttcaggcac

SEQ ID NO: 1443614 - DNA, 25 bp, Homo sapien
caactgctcctgtccgacatttgag

SEQ ID NO: 1443615 - DNA, 25 bp, Homo sapien
caaacatatctattccgtgaagccc

SEQ ID NO: 1443616 - DNA, 25 bp, Homo sapien
ctattgataggctaaacttcttgcc

SEQ ID NO: 1443617 - DNA, 25 bp, Homo sapien
ttcctagactggacatgtaaacaga

SEQ ID NO: 1443618 - DNA, 25 bp, Homo sapien
tcctttgtcgtaacacaacatgcct

SEQ ID NO: 1443619 - DNA, 25 bp, Homo sapien
cagagctttggtcttaattcctaaa

SEQ ID NO: 1443620 - DNA, 25 bp, Homo sapien
tcttaacaaccgatggaaactgtgt

SEQ ID NO: 1443621 - DNA, 25 bp, Homo sapien
aataagtctgaactgaaagaacaac

SEQ ID NO: 1443622 - DNA, 25 bp, Homo sapien
ccaaatgtgactgagtacggaatgt

SEQ ID NO: 1443623 - DNA, 25 bp, Homo sapien
gctccacaatagttctaaagttcat

SEQ ID NO: 1443624 - DNA, 25 bp, Homo sapien
acagttttccaactaaagatcctct

SEQ ID NO: 1443625 - DNA, 25 bp, Homo sapien
tacacttccaaagatactaatttca

SEQ ID NO: 1443626 - DNA, 25 bp, Homo sapien
atttttctccagctatctatctaca

SEQ ID NO: 1443627 - DNA, 25 bp, Homo sapien
cagctatctatctacacttccaaag

SEQ ID NO: 1443628 - DNA, 25 bp, Homo sapien
ttccaaagatactaatttcaacata

SEQ ID NO: 1443629 - DNA, 25 bp, Homo sapien
gactcgccagtacagataatctcta

SEQ ID NO: 1443630 - DNA, 25 bp, Homo sapien
aaaaatcaatctgttagggctaatc

SEQ ID NO: 1443631 - DNA, 25 bp, Homo sapien
gaccaaatctaggaaatacacttgg

SEQ ID NO: 1443632 - DNA, 25 bp, Homo sapien
catttcctaatcacagactcgccag

SEQ ID NO: 1443633 - DNA, 25 bp, Homo sapien
tccatcctttgattacagcttgtac

SEQ ID NO: 1443634 - DNA, 25 bp, Homo sapien
gaacttaccgcacttactgaaataa

SEQ ID NO: 1443635 - DNA, 25 bp, Homo sapien
cagtggtaaaggtcctctccatcct

SEQ ID NO: 1443636 - DNA, 25 bp, Homo sapien
tcatacagcttaagagatacagtgg

SEQ ID NO: 1443637 - DNA, 25 bp, Homo sapien
tttccaaacactgcttttataacag

SEQ ID NO: 1443638 - DNA, 25 bp, Homo sapien
caaacactgcttttataacagaagt

SEQ ID NO: 1443639 - DNA, 25 bp, Homo sapien
tccaaacactgcttttataacagaa

SEQ ID NO: 1443640 - DNA, 25 bp, Homo sapien
tgcttttataacagaagtgttttac

SEQ ID NO: 1443641 - DNA, 25 bp, Homo sapien
ggtaatacgtaacagcgcagacaga

SEQ ID NO: 1443642 - DNA, 25 bp, Homo sapien
gaatatttgttctaccaggctggaa

SEQ ID NO: 1443643 - DNA, 25 bp, Homo sapien
taaaggccgcaatttcacaaagagg

SEQ ID NO: 1443644 - DNA, 25 bp, Homo sapien
ttatacatggaagcctgcggtaggc

SEQ ID NO: 1443645 - DNA, 25 bp, Homo sapien
tttactcttgtactacatggctcac

SEQ ID NO: 1443646 - DNA, 25 bp, Homo sapien
ctcttgtactacatggctcacttac

SEQ ID NO: 1443647 - DNA, 25 bp, Homo sapien
tgtctttactcttgtactacatggc

SEQ ID NO: 1443648 - DNA, 25 bp, Homo sapien
gggtgtctttactcttgtactacat

SEQ ID NO: 1443649 - DNA, 25 bp, Homo sapien
gatgacccaggttctgcactagtgg

SEQ ID NO: 1443650 - DNA, 25 bp, Homo sapien
cagactgttgggagaccatgtgtcc

SEQ ID NO: 1443651 - DNA, 25 bp, Homo sapien
caacactgaggtaacagattggccg

SEQ ID NO: 1443652 - DNA, 25 bp, Homo sapien
tccactggaagacacggtaggcatt

SEQ ID NO: 1443653 - DNA, 25 bp, Homo sapien
cttcggaaagcagcactacagtgat

SEQ ID NO: 1443654 - DNA, 25 bp, Homo sapien
tatgaatgaggacatgtctccgcag

SEQ ID NO: 1443655 - DNA, 25 bp, Homo sapien
ccgcaggtgataggagcttcggaaa

SEQ ID NO: 1443656 - DNA, 25 bp, Homo sapien
gaaaaatactgttggcaagtgtcac

SEQ ID NO: 1443657 - DNA, 25 bp, Homo sapien
gctgagtaatacgtcacggtggtgc

SEQ ID NO: 1443658 - DNA, 25 bp, Homo sapien
taatacgtcacggtggtgctgggct

SEQ ID NO: 1443659 - DNA, 25 bp, Homo sapien
tgctgctgagtaatacgtcacggtg

SEQ ID NO: 1443660 - DNA, 25 bp, Homo sapien
ctcctcagtgccatggtggtcatca

SEQ ID NO: 1443661 - DNA, 25 bp, Homo sapien
gaacagccccccatagtggtggtgg

SEQ ID NO: 1443662 - DNA, 25 bp, Homo sapien
aggtcctggatgacgccgtgactcc

SEQ ID NO: 1443663 - DNA, 25 bp, Homo sapien
tggagaatactgaggtcctggatga

SEQ ID NO: 1443664 - DNA, 25 bp, Homo sapien
tgctcctcaggatccgcgggtttct

SEQ ID NO: 1443665 - DNA, 25 bp, Homo sapien
caaagactgcaagaacccccaggag

SEQ ID NO: 1443666 - DNA, 25 bp, Homo sapien
caggaggtcctctgcgaggggaagg

SEQ ID NO: 1443667 - DNA, 25 bp, Homo sapien
ccgcggctgacgccgccggctcctt

SEQ ID NO: 1443668 - DNA, 25 bp, Homo sapien
ctgcgaggggaaggccgcggctgac

SEQ ID NO: 1443669 - DNA, 25 bp, Homo sapien
ggctggcggaggggggggctcagcg

SEQ ID NO: 1443670 - DNA, 25 bp, Homo sapien
tagaggaggataacacgcattgcgg

SEQ ID NO: 1443671 - DNA, 25 bp, Homo sapien
aggtagaggaggataacacgcattg

SEQ ID NO: 1443672 - DNA, 25 bp, Homo sapien
cccgccggccgggtgaagctggtga

SEQ ID NO: 1443673 - DNA, 25 bp, Homo sapien
ggaagacggtggttgaacataacca

SEQ ID NO: 1443674 - DNA, 25 bp, Homo sapien
ccgccggagccgctaccaccgctac

SEQ ID NO: 1443675 - DNA, 25 bp, Homo sapien
gagccgctaccaccgctactgccgg

SEQ ID NO: 1443676 - DNA, 25 bp, Homo sapien
gctaccaccgctactgccggtacct

SEQ ID NO: 1443677 - DNA, 25 bp, Homo sapien
tactgccggtacctccgccgccact

SEQ ID NO: 1443678 - DNA, 25 bp, Homo sapien
aaaataacgccgtcctctccacaat

SEQ ID NO: 1443679 - DNA, 25 bp, Homo sapien
cgccgtcctctccacaatggaatta

SEQ ID NO: 1443680 - DNA, 25 bp, Homo sapien
aattaaaagcctcccgtgtactgcg

SEQ ID NO: 1443681 - DNA, 25 bp, Homo sapien
caatggaattaaaagcctcccgtgt

SEQ ID NO: 1443682 - DNA, 25 bp, Homo sapien
tgaggctgtccctttattcagggtg

SEQ ID NO: 1443683 - DNA, 25 bp, Homo sapien
gtccctttattcagggtgtcagtgt

SEQ ID NO: 1443684 - DNA, 25 bp, Homo sapien
taatggtaagctgggatgcatataa

SEQ ID NO: 1443685 - DNA, 25 bp, Homo sapien
cagggtgtcagtgtttaatggtaag

SEQ ID NO: 1443686 - DNA, 25 bp, Homo sapien
acaccccatatatcaggaagatgaa

SEQ ID NO: 1443687 - DNA, 25 bp, Homo sapien
gtgttgtacaccccatatatcagga

SEQ ID NO: 1443688 - DNA, 25 bp, Homo sapien
tgtacaccccatatatcaggaagat

SEQ ID NO: 1443689 - DNA, 25 bp, Homo sapien
gttgtacaccccatatatcaggaag

SEQ ID NO: 1443690 - DNA, 25 bp, Homo sapien
ctgttaacgctaatcatttcagcag

SEQ ID NO: 1443691 - DNA, 25 bp, Homo sapien
gaaaagctgttaacgctaatcattt

SEQ ID NO: 1443692 - DNA, 25 bp, Homo sapien
aagctgttaacgctaatcatttcag

SEQ ID NO: 1443693 - DNA, 25 bp, Homo sapien
gggaaaagctgttaacgctaatcat

SEQ ID NO: 1443694 - DNA, 25 bp, Homo sapien
acattgtagtattcttgttaggtac

SEQ ID NO: 1443695 - DNA, 25 bp, Homo sapien
ccaaatattaaataggagtctgtac

SEQ ID NO: 1443696 - DNA, 25 bp, Homo sapien
tgataagatagtactcaggctgggc

SEQ ID NO: 1443697 - DNA, 25 bp, Homo sapien
tctgtactaaatctagaaatggttc

SEQ ID NO: 1443698 - DNA, 25 bp, Homo sapien
aactgttgtcgtcgtcactggtttc

SEQ ID NO: 1443699 - DNA, 25 bp, Homo sapien
caaactgttgtcgtcgtcactggtt

SEQ ID NO: 1443700 - DNA, 25 bp, Homo sapien
aaactgttgtcgtcgtcactggttt

SEQ ID NO: 1443701 - DNA, 25 bp, Homo sapien
cgaaggctagctctgtgcaagttcc

SEQ ID NO: 1443702 - DNA, 25 bp, Homo sapien
tgggtacttaaatggccagggtatc

SEQ ID NO: 1443703 - DNA, 25 bp, Homo sapien
gctcacttcatatgttaggccaaaa

SEQ ID NO: 1443704 - DNA, 25 bp, Homo sapien
tatgagccagtacctcgaaggctag

SEQ ID NO: 1443705 - DNA, 25 bp, Homo sapien
tttacccagtagagatcagagccgg

SEQ ID NO: 1443706 - DNA, 25 bp, Homo sapien
tcgtctctgggaagagatttaccca

SEQ ID NO: 1443707 - DNA, 25 bp, Homo sapien
gatcagagccggacattttattgtt

SEQ ID NO: 1443708 - DNA, 25 bp, Homo sapien
gaagagccaatccagtttaagtgtg

SEQ ID NO: 1443709 - DNA, 25 bp, Homo sapien
ctagctgattgcttgcctccatatg

SEQ ID NO: 1443710 - DNA, 25 bp, Homo sapien
ccatatgatgggcactattttagca

SEQ ID NO: 1443711 - DNA, 25 bp, Homo sapien
gattgcttgcctccatatgatgggc

SEQ ID NO: 1443712 - DNA, 25 bp, Homo sapien
tatgatgggcactattttagcatcc

SEQ ID NO: 1443713 - DNA, 25 bp, Homo sapien
tgaataattttaatggcctttgcat

SEQ ID NO: 1443714 - DNA, 25 bp, Homo sapien
gaataattttaatggcctttgcatc

SEQ ID NO: 1443715 - DNA, 25 bp, Homo sapien
aataattttaatggcctttgcatca

SEQ ID NO: 1443716 - DNA, 25 bp, Homo sapien
aactcattaccccagttcctcttgt

SEQ ID NO: 1443717 - DNA, 25 bp, Homo sapien
cctcttgtgtatccagagaaatcca

SEQ ID NO: 1443718 - DNA, 25 bp, Homo sapien
ttgataatattcttctaagccaaac

SEQ ID NO: 1443719 - DNA, 25 bp, Homo sapien
gttcctcttgtgtatccagagaaat

SEQ ID NO: 1443720 - DNA, 25 bp, Homo sapien
tggagtataaaacataatggacagc

SEQ ID NO: 1443721 - DNA, 25 bp, Homo sapien
ggtgattaaacatccaagtgatgct

SEQ ID NO: 1443722 - DNA, 25 bp, Homo sapien
gcttttgcgggtgattaaacatcca

SEQ ID NO: 1443723 - DNA, 25 bp, Homo sapien
cattggataaccacaaatgtaatga

SEQ ID NO: 1443724 - DNA, 25 bp, Homo sapien
tctgaaggacatctaagtgtttcat

SEQ ID NO: 1443725 - DNA, 25 bp, Homo sapien
aaggacatctaagtgtttcattgtc

SEQ ID NO: 1443726 - DNA, 25 bp, Homo sapien
gaaggacatctaagtgtttcattgt

SEQ ID NO: 1443727 - DNA, 25 bp, Homo sapien
tgaaggacatctaagtgtttcattg

SEQ ID NO: 1443728 - DNA, 25 bp, Homo sapien
ctgaagctagattgagagtaaatgc

SEQ ID NO: 1443729 - DNA, 25 bp, Homo sapien
tctttgtaagtccaaagcaatacat

SEQ ID NO: 1443730 - DNA, 25 bp, Homo sapien
aatacatcagggaagcgtttactgc

SEQ ID NO: 1443731 - DNA, 25 bp, Homo sapien
gagagtaaatgcatcttgggttgct

SEQ ID NO: 1443732 - DNA, 25 bp, Homo sapien
ctcagtactttgcaggcggatggtg

SEQ ID NO: 1443733 - DNA, 25 bp, Homo sapien
caagttgatatgctccaggactggg

SEQ ID NO: 1443734 - DNA, 25 bp, Homo sapien
gaggagacccacatggttagccagc

SEQ ID NO: 1443735 - DNA, 25 bp, Homo sapien
tagattcttagaccagccacggtgg

SEQ ID NO: 1443736 - DNA, 25 bp, Homo sapien
taatcaccaatatcagcagttgctg

SEQ ID NO: 1443737 - DNA, 25 bp, Homo sapien
tcaccaatatcagcagttgctgctt

SEQ ID NO: 1443738 - DNA, 25 bp, Homo sapien
cttctgcataatcaccaatatcagc

SEQ ID NO: 1443739 - DNA, 25 bp, Homo sapien
gcataatcaccaatatcagcagttg

SEQ ID NO: 1443740 - DNA, 25 bp, Homo sapien
cagatgttccagctaccaggatgtg

SEQ ID NO: 1443741 - DNA, 25 bp, Homo sapien
cctgctcgaggaaatccaattgaaa

SEQ ID NO: 1443742 - DNA, 25 bp, Homo sapien
gcagccaagaggaacaacaagctag

SEQ ID NO: 1443743 - DNA, 25 bp, Homo sapien
catttaacctgaacatgtagttggg

SEQ ID NO: 1443744 - DNA, 25 bp, Homo sapien
atttgctttagaatgcccgattata

SEQ ID NO: 1443745 - DNA, 25 bp, Homo sapien
catttttggggtcactgaattctta

SEQ ID NO: 1443746 - DNA, 25 bp, Homo sapien
ttatttgctttagaatgcccgatta

SEQ ID NO: 1443747 - DNA, 25 bp, Homo sapien
ttgctttagaatgcccgattatatc

SEQ ID NO: 1443748 - DNA, 25 bp, Homo sapien
ctacatttgaggatacagcctttga

SEQ ID NO: 1443749 - DNA, 25 bp, Homo sapien
gatacagcctttgaaacaatgccaa

SEQ ID NO: 1443750 - DNA, 25 bp, Homo sapien
gaacaaagtctacatttgaggatac

SEQ ID NO: 1443751 - DNA, 25 bp, Homo sapien
acagcctttgaaacaatgccaacca

SEQ ID NO: 1443752 - DNA, 25 bp, Homo sapien
atgtcctaaaccgcaacaaatacgt

SEQ ID NO: 1443753 - DNA, 25 bp, Homo sapien
taaggtaatgtcctaaaccgcaaca

SEQ ID NO: 1443754 - DNA, 25 bp, Homo sapien
tgtcctaaaccgcaacaaatacgtg

SEQ ID NO: 1443755 - DNA, 25 bp, Homo sapien
cagagccagctgcttctatggcatc

SEQ ID NO: 1443756 - DNA, 25 bp, Homo sapien
tggcgtctgagcaaataatttacag

SEQ ID NO: 1443757 - DNA, 25 bp, Homo sapien
agaaattccacaggaaaggaggtgc

SEQ ID NO: 1443758 - DNA, 25 bp, Homo sapien
tttacagaaattccacaggaaagga

SEQ ID NO: 1443759 - DNA, 25 bp, Homo sapien
gaggagaatgtactgtctctgctgc

SEQ ID NO: 1443760 - DNA, 25 bp, Homo sapien
cccaaacctgacagcggtaggagga

SEQ ID NO: 1443761 - DNA, 25 bp, Homo sapien
aggttggatccggagaccatttttg

SEQ ID NO: 1443762 - DNA, 25 bp, Homo sapien
gggaattttccaattacacacacaa

SEQ ID NO: 1443763 - DNA, 25 bp, Homo sapien
cagaagcttgcccaatcccataggt

SEQ ID NO: 1443764 - DNA, 25 bp, Homo sapien
agaaatgagtcctatggcagaaacc

SEQ ID NO: 1443765 - DNA, 25 bp, Homo sapien
tgtggacaagggactaaattctacc

SEQ ID NO: 1443766 - DNA, 25 bp, Homo sapien
ggcagaaaccactagtaatcaccaa

SEQ ID NO: 1443767 - DNA, 25 bp, Homo sapien
tctacccattggaaacattacgtcc

SEQ ID NO: 1443768 - DNA, 25 bp, Homo sapien
ggttactgggttctgcacgtattca

SEQ ID NO: 1443769 - DNA, 25 bp, Homo sapien
tcagactttgttgaggcccttgagg

SEQ ID NO: 1443770 - DNA, 25 bp, Homo sapien
ttctgtgtcagactagaagaagcca

SEQ ID NO: 1443771 - DNA, 25 bp, Homo sapien
catcttcccgagcaatgttgactgg

SEQ ID NO: 1443772 - DNA, 25 bp, Homo sapien
actgctccctgatattctgtagcag

SEQ ID NO: 1443773 - DNA, 25 bp, Homo sapien
ctgctccctgatattctgtagcagc

SEQ ID NO: 1443774 - DNA, 25 bp, Homo sapien
tgctccctgatattctgtagcagca

SEQ ID NO: 1443775 - DNA, 25 bp, Homo sapien
tgagtatgatgtcaggtgagagtat

SEQ ID NO: 1443776 - DNA, 25 bp, Homo sapien
tatgatgtcaggtgagagtatggtc

SEQ ID NO: 1443777 - DNA, 25 bp, Homo sapien
agtatgatgtcaggtgagagtatgg

SEQ ID NO: 1443778 - DNA, 25 bp, Homo sapien
gagtatgatgtcaggtgagagtatg

SEQ ID NO: 1443779 - DNA, 25 bp, Homo sapien
gaacctgagctgtcacccacgttaa

SEQ ID NO: 1443780 - DNA, 25 bp, Homo sapien
gagctgtcacccacgttaaattact

SEQ ID NO: 1443781 - DNA, 25 bp, Homo sapien
tcttagcccgaacctgagctgtcac

SEQ ID NO: 1443782 - DNA, 25 bp, Homo sapien
catgtcgacctctcttagcccgaac

SEQ ID NO: 1443783 - DNA, 25 bp, Homo sapien
gatgtatagttgaagtggtcatctg

SEQ ID NO: 1443784 - DNA, 25 bp, Homo sapien
tgtatggccctgacaagggcaccaa

SEQ ID NO: 1443785 - DNA, 25 bp, Homo sapien
tggatgatgtatagttgaagtggtc

SEQ ID NO: 1443786 - DNA, 25 bp, Homo sapien
gaagcatgctggtgatgtatggccc

SEQ ID NO: 1443787 - DNA, 25 bp, Homo sapien
tgtacatctacactccagcaaactg

SEQ ID NO: 1443788 - DNA, 25 bp, Homo sapien
taatactgttctgactgcaatgact

SEQ ID NO: 1443789 - DNA, 25 bp, Homo sapien
cgggaaatcctcatatgtacatcta

SEQ ID NO: 1443790 - DNA, 25 bp, Homo sapien
gagcttgaaaacaccacacaaggtt

SEQ ID NO: 1443791 - DNA, 25 bp, Homo sapien
cagggtaaactactgtgccagcaag

SEQ ID NO: 1443792 - DNA, 25 bp, Homo sapien
gaaggcataggcacaaaggtaactg

SEQ ID NO: 1443793 - DNA, 25 bp, Homo sapien
cattatcaagagaaggtccagcctc

SEQ ID NO: 1443794 - DNA, 25 bp, Homo sapien
catgggtggtcataaaagtgcctac

SEQ ID NO: 1443795 - DNA, 25 bp, Homo sapien
aatcctactgggtgtgcattcctct

SEQ ID NO: 1443796 - DNA, 25 bp, Homo sapien
ccactgaatcctactgggtgtgcat

SEQ ID NO: 1443797 - DNA, 25 bp, Homo sapien
ctgaatcctactgggtgtgcattcc

SEQ ID NO: 1443798 - DNA, 25 bp, Homo sapien
tcctactgggtgtgcattcctctga

SEQ ID NO: 1443799 - DNA, 25 bp, Homo sapien
gacacgctttggtacacctttattc

SEQ ID NO: 1443800 - DNA, 25 bp, Homo sapien
gggatgagccatggagctcatagac

SEQ ID NO: 1443801 - DNA, 25 bp, Homo sapien
ggatgagccatggagctcatagaca

SEQ ID NO: 1443802 - DNA, 25 bp, Homo sapien
ggagctcatagacacgctttggtac

SEQ ID NO: 1443803 - DNA, 25 bp, Homo sapien
cagggtttcaacaaatcagggcttt

SEQ ID NO: 1443804 - DNA, 25 bp, Homo sapien
catagctgccaacagaagtagaagg

SEQ ID NO: 1443805 - DNA, 25 bp, Homo sapien
gagttactctactctcatagctgcc

SEQ ID NO: 1443806 - DNA, 25 bp, Homo sapien
tgtaaaaatcactggccaagttgcg

SEQ ID NO: 1443807 - DNA, 25 bp, Homo sapien
tggagaagatttatatcactatggc

SEQ ID NO: 1443808 - DNA, 25 bp, Homo sapien
ggagaagatttatatcactatggca

SEQ ID NO: 1443809 - DNA, 25 bp, Homo sapien
ctggagaagatttatatcactatgg

SEQ ID NO: 1443810 - DNA, 25 bp, Homo sapien
agaagatttatatcactatggcatc

SEQ ID NO: 1443811 - DNA, 25 bp, Homo sapien
aagaattctggagcacgattaacca

SEQ ID NO: 1443812 - DNA, 25 bp, Homo sapien
agaattctggagcacgattaaccat

SEQ ID NO: 1443813 - DNA, 25 bp, Homo sapien
tttaagaattctggagcacgattaa

SEQ ID NO: 1443814 - DNA, 25 bp, Homo sapien
taagaattctggagcacgattaacc

SEQ ID NO: 1443815 - DNA, 25 bp, Homo sapien
cctcttgaaatcttggtattcaaag

SEQ ID NO: 1443816 - DNA, 25 bp, Homo sapien
gagatctaatcaatcccatggcatt

SEQ ID NO: 1443817 - DNA, 25 bp, Homo sapien
tcaagagatctaatcaatcccatgg

SEQ ID NO: 1443818 - DNA, 25 bp, Homo sapien
aatcaatcccatggcattagttttc

SEQ ID NO: 1443819 - DNA, 25 bp, Homo sapien
gatgttttcaagagatctaatcaat

SEQ ID NO: 1443820 - DNA, 25 bp, Homo sapien
ctacagatgtgcaccaccacgctca

SEQ ID NO: 1443821 - DNA, 25 bp, Homo sapien
actacagatgtgcaccaccacgctc

SEQ ID NO: 1443822 - DNA, 25 bp, Homo sapien
agccaccgcgcccagccgtgttttt

SEQ ID NO: 1443823 - DNA, 25 bp, Homo sapien
atgagccaccgcgcccagccgtgtt

SEQ ID NO: 1443824 - DNA, 25 bp, Homo sapien
gtttacagactgaattcttgaaaat

SEQ ID NO: 1443825 - DNA, 25 bp, Homo sapien
aggagtttacagactgaattcttga

SEQ ID NO: 1443826 - DNA, 25 bp, Homo sapien
ttacagactgaattcttgaaaatag

SEQ ID NO: 1443827 - DNA, 25 bp, Homo sapien
ttaggagtttacagactgaattctt

SEQ ID NO: 1443828 - DNA, 25 bp, Homo sapien
taataaaatcttcattcctaagcct

SEQ ID NO: 1443829 - DNA, 25 bp, Homo sapien
attcctaagcctacaccatcacaaa

SEQ ID NO: 1443830 - DNA, 25 bp, Homo sapien
gcctaaagagttcatgctgaagttc

SEQ ID NO: 1443831 - DNA, 25 bp, Homo sapien
cattttttgtacactgcctaaagag

SEQ ID NO: 1443832 - DNA, 25 bp, Homo sapien
tttgagcctcttttatcattgatga

SEQ ID NO: 1443833 - DNA, 25 bp, Homo sapien
tgctccctttcagaactgctaactg

SEQ ID NO: 1443834 - DNA, 25 bp, Homo sapien
actgccccacatactttacagcttg

SEQ ID NO: 1443835 - DNA, 25 bp, Homo sapien
cactggcagctttattgttaccgtt

SEQ ID NO: 1443836 - DNA, 25 bp, Homo sapien
caaaagcacatgcagtctgaatagt

SEQ ID NO: 1443837 - DNA, 25 bp, Homo sapien
tggtacaaggcagtaaatcactcag

SEQ ID NO: 1443838 - DNA, 25 bp, Homo sapien
taagtgactggattgctcgatcaga

SEQ ID NO: 1443839 - DNA, 25 bp, Homo sapien
aaaataactgtaagtagcctcccag

SEQ ID NO: 1443840 - DNA, 25 bp, Homo sapien
taggctgtctgctatagttctttct

SEQ ID NO: 1443841 - DNA, 25 bp, Homo sapien
gtctgctatagttctttcttcatca

SEQ ID NO: 1443842 - DNA, 25 bp, Homo sapien
tggcaaatagcccattataaatttt

SEQ ID NO: 1443843 - DNA, 25 bp, Homo sapien
tggaaatggcaaatagcccattata

SEQ ID NO: 1443844 - DNA, 25 bp, Homo sapien
taacgaagaaccaatcaattctttg

SEQ ID NO: 1443845 - DNA, 25 bp, Homo sapien
aattctttgcaaattccaggaagaa

SEQ ID NO: 1443846 - DNA, 25 bp, Homo sapien
aaatagtgcttgatttgtccattaa

SEQ ID NO: 1443847 - DNA, 25 bp, Homo sapien
aagaaaggactctgctgaatttgag

SEQ ID NO: 1443848 - DNA, 25 bp, Homo sapien
tgtcatgtaaacaaccagaaattct

SEQ ID NO: 1443849 - DNA, 25 bp, Homo sapien
gaatgcaaattcttaattggatgga

SEQ ID NO: 1443850 - DNA, 25 bp, Homo sapien
acttgtatgtcatgtaaacaaccag

SEQ ID NO: 1443851 - DNA, 25 bp, Homo sapien
aatgcaaattcttaattggatggac

SEQ ID NO: 1443852 - DNA, 25 bp, Homo sapien
tgtaatgtcgggttcccattcatct

SEQ ID NO: 1443853 - DNA, 25 bp, Homo sapien
gatcacaaaaggcatcttcacccct

SEQ ID NO: 1443854 - DNA, 25 bp, Homo sapien
atcttcacccctgttactaccatta

SEQ ID NO: 1443855 - DNA, 25 bp, Homo sapien
aaactggtgcatctgtaatgtcggg

SEQ ID NO: 1443856 - DNA, 25 bp, Homo sapien
gaagtgtcagaactacttttatctg

SEQ ID NO: 1443857 - DNA, 25 bp, Homo sapien
caagtttagattcaaacttttccag

SEQ ID NO: 1443858 - DNA, 25 bp, Homo sapien
gttacgaacccgaatagaagtgtca

SEQ ID NO: 1443859 - DNA, 25 bp, Homo sapien
ccagactccagaatgttgagattcc

SEQ ID NO: 1443860 - DNA, 25 bp, Homo sapien
gagtttcatagagctccaagttgtc

SEQ ID NO: 1443861 - DNA, 25 bp, Homo sapien
tcaatttgctgctgatagcattggc

SEQ ID NO: 1443862 - DNA, 25 bp, Homo sapien
tggcttcctgaatcatcattgagag

SEQ ID NO: 1443863 - DNA, 25 bp, Homo sapien
tcatcattgagagtttcatagagct

SEQ ID NO: 1443864 - DNA, 25 bp, Homo sapien
ttttatccctattattccgattctg

SEQ ID NO: 1443865 - DNA, 25 bp, Homo sapien
ttgcatggcggatgctatggtcttc

SEQ ID NO: 1443866 - DNA, 25 bp, Homo sapien
tccagaattcttgcatggcggatgc

SEQ ID NO: 1443867 - DNA, 25 bp, Homo sapien
cctattattccgattctgctgtaga

SEQ ID NO: 1443868 - DNA, 25 bp, Homo sapien
tgattagccttctggttatttattt

SEQ ID NO: 1443869 - DNA, 25 bp, Homo sapien
catttctaatcgctttttgttgaca

SEQ ID NO: 1443870 - DNA, 25 bp, Homo sapien
tgtgattagccttctggttatttat

SEQ ID NO: 1443871 - DNA, 25 bp, Homo sapien
gtgattagccttctggttatttatt

SEQ ID NO: 1443872 - DNA, 25 bp, Homo sapien
ccttcaactgagcctcttttatttc

SEQ ID NO: 1443873 - DNA, 25 bp, Homo sapien
tcctttgccttcaactgagcctctt

SEQ ID NO: 1443874 - DNA, 25 bp, Homo sapien
tattttgctttcatatgcagctttt

SEQ ID NO: 1443875 - DNA, 25 bp, Homo sapien
attttgctttcatatgcagcttttt

SEQ ID NO: 1443876 - DNA, 25 bp, Homo sapien
tgatctccaccaagaatcactcgat

SEQ ID NO: 1443877 - DNA, 25 bp, Homo sapien
tctggacttctactggatgattaaa

SEQ ID NO: 1443878 - DNA, 25 bp, Homo sapien
tcttttggaccctcacttataggag

SEQ ID NO: 1443879 - DNA, 25 bp, Homo sapien
ttataggagtatctcttccagatgg

SEQ ID NO: 1443880 - DNA, 25 bp, Homo sapien
atgacgtaatactgtgatttccaaa

SEQ ID NO: 1443881 - DNA, 25 bp, Homo sapien
tccccaactgggataatactcactg

SEQ ID NO: 1443882 - DNA, 25 bp, Homo sapien
tgacgtaatactgtgatttccaaaa

SEQ ID NO: 1443883 - DNA, 25 bp, Homo sapien
ttccccaactgggataatactcact

SEQ ID NO: 1443884 - DNA, 25 bp, Homo sapien
tcagcaatcagcaccccagataact

SEQ ID NO: 1443885 - DNA, 25 bp, Homo sapien
caaggtttggtaaatgattgtccat

SEQ ID NO: 1443886 - DNA, 25 bp, Homo sapien
agataactgaatatcatggcttgag

SEQ ID NO: 1443887 - DNA, 25 bp, Homo sapien
gcatctcagatagttgtggatcttc

SEQ ID NO: 1443888 - DNA, 25 bp, Homo sapien
ctggtagaagtcagaaaaagaaatt

SEQ ID NO: 1443889 - DNA, 25 bp, Homo sapien
tggtagaagtcagaaaaagaaatta

SEQ ID NO: 1443890 - DNA, 25 bp, Homo sapien
ttcagcttgttcaaacttttctttc

SEQ ID NO: 1443891 - DNA, 25 bp, Homo sapien
gcttgttcaaacttttctttccaca

SEQ ID NO: 1443892 - DNA, 25 bp, Homo sapien
ctgtaactcttttgtttcttgaagt

SEQ ID NO: 1443893 - DNA, 25 bp, Homo sapien
cagcttgttcaaacttttctttcca

SEQ ID NO: 1443894 - DNA, 25 bp, Homo sapien
ttcttaaggatgttatttcttgccg

SEQ ID NO: 1443895 - DNA, 25 bp, Homo sapien
tcagggtcaatattccgactgtttc

SEQ ID NO: 1443896 - DNA, 25 bp, Homo sapien
tcttgccgacagagcctgtatcgtt

SEQ ID NO: 1443897 - DNA, 25 bp, Homo sapien
cagagcctgtatcgttcagggtcaa

SEQ ID NO: 1443898 - DNA, 25 bp, Homo sapien
aacgggcttggttagcatatctaag

SEQ ID NO: 1443899 - DNA, 25 bp, Homo sapien
gctggcagcgggactaatcgtagca

SEQ ID NO: 1443900 - DNA, 25 bp, Homo sapien
aattaacttagcgttcatatcttca

SEQ ID NO: 1443901 - DNA, 25 bp, Homo sapien
catatctaagtgtgcttaatgtttc

SEQ ID NO: 1443902 - DNA, 25 bp, Homo sapien
caagaggcaataatctgtgcagaga

SEQ ID NO: 1443903 - DNA, 25 bp, Homo sapien
tatttgtaactatttctagatctca

SEQ ID NO: 1443904 - DNA, 25 bp, Homo sapien
gatctcataaacactttttctctct

SEQ ID NO: 1443905 - DNA, 25 bp, Homo sapien
tttcaagaggcaataatctgtgcag

SEQ ID NO: 1443906 - DNA, 25 bp, Homo sapien
taagaacagattcacgataaggaat

SEQ ID NO: 1443907 - DNA, 25 bp, Homo sapien
tcccaaagttagcaaggacttatta

SEQ ID NO: 1443908 - DNA, 25 bp, Homo sapien
gcttgttccgaaagtgcagatataa

SEQ ID NO: 1443909 - DNA, 25 bp, Homo sapien
aggacttattaatactcacaccttc

SEQ ID NO: 1443910 - DNA, 25 bp, Homo sapien
ctttagtcgatctccattagtgtga

SEQ ID NO: 1443911 - DNA, 25 bp, Homo sapien
ttattctgtgatcgtgttcttcccc

SEQ ID NO: 1443912 - DNA, 25 bp, Homo sapien
tgcctgccagatctattaggttaat

SEQ ID NO: 1443913 - DNA, 25 bp, Homo sapien
tctccattagtgtgagccgtagagc

SEQ ID NO: 1443914 - DNA, 25 bp, Homo sapien
agtagcagcagtagctctttgttta

SEQ ID NO: 1443915 - DNA, 25 bp, Homo sapien
aactgaatgagatcgggaactttta

SEQ ID NO: 1443916 - DNA, 25 bp, Homo sapien
ttttatcattcataccagtagcagc

SEQ ID NO: 1443917 - DNA, 25 bp, Homo sapien
tcaccagggtgaaaactgaatgaga

SEQ ID NO: 1443918 - DNA, 25 bp, Homo sapien
gatatcagcgtaagaactgacaatg

SEQ ID NO: 1443919 - DNA, 25 bp, Homo sapien
atcagcgtaagaactgacaatgttc

SEQ ID NO: 1443920 - DNA, 25 bp, Homo sapien
ctggatatcagcgtaagaactgaca

SEQ ID NO: 1443921 - DNA, 25 bp, Homo sapien
tggatatcagcgtaagaactgacaa

SEQ ID NO: 1443922 - DNA, 25 bp, Homo sapien
ttgacagtgcttcaacatatggtcc

SEQ ID NO: 1443923 - DNA, 25 bp, Homo sapien
cataaacaggatgttccctcactct

SEQ ID NO: 1443924 - DNA, 25 bp, Homo sapien
tatggtccataaacaggatgttccc

SEQ ID NO: 1443925 - DNA, 25 bp, Homo sapien
caacatatggtccataaacaggatg

SEQ ID NO: 1443926 - DNA, 25 bp, Homo sapien
cagaaggtcgtgaattttttcatta

SEQ ID NO: 1443927 - DNA, 25 bp, Homo sapien
ggaattattcctggttcttcactaa

SEQ ID NO: 1443928 - DNA, 25 bp, Homo sapien
tctggctagcgtagtgaggatgaca

SEQ ID NO: 1443929 - DNA, 25 bp, Homo sapien
acttgtttcgtgtcagggtgttcca

SEQ ID NO: 1443930 - DNA, 25 bp, Homo sapien
gctctttctaggagtggtgctgcta

SEQ ID NO: 1443931 - DNA, 25 bp, Homo sapien
gccagtctgaccataagcaaaaaga

SEQ ID NO: 1443932 - DNA, 25 bp, Homo sapien
ctgggatgctttttcaatcttctct

SEQ ID NO: 1443933 - DNA, 25 bp, Homo sapien
tgaaaggtcttacgcgtactgccac

SEQ ID NO: 1443934 - DNA, 25 bp, Homo sapien
ggtgaaaggtcttacgcgtactgcc

SEQ ID NO: 1443935 - DNA, 25 bp, Homo sapien
ctcttggtgaaaggtcttacgcgta

SEQ ID NO: 1443936 - DNA, 25 bp, Homo sapien
ggtcttacgcgtactgccactgtca

SEQ ID NO: 1443937 - DNA, 25 bp, Homo sapien
tcagtctgactcagggaagcaatgg

SEQ ID NO: 1443938 - DNA, 25 bp, Homo sapien
ctgggctcttaagctgaggcaggct

SEQ ID NO: 1443939 - DNA, 25 bp, Homo sapien
tgtcaagtgtcctgatctaacaact

SEQ ID NO: 1443940 - DNA, 25 bp, Homo sapien
caatgggtggtctattacttgagta

SEQ ID NO: 1443941 - DNA, 25 bp, Homo sapien
atccttacatttgttctactttcct

SEQ ID NO: 1443942 - DNA, 25 bp, Homo sapien
tttagcattatttacaatccttaca

SEQ ID NO: 1443943 - DNA, 25 bp, Homo sapien
cttacatttgttctactttccttag

SEQ ID NO: 1443944 - DNA, 25 bp, Homo sapien
tagcattatttacaatccttacatt

SEQ ID NO: 1443945 - DNA, 25 bp, Homo sapien
tagcacgacgttgtaatgtaagacg

SEQ ID NO: 1443946 - DNA, 25 bp, Homo sapien
taatgtaagacgtgtttctgctgtt

SEQ ID NO: 1443947 - DNA, 25 bp, Homo sapien
tgacagaatctatttcagctgtttt

SEQ ID NO: 1443948 - DNA, 25 bp, Homo sapien
cagaatctgttttagcacgacgttg

SEQ ID NO: 1443949 - DNA, 25 bp, Homo sapien
tctttgttccttgtagttctcctct

SEQ ID NO: 1443950 - DNA, 25 bp, Homo sapien
tccttgtagttctcctctgaagtgc

SEQ ID NO: 1443951 - DNA, 25 bp, Homo sapien
tttgttccttgtagttctcctctga

SEQ ID NO: 1443952 - DNA, 25 bp, Homo sapien
tgttccttgtagttctcctctgaag

SEQ ID NO: 1443953 - DNA, 25 bp, Homo sapien
gattaggggtaaggggcatgtctgc

SEQ ID NO: 1443954 - DNA, 25 bp, Homo sapien
gtctgctgtttttctactggcagaa

SEQ ID NO: 1443955 - DNA, 25 bp, Homo sapien
tgctgtttttctactggcagaaata

SEQ ID NO: 1443956 - DNA, 25 bp, Homo sapien
cataagttctatttatgtctctgac

SEQ ID NO: 1443957 - DNA, 25 bp, Homo sapien
ttcacattctgacatatccgacttc

SEQ ID NO: 1443958 - DNA, 25 bp, Homo sapien
gatctcaataatggatcatcatttt

SEQ ID NO: 1443959 - DNA, 25 bp, Homo sapien
agcttaagtcggctactgtgggtga

SEQ ID NO: 1443960 - DNA, 25 bp, Homo sapien
gacatatccgacttcaaatgcagct

SEQ ID NO: 1443961 - DNA, 25 bp, Homo sapien
gaagaaggaatatcaagaatatcac

SEQ ID NO: 1443962 - DNA, 25 bp, Homo sapien
tttgggaagaaggaatatcaagaat

SEQ ID NO: 1443963 - DNA, 25 bp, Homo sapien
tatcaagaatatcaccgctgttatt

SEQ ID NO: 1443964 - DNA, 25 bp, Homo sapien
ctattatgagtactgtgtaatgaca

SEQ ID NO: 1443965 - DNA, 25 bp, Homo sapien
atgttactaagaccctaagctcttc

SEQ ID NO: 1443966 - DNA, 25 bp, Homo sapien
tactaagaccctaagctcttctttg

SEQ ID NO: 1443967 - DNA, 25 bp, Homo sapien
agaatgttactaagaccctaagctc

SEQ ID NO: 1443968 - DNA, 25 bp, Homo sapien
ctaagaccctaagctcttctttgga

SEQ ID NO: 1443969 - DNA, 25 bp, Homo sapien
agcccacgggccgagaggccctgaa

SEQ ID NO: 1443970 - DNA, 25 bp, Homo sapien
agaggccctgaagtccggcttcccg

SEQ ID NO: 1443971 - DNA, 25 bp, Homo sapien
ctcttaatgccaaccgactcgggga

SEQ ID NO: 1443972 - DNA, 25 bp, Homo sapien
gagacgctgccttgcgcccttcgtt

SEQ ID NO: 1443973 - DNA, 25 bp, Homo sapien
gggactggagctaagaccacccgcc

SEQ ID NO: 1443974 - DNA, 25 bp, Homo sapien
tgggggactggagctaagaccaccc

SEQ ID NO: 1443975 - DNA, 25 bp, Homo sapien
tgaatgggggactggagctaagacc

SEQ ID NO: 1443976 - DNA, 25 bp, Homo sapien
tgctgaggaactgaatgggggactg

SEQ ID NO: 1443977 - DNA, 25 bp, Homo sapien
gtagggaaagcgtccgcacgccctc

SEQ ID NO: 1443978 - DNA, 25 bp, Homo sapien
gtgccgaaacttcgcccctccgcag

SEQ ID NO: 1443979 - DNA, 25 bp, Homo sapien
cctccgcagggtccggcaccttggg

SEQ ID NO: 1443980 - DNA, 25 bp, Homo sapien
ccagtgccgaaacttcgcccctccg

SEQ ID NO: 1443981 - DNA, 25 bp, Homo sapien
tctgctaaagcgtggagcttggccc

SEQ ID NO: 1443982 - DNA, 25 bp, Homo sapien
ctgattggctgctgggcgtcgcgtc

SEQ ID NO: 1443983 - DNA, 25 bp, Homo sapien
ccagaaggccgcaatttgaatgggc

SEQ ID NO: 1443984 - DNA, 25 bp, Homo sapien
tgggctccggtagccgtctctgaat

SEQ ID NO: 1443985 - DNA, 25 bp, Homo sapien
aaggggcggcggtcgcgggcgcagc

SEQ ID NO: 1443986 - DNA, 25 bp, Homo sapien
cagaggaaggggcggcggtcgcggg

SEQ ID NO: 1443987 - DNA, 25 bp, Homo sapien
accagaggaaggggcggcggtcgcg

SEQ ID NO: 1443988 - DNA, 25 bp, Homo sapien
aatccgaccagaggaaggggcggcg

SEQ ID NO: 1443989 - DNA, 25 bp, Homo sapien
gaattcagttgttgtcacttggtga

SEQ ID NO: 1443990 - DNA, 25 bp, Homo sapien
cattccagggaagattagcaagatt

SEQ ID NO: 1443991 - DNA, 25 bp, Homo sapien
tacatgttagaccaagagtcttgga

SEQ ID NO: 1443992 - DNA, 25 bp, Homo sapien
ttgtcagccccaaagcctagtgagt

SEQ ID NO: 1443993 - DNA, 25 bp, Homo sapien
ttgtgctttgccaacatagcccaag

SEQ ID NO: 1443994 - DNA, 25 bp, Homo sapien
ctttgccaacatagcccaaggtcat

SEQ ID NO: 1443995 - DNA, 25 bp, Homo sapien
tcccattgtgctttgccaacatagc

SEQ ID NO: 1443996 - DNA, 25 bp, Homo sapien
gtgctttgccaacatagcccaaggt

SEQ ID NO: 1443997 - DNA, 25 bp, Homo sapien
tgacatcctgttgaaaatgctgggg

SEQ ID NO: 1443998 - DNA, 25 bp, Homo sapien
tctgacatcctgttgaaaatgctgg

SEQ ID NO: 1443999 - DNA, 25 bp, Homo sapien
ctgacatcctgttgaaaatgctggg

SEQ ID NO: 1444000 - DNA, 25 bp, Homo sapien
tcagtgatggtattgggcggagaaa

SEQ ID NO: 1444001 - DNA, 25 bp, Homo sapien
tattgggcggagaaagccatggcag

SEQ ID NO: 1444002 - DNA, 25 bp, Homo sapien
tggtattgggcggagaaagccatgg

SEQ ID NO: 1444003 - DNA, 25 bp, Homo sapien
agtgatggtattgggcggagaaagc

SEQ ID NO: 1444004 - DNA, 25 bp, Homo sapien
tgtaagttactatttgtaaacatta

SEQ ID NO: 1444005 - DNA, 25 bp, Homo sapien
taagttactatttgtaaacattaca

SEQ ID NO: 1444006 - DNA, 25 bp, Homo sapien
tcaccttggatgacacgttacctct

SEQ ID NO: 1444007 - DNA, 25 bp, Homo sapien
tggcggcaacaaaagagtcctatct

SEQ ID NO: 1444008 - DNA, 25 bp, Homo sapien
tcagtttactggtggctgccaggaa

SEQ ID NO: 1444009 - DNA, 25 bp, Homo sapien
tcattgtaagtatgccttggcggca

SEQ ID NO: 1444010 - DNA, 25 bp, Homo sapien
taagagatgcgttgatattaattcc

SEQ ID NO: 1444011 - DNA, 25 bp, Homo sapien
tgtataacaaggcaataagagatgc

SEQ ID NO: 1444012 - DNA, 25 bp, Homo sapien
taacaaggcaataagagatgcgttg

SEQ ID NO: 1444013 - DNA, 25 bp, Homo sapien
gcaataagagatgcgttgatattaa

SEQ ID NO: 1444014 - DNA, 25 bp, Homo sapien
cattttctgatgtttttaatttata

SEQ ID NO: 1444015 - DNA, 25 bp, Homo sapien
tctgatgtttttaatttataagaat

SEQ ID NO: 1444016 - DNA, 25 bp, Homo sapien
ttttttgctgactatatacaataaa

SEQ ID NO: 1444017 - DNA, 25 bp, Homo sapien
attttttgctgactatatacaataa

SEQ ID NO: 1444018 - DNA, 25 bp, Homo sapien
aattttttgctgactatatacaata

SEQ ID NO: 1444019 - DNA, 25 bp, Homo sapien
cataagattagctcctgtaaccaga

SEQ ID NO: 1444020 - DNA, 25 bp, Homo sapien
tgtaaccagatcattctgtgtctgt

SEQ ID NO: 1444021 - DNA, 25 bp, Homo sapien
ttctgataatatccataagattagc

SEQ ID NO: 1444022 - DNA, 25 bp, Homo sapien
tcttctggtcatgaaggtatgggga

SEQ ID NO: 1444023 - DNA, 25 bp, Homo sapien
gaaagtaatcgctgttccattttga

SEQ ID NO: 1444024 - DNA, 25 bp, Homo sapien
aatggatcctgtgggctttactcgt

SEQ ID NO: 1444025 - DNA, 25 bp, Homo sapien
taatcgctgttccattttgacctaa

SEQ ID NO: 1444026 - DNA, 25 bp, Homo sapien
ttgatgaaagtaatcgctgttccat

SEQ ID NO: 1444027 - DNA, 25 bp, Homo sapien
cattttcaagatgtccatgtaaaat

SEQ ID NO: 1444028 - DNA, 25 bp, Homo sapien
ttttcaagatgtccatgtaaaatct

SEQ ID NO: 1444029 - DNA, 25 bp, Homo sapien
ttcaagatgtccatgtaaaatctta

SEQ ID NO: 1444030 - DNA, 25 bp, Homo sapien
aacattttcaagatgtccatgtaaa

SEQ ID NO: 1444031 - DNA, 25 bp, Homo sapien
tcatccatacttgaaggcatatcaa

SEQ ID NO: 1444032 - DNA, 25 bp, Homo sapien
taggcctcgtcccaagactcctgtg

SEQ ID NO: 1444033 - DNA, 25 bp, Homo sapien
cagcctgacactgatcaagtctagg

SEQ ID NO: 1444034 - DNA, 25 bp, Homo sapien
tgaaggcatatcaaaattgacaacc

SEQ ID NO: 1444035 - DNA, 25 bp, Homo sapien
tcctttctatttgcgacttctctga

SEQ ID NO: 1444036 - DNA, 25 bp, Homo sapien
ccctgtgattttctgaacggcttca

SEQ ID NO: 1444037 - DNA, 25 bp, Homo sapien
tatagatatgcttttcagccctgtg

SEQ ID NO: 1444038 - DNA, 25 bp, Homo sapien
aaagatctgctcctagtttgcagtc

SEQ ID NO: 1444039 - DNA, 25 bp, Homo sapien
cagaagctggcttgctagctgttct

SEQ ID NO: 1444040 - DNA, 25 bp, Homo sapien
ggctgggtcttctacccacaaaata

SEQ ID NO: 1444041 - DNA, 25 bp, Homo sapien
taatctgacgtacattggcacaagg

SEQ ID NO: 1444042 - DNA, 25 bp, Homo sapien
gctagttggaattgtggctgaaacc

SEQ ID NO: 1444043 - DNA, 25 bp, Homo sapien
taaatagaaaactataccacaatgt

SEQ ID NO: 1444044 - DNA, 25 bp, Homo sapien
ttcctaaatagaaaactataccaca

SEQ ID NO: 1444045 - DNA, 25 bp, Homo sapien
tagaaaactataccacaatgtcaag

SEQ ID NO: 1444046 - DNA, 25 bp, Homo sapien
gaaaactataccacaatgtcaagag

SEQ ID NO: 1444047 - DNA, 25 bp, Homo sapien
ggaagagggtgctgatgccatcttt

SEQ ID NO: 1444048 - DNA, 25 bp, Homo sapien
tgaaatctaacccacaatgtacggg

SEQ ID NO: 1444049 - DNA, 25 bp, Homo sapien
tttgaagtagagagcaggccctcac

SEQ ID NO: 1444050 - DNA, 25 bp, Homo sapien
tattttgttatagcaccaggagtgg

SEQ ID NO: 1444051 - DNA, 25 bp, Homo sapien
taatgtgctgtcatccatattaaaa

SEQ ID NO: 1444052 - DNA, 25 bp, Homo sapien
tgtagtggcatgattctagcttgct

SEQ ID NO: 1444053 - DNA, 25 bp, Homo sapien
tctagcttgctggaaccttaaactc

SEQ ID NO: 1444054 - DNA, 25 bp, Homo sapien
tttttaagggcccactaatgtgctg

SEQ ID NO: 1444055 - DNA, 25 bp, Homo sapien
tctcgtctgatggtcactaagcaag

SEQ ID NO: 1444056 - DNA, 25 bp, Homo sapien
tggctccaactcacacctactgaat

SEQ ID NO: 1444057 - DNA, 25 bp, Homo sapien
gagtttgtagagattcctggctcca

SEQ ID NO: 1444058 - DNA, 25 bp, Homo sapien
tatccaagtgagaggtctggtctcg

SEQ ID NO: 1444059 - DNA, 25 bp, Homo sapien
taaggaaacttgggcaaacactgtg

SEQ ID NO: 1444060 - DNA, 25 bp, Homo sapien
attaaggaaacttgggcaaacactg

SEQ ID NO: 1444061 - DNA, 25 bp, Homo sapien
aatttagaaagcctcactgactccc

SEQ ID NO: 1444062 - DNA, 25 bp, Homo sapien
catacgtttcatggattccgatgcc

SEQ ID NO: 1444063 - DNA, 25 bp, Homo sapien
gtgtgaccccttacccctgtctgga

SEQ ID NO: 1444064 - DNA, 25 bp, Homo sapien
tgtatcacgcagcagggtaacctct

SEQ ID NO: 1444065 - DNA, 25 bp, Homo sapien
ttacaccacagagttctacagagct

SEQ ID NO: 1444066 - DNA, 25 bp, Homo sapien
tacaccacagagttctacagagctc

SEQ ID NO: 1444067 - DNA, 25 bp, Homo sapien
ctttacaccacagagttctacagag

SEQ ID NO: 1444068 - DNA, 25 bp, Homo sapien
tttacaccacagagttctacagagc

SEQ ID NO: 1444069 - DNA, 25 bp, Homo sapien
cacagttttcatgcgtggcaggcca

SEQ ID NO: 1444070 - DNA, 25 bp, Homo sapien
tctggttggtgtaagaatgagcgca

SEQ ID NO: 1444071 - DNA, 25 bp, Homo sapien
taacatgttgttgcagacgataaag

SEQ ID NO: 1444072 - DNA, 25 bp, Homo sapien
ggcaggccactcatcaattctttag

SEQ ID NO: 1444073 - DNA, 25 bp, Homo sapien
taaggaagcaagtttttagatcgtc

SEQ ID NO: 1444074 - DNA, 25 bp, Homo sapien
tgtagctcgtctggtcagctggatc

SEQ ID NO: 1444075 - DNA, 25 bp, Homo sapien
aactgacacacaaactgtagctcgt

SEQ ID NO: 1444076 - DNA, 25 bp, Homo sapien
tatcagaagcaaaatcactacaggc

SEQ ID NO: 1444077 - DNA, 25 bp, Homo sapien
tgggagttggcacctcatagcctga

SEQ ID NO: 1444078 - DNA, 25 bp, Homo sapien
gttcaaagtcaataatgggcctggt

SEQ ID NO: 1444079 - DNA, 25 bp, Homo sapien
gaaaatgacttaacgggctcttcag

SEQ ID NO: 1444080 - DNA, 25 bp, Homo sapien
cattcagtggagactctggctcaga

SEQ ID NO: 1444081 - DNA, 25 bp, Homo sapien
tgctcgggacttactgaatgaacct

SEQ ID NO: 1444082 - DNA, 25 bp, Homo sapien
tctgcttttgtccaactgaaggtct

SEQ ID NO: 1444083 - DNA, 25 bp, Homo sapien
tgtagctacagcatcaacgggaaca

SEQ ID NO: 1444084 - DNA, 25 bp, Homo sapien
gaaagggcatgattcgctgatgtgc

SEQ ID NO: 1444085 - DNA, 25 bp, Homo sapien
ccgaggcgcttcacgtcacggagct

SEQ ID NO: 1444086 - DNA, 25 bp, Homo sapien
tcacgtcacggagctgctaggagac

SEQ ID NO: 1444087 - DNA, 25 bp, Homo sapien
aggatgggaggaaggccgcgcaggg

SEQ ID NO: 1444088 - DNA, 25 bp, Homo sapien
ggcgcttcacgtcacggagctgcta

SEQ ID NO: 1444089 - DNA, 25 bp, Homo sapien
cggagcggagcgtagagtagaatcc

SEQ ID NO: 1444090 - DNA, 25 bp, Homo sapien
tgacccgctcgtcaggactgcggcc

SEQ ID NO: 1444091 - DNA, 25 bp, Homo sapien
agcggagcgtagagtagaatccact

SEQ ID NO: 1444092 - DNA, 25 bp, Homo sapien
aggcttccgcccgacaagccctgac

SEQ ID NO: 1444093 - DNA, 25 bp, Homo sapien
agccataagaaaggtgggagtcttc

SEQ ID NO: 1444094 - DNA, 25 bp, Homo sapien
tggaagatctgaaccgtgaagctct

SEQ ID NO: 1444095 - DNA, 25 bp, Homo sapien
cctggaagatctgaaccgtgaagct

SEQ ID NO: 1444096 - DNA, 25 bp, Homo sapien
gaagatctgaaccgtgaagctctgt

SEQ ID NO: 1444097 - DNA, 25 bp, Homo sapien
cggctgagggggaacgatccagcga

SEQ ID NO: 1444098 - DNA, 25 bp, Homo sapien
ggctgagggggaacgatccagcgag

SEQ ID NO: 1444099 - DNA, 25 bp, Homo sapien
ggagagggaggcgagggcgtgcggg

SEQ ID NO: 1444100 - DNA, 25 bp, Homo sapien
ggcctgaggggtctccccgctccga

SEQ ID NO: 1444101 - DNA, 25 bp, Homo sapien
cctgaggggtctccccgctccgagg

SEQ ID NO: 1444102 - DNA, 25 bp, Homo sapien
agagggaggcgagggcgtgcgggca

SEQ ID NO: 1444103 - DNA, 25 bp, Homo sapien
gatgttgtaatacctagaaagcaaa

SEQ ID NO: 1444104 - DNA, 25 bp, Homo sapien
taatttgaagtcttaggagccttga

SEQ ID NO: 1444105 - DNA, 25 bp, Homo sapien
tttataaccatatgttgtaaaagtc

SEQ ID NO: 1444106 - DNA, 25 bp, Homo sapien
aaaacactgatgttgtaatacctag

SEQ ID NO: 1444107 - DNA, 25 bp, Homo sapien
atacaagtcctttgacaaatacatg

SEQ ID NO: 1444108 - DNA, 25 bp, Homo sapien
tgacaaatacatgcattgcagatag

SEQ ID NO: 1444109 - DNA, 25 bp, Homo sapien
gcattgcagatagtttctcctaatc

SEQ ID NO: 1444110 - DNA, 25 bp, Homo sapien
tcctagcctctatcaatcctccctc

SEQ ID NO: 1444111 - DNA, 25 bp, Homo sapien
aacatgagttcatatataaacctcc

SEQ ID NO: 1444112 - DNA, 25 bp, Homo sapien
taatttctagctcaacaagatgttt

SEQ ID NO: 1444113 - DNA, 25 bp, Homo sapien
caattccaatcaaactccacagagt

SEQ ID NO: 1444114 - DNA, 25 bp, Homo sapien
atttctagctcaacaagatgtttca

SEQ ID NO: 1444115 - DNA, 25 bp, Homo sapien
gcctgctagatcaattggaccacca

SEQ ID NO: 1444116 - DNA, 25 bp, Homo sapien
cgtgttgttcgtccacaaggaggta

SEQ ID NO: 1444117 - DNA, 25 bp, Homo sapien
gaagccgtcttttgtacagcctcgt

SEQ ID NO: 1444118 - DNA, 25 bp, Homo sapien
gataacccctctttagagtgtcaga

SEQ ID NO: 1444119 - DNA, 25 bp, Homo sapien
gaatccccacaaattattgtttggc

SEQ ID NO: 1444120 - DNA, 25 bp, Homo sapien
taacattgtgttacccagaatcccc

SEQ ID NO: 1444121 - DNA, 25 bp, Homo sapien
tgcatcttttatcgttatcccagct

SEQ ID NO: 1444122 - DNA, 25 bp, Homo sapien
tgtttggccttaacccgcaactcga

SEQ ID NO: 1444123 - DNA, 25 bp, Homo sapien
tatgatattcgaactggcaacacca

SEQ ID NO: 1444124 - DNA, 25 bp, Homo sapien
ggacgggacactacccagctgttgg

SEQ ID NO: 1444125 - DNA, 25 bp, Homo sapien
gaagaaacagggcttccacagggac

SEQ ID NO: 1444126 - DNA, 25 bp, Homo sapien
tgtaagtaccaagtctcagccaggc

SEQ ID NO: 1444127 - DNA, 25 bp, Homo sapien
acagaaaatgggaaggacagcattc

SEQ ID NO: 1444128 - DNA, 25 bp, Homo sapien
aaatgggaaggacagcattccttac

SEQ ID NO: 1444129 - DNA, 25 bp, Homo sapien
agaaaatgggaaggacagcattcct

SEQ ID NO: 1444130 - DNA, 25 bp, Homo sapien
gacagaaaatgggaaggacagcatt

SEQ ID NO: 1444131 - DNA, 25 bp, Homo sapien
caaggtaaaggaaattgctggccca

SEQ ID NO: 1444132 - DNA, 25 bp, Homo sapien
ggcccagtgctagatctgaacttta

SEQ ID NO: 1444133 - DNA, 25 bp, Homo sapien
tatagatagacagctggatcaatgc

SEQ ID NO: 1444134 - DNA, 25 bp, Homo sapien
taagtactcaaagaggtggtctctc

SEQ ID NO: 1444135 - DNA, 25 bp, Homo sapien
tctattaccaactaagacaaaggag

SEQ ID NO: 1444136 - DNA, 25 bp, Homo sapien
cacagtcagtagaatgagagtacca

SEQ ID NO: 1444137 - DNA, 25 bp, Homo sapien
ccaaagtgggttgcctatgacttag

SEQ ID NO: 1444138 - DNA, 25 bp, Homo sapien
taccatcctttgtgttatttgccag

SEQ ID NO: 1444139 - DNA, 25 bp, Homo sapien
ctgcgaataagacaaacaatgttat

SEQ ID NO: 1444140 - DNA, 25 bp, Homo sapien
gctgcgaataagacaaacaatgtta

SEQ ID NO: 1444141 - DNA, 25 bp, Homo sapien
ggcttcttatctccaagtcgttgtg

SEQ ID NO: 1444142 - DNA, 25 bp, Homo sapien
gactgggagaatgcatcaacaactt

SEQ ID NO: 1444143 - DNA, 25 bp, Homo sapien
cacctttgggtcttaaacataggca

SEQ ID NO: 1444144 - DNA, 25 bp, Homo sapien
tactttcacgtataccctctgggcc

SEQ ID NO: 1444145 - DNA, 25 bp, Homo sapien
cagtgtatggtgtgcttacctgtcc

SEQ ID NO: 1444146 - DNA, 25 bp, Homo sapien
catggacactgttgagcaatgtaca

SEQ ID NO: 1444147 - DNA, 25 bp, Homo sapien
gccaaacatttgtcgtggttaccag

SEQ ID NO: 1444148 - DNA, 25 bp, Homo sapien
taaagtctgaggattttcgtcaacc

SEQ ID NO: 1444149 - DNA, 25 bp, Homo sapien
cagagcacagctatatttccacaat

SEQ ID NO: 1444150 - DNA, 25 bp, Homo sapien
tgatctggagtagccatgagaagct

SEQ ID NO: 1444151 - DNA, 25 bp, Homo sapien
tctatgcttagcacagacggtctac

SEQ ID NO: 1444152 - DNA, 25 bp, Homo sapien
ttatattgtaccagaactagtgctc

SEQ ID NO: 1444153 - DNA, 25 bp, Homo sapien
catcaaaatctgcgtgtggcgtgtg

SEQ ID NO: 1444154 - DNA, 25 bp, Homo sapien
atcaaaatctgcgtgtggcgtgtgc

SEQ ID NO: 1444155 - DNA, 25 bp, Homo sapien
tgtgtacactctaattacagatacg

SEQ ID NO: 1444156 - DNA, 25 bp, Homo sapien
gcaggtccaagatgacgactacttc

SEQ ID NO: 1444157 - DNA, 25 bp, Homo sapien
tacagatacgactttgaaacacctg

SEQ ID NO: 1444158 - DNA, 25 bp, Homo sapien
aattaagcaacatagactcatgtgg

SEQ ID NO: 1444159 - DNA, 25 bp, Homo sapien
tgcccctggtcgtcaccctcttctg

SEQ ID NO: 1444160 - DNA, 25 bp, Homo sapien
ctgcccctggtcgtcaccctcttct

SEQ ID NO: 1444161 - DNA, 25 bp, Homo sapien
ctactgccgcatctcgcgccgcctg

SEQ ID NO: 1444162 - DNA, 25 bp, Homo sapien
atctcgcgccgcctgcgacggccgc

SEQ ID NO: 1444163 - DNA, 25 bp, Homo sapien
cccggaggaactcgctgcgcatcat

SEQ ID NO: 1444164 - DNA, 25 bp, Homo sapien
cgacggccgccgcacgtgggtcggg

SEQ ID NO: 1444165 - DNA, 25 bp, Homo sapien
tggccttcgtcaacagctgcgccaa

SEQ ID NO: 1444166 - DNA, 25 bp, Homo sapien
gctctccagggacgacagttccgtg

SEQ ID NO: 1444167 - DNA, 25 bp, Homo sapien
agagcacgtttgtgggctcctggct

SEQ ID NO: 1444168 - DNA, 25 bp, Homo sapien
agacgcgcctgttctggcggcagca

SEQ ID NO: 1444169 - DNA, 25 bp, Homo sapien
gagacccgcagattcaccaagtaga

SEQ ID NO: 1444170 - DNA, 25 bp, Homo sapien
cagggtacctgagctaattttgtcc

SEQ ID NO: 1444171 - DNA, 25 bp, Homo sapien
cacaatagccgttgctttcagagaa

SEQ ID NO: 1444172 - DNA, 25 bp, Homo sapien
gtccagtccaagataggtgctatga

SEQ ID NO: 1444173 - DNA, 25 bp, Homo sapien
gctcaagctttgaacactataggta

SEQ ID NO: 1444174 - DNA, 25 bp, Homo sapien
caagctccatgcatgcagacggttt

SEQ ID NO: 1444175 - DNA, 25 bp, Homo sapien
ggtgctaactaatggaatgctgtcg

SEQ ID NO: 1444176 - DNA, 25 bp, Homo sapien
gtctgttggttcaaggctgtgttcc

SEQ ID NO: 1444177 - DNA, 25 bp, Homo sapien
atccatcacagtgctttaaggacag

SEQ ID NO: 1444178 - DNA, 25 bp, Homo sapien
actgcctgagattcatatttacatc

SEQ ID NO: 1444179 - DNA, 25 bp, Homo sapien
tgcctgagattcatatttacatcca

SEQ ID NO: 1444180 - DNA, 25 bp, Homo sapien
ttacatccatcacagtgctttaagg

SEQ ID NO: 1444181 - DNA, 25 bp, Homo sapien
aaatgaaccaattgcagaggggtgt

SEQ ID NO: 1444182 - DNA, 25 bp, Homo sapien
taaatgaaccaattgcagaggggtg

SEQ ID NO: 1444183 - DNA, 25 bp, Homo sapien
aatgaaccaattgcagaggggtgtg

SEQ ID NO: 1444184 - DNA, 25 bp, Homo sapien
ctaaatgaaccaattgcagaggggt

SEQ ID NO: 1444185 - DNA, 25 bp, Homo sapien
tgtctgggtctaggcacgcctccct

SEQ ID NO: 1444186 - DNA, 25 bp, Homo sapien
actgtctgggtctaggcacgcctcc

SEQ ID NO: 1444187 - DNA, 25 bp, Homo sapien
ggcactgtctgggtctaggcacgcc

SEQ ID NO: 1444188 - DNA, 25 bp, Homo sapien
agggcattgacagggcactgtctgg

SEQ ID NO: 1444189 - DNA, 25 bp, Homo sapien
tcaggtactgtgctgcttcatcact

SEQ ID NO: 1444190 - DNA, 25 bp, Homo sapien
ttacttcaggtactgtgctgcttca

SEQ ID NO: 1444191 - DNA, 25 bp, Homo sapien
tacttcaggtactgtgctgcttcat

SEQ ID NO: 1444192 - DNA, 25 bp, Homo sapien
ggtactgtgctgcttcatcactcgt

SEQ ID NO: 1444193 - DNA, 25 bp, Homo sapien
gaatggatgaacggggacacagcag

SEQ ID NO: 1444194 - DNA, 25 bp, Homo sapien
cgctcgccgggagggtgctccttcc

SEQ ID NO: 1444195 - DNA, 25 bp, Homo sapien
ttcccttcagccagccggagttcag

SEQ ID NO: 1444196 - DNA, 25 bp, Homo sapien
ggcgctcgccgggagggtgctcctt

SEQ ID NO: 1444197 - DNA, 25 bp, Homo sapien
tatctacaaccaccctggtcaaggg

SEQ ID NO: 1444198 - DNA, 25 bp, Homo sapien
gagcccttaggtgtgactgttttcc

SEQ ID NO: 1444199 - DNA, 25 bp, Homo sapien
caggttagcttccaacaggtggttc

SEQ ID NO: 1444200 - DNA, 25 bp, Homo sapien
gttgatgtgtagtcccctggcctga

SEQ ID NO: 1444201 - DNA, 25 bp, Homo sapien
gggaagctggaaagcccttgctagt

SEQ ID NO: 1444202 - DNA, 25 bp, Homo sapien
catccctgcatatcgtgttggcttt

SEQ ID NO: 1444203 - DNA, 25 bp, Homo sapien
ggctttttgccaagactactcctca

SEQ ID NO: 1444204 - DNA, 25 bp, Homo sapien
cctcaggcagggagttatctcagca

SEQ ID NO: 1444205 - DNA, 25 bp, Homo sapien
tgaattggacatggaagcccctaag

SEQ ID NO: 1444206 - DNA, 25 bp, Homo sapien
ggaggtgcctccatgtgacagttaa

SEQ ID NO: 1444207 - DNA, 25 bp, Homo sapien
gatatgcccgttggttgcagcgcct

SEQ ID NO: 1444208 - DNA, 25 bp, Homo sapien
tggagccctcagtacaggtgaagac

SEQ ID NO: 1444209 - DNA, 25 bp, Homo sapien
tcccaagacccatcgtcaccgcggg

SEQ ID NO: 1444210 - DNA, 25 bp, Homo sapien
cagcagccccgacatctcctttctg

SEQ ID NO: 1444211 - DNA, 25 bp, Homo sapien
ggtcccagccggcagcagagagctg

SEQ ID NO: 1444212 - DNA, 25 bp, Homo sapien
tgccgcctggctatttcccggcggg

SEQ ID NO: 1444213 - DNA, 25 bp, Homo sapien
gattgtcctcaatacccctgtgata

SEQ ID NO: 1444214 - DNA, 25 bp, Homo sapien
tcccactattgctggaggctggaca

SEQ ID NO: 1444215 - DNA, 25 bp, Homo sapien
gactgacagcctctatctccttata

SEQ ID NO: 1444216 - DNA, 25 bp, Homo sapien
gcctactggacttaaggccttgcct

SEQ ID NO: 1444217 - DNA, 25 bp, Homo sapien
ggatggcccatcaaaggaacctggg

SEQ ID NO: 1444218 - DNA, 25 bp, Homo sapien
cccaggatggcccatcaaaggaacc

SEQ ID NO: 1444219 - DNA, 25 bp, Homo sapien
tcactgtgctcttaccgcatcagca

SEQ ID NO: 1444220 - DNA, 25 bp, Homo sapien
gcacaagggtgccaagggaagaccc

SEQ ID NO: 1444221 - DNA, 25 bp, Homo sapien
tccactgagattttgatgggcaaca

SEQ ID NO: 1444222 - DNA, 25 bp, Homo sapien
ggcaacatgcgtcagcaagccatgc

SEQ ID NO: 1444223 - DNA, 25 bp, Homo sapien
gcgcctgggtctcttgtgctcagaa

SEQ ID NO: 1444224 - DNA, 25 bp, Homo sapien
actaattcttgaagaatccactgag

SEQ ID NO: 1444225 - DNA, 25 bp, Homo sapien
ttccaattttagtatctgtgaagcg

SEQ ID NO: 1444226 - DNA, 25 bp, Homo sapien
attttagtatctgtgaagcgagcac

SEQ ID NO: 1444227 - DNA, 25 bp, Homo sapien
ccaattttagtatctgtgaagcgag

SEQ ID NO: 1444228 - DNA, 25 bp, Homo sapien
caattttagtatctgtgaagcgagc

SEQ ID NO: 1444229 - DNA, 25 bp, Homo sapien
cctggtgacaggacctatgagtcga

SEQ ID NO: 1444230 - DNA, 25 bp, Homo sapien
cacatagctgaatggatggacccca

SEQ ID NO: 1444231 - DNA, 25 bp, Homo sapien
gctagtgattatgctccagggacca

SEQ ID NO: 1444232 - DNA, 25 bp, Homo sapien
tgctggaacccagtcggcagatgga

SEQ ID NO: 1444233 - DNA, 25 bp, Homo sapien
tagagagcgctttactcctggtccc

SEQ ID NO: 1444234 - DNA, 25 bp, Homo sapien
tgatgatgagcacctctcgcagggc

SEQ ID NO: 1444235 - DNA, 25 bp, Homo sapien
aaggccctcaggacatggttcacag

SEQ ID NO: 1444236 - DNA, 25 bp, Homo sapien
tacactatgtacagccatcggcaga

SEQ ID NO: 1444237 - DNA, 25 bp, Homo sapien
tttgtggccacatcttagagctaag

SEQ ID NO: 1444238 - DNA, 25 bp, Homo sapien
agactgaagcgggaagcacaagacc

SEQ ID NO: 1444239 - DNA, 25 bp, Homo sapien
catgcggacggattctttcttacag

SEQ ID NO: 1444240 - DNA, 25 bp, Homo sapien
caagaccagcgatgcaacggaaaaa

SEQ ID NO: 1444241 - DNA, 25 bp, Homo sapien
gacctcgcgagtgagaagacacatg

SEQ ID NO: 1444242 - DNA, 25 bp, Homo sapien
aagacacatgtggtgccgcgggcat

SEQ ID NO: 1444243 - DNA, 25 bp, Homo sapien
ctacgtggcccacgcaggactgtgg

SEQ ID NO: 1444244 - DNA, 25 bp, Homo sapien
agctggagagactccccggcccagt

SEQ ID NO: 1444245 - DNA, 25 bp, Homo sapien
tagctagaagactccctgggggctg

SEQ ID NO: 1444246 - DNA, 25 bp, Homo sapien
aggccaggggtagctagaagactcc

SEQ ID NO: 1444247 - DNA, 25 bp, Homo sapien
cagagtcgaaggagcagttccctcc

SEQ ID NO: 1444248 - DNA, 25 bp, Homo sapien
cctgagctgcagagtcgaaggagca

SEQ ID NO: 1444249 - DNA, 25 bp, Homo sapien
tatctgcgggttgccagagggttaa

SEQ ID NO: 1444250 - DNA, 25 bp, Homo sapien
caggagacaatgtggccacgactgc

SEQ ID NO: 1444251 - DNA, 25 bp, Homo sapien
taagggttagctgcaaggcccagcc

SEQ ID NO: 1444252 - DNA, 25 bp, Homo sapien
ctggtttccttagctacctgaggac

SEQ ID NO: 1444253 - DNA, 25 bp, Homo sapien
gccgctgtggggtaaccgccggaca

SEQ ID NO: 1444254 - DNA, 25 bp, Homo sapien
cactccagaacttcaccgtcaggtc

SEQ ID NO: 1444255 - DNA, 25 bp, Homo sapien
tggggtaaccgccggacactccaga

SEQ ID NO: 1444256 - DNA, 25 bp, Homo sapien
taaccgccggacactccagaacttc

SEQ ID NO: 1444257 - DNA, 25 bp, Homo sapien
caggcagggcacctctctaggccag

SEQ ID NO: 1444258 - DNA, 25 bp, Homo sapien
ggtgtttcgttttgtccaggcctga

SEQ ID NO: 1444259 - DNA, 25 bp, Homo sapien
tgttcatgcttggaaaaggacggtg

SEQ ID NO: 1444260 - DNA, 25 bp, Homo sapien
ccccaaaagtagaggatgaactgga

SEQ ID NO: 1444261 - DNA, 25 bp, Homo sapien
cgttaagaagcagctcagatcgaag

SEQ ID NO: 1444262 - DNA, 25 bp, Homo sapien
cagctcagatcgaagtggggaaaga

SEQ ID NO: 1444263 - DNA, 25 bp, Homo sapien
aagaagcagctcagatcgaagtggg

SEQ ID NO: 1444264 - DNA, 25 bp, Homo sapien
aagcagctcagatcgaagtggggaa

SEQ ID NO: 1444265 - DNA, 25 bp, Homo sapien
tttatggccaggactcggcgaggaa

SEQ ID NO: 1444266 - DNA, 25 bp, Homo sapien
agtccagggacgtaattccacaact

SEQ ID NO: 1444267 - DNA, 25 bp, Homo sapien
tggtggcgcggccctttatggccag

SEQ ID NO: 1444268 - DNA, 25 bp, Homo sapien
agggtggtggcgcggccctttatgg

SEQ ID NO: 1444269 - DNA, 25 bp, Homo sapien
tggggtgtaagaggcgtggtctggg

SEQ ID NO: 1444270 - DNA, 25 bp, Homo sapien
gggtgtaagaggcgtggtctggggc

SEQ ID NO: 1444271 - DNA, 25 bp, Homo sapien
ggtgtaagaggcgtggtctggggct

SEQ ID NO: 1444272 - DNA, 25 bp, Homo sapien
gaagttgtccacgttccagaccttg

SEQ ID NO: 1444273 - DNA, 25 bp, Homo sapien
tgaagatatgcttggcattggtgca

SEQ ID NO: 1444274 - DNA, 25 bp, Homo sapien
ggcccttgatctcaccgatgggtgt

SEQ ID NO: 1444275 - DNA, 25 bp, Homo sapien
gcattgatgggactgtcgtggccct

SEQ ID NO: 1444276 - DNA, 25 bp, Homo sapien
gtgagaggatcagggctggtgaggg

SEQ ID NO: 1444277 - DNA, 25 bp, Homo sapien
tgtgagaggatcagggctggtgagg

SEQ ID NO: 1444278 - DNA, 25 bp, Homo sapien
ctgtgagaggatcagggctggtgag

SEQ ID NO: 1444279 - DNA, 25 bp, Homo sapien
cctggatggcgagacactcgatgcc

SEQ ID NO: 1444280 - DNA, 25 bp, Homo sapien
acactcgatgccatcgtagtgcggg

SEQ ID NO: 1444281 - DNA, 25 bp, Homo sapien
tatctcgggagccactgaacaggat

SEQ ID NO: 1444282 - DNA, 25 bp, Homo sapien
cccacttcttgatgccgttatctcg

SEQ ID NO: 1444283 - DNA, 25 bp, Homo sapien
cttaacgtagtggtccttggagcca

SEQ ID NO: 1444284 - DNA, 25 bp, Homo sapien
agtcaccacgaggtcatgctggctg

SEQ ID NO: 1444285 - DNA, 25 bp, Homo sapien
ggagccagtcaccacgaggtcatgc

SEQ ID NO: 1444286 - DNA, 25 bp, Homo sapien
aacgtagtggtccttggagccagtc

SEQ ID NO: 1444287 - DNA, 25 bp, Homo sapien
gtggccagtcagcttgccgacaggc

SEQ ID NO: 1444288 - DNA, 25 bp, Homo sapien
ggccgatgtggccagtcagcttgcc

SEQ ID NO: 1444289 - DNA, 25 bp, Homo sapien
cacagggccgatgtggccagtcagc

SEQ ID NO: 1444290 - DNA, 25 bp, Homo sapien
gatgtggccagtcagcttgccgaca

SEQ ID NO: 1444291 - DNA, 25 bp, Homo sapien
cgtacagcatggtgcccgaagggct

SEQ ID NO: 1444292 - DNA, 25 bp, Homo sapien
tggatgtggcggcacaggcatcccc

SEQ ID NO: 1444293 - DNA, 25 bp, Homo sapien
acggcattgcccgaggcggcgtaca

SEQ ID NO: 1444294 - DNA, 25 bp, Homo sapien
ggttgatctgatgctcgccctgagc

SEQ ID NO: 1444295 - DNA, 25 bp, Homo sapien
gggtggccctttagagctgcgatct

SEQ ID NO: 1444296 - DNA, 25 bp, Homo sapien
tacttgatggagaccacgttgttgg

SEQ ID NO: 1444297 - DNA, 25 bp, Homo sapien
acttggctgagtcccggatgtccca

SEQ ID NO: 1444298 - DNA, 25 bp, Homo sapien
tgagagtccgaatgcacttggctga

SEQ ID NO: 1444299 - DNA, 25 bp, Homo sapien
tggggccgtccgtgcacccttggct

SEQ ID NO: 1444300 - DNA, 25 bp, Homo sapien
acacactgcagtggggccgtccgtg

SEQ ID NO: 1444301 - DNA, 25 bp, Homo sapien
tcctccaaccggggagatgatgccc

SEQ ID NO: 1444302 - DNA, 25 bp, Homo sapien
tgtggccttcggccatggagacaca

SEQ ID NO: 1444303 - DNA, 25 bp, Homo sapien
ggagagaaggcatgctcgtcagcca

SEQ ID NO: 1444304 - DNA, 25 bp, Homo sapien
ggcatgctcgtcagccagggagact

SEQ ID NO: 1444305 - DNA, 25 bp, Homo sapien
atgctcgtcagccagggagactgtg

SEQ ID NO: 1444306 - DNA, 25 bp, Homo sapien
agaaggcatgctcgtcagccaggga

SEQ ID NO: 1444307 - DNA, 25 bp, Homo sapien
cctccgacaaagaggagtcgctgtc

SEQ ID NO: 1444308 - DNA, 25 bp, Homo sapien
ccgacaaagaggagtcgctgtcatc

SEQ ID NO: 1444309 - DNA, 25 bp, Homo sapien
ctcaggacctccgacaaagaggagt

SEQ ID NO: 1444310 - DNA, 25 bp, Homo sapien
gacctccgacaaagaggagtcgctg

SEQ ID NO: 1444311 - DNA, 25 bp, Homo sapien
tgatgggggtgtgaatcccacatct

SEQ ID NO: 1444312 - DNA, 25 bp, Homo sapien
gattactggtgagacgagagaagac

SEQ ID NO: 1444313 - DNA, 25 bp, Homo sapien
agagaagacattgcggtcattgcgg

SEQ ID NO: 1444314 - DNA, 25 bp, Homo sapien
cctggctctgattactggtgagacg

SEQ ID NO: 1444315 - DNA, 25 bp, Homo sapien
aatgggctgccctcggtcgtaggac

SEQ ID NO: 1444316 - DNA, 25 bp, Homo sapien
tccttctcgtcagcggggacgtctc

SEQ ID NO: 1444317 - DNA, 25 bp, Homo sapien
cctcggtcgtaggacttccttctcg

SEQ ID NO: 1444318 - DNA, 25 bp, Homo sapien
ggacgtctctgtggctcgagattgc

SEQ ID NO: 1444319 - DNA, 25 bp, Homo sapien
tgctgccccgggtaggcagactgac

SEQ ID NO: 1444320 - DNA, 25 bp, Homo sapien
aggcactcagccgacacagctttca

SEQ ID NO: 1444321 - DNA, 25 bp, Homo sapien
gcagactgacggtgcgcgagaccct

SEQ ID NO: 1444322 - DNA, 25 bp, Homo sapien
gacagagaagcccactccgtcctct

SEQ ID NO: 1444323 - DNA, 25 bp, Homo sapien
gaacttgaaatcgtcatggctggtg

SEQ ID NO: 1444324 - DNA, 25 bp, Homo sapien
cttgaaatcgtcatggctggtggag

SEQ ID NO: 1444325 - DNA, 25 bp, Homo sapien
catggctggtggagcctttcatggt

SEQ ID NO: 1444326 - DNA, 25 bp, Homo sapien
tggtggagcctttcatggtgaatga

SEQ ID NO: 1444327 - DNA, 25 bp, Homo sapien
tcatctgtgctggcgtagccattct

SEQ ID NO: 1444328 - DNA, 25 bp, Homo sapien
ctcatctgtgctggcgtagccattc

SEQ ID NO: 1444329 - DNA, 25 bp, Homo sapien
cctcatctgtgctggcgtagccatt

SEQ ID NO: 1444330 - DNA, 25 bp, Homo sapien
tcacgcagggcgtccaggagcagat

SEQ ID NO: 1444331 - DNA, 25 bp, Homo sapien
tgggaggagcctgccatatccgtct

SEQ ID NO: 1444332 - DNA, 25 bp, Homo sapien
tccaacagccggatctgggcttcct

SEQ ID NO: 1444333 - DNA, 25 bp, Homo sapien
gcacattgtagatgagggcctgcag

SEQ ID NO: 1444334 - DNA, 25 bp, Homo sapien
tgtctagcaggaggcgggcttcagc

SEQ ID NO: 1444335 - DNA, 25 bp, Homo sapien
gttgtctagcaggaggcgggcttca

SEQ ID NO: 1444336 - DNA, 25 bp, Homo sapien
gtctagcaggaggcgggcttcagcc

SEQ ID NO: 1444337 - DNA, 25 bp, Homo sapien
ttgtctagcaggaggcgggcttcag

SEQ ID NO: 1444338 - DNA, 25 bp, Homo sapien
agcacctcgatctcctcagccagct

SEQ ID NO: 1444339 - DNA, 25 bp, Homo sapien
attgatgtagtcaatgttggctgcc

SEQ ID NO: 1444340 - DNA, 25 bp, Homo sapien
ccagctgcacgatggtggcctggca

SEQ ID NO: 1444341 - DNA, 25 bp, Homo sapien
gcctggcagtcggtgatgccgtcat

SEQ ID NO: 1444342 - DNA, 25 bp, Homo sapien
tctgcatgacgatgtcaatgatccg

SEQ ID NO: 1444343 - DNA, 25 bp, Homo sapien
tcaatgatccgtcgctccagggact

SEQ ID NO: 1444344 - DNA, 25 bp, Homo sapien
gcctccaggttgacaatggtcattc

SEQ ID NO: 1444345 - DNA, 25 bp, Homo sapien
cacttgagccttgccgccttactga

SEQ ID NO: 1444346 - DNA, 25 bp, Homo sapien
cgggtgccattgacagtgggcgcag

SEQ ID NO: 1444347 - DNA, 25 bp, Homo sapien
gacgggtgccattgacagtgggcgc

SEQ ID NO: 1444348 - DNA, 25 bp, Homo sapien
caggacgggtgccattgacagtggg

SEQ ID NO: 1444349 - DNA, 25 bp, Homo sapien
cgggcaggacgggtgccattgacag

SEQ ID NO: 1444350 - DNA, 25 bp, Homo sapien
ttggccaggcgcctcagtgcagaaa

SEQ ID NO: 1444351 - DNA, 25 bp, Homo sapien
tccagcatgggtggctttagtcctg

SEQ ID NO: 1444352 - DNA, 25 bp, Homo sapien
gattttgcggttccactggcgcacg

SEQ ID NO: 1444353 - DNA, 25 bp, Homo sapien
tgccacccgctcagacatgggcttg

SEQ ID NO: 1444354 - DNA, 25 bp, Homo sapien
tcctgctgccgcttctgggactcca

SEQ ID NO: 1444355 - DNA, 25 bp, Homo sapien
gctgttgctcctcacgcatctgctt

SEQ ID NO: 1444356 - DNA, 25 bp, Homo sapien
ctgttgctcctcacgcatctgcttc

SEQ ID NO: 1444357 - DNA, 25 bp, Homo sapien
tgttgctcctcacgcatctgcttca

SEQ ID NO: 1444358 - DNA, 25 bp, Homo sapien
cttctcatagtctgccttgatcttg

SEQ ID NO: 1444359 - DNA, 25 bp, Homo sapien
tgcaggtcccggttcatctcccgca

SEQ ID NO: 1444360 - DNA, 25 bp, Homo sapien
tggttcttaagcagccgggcgtgct

SEQ ID NO: 1444361 - DNA, 25 bp, Homo sapien
gctccctctcgtagcgcgactggtt

SEQ ID NO: 1444362 - DNA, 25 bp, Homo sapien
tctgacccatgatccagtgttggag

SEQ ID NO: 1444363 - DNA, 25 bp, Homo sapien
ggttctgacccatgatccagtgttg

SEQ ID NO: 1444364 - DNA, 25 bp, Homo sapien
tgacccatgatccagtgttggagga

SEQ ID NO: 1444365 - DNA, 25 bp, Homo sapien
tgggttctgacccatgatccagtgt

SEQ ID NO: 1444366 - DNA, 25 bp, Homo sapien
ggtggaggggcatggcggtggcctc

SEQ ID NO: 1444367 - DNA, 25 bp, Homo sapien
tggaggggcatggcggtggcctcac

SEQ ID NO: 1444368 - DNA, 25 bp, Homo sapien
tggggtggaggggcatggcggtggc

SEQ ID NO: 1444369 - DNA, 25 bp, Homo sapien
ccggatggggtggaggggcatggcg

SEQ ID NO: 1444370 - DNA, 25 bp, Homo sapien
gctgttctccagctcgtcgatcagc

SEQ ID NO: 1444371 - DNA, 25 bp, Homo sapien
aatcagcttttcctcatactggtgc

SEQ ID NO: 1444372 - DNA, 25 bp, Homo sapien
tactggtgcttgagcgtctgcaacc

SEQ ID NO: 1444373 - DNA, 25 bp, Homo sapien
gcgctccagctgtgtgtctcggatc

SEQ ID NO: 1444374 - DNA, 25 bp, Homo sapien
ctcacagccactctcgtctcgctct

SEQ ID NO: 1444375 - DNA, 25 bp, Homo sapien
ctcatcttcatcctcgcgcccttcc

SEQ ID NO: 1444376 - DNA, 25 bp, Homo sapien
agccactctcgtctcgctcttcctc

SEQ ID NO: 1444377 - DNA, 25 bp, Homo sapien
tcatcttcatcctcgcgcccttcct

SEQ ID NO: 1444378 - DNA, 25 bp, Homo sapien
caggcaccattggggtgggcctggc

SEQ ID NO: 1444379 - DNA, 25 bp, Homo sapien
gcaccaggcaccattggggtgggcc

SEQ ID NO: 1444380 - DNA, 25 bp, Homo sapien
caccaggcaccattggggtgggcct

SEQ ID NO: 1444381 - DNA, 25 bp, Homo sapien
accaggcaccattggggtgggcctg

SEQ ID NO: 1444382 - DNA, 25 bp, Homo sapien
ctcctccgcctcgttctcatccgtc

SEQ ID NO: 1444383 - DNA, 25 bp, Homo sapien
gttctcctgttggagttttgccctc

SEQ ID NO: 1444384 - DNA, 25 bp, Homo sapien
ctccgcctcgttctcatccgtctcc

SEQ ID NO: 1444385 - DNA, 25 bp, Homo sapien
tctcctgttggagttttgccctctt

SEQ ID NO: 1444386 - DNA, 25 bp, Homo sapien
ggaagctggattaggaaggctgccc

SEQ ID NO: 1444387 - DNA, 25 bp, Homo sapien
gggaagctggattaggaaggctgcc

SEQ ID NO: 1444388 - DNA, 25 bp, Homo sapien
agggaagctggattaggaaggctgc

SEQ ID NO: 1444389 - DNA, 25 bp, Homo sapien
cagggaagctggattaggaaggctg

SEQ ID NO: 1444390 - DNA, 25 bp, Homo sapien
ttggccctgcggatcacctccgagg

SEQ ID NO: 1444391 - DNA, 25 bp, Homo sapien
aggcccgtgagaggctgcggcgcag

SEQ ID NO: 1444392 - DNA, 25 bp, Homo sapien
cggcgcagggactcgttcatggctt

SEQ ID NO: 1444393 - DNA, 25 bp, Homo sapien
gggctcctagccgaggcccgtgaga

SEQ ID NO: 1444394 - DNA, 25 bp, Homo sapien
ctggatcagcgcaccaatggcctca

SEQ ID NO: 1444395 - DNA, 25 bp, Homo sapien
ggatgtagttctggatcagcgcacc

SEQ ID NO: 1444396 - DNA, 25 bp, Homo sapien
tagttctggatcagcgcaccaatgg

SEQ ID NO: 1444397 - DNA, 25 bp, Homo sapien
tcctcgatctcccggatgtagttct

SEQ ID NO: 1444398 - DNA, 25 bp, Homo sapien
cggccttggctagcagcaggttggc

SEQ ID NO: 1444399 - DNA, 25 bp, Homo sapien
aacagatcactatagccctcagcgc

SEQ ID NO: 1444400 - DNA, 25 bp, Homo sapien
gttgttgatggcatcgatggcctcc

SEQ ID NO: 1444401 - DNA, 25 bp, Homo sapien
tgagctgggtgacgcggttgttgat

SEQ ID NO: 1444402 - DNA, 25 bp, Homo sapien
aggcagcagagctcgcggttggggg

SEQ ID NO: 1444403 - DNA, 25 bp, Homo sapien
gggggtaaggggctgatgatgcccc

SEQ ID NO: 1444404 - DNA, 25 bp, Homo sapien
gcagagctcgcggttgggggggtaa

SEQ ID NO: 1444405 - DNA, 25 bp, Homo sapien
tggccttcccctggatatggcgcat

SEQ ID NO: 1444406 - DNA, 25 bp, Homo sapien
caagatctatgcaacaaaagctggg

SEQ ID NO: 1444407 - DNA, 25 bp, Homo sapien
tgaccatccatgcaagtaaggccaa

SEQ ID NO: 1444408 - DNA, 25 bp, Homo sapien
tgtgggcccctctatcaacgattct

SEQ ID NO: 1444409 - DNA, 25 bp, Homo sapien
tccctaatagtaagcagcatgcctg

SEQ ID NO: 1444410 - DNA, 25 bp, Homo sapien
agccgagcaatctcagcccgcagtg

SEQ ID NO: 1444411 - DNA, 25 bp, Homo sapien
cttgttcttgatgttgcgggcccga

SEQ ID NO: 1444412 - DNA, 25 bp, Homo sapien
catatttgagtgtgttgagggtctc

SEQ ID NO: 1444413 - DNA, 25 bp, Homo sapien
tgagggtctccatgaaatctcggtc

SEQ ID NO: 1444414 - DNA, 25 bp, Homo sapien
cctgcctcccctgtcccttccctgg

SEQ ID NO: 1444415 - DNA, 25 bp, Homo sapien
tattttccaggaacctccctgcctc

SEQ ID NO: 1444416 - DNA, 25 bp, Homo sapien
tcccttccctgggtgttggtcacca

SEQ ID NO: 1444417 - DNA, 25 bp, Homo sapien
ctattttccaggaacctccctgcct

SEQ ID NO: 1444418 - DNA, 25 bp, Homo sapien
gccgagtgagcttggagtccctgta

SEQ ID NO: 1444419 - DNA, 25 bp, Homo sapien
ccagcgaatcctggaggagccgagt

SEQ ID NO: 1444420 - DNA, 25 bp, Homo sapien
tcccctaaggcgctgatcacattgc

SEQ ID NO: 1444421 - DNA, 25 bp, Homo sapien
tagggaacgtgcaccaccttcttgc

SEQ ID NO: 1444422 - DNA, 25 bp, Homo sapien
agaccctggcactcagcagtcactc

SEQ ID NO: 1444423 - DNA, 25 bp, Homo sapien
ctgtgggagacagaccctggcactc

SEQ ID NO: 1444424 - DNA, 25 bp, Homo sapien
agagtgaagggctaattggcaagat

SEQ ID NO: 1444425 - DNA, 25 bp, Homo sapien
caagatgtccaaggaggactcagca

SEQ ID NO: 1444426 - DNA, 25 bp, Homo sapien
aggactcagcaggtgtaggactgca

SEQ ID NO: 1444427 - DNA, 25 bp, Homo sapien
cacatggataagttggtgaaatggg

SEQ ID NO: 1444428 - DNA, 25 bp, Homo sapien
gccacagttgatggagatgccctcc

SEQ ID NO: 1444429 - DNA, 25 bp, Homo sapien
ggtgtaccatcaggaagcccagtca

SEQ ID NO: 1444430 - DNA, 25 bp, Homo sapien
caaagtgaaacttagcagtgagtgt

SEQ ID NO: 1444431 - DNA, 25 bp, Homo sapien
gagtgtctcatactcactcgaggga

SEQ ID NO: 1444432 - DNA, 25 bp, Homo sapien
cttgcccttcgcacatgcagagcat

SEQ ID NO: 1444433 - DNA, 25 bp, Homo sapien
tctgacaatgtgcacagtatttgca

SEQ ID NO: 1444434 - DNA, 25 bp, Homo sapien
acagtactgccatccgggagaggca

SEQ ID NO: 1444435 - DNA, 25 bp, Homo sapien
actggctcccctgatcacagtactg

SEQ ID NO: 1444436 - DNA, 25 bp, Homo sapien
gcctcaatctggtttgctatttctg

SEQ ID NO: 1444437 - DNA, 25 bp, Homo sapien
cccgggatacccctgcagcaagctg

SEQ ID NO: 1444438 - DNA, 25 bp, Homo sapien
tacaaattgggcaacaaggctcaag

SEQ ID NO: 1444439 - DNA, 25 bp, Homo sapien
cacaacaccacgatacagagatcat

SEQ ID NO: 1444440 - DNA, 25 bp, Homo sapien
ggtgcacatgcgcatctggcacagg

SEQ ID NO: 1444441 - DNA, 25 bp, Homo sapien
gggccccctgcttcaggcactggat

SEQ ID NO: 1444442 - DNA, 25 bp, Homo sapien
aagatggcgtgggagcgtgagctct

SEQ ID NO: 1444443 - DNA, 25 bp, Homo sapien
tgcacgttcatctgggtgctggctg

SEQ ID NO: 1444444 - DNA, 25 bp, Homo sapien
gagggcttgggactaccgtggtgcc

SEQ ID NO: 1444445 - DNA, 25 bp, Homo sapien
cagaagtgagggcttgggactaccg

SEQ ID NO: 1444446 - DNA, 25 bp, Homo sapien
cttgggactaccgtggtgccagccc

SEQ ID NO: 1444447 - DNA, 25 bp, Homo sapien
tgggactaccgtggtgccagcccct

SEQ ID NO: 1444448 - DNA, 25 bp, Homo sapien
ggtcaaggatctcctcgttgtagag

SEQ ID NO: 1444449 - DNA, 25 bp, Homo sapien
atcttgatgttggacctgcggtggc

SEQ ID NO: 1444450 - DNA, 25 bp, Homo sapien
tggtgtagatgccaccgtttgcgtc

SEQ ID NO: 1444451 - DNA, 25 bp, Homo sapien
tcacgggtgctgtcaaacaggtcaa

SEQ ID NO: 1444452 - DNA, 25 bp, Homo sapien
gaaactgggcgctgactttgaactc

SEQ ID NO: 1444453 - DNA, 25 bp, Homo sapien
aaagccagtgcccatggtgtacgtc

SEQ ID NO: 1444454 - DNA, 25 bp, Homo sapien
caatgcccccaaagaggtgtgcgat

SEQ ID NO: 1444455 - DNA, 25 bp, Homo sapien
tcctccgacgttgccatgtcaaagc

SEQ ID NO: 1444456 - DNA, 25 bp, Homo sapien
gcaccgtggcattatagccctcgaa

SEQ ID NO: 1444457 - DNA, 25 bp, Homo sapien
tcgaagcagccctcgatgagcttgc

SEQ ID NO: 1444458 - DNA, 25 bp, Homo sapien
tgtccaggtcgaagacaaagtcata

SEQ ID NO: 1444459 - DNA, 25 bp, Homo sapien
taacagaggtacagatgtgacagcc

SEQ ID NO: 1444460 - DNA, 25 bp, Homo sapien
caagcagccatcaccacgacatggt

SEQ ID NO: 1444461 - DNA, 25 bp, Homo sapien
agcccatcagcaggcacttacaatg

SEQ ID NO: 1444462 - DNA, 25 bp, Homo sapien
tggcaaccaagcaggagtcagcaag

SEQ ID NO: 1444463 - DNA, 25 bp, Homo sapien
tgtacagggattggcggaaagcacc

SEQ ID NO: 1444464 - DNA, 25 bp, Homo sapien
gggtgtgaacaggttcttataggtc

SEQ ID NO: 1444465 - DNA, 25 bp, Homo sapien
tccggggtgtgaacaggttcttata

SEQ ID NO: 1444466 - DNA, 25 bp, Homo sapien
tgaacaggttcttataggtcagtgg

SEQ ID NO: 1444467 - DNA, 25 bp, Homo sapien
tcagaagtgtttccggggtgtgaac

SEQ ID NO: 1444468 - DNA, 25 bp, Homo sapien
caatgctgatgattggagaaaatcg

SEQ ID NO: 1444469 - DNA, 25 bp, Homo sapien
gctgatgattggagaaaatcgaatc

SEQ ID NO: 1444470 - DNA, 25 bp, Homo sapien
tgattggagaaaatcgaatcatcat

SEQ ID NO: 1444471 - DNA, 25 bp, Homo sapien
gatgattggagaaaatcgaatcatc

SEQ ID NO: 1444472 - DNA, 25 bp, Homo sapien
agacgctgcagagtcaggcttcgcc

SEQ ID NO: 1444473 - DNA, 25 bp, Homo sapien
catctgcatctggtggggaatggcc

SEQ ID NO: 1444474 - DNA, 25 bp, Homo sapien
agagtcaggcttcgcccagagccca

SEQ ID NO: 1444475 - DNA, 25 bp, Homo sapien
gcccagagctgtgacggtattggca

SEQ ID NO: 1444476 - DNA, 25 bp, Homo sapien
attgtctgctgtacacggccggctg

SEQ ID NO: 1444477 - DNA, 25 bp, Homo sapien
cccattgaggtctggcgtgtgccgg

SEQ ID NO: 1444478 - DNA, 25 bp, Homo sapien
tgggttctgtccaggcattgtctgc

SEQ ID NO: 1444479 - DNA, 25 bp, Homo sapien
cagtcctaagctctctgattagaaa

SEQ ID NO: 1444480 - DNA, 25 bp, Homo sapien
gacttctgatgctcaaatgccccac

SEQ ID NO: 1444481 - DNA, 25 bp, Homo sapien
ttcccggagaccctgaaagcctgac

SEQ ID NO: 1444482 - DNA, 25 bp, Homo sapien
ccagaccccacttagggcaatctga

SEQ ID NO: 1444483 - DNA, 25 bp, Homo sapien
ccccaatccagatcagcaactgaaa

SEQ ID NO: 1444484 - DNA, 25 bp, Homo sapien
ggctggaggtgacatgctcgcgggc

SEQ ID NO: 1444485 - DNA, 25 bp, Homo sapien
cggagctagctgacagccggcggcg

SEQ ID NO: 1444486 - DNA, 25 bp, Homo sapien
ggagctagggtctgggcgtggatca

SEQ ID NO: 1444487 - DNA, 25 bp, Homo sapien
ctgacggccaccttgacgcagcagt

SEQ ID NO: 1444488 - DNA, 25 bp, Homo sapien
caggccatgcatctagctgctgaga

SEQ ID NO: 1444489 - DNA, 25 bp, Homo sapien
tggtcatgccagctctaagcccatg

SEQ ID NO: 1444490 - DNA, 25 bp, Homo sapien
gtggccctaggccagacaggcactg

SEQ ID NO: 1444491 - DNA, 25 bp, Homo sapien
gagattttaatgtcctgcaggtggg

SEQ ID NO: 1444492 - DNA, 25 bp, Homo sapien
cagccttggaggaataagggtctcc

SEQ ID NO: 1444493 - DNA, 25 bp, Homo sapien
ccctggtgttggtcgaggctgccca

SEQ ID NO: 1444494 - DNA, 25 bp, Homo sapien
tcagtagctctgttgccatgatctc

SEQ ID NO: 1444495 - DNA, 25 bp, Homo sapien
gggcctctcgtcctttcagtagctc

SEQ ID NO: 1444496 - DNA, 25 bp, Homo sapien
cctcatgaagagaccctggtgtgga

SEQ ID NO: 1444497 - DNA, 25 bp, Homo sapien
gagcacctggaagtattctccctgg

SEQ ID NO: 1444498 - DNA, 25 bp, Homo sapien
ctggaagtattctccctggtgctcc

SEQ ID NO: 1444499 - DNA, 25 bp, Homo sapien
ctggtgctgagcacctggaagtatt

SEQ ID NO: 1444500 - DNA, 25 bp, Homo sapien
caccaatgagcaaaattccagatca

SEQ ID NO: 1444501 - DNA, 25 bp, Homo sapien
atctccacacagggtttgctgtggg

SEQ ID NO: 1444502 - DNA, 25 bp, Homo sapien
tccacacagggtttgctgtggggtc

SEQ ID NO: 1444503 - DNA, 25 bp, Homo sapien
tcgtcctctggtagcaggcgtctct

SEQ ID NO: 1444504 - DNA, 25 bp, Homo sapien
caagggctcgtcctctggtagcagg

SEQ ID NO: 1444505 - DNA, 25 bp, Homo sapien
ggtagcaggcgtctctgtctcttct

SEQ ID NO: 1444506 - DNA, 25 bp, Homo sapien
gttggccaagggctcgtcctctggt

SEQ ID NO: 1444507 - DNA, 25 bp, Homo sapien
cattggcgttggcattgttggtatt

SEQ ID NO: 1444508 - DNA, 25 bp, Homo sapien
ggtgcgtggatcttgtgggaagtcc

SEQ ID NO: 1444509 - DNA, 25 bp, Homo sapien
cagggagttggtcctttccaggaag

SEQ ID NO: 1444510 - DNA, 25 bp, Homo sapien
gttgctgttgccataggcgacattg

SEQ ID NO: 1444511 - DNA, 25 bp, Homo sapien
ctgagaccgtgcgacagatctcggg

SEQ ID NO: 1444512 - DNA, 25 bp, Homo sapien
cgtgcgacagatctcgggggctgcc

SEQ ID NO: 1444513 - DNA, 25 bp, Homo sapien
cttcctcaatggtccgcagccctgc

SEQ ID NO: 1444514 - DNA, 25 bp, Homo sapien
tcctgagaccgtgcgacagatctcg

SEQ ID NO: 1444515 - DNA, 25 bp, Homo sapien
ccttcttgggccgatagccataata

SEQ ID NO: 1444516 - DNA, 25 bp, Homo sapien
gatgaggaatgtggcgtagaacttc

SEQ ID NO: 1444517 - DNA, 25 bp, Homo sapien
aatactcctcttggcgtttcatgaa

SEQ ID NO: 1444518 - DNA, 25 bp, Homo sapien
ggcgtttcatgaacttccggaagtg

SEQ ID NO: 1444519 - DNA, 25 bp, Homo sapien
ctcctattggagggatgacctggtc

SEQ ID NO: 1444520 - DNA, 25 bp, Homo sapien
tcctattggagggatgacctggtcc

SEQ ID NO: 1444521 - DNA, 25 bp, Homo sapien
catgcttgtcttcccagtaggtgag

SEQ ID NO: 1444522 - DNA, 25 bp, Homo sapien
tcgaatgtggactcccgtcagcctg

SEQ ID NO: 1444523 - DNA, 25 bp, Homo sapien
taggtgaggacctgcagatttagtg

SEQ ID NO: 1444524 - DNA, 25 bp, Homo sapien
acagccaaactgcagggcacccctg

SEQ ID NO: 1444525 - DNA, 25 bp, Homo sapien
tctttgccctgcagaaaaccctcag

SEQ ID NO: 1444526 - DNA, 25 bp, Homo sapien
gagtgtgggaacagacccttgatga

SEQ ID NO: 1444527 - DNA, 25 bp, Homo sapien
gacccttgatgatctttgccctgca

SEQ ID NO: 1444528 - DNA, 25 bp, Homo sapien
tgtgggaacagacccttgatgatct

SEQ ID NO: 1444529 - DNA, 25 bp, Homo sapien
gaaggtgactgtgccgtcgctgttc

SEQ ID NO: 1444530 - DNA, 25 bp, Homo sapien
ttgatcttgagtgccgtgcggacca

SEQ ID NO: 1444531 - DNA, 25 bp, Homo sapien
tcttgatcttgagtgccgtgcggac

SEQ ID NO: 1444532 - DNA, 25 bp, Homo sapien
cgtcttgatcttgagtgccgtgcgg

SEQ ID NO: 1444533 - DNA, 25 bp, Homo sapien
ctgtacagggagacgcagtggcctg

SEQ ID NO: 1444534 - DNA, 25 bp, Homo sapien
tacagggagacgcagtggcctgccg

SEQ ID NO: 1444535 - DNA, 25 bp, Homo sapien
cagggagacgcagtggcctgccgct

SEQ ID NO: 1444536 - DNA, 25 bp, Homo sapien
tgtacagggagacgcagtggcctgc

SEQ ID NO: 1444537 - DNA, 25 bp, Homo sapien
gcttggcaagtcatcctcacccggt

SEQ ID NO: 1444538 - DNA, 25 bp, Homo sapien
caggccaagcttggcaagtcatcct

SEQ ID NO: 1444539 - DNA, 25 bp, Homo sapien
gccaagcttggcaagtcatcctcac

SEQ ID NO: 1444540 - DNA, 25 bp, Homo sapien
aagcttggcaagtcatcctcacccg

SEQ ID NO: 1444541 - DNA, 25 bp, Homo sapien
gacacgagggctgggggtgtcagct

SEQ ID NO: 1444542 - DNA, 25 bp, Homo sapien
cgagggctgggggtgtcagctgacc

SEQ ID NO: 1444543 - DNA, 25 bp, Homo sapien
ctgggggtgtcagctgaccaggaca

SEQ ID NO: 1444544 - DNA, 25 bp, Homo sapien
ggctgggggtgtcagctgaccagga

SEQ ID NO: 1444545 - DNA, 25 bp, Homo sapien
acccgatgtgggcagaacttcccaa

SEQ ID NO: 1444546 - DNA, 25 bp, Homo sapien
gctacccgatgtgggcagaacttcc

SEQ ID NO: 1444547 - DNA, 25 bp, Homo sapien
aagcccagagggggctgaatccttc

SEQ ID NO: 1444548 - DNA, 25 bp, Homo sapien
aagctacccgatgtgggcagaactt

SEQ ID NO: 1444549 - DNA, 25 bp, Homo sapien
aactcatccaggtgatgagggccca

SEQ ID NO: 1444550 - DNA, 25 bp, Homo sapien
tcccctggggcatagtccgactctg

SEQ ID NO: 1444551 - DNA, 25 bp, Homo sapien
catagtccgactctgggtcacacag

SEQ ID NO: 1444552 - DNA, 25 bp, Homo sapien
ggtgccacatgtgtactcctcccct

SEQ ID NO: 1444553 - DNA, 25 bp, Homo sapien
gccacatgtgtactcctcccctggg

SEQ ID NO: 1444554 - DNA, 25 bp, Homo sapien
tttcacaggccataagggctgcagg

SEQ ID NO: 1444555 - DNA, 25 bp, Homo sapien
gtgaggtgccggtctccttttcaca

SEQ ID NO: 1444556 - DNA, 25 bp, Homo sapien
gtgacctcatggagcctttgacacg

SEQ ID NO: 1444557 - DNA, 25 bp, Homo sapien
tgctgtgacctcatggagcctttga

SEQ ID NO: 1444558 - DNA, 25 bp, Homo sapien
tccaccaaggcgatcttcccaaaca

SEQ ID NO: 1444559 - DNA, 25 bp, Homo sapien
cccatccaccaaggcgatcttccca

SEQ ID NO: 1444560 - DNA, 25 bp, Homo sapien
catccaccaaggcgatcttcccaaa

SEQ ID NO: 1444561 - DNA, 25 bp, Homo sapien
ccaccaaggcgatcttcccaaacat

SEQ ID NO: 1444562 - DNA, 25 bp, Homo sapien
tccagccatccacgatcagggaggt

SEQ ID NO: 1444563 - DNA, 25 bp, Homo sapien
ggcatccaagcatctgacactccag

SEQ ID NO: 1444564 - DNA, 25 bp, Homo sapien
ttctttctcacgagcaaggcaggga

SEQ ID NO: 1444565 - DNA, 25 bp, Homo sapien
ggtccagcccgtgtgctgctcaggc

SEQ ID NO: 1444566 - DNA, 25 bp, Homo sapien
ttggccaagatccatgctttggcct

SEQ ID NO: 1444567 - DNA, 25 bp, Homo sapien
ccaagatccatgctttggcctgggc

SEQ ID NO: 1444568 - DNA, 25 bp, Homo sapien
gccaagatccatgctttggcctggg

SEQ ID NO: 1444569 - DNA, 25 bp, Homo sapien
ggccaagatccatgctttggcctgg

SEQ ID NO: 1444570 - DNA, 25 bp, Homo sapien
gatgagcagagccacgtagggtagg

SEQ ID NO: 1444571 - DNA, 25 bp, Homo sapien
acgatgagcagagccacgtagggta

SEQ ID NO: 1444572 - DNA, 25 bp, Homo sapien
tgagcagagccacgtagggtagggc

SEQ ID NO: 1444573 - DNA, 25 bp, Homo sapien
atgacgatgagcagagccacgtagg

SEQ ID NO: 1444574 - DNA, 25 bp, Homo sapien
gtgcagtttccagggtccctgttgc

SEQ ID NO: 1444575 - DNA, 25 bp, Homo sapien
gcagtttccagggtccctgttgcac

SEQ ID NO: 1444576 - DNA, 25 bp, Homo sapien
tgcagtttccagggtccctgttgca

SEQ ID NO: 1444577 - DNA, 25 bp, Homo sapien
gacttgatgaacgtccacaggaggg

SEQ ID NO: 1444578 - DNA, 25 bp, Homo sapien
cctcatgacacggaacaggcggaag

SEQ ID NO: 1444579 - DNA, 25 bp, Homo sapien
atcagcctcatgacacggaacaggc

SEQ ID NO: 1444580 - DNA, 25 bp, Homo sapien
ggagggttcgcactccttctgcccg

SEQ ID NO: 1444581 - DNA, 25 bp, Homo sapien
ctgcggggcagcagccccagaggtc

SEQ ID NO: 1444582 - DNA, 25 bp, Homo sapien
gcggggcagcagccccagaggtcag

SEQ ID NO: 1444583 - DNA, 25 bp, Homo sapien
tgcggggcagcagccccagaggtca

SEQ ID NO: 1444584 - DNA, 25 bp, Homo sapien
cggggcagcagccccagaggtcagt

SEQ ID NO: 1444585 - DNA, 25 bp, Homo sapien
ccaggcaatacagtcccccgctgga

SEQ ID NO: 1444586 - DNA, 25 bp, Homo sapien
aggcaatacagtcccccgctggagg

SEQ ID NO: 1444587 - DNA, 25 bp, Homo sapien
agcctccacccaggcaatacagtcc

SEQ ID NO: 1444588 - DNA, 25 bp, Homo sapien
tccacccaggcaatacagtcccccg

SEQ ID NO: 1444589 - DNA, 25 bp, Homo sapien
tagtgatggctctgcctgcctgata

SEQ ID NO: 1444590 - DNA, 25 bp, Homo sapien
tgatggctctgcctgcctgatactc

SEQ ID NO: 1444591 - DNA, 25 bp, Homo sapien
gatggctctgcctgcctgatactca

SEQ ID NO: 1444592 - DNA, 25 bp, Homo sapien
cctagtgatggctctgcctgcctga

SEQ ID NO: 1444593 - DNA, 25 bp, Homo sapien
gtcgatctcactgaggatgacatca

SEQ ID NO: 1444594 - DNA, 25 bp, Homo sapien
caatgacaatcaggaagtcaaacac

SEQ ID NO: 1444595 - DNA, 25 bp, Homo sapien
ctgaggatgacatcaatgatgctgc

SEQ ID NO: 1444596 - DNA, 25 bp, Homo sapien
aatgatgctgccaatgacaatcagg

SEQ ID NO: 1444597 - DNA, 25 bp, Homo sapien
ccagcttctcatctggcccggtggc

SEQ ID NO: 1444598 - DNA, 25 bp, Homo sapien
cccagcttctcatctggcccggtgg

SEQ ID NO: 1444599 - DNA, 25 bp, Homo sapien
agcttctcatctggcccggtggccc

SEQ ID NO: 1444600 - DNA, 25 bp, Homo sapien
gccccagcttctcatctggcccggt

SEQ ID NO: 1444601 - DNA, 25 bp, Homo sapien
cagggtgaagatgatagtgaaggcc

SEQ ID NO: 1444602 - DNA, 25 bp, Homo sapien
cctggccttgaaggccatgagcttg

SEQ ID NO: 1444603 - DNA, 25 bp, Homo sapien
tcatctgctccgactggttgtagtg

SEQ ID NO: 1444604 - DNA, 25 bp, Homo sapien
ggatgtctgagatgtggttcatctg

SEQ ID NO: 1444605 - DNA, 25 bp, Homo sapien
catcaggtattcaaagtaggaggag

SEQ ID NO: 1444606 - DNA, 25 bp, Homo sapien
tttgggaatgtagcacctcagtggg

SEQ ID NO: 1444607 - DNA, 25 bp, Homo sapien
tcagggcatactgtacacattggcg

SEQ ID NO: 1444608 - DNA, 25 bp, Homo sapien
ccacacctggtactggtatgggttt

SEQ ID NO: 1444609 - DNA, 25 bp, Homo sapien
acacggttgttgtagatgggaccca

SEQ ID NO: 1444610 - DNA, 25 bp, Homo sapien
tccgcattggagtctatggccttgt

SEQ ID NO: 1444611 - DNA, 25 bp, Homo sapien
ggagtctatggccttgtacagcagc

SEQ ID NO: 1444612 - DNA, 25 bp, Homo sapien
ggacccacgtcctccgcattggagt

SEQ ID NO: 1444613 - DNA, 25 bp, Homo sapien
gtccttgtacacgtagtagtagccc

SEQ ID NO: 1444614 - DNA, 25 bp, Homo sapien
cgaagtggaagtcgctgtgtaccca

SEQ ID NO: 1444615 - DNA, 25 bp, Homo sapien
aagagggacatcatggctgagagca

SEQ ID NO: 1444616 - DNA, 25 bp, Homo sapien
catccctcgaaggtggagaccgtga

SEQ ID NO: 1444617 - DNA, 25 bp, Homo sapien
tggcagggaggcccagtcactccac

SEQ ID NO: 1444618 - DNA, 25 bp, Homo sapien
gaggcccagtcactccacagggcat

SEQ ID NO: 1444619 - DNA, 25 bp, Homo sapien
agggaggcccagtcactccacaggg

SEQ ID NO: 1444620 - DNA, 25 bp, Homo sapien
ctgtggcagggaggcccagtcactc

SEQ ID NO: 1444621 - DNA, 25 bp, Homo sapien
tcttggacaagtcggtgcacctgaa

SEQ ID NO: 1444622 - DNA, 25 bp, Homo sapien
ctgtcatcttggacaagtcggtgca

SEQ ID NO: 1444623 - DNA, 25 bp, Homo sapien
gacaagtcggtgcacctgaagaact

SEQ ID NO: 1444624 - DNA, 25 bp, Homo sapien
agtcggtgcacctgaagaacttccc

SEQ ID NO: 1444625 - DNA, 25 bp, Homo sapien
tgtggggctgggatagggcgtatgc

SEQ ID NO: 1444626 - DNA, 25 bp, Homo sapien
gggatagggcgtatgcttggcacag

SEQ ID NO: 1444627 - DNA, 25 bp, Homo sapien
ctgggatagggcgtatgcttggcac

SEQ ID NO: 1444628 - DNA, 25 bp, Homo sapien
gatagggcgtatgcttggcacaggc

SEQ ID NO: 1444629 - DNA, 25 bp, Homo sapien
catatggaaatctgtgcattcgaag

SEQ ID NO: 1444630 - DNA, 25 bp, Homo sapien
aatgtggggctccttgtgcttgaga

SEQ ID NO: 1444631 - DNA, 25 bp, Homo sapien
ggaaatctgtgcattcgaagacatc

SEQ ID NO: 1444632 - DNA, 25 bp, Homo sapien
tctgtgcattcgaagacatctgttt

SEQ ID NO: 1444633 - DNA, 25 bp, Homo sapien
cgatggtgctgatggccacgaacat

SEQ ID NO: 1444634 - DNA, 25 bp, Homo sapien
gatggtgctgatggccacgaacatg

SEQ ID NO: 1444635 - DNA, 25 bp, Homo sapien
tagtgaccagcacgatgttcccgat

SEQ ID NO: 1444636 - DNA, 25 bp, Homo sapien
catgaactgtaggagggtagtgacc

SEQ ID NO: 1444637 - DNA, 25 bp, Homo sapien
cttcaaccccttggctctgttgatg

SEQ ID NO: 1444638 - DNA, 25 bp, Homo sapien
ctgagtggtcggagcaccctcagca

SEQ ID NO: 1444639 - DNA, 25 bp, Homo sapien
gctctgagtggtcggagcaccctca

SEQ ID NO: 1444640 - DNA, 25 bp, Homo sapien
atggctctgagtggtcggagcaccc

SEQ ID NO: 1444641 - DNA, 25 bp, Homo sapien
gtgcaggaaggctccgtaggtcgtc

SEQ ID NO: 1444642 - DNA, 25 bp, Homo sapien
gcaggaaggctccgtaggtcgtcat

SEQ ID NO: 1444643 - DNA, 25 bp, Homo sapien
tgcaggaaggctccgtaggtcgtca

SEQ ID NO: 1444644 - DNA, 25 bp, Homo sapien
gacagaggtgaacccgatgtcaaag

SEQ ID NO: 1444645 - DNA, 25 bp, Homo sapien
cttgaggacaatctccacagtgaag

SEQ ID NO: 1444646 - DNA, 25 bp, Homo sapien
agaggtgaacccgatgtcaaagtgt

SEQ ID NO: 1444647 - DNA, 25 bp, Homo sapien
ggtgaacccgatgtcaaagtgttta

SEQ ID NO: 1444648 - DNA, 25 bp, Homo sapien
agtcagagccattctgtgccccagc

SEQ ID NO: 1444649 - DNA, 25 bp, Homo sapien
cagtcagagccattctgtgccccag

SEQ ID NO: 1444650 - DNA, 25 bp, Homo sapien
gcagtcagagccattctgtgcccca

SEQ ID NO: 1444651 - DNA, 25 bp, Homo sapien
aggcagtcagagccattctgtgccc

SEQ ID NO: 1444652 - DNA, 25 bp, Homo sapien
ttctcatggaatcagcccggatggg

SEQ ID NO: 1444653 - DNA, 25 bp, Homo sapien
tgatttctcatggaatcagcccgga

SEQ ID NO: 1444654 - DNA, 25 bp, Homo sapien
tttctcatggaatcagcccggatgg

SEQ ID NO: 1444655 - DNA, 25 bp, Homo sapien
gcccggatggggtcttccgcagcca

SEQ ID NO: 1444656 - DNA, 25 bp, Homo sapien
ttgacgatgcggtgacacaggacac

SEQ ID NO: 1444657 - DNA, 25 bp, Homo sapien
gatgaagttggtaaaccaggtggca

SEQ ID NO: 1444658 - DNA, 25 bp, Homo sapien
aaaccaggtggcattgacgatgcgg

SEQ ID NO: 1444659 - DNA, 25 bp, Homo sapien
agcaggatgaagttggtaaaccagg

SEQ ID NO: 1444660 - DNA, 25 bp, Homo sapien
aatgggcacggccttctctttcagc

SEQ ID NO: 1444661 - DNA, 25 bp, Homo sapien
agcgggatctcaggctcatcttcct

SEQ ID NO: 1444662 - DNA, 25 bp, Homo sapien
gggatctcaggctcatcttcctcgt

SEQ ID NO: 1444663 - DNA, 25 bp, Homo sapien
ctcagcgggatctcaggctcatctt

SEQ ID NO: 1444664 - DNA, 25 bp, Homo sapien
tgacattagattcaaactcatcgat

SEQ ID NO: 1444665 - DNA, 25 bp, Homo sapien
ccttcacctcattgacattagattc

SEQ ID NO: 1444666 - DNA, 25 bp, Homo sapien
tagattcaaactcatcgattttcag

SEQ ID NO: 1444667 - DNA, 25 bp, Homo sapien
tgaggggtagggatccttcacctca

SEQ ID NO: 1444668 - DNA, 25 bp, Homo sapien
tcttggccatcgttgacttctcctc

SEQ ID NO: 1444669 - DNA, 25 bp, Homo sapien
ttggccatcgttgacttctcctctt

SEQ ID NO: 1444670 - DNA, 25 bp, Homo sapien
ttcttggccatcgttgacttctcct

SEQ ID NO: 1444671 - DNA, 25 bp, Homo sapien
ctcttctgacttgtctgggagaccc

SEQ ID NO: 1444672 - DNA, 25 bp, Homo sapien
cacggcaatggccaggaagacattg

SEQ ID NO: 1444673 - DNA, 25 bp, Homo sapien
ggacatcttcctgcgttttttctcc

SEQ ID NO: 1444674 - DNA, 25 bp, Homo sapien
tggacatcttcctgcgttttttctc

SEQ ID NO: 1444675 - DNA, 25 bp, Homo sapien
cggcaatggccaggaagacattgag

SEQ ID NO: 1444676 - DNA, 25 bp, Homo sapien
gctacccatgggaaggtgtggatcc

SEQ ID NO: 1444677 - DNA, 25 bp, Homo sapien
gatccagggacatagtggaaggccc

SEQ ID NO: 1444678 - DNA, 25 bp, Homo sapien
gacatagtggaaggccctcagggaa

SEQ ID NO: 1444679 - DNA, 25 bp, Homo sapien
ccagagctacccatgggaaggtgtg

SEQ ID NO: 1444680 - DNA, 25 bp, Homo sapien
aggagcctgaatcctgtggccttga

SEQ ID NO: 1444681 - DNA, 25 bp, Homo sapien
tcctgtggccttgaatcccatccgt

SEQ ID NO: 1444682 - DNA, 25 bp, Homo sapien
cctgtggccttgaatcccatccgtt

SEQ ID NO: 1444683 - DNA, 25 bp, Homo sapien
gaaggagcctgaatcctgtggcctt

SEQ ID NO: 1444684 - DNA, 25 bp, Homo sapien
cccctccctaagctcttttctgcac

SEQ ID NO: 1444685 - DNA, 25 bp, Homo sapien
acaagcatgccagggtaggacggcc

SEQ ID NO: 1444686 - DNA, 25 bp, Homo sapien
gttgccacagacgaaaaggatgatg

SEQ ID NO: 1444687 - DNA, 25 bp, Homo sapien
gatgatgaagtaaatgcacacaagc

SEQ ID NO: 1444688 - DNA, 25 bp, Homo sapien
cgccgtaggccatgatcccattgta

SEQ ID NO: 1444689 - DNA, 25 bp, Homo sapien
gtggctgatagtgaatcggctgtgc

SEQ ID NO: 1444690 - DNA, 25 bp, Homo sapien
tcccttgggtggctgatagtgaatc

SEQ ID NO: 1444691 - DNA, 25 bp, Homo sapien
ctgatagtgaatcggctgtgccgcc

SEQ ID NO: 1444692 - DNA, 25 bp, Homo sapien
cccttgggtggctgatagtgaatcg

SEQ ID NO: 1444693 - DNA, 25 bp, Homo sapien
tgtcaaagttgctgcgccgtacttc

SEQ ID NO: 1444694 - DNA, 25 bp, Homo sapien
gctgcgccgtacttctgtgtcttca

SEQ ID NO: 1444695 - DNA, 25 bp, Homo sapien
gcccaggagggcgaagatgacgatg

SEQ ID NO: 1444696 - DNA, 25 bp, Homo sapien
ctggaagacgctgatgagggcttgg

SEQ ID NO: 1444697 - DNA, 25 bp, Homo sapien
tagacatgaagtactggcgcaggcc

SEQ ID NO: 1444698 - DNA, 25 bp, Homo sapien
ctcaggaggcggatgcagcggagca

SEQ ID NO: 1444699 - DNA, 25 bp, Homo sapien
cagtcgaagcggttgaagatagaca

SEQ ID NO: 1444700 - DNA, 25 bp, Homo sapien
gcaggatctccaggataccgctaca

SEQ ID NO: 1444701 - DNA, 25 bp, Homo sapien
cacttccagcgaaagatgcggttcc

SEQ ID NO: 1444702 - DNA, 25 bp, Homo sapien
cttggacttcacgatgtcatggcac

SEQ ID NO: 1444703 - DNA, 25 bp, Homo sapien
cttgcaaacgggtcagccagagagg

SEQ ID NO: 1444704 - DNA, 25 bp, Homo sapien
tgttgagggcaacgatgagaatcac

SEQ ID NO: 1444705 - DNA, 25 bp, Homo sapien
tgttcaagcctgcaatttcatacag

SEQ ID NO: 1444706 - DNA, 25 bp, Homo sapien
caagcctgcaatttcatacaggctc

SEQ ID NO: 1444707 - DNA, 25 bp, Homo sapien
gaactggatgattttgttcaagcct

SEQ ID NO: 1444708 - DNA, 25 bp, Homo sapien
tttgttcaagcctgcaatttcatac

SEQ ID NO: 1444709 - DNA, 25 bp, Homo sapien
gagacaagggcccattgaccagaga

SEQ ID NO: 1444710 - DNA, 25 bp, Homo sapien
acaagggcccattgaccagagacat

SEQ ID NO: 1444711 - DNA, 25 bp, Homo sapien
ctggactgggcacccgagacaaggg

SEQ ID NO: 1444712 - DNA, 25 bp, Homo sapien
tgggcacccgagacaagggcccatt

SEQ ID NO: 1444713 - DNA, 25 bp, Homo sapien
ccattttgctttaggcaagtcactc

SEQ ID NO: 1444714 - DNA, 25 bp, Homo sapien
cattttgagccattttgctttaggc

SEQ ID NO: 1444715 - DNA, 25 bp, Homo sapien
agccattttgctttaggcaagtcac

SEQ ID NO: 1444716 - DNA, 25 bp, Homo sapien
ttgagccattttgctttaggcaagt

SEQ ID NO: 1444717 - DNA, 25 bp, Homo sapien
cctcaaaggactaatgttggacttg

SEQ ID NO: 1444718 - DNA, 25 bp, Homo sapien
gattgcaaggtatgactcagaggtg

SEQ ID NO: 1444719 - DNA, 25 bp, Homo sapien
gctcagtgggcctgattgcaaggta

SEQ ID NO: 1444720 - DNA, 25 bp, Homo sapien
taatgttggacttgctcagtgggcc

SEQ ID NO: 1444721 - DNA, 25 bp, Homo sapien
gaagtcctcaacatccatgacctcg

SEQ ID NO: 1444722 - DNA, 25 bp, Homo sapien
caacatccatgacctcgccctgcgt

SEQ ID NO: 1444723 - DNA, 25 bp, Homo sapien
ctgaagtcctcaacatccatgacct

SEQ ID NO: 1444724 - DNA, 25 bp, Homo sapien
acatccatgacctcgccctgcgtga

SEQ ID NO: 1444725 - DNA, 25 bp, Homo sapien
cttctggaaggttcccctggacttg

SEQ ID NO: 1444726 - DNA, 25 bp, Homo sapien
aagaaggatcccagcaaaatgaggg

SEQ ID NO: 1444727 - DNA, 25 bp, Homo sapien
gtctgctcattaagactccacccaa

SEQ ID NO: 1444728 - DNA, 25 bp, Homo sapien
caggacagaagtgtgatcctctgag

SEQ ID NO: 1444729 - DNA, 25 bp, Homo sapien
ctcttccccaagtctgctcattaag

SEQ ID NO: 1444730 - DNA, 25 bp, Homo sapien
tcctctgagttgagggcttggttcc

SEQ ID NO: 1444731 - DNA, 25 bp, Homo sapien
gatcctgcacagacatattgtatca

SEQ ID NO: 1444732 - DNA, 25 bp, Homo sapien
gacatattgtatcatggggatttcc

SEQ ID NO: 1444733 - DNA, 25 bp, Homo sapien
acatattgtatcatggggatttccc

SEQ ID NO: 1444734 - DNA, 25 bp, Homo sapien
tgagcatggagaagccgaagttgtc

SEQ ID NO: 1444735 - DNA, 25 bp, Homo sapien
cagtaaaggacgtcagtccatccct

SEQ ID NO: 1444736 - DNA, 25 bp, Homo sapien
catccctccatggtaatgcactggt

SEQ ID NO: 1444737 - DNA, 25 bp, Homo sapien
aagttgtcgaagtgggtgatgccat

SEQ ID NO: 1444738 - DNA, 25 bp, Homo sapien
tcattctccaccgtggccacgatat

SEQ ID NO: 1444739 - DNA, 25 bp, Homo sapien
attgatggtgcaccggcgccctgag

SEQ ID NO: 1444740 - DNA, 25 bp, Homo sapien
cgccctgagcccgtcctggcgcagg

SEQ ID NO: 1444741 - DNA, 25 bp, Homo sapien
ggcgcagggcgatggctcttcattc

SEQ ID NO: 1444742 - DNA, 25 bp, Homo sapien
atagatgatgaccataaagaggacc

SEQ ID NO: 1444743 - DNA, 25 bp, Homo sapien
gagctccagcccgatgatggcatag

SEQ ID NO: 1444744 - DNA, 25 bp, Homo sapien
gctccagcccgatgatggcatagat

SEQ ID NO: 1444745 - DNA, 25 bp, Homo sapien
tgtaccaatgaagtagcaggtcttg

SEQ ID NO: 1444746 - DNA, 25 bp, Homo sapien
ggtctgagcactcggaaggctctga

SEQ ID NO: 1444747 - DNA, 25 bp, Homo sapien
cccgacaccagccggaggggtctga

SEQ ID NO: 1444748 - DNA, 25 bp, Homo sapien
ggggtctgagcactcggaaggctct

SEQ ID NO: 1444749 - DNA, 25 bp, Homo sapien
ggaggggtctgagcactcggaaggc

SEQ ID NO: 1444750 - DNA, 25 bp, Homo sapien
gtggctttggatgacgttaacctgt

SEQ ID NO: 1444751 - DNA, 25 bp, Homo sapien
cttgacatccaagccggctcctttg

SEQ ID NO: 1444752 - DNA, 25 bp, Homo sapien
cctgttccagaatcacggtgaagac

SEQ ID NO: 1444753 - DNA, 25 bp, Homo sapien
gacgttaacctgttccagaatcacg

SEQ ID NO: 1444754 - DNA, 25 bp, Homo sapien
cgtaggcaatgatcttcatggcggc

SEQ ID NO: 1444755 - DNA, 25 bp, Homo sapien
attccagccactgcgcaggtaagcg

SEQ ID NO: 1444756 - DNA, 25 bp, Homo sapien
ctggtggaataagaagccgtaggca

SEQ ID NO: 1444757 - DNA, 25 bp, Homo sapien
tcatggcggcttcaatcgagaagac

SEQ ID NO: 1444758 - DNA, 25 bp, Homo sapien
cttcgaaccaggtgcagccttggga

SEQ ID NO: 1444759 - DNA, 25 bp, Homo sapien
caggtgcagccttgggatctgcatt

SEQ ID NO: 1444760 - DNA, 25 bp, Homo sapien
gaaccaggtgcagccttgggatctg

SEQ ID NO: 1444761 - DNA, 25 bp, Homo sapien
aggtgcagccttgggatctgcattc

SEQ ID NO: 1444762 - DNA, 25 bp, Homo sapien
tctcaggggtctcatttccctcttc

SEQ ID NO: 1444763 - DNA, 25 bp, Homo sapien
tcaggggtctcatttccctcttcca

SEQ ID NO: 1444764 - DNA, 25 bp, Homo sapien
ctcaggggtctcatttccctcttcc

SEQ ID NO: 1444765 - DNA, 25 bp, Homo sapien
tccctcaggtctgggtgggccagac

SEQ ID NO: 1444766 - DNA, 25 bp, Homo sapien
aagctccctcaggtctgggtgggcc

SEQ ID NO: 1444767 - DNA, 25 bp, Homo sapien
gggtgggccagacacaccagggctg

SEQ ID NO: 1444768 - DNA, 25 bp, Homo sapien
cagggaaccaagctccctcaggtct

SEQ ID NO: 1444769 - DNA, 25 bp, Homo sapien
cccagtggaggacgaacactgaggt

SEQ ID NO: 1444770 - DNA, 25 bp, Homo sapien
gtggaggacgaacactgaggtttct

SEQ ID NO: 1444771 - DNA, 25 bp, Homo sapien
gtgctggatacagcacagggtggcg

SEQ ID NO: 1444772 - DNA, 25 bp, Homo sapien
aggcttccttgtgcctccgagccca

SEQ ID NO: 1444773 - DNA, 25 bp, Homo sapien
tcagagagttgttgtcatcttccgg

SEQ ID NO: 1444774 - DNA, 25 bp, Homo sapien
atcttccggcatgggcaggtacacg

SEQ ID NO: 1444775 - DNA, 25 bp, Homo sapien
gagcaagatgatcgtctcgaagggc

SEQ ID NO: 1444776 - DNA, 25 bp, Homo sapien
gcaaagatggtgagcaagatgatcg

SEQ ID NO: 1444777 - DNA, 25 bp, Homo sapien
ctggacaggctcatggacgctcgcc

SEQ ID NO: 1444778 - DNA, 25 bp, Homo sapien
gctgctggacaggctcatggacgct

SEQ ID NO: 1444779 - DNA, 25 bp, Homo sapien
tgctggacaggctcatggacgctcg

SEQ ID NO: 1444780 - DNA, 25 bp, Homo sapien
ggcgctgagggtcagtctggactgt

SEQ ID NO: 1444781 - DNA, 25 bp, Homo sapien
ccatggctttctcgactttctggcc

SEQ ID NO: 1444782 - DNA, 25 bp, Homo sapien
tctggcccattaggcagcaagtctg

SEQ ID NO: 1444783 - DNA, 25 bp, Homo sapien
tttctcgactttctggcccattagg

SEQ ID NO: 1444784 - DNA, 25 bp, Homo sapien
ggcccattaggcagcaagtctggaa

SEQ ID NO: 1444785 - DNA, 25 bp, Homo sapien
tctacaatgctgatgcaggccttcc

SEQ ID NO: 1444786 - DNA, 25 bp, Homo sapien
ccagggtcaggcagaacaaggcccg

SEQ ID NO: 1444787 - DNA, 25 bp, Homo sapien
gaatctcaggaactggcttcttggg

SEQ ID NO: 1444788 - DNA, 25 bp, Homo sapien
gggtggccttggcagaatctcagga

SEQ ID NO: 1444789 - DNA, 25 bp, Homo sapien
atgcccccgccttggggactaggct

SEQ ID NO: 1444790 - DNA, 25 bp, Homo sapien
caatgcccccgccttggggactagg

SEQ ID NO: 1444791 - DNA, 25 bp, Homo sapien
tgcccccgccttggggactaggctg

SEQ ID NO: 1444792 - DNA, 25 bp, Homo sapien
ccaatgcccccgccttggggactag

SEQ ID NO: 1444793 - DNA, 25 bp, Homo sapien
gcaggaggattactctcctcgctcc

SEQ ID NO: 1444794 - DNA, 25 bp, Homo sapien
aggaggattactctcctcgctccca

SEQ ID NO: 1444795 - DNA, 25 bp, Homo sapien
caggaggattactctcctcgctccc

SEQ ID NO: 1444796 - DNA, 25 bp, Homo sapien
tagctctttggtgccgacgcagtgc

SEQ ID NO: 1444797 - DNA, 25 bp, Homo sapien
ttatttagctctttggtgccgacgc

SEQ ID NO: 1444798 - DNA, 25 bp, Homo sapien
gacgcagtgcctatgtacctatatg

SEQ ID NO: 1444799 - DNA, 25 bp, Homo sapien
tggtgccgacgcagtgcctatgtac

SEQ ID NO: 1444800 - DNA, 25 bp, Homo sapien
gaagtcgctagtatctgaggccatc

SEQ ID NO: 1444801 - DNA, 25 bp, Homo sapien
taagcgtgctcccaaagaagtcgct

SEQ ID NO: 1444802 - DNA, 25 bp, Homo sapien
cagtggcatggtaaccgagggctca

SEQ ID NO: 1444803 - DNA, 25 bp, Homo sapien
gggacaaaactagacgacctcatgg

SEQ ID NO: 1444804 - DNA, 25 bp, Homo sapien
taggtctctatcgtgcccatcgtac

SEQ ID NO: 1444805 - DNA, 25 bp, Homo sapien
caggaggactcggatgactccggca

SEQ ID NO: 1444806 - DNA, 25 bp, Homo sapien
cacaggcccgatcaatgccaggatt

SEQ ID NO: 1444807 - DNA, 25 bp, Homo sapien
gattcctccgactccaagaaaggcg

SEQ ID NO: 1444808 - DNA, 25 bp, Homo sapien
ccagagcccggcagaagttattgtt

SEQ ID NO: 1444809 - DNA, 25 bp, Homo sapien
tcgttgacgcacttgactcgctgcc

SEQ ID NO: 1444810 - DNA, 25 bp, Homo sapien
gcgctcgttgcgcttctggatgaag

SEQ ID NO: 1444811 - DNA, 25 bp, Homo sapien
ccccgcataggcgtcgtagtagggc

SEQ ID NO: 1444812 - DNA, 25 bp, Homo sapien
caggacttgctagggcctcttttcg

SEQ ID NO: 1444813 - DNA, 25 bp, Homo sapien
accagtggggcaagtcacatcgcta

SEQ ID NO: 1444814 - DNA, 25 bp, Homo sapien
tcacatcgctagcagcagctcttgg

SEQ ID NO: 1444815 - DNA, 25 bp, Homo sapien
gctcttgggtaccaggacttgctag

SEQ ID NO: 1444816 - DNA, 25 bp, Homo sapien
aaaccacgggctccatgtcctccac

SEQ ID NO: 1444817 - DNA, 25 bp, Homo sapien
ctaaaccacgggctccatgtcctcc

SEQ ID NO: 1444818 - DNA, 25 bp, Homo sapien
taaaccacgggctccatgtcctcca

SEQ ID NO: 1444819 - DNA, 25 bp, Homo sapien
accacgggctccatgtcctccacac

SEQ ID NO: 1444820 - DNA, 25 bp, Homo sapien
aactgatggctgctgttaggagtgc

SEQ ID NO: 1444821 - DNA, 25 bp, Homo sapien
tgatggctgctgttaggagtgcgcc

SEQ ID NO: 1444822 - DNA, 25 bp, Homo sapien
cgcggccttcgggatccccgggctg

SEQ ID NO: 1444823 - DNA, 25 bp, Homo sapien
gctgtccggggtccccaaactgatg

SEQ ID NO: 1444824 - DNA, 25 bp, Homo sapien
tgcctagacccttcacgacgagcaa

SEQ ID NO: 1444825 - DNA, 25 bp, Homo sapien
ggcagcacagctgatctcgccttct

SEQ ID NO: 1444826 - DNA, 25 bp, Homo sapien
cgacgagcaagtccatgggaaaatg

SEQ ID NO: 1444827 - DNA, 25 bp, Homo sapien
ggaaaatgcccgctcagtggcaatg

SEQ ID NO: 1444828 - DNA, 25 bp, Homo sapien
agcagcctctggccgggctttcctg

SEQ ID NO: 1444829 - DNA, 25 bp, Homo sapien
cgcttatcctgatcagtggctcttg

SEQ ID NO: 1444830 - DNA, 25 bp, Homo sapien
agcaccgggagccaggtacacttta

SEQ ID NO: 1444831 - DNA, 25 bp, Homo sapien
ctctgggtttgttcctccggcagcg

SEQ ID NO: 1444832 - DNA, 25 bp, Homo sapien
cctcagcctctgtggcagcactggg

SEQ ID NO: 1444833 - DNA, 25 bp, Homo sapien
tgccagggcaccctcagcctctgtg

SEQ ID NO: 1444834 - DNA, 25 bp, Homo sapien
ctgccagggcaccctcagcctctgt

SEQ ID NO: 1444835 - DNA, 25 bp, Homo sapien
caccctcagcctctgtggcagcact

SEQ ID NO: 1444836 - DNA, 25 bp, Homo sapien
gggatctccgccccttcatattcac

SEQ ID NO: 1444837 - DNA, 25 bp, Homo sapien
ggatctccgccccttcatattcaca

SEQ ID NO: 1444838 - DNA, 25 bp, Homo sapien
ggggatctccgccccttcatattca

SEQ ID NO: 1444839 - DNA, 25 bp, Homo sapien
agaaagatgaagtgtactctgccat

SEQ ID NO: 1444840 - DNA, 25 bp, Homo sapien
gaaataaaacaatttaatgatggct

SEQ ID NO: 1444841 - DNA, 25 bp, Homo sapien
aaaacaatttaatgatggcttcctt

SEQ ID NO: 1444842 - DNA, 25 bp, Homo sapien
taaaacaatttaatgatggcttcct

SEQ ID NO: 1444843 - DNA, 25 bp, Homo sapien
aataaaacaatttaatgatggcttc

SEQ ID NO: 1444844 - DNA, 25 bp, Homo sapien
gcagcagagtatgcatgggcactcc

SEQ ID NO: 1444845 - DNA, 25 bp, Homo sapien
tggtgttcagatccacgctcagcct

SEQ ID NO: 1444846 - DNA, 25 bp, Homo sapien
tccatgccccagtgcgagaagtgca

SEQ ID NO: 1444847 - DNA, 25 bp, Homo sapien
caacgaagttcagggacaagaggca

SEQ ID NO: 1444848 - DNA, 25 bp, Homo sapien
gaagacaacagagatcagagaccac

SEQ ID NO: 1444849 - DNA, 25 bp, Homo sapien
tcccagacactgagttcctgaagac

SEQ ID NO: 1444850 - DNA, 25 bp, Homo sapien
gctttatcttccaagggtaacaaca

SEQ ID NO: 1444851 - DNA, 25 bp, Homo sapien
caggagagacagatcgcatccactc

SEQ ID NO: 1444852 - DNA, 25 bp, Homo sapien
tagctgagcatcttgtgccgatcga

SEQ ID NO: 1444853 - DNA, 25 bp, Homo sapien
cagctgctgccatagagcgagcatc

SEQ ID NO: 1444854 - DNA, 25 bp, Homo sapien
ccacacgctccaggactgtgtttgc

SEQ ID NO: 1444855 - DNA, 25 bp, Homo sapien
tgtgccgatcgaagactgtcttccg

SEQ ID NO: 1444856 - DNA, 25 bp, Homo sapien
atccagatccatgggatcttagttt

SEQ ID NO: 1444857 - DNA, 25 bp, Homo sapien
tccagatccatgggatcttagtttc

SEQ ID NO: 1444858 - DNA, 25 bp, Homo sapien
ccagatccatgggatcttagtttcc

SEQ ID NO: 1444859 - DNA, 25 bp, Homo sapien
aggtctgtgcaaatctcaacactgt

SEQ ID NO: 1444860 - DNA, 25 bp, Homo sapien
ccccgagggcagacataaggtctgt

SEQ ID NO: 1444861 - DNA, 25 bp, Homo sapien
tgtgcaaatctcaacactgtgccac

SEQ ID NO: 1444862 - DNA, 25 bp, Homo sapien
tgcttttggccgtcttggggcttaa

SEQ ID NO: 1444863 - DNA, 25 bp, Homo sapien
gaaaagcagagttgctgaaccacag

SEQ ID NO: 1444864 - DNA, 25 bp, Homo sapien
agcagagttgctgaaccacagacat

SEQ ID NO: 1444865 - DNA, 25 bp, Homo sapien
agagttgctgaaccacagacatctg

SEQ ID NO: 1444866 - DNA, 25 bp, Homo sapien
aaagcagagttgctgaaccacagac

SEQ ID NO: 1444867 - DNA, 25 bp, Homo sapien
cccaccacggacaggtagatgacaa

SEQ ID NO: 1444868 - DNA, 25 bp, Homo sapien
gcagttgctcagtatatgcatccgg

SEQ ID NO: 1444869 - DNA, 25 bp, Homo sapien
ccggctttcggatcagagggtccac

SEQ ID NO: 1444870 - DNA, 25 bp, Homo sapien
ccacggacaggtagatgacaatgat

SEQ ID NO: 1444871 - DNA, 25 bp, Homo sapien
gaaatccgttgctagtcttgggcca

SEQ ID NO: 1444872 - DNA, 25 bp, Homo sapien
tgatcccaaggctaccagatggtgg

SEQ ID NO: 1444873 - DNA, 25 bp, Homo sapien
gaagaagtctggagcctgatgccga

SEQ ID NO: 1444874 - DNA, 25 bp, Homo sapien
tatgaaccattatctgaggccaggg

SEQ ID NO: 1444875 - DNA, 25 bp, Homo sapien
gaggctgggtcttcaataggctgaa

SEQ ID NO: 1444876 - DNA, 25 bp, Homo sapien
tgggtcttcaataggctgaagttga

SEQ ID NO: 1444877 - DNA, 25 bp, Homo sapien
ggctgggtcttcaataggctgaagt

SEQ ID NO: 1444878 - DNA, 25 bp, Homo sapien
gtcttcaataggctgaagttgaggg

SEQ ID NO: 1444879 - DNA, 25 bp, Homo sapien
taaatgtgcctcgaaaggagaaacc

SEQ ID NO: 1444880 - DNA, 25 bp, Homo sapien
aacctgatggaggacccagcagtgc

SEQ ID NO: 1444881 - DNA, 25 bp, Homo sapien
gcagcggtgacatctggctctgaat

SEQ ID NO: 1444882 - DNA, 25 bp, Homo sapien
tatctgatgaggtccccatgccagg

SEQ ID NO: 1444883 - DNA, 25 bp, Homo sapien
ggtggtggtgctgcgctcctcgtac

SEQ ID NO: 1444884 - DNA, 25 bp, Homo sapien
cttgatggtggtggtgctgcgctcc

SEQ ID NO: 1444885 - DNA, 25 bp, Homo sapien
atggtggtggtgctgcgctcctcgt

SEQ ID NO: 1444886 - DNA, 25 bp, Homo sapien
ttgatggtggtggtgctgcgctcct

SEQ ID NO: 1444887 - DNA, 25 bp, Homo sapien
cagtaggcctccacgtcatggccag

SEQ ID NO: 1444888 - DNA, 25 bp, Homo sapien
caggcagtaggcctccacgtcatgg

SEQ ID NO: 1444889 - DNA, 25 bp, Homo sapien
aggcagtaggcctccacgtcatggc

SEQ ID NO: 1444890 - DNA, 25 bp, Homo sapien
tgcactcgcacagcaggcagtaggc

SEQ ID NO: 1444891 - DNA, 25 bp, Homo sapien
caacatgttattccctgctctgagc

SEQ ID NO: 1444892 - DNA, 25 bp, Homo sapien
tgagtttatctaaacctttcatgat

SEQ ID NO: 1444893 - DNA, 25 bp, Homo sapien
cacctctgtgtccaacatgttattc

SEQ ID NO: 1444894 - DNA, 25 bp, Homo sapien
gcaggtctcccctgttgtaaccgga

SEQ ID NO: 1444895 - DNA, 25 bp, Homo sapien
tataaggtggacagatgcatttgca

SEQ ID NO: 1444896 - DNA, 25 bp, Homo sapien
catttgcaccggatatcttcagaac

SEQ ID NO: 1444897 - DNA, 25 bp, Homo sapien
tggacagatgcatttgcaccggata

SEQ ID NO: 1444898 - DNA, 25 bp, Homo sapien
cactgatgtttctataaggtggaca

SEQ ID NO: 1444899 - DNA, 25 bp, Homo sapien
ccgtgcactgtggtcgtgaccaggt

SEQ ID NO: 1444900 - DNA, 25 bp, Homo sapien
tggccgtgcactgtggtcgtgacca

SEQ ID NO: 1444901 - DNA, 25 bp, Homo sapien
cactgtggtcgtgaccaggtgctgc

SEQ ID NO: 1444902 - DNA, 25 bp, Homo sapien
gacagggtggccgtgcactgtggtc

SEQ ID NO: 1444903 - DNA, 25 bp, Homo sapien
cgaccacagccaccaaagataagag

SEQ ID NO: 1444904 - DNA, 25 bp, Homo sapien
gctgggggcaccagcaaacacccga

SEQ ID NO: 1444905 - DNA, 25 bp, Homo sapien
gcaccagcaaacacccgaccacagc

SEQ ID NO: 1444906 - DNA, 25 bp, Homo sapien
gaccacagccaccaaagataagagc

SEQ ID NO: 1444907 - DNA, 25 bp, Homo sapien
ttgctgggccagcaaagccggacac

SEQ ID NO: 1444908 - DNA, 25 bp, Homo sapien
cttgctgggccagcaaagccggaca

SEQ ID NO: 1444909 - DNA, 25 bp, Homo sapien
taaccatccggccaagtgggaatgg

SEQ ID NO: 1444910 - DNA, 25 bp, Homo sapien
ggattccaaggcctgctaaacctgg

SEQ ID NO: 1444911 - DNA, 25 bp, Homo sapien
tgctaaacctggtcgccaaaccctg

SEQ ID NO: 1444912 - DNA, 25 bp, Homo sapien
gaaggtggccacaccgcagccagca

SEQ ID NO: 1444913 - DNA, 25 bp, Homo sapien
gagcccggcagaggggtcctcgagg

SEQ ID NO: 1444914 - DNA, 25 bp, Homo sapien
gtcctcgaggggacaccgctgccag

SEQ ID NO: 1444915 - DNA, 25 bp, Homo sapien
ctctgacccgcgcatcacgtcccac

SEQ ID NO: 1444916 - DNA, 25 bp, Homo sapien
ttccttctcaaggcccggctctgac

SEQ ID NO: 1444917 - DNA, 25 bp, Homo sapien
cccctgctccgacggcgaaggccgg

SEQ ID NO: 1444918 - DNA, 25 bp, Homo sapien
tgggacccctgctccgacggcgaag

SEQ ID NO: 1444919 - DNA, 25 bp, Homo sapien
gacccctgctccgacggcgaaggcc

SEQ ID NO: 1444920 - DNA, 25 bp, Homo sapien
ctgctccgacggcgaaggccggtgc

SEQ ID NO: 1444921 - DNA, 25 bp, Homo sapien
ccagaggtcttaagccggactggga

SEQ ID NO: 1444922 - DNA, 25 bp, Homo sapien
cagaggtcttaagccggactgggac

SEQ ID NO: 1444923 - DNA, 25 bp, Homo sapien
ccgctgcagccgcaaaagacccagt

SEQ ID NO: 1444924 - DNA, 25 bp, Homo sapien
tgcagccgcaaaagacccagttgtc

SEQ ID NO: 1444925 - DNA, 25 bp, Homo sapien
gcagccgcaaaagacccagttgtcc

SEQ ID NO: 1444926 - DNA, 25 bp, Homo sapien
gctgcagccgcaaaagacccagttg

SEQ ID NO: 1444927 - DNA, 25 bp, Homo sapien
gagaaatctagggttggcgatgggt

SEQ ID NO: 1444928 - DNA, 25 bp, Homo sapien
aaatctagggttggcgatgggtggt

SEQ ID NO: 1444929 - DNA, 25 bp, Homo sapien
tctagggttggcgatgggtggtgtg

SEQ ID NO: 1444930 - DNA, 25 bp, Homo sapien
tagggttggcgatgggtggtgtggg

SEQ ID NO: 1444931 - DNA, 25 bp, Homo sapien
aaaatggggcaaagtgtgcatggcc

SEQ ID NO: 1444932 - DNA, 25 bp, Homo sapien
ggtgctgggcctggcaaaatggggc

SEQ ID NO: 1444933 - DNA, 25 bp, Homo sapien
gctgctatgtggcagatgtgaactt

SEQ ID NO: 1444934 - DNA, 25 bp, Homo sapien
tccctggctgctatgtggcagatgt

SEQ ID NO: 1444935 - DNA, 25 bp, Homo sapien
agggaggccttccactgtcattctg

SEQ ID NO: 1444936 - DNA, 25 bp, Homo sapien
tcaaacagaagggaggccttccact

SEQ ID NO: 1444937 - DNA, 25 bp, Homo sapien
cagaagggaggccttccactgtcat

SEQ ID NO: 1444938 - DNA, 25 bp, Homo sapien
cttcctcatcaaacagaagggaggc

SEQ ID NO: 1444939 - DNA, 25 bp, Homo sapien
gaagtttagctagatcagatctccc

SEQ ID NO: 1444940 - DNA, 25 bp, Homo sapien
gaaatagggttctcagtgttatccc

SEQ ID NO: 1444941 - DNA, 25 bp, Homo sapien
cagaaagctcttcgtgccctagtta

SEQ ID NO: 1444942 - DNA, 25 bp, Homo sapien
tcttgggttctacaacagtgacgtt

SEQ ID NO: 1444943 - DNA, 25 bp, Homo sapien
cccagagaagctaggtggtgttaca

SEQ ID NO: 1444944 - DNA, 25 bp, Homo sapien
ccttggcaggaaggtcaggacacct

SEQ ID NO: 1444945 - DNA, 25 bp, Homo sapien
gatgacagaatcagtcccttggacc

SEQ ID NO: 1444946 - DNA, 25 bp, Homo sapien
tggacctaagttggcctcaagcctg

SEQ ID NO: 1444947 - DNA, 25 bp, Homo sapien
tgacaagtctgagaacacgactccc

SEQ ID NO: 1444948 - DNA, 25 bp, Homo sapien
ttaccagtagtagcccacatgacat

SEQ ID NO: 1444949 - DNA, 25 bp, Homo sapien
catgacatgtcataactgggtgctg

SEQ ID NO: 1444950 - DNA, 25 bp, Homo sapien
cataactgggtgctgaaatgctgac

SEQ ID NO: 1444951 - DNA, 25 bp, Homo sapien
tttcagctcctgctctcgggtgcat

SEQ ID NO: 1444952 - DNA, 25 bp, Homo sapien
cattgcagtcatagagggatctgtg

SEQ ID NO: 1444953 - DNA, 25 bp, Homo sapien
ctcacattgcagtcatagagggatc

SEQ ID NO: 1444954 - DNA, 25 bp, Homo sapien
ctgctctcgggtgcattgtgggaca

SEQ ID NO: 1444955 - DNA, 25 bp, Homo sapien
tatgtctctcaaacgaggcaaggca

SEQ ID NO: 1444956 - DNA, 25 bp, Homo sapien
cagcaggagtaaccagggaaggacc

SEQ ID NO: 1444957 - DNA, 25 bp, Homo sapien
tacaacttgctgttaatagaggcca

SEQ ID NO: 1444958 - DNA, 25 bp, Homo sapien
cagggacagtccagccatggttagg

SEQ ID NO: 1444959 - DNA, 25 bp, Homo sapien
cataatcttttgtcataaccttcca

SEQ ID NO: 1444960 - DNA, 25 bp, Homo sapien
taatcttttgtcataaccttccaca

SEQ ID NO: 1444961 - DNA, 25 bp, Homo sapien
ttcataatcttttgtcataaccttc

SEQ ID NO: 1444962 - DNA, 25 bp, Homo sapien
aatcttttgtcataaccttccacat

SEQ ID NO: 1444963 - DNA, 25 bp, Homo sapien
tctgtggcaacgactcagttctgct

SEQ ID NO: 1444964 - DNA, 25 bp, Homo sapien
cagtgttgacaacttataaggccgg

SEQ ID NO: 1444965 - DNA, 25 bp, Homo sapien
gcagccacaggtgctatgtaaataa

SEQ ID NO: 1444966 - DNA, 25 bp, Homo sapien
ttttcctgtaaaggcctagacagtg

SEQ ID NO: 1444967 - DNA, 25 bp, Homo sapien
gttaccagccattgtatttccaatt

SEQ ID NO: 1444968 - DNA, 25 bp, Homo sapien
tccatctgtccgaccaaaaacccaa

SEQ ID NO: 1444969 - DNA, 25 bp, Homo sapien
tttccacttgccatccatctgtccg

SEQ ID NO: 1444970 - DNA, 25 bp, Homo sapien
taagaaaatctgttaccagccattg

SEQ ID NO: 1444971 - DNA, 25 bp, Homo sapien
tgcctttgacccaagctgacactgg

SEQ ID NO: 1444972 - DNA, 25 bp, Homo sapien
ggctctctcccgaacaaggtgtgac

SEQ ID NO: 1444973 - DNA, 25 bp, Homo sapien
cactaatggtatgtggtacagccag

SEQ ID NO: 1444974 - DNA, 25 bp, Homo sapien
catggttcacgttcagaatgggaca

SEQ ID NO: 1444975 - DNA, 25 bp, Homo sapien
tggcccctagtcagtgcttgtggaa

SEQ ID NO: 1444976 - DNA, 25 bp, Homo sapien
tcacttggcggctgggtggccattc

SEQ ID NO: 1444977 - DNA, 25 bp, Homo sapien
cagtctgtcccaagttcctcgtgga

SEQ ID NO: 1444978 - DNA, 25 bp, Homo sapien
tcctttgaagtgagtgtacctgcag

SEQ ID NO: 1444979 - DNA, 25 bp, Homo sapien
ttcctgggctgagccgtttggaggg

SEQ ID NO: 1444980 - DNA, 25 bp, Homo sapien
gatgggccggctccttattttcctg

SEQ ID NO: 1444981 - DNA, 25 bp, Homo sapien
actagggcatcaaggtcgtgtgtgt

SEQ ID NO: 1444982 - DNA, 25 bp, Homo sapien
acctgggtgaggactagggcatcaa

SEQ ID NO: 1444983 - DNA, 25 bp, Homo sapien
caggataaaagttgttacacctgca

SEQ ID NO: 1444984 - DNA, 25 bp, Homo sapien
aattttagactctgcacaggataaa

SEQ ID NO: 1444985 - DNA, 25 bp, Homo sapien
tattgttctgacgacccttgcacct

SEQ ID NO: 1444986 - DNA, 25 bp, Homo sapien
gataatattgcattattgttctgac

SEQ ID NO: 1444987 - DNA, 25 bp, Homo sapien
actgactggggaggatgtagtttct

SEQ ID NO: 1444988 - DNA, 25 bp, Homo sapien
gcaggcctgcgccttaggttcctgg

SEQ ID NO: 1444989 - DNA, 25 bp, Homo sapien
ggctccagactagcatatccctctg

SEQ ID NO: 1444990 - DNA, 25 bp, Homo sapien
ttaggttcctggagcttggtgttgt

SEQ ID NO: 1444991 - DNA, 25 bp, Homo sapien
gcttgggtactgtatccagtcgcat

SEQ ID NO: 1444992 - DNA, 25 bp, Homo sapien
gacatctttcattacgcttgggtac

SEQ ID NO: 1444993 - DNA, 25 bp, Homo sapien
gctgggtaaacttctacggatttca

SEQ ID NO: 1444994 - DNA, 25 bp, Homo sapien
ccatggttgggtcgatgaagtgact

SEQ ID NO: 1444995 - DNA, 25 bp, Homo sapien
agcaggaactggatgagcttcggat

SEQ ID NO: 1444996 - DNA, 25 bp, Homo sapien
aacagaggtactcaagcaggcactg

SEQ ID NO: 1444997 - DNA, 25 bp, Homo sapien
agcttcggatggtgcaggcccagct

SEQ ID NO: 1444998 - DNA, 25 bp, Homo sapien
cgaagctccgagaaacagaggtact

SEQ ID NO: 1444999 - DNA, 25 bp, Homo sapien
gtcttagatgacctggacaggaccg

SEQ ID NO: 1445000 - DNA, 25 bp, Homo sapien
gttctctctgagagtcaaggagagc

SEQ ID NO: 1445001 - DNA, 25 bp, Homo sapien
acctgtcttagatgacctggacagg

SEQ ID NO: 1445002 - DNA, 25 bp, Homo sapien
cctggacaggaccgcagagtgtccc

SEQ ID NO: 1445003 - DNA, 25 bp, Homo sapien
gaggtctctagagcaccctcgtagc

SEQ ID NO: 1445004 - DNA, 25 bp, Homo sapien
gagcaccctcgtagctaatggctgg

SEQ ID NO: 1445005 - DNA, 25 bp, Homo sapien
gttccccgctcttgaggtctctaga

SEQ ID NO: 1445006 - DNA, 25 bp, Homo sapien
ctgttccccgctcttgaggtctcta

SEQ ID NO: 1445007 - DNA, 25 bp, Homo sapien
tattggctgaggagcagttctaccg

SEQ ID NO: 1445008 - DNA, 25 bp, Homo sapien
tctgagggccactcgtatattggct

SEQ ID NO: 1445009 - DNA, 25 bp, Homo sapien
caaaagctggaaaaacgtgtgtgtt

SEQ ID NO: 1445010 - DNA, 25 bp, Homo sapien
agttctaccgtccacagcgcagtgg

SEQ ID NO: 1445011 - DNA, 25 bp, Homo sapien
atgtcaggttgcgatgaggagcccg

SEQ ID NO: 1445012 - DNA, 25 bp, Homo sapien
gggagagtgggcgaatcctggtctg

SEQ ID NO: 1445013 - DNA, 25 bp, Homo sapien
agtgggcgaatcctggtctggatgg

SEQ ID NO: 1445014 - DNA, 25 bp, Homo sapien
aggaatgtcaggttgcgatgaggag

SEQ ID NO: 1445015 - DNA, 25 bp, Homo sapien
tctttcaggaactctatgaccaggc

SEQ ID NO: 1445016 - DNA, 25 bp, Homo sapien
tttcaggaactctatgaccaggcag

SEQ ID NO: 1445017 - DNA, 25 bp, Homo sapien
cttctttcaggaactctatgaccag

SEQ ID NO: 1445018 - DNA, 25 bp, Homo sapien
ctttcaggaactctatgaccaggca

SEQ ID NO: 1445019 - DNA, 25 bp, Homo sapien
aaagacagggcatcagtggactgag

SEQ ID NO: 1445020 - DNA, 25 bp, Homo sapien
tgaaagacagggcatcagtggactg

SEQ ID NO: 1445021 - DNA, 25 bp, Homo sapien
ctgtggtgaaagacagggcatcagt

SEQ ID NO: 1445022 - DNA, 25 bp, Homo sapien
cagggcatcagtggactgaggacac

SEQ ID NO: 1445023 - DNA, 25 bp, Homo sapien
agttctgccatccaggcaatgacca

SEQ ID NO: 1445024 - DNA, 25 bp, Homo sapien
gcaatgaccagtttcaagtggaata

SEQ ID NO: 1445025 - DNA, 25 bp, Homo sapien
ggacagaacccttgggtcatgagtc

SEQ ID NO: 1445026 - DNA, 25 bp, Homo sapien
gctcaggacagaacccttgggtcat

SEQ ID NO: 1445027 - DNA, 25 bp, Homo sapien
tgatctccagcggccaggaccctgt

SEQ ID NO: 1445028 - DNA, 25 bp, Homo sapien
gctgagagctgatctccagcggcca

SEQ ID NO: 1445029 - DNA, 25 bp, Homo sapien
ttgtggcatgggagatgaacgccca

SEQ ID NO: 1445030 - DNA, 25 bp, Homo sapien
ccaggaccctgtctgttgtggcatg

SEQ ID NO: 1445031 - DNA, 25 bp, Homo sapien
actccactctgtctgctggccttgg

SEQ ID NO: 1445032 - DNA, 25 bp, Homo sapien
tccactctgtctgctggccttggac

SEQ ID NO: 1445033 - DNA, 25 bp, Homo sapien
cactccactctgtctgctggccttg

SEQ ID NO: 1445034 - DNA, 25 bp, Homo sapien
ctccactctgtctgctggccttgga

SEQ ID NO: 1445035 - DNA, 25 bp, Homo sapien
tcgtcctcatcgcagaatcctgatc

SEQ ID NO: 1445036 - DNA, 25 bp, Homo sapien
tggcagcctgccttatctgggataa

SEQ ID NO: 1445037 - DNA, 25 bp, Homo sapien
tcatcgcagaatcctgatccagctg

SEQ ID NO: 1445038 - DNA, 25 bp, Homo sapien
tatctgggataagctcgtcctcatc

SEQ ID NO: 1445039 - DNA, 25 bp, Homo sapien
aagtgtccacatgcagcgtctggga

SEQ ID NO: 1445040 - DNA, 25 bp, Homo sapien
cacagaggcttcgtccacagggaag

SEQ ID NO: 1445041 - DNA, 25 bp, Homo sapien
cacagggaagtgtccacatgcagcg

SEQ ID NO: 1445042 - DNA, 25 bp, Homo sapien
gcactcccacgtctgggtccaggat

SEQ ID NO: 1445043 - DNA, 25 bp, Homo sapien
aggacccaggcacaatcaggggact

SEQ ID NO: 1445044 - DNA, 25 bp, Homo sapien
caatcaggggacttgggcagaacaa

SEQ ID NO: 1445045 - DNA, 25 bp, Homo sapien
gacccaggcacaatcaggggacttg

SEQ ID NO: 1445046 - DNA, 25 bp, Homo sapien
caggcacaatcaggggacttgggca

SEQ ID NO: 1445047 - DNA, 25 bp, Homo sapien
cttgttatgtttaattgtggctgtg

SEQ ID NO: 1445048 - DNA, 25 bp, Homo sapien
tcttgttatgtttaattgtggctgt

SEQ ID NO: 1445049 - DNA, 25 bp, Homo sapien
ttgttatgtttaattgtggctgtgt

SEQ ID NO: 1445050 - DNA, 25 bp, Homo sapien
ctgagagtctggcagttattagagg

SEQ ID NO: 1445051 - DNA, 25 bp, Homo sapien
agggctgagagtctggcagttatta

SEQ ID NO: 1445052 - DNA, 25 bp, Homo sapien
ggctgagagtctggcagttattaga

SEQ ID NO: 1445053 - DNA, 25 bp, Homo sapien
tgagagtctggcagttattagaggc

SEQ ID NO: 1445054 - DNA, 25 bp, Homo sapien
cctggtggaacggtgacatcgccca

SEQ ID NO: 1445055 - DNA, 25 bp, Homo sapien
cctggctaaggtgtaactggcttca

SEQ ID NO: 1445056 - DNA, 25 bp, Homo sapien
caacttcctggctaaggtgtaactg

SEQ ID NO: 1445057 - DNA, 25 bp, Homo sapien
ctggtggaacggtgacatcgcccat

SEQ ID NO: 1445058 - DNA, 25 bp, Homo sapien
gggtggatagagaggcaggcccccg

SEQ ID NO: 1445059 - DNA, 25 bp, Homo sapien
gccacagaacagcactgctggccaa

SEQ ID NO: 1445060 - DNA, 25 bp, Homo sapien
gtcccattgggcacactttggagtc

SEQ ID NO: 1445061 - DNA, 25 bp, Homo sapien
tttggagtctatgtgaaatggcttt

SEQ ID NO: 1445062 - DNA, 25 bp, Homo sapien
gctctcgtggaagcccggtgggatt

SEQ ID NO: 1445063 - DNA, 25 bp, Homo sapien
tggaagcccggtgggattgttcctg

SEQ ID NO: 1445064 - DNA, 25 bp, Homo sapien
tgtgctctcgtggaagcccggtggg

SEQ ID NO: 1445065 - DNA, 25 bp, Homo sapien
ccggtgggattgttcctgagggcat

SEQ ID NO: 1445066 - DNA, 25 bp, Homo sapien
agctggtgtaaacgcgacccgaggc

SEQ ID NO: 1445067 - DNA, 25 bp, Homo sapien
ccggttctgagctggtgtaaacgcg

SEQ ID NO: 1445068 - DNA, 25 bp, Homo sapien
aacgcgacccgaggctggctcgacg

SEQ ID NO: 1445069 - DNA, 25 bp, Homo sapien
ttctgagctggtgtaaacgcgaccc

SEQ ID NO: 1445070 - DNA, 25 bp, Homo sapien
cagtacaggtcaaccaagacttatg

SEQ ID NO: 1445071 - DNA, 25 bp, Homo sapien
ctttacccattaccaaacagtacag

SEQ ID NO: 1445072 - DNA, 25 bp, Homo sapien
taaaatgctaataagactttaccca

SEQ ID NO: 1445073 - DNA, 25 bp, Homo sapien
taccaaacagtacaggtcaaccaag

SEQ ID NO: 1445074 - DNA, 25 bp, Homo sapien
tgtctgcactcatgctctccctgaa

SEQ ID NO: 1445075 - DNA, 25 bp, Homo sapien
gtctgcactcatgctctccctgaaa

SEQ ID NO: 1445076 - DNA, 25 bp, Homo sapien
tgcactcatgctctccctgaaatgc

SEQ ID NO: 1445077 - DNA, 25 bp, Homo sapien
aatgcctgtctgcactcatgctctc

SEQ ID NO: 1445078 - DNA, 25 bp, Homo sapien
gaatctcttcctaaagctgaacctg

SEQ ID NO: 1445079 - DNA, 25 bp, Homo sapien
gaactgcccctgaagtattgctccc

SEQ ID NO: 1445080 - DNA, 25 bp, Homo sapien
aaagatctttgccagggaaatgacc

SEQ ID NO: 1445081 - DNA, 25 bp, Homo sapien
tccagggaagtcctaacaacaccag

SEQ ID NO: 1445082 - DNA, 25 bp, Homo sapien
gagattctgacttagtgagtatgaa

SEQ ID NO: 1445083 - DNA, 25 bp, Homo sapien
tggcacgggcatcaggacttcagaa

SEQ ID NO: 1445084 - DNA, 25 bp, Homo sapien
tcaaacaacacaaatgcgtgagtcc

SEQ ID NO: 1445085 - DNA, 25 bp, Homo sapien
tgttctagtccctgtccttcactca

SEQ ID NO: 1445086 - DNA, 25 bp, Homo sapien
ctcaagagagcgatgaagacttggg

SEQ ID NO: 1445087 - DNA, 25 bp, Homo sapien
cactccttggaatagatctctgctg

SEQ ID NO: 1445088 - DNA, 25 bp, Homo sapien
ccttgtccatccactccttggaata

SEQ ID NO: 1445089 - DNA, 25 bp, Homo sapien
ctaatccctcaagagagcgatgaag

SEQ ID NO: 1445090 - DNA, 25 bp, Homo sapien
ccagaggcatcgctggtgctcagga

SEQ ID NO: 1445091 - DNA, 25 bp, Homo sapien
caatgtgcggctcttaaggcatcac

SEQ ID NO: 1445092 - DNA, 25 bp, Homo sapien
tgtgcggctcttaaggcatcaccag

SEQ ID NO: 1445093 - DNA, 25 bp, Homo sapien
cggctcttaaggcatcaccagaggc

SEQ ID NO: 1445094 - DNA, 25 bp, Homo sapien
taggagaacgaatctgatgacagga

SEQ ID NO: 1445095 - DNA, 25 bp, Homo sapien
tctgcccaggatgcgagcttgttag

SEQ ID NO: 1445096 - DNA, 25 bp, Homo sapien
gacaggatggcggaagagtcttcac

SEQ ID NO: 1445097 - DNA, 25 bp, Homo sapien
tgggcatcacacgaacaagctctgc

SEQ ID NO: 1445098 - DNA, 25 bp, Homo sapien
tcgaaagtacagtgagatgggatct

SEQ ID NO: 1445099 - DNA, 25 bp, Homo sapien
ccctgagcatttggtgtacacaggg

SEQ ID NO: 1445100 - DNA, 25 bp, Homo sapien
tgaggcaatgggtcatggatcgaaa

SEQ ID NO: 1445101 - DNA, 25 bp, Homo sapien
tgagcatttggtgtacacagggtgc

SEQ ID NO: 1445102 - DNA, 25 bp, Homo sapien
cagctcctcagttgtcaggaggccc

SEQ ID NO: 1445103 - DNA, 25 bp, Homo sapien
ccttcaacgtttggttcaggaccat

SEQ ID NO: 1445104 - DNA, 25 bp, Homo sapien
cactgctgcaccttcaacgtttggt

SEQ ID NO: 1445105 - DNA, 25 bp, Homo sapien
gctcctcagttgtcaggaggcccag

SEQ ID NO: 1445106 - DNA, 25 bp, Homo sapien
aagcacaagaatgatggaagtggtg

SEQ ID NO: 1445107 - DNA, 25 bp, Homo sapien
cataagcacaagaatgatggaagtg

SEQ ID NO: 1445108 - DNA, 25 bp, Homo sapien
agcacaagaatgatggaagtggtgg

SEQ ID NO: 1445109 - DNA, 25 bp, Homo sapien
taagcacaagaatgatggaagtggt

SEQ ID NO: 1445110 - DNA, 25 bp, Homo sapien
tgtggtggctttttattactggtgt

SEQ ID NO: 1445111 - DNA, 25 bp, Homo sapien
gtggtggctttttattactggtgtg

SEQ ID NO: 1445112 - DNA, 25 bp, Homo sapien
ccatttccaaacaggagctgcctgg

SEQ ID NO: 1445113 - DNA, 25 bp, Homo sapien
ggtggctcccacctaggccagctcc

SEQ ID NO: 1445114 - DNA, 25 bp, Homo sapien
ccacctaggccagctccccatttcc

SEQ ID NO: 1445115 - DNA, 25 bp, Homo sapien
tccccatttccaaacaggagctgcc

SEQ ID NO: 1445116 - DNA, 25 bp, Homo sapien
ggaggcaggtgcgagcgaggagcag

SEQ ID NO: 1445117 - DNA, 25 bp, Homo sapien
caggtgcgagcgaggagcagatctt

SEQ ID NO: 1445118 - DNA, 25 bp, Homo sapien
gcgaggagcagatctttggtgaagg

SEQ ID NO: 1445119 - DNA, 25 bp, Homo sapien
gggagtgcaggccggaggcaggtgc

SEQ ID NO: 1445120 - DNA, 25 bp, Homo sapien
cagcgcccggtgactttagccttcc

SEQ ID NO: 1445121 - DNA, 25 bp, Homo sapien
tatcgttgatcctgtttcggagaac

SEQ ID NO: 1445122 - DNA, 25 bp, Homo sapien
tctggttatcgttgatcctgtttcg

SEQ ID NO: 1445123 - DNA, 25 bp, Homo sapien
ggttatcgttgatcctgtttcggag

SEQ ID NO: 1445124 - DNA, 25 bp, Homo sapien
actttctggttatcgttgatcctgt

SEQ ID NO: 1445125 - DNA, 25 bp, Homo sapien
tccagcaagcagtcgtcaatgcggt

SEQ ID NO: 1445126 - DNA, 25 bp, Homo sapien
caggtctaagctccggtatgcagca

SEQ ID NO: 1445127 - DNA, 25 bp, Homo sapien
caatgcggtggacatggaacactgc

SEQ ID NO: 1445128 - DNA, 25 bp, Homo sapien
cataggactccgaaagactgtgagc

SEQ ID NO: 1445129 - DNA, 25 bp, Homo sapien
attaccggacccagtgaaccaggag

SEQ ID NO: 1445130 - DNA, 25 bp, Homo sapien
gaggagtgtgagatggagatgctgg

SEQ ID NO: 1445131 - DNA, 25 bp, Homo sapien
agggacctgcagcagtattaccgga

SEQ ID NO: 1445132 - DNA, 25 bp, Homo sapien
tgcagcagtattaccggacccagtg

SEQ ID NO: 1445133 - DNA, 25 bp, Homo sapien
caagttatagatgctctgccacagc

SEQ ID NO: 1445134 - DNA, 25 bp, Homo sapien
tccaagttatagatgctctgccaca

SEQ ID NO: 1445135 - DNA, 25 bp, Homo sapien
ctgcctccaagttatagatgctctg

SEQ ID NO: 1445136 - DNA, 25 bp, Homo sapien
gcctccaagttatagatgctctgcc

SEQ ID NO: 1445137 - DNA, 25 bp, Homo sapien
gatcttcattcaggtggtcaatggc

SEQ ID NO: 1445138 - DNA, 25 bp, Homo sapien
ctgatcttcattcaggtggtcaatg

SEQ ID NO: 1445139 - DNA, 25 bp, Homo sapien
ttcttcttttcccgctcagtctgcc

SEQ ID NO: 1445140 - DNA, 25 bp, Homo sapien
cttcttttcccgctcagtctgcctc

SEQ ID NO: 1445141 - DNA, 25 bp, Homo sapien
ctcctcctctcgtcgagccctctct

SEQ ID NO: 1445142 - DNA, 25 bp, Homo sapien
tcctcctctcgtcgagccctctctt

SEQ ID NO: 1445143 - DNA, 25 bp, Homo sapien
cctcctctcgtcgagccctctcttc

SEQ ID NO: 1445144 - DNA, 25 bp, Homo sapien
actgcgtgattgaatgaggtcctga

SEQ ID NO: 1445145 - DNA, 25 bp, Homo sapien
ctttctgagagggtagctcccagca

SEQ ID NO: 1445146 - DNA, 25 bp, Homo sapien
tcagctttctctccgctcagcaagg

SEQ ID NO: 1445147 - DNA, 25 bp, Homo sapien
gattcccaaatgtgaggtctcgtca

SEQ ID NO: 1445148 - DNA, 25 bp, Homo sapien
ggccttcggttcccacgaagtctgc

SEQ ID NO: 1445149 - DNA, 25 bp, Homo sapien
gccttcggttcccacgaagtctgca

SEQ ID NO: 1445150 - DNA, 25 bp, Homo sapien
tgcacaggaagagagctacggggcc

SEQ ID NO: 1445151 - DNA, 25 bp, Homo sapien
acaggaagagagctacggggccttc

SEQ ID NO: 1445152 - DNA, 25 bp, Homo sapien
atcagagccaagacaatgcccagca

SEQ ID NO: 1445153 - DNA, 25 bp, Homo sapien
taacacgttcataaggacgcaggca

SEQ ID NO: 1445154 - DNA, 25 bp, Homo sapien
tgcccagcacttcctaggttgatat

SEQ ID NO: 1445155 - DNA, 25 bp, Homo sapien
cgcaggcatttctgtcttgtttgct

SEQ ID NO: 1445156 - DNA, 25 bp, Homo sapien
ctcccgctcattccggatgcgctgc

SEQ ID NO: 1445157 - DNA, 25 bp, Homo sapien
ctgctcggcccgctctgcccgacgt

SEQ ID NO: 1445158 - DNA, 25 bp, Homo sapien
tcggcccgctctgcccgacgtctct

SEQ ID NO: 1445159 - DNA, 25 bp, Homo sapien
ccgctcattccggatgcgctgctgc

SEQ ID NO: 1445160 - DNA, 25 bp, Homo sapien
cgatcagcgcctgcaactcattcag

SEQ ID NO: 1445161 - DNA, 25 bp, Homo sapien
ttcttcctgttctcaaagtgagcct

SEQ ID NO: 1445162 - DNA, 25 bp, Homo sapien
tcaaagtgagcctcgatcagcgcct

SEQ ID NO: 1445163 - DNA, 25 bp, Homo sapien
gtctttgagagaaacgagctcctcc

SEQ ID NO: 1445164 - DNA, 25 bp, Homo sapien
tcaaagtccactctctctccatcgg

SEQ ID NO: 1445165 - DNA, 25 bp, Homo sapien
atcaaagtccactctctctccatcg

SEQ ID NO: 1445166 - DNA, 25 bp, Homo sapien
ggaagagacgcttgtgcagtacaca

SEQ ID NO: 1445167 - DNA, 25 bp, Homo sapien
caactgtactgtggtgctctgtgcc

SEQ ID NO: 1445168 - DNA, 25 bp, Homo sapien
tctgaagccgccatgcctatgctgg

SEQ ID NO: 1445169 - DNA, 25 bp, Homo sapien
tagtaacactgacgtcaacaatggc

SEQ ID NO: 1445170 - DNA, 25 bp, Homo sapien
ctgggctttggtttggactcctcca

SEQ ID NO: 1445171 - DNA, 25 bp, Homo sapien
tgggctttggtttggactcctccat

SEQ ID NO: 1445172 - DNA, 25 bp, Homo sapien
cgccctcgatgagctagatccctgt

SEQ ID NO: 1445173 - DNA, 25 bp, Homo sapien
aagtggtcccaactccgccctcgat

SEQ ID NO: 1445174 - DNA, 25 bp, Homo sapien
ccctcgatgagctagatccctgtgg

SEQ ID NO: 1445175 - DNA, 25 bp, Homo sapien
caactccgccctcgatgagctagat

SEQ ID NO: 1445176 - DNA, 25 bp, Homo sapien
tacggacaccacatcctacaagtga

SEQ ID NO: 1445177 - DNA, 25 bp, Homo sapien
gcattgggatttcatcctacggaca

SEQ ID NO: 1445178 - DNA, 25 bp, Homo sapien
tgaaggctgcagcatgacgatgact

SEQ ID NO: 1445179 - DNA, 25 bp, Homo sapien
tggaagtgccaccaagttctgtcct

SEQ ID NO: 1445180 - DNA, 25 bp, Homo sapien
gcctcctttgcttcctcttcttctt

SEQ ID NO: 1445181 - DNA, 25 bp, Homo sapien
agcctcctttgcttcctcttcttct

SEQ ID NO: 1445182 - DNA, 25 bp, Homo sapien
tcctttgcttcctcttcttcttcat

SEQ ID NO: 1445183 - DNA, 25 bp, Homo sapien
cttcagcctcctttgcttcctcttc

SEQ ID NO: 1445184 - DNA, 25 bp, Homo sapien
tcggtctcagcctctgcttcagcat

SEQ ID NO: 1445185 - DNA, 25 bp, Homo sapien
cttctgccctggtctcctcggtctc

SEQ ID NO: 1445186 - DNA, 25 bp, Homo sapien
tctgccctggtctcctcggtctcag

SEQ ID NO: 1445187 - DNA, 25 bp, Homo sapien
ttcagcatcctcttccgctgcctcc

SEQ ID NO: 1445188 - DNA, 25 bp, Homo sapien
caggtcccctctatggccacatttg

SEQ ID NO: 1445189 - DNA, 25 bp, Homo sapien
ttgggagaccagctagccttggtcc

SEQ ID NO: 1445190 - DNA, 25 bp, Homo sapien
gaagttcaggcatgatgatcagctt

SEQ ID NO: 1445191 - DNA, 25 bp, Homo sapien
cctctatggccacatttggagcagc

SEQ ID NO: 1445192 - DNA, 25 bp, Homo sapien
cgtcttcgtcctctctccagtcctc

SEQ ID NO: 1445193 - DNA, 25 bp, Homo sapien
tcttcgtcctctctccagtcctcct

SEQ ID NO: 1445194 - DNA, 25 bp, Homo sapien
gtcttcgtcctctctccagtcctcc

SEQ ID NO: 1445195 - DNA, 25 bp, Homo sapien
tccaggagtcacactttagaaagcc

SEQ ID NO: 1445196 - DNA, 25 bp, Homo sapien
aatgacctagcgtgcatagagcgcc

SEQ ID NO: 1445197 - DNA, 25 bp, Homo sapien
gacagaggcccctaaagagcagaga

SEQ ID NO: 1445198 - DNA, 25 bp, Homo sapien
taactgcaatgcctctagacgacag

SEQ ID NO: 1445199 - DNA, 25 bp, Homo sapien
aatgagtacacacgtttacgcttac

SEQ ID NO: 1445200 - DNA, 25 bp, Homo sapien
ggctgtctttgatccaaatgagtac

SEQ ID NO: 1445201 - DNA, 25 bp, Homo sapien
gaagaggtgggtcagtttcgaacca

SEQ ID NO: 1445202 - DNA, 25 bp, Homo sapien
cagtttcgaaccaggctgtctttga

SEQ ID NO: 1445203 - DNA, 25 bp, Homo sapien
gaccccactcaggcaagatgctcca

SEQ ID NO: 1445204 - DNA, 25 bp, Homo sapien
ccactcaggcaagatgctccagata

SEQ ID NO: 1445205 - DNA, 25 bp, Homo sapien
gctcctggaccaggtgtcagggcag

SEQ ID NO: 1445206 - DNA, 25 bp, Homo sapien
gtcagggcagcggcgggagaggacc

SEQ ID NO: 1445207 - DNA, 25 bp, Homo sapien
tcttccaccacctcttctatgtcag

SEQ ID NO: 1445208 - DNA, 25 bp, Homo sapien
ttccaccacctcttctatgtcagac

SEQ ID NO: 1445209 - DNA, 25 bp, Homo sapien
tccaccacctcttctatgtcagaca

SEQ ID NO: 1445210 - DNA, 25 bp, Homo sapien
ccaccacctcttctatgtcagacat

SEQ ID NO: 1445211 - DNA, 25 bp, Homo sapien
tactcagggtctttacgaggctcca

SEQ ID NO: 1445212 - DNA, 25 bp, Homo sapien
ccgttgtacagagatcagcgaggcc

SEQ ID NO: 1445213 - DNA, 25 bp, Homo sapien
tgctccagggacacaatcacgttgt

SEQ ID NO: 1445214 - DNA, 25 bp, Homo sapien
tttgggcaccccaagagactggcct

SEQ ID NO: 1445215 - DNA, 25 bp, Homo sapien
gcccttccaccagttcagagccact

SEQ ID NO: 1445216 - DNA, 25 bp, Homo sapien
tgggcatggtgctggggcctcacag

SEQ ID NO: 1445217 - DNA, 25 bp, Homo sapien
gaggacagagcagcttggactcctc

SEQ ID NO: 1445218 - DNA, 25 bp, Homo sapien
tgttcctgggggcaccatccagctc

SEQ ID NO: 1445219 - DNA, 25 bp, Homo sapien
gacagatcctggaggcgtctgctca

SEQ ID NO: 1445220 - DNA, 25 bp, Homo sapien
agaggatggagagggctttaagcag

SEQ ID NO: 1445221 - DNA, 25 bp, Homo sapien
gcagctgccgacagatcctggaggc

SEQ ID NO: 1445222 - DNA, 25 bp, Homo sapien
tctgctcagtctcagcggggactgg

SEQ ID NO: 1445223 - DNA, 25 bp, Homo sapien
gacagcctctcagataaggaaatcc

SEQ ID NO: 1445224 - DNA, 25 bp, Homo sapien
ggatccacaataggacgggccactt

SEQ ID NO: 1445225 - DNA, 25 bp, Homo sapien
tgggaaaagcccagtagatccttgg

SEQ ID NO: 1445226 - DNA, 25 bp, Homo sapien
taaggcaggagcttcgttcagagcg

SEQ ID NO: 1445227 - DNA, 25 bp, Homo sapien
tgcgtccccagtaggaacgagggca

SEQ ID NO: 1445228 - DNA, 25 bp, Homo sapien
taggctcttactccacggtcaggcc

SEQ ID NO: 1445229 - DNA, 25 bp, Homo sapien
agggccctcacgtgctggattcaca

SEQ ID NO: 1445230 - DNA, 25 bp, Homo sapien
tgtgctgtagcaccccgacatttcc

SEQ ID NO: 1445231 - DNA, 25 bp, Homo sapien
ggcagggaccccaggtcccgatatc

SEQ ID NO: 1445232 - DNA, 25 bp, Homo sapien
gaagttggaacactcacaaagcccc

SEQ ID NO: 1445233 - DNA, 25 bp, Homo sapien
ggcaggactcaatccgttcctcggc

SEQ ID NO: 1445234 - DNA, 25 bp, Homo sapien
tgtcctccaactctcggctatgaag

SEQ ID NO: 1445235 - DNA, 25 bp, Homo sapien
gggacctgagcacggatggcacttt

SEQ ID NO: 1445236 - DNA, 25 bp, Homo sapien
acctgagcacggatggcactttgag

SEQ ID NO: 1445237 - DNA, 25 bp, Homo sapien
gacctgagcacggatggcactttga

SEQ ID NO: 1445238 - DNA, 25 bp, Homo sapien
cctgagcacggatggcactttgagg

SEQ ID NO: 1445239 - DNA, 25 bp, Homo sapien
tatgtggcagttcccagtcaccaag

SEQ ID NO: 1445240 - DNA, 25 bp, Homo sapien
cataggccccatagtgctgatgtgc

SEQ ID NO: 1445241 - DNA, 25 bp, Homo sapien
cacttgctgggagccgatgagacag

SEQ ID NO: 1445242 - DNA, 25 bp, Homo sapien
taagtggttgcacacaaaaaggcac

SEQ ID NO: 1445243 - DNA, 25 bp, Homo sapien
gatggggtctcccacagtacaccgt

SEQ ID NO: 1445244 - DNA, 25 bp, Homo sapien
gactgcgcgattgcaggccaattag

SEQ ID NO: 1445245 - DNA, 25 bp, Homo sapien
ttctgggtggactgcgcgattgcag

SEQ ID NO: 1445246 - DNA, 25 bp, Homo sapien
caggccaattagtgtgtgcacacgg

SEQ ID NO: 1445247 - DNA, 25 bp, Homo sapien
ccactgagtcctctcggttgcagat

SEQ ID NO: 1445248 - DNA, 25 bp, Homo sapien
cactgagtcctctcggttgcagatg

SEQ ID NO: 1445249 - DNA, 25 bp, Homo sapien
tcagcgtccagcgaggagtcagatt

SEQ ID NO: 1445250 - DNA, 25 bp, Homo sapien
ctcagcgtccagcgaggagtcagat

SEQ ID NO: 1445251 - DNA, 25 bp, Homo sapien
gccttgatgtcacaacccctgagag

SEQ ID NO: 1445252 - DNA, 25 bp, Homo sapien
gcccttggcagcagcgaggcatgtt

SEQ ID NO: 1445253 - DNA, 25 bp, Homo sapien
cagcagcgaggcatgttcagaggcc

SEQ ID NO: 1445254 - DNA, 25 bp, Homo sapien
ttggcagcagcgaggcatgttcaga

SEQ ID NO: 1445255 - DNA, 25 bp, Homo sapien
cccttggcagcagcgaggcatgttc

SEQ ID NO: 1445256 - DNA, 25 bp, Homo sapien
ctaatcaccctaaggaccctgtggg

SEQ ID NO: 1445257 - DNA, 25 bp, Homo sapien
ggttttggagacgtcagggctaatc

SEQ ID NO: 1445258 - DNA, 25 bp, Homo sapien
gagacgtcagggctaatcaccctaa

SEQ ID NO: 1445259 - DNA, 25 bp, Homo sapien
tcagggctaatcaccctaaggaccc

SEQ ID NO: 1445260 - DNA, 25 bp, Homo sapien
ctggaggctggttctgctcggctct

SEQ ID NO: 1445261 - DNA, 25 bp, Homo sapien
aataactcagtgcaaggcagacccc

SEQ ID NO: 1445262 - DNA, 25 bp, Homo sapien
cccacaggagccacgaataactcag

SEQ ID NO: 1445263 - DNA, 25 bp, Homo sapien
ggcagaccccgagacttgacagatt

SEQ ID NO: 1445264 - DNA, 25 bp, Homo sapien
caagaacaccaacagctgacccatg

SEQ ID NO: 1445265 - DNA, 25 bp, Homo sapien
gggaaccaagaacaccaacagctga

SEQ ID NO: 1445266 - DNA, 25 bp, Homo sapien
ctgggaaccaagaacaccaacagct

SEQ ID NO: 1445267 - DNA, 25 bp, Homo sapien
gaaccaagaacaccaacagctgacc

SEQ ID NO: 1445268 - DNA, 25 bp, Homo sapien
ccgtatggccgtgtggtatctctcc

SEQ ID NO: 1445269 - DNA, 25 bp, Homo sapien
cgtatggccgtgtggtatctctcca

SEQ ID NO: 1445270 - DNA, 25 bp, Homo sapien
tatggccgtgtggtatctctccagc

SEQ ID NO: 1445271 - DNA, 25 bp, Homo sapien
atggccgtgtggtatctctccagct

SEQ ID NO: 1445272 - DNA, 25 bp, Homo sapien
ccaagagaatgtggccctccatcac

SEQ ID NO: 1445273 - DNA, 25 bp, Homo sapien
cgagccaagtgagacacccagggag

SEQ ID NO: 1445274 - DNA, 25 bp, Homo sapien
gccaagagaatgtggccctccatca

SEQ ID NO: 1445275 - DNA, 25 bp, Homo sapien
gaacaggcgagccaagtgagacacc

SEQ ID NO: 1445276 - DNA, 25 bp, Homo sapien
ctgcgagttagggttgtttccgagt

SEQ ID NO: 1445277 - DNA, 25 bp, Homo sapien
gctggagcgtttgagggagctgctg

SEQ ID NO: 1445278 - DNA, 25 bp, Homo sapien
gctgtaggttcgctgtgtgggtgag

SEQ ID NO: 1445279 - DNA, 25 bp, Homo sapien
ttcgctgtgtgggtgaggacatatc

SEQ ID NO: 1445280 - DNA, 25 bp, Homo sapien
tgggtgaggacatatctgcctcttc

SEQ ID NO: 1445281 - DNA, 25 bp, Homo sapien
gggtgggagggacgggacactgcca

SEQ ID NO: 1445282 - DNA, 25 bp, Homo sapien
cagccaggtggcagagtagaagggt

SEQ ID NO: 1445283 - DNA, 25 bp, Homo sapien
ctttgccaaagagggcaggttcttc

SEQ ID NO: 1445284 - DNA, 25 bp, Homo sapien
ggagtgtgacgggtgggaggcggga

SEQ ID NO: 1445285 - DNA, 25 bp, Homo sapien
gccacagtcggagggtctgaagccc

SEQ ID NO: 1445286 - DNA, 25 bp, Homo sapien
ccggcttagcatctgcagttgggct

SEQ ID NO: 1445287 - DNA, 25 bp, Homo sapien
tatcttctctgatagagatgtcttc

SEQ ID NO: 1445288 - DNA, 25 bp, Homo sapien
ggagaccaggctcttttcaggtgcc

SEQ ID NO: 1445289 - DNA, 25 bp, Homo sapien
ccttctcagagatggaggttttatc

SEQ ID NO: 1445290 - DNA, 25 bp, Homo sapien
cttctttggcatggaggacttctcc

SEQ ID NO: 1445291 - DNA, 25 bp, Homo sapien
cggcgaggtgggatttccagttcct

SEQ ID NO: 1445292 - DNA, 25 bp, Homo sapien
ctcgtcctcatctttggaggctggg

SEQ ID NO: 1445293 - DNA, 25 bp, Homo sapien
cccgactcagtctccggcgaggtgg

SEQ ID NO: 1445294 - DNA, 25 bp, Homo sapien
gccgtgttctgaggatgctctggat

SEQ ID NO: 1445295 - DNA, 25 bp, Homo sapien
agctcaggttgcggtgccgccgcct

SEQ ID NO: 1445296 - DNA, 25 bp, Homo sapien
cctgggagcctcatcgtccgtggtg

SEQ ID NO: 1445297 - DNA, 25 bp, Homo sapien
gagcctcatcgtccgtggtggagct

SEQ ID NO: 1445298 - DNA, 25 bp, Homo sapien
catcgtccgtggtggagctcaggtt

SEQ ID NO: 1445299 - DNA, 25 bp, Homo sapien
cgctgaggcttgttcacccagggag

SEQ ID NO: 1445300 - DNA, 25 bp, Homo sapien
tgcctgcccgctgaggcttgttcac

SEQ ID NO: 1445301 - DNA, 25 bp, Homo sapien
tgcccgctgaggcttgttcacccag

SEQ ID NO: 1445302 - DNA, 25 bp, Homo sapien
gagcgggagcggtcctctgttccag

SEQ ID NO: 1445303 - DNA, 25 bp, Homo sapien
cttttcccctctctagagcccatgg

SEQ ID NO: 1445304 - DNA, 25 bp, Homo sapien
gtcccaggcgatgagctgctatgga

SEQ ID NO: 1445305 - DNA, 25 bp, Homo sapien
cccaggcgatgagctgctatggaga

SEQ ID NO: 1445306 - DNA, 25 bp, Homo sapien
ttcccctctctagagcccatgggct

SEQ ID NO: 1445307 - DNA, 25 bp, Homo sapien
acagcgcggaccagtccttcctgct

SEQ ID NO: 1445308 - DNA, 25 bp, Homo sapien
ctggacagcgcggaccagtccttcc

SEQ ID NO: 1445309 - DNA, 25 bp, Homo sapien
ggacagcgcggaccagtccttcctg

SEQ ID NO: 1445310 - DNA, 25 bp, Homo sapien
tggacagcgcggaccagtccttcct

SEQ ID NO: 1445311 - DNA, 25 bp, Homo sapien
tccagcccaggtgggatcacatggc

SEQ ID NO: 1445312 - DNA, 25 bp, Homo sapien
aggtgggatcacatggccgcttatc

SEQ ID NO: 1445313 - DNA, 25 bp, Homo sapien
ttccagcccaggtgggatcacatgg

SEQ ID NO: 1445314 - DNA, 25 bp, Homo sapien
ccaggtgggatcacatggccgctta

SEQ ID NO: 1445315 - DNA, 25 bp, Homo sapien
cgcattgattgcagcccaggccggc

SEQ ID NO: 1445316 - DNA, 25 bp, Homo sapien
ggatgtgggcgtcccagacaaagcc

SEQ ID NO: 1445317 - DNA, 25 bp, Homo sapien
gcactgggtggaccgtcggacggat

SEQ ID NO: 1445318 - DNA, 25 bp, Homo sapien
tccgatttgccgacccgggaatggc

SEQ ID NO: 1445319 - DNA, 25 bp, Homo sapien
cattaaaaacgtatgcgtgtcctgg

SEQ ID NO: 1445320 - DNA, 25 bp, Homo sapien
tgaatgaggtgataagacccacgcc

SEQ ID NO: 1445321 - DNA, 25 bp, Homo sapien
cataagggcttcaaaagtatgtgcc

SEQ ID NO: 1445322 - DNA, 25 bp, Homo sapien
cagctggctcgaggtcacatcctga

SEQ ID NO: 1445323 - DNA, 25 bp, Homo sapien
cagagtgctgcttcccctaaggtag

SEQ ID NO: 1445324 - DNA, 25 bp, Homo sapien
cagggccccaggttaatagttgact

SEQ ID NO: 1445325 - DNA, 25 bp, Homo sapien
tttaggtcacaaagagccagtcagg

SEQ ID NO: 1445326 - DNA, 25 bp, Homo sapien
tctgatctcagaaaagggcaacccc

SEQ ID NO: 1445327 - DNA, 25 bp, Homo sapien
catctccgggaaagaatcagtcctg

SEQ ID NO: 1445328 - DNA, 25 bp, Homo sapien
gagaaaggacctgatccagaggaca

SEQ ID NO: 1445329 - DNA, 25 bp, Homo sapien
cagcacacatcagggagagttaatc

SEQ ID NO: 1445330 - DNA, 25 bp, Homo sapien
gaagcggctcttaatggagaggcct

SEQ ID NO: 1445331 - DNA, 25 bp, Homo sapien
ccccaggtgcctcatgggtggatag

SEQ ID NO: 1445332 - DNA, 25 bp, Homo sapien
caccctgccagggtgaggtcttcag

SEQ ID NO: 1445333 - DNA, 25 bp, Homo sapien
tgtgatgcctgtggacactgtacac

SEQ ID NO: 1445334 - DNA, 25 bp, Homo sapien
gggtggatagaagcccaccctgcca

SEQ ID NO: 1445335 - DNA, 25 bp, Homo sapien
gcaggagctcagagcgcagcacagc

SEQ ID NO: 1445336 - DNA, 25 bp, Homo sapien
agagaggtgagtgagctgggttgga

SEQ ID NO: 1445337 - DNA, 25 bp, Homo sapien
gaggtgagtgagctgggttggagaa

SEQ ID NO: 1445338 - DNA, 25 bp, Homo sapien
gctcagagcgcagcacagcaagctg

SEQ ID NO: 1445339 - DNA, 25 bp, Homo sapien
catgcccaagtatcatggtgctgga

SEQ ID NO: 1445340 - DNA, 25 bp, Homo sapien
cccaggagagccgactcaaatcagt

SEQ ID NO: 1445341 - DNA, 25 bp, Homo sapien
gtgccttagtccgtgcatccgtgca

SEQ ID NO: 1445342 - DNA, 25 bp, Homo sapien
tgcatcccaggtgatgtagacgctg

SEQ ID NO: 1445343 - DNA, 25 bp, Homo sapien
tgaggtcggagacttggcggcatca

SEQ ID NO: 1445344 - DNA, 25 bp, Homo sapien
cagacatggcctccacgttcttcct

SEQ ID NO: 1445345 - DNA, 25 bp, Homo sapien
attgtgaggtcggagacttggcggc

SEQ ID NO: 1445346 - DNA, 25 bp, Homo sapien
ggtcggagacttggcggcatcaaac

SEQ ID NO: 1445347 - DNA, 25 bp, Homo sapien
ttcacagacttgaggttggcccgca

SEQ ID NO: 1445348 - DNA, 25 bp, Homo sapien
cgggcgcttgaacttcccacggagg

SEQ ID NO: 1445349 - DNA, 25 bp, Homo sapien
ccggagcatggcgtcagccgagaca

SEQ ID NO: 1445350 - DNA, 25 bp, Homo sapien
agccgagacacggactcgacgcagg

SEQ ID NO: 1445351 - DNA, 25 bp, Homo sapien
tcaatgtcgtatcgctcctcatcca

SEQ ID NO: 1445352 - DNA, 25 bp, Homo sapien
ggcctcaatgtcgtatcgctcctca

SEQ ID NO: 1445353 - DNA, 25 bp, Homo sapien
gaggcatttggcctcaatgtcgtat

SEQ ID NO: 1445354 - DNA, 25 bp, Homo sapien
catttggcctcaatgtcgtatcgct

SEQ ID NO: 1445355 - DNA, 25 bp, Homo sapien
gagggacaggccacgggtctgcagc

SEQ ID NO: 1445356 - DNA, 25 bp, Homo sapien
caggtagcgcaccttctcagcctcg

SEQ ID NO: 1445357 - DNA, 25 bp, Homo sapien
cagcgtggggatgcgctctgccagg

SEQ ID NO: 1445358 - DNA, 25 bp, Homo sapien
gacaggccacgggtctgcagcgtgg

SEQ ID NO: 1445359 - DNA, 25 bp, Homo sapien
cttcagcaagagtttgcgggaggca

SEQ ID NO: 1445360 - DNA, 25 bp, Homo sapien
cgggaggcagtgatcttgggttttc

SEQ ID NO: 1445361 - DNA, 25 bp, Homo sapien
tttgcgggaggcagtgatcttgggt

SEQ ID NO: 1445362 - DNA, 25 bp, Homo sapien
aagagtttgcgggaggcagtgatct

SEQ ID NO: 1445363 - DNA, 25 bp, Homo sapien
cctgggagtcctgcgcgtcaggcac

SEQ ID NO: 1445364 - DNA, 25 bp, Homo sapien
ggcaaagggagctaacagcgtcgct

SEQ ID NO: 1445365 - DNA, 25 bp, Homo sapien
gcaagatggtttccttggccagcag

SEQ ID NO: 1445366 - DNA, 25 bp, Homo sapien
cactacagagggataggcaaaggga

SEQ ID NO: 1445367 - DNA, 25 bp, Homo sapien
ctggcctgtgcctcgccgtagactg

SEQ ID NO: 1445368 - DNA, 25 bp, Homo sapien
tggcctgtgcctcgccgtagactgc

SEQ ID NO: 1445369 - DNA, 25 bp, Homo sapien
cctgtgcctcgccgtagactgcaga

SEQ ID NO: 1445370 - DNA, 25 bp, Homo sapien
ggcctgtgcctcgccgtagactgca

SEQ ID NO: 1445371 - DNA, 25 bp, Homo sapien
ccatgtgcccgtgaggaaatcgagg

SEQ ID NO: 1445372 - DNA, 25 bp, Homo sapien
agagcaggaagaccgtccagtccaa

SEQ ID NO: 1445373 - DNA, 25 bp, Homo sapien
attgcaggacgccagagcaggaaga

SEQ ID NO: 1445374 - DNA, 25 bp, Homo sapien
tctgatcttgccgagagcattgcag

SEQ ID NO: 1445375 - DNA, 25 bp, Homo sapien
tggctcagcaataacccagggtccc

SEQ ID NO: 1445376 - DNA, 25 bp, Homo sapien
ctatacccacgaggaaacagactca

SEQ ID NO: 1445377 - DNA, 25 bp, Homo sapien
cacagcaaggatgacgcagagctga

SEQ ID NO: 1445378 - DNA, 25 bp, Homo sapien
cctactatacccacgaggaaacaga

SEQ ID NO: 1445379 - DNA, 25 bp, Homo sapien
catggcaaaatcacggcagtcatgg

SEQ ID NO: 1445380 - DNA, 25 bp, Homo sapien
gaggacctcccttgaagaaccactg

SEQ ID NO: 1445381 - DNA, 25 bp, Homo sapien
caatgcagctaaggtcagacacact

SEQ ID NO: 1445382 - DNA, 25 bp, Homo sapien
tcccaaaggcggtggcaatgcagct

SEQ ID NO: 1445383 - DNA, 25 bp, Homo sapien
cttctttgccagaggaacgcactta

SEQ ID NO: 1445384 - DNA, 25 bp, Homo sapien
cacttagtgccagggctaagagagg

SEQ ID NO: 1445385 - DNA, 25 bp, Homo sapien
tcttcccatgcagcagatggcgagg

SEQ ID NO: 1445386 - DNA, 25 bp, Homo sapien
ggaacgcacttagtgccagggctaa

SEQ ID NO: 1445387 - DNA, 25 bp, Homo sapien
gacataggtgatgaactgctcgccc

SEQ ID NO: 1445388 - DNA, 25 bp, Homo sapien
gacacacatagaaacaacagctggg

SEQ ID NO: 1445389 - DNA, 25 bp, Homo sapien
ctccaacaatgtgctcggacacaca

SEQ ID NO: 1445390 - DNA, 25 bp, Homo sapien
aggtcaccctgaactatgaccaccc

SEQ ID NO: 1445391 - DNA, 25 bp, Homo sapien
tggctgcttcctcctcccgctccat

SEQ ID NO: 1445392 - DNA, 25 bp, Homo sapien
ctccctggctgcttcctcctcccgc

SEQ ID NO: 1445393 - DNA, 25 bp, Homo sapien
ccctggctgcttcctcctcccgctc

SEQ ID NO: 1445394 - DNA, 25 bp, Homo sapien
ctggctgcttcctcctcccgctcca

SEQ ID NO: 1445395 - DNA, 25 bp, Homo sapien
gtgccatctcgcctctcataatctt

SEQ ID NO: 1445396 - DNA, 25 bp, Homo sapien
tgtgttgtgccatctcgcctctcat

SEQ ID NO: 1445397 - DNA, 25 bp, Homo sapien
gagctggggtcagacgagtcatcct

SEQ ID NO: 1445398 - DNA, 25 bp, Homo sapien
atctcgcctctcataatctttctct

SEQ ID NO: 1445399 - DNA, 25 bp, Homo sapien
ccagggaggggttcgcagttctgga

SEQ ID NO: 1445400 - DNA, 25 bp, Homo sapien
cccagggaggggttcgcagttctgg

SEQ ID NO: 1445401 - DNA, 25 bp, Homo sapien
gactcccgtcatgcagccagggcct

SEQ ID NO: 1445402 - DNA, 25 bp, Homo sapien
gagcctcgggatccaggagaaagca

SEQ ID NO: 1445403 - DNA, 25 bp, Homo sapien
ggccagactcccgtcatgcagccag

SEQ ID NO: 1445404 - DNA, 25 bp, Homo sapien
cgtggggctaccaagcctgtgttgg

SEQ ID NO: 1445405 - DNA, 25 bp, Homo sapien
tcttcccggctccactcatctgaag

SEQ ID NO: 1445406 - DNA, 25 bp, Homo sapien
ccactcatctgaagtgtcccaggag

SEQ ID NO: 1445407 - DNA, 25 bp, Homo sapien
gatttcttcccggctccactcatct

SEQ ID NO: 1445408 - DNA, 25 bp, Homo sapien
tttcttcccggctccactcatctga

SEQ ID NO: 1445409 - DNA, 25 bp, Homo sapien
gttcctcaggttctgtgcacaccat

SEQ ID NO: 1445410 - DNA, 25 bp, Homo sapien
attgcctacggaaagaagcccacac

SEQ ID NO: 1445411 - DNA, 25 bp, Homo sapien
ttgttcctcaggttctgtgcacacc

SEQ ID NO: 1445412 - DNA, 25 bp, Homo sapien
ccattgcctacggaaagaagcccac

SEQ ID NO: 1445413 - DNA, 25 bp, Homo sapien
ggccacgctggggctgccgaagcat

SEQ ID NO: 1445414 - DNA, 25 bp, Homo sapien
ggtgaggccacgctggggctgccga

SEQ ID NO: 1445415 - DNA, 25 bp, Homo sapien
ggtgggggtgaggccacgctggggc

SEQ ID NO: 1445416 - DNA, 25 bp, Homo sapien
tgggggtgaggccacgctggggctg

SEQ ID NO: 1445417 - DNA, 25 bp, Homo sapien
cgcgccccgcccaaagattctattt

SEQ ID NO: 1445418 - DNA, 25 bp, Homo sapien
gttatataggatggcaaccctcttc

SEQ ID NO: 1445419 - DNA, 25 bp, Homo sapien
ctgctgttatataggatggcaaccc

SEQ ID NO: 1445420 - DNA, 25 bp, Homo sapien
ttagaggctatttagaagctgctgt

SEQ ID NO: 1445421 - DNA, 25 bp, Homo sapien
tgattagggttgcataaacagacgc

SEQ ID NO: 1445422 - DNA, 25 bp, Homo sapien
gattaagccacccatggacaattgt

SEQ ID NO: 1445423 - DNA, 25 bp, Homo sapien
cacacatcagatgagcaagttgaac

SEQ ID NO: 1445424 - DNA, 25 bp, Homo sapien
tatttgccatggtgggattaagcca

SEQ ID NO: 1445425 - DNA, 25 bp, Homo sapien
gaccctgtagtaggccactgctttg

SEQ ID NO: 1445426 - DNA, 25 bp, Homo sapien
cactgctttgcaacagggaaggtca

SEQ ID NO: 1445427 - DNA, 25 bp, Homo sapien
caagtttctgtacaactccaggcag

SEQ ID NO: 1445428 - DNA, 25 bp, Homo sapien
gctggccacagcctggaaaggtcca

SEQ ID NO: 1445429 - DNA, 25 bp, Homo sapien
ctggggctataggtgtgtgccacct

SEQ ID NO: 1445430 - DNA, 25 bp, Homo sapien
ggctataggtgtgtgccacctcacc

SEQ ID NO: 1445431 - DNA, 25 bp, Homo sapien
ccagtagctggggctataggtgtgt

SEQ ID NO: 1445432 - DNA, 25 bp, Homo sapien
cagtagctggggctataggtgtgtg

SEQ ID NO: 1445433 - DNA, 25 bp, Homo sapien
tactgtgtaaatgtataaagcctga

SEQ ID NO: 1445434 - DNA, 25 bp, Homo sapien
ccaggagggagaacttactgtgtaa

SEQ ID NO: 1445435 - DNA, 25 bp, Homo sapien
ccttcaccctgttgaaattattcct

SEQ ID NO: 1445436 - DNA, 25 bp, Homo sapien
ttactgtgtaaatgtataaagcctg

SEQ ID NO: 1445437 - DNA, 25 bp, Homo sapien
tcatgccatatgaggccaggcctgt

SEQ ID NO: 1445438 - DNA, 25 bp, Homo sapien
cccaaaaggacctaagcagcaggag

SEQ ID NO: 1445439 - DNA, 25 bp, Homo sapien
tactccttttggtaccaggctggcc

SEQ ID NO: 1445440 - DNA, 25 bp, Homo sapien
ccaggagtgggctttaggcccagca

SEQ ID NO: 1445441 - DNA, 25 bp, Homo sapien
aaggaaagatggtgcgcccggtggt

SEQ ID NO: 1445442 - DNA, 25 bp, Homo sapien
tgaggtggtgggtagcatgaaggaa

SEQ ID NO: 1445443 - DNA, 25 bp, Homo sapien
tgaaggaaagatggtgcgcccggtg

SEQ ID NO: 1445444 - DNA, 25 bp, Homo sapien
gaggtggtgggtagcatgaaggaaa

SEQ ID NO: 1445445 - DNA, 25 bp, Homo sapien
tcccggtcccgaggctctgccgggc

SEQ ID NO: 1445446 - DNA, 25 bp, Homo sapien
gagggtcccggtcccgaggctctgc

SEQ ID NO: 1445447 - DNA, 25 bp, Homo sapien
cgagggtcccggtcccgaggctctg

SEQ ID NO: 1445448 - DNA, 25 bp, Homo sapien
tcccgaggctctgccgggcccgcac

SEQ ID NO: 1445449 - DNA, 25 bp, Homo sapien
tctgggcgttccagccgggatcttc

SEQ ID NO: 1445450 - DNA, 25 bp, Homo sapien
ccttcggtcaccagcgtgaagtaga

SEQ ID NO: 1445451 - DNA, 25 bp, Homo sapien
ccacggccttgatgcgggcgaagct

SEQ ID NO: 1445452 - DNA, 25 bp, Homo sapien
ttcttgaacttgaccaggcctaggg

SEQ ID NO: 1445453 - DNA, 25 bp, Homo sapien
gccccgaggttcgcggaaagctcca

SEQ ID NO: 1445454 - DNA, 25 bp, Homo sapien
cccgaggttcgcggaaagctccagg

SEQ ID NO: 1445455 - DNA, 25 bp, Homo sapien
ccccgaggttcgcggaaagctccag

SEQ ID NO: 1445456 - DNA, 25 bp, Homo sapien
ccgcagcgcaggattctggcgcccc

SEQ ID NO: 1445457 - DNA, 25 bp, Homo sapien
ggccccgcagcgcaggattctggcg

SEQ ID NO: 1445458 - DNA, 25 bp, Homo sapien
ccccgcagcgcaggattctggcgcc

SEQ ID NO: 1445459 - DNA, 25 bp, Homo sapien
gccccgcagcgcaggattctggcgc

SEQ ID NO: 1445460 - DNA, 25 bp, Homo sapien
gatgtgcccttacatgttccgccgc

SEQ ID NO: 1445461 - DNA, 25 bp, Homo sapien
tgggctctgtctgcgcgctgggcgg

SEQ ID NO: 1445462 - DNA, 25 bp, Homo sapien
agcgggggctcagtcactcactgga

SEQ ID NO: 1445463 - DNA, 25 bp, Homo sapien
gccggtgaggtggtgtcggtgcccc

SEQ ID NO: 1445464 - DNA, 25 bp, Homo sapien
cgtctgccgcttctcggaaccgcag

SEQ ID NO: 1445465 - DNA, 25 bp, Homo sapien
cccaggccttgaatgaagggggaga

SEQ ID NO: 1445466 - DNA, 25 bp, Homo sapien
ggctgccgtctgccgcttctcggaa

SEQ ID NO: 1445467 - DNA, 25 bp, Homo sapien
tcaacagcccaagccttctggctgc

SEQ ID NO: 1445468 - DNA, 25 bp, Homo sapien
taatcactttccagcccaataactt

SEQ ID NO: 1445469 - DNA, 25 bp, Homo sapien
cctttaatcactttccagcccaata

SEQ ID NO: 1445470 - DNA, 25 bp, Homo sapien
tccctttcgtcttgagagcacctac

SEQ ID NO: 1445471 - DNA, 25 bp, Homo sapien
tttcctgattcaccaagaatccctt

SEQ ID NO: 1445472 - DNA, 25 bp, Homo sapien
ggctccagatagtgttgtcctttca

SEQ ID NO: 1445473 - DNA, 25 bp, Homo sapien
tggagtgatgtgatctaagggtccc

SEQ ID NO: 1445474 - DNA, 25 bp, Homo sapien
tgcagccctttcagtgggtggctcc

SEQ ID NO: 1445475 - DNA, 25 bp, Homo sapien
tcctttcagttgctgggagcggtga

SEQ ID NO: 1445476 - DNA, 25 bp, Homo sapien
taaatgccaatatatgtttcaggta

SEQ ID NO: 1445477 - DNA, 25 bp, Homo sapien
aagatttgagccattgataaatgcc

SEQ ID NO: 1445478 - DNA, 25 bp, Homo sapien
gatttgagccattgataaatgccaa

SEQ ID NO: 1445479 - DNA, 25 bp, Homo sapien
gccaatatatgtttcaggtatttca

SEQ ID NO: 1445480 - DNA, 25 bp, Homo sapien
aaaccaaagggagccagatgcccaa

SEQ ID NO: 1445481 - DNA, 25 bp, Homo sapien
gggaggctatccattccacaaagac

SEQ ID NO: 1445482 - DNA, 25 bp, Homo sapien
cacaggaggctaagaacagagctct

SEQ ID NO: 1445483 - DNA, 25 bp, Homo sapien
ctctgggtgccaagatgtgtcctca

SEQ ID NO: 1445484 - DNA, 25 bp, Homo sapien
cagctccttgcccaaaaccaaagcc

SEQ ID NO: 1445485 - DNA, 25 bp, Homo sapien
ccagctccttgcccaaaaccaaagc

SEQ ID NO: 1445486 - DNA, 25 bp, Homo sapien
cattggactgggagttaggaagcca

SEQ ID NO: 1445487 - DNA, 25 bp, Homo sapien
gaggctcttggttgtaccctgtacc

SEQ ID NO: 1445488 - DNA, 25 bp, Homo sapien
gatgttcagatcttggatcccaagg

SEQ ID NO: 1445489 - DNA, 25 bp, Homo sapien
tagtaaaatagcgaagaggctcttg

SEQ ID NO: 1445490 - DNA, 25 bp, Homo sapien
ggcctcctgaccctcaattagaagt

SEQ ID NO: 1445491 - DNA, 25 bp, Homo sapien
tcctgaccctcaattagaagtgaaa

SEQ ID NO: 1445492 - DNA, 25 bp, Homo sapien
cctcctgaccctcaattagaagtga

SEQ ID NO: 1445493 - DNA, 25 bp, Homo sapien
cctcaattagaagtgaaaacaccca

SEQ ID NO: 1445494 - DNA, 25 bp, Homo sapien
gtaaatctcgccatccttgtctgcc

SEQ ID NO: 1445495 - DNA, 25 bp, Homo sapien
tctgccagggtggttgactcaaggc

SEQ ID NO: 1445496 - DNA, 25 bp, Homo sapien
cacatcgaaagcaggccttatgcca

SEQ ID NO: 1445497 - DNA, 25 bp, Homo sapien
tttgcagtaaatctcgccatccttg

SEQ ID NO: 1445498 - DNA, 25 bp, Homo sapien
taatctgacactgcaaaccccaggg

SEQ ID NO: 1445499 - DNA, 25 bp, Homo sapien
cacagtgatgggacgttgcacagac

SEQ ID NO: 1445500 - DNA, 25 bp, Homo sapien
taaccatggtataagggctcaagcc

SEQ ID NO: 1445501 - DNA, 25 bp, Homo sapien
tagacagctctgcttaacccaggaa

SEQ ID NO: 1445502 - DNA, 25 bp, Homo sapien
tcggagccaccaatcttctgggcaa

SEQ ID NO: 1445503 - DNA, 25 bp, Homo sapien
gcatagactgcctggctgcatcggg

SEQ ID NO: 1445504 - DNA, 25 bp, Homo sapien
cttctccgcagcatagactgcctgg

SEQ ID NO: 1445505 - DNA, 25 bp, Homo sapien
agcaccaatcaccttctccgcagca

SEQ ID NO: 1445506 - DNA, 25 bp, Homo sapien
ggtggtgggcctgtggccaggggct

SEQ ID NO: 1445507 - DNA, 25 bp, Homo sapien
ggtcacccagttaaccccagaatca

SEQ ID NO: 1445508 - DNA, 25 bp, Homo sapien
gatggacaaaccaagcctcagcaca

SEQ ID NO: 1445509 - DNA, 25 bp, Homo sapien
atctcatgccagagcagcgcgcaat

SEQ ID NO: 1445510 - DNA, 25 bp, Homo sapien
ccaaagtcacaaaggctagggcctc

SEQ ID NO: 1445511 - DNA, 25 bp, Homo sapien
tagaatgcacgctccttgcagggag

SEQ ID NO: 1445512 - DNA, 25 bp, Homo sapien
cattgcttacccaaaaatggttgta

SEQ ID NO: 1445513 - DNA, 25 bp, Homo sapien
gcctgacacatagacactgctctgt

SEQ ID NO: 1445514 - DNA, 25 bp, Homo sapien
gaaattggactaagtgattcttggg

SEQ ID NO: 1445515 - DNA, 25 bp, Homo sapien
ccagcgactcccccttgtcagtgct

SEQ ID NO: 1445516 - DNA, 25 bp, Homo sapien
acccagcgactcccccttgtcagtg

SEQ ID NO: 1445517 - DNA, 25 bp, Homo sapien
tcctcgtgcttgatacccagcgact

SEQ ID NO: 1445518 - DNA, 25 bp, Homo sapien
atacccagcgactcccccttgtcag

SEQ ID NO: 1445519 - DNA, 25 bp, Homo sapien
tgcccgtagccatagcctttgggcc

SEQ ID NO: 1445520 - DNA, 25 bp, Homo sapien
agccatagcctttgggcccatactt

SEQ ID NO: 1445521 - DNA, 25 bp, Homo sapien
cctgcccgtagccatagcctttggg

SEQ ID NO: 1445522 - DNA, 25 bp, Homo sapien
cgtagccatagcctttgggcccata

SEQ ID NO: 1445523 - DNA, 25 bp, Homo sapien
ccatgcacggccacagtggtactgt

SEQ ID NO: 1445524 - DNA, 25 bp, Homo sapien
accatgcacggccacagtggtactg

SEQ ID NO: 1445525 - DNA, 25 bp, Homo sapien
caccatgcacggccacagtggtact

SEQ ID NO: 1445526 - DNA, 25 bp, Homo sapien
cacagtggtactgtccagattcttc

SEQ ID NO: 1445527 - DNA, 25 bp, Homo sapien
taatatcctgatctttcaggaactg

SEQ ID NO: 1445528 - DNA, 25 bp, Homo sapien
gaagcggacgcattgagttgaagct

SEQ ID NO: 1445529 - DNA, 25 bp, Homo sapien
ctctggcctctttgcatacataata

SEQ ID NO: 1445530 - DNA, 25 bp, Homo sapien
tcttacagctgaagctctctggcct

SEQ ID NO: 1445531 - DNA, 25 bp, Homo sapien
tgtcctgaacatagaaaccgaggga

SEQ ID NO: 1445532 - DNA, 25 bp, Homo sapien
gcatctcagttggacgcatcctcaa

SEQ ID NO: 1445533 - DNA, 25 bp, Homo sapien
aaccgagggataccactggagaagc

SEQ ID NO: 1445534 - DNA, 25 bp, Homo sapien
tataaagttagtaccatcgggagac

SEQ ID NO: 1445535 - DNA, 25 bp, Homo sapien
tgggcccttgtgatactgcttggaa

SEQ ID NO: 1445536 - DNA, 25 bp, Homo sapien
gagagactctgcaactcaccaaagt

SEQ ID NO: 1445537 - DNA, 25 bp, Homo sapien
tccagatcacgtgttggccagatgc

SEQ ID NO: 1445538 - DNA, 25 bp, Homo sapien
tgatctctccagtaggagacccagg

SEQ ID NO: 1445539 - DNA, 25 bp, Homo sapien
gattcagcttcaccatgaggttgtg

SEQ ID NO: 1445540 - DNA, 25 bp, Homo sapien
aagctgtttacatcccatgggatca

SEQ ID NO: 1445541 - DNA, 25 bp, Homo sapien
ttctgaacggaacaaagaggccctg

SEQ ID NO: 1445542 - DNA, 25 bp, Homo sapien
tggccagttcatcccttagaaagaa

SEQ ID NO: 1445543 - DNA, 25 bp, Homo sapien
gaagctgttgccttcgcactgaacc

SEQ ID NO: 1445544 - DNA, 25 bp, Homo sapien
caaagtaaaccgtcttctgacacac

SEQ ID NO: 1445545 - DNA, 25 bp, Homo sapien
cttcggcaaagtaaaccgtcttctg

SEQ ID NO: 1445546 - DNA, 25 bp, Homo sapien
gcactgaacctcttcggcaaagtaa

SEQ ID NO: 1445547 - DNA, 25 bp, Homo sapien
aggagggctggcatcccttccaatc

SEQ ID NO: 1445548 - DNA, 25 bp, Homo sapien
ttccaatctgcagctcggcttttgc

SEQ ID NO: 1445549 - DNA, 25 bp, Homo sapien
caatctgcagctcggcttttgcctc

SEQ ID NO: 1445550 - DNA, 25 bp, Homo sapien
gacaggagggctggcatcccttcca

SEQ ID NO: 1445551 - DNA, 25 bp, Homo sapien
aacagactgaaaacccggaggtcag

SEQ ID NO: 1445552 - DNA, 25 bp, Homo sapien
ccctgatccatccaagtgaaagata

SEQ ID NO: 1445553 - DNA, 25 bp, Homo sapien
gagttctaaccctgatccatccaag

SEQ ID NO: 1445554 - DNA, 25 bp, Homo sapien
ggtcaggagttctaaccctgatcca

SEQ ID NO: 1445555 - DNA, 25 bp, Homo sapien
aaatggcagatatttccttagtgag

SEQ ID NO: 1445556 - DNA, 25 bp, Homo sapien
acaaatggcagatatttccttagtg

SEQ ID NO: 1445557 - DNA, 25 bp, Homo sapien
tgatgtgtttcacaaatggcagata

SEQ ID NO: 1445558 - DNA, 25 bp, Homo sapien
cttgtaaagctgatgtgtttcacaa

SEQ ID NO: 1445559 - DNA, 25 bp, Homo sapien
gaaacctgcgcgttaagtggcaaat

SEQ ID NO: 1445560 - DNA, 25 bp, Homo sapien
ggtttatgagtatcccgtaggccaa

SEQ ID NO: 1445561 - DNA, 25 bp, Homo sapien
ggttctgtgtaatatgctccccaag

SEQ ID NO: 1445562 - DNA, 25 bp, Homo sapien
caattgcagagttgatgggccttct

SEQ ID NO: 1445563 - DNA, 25 bp, Homo sapien
gaatcgccgattgttctgcccgact

SEQ ID NO: 1445564 - DNA, 25 bp, Homo sapien
ggtggcacggatgccctcatctctc

SEQ ID NO: 1445565 - DNA, 25 bp, Homo sapien
ggacacagatgtccaaggtcaggcc

SEQ ID NO: 1445566 - DNA, 25 bp, Homo sapien
catacaatgagcgtcagtggcgcgc

SEQ ID NO: 1445567 - DNA, 25 bp, Homo sapien
ggcctgcgcgccgttttgttccgct

SEQ ID NO: 1445568 - DNA, 25 bp, Homo sapien
caggcgctctcggaagtggcggctg

SEQ ID NO: 1445569 - DNA, 25 bp, Homo sapien
tgttccgctccgcggaaggcgtgtc

SEQ ID NO: 1445570 - DNA, 25 bp, Homo sapien
ccagggctgatgtcatggcgcgaag

SEQ ID NO: 1445571 - DNA, 25 bp, Homo sapien
gctcgtgctgcggtcccactgtgcg

SEQ ID NO: 1445572 - DNA, 25 bp, Homo sapien
cggaaaacgtcttgcacgtgcgagg

SEQ ID NO: 1445573 - DNA, 25 bp, Homo sapien
accgcggaaaacgtcttgcacgtgc

SEQ ID NO: 1445574 - DNA, 25 bp, Homo sapien
gccaccgcggaaaacgtcttgcacg

SEQ ID NO: 1445575 - DNA, 25 bp, Homo sapien
caacacttctgggttggtatttgat

SEQ ID NO: 1445576 - DNA, 25 bp, Homo sapien
cccaacacttctgggttggtatttg

SEQ ID NO: 1445577 - DNA, 25 bp, Homo sapien
acttctgggttggtatttgatggct

SEQ ID NO: 1445578 - DNA, 25 bp, Homo sapien
acacttctgggttggtatttgatgg

SEQ ID NO: 1445579 - DNA, 25 bp, Homo sapien
caggcggcagggagctcccgggcag

SEQ ID NO: 1445580 - DNA, 25 bp, Homo sapien
gcgggagcaggcggcagggagctcc

SEQ ID NO: 1445581 - DNA, 25 bp, Homo sapien
gagcaggcggcagggagctcccggg

SEQ ID NO: 1445582 - DNA, 25 bp, Homo sapien
cggcagggagctcccgggcagctgg

SEQ ID NO: 1445583 - DNA, 25 bp, Homo sapien
agttccaatcacgccagctcctaat

SEQ ID NO: 1445584 - DNA, 25 bp, Homo sapien
tctgacaggcccagttccaatcacg

SEQ ID NO: 1445585 - DNA, 25 bp, Homo sapien
atcacgccagctcctaatctactga

SEQ ID NO: 1445586 - DNA, 25 bp, Homo sapien
ttctgacaggcccagttccaatcac

SEQ ID NO: 1445587 - DNA, 25 bp, Homo sapien
ccagacagattgcaaggtttttcca

SEQ ID NO: 1445588 - DNA, 25 bp, Homo sapien
tcttagtctcgtcaaaggcactcca

SEQ ID NO: 1445589 - DNA, 25 bp, Homo sapien
tgtttcttctggcacggcactgtca

SEQ ID NO: 1445590 - DNA, 25 bp, Homo sapien
cgagcaccgttccattgaggcgtta

SEQ ID NO: 1445591 - DNA, 25 bp, Homo sapien
gaactagtacatgatcaagctctcc

SEQ ID NO: 1445592 - DNA, 25 bp, Homo sapien
aaaacttggttctggtcatggctgc

SEQ ID NO: 1445593 - DNA, 25 bp, Homo sapien
ataacaaccgtatgaggcaggcact

SEQ ID NO: 1445594 - DNA, 25 bp, Homo sapien
actgctatggagactatcaagactc

SEQ ID NO: 1445595 - DNA, 25 bp, Homo sapien
gattgggataccattggctcgttca

SEQ ID NO: 1445596 - DNA, 25 bp, Homo sapien
ttaggatagtcacagggcgcagctg

SEQ ID NO: 1445597 - DNA, 25 bp, Homo sapien
gcttaagggaagagctggatccccc

SEQ ID NO: 1445598 - DNA, 25 bp, Homo sapien
tgataacatgctgtttatctggctt

SEQ ID NO: 1445599 - DNA, 25 bp, Homo sapien
cagttcattggtgcagataattgag

SEQ ID NO: 1445600 - DNA, 25 bp, Homo sapien
ctgggttctgggtaatgccaagata

SEQ ID NO: 1445601 - DNA, 25 bp, Homo sapien
gcctttttcccagttcattggtgca

SEQ ID NO: 1445602 - DNA, 25 bp, Homo sapien
caagataccaactgctctcttcctg

SEQ ID NO: 1445603 - DNA, 25 bp, Homo sapien
ccagaaagaaatcaggggccgtagg

SEQ ID NO: 1445604 - DNA, 25 bp, Homo sapien
gccagaaagaaatcaggggccgtag

SEQ ID NO: 1445605 - DNA, 25 bp, Homo sapien
ggccagaaagaaatcaggggccgta

SEQ ID NO: 1445606 - DNA, 25 bp, Homo sapien
cagaaagaaatcaggggccgtaggg

SEQ ID NO: 1445607 - DNA, 25 bp, Homo sapien
tccttagagttacgactgggagcag

SEQ ID NO: 1445608 - DNA, 25 bp, Homo sapien
actggagactcgcacataaaccacc

SEQ ID NO: 1445609 - DNA, 25 bp, Homo sapien
ggtgagaagctttgtccgagatgat

SEQ ID NO: 1445610 - DNA, 25 bp, Homo sapien
tccattgaagcactgatcgctgaag

SEQ ID NO: 1445611 - DNA, 25 bp, Homo sapien
ccatccacttctctttggacagaac

SEQ ID NO: 1445612 - DNA, 25 bp, Homo sapien
tgtccatccacttctctttggacag

SEQ ID NO: 1445613 - DNA, 25 bp, Homo sapien
ttaagaacagtgcagtgtccatcca

SEQ ID NO: 1445614 - DNA, 25 bp, Homo sapien
taagaacagtgcagtgtccatccac

SEQ ID NO: 1445615 - DNA, 25 bp, Homo sapien
cgtgccatccgccaataggtgctta

SEQ ID NO: 1445616 - DNA, 25 bp, Homo sapien
tctgcatggccttgcatcttcctgt

SEQ ID NO: 1445617 - DNA, 25 bp, Homo sapien
taataaaggcggtgtagagggattc

SEQ ID NO: 1445618 - DNA, 25 bp, Homo sapien
aggaggaagaatctggttcggcctt

SEQ ID NO: 1445619 - DNA, 25 bp, Homo sapien
gggtctctgttccaatccagtgtgg

SEQ ID NO: 1445620 - DNA, 25 bp, Homo sapien
cctggggtctctgttccaatccagt

SEQ ID NO: 1445621 - DNA, 25 bp, Homo sapien
ccaatccagtgtggccagggtctac

SEQ ID NO: 1445622 - DNA, 25 bp, Homo sapien
ctctgttccaatccagtgtggccag

SEQ ID NO: 1445623 - DNA, 25 bp, Homo sapien
gactgtctctccaacagcacagaca

SEQ ID NO: 1445624 - DNA, 25 bp, Homo sapien
gaggaaggtggagactgtctctcca

SEQ ID NO: 1445625 - DNA, 25 bp, Homo sapien
ctgccgctgctttgtggaggaaggt

SEQ ID NO: 1445626 - DNA, 25 bp, Homo sapien
tgccgctgctttgtggaggaaggtg

SEQ ID NO: 1445627 - DNA, 25 bp, Homo sapien
taagaagaggcactatagtcatccg

SEQ ID NO: 1445628 - DNA, 25 bp, Homo sapien
tcttgtgtgccctgattaggctgac

SEQ ID NO: 1445629 - DNA, 25 bp, Homo sapien
gggtgagcgcttctctggcctcttg

SEQ ID NO: 1445630 - DNA, 25 bp, Homo sapien
tagtcatccggggtgagcgcttctc

SEQ ID NO: 1445631 - DNA, 25 bp, Homo sapien
acctaatgtcaaaaatgaacatgag

SEQ ID NO: 1445632 - DNA, 25 bp, Homo sapien
aaatacctaatgtcaaaaatgaaca

SEQ ID NO: 1445633 - DNA, 25 bp, Homo sapien
cagtctgttggaggaaatgttcagg

SEQ ID NO: 1445634 - DNA, 25 bp, Homo sapien
gctgcccccagtctgttggaggaaa

SEQ ID NO: 1445635 - DNA, 25 bp, Homo sapien
ccttaaaggctttctgagcagtcat

SEQ ID NO: 1445636 - DNA, 25 bp, Homo sapien
cattatctgtagactctgctaaggg

SEQ ID NO: 1445637 - DNA, 25 bp, Homo sapien
ctcccattatctgtagactctgcta

SEQ ID NO: 1445638 - DNA, 25 bp, Homo sapien
tcccatctgcaattaagacaaaaag

SEQ ID NO: 1445639 - DNA, 25 bp, Homo sapien
aaaaagctcgttatctctcccgctc

SEQ ID NO: 1445640 - DNA, 25 bp, Homo sapien
ctgaggatcgcagacagtgagatgt

SEQ ID NO: 1445641 - DNA, 25 bp, Homo sapien
ggatcgcagacagtgagatgtcttt

SEQ ID NO: 1445642 - DNA, 25 bp, Homo sapien
cagcttgtcgatgactgaggatcgc

SEQ ID NO: 1445643 - DNA, 25 bp, Homo sapien
ggtcctgttaaccagcttgtcgatg

SEQ ID NO: 1445644 - DNA, 25 bp, Homo sapien
ctttggctgcattcaactttcctgc

SEQ ID NO: 1445645 - DNA, 25 bp, Homo sapien
ggctgcattcaactttcctgcaatt

SEQ ID NO: 1445646 - DNA, 25 bp, Homo sapien
tggctgcattcaactttcctgcaat

SEQ ID NO: 1445647 - DNA, 25 bp, Homo sapien
tttggctgcattcaactttcctgca

SEQ ID NO: 1445648 - DNA, 25 bp, Homo sapien
gtttctgatcaatccgaggcaggga

SEQ ID NO: 1445649 - DNA, 25 bp, Homo sapien
caggtttctgatcaatccgaggcag

SEQ ID NO: 1445650 - DNA, 25 bp, Homo sapien
ccataccaggtttctgatcaatccg

SEQ ID NO: 1445651 - DNA, 25 bp, Homo sapien
tccaggccataccaggtttctgatc

SEQ ID NO: 1445652 - DNA, 25 bp, Homo sapien
cctgcaaccaaggtgcccttcttct

SEQ ID NO: 1445653 - DNA, 25 bp, Homo sapien
tcccctgcaaccaaggtgcccttct

SEQ ID NO: 1445654 - DNA, 25 bp, Homo sapien
tgtcccctgcaaccaaggtgccctt

SEQ ID NO: 1445655 - DNA, 25 bp, Homo sapien
tgcaaccaaggtgcccttcttctgc

SEQ ID NO: 1445656 - DNA, 25 bp, Homo sapien
cttccactgacccaccagagagaat

SEQ ID NO: 1445657 - DNA, 25 bp, Homo sapien
cactgacccaccagagagaatggtt

SEQ ID NO: 1445658 - DNA, 25 bp, Homo sapien
ttccactgacccaccagagagaatg

SEQ ID NO: 1445659 - DNA, 25 bp, Homo sapien
tccactgacccaccagagagaatgg

SEQ ID NO: 1445660 - DNA, 25 bp, Homo sapien
tcgttgcctagcaaccggcttccta

SEQ ID NO: 1445661 - DNA, 25 bp, Homo sapien
gttgcctagcaaccggcttcctacc

SEQ ID NO: 1445662 - DNA, 25 bp, Homo sapien
tccagcatctcgttgcctagcaacc

SEQ ID NO: 1445663 - DNA, 25 bp, Homo sapien
gcatctcgttgcctagcaaccggct

SEQ ID NO: 1445664 - DNA, 25 bp, Homo sapien
caggcagaacggaggcagttgctct

SEQ ID NO: 1445665 - DNA, 25 bp, Homo sapien
gtcagtgaggcaccgagtacaggca

SEQ ID NO: 1445666 - DNA, 25 bp, Homo sapien
aggtcagtgaggcaccgagtacagg

SEQ ID NO: 1445667 - DNA, 25 bp, Homo sapien
aggcagaacggaggcagttgctctc

SEQ ID NO: 1445668 - DNA, 25 bp, Homo sapien
tagaactctaagctctgatttgcat

SEQ ID NO: 1445669 - DNA, 25 bp, Homo sapien
caattgttggggtgtttggaactga

SEQ ID NO: 1445670 - DNA, 25 bp, Homo sapien
ctagatatttatacccttgtggctt

SEQ ID NO: 1445671 - DNA, 25 bp, Homo sapien
gatttgcattgcaggggagcatgcc

SEQ ID NO: 1445672 - DNA, 25 bp, Homo sapien
tctgtgtctgaatttggcaacttcc

SEQ ID NO: 1445673 - DNA, 25 bp, Homo sapien
catccaccagactgtcccattctgt

SEQ ID NO: 1445674 - DNA, 25 bp, Homo sapien
ctgccatccaccagactgtcccatt

SEQ ID NO: 1445675 - DNA, 25 bp, Homo sapien
gccatccaccagactgtcccattct

SEQ ID NO: 1445676 - DNA, 25 bp, Homo sapien
tgacaactaaatccccatggtactc

SEQ ID NO: 1445677 - DNA, 25 bp, Homo sapien
gaactcagaggttccgcaatttgcc

SEQ ID NO: 1445678 - DNA, 25 bp, Homo sapien
gggcatgaggagttctaccatcaaa

SEQ ID NO: 1445679 - DNA, 25 bp, Homo sapien
gagccacgctttggacccaggcatt

SEQ ID NO: 1445680 - DNA, 25 bp, Homo sapien
tcagcaggcatgtctaggccccagg

SEQ ID NO: 1445681 - DNA, 25 bp, Homo sapien
taaactgggtgcttgtagtcagcag

SEQ ID NO: 1445682 - DNA, 25 bp, Homo sapien
tctgctcagacagaatatgaggcag

SEQ ID NO: 1445683 - DNA, 25 bp, Homo sapien
gagaagacctgtgcaagaggcctta

SEQ ID NO: 1445684 - DNA, 25 bp, Homo sapien
gggcctcagcccaaatcctacttcc

SEQ ID NO: 1445685 - DNA, 25 bp, Homo sapien
gacctgaaattccagtcttcctcct

SEQ ID NO: 1445686 - DNA, 25 bp, Homo sapien
ctgctgccagagacctgaaattcca

SEQ ID NO: 1445687 - DNA, 25 bp, Homo sapien
ggtgtgccacttgccaccaactagg

SEQ ID NO: 1445688 - DNA, 25 bp, Homo sapien
ctcttaccaacactggatattttaa

SEQ ID NO: 1445689 - DNA, 25 bp, Homo sapien
gcctcatggccatatactcttacca

SEQ ID NO: 1445690 - DNA, 25 bp, Homo sapien
cagcctcatggccatatactcttac

SEQ ID NO: 1445691 - DNA, 25 bp, Homo sapien
catggccatatactcttaccaacac

SEQ ID NO: 1445692 - DNA, 25 bp, Homo sapien
tatagtttattgatgtgtcaaacct

SEQ ID NO: 1445693 - DNA, 25 bp, Homo sapien
cacatctatcagtgttttagtttat

SEQ ID NO: 1445694 - DNA, 25 bp, Homo sapien
catctatcagtgttttagtttatga

SEQ ID NO: 1445695 - DNA, 25 bp, Homo sapien
tttatagtttattgatgtgtcaaac

SEQ ID NO: 1445696 - DNA, 25 bp, Homo sapien
cactaggagctttaaccttcagcag

SEQ ID NO: 1445697 - DNA, 25 bp, Homo sapien
taatattacaggactaggcctttgg

SEQ ID NO: 1445698 - DNA, 25 bp, Homo sapien
tcaggacaaggaagtgaatggtccc

SEQ ID NO: 1445699 - DNA, 25 bp, Homo sapien
aaaacacatgtagagcaagactgac

SEQ ID NO: 1445700 - DNA, 25 bp, Homo sapien
cttccttccttcctctctctctttc

SEQ ID NO: 1445701 - DNA, 25 bp, Homo sapien
ccgtgcctggcctctttctctcttt

SEQ ID NO: 1445702 - DNA, 25 bp, Homo sapien
ccttccttcctctctctctttcttc

SEQ ID NO: 1445703 - DNA, 25 bp, Homo sapien
cgtgcctggcctctttctctctttc

SEQ ID NO: 1445704 - DNA, 25 bp, Homo sapien
tgaggagagaacacctccacttccc

SEQ ID NO: 1445705 - DNA, 25 bp, Homo sapien
ctgacactttcagtaacctcggaag

SEQ ID NO: 1445706 - DNA, 25 bp, Homo sapien
ccttaaaggcatctatgagttcatg

SEQ ID NO: 1445707 - DNA, 25 bp, Homo sapien
gatctcctgaggactaagtcgcagc

SEQ ID NO: 1445708 - DNA, 25 bp, Homo sapien
ccagttatgttcactccatagtacc

SEQ ID NO: 1445709 - DNA, 25 bp, Homo sapien
tccatagtaccatcctagatccaag

SEQ ID NO: 1445710 - DNA, 25 bp, Homo sapien
gtaccatcctagatccaagaggctg

SEQ ID NO: 1445711 - DNA, 25 bp, Homo sapien
cagttatgttcactccatagtacca

SEQ ID NO: 1445712 - DNA, 25 bp, Homo sapien
gttctgactgctgcagtcaaaagct

SEQ ID NO: 1445713 - DNA, 25 bp, Homo sapien
cctctcctttgggcattgccttgtt

SEQ ID NO: 1445714 - DNA, 25 bp, Homo sapien
ttctgactgctgcagtcaaaagctg

SEQ ID NO: 1445715 - DNA, 25 bp, Homo sapien
cctcttttccgaggccagctctgca

SEQ ID NO: 1445716 - DNA, 25 bp, Homo sapien
ttgcctcggccactcccgcagatct

SEQ ID NO: 1445717 - DNA, 25 bp, Homo sapien
gttgggctcctctccgttgcctcgg

SEQ ID NO: 1445718 - DNA, 25 bp, Homo sapien
caggaaatcctccagttgggctcct

SEQ ID NO: 1445719 - DNA, 25 bp, Homo sapien
tgggcagctgaaggccactcaccca

SEQ ID NO: 1445720 - DNA, 25 bp, Homo sapien
ggccactcacccatcggtaagtccc

SEQ ID NO: 1445721 - DNA, 25 bp, Homo sapien
gagtgggcagctgaaggccactcac

SEQ ID NO: 1445722 - DNA, 25 bp, Homo sapien
gccactcacccatcggtaagtccct

SEQ ID NO: 1445723 - DNA, 25 bp, Homo sapien
tctgatgggccagtctcactggcca

SEQ ID NO: 1445724 - DNA, 25 bp, Homo sapien
aggaaattctgggtcattggtgtca

SEQ ID NO: 1445725 - DNA, 25 bp, Homo sapien
ggtgtcagcttgaggcacttgaaac

SEQ ID NO: 1445726 - DNA, 25 bp, Homo sapien
ggtcattggtgtcagcttgaggcac

SEQ ID NO: 1445727 - DNA, 25 bp, Homo sapien
gcacttgaaaccatagcgcccatgt

SEQ ID NO: 1445728 - DNA, 25 bp, Homo sapien
atcctggggcccgggactgcctcag

SEQ ID NO: 1445729 - DNA, 25 bp, Homo sapien
ctgagggatcctggggcccgggact

SEQ ID NO: 1445730 - DNA, 25 bp, Homo sapien
ctggggcccgggactgcctcaggtt

SEQ ID NO: 1445731 - DNA, 25 bp, Homo sapien
ggatcctggggcccgggactgcctc

SEQ ID NO: 1445732 - DNA, 25 bp, Homo sapien
catcttcattagctgcgttggggtc

SEQ ID NO: 1445733 - DNA, 25 bp, Homo sapien
ctgagaaacagcatcgggtccttgg

SEQ ID NO: 1445734 - DNA, 25 bp, Homo sapien
aaacagcatcgggtccttggatggg

SEQ ID NO: 1445735 - DNA, 25 bp, Homo sapien
tcattagctgcgttggggtcactcc

SEQ ID NO: 1445736 - DNA, 25 bp, Homo sapien
acatagactgatggcgatgccagtg

SEQ ID NO: 1445737 - DNA, 25 bp, Homo sapien
agacgctcaagctcgactgccctgt

SEQ ID NO: 1445738 - DNA, 25 bp, Homo sapien
gccagtggggacgactgaagccctt

SEQ ID NO: 1445739 - DNA, 25 bp, Homo sapien
tcgactgccctgtggacgcacatag

SEQ ID NO: 1445740 - DNA, 25 bp, Homo sapien
aggccccacagatgggccgcggcat

SEQ ID NO: 1445741 - DNA, 25 bp, Homo sapien
gatggtcgtgggaggcacacactta

SEQ ID NO: 1445742 - DNA, 25 bp, Homo sapien
gaacacagtgcaaatgtgtctccgc

SEQ ID NO: 1445743 - DNA, 25 bp, Homo sapien
cggcatctacgagcagagcgagagt

SEQ ID NO: 1445744 - DNA, 25 bp, Homo sapien
aaggtagggcccagtcagtgccttg

SEQ ID NO: 1445745 - DNA, 25 bp, Homo sapien
tgaagcggcaaccaaagactaggaa

SEQ ID NO: 1445746 - DNA, 25 bp, Homo sapien
caagagaatgtcgaagagaagctat

SEQ ID NO: 1445747 - DNA, 25 bp, Homo sapien
actgctctaagacctcgctgccagg

SEQ ID NO: 1445748 - DNA, 25 bp, Homo sapien
tctgcttcctattctgtccaatgtc

SEQ ID NO: 1445749 - DNA, 25 bp, Homo sapien
tgcttcctattctgtccaatgtccc

SEQ ID NO: 1445750 - DNA, 25 bp, Homo sapien
agcctgaagctttcaccaaacatgc

SEQ ID NO: 1445751 - DNA, 25 bp, Homo sapien
gaagctttcaccaaacatgctgccc

SEQ ID NO: 1445752 - DNA, 25 bp, Homo sapien
ccactgtccacagcaggaaggacag

SEQ ID NO: 1445753 - DNA, 25 bp, Homo sapien
agatgacaggaggaggctcactttt

SEQ ID NO: 1445754 - DNA, 25 bp, Homo sapien
aggaggaggctcacttttgctgcca

SEQ ID NO: 1445755 - DNA, 25 bp, Homo sapien
ccccactgtccacagcaggaaggac

SEQ ID NO: 1445756 - DNA, 25 bp, Homo sapien
tatggaccaggtaaacctcttccca

SEQ ID NO: 1445757 - DNA, 25 bp, Homo sapien
tctccctactcccatggaatcaagg

SEQ ID NO: 1445758 - DNA, 25 bp, Homo sapien
ggagggacgtgaatctgcacagctt

SEQ ID NO: 1445759 - DNA, 25 bp, Homo sapien
gaccatggcaggttagtgcttatgg

SEQ ID NO: 1445760 - DNA, 25 bp, Homo sapien
tagtccaattaatctctagcgatga

SEQ ID NO: 1445761 - DNA, 25 bp, Homo sapien
tctagcgatgaattattctgtccga

SEQ ID NO: 1445762 - DNA, 25 bp, Homo sapien
ctgagagccaacgtaattagtccaa

SEQ ID NO: 1445763 - DNA, 25 bp, Homo sapien
gataatcgtcttcggaagcaaagga

SEQ ID NO: 1445764 - DNA, 25 bp, Homo sapien
cgccttttctggagatgcttaagaa

SEQ ID NO: 1445765 - DNA, 25 bp, Homo sapien
ggacgccgtggaatcgccttttctg

SEQ ID NO: 1445766 - DNA, 25 bp, Homo sapien
cgtggaatcgccttttctggagatg

SEQ ID NO: 1445767 - DNA, 25 bp, Homo sapien
tggagatgcttaagaaaagttctgc

SEQ ID NO: 1445768 - DNA, 25 bp, Homo sapien
ctgcccagtgctgcgagggtgtgga

SEQ ID NO: 1445769 - DNA, 25 bp, Homo sapien
catcactcgggcagcatttcctggg

SEQ ID NO: 1445770 - DNA, 25 bp, Homo sapien
actcgggcagcatttcctgggcagc

SEQ ID NO: 1445771 - DNA, 25 bp, Homo sapien
tggatggagctacataagggatgta

SEQ ID NO: 1445772 - DNA, 25 bp, Homo sapien
ggatcatttgcagggagaatgcagc

SEQ ID NO: 1445773 - DNA, 25 bp, Homo sapien
ccctgagttaggctggggatcattt

SEQ ID NO: 1445774 - DNA, 25 bp, Homo sapien
ttgcagggagaatgcagccaggacc

SEQ ID NO: 1445775 - DNA, 25 bp, Homo sapien
ttcttgccctgagttaggctgggga

SEQ ID NO: 1445776 - DNA, 25 bp, Homo sapien
tctgtagtgattagtaatatggagc

SEQ ID NO: 1445777 - DNA, 25 bp, Homo sapien
aaaaacccatcctgatggaggcgaa

SEQ ID NO: 1445778 - DNA, 25 bp, Homo sapien
ggagcagctttatgtacttattagc

SEQ ID NO: 1445779 - DNA, 25 bp, Homo sapien
gatggaggcgaagtggttatctcat

SEQ ID NO: 1445780 - DNA, 25 bp, Homo sapien
cactagaagtagtctcgccagggta

SEQ ID NO: 1445781 - DNA, 25 bp, Homo sapien
tggaagctctcaggacgtcaatgac

SEQ ID NO: 1445782 - DNA, 25 bp, Homo sapien
ccttagacagagtcagcaggctcca

SEQ ID NO: 1445783 - DNA, 25 bp, Homo sapien
atttggcacctagactgatcacccg

SEQ ID NO: 1445784 - DNA, 25 bp, Homo sapien
ggttgggggtccaaagatgctgaag

SEQ ID NO: 1445785 - DNA, 25 bp, Homo sapien
gttgggggtccaaagatgctgaagg

SEQ ID NO: 1445786 - DNA, 25 bp, Homo sapien
gggttgggggtccaaagatgctgaa

SEQ ID NO: 1445787 - DNA, 25 bp, Homo sapien
ggaggtgatttagagaccctatacc

SEQ ID NO: 1445788 - DNA, 25 bp, Homo sapien
ttctggcagctcaggaatcaatccc

SEQ ID NO: 1445789 - DNA, 25 bp, Homo sapien
ggaatcaatcccaagaaggaggtga

SEQ ID NO: 1445790 - DNA, 25 bp, Homo sapien
ccctataccccagaatgttcagtgg

SEQ ID NO: 1445791 - DNA, 25 bp, Homo sapien
gagagccaggatagggcttggccag

SEQ ID NO: 1445792 - DNA, 25 bp, Homo sapien
gacattaccagaacaggagagccag

SEQ ID NO: 1445793 - DNA, 25 bp, Homo sapien
gagccaggatagggcttggccaggg

SEQ ID NO: 1445794 - DNA, 25 bp, Homo sapien
acattaccagaacaggagagccagg

SEQ ID NO: 1445795 - DNA, 25 bp, Homo sapien
gacccatgctccgatttttagaaat

SEQ ID NO: 1445796 - DNA, 25 bp, Homo sapien
cactgacccatgctccgatttttag

SEQ ID NO: 1445797 - DNA, 25 bp, Homo sapien
atgcactgacccatgctccgatttt

SEQ ID NO: 1445798 - DNA, 25 bp, Homo sapien
ccatgctccgatttttagaaatttc

SEQ ID NO: 1445799 - DNA, 25 bp, Homo sapien
acagctggagccgtaagtacaagcc

SEQ ID NO: 1445800 - DNA, 25 bp, Homo sapien
tacagctggagccgtaagtacaagc

SEQ ID NO: 1445801 - DNA, 25 bp, Homo sapien
cgctgggtgcccacccggtgaatgg

SEQ ID NO: 1445802 - DNA, 25 bp, Homo sapien
gcctgagccggggaagatgcttcat

SEQ ID NO: 1445803 - DNA, 25 bp, Homo sapien
ggtgtcaggcgagagcggtcctggg

SEQ ID NO: 1445804 - DNA, 25 bp, Homo sapien
acccggtgaatggccgcctgagccg

SEQ ID NO: 1445805 - DNA, 25 bp, Homo sapien
ggtccgcaagaaggagggtcttggc

SEQ ID NO: 1445806 - DNA, 25 bp, Homo sapien
gcgctcgcttttccgccagagagga

SEQ ID NO: 1445807 - DNA, 25 bp, Homo sapien
caagaaggagggtcttggccgcgct

SEQ ID NO: 1445808 - DNA, 25 bp, Homo sapien
ccgagctcctggacgtttggcttac

SEQ ID NO: 1445809 - DNA, 25 bp, Homo sapien
gctgggagtgggtgtgtggagggct

SEQ ID NO: 1445810 - DNA, 25 bp, Homo sapien
ctggggctgggagtgggtgtgtgga

SEQ ID NO: 1445811 - DNA, 25 bp, Homo sapien
gggctgggagtgggtgtgtggaggg

SEQ ID NO: 1445812 - DNA, 25 bp, Homo sapien
gggcatctggggctgggagtgggtg

SEQ ID NO: 1445813 - DNA, 25 bp, Homo sapien
gaaaggagcttaggcgcccaggaga

SEQ ID NO: 1445814 - DNA, 25 bp, Homo sapien
aaggaaaggagcttaggcgcccagg

SEQ ID NO: 1445815 - DNA, 25 bp, Homo sapien
aggaaaggagcttaggcgcccagga

SEQ ID NO: 1445816 - DNA, 25 bp, Homo sapien
aaaggagcttaggcgcccaggagac

SEQ ID NO: 1445817 - DNA, 25 bp, Homo sapien
ttgaacttcgatggttgcggctgtg

SEQ ID NO: 1445818 - DNA, 25 bp, Homo sapien
aatagcgcaacttgattgaacttcg

SEQ ID NO: 1445819 - DNA, 25 bp, Homo sapien
ttgattgaacttcgatggttgcggc

SEQ ID NO: 1445820 - DNA, 25 bp, Homo sapien
gacggagctgagacaatagcgcaac

SEQ ID NO: 1445821 - DNA, 25 bp, Homo sapien
tcccttaaactccaaaggaggcagc

SEQ ID NO: 1445822 - DNA, 25 bp, Homo sapien
gtatttgggtgaatgacttaattgg

SEQ ID NO: 1445823 - DNA, 25 bp, Homo sapien
catccggcattttttttcttgtcct

SEQ ID NO: 1445824 - DNA, 25 bp, Homo sapien
tcatccggcattttttttcttgtcc

SEQ ID NO: 1445825 - DNA, 25 bp, Homo sapien
tccggcattttttttcttgtcctca

SEQ ID NO: 1445826 - DNA, 25 bp, Homo sapien
ggccagatagggtccttgataagtt

SEQ ID NO: 1445827 - DNA, 25 bp, Homo sapien
gttttggattcttgcccacgagttg

SEQ ID NO: 1445828 - DNA, 25 bp, Homo sapien
catgagggattgatgttttggattc

SEQ ID NO: 1445829 - DNA, 25 bp, Homo sapien
catagacttcctttacaaagtaagg

SEQ ID NO: 1445830 - DNA, 25 bp, Homo sapien
ctcctggttcaagcaattctcctgc

SEQ ID NO: 1445831 - DNA, 25 bp, Homo sapien
tcctggttcaagcaattctcctgcc

SEQ ID NO: 1445832 - DNA, 25 bp, Homo sapien
ttgctatgtcgccaggctgcagtgc

SEQ ID NO: 1445833 - DNA, 25 bp, Homo sapien
cttgctatgtcgccaggctgcagtg

SEQ ID NO: 1445834 - DNA, 25 bp, Homo sapien
tatgaacagatagggcttatgtcca

SEQ ID NO: 1445835 - DNA, 25 bp, Homo sapien
tcactgcatagtggtgtgaggaccg

SEQ ID NO: 1445836 - DNA, 25 bp, Homo sapien
cttatgtccactgatgtcagatccc

SEQ ID NO: 1445837 - DNA, 25 bp, Homo sapien
tgaggaccggctcctcatgcaggtc

SEQ ID NO: 1445838 - DNA, 25 bp, Homo sapien
tcccttgaaatatccgttgacaagg

SEQ ID NO: 1445839 - DNA, 25 bp, Homo sapien
aaatatccgttgacaaggttcttca

SEQ ID NO: 1445840 - DNA, 25 bp, Homo sapien
ataatctgttatagctcccttgaaa

SEQ ID NO: 1445841 - DNA, 25 bp, Homo sapien
tctataatctgttatagctcccttg

SEQ ID NO: 1445842 - DNA, 25 bp, Homo sapien
agcgcggttcacgctcattccagct

SEQ ID NO: 1445843 - DNA, 25 bp, Homo sapien
ctagcgcggttcacgctcattccag

SEQ ID NO: 1445844 - DNA, 25 bp, Homo sapien
cgcggttcacgctcattccagctct

SEQ ID NO: 1445845 - DNA, 25 bp, Homo sapien
gcggttcacgctcattccagctctg

SEQ ID NO: 1445846 - DNA, 25 bp, Homo sapien
ggatggaatgtagttatgcaatctc

SEQ ID NO: 1445847 - DNA, 25 bp, Homo sapien
atggaatgtagttatgcaatctcag

SEQ ID NO: 1445848 - DNA, 25 bp, Homo sapien
gatggaatgtagttatgcaatctca

SEQ ID NO: 1445849 - DNA, 25 bp, Homo sapien
tggatggaatgtagttatgcaatct

SEQ ID NO: 1445850 - DNA, 25 bp, Homo sapien
gacagtcaaagacagcaccccaagt

SEQ ID NO: 1445851 - DNA, 25 bp, Homo sapien
gataggacagtcaaagacagcaccc

SEQ ID NO: 1445852 - DNA, 25 bp, Homo sapien
tcaaagacagcaccccaagttctct

SEQ ID NO: 1445853 - DNA, 25 bp, Homo sapien
ccgaggataggacagtcaaagacag

SEQ ID NO: 1445854 - DNA, 25 bp, Homo sapien
gagtcccaactctcataaatccatc

SEQ ID NO: 1445855 - DNA, 25 bp, Homo sapien
tgcccccctttagatggccatgctg

SEQ ID NO: 1445856 - DNA, 25 bp, Homo sapien
gaagctgccaactacattgagtctc

SEQ ID NO: 1445857 - DNA, 25 bp, Homo sapien
ttgttgttgtttcccttctgtgggc

SEQ ID NO: 1445858 - DNA, 25 bp, Homo sapien
gggacatcaacaagacggctgccaa

SEQ ID NO: 1445859 - DNA, 25 bp, Homo sapien
agttgccaaggtagagagctgcccg

SEQ ID NO: 1445860 - DNA, 25 bp, Homo sapien
agagagaggaaccagttgccaaggt

SEQ ID NO: 1445861 - DNA, 25 bp, Homo sapien
gacataggggacatcaacaagacgg

SEQ ID NO: 1445862 - DNA, 25 bp, Homo sapien
tcacatgtccacgagatgcttgggt

SEQ ID NO: 1445863 - DNA, 25 bp, Homo sapien
aagcattggctcagaagtagaggga

SEQ ID NO: 1445864 - DNA, 25 bp, Homo sapien
tgccatgccactatctttggcatcc

SEQ ID NO: 1445865 - DNA, 25 bp, Homo sapien
tgcaattggcatgacacctgccatg

SEQ ID NO: 1445866 - DNA, 25 bp, Homo sapien
cttcatatcggtatattaagtccaa

SEQ ID NO: 1445867 - DNA, 25 bp, Homo sapien
tctgcatccacgtggtaagctccca

SEQ ID NO: 1445868 - DNA, 25 bp, Homo sapien
ccaaccgaggagtagatgcatctga

SEQ ID NO: 1445869 - DNA, 25 bp, Homo sapien
taagtccaaaagatggtccgggctg

SEQ ID NO: 1445870 - DNA, 25 bp, Homo sapien
tatatggcaactgcagaaggctgag

SEQ ID NO: 1445871 - DNA, 25 bp, Homo sapien
aagtgtgttcccgtctagtgaggta

SEQ ID NO: 1445872 - DNA, 25 bp, Homo sapien
catggtgctataaccccttgggaca

SEQ ID NO: 1445873 - DNA, 25 bp, Homo sapien
ttatggcaaggagcaaatctacagc

SEQ ID NO: 1445874 - DNA, 25 bp, Homo sapien
ctcagaccttgcctaggcactaaaa

SEQ ID NO: 1445875 - DNA, 25 bp, Homo sapien
tccctcaccacagttgtctaggaaa

SEQ ID NO: 1445876 - DNA, 25 bp, Homo sapien
taatttctggatgaagaagaccaac

SEQ ID NO: 1445877 - DNA, 25 bp, Homo sapien
tcaatatctaatgtcaaccaatggg

SEQ ID NO: 1445878 - DNA, 25 bp, Homo sapien
gttaggagaatgtttgtgtctttcc

SEQ ID NO: 1445879 - DNA, 25 bp, Homo sapien
gggcttcaacaaggaaaagcagttg

SEQ ID NO: 1445880 - DNA, 25 bp, Homo sapien
tcctagttgaatacaaccttcagag

SEQ ID NO: 1445881 - DNA, 25 bp, Homo sapien
ttttaacaaagaaaggtatgtgtgc

SEQ ID NO: 1445882 - DNA, 25 bp, Homo sapien
gaacctccttctgtatggcagctaa

SEQ ID NO: 1445883 - DNA, 25 bp, Homo sapien
cagtgtagggctccagtatcccagg

SEQ ID NO: 1445884 - DNA, 25 bp, Homo sapien
tatttccatgacaacgtgttctccc

SEQ ID NO: 1445885 - DNA, 25 bp, Homo sapien
cagctcataggagagtcttgcataa

SEQ ID NO: 1445886 - DNA, 25 bp, Homo sapien
taagttattgggtgcaaaatcccaa

SEQ ID NO: 1445887 - DNA, 25 bp, Homo sapien
caccgtttatgtgacagagtccgtg

SEQ ID NO: 1445888 - DNA, 25 bp, Homo sapien
tgtttctcaaatgcatggtgttcct

SEQ ID NO: 1445889 - DNA, 25 bp, Homo sapien
cgcctccatactgttttaggcagca

SEQ ID NO: 1445890 - DNA, 25 bp, Homo sapien
ttattccaaatgagattgctaactt

SEQ ID NO: 1445891 - DNA, 25 bp, Homo sapien
tattccaaatgagattgctaactta

SEQ ID NO: 1445892 - DNA, 25 bp, Homo sapien
attccaaatgagattgctaacttac

SEQ ID NO: 1445893 - DNA, 25 bp, Homo sapien
cgttagtggatacgctcaccgggat

SEQ ID NO: 1445894 - DNA, 25 bp, Homo sapien
tatccccagtacaggaggtgcgggc

SEQ ID NO: 1445895 - DNA, 25 bp, Homo sapien
gaaaggtgcagttctcgttcaggca

SEQ ID NO: 1445896 - DNA, 25 bp, Homo sapien
tggaggcttagattcattccccgcc

SEQ ID NO: 1445897 - DNA, 25 bp, Homo sapien
tttgatcacacccagtagctccaca

SEQ ID NO: 1445898 - DNA, 25 bp, Homo sapien
tatgcagctgtagagaagaacttca

SEQ ID NO: 1445899 - DNA, 25 bp, Homo sapien
taactgtccatacagaggagagcac

SEQ ID NO: 1445900 - DNA, 25 bp, Homo sapien
aaatgcacttacctcttgacccaca

SEQ ID NO: 1445901 - DNA, 25 bp, Homo sapien
ggtgatgtgcgggaaaaaagacaga

SEQ ID NO: 1445902 - DNA, 25 bp, Homo sapien
tcacctttatccttcaggagctact

SEQ ID NO: 1445903 - DNA, 25 bp, Homo sapien
cagccctggtcctaagaccattgca

SEQ ID NO: 1445904 - DNA, 25 bp, Homo sapien
gtcctaagaccattgcatcaggtag

SEQ ID NO: 1445905 - DNA, 25 bp, Homo sapien
ccagtagtaagcaagtctagaaaac

SEQ ID NO: 1445906 - DNA, 25 bp, Homo sapien
cccggccctgataccaatattctta

SEQ ID NO: 1445907 - DNA, 25 bp, Homo sapien
ccatagctccctccaaagggaagtg

SEQ ID NO: 1445908 - DNA, 25 bp, Homo sapien
gaagtgatgagcctattgtgaccta

SEQ ID NO: 1445909 - DNA, 25 bp, Homo sapien
ttaataaattgataccagggatgag

SEQ ID NO: 1445910 - DNA, 25 bp, Homo sapien
cccaaaatgtcccaagtggttagct

SEQ ID NO: 1445911 - DNA, 25 bp, Homo sapien
ttatccttgaggaggaaattacagc

SEQ ID NO: 1445912 - DNA, 25 bp, Homo sapien
gaacactcaccattcaaagctcaga

SEQ ID NO: 1445913 - DNA, 25 bp, Homo sapien
tctcccagagatgtataagatcttc

SEQ ID NO: 1445914 - DNA, 25 bp, Homo sapien
gatgtataagatcttcaccatggct

SEQ ID NO: 1445915 - DNA, 25 bp, Homo sapien
attctcccagagatgtataagatct

SEQ ID NO: 1445916 - DNA, 25 bp, Homo sapien
ccagagatgtataagatcttcacca

SEQ ID NO: 1445917 - DNA, 25 bp, Homo sapien
tcccgagccgtggagatttttacca

SEQ ID NO: 1445918 - DNA, 25 bp, Homo sapien
cccatatgatctgtaacatggagga

SEQ ID NO: 1445919 - DNA, 25 bp, Homo sapien
gagatttttaccacttgtgcccata

SEQ ID NO: 1445920 - DNA, 25 bp, Homo sapien
cacttgtgcccatatgatctgtaac

SEQ ID NO: 1445921 - DNA, 25 bp, Homo sapien
ggtgcagccaaagtcctgatctttc

SEQ ID NO: 1445922 - DNA, 25 bp, Homo sapien
tgatctttcccgtggtacagcagtt

SEQ ID NO: 1445923 - DNA, 25 bp, Homo sapien
ggtacagcagttcacagaggccttt

SEQ ID NO: 1445924 - DNA, 25 bp, Homo sapien
gaggcctttgttcaggccctccaga

SEQ ID NO: 1445925 - DNA, 25 bp, Homo sapien
acaccctaaccgagagtgcagcttt

SEQ ID NO: 1445926 - DNA, 25 bp, Homo sapien
agattctgcctattgtttggaacac

SEQ ID NO: 1445927 - DNA, 25 bp, Homo sapien
gacagccctagtgaaaaacttccca

SEQ ID NO: 1445928 - DNA, 25 bp, Homo sapien
tggaacaccctaaccgagagtgcag

SEQ ID NO: 1445929 - DNA, 25 bp, Homo sapien
ttatgtgaggacagaagtaaattac

SEQ ID NO: 1445930 - DNA, 25 bp, Homo sapien
agtaaattacacagaagaagtagaa

SEQ ID NO: 1445931 - DNA, 25 bp, Homo sapien
atttttgaatttgtccatgctctac

SEQ ID NO: 1445932 - DNA, 25 bp, Homo sapien
cctgggctttgaaaatctcgtcttt

SEQ ID NO: 1445933 - DNA, 25 bp, Homo sapien
gctttgaaaatctcgtctttagcat

SEQ ID NO: 1445934 - DNA, 25 bp, Homo sapien
gaaaatctcgtctttagcatttttg

SEQ ID NO: 1445935 - DNA, 25 bp, Homo sapien
aataatgtttctgtattactgtgaa

SEQ ID NO: 1445936 - DNA, 25 bp, Homo sapien
cattctgttttcacttacagtatag

SEQ ID NO: 1445937 - DNA, 25 bp, Homo sapien
tctggaccatcctttgggaactgct

SEQ ID NO: 1445938 - DNA, 25 bp, Homo sapien
tgtacattatcagtttctcacttac

SEQ ID NO: 1445939 - DNA, 25 bp, Homo sapien
gaataagaatagtctctcctcagca

SEQ ID NO: 1445940 - DNA, 25 bp, Homo sapien
gagcatctgtattgcgtaatttgac

SEQ ID NO: 1445941 - DNA, 25 bp, Homo sapien
tcctcagcagcttatagtaaacaag

SEQ ID NO: 1445942 - DNA, 25 bp, Homo sapien
tcagtgttttccgtcaacaagatgt

SEQ ID NO: 1445943 - DNA, 25 bp, Homo sapien
ttgaggaatggagggccggatgcgg

SEQ ID NO: 1445944 - DNA, 25 bp, Homo sapien
aatgagttgtacatattatgtagca

SEQ ID NO: 1445945 - DNA, 25 bp, Homo sapien
tatgtagcatctatttacttctaaa

SEQ ID NO: 1445946 - DNA, 25 bp, Homo sapien
attgaggaatggagggccggatgcg

SEQ ID NO: 1445947 - DNA, 25 bp, Homo sapien
tagatttataattacctccgctgtc

SEQ ID NO: 1445948 - DNA, 25 bp, Homo sapien
tatagtcaggtacagtgaaagtctg

SEQ ID NO: 1445949 - DNA, 25 bp, Homo sapien
caggtagggagtatagagctgctat

SEQ ID NO: 1445950 - DNA, 25 bp, Homo sapien
ggactggagtactggctctatacag

SEQ ID NO: 1445951 - DNA, 25 bp, Homo sapien
cagataggaatcctcatgagagatc

SEQ ID NO: 1445952 - DNA, 25 bp, Homo sapien
ttctacaacactaaggctcctctgt

SEQ ID NO: 1445953 - DNA, 25 bp, Homo sapien
gagatcattatgctttgtgccctgg

SEQ ID NO: 1445954 - DNA, 25 bp, Homo sapien
gcgcaggaagtcactaccatttata

SEQ ID NO: 1445955 - DNA, 25 bp, Homo sapien
tggaggccagtacatgttgacagaa

SEQ ID NO: 1445956 - DNA, 25 bp, Homo sapien
tggccaaagagaactagcttcagtc

SEQ ID NO: 1445957 - DNA, 25 bp, Homo sapien
gacccctcgatgtgcaggtacttaa

SEQ ID NO: 1445958 - DNA, 25 bp, Homo sapien
taagggctacccctggctaacagat

SEQ ID NO: 1445959 - DNA, 25 bp, Homo sapien
cccttctggtgctcaaccggaggct

SEQ ID NO: 1445960 - DNA, 25 bp, Homo sapien
tctaggatgagataataaaaacagg

SEQ ID NO: 1445961 - DNA, 25 bp, Homo sapien
tagggtagtgtggaaggtcctttca

SEQ ID NO: 1445962 - DNA, 25 bp, Homo sapien
tgtgcctatcagtgatcctcattgc

SEQ ID NO: 1445963 - DNA, 25 bp, Homo sapien
gccccttgctcacctgcaggttgag

SEQ ID NO: 1445964 - DNA, 25 bp, Homo sapien
ctagagccccttgctcacctgcagg

SEQ ID NO: 1445965 - DNA, 25 bp, Homo sapien
agagccccttgctcacctgcaggtt

SEQ ID NO: 1445966 - DNA, 25 bp, Homo sapien
cccttgctcacctgcaggttgagct

SEQ ID NO: 1445967 - DNA, 25 bp, Homo sapien
ctgcagcaccgtcacagccttattt

SEQ ID NO: 1445968 - DNA, 25 bp, Homo sapien
acagccttatttcagtgagggaagg

SEQ ID NO: 1445969 - DNA, 25 bp, Homo sapien
cacagccttatttcagtgagggaag

SEQ ID NO: 1445970 - DNA, 25 bp, Homo sapien
tcacagccttatttcagtgagggaa

SEQ ID NO: 1445971 - DNA, 25 bp, Homo sapien
tagaatattggtatccacctcacag

SEQ ID NO: 1445972 - DNA, 25 bp, Homo sapien
ctgacagtggaagctctagctggcc

SEQ ID NO: 1445973 - DNA, 25 bp, Homo sapien
aaagcatctagctagtgcccagtgc

SEQ ID NO: 1445974 - DNA, 25 bp, Homo sapien
tttggtcagacctagcacagcgatc

SEQ ID NO: 1445975 - DNA, 25 bp, Homo sapien
ggtgaaactgctgtgcctcctgctg

SEQ ID NO: 1445976 - DNA, 25 bp, Homo sapien
aaactgctgtgcctcctgctgttga

SEQ ID NO: 1445977 - DNA, 25 bp, Homo sapien
ctcaaagatggtgaaactgctgtgc

SEQ ID NO: 1445978 - DNA, 25 bp, Homo sapien
agatggtgaaactgctgtgcctcct

SEQ ID NO: 1445979 - DNA, 25 bp, Homo sapien
gagaaacctacaagtgacacagacc

SEQ ID NO: 1445980 - DNA, 25 bp, Homo sapien
ccctgagcccatggttaggcagagt

SEQ ID NO: 1445981 - DNA, 25 bp, Homo sapien
gtgactgctgtgaggacctggccct

SEQ ID NO: 1445982 - DNA, 25 bp, Homo sapien
cagacctagtagaggcctggccttc

SEQ ID NO: 1445983 - DNA, 25 bp, Homo sapien
ggatcacaggccttttgcagcttgc

SEQ ID NO: 1445984 - DNA, 25 bp, Homo sapien
taggatcaggactcacagttcagga

SEQ ID NO: 1445985 - DNA, 25 bp, Homo sapien
aactcaaatagtgtggcagggaacc

SEQ ID NO: 1445986 - DNA, 25 bp, Homo sapien
tctcagtgatgtgctaaaaggactc

SEQ ID NO: 1445987 - DNA, 25 bp, Homo sapien
ctactgaagcagtttgggcacttcc

SEQ ID NO: 1445988 - DNA, 25 bp, Homo sapien
tccaaccaaatggacaaacgatcgt

SEQ ID NO: 1445989 - DNA, 25 bp, Homo sapien
aatggacaaacgatcgtggactttg

SEQ ID NO: 1445990 - DNA, 25 bp, Homo sapien
caaacgatcgtggactttgtcaccc

SEQ ID NO: 1445991 - DNA, 25 bp, Homo sapien
ggtatccaaccaaatggacaaacga

SEQ ID NO: 1445992 - DNA, 25 bp, Homo sapien
gccccgccctgttggctcatgccca

SEQ ID NO: 1445993 - DNA, 25 bp, Homo sapien
agccccgccctgttggctcatgccc

SEQ ID NO: 1445994 - DNA, 25 bp, Homo sapien
ccagccccgccctgttggctcatgc

SEQ ID NO: 1445995 - DNA, 25 bp, Homo sapien
cccgccctgttggctcatgcccaca

SEQ ID NO: 1445996 - DNA, 25 bp, Homo sapien
ttgctggagcggatggcagccaata

SEQ ID NO: 1445997 - DNA, 25 bp, Homo sapien
agctgcttgaggttgctggagcgga

SEQ ID NO: 1445998 - DNA, 25 bp, Homo sapien
ggtcacgggagttcttctcctgggc

SEQ ID NO: 1445999 - DNA, 25 bp, Homo sapien
ggatggcagccaatagctggtcacg

SEQ ID NO: 1446000 - DNA, 25 bp, Homo sapien
gggtggtggggcagctggagcaccc

SEQ ID NO: 1446001 - DNA, 25 bp, Homo sapien
gggggtggtggggcagctggagcac

SEQ ID NO: 1446002 - DNA, 25 bp, Homo sapien
gagggggtggtggggcagctggagc

SEQ ID NO: 1446003 - DNA, 25 bp, Homo sapien
ggtggtggggcagctggagcacccc

SEQ ID NO: 1446004 - DNA, 25 bp, Homo sapien
tttgggtgagttctttggagagggc

SEQ ID NO: 1446005 - DNA, 25 bp, Homo sapien
ttgggtgagttctttggagagggct

SEQ ID NO: 1446006 - DNA, 25 bp, Homo sapien
agatggttgaggtgaaggttttggg

SEQ ID NO: 1446007 - DNA, 25 bp, Homo sapien
gctttggagatggttgaggtgaagg

SEQ ID NO: 1446008 - DNA, 25 bp, Homo sapien
gagcctcagtaaaccggaccaagat

SEQ ID NO: 1446009 - DNA, 25 bp, Homo sapien
ccagcttgagcagggtagtattctc

SEQ ID NO: 1446010 - DNA, 25 bp, Homo sapien
ttggccaaggcgaacagcttaacca

SEQ ID NO: 1446011 - DNA, 25 bp, Homo sapien
tcatcggctcgcgtgttggccaagg

SEQ ID NO: 1446012 - DNA, 25 bp, Homo sapien
atcgtcctttttggtgtctgtgttc

SEQ ID NO: 1446013 - DNA, 25 bp, Homo sapien
cttgactttttcatcgtcctttttg

SEQ ID NO: 1446014 - DNA, 25 bp, Homo sapien
tccttttcatgtaagggttcattct

SEQ ID NO: 1446015 - DNA, 25 bp, Homo sapien
cttttcatgtaagggttcattcttc

SEQ ID NO: 1446016 - DNA, 25 bp, Homo sapien
gtctgtgttcccacctgctcttttc

SEQ ID NO: 1446017 - DNA, 25 bp, Homo sapien
tctgtgttcccacctgctcttttca

SEQ ID NO: 1446018 - DNA, 25 bp, Homo sapien
ctgtgttcccacctgctcttttcat

SEQ ID NO: 1446019 - DNA, 25 bp, Homo sapien
ctgctcaagcctgtgttcctgtcac

SEQ ID NO: 1446020 - DNA, 25 bp, Homo sapien
ttttatccttgtccctgctcaagcc

SEQ ID NO: 1446021 - DNA, 25 bp, Homo sapien
tatccttgtccctgctcaagcctgt

SEQ ID NO: 1446022 - DNA, 25 bp, Homo sapien
ctttttatccttgtccctgctcaag

SEQ ID NO: 1446023 - DNA, 25 bp, Homo sapien
gggcttctcgccactcttgccacca

SEQ ID NO: 1446024 - DNA, 25 bp, Homo sapien
cggcccttgtcaatgccccggatga

SEQ ID NO: 1446025 - DNA, 25 bp, Homo sapien
tgcctccttcttatccactgcagcc

SEQ ID NO: 1446026 - DNA, 25 bp, Homo sapien
gatctgagtcccgtctggggcccag

SEQ ID NO: 1446027 - DNA, 25 bp, Homo sapien
gatgtctccattgagggcagcaaaa

SEQ ID NO: 1446028 - DNA, 25 bp, Homo sapien
catcagactcaaggcctcagggttg

SEQ ID NO: 1446029 - DNA, 25 bp, Homo sapien
tgagcctctgaaggacagttgtgct

SEQ ID NO: 1446030 - DNA, 25 bp, Homo sapien
gagcgcttacataactgcccttgag

SEQ ID NO: 1446031 - DNA, 25 bp, Homo sapien
ctaccctggggtcctagttggcaag

SEQ ID NO: 1446032 - DNA, 25 bp, Homo sapien
tccctgacaccgcacatcctgactt

SEQ ID NO: 1446033 - DNA, 25 bp, Homo sapien
cgcccagcctcaatttaaccttctt

SEQ ID NO: 1446034 - DNA, 25 bp, Homo sapien
ttctcccctttatcctaatccagga

SEQ ID NO: 1446035 - DNA, 25 bp, Homo sapien
tgttgccgcttgtgtagccctgagc

SEQ ID NO: 1446036 - DNA, 25 bp, Homo sapien
tgtagccctgagcactcaaacgttg

SEQ ID NO: 1446037 - DNA, 25 bp, Homo sapien
agcttgttgccgcttgtgtagccct

SEQ ID NO: 1446038 - DNA, 25 bp, Homo sapien
gcttgtgtagccctgagcactcaaa

SEQ ID NO: 1446039 - DNA, 25 bp, Homo sapien
gatgctgctttctttagaagtctta

SEQ ID NO: 1446040 - DNA, 25 bp, Homo sapien
ttctgatgctgctttctttagaagt

SEQ ID NO: 1446041 - DNA, 25 bp, Homo sapien
atgctgctttctttagaagtcttat

SEQ ID NO: 1446042 - DNA, 25 bp, Homo sapien
ctgatgctgctttctttagaagtct

SEQ ID NO: 1446043 - DNA, 25 bp, Homo sapien
cacaccgtcccccactgaggtcacc

SEQ ID NO: 1446044 - DNA, 25 bp, Homo sapien
ttgccagcccacaccgtcccccact

SEQ ID NO: 1446045 - DNA, 25 bp, Homo sapien
cgtcccccactgaggtcaccttctt

SEQ ID NO: 1446046 - DNA, 25 bp, Homo sapien
caccgtcccccactgaggtcacctt

SEQ ID NO: 1446047 - DNA, 25 bp, Homo sapien
tgcagagtcatttggacccatgtag

SEQ ID NO: 1446048 - DNA, 25 bp, Homo sapien
tcatctatctttacaagggagggca

SEQ ID NO: 1446049 - DNA, 25 bp, Homo sapien
gccccagggaaatatgtgacatctc

SEQ ID NO: 1446050 - DNA, 25 bp, Homo sapien
tgaagctgtcccaccaagaactggg

SEQ ID NO: 1446051 - DNA, 25 bp, Homo sapien
tacaggttccctttacggctgccag

SEQ ID NO: 1446052 - DNA, 25 bp, Homo sapien
ggacacagtgctacatgagaaacag

SEQ ID NO: 1446053 - DNA, 25 bp, Homo sapien
caccaagaggcttctgtcaacactg

SEQ ID NO: 1446054 - DNA, 25 bp, Homo sapien
tgtcaacactgtatgagggacacag

SEQ ID NO: 1446055 - DNA, 25 bp, Homo sapien
gggacaagttcacatcaaagtgtat

SEQ ID NO: 1446056 - DNA, 25 bp, Homo sapien
ggcctgcaaacttgaggatgtccag

SEQ ID NO: 1446057 - DNA, 25 bp, Homo sapien
aaggcctgcaaacttgaggatgtcc

SEQ ID NO: 1446058 - DNA, 25 bp, Homo sapien
cctgcaaacttgaggatgtccaggg

SEQ ID NO: 1446059 - DNA, 25 bp, Homo sapien
ctgctaaggcctgcaaacttgagga

SEQ ID NO: 1446060 - DNA, 25 bp, Homo sapien
acctcttgttctatccagcacgtca

SEQ ID NO: 1446061 - DNA, 25 bp, Homo sapien
ggagtggcgcaatggcagccaagaa

SEQ ID NO: 1446062 - DNA, 25 bp, Homo sapien
ctcccaagatgatctccaggggtcg

SEQ ID NO: 1446063 - DNA, 25 bp, Homo sapien
gtcggagtggcgcaatggcagccaa

SEQ ID NO: 1446064 - DNA, 25 bp, Homo sapien
caagatgatctccaggggtcggagt

SEQ ID NO: 1446065 - DNA, 25 bp, Homo sapien
cctaccaccaaggcttctgcattca

SEQ ID NO: 1446066 - DNA, 25 bp, Homo sapien
ccatttggttatggtttggtattgg

SEQ ID NO: 1446067 - DNA, 25 bp, Homo sapien
ggttatggtttggtattggtgtgga

SEQ ID NO: 1446068 - DNA, 25 bp, Homo sapien
ttatggtttggtattggtgtggaat

SEQ ID NO: 1446069 - DNA, 25 bp, Homo sapien
ctacaagcttctgggagtaagacac

SEQ ID NO: 1446070 - DNA, 25 bp, Homo sapien
gctggagtgcagtggtgtgatcatg

SEQ ID NO: 1446071 - DNA, 25 bp, Homo sapien
gctaactgcagcctcaacctcccag

SEQ ID NO: 1446072 - DNA, 25 bp, Homo sapien
agacagggtcttcctttgtgcccag

SEQ ID NO: 1446073 - DNA, 25 bp, Homo sapien
attcttttggagagactggggggcg

SEQ ID NO: 1446074 - DNA, 25 bp, Homo sapien
tctgcgtttccagtgcccagtgagt

SEQ ID NO: 1446075 - DNA, 25 bp, Homo sapien
tggcagatggtccaatattaggaac

SEQ ID NO: 1446076 - DNA, 25 bp, Homo sapien
tctaaaagaataacatgtgtggcct

SEQ ID NO: 1446077 - DNA, 25 bp, Homo sapien
tgtgagctgaccataagtctctgcg

SEQ ID NO: 1446078 - DNA, 25 bp, Homo sapien
tgaaagaactttgaccactggaaca

SEQ ID NO: 1446079 - DNA, 25 bp, Homo sapien
tgcttttaaggcaaagattacagag

SEQ ID NO: 1446080 - DNA, 25 bp, Homo sapien
aaattattatacttggctcacgcct

SEQ ID NO: 1446081 - DNA, 25 bp, Homo sapien
gtactctgggatcattattagatat

SEQ ID NO: 1446082 - DNA, 25 bp, Homo sapien
acttttcctagatctagaggcaatg

SEQ ID NO: 1446083 - DNA, 25 bp, Homo sapien
gaacttctccagatattttatggaa

SEQ ID NO: 1446084 - DNA, 25 bp, Homo sapien
attttatggaagaatccagatgatg

SEQ ID NO: 1446085 - DNA, 25 bp, Homo sapien
cctagatctagaggcaatgctgctg

SEQ ID NO: 1446086 - DNA, 25 bp, Homo sapien
gatagcatcgataaagcctttggct

SEQ ID NO: 1446087 - DNA, 25 bp, Homo sapien
gccattgggagaactgatgaaccga

SEQ ID NO: 1446088 - DNA, 25 bp, Homo sapien
gaaggtctctcgtgatgtgccaaac

SEQ ID NO: 1446089 - DNA, 25 bp, Homo sapien
gatgaaccgaatggagaccactgct

SEQ ID NO: 1446090 - DNA, 25 bp, Homo sapien
gatatgctgacacggtctgacaaag

SEQ ID NO: 1446091 - DNA, 25 bp, Homo sapien
gacacggtctgacaaagatactcta

SEQ ID NO: 1446092 - DNA, 25 bp, Homo sapien
tctgacaaagatactctaaagtctc

SEQ ID NO: 1446093 - DNA, 25 bp, Homo sapien
gggcccagctgtagatatgctgaca

SEQ ID NO: 1446094 - DNA, 25 bp, Homo sapien
ttacagacatgtgccgctatgcctg

SEQ ID NO: 1446095 - DNA, 25 bp, Homo sapien
tcttgaactcccagcctcaggtgat

SEQ ID NO: 1446096 - DNA, 25 bp, Homo sapien
gtcttgaactcccagcctcaggtga

SEQ ID NO: 1446097 - DNA, 25 bp, Homo sapien
atgcctggctaattttgtattttaa

SEQ ID NO: 1446098 - DNA, 25 bp, Homo sapien
cagggctattttgggtgtgtaccag

SEQ ID NO: 1446099 - DNA, 25 bp, Homo sapien
tgctgctcagtgcactcctgatagg

SEQ ID NO: 1446100 - DNA, 25 bp, Homo sapien
caccctagcctccagggctattttg

SEQ ID NO: 1446101 - DNA, 25 bp, Homo sapien
ggttaatctccttaagcattgagcc

SEQ ID NO: 1446102 - DNA, 25 bp, Homo sapien
ggagagttcccggatgattagggcg

SEQ ID NO: 1446103 - DNA, 25 bp, Homo sapien
tgattagggcggagctacactggct

SEQ ID NO: 1446104 - DNA, 25 bp, Homo sapien
cccggatgattagggcggagctaca

SEQ ID NO: 1446105 - DNA, 25 bp, Homo sapien
cggagctacactggctgacaggtct

SEQ ID NO: 1446106 - DNA, 25 bp, Homo sapien
caatagccagagtatgcatcttggg

SEQ ID NO: 1446107 - DNA, 25 bp, Homo sapien
gcacaatagccagagtatgcatctt

SEQ ID NO: 1446108 - DNA, 25 bp, Homo sapien
tttgcacaatagccagagtatgcat

SEQ ID NO: 1446109 - DNA, 25 bp, Homo sapien
gagtatgcatcttggggctgtcctt

SEQ ID NO: 1446110 - DNA, 25 bp, Homo sapien
ttaaactgacaggtgaggcttgcac

SEQ ID NO: 1446111 - DNA, 25 bp, Homo sapien
tgttaatggtgccaaagaagccacc

SEQ ID NO: 1446112 - DNA, 25 bp, Homo sapien
gagtagagatttgctttcggcccac

SEQ ID NO: 1446113 - DNA, 25 bp, Homo sapien
tcacatggagtgaaggccaccgtca

SEQ ID NO: 1446114 - DNA, 25 bp, Homo sapien
tcaaggatgtacacacaaacacaca

SEQ ID NO: 1446115 - DNA, 25 bp, Homo sapien
caaggatgtacacacaaacacacac

SEQ ID NO: 1446116 - DNA, 25 bp, Homo sapien
atcaaggatgtacacacaaacacac

SEQ ID NO: 1446117 - DNA, 25 bp, Homo sapien
aggatgtacacacaaacacacacac

SEQ ID NO: 1446118 - DNA, 25 bp, Homo sapien
tctgtccgcagaaccaagtgtggac

SEQ ID NO: 1446119 - DNA, 25 bp, Homo sapien
cacttctatttcttgactcgggctc

SEQ ID NO: 1446120 - DNA, 25 bp, Homo sapien
tcttgactcgggctctgtccgcaga

SEQ ID NO: 1446121 - DNA, 25 bp, Homo sapien
gctctgtccgcagaaccaagtgtgg

SEQ ID NO: 1446122 - DNA, 25 bp, Homo sapien
tgtgcttaagcccattgtaggtgtg

SEQ ID NO: 1446123 - DNA, 25 bp, Homo sapien
ccagctgctaaagggttaattacca

SEQ ID NO: 1446124 - DNA, 25 bp, Homo sapien
aaagtcatacttcatcggaggctag

SEQ ID NO: 1446125 - DNA, 25 bp, Homo sapien
tggacaaaggtatcccacaaagtca

SEQ ID NO: 1446126 - DNA, 25 bp, Homo sapien
ggaccaggatggagtcaacttgaca

SEQ ID NO: 1446127 - DNA, 25 bp, Homo sapien
gacaatggactcttcaaggacacct

SEQ ID NO: 1446128 - DNA, 25 bp, Homo sapien
gaagcatcctaatcatgaagccagg

SEQ ID NO: 1446129 - DNA, 25 bp, Homo sapien
taagagattcgcaccgctagttcag

SEQ ID NO: 1446130 - DNA, 25 bp, Homo sapien
ccggttgtacacacccgtggactgt

SEQ ID NO: 1446131 - DNA, 25 bp, Homo sapien
tttctctgccgcagccccacgggaa

SEQ ID NO: 1446132 - DNA, 25 bp, Homo sapien
gagcatggcctcccggttgtacaca

SEQ ID NO: 1446133 - DNA, 25 bp, Homo sapien
tggactgtttctccgtctggtttct

SEQ ID NO: 1446134 - DNA, 25 bp, Homo sapien
tcttcactcacctgccggcgatatt

SEQ ID NO: 1446135 - DNA, 25 bp, Homo sapien
ggcgatatttggctactctagacat

SEQ ID NO: 1446136 - DNA, 25 bp, Homo sapien
tcacctgccggcgatatttggctac

SEQ ID NO: 1446137 - DNA, 25 bp, Homo sapien
caggctgtcgatgtcggggtcttca

SEQ ID NO: 1446138 - DNA, 25 bp, Homo sapien
gcccttctgtgctacaggtgctgaa

SEQ ID NO: 1446139 - DNA, 25 bp, Homo sapien
tgaggagcaaacctcctgctggtcg

SEQ ID NO: 1446140 - DNA, 25 bp, Homo sapien
tgctggtcgaggactgcagctcctt

SEQ ID NO: 1446141 - DNA, 25 bp, Homo sapien
gaagtgttcactggacgcagcagcc

SEQ ID NO: 1446142 - DNA, 25 bp, Homo sapien
tcccgaacagtcagggctacaggca

SEQ ID NO: 1446143 - DNA, 25 bp, Homo sapien
cactgagacactgtttgccctaaag

SEQ ID NO: 1446144 - DNA, 25 bp, Homo sapien
tccaaattggtcatggctctccaga

SEQ ID NO: 1446145 - DNA, 25 bp, Homo sapien
tgagaggctctggtgtcaatgtccc

SEQ ID NO: 1446146 - DNA, 25 bp, Homo sapien
taaaataggtagctttgcagtttgg

SEQ ID NO: 1446147 - DNA, 25 bp, Homo sapien
tacaatccagctttattcgaaagat

SEQ ID NO: 1446148 - DNA, 25 bp, Homo sapien
gctttgggccgttgctaattttcca

SEQ ID NO: 1446149 - DNA, 25 bp, Homo sapien
taagtattctaactcttgttcggtg

SEQ ID NO: 1446150 - DNA, 25 bp, Homo sapien
gaaagatgaaggaccaaaaggccaa

SEQ ID NO: 1446151 - DNA, 25 bp, Homo sapien
gaattcatggagagtgtactggcac

SEQ ID NO: 1446152 - DNA, 25 bp, Homo sapien
tagacttcgatgtttcatgctcatg

SEQ ID NO: 1446153 - DNA, 25 bp, Homo sapien
gcagagtcaacatggatcatttcac

SEQ ID NO: 1446154 - DNA, 25 bp, Homo sapien
cctccaacttccgggcctttgagct

SEQ ID NO: 1446155 - DNA, 25 bp, Homo sapien
tccaacttccgggcctttgagctgc

SEQ ID NO: 1446156 - DNA, 25 bp, Homo sapien
gcctccaacttccgggcctttgagc

SEQ ID NO: 1446157 - DNA, 25 bp, Homo sapien
ctccaacttccgggcctttgagctg

SEQ ID NO: 1446158 - DNA, 25 bp, Homo sapien
gcaccgcggtcctggacctgcgctg

SEQ ID NO: 1446159 - DNA, 25 bp, Homo sapien
tgagcggcaccgcggtcctggacct

SEQ ID NO: 1446160 - DNA, 25 bp, Homo sapien
cctgcgggctgagttcgggcctcca

SEQ ID NO: 1446161 - DNA, 25 bp, Homo sapien
tggacctgcgggctgagttcgggcc

SEQ ID NO: 1446162 - DNA, 25 bp, Homo sapien
actcgcacccgtgcctggaggtgac

SEQ ID NO: 1446163 - DNA, 25 bp, Homo sapien
aggtgctgctcacctaccgcgtcgg

SEQ ID NO: 1446164 - DNA, 25 bp, Homo sapien
ggagcccgtgagcttctacacgcag

SEQ ID NO: 1446165 - DNA, 25 bp, Homo sapien
agcccttctcgcactatggccaggc

SEQ ID NO: 1446166 - DNA, 25 bp, Homo sapien
gttggctcccgagcagacagcagga

SEQ ID NO: 1446167 - DNA, 25 bp, Homo sapien
aagaagcccttcgtgtacacccagg

SEQ ID NO: 1446168 - DNA, 25 bp, Homo sapien
ccttgcttcgacacgcctgctgtta

SEQ ID NO: 1446169 - DNA, 25 bp, Homo sapien
caggctgtcctaaaccgggccttct

SEQ ID NO: 1446170 - DNA, 25 bp, Homo sapien
taactggtggtaatgccttattcct

SEQ ID NO: 1446171 - DNA, 25 bp, Homo sapien
taggtgacagaatccacttaactgg

SEQ ID NO: 1446172 - DNA, 25 bp, Homo sapien
tgacaacatggtatatcgaactagg

SEQ ID NO: 1446173 - DNA, 25 bp, Homo sapien
cctcctgggtcacatcgtagggtct

SEQ ID NO: 1446174 - DNA, 25 bp, Homo sapien
gatgcattgaacacctatagaacca

SEQ ID NO: 1446175 - DNA, 25 bp, Homo sapien
cattagtaggtttgggtcggacaca

SEQ ID NO: 1446176 - DNA, 25 bp, Homo sapien
ggcccagccagtctcattcatatgt

SEQ ID NO: 1446177 - DNA, 25 bp, Homo sapien
aaaagcagttctaagcgcagccagg

SEQ ID NO: 1446178 - DNA, 25 bp, Homo sapien
tgaagccataactgcgtagcacggt

SEQ ID NO: 1446179 - DNA, 25 bp, Homo sapien
caacaggagagaagctttttggacc

SEQ ID NO: 1446180 - DNA, 25 bp, Homo sapien
caggtcactgcgatggtctctaaac

SEQ ID NO: 1446181 - DNA, 25 bp, Homo sapien
gatccgatcttgcactccgtcactg

SEQ ID NO: 1446182 - DNA, 25 bp, Homo sapien
tttgagatggggcagcaccgtcaag

SEQ ID NO: 1446183 - DNA, 25 bp, Homo sapien
gaagaggttcttgaggtgttcaaaa

SEQ ID NO: 1446184 - DNA, 25 bp, Homo sapien
cctgcagttgccaagtttgagatgg

SEQ ID NO: 1446185 - DNA, 25 bp, Homo sapien
ggagagggcctaggagatgaggttc

SEQ ID NO: 1446186 - DNA, 25 bp, Homo sapien
ttcttagaaacataatttctgggtc

SEQ ID NO: 1446187 - DNA, 25 bp, Homo sapien
tcttagaaacataatttctgggtct

SEQ ID NO: 1446188 - DNA, 25 bp, Homo sapien
taatgcagaaggagacttagagatc

SEQ ID NO: 1446189 - DNA, 25 bp, Homo sapien
tgaatatcttaatcagccattagga

SEQ ID NO: 1446190 - DNA, 25 bp, Homo sapien
caaaacatctaggaaagggcagagc

SEQ ID NO: 1446191 - DNA, 25 bp, Homo sapien
agaagatcaagtcattgccaggcat

SEQ ID NO: 1446192 - DNA, 25 bp, Homo sapien
aacccaggaggagacggaggttgca

SEQ ID NO: 1446193 - DNA, 25 bp, Homo sapien
tgagccaagatcacgccattgcact

SEQ ID NO: 1446194 - DNA, 25 bp, Homo sapien
gtgagccaagatcacgccattgcac

SEQ ID NO: 1446195 - DNA, 25 bp, Homo sapien
cttgaacccaggaggagacggaggt

SEQ ID NO: 1446196 - DNA, 25 bp, Homo sapien
tacacttggatgtggtgacagacgt

SEQ ID NO: 1446197 - DNA, 25 bp, Homo sapien
cttacgtttgattctgcaccaggcg

SEQ ID NO: 1446198 - DNA, 25 bp, Homo sapien
tgacagacgttttcccgaggcttac

SEQ ID NO: 1446199 - DNA, 25 bp, Homo sapien
tccgcgtgaagattgaaccaggtcc

SEQ ID NO: 1446200 - DNA, 25 bp, Homo sapien
tctgtgcggttcgtgatgacttcac

SEQ ID NO: 1446201 - DNA, 25 bp, Homo sapien
caagccattgcagccagataggagt

SEQ ID NO: 1446202 - DNA, 25 bp, Homo sapien
tcatgatcatcagggcagatctgtg

SEQ ID NO: 1446203 - DNA, 25 bp, Homo sapien
cacaagtccatatcgttttaccagg

SEQ ID NO: 1446204 - DNA, 25 bp, Homo sapien
tcttggaagtaccttgagagaggcc

SEQ ID NO: 1446205 - DNA, 25 bp, Homo sapien
tattagatccacagtgaatggccct

SEQ ID NO: 1446206 - DNA, 25 bp, Homo sapien
gaaatgtgtccgctcctctggaagg

SEQ ID NO: 1446207 - DNA, 25 bp, Homo sapien
gaatggccctctgagatcttggaag

SEQ ID NO: 1446208 - DNA, 25 bp, Homo sapien
taactaggaccctgctggagcgaat

SEQ ID NO: 1446209 - DNA, 25 bp, Homo sapien
tgtgggcagggctcatctaggactc

SEQ ID NO: 1446210 - DNA, 25 bp, Homo sapien
tgctgaagagctagcccaactgtgg

SEQ ID NO: 1446211 - DNA, 25 bp, Homo sapien
tcaaatgcccggaatgcagagctcc

SEQ ID NO: 1446212 - DNA, 25 bp, Homo sapien
ggtctcttcaggagcgactgcagca

SEQ ID NO: 1446213 - DNA, 25 bp, Homo sapien
gaccttgccaacagagtgggcgctg

SEQ ID NO: 1446214 - DNA, 25 bp, Homo sapien
tgagtattgcccagcattgagcctg

SEQ ID NO: 1446215 - DNA, 25 bp, Homo sapien
tgtggattctggcaactccggcagg

SEQ ID NO: 1446216 - DNA, 25 bp, Homo sapien
gtgttgtgaatgctacctcctgccc

SEQ ID NO: 1446217 - DNA, 25 bp, Homo sapien
tgaggtgtgaatccccagtgtgctc

SEQ ID NO: 1446218 - DNA, 25 bp, Homo sapien
gaggagggtctctaggcaaattcca

SEQ ID NO: 1446219 - DNA, 25 bp, Homo sapien
tgtcagataccaggacaagggtgtt

SEQ ID NO: 1446220 - DNA, 25 bp, Homo sapien
tggccggcgactcgtctacaagttt

SEQ ID NO: 1446221 - DNA, 25 bp, Homo sapien
tgtattgtcagccatcgtcctggga

SEQ ID NO: 1446222 - DNA, 25 bp, Homo sapien
tcctgggactcggagactatggcct

SEQ ID NO: 1446223 - DNA, 25 bp, Homo sapien
gtttggcaaaaactcaagcggctgg

SEQ ID NO: 1446224 - DNA, 25 bp, Homo sapien
cctccagtgggctgatgctgggacc

SEQ ID NO: 1446225 - DNA, 25 bp, Homo sapien
ctctcccacagagtgctggactgtt

SEQ ID NO: 1446226 - DNA, 25 bp, Homo sapien
gtgctggactgttccaggccctcca

SEQ ID NO: 1446227 - DNA, 25 bp, Homo sapien
cagtgggctgatgctgggaccctta

SEQ ID NO: 1446228 - DNA, 25 bp, Homo sapien
tgctgagcttgggatgcgaatgatc

SEQ ID NO: 1446229 - DNA, 25 bp, Homo sapien
ggcactgtgctagcccactctggct

SEQ ID NO: 1446230 - DNA, 25 bp, Homo sapien
tagcacccagtgaaactgtagtctc

SEQ ID NO: 1446231 - DNA, 25 bp, Homo sapien
tgtgggcgcttctaacctaatcctc

SEQ ID NO: 1446232 - DNA, 25 bp, Homo sapien
aaggccaggtttgggatcttattgg

SEQ ID NO: 1446233 - DNA, 25 bp, Homo sapien
ccagaaacacatctgtttaggagga

SEQ ID NO: 1446234 - DNA, 25 bp, Homo sapien
aattccagaaacacatctgtttagg

SEQ ID NO: 1446235 - DNA, 25 bp, Homo sapien
cagggagttggcttgaccctgagaa

SEQ ID NO: 1446236 - DNA, 25 bp, Homo sapien
ggctggagatgttcccaacccagtc

SEQ ID NO: 1446237 - DNA, 25 bp, Homo sapien
cccagaagggcttgaaactgacact

SEQ ID NO: 1446238 - DNA, 25 bp, Homo sapien
gcttgaaactgacactgggccatga

SEQ ID NO: 1446239 - DNA, 25 bp, Homo sapien
gaagggcttgaaactgacactgggc

SEQ ID NO: 1446240 - DNA, 25 bp, Homo sapien
tgacttcctgatctgggagctccag

SEQ ID NO: 1446241 - DNA, 25 bp, Homo sapien
gacttcctgatctgggagctccagg

SEQ ID NO: 1446242 - DNA, 25 bp, Homo sapien
agtgacttcctgatctgggagctcc

SEQ ID NO: 1446243 - DNA, 25 bp, Homo sapien
gtgacttcctgatctgggagctcca

SEQ ID NO: 1446244 - DNA, 25 bp, Homo sapien
atcgtgtggcacagctactacctga

SEQ ID NO: 1446245 - DNA, 25 bp, Homo sapien
cggtgaccgagagctcctacagtgc

SEQ ID NO: 1446246 - DNA, 25 bp, Homo sapien
ggcattgtgggcaacctgtcggtca

SEQ ID NO: 1446247 - DNA, 25 bp, Homo sapien
ctgtcggtcatgtgcatcgtgtggc

SEQ ID NO: 1446248 - DNA, 25 bp, Homo sapien
gctttcccataggaggcccttcttg

SEQ ID NO: 1446249 - DNA, 25 bp, Homo sapien
ggtgctttcccataggaggcccttc

SEQ ID NO: 1446250 - DNA, 25 bp, Homo sapien
taggtgctttcccataggaggccct

SEQ ID NO: 1446251 - DNA, 25 bp, Homo sapien
tgctttcccataggaggcccttctt

SEQ ID NO: 1446252 - DNA, 25 bp, Homo sapien
caggaaaacctagccatgcttgcag

SEQ ID NO: 1446253 - DNA, 25 bp, Homo sapien
gcacctggcccctgaacaaattctt

SEQ ID NO: 1446254 - DNA, 25 bp, Homo sapien
aagtcatattagcacctgctgcacg

SEQ ID NO: 1446255 - DNA, 25 bp, Homo sapien
gccccagatgagtgagattgctggt

SEQ ID NO: 1446256 - DNA, 25 bp, Homo sapien
cacattctttcctccaactctctgg

SEQ ID NO: 1446257 - DNA, 25 bp, Homo sapien
tcagatgccaaattccatccacatt

SEQ ID NO: 1446258 - DNA, 25 bp, Homo sapien
tctggcagtggggaactgcctctcc

SEQ ID NO: 1446259 - DNA, 25 bp, Homo sapien
tctttcctccaactctctggcagtg

SEQ ID NO: 1446260 - DNA, 25 bp, Homo sapien
agaggcagcaaaggcggtgacactc

SEQ ID NO: 1446261 - DNA, 25 bp, Homo sapien
tgcagctcagttcgcacacaacagc

SEQ ID NO: 1446262 - DNA, 25 bp, Homo sapien
ctgaggcctgaactgggcctaagga

SEQ ID NO: 1446263 - DNA, 25 bp, Homo sapien
tacccctgaagcacagttaactggt

SEQ ID NO: 1446264 - DNA, 25 bp, Homo sapien
tgccaactgcggaaaagtaaccagc

SEQ ID NO: 1446265 - DNA, 25 bp, Homo sapien
atgtgctcgcgctccgtggctctgt

SEQ ID NO: 1446266 - DNA, 25 bp, Homo sapien
tgtgggcctgtagggcaacccatgc

SEQ ID NO: 1446267 - DNA, 25 bp, Homo sapien
tttgtgcagcgccattgtgctcccc

SEQ ID NO: 1446268 - DNA, 25 bp, Homo sapien
cccgtgtgcctggtggtttctggta

SEQ ID NO: 1446269 - DNA, 25 bp, Homo sapien
tacctggtcgtcgtacctggtggct

SEQ ID NO: 1446270 - DNA, 25 bp, Homo sapien
cactgccaggacaagccagattggg

SEQ ID NO: 1446271 - DNA, 25 bp, Homo sapien
aacagaaaatgaagtgggccgtgga

SEQ ID NO: 1446272 - DNA, 25 bp, Homo sapien
agctcggcttcaggtttagatgatg

SEQ ID NO: 1446273 - DNA, 25 bp, Homo sapien
taaaaacaggagttcaaacctcagc

SEQ ID NO: 1446274 - DNA, 25 bp, Homo sapien
agatgatgacggtccctggtctgag

SEQ ID NO: 1446275 - DNA, 25 bp, Homo sapien
aggagttcaaacctcagcagaacag

SEQ ID NO: 1446276 - DNA, 25 bp, Homo sapien
tccgtgacttcgagtgttgaataag

SEQ ID NO: 1446277 - DNA, 25 bp, Homo sapien
tgacttcgagtgttgaataagccac

SEQ ID NO: 1446278 - DNA, 25 bp, Homo sapien
acttcgagtgttgaataagccactg

SEQ ID NO: 1446279 - DNA, 25 bp, Homo sapien
cttctccgtgacttcgagtgttgaa

SEQ ID NO: 1446280 - DNA, 25 bp, Homo sapien
atggagtagcagcagatctctcggt

SEQ ID NO: 1446281 - DNA, 25 bp, Homo sapien
agtagcagcagatctctcggtcctg

SEQ ID NO: 1446282 - DNA, 25 bp, Homo sapien
gagtagcagcagatctctcggtcct

SEQ ID NO: 1446283 - DNA, 25 bp, Homo sapien
tttctttgcaagagatggagtagca

SEQ ID NO: 1446284 - DNA, 25 bp, Homo sapien
tgctcccggaaggtctcgcttgtta

SEQ ID NO: 1446285 - DNA, 25 bp, Homo sapien
ccaatgctcccggaaggtctcgctt

SEQ ID NO: 1446286 - DNA, 25 bp, Homo sapien
ctcgcttgttacccaggactaagac

SEQ ID NO: 1446287 - DNA, 25 bp, Homo sapien
tcatccaatgctcccggaaggtctc

SEQ ID NO: 1446288 - DNA, 25 bp, Homo sapien
ccgtttcctctctgcgcccctacca

SEQ ID NO: 1446289 - DNA, 25 bp, Homo sapien
gcagccgtgcccaggttgtctgggt

SEQ ID NO: 1446290 - DNA, 25 bp, Homo sapien
gatgaggtctagggcagccgtgccc

SEQ ID NO: 1446291 - DNA, 25 bp, Homo sapien
ctctctgcgcccctaccatgcctgg

SEQ ID NO: 1446292 - DNA, 25 bp, Homo sapien
taggttgtggagctcgttcttagag

SEQ ID NO: 1446293 - DNA, 25 bp, Homo sapien
tgtccagtaggttgtggagctcgtt

SEQ ID NO: 1446294 - DNA, 25 bp, Homo sapien
cagtaggttgtggagctcgttctta

SEQ ID NO: 1446295 - DNA, 25 bp, Homo sapien
tccagtaggttgtggagctcgttct

SEQ ID NO: 1446296 - DNA, 25 bp, Homo sapien
acatgctgcggaaacgcggctgtcc

SEQ ID NO: 1446297 - DNA, 25 bp, Homo sapien
acgatggcgctcactcctcggcagt

SEQ ID NO: 1446298 - DNA, 25 bp, Homo sapien
ccacatgctgcggaaacgcggctgt

SEQ ID NO: 1446299 - DNA, 25 bp, Homo sapien
tcggcagtagcgctcccacatgctg

SEQ ID NO: 1446300 - DNA, 25 bp, Homo sapien
tgcgcatgttgaaacccacggtggg

SEQ ID NO: 1446301 - DNA, 25 bp, Homo sapien
gattttgcgcatgttgaaacccacg

SEQ ID NO: 1446302 - DNA, 25 bp, Homo sapien
ctttggtgattttgcgcatgttgaa

SEQ ID NO: 1446303 - DNA, 25 bp, Homo sapien
ggtgattttgcgcatgttgaaaccc

SEQ ID NO: 1446304 - DNA, 25 bp, Homo sapien
agtacccaggactgacacccaatga

SEQ ID NO: 1446305 - DNA, 25 bp, Homo sapien
gatataagaactgagtacccaggac

SEQ ID NO: 1446306 - DNA, 25 bp, Homo sapien
tgcaggaaccacctattcatcaggg

SEQ ID NO: 1446307 - DNA, 25 bp, Homo sapien
tcatcagggccttaggatgatataa

SEQ ID NO: 1446308 - DNA, 25 bp, Homo sapien
cccagagcacagctatagtaacacc

SEQ ID NO: 1446309 - DNA, 25 bp, Homo sapien
tcccagagcacagctatagtaacac

SEQ ID NO: 1446310 - DNA, 25 bp, Homo sapien
tactgaagcccgaccagcgtgagct

SEQ ID NO: 1446311 - DNA, 25 bp, Homo sapien
gcagcttgttgaacaaagcgatcat

SEQ ID NO: 1446312 - DNA, 25 bp, Homo sapien
gaaccagtccagcagcttgttgaac

SEQ ID NO: 1446313 - DNA, 25 bp, Homo sapien
tccttccagaatagggccttgaacc

SEQ ID NO: 1446314 - DNA, 25 bp, Homo sapien
ggtcccgcggctcggtgcgggcgga

SEQ ID NO: 1446315 - DNA, 25 bp, Homo sapien
gcggaggctcgagcgcggctgccga

SEQ ID NO: 1446316 - DNA, 25 bp, Homo sapien
cgacgactcgctgccccggaatcgg

SEQ ID NO: 1446317 - DNA, 25 bp, Homo sapien
gctcgccgatgggtgtggcttccgc

SEQ ID NO: 1446318 - DNA, 25 bp, Homo sapien
ttctggagcttgtaccctctgagct

SEQ ID NO: 1446319 - DNA, 25 bp, Homo sapien
tactgttctggagcttgtaccctct

SEQ ID NO: 1446320 - DNA, 25 bp, Homo sapien
cacttggttactgttctggagcttg

SEQ ID NO: 1446321 - DNA, 25 bp, Homo sapien
tttcccacttggttactgttctgga

SEQ ID NO: 1446322 - DNA, 25 bp, Homo sapien
acagtcgtgcctctcacagggctca

SEQ ID NO: 1446323 - DNA, 25 bp, Homo sapien
tctccagatccaactcctcgggggt

SEQ ID NO: 1446324 - DNA, 25 bp, Homo sapien
ccaccgagcctcattggcatagaca

SEQ ID NO: 1446325 - DNA, 25 bp, Homo sapien
gcactgcgtgttcttcaggagagaa

SEQ ID NO: 1446326 - DNA, 25 bp, Homo sapien
tgtggcgttcagtcctgaggtagac

SEQ ID NO: 1446327 - DNA, 25 bp, Homo sapien
catccccatctcagaatgggcagcc

SEQ ID NO: 1446328 - DNA, 25 bp, Homo sapien
gccagtctcagattcaaggaggagg

SEQ ID NO: 1446329 - DNA, 25 bp, Homo sapien
gaggttccccttactgtccatctgg

SEQ ID NO: 1446330 - DNA, 25 bp, Homo sapien
gtagcctactcttatgacacatggg

SEQ ID NO: 1446331 - DNA, 25 bp, Homo sapien
tgagacttggagatcaggaccagac

SEQ ID NO: 1446332 - DNA, 25 bp, Homo sapien
gagatttcaactgccaggcctggtc

SEQ ID NO: 1446333 - DNA, 25 bp, Homo sapien
ctgcaagcaccactaaggaggcact

SEQ ID NO: 1446334 - DNA, 25 bp, Homo sapien
tacccccagatcactcggcccactt

SEQ ID NO: 1446335 - DNA, 25 bp, Homo sapien
acccccagatcactcggcccacttt

SEQ ID NO: 1446336 - DNA, 25 bp, Homo sapien
gtacccccagatcactcggcccact

SEQ ID NO: 1446337 - DNA, 25 bp, Homo sapien
aggcacctgggccaccggagggtgg

SEQ ID NO: 1446338 - DNA, 25 bp, Homo sapien
cttgagggaggtaggcacctgggcc

SEQ ID NO: 1446339 - DNA, 25 bp, Homo sapien
ccaggcttgagggaggtaggcacct

SEQ ID NO: 1446340 - DNA, 25 bp, Homo sapien
cttcccaggcttgagggaggtaggc

SEQ ID NO: 1446341 - DNA, 25 bp, Homo sapien
caggggctgggttcctcaggcagct

SEQ ID NO: 1446342 - DNA, 25 bp, Homo sapien
tcaggggctgggttcctcaggcagc

SEQ ID NO: 1446343 - DNA, 25 bp, Homo sapien
tactgctctgccgtctggatcatcc

SEQ ID NO: 1446344 - DNA, 25 bp, Homo sapien
ggtactgctctgccgtctggatcat

SEQ ID NO: 1446345 - DNA, 25 bp, Homo sapien
tggtactgctctgccgtctggatca

SEQ ID NO: 1446346 - DNA, 25 bp, Homo sapien
ctgctctgccgtctggatcatcccc

SEQ ID NO: 1446347 - DNA, 25 bp, Homo sapien
tggtgatgggcctagcagaactctg

SEQ ID NO: 1446348 - DNA, 25 bp, Homo sapien
cccggccatccagatagatattttt

SEQ ID NO: 1446349 - DNA, 25 bp, Homo sapien
ggcccagaggcactgatgccatccg

SEQ ID NO: 1446350 - DNA, 25 bp, Homo sapien
tgtaaaataaacagctctaagcaga

SEQ ID NO: 1446351 - DNA, 25 bp, Homo sapien
ttggccttgtttacacccacagacc

SEQ ID NO: 1446352 - DNA, 25 bp, Homo sapien
gttgttggccttgtttacacccaca

SEQ ID NO: 1446353 - DNA, 25 bp, Homo sapien
tgttggccttgtttacacccacaga

SEQ ID NO: 1446354 - DNA, 25 bp, Homo sapien
gccttgtttacacccacagacccac

SEQ ID NO: 1446355 - DNA, 25 bp, Homo sapien
tgttgacagccaattcgcgtggcga

SEQ ID NO: 1446356 - DNA, 25 bp, Homo sapien
tggcgatgaagcagcccgtccggcc

SEQ ID NO: 1446357 - DNA, 25 bp, Homo sapien
ctgtctagccgcagttggcacacaa

SEQ ID NO: 1446358 - DNA, 25 bp, Homo sapien
tctcctcgggctttcagctgttgac

SEQ ID NO: 1446359 - DNA, 25 bp, Homo sapien
tctggccaggccgaaaagaggatgt

SEQ ID NO: 1446360 - DNA, 25 bp, Homo sapien
gggcccagctgattctggtgtctga

SEQ ID NO: 1446361 - DNA, 25 bp, Homo sapien
tgtgctttactgaccggcgctcttc

SEQ ID NO: 1446362 - DNA, 25 bp, Homo sapien
ctgcagtggactacgataggcccgg

SEQ ID NO: 1446363 - DNA, 25 bp, Homo sapien
gattggagacaaggcatgagaacca

SEQ ID NO: 1446364 - DNA, 25 bp, Homo sapien
gggtggagggcactgtctaccttct

SEQ ID NO: 1446365 - DNA, 25 bp, Homo sapien
aaggcatgagaaccaaggtcagggt

SEQ ID NO: 1446366 - DNA, 25 bp, Homo sapien
ggtggagggcactgtctaccttctt

SEQ ID NO: 1446367 - DNA, 25 bp, Homo sapien
tctggaagggtccataggtttcctc

SEQ ID NO: 1446368 - DNA, 25 bp, Homo sapien
tggatggtgagctgccgcacagtgt

SEQ ID NO: 1446369 - DNA, 25 bp, Homo sapien
tctgtgggccagtagtggacacatt

SEQ ID NO: 1446370 - DNA, 25 bp, Homo sapien
gagctgccgcacagtgtattctggg

SEQ ID NO: 1446371 - DNA, 25 bp, Homo sapien
gggctatatctcagggaactttctg

SEQ ID NO: 1446372 - DNA, 25 bp, Homo sapien
gtggcaatgtagaccttctccttcc

SEQ ID NO: 1446373 - DNA, 25 bp, Homo sapien
ggccctgggtggcaatgtagacctt

SEQ ID NO: 1446374 - DNA, 25 bp, Homo sapien
aagtccgacacagtgttgggcatgg

SEQ ID NO: 1446375 - DNA, 25 bp, Homo sapien
tctcccagaagtccgacacagtgtt

SEQ ID NO: 1446376 - DNA, 25 bp, Homo sapien
tggaagatattctcagacgtctgag

SEQ ID NO: 1446377 - DNA, 25 bp, Homo sapien
ctcagacgtctgagaattcccccat

SEQ ID NO: 1446378 - DNA, 25 bp, Homo sapien
tggctggaagatattctcagacgtc

SEQ ID NO: 1446379 - DNA, 25 bp, Homo sapien
cagccatggctggaagatattctca

SEQ ID NO: 1446380 - DNA, 25 bp, Homo sapien
tgtgcccggcctagacagacacggc

SEQ ID NO: 1446381 - DNA, 25 bp, Homo sapien
gcattgatgtaatctccgtcctcct

SEQ ID NO: 1446382 - DNA, 25 bp, Homo sapien
ccggcctagacagacacggctctgg

SEQ ID NO: 1446383 - DNA, 25 bp, Homo sapien
ttgatgtaatctccgtcctcctggc

SEQ ID NO: 1446384 - DNA, 25 bp, Homo sapien
gttctctagccccagggactgtacc

SEQ ID NO: 1446385 - DNA, 25 bp, Homo sapien
agggactgtacccgactcccttcat

SEQ ID NO: 1446386 - DNA, 25 bp, Homo sapien
gactcccttcatcccagcagcagtt

SEQ ID NO: 1446387 - DNA, 25 bp, Homo sapien
tgaagttctctagccccagggactg

SEQ ID NO: 1446388 - DNA, 25 bp, Homo sapien
gtcttcggggctgacaaagtttgaa

SEQ ID NO: 1446389 - DNA, 25 bp, Homo sapien
agatggtcttgtatcggtccttgga

SEQ ID NO: 1446390 - DNA, 25 bp, Homo sapien
ccagggatgtccaggtcttcggggc

SEQ ID NO: 1446391 - DNA, 25 bp, Homo sapien
tcttgtatcggtccttggaggcgtg

SEQ ID NO: 1446392 - DNA, 25 bp, Homo sapien
gtccagcagtgcgcagaaagtgtag

SEQ ID NO: 1446393 - DNA, 25 bp, Homo sapien
gtggctggcgctgaagggcccagcg

SEQ ID NO: 1446394 - DNA, 25 bp, Homo sapien
cgctgaagggcccagcgggtaaggg

SEQ ID NO: 1446395 - DNA, 25 bp, Homo sapien
tgacctcccggggtgtgttcacaga

SEQ ID NO: 1446396 - DNA, 25 bp, Homo sapien
gcccccagggaccgaacgtccagca

SEQ ID NO: 1446397 - DNA, 25 bp, Homo sapien
cccccagggaccgaacgtccagcat

SEQ ID NO: 1446398 - DNA, 25 bp, Homo sapien
gcccaccactgcctagtgagcaccc

SEQ ID NO: 1446399 - DNA, 25 bp, Homo sapien
tgatggcactattatggctcacagc

SEQ ID NO: 1446400 - DNA, 25 bp, Homo sapien
tgtgatggcactattatggctcaca

SEQ ID NO: 1446401 - DNA, 25 bp, Homo sapien
ccactgcctagtgagcacccaatca

SEQ ID NO: 1446402 - DNA, 25 bp, Homo sapien
caaattggagtcaacaactgagggc

SEQ ID NO: 1446403 - DNA, 25 bp, Homo sapien
ggctgtgggccttgcctggaattta

SEQ ID NO: 1446404 - DNA, 25 bp, Homo sapien
tgcaaatgagcactactggtttcct

SEQ ID NO: 1446405 - DNA, 25 bp, Homo sapien
ttactgttataaggcacctctgagg

SEQ ID NO: 1446406 - DNA, 25 bp, Homo sapien
cttggctggcgttttttcaggcgga

SEQ ID NO: 1446407 - DNA, 25 bp, Homo sapien
ttttttcaggcggaggctgggtcat

SEQ ID NO: 1446408 - DNA, 25 bp, Homo sapien
ctctcctgcagtcgcacatgcttct

SEQ ID NO: 1446409 - DNA, 25 bp, Homo sapien
cctgcagtcgcacatgcttcttggc

SEQ ID NO: 1446410 - DNA, 25 bp, Homo sapien
agacaaggtcaacggctgtgctctg

SEQ ID NO: 1446411 - DNA, 25 bp, Homo sapien
aaggtcaacggctgtgctctggagc

SEQ ID NO: 1446412 - DNA, 25 bp, Homo sapien
gtcaacggctgtgctctggagcgcc

SEQ ID NO: 1446413 - DNA, 25 bp, Homo sapien
tcaacggctgtgctctggagcgccc

SEQ ID NO: 1446414 - DNA, 25 bp, Homo sapien
aggctcactcagccatgaggtctgc

SEQ ID NO: 1446415 - DNA, 25 bp, Homo sapien
gggccctccgctgctgttctctggc

SEQ ID NO: 1446416 - DNA, 25 bp, Homo sapien
agggccctccgctgctgttctctgg

SEQ ID NO: 1446417 - DNA, 25 bp, Homo sapien
gaagccatctctgagctaaccagtg

SEQ ID NO: 1446418 - DNA, 25 bp, Homo sapien
gcccttgaacgacagcgcatggtga

SEQ ID NO: 1446419 - DNA, 25 bp, Homo sapien
gagatgccctcttatatccccggag

SEQ ID NO: 1446420 - DNA, 25 bp, Homo sapien
gacaggatctatttggtgggaccca

SEQ ID NO: 1446421 - DNA, 25 bp, Homo sapien
gtgctgtcccacaaagaacccaagg

SEQ ID NO: 1446422 - DNA, 25 bp, Homo sapien
gaatccatgcctcacaatgtgaagg

SEQ ID NO: 1446423 - DNA, 25 bp, Homo sapien
ttgggaattcatggccaagcacaga

SEQ ID NO: 1446424 - DNA, 25 bp, Homo sapien
tacagacagtggacagtctctggcc

SEQ ID NO: 1446425 - DNA, 25 bp, Homo sapien
tgtgcattctcccagatggagccct

SEQ ID NO: 1446426 - DNA, 25 bp, Homo sapien
aattgtctgaacagcgcactggcag

SEQ ID NO: 1446427 - DNA, 25 bp, Homo sapien
tatatctacctctacaattgtctga

SEQ ID NO: 1446428 - DNA, 25 bp, Homo sapien
taaccctatgtccatctccagaagc

SEQ ID NO: 1446429 - DNA, 25 bp, Homo sapien
tgtgagcacgaaaacccaattgtca

SEQ ID NO: 1446430 - DNA, 25 bp, Homo sapien
cacatgtgagcacgaaaacccaatt

SEQ ID NO: 1446431 - DNA, 25 bp, Homo sapien
gcacgaaaacccaattgtcacactt

SEQ ID NO: 1446432 - DNA, 25 bp, Homo sapien
tgagcacgaaaacccaattgtcaca

SEQ ID NO: 1446433 - DNA, 25 bp, Homo sapien
catcatgcccagtaacagccccgat

SEQ ID NO: 1446434 - DNA, 25 bp, Homo sapien
tcatgcccagtaacagccccgatgt

SEQ ID NO: 1446435 - DNA, 25 bp, Homo sapien
gtaacagccccgatgtccaacactt

SEQ ID NO: 1446436 - DNA, 25 bp, Homo sapien
cagtaacagccccgatgtccaacac

SEQ ID NO: 1446437 - DNA, 25 bp, Homo sapien
ggccgtgagccttcaaattagtcag

SEQ ID NO: 1446438 - DNA, 25 bp, Homo sapien
ggtaatccaggttagcacaggagag

SEQ ID NO: 1446439 - DNA, 25 bp, Homo sapien
gatgacaccatatgatgcagtccag

SEQ ID NO: 1446440 - DNA, 25 bp, Homo sapien
ggtgattgccccgataaacatggaa

SEQ ID NO: 1446441 - DNA, 25 bp, Homo sapien
tccccaacagctaacacgaagcggt

SEQ ID NO: 1446442 - DNA, 25 bp, Homo sapien
gaagcggtgcgttttaacaagagcc

SEQ ID NO: 1446443 - DNA, 25 bp, Homo sapien
acagcacacgctgcaaaggcacaaa

SEQ ID NO: 1446444 - DNA, 25 bp, Homo sapien
tatcggttggaatcccgagagctcc

SEQ ID NO: 1446445 - DNA, 25 bp, Homo sapien
aggaagacattctgacactctcgag

SEQ ID NO: 1446446 - DNA, 25 bp, Homo sapien
cttcaacgcacccagcaggaagaca

SEQ ID NO: 1446447 - DNA, 25 bp, Homo sapien
ctccttaattgagggcttcaacgca

SEQ ID NO: 1446448 - DNA, 25 bp, Homo sapien
gaagacattctgacactctcgagtc

SEQ ID NO: 1446449 - DNA, 25 bp, Homo sapien
ctgttagctgtcacttccactgctg

SEQ ID NO: 1446450 - DNA, 25 bp, Homo sapien
gaacaccggactcaaaaccaatgcc

SEQ ID NO: 1446451 - DNA, 25 bp, Homo sapien
aatgctgaaagtgcccataactgga

SEQ ID NO: 1446452 - DNA, 25 bp, Homo sapien
caaagtgggcacttgggtaaagttg

SEQ ID NO: 1446453 - DNA, 25 bp, Homo sapien
acattaactaagatgaaccaggaca

SEQ ID NO: 1446454 - DNA, 25 bp, Homo sapien
gcaacttagatcaccttggcaaaga

SEQ ID NO: 1446455 - DNA, 25 bp, Homo sapien
gaacacattaactaagatgaaccag

SEQ ID NO: 1446456 - DNA, 25 bp, Homo sapien
aaattcaaggtaggcaacttagatc

SEQ ID NO: 1446457 - DNA, 25 bp, Homo sapien
ttctgtgttgagttgtgtactctgg

SEQ ID NO: 1446458 - DNA, 25 bp, Homo sapien
tactctggagtcaccagcctctggt

SEQ ID NO: 1446459 - DNA, 25 bp, Homo sapien
tatgcctactagctgactggccttc

SEQ ID NO: 1446460 - DNA, 25 bp, Homo sapien
ttttctatgcctactagctgactgg

SEQ ID NO: 1446461 - DNA, 25 bp, Homo sapien
tcacacaaatgccaggatggagaaa

SEQ ID NO: 1446462 - DNA, 25 bp, Homo sapien
aaaatgaagctctgtaatattattt

SEQ ID NO: 1446463 - DNA, 25 bp, Homo sapien
cacagtaaggttcacacaaatgcca

SEQ ID NO: 1446464 - DNA, 25 bp, Homo sapien
aaacacagtaaggttcacacaaatg

SEQ ID NO: 1446465 - DNA, 25 bp, Homo sapien
gaactatgatgtgctactttccatg

SEQ ID NO: 1446466 - DNA, 25 bp, Homo sapien
tgcccaataggtgacaactgttatg

SEQ ID NO: 1446467 - DNA, 25 bp, Homo sapien
gcaactagtccctgcaaatatagat

SEQ ID NO: 1446468 - DNA, 25 bp, Homo sapien
gcctgccgtctagtgttgcccaata

SEQ ID NO: 1446469 - DNA, 25 bp, Homo sapien
gaaggctggcttattatatttaaat

SEQ ID NO: 1446470 - DNA, 25 bp, Homo sapien
attcttgaggaaggctggcttatta

SEQ ID NO: 1446471 - DNA, 25 bp, Homo sapien
gaggaaggctggcttattatattta

SEQ ID NO: 1446472 - DNA, 25 bp, Homo sapien
cttgaggaaggctggcttattatat

SEQ ID NO: 1446473 - DNA, 25 bp, Homo sapien
aaacatgatttgcagtggttagagc

SEQ ID NO: 1446474 - DNA, 25 bp, Homo sapien
aaaacatgatttgcagtggttagag

SEQ ID NO: 1446475 - DNA, 25 bp, Homo sapien
gaaaaacatgatttgcagtggttag

SEQ ID NO: 1446476 - DNA, 25 bp, Homo sapien
agaaaaacatgatttgcagtggtta

SEQ ID NO: 1446477 - DNA, 25 bp, Homo sapien
acaaggtaggatatgtgttgcagag

SEQ ID NO: 1446478 - DNA, 25 bp, Homo sapien
gagagttagcggtatagacaaggta

SEQ ID NO: 1446479 - DNA, 25 bp, Homo sapien
agttagcggtatagacaaggtagga

SEQ ID NO: 1446480 - DNA, 25 bp, Homo sapien
cggtatagacaaggtaggatatgtg

SEQ ID NO: 1446481 - DNA, 25 bp, Homo sapien
aacacagttgcgatgttgagggatg

SEQ ID NO: 1446482 - DNA, 25 bp, Homo sapien
gctgaatagaggtcaacacagttgc

SEQ ID NO: 1446483 - DNA, 25 bp, Homo sapien
tatgtcagccatgagcgggtcatca

SEQ ID NO: 1446484 - DNA, 25 bp, Homo sapien
gttgggttctgacatgagcagctga

SEQ ID NO: 1446485 - DNA, 25 bp, Homo sapien
gaaaacagaatgctgtagagtcaac

SEQ ID NO: 1446486 - DNA, 25 bp, Homo sapien
ctatatacaaacagatgaacagttg

SEQ ID NO: 1446487 - DNA, 25 bp, Homo sapien
tagaatgtgatcctctaattcaagt

SEQ ID NO: 1446488 - DNA, 25 bp, Homo sapien
cctctaattcaagtttaatagatga

SEQ ID NO: 1446489 - DNA, 25 bp, Homo sapien
gagaaatcggatctgaggaggttca

SEQ ID NO: 1446490 - DNA, 25 bp, Homo sapien
ggcaatttgagaacatccagacaaa

SEQ ID NO: 1446491 - DNA, 25 bp, Homo sapien
cagacaaatccttccagcagaatca

SEQ ID NO: 1446492 - DNA, 25 bp, Homo sapien
ccagcagaatcaatgtttggatgat

SEQ ID NO: 1446493 - DNA, 25 bp, Homo sapien
agactgcctttgggaggcaaacttt

SEQ ID NO: 1446494 - DNA, 25 bp, Homo sapien
gcctttgggaggcaaactttctctc

SEQ ID NO: 1446495 - DNA, 25 bp, Homo sapien
gactgcctttgggaggcaaactttc

SEQ ID NO: 1446496 - DNA, 25 bp, Homo sapien
gtttgaaataacagtattgaaaaca

SEQ ID NO: 1446497 - DNA, 25 bp, Homo sapien
tagtgagacaccgaccttgcaaagt

SEQ ID NO: 1446498 - DNA, 25 bp, Homo sapien
gattattaagctgttctcccaagac

SEQ ID NO: 1446499 - DNA, 25 bp, Homo sapien
agtttggccaggatctgacctagtg

SEQ ID NO: 1446500 - DNA, 25 bp, Homo sapien
gatcatggtctttgcaggaacagaa

SEQ ID NO: 1446501 - DNA, 25 bp, Homo sapien
caacaaatccccgtgatatcatgag

SEQ ID NO: 1446502 - DNA, 25 bp, Homo sapien
cccgtgatatcatgagtttacctat

SEQ ID NO: 1446503 - DNA, 25 bp, Homo sapien
gggcaaaactactggatactaggct

SEQ ID NO: 1446504 - DNA, 25 bp, Homo sapien
acagagaagggcaaaactactggat

SEQ ID NO: 1446505 - DNA, 25 bp, Homo sapien
caggaatgataacttctagcttaaa

SEQ ID NO: 1446506 - DNA, 25 bp, Homo sapien
ctcaggaatgataacttctagctta

SEQ ID NO: 1446507 - DNA, 25 bp, Homo sapien
tttctcataaggtgtgttggctcca

SEQ ID NO: 1446508 - DNA, 25 bp, Homo sapien
aaaacacctttctcataaggtgtgt

SEQ ID NO: 1446509 - DNA, 25 bp, Homo sapien
tggtctttatcttgccaacatgtga

SEQ ID NO: 1446510 - DNA, 25 bp, Homo sapien
tgtggctaacatgtgcagctctctc

SEQ ID NO: 1446511 - DNA, 25 bp, Homo sapien
gctctctcttcagacgtgaagctct

SEQ ID NO: 1446512 - DNA, 25 bp, Homo sapien
gagctcgcaggtcatccatttggtc

SEQ ID NO: 1446513 - DNA, 25 bp, Homo sapien
atccccaagtagaaggaaccacaca

SEQ ID NO: 1446514 - DNA, 25 bp, Homo sapien
tccccaagtagaaggaaccacacac

SEQ ID NO: 1446515 - DNA, 25 bp, Homo sapien
gatccccaagtagaaggaaccacac

SEQ ID NO: 1446516 - DNA, 25 bp, Homo sapien
gatagtcaacattctcaggtacaaa

SEQ ID NO: 1446517 - DNA, 25 bp, Homo sapien
aattataaactcatgaggccaggcc

SEQ ID NO: 1446518 - DNA, 25 bp, Homo sapien
tttactaaccaagcaaaggacacta

SEQ ID NO: 1446519 - DNA, 25 bp, Homo sapien
tgtagccttagcatgcctgtcatag

SEQ ID NO: 1446520 - DNA, 25 bp, Homo sapien
gtgggtttggaccagatgttgaaga

SEQ ID NO: 1446521 - DNA, 25 bp, Homo sapien
tgggtttggaccagatgttgaagaa

SEQ ID NO: 1446522 - DNA, 25 bp, Homo sapien
ccgcagcaagtactgggctgttatg

SEQ ID NO: 1446523 - DNA, 25 bp, Homo sapien
gctgttatgtcccttctagtggcaa

SEQ ID NO: 1446524 - DNA, 25 bp, Homo sapien
tgtcccttctagtggcaaatttctc

SEQ ID NO: 1446525 - DNA, 25 bp, Homo sapien
tactgggctgttatgtcccttctag

SEQ ID NO: 1446526 - DNA, 25 bp, Homo sapien
ggaaccggaatactctccttgctta

SEQ ID NO: 1446527 - DNA, 25 bp, Homo sapien
tccccccaagactcagtgaccttct

SEQ ID NO: 1446528 - DNA, 25 bp, Homo sapien
tccagtgtaccttctttcagatggg

SEQ ID NO: 1446529 - DNA, 25 bp, Homo sapien
ttcagatggggaaccggaatactct

SEQ ID NO: 1446530 - DNA, 25 bp, Homo sapien
agcgcctgcgcgacctctgactgtt

SEQ ID NO: 1446531 - DNA, 25 bp, Homo sapien
gccagtgctctgaacgctcacgcat

SEQ ID NO: 1446532 - DNA, 25 bp, Homo sapien
acctctgactgttggcgtggctccg

SEQ ID NO: 1446533 - DNA, 25 bp, Homo sapien
gtaatccaccgggaaagaagcgcag

SEQ ID NO: 1446534 - DNA, 25 bp, Homo sapien
gaggcgtccagtctcctacagatga

SEQ ID NO: 1446535 - DNA, 25 bp, Homo sapien
gggagtatcagtgttgccgccgact

SEQ ID NO: 1446536 - DNA, 25 bp, Homo sapien
cccagggtcttaggaatagcgtcac

SEQ ID NO: 1446537 - DNA, 25 bp, Homo sapien
tatcaacacggtcaacgtggacggc

SEQ ID NO: 1446538 - DNA, 25 bp, Homo sapien
gtgatgcctttgttctcattggcgt

SEQ ID NO: 1446539 - DNA, 25 bp, Homo sapien
ggtgatgcctttgttctcattggcg

SEQ ID NO: 1446540 - DNA, 25 bp, Homo sapien
aggtgatgcctttgttctcattggc

SEQ ID NO: 1446541 - DNA, 25 bp, Homo sapien
tcaggtgatgcctttgttctcattg

SEQ ID NO: 1446542 - DNA, 25 bp, Homo sapien
ttggctcactcttgtacttgcctcg

SEQ ID NO: 1446543 - DNA, 25 bp, Homo sapien
atggagatttggctcactcttgtac

SEQ ID NO: 1446544 - DNA, 25 bp, Homo sapien
gagatttggctcactcttgtacttg

SEQ ID NO: 1446545 - DNA, 25 bp, Homo sapien
gctcactcttgtacttgcctcgctt

SEQ ID NO: 1446546 - DNA, 25 bp, Homo sapien
ctactcaggtgtattgaagataaat

SEQ ID NO: 1446547 - DNA, 25 bp, Homo sapien
caaaggagacagggggcgtttctca

SEQ ID NO: 1446548 - DNA, 25 bp, Homo sapien
gacagggggcgtttctcattttcat

SEQ ID NO: 1446549 - DNA, 25 bp, Homo sapien
gagacagggggcgtttctcattttc

SEQ ID NO: 1446550 - DNA, 25 bp, Homo sapien
aggagacagggggcgtttctcattt

SEQ ID NO: 1446551 - DNA, 25 bp, Homo sapien
tgcttgtcatccttatgtaggggcc

SEQ ID NO: 1446552 - DNA, 25 bp, Homo sapien
ttgcttgtcatccttatgtaggggc

SEQ ID NO: 1446553 - DNA, 25 bp, Homo sapien
catccttatgtaggggccatgccaa

SEQ ID NO: 1446554 - DNA, 25 bp, Homo sapien
cttatgtaggggccatgccaatctc

SEQ ID NO: 1446555 - DNA, 25 bp, Homo sapien
gaaaatacatattggccctttggag

SEQ ID NO: 1446556 - DNA, 25 bp, Homo sapien
gaacttttagaacagtcagggccaa

SEQ ID NO: 1446557 - DNA, 25 bp, Homo sapien
gagaaagtatgctgatcctacctta

SEQ ID NO: 1446558 - DNA, 25 bp, Homo sapien
gttcatcccagaggatttagctcca

SEQ ID NO: 1446559 - DNA, 25 bp, Homo sapien
agcggagcacggagaccgccctgta

SEQ ID NO: 1446560 - DNA, 25 bp, Homo sapien
aagctggtgaagaagcacgcggcac

SEQ ID NO: 1446561 - DNA, 25 bp, Homo sapien
ggagaccgccctgtactggaaaatg

SEQ ID NO: 1446562 - DNA, 25 bp, Homo sapien
tgcccgccaagtgccccggcaaggg

SEQ ID NO: 1446563 - DNA, 25 bp, Homo sapien
catctcagggcaaatgtgatctcaa

SEQ ID NO: 1446564 - DNA, 25 bp, Homo sapien
ttagccagcggtattggcatcaccc

SEQ ID NO: 1446565 - DNA, 25 bp, Homo sapien
tcgagtggtcctcctgacttgccct

SEQ ID NO: 1446566 - DNA, 25 bp, Homo sapien
tggcctgggtgcatgttaggactcc

SEQ ID NO: 1446567 - DNA, 25 bp, Homo sapien
tagggtgacaaggaaggcctaccag

SEQ ID NO: 1446568 - DNA, 25 bp, Homo sapien
ccaagactggtattccactggagaa

SEQ ID NO: 1446569 - DNA, 25 bp, Homo sapien
cttcttagggtcattcctctctggg

SEQ ID NO: 1446570 - DNA, 25 bp, Homo sapien
aaacaaacaagttcagaatgcctga

SEQ ID NO: 1446571 - DNA, 25 bp, Homo sapien
ccactcatcttgactcagagtgctt

SEQ ID NO: 1446572 - DNA, 25 bp, Homo sapien
gtttcccactcatcttgactcagag

SEQ ID NO: 1446573 - DNA, 25 bp, Homo sapien
aatgtgtttattgagatggtttccc

SEQ ID NO: 1446574 - DNA, 25 bp, Homo sapien
atggtttcccactcatcttgactca

SEQ ID NO: 1446575 - DNA, 25 bp, Homo sapien
atggctaaagaccgtggtgatttta

SEQ ID NO: 1446576 - DNA, 25 bp, Homo sapien
aaactaccgtttgtgcatggctaaa

SEQ ID NO: 1446577 - DNA, 25 bp, Homo sapien
gaaggagatcctttgtgagaggcat

SEQ ID NO: 1446578 - DNA, 25 bp, Homo sapien
ttttcctcccgtaggctggcagagg

SEQ ID NO: 1446579 - DNA, 25 bp, Homo sapien
gcaacacatagaacaattgagctgc

SEQ ID NO: 1446580 - DNA, 25 bp, Homo sapien
cacatagaacaattgagctgcatac

SEQ ID NO: 1446581 - DNA, 25 bp, Homo sapien
taaagcaacacatagaacaattgag

SEQ ID NO: 1446582 - DNA, 25 bp, Homo sapien
gaacaattgagctgcatacataacc

SEQ ID NO: 1446583 - DNA, 25 bp, Homo sapien
gtaagatagctaggtcactaatagt

SEQ ID NO: 1446584 - DNA, 25 bp, Homo sapien
catgtatccgtaagatagctaggtc

SEQ ID NO: 1446585 - DNA, 25 bp, Homo sapien
tcagtcggtattatgaccaacagca

SEQ ID NO: 1446586 - DNA, 25 bp, Homo sapien
tgaccaacagcatgtatccgtaaga

SEQ ID NO: 1446587 - DNA, 25 bp, Homo sapien
aatttgtggttgttgtatgccagtc

SEQ ID NO: 1446588 - DNA, 25 bp, Homo sapien
tggttgttgtatgccagtcaattca

SEQ ID NO: 1446589 - DNA, 25 bp, Homo sapien
tgtggttgttgtatgccagtcaatt

SEQ ID NO: 1446590 - DNA, 25 bp, Homo sapien
tttgtggttgttgtatgccagtcaa

SEQ ID NO: 1446591 - DNA, 25 bp, Homo sapien
actctggtaagctttatacttacag

SEQ ID NO: 1446592 - DNA, 25 bp, Homo sapien
gtaagctttatacttacagatccag

SEQ ID NO: 1446593 - DNA, 25 bp, Homo sapien
attttcccgattgtggcatcttagg

SEQ ID NO: 1446594 - DNA, 25 bp, Homo sapien
tgtcattttcccgattgtggcatct

SEQ ID NO: 1446595 - DNA, 25 bp, Homo sapien
aaattaccatgtagtggaatttggt

SEQ ID NO: 1446596 - DNA, 25 bp, Homo sapien
cagtataaattaccatgtagtggaa

SEQ ID NO: 1446597 - DNA, 25 bp, Homo sapien
taccatgtagtggaatttggtatat

SEQ ID NO: 1446598 - DNA, 25 bp, Homo sapien
catgtagtggaatttggtatatggc

SEQ ID NO: 1446599 - DNA, 25 bp, Homo sapien
gctgagttctatgaccctaaggcca

SEQ ID NO: 1446600 - DNA, 25 bp, Homo sapien
gcaagaagaccagcataatttctat

SEQ ID NO: 1446601 - DNA, 25 bp, Homo sapien
actgctgcaagaagaccagcataat

SEQ ID NO: 1446602 - DNA, 25 bp, Homo sapien
tctatgaccctaaggccaaaaggga

SEQ ID NO: 1446603 - DNA, 25 bp, Homo sapien
ttcagtcaggtgtccattattctcc

SEQ ID NO: 1446604 - DNA, 25 bp, Homo sapien
taggcagattcaatcgctcaagcga

SEQ ID NO: 1446605 - DNA, 25 bp, Homo sapien
tgcctgtaaactctaaagcccctaa

SEQ ID NO: 1446606 - DNA, 25 bp, Homo sapien
caatgccaggtttgcagatcgtcca

SEQ ID NO: 1446607 - DNA, 25 bp, Homo sapien
tgaatgatgttgcaatggctttccc

SEQ ID NO: 1446608 - DNA, 25 bp, Homo sapien
gggtctaacccttcataagatgtga

SEQ ID NO: 1446609 - DNA, 25 bp, Homo sapien
taagatgtgagttcttccaacccaa

SEQ ID NO: 1446610 - DNA, 25 bp, Homo sapien
taagaatattaaagcctgcagaggt

SEQ ID NO: 1446611 - DNA, 25 bp, Homo sapien
cagaagtagcttgactctcgcctaa

SEQ ID NO: 1446612 - DNA, 25 bp, Homo sapien
tgaataagggacatgcaagggccag

SEQ ID NO: 1446613 - DNA, 25 bp, Homo sapien
aaccagagttgagagtcggagtgcc

SEQ ID NO: 1446614 - DNA, 25 bp, Homo sapien
gaaaggttgtgcctaccactggctg

SEQ ID NO: 1446615 - DNA, 25 bp, Homo sapien
tctgtgtttgaaagtttgggaataa

SEQ ID NO: 1446616 - DNA, 25 bp, Homo sapien
gggagggaagattcttctcccctga

SEQ ID NO: 1446617 - DNA, 25 bp, Homo sapien
acccagctgtttgtaacccaagcag

SEQ ID NO: 1446618 - DNA, 25 bp, Homo sapien
tgtttgtaacccaagcagcagcaga

SEQ ID NO: 1446619 - DNA, 25 bp, Homo sapien
tgatgtcacccagctgtttgtaacc

SEQ ID NO: 1446620 - DNA, 25 bp, Homo sapien
ttgatgtcatggttgaagaattcag

SEQ ID NO: 1446621 - DNA, 25 bp, Homo sapien
tgtcatggttgaagaattcagtcct

SEQ ID NO: 1446622 - DNA, 25 bp, Homo sapien
gtcatggttgaagaattcagtcctg

SEQ ID NO: 1446623 - DNA, 25 bp, Homo sapien
gatgtcatggttgaagaattcagtc

SEQ ID NO: 1446624 - DNA, 25 bp, Homo sapien
ggacaggtgctggtgtaaactgaca

SEQ ID NO: 1446625 - DNA, 25 bp, Homo sapien
tctagccaacggtgttcctggagga

SEQ ID NO: 1446626 - DNA, 25 bp, Homo sapien
taaaaattctgacgccctatccctg

SEQ ID NO: 1446627 - DNA, 25 bp, Homo sapien
catgcctttggacctgatggacaag

SEQ ID NO: 1446628 - DNA, 25 bp, Homo sapien
caagaacaagagtccacataaggga

SEQ ID NO: 1446629 - DNA, 25 bp, Homo sapien
caaatcaagtccttagatgggcagg

SEQ ID NO: 1446630 - DNA, 25 bp, Homo sapien
ggtccaagcacctgattccagcctg

SEQ ID NO: 1446631 - DNA, 25 bp, Homo sapien
gaccttggcgaagctaggctctgcc

SEQ ID NO: 1446632 - DNA, 25 bp, Homo sapien
tacctgtccctctcagttcaacagg

SEQ ID NO: 1446633 - DNA, 25 bp, Homo sapien
gggctacctgtccctctcagttcaa

SEQ ID NO: 1446634 - DNA, 25 bp, Homo sapien
ctgtccctctcagttcaacaggatg

SEQ ID NO: 1446635 - DNA, 25 bp, Homo sapien
gggggctacctgtccctctcagttc

SEQ ID NO: 1446636 - DNA, 25 bp, Homo sapien
tctgctacttggtgcaactggctgg

SEQ ID NO: 1446637 - DNA, 25 bp, Homo sapien
cactctcaggggatcgctggtagcc

SEQ ID NO: 1446638 - DNA, 25 bp, Homo sapien
gctggtagccctgaggttgccccgc

SEQ ID NO: 1446639 - DNA, 25 bp, Homo sapien
cctctctcacagctgaacctgccca

SEQ ID NO: 1446640 - DNA, 25 bp, Homo sapien
tgccccgctattgggctgctttctg

SEQ ID NO: 1446641 - DNA, 25 bp, Homo sapien
actacagaggtgagtaagcagggat

SEQ ID NO: 1446642 - DNA, 25 bp, Homo sapien
ccccaggaaaggtatccagaaccat

SEQ ID NO: 1446643 - DNA, 25 bp, Homo sapien
ggaagagcgtcagcccctgtattca

SEQ ID NO: 1446644 - DNA, 25 bp, Homo sapien
tgctcctcgcccagcgtagagatgg

SEQ ID NO: 1446645 - DNA, 25 bp, Homo sapien
caggccgagaaagccagctcgggca

SEQ ID NO: 1446646 - DNA, 25 bp, Homo sapien
tgtgaacccaggccgagaaagccag

SEQ ID NO: 1446647 - DNA, 25 bp, Homo sapien
gtgaacccaggccgagaaagccagc

SEQ ID NO: 1446648 - DNA, 25 bp, Homo sapien
gaagccctggacaccgtccattctc

SEQ ID NO: 1446649 - DNA, 25 bp, Homo sapien
caccgtccattctcatgacacggga

SEQ ID NO: 1446650 - DNA, 25 bp, Homo sapien
tggacaccgtccattctcatgacac

SEQ ID NO: 1446651 - DNA, 25 bp, Homo sapien
gccctggacaccgtccattctcatg

SEQ ID NO: 1446652 - DNA, 25 bp, Homo sapien
gagtgacaacaggtgagcccttcag

SEQ ID NO: 1446653 - DNA, 25 bp, Homo sapien
agggagtgacaacaggtgagccctt

SEQ ID NO: 1446654 - DNA, 25 bp, Homo sapien
gacaacaggtgagcccttcagaagt

SEQ ID NO: 1446655 - DNA, 25 bp, Homo sapien
caggagggagtgacaacaggtgagc

SEQ ID NO: 1446656 - DNA, 25 bp, Homo sapien
gccaagggaggccaaatctccagca

SEQ ID NO: 1446657 - DNA, 25 bp, Homo sapien
ccaagggaggccaaatctccagcag

SEQ ID NO: 1446658 - DNA, 25 bp, Homo sapien
gacacaatgcaggatgaccagttac

SEQ ID NO: 1446659 - DNA, 25 bp, Homo sapien
gatatgagggcagttcctggctcaa

SEQ ID NO: 1446660 - DNA, 25 bp, Homo sapien
tgggatgccagataccaggctggac

SEQ ID NO: 1446661 - DNA, 25 bp, Homo sapien
tgccatgcggctatttacagaaagt

SEQ ID NO: 1446662 - DNA, 25 bp, Homo sapien
cgctgaagccttgggccagcaaaat

SEQ ID NO: 1446663 - DNA, 25 bp, Homo sapien
cccacaggagggctgtagtgacctc

SEQ ID NO: 1446664 - DNA, 25 bp, Homo sapien
gaggcaggtttataagagagctgct

SEQ ID NO: 1446665 - DNA, 25 bp, Homo sapien
caccccactgcatggaggcaggttt

SEQ ID NO: 1446666 - DNA, 25 bp, Homo sapien
gtttgtgccagtagagagcctcgct

SEQ ID NO: 1446667 - DNA, 25 bp, Homo sapien
ggtttaagctacgtcagccctcagg

SEQ ID NO: 1446668 - DNA, 25 bp, Homo sapien
tgaaagccccgatatctgaacagga

SEQ ID NO: 1446669 - DNA, 25 bp, Homo sapien
tacgtggcatatcaggaccagctgg

SEQ ID NO: 1446670 - DNA, 25 bp, Homo sapien
tgttcttgcccaggagtgcatccac

SEQ ID NO: 1446671 - DNA, 25 bp, Homo sapien
ttgttcttgcccaggagtgcatcca

SEQ ID NO: 1446672 - DNA, 25 bp, Homo sapien
gtgcccgtggcattgctgcccacga

SEQ ID NO: 1446673 - DNA, 25 bp, Homo sapien
cccacgaagatcttgcctatggctt

SEQ ID NO: 1446674 - DNA, 25 bp, Homo sapien
gcacggtgaccactacctggacttt

SEQ ID NO: 1446675 - DNA, 25 bp, Homo sapien
catgtcggaccagtgccgcagctct

SEQ ID NO: 1446676 - DNA, 25 bp, Homo sapien
tagatgacagaaccaactctgaaga

SEQ ID NO: 1446677 - DNA, 25 bp, Homo sapien
gaagtattccatcaataacatcata

SEQ ID NO: 1446678 - DNA, 25 bp, Homo sapien
gcccagtgttcccttgaagtattcc

SEQ ID NO: 1446679 - DNA, 25 bp, Homo sapien
gaagattctcttgtacccttgcccc

SEQ ID NO: 1446680 - DNA, 25 bp, Homo sapien
ctgaaggactcgttgaagtatgggt

SEQ ID NO: 1446681 - DNA, 25 bp, Homo sapien
aagtatgggttcagggtcttcttct

SEQ ID NO: 1446682 - DNA, 25 bp, Homo sapien
aatctgctcgaaggggatctcaaag

SEQ ID NO: 1446683 - DNA, 25 bp, Homo sapien
catcaggtggatcttcacgtacggg

SEQ ID NO: 1446684 - DNA, 25 bp, Homo sapien
ggaggtgcagatgtcgcccagcttc

SEQ ID NO: 1446685 - DNA, 25 bp, Homo sapien
ggccgcccacgtccatcttcttgag

SEQ ID NO: 1446686 - DNA, 25 bp, Homo sapien
tcttgaggttcttagcctccaggat

SEQ ID NO: 1446687 - DNA, 25 bp, Homo sapien
ccgtgggcacatagcgcagggaggt

SEQ ID NO: 1446688 - DNA, 25 bp, Homo sapien
ggcacctttacctctccaatgatgt

SEQ ID NO: 1446689 - DNA, 25 bp, Homo sapien
tctccactcctcaatgggctggccg

SEQ ID NO: 1446690 - DNA, 25 bp, Homo sapien
tgtcatgtttggagaagcggtcaaa

SEQ ID NO: 1446691 - DNA, 25 bp, Homo sapien
ggctggccgaggtccactgtgttca

SEQ ID NO: 1446692 - DNA, 25 bp, Homo sapien
ccttgacataagggtctgaggtgcc

SEQ ID NO: 1446693 - DNA, 25 bp, Homo sapien
agggttcagtgtcttccgatggact

SEQ ID NO: 1446694 - DNA, 25 bp, Homo sapien
gtgtcttccgatggactttggtctc

SEQ ID NO: 1446695 - DNA, 25 bp, Homo sapien
cagcctgcagaacgcccacagtaag

SEQ ID NO: 1446696 - DNA, 25 bp, Homo sapien
aggcctgtctctgcgtcgtcgtcat

SEQ ID NO: 1446697 - DNA, 25 bp, Homo sapien
tcagtcaggcctgtctctgcgtcgt

SEQ ID NO: 1446698 - DNA, 25 bp, Homo sapien
aatcatagtccagggaaaactgcag

SEQ ID NO: 1446699 - DNA, 25 bp, Homo sapien
ctgattagcctgaaaatcatagtcc

SEQ ID NO: 1446700 - DNA, 25 bp, Homo sapien
tcatgtccttcatgttcatggcatt

SEQ ID NO: 1446701 - DNA, 25 bp, Homo sapien
tgtccttcatgttcatggcattctt

SEQ ID NO: 1446702 - DNA, 25 bp, Homo sapien
cccctttcatgtccttcatgttcat

SEQ ID NO: 1446703 - DNA, 25 bp, Homo sapien
ccctttcatgtccttcatgttcatg

SEQ ID NO: 1446704 - DNA, 25 bp, Homo sapien
aaccacagcaatggcgatcagtgcc

SEQ ID NO: 1446705 - DNA, 25 bp, Homo sapien
agcaatggcgatcagtgcccagggt

SEQ ID NO: 1446706 - DNA, 25 bp, Homo sapien
caaccacagcaatggcgatcagtgc

SEQ ID NO: 1446707 - DNA, 25 bp, Homo sapien
cacagcaatggcgatcagtgcccag

SEQ ID NO: 1446708 - DNA, 25 bp, Homo sapien
catagccagataggcaggccaagct

SEQ ID NO: 1446709 - DNA, 25 bp, Homo sapien
tggaggactggctcactctagagag

SEQ ID NO: 1446710 - DNA, 25 bp, Homo sapien
tagacctagactgctgctgggcttt

SEQ ID NO: 1446711 - DNA, 25 bp, Homo sapien
caagctccttgaggctagacctaga

SEQ ID NO: 1446712 - DNA, 25 bp, Homo sapien
agactctagccttgccccaccctct

SEQ ID NO: 1446713 - DNA, 25 bp, Homo sapien
cctctcagccaccagagacactcac

SEQ ID NO: 1446714 - DNA, 25 bp, Homo sapien
tctcccagactctagccttgcccca

SEQ ID NO: 1446715 - DNA, 25 bp, Homo sapien
accctctcagccaccagagacactc

SEQ ID NO: 1446716 - DNA, 25 bp, Homo sapien
tggagttgtccacgggtccaatggg

SEQ ID NO: 1446717 - DNA, 25 bp, Homo sapien
tcagtttggcaaacatgtcctcctg

SEQ ID NO: 1446718 - DNA, 25 bp, Homo sapien
gtggagttgtccacgggtccaatgg

SEQ ID NO: 1446719 - DNA, 25 bp, Homo sapien
aaccaaggtccactggacttcgcct

SEQ ID NO: 1446720 - DNA, 25 bp, Homo sapien
gaccccaaaactggtcttgaagtga

SEQ ID NO: 1446721 - DNA, 25 bp, Homo sapien
tgaaatagccttgaccccaaaactg

SEQ ID NO: 1446722 - DNA, 25 bp, Homo sapien
agccttgaccccaaaactggtcttg

SEQ ID NO: 1446723 - DNA, 25 bp, Homo sapien
ccttgccgctggattggcagtcctc

SEQ ID NO: 1446724 - DNA, 25 bp, Homo sapien
tgccgctggattggcagtcctcctc

SEQ ID NO: 1446725 - DNA, 25 bp, Homo sapien
acagccggtccacggtccctgcagc

SEQ ID NO: 1446726 - DNA, 25 bp, Homo sapien
ccccacagccggtccacggtccctg

SEQ ID NO: 1446727 - DNA, 25 bp, Homo sapien
atctttctcagctcaaacagtactt

SEQ ID NO: 1446728 - DNA, 25 bp, Homo sapien
acagtacttccaagaacgccttcct

SEQ ID NO: 1446729 - DNA, 25 bp, Homo sapien
gatcagactaatacagtctacacat

SEQ ID NO: 1446730 - DNA, 25 bp, Homo sapien
tgcaagatcagactaatacagtcta

SEQ ID NO: 1446731 - DNA, 25 bp, Homo sapien
ttcttccctgcggcccgttgaggag

SEQ ID NO: 1446732 - DNA, 25 bp, Homo sapien
ctgcggcccgttgaggagacctagc

SEQ ID NO: 1446733 - DNA, 25 bp, Homo sapien
ccgttgaggagacctagcggtgccc

SEQ ID NO: 1446734 - DNA, 25 bp, Homo sapien
cccgttgaggagacctagcggtgcc

SEQ ID NO: 1446735 - DNA, 25 bp, Homo sapien
tgccttgtttacgactgcatttcct

SEQ ID NO: 1446736 - DNA, 25 bp, Homo sapien
tcccaggggaccactagggctgtga

SEQ ID NO: 1446737 - DNA, 25 bp, Homo sapien
ctcccagaggagcagcctgattgct

SEQ ID NO: 1446738 - DNA, 25 bp, Homo sapien
tgaggtgggaacgtgccttgtttac

SEQ ID NO: 1446739 - DNA, 25 bp, Homo sapien
gtgatattgactcaatgtgctgctt

SEQ ID NO: 1446740 - DNA, 25 bp, Homo sapien
tgtgatattgactcaatgtgctgct

SEQ ID NO: 1446741 - DNA, 25 bp, Homo sapien
atgtgatattgactcaatgtgctgc

SEQ ID NO: 1446742 - DNA, 25 bp, Homo sapien
caggaaagatgctgaatgtgatatt

SEQ ID NO: 1446743 - DNA, 25 bp, Homo sapien
aggccccatgacgaagactagagca

SEQ ID NO: 1446744 - DNA, 25 bp, Homo sapien
gactagagcatgcaaactcctggag

SEQ ID NO: 1446745 - DNA, 25 bp, Homo sapien
catgctgctggcttgcgttccctca

SEQ ID NO: 1446746 - DNA, 25 bp, Homo sapien
cctcatcatcaggagccttttgtca

SEQ ID NO: 1446747 - DNA, 25 bp, Homo sapien
gacgttccgggcgcgttcagcctga

SEQ ID NO: 1446748 - DNA, 25 bp, Homo sapien
ttccgggcgcgttcagcctgagctg

SEQ ID NO: 1446749 - DNA, 25 bp, Homo sapien
cgttccgggcgcgttcagcctgagc

SEQ ID NO: 1446750 - DNA, 25 bp, Homo sapien
cctgggacgttccgggcgcgttcag

SEQ ID NO: 1446751 - DNA, 25 bp, Homo sapien
aactgcttcccgagtcactttgtag

SEQ ID NO: 1446752 - DNA, 25 bp, Homo sapien
cacagctctcctctaatctagggag

SEQ ID NO: 1446753 - DNA, 25 bp, Homo sapien
ggcagacagccccaagagggataga

SEQ ID NO: 1446754 - DNA, 25 bp, Homo sapien
caaggacagtcctcagagacctcta

SEQ ID NO: 1446755 - DNA, 25 bp, Homo sapien
cgtggctggcgacggtttcgcaggg

SEQ ID NO: 1446756 - DNA, 25 bp, Homo sapien
cgtcggacggcaaggacgcgtggct

SEQ ID NO: 1446757 - DNA, 25 bp, Homo sapien
cgctgccccaactcggctccgaagt

SEQ ID NO: 1446758 - DNA, 25 bp, Homo sapien
gagagatccggggtctccaatgtga

SEQ ID NO: 1446759 - DNA, 25 bp, Homo sapien
gagtctggctcagctactggccaca

SEQ ID NO: 1446760 - DNA, 25 bp, Homo sapien
catagatgtgatagaggtcatagta

SEQ ID NO: 1446761 - DNA, 25 bp, Homo sapien
tgcccatatcccagtttaagtcaca

SEQ ID NO: 1446762 - DNA, 25 bp, Homo sapien
tggccacaagccttatgcaacttct

SEQ ID NO: 1446763 - DNA, 25 bp, Homo sapien
cagtcagtgagaacgtattggcaag

SEQ ID NO: 1446764 - DNA, 25 bp, Homo sapien
gaagcatggtttgaaaccgcactct

SEQ ID NO: 1446765 - DNA, 25 bp, Homo sapien
acttctagctaggtaagtttgccag

SEQ ID NO: 1446766 - DNA, 25 bp, Homo sapien
cttgtcctgatcatacacagaaggg

SEQ ID NO: 1446767 - DNA, 25 bp, Homo sapien
cactaggagttgagggaccctgacc

SEQ ID NO: 1446768 - DNA, 25 bp, Homo sapien
tcctaggatactgaaacgaagctgt

SEQ ID NO: 1446769 - DNA, 25 bp, Homo sapien
tacaaagggccttcagagtacaacc

SEQ ID NO: 1446770 - DNA, 25 bp, Homo sapien
tagctcaataaaggccgacactggg

SEQ ID NO: 1446771 - DNA, 25 bp, Homo sapien
tgtgtaccaccacccacaggtgaag

SEQ ID NO: 1446772 - DNA, 25 bp, Homo sapien
cagaggtttctctggtacaggccag

SEQ ID NO: 1446773 - DNA, 25 bp, Homo sapien
gttggcatcctatctcaaagtcggg

SEQ ID NO: 1446774 - DNA, 25 bp, Homo sapien
gctttatattagcagcagggtctcc

SEQ ID NO: 1446775 - DNA, 25 bp, Homo sapien
gagaaacatcacaacaactgcagaa

SEQ ID NO: 1446776 - DNA, 25 bp, Homo sapien
aacatcacaacaactgcagaaaact

SEQ ID NO: 1446777 - DNA, 25 bp, Homo sapien
acatcacaacaactgcagaaaactg

SEQ ID NO: 1446778 - DNA, 25 bp, Homo sapien
gaaacatcacaacaactgcagaaaa

SEQ ID NO: 1446779 - DNA, 25 bp, Homo sapien
tgcaacctggttgggcagaggcaaa

SEQ ID NO: 1446780 - DNA, 25 bp, Homo sapien
aagaatcccctaatgttgtttgcag

SEQ ID NO: 1446781 - DNA, 25 bp, Homo sapien
aggcatatggcccaccaaacagagc

SEQ ID NO: 1446782 - DNA, 25 bp, Homo sapien
tactaaacccggacctctgtgagga

SEQ ID NO: 1446783 - DNA, 25 bp, Homo sapien
cactagaaactagacatttgtgttc

SEQ ID NO: 1446784 - DNA, 25 bp, Homo sapien
tacatcactagttcatcagtgacac

SEQ ID NO: 1446785 - DNA, 25 bp, Homo sapien
caatcaatcgctaaagcaccaacac

SEQ ID NO: 1446786 - DNA, 25 bp, Homo sapien
tgtggcaattacttacagagaagtc

SEQ ID NO: 1446787 - DNA, 25 bp, Homo sapien
tgcccttttgggcactggaagtgag

SEQ ID NO: 1446788 - DNA, 25 bp, Homo sapien
cagccactgaaaccaacatagaagt

SEQ ID NO: 1446789 - DNA, 25 bp, Homo sapien
aaatttccccaatgtggtaacagag

SEQ ID NO: 1446790 - DNA, 25 bp, Homo sapien
ataaacctagtctaccaggaagaag

SEQ ID NO: 1446791 - DNA, 25 bp, Homo sapien
gtcctggaaaaatgatcccataagg

SEQ ID NO: 1446792 - DNA, 25 bp, Homo sapien
gaagaaatcctcttggttggagtcc

SEQ ID NO: 1446793 - DNA, 25 bp, Homo sapien
gaaatagcaccgtttacaggctggc

SEQ ID NO: 1446794 - DNA, 25 bp, Homo sapien
tgtacatgaaaaggtgcaagcttca

SEQ ID NO: 1446795 - DNA, 25 bp, Homo sapien
cttcacagtacagcgcacacagatg

SEQ ID NO: 1446796 - DNA, 25 bp, Homo sapien
gacctgatgaaaccactgattgcag

SEQ ID NO: 1446797 - DNA, 25 bp, Homo sapien
acacagatgtagtcttctttctctg

SEQ ID NO: 1446798 - DNA, 25 bp, Homo sapien
tactttcggcttggtgcgtccttca

SEQ ID NO: 1446799 - DNA, 25 bp, Homo sapien
tgggacctctggcacaacagctaag

SEQ ID NO: 1446800 - DNA, 25 bp, Homo sapien
taagccaaagggcatcacatcagca

SEQ ID NO: 1446801 - DNA, 25 bp, Homo sapien
gcgctgccctgtgataagtaagcca

SEQ ID NO: 1446802 - DNA, 25 bp, Homo sapien
tcaagaaattcaggccgtttgccaa

SEQ ID NO: 1446803 - DNA, 25 bp, Homo sapien
cttcttagcgccgggaaggtgaaag

SEQ ID NO: 1446804 - DNA, 25 bp, Homo sapien
caggaacgatggtaagagcacagat

SEQ ID NO: 1446805 - DNA, 25 bp, Homo sapien
tgagcaatccattcagatcagctca

SEQ ID NO: 1446806 - DNA, 25 bp, Homo sapien
gaaagacccagcgagatgaggtcta

SEQ ID NO: 1446807 - DNA, 25 bp, Homo sapien
gatcagctcaaagcagataagcaga

SEQ ID NO: 1446808 - DNA, 25 bp, Homo sapien
taagggaaagcacgtcctctatggc

SEQ ID NO: 1446809 - DNA, 25 bp, Homo sapien
tttctgagttaagggaaagcacgtc

SEQ ID NO: 1446810 - DNA, 25 bp, Homo sapien
gagttaagggaaagcacgtcctcta

SEQ ID NO: 1446811 - DNA, 25 bp, Homo sapien
tcctctatggcccaaacctcactga

SEQ ID NO: 1446812 - DNA, 25 bp, Homo sapien
cctgttcggaataggatgtgtctga

SEQ ID NO: 1446813 - DNA, 25 bp, Homo sapien
gaactaattcatagctacgctctct

SEQ ID NO: 1446814 - DNA, 25 bp, Homo sapien
tcgttcccaccgctcactggagagg

SEQ ID NO: 1446815 - DNA, 25 bp, Homo sapien
cagggaatgagtttcagcagaacga

SEQ ID NO: 1446816 - DNA, 25 bp, Homo sapien
tgttaaagacgtgattacccttcca

SEQ ID NO: 1446817 - DNA, 25 bp, Homo sapien
tcaattttcgcctatgggtcaccta

SEQ ID NO: 1446818 - DNA, 25 bp, Homo sapien
cactgttaatgctaccaaaggatca

SEQ ID NO: 1446819 - DNA, 25 bp, Homo sapien
tcctgaggaaccacactaataatct

SEQ ID NO: 1446820 - DNA, 25 bp, Homo sapien
gtcatcctcagtctaatcgcccagt

SEQ ID NO: 1446821 - DNA, 25 bp, Homo sapien
cctcagtctaatcgcccagtcctca

SEQ ID NO: 1446822 - DNA, 25 bp, Homo sapien
gtttcgaggagtaaaataaagcata

SEQ ID NO: 1446823 - DNA, 25 bp, Homo sapien
agtctaatcgcccagtcctcacacc

SEQ ID NO: 1446824 - DNA, 25 bp, Homo sapien
tttcaggaagggatacctggagcag

SEQ ID NO: 1446825 - DNA, 25 bp, Homo sapien
cagctgggcttccatcaatagttca

SEQ ID NO: 1446826 - DNA, 25 bp, Homo sapien
gcttggctttgcaagtaaagtctgg

SEQ ID NO: 1446827 - DNA, 25 bp, Homo sapien
tgagcttcggtcagtctgctgagca

SEQ ID NO: 1446828 - DNA, 25 bp, Homo sapien
tatgagacaaatagaaggactgccc

SEQ ID NO: 1446829 - DNA, 25 bp, Homo sapien
tgataacaacaaagggtgtttcaca

SEQ ID NO: 1446830 - DNA, 25 bp, Homo sapien
cagttgaagtgaggtttaatgtgcc

SEQ ID NO: 1446831 - DNA, 25 bp, Homo sapien
acattcacatttgggtttatgagac

SEQ ID NO: 1446832 - DNA, 25 bp, Homo sapien
aaatatgaggttctgttgtcccagt

SEQ ID NO: 1446833 - DNA, 25 bp, Homo sapien
gggatacaacttcgtccagttgaga

SEQ ID NO: 1446834 - DNA, 25 bp, Homo sapien
tcccagtcatcaggcaaagaaaatg

SEQ ID NO: 1446835 - DNA, 25 bp, Homo sapien
tacaacttcgtccagttgagaaggg

SEQ ID NO: 1446836 - DNA, 25 bp, Homo sapien
cctcaggaaggcgaactcggatacg

SEQ ID NO: 1446837 - DNA, 25 bp, Homo sapien
gattccctgacgaaagcagttgctg

SEQ ID NO: 1446838 - DNA, 25 bp, Homo sapien
tatatcgaagtgcatctccctcagg

SEQ ID NO: 1446839 - DNA, 25 bp, Homo sapien
tgagcccactcgatcttgcacaaat

SEQ ID NO: 1446840 - DNA, 25 bp, Homo sapien
cctgtgaaatactgggtaccgccac

SEQ ID NO: 1446841 - DNA, 25 bp, Homo sapien
gacaaagccagattcgcaggccctg

SEQ ID NO: 1446842 - DNA, 25 bp, Homo sapien
ttcgcaggccctgtgaaatactggg

SEQ ID NO: 1446843 - DNA, 25 bp, Homo sapien
tgggtaccgccacacaactggtgtg

SEQ ID NO: 1446844 - DNA, 25 bp, Homo sapien
gcagagttcacattgaatcataggg

SEQ ID NO: 1446845 - DNA, 25 bp, Homo sapien
cccttcattggcgagtctgagagac

SEQ ID NO: 1446846 - DNA, 25 bp, Homo sapien
tatatccacatcttggagaggcgac

SEQ ID NO: 1446847 - DNA, 25 bp, Homo sapien
ttaggcgagcttccccaagagttgc

SEQ ID NO: 1446848 - DNA, 25 bp, Homo sapien
ttccatttggcaagggctcctttaa

SEQ ID NO: 1446849 - DNA, 25 bp, Homo sapien
tggcaagggctcctttaactttctc

SEQ ID NO: 1446850 - DNA, 25 bp, Homo sapien
aggccaatatcacatcgaggacaca

SEQ ID NO: 1446851 - DNA, 25 bp, Homo sapien
tcccaaaaggccaatatcacatcga

SEQ ID NO: 1446852 - DNA, 25 bp, Homo sapien
ggatagatcggcctcgtgtaacaag

SEQ ID NO: 1446853 - DNA, 25 bp, Homo sapien
ttggcaaagaattcagatgtacggg

SEQ ID NO: 1446854 - DNA, 25 bp, Homo sapien
gaacctcagctactagggtttccag

SEQ ID NO: 1446855 - DNA, 25 bp, Homo sapien
tgtgtctaacactggcacacgtcct

SEQ ID NO: 1446856 - DNA, 25 bp, Homo sapien
tcatctcattggttcctattaacag

SEQ ID NO: 1446857 - DNA, 25 bp, Homo sapien
gaacatggcatatactgtggtccct

SEQ ID NO: 1446858 - DNA, 25 bp, Homo sapien
gctaggctctaaggatacaaatgtg

SEQ ID NO: 1446859 - DNA, 25 bp, Homo sapien
gagaacctagtttgtgctaggctct

SEQ ID NO: 1446860 - DNA, 25 bp, Homo sapien
acacattctgtatatactttttaaa

SEQ ID NO: 1446861 - DNA, 25 bp, Homo sapien
cacattctgtatatactttttaaaa

SEQ ID NO: 1446862 - DNA, 25 bp, Homo sapien
tacacattctgtatatactttttaa

SEQ ID NO: 1446863 - DNA, 25 bp, Homo sapien
ttacacattctgtatatacttttta

SEQ ID NO: 1446864 - DNA, 25 bp, Homo sapien
cgtagcaaggctattcaatgaatgt

SEQ ID NO: 1446865 - DNA, 25 bp, Homo sapien
gagccgcaccattgggcagatatgc

SEQ ID NO: 1446866 - DNA, 25 bp, Homo sapien
aggccctctacatcctgaagccagt

SEQ ID NO: 1446867 - DNA, 25 bp, Homo sapien
tcttcgatttcctttactgccgtag

SEQ ID NO: 1446868 - DNA, 25 bp, Homo sapien
tgttccaaacggatacgcatctcag

SEQ ID NO: 1446869 - DNA, 25 bp, Homo sapien
tatcatctaaagtaagggagctggg

SEQ ID NO: 1446870 - DNA, 25 bp, Homo sapien
tgcagctccgcagcactaggcgttt

SEQ ID NO: 1446871 - DNA, 25 bp, Homo sapien
tgctgcacctcttctagccaacggg

SEQ ID NO: 1446872 - DNA, 25 bp, Homo sapien
tagtaatggtgtctgactgaggaca

SEQ ID NO: 1446873 - DNA, 25 bp, Homo sapien
cactgtcaactgattttgggatttc

SEQ ID NO: 1446874 - DNA, 25 bp, Homo sapien
gtgttacaaactgccggagctcatt

SEQ ID NO: 1446875 - DNA, 25 bp, Homo sapien
cacatggaagagcatacagctgtgt

SEQ ID NO: 1446876 - DNA, 25 bp, Homo sapien
tctgcatcctgtgtgactaggcgaa

SEQ ID NO: 1446877 - DNA, 25 bp, Homo sapien
gccttttgccattaagcaactgctg

SEQ ID NO: 1446878 - DNA, 25 bp, Homo sapien
gaaggtgtcgcaaaagatcattgtc

SEQ ID NO: 1446879 - DNA, 25 bp, Homo sapien
gcaacagaggcacacttctctgcat

SEQ ID NO: 1446880 - DNA, 25 bp, Homo sapien
agagatcatccagcgtgtacctata

SEQ ID NO: 1446881 - DNA, 25 bp, Homo sapien
gcattcatcatagggtagagatcat

SEQ ID NO: 1446882 - DNA, 25 bp, Homo sapien
ccattcgttgtaagattctgctcga

SEQ ID NO: 1446883 - DNA, 25 bp, Homo sapien
tctgctcgaagcttcaatgcattca

SEQ ID NO: 1446884 - DNA, 25 bp, Homo sapien
cactgacgttcatcatctggcaaca

SEQ ID NO: 1446885 - DNA, 25 bp, Homo sapien
gcaggcaaacaagaaggccaggttt

SEQ ID NO: 1446886 - DNA, 25 bp, Homo sapien
caggtttacaagaacaggagatggc

SEQ ID NO: 1446887 - DNA, 25 bp, Homo sapien
cacaattcttttacatgatgcaggc

SEQ ID NO: 1446888 - DNA, 25 bp, Homo sapien
gataatgctccacacactgtcggcc

SEQ ID NO: 1446889 - DNA, 25 bp, Homo sapien
gatcatctcatcgtgggaaaacaca

SEQ ID NO: 1446890 - DNA, 25 bp, Homo sapien
ttctgaacagttgaagccactacaa

SEQ ID NO: 1446891 - DNA, 25 bp, Homo sapien
taatacatcagccttggaagccatc

SEQ ID NO: 1446892 - DNA, 25 bp, Homo sapien
taatcacaaactccccagcacactg

SEQ ID NO: 1446893 - DNA, 25 bp, Homo sapien
aacagtgcagaagttaacagcctca

SEQ ID NO: 1446894 - DNA, 25 bp, Homo sapien
tcaacagtgcagaagttaacagcct

SEQ ID NO: 1446895 - DNA, 25 bp, Homo sapien
tggtaggctcttggaaatgtaatca

SEQ ID NO: 1446896 - DNA, 25 bp, Homo sapien
tccataccaggtttttggctcaccc

SEQ ID NO: 1446897 - DNA, 25 bp, Homo sapien
cagcagcataccctgggactccata

SEQ ID NO: 1446898 - DNA, 25 bp, Homo sapien
tcacaagctgatggaggagatccgg

SEQ ID NO: 1446899 - DNA, 25 bp, Homo sapien
ggcacttcatgagtcatcagggtat

SEQ ID NO: 1446900 - DNA, 25 bp, Homo sapien
caaacactagtaaggcaattagcat

SEQ ID NO: 1446901 - DNA, 25 bp, Homo sapien
ccttgcccattctggcagacgaagt

SEQ ID NO: 1446902 - DNA, 25 bp, Homo sapien
tataaggtatcgtattcacttcagg

SEQ ID NO: 1446903 - DNA, 25 bp, Homo sapien
cagtttcctaaagcaacccacaagg

SEQ ID NO: 1446904 - DNA, 25 bp, Homo sapien
gcacattcccacatacaaccaagga

SEQ ID NO: 1446905 - DNA, 25 bp, Homo sapien
gttaattgaatagctccagtggtct

SEQ ID NO: 1446906 - DNA, 25 bp, Homo sapien
cagcagtaatatgtgcaaggacaga

SEQ ID NO: 1446907 - DNA, 25 bp, Homo sapien
gtttcatgccacatatatcagcagt

SEQ ID NO: 1446908 - DNA, 25 bp, Homo sapien
gaggcaatgtcagctccatattcca

SEQ ID NO: 1446909 - DNA, 25 bp, Homo sapien
tgtgacatcctcctcaatagtgctt

SEQ ID NO: 1446910 - DNA, 25 bp, Homo sapien
ttgaggcaatgtcagctccatattc

SEQ ID NO: 1446911 - DNA, 25 bp, Homo sapien
agtgcttactagtctccaaaattct

SEQ ID NO: 1446912 - DNA, 25 bp, Homo sapien
atgggtcttcaggtacacttttctc

SEQ ID NO: 1446913 - DNA, 25 bp, Homo sapien
aatcctaaatcaaagcagtatatat

SEQ ID NO: 1446914 - DNA, 25 bp, Homo sapien
taaatcaaagcagtatatatgtaca

SEQ ID NO: 1446915 - DNA, 25 bp, Homo sapien
ggtcttcaggtacacttttctccaa

SEQ ID NO: 1446916 - DNA, 25 bp, Homo sapien
gtaatcagatttgaacgcatctgcc

SEQ ID NO: 1446917 - DNA, 25 bp, Homo sapien
tggctgcttgttcaaagccaaatgc

SEQ ID NO: 1446918 - DNA, 25 bp, Homo sapien
agtacggagggtatagtccctggct

SEQ ID NO: 1446919 - DNA, 25 bp, Homo sapien
gactggcatgttgaagtaatcagat

SEQ ID NO: 1446920 - DNA, 25 bp, Homo sapien
tgggcctcattactgtcgactgcca

SEQ ID NO: 1446921 - DNA, 25 bp, Homo sapien
gggcctcattactgtcgactgccaa

SEQ ID NO: 1446922 - DNA, 25 bp, Homo sapien
catgggcctcattactgtcgactgc

SEQ ID NO: 1446923 - DNA, 25 bp, Homo sapien
gcctcattactgtcgactgccaaat

SEQ ID NO: 1446924 - DNA, 25 bp, Homo sapien
gggatcaagcaaaaggtatggtaac

SEQ ID NO: 1446925 - DNA, 25 bp, Homo sapien
cacacaacagtagccggtcttcatc

SEQ ID NO: 1446926 - DNA, 25 bp, Homo sapien
cagtagccggtcttcatcattgcca

SEQ ID NO: 1446927 - DNA, 25 bp, Homo sapien
acagccatcacacaacagtagccgg

SEQ ID NO: 1446928 - DNA, 25 bp, Homo sapien
catcacacaacagtagccggtcttc

SEQ ID NO: 1446929 - DNA, 25 bp, Homo sapien
tccagaaaatcgcagtcaatgccgc

SEQ ID NO: 1446930 - DNA, 25 bp, Homo sapien
aatgccgccccggatgttactacca

SEQ ID NO: 1446931 - DNA, 25 bp, Homo sapien
tgctagctgggaagttggaaaacac

SEQ ID NO: 1446932 - DNA, 25 bp, Homo sapien
actaacttggatttttgagcgagcc

SEQ ID NO: 1446933 - DNA, 25 bp, Homo sapien
tttagatcgactcttgggcttttcc

SEQ ID NO: 1446934 - DNA, 25 bp, Homo sapien
tataatctttcctctcaataggttc

SEQ ID NO: 1446935 - DNA, 25 bp, Homo sapien
gcttttttagatcgactcttgggct

SEQ ID NO: 1446936 - DNA, 25 bp, Homo sapien
gcattggtggcttttttagatcgac

SEQ ID NO: 1446937 - DNA, 25 bp, Homo sapien
tctcagattatgagttctggcttcc

SEQ ID NO: 1446938 - DNA, 25 bp, Homo sapien
cccattcgacgtctcagattatgag

SEQ ID NO: 1446939 - DNA, 25 bp, Homo sapien
gacgtctcagattatgagttctggc

SEQ ID NO: 1446940 - DNA, 25 bp, Homo sapien
agttggacaacccattcgacgtctc

SEQ ID NO: 1446941 - DNA, 25 bp, Homo sapien
agaacaaattgtggctgggcgaggt

SEQ ID NO: 1446942 - DNA, 25 bp, Homo sapien
caaattgtggctgggcgaggtgcct

SEQ ID NO: 1446943 - DNA, 25 bp, Homo sapien
gtcaaaggatcaagaacaaattgtg

SEQ ID NO: 1446944 - DNA, 25 bp, Homo sapien
aacaaattgtggctgggcgaggtgc

SEQ ID NO: 1446945 - DNA, 25 bp, Homo sapien
gaagaattgctggaatctaggaggc

SEQ ID NO: 1446946 - DNA, 25 bp, Homo sapien
tctaggaggcggaggttgcagtgag

SEQ ID NO: 1446947 - DNA, 25 bp, Homo sapien
ggcagaagaattgctggaatctagg

SEQ ID NO: 1446948 - DNA, 25 bp, Homo sapien
tgagccaagatcgcgccactgcact

SEQ ID NO: 1446949 - DNA, 25 bp, Homo sapien
gtttgtactccttgtccttagtgtc

SEQ ID NO: 1446950 - DNA, 25 bp, Homo sapien
gcacgtttccgaaggctgcacagac

SEQ ID NO: 1446951 - DNA, 25 bp, Homo sapien
tcatgcgttttgctcgtcgggctgg

SEQ ID NO: 1446952 - DNA, 25 bp, Homo sapien
gaatatcatggggtttgtactcctt

SEQ ID NO: 1446953 - DNA, 25 bp, Homo sapien
catgagttcgagtttgatctacttc

SEQ ID NO: 1446954 - DNA, 25 bp, Homo sapien
gcatgccacatgagttcgagtttga

SEQ ID NO: 1446955 - DNA, 25 bp, Homo sapien
ccacatgagttcgagtttgatctac

SEQ ID NO: 1446956 - DNA, 25 bp, Homo sapien
tatctagcatgccacatgagttcga

SEQ ID NO: 1446957 - DNA, 25 bp, Homo sapien
caaacacatcttagctagtaacgac

SEQ ID NO: 1446958 - DNA, 25 bp, Homo sapien
gctagtaacgaccacttgttttcca

SEQ ID NO: 1446959 - DNA, 25 bp, Homo sapien
cagatccaaagtacaaacacatctt

SEQ ID NO: 1446960 - DNA, 25 bp, Homo sapien
tcttagctagtaacgaccacttgtt

SEQ ID NO: 1446961 - DNA, 25 bp, Homo sapien
gaccacagaggctgtgaacctccgg

SEQ ID NO: 1446962 - DNA, 25 bp, Homo sapien
acggaccacagaggctgtgaacctc

SEQ ID NO: 1446963 - DNA, 25 bp, Homo sapien
acagaggctgtgaacctccggatgc

SEQ ID NO: 1446964 - DNA, 25 bp, Homo sapien
ccacagaggctgtgaacctccggat

SEQ ID NO: 1446965 - DNA, 25 bp, Homo sapien
gcccaacatagcgctgctggaagct

SEQ ID NO: 1446966 - DNA, 25 bp, Homo sapien
ctagcccaacatagcgctgctggaa

SEQ ID NO: 1446967 - DNA, 25 bp, Homo sapien
tagcccaacatagcgctgctggaag

SEQ ID NO: 1446968 - DNA, 25 bp, Homo sapien
agcccaacatagcgctgctggaagc

SEQ ID NO: 1446969 - DNA, 25 bp, Homo sapien
tgcagagaccgaggaaggatgaaat

SEQ ID NO: 1446970 - DNA, 25 bp, Homo sapien
ctgcgaaaggtgcagagaccgagga

SEQ ID NO: 1446971 - DNA, 25 bp, Homo sapien
tggcggcacctcaccaagacctttt

SEQ ID NO: 1446972 - DNA, 25 bp, Homo sapien
gaaggatgaaatggcggcacctcac

SEQ ID NO: 1446973 - DNA, 25 bp, Homo sapien
cagagactgggcgaagaacaaaata

SEQ ID NO: 1446974 - DNA, 25 bp, Homo sapien
tgagatacgtggaaataacaacctt

SEQ ID NO: 1446975 - DNA, 25 bp, Homo sapien
cctgaagcactaacactatgagcat

SEQ ID NO: 1446976 - DNA, 25 bp, Homo sapien
ccctctagggtgtgttatagcagct

SEQ ID NO: 1446977 - DNA, 25 bp, Homo sapien
tgttccactggaacagtgcatcaac

SEQ ID NO: 1446978 - DNA, 25 bp, Homo sapien
gagaaaccaggacttacaggtgatt

SEQ ID NO: 1446979 - DNA, 25 bp, Homo sapien
aacatgatgatgcaagattgaggcc

SEQ ID NO: 1446980 - DNA, 25 bp, Homo sapien
tgccataatcacatcatcccaaaga

SEQ ID NO: 1446981 - DNA, 25 bp, Homo sapien
aaccccatcttggtagcaattttgg

SEQ ID NO: 1446982 - DNA, 25 bp, Homo sapien
tgccctctgatatgtgagcccactg

SEQ ID NO: 1446983 - DNA, 25 bp, Homo sapien
ccttaggctgtctccggacaggaat

SEQ ID NO: 1446984 - DNA, 25 bp, Homo sapien
ggttgagaattcgttcataatgccc

SEQ ID NO: 1446985 - DNA, 25 bp, Homo sapien
gctgaaataagtccaagatcttcct

SEQ ID NO: 1446986 - DNA, 25 bp, Homo sapien
tattaagctgaaataagtccaagat

SEQ ID NO: 1446987 - DNA, 25 bp, Homo sapien
ccagtactttgcaatctggtccaag

SEQ ID NO: 1446988 - DNA, 25 bp, Homo sapien
cagtactttgcaatctggtccaaga

SEQ ID NO: 1446989 - DNA, 25 bp, Homo sapien
agtactttgcaatctggtccaagaa

SEQ ID NO: 1446990 - DNA, 25 bp, Homo sapien
agtgaaccaggataatgctgctgca

SEQ ID NO: 1446991 - DNA, 25 bp, Homo sapien
gcagtgaaccaggataatgctgctg

SEQ ID NO: 1446992 - DNA, 25 bp, Homo sapien
gaaccaggataatgctgctgcactc

SEQ ID NO: 1446993 - DNA, 25 bp, Homo sapien
tgaaccaggataatgctgctgcact

SEQ ID NO: 1446994 - DNA, 25 bp, Homo sapien
tacgtggcgtaaaatgaagtttatc

SEQ ID NO: 1446995 - DNA, 25 bp, Homo sapien
tgaagtttatcaacatcacatgcaa

SEQ ID NO: 1446996 - DNA, 25 bp, Homo sapien
gtttatcaacatcacatgcaaatgg

SEQ ID NO: 1446997 - DNA, 25 bp, Homo sapien
attcagtctctggatacgtggcgta

SEQ ID NO: 1446998 - DNA, 25 bp, Homo sapien
gtacatttatatagggagccccgag

SEQ ID NO: 1446999 - DNA, 25 bp, Homo sapien
tagctgcctaaacctgtcatgaaat

SEQ ID NO: 1447000 - DNA, 25 bp, Homo sapien
cagtgggtctcaaacctagcagagc

SEQ ID NO: 1447001 - DNA, 25 bp, Homo sapien
tcatgaaattacctaaaccagtggg

SEQ ID NO: 1447002 - DNA, 25 bp, Homo sapien
taaagagccatggtttgcaacatcc

SEQ ID NO: 1447003 - DNA, 25 bp, Homo sapien
tagtcatgaccctccttaaggttag

SEQ ID NO: 1447004 - DNA, 25 bp, Homo sapien
tgggcctcactatgtaaagaagggc

SEQ ID NO: 1447005 - DNA, 25 bp, Homo sapien
tttctaggatctatgaagggagcca

SEQ ID NO: 1447006 - DNA, 25 bp, Homo sapien
aatggtggtctcacgtttcaagggc

SEQ ID NO: 1447007 - DNA, 25 bp, Homo sapien
cgtgacacccctggacatggtggaa

SEQ ID NO: 1447008 - DNA, 25 bp, Homo sapien
cacagagctgtaatgggcctgacca

SEQ ID NO: 1447009 - DNA, 25 bp, Homo sapien
tagctccctccaacaaatggtggtc

SEQ ID NO: 1447010 - DNA, 25 bp, Homo sapien
caaccataggagtcagctttgcagc

SEQ ID NO: 1447011 - DNA, 25 bp, Homo sapien
tgggctcaggccaaaggaactccat

SEQ ID NO: 1447012 - DNA, 25 bp, Homo sapien
gctacagtgctgaccctaacctttg

SEQ ID NO: 1447013 - DNA, 25 bp, Homo sapien
ctggatgcggactctacctggttgc

SEQ ID NO: 1447014 - DNA, 25 bp, Homo sapien
gtaatctcaactaaatggggggctg

SEQ ID NO: 1447015 - DNA, 25 bp, Homo sapien
ctgtaatctcaactaaatggggggc

SEQ ID NO: 1447016 - DNA, 25 bp, Homo sapien
tgtaatctcaactaaatggggggct

SEQ ID NO: 1447017 - DNA, 25 bp, Homo sapien
gaaatgggtagccaagcctaaccag

SEQ ID NO: 1447018 - DNA, 25 bp, Homo sapien
catttccctcatattcgctggccag

SEQ ID NO: 1447019 - DNA, 25 bp, Homo sapien
gagaaacgtacttcccttaagcagc

SEQ ID NO: 1447020 - DNA, 25 bp, Homo sapien
ggaggtctccaaacagagtactggt

SEQ ID NO: 1447021 - DNA, 25 bp, Homo sapien
tctcctcagcgaacgttggagccgt

SEQ ID NO: 1447022 - DNA, 25 bp, Homo sapien
gccgttacggatggtttcagcaaca

SEQ ID NO: 1447023 - DNA, 25 bp, Homo sapien
gggaaacgagcacgaaatcttcgga

SEQ ID NO: 1447024 - DNA, 25 bp, Homo sapien
taggcagccccaaacttgacgaggc

SEQ ID NO: 1447025 - DNA, 25 bp, Homo sapien
tgccagtctgctcggctatgggccg

SEQ ID NO: 1447026 - DNA, 25 bp, Homo sapien
gccggatcttgtggatgaaagcgaa

SEQ ID NO: 1447027 - DNA, 25 bp, Homo sapien
tctgctcggctatgggccggatctt

SEQ ID NO: 1447028 - DNA, 25 bp, Homo sapien
ccttacagatgccagtctgctcggc

SEQ ID NO: 1447029 - DNA, 25 bp, Homo sapien
cgcgggcctgggtgcagtgtggtgg

SEQ ID NO: 1447030 - DNA, 25 bp, Homo sapien
ggcgcgggcctgggtgcagtgtggt

SEQ ID NO: 1447031 - DNA, 25 bp, Homo sapien
gcgcgggcctgggtgcagtgtggtg

SEQ ID NO: 1447032 - DNA, 25 bp, Homo sapien
gtgggctccgggaccgaggctgcga

SEQ ID NO: 1447033 - DNA, 25 bp, Homo sapien
gggcaagggcgaggcgaaggtgggc

SEQ ID NO: 1447034 - DNA, 25 bp, Homo sapien
ctccgggaccgaggctgcgagctcc

SEQ ID NO: 1447035 - DNA, 25 bp, Homo sapien
aggctgggcaagggcgaggcgaagg

SEQ ID NO: 1447036 - DNA, 25 bp, Homo sapien
cctgagtagatgctagcccgttggc

SEQ ID NO: 1447037 - DNA, 25 bp, Homo sapien
gccacggcgaggaaaaagagtccca

SEQ ID NO: 1447038 - DNA, 25 bp, Homo sapien
cacaatggtaggtgcagtaaaaccc

SEQ ID NO: 1447039 - DNA, 25 bp, Homo sapien
aacagcaagtccgagttgtacgggc

SEQ ID NO: 1447040 - DNA, 25 bp, Homo sapien
ccaggtaggcataactttgagacaa

SEQ ID NO: 1447041 - DNA, 25 bp, Homo sapien
tatcgtcgatggctctttggtgcgc

SEQ ID NO: 1447042 - DNA, 25 bp, Homo sapien
gagattctatcgctcccagatcagg

SEQ ID NO: 1447043 - DNA, 25 bp, Homo sapien
taacgttggcatcctacgagccagg

SEQ ID NO: 1447044 - DNA, 25 bp, Homo sapien
tagagggaaactcatgttccctgtt

SEQ ID NO: 1447045 - DNA, 25 bp, Homo sapien
gggcttcagggcgtgtttcttccca

SEQ ID NO: 1447046 - DNA, 25 bp, Homo sapien
gcaatcctgtgagctgcttagagaa

SEQ ID NO: 1447047 - DNA, 25 bp, Homo sapien
gagaagctgtgaggattagagggaa

SEQ ID NO: 1447048 - DNA, 25 bp, Homo sapien
tggcctcaggtacagcgcagactgt

SEQ ID NO: 1447049 - DNA, 25 bp, Homo sapien
taggcgaggaaccagactgaaagcc

SEQ ID NO: 1447050 - DNA, 25 bp, Homo sapien
tgaaagccgggcagaacttactgag

SEQ ID NO: 1447051 - DNA, 25 bp, Homo sapien
gccgggcagaacttactgagagtct

SEQ ID NO: 1447052 - DNA, 25 bp, Homo sapien
tgagaacatgacttaccttccattc

SEQ ID NO: 1447053 - DNA, 25 bp, Homo sapien
caaaaagagggatgggtcatagatg

SEQ ID NO: 1447054 - DNA, 25 bp, Homo sapien
cttccattctacctgggtgccagga

SEQ ID NO: 1447055 - DNA, 25 bp, Homo sapien
gcagctgctaggttatccaaataaa

SEQ ID NO: 1447056 - DNA, 25 bp, Homo sapien
cgtatcttcatagtcccaggctgga

SEQ ID NO: 1447057 - DNA, 25 bp, Homo sapien
gcatgaggtagtgcctgtaggccac

SEQ ID NO: 1447058 - DNA, 25 bp, Homo sapien
cgtttgtaaggcatcaggacagagc

SEQ ID NO: 1447059 - DNA, 25 bp, Homo sapien
ggaatcctatttcttggaccctgcg

SEQ ID NO: 1447060 - DNA, 25 bp, Homo sapien
tgtgaagttgaagtaccacagcctg

SEQ ID NO: 1447061 - DNA, 25 bp, Homo sapien
ggtacacatagggacccctgtgaag

SEQ ID NO: 1447062 - DNA, 25 bp, Homo sapien
catagggacccctgtgaagttgaag

SEQ ID NO: 1447063 - DNA, 25 bp, Homo sapien
ggacccctgtgaagttgaagtacca

SEQ ID NO: 1447064 - DNA, 25 bp, Homo sapien
gaagcagtgccaatcctccactaga

SEQ ID NO: 1447065 - DNA, 25 bp, Homo sapien
cacacaactgtggtgcgagagacca

SEQ ID NO: 1447066 - DNA, 25 bp, Homo sapien
ccaggtgttacaggtgccaggaccc

SEQ ID NO: 1447067 - DNA, 25 bp, Homo sapien
gaagcttaaagatggcccactgcct

SEQ ID NO: 1447068 - DNA, 25 bp, Homo sapien
gtggtattgtttagcacgcagactg

SEQ ID NO: 1447069 - DNA, 25 bp, Homo sapien
ccctgtccacataacagtgcataaa

SEQ ID NO: 1447070 - DNA, 25 bp, Homo sapien
gatggctgtggtattgtttagcacg

SEQ ID NO: 1447071 - DNA, 25 bp, Homo sapien
gcccctgtccacataacagtgcata

SEQ ID NO: 1447072 - DNA, 25 bp, Homo sapien
tgtgggggactggtagttgatgcca

SEQ ID NO: 1447073 - DNA, 25 bp, Homo sapien
tgggggactggtagttgatgccaac

SEQ ID NO: 1447074 - DNA, 25 bp, Homo sapien
gtgggggactggtagttgatgccaa

SEQ ID NO: 1447075 - DNA, 25 bp, Homo sapien
ctgtgggggactggtagttgatgcc

SEQ ID NO: 1447076 - DNA, 25 bp, Homo sapien
cccatcatctgataatgggcctctc

SEQ ID NO: 1447077 - DNA, 25 bp, Homo sapien
tccccatcatctgataatgggcctc

SEQ ID NO: 1447078 - DNA, 25 bp, Homo sapien
ctttccccatcatctgataatgggc

SEQ ID NO: 1447079 - DNA, 25 bp, Homo sapien
ttctgatccgcactttccccatcat

SEQ ID NO: 1447080 - DNA, 25 bp, Homo sapien
ctaagtaagatgaaattgatacttt

SEQ ID NO: 1447081 - DNA, 25 bp, Homo sapien
caggctaagtaagatgaaattgata

SEQ ID NO: 1447082 - DNA, 25 bp, Homo sapien
ggctaagtaagatgaaattgatact

SEQ ID NO: 1447083 - DNA, 25 bp, Homo sapien
aggctaagtaagatgaaattgatac

SEQ ID NO: 1447084 - DNA, 25 bp, Homo sapien
tggtggcattctcgtccttgggcac

SEQ ID NO: 1447085 - DNA, 25 bp, Homo sapien
ggtggcaatggtggcattctcgtcc

SEQ ID NO: 1447086 - DNA, 25 bp, Homo sapien
tgtgggacacgtccgcaaaacaaat

SEQ ID NO: 1447087 - DNA, 25 bp, Homo sapien
acctgtgggacacgtccgcaaaaca

SEQ ID NO: 1447088 - DNA, 25 bp, Homo sapien
tatagggttctacaactgtcatgga

SEQ ID NO: 1447089 - DNA, 25 bp, Homo sapien
ggtccacgttgagggcaccatcaaa

SEQ ID NO: 1447090 - DNA, 25 bp, Homo sapien
gcagcagagatcatagatggcctcg

SEQ ID NO: 1447091 - DNA, 25 bp, Homo sapien
tagcaaattccaacttgagccagtg

SEQ ID NO: 1447092 - DNA, 25 bp, Homo sapien
tctaccgagcagcagagagtatgtc

SEQ ID NO: 1447093 - DNA, 25 bp, Homo sapien
tggtggttctcaatgcctcggatag

SEQ ID NO: 1447094 - DNA, 25 bp, Homo sapien
taaggatgcaacgacctcctgtagg

SEQ ID NO: 1447095 - DNA, 25 bp, Homo sapien
gaatgatgtcaggtaccagcacagg

SEQ ID NO: 1447096 - DNA, 25 bp, Homo sapien
ctccagcaccaaatcgatgatctcc

SEQ ID NO: 1447097 - DNA, 25 bp, Homo sapien
atcttccacgccagatatcagctgt

SEQ ID NO: 1447098 - DNA, 25 bp, Homo sapien
catcttccacgccagatatcagctg

SEQ ID NO: 1447099 - DNA, 25 bp, Homo sapien
tcttccacgccagatatcagctgtt

SEQ ID NO: 1447100 - DNA, 25 bp, Homo sapien
ctataaatgtcagttcttaccccat

SEQ ID NO: 1447101 - DNA, 25 bp, Homo sapien
accagaacctttgctgctaagcctc

SEQ ID NO: 1447102 - DNA, 25 bp, Homo sapien
ttcattccccaagggaacgccagac

SEQ ID NO: 1447103 - DNA, 25 bp, Homo sapien
caaaggtaagacaagctggttcatt

SEQ ID NO: 1447104 - DNA, 25 bp, Homo sapien
ggtaagacaagctggttcattcccc

SEQ ID NO: 1447105 - DNA, 25 bp, Homo sapien
gatgatgcacggcatcttctttttc

SEQ ID NO: 1447106 - DNA, 25 bp, Homo sapien
gagtgatgatgcacggcatcttctt

SEQ ID NO: 1447107 - DNA, 25 bp, Homo sapien
agagtgatgatgcacggcatcttct

SEQ ID NO: 1447108 - DNA, 25 bp, Homo sapien
gtgatgatgcacggcatcttctttt

SEQ ID NO: 1447109 - DNA, 25 bp, Homo sapien
cacttctaaggccaggtcctgcctg

SEQ ID NO: 1447110 - DNA, 25 bp, Homo sapien
tggcaccttcagtggtcccttccct

SEQ ID NO: 1447111 - DNA, 25 bp, Homo sapien
cttccctctacagcgacttcattgt

SEQ ID NO: 1447112 - DNA, 25 bp, Homo sapien
gaccagagacccacttctaaggcca

SEQ ID NO: 1447113 - DNA, 25 bp, Homo sapien
acagccaagttcacataggcccaca

SEQ ID NO: 1447114 - DNA, 25 bp, Homo sapien
agccaagttcacataggcccacatc

SEQ ID NO: 1447115 - DNA, 25 bp, Homo sapien
aaagcctccggaagccagcaacagc

SEQ ID NO: 1447116 - DNA, 25 bp, Homo sapien
ggaagcaggaaagcctccggaagcc

SEQ ID NO: 1447117 - DNA, 25 bp, Homo sapien
aggtccacagacagcccaggacaca

SEQ ID NO: 1447118 - DNA, 25 bp, Homo sapien
tccaggtccacagacagcccaggac

SEQ ID NO: 1447119 - DNA, 25 bp, Homo sapien
tatgacagcaggctccaggtccaca

SEQ ID NO: 1447120 - DNA, 25 bp, Homo sapien
ctatgacagcaggctccaggtccac

SEQ ID NO: 1447121 - DNA, 25 bp, Homo sapien
gtcgtgctccaggcagtacagctcc

SEQ ID NO: 1447122 - DNA, 25 bp, Homo sapien
ccactgggctggatgtcgtgctcca

SEQ ID NO: 1447123 - DNA, 25 bp, Homo sapien
ggtgttgaaggagttatcactgctc

SEQ ID NO: 1447124 - DNA, 25 bp, Homo sapien
ggagttatcactgctccccagggcc

SEQ ID NO: 1447125 - DNA, 25 bp, Homo sapien
tccggcctggcccacatggatggag

SEQ ID NO: 1447126 - DNA, 25 bp, Homo sapien
ctggcccacatggatggagatgcac

SEQ ID NO: 1447127 - DNA, 25 bp, Homo sapien
ccacatggatggagatgcactcaca

SEQ ID NO: 1447128 - DNA, 25 bp, Homo sapien
ggcccacatggatggagatgcactc

SEQ ID NO: 1447129 - DNA, 25 bp, Homo sapien
gccagggcatgagtggtgtggagtg

SEQ ID NO: 1447130 - DNA, 25 bp, Homo sapien
cagggcatgagtggtgtggagtgaa

SEQ ID NO: 1447131 - DNA, 25 bp, Homo sapien
catgagtggtgtggagtgaaaaggt

SEQ ID NO: 1447132 - DNA, 25 bp, Homo sapien
gggcatgagtggtgtggagtgaaaa

SEQ ID NO: 1447133 - DNA, 25 bp, Homo sapien
atcctccccatcgtgcgacaccctc

SEQ ID NO: 1447134 - DNA, 25 bp, Homo sapien
ccggcatcctccccatcgtgcgaca

SEQ ID NO: 1447135 - DNA, 25 bp, Homo sapien
ggcatcctccccatcgtgcgacacc

SEQ ID NO: 1447136 - DNA, 25 bp, Homo sapien
catcctccccatcgtgcgacaccct

SEQ ID NO: 1447137 - DNA, 25 bp, Homo sapien
tagttgaagttggagggtcgctgac

SEQ ID NO: 1447138 - DNA, 25 bp, Homo sapien
tgactgcagacaccatacgggtctc

SEQ ID NO: 1447139 - DNA, 25 bp, Homo sapien
cacgaatcccaacgcgcggttgctg

SEQ ID NO: 1447140 - DNA, 25 bp, Homo sapien
acgggtctccagcaacaccacgaat

SEQ ID NO: 1447141 - DNA, 25 bp, Homo sapien
agagccgccggttgtgtctcctggc

SEQ ID NO: 1447142 - DNA, 25 bp, Homo sapien
aatccccggagagccgccggttgtg

SEQ ID NO: 1447143 - DNA, 25 bp, Homo sapien
cttataaatccccggagagccgccg

SEQ ID NO: 1447144 - DNA, 25 bp, Homo sapien
cggagagccgccggttgtgtctcct

SEQ ID NO: 1447145 - DNA, 25 bp, Homo sapien
ccttggagaagggtgcatacttaag

SEQ ID NO: 1447146 - DNA, 25 bp, Homo sapien
cgaaaagtgtgtcggccttggagaa

SEQ ID NO: 1447147 - DNA, 25 bp, Homo sapien
ctgattcgaaaagtgtgtcggcctt

SEQ ID NO: 1447148 - DNA, 25 bp, Homo sapien
gggtgcatacttaagttcagcaacc

SEQ ID NO: 1447149 - DNA, 25 bp, Homo sapien
tgagaaccgactgctgggagtttcc

SEQ ID NO: 1447150 - DNA, 25 bp, Homo sapien
ggagtttccagagcgggacaaaatg

SEQ ID NO: 1447151 - DNA, 25 bp, Homo sapien
tccagagcgggacaaaatgcggctg

SEQ ID NO: 1447152 - DNA, 25 bp, Homo sapien
ggtgggtaggataggcaaacaggca

SEQ ID NO: 1447153 - DNA, 25 bp, Homo sapien
atctgcagctgatatgactttctgc

SEQ ID NO: 1447154 - DNA, 25 bp, Homo sapien
tctgcagctgatatgactttctgct

SEQ ID NO: 1447155 - DNA, 25 bp, Homo sapien
aaatctgcagctgatatgactttct

SEQ ID NO: 1447156 - DNA, 25 bp, Homo sapien
aatctgcagctgatatgactttctg

SEQ ID NO: 1447157 - DNA, 25 bp, Homo sapien
taatcttggacaggtgtactcagct

SEQ ID NO: 1447158 - DNA, 25 bp, Homo sapien
caagtgtaggttgtggtgtctttct

SEQ ID NO: 1447159 - DNA, 25 bp, Homo sapien
atagccacaggtataatccgttggg

SEQ ID NO: 1447160 - DNA, 25 bp, Homo sapien
ggtgccgtgcttaacaatactcccc

SEQ ID NO: 1447161 - DNA, 25 bp, Homo sapien
tgagattgttaacagtattaggagt

SEQ ID NO: 1447162 - DNA, 25 bp, Homo sapien
gataagtattctaagctctgtgggc

SEQ ID NO: 1447163 - DNA, 25 bp, Homo sapien
tacatcagtttgaagttgagattgt

SEQ ID NO: 1447164 - DNA, 25 bp, Homo sapien
ggcagaattggagatattatatact

SEQ ID NO: 1447165 - DNA, 25 bp, Homo sapien
tgaattcccaaactagtgtctctcc

SEQ ID NO: 1447166 - DNA, 25 bp, Homo sapien
tagtctgatagcaccgatgtctcca

SEQ ID NO: 1447167 - DNA, 25 bp, Homo sapien
accatgcccaatcaagtttccactg

SEQ ID NO: 1447168 - DNA, 25 bp, Homo sapien
tgggcctgctatcttgtctcacgtg

SEQ ID NO: 1447169 - DNA, 25 bp, Homo sapien
gtttgggcaaactaccactctggga

SEQ ID NO: 1447170 - DNA, 25 bp, Homo sapien
taagatccgtaatcggaggctgggc

SEQ ID NO: 1447171 - DNA, 25 bp, Homo sapien
cctttctagttaaccagtgagctgg

SEQ ID NO: 1447172 - DNA, 25 bp, Homo sapien
tatactcggagcagaaagcacaggt

SEQ ID NO: 1447173 - DNA, 25 bp, Homo sapien
cattgcttaaatgcctttatttctt

SEQ ID NO: 1447174 - DNA, 25 bp, Homo sapien
attgcttaaatgcctttatttcttt

SEQ ID NO: 1447175 - DNA, 25 bp, Homo sapien
ccattgcttaaatgcctttatttct

SEQ ID NO: 1447176 - DNA, 25 bp, Homo sapien
gaaagttacttgtccagatgtggca

SEQ ID NO: 1447177 - DNA, 25 bp, Homo sapien
tactgtagatcacaagggtagccat

SEQ ID NO: 1447178 - DNA, 25 bp, Homo sapien
gcagccccggagctatggaaatttg

SEQ ID NO: 1447179 - DNA, 25 bp, Homo sapien
tatcaaactgttagagcagccccgg

SEQ ID NO: 1447180 - DNA, 25 bp, Homo sapien
tggtccaatttcacagtctgcgcag

SEQ ID NO: 1447181 - DNA, 25 bp, Homo sapien
tcttgtcatctaggcaatgccagcc

SEQ ID NO: 1447182 - DNA, 25 bp, Homo sapien
ggattgctgccgtcagacagagctg

SEQ ID NO: 1447183 - DNA, 25 bp, Homo sapien
tgcgcagaccagaaacttgatgttg

SEQ ID NO: 1447184 - DNA, 25 bp, Homo sapien
ttcacatagatggagtaaacttcag

SEQ ID NO: 1447185 - DNA, 25 bp, Homo sapien
tcaaccaagaattcagtgtgtccaa

SEQ ID NO: 1447186 - DNA, 25 bp, Homo sapien
aaatgtatttctggcttatccccta

SEQ ID NO: 1447187 - DNA, 25 bp, Homo sapien
aagcattagtgttcaggaggtgccc

SEQ ID NO: 1447188 - DNA, 25 bp, Homo sapien
caggcttaacggctgggagcgctcc

SEQ ID NO: 1447189 - DNA, 25 bp, Homo sapien
taacggctgggagcgctcctttaac

SEQ ID NO: 1447190 - DNA, 25 bp, Homo sapien
cctttctgcaggcttaacggctggg

SEQ ID NO: 1447191 - DNA, 25 bp, Homo sapien
ctttctgcaggcttaacggctggga

SEQ ID NO: 1447192 - DNA, 25 bp, Homo sapien
cggtttcggccctcggctgacacta

SEQ ID NO: 1447193 - DNA, 25 bp, Homo sapien
gcacagcaccgccttccggtttcgg

SEQ ID NO: 1447194 - DNA, 25 bp, Homo sapien
gagccgcaacgctggcacagcaccg

SEQ ID NO: 1447195 - DNA, 25 bp, Homo sapien
gctgacactaactcgctcggctgct

SEQ ID NO: 1447196 - DNA, 25 bp, Homo sapien
ctcagccacggctgcgcagacgctg

SEQ ID NO: 1447197 - DNA, 25 bp, Homo sapien
agccacggctgcgcagacgctgtct

SEQ ID NO: 1447198 - DNA, 25 bp, Homo sapien
cctcagccacggctgcgcagacgct

SEQ ID NO: 1447199 - DNA, 25 bp, Homo sapien
tcagccacggctgcgcagacgctgt

SEQ ID NO: 1447200 - DNA, 25 bp, Homo sapien
tcgttattcactgcgctggcgcggc

SEQ ID NO: 1447201 - DNA, 25 bp, Homo sapien
ctgctggctcgttattcactgcgct

SEQ ID NO: 1447202 - DNA, 25 bp, Homo sapien
tggctcgttattcactgcgctggcg

SEQ ID NO: 1447203 - DNA, 25 bp, Homo sapien
tattcactgcgctggcgcggcttgg

SEQ ID NO: 1447204 - DNA, 25 bp, Homo sapien
aattaactctgtaggtcaatacaac

SEQ ID NO: 1447205 - DNA, 25 bp, Homo sapien
ttaactctgtaggtcaatacaactc

SEQ ID NO: 1447206 - DNA, 25 bp, Homo sapien
aactctgtaggtcaatacaactcag

SEQ ID NO: 1447207 - DNA, 25 bp, Homo sapien
cagctgtcgatgatagggtcataac

SEQ ID NO: 1447208 - DNA, 25 bp, Homo sapien
ttcccagctgtcgatgatagggtca

SEQ ID NO: 1447209 - DNA, 25 bp, Homo sapien
cccagctgtcgatgatagggtcata

SEQ ID NO: 1447210 - DNA, 25 bp, Homo sapien
ccagctgtcgatgatagggtcataa

SEQ ID NO: 1447211 - DNA, 25 bp, Homo sapien
tgcaattgcatagagtctcccccga

SEQ ID NO: 1447212 - DNA, 25 bp, Homo sapien
gaaaggtgggctgtaccatcaaatc

SEQ ID NO: 1447213 - DNA, 25 bp, Homo sapien
ggcccctacatagcatcgtggagtg

SEQ ID NO: 1447214 - DNA, 25 bp, Homo sapien
tgttgtatgcttcaacggaagaaag

SEQ ID NO: 1447215 - DNA, 25 bp, Homo sapien
taagatattcaagccgtcatatcct

SEQ ID NO: 1447216 - DNA, 25 bp, Homo sapien
tttaagatattcaagccgtcatatc

SEQ ID NO: 1447217 - DNA, 25 bp, Homo sapien
ttaagatattcaagccgtcatatcc

SEQ ID NO: 1447218 - DNA, 25 bp, Homo sapien
tatttctcaactgaatttaagatat

SEQ ID NO: 1447219 - DNA, 25 bp, Homo sapien
ccactggccactacgagtccggcac

SEQ ID NO: 1447220 - DNA, 25 bp, Homo sapien
gatcactccactggccactacgagt

SEQ ID NO: 1447221 - DNA, 25 bp, Homo sapien
actccactggccactacgagtccgg

SEQ ID NO: 1447222 - DNA, 25 bp, Homo sapien
cactccactggccactacgagtccg

SEQ ID NO: 1447223 - DNA, 25 bp, Homo sapien
tgtgacgcctgcttccatcaaagcc

SEQ ID NO: 1447224 - DNA, 25 bp, Homo sapien
caaagcctccagagacatagatcat

SEQ ID NO: 1447225 - DNA, 25 bp, Homo sapien
caatgtttggatcatagcgctccat

SEQ ID NO: 1447226 - DNA, 25 bp, Homo sapien
gcatgctccactggtcaatgtttgg

SEQ ID NO: 1447227 - DNA, 25 bp, Homo sapien
ctaaggcgggaacggccatcatagc

SEQ ID NO: 1447228 - DNA, 25 bp, Homo sapien
ggcgggaacggccatcatagccacc

SEQ ID NO: 1447229 - DNA, 25 bp, Homo sapien
gcgggaacggccatcatagccacca

SEQ ID NO: 1447230 - DNA, 25 bp, Homo sapien
gaactaaggcgggaacggccatcat

SEQ ID NO: 1447231 - DNA, 25 bp, Homo sapien
ctccactcctgagtcttggggtcat

SEQ ID NO: 1447232 - DNA, 25 bp, Homo sapien
tccactcctgagtcttggggtcata

SEQ ID NO: 1447233 - DNA, 25 bp, Homo sapien
cactcctgagtcttggggtcatatt

SEQ ID NO: 1447234 - DNA, 25 bp, Homo sapien
aaaagctccactcctgagtcttggg

SEQ ID NO: 1447235 - DNA, 25 bp, Homo sapien
catcaatgggagactgctggcttcc

SEQ ID NO: 1447236 - DNA, 25 bp, Homo sapien
cacatcaatgggagactgctggctt

SEQ ID NO: 1447237 - DNA, 25 bp, Homo sapien
accaccaaaagcacttcattggctc

SEQ ID NO: 1447238 - DNA, 25 bp, Homo sapien
ccccaaccaccaaaagcacttcatt

SEQ ID NO: 1447239 - DNA, 25 bp, Homo sapien
taactagtcacagggaagtgtcaac

SEQ ID NO: 1447240 - DNA, 25 bp, Homo sapien
ggctgtagctctcgagtctctgaaa

SEQ ID NO: 1447241 - DNA, 25 bp, Homo sapien
gcatccctggatgggtaactagtca

SEQ ID NO: 1447242 - DNA, 25 bp, Homo sapien
tgtggctgagggatgcaatccgaaa

SEQ ID NO: 1447243 - DNA, 25 bp, Homo sapien
aagcatcctcctagcctcccacttc

SEQ ID NO: 1447244 - DNA, 25 bp, Homo sapien
gggctcaagcatcctcctagcctcc

SEQ ID NO: 1447245 - DNA, 25 bp, Homo sapien
ctcaagcatcctcctagcctcccac

SEQ ID NO: 1447246 - DNA, 25 bp, Homo sapien
agcttccctagtagctgggaccact

SEQ ID NO: 1447247 - DNA, 25 bp, Homo sapien
tctacctaaacccatcagtgagcag

SEQ ID NO: 1447248 - DNA, 25 bp, Homo sapien
gcggataaatcaccattctacctaa

SEQ ID NO: 1447249 - DNA, 25 bp, Homo sapien
ttagcacgcatcatgagtcctcagt

SEQ ID NO: 1447250 - DNA, 25 bp, Homo sapien
ttatcaactaacaccttagcacgca

SEQ ID NO: 1447251 - DNA, 25 bp, Homo sapien
tcattctgccgagataccagcttac

SEQ ID NO: 1447252 - DNA, 25 bp, Homo sapien
gaaaagcatcccctcattctgccga

SEQ ID NO: 1447253 - DNA, 25 bp, Homo sapien
ctgcaagaagtagttgaaaagcatc

SEQ ID NO: 1447254 - DNA, 25 bp, Homo sapien
caagaagtagttgaaaagcatcccc

SEQ ID NO: 1447255 - DNA, 25 bp, Homo sapien
tgcattgtaaactacagcggatgaa

SEQ ID NO: 1447256 - DNA, 25 bp, Homo sapien
ccctgcattgtaaactacagcggat

SEQ ID NO: 1447257 - DNA, 25 bp, Homo sapien
attgtaaactacagcggatgaaagg

SEQ ID NO: 1447258 - DNA, 25 bp, Homo sapien
cctgcattgtaaactacagcggatg

SEQ ID NO: 1447259 - DNA, 25 bp, Homo sapien
aaaaccagtttgcaaagccctgtga

SEQ ID NO: 1447260 - DNA, 25 bp, Homo sapien
cagatatgttgagcagtatttccca

SEQ ID NO: 1447261 - DNA, 25 bp, Homo sapien
ccaggagtattgctggtagtaacca

SEQ ID NO: 1447262 - DNA, 25 bp, Homo sapien
gtatttcccatctatcgcagcgctt

SEQ ID NO: 1447263 - DNA, 25 bp, Homo sapien
caaaggtcaaggtttctctcaaggc

SEQ ID NO: 1447264 - DNA, 25 bp, Homo sapien
tatgaactgtgtcaatagggcttcc

SEQ ID NO: 1447265 - DNA, 25 bp, Homo sapien
tgggatcagcccaaccaaaggtcaa

SEQ ID NO: 1447266 - DNA, 25 bp, Homo sapien
aatgctccctcgaagtatggtccag

SEQ ID NO: 1447267 - DNA, 25 bp, Homo sapien
taagagtccgtcaaggttttggatc

SEQ ID NO: 1447268 - DNA, 25 bp, Homo sapien
gatcctgagagtgttgcactactta

SEQ ID NO: 1447269 - DNA, 25 bp, Homo sapien
caaggttttggatcctgagagtgtt

SEQ ID NO: 1447270 - DNA, 25 bp, Homo sapien
tacataacactaaggtaagagtccg

SEQ ID NO: 1447271 - DNA, 25 bp, Homo sapien
tgtagcaggttaggcaaggattctt

SEQ ID NO: 1447272 - DNA, 25 bp, Homo sapien
cacatactgtagcaggttaggcaag

SEQ ID NO: 1447273 - DNA, 25 bp, Homo sapien
ggcatccgcacatactgtagcaggt

SEQ ID NO: 1447274 - DNA, 25 bp, Homo sapien
ggttagtaggggcatccgcacatac

SEQ ID NO: 1447275 - DNA, 25 bp, Homo sapien
cctacgaatggccataactgtgaag

SEQ ID NO: 1447276 - DNA, 25 bp, Homo sapien
ctacgaatggccataactgtgaagt

SEQ ID NO: 1447277 - DNA, 25 bp, Homo sapien
tcctacgaatggccataactgtgaa

SEQ ID NO: 1447278 - DNA, 25 bp, Homo sapien
atcctacgaatggccataactgtga

SEQ ID NO: 1447279 - DNA, 25 bp, Homo sapien
tctgtggaaagcgtaaagcattcca

SEQ ID NO: 1447280 - DNA, 25 bp, Homo sapien
ttttttggcacccatgctgttgatt

SEQ ID NO: 1447281 - DNA, 25 bp, Homo sapien
tgtgactaattgtgtaacaggttat

SEQ ID NO: 1447282 - DNA, 25 bp, Homo sapien
catgtgtatgggcaaaaaactcgag

SEQ ID NO: 1447283 - DNA, 25 bp, Homo sapien
tgtgatactctaaaaacgcagatgt

SEQ ID NO: 1447284 - DNA, 25 bp, Homo sapien
gcccctacagagtacatattctggg

SEQ ID NO: 1447285 - DNA, 25 bp, Homo sapien
tatataataacacctaggacttccc

SEQ ID NO: 1447286 - DNA, 25 bp, Homo sapien
cctgaatagaggtcctgtgcccctt

SEQ ID NO: 1447287 - DNA, 25 bp, Homo sapien
gaactggcagcttgaggaaatgact

SEQ ID NO: 1447288 - DNA, 25 bp, Homo sapien
caaaaggtgacggtgcttactggac

SEQ ID NO: 1447289 - DNA, 25 bp, Homo sapien
catccgaaggtttcaagcaggctag

SEQ ID NO: 1447290 - DNA, 25 bp, Homo sapien
tagaacagtttaaagggccaagagc

SEQ ID NO: 1447291 - DNA, 25 bp, Homo sapien
attgtggtcaacagttgtaaacacc

SEQ ID NO: 1447292 - DNA, 25 bp, Homo sapien
aaaagactaatcacatgaagcagca

SEQ ID NO: 1447293 - DNA, 25 bp, Homo sapien
actgattgtggtcaacagttgtaaa

SEQ ID NO: 1447294 - DNA, 25 bp, Homo sapien
aactgattgtggtcaacagttgtaa

SEQ ID NO: 1447295 - DNA, 25 bp, Homo sapien
ctatttgcaagttttgtaattgccc

SEQ ID NO: 1447296 - DNA, 25 bp, Homo sapien
ttgaagaaaccataacatcaagaca

SEQ ID NO: 1447297 - DNA, 25 bp, Homo sapien
tgtaattgcccaatcttgaagaaac

SEQ ID NO: 1447298 - DNA, 25 bp, Homo sapien
ccataacatcaagacaaatccgtac

SEQ ID NO: 1447299 - DNA, 25 bp, Homo sapien
taatacccaggcaattagaagggtc

SEQ ID NO: 1447300 - DNA, 25 bp, Homo sapien
agaagggtccaactgactttctaag

SEQ ID NO: 1447301 - DNA, 25 bp, Homo sapien
caggtcaacacaattgtgggtttca

SEQ ID NO: 1447302 - DNA, 25 bp, Homo sapien
tcatgctgtaccacttcaggaaaat

SEQ ID NO: 1447303 - DNA, 25 bp, Homo sapien
caaacactttagaatagttggacag

SEQ ID NO: 1447304 - DNA, 25 bp, Homo sapien
catgttatcagatgaacccttgttt

SEQ ID NO: 1447305 - DNA, 25 bp, Homo sapien
tcttctctacatgttatcagatgaa

SEQ ID NO: 1447306 - DNA, 25 bp, Homo sapien
gatctaggatatattcttgtatctc

SEQ ID NO: 1447307 - DNA, 25 bp, Homo sapien
ttcttgtacattctccactgtcaca

SEQ ID NO: 1447308 - DNA, 25 bp, Homo sapien
gttcttgtacattctccactgtcac

SEQ ID NO: 1447309 - DNA, 25 bp, Homo sapien
tccgatgggcagggaagtctttctg

SEQ ID NO: 1447310 - DNA, 25 bp, Homo sapien
atccgatgggcagggaagtctttct

SEQ ID NO: 1447311 - DNA, 25 bp, Homo sapien
gatttagcatgagtatttgtcatta

SEQ ID NO: 1447312 - DNA, 25 bp, Homo sapien
aacaaaatgggtccttggattctgc

SEQ ID NO: 1447313 - DNA, 25 bp, Homo sapien
agcagtgcggagaaagaacaaaatg

SEQ ID NO: 1447314 - DNA, 25 bp, Homo sapien
caaaatgggtccttggattctgcaa

SEQ ID NO: 1447315 - DNA, 25 bp, Homo sapien
agaacaaaatgggtccttggattct

SEQ ID NO: 1447316 - DNA, 25 bp, Homo sapien
cgctcccgaacccacacagccgcac

SEQ ID NO: 1447317 - DNA, 25 bp, Homo sapien
tcccgaacccacacagccgcaccgg

SEQ ID NO: 1447318 - DNA, 25 bp, Homo sapien
ctccgctcccgaacccacacagccg

SEQ ID NO: 1447319 - DNA, 25 bp, Homo sapien
acagccgcaccgggcccgtccccag

SEQ ID NO: 1447320 - DNA, 25 bp, Homo sapien
gctctggagccgtccgggtctggcc

SEQ ID NO: 1447321 - DNA, 25 bp, Homo sapien
ctggagccgtccgggtctggcccct

SEQ ID NO: 1447322 - DNA, 25 bp, Homo sapien
tctggagccgtccgggtctggcccc

SEQ ID NO: 1447323 - DNA, 25 bp, Homo sapien
ctctggagccgtccgggtctggccc

SEQ ID NO: 1447324 - DNA, 25 bp, Homo sapien
cagacccgcctggggatcacggcaa

SEQ ID NO: 1447325 - DNA, 25 bp, Homo sapien
tgacatcgagaaaacccacagaggc

SEQ ID NO: 1447326 - DNA, 25 bp, Homo sapien
cacaatggccttttcgggccgaaca

SEQ ID NO: 1447327 - DNA, 25 bp, Homo sapien
gcctcaaatttattcacgtccattg

SEQ ID NO: 1447328 - DNA, 25 bp, Homo sapien
aacgctgcggcgagaatcctctgag

SEQ ID NO: 1447329 - DNA, 25 bp, Homo sapien
tacatagcaatgatagcaggtttct

SEQ ID NO: 1447330 - DNA, 25 bp, Homo sapien
gctctataagcagatccaggcccta

SEQ ID NO: 1447331 - DNA, 25 bp, Homo sapien
gacagaatttctgaagagtcccagt

SEQ ID NO: 1447332 - DNA, 25 bp, Homo sapien
acttccatgattagccgggctaggt

SEQ ID NO: 1447333 - DNA, 25 bp, Homo sapien
tctaggccgtaacggaattcctgaa

SEQ ID NO: 1447334 - DNA, 25 bp, Homo sapien
ttctaggccgtaacggaattcctga

SEQ ID NO: 1447335 - DNA, 25 bp, Homo sapien
cttctaggccgtaacggaattcctg

SEQ ID NO: 1447336 - DNA, 25 bp, Homo sapien
ctaggccgtaacggaattcctgaag

SEQ ID NO: 1447337 - DNA, 25 bp, Homo sapien
gaaaagagcctttaggataatgcaa

SEQ ID NO: 1447338 - DNA, 25 bp, Homo sapien
cacagtccttgtcagagatacacca

SEQ ID NO: 1447339 - DNA, 25 bp, Homo sapien
gcacatatatgtacctccaaacact

SEQ ID NO: 1447340 - DNA, 25 bp, Homo sapien
ttaactttgggctgttcactcacca

SEQ ID NO: 1447341 - DNA, 25 bp, Homo sapien
gtggccttgacaaagccctcagcga

SEQ ID NO: 1447342 - DNA, 25 bp, Homo sapien
gggcacgacgccactcaagccaagt

SEQ ID NO: 1447343 - DNA, 25 bp, Homo sapien
gcatggtgggcacgacgccactcaa

SEQ ID NO: 1447344 - DNA, 25 bp, Homo sapien
gccctcagcgatagtaaagtgcatg

SEQ ID NO: 1447345 - DNA, 25 bp, Homo sapien
tttggatgaatagtacatgtttagg

SEQ ID NO: 1447346 - DNA, 25 bp, Homo sapien
taggaaacttagctacaagatggat

SEQ ID NO: 1447347 - DNA, 25 bp, Homo sapien
aaacagccaccgcatggaaggcact

SEQ ID NO: 1447348 - DNA, 25 bp, Homo sapien
cagaacagacataagactgtcaaac

SEQ ID NO: 1447349 - DNA, 25 bp, Homo sapien
ctgctcttgtctgccggtgcttagg

SEQ ID NO: 1447350 - DNA, 25 bp, Homo sapien
tcttgtctgccggtgcttaggagtg

SEQ ID NO: 1447351 - DNA, 25 bp, Homo sapien
ctgccggtgcttaggagtggcaaac

SEQ ID NO: 1447352 - DNA, 25 bp, Homo sapien
tgtctgccggtgcttaggagtggca

SEQ ID NO: 1447353 - DNA, 25 bp, Homo sapien
acacagacgatggagaggtagatga

SEQ ID NO: 1447354 - DNA, 25 bp, Homo sapien
tgcccaggacacagacgatggagag

SEQ ID NO: 1447355 - DNA, 25 bp, Homo sapien
cggtcccactgcgccacaatgatgg

SEQ ID NO: 1447356 - DNA, 25 bp, Homo sapien
cccactgcgccacaatgatggcaga

SEQ ID NO: 1447357 - DNA, 25 bp, Homo sapien
gacaaagctccccataattagaaga

SEQ ID NO: 1447358 - DNA, 25 bp, Homo sapien
caaagctccccataattagaagagc

SEQ ID NO: 1447359 - DNA, 25 bp, Homo sapien
atagagccaggggacaaagctcccc

SEQ ID NO: 1447360 - DNA, 25 bp, Homo sapien
ataatagagccaggggacaaagctc

SEQ ID NO: 1447361 - DNA, 25 bp, Homo sapien
caaggtcacttctattttacgatgg

SEQ ID NO: 1447362 - DNA, 25 bp, Homo sapien
aagaatccccattcaaagaactcta

SEQ ID NO: 1447363 - DNA, 25 bp, Homo sapien
accattccctcaatctatcctgtat

SEQ ID NO: 1447364 - DNA, 25 bp, Homo sapien
cctgtattctggattaaaattccac

SEQ ID NO: 1447365 - DNA, 25 bp, Homo sapien
tgaacagccgtatctcccatagtag

SEQ ID NO: 1447366 - DNA, 25 bp, Homo sapien
ccgtatctcccatagtagacacttg

SEQ ID NO: 1447367 - DNA, 25 bp, Homo sapien
tagtgaacagccgtatctcccatag

SEQ ID NO: 1447368 - DNA, 25 bp, Homo sapien
acagccgtatctcccatagtagaca

SEQ ID NO: 1447369 - DNA, 25 bp, Homo sapien
gaaagcacacgatgatggacatctg

SEQ ID NO: 1447370 - DNA, 25 bp, Homo sapien
tctaagcctcacaaaagatagtgct

SEQ ID NO: 1447371 - DNA, 25 bp, Homo sapien
aatagaacctcaggctcacggctgg

SEQ ID NO: 1447372 - DNA, 25 bp, Homo sapien
tagtaagttacgcttgtacaaggtc

SEQ ID NO: 1447373 - DNA, 25 bp, Homo sapien
ttctctgaatgacaatagacggtgt

SEQ ID NO: 1447374 - DNA, 25 bp, Homo sapien
tgacaatagacggtgtgaaagagcc

SEQ ID NO: 1447375 - DNA, 25 bp, Homo sapien
tctgaatgacaatagacggtgtgaa

SEQ ID NO: 1447376 - DNA, 25 bp, Homo sapien
caatagacggtgtgaaagagccagg

SEQ ID NO: 1447377 - DNA, 25 bp, Homo sapien
acatatttggtctgagcatggtcaa

SEQ ID NO: 1447378 - DNA, 25 bp, Homo sapien
aagtacatatttggtctgagcatgg

SEQ ID NO: 1447379 - DNA, 25 bp, Homo sapien
gaagtacatatttggtctgagcatg

SEQ ID NO: 1447380 - DNA, 25 bp, Homo sapien
gtacatatttggtctgagcatggtc

SEQ ID NO: 1447381 - DNA, 25 bp, Homo sapien
gaccatgtagcagatagtcgttgtc

SEQ ID NO: 1447382 - DNA, 25 bp, Homo sapien
tgaagcaagcccgaaaggagggcat

SEQ ID NO: 1447383 - DNA, 25 bp, Homo sapien
ttctgtatgaatgcggaagatgctc

SEQ ID NO: 1447384 - DNA, 25 bp, Homo sapien
agcagatgggtccagatgttgccag

SEQ ID NO: 1447385 - DNA, 25 bp, Homo sapien
tcagggagcacatcatatgggatga

SEQ ID NO: 1447386 - DNA, 25 bp, Homo sapien
ggagcacatcatatgggatgaccct

SEQ ID NO: 1447387 - DNA, 25 bp, Homo sapien
agtcagggagcacatcatatgggat

SEQ ID NO: 1447388 - DNA, 25 bp, Homo sapien
agggagcacatcatatgggatgacc

SEQ ID NO: 1447389 - DNA, 25 bp, Homo sapien
caaaccacagtattagtagaacttg

SEQ ID NO: 1447390 - DNA, 25 bp, Homo sapien
tccatgcactatggacaggatccag

SEQ ID NO: 1447391 - DNA, 25 bp, Homo sapien
tcacacattagttctgcaggtatct

SEQ ID NO: 1447392 - DNA, 25 bp, Homo sapien
gttcttaatctaggatccatgcact

SEQ ID NO: 1447393 - DNA, 25 bp, Homo sapien
ttcgacccagtgcaagcttgctggc

SEQ ID NO: 1447394 - DNA, 25 bp, Homo sapien
cttcgacccagtgcaagcttgctgg

SEQ ID NO: 1447395 - DNA, 25 bp, Homo sapien
ttccatcttctccatggcgtggtgg

SEQ ID NO: 1447396 - DNA, 25 bp, Homo sapien
gcaggggaagtgtcagtacccgcac

SEQ ID NO: 1447397 - DNA, 25 bp, Homo sapien
catcttctccatggcgtggtgggct

SEQ ID NO: 1447398 - DNA, 25 bp, Homo sapien
ttctccatggcgtggtgggcttgca

SEQ ID NO: 1447399 - DNA, 25 bp, Homo sapien
ggcactgggcatgtttgctcttctt

SEQ ID NO: 1447400 - DNA, 25 bp, Homo sapien
tggggcactgggcatgtttgctctt

SEQ ID NO: 1447401 - DNA, 25 bp, Homo sapien
cactgggcatgtttgctcttcttca

SEQ ID NO: 1447402 - DNA, 25 bp, Homo sapien
actgggcatgtttgctcttcttcag

SEQ ID NO: 1447403 - DNA, 25 bp, Homo sapien
gcaggggtcccagttcagccagttc

SEQ ID NO: 1447404 - DNA, 25 bp, Homo sapien
tcccctgtgccaccacagatccttt

SEQ ID NO: 1447405 - DNA, 25 bp, Homo sapien
tcagcttccctgttactggcaggag

SEQ ID NO: 1447406 - DNA, 25 bp, Homo sapien
tcagccagttccaccgtgtcagctt

SEQ ID NO: 1447407 - DNA, 25 bp, Homo sapien
gggcagagatctccctctgatggta

SEQ ID NO: 1447408 - DNA, 25 bp, Homo sapien
agagatctccctctgatggtagaca

SEQ ID NO: 1447409 - DNA, 25 bp, Homo sapien
ccagggggcagagatctccctctga

SEQ ID NO: 1447410 - DNA, 25 bp, Homo sapien
gtacctcaataccctgcagcttcag

SEQ ID NO: 1447411 - DNA, 25 bp, Homo sapien
tggagatcatgtcatcatagtgagc

SEQ ID NO: 1447412 - DNA, 25 bp, Homo sapien
ggagatcatgtcatcatagtgagca

SEQ ID NO: 1447413 - DNA, 25 bp, Homo sapien
atggagatcatgtcatcatagtgag

SEQ ID NO: 1447414 - DNA, 25 bp, Homo sapien
tgcagagcgatcaccaacctccctt

SEQ ID NO: 1447415 - DNA, 25 bp, Homo sapien
ccaccccatcaaagtgagggcactg

SEQ ID NO: 1447416 - DNA, 25 bp, Homo sapien
cttaaccctgcagagcgatcaccaa

SEQ ID NO: 1447417 - DNA, 25 bp, Homo sapien
ttcccaccccatcaaagtgagggca

SEQ ID NO: 1447418 - DNA, 25 bp, Homo sapien
ctggaggcggcctgcggccgagcgg

SEQ ID NO: 1447419 - DNA, 25 bp, Homo sapien
cccgcgctacatcccgcggcgctgg

SEQ ID NO: 1447420 - DNA, 25 bp, Homo sapien
gagcggccccgatcttcagcgccct

SEQ ID NO: 1447421 - DNA, 25 bp, Homo sapien
gggcgcgcgacctcccgcgtcacct

SEQ ID NO: 1447422 - DNA, 25 bp, Homo sapien
gacgttcgtcggattctacactcca

SEQ ID NO: 1447423 - DNA, 25 bp, Homo sapien
ccgccgcagccaggtaacctccacc

SEQ ID NO: 1447424 - DNA, 25 bp, Homo sapien
gaggacgttcgtcggattctacact

SEQ ID NO: 1447425 - DNA, 25 bp, Homo sapien
ggtagaggacgttcgtcggattcta

SEQ ID NO: 1447426 - DNA, 25 bp, Homo sapien
ctacatagcagaggagaagggtact

SEQ ID NO: 1447427 - DNA, 25 bp, Homo sapien
gctgccctagtcctaccctgggaaa

SEQ ID NO: 1447428 - DNA, 25 bp, Homo sapien
gagtgaattctgagggtcccacaaa

SEQ ID NO: 1447429 - DNA, 25 bp, Homo sapien
tctatctgggcatcaacaattccgg

SEQ ID NO: 1447430 - DNA, 25 bp, Homo sapien
tacaacttctcaaaggttctttgga

SEQ ID NO: 1447431 - DNA, 25 bp, Homo sapien
gagaagcggagctctggctctgctg

SEQ ID NO: 1447432 - DNA, 25 bp, Homo sapien
tttggaacacctgggagagttgcat

SEQ ID NO: 1447433 - DNA, 25 bp, Homo sapien
gcacatggtacaacttctcaaaggt

SEQ ID NO: 1447434 - DNA, 25 bp, Homo sapien
taagaccacctctggaagtatgcta

SEQ ID NO: 1447435 - DNA, 25 bp, Homo sapien
ttggaccaagcgtacatgctccctt

SEQ ID NO: 1447436 - DNA, 25 bp, Homo sapien
tggccctcttccatggctacaggaa

SEQ ID NO: 1447437 - DNA, 25 bp, Homo sapien
tttaggaggccatccaaggagtgac

SEQ ID NO: 1447438 - DNA, 25 bp, Homo sapien
gggtggcccacaaagcagtaccagc

SEQ ID NO: 1447439 - DNA, 25 bp, Homo sapien
cttttgtgagtagcccagtttgtcc

SEQ ID NO: 1447440 - DNA, 25 bp, Homo sapien
cagtaggtgaatcgcatcttttgtg

SEQ ID NO: 1447441 - DNA, 25 bp, Homo sapien
caggtgttcccggatcatgtcggca

SEQ ID NO: 1447442 - DNA, 25 bp, Homo sapien
gaatgggtatactcagcctgcctca

SEQ ID NO: 1447443 - DNA, 25 bp, Homo sapien
gaaagtgtcaagtggtagcagcagc

SEQ ID NO: 1447444 - DNA, 25 bp, Homo sapien
tcaagctgagccttagcagcaccgc

SEQ ID NO: 1447445 - DNA, 25 bp, Homo sapien
cagacttccgagttggcagtgtgag

SEQ ID NO: 1447446 - DNA, 25 bp, Homo sapien
cagagtgaaccagagcttaaagcga

SEQ ID NO: 1447447 - DNA, 25 bp, Homo sapien
gggatgatccagagtgaaccagagc

SEQ ID NO: 1447448 - DNA, 25 bp, Homo sapien
cttaaagcgattgggatagcgggcc

SEQ ID NO: 1447449 - DNA, 25 bp, Homo sapien
gaaccagagcttaaagcgattggga

SEQ ID NO: 1447450 - DNA, 25 bp, Homo sapien
ggagtcttctcaggcccacataaaa

SEQ ID NO: 1447451 - DNA, 25 bp, Homo sapien
aaagaggaccctgtgccttacagag

SEQ ID NO: 1447452 - DNA, 25 bp, Homo sapien
tgctccagactagataccttaaaag

SEQ ID NO: 1447453 - DNA, 25 bp, Homo sapien
gaagatctaagtttctgtgctccag

SEQ ID NO: 1447454 - DNA, 25 bp, Homo sapien
caggatggcccggatcagctgtagc

SEQ ID NO: 1447455 - DNA, 25 bp, Homo sapien
tggcccggatcagctgtagcattgg

SEQ ID NO: 1447456 - DNA, 25 bp, Homo sapien
gggactttcaggatggcccggatca

SEQ ID NO: 1447457 - DNA, 25 bp, Homo sapien
ggactttcaggatggcccggatcag

SEQ ID NO: 1447458 - DNA, 25 bp, Homo sapien
gagaaaggccctcagtgtaatgcac

SEQ ID NO: 1447459 - DNA, 25 bp, Homo sapien
tcagagggtcacctaggaatttgca

SEQ ID NO: 1447460 - DNA, 25 bp, Homo sapien
taagcattgctggaaatcccctgat

SEQ ID NO: 1447461 - DNA, 25 bp, Homo sapien
tatggttaccagtcttcagagggtc

SEQ ID NO: 1447462 - DNA, 25 bp, Homo sapien
ctgtcccgccggcaatcattcccag

SEQ ID NO: 1447463 - DNA, 25 bp, Homo sapien
ttcttcgccactcggggttctggtg

SEQ ID NO: 1447464 - DNA, 25 bp, Homo sapien
cagtttcttcgccactcggggttct

SEQ ID NO: 1447465 - DNA, 25 bp, Homo sapien
tcccgccggcaatcattcccagttt

SEQ ID NO: 1447466 - DNA, 25 bp, Homo sapien
tatgcctgaggccagttgagcagct

SEQ ID NO: 1447467 - DNA, 25 bp, Homo sapien
ttagtaatctccacagctgccatgg

SEQ ID NO: 1447468 - DNA, 25 bp, Homo sapien
tggaagcttgagttgagccagccct

SEQ ID NO: 1447469 - DNA, 25 bp, Homo sapien
gaagggctgaaagctatctctggct

SEQ ID NO: 1447470 - DNA, 25 bp, Homo sapien
cctcaggaaatttggggtgcacacc

SEQ ID NO: 1447471 - DNA, 25 bp, Homo sapien
aaccttcaggctatccaggtactga

SEQ ID NO: 1447472 - DNA, 25 bp, Homo sapien
gtgtaagtgagcaacccgcttggcc

SEQ ID NO: 1447473 - DNA, 25 bp, Homo sapien
cttttccagtgtaagtgagcaaccc

SEQ ID NO: 1447474 - DNA, 25 bp, Homo sapien
ttctacaaatcccagaaagaatggg

SEQ ID NO: 1447475 - DNA, 25 bp, Homo sapien
aagaatgggtaagcagcccctgggt

SEQ ID NO: 1447476 - DNA, 25 bp, Homo sapien
tgagtagctcatactttcttcacat

SEQ ID NO: 1447477 - DNA, 25 bp, Homo sapien
agagtacataccatttcctgctgtc

SEQ ID NO: 1447478 - DNA, 25 bp, Homo sapien
tgatgacaagatccacatagccttg

SEQ ID NO: 1447479 - DNA, 25 bp, Homo sapien
acaggagtgtatggcctgatgacca

SEQ ID NO: 1447480 - DNA, 25 bp, Homo sapien
ctgccatcaattcgggtggagaggt

SEQ ID NO: 1447481 - DNA, 25 bp, Homo sapien
tcaattcgggtggagaggtagatat

SEQ ID NO: 1447482 - DNA, 25 bp, Homo sapien
ttgagagaacaagatgtcttgcttc

SEQ ID NO: 1447483 - DNA, 25 bp, Homo sapien
gagaacaagatgtcttgcttcctgc

SEQ ID NO: 1447484 - DNA, 25 bp, Homo sapien
ccgtgcagagagctacataagggtt

SEQ ID NO: 1447485 - DNA, 25 bp, Homo sapien
ggaccgtgcagagagctacataagg

SEQ ID NO: 1447486 - DNA, 25 bp, Homo sapien
gaagatttgccccattgagccctca

SEQ ID NO: 1447487 - DNA, 25 bp, Homo sapien
tggagcaaaccggttgaagcagcgt

SEQ ID NO: 1447488 - DNA, 25 bp, Homo sapien
gaagcagcgtgtttcatgagatccc

SEQ ID NO: 1447489 - DNA, 25 bp, Homo sapien
tgccaggaccttgacagatgagcca

SEQ ID NO: 1447490 - DNA, 25 bp, Homo sapien
ggcaaagcggaacctcttggtgttg

SEQ ID NO: 1447491 - DNA, 25 bp, Homo sapien
cagggcaaagcggaacctcttggtg

SEQ ID NO: 1447492 - DNA, 25 bp, Homo sapien
agggcaaagcggaacctcttggtgt

SEQ ID NO: 1447493 - DNA, 25 bp, Homo sapien
tggcgctgccacgtcccttggacat

SEQ ID NO: 1447494 - DNA, 25 bp, Homo sapien
acacaagtgtttcaccaagcgcgcc

SEQ ID NO: 1447495 - DNA, 25 bp, Homo sapien
cttggacatcccaaccaccgtgggt

SEQ ID NO: 1447496 - DNA, 25 bp, Homo sapien
ggtgctgtaccctccatgccaggag

SEQ ID NO: 1447497 - DNA, 25 bp, Homo sapien
ccaggagagtgacctgaggccggcg

SEQ ID NO: 1447498 - DNA, 25 bp, Homo sapien
cgtcttgtctagcagtcgtagcagg

SEQ ID NO: 1447499 - DNA, 25 bp, Homo sapien
aggccgagcagagtgaccagcccca

SEQ ID NO: 1447500 - DNA, 25 bp, Homo sapien
gcagtcgtagcaggtacttttcatt

SEQ ID NO: 1447501 - DNA, 25 bp, Homo sapien
gtagaggaggcagcgtgaccgccag

SEQ ID NO: 1447502 - DNA, 25 bp, Homo sapien
gaccgccaggctgggtaagagcccg

SEQ ID NO: 1447503 - DNA, 25 bp, Homo sapien
acctggcggagtcccgagcccggat

SEQ ID NO: 1447504 - DNA, 25 bp, Homo sapien
agctccagcgcggaggcatgccaag

SEQ ID NO: 1447505 - DNA, 25 bp, Homo sapien
cccctggtccggagctgagtggcca

SEQ ID NO: 1447506 - DNA, 25 bp, Homo sapien
ccagtggaggatactgaatgagggt

SEQ ID NO: 1447507 - DNA, 25 bp, Homo sapien
ccggagctgagtggccagaaccaga

SEQ ID NO: 1447508 - DNA, 25 bp, Homo sapien
ggaggatactgaatgagggtcttac

SEQ ID NO: 1447509 - DNA, 25 bp, Homo sapien
ctgacaagccgacagatcccacaat

SEQ ID NO: 1447510 - DNA, 25 bp, Homo sapien
tccaccacctgacaagccgacagat

SEQ ID NO: 1447511 - DNA, 25 bp, Homo sapien
ttcctccaccacctgacaagccgac

SEQ ID NO: 1447512 - DNA, 25 bp, Homo sapien
gacagatcccacaatgcgccgcggg

SEQ ID NO: 1447513 - DNA, 25 bp, Homo sapien
gggctgggcccctctgcgcgccacc

SEQ ID NO: 1447514 - DNA, 25 bp, Homo sapien
ttccctccgctactcggtggctcag

SEQ ID NO: 1447515 - DNA, 25 bp, Homo sapien
tccgctactcggtggctcagggtct

SEQ ID NO: 1447516 - DNA, 25 bp, Homo sapien
caccctttccctccgctactcggtg

SEQ ID NO: 1447517 - DNA, 25 bp, Homo sapien
gagagtgtaacgatgaaccagagac

SEQ ID NO: 1447518 - DNA, 25 bp, Homo sapien
caagagaatggaacagcccagagga

SEQ ID NO: 1447519 - DNA, 25 bp, Homo sapien
cagaggagtctcttacaggagtgaa

SEQ ID NO: 1447520 - DNA, 25 bp, Homo sapien
aaatctcttgagtctgcgggtgctg

SEQ ID NO: 1447521 - DNA, 25 bp, Homo sapien
taccgtgatggatgagatctctgca

SEQ ID NO: 1447522 - DNA, 25 bp, Homo sapien
aaaaaacatcaggagccgctggagc

SEQ ID NO: 1447523 - DNA, 25 bp, Homo sapien
tcttaaactaataccatcagggcag

SEQ ID NO: 1447524 - DNA, 25 bp, Homo sapien
gagctacagatttcccaagatgacc

SEQ ID NO: 1447525 - DNA, 25 bp, Homo sapien
ttcagtgacactatcttggcactgc

SEQ ID NO: 1447526 - DNA, 25 bp, Homo sapien
tcagtgacactatcttggcactgcc

SEQ ID NO: 1447527 - DNA, 25 bp, Homo sapien
gttcagtgacactatcttggcactg

SEQ ID NO: 1447528 - DNA, 25 bp, Homo sapien
caacagggttgtctggttcaccaaa

SEQ ID NO: 1447529 - DNA, 25 bp, Homo sapien
agcacagcttttgggatcctcctgg

SEQ ID NO: 1447530 - DNA, 25 bp, Homo sapien
tagcagggcatagcgagcacagctt

SEQ ID NO: 1447531 - DNA, 25 bp, Homo sapien
ggtagagtagccctccttgttcagt

SEQ ID NO: 1447532 - DNA, 25 bp, Homo sapien
caaggtagttctttccaggctgata

SEQ ID NO: 1447533 - DNA, 25 bp, Homo sapien
ggccaagagaagacgaaattcagag

SEQ ID NO: 1447534 - DNA, 25 bp, Homo sapien
gaagcaagtgagtaggagtgtcctt

SEQ ID NO: 1447535 - DNA, 25 bp, Homo sapien
gctagcaaagttcatgaggagggca

SEQ ID NO: 1447536 - DNA, 25 bp, Homo sapien
gtgattaacgtcactcagatctcct

SEQ ID NO: 1447537 - DNA, 25 bp, Homo sapien
agaggggagctatgattgatcacca

SEQ ID NO: 1447538 - DNA, 25 bp, Homo sapien
tgatgagtgattaacgtcactcaga

SEQ ID NO: 1447539 - DNA, 25 bp, Homo sapien
cagagtgatgagtgattaacgtcac

SEQ ID NO: 1447540 - DNA, 25 bp, Homo sapien
aagccattcagggtcaggacctgac

SEQ ID NO: 1447541 - DNA, 25 bp, Homo sapien
tgtgaagagacctgaaatagtggca

SEQ ID NO: 1447542 - DNA, 25 bp, Homo sapien
ggaccagcaccacgatatactccag

SEQ ID NO: 1447543 - DNA, 25 bp, Homo sapien
tcaggacctgacaggtggaccagca

SEQ ID NO: 1447544 - DNA, 25 bp, Homo sapien
tccaagaggtagctcccacgaggat

SEQ ID NO: 1447545 - DNA, 25 bp, Homo sapien
aggttgtccaagaggtagctcccac

SEQ ID NO: 1447546 - DNA, 25 bp, Homo sapien
gcattgaggcaatccccacggtcag

SEQ ID NO: 1447547 - DNA, 25 bp, Homo sapien
gctcccacgaggatgctgcattgag

SEQ ID NO: 1447548 - DNA, 25 bp, Homo sapien
agggattggtagctagcctgctgga

SEQ ID NO: 1447549 - DNA, 25 bp, Homo sapien
ccagggattggtagctagcctgctg

SEQ ID NO: 1447550 - DNA, 25 bp, Homo sapien
gccagggattggtagctagcctgct

SEQ ID NO: 1447551 - DNA, 25 bp, Homo sapien
cagggattggtagctagcctgctgg

SEQ ID NO: 1447552 - DNA, 25 bp, Homo sapien
cattttggattttctcacggaggaa

SEQ ID NO: 1447553 - DNA, 25 bp, Homo sapien
cggaggaagaagctcaagaggaata

SEQ ID NO: 1447554 - DNA, 25 bp, Homo sapien
caagaggaataaggatataattgct

SEQ ID NO: 1447555 - DNA, 25 bp, Homo sapien
tggattttctcacggaggaagaagc

SEQ ID NO: 1447556 - DNA, 25 bp, Homo sapien
gagcctagtgtgaagaccctcttat

SEQ ID NO: 1447557 - DNA, 25 bp, Homo sapien
tataacagtaccacagattctgggt

SEQ ID NO: 1447558 - DNA, 25 bp, Homo sapien
aaacaggtacgtggtcttctctttg

SEQ ID NO: 1447559 - DNA, 25 bp, Homo sapien
cagacaggaaccaatgtgggaattc

SEQ ID NO: 1447560 - DNA, 25 bp, Homo sapien
taagcacttagcgactttgctctgc

SEQ ID NO: 1447561 - DNA, 25 bp, Homo sapien
tatttcaggaaggatagtgaccctt

SEQ ID NO: 1447562 - DNA, 25 bp, Homo sapien
tgtgtgcctacagaagcctggtctt

SEQ ID NO: 1447563 - DNA, 25 bp, Homo sapien
gcatgttgaaaccagcctcttgaac

SEQ ID NO: 1447564 - DNA, 25 bp, Homo sapien
aggaatattcctagaaagcatctgc

SEQ ID NO: 1447565 - DNA, 25 bp, Homo sapien
ttatcccacgttgagggtggtatta

SEQ ID NO: 1447566 - DNA, 25 bp, Homo sapien
tatcccacgttgagggtggtattaa

SEQ ID NO: 1447567 - DNA, 25 bp, Homo sapien
agagtgagcctgggtcagtcaaaaa

SEQ ID NO: 1447568 - DNA, 25 bp, Homo sapien
gagtgagcctgggtcagtcaaaaac

SEQ ID NO: 1447569 - DNA, 25 bp, Homo sapien
agtgagcctgggtcagtcaaaaaca

SEQ ID NO: 1447570 - DNA, 25 bp, Homo sapien
gtgagcctgggtcagtcaaaaacag

SEQ ID NO: 1447571 - DNA, 25 bp, Homo sapien
tggggtaggatgcgtcttttcccca

SEQ ID NO: 1447572 - DNA, 25 bp, Homo sapien
gcctagccgcctggccttcggcatt

SEQ ID NO: 1447573 - DNA, 25 bp, Homo sapien
tgctgcttccgagcctagccgcctg

SEQ ID NO: 1447574 - DNA, 25 bp, Homo sapien
gacgtgtcgggctgcacgggtcggg

SEQ ID NO: 1447575 - DNA, 25 bp, Homo sapien
ctcgccctcctttgcggtgccctgt

SEQ ID NO: 1447576 - DNA, 25 bp, Homo sapien
tcgccctcctttgcggtgccctgtg

SEQ ID NO: 1447577 - DNA, 25 bp, Homo sapien
cctcgccctcctttgcggtgccctg

SEQ ID NO: 1447578 - DNA, 25 bp, Homo sapien
ccctcgccctcctttgcggtgccct

SEQ ID NO: 1447579 - DNA, 25 bp, Homo sapien
gaagggaattcgcatccagtggagt

SEQ ID NO: 1447580 - DNA, 25 bp, Homo sapien
cactctgtgtagtgggagacgccat

SEQ ID NO: 1447581 - DNA, 25 bp, Homo sapien
tcgtgatgtcagaaccgtgtggtgc

SEQ ID NO: 1447582 - DNA, 25 bp, Homo sapien
caagaatgtcctagacactctgtgt

SEQ ID NO: 1447583 - DNA, 25 bp, Homo sapien
tattgagcaggtcttctagaagagc

SEQ ID NO: 1447584 - DNA, 25 bp, Homo sapien
gcatgatagtcataaatgtcaccct

SEQ ID NO: 1447585 - DNA, 25 bp, Homo sapien
ggttgatttccatcaggtcacccag

SEQ ID NO: 1447586 - DNA, 25 bp, Homo sapien
cctgttttggtaggacaagcatgca

SEQ ID NO: 1447587 - DNA, 25 bp, Homo sapien
gcatcgggaagagaccagaacagga

SEQ ID NO: 1447588 - DNA, 25 bp, Homo sapien
accttggtcggatggcagctttaca

SEQ ID NO: 1447589 - DNA, 25 bp, Homo sapien
taggaggcccctgctacagaagtag

SEQ ID NO: 1447590 - DNA, 25 bp, Homo sapien
gagctggcttcctagcatcagggca

SEQ ID NO: 1447591 - DNA, 25 bp, Homo sapien
agtgcaggttgtgggcatctgtagg

SEQ ID NO: 1447592 - DNA, 25 bp, Homo sapien
gggagtgcaggttgtgggcatctgt

SEQ ID NO: 1447593 - DNA, 25 bp, Homo sapien
tcagttgggcatggtttcatctggg

SEQ ID NO: 1447594 - DNA, 25 bp, Homo sapien
gagggagtgcaggttgtgggcatct

SEQ ID NO: 1447595 - DNA, 25 bp, Homo sapien
tggcgctgaactccagtgcactgcc

SEQ ID NO: 1447596 - DNA, 25 bp, Homo sapien
ttggcgctgaactccagtgcactgc

SEQ ID NO: 1447597 - DNA, 25 bp, Homo sapien
tcagggcctcgaaggcctcattcac

SEQ ID NO: 1447598 - DNA, 25 bp, Homo sapien
ggctcagggtgagctccgtccgctc

SEQ ID NO: 1447599 - DNA, 25 bp, Homo sapien
tcgtagcctggtggttcgaagccct

SEQ ID NO: 1447600 - DNA, 25 bp, Homo sapien
cctggaggcgctcgatgtactggat

SEQ ID NO: 1447601 - DNA, 25 bp, Homo sapien
agcagcccctcacgccaactgctgg

SEQ ID NO: 1447602 - DNA, 25 bp, Homo sapien
gagatctgaatcctgtgaatagcca

SEQ ID NO: 1447603 - DNA, 25 bp, Homo sapien
aatagccacgtgctctatgaccagg

SEQ ID NO: 1447604 - DNA, 25 bp, Homo sapien
gaattcagagatctgaatcctgtga

SEQ ID NO: 1447605 - DNA, 25 bp, Homo sapien
aagtccatgtcattgaagcaagtcc

SEQ ID NO: 1447606 - DNA, 25 bp, Homo sapien
gagcctgcaaaacaatatgggatga

SEQ ID NO: 1447607 - DNA, 25 bp, Homo sapien
attctgaagtcctgcagaagagatg

SEQ ID NO: 1447608 - DNA, 25 bp, Homo sapien
gactggtttcatggagagagcaggg

SEQ ID NO: 1447609 - DNA, 25 bp, Homo sapien
ccagggctaccgactgctttgggag

SEQ ID NO: 1447610 - DNA, 25 bp, Homo sapien
gaacagtcaggcagccgggagctct

SEQ ID NO: 1447611 - DNA, 25 bp, Homo sapien
aatccctggagctagcggctgctga

SEQ ID NO: 1447612 - DNA, 25 bp, Homo sapien
ggggcacttggacagaacagtcagg

SEQ ID NO: 1447613 - DNA, 25 bp, Homo sapien
gcggctgctgaaggcgtcgaggtgt

SEQ ID NO: 1447614 - DNA, 25 bp, Homo sapien
cccatttcagcgaatgcagctgaga

SEQ ID NO: 1447615 - DNA, 25 bp, Homo sapien
agagcactgagtggccccatttcag

SEQ ID NO: 1447616 - DNA, 25 bp, Homo sapien
tgttaactcgtgcacagtggttccc

SEQ ID NO: 1447617 - DNA, 25 bp, Homo sapien
tgactggcaacaatcagggtcctct

SEQ ID NO: 1447618 - DNA, 25 bp, Homo sapien
attccaatccccactgcggagctgt

SEQ ID NO: 1447619 - DNA, 25 bp, Homo sapien
ccactgcggagctgtctgtgaggca

SEQ ID NO: 1447620 - DNA, 25 bp, Homo sapien
agctgtctgtgaggcagtgctcttg

SEQ ID NO: 1447621 - DNA, 25 bp, Homo sapien
cttcattgttcaggggcgagttggc

SEQ ID NO: 1447622 - DNA, 25 bp, Homo sapien
tcaagcccagtgccagtgtgcaatt

SEQ ID NO: 1447623 - DNA, 25 bp, Homo sapien
catcctcaacgggttcaagcccagt

SEQ ID NO: 1447624 - DNA, 25 bp, Homo sapien
aattcaactgctgtgggttccctcc

SEQ ID NO: 1447625 - DNA, 25 bp, Homo sapien
ccagtgtgcaattcaactgctgtgg

SEQ ID NO: 1447626 - DNA, 25 bp, Homo sapien
ggagtttgaattcagtccagtcaag

SEQ ID NO: 1447627 - DNA, 25 bp, Homo sapien
caggagtttgaattcagtccagtca

SEQ ID NO: 1447628 - DNA, 25 bp, Homo sapien
cccaggagtttgaattcagtccagt

SEQ ID NO: 1447629 - DNA, 25 bp, Homo sapien
tgcccaggagtttgaattcagtcca

SEQ ID NO: 1447630 - DNA, 25 bp, Homo sapien
tcttcgcccttcaggtacttgcagt

SEQ ID NO: 1447631 - DNA, 25 bp, Homo sapien
tgattttgaaccagacttcgtcttc

SEQ ID NO: 1447632 - DNA, 25 bp, Homo sapien
tactgtggtaggtgctaggaagatg

SEQ ID NO: 1447633 - DNA, 25 bp, Homo sapien
tttgaaccagacttcgtcttcgccc

SEQ ID NO: 1447634 - DNA, 25 bp, Homo sapien
tgtattgtgaaatcgcccagggcat

SEQ ID NO: 1447635 - DNA, 25 bp, Homo sapien
gccatcccggtcttccttggagaga

SEQ ID NO: 1447636 - DNA, 25 bp, Homo sapien
gtcagaaacagtcacccatagcagg

SEQ ID NO: 1447637 - DNA, 25 bp, Homo sapien
cccagggcattgtctcaaagtgtga

SEQ ID NO: 1447638 - DNA, 25 bp, Homo sapien
agcccgtgatcaagtgcgagttcga

SEQ ID NO: 1447639 - DNA, 25 bp, Homo sapien
tcaacaagaaggtgtcggcctcctc

SEQ ID NO: 1447640 - DNA, 25 bp, Homo sapien
ggactgacccctatgtttggctgga

SEQ ID NO: 1447641 - DNA, 25 bp, Homo sapien
tttggctggaacaatctgagtgcgg

SEQ ID NO: 1447642 - DNA, 25 bp, Homo sapien
cacgcatctttatttgagtgcttcc

SEQ ID NO: 1447643 - DNA, 25 bp, Homo sapien
ccttgagcccagttagtctggcctg

SEQ ID NO: 1447644 - DNA, 25 bp, Homo sapien
ttgagtgcttcccacccagagtgca

SEQ ID NO: 1447645 - DNA, 25 bp, Homo sapien
actccaatctctgcgccttccagca

SEQ ID NO: 1447646 - DNA, 25 bp, Homo sapien
catcagccgtcgctatggaagcggg

SEQ ID NO: 1447647 - DNA, 25 bp, Homo sapien
gggcggttccatcagccgtcgctat

SEQ ID NO: 1447648 - DNA, 25 bp, Homo sapien
catctctggagtttgactgtaggcc

SEQ ID NO: 1447649 - DNA, 25 bp, Homo sapien
cagcaggtaccaggggcggttccat

SEQ ID NO: 1447650 - DNA, 25 bp, Homo sapien
ttcctgagcccctggtgtgagcaga

SEQ ID NO: 1447651 - DNA, 25 bp, Homo sapien
gaggaggacatgcttcctgagcccc

SEQ ID NO: 1447652 - DNA, 25 bp, Homo sapien
aggacatgcttcctgagcccctggt

SEQ ID NO: 1447653 - DNA, 25 bp, Homo sapien
tgagcccctggtgtgagcagagctc

SEQ ID NO: 1447654 - DNA, 25 bp, Homo sapien
ttgtgtggcggtccacggaatcacc

SEQ ID NO: 1447655 - DNA, 25 bp, Homo sapien
ccccagttttcggatgagagaatgt

SEQ ID NO: 1447656 - DNA, 25 bp, Homo sapien
catgcgtgctagttgcctgtgtcca

SEQ ID NO: 1447657 - DNA, 25 bp, Homo sapien
gatacttccgtacttatgcagagcc

SEQ ID NO: 1447658 - DNA, 25 bp, Homo sapien
ctcatcacagcctcctcccgtgact

SEQ ID NO: 1447659 - DNA, 25 bp, Homo sapien
ggctcctcatcacagcctcctcccg

SEQ ID NO: 1447660 - DNA, 25 bp, Homo sapien
ctcctcatcacagcctcctcccgtg

SEQ ID NO: 1447661 - DNA, 25 bp, Homo sapien
ctggctcctcatcacagcctcctcc

SEQ ID NO: 1447662 - DNA, 25 bp, Homo sapien
tccaccctgccgcttggaaagtaat

SEQ ID NO: 1447663 - DNA, 25 bp, Homo sapien
gaactggaaagttcacggttataca

SEQ ID NO: 1447664 - DNA, 25 bp, Homo sapien
acctgtccaccctgccgcttggaaa

SEQ ID NO: 1447665 - DNA, 25 bp, Homo sapien
gccgcttggaaagtaatcagcacag

SEQ ID NO: 1447666 - DNA, 25 bp, Homo sapien
gtttccggatctctagggtgcagac

SEQ ID NO: 1447667 - DNA, 25 bp, Homo sapien
ggtgcagacgccttgctcagagagg

SEQ ID NO: 1447668 - DNA, 25 bp, Homo sapien
ccccagcacatttatggccttgcag

SEQ ID NO: 1447669 - DNA, 25 bp, Homo sapien
gtgtagaccccagaatcaaaggggc

SEQ ID NO: 1447670 - DNA, 25 bp, Homo sapien
gcccagggcacaacagggcctggcc

SEQ ID NO: 1447671 - DNA, 25 bp, Homo sapien
ccagggcacaacagggcctggcccc

SEQ ID NO: 1447672 - DNA, 25 bp, Homo sapien
ggcacaacagggcctggcccctcac

SEQ ID NO: 1447673 - DNA, 25 bp, Homo sapien
cagcccagggcacaacagggcctgg

SEQ ID NO: 1447674 - DNA, 25 bp, Homo sapien
aagctcggacactgcagaacaactg

SEQ ID NO: 1447675 - DNA, 25 bp, Homo sapien
cggacactgcagaacaactgggtgc

SEQ ID NO: 1447676 - DNA, 25 bp, Homo sapien
tgagaagtctcgctcaataaaccct

SEQ ID NO: 1447677 - DNA, 25 bp, Homo sapien
gagaagtctcgctcaataaaccctt

SEQ ID NO: 1447678 - DNA, 25 bp, Homo sapien
tggttgggtggtagcgctccagcac

SEQ ID NO: 1447679 - DNA, 25 bp, Homo sapien
cccggaaggagtacgagttgccgat

SEQ ID NO: 1447680 - DNA, 25 bp, Homo sapien
tttctgagaagacccggaaggagta

SEQ ID NO: 1447681 - DNA, 25 bp, Homo sapien
acggtggccgaggtgctgagtccac

SEQ ID NO: 1447682 - DNA, 25 bp, Homo sapien
ctgcagggccccgggtgtcaccctc

SEQ ID NO: 1447683 - DNA, 25 bp, Homo sapien
gcagggccccgggtgtcaccctcat

SEQ ID NO: 1447684 - DNA, 25 bp, Homo sapien
tgcagggccccgggtgtcaccctca

SEQ ID NO: 1447685 - DNA, 25 bp, Homo sapien
cagacgtccaggagcctgatgctgc

SEQ ID NO: 1447686 - DNA, 25 bp, Homo sapien
ggtggcgtccactgaagagcagcat

SEQ ID NO: 1447687 - DNA, 25 bp, Homo sapien
tgccttctgcaccatgtagcccagg

SEQ ID NO: 1447688 - DNA, 25 bp, Homo sapien
ttctgcaccatgtagcccaggagct

SEQ ID NO: 1447689 - DNA, 25 bp, Homo sapien
gagaggaagtgagtgtgagggccag

SEQ ID NO: 1447690 - DNA, 25 bp, Homo sapien
agagtgtgagaggaagtgagtgtga

SEQ ID NO: 1447691 - DNA, 25 bp, Homo sapien
tgagaggaagtgagtgtgagggcca

SEQ ID NO: 1447692 - DNA, 25 bp, Homo sapien
cccagagtgtgagaggaagtgagtg

SEQ ID NO: 1447693 - DNA, 25 bp, Homo sapien
ccatcagctctgggataggaggttg

SEQ ID NO: 1447694 - DNA, 25 bp, Homo sapien
gctgggccgagcgaatgaagaggat

SEQ ID NO: 1447695 - DNA, 25 bp, Homo sapien
acagtgagctcgtagcggccagagt

SEQ ID NO: 1447696 - DNA, 25 bp, Homo sapien
gtgcgcatgctcacccgctggctgt

SEQ ID NO: 1447697 - DNA, 25 bp, Homo sapien
tccaggtcttccacgcgcacagtga

SEQ ID NO: 1447698 - DNA, 25 bp, Homo sapien
ccacctggcggatgtaggtctgacg

SEQ ID NO: 1447699 - DNA, 25 bp, Homo sapien
tggcggatgtaggtctgacggaggt

SEQ ID NO: 1447700 - DNA, 25 bp, Homo sapien
aggtggcgggggacacggatcttgg

SEQ ID NO: 1447701 - DNA, 25 bp, Homo sapien
cctggcggatgtaggtctgacggag

SEQ ID NO: 1447702 - DNA, 25 bp, Homo sapien
aaagcaagagtctgggcttagcagt

SEQ ID NO: 1447703 - DNA, 25 bp, Homo sapien
tttctccattagataaggtgtttgg

SEQ ID NO: 1447704 - DNA, 25 bp, Homo sapien
gtttctccattagataaggtgtttg

SEQ ID NO: 1447705 - DNA, 25 bp, Homo sapien
gcagaactcactgcagacacgcgca

SEQ ID NO: 1447706 - DNA, 25 bp, Homo sapien
ccaggttccgcacagtctgctgggt

SEQ ID NO: 1447707 - DNA, 25 bp, Homo sapien
ctgggtcaccatcatgggccgggca

SEQ ID NO: 1447708 - DNA, 25 bp, Homo sapien
tcactgcagacacgcgcaggaggaa

SEQ ID NO: 1447709 - DNA, 25 bp, Homo sapien
gagctccagcacatagccctggagg

SEQ ID NO: 1447710 - DNA, 25 bp, Homo sapien
cagagctccagcacatagccctgga

SEQ ID NO: 1447711 - DNA, 25 bp, Homo sapien
agagctccagcacatagccctggag

SEQ ID NO: 1447712 - DNA, 25 bp, Homo sapien
gcagagctccagcacatagccctgg

SEQ ID NO: 1447713 - DNA, 25 bp, Homo sapien
ttctctggtggactctgatactgcc

SEQ ID NO: 1447714 - DNA, 25 bp, Homo sapien
ccttggcagattcagatgcggtctc

SEQ ID NO: 1447715 - DNA, 25 bp, Homo sapien
ggcctgcggcttgggcacctgctct

SEQ ID NO: 1447716 - DNA, 25 bp, Homo sapien
gatactgccacttctccgggaggct

SEQ ID NO: 1447717 - DNA, 25 bp, Homo sapien
tgcaggcagggccctcggaggtgtt

SEQ ID NO: 1447718 - DNA, 25 bp, Homo sapien
gcaggcagggccctcggaggtgttt

SEQ ID NO: 1447719 - DNA, 25 bp, Homo sapien
caggcagggccctcggaggtgtttt

SEQ ID NO: 1447720 - DNA, 25 bp, Homo sapien
gtggagtgtgcaggggtcagccgtt

SEQ ID NO: 1447721 - DNA, 25 bp, Homo sapien
gccagggtggagtgtgcaggggtca

SEQ ID NO: 1447722 - DNA, 25 bp, Homo sapien
gggtggagtgtgcaggggtcagccg

SEQ ID NO: 1447723 - DNA, 25 bp, Homo sapien
cagggtggagtgtgcaggggtcagc

SEQ ID NO: 1447724 - DNA, 25 bp, Homo sapien
cttcaaggtacatccgtaggcggta

SEQ ID NO: 1447725 - DNA, 25 bp, Homo sapien
tacaaaagttaggatggcgattgcc

SEQ ID NO: 1447726 - DNA, 25 bp, Homo sapien
gaccttgggatcagtagcatctgcc

SEQ ID NO: 1447727 - DNA, 25 bp, Homo sapien
gccagaggtgaaatgccgggtaccc

SEQ ID NO: 1447728 - DNA, 25 bp, Homo sapien
gggaggtgagtccagtgggtctagt

SEQ ID NO: 1447729 - DNA, 25 bp, Homo sapien
gatagaccaaagcaaagcgccaaca

SEQ ID NO: 1447730 - DNA, 25 bp, Homo sapien
tagtgggcgctcaaagatagaccaa

SEQ ID NO: 1447731 - DNA, 25 bp, Homo sapien
tccagtgggtctagtgggcgctcaa

SEQ ID NO: 1447732 - DNA, 25 bp, Homo sapien
gagcttgccaaaatggtgtcctttg

SEQ ID NO: 1447733 - DNA, 25 bp, Homo sapien
agtatggtcactgtgtcttgtagga

SEQ ID NO: 1447734 - DNA, 25 bp, Homo sapien
gacacgattacgttcctaagtgaag

SEQ ID NO: 1447735 - DNA, 25 bp, Homo sapien
tgtaggatgtttggctccttggtga

SEQ ID NO: 1447736 - DNA, 25 bp, Homo sapien
tttccattaatcaacaagtgtgtac

SEQ ID NO: 1447737 - DNA, 25 bp, Homo sapien
tcaacaagtgtgtactaatcccgag

SEQ ID NO: 1447738 - DNA, 25 bp, Homo sapien
tactaatcccgagtcttacattgcg

SEQ ID NO: 1447739 - DNA, 25 bp, Homo sapien
ttacattgcgatgcctcactatccc

SEQ ID NO: 1447740 - DNA, 25 bp, Homo sapien
tgcccaccagggctgagctcaaatc

SEQ ID NO: 1447741 - DNA, 25 bp, Homo sapien
atctgtgtgttgtggacctctgcat

SEQ ID NO: 1447742 - DNA, 25 bp, Homo sapien
tgggactcagcagggcaggtgatca

SEQ ID NO: 1447743 - DNA, 25 bp, Homo sapien
gacctctgcataggccccaagggag

SEQ ID NO: 1447744 - DNA, 25 bp, Homo sapien
gagggaagcgcagatcctggccaca

SEQ ID NO: 1447745 - DNA, 25 bp, Homo sapien
aggtccagggcccataccatggcgc

SEQ ID NO: 1447746 - DNA, 25 bp, Homo sapien
tggtgagagggaagcgcagatcctg

SEQ ID NO: 1447747 - DNA, 25 bp, Homo sapien
ggcattggtgagagggaagcgcaga

SEQ ID NO: 1447748 - DNA, 25 bp, Homo sapien
ggttccctgacccagagtgtgtaca

SEQ ID NO: 1447749 - DNA, 25 bp, Homo sapien
agggcacatgtgctctgtgagccca

SEQ ID NO: 1447750 - DNA, 25 bp, Homo sapien
gtgtgtacagggcacatgtgctctg

SEQ ID NO: 1447751 - DNA, 25 bp, Homo sapien
agcccagacctcagtgcaagggaca

SEQ ID NO: 1447752 - DNA, 25 bp, Homo sapien
cctgctggccgaggattctatggac

SEQ ID NO: 1447753 - DNA, 25 bp, Homo sapien
tggctccgcggaggaagtcacagat

SEQ ID NO: 1447754 - DNA, 25 bp, Homo sapien
tggtcgtcgtatcctacccactggt

SEQ ID NO: 1447755 - DNA, 25 bp, Homo sapien
ttgcttttgacgctttcctggtcgt

SEQ ID NO: 1447756 - DNA, 25 bp, Homo sapien
ggcaaatgacccagagatggtggct

SEQ ID NO: 1447757 - DNA, 25 bp, Homo sapien
gagtcgtgccgagaccttgcaggtc

SEQ ID NO: 1447758 - DNA, 25 bp, Homo sapien
tatcccaggtgcctagtggtgcagg

SEQ ID NO: 1447759 - DNA, 25 bp, Homo sapien
caggctgcatgcatcacacaagttt

SEQ ID NO: 1447760 - DNA, 25 bp, Homo sapien
catcaccagcttactggcaggagcc

SEQ ID NO: 1447761 - DNA, 25 bp, Homo sapien
ctcatagtaggcaagggtccctgcc

SEQ ID NO: 1447762 - DNA, 25 bp, Homo sapien
gtccctgcctccttggtgaaccggc

SEQ ID NO: 1447763 - DNA, 25 bp, Homo sapien
tggaattcccggtcctgagattggg

SEQ ID NO: 1447764 - DNA, 25 bp, Homo sapien
ccgggaacggatcatgtcactttaa

SEQ ID NO: 1447765 - DNA, 25 bp, Homo sapien
cttgcaggactgtactgagggctag

SEQ ID NO: 1447766 - DNA, 25 bp, Homo sapien
tggttggctctgagggcacaatgac

SEQ ID NO: 1447767 - DNA, 25 bp, Homo sapien
caacgtgagcagttagtgcacaggt

SEQ ID NO: 1447768 - DNA, 25 bp, Homo sapien
aggacttgcatcctcctgacctcgg

SEQ ID NO: 1447769 - DNA, 25 bp, Homo sapien
caggctccatgaaaatcgtaggtca

SEQ ID NO: 1447770 - DNA, 25 bp, Homo sapien
gtggtcccacgccaggctccatgaa

SEQ ID NO: 1447771 - DNA, 25 bp, Homo sapien
gttgctgaatctgtcaggacttgca

SEQ ID NO: 1447772 - DNA, 25 bp, Homo sapien
ggatgacctgaacctaagatgactg

SEQ ID NO: 1447773 - DNA, 25 bp, Homo sapien
tgggaggaggttttgcacacccgca

SEQ ID NO: 1447774 - DNA, 25 bp, Homo sapien
tcaaggtcacacatcaaggctttgg

SEQ ID NO: 1447775 - DNA, 25 bp, Homo sapien
tatgagagagccttgaggactcccc

SEQ ID NO: 1447776 - DNA, 25 bp, Homo sapien
catagctgctgtcaatggtgacctt

SEQ ID NO: 1447777 - DNA, 25 bp, Homo sapien
ttggcaatgtcatagctgctgtcaa

SEQ ID NO: 1447778 - DNA, 25 bp, Homo sapien
gcttcctttataaattcggccttca

SEQ ID NO: 1447779 - DNA, 25 bp, Homo sapien
ttccccgcagacagtgctgcgctga

SEQ ID NO: 1447780 - DNA, 25 bp, Homo sapien
ctgacttgatgaaagtccggcgact

SEQ ID NO: 1447781 - DNA, 25 bp, Homo sapien
ggtgttggaggctatcttggaaaat

SEQ ID NO: 1447782 - DNA, 25 bp, Homo sapien
tcaaagccatgggtgcgcagaaatg

SEQ ID NO: 1447783 - DNA, 25 bp, Homo sapien
gcagaaatggcggtactgacttgat

SEQ ID NO: 1447784 - DNA, 25 bp, Homo sapien
cacatgggtgccaacgatggccata

SEQ ID NO: 1447785 - DNA, 25 bp, Homo sapien
tttctttgctacacatcaggcaggc

SEQ ID NO: 1447786 - DNA, 25 bp, Homo sapien
ggtggtagccccagaagtcccatat

SEQ ID NO: 1447787 - DNA, 25 bp, Homo sapien
gagcccctggaacatccatacagtg

SEQ ID NO: 1447788 - DNA, 25 bp, Homo sapien
caaagttccatcctccgacagacaa

SEQ ID NO: 1447789 - DNA, 25 bp, Homo sapien
catcctccgacagacaagagagtct

SEQ ID NO: 1447790 - DNA, 25 bp, Homo sapien
cctccgacagacaagagagtcttca

SEQ ID NO: 1447791 - DNA, 25 bp, Homo sapien
gttccatcctccgacagacaagaga

SEQ ID NO: 1447792 - DNA, 25 bp, Homo sapien
tagcagaccagtttgtatgcagagc

SEQ ID NO: 1447793 - DNA, 25 bp, Homo sapien
acagaggaagcggtcaagggcatct

SEQ ID NO: 1447794 - DNA, 25 bp, Homo sapien
cttcccggtactgggaccagctggt

SEQ ID NO: 1447795 - DNA, 25 bp, Homo sapien
tgagcatgccgtagagcgtcacatc

SEQ ID NO: 1447796 - DNA, 25 bp, Homo sapien
ggattcggcaagagacctcaggctg

SEQ ID NO: 1447797 - DNA, 25 bp, Homo sapien
gccaggattcggcaagagacctcag

SEQ ID NO: 1447798 - DNA, 25 bp, Homo sapien
attcggcaagagacctcaggctgag

SEQ ID NO: 1447799 - DNA, 25 bp, Homo sapien
cccgggccaggattcggcaagagac

SEQ ID NO: 1447800 - DNA, 25 bp, Homo sapien
gaatggcagtcctgtgctccctcgg

SEQ ID NO: 1447801 - DNA, 25 bp, Homo sapien
tggcagtcctgtgctccctcggcat

SEQ ID NO: 1447802 - DNA, 25 bp, Homo sapien
ccggaatggcagtcctgtgctccct

SEQ ID NO: 1447803 - DNA, 25 bp, Homo sapien
ggaatggcagtcctgtgctccctcg

SEQ ID NO: 1447804 - DNA, 25 bp, Homo sapien
tggagcagcaccaggaccacaaagc

SEQ ID NO: 1447805 - DNA, 25 bp, Homo sapien
ctggagcagcaccaggaccacaaag

SEQ ID NO: 1447806 - DNA, 25 bp, Homo sapien
agcactggagcagcaccaggaccac

SEQ ID NO: 1447807 - DNA, 25 bp, Homo sapien
cactggagcagcaccaggaccacaa

SEQ ID NO: 1447808 - DNA, 25 bp, Homo sapien
ctgtttgagacgccttcacacccat

SEQ ID NO: 1447809 - DNA, 25 bp, Homo sapien
acggctcctggtgccagctacctag

SEQ ID NO: 1447810 - DNA, 25 bp, Homo sapien
agggcagggtgtggcctcttccctt

SEQ ID NO: 1447811 - DNA, 25 bp, Homo sapien
ggtgccagctacctagacagggcct

SEQ ID NO: 1447812 - DNA, 25 bp, Homo sapien
ctcctggtgccagctacctagacag

SEQ ID NO: 1447813 - DNA, 25 bp, Homo sapien
tcagtggtattcaatagaagggctt

SEQ ID NO: 1447814 - DNA, 25 bp, Homo sapien
gtcatgaaatagcacttcagtctgg

SEQ ID NO: 1447815 - DNA, 25 bp, Homo sapien
ggtctctggtcatgcaacgaatgtt

SEQ ID NO: 1447816 - DNA, 25 bp, Homo sapien
ggaaggactaatggctggacactaa

SEQ ID NO: 1447817 - DNA, 25 bp, Homo sapien
gctcgcagagcgcttaaatcaggga

SEQ ID NO: 1447818 - DNA, 25 bp, Homo sapien
ggacaccgtgtgcatgctctctggc

SEQ ID NO: 1447819 - DNA, 25 bp, Homo sapien
cattttgggaataacacgtgcgtga

SEQ ID NO: 1447820 - DNA, 25 bp, Homo sapien
ggatttatctcgaagacccctgagt

SEQ ID NO: 1447821 - DNA, 25 bp, Homo sapien
tattttgcaagtgaaaggggcagcc

SEQ ID NO: 1447822 - DNA, 25 bp, Homo sapien
caggctgtagagtgatcctgggccc

SEQ ID NO: 1447823 - DNA, 25 bp, Homo sapien
ctgtagagtgatcctgggcccagcc

SEQ ID NO: 1447824 - DNA, 25 bp, Homo sapien
attttgcaagtgaaaggggcagccc

SEQ ID NO: 1447825 - DNA, 25 bp, Homo sapien
catttgcaggagttgctgaacacca

SEQ ID NO: 1447826 - DNA, 25 bp, Homo sapien
gtagaagctggaccgttcccgagga

SEQ ID NO: 1447827 - DNA, 25 bp, Homo sapien
ttcccgaggattgggatagagccca

SEQ ID NO: 1447828 - DNA, 25 bp, Homo sapien
ttgccctggcagaacgtgtcttgtc

SEQ ID NO: 1447829 - DNA, 25 bp, Homo sapien
ctgacctggttttggaacttcaagc

SEQ ID NO: 1447830 - DNA, 25 bp, Homo sapien
agagggctgacctggttttggaact

SEQ ID NO: 1447831 - DNA, 25 bp, Homo sapien
catgctcaggttcagagggctgacc

SEQ ID NO: 1447832 - DNA, 25 bp, Homo sapien
gccatgctcaggttcagagggctga

SEQ ID NO: 1447833 - DNA, 25 bp, Homo sapien
cctggcctcacatgtgacaggcagt

SEQ ID NO: 1447834 - DNA, 25 bp, Homo sapien
acctggcctcacatgtgacaggcag

SEQ ID NO: 1447835 - DNA, 25 bp, Homo sapien
gaagccggcaaagtcatctaagtcc

SEQ ID NO: 1447836 - DNA, 25 bp, Homo sapien
tcagttcctgccgtagcgtctggat

SEQ ID NO: 1447837 - DNA, 25 bp, Homo sapien
atgagggggtatcggccctggttgc

SEQ ID NO: 1447838 - DNA, 25 bp, Homo sapien
tggttgcaggagaagccggcaaagt

SEQ ID NO: 1447839 - DNA, 25 bp, Homo sapien
aggcctgtgagtggctgtagattct

SEQ ID NO: 1447840 - DNA, 25 bp, Homo sapien
tcaggcctgtgagtggctgtagatt

SEQ ID NO: 1447841 - DNA, 25 bp, Homo sapien
agcctcaggcctgtgagtggctgta

SEQ ID NO: 1447842 - DNA, 25 bp, Homo sapien
cctcaggcctgtgagtggctgtaga

SEQ ID NO: 1447843 - DNA, 25 bp, Homo sapien
gaagatgtagggcaccttctgatcc

SEQ ID NO: 1447844 - DNA, 25 bp, Homo sapien
cggaagatgtagggcaccttctgat

SEQ ID NO: 1447845 - DNA, 25 bp, Homo sapien
agatgtagggcaccttctgatcctg

SEQ ID NO: 1447846 - DNA, 25 bp, Homo sapien
cccactggttgtcccggaagatgta

SEQ ID NO: 1447847 - DNA, 25 bp, Homo sapien
cgtccgtaggtaggcatgccaagga

SEQ ID NO: 1447848 - DNA, 25 bp, Homo sapien
gccagtgtgaaggagcgtccgtagg

SEQ ID NO: 1447849 - DNA, 25 bp, Homo sapien
gaaggagcgtccgtaggtaggcatg

SEQ ID NO: 1447850 - DNA, 25 bp, Homo sapien
cagtgtgaaggagcgtccgtaggta

SEQ ID NO: 1447851 - DNA, 25 bp, Homo sapien
cataaggttgacaaaatccaggttc

SEQ ID NO: 1447852 - DNA, 25 bp, Homo sapien
cttctcccaagagccatggaagtcg

SEQ ID NO: 1447853 - DNA, 25 bp, Homo sapien
gggctgttatgtcccgtgaccttct

SEQ ID NO: 1447854 - DNA, 25 bp, Homo sapien
catggaagtcgtaggccataaggtt

SEQ ID NO: 1447855 - DNA, 25 bp, Homo sapien
gattttgtccacctcgtatccagca

SEQ ID NO: 1447856 - DNA, 25 bp, Homo sapien
cctgctggaaggcattggccaagtc

SEQ ID NO: 1447857 - DNA, 25 bp, Homo sapien
agaagaaggcgttccttccctgagg

SEQ ID NO: 1447858 - DNA, 25 bp, Homo sapien
ataggtctgcccagctggaaccgct

SEQ ID NO: 1447859 - DNA, 25 bp, Homo sapien
ttgtagaagtctgagagctggccac

SEQ ID NO: 1447860 - DNA, 25 bp, Homo sapien
tgtgccatgcagatacgtgaagcag

SEQ ID NO: 1447861 - DNA, 25 bp, Homo sapien
catgcagatacgtgaagcagctggc

SEQ ID NO: 1447862 - DNA, 25 bp, Homo sapien
gatgttcacttgtagaagtctgaga

SEQ ID NO: 1447863 - DNA, 25 bp, Homo sapien
gaagcgctccttgtctacggcaggg

SEQ ID NO: 1447864 - DNA, 25 bp, Homo sapien
tatttgcgcagaaacctgatggccg

SEQ ID NO: 1447865 - DNA, 25 bp, Homo sapien
ctgtaccagggttgtgaagcgctcc

SEQ ID NO: 1447866 - DNA, 25 bp, Homo sapien
ggtcaaggccgtcaaagctgtattt

SEQ ID NO: 1447867 - DNA, 25 bp, Homo sapien
ctccgatggctaacagggtcttcag

SEQ ID NO: 1447868 - DNA, 25 bp, Homo sapien
tccagcctccgatggctaacagggt

SEQ ID NO: 1447869 - DNA, 25 bp, Homo sapien
ctgagtgccgaaattccagcctccg

SEQ ID NO: 1447870 - DNA, 25 bp, Homo sapien
gaaattccagcctccgatggctaac

SEQ ID NO: 1447871 - DNA, 25 bp, Homo sapien
tagagagtctcgtcattccactcag

SEQ ID NO: 1447872 - DNA, 25 bp, Homo sapien
tcatgccagcgaaggcgtagatgag

SEQ ID NO: 1447873 - DNA, 25 bp, Homo sapien
caagtccttgggcaggaagcgagcc

SEQ ID NO: 1447874 - DNA, 25 bp, Homo sapien
ttggtcatgccagcgaaggcgtaga

SEQ ID NO: 1447875 - DNA, 25 bp, Homo sapien
ggggtaggcaatgtccttggacctc

SEQ ID NO: 1447876 - DNA, 25 bp, Homo sapien
ttctggggactggtcaccctccatc

SEQ ID NO: 1447877 - DNA, 25 bp, Homo sapien
tctggggtaggcaatgtccttggac

SEQ ID NO: 1447878 - DNA, 25 bp, Homo sapien
tggggactggtcaccctccatctgg

SEQ ID NO: 1447879 - DNA, 25 bp, Homo sapien
gcagcaacttggagtctgagactgg

SEQ ID NO: 1447880 - DNA, 25 bp, Homo sapien
acttggagtctgagactggtgcaga

SEQ ID NO: 1447881 - DNA, 25 bp, Homo sapien
cagcaacttggagtctgagactggt

SEQ ID NO: 1447882 - DNA, 25 bp, Homo sapien
caacttggagtctgagactggtgca

SEQ ID NO: 1447883 - DNA, 25 bp, Homo sapien
ccaataatgagaggcagtactgtac

SEQ ID NO: 1447884 - DNA, 25 bp, Homo sapien
agccaataatgagaggcagtactgt

SEQ ID NO: 1447885 - DNA, 25 bp, Homo sapien
aataatgagaggcagtactgtactg

SEQ ID NO: 1447886 - DNA, 25 bp, Homo sapien
ctaagccaataatgagaggcagtac

SEQ ID NO: 1447887 - DNA, 25 bp, Homo sapien
catgggatcatcagcaggaccatga

SEQ ID NO: 1447888 - DNA, 25 bp, Homo sapien
tgggatcatcagcaggaccatgaaa

SEQ ID NO: 1447889 - DNA, 25 bp, Homo sapien
cccatgggatcatcagcaggaccat

SEQ ID NO: 1447890 - DNA, 25 bp, Homo sapien
gggatcatcagcaggaccatgaaac

SEQ ID NO: 1447891 - DNA, 25 bp, Homo sapien
gaccttggacttctctgtcaaccta

SEQ ID NO: 1447892 - DNA, 25 bp, Homo sapien
tccatgaaaatttgcaaggatgccc

SEQ ID NO: 1447893 - DNA, 25 bp, Homo sapien
cttggataaggccaacaggagggac

SEQ ID NO: 1447894 - DNA, 25 bp, Homo sapien
tgccctcttgcaggacagacaatat

SEQ ID NO: 1447895 - DNA, 25 bp, Homo sapien
ctgcccaggccacagaccgcaccat

SEQ ID NO: 1447896 - DNA, 25 bp, Homo sapien
gcagctcagcggcaggctgcagccc

SEQ ID NO: 1447897 - DNA, 25 bp, Homo sapien
gatgcagctcagcggcaggctgcag

SEQ ID NO: 1447898 - DNA, 25 bp, Homo sapien
tgcagctcagcggcaggctgcagcc

SEQ ID NO: 1447899 - DNA, 25 bp, Homo sapien
agctcagcggcaggctgcagcccat

SEQ ID NO: 1447900 - DNA, 25 bp, Homo sapien
cagctttccaggtcctgctctgctt

SEQ ID NO: 1447901 - DNA, 25 bp, Homo sapien
ctttccaggtcctgctctgctttta

SEQ ID NO: 1447902 - DNA, 25 bp, Homo sapien
ccagctttccaggtcctgctctgct

SEQ ID NO: 1447903 - DNA, 25 bp, Homo sapien
acaaaccagctttccaggtcctgct

SEQ ID NO: 1447904 - DNA, 25 bp, Homo sapien
tcatgaatttctcgctatgcctcat

SEQ ID NO: 1447905 - DNA, 25 bp, Homo sapien
agtttcatgaatttctcgctatgcc

SEQ ID NO: 1447906 - DNA, 25 bp, Homo sapien
tcagtttcatgaatttctcgctatg

SEQ ID NO: 1447907 - DNA, 25 bp, Homo sapien
tttcatgaatttctcgctatgcctc

SEQ ID NO: 1447908 - DNA, 25 bp, Homo sapien
ctggcagaaatacttaaatggtgac

SEQ ID NO: 1447909 - DNA, 25 bp, Homo sapien
ataaactggcagaaatacttaaatg

SEQ ID NO: 1447910 - DNA, 25 bp, Homo sapien
tggcagaaatacttaaatggtgaca

SEQ ID NO: 1447911 - DNA, 25 bp, Homo sapien
aactggcagaaatacttaaatggtg

SEQ ID NO: 1447912 - DNA, 25 bp, Homo sapien
ttctcatgttgaagactggaaaaaa

SEQ ID NO: 1447913 - DNA, 25 bp, Homo sapien
accaagttctcatgttgaagactgg

SEQ ID NO: 1447914 - DNA, 25 bp, Homo sapien
agttctcatgttgaagactggaaaa

SEQ ID NO: 1447915 - DNA, 25 bp, Homo sapien
caagttctcatgttgaagactggaa

SEQ ID NO: 1447916 - DNA, 25 bp, Homo sapien
aaaaatccactagccctgtagccat

SEQ ID NO: 1447917 - DNA, 25 bp, Homo sapien
ggaaaaatccactagccctgtagcc

SEQ ID NO: 1447918 - DNA, 25 bp, Homo sapien
aaaatccactagccctgtagccatc

SEQ ID NO: 1447919 - DNA, 25 bp, Homo sapien
gggaaaaatccactagccctgtagc

SEQ ID NO: 1447920 - DNA, 25 bp, Homo sapien
tgtatcatctgcactgttagccact

SEQ ID NO: 1447921 - DNA, 25 bp, Homo sapien
ctgtatcatctgcactgttagccac

SEQ ID NO: 1447922 - DNA, 25 bp, Homo sapien
tctgcactgttagccactcttgtct

SEQ ID NO: 1447923 - DNA, 25 bp, Homo sapien
cactgttagccactcttgtctcagc

SEQ ID NO: 1447924 - DNA, 25 bp, Homo sapien
ggcattccagttaaagtaacactgt

SEQ ID NO: 1447925 - DNA, 25 bp, Homo sapien
ctatacagccaatggtttcctctgg

SEQ ID NO: 1447926 - DNA, 25 bp, Homo sapien
taccagtggtcttacggctgaagtg

SEQ ID NO: 1447927 - DNA, 25 bp, Homo sapien
ttcaaaatgtctatacagccaatgg

SEQ ID NO: 1447928 - DNA, 25 bp, Homo sapien
ggtgttccagctgtcacgtgatgtt

SEQ ID NO: 1447929 - DNA, 25 bp, Homo sapien
cacgtgatgttataatgagagccat

SEQ ID NO: 1447930 - DNA, 25 bp, Homo sapien
aatctatgctgctgtaggtgttcca

SEQ ID NO: 1447931 - DNA, 25 bp, Homo sapien
tttaaaatctatgctgctgtaggtg

SEQ ID NO: 1447932 - DNA, 25 bp, Homo sapien
gattcctggtggagccgacttgacc

SEQ ID NO: 1447933 - DNA, 25 bp, Homo sapien
tagtttcccagtggcgagttcagcc

SEQ ID NO: 1447934 - DNA, 25 bp, Homo sapien
aagttctgcgtgagtcctaggtggc

SEQ ID NO: 1447935 - DNA, 25 bp, Homo sapien
aatgttcgctctcttgactgtggcc

SEQ ID NO: 1447936 - DNA, 25 bp, Homo sapien
gaagtggcgtcctctgctggtagaa

SEQ ID NO: 1447937 - DNA, 25 bp, Homo sapien
tcaaaccagttggagaagtgtgctc

SEQ ID NO: 1447938 - DNA, 25 bp, Homo sapien
aagtaaggcagcttccattcccggg

SEQ ID NO: 1447939 - DNA, 25 bp, Homo sapien
tacggcagacaagtggaccagattc

SEQ ID NO: 1447940 - DNA, 25 bp, Homo sapien
cttggcagtttccttagaggtgtcc

SEQ ID NO: 1447941 - DNA, 25 bp, Homo sapien
gtttccttagaggtgtcccagcaag

SEQ ID NO: 1447942 - DNA, 25 bp, Homo sapien
ccttagaggtgtcccagcaagctag

SEQ ID NO: 1447943 - DNA, 25 bp, Homo sapien
tagaggtgtcccagcaagctagagt

SEQ ID NO: 1447944 - DNA, 25 bp, Homo sapien
gactacagttgttaccaggcaggca

SEQ ID NO: 1447945 - DNA, 25 bp, Homo sapien
aacctaagaagacgcctggagcctg

SEQ ID NO: 1447946 - DNA, 25 bp, Homo sapien
tactagcaagacaaatgggtggccc

SEQ ID NO: 1447947 - DNA, 25 bp, Homo sapien
gggatgcttcacacctaagagctga

SEQ ID NO: 1447948 - DNA, 25 bp, Homo sapien
catgtgaccgcgtctgtgcaccggg

SEQ ID NO: 1447949 - DNA, 25 bp, Homo sapien
ctgtccgcccggtcctggactcccg

SEQ ID NO: 1447950 - DNA, 25 bp, Homo sapien
tgggctttgtgctgagccaaaggtg

SEQ ID NO: 1447951 - DNA, 25 bp, Homo sapien
tgtggacgggcgtgcatgtgaccgc

SEQ ID NO: 1447952 - DNA, 25 bp, Homo sapien
cagcggggaggacccacagggtaga

SEQ ID NO: 1447953 - DNA, 25 bp, Homo sapien
ccccacgggcgccactctgtgtgcc

SEQ ID NO: 1447954 - DNA, 25 bp, Homo sapien
cccacagggtagaccgcctccttgg

SEQ ID NO: 1447955 - DNA, 25 bp, Homo sapien
aggagccactgcctcgtgctcagcc

SEQ ID NO: 1447956 - DNA, 25 bp, Homo sapien
agggccaccatgtgatcatccttcc

SEQ ID NO: 1447957 - DNA, 25 bp, Homo sapien
ctgctggatggggctcagactcagg

SEQ ID NO: 1447958 - DNA, 25 bp, Homo sapien
gctggatggggctcagactcaggaa

SEQ ID NO: 1447959 - DNA, 25 bp, Homo sapien
cagactcaggaagagctgctggaaa

SEQ ID NO: 1447960 - DNA, 25 bp, Homo sapien
actcaggaagagctgctggaaacct

SEQ ID NO: 1447961 - DNA, 25 bp, Homo sapien
tgggagtctgtggtttccctctgtt

SEQ ID NO: 1447962 - DNA, 25 bp, Homo sapien
ctctgtttccttgtccctctgggtt

SEQ ID NO: 1447963 - DNA, 25 bp, Homo sapien
cctctgtttccttgtccctctgggt

SEQ ID NO: 1447964 - DNA, 25 bp, Homo sapien
ctgtgggagtctgtggtttccctct

SEQ ID NO: 1447965 - DNA, 25 bp, Homo sapien
tcagttcatgctcagcttgggttta

SEQ ID NO: 1447966 - DNA, 25 bp, Homo sapien
tccagatttcctctttgagccaaat

SEQ ID NO: 1447967 - DNA, 25 bp, Homo sapien
agtctccagatttcctctttgagcc

SEQ ID NO: 1447968 - DNA, 25 bp, Homo sapien
cagcttgggtttaacagtctccaga

SEQ ID NO: 1447969 - DNA, 25 bp, Homo sapien
ctgtttggacacttgctttggtgtc

SEQ ID NO: 1447970 - DNA, 25 bp, Homo sapien
gctgctgtttggacacttgctttgg

SEQ ID NO: 1447971 - DNA, 25 bp, Homo sapien
ccttcctgctgctgtttggacactt

SEQ ID NO: 1447972 - DNA, 25 bp, Homo sapien
tgctgtttggacacttgctttggtg

SEQ ID NO: 1447973 - DNA, 25 bp, Homo sapien
ggagatttctctggacctttggagg

SEQ ID NO: 1447974 - DNA, 25 bp, Homo sapien
gatttgaacccaagcggtctggcac

SEQ ID NO: 1447975 - DNA, 25 bp, Homo sapien
tgaagcacagcgaatattaggtaac

SEQ ID NO: 1447976 - DNA, 25 bp, Homo sapien
tctattagaagaagaccactctggt

SEQ ID NO: 1447977 - DNA, 25 bp, Homo sapien
gaggtactggccacggatccattgc

SEQ ID NO: 1447978 - DNA, 25 bp, Homo sapien
gcagaggagccagcttatactccca

SEQ ID NO: 1447979 - DNA, 25 bp, Homo sapien
ccatttggcacacttattgttatcc

SEQ ID NO: 1447980 - DNA, 25 bp, Homo sapien
tattgttatcctgtgctgtgaggga

SEQ ID NO: 1447981 - DNA, 25 bp, Homo sapien
gtccatgtcatatgcgtccttgaca

SEQ ID NO: 1447982 - DNA, 25 bp, Homo sapien
aagagcaggtcctccagagcacaaa

SEQ ID NO: 1447983 - DNA, 25 bp, Homo sapien
ctgtgaaacacatttggacgcccaa

SEQ ID NO: 1447984 - DNA, 25 bp, Homo sapien
atatgcgtccttgacaccaccaggc

SEQ ID NO: 1447985 - DNA, 25 bp, Homo sapien
ccgcgccgcgtcacttgtttttctg

SEQ ID NO: 1447986 - DNA, 25 bp, Homo sapien
tctacctcagctgccgggaagtgct

SEQ ID NO: 1447987 - DNA, 25 bp, Homo sapien
tgggggcgtcacagcctctacctca

SEQ ID NO: 1447988 - DNA, 25 bp, Homo sapien
ccgccggccgctgacgtggactggg

SEQ ID NO: 1447989 - DNA, 25 bp, Homo sapien
ggtggtcacttggtgccagggagga

SEQ ID NO: 1447990 - DNA, 25 bp, Homo sapien
gaggaggaacctgttcaggagcccc

SEQ ID NO: 1447991 - DNA, 25 bp, Homo sapien
tgccagggaggaggaacctgttcag

SEQ ID NO: 1447992 - DNA, 25 bp, Homo sapien
tccagaacctgcctttcccgggcca

SEQ ID NO: 1447993 - DNA, 25 bp, Homo sapien
ctcatcccgtcttcactgtctctcc

SEQ ID NO: 1447994 - DNA, 25 bp, Homo sapien
catcccgtcttcactgtctctcctg

SEQ ID NO: 1447995 - DNA, 25 bp, Homo sapien
tcccgtcttcactgtctctcctgta

SEQ ID NO: 1447996 - DNA, 25 bp, Homo sapien
cccgtcttcactgtctctcctgtac

SEQ ID NO: 1447997 - DNA, 25 bp, Homo sapien
tggcaaaggagggtgagaagcccag

SEQ ID NO: 1447998 - DNA, 25 bp, Homo sapien
tccttcttgccttcacccttccctg

SEQ ID NO: 1447999 - DNA, 25 bp, Homo sapien
cagccagggtggcaaaggagggtga

SEQ ID NO: 1448000 - DNA, 25 bp, Homo sapien
ggagggtgagaagcccagatcattc

SEQ ID NO: 1448001 - DNA, 25 bp, Homo sapien
caagccttccttcggtctagatggg

SEQ ID NO: 1448002 - DNA, 25 bp, Homo sapien
caatagggtctcaaaaagccccagg

SEQ ID NO: 1448003 - DNA, 25 bp, Homo sapien
gaaatcatgtgggtagcctctgagg

SEQ ID NO: 1448004 - DNA, 25 bp, Homo sapien
tgtggtgagctagaggacatacccc

SEQ ID NO: 1448005 - DNA, 25 bp, Homo sapien
tgaagagagcaggtgggtcaatcct

SEQ ID NO: 1448006 - DNA, 25 bp, Homo sapien
gtcaatcctgagtcggccacacagg

SEQ ID NO: 1448007 - DNA, 25 bp, Homo sapien
tgcaagtgggcgagatgagcaacca

SEQ ID NO: 1448008 - DNA, 25 bp, Homo sapien
tctgcgtgggaatatggcctgaaga

SEQ ID NO: 1448009 - DNA, 25 bp, Homo sapien
tacaaacacggcatctgtatgccag

SEQ ID NO: 1448010 - DNA, 25 bp, Homo sapien
cggtgttgggtagaagttatcctca

SEQ ID NO: 1448011 - DNA, 25 bp, Homo sapien
cagacatctaccgagtgcctgtgat

SEQ ID NO: 1448012 - DNA, 25 bp, Homo sapien
gaggccagattctttctcgagaagg

SEQ ID NO: 1448013 - DNA, 25 bp, Homo sapien
cttagacttgaatggttctcagcaa

SEQ ID NO: 1448014 - DNA, 25 bp, Homo sapien
gcaaagcggtaaaatggtgacaaca

SEQ ID NO: 1448015 - DNA, 25 bp, Homo sapien
tagttaagagacgaggcaaagcggt

SEQ ID NO: 1448016 - DNA, 25 bp, Homo sapien
tgacaacacgtcctggtgagtggtt

SEQ ID NO: 1448017 - DNA, 25 bp, Homo sapien
ggagtactcgggagccgcctccctc

SEQ ID NO: 1448018 - DNA, 25 bp, Homo sapien
ctaactcgagccttaaaaatgggcg

SEQ ID NO: 1448019 - DNA, 25 bp, Homo sapien
ctcgctcagctcagccgggcgcagg

SEQ ID NO: 1448020 - DNA, 25 bp, Homo sapien
tgccccgcgcggagtactcgggagc

SEQ ID NO: 1448021 - DNA, 25 bp, Homo sapien
tctgcgtcttgtacgaggaggcccc

SEQ ID NO: 1448022 - DNA, 25 bp, Homo sapien
tcaaaagctacagggaactccaggt

SEQ ID NO: 1448023 - DNA, 25 bp, Homo sapien
tatttttctaatgaggtcctgggca

SEQ ID NO: 1448024 - DNA, 25 bp, Homo sapien
tgaacagagaggtcgggatttgccc

SEQ ID NO: 1448025 - DNA, 25 bp, Homo sapien
gctagtcagccttgcatgtattcct

SEQ ID NO: 1448026 - DNA, 25 bp, Homo sapien
gagtgccccatgttctgcaagacta

SEQ ID NO: 1448027 - DNA, 25 bp, Homo sapien
tgtagggccgacactaaataaaagc

SEQ ID NO: 1448028 - DNA, 25 bp, Homo sapien
ccttggctgaatgggagagtgcccc

SEQ ID NO: 1448029 - DNA, 25 bp, Homo sapien
cacattttgtattgccttcccagac

SEQ ID NO: 1448030 - DNA, 25 bp, Homo sapien
tggaagaatgtacagcttatggaca

SEQ ID NO: 1448031 - DNA, 25 bp, Homo sapien
gcaggctgtgttcttgcatcttgtc

SEQ ID NO: 1448032 - DNA, 25 bp, Homo sapien
catggtctcatgcttaatcttgtct

SEQ ID NO: 1448033 - DNA, 25 bp, Homo sapien
tcctggcacaggtaagtactcgata

SEQ ID NO: 1448034 - DNA, 25 bp, Homo sapien
gcaacctggtggctagtgactttag

SEQ ID NO: 1448035 - DNA, 25 bp, Homo sapien
tacaaagaggttaggagctcaggct

SEQ ID NO: 1448036 - DNA, 25 bp, Homo sapien
gctcaggctctggtgttaggctccc

SEQ ID NO: 1448037 - DNA, 25 bp, Homo sapien
gcaaggacttcatgaccaaaacaca

SEQ ID NO: 1448038 - DNA, 25 bp, Homo sapien
tgcaatctactcatgtgacaaaggg

SEQ ID NO: 1448039 - DNA, 25 bp, Homo sapien
aggacttcatgaccaaaacacaaaa

SEQ ID NO: 1448040 - DNA, 25 bp, Homo sapien
ggagaaataggaatgcttttgcact

SEQ ID NO: 1448041 - DNA, 25 bp, Homo sapien
agtatatgtgctgccgaagcgagca

SEQ ID NO: 1448042 - DNA, 25 bp, Homo sapien
cgcaggagccatgctaatctccgta

SEQ ID NO: 1448043 - DNA, 25 bp, Homo sapien
gcgcaggagccatgctaatctccgt

SEQ ID NO: 1448044 - DNA, 25 bp, Homo sapien
tcgttccaattttagtatatgtgct

SEQ ID NO: 1448045 - DNA, 25 bp, Homo sapien
acacctccatggcaggaatcatttc

SEQ ID NO: 1448046 - DNA, 25 bp, Homo sapien
tcctttttcacctccatgtgcttgt

SEQ ID NO: 1448047 - DNA, 25 bp, Homo sapien
tcacacctccatggcaggaatcatt

SEQ ID NO: 1448048 - DNA, 25 bp, Homo sapien
atttcctttttcacctccatgtgct

SEQ ID NO: 1448049 - DNA, 25 bp, Homo sapien
ccctcttcctcaatatgcttggtgg

SEQ ID NO: 1448050 - DNA, 25 bp, Homo sapien
tcttcctcaatatgcttggtggtga

SEQ ID NO: 1448051 - DNA, 25 bp, Homo sapien
gaccgttgcggccaaggcgatccca

SEQ ID NO: 1448052 - DNA, 25 bp, Homo sapien
cccacacgggctgcctggagtcaga

SEQ ID NO: 1448053 - DNA, 25 bp, Homo sapien
ctcgcagcttgagcgactgcagggc

SEQ ID NO: 1448054 - DNA, 25 bp, Homo sapien
tcgaaggcgtccccgcttctcaggt

SEQ ID NO: 1448055 - DNA, 25 bp, Homo sapien
gagctcaggtccctaaaacctcgaa

SEQ ID NO: 1448056 - DNA, 25 bp, Homo sapien
tcttgagcaactggaggttcggggg

SEQ ID NO: 1448057 - DNA, 25 bp, Homo sapien
cattgatttccccaagttcgggctc

SEQ ID NO: 1448058 - DNA, 25 bp, Homo sapien
tcgtgcctctgcgtgcttgcgccct

SEQ ID NO: 1448059 - DNA, 25 bp, Homo sapien
ctttgggcattgatttccccaagtt

SEQ ID NO: 1448060 - DNA, 25 bp, Homo sapien
gatttccccaagttcgggctcaggc

SEQ ID NO: 1448061 - DNA, 25 bp, Homo sapien
ctatgggcgcagttacttgagctct

SEQ ID NO: 1448062 - DNA, 25 bp, Homo sapien
ttacttgagctctgtctgccatcgc

SEQ ID NO: 1448063 - DNA, 25 bp, Homo sapien
tctgccatcgccaatccgccatcct

SEQ ID NO: 1448064 - DNA, 25 bp, Homo sapien
agctctgtctgccatcgccaatccg

SEQ ID NO: 1448065 - DNA, 25 bp, Homo sapien
ctgttcctgatgctttcctgcctgc

SEQ ID NO: 1448066 - DNA, 25 bp, Homo sapien
gttcctgatgctttcctgcctgcac

SEQ ID NO: 1448067 - DNA, 25 bp, Homo sapien
tgttcctgatgctttcctgcctgca

SEQ ID NO: 1448068 - DNA, 25 bp, Homo sapien
ccactgccactgttcacaaatgcca

SEQ ID NO: 1448069 - DNA, 25 bp, Homo sapien
ctctggggtagaccctggataggac

SEQ ID NO: 1448070 - DNA, 25 bp, Homo sapien
aggacattgggggtgctgttgtccc

SEQ ID NO: 1448071 - DNA, 25 bp, Homo sapien
ccctggataggacattgggggtgct

SEQ ID NO: 1448072 - DNA, 25 bp, Homo sapien
acattgggggtgctgttgtccctgc

SEQ ID NO: 1448073 - DNA, 25 bp, Homo sapien
tgcgacctcaccaggtcctcctaaa

SEQ ID NO: 1448074 - DNA, 25 bp, Homo sapien
cctgtgtgacctgcgacctcaccag

SEQ ID NO: 1448075 - DNA, 25 bp, Homo sapien
gcgacctcaccaggtcctcctaaag

SEQ ID NO: 1448076 - DNA, 25 bp, Homo sapien
gtgtgacctgcgacctcaccaggtc

SEQ ID NO: 1448077 - DNA, 25 bp, Homo sapien
atcataaaataactttattggtcag

SEQ ID NO: 1448078 - DNA, 25 bp, Homo sapien
gcaatcataaaataactttattggt

SEQ ID NO: 1448079 - DNA, 25 bp, Homo sapien
caatcataaaataactttattggtc

SEQ ID NO: 1448080 - DNA, 25 bp, Homo sapien
cataaaataactttattggtcaggt

SEQ ID NO: 1448081 - DNA, 25 bp, Homo sapien
catgcttttcctgtaataaggatcc

SEQ ID NO: 1448082 - DNA, 25 bp, Homo sapien
tgtaataaggatcctttataaaggc

SEQ ID NO: 1448083 - DNA, 25 bp, Homo sapien
aaaggcatgatggtgttcacatgca

SEQ ID NO: 1448084 - DNA, 25 bp, Homo sapien
catcggagctcctttgttgaaatga

SEQ ID NO: 1448085 - DNA, 25 bp, Homo sapien
ggtctggagccaagaacgtagtcca

SEQ ID NO: 1448086 - DNA, 25 bp, Homo sapien
gccaagaacgtagtccaaagatccc

SEQ ID NO: 1448087 - DNA, 25 bp, Homo sapien
cagggaaggtgcttcaaagcataca

SEQ ID NO: 1448088 - DNA, 25 bp, Homo sapien
gagccaagaacgtagtccaaagatc

SEQ ID NO: 1448089 - DNA, 25 bp, Homo sapien
tggctttgtcccaaccttgcccaaa

SEQ ID NO: 1448090 - DNA, 25 bp, Homo sapien
ccttgcccctgactgcccagatggc

SEQ ID NO: 1448091 - DNA, 25 bp, Homo sapien
tatacttgggctaactctcctccaa

SEQ ID NO: 1448092 - DNA, 25 bp, Homo sapien
catctgggcagagcctatacttggg

SEQ ID NO: 1448093 - DNA, 25 bp, Homo sapien
agaattaagtgctccccagccaaac

SEQ ID NO: 1448094 - DNA, 25 bp, Homo sapien
ggaagaattaagtgctccccagcca

SEQ ID NO: 1448095 - DNA, 25 bp, Homo sapien
atgggaagaattaagtgctccccag

SEQ ID NO: 1448096 - DNA, 25 bp, Homo sapien
cagccaaactataaagcaaaagcca

SEQ ID NO: 1448097 - DNA, 25 bp, Homo sapien
taactatggccttaggacaaaccag

SEQ ID NO: 1448098 - DNA, 25 bp, Homo sapien
tgtgaaagcagagggttgtatgccc

SEQ ID NO: 1448099 - DNA, 25 bp, Homo sapien
cactaatgaggatatagctcagaga

SEQ ID NO: 1448100 - DNA, 25 bp, Homo sapien
agagggttgtatgcccagcacaggc

SEQ ID NO: 1448101 - DNA, 25 bp, Homo sapien
tactttaaaaaccatgtggccgcta

SEQ ID NO: 1448102 - DNA, 25 bp, Homo sapien
tggccgctacctttgtggataaaaa

SEQ ID NO: 1448103 - DNA, 25 bp, Homo sapien
tacattgatctaagcctgaggttgg

SEQ ID NO: 1448104 - DNA, 25 bp, Homo sapien
ttctttgggctagcaagtccagggc

SEQ ID NO: 1448105 - DNA, 25 bp, Homo sapien
catgctggtgacctccaatctggtg

SEQ ID NO: 1448106 - DNA, 25 bp, Homo sapien
ggttatatactattgcccatgccac

SEQ ID NO: 1448107 - DNA, 25 bp, Homo sapien
tttgagaagcaacaaatgggagccc

SEQ ID NO: 1448108 - DNA, 25 bp, Homo sapien
ctgcttaaggcacagaagaggcatc

SEQ ID NO: 1448109 - DNA, 25 bp, Homo sapien
gaaagaagactacagagggtgcccg

SEQ ID NO: 1448110 - DNA, 25 bp, Homo sapien
tatgtcctcagcagaaggctgcctg

SEQ ID NO: 1448111 - DNA, 25 bp, Homo sapien
agggtgcccgtggacttctgtcaca

SEQ ID NO: 1448112 - DNA, 25 bp, Homo sapien
aaagagtgagcttctgcctatgtcc

SEQ ID NO: 1448113 - DNA, 25 bp, Homo sapien
gcaggcatggcgctgcgcttgatct

SEQ ID NO: 1448114 - DNA, 25 bp, Homo sapien
atgaggctggcaaggcgcaggcaga

SEQ ID NO: 1448115 - DNA, 25 bp, Homo sapien
gcttgatctcgttcccgtccaggcg

SEQ ID NO: 1448116 - DNA, 25 bp, Homo sapien
cttggagaagttcacgacgtccacc

SEQ ID NO: 1448117 - DNA, 25 bp, Homo sapien
tgtaccagaggcatccatcggcttg

SEQ ID NO: 1448118 - DNA, 25 bp, Homo sapien
attaaagagagaaagcctgggccga

SEQ ID NO: 1448119 - DNA, 25 bp, Homo sapien
gacaagtgtctttgtgtgccagggc

SEQ ID NO: 1448120 - DNA, 25 bp, Homo sapien
tattcttaggtgtgaccatgagggc

SEQ ID NO: 1448121 - DNA, 25 bp, Homo sapien
acatcttgctcaatgactgatctgt

SEQ ID NO: 1448122 - DNA, 25 bp, Homo sapien
tgttaacatcttgctcaatgactga

SEQ ID NO: 1448123 - DNA, 25 bp, Homo sapien
agggctgcccagcttgttaacatct

SEQ ID NO: 1448124 - DNA, 25 bp, Homo sapien
gcccagcttgttaacatcttgctca

SEQ ID NO: 1448125 - DNA, 25 bp, Homo sapien
aaggatatctgccctgccaccaggg

SEQ ID NO: 1448126 - DNA, 25 bp, Homo sapien
gaactgaccagaacaagtgccgcat

SEQ ID NO: 1448127 - DNA, 25 bp, Homo sapien
cagggggtccttgtactccaggaag

SEQ ID NO: 1448128 - DNA, 25 bp, Homo sapien
acaagtgccgcattcagctctgaga

SEQ ID NO: 1448129 - DNA, 25 bp, Homo sapien
gaatgaaacttacctctcctggaaa

SEQ ID NO: 1448130 - DNA, 25 bp, Homo sapien
agagagctcatcctcttctgggaca

SEQ ID NO: 1448131 - DNA, 25 bp, Homo sapien
tgagtaagtgcagggcttcaaccca

SEQ ID NO: 1448132 - DNA, 25 bp, Homo sapien
caggtgacctgtgaaaatgactggc

SEQ ID NO: 1448133 - DNA, 25 bp, Homo sapien
tatggcttggttgtcaggttgcttc

SEQ ID NO: 1448134 - DNA, 25 bp, Homo sapien
agtgaaatagacagccagtccccgc

SEQ ID NO: 1448135 - DNA, 25 bp, Homo sapien
agcactcagaatagtgtctttcaag

SEQ ID NO: 1448136 - DNA, 25 bp, Homo sapien
tcatttgtgctgtctggttccccta

SEQ ID NO: 1448137 - DNA, 25 bp, Homo sapien
ccttccgaaggtggttataactcag

SEQ ID NO: 1448138 - DNA, 25 bp, Homo sapien
tgttgtgctccatgtacagctgctc

SEQ ID NO: 1448139 - DNA, 25 bp, Homo sapien
gaggccaggccattgttggttagac

SEQ ID NO: 1448140 - DNA, 25 bp, Homo sapien
taactcaggtccagcaagatcagtg

SEQ ID NO: 1448141 - DNA, 25 bp, Homo sapien
tgtcaaagacgccttcctggatgga

SEQ ID NO: 1448142 - DNA, 25 bp, Homo sapien
gattgtcacagtacatggccgtggg

SEQ ID NO: 1448143 - DNA, 25 bp, Homo sapien
tatcactggtgatctggttgccgtg

SEQ ID NO: 1448144 - DNA, 25 bp, Homo sapien
tacacatacttcatgcgggagggaa

SEQ ID NO: 1448145 - DNA, 25 bp, Homo sapien
tcatagggatcgtagtaggtggact

SEQ ID NO: 1448146 - DNA, 25 bp, Homo sapien
ctcatacgggtaagggtcataggga

SEQ ID NO: 1448147 - DNA, 25 bp, Homo sapien
gctgcggaggtagtggaaccaccaa

SEQ ID NO: 1448148 - DNA, 25 bp, Homo sapien
gccgtaggtgtaggctggcccttca

SEQ ID NO: 1448149 - DNA, 25 bp, Homo sapien
ctgggagagggagaagagccctgcc

SEQ ID NO: 1448150 - DNA, 25 bp, Homo sapien
cagcagcaggagggaggtccactgc

SEQ ID NO: 1448151 - DNA, 25 bp, Homo sapien
agggagaagagccctgccagcagca

SEQ ID NO: 1448152 - DNA, 25 bp, Homo sapien
gcagcaggagggaggtccactgcat

SEQ ID NO: 1448153 - DNA, 25 bp, Homo sapien
ttgctgttgggcctactggggttgg

SEQ ID NO: 1448154 - DNA, 25 bp, Homo sapien
attgctgttgggcctactggggttg

SEQ ID NO: 1448155 - DNA, 25 bp, Homo sapien
tcggtccgcctgacgctataaaaac

SEQ ID NO: 1448156 - DNA, 25 bp, Homo sapien
tgaatgagttagtggcgccctagaa

SEQ ID NO: 1448157 - DNA, 25 bp, Homo sapien
tactgagagtgtgcgtgcctgtgcc

SEQ ID NO: 1448158 - DNA, 25 bp, Homo sapien
tacagtctcttatgaagcgcctgga

SEQ ID NO: 1448159 - DNA, 25 bp, Homo sapien
gtccaccagaaccaggtttccatgg

SEQ ID NO: 1448160 - DNA, 25 bp, Homo sapien
tgtccaccagaaccaggtttccatg

SEQ ID NO: 1448161 - DNA, 25 bp, Homo sapien
ctctctgtccaccagaaccaggttt

SEQ ID NO: 1448162 - DNA, 25 bp, Homo sapien
tctgtccaccagaaccaggtttcca

SEQ ID NO: 1448163 - DNA, 25 bp, Homo sapien
gtgccatgattgaggcaaccacatg

SEQ ID NO: 1448164 - DNA, 25 bp, Homo sapien
tggtacagccgtcagctgccaggag

SEQ ID NO: 1448165 - DNA, 25 bp, Homo sapien
ggagcttctcatgaagcctcagtac

SEQ ID NO: 1448166 - DNA, 25 bp, Homo sapien
gcagccattgagtttggtacagccg

SEQ ID NO: 1448167 - DNA, 25 bp, Homo sapien
tctaaggcccatggcatccgggaat

SEQ ID NO: 1448168 - DNA, 25 bp, Homo sapien
ccaggtcgagggaaccttgagtgct

SEQ ID NO: 1448169 - DNA, 25 bp, Homo sapien
tccgggaattgagtgggcttggcca

SEQ ID NO: 1448170 - DNA, 25 bp, Homo sapien
acacgaaggagccatcgtctaaggc

SEQ ID NO: 1448171 - DNA, 25 bp, Homo sapien
ggttcattagggtctgtgacctcag

SEQ ID NO: 1448172 - DNA, 25 bp, Homo sapien
cagatgccttctagacctctgtgtc

SEQ ID NO: 1448173 - DNA, 25 bp, Homo sapien
gggtcacctggttcaatttatctag

SEQ ID NO: 1448174 - DNA, 25 bp, Homo sapien
cagctgatccagaggttggtaacca

SEQ ID NO: 1448175 - DNA, 25 bp, Homo sapien
caggaggctgaattcaaccatatgt

SEQ ID NO: 1448176 - DNA, 25 bp, Homo sapien
ggcctccctgtgggaactgtgtgct

SEQ ID NO: 1448177 - DNA, 25 bp, Homo sapien
tctgtgggcacatcagtgtatgcat

SEQ ID NO: 1448178 - DNA, 25 bp, Homo sapien
gtgtatgcatgggtaacatatgcct

SEQ ID NO: 1448179 - DNA, 25 bp, Homo sapien
tatcctctgatactgacagcaggcg

SEQ ID NO: 1448180 - DNA, 25 bp, Homo sapien
atactgacagcaggcgcgcagactc

SEQ ID NO: 1448181 - DNA, 25 bp, Homo sapien
atctatcctctgatactgacagcag

SEQ ID NO: 1448182 - DNA, 25 bp, Homo sapien
ctctgatactgacagcaggcgcgca

SEQ ID NO: 1448183 - DNA, 25 bp, Homo sapien
gagagggatgtgaatgtatttgcat

SEQ ID NO: 1448184 - DNA, 25 bp, Homo sapien
catcttgttagccatcaggaaggga

SEQ ID NO: 1448185 - DNA, 25 bp, Homo sapien
agaaggggtcagtgccaatgatgaa

SEQ ID NO: 1448186 - DNA, 25 bp, Homo sapien
ggacgtggacaatctggtataatgg

SEQ ID NO: 1448187 - DNA, 25 bp, Homo sapien
cggtgttgctgttggccgggcctgc

SEQ ID NO: 1448188 - DNA, 25 bp, Homo sapien
aggaagaggatagggattcagccct

SEQ ID NO: 1448189 - DNA, 25 bp, Homo sapien
cagtctcccggcatccggtgttgct

SEQ ID NO: 1448190 - DNA, 25 bp, Homo sapien
tcccggcatccggtgttgctgttgg

SEQ ID NO: 1448191 - DNA, 25 bp, Homo sapien
ataggcagggctgtggccaaagtcc

SEQ ID NO: 1448192 - DNA, 25 bp, Homo sapien
cagggctgtggccaaagtccttatc

SEQ ID NO: 1448193 - DNA, 25 bp, Homo sapien
ggcagggctgtggccaaagtcctta

SEQ ID NO: 1448194 - DNA, 25 bp, Homo sapien
ctgggggataggcagggctgtggcc

SEQ ID NO: 1448195 - DNA, 25 bp, Homo sapien
tagttgtccctgattgtggtatgtg

SEQ ID NO: 1448196 - DNA, 25 bp, Homo sapien
gctcataaagactagaagtggtcac

SEQ ID NO: 1448197 - DNA, 25 bp, Homo sapien
ttgaaccagcatcaccctttggagt

SEQ ID NO: 1448198 - DNA, 25 bp, Homo sapien
gatgaattgttcgatccagggtcct

SEQ ID NO: 1448199 - DNA, 25 bp, Homo sapien
tcaggtcagggcaaatgtgccttga

SEQ ID NO: 1448200 - DNA, 25 bp, Homo sapien
gctttgacatgcaaaagggcaggga

SEQ ID NO: 1448201 - DNA, 25 bp, Homo sapien
taaaggctgtaatggaatatccaat

SEQ ID NO: 1448202 - DNA, 25 bp, Homo sapien
cattggagaacggaatgatgaattc

SEQ ID NO: 1448203 - DNA, 25 bp, Homo sapien
gaagaggcagagactatcaatccag

SEQ ID NO: 1448204 - DNA, 25 bp, Homo sapien
ggagactgagccagatgacactgtc

SEQ ID NO: 1448205 - DNA, 25 bp, Homo sapien
cttacagtctgtcccatcttgatgg

SEQ ID NO: 1448206 - DNA, 25 bp, Homo sapien
tctctgtctgctctgaaagctgtag

SEQ ID NO: 1448207 - DNA, 25 bp, Homo sapien
cagggctctcttacagtctgtccca

SEQ ID NO: 1448208 - DNA, 25 bp, Homo sapien
caggcatctccgaagatcaggtgct

SEQ ID NO: 1448209 - DNA, 25 bp, Homo sapien
aggcatctccgaagatcaggtgctc

SEQ ID NO: 1448210 - DNA, 25 bp, Homo sapien
gtgtgacagctctttatttgactct

SEQ ID NO: 1448211 - DNA, 25 bp, Homo sapien
gtaaccagctgcaggatcatgcaga

SEQ ID NO: 1448212 - DNA, 25 bp, Homo sapien
cttgtctaaggtctgtttattattg

SEQ ID NO: 1448213 - DNA, 25 bp, Homo sapien
ggtgcagattccagctctagggtgt

SEQ ID NO: 1448214 - DNA, 25 bp, Homo sapien
actctgagtgatcccctacatctct

SEQ ID NO: 1448215 - DNA, 25 bp, Homo sapien
caccactctgagtgatcccctacat

SEQ ID NO: 1448216 - DNA, 25 bp, Homo sapien
tgtttaagatcaattccccccacac

SEQ ID NO: 1448217 - DNA, 25 bp, Homo sapien
ggtcaacataacaagattgtttaag

SEQ ID NO: 1448218 - DNA, 25 bp, Homo sapien
tactgcattgggtcccagccatgcc

SEQ ID NO: 1448219 - DNA, 25 bp, Homo sapien
cttcatttccagtactgcattgggt

SEQ ID NO: 1448220 - DNA, 25 bp, Homo sapien
tttccagtactgcattgggtcccag

SEQ ID NO: 1448221 - DNA, 25 bp, Homo sapien
tatggtttgatgcattgcactggaa

SEQ ID NO: 1448222 - DNA, 25 bp, Homo sapien
tccatgtgtgctcttaattgcctgg

SEQ ID NO: 1448223 - DNA, 25 bp, Homo sapien
aatgggcacgttccactatggcttg

SEQ ID NO: 1448224 - DNA, 25 bp, Homo sapien
tccttgagggttatacgagataccc

SEQ ID NO: 1448225 - DNA, 25 bp, Homo sapien
ggaatggtcgatgttccatgtgtgc

SEQ ID NO: 1448226 - DNA, 25 bp, Homo sapien
cagaccctgactggtggatgaactg

SEQ ID NO: 1448227 - DNA, 25 bp, Homo sapien
cacagaccctgactggtggatgaac

SEQ ID NO: 1448228 - DNA, 25 bp, Homo sapien
gcgcagtcacttcacgttcattttc

SEQ ID NO: 1448229 - DNA, 25 bp, Homo sapien
acgttcattttcgagggttccatca

SEQ ID NO: 1448230 - DNA, 25 bp, Homo sapien
ccatgaatgtttctatggccacaaa

SEQ ID NO: 1448231 - DNA, 25 bp, Homo sapien
tccatgaatgtttctatggccacaa

SEQ ID NO: 1448232 - DNA, 25 bp, Homo sapien
atccatgaatgtttctatggccaca

SEQ ID NO: 1448233 - DNA, 25 bp, Homo sapien
tcatctagccaaatggaatcatgcc

SEQ ID NO: 1448234 - DNA, 25 bp, Homo sapien
gatcactgcagaccccttctaacta

SEQ ID NO: 1448235 - DNA, 25 bp, Homo sapien
cacctgagtgccagatgggctcatc

SEQ ID NO: 1448236 - DNA, 25 bp, Homo sapien
tgtaaggcagcagcaagcctcgcct

SEQ ID NO: 1448237 - DNA, 25 bp, Homo sapien
cttatgtctgtccagggctgccaga

SEQ ID NO: 1448238 - DNA, 25 bp, Homo sapien
gtccagggctgccagagggataaaa

SEQ ID NO: 1448239 - DNA, 25 bp, Homo sapien
ccagggctgccagagggataaaatg

SEQ ID NO: 1448240 - DNA, 25 bp, Homo sapien
agggctgccagagggataaaatgga

SEQ ID NO: 1448241 - DNA, 25 bp, Homo sapien
tgctttgaaaagcacccgaatatat

SEQ ID NO: 1448242 - DNA, 25 bp, Homo sapien
gaatatatctcgttgttcttcccca

SEQ ID NO: 1448243 - DNA, 25 bp, Homo sapien
aaaagcacccgaatatatctcgttg

SEQ ID NO: 1448244 - DNA, 25 bp, Homo sapien
aataaatgaaggtgctttgaaaagc

SEQ ID NO: 1448245 - DNA, 25 bp, Homo sapien
ctggaataccaatgaggccttctag

SEQ ID NO: 1448246 - DNA, 25 bp, Homo sapien
tggaataccaatgaggccttctagt

SEQ ID NO: 1448247 - DNA, 25 bp, Homo sapien
tttggtttcagtctgcccaggacgg

SEQ ID NO: 1448248 - DNA, 25 bp, Homo sapien
gggatatcatcagtccgctgcccat

SEQ ID NO: 1448249 - DNA, 25 bp, Homo sapien
cagagataaggtctccgccagaggc

SEQ ID NO: 1448250 - DNA, 25 bp, Homo sapien
gggccaccctaatatgcgggatatc

SEQ ID NO: 1448251 - DNA, 25 bp, Homo sapien
ctgtaatcgatcatctcggagtggg

SEQ ID NO: 1448252 - DNA, 25 bp, Homo sapien
tggaacatgaccagtctaggaccat

SEQ ID NO: 1448253 - DNA, 25 bp, Homo sapien
gaagccgtagttaattgtctctgac

SEQ ID NO: 1448254 - DNA, 25 bp, Homo sapien
tctctgactgtaatcgatcatctcg

SEQ ID NO: 1448255 - DNA, 25 bp, Homo sapien
ttttagggctctctgccgcacagga

SEQ ID NO: 1448256 - DNA, 25 bp, Homo sapien
tgagaaggatcttgcgagtgaaccg

SEQ ID NO: 1448257 - DNA, 25 bp, Homo sapien
cctgagagtaacaaaggagctgttc

SEQ ID NO: 1448258 - DNA, 25 bp, Homo sapien
tgtcaaggacacatccataagcagt

SEQ ID NO: 1448259 - DNA, 25 bp, Homo sapien
gatgaagaaataggccggtactcaa

SEQ ID NO: 1448260 - DNA, 25 bp, Homo sapien
taacaataacttgcagacgtgatgc

SEQ ID NO: 1448261 - DNA, 25 bp, Homo sapien
ataggccggtactcaactgaggccc

SEQ ID NO: 1448262 - DNA, 25 bp, Homo sapien
tgcagacgtgatgccggcgcctgct

SEQ ID NO: 1448263 - DNA, 25 bp, Homo sapien
ctaacttttgaggagacaggtccca

SEQ ID NO: 1448264 - DNA, 25 bp, Homo sapien
taacttttgaggagacaggtcccag

SEQ ID NO: 1448265 - DNA, 25 bp, Homo sapien
aacttttgaggagacaggtcccagg

SEQ ID NO: 1448266 - DNA, 25 bp, Homo sapien
tgactcagggctctttttacgtagg

SEQ ID NO: 1448267 - DNA, 25 bp, Homo sapien
tcctttagtcaattccccttctgtg

SEQ ID NO: 1448268 - DNA, 25 bp, Homo sapien
ggtgacggctattaatcctttagtc

SEQ ID NO: 1448269 - DNA, 25 bp, Homo sapien
ttttacgtaggctcatgtaggtgac

SEQ ID NO: 1448270 - DNA, 25 bp, Homo sapien
ctccttgccaatccagactttcagc

SEQ ID NO: 1448271 - DNA, 25 bp, Homo sapien
tccttgccaatccagactttcagcc

SEQ ID NO: 1448272 - DNA, 25 bp, Homo sapien
cctccttgccaatccagactttcag

SEQ ID NO: 1448273 - DNA, 25 bp, Homo sapien
tcttctgctagttgctttatagctt

SEQ ID NO: 1448274 - DNA, 25 bp, Homo sapien
gctagttgctttatagcttggtcca

SEQ ID NO: 1448275 - DNA, 25 bp, Homo sapien
ttcttctgctagttgctttatagct

SEQ ID NO: 1448276 - DNA, 25 bp, Homo sapien
tgctagttgctttatagcttggtcc

SEQ ID NO: 1448277 - DNA, 25 bp, Homo sapien
ggtaacctgagcatattttctccaa

SEQ ID NO: 1448278 - DNA, 25 bp, Homo sapien
tttacctcaatgacaatatctttgg

SEQ ID NO: 1448279 - DNA, 25 bp, Homo sapien
tgtcacaaggcccaattcgctcaca

SEQ ID NO: 1448280 - DNA, 25 bp, Homo sapien
tatctttggtaataacacccacagt

SEQ ID NO: 1448281 - DNA, 25 bp, Homo sapien
caagatgtaatacatgggctttctt

SEQ ID NO: 1448282 - DNA, 25 bp, Homo sapien
gttcaagatgtaatacatgggcttt

SEQ ID NO: 1448283 - DNA, 25 bp, Homo sapien
tcaagatgtaatacatgggctttct

SEQ ID NO: 1448284 - DNA, 25 bp, Homo sapien
ttcaagatgtaatacatgggctttc

SEQ ID NO: 1448285 - DNA, 25 bp, Homo sapien
ttccatgccttcttctttctctttc

SEQ ID NO: 1448286 - DNA, 25 bp, Homo sapien
cttccatgccttcttctttctcttt

SEQ ID NO: 1448287 - DNA, 25 bp, Homo sapien
tcttccatgccttcttctttctctt

SEQ ID NO: 1448288 - DNA, 25 bp, Homo sapien
cctcttccatgccttcttctttctc

SEQ ID NO: 1448289 - DNA, 25 bp, Homo sapien
catgacactgtttaaggtaaagctt

SEQ ID NO: 1448290 - DNA, 25 bp, Homo sapien
cagcatgacactgtttaaggtaaag

SEQ ID NO: 1448291 - DNA, 25 bp, Homo sapien
gcatgacactgtttaaggtaaagct

SEQ ID NO: 1448292 - DNA, 25 bp, Homo sapien
gacactgtttaaggtaaagcttagc

SEQ ID NO: 1448293 - DNA, 25 bp, Homo sapien
tctaagattcaagaagggatgatgg

SEQ ID NO: 1448294 - DNA, 25 bp, Homo sapien
gaaccacggccgatcattagcattt

SEQ ID NO: 1448295 - DNA, 25 bp, Homo sapien
tctggaaaaccaagatgaaaggatc

SEQ ID NO: 1448296 - DNA, 25 bp, Homo sapien
ggaatcgtacctgcaatgtctccaa

SEQ ID NO: 1448297 - DNA, 25 bp, Homo sapien
tgagagttgaaagggtcctgaccag

SEQ ID NO: 1448298 - DNA, 25 bp, Homo sapien
atccaaggggattctcataagccac

SEQ ID NO: 1448299 - DNA, 25 bp, Homo sapien
ccacagagaactgcccatgagtatg

SEQ ID NO: 1448300 - DNA, 25 bp, Homo sapien
cccatgagtatgaaagggaattcct

SEQ ID NO: 1448301 - DNA, 25 bp, Homo sapien
ccagggagctgcgatgattaactgc

SEQ ID NO: 1448302 - DNA, 25 bp, Homo sapien
ttccatagcctcactgccgtgggac

SEQ ID NO: 1448303 - DNA, 25 bp, Homo sapien
tgcgatgattaactgcaggagccca

SEQ ID NO: 1448304 - DNA, 25 bp, Homo sapien
ccgcatgaaggcgagctctctttct

SEQ ID NO: 1448305 - DNA, 25 bp, Homo sapien
ggtaggactagcttattgtgttcag

SEQ ID NO: 1448306 - DNA, 25 bp, Homo sapien
ctcagagtggaacggaggtggaaca

SEQ ID NO: 1448307 - DNA, 25 bp, Homo sapien
tgtgttcagttcttgagtggtcagc

SEQ ID NO: 1448308 - DNA, 25 bp, Homo sapien
gagccatcttgcagcttgtagttgg

SEQ ID NO: 1448309 - DNA, 25 bp, Homo sapien
tttgtctctttcaacaatgagccct

SEQ ID NO: 1448310 - DNA, 25 bp, Homo sapien
tttcaacaatgagccctgtgtccat

SEQ ID NO: 1448311 - DNA, 25 bp, Homo sapien
ctctttgcctgccctttgtctcttt

SEQ ID NO: 1448312 - DNA, 25 bp, Homo sapien
tctttgcctgccctttgtctctttc

SEQ ID NO: 1448313 - DNA, 25 bp, Homo sapien
ccatgtcttcctcccttgatagtgg

SEQ ID NO: 1448314 - DNA, 25 bp, Homo sapien
cctcccttgatagtggcagctggtg

SEQ ID NO: 1448315 - DNA, 25 bp, Homo sapien
ccgtaatataagtgcagggaggtga

SEQ ID NO: 1448316 - DNA, 25 bp, Homo sapien
ctggggtttggcgtttctccttgag

SEQ ID NO: 1448317 - DNA, 25 bp, Homo sapien
catcaggaatcccaacggtggcttc

SEQ ID NO: 1448318 - DNA, 25 bp, Homo sapien
ttccgtatgtacagcaagggcgcct

SEQ ID NO: 1448319 - DNA, 25 bp, Homo sapien
gaggagaagctctacaaggtgtaca

SEQ ID NO: 1448320 - DNA, 25 bp, Homo sapien
tgcgtaatgaagtgcccgaggagaa

SEQ ID NO: 1448321 - DNA, 25 bp, Homo sapien
aaagacagagatgatatggtacgca

SEQ ID NO: 1448322 - DNA, 25 bp, Homo sapien
ccggaaaggggaagcagtgccattc

SEQ ID NO: 1448323 - DNA, 25 bp, Homo sapien
tatggtacgcactgtcatcgagccc

SEQ ID NO: 1448324 - DNA, 25 bp, Homo sapien
cactgtcatcgagcccatggcctgt

SEQ ID NO: 1448325 - DNA, 25 bp, Homo sapien
aaggcactgggtttggactcactca

SEQ ID NO: 1448326 - DNA, 25 bp, Homo sapien
tgtactggcggataaaggcacctgc

SEQ ID NO: 1448327 - DNA, 25 bp, Homo sapien
tctcacctagatctggagcaaaggc

SEQ ID NO: 1448328 - DNA, 25 bp, Homo sapien
taaaaatgtggtcctcgctgtctgt

SEQ ID NO: 1448329 - DNA, 25 bp, Homo sapien
taaatatggcataagttaataacac

SEQ ID NO: 1448330 - DNA, 25 bp, Homo sapien
ggagaacgtatcatcctagcttcct

SEQ ID NO: 1448331 - DNA, 25 bp, Homo sapien
ccaactggcagtgggtaaatatggc

SEQ ID NO: 1448332 - DNA, 25 bp, Homo sapien
tagcttcctctcttaataaacctag

SEQ ID NO: 1448333 - DNA, 25 bp, Homo sapien
gagatcacctagaaatccctctgga

SEQ ID NO: 1448334 - DNA, 25 bp, Homo sapien
tagccctgagtgacagtcttaaggc

SEQ ID NO: 1448335 - DNA, 25 bp, Homo sapien
tacaattgaagcagcccgtggtacc

SEQ ID NO: 1448336 - DNA, 25 bp, Homo sapien
ttacctcactgctgaaaacccagag

SEQ ID NO: 1448337 - DNA, 25 bp, Homo sapien
cagtccagtgtgtgttgccataatt

SEQ ID NO: 1448338 - DNA, 25 bp, Homo sapien
gcaattcagcttaacagtgcaccca

SEQ ID NO: 1448339 - DNA, 25 bp, Homo sapien
gatgagctcccataactgaattggc

SEQ ID NO: 1448340 - DNA, 25 bp, Homo sapien
aagcaacgtataccccagtccagtg

SEQ ID NO: 1448341 - DNA, 25 bp, Homo sapien
taaattgagcgcttactgaatggca

SEQ ID NO: 1448342 - DNA, 25 bp, Homo sapien
ggcatcgcctcatagaggaactaca

SEQ ID NO: 1448343 - DNA, 25 bp, Homo sapien
caaaacgttatgaaagccggcttcg

SEQ ID NO: 1448344 - DNA, 25 bp, Homo sapien
gaatggcagtctcagttcctgcggc

SEQ ID NO: 1448345 - DNA, 25 bp, Homo sapien
agaaagacgtggcagcaagcgggag

SEQ ID NO: 1448346 - DNA, 25 bp, Homo sapien
cgtgctggcacttttaccggccggg

SEQ ID NO: 1448347 - DNA, 25 bp, Homo sapien
atctttgacgctggcagtcttggtt

SEQ ID NO: 1448348 - DNA, 25 bp, Homo sapien
agtcttggttttctgctagtgctgc

SEQ ID NO: 1448349 - DNA, 25 bp, Homo sapien
tattctacgttggttctgagctggg

SEQ ID NO: 1448350 - DNA, 25 bp, Homo sapien
ccaaaacagatcatgagcctggact

SEQ ID NO: 1448351 - DNA, 25 bp, Homo sapien
gatttcatagctataactgtggcgc

SEQ ID NO: 1448352 - DNA, 25 bp, Homo sapien
ctaagttgccccatgtgtagttggc

SEQ ID NO: 1448353 - DNA, 25 bp, Homo sapien
tttaatggcaaaccagtgatactgg

SEQ ID NO: 1448354 - DNA, 25 bp, Homo sapien
gcgtaagcaagcctttccagggcca

SEQ ID NO: 1448355 - DNA, 25 bp, Homo sapien
tgggctgggcaaaatttagtgtaac

SEQ ID NO: 1448356 - DNA, 25 bp, Homo sapien
taaagaatttggacctaggctgcgt

SEQ ID NO: 1448357 - DNA, 25 bp, Homo sapien
taaatagaactcttggtcagccaca

SEQ ID NO: 1448358 - DNA, 25 bp, Homo sapien
catgttgaatgactcttgggtgcga

SEQ ID NO: 1448359 - DNA, 25 bp, Homo sapien
cttcatctaattctgggccgccata

SEQ ID NO: 1448360 - DNA, 25 bp, Homo sapien
gcaaggctttctgcgtaatcatatt

SEQ ID NO: 1448361 - DNA, 25 bp, Homo sapien
gggcagcggagccttaatttcactt

SEQ ID NO: 1448362 - DNA, 25 bp, Homo sapien
ctgggcagcggagccttaatttcac

SEQ ID NO: 1448363 - DNA, 25 bp, Homo sapien
tcctgaagaatcagtttatcttgag

SEQ ID NO: 1448364 - DNA, 25 bp, Homo sapien
tttatcttgagtggctgtaaaggaa

SEQ ID NO: 1448365 - DNA, 25 bp, Homo sapien
tcatcacgttttggcatggatagtt

SEQ ID NO: 1448366 - DNA, 25 bp, Homo sapien
taagtcatcacgttttggcatggat

SEQ ID NO: 1448367 - DNA, 25 bp, Homo sapien
agtcatcacgttttggcatggatag

SEQ ID NO: 1448368 - DNA, 25 bp, Homo sapien
aagcaaggtggtaagtcatcacgtt

SEQ ID NO: 1448369 - DNA, 25 bp, Homo sapien
aagaaaagctatgtgctcccttttt

SEQ ID NO: 1448370 - DNA, 25 bp, Homo sapien
agaaaagctatgtgctccctttttt

SEQ ID NO: 1448371 - DNA, 25 bp, Homo sapien
taagaaaagctatgtgctccctttt

SEQ ID NO: 1448372 - DNA, 25 bp, Homo sapien
ctttaagaagtcctgttcccaggag

SEQ ID NO: 1448373 - DNA, 25 bp, Homo sapien
ttaagaagtcctgttcccaggaggc

SEQ ID NO: 1448374 - DNA, 25 bp, Homo sapien
tagaaacttattctcaggagaaaca

SEQ ID NO: 1448375 - DNA, 25 bp, Homo sapien
acatgcatatgtatgagattattct

SEQ ID NO: 1448376 - DNA, 25 bp, Homo sapien
aattggtgtcatctgggtattgagg

SEQ ID NO: 1448377 - DNA, 25 bp, Homo sapien
tgcatatgtatgagattattctaat

SEQ ID NO: 1448378 - DNA, 25 bp, Homo sapien
gatttcaggaggcaaattggaagct

SEQ ID NO: 1448379 - DNA, 25 bp, Homo sapien
tcagattcctcacccccggaggtgt

SEQ ID NO: 1448380 - DNA, 25 bp, Homo sapien
gagcatgaaaactcgccgactcagc

SEQ ID NO: 1448381 - DNA, 25 bp, Homo sapien
cctcatcccaaatgagcatgaaaac

SEQ ID NO: 1448382 - DNA, 25 bp, Homo sapien
gagatgatcatttctttagtctaga

SEQ ID NO: 1448383 - DNA, 25 bp, Homo sapien
ccttctgcttgagctatcagaaatg

SEQ ID NO: 1448384 - DNA, 25 bp, Homo sapien
ttgtaacatttacctgagatgatca

SEQ ID NO: 1448385 - DNA, 25 bp, Homo sapien
ctgaattatctgtatgtgtcctgga

SEQ ID NO: 1448386 - DNA, 25 bp, Homo sapien
tacactgaattgtactgtgccaggg

SEQ ID NO: 1448387 - DNA, 25 bp, Homo sapien
taagctttaaagagggctgagcagc

SEQ ID NO: 1448388 - DNA, 25 bp, Homo sapien
gacagctgctaccattaaggaccaa

SEQ ID NO: 1448389 - DNA, 25 bp, Homo sapien
gatagcccttctccaaagcagaggt

SEQ ID NO: 1448390 - DNA, 25 bp, Homo sapien
tagagtctgaatctatggcatggta

SEQ ID NO: 1448391 - DNA, 25 bp, Homo sapien
atggcatggtaaagaataatcacag

SEQ ID NO: 1448392 - DNA, 25 bp, Homo sapien
taaaatgttgtagagtctgaatcta

SEQ ID NO: 1448393 - DNA, 25 bp, Homo sapien
ctatggcatggtaaagaataatcac

SEQ ID NO: 1448394 - DNA, 25 bp, Homo sapien
ttgccacctgaacagtaactctcca

SEQ ID NO: 1448395 - DNA, 25 bp, Homo sapien
cacctgaacagtaactctccacgaa

SEQ ID NO: 1448396 - DNA, 25 bp, Homo sapien
acctgaacagtaactctccacgaaa

SEQ ID NO: 1448397 - DNA, 25 bp, Homo sapien
tcagttgccacctgaacagtaactc

SEQ ID NO: 1448398 - DNA, 25 bp, Homo sapien
gggcatttcccaggagccgcccatg

SEQ ID NO: 1448399 - DNA, 25 bp, Homo sapien
cagcgcagacgcctcagtttggcct

SEQ ID NO: 1448400 - DNA, 25 bp, Homo sapien
gaaacgtgacttcatggctagaggg

SEQ ID NO: 1448401 - DNA, 25 bp, Homo sapien
tcggaggccatgcagcgaagaaacg

SEQ ID NO: 1448402 - DNA, 25 bp, Homo sapien
ttctttattccggaagttgctctca

SEQ ID NO: 1448403 - DNA, 25 bp, Homo sapien
tcagaggcagcgtgcgggtgtgctc

SEQ ID NO: 1448404 - DNA, 25 bp, Homo sapien
cgtgcgggtgtgctctttgtgaaat

SEQ ID NO: 1448405 - DNA, 25 bp, Homo sapien
ttccggaagttgctctcagaggcag

SEQ ID NO: 1448406 - DNA, 25 bp, Homo sapien
tcagttcggcagtggacatcagctc

SEQ ID NO: 1448407 - DNA, 25 bp, Homo sapien
tactgactggctataaactgggtcc

SEQ ID NO: 1448408 - DNA, 25 bp, Homo sapien
tgagatagcgtcagttcccagaggt

SEQ ID NO: 1448409 - DNA, 25 bp, Homo sapien
gctcagagtcgtcaagttcagttca

SEQ ID NO: 1448410 - DNA, 25 bp, Homo sapien
gcttcccatctcgcgtctctatttt

SEQ ID NO: 1448411 - DNA, 25 bp, Homo sapien
agcttcccatctcgcgtctctattt

SEQ ID NO: 1448412 - DNA, 25 bp, Homo sapien
cagcttcatgtaggtggcaacctct

SEQ ID NO: 1448413 - DNA, 25 bp, Homo sapien
agcctgttcttgttgccctccagca

SEQ ID NO: 1448414 - DNA, 25 bp, Homo sapien
gtaggtggcaacctctgtgtccagg

SEQ ID NO: 1448415 - DNA, 25 bp, Homo sapien
tcatgtaggtggcaacctctgtgtc

SEQ ID NO: 1448416 - DNA, 25 bp, Homo sapien
ttgatgaagacaaatgcattgtcca

SEQ ID NO: 1448417 - DNA, 25 bp, Homo sapien
catgtaagctttgtccgtaaacttc

SEQ ID NO: 1448418 - DNA, 25 bp, Homo sapien
acattcttcatgtaagctttgtccg

SEQ ID NO: 1448419 - DNA, 25 bp, Homo sapien
gctttgtccgtaaacttcttgatga

SEQ ID NO: 1448420 - DNA, 25 bp, Homo sapien
tgtccatgttgctctgtgccgtctt

SEQ ID NO: 1448421 - DNA, 25 bp, Homo sapien
tccatgttgctctgtgccgtcttct

SEQ ID NO: 1448422 - DNA, 25 bp, Homo sapien
gttgtccatgttgctctgtgccgtc

SEQ ID NO: 1448423 - DNA, 25 bp, Homo sapien
ccatgttgctctgtgccgtcttctg

SEQ ID NO: 1448424 - DNA, 25 bp, Homo sapien
acgttgatgccatttcaatagtgac

SEQ ID NO: 1448425 - DNA, 25 bp, Homo sapien
acttcagtggaatgggcagtttcac

SEQ ID NO: 1448426 - DNA, 25 bp, Homo sapien
agtggaatgggcagtttcacgttga

SEQ ID NO: 1448427 - DNA, 25 bp, Homo sapien
ttcacgttgatgccatttcaatagt

SEQ ID NO: 1448428 - DNA, 25 bp, Homo sapien
tcctttagaacacgatccaacagcg

SEQ ID NO: 1448429 - DNA, 25 bp, Homo sapien
cttcaactttcactctaactggttg

SEQ ID NO: 1448430 - DNA, 25 bp, Homo sapien
ttatcttcaactttcactctaactg

SEQ ID NO: 1448431 - DNA, 25 bp, Homo sapien
tcagcctacgtactttccaagaatg

SEQ ID NO: 1448432 - DNA, 25 bp, Homo sapien
tctaaacgcttgtccttcctgccat

SEQ ID NO: 1448433 - DNA, 25 bp, Homo sapien
actttctaaacgcttgtccttcctg

SEQ ID NO: 1448434 - DNA, 25 bp, Homo sapien
taaacgcttgtccttcctgccatga

SEQ ID NO: 1448435 - DNA, 25 bp, Homo sapien
tttctaaacgcttgtccttcctgcc

SEQ ID NO: 1448436 - DNA, 25 bp, Homo sapien
caagctatgggatctatatcttttc

SEQ ID NO: 1448437 - DNA, 25 bp, Homo sapien
tcaagctatgggatctatatctttt

SEQ ID NO: 1448438 - DNA, 25 bp, Homo sapien
tgagactttgcgcacttgaagttta

SEQ ID NO: 1448439 - DNA, 25 bp, Homo sapien
gagactttgcgcacttgaagtttaa

SEQ ID NO: 1448440 - DNA, 25 bp, Homo sapien
aatgagatgtcatcaatgctggttt

SEQ ID NO: 1448441 - DNA, 25 bp, Homo sapien
agactttgcgcacttgaagtttaat

SEQ ID NO: 1448442 - DNA, 25 bp, Homo sapien
aggcaggaggggaagtcatgcagag

SEQ ID NO: 1448443 - DNA, 25 bp, Homo sapien
gaggggaagtcatgcagagggggct

SEQ ID NO: 1448444 - DNA, 25 bp, Homo sapien
gggctgctgcaggaaatatgcccac

SEQ ID NO: 1448445 - DNA, 25 bp, Homo sapien
cagtcaggcaggaggggaagtcatg

SEQ ID NO: 1448446 - DNA, 25 bp, Homo sapien
tcttgtgtccccatacccatcagaa

SEQ ID NO: 1448447 - DNA, 25 bp, Homo sapien
tccccatacccatcagaacctacat

SEQ ID NO: 1448448 - DNA, 25 bp, Homo sapien
cccatacccatcagaacctacatct

SEQ ID NO: 1448449 - DNA, 25 bp, Homo sapien
catcttgtgtccccatacccatcag

SEQ ID NO: 1448450 - DNA, 25 bp, Homo sapien
gtggtggtattagagtggtggtcat

SEQ ID NO: 1448451 - DNA, 25 bp, Homo sapien
ggtggtggtattagagtggtggtca

SEQ ID NO: 1448452 - DNA, 25 bp, Homo sapien
tggtggtggtattagagtggtggtc

SEQ ID NO: 1448453 - DNA, 25 bp, Homo sapien
gtttgcacacggcagagtagaaatt

SEQ ID NO: 1448454 - DNA, 25 bp, Homo sapien
tatctgtggtaacagtcagttccat

SEQ ID NO: 1448455 - DNA, 25 bp, Homo sapien
gaatccaagtactgtgtgtgcgccc

SEQ ID NO: 1448456 - DNA, 25 bp, Homo sapien
gttggttgcatagtcagcttcagag

SEQ ID NO: 1448457 - DNA, 25 bp, Homo sapien
atctaacagcatcgcgttgctccgg

SEQ ID NO: 1448458 - DNA, 25 bp, Homo sapien
gaaggtgggtgttcctgccagccca

SEQ ID NO: 1448459 - DNA, 25 bp, Homo sapien
ctcctatatcctgccttgaataggg

SEQ ID NO: 1448460 - DNA, 25 bp, Homo sapien
tttaataaatgggacagatgtatct

SEQ ID NO: 1448461 - DNA, 25 bp, Homo sapien
aatgggacagatgtatctggcacca

SEQ ID NO: 1448462 - DNA, 25 bp, Homo sapien
ttcctcctatatcctgccttgaata

SEQ ID NO: 1448463 - DNA, 25 bp, Homo sapien
cttgagccatggcatccacattgtg

SEQ ID NO: 1448464 - DNA, 25 bp, Homo sapien
ttgagccatggcatccacattgtga

SEQ ID NO: 1448465 - DNA, 25 bp, Homo sapien
tattgtgtcctaaaccaatgccggc

SEQ ID NO: 1448466 - DNA, 25 bp, Homo sapien
cataggtttgtctgctcttgcccca

SEQ ID NO: 1448467 - DNA, 25 bp, Homo sapien
tcctgggatcctcggagcacataac

SEQ ID NO: 1448468 - DNA, 25 bp, Homo sapien
ggctttccccagatgaagggccctg

SEQ ID NO: 1448469 - DNA, 25 bp, Homo sapien
aggcactgacagcatttcttggctg

SEQ ID NO: 1448470 - DNA, 25 bp, Homo sapien
ggcactgacagcatttcttggctgg

SEQ ID NO: 1448471 - DNA, 25 bp, Homo sapien
gcactgacagcatttcttggctggt

SEQ ID NO: 1448472 - DNA, 25 bp, Homo sapien
tgttgaagtgtctctgccctgccag

SEQ ID NO: 1448473 - DNA, 25 bp, Homo sapien
tccatggttgtctcactgagtgttt

SEQ ID NO: 1448474 - DNA, 25 bp, Homo sapien
ccaggtgttgaaaggctgcgtctcc

SEQ ID NO: 1448475 - DNA, 25 bp, Homo sapien
ttcactgttgcatccctagggtcca

SEQ ID NO: 1448476 - DNA, 25 bp, Homo sapien
agctgccaatcactggaagcccaga

SEQ ID NO: 1448477 - DNA, 25 bp, Homo sapien
tacacgatgttctccttctcagggc

SEQ ID NO: 1448478 - DNA, 25 bp, Homo sapien
gggttggcctgtacctacacgatgt

SEQ ID NO: 1448479 - DNA, 25 bp, Homo sapien
gcattccctatatgtgagtgtctca

SEQ ID NO: 1448480 - DNA, 25 bp, Homo sapien
tcaaggtgggatgccgctgcatcac

SEQ ID NO: 1448481 - DNA, 25 bp, Homo sapien
tcatctcaaggtgggatgccgctgc

SEQ ID NO: 1448482 - DNA, 25 bp, Homo sapien
tctcaaggtgggatgccgctgcatc

SEQ ID NO: 1448483 - DNA, 25 bp, Homo sapien
atctcaaggtgggatgccgctgcat

SEQ ID NO: 1448484 - DNA, 25 bp, Homo sapien
atggactcacaagcccgcgcgatgg

SEQ ID NO: 1448485 - DNA, 25 bp, Homo sapien
ggacaactgcgctccatggactcac

SEQ ID NO: 1448486 - DNA, 25 bp, Homo sapien
gatagttccctggacaactgcgctc

SEQ ID NO: 1448487 - DNA, 25 bp, Homo sapien
cttcctctcatgctgcatcggatag

SEQ ID NO: 1448488 - DNA, 25 bp, Homo sapien
tcatggagtctgtgtatggagactg

SEQ ID NO: 1448489 - DNA, 25 bp, Homo sapien
tcttttagtctcttcaaggatattg

SEQ ID NO: 1448490 - DNA, 25 bp, Homo sapien
gctggcttgttcagtgttgttctga

SEQ ID NO: 1448491 - DNA, 25 bp, Homo sapien
gtctcttcaaggatattgccaacac

SEQ ID NO: 1448492 - DNA, 25 bp, Homo sapien
ggtctcccaaagtccaagacttata

SEQ ID NO: 1448493 - DNA, 25 bp, Homo sapien
tctcccaaagtccaagacttataca

SEQ ID NO: 1448494 - DNA, 25 bp, Homo sapien
gtctcccaaagtccaagacttatac

SEQ ID NO: 1448495 - DNA, 25 bp, Homo sapien
agaaatgaaagtccaagactcttca

SEQ ID NO: 1448496 - DNA, 25 bp, Homo sapien
caaccaggtgcaaacaaacaagcaa

SEQ ID NO: 1448497 - DNA, 25 bp, Homo sapien
caagaaatgaaagtccaagactctt

SEQ ID NO: 1448498 - DNA, 25 bp, Homo sapien
gaaagtccaagactcttcagataat

SEQ ID NO: 1448499 - DNA, 25 bp, Homo sapien
tggagggagaggaagggcgaggccc

SEQ ID NO: 1448500 - DNA, 25 bp, Homo sapien
gagggagaggaagggcgaggcccac

SEQ ID NO: 1448501 - DNA, 25 bp, Homo sapien
ctggagggagaggaagggcgaggcc

SEQ ID NO: 1448502 - DNA, 25 bp, Homo sapien
ggagggagaggaagggcgaggccca

SEQ ID NO: 1448503 - DNA, 25 bp, Homo sapien
ccgcagacccgagccagcctcctgg

SEQ ID NO: 1448504 - DNA, 25 bp, Homo sapien
tcctgggctcgcccacgtgctctgg

SEQ ID NO: 1448505 - DNA, 25 bp, Homo sapien
ctcctgggctcgcccacgtgctctg

SEQ ID NO: 1448506 - DNA, 25 bp, Homo sapien
ctttttgaccgtgaggtgtccatcc

SEQ ID NO: 1448507 - DNA, 25 bp, Homo sapien
ccgtgaggtgtccatccagggcaga

SEQ ID NO: 1448508 - DNA, 25 bp, Homo sapien
accaagctttttgaccgtgaggtgt

SEQ ID NO: 1448509 - DNA, 25 bp, Homo sapien
tttgaccgtgaggtgtccatccagg

SEQ ID NO: 1448510 - DNA, 25 bp, Homo sapien
cctttgctggtgtggcccagtggcc

SEQ ID NO: 1448511 - DNA, 25 bp, Homo sapien
ctgcctttgctggtgtggcccagtg

SEQ ID NO: 1448512 - DNA, 25 bp, Homo sapien
tgctggtgtggcccagtggcccctc

SEQ ID NO: 1448513 - DNA, 25 bp, Homo sapien
gctggtgtggcccagtggcccctct

SEQ ID NO: 1448514 - DNA, 25 bp, Homo sapien
caggtcagcctgaaggcagtgcttg

SEQ ID NO: 1448515 - DNA, 25 bp, Homo sapien
tcaggtcagcctgaaggcagtgctt

SEQ ID NO: 1448516 - DNA, 25 bp, Homo sapien
tcagcctgaaggcagtgcttgcctc

SEQ ID NO: 1448517 - DNA, 25 bp, Homo sapien
ggtcagcctgaaggcagtgcttgcc

SEQ ID NO: 1448518 - DNA, 25 bp, Homo sapien
tccagtcccggcttggaactgaact

SEQ ID NO: 1448519 - DNA, 25 bp, Homo sapien
tcgtaggccctgactcggaatcgag

SEQ ID NO: 1448520 - DNA, 25 bp, Homo sapien
aactgaactgtgtgagcacgggtcc

SEQ ID NO: 1448521 - DNA, 25 bp, Homo sapien
agagctcagcggtcagcctcgtagg

SEQ ID NO: 1448522 - DNA, 25 bp, Homo sapien
ctttccgggaggaccccgagcgctg

SEQ ID NO: 1448523 - DNA, 25 bp, Homo sapien
ggaggaccccgagcgctggagcggc

SEQ ID NO: 1448524 - DNA, 25 bp, Homo sapien
cttggcagccgcctcggtgacagag

SEQ ID NO: 1448525 - DNA, 25 bp, Homo sapien
cagctgcaaagactccgctggcgct

SEQ ID NO: 1448526 - DNA, 25 bp, Homo sapien
gactctctgggaatttccgggcagg

SEQ ID NO: 1448527 - DNA, 25 bp, Homo sapien
tggaggaagccgaagagttttcctg

SEQ ID NO: 1448528 - DNA, 25 bp, Homo sapien
ctctgggaatttccgggcaggacgc

SEQ ID NO: 1448529 - DNA, 25 bp, Homo sapien
ttgctttgactctctgggaatttcc

SEQ ID NO: 1448530 - DNA, 25 bp, Homo sapien
ctccccggctccctgactccgtaat

SEQ ID NO: 1448531 - DNA, 25 bp, Homo sapien
tgactccgtaatctgcgcctcggcg

SEQ ID NO: 1448532 - DNA, 25 bp, Homo sapien
tgcgcctcggcgcagttgcgagtca

SEQ ID NO: 1448533 - DNA, 25 bp, Homo sapien
cgtaatctgcgcctcggcgcagttg

SEQ ID NO: 1448534 - DNA, 25 bp, Homo sapien
tggacttccccgcatgcgaaatggg

SEQ ID NO: 1448535 - DNA, 25 bp, Homo sapien
tggattccagttccccatcgatgag

SEQ ID NO: 1448536 - DNA, 25 bp, Homo sapien
tgagcagcgtgggtttggacttccc

SEQ ID NO: 1448537 - DNA, 25 bp, Homo sapien
tagaaagcgcttcacaagatgctgg

SEQ ID NO: 1448538 - DNA, 25 bp, Homo sapien
acaactgtgtcaacagcagggtgat

SEQ ID NO: 1448539 - DNA, 25 bp, Homo sapien
tcaacaactgtgtcaacagcagggt

SEQ ID NO: 1448540 - DNA, 25 bp, Homo sapien
aatcaacaactgtgtcaacagcagg

SEQ ID NO: 1448541 - DNA, 25 bp, Homo sapien
aaaatcaacaactgtgtcaacagca

SEQ ID NO: 1448542 - DNA, 25 bp, Homo sapien
tgttctgctaagatgagcatctgta

SEQ ID NO: 1448543 - DNA, 25 bp, Homo sapien
catctgtagggcacctttgcaccag

SEQ ID NO: 1448544 - DNA, 25 bp, Homo sapien
taagtgtgtattgagcatggattct

SEQ ID NO: 1448545 - DNA, 25 bp, Homo sapien
tcaaattcgattcagcacgggtgaa

SEQ ID NO: 1448546 - DNA, 25 bp, Homo sapien
cctgggtgctcaggatgatgcctgt

SEQ ID NO: 1448547 - DNA, 25 bp, Homo sapien
accctgggtgctcaggatgatgcct

SEQ ID NO: 1448548 - DNA, 25 bp, Homo sapien
ctttggaccctgggtgctcaggatg

SEQ ID NO: 1448549 - DNA, 25 bp, Homo sapien
ttggaccctgggtgctcaggatgat

SEQ ID NO: 1448550 - DNA, 25 bp, Homo sapien
ctgacaggaagtgaaggcggtggca

SEQ ID NO: 1448551 - DNA, 25 bp, Homo sapien
acaggaagtgaaggcggtggcatgg

SEQ ID NO: 1448552 - DNA, 25 bp, Homo sapien
gcatgggtgtggggggccacccctc

SEQ ID NO: 1448553 - DNA, 25 bp, Homo sapien
aagtgaaggcggtggcatgggtgtg

SEQ ID NO: 1448554 - DNA, 25 bp, Homo sapien
caggcttctatctgtttttcacagc

SEQ ID NO: 1448555 - DNA, 25 bp, Homo sapien
tttcacagcagctataccacttttc

SEQ ID NO: 1448556 - DNA, 25 bp, Homo sapien
ccatcagaaattctctacatccttg

SEQ ID NO: 1448557 - DNA, 25 bp, Homo sapien
cagcagctataccacttttcatttt

SEQ ID NO: 1448558 - DNA, 25 bp, Homo sapien
gtctctgcaagtggcgcaggcaggc

SEQ ID NO: 1448559 - DNA, 25 bp, Homo sapien
tctctgcaagtggcgcaggcaggct

SEQ ID NO: 1448560 - DNA, 25 bp, Homo sapien
cttgacttccattgtgggagcagca

SEQ ID NO: 1448561 - DNA, 25 bp, Homo sapien
caggttgactattacttcccttgca

SEQ ID NO: 1448562 - DNA, 25 bp, Homo sapien
caggagtgagcgaagcttgtagcct

SEQ ID NO: 1448563 - DNA, 25 bp, Homo sapien
ttgcatcatccgtaccagggccaag

SEQ ID NO: 1448564 - DNA, 25 bp, Homo sapien
ggtttccaggagataaacttccatg

SEQ ID NO: 1448565 - DNA, 25 bp, Homo sapien
ttccaggagataaacttccatggct

SEQ ID NO: 1448566 - DNA, 25 bp, Homo sapien
gacagtggggtttccaggagataaa

SEQ ID NO: 1448567 - DNA, 25 bp, Homo sapien
agataaacttccatggctcttggga

SEQ ID NO: 1448568 - DNA, 25 bp, Homo sapien
ttctcctgcctctgcaatgagttgg

SEQ ID NO: 1448569 - DNA, 25 bp, Homo sapien
tctcctgcctctgcaatgagttggg

SEQ ID NO: 1448570 - DNA, 25 bp, Homo sapien
cctgcctctgcaatgagttgggtgc

SEQ ID NO: 1448571 - DNA, 25 bp, Homo sapien
tcctgcctctgcaatgagttgggtg

SEQ ID NO: 1448572 - DNA, 25 bp, Homo sapien
tcacctcctaatctagatgacaatg

SEQ ID NO: 1448573 - DNA, 25 bp, Homo sapien
tactctttgaaaccccactagtgag

SEQ ID NO: 1448574 - DNA, 25 bp, Homo sapien
tcaagtattcactgggctacctaga

SEQ ID NO: 1448575 - DNA, 25 bp, Homo sapien
cagttgttcatcacggctgtgtgcc

SEQ ID NO: 1448576 - DNA, 25 bp, Homo sapien
gccctggtgttctgcaggtgcatgt

SEQ ID NO: 1448577 - DNA, 25 bp, Homo sapien
cctggtgttctgcaggtgcatgtct

SEQ ID NO: 1448578 - DNA, 25 bp, Homo sapien
ggtgttctgcaggtgcatgtcttct

SEQ ID NO: 1448579 - DNA, 25 bp, Homo sapien
aggaagagggtggcgggccctggtg

SEQ ID NO: 1448580 - DNA, 25 bp, Homo sapien
cccagaggataccaactaagggcca

SEQ ID NO: 1448581 - DNA, 25 bp, Homo sapien
tataagggtgatccatggtgcctgg

SEQ ID NO: 1448582 - DNA, 25 bp, Homo sapien
aggtgtcctagtgcagcgctgtcca

SEQ ID NO: 1448583 - DNA, 25 bp, Homo sapien
gagacaggctccctaatataagggt

SEQ ID NO: 1448584 - DNA, 25 bp, Homo sapien
cagtcggttcccacggagccatttt

SEQ ID NO: 1448585 - DNA, 25 bp, Homo sapien
gacaggaggattgatggtgctcccc

SEQ ID NO: 1448586 - DNA, 25 bp, Homo sapien
gatcagcatgggaatgtgcctcggc

SEQ ID NO: 1448587 - DNA, 25 bp, Homo sapien
caacctgatcccacgagggagttgg

SEQ ID NO: 1448588 - DNA, 25 bp, Homo sapien
taattccttcccatacagatggtgg

SEQ ID NO: 1448589 - DNA, 25 bp, Homo sapien
tgttaattccttcccatacagatgg

SEQ ID NO: 1448590 - DNA, 25 bp, Homo sapien
ctgctgttaattccttcccatacag

SEQ ID NO: 1448591 - DNA, 25 bp, Homo sapien
ttcccatacagatggtggtcaggac

SEQ ID NO: 1448592 - DNA, 25 bp, Homo sapien
accagggtgctttttgcaggcaaaa

SEQ ID NO: 1448593 - DNA, 25 bp, Homo sapien
aaagccaaacaaccagagtccacct

SEQ ID NO: 1448594 - DNA, 25 bp, Homo sapien
ccagctccagtggttgccatggcac

SEQ ID NO: 1448595 - DNA, 25 bp, Homo sapien
ctctgctgcccctaagggcactggg

SEQ ID NO: 1448596 - DNA, 25 bp, Homo sapien
ttacaaatgaatcactttctgggcc

SEQ ID NO: 1448597 - DNA, 25 bp, Homo sapien
tacaaatgaatcactttctgggcca

SEQ ID NO: 1448598 - DNA, 25 bp, Homo sapien
tccagataggaagacctcgggtcag

SEQ ID NO: 1448599 - DNA, 25 bp, Homo sapien
taaacacacatataaggcagcccca

SEQ ID NO: 1448600 - DNA, 25 bp, Homo sapien
gagtgtccgggcaaccagtttagtc

SEQ ID NO: 1448601 - DNA, 25 bp, Homo sapien
tgtggatcccagagtgcagaattga

SEQ ID NO: 1448602 - DNA, 25 bp, Homo sapien
tactggttgaatcggatcactgcgt

SEQ ID NO: 1448603 - DNA, 25 bp, Homo sapien
cttgaagtactggttgaatcggatc

SEQ ID NO: 1448604 - DNA, 25 bp, Homo sapien
gaagtactggttgaatcggatcact

SEQ ID NO: 1448605 - DNA, 25 bp, Homo sapien
ctggttgaatcggatcactgcgtac

SEQ ID NO: 1448606 - DNA, 25 bp, Homo sapien
tggacaaccgaaactagacctatta

SEQ ID NO: 1448607 - DNA, 25 bp, Homo sapien
gactagagaaacccttccacaaaca

SEQ ID NO: 1448608 - DNA, 25 bp, Homo sapien
cattgctgtgcaaatgaatatctac

SEQ ID NO: 1448609 - DNA, 25 bp, Homo sapien
tttttcttcttagatcagactagag

SEQ ID NO: 1448610 - DNA, 25 bp, Homo sapien
caaagtcgatggtggagtactggtt

SEQ ID NO: 1448611 - DNA, 25 bp, Homo sapien
tcaaagtcgatggtggagtactggt

SEQ ID NO: 1448612 - DNA, 25 bp, Homo sapien
gtcgatggtggagtactggttctgg

SEQ ID NO: 1448613 - DNA, 25 bp, Homo sapien
aagtcgatggtggagtactggttct

SEQ ID NO: 1448614 - DNA, 25 bp, Homo sapien
atgcctgtttccgactctacagcac

SEQ ID NO: 1448615 - DNA, 25 bp, Homo sapien
tgtttccgactctacagcactggag

SEQ ID NO: 1448616 - DNA, 25 bp, Homo sapien
cccatgcctgtttccgactctacag

SEQ ID NO: 1448617 - DNA, 25 bp, Homo sapien
gcctgtttccgactctacagcactg

SEQ ID NO: 1448618 - DNA, 25 bp, Homo sapien
gccatccccttttgtgcctgcaggt

SEQ ID NO: 1448619 - DNA, 25 bp, Homo sapien
tgcaggtagtagtgcagccactgca

SEQ ID NO: 1448620 - DNA, 25 bp, Homo sapien
ttgttgacttgcacgtagagccttt

SEQ ID NO: 1448621 - DNA, 25 bp, Homo sapien
cgcgccgggtacaggcagtaatcca

SEQ ID NO: 1448622 - DNA, 25 bp, Homo sapien
agttggcctgggcatgcctctctat

SEQ ID NO: 1448623 - DNA, 25 bp, Homo sapien
gaacactttactgtgctagtctggg

SEQ ID NO: 1448624 - DNA, 25 bp, Homo sapien
catgtgagttgcctcctcggttcca

SEQ ID NO: 1448625 - DNA, 25 bp, Homo sapien
ggttccatctaattaagccctcaag

SEQ ID NO: 1448626 - DNA, 25 bp, Homo sapien
caaaagcttggtagttgtagccagc

SEQ ID NO: 1448627 - DNA, 25 bp, Homo sapien
ctgcaaactcattgaaatggttgcc

SEQ ID NO: 1448628 - DNA, 25 bp, Homo sapien
cagcatattcatagtcaatgaaccg

SEQ ID NO: 1448629 - DNA, 25 bp, Homo sapien
tcatagtcaatgaaccgcacgtgac

SEQ ID NO: 1448630 - DNA, 25 bp, Homo sapien
cactgagactggcccttggcacaga

SEQ ID NO: 1448631 - DNA, 25 bp, Homo sapien
actgagactggcccttggcacagac

SEQ ID NO: 1448632 - DNA, 25 bp, Homo sapien
gccactgagactggcccttggcaca

SEQ ID NO: 1448633 - DNA, 25 bp, Homo sapien
gagccactgagactggcccttggca

SEQ ID NO: 1448634 - DNA, 25 bp, Homo sapien
tgtccaagtgccagccggaagaaca

SEQ ID NO: 1448635 - DNA, 25 bp, Homo sapien
ccagccggaagaacagctccgtgaa

SEQ ID NO: 1448636 - DNA, 25 bp, Homo sapien
gcttgtccaagtgccagccggaaga

SEQ ID NO: 1448637 - DNA, 25 bp, Homo sapien
aagtgccagccggaagaacagctcc

SEQ ID NO: 1448638 - DNA, 25 bp, Homo sapien
gatgctgtcatagatgatattcttg

SEQ ID NO: 1448639 - DNA, 25 bp, Homo sapien
cttgcagagcaggtcattgtgacaa

SEQ ID NO: 1448640 - DNA, 25 bp, Homo sapien
gtcattgtgacaaaacaccacaggg

SEQ ID NO: 1448641 - DNA, 25 bp, Homo sapien
agctcccgttccaacacctctacct

SEQ ID NO: 1448642 - DNA, 25 bp, Homo sapien
taaaatggcactgaggcgtcctgtc

SEQ ID NO: 1448643 - DNA, 25 bp, Homo sapien
tcaagagccctgaatctgagcctca

SEQ ID NO: 1448644 - DNA, 25 bp, Homo sapien
tccagactaagaacaagggcaacag

SEQ ID NO: 1448645 - DNA, 25 bp, Homo sapien
ctaggaagctgataaagacatgggc

SEQ ID NO: 1448646 - DNA, 25 bp, Homo sapien
ctctttcaaggctgtgggatcggca

SEQ ID NO: 1448647 - DNA, 25 bp, Homo sapien
gacaggcaagagtactttctcccca

SEQ ID NO: 1448648 - DNA, 25 bp, Homo sapien
cacgcagatggttactgtgggaaca

SEQ ID NO: 1448649 - DNA, 25 bp, Homo sapien
ggatcggcagaagagtaaccaccac

SEQ ID NO: 1448650 - DNA, 25 bp, Homo sapien
tcgtcactcaggagcaaaccctgct

SEQ ID NO: 1448651 - DNA, 25 bp, Homo sapien
gctccaggtgcttatctcgtctaaa

SEQ ID NO: 1448652 - DNA, 25 bp, Homo sapien
tcaggcagcttagggcatggatcat

SEQ ID NO: 1448653 - DNA, 25 bp, Homo sapien
catgggcatgtcctgtgtacctaga

SEQ ID NO: 1448654 - DNA, 25 bp, Homo sapien
ctgccgttggcgtggatagtatgaa

SEQ ID NO: 1448655 - DNA, 25 bp, Homo sapien
gcgtggatagtatgaatctttgcca

SEQ ID NO: 1448656 - DNA, 25 bp, Homo sapien
ttgtgcatcttgtgccagaggatgg

SEQ ID NO: 1448657 - DNA, 25 bp, Homo sapien
tcttcacaagcgtgaaataattgtg

SEQ ID NO: 1448658 - DNA, 25 bp, Homo sapien
tcagtgctgggacattgccttcccc

SEQ ID NO: 1448659 - DNA, 25 bp, Homo sapien
tagagcatcagtgctgggacattgc

SEQ ID NO: 1448660 - DNA, 25 bp, Homo sapien
catcagtgctgggacattgccttcc

SEQ ID NO: 1448661 - DNA, 25 bp, Homo sapien
aagagtagagcatcagtgctgggac

SEQ ID NO: 1448662 - DNA, 25 bp, Homo sapien
cagggcacttgccagagggccaagg

SEQ ID NO: 1448663 - DNA, 25 bp, Homo sapien
tgggatgattgcaagtcccttagga

SEQ ID NO: 1448664 - DNA, 25 bp, Homo sapien
ggatgggatgattgcaagtccctta

SEQ ID NO: 1448665 - DNA, 25 bp, Homo sapien
ccaaggatgggatgattgcaagtcc

SEQ ID NO: 1448666 - DNA, 25 bp, Homo sapien
agaaggaaggtctcagcagaagaga

SEQ ID NO: 1448667 - DNA, 25 bp, Homo sapien
ctgcagaaggaaggtctcagcagaa

SEQ ID NO: 1448668 - DNA, 25 bp, Homo sapien
gagaggagaatgaattaagacctta

SEQ ID NO: 1448669 - DNA, 25 bp, Homo sapien
gcagaaggaaggtctcagcagaaga

SEQ ID NO: 1448670 - DNA, 25 bp, Homo sapien
tgataaagaccccatcgcccgaggc

SEQ ID NO: 1448671 - DNA, 25 bp, Homo sapien
gagggccttgataaagaccccatcg

SEQ ID NO: 1448672 - DNA, 25 bp, Homo sapien
gggccttgataaagaccccatcgcc

SEQ ID NO: 1448673 - DNA, 25 bp, Homo sapien
aggagggccttgataaagaccccat

SEQ ID NO: 1448674 - DNA, 25 bp, Homo sapien
ttcttcttcttatggaacctaaatc

SEQ ID NO: 1448675 - DNA, 25 bp, Homo sapien
ctcctacacctatcccaatttcggg

SEQ ID NO: 1448676 - DNA, 25 bp, Homo sapien
tcttcttcttatggaacctaaatcc

SEQ ID NO: 1448677 - DNA, 25 bp, Homo sapien
tacacctatcccaatttcgggctct

SEQ ID NO: 1448678 - DNA, 25 bp, Homo sapien
ccacatagcaggccaccagcttgtt

SEQ ID NO: 1448679 - DNA, 25 bp, Homo sapien
gggctcacggatgtgctcaggctcc

SEQ ID NO: 1448680 - DNA, 25 bp, Homo sapien
gctggaagtttctgacctcattctc

SEQ ID NO: 1448681 - DNA, 25 bp, Homo sapien
tgcatgtactcatagcacagcccat

SEQ ID NO: 1448682 - DNA, 25 bp, Homo sapien
ccagcaggaggtgctcatttgaatg

SEQ ID NO: 1448683 - DNA, 25 bp, Homo sapien
gaggtgctcatttgaatgccgagca

SEQ ID NO: 1448684 - DNA, 25 bp, Homo sapien
atttgaatgccgagcacaaccaccc

SEQ ID NO: 1448685 - DNA, 25 bp, Homo sapien
gctcatttgaatgccgagcacaacc

SEQ ID NO: 1448686 - DNA, 25 bp, Homo sapien
ctgtccccaaccttgggagtctcca

SEQ ID NO: 1448687 - DNA, 25 bp, Homo sapien
gcttgggtttagctcccacacactc

SEQ ID NO: 1448688 - DNA, 25 bp, Homo sapien
cttgggtttagctcccacacactcc

SEQ ID NO: 1448689 - DNA, 25 bp, Homo sapien
tgcgggcaaggcgtgtgcctcctca

SEQ ID NO: 1448690 - DNA, 25 bp, Homo sapien
tgctcgggtttccaatgcggccgca

SEQ ID NO: 1448691 - DNA, 25 bp, Homo sapien
tgtcgtccgggtccacggaaatgcc

SEQ ID NO: 1448692 - DNA, 25 bp, Homo sapien
aaatgccgaagtacgcgacggcggc

SEQ ID NO: 1448693 - DNA, 25 bp, Homo sapien
attgtgacatcacgggcggtggccc

SEQ ID NO: 1448694 - DNA, 25 bp, Homo sapien
aagtccatgactcaggcgcgagctg

SEQ ID NO: 1448695 - DNA, 25 bp, Homo sapien
gcggcccgccgcgattgtgacatca

SEQ ID NO: 1448696 - DNA, 25 bp, Homo sapien
gagctgcccgcttcgatcgccggct

SEQ ID NO: 1448697 - DNA, 25 bp, Homo sapien
cggaccccgggaaatggctctgcag

SEQ ID NO: 1448698 - DNA, 25 bp, Homo sapien
ggaatagagagatccgctgctccca

SEQ ID NO: 1448699 - DNA, 25 bp, Homo sapien
gctgctcccacgacgtcagcttggg

SEQ ID NO: 1448700 - DNA, 25 bp, Homo sapien
ctcatcctggaatagagagatccgc

SEQ ID NO: 1448701 - DNA, 25 bp, Homo sapien
gcaggagctccacatccaatgtctc

SEQ ID NO: 1448702 - DNA, 25 bp, Homo sapien
aggggtcagggcacgcatccagcag

SEQ ID NO: 1448703 - DNA, 25 bp, Homo sapien
tttgtcctcaaagcagggaagggct

SEQ ID NO: 1448704 - DNA, 25 bp, Homo sapien
catctgagggcataagcccaggcag

SEQ ID NO: 1448705 - DNA, 25 bp, Homo sapien
tcagcgggccaaggcgaagccaatg

SEQ ID NO: 1448706 - DNA, 25 bp, Homo sapien
aactctgtgtagaactttcggatga

SEQ ID NO: 1448707 - DNA, 25 bp, Homo sapien
caatgcggttgttacgccgatcaaa

SEQ ID NO: 1448708 - DNA, 25 bp, Homo sapien
gttacgccgatcaaactctgtgtag

SEQ ID NO: 1448709 - DNA, 25 bp, Homo sapien
tgggtggcgggatatccatggcgtg

SEQ ID NO: 1448710 - DNA, 25 bp, Homo sapien
tatccatggcgtggatggccagtgt

SEQ ID NO: 1448711 - DNA, 25 bp, Homo sapien
agtgggtggcgggatatccatggcg

SEQ ID NO: 1448712 - DNA, 25 bp, Homo sapien
gggtccagtgggtggcgggatatcc

SEQ ID NO: 1448713 - DNA, 25 bp, Homo sapien
ctgaaatacatagtccgcgctggtg

SEQ ID NO: 1448714 - DNA, 25 bp, Homo sapien
ggccctcgttacacttcacgacata

SEQ ID NO: 1448715 - DNA, 25 bp, Homo sapien
tgtagggccctcgttacacttcacg

SEQ ID NO: 1448716 - DNA, 25 bp, Homo sapien
gctggtgagcgtgtattctttgcct

SEQ ID NO: 1448717 - DNA, 25 bp, Homo sapien
catgagcttctctatggagctggta

SEQ ID NO: 1448718 - DNA, 25 bp, Homo sapien
accggtgtctaccaatgccaggcag

SEQ ID NO: 1448719 - DNA, 25 bp, Homo sapien
ctggtagaacctgagatgtaggatg

SEQ ID NO: 1448720 - DNA, 25 bp, Homo sapien
ttcacagagcaaggtggatgacccc

SEQ ID NO: 1448721 - DNA, 25 bp, Homo sapien
gatgaggttgatatagtggaaattc

SEQ ID NO: 1448722 - DNA, 25 bp, Homo sapien
cagtcttgatgaggttgatatagtg

SEQ ID NO: 1448723 - DNA, 25 bp, Homo sapien
gtcgctgcctcccagcacaatctgt

SEQ ID NO: 1448724 - DNA, 25 bp, Homo sapien
tggaaattcccttcgtaatgctggg

SEQ ID NO: 1448725 - DNA, 25 bp, Homo sapien
ggtaaggcgggcatctccgtgacct

SEQ ID NO: 1448726 - DNA, 25 bp, Homo sapien
tcctcttttagcaccccttgggaga

SEQ ID NO: 1448727 - DNA, 25 bp, Homo sapien
caaactcggccagcatgaagggtaa

SEQ ID NO: 1448728 - DNA, 25 bp, Homo sapien
gggtgaccctgccaatggcctgttc

SEQ ID NO: 1448729 - DNA, 25 bp, Homo sapien
atgtggcagagtagggtgttcctca

SEQ ID NO: 1448730 - DNA, 25 bp, Homo sapien
ggtgagcccgtagcccaggcttgct

SEQ ID NO: 1448731 - DNA, 25 bp, Homo sapien
gctccaagtgggctgcagtgtacct

SEQ ID NO: 1448732 - DNA, 25 bp, Homo sapien
ccataggtactgctgctttgcagca

SEQ ID NO: 1448733 - DNA, 25 bp, Homo sapien
gactgtccctgttgaatagcggagg

SEQ ID NO: 1448734 - DNA, 25 bp, Homo sapien
ctgttccattgtgcttgtagctgga

SEQ ID NO: 1448735 - DNA, 25 bp, Homo sapien
cttgtagctggaggaatccgaagca

SEQ ID NO: 1448736 - DNA, 25 bp, Homo sapien
gaagcatcgaagagcttgtgataca

SEQ ID NO: 1448737 - DNA, 25 bp, Homo sapien
gtcaaagacgactttgaaggtctgg

SEQ ID NO: 1448738 - DNA, 25 bp, Homo sapien
gaggagggcacccaaacattggacg

SEQ ID NO: 1448739 - DNA, 25 bp, Homo sapien
ggtgccgatgccaatctcgccatag

SEQ ID NO: 1448740 - DNA, 25 bp, Homo sapien
tgccaatctcgccatagtactgggt

SEQ ID NO: 1448741 - DNA, 25 bp, Homo sapien
tgaggatcacggaggaggtggtgtt

SEQ ID NO: 1448742 - DNA, 25 bp, Homo sapien
gtccatgtagttggtgaggatcacg

SEQ ID NO: 1448743 - DNA, 25 bp, Homo sapien
gttggtgaggatcacggaggaggtg

SEQ ID NO: 1448744 - DNA, 25 bp, Homo sapien
ccatgtagttggtgaggatcacgga

SEQ ID NO: 1448745 - DNA, 25 bp, Homo sapien
ttcaggctttctcggattgagggca

SEQ ID NO: 1448746 - DNA, 25 bp, Homo sapien
acctcgttccttcaggctttctcgg

SEQ ID NO: 1448747 - DNA, 25 bp, Homo sapien
tccttcaggctttctcggattgagg

SEQ ID NO: 1448748 - DNA, 25 bp, Homo sapien
tggccatgtccacacctcgttcctt

SEQ ID NO: 1448749 - DNA, 25 bp, Homo sapien
tcacagcccacactgtacagcttgt

SEQ ID NO: 1448750 - DNA, 25 bp, Homo sapien
ttgtggaactggtgccgtacggtgg

SEQ ID NO: 1448751 - DNA, 25 bp, Homo sapien
cccacactgtacagcttgtggaact

SEQ ID NO: 1448752 - DNA, 25 bp, Homo sapien
tgccgtacggtggtgaagacagtgg

SEQ ID NO: 1448753 - DNA, 25 bp, Homo sapien
tctatgccttatctcctaaaatccc

SEQ ID NO: 1448754 - DNA, 25 bp, Homo sapien
tttctatgccttatctcctaaaatc

SEQ ID NO: 1448755 - DNA, 25 bp, Homo sapien
ctttctatgccttatctcctaaaat

SEQ ID NO: 1448756 - DNA, 25 bp, Homo sapien
aacgtgcccagctttctatgcctta

SEQ ID NO: 1448757 - DNA, 25 bp, Homo sapien
gtgtctgtcgggagaccaaaggtac

SEQ ID NO: 1448758 - DNA, 25 bp, Homo sapien
ggagaccaaaggtacaggagcccca

SEQ ID NO: 1448759 - DNA, 25 bp, Homo sapien
tcgggagaccaaaggtacaggagcc

SEQ ID NO: 1448760 - DNA, 25 bp, Homo sapien
tggtggtgtctgtcgggagaccaaa

SEQ ID NO: 1448761 - DNA, 25 bp, Homo sapien
gctctctctgagatccactgaggtt

SEQ ID NO: 1448762 - DNA, 25 bp, Homo sapien
gggctctctctgagatccactgagg

SEQ ID NO: 1448763 - DNA, 25 bp, Homo sapien
ggggctctctctgagatccactgag

SEQ ID NO: 1448764 - DNA, 25 bp, Homo sapien
tctctctgagatccactgaggttct

SEQ ID NO: 1448765 - DNA, 25 bp, Homo sapien
ggtgtgtgcttggatttggttacat

SEQ ID NO: 1448766 - DNA, 25 bp, Homo sapien
ctctcagcttacttgctgttgtgtg

SEQ ID NO: 1448767 - DNA, 25 bp, Homo sapien
tgtgtgcttggatttggttacataa

SEQ ID NO: 1448768 - DNA, 25 bp, Homo sapien
tggtgtgtgcttggatttggttaca

SEQ ID NO: 1448769 - DNA, 25 bp, Homo sapien
tggaaggggaacagcctcatcagag

SEQ ID NO: 1448770 - DNA, 25 bp, Homo sapien
cagagctgcttgcaaaaatgagccg

SEQ ID NO: 1448771 - DNA, 25 bp, Homo sapien
aaatgagccgcagaccacacgtcag

SEQ ID NO: 1448772 - DNA, 25 bp, Homo sapien
gaaatcagctaaccatccattgagg

SEQ ID NO: 1448773 - DNA, 25 bp, Homo sapien
tattgcctcgggttggaagctccag

SEQ ID NO: 1448774 - DNA, 25 bp, Homo sapien
tcttttattgcctcgggttggaagc

SEQ ID NO: 1448775 - DNA, 25 bp, Homo sapien
gccccgcatgctctgactcctttgg

SEQ ID NO: 1448776 - DNA, 25 bp, Homo sapien
catgctctgactcctttggggtctg

SEQ ID NO: 1448777 - DNA, 25 bp, Homo sapien
ccgcttgccgaagcgcaggccgaag

SEQ ID NO: 1448778 - DNA, 25 bp, Homo sapien
gttccagttgtagttcggcaggtcc

SEQ ID NO: 1448779 - DNA, 25 bp, Homo sapien
cgaagcgcaggccgaaggagttcca

SEQ ID NO: 1448780 - DNA, 25 bp, Homo sapien
agcgcttctgccgtggttccctggt

SEQ ID NO: 1448781 - DNA, 25 bp, Homo sapien
gaggtcccccgacggctcagcctgg

SEQ ID NO: 1448782 - DNA, 25 bp, Homo sapien
cgaggtcccccgacggctcagcctg

SEQ ID NO: 1448783 - DNA, 25 bp, Homo sapien
agcgaggtcccccgacggctcagcc

SEQ ID NO: 1448784 - DNA, 25 bp, Homo sapien
acagcgaggtcccccgacggctcag

SEQ ID NO: 1448785 - DNA, 25 bp, Homo sapien
tctcggtgcacggcaggctctgctc

SEQ ID NO: 1448786 - DNA, 25 bp, Homo sapien
tcctctcggtgcacggcaggctctg

SEQ ID NO: 1448787 - DNA, 25 bp, Homo sapien
cttcctctcggtgcacggcaggctc

SEQ ID NO: 1448788 - DNA, 25 bp, Homo sapien
ctctcggtgcacggcaggctctgct

SEQ ID NO: 1448789 - DNA, 25 bp, Homo sapien
tcttctcaacatcggcacagagagg

SEQ ID NO: 1448790 - DNA, 25 bp, Homo sapien
cagtcgactagatggaaaatacggg

SEQ ID NO: 1448791 - DNA, 25 bp, Homo sapien
tgaggtcaccgataaagcaaggttg

SEQ ID NO: 1448792 - DNA, 25 bp, Homo sapien
caaggcatccgtcacttgcagggtt

SEQ ID NO: 1448793 - DNA, 25 bp, Homo sapien
ggccaccttttctaatggctcccca

SEQ ID NO: 1448794 - DNA, 25 bp, Homo sapien
caccttttctaatggctccccaaag

SEQ ID NO: 1448795 - DNA, 25 bp, Homo sapien
tgtgggtctagaattccccacagag

SEQ ID NO: 1448796 - DNA, 25 bp, Homo sapien
tgggtctagaattccccacagaggc

SEQ ID NO: 1448797 - DNA, 25 bp, Homo sapien
aggcaggtcctagaagtgccttgag

SEQ ID NO: 1448798 - DNA, 25 bp, Homo sapien
aagaggcaggtcctagaagtgcctt

SEQ ID NO: 1448799 - DNA, 25 bp, Homo sapien
gaggcaggtcctagaagtgccttga

SEQ ID NO: 1448800 - DNA, 25 bp, Homo sapien
ggcaggtcctagaagtgccttgagg

SEQ ID NO: 1448801 - DNA, 25 bp, Homo sapien
ggtagagggatgagtctaaacaaat

SEQ ID NO: 1448802 - DNA, 25 bp, Homo sapien
gattgagactctttacacagtgtag

SEQ ID NO: 1448803 - DNA, 25 bp, Homo sapien
cacagtgtagttaaagctgaattca

SEQ ID NO: 1448804 - DNA, 25 bp, Homo sapien
gaattcatgctaggtgagggtcatc

SEQ ID NO: 1448805 - DNA, 25 bp, Homo sapien
cggagcctctgaggtgacgagacca

SEQ ID NO: 1448806 - DNA, 25 bp, Homo sapien
tctgaggtgacgagaccacctggct

SEQ ID NO: 1448807 - DNA, 25 bp, Homo sapien
gcctctgaggtgacgagaccacctg

SEQ ID NO: 1448808 - DNA, 25 bp, Homo sapien
ggcagctgggctcccggtctcaaga

SEQ ID NO: 1448809 - DNA, 25 bp, Homo sapien
aaagacgccaactctgagccttaga

SEQ ID NO: 1448810 - DNA, 25 bp, Homo sapien
ggatttgacgtcagttgctcagctc

SEQ ID NO: 1448811 - DNA, 25 bp, Homo sapien
gagtgagggtgtgataccagcccca

SEQ ID NO: 1448812 - DNA, 25 bp, Homo sapien
gcagcctcttgagtcgacttgggga

SEQ ID NO: 1448813 - DNA, 25 bp, Homo sapien
gacttggggatttgacgtcagttgc

SEQ ID NO: 1448814 - DNA, 25 bp, Homo sapien
tcagaccatcgagctagtgccttga

SEQ ID NO: 1448815 - DNA, 25 bp, Homo sapien
cacacaaagggtagagagcagatgc

SEQ ID NO: 1448816 - DNA, 25 bp, Homo sapien
gtgggagccaagaatcattactcca

SEQ ID NO: 1448817 - DNA, 25 bp, Homo sapien
tagagagcagatgcaatatctagtt

SEQ ID NO: 1448818 - DNA, 25 bp, Homo sapien
tattacagagctggccttgagagcc

SEQ ID NO: 1448819 - DNA, 25 bp, Homo sapien
gcgcagatacgagaggggctgtagg

SEQ ID NO: 1448820 - DNA, 25 bp, Homo sapien
caggcgcagatacgagaggggctgt

SEQ ID NO: 1448821 - DNA, 25 bp, Homo sapien
ctgtgtccagctggcggttgtggtg

SEQ ID NO: 1448822 - DNA, 25 bp, Homo sapien
tgtgccaggcgcagatacgagaggg

SEQ ID NO: 1448823 - DNA, 25 bp, Homo sapien
cacactcagctacaactgcgtctgg

SEQ ID NO: 1448824 - DNA, 25 bp, Homo sapien
agctacaactgcgtctggatcccct

SEQ ID NO: 1448825 - DNA, 25 bp, Homo sapien
ctcttgtcaaatggagaaggtgcgg

SEQ ID NO: 1448826 - DNA, 25 bp, Homo sapien
ctccccagggtacgcccgcagggct

SEQ ID NO: 1448827 - DNA, 25 bp, Homo sapien
aggggatgttgcagacattgcccag

SEQ ID NO: 1448828 - DNA, 25 bp, Homo sapien
cgcacccaggaaggggatgttgcag

SEQ ID NO: 1448829 - DNA, 25 bp, Homo sapien
gggccagcgtaggagcacgataacc

SEQ ID NO: 1448830 - DNA, 25 bp, Homo sapien
ccttgagtttgtgccgttggaagaa

SEQ ID NO: 1448831 - DNA, 25 bp, Homo sapien
aggctgaagaatccgtaggtttcca

SEQ ID NO: 1448832 - DNA, 25 bp, Homo sapien
gtaggtttccaggaacatgccgagg

SEQ ID NO: 1448833 - DNA, 25 bp, Homo sapien
aggccaggagcacggaatcaaagta

SEQ ID NO: 1448834 - DNA, 25 bp, Homo sapien
agaagatgccgaaaccggtgatccc

SEQ ID NO: 1448835 - DNA, 25 bp, Homo sapien
gatgaagaagatgccgaaaccggtg

SEQ ID NO: 1448836 - DNA, 25 bp, Homo sapien
aaagtacaggagtgttccaaagagg

SEQ ID NO: 1448837 - DNA, 25 bp, Homo sapien
tgggcaaggaggtggtggaggaaag

SEQ ID NO: 1448838 - DNA, 25 bp, Homo sapien
tgcaatgggcaaggaggtggtggag

SEQ ID NO: 1448839 - DNA, 25 bp, Homo sapien
ctgcaatgggcaaggaggtggtgga

SEQ ID NO: 1448840 - DNA, 25 bp, Homo sapien
cagtggtattaagcgcatctcctga

SEQ ID NO: 1448841 - DNA, 25 bp, Homo sapien
gaattcttcgtcttgcaaagctgaa

SEQ ID NO: 1448842 - DNA, 25 bp, Homo sapien
ggcaacgtgcacataaaatgagact

SEQ ID NO: 1448843 - DNA, 25 bp, Homo sapien
tgaatttttgactactctgggaacc

SEQ ID NO: 1448844 - DNA, 25 bp, Homo sapien
tcaagactagatttactggctgagt

SEQ ID NO: 1448845 - DNA, 25 bp, Homo sapien
aatccagtgctgtaatgctttcccc

SEQ ID NO: 1448846 - DNA, 25 bp, Homo sapien
tcttctgggtagttaatccatcatc

SEQ ID NO: 1448847 - DNA, 25 bp, Homo sapien
tcatggtcttgatgccctcgtcaaa

SEQ ID NO: 1448848 - DNA, 25 bp, Homo sapien
tagtcaagttatccagccagaggtt

SEQ ID NO: 1448849 - DNA, 25 bp, Homo sapien
ggtccccgtgatccagacagattgg

SEQ ID NO: 1448850 - DNA, 25 bp, Homo sapien
gggcagatgcaattccaggactctc

SEQ ID NO: 1448851 - DNA, 25 bp, Homo sapien
tcagtgctcagtgggacacgaaacc

SEQ ID NO: 1448852 - DNA, 25 bp, Homo sapien
gatgtttcctcacgactagcttcag

SEQ ID NO: 1448853 - DNA, 25 bp, Homo sapien
tatgtgactatcctccaaccctcag

SEQ ID NO: 1448854 - DNA, 25 bp, Homo sapien
ttctgtagccatccctccatttggg

SEQ ID NO: 1448855 - DNA, 25 bp, Homo sapien
gacacttttgaagattcaggccact

SEQ ID NO: 1448856 - DNA, 25 bp, Homo sapien
tttttattcgccaggtccatgattc

SEQ ID NO: 1448857 - DNA, 25 bp, Homo sapien
ctctatatttttattcgccaggtcc

SEQ ID NO: 1448858 - DNA, 25 bp, Homo sapien
tatatttttattcgccaggtccatg

SEQ ID NO: 1448859 - DNA, 25 bp, Homo sapien
tattcgccaggtccatgattctcaa

SEQ ID NO: 1448860 - DNA, 25 bp, Homo sapien
tctgccattcggtgatggagatcat

SEQ ID NO: 1448861 - DNA, 25 bp, Homo sapien
gaagcgggcaagtggagcgtggccc

SEQ ID NO: 1448862 - DNA, 25 bp, Homo sapien
aagcgggcaagtggagcgtggccca

SEQ ID NO: 1448863 - DNA, 25 bp, Homo sapien
gtggaagcgggcaagtggagcgtgg

SEQ ID NO: 1448864 - DNA, 25 bp, Homo sapien
cgggtggaagcgggcaagtggagcg

SEQ ID NO: 1448865 - DNA, 25 bp, Homo sapien
gttaagttgcgaaatgagcctgtgg

SEQ ID NO: 1448866 - DNA, 25 bp, Homo sapien
tgtggcaaatcattaactctccctc

SEQ ID NO: 1448867 - DNA, 25 bp, Homo sapien
agctgacccttggttaagttgcgaa

SEQ ID NO: 1448868 - DNA, 25 bp, Homo sapien
cgcacaccacgcaggtgcttctact

SEQ ID NO: 1448869 - DNA, 25 bp, Homo sapien
cgtctgctccgcgaaacttagattg

SEQ ID NO: 1448870 - DNA, 25 bp, Homo sapien
ggtgttctgcggctctcgtctgctc

SEQ ID NO: 1448871 - DNA, 25 bp, Homo sapien
tttcctcgcacctcgcggtgttctg

SEQ ID NO: 1448872 - DNA, 25 bp, Homo sapien
tatgtggaagcattggaatctaggg

SEQ ID NO: 1448873 - DNA, 25 bp, Homo sapien
tgtagacatggattcgtcctttggg

SEQ ID NO: 1448874 - DNA, 25 bp, Homo sapien
tgtgtagacatggattcgtcctttg

SEQ ID NO: 1448875 - DNA, 25 bp, Homo sapien
gtagacatggattcgtcctttgggc

SEQ ID NO: 1448876 - DNA, 25 bp, Homo sapien
gtgtagacatggattcgtcctttgg

SEQ ID NO: 1448877 - DNA, 25 bp, Homo sapien
tcttggtccccacagtaagattcca

SEQ ID NO: 1448878 - DNA, 25 bp, Homo sapien
gagtgtcaatacctgataaccacaa

SEQ ID NO: 1448879 - DNA, 25 bp, Homo sapien
caaattgagaagcactggtaaagcc

SEQ ID NO: 1448880 - DNA, 25 bp, Homo sapien
cacacagagtgtcaatacctgataa

SEQ ID NO: 1448881 - DNA, 25 bp, Homo sapien
tgctggtgttggtagcataccctcg

SEQ ID NO: 1448882 - DNA, 25 bp, Homo sapien
ggtgttggtagcataccctcgcttc

SEQ ID NO: 1448883 - DNA, 25 bp, Homo sapien
tgttggtagcataccctcgcttccc

SEQ ID NO: 1448884 - DNA, 25 bp, Homo sapien
gatgctggtgttggtagcataccct

SEQ ID NO: 1448885 - DNA, 25 bp, Homo sapien
tggggatggaggccaaaaagtgcag

SEQ ID NO: 1448886 - DNA, 25 bp, Homo sapien
ggggatggaggccaaaaagtgcagg

SEQ ID NO: 1448887 - DNA, 25 bp, Homo sapien
ctggggatggaggccaaaaagtgca

SEQ ID NO: 1448888 - DNA, 25 bp, Homo sapien
gaattggttccctcttgccgtagcc

SEQ ID NO: 1448889 - DNA, 25 bp, Homo sapien
caaaggccggagagcaagtgtgcca

SEQ ID NO: 1448890 - DNA, 25 bp, Homo sapien
gatggttgacaaaggctaagcagct

SEQ ID NO: 1448891 - DNA, 25 bp, Homo sapien
tacagctgtttgtcccctgacagag

SEQ ID NO: 1448892 - DNA, 25 bp, Homo sapien
tggcataggctgctgttacgctgtc

SEQ ID NO: 1448893 - DNA, 25 bp, Homo sapien
ctgctgttacgctgtctgctctttc

SEQ ID NO: 1448894 - DNA, 25 bp, Homo sapien
tgaagaggggtagtctagcagccca

SEQ ID NO: 1448895 - DNA, 25 bp, Homo sapien
aggggtagtctagcagcccatctgg

SEQ ID NO: 1448896 - DNA, 25 bp, Homo sapien
tgaagatcggtggaatcctcccagg

SEQ ID NO: 1448897 - DNA, 25 bp, Homo sapien
tcttgggaccgctggaagtcaggct

SEQ ID NO: 1448898 - DNA, 25 bp, Homo sapien
ttggctcaagcagggtggtcagtct

SEQ ID NO: 1448899 - DNA, 25 bp, Homo sapien
gacattaatgaggatggtgctcccc

SEQ ID NO: 1448900 - DNA, 25 bp, Homo sapien
cgccccgtggggattcagacgacag

SEQ ID NO: 1448901 - DNA, 25 bp, Homo sapien
ccgcatggtatagctgctgtcggcg

SEQ ID NO: 1448902 - DNA, 25 bp, Homo sapien
gcatggtatagctgctgtcggcgcc

SEQ ID NO: 1448903 - DNA, 25 bp, Homo sapien
tgtcggcgccccgtggggattcaga

SEQ ID NO: 1448904 - DNA, 25 bp, Homo sapien
ggtgggagggcttggggtggcacat

SEQ ID NO: 1448905 - DNA, 25 bp, Homo sapien
tggaggagccggggaagcaggggag

SEQ ID NO: 1448906 - DNA, 25 bp, Homo sapien
gtgggagggcttggggtggcacatt

SEQ ID NO: 1448907 - DNA, 25 bp, Homo sapien
ggagggcttggggtggcacattgca

SEQ ID NO: 1448908 - DNA, 25 bp, Homo sapien
acactgcatttccaccgagagaggg

SEQ ID NO: 1448909 - DNA, 25 bp, Homo sapien
ctgagcaaatcgagacaagcctgaa

SEQ ID NO: 1448910 - DNA, 25 bp, Homo sapien
gagacctggccgaatctaggctctg

SEQ ID NO: 1448911 - DNA, 25 bp, Homo sapien
cagtcaagggctcggaaacatgttc

SEQ ID NO: 1448912 - DNA, 25 bp, Homo sapien
ctggcagggtggagcgaggcccagc

SEQ ID NO: 1448913 - DNA, 25 bp, Homo sapien
tggcagggtggagcgaggcccagcc

SEQ ID NO: 1448914 - DNA, 25 bp, Homo sapien
gccgatgggcaccacgttctgcata

SEQ ID NO: 1448915 - DNA, 25 bp, Homo sapien
gtcgccagggcgcaggagatttcaa

SEQ ID NO: 1448916 - DNA, 25 bp, Homo sapien
gcgcaggagatttcaatccgcttct

SEQ ID NO: 1448917 - DNA, 25 bp, Homo sapien
tcgccgatgggcaccacgttctgca

SEQ ID NO: 1448918 - DNA, 25 bp, Homo sapien
gacaggatggtccaagtggcttgag

SEQ ID NO: 1448919 - DNA, 25 bp, Homo sapien
gggacaggatggtccaagtggcttg

SEQ ID NO: 1448920 - DNA, 25 bp, Homo sapien
gagggacaggatggtccaagtggct

SEQ ID NO: 1448921 - DNA, 25 bp, Homo sapien
caggatggtccaagtggcttgaggg

SEQ ID NO: 1448922 - DNA, 25 bp, Homo sapien
gtgaatgtgcagtctctggttccca

SEQ ID NO: 1448923 - DNA, 25 bp, Homo sapien
ggccccgtgaatgtgcagtctctgg

SEQ ID NO: 1448924 - DNA, 25 bp, Homo sapien
gccagggccccgtgaatgtgcagtc

SEQ ID NO: 1448925 - DNA, 25 bp, Homo sapien
cccgtgaatgtgcagtctctggttc

SEQ ID NO: 1448926 - DNA, 25 bp, Homo sapien
tgaggactttgtctggagtggagag

SEQ ID NO: 1448927 - DNA, 25 bp, Homo sapien
caggctccaggtcaatgtaccgttc

SEQ ID NO: 1448928 - DNA, 25 bp, Homo sapien
caatgtaccgttcagggatgaggac

SEQ ID NO: 1448929 - DNA, 25 bp, Homo sapien
caatgagtgtcttgatcctctccac

SEQ ID NO: 1448930 - DNA, 25 bp, Homo sapien
gggtgtctcgtaggcatgcccgcca

SEQ ID NO: 1448931 - DNA, 25 bp, Homo sapien
ttgatgtccacgtcataatgctggg

SEQ ID NO: 1448932 - DNA, 25 bp, Homo sapien
tagctccattttgcgaagccgggca

SEQ ID NO: 1448933 - DNA, 25 bp, Homo sapien
tctacctcatggatgctgcggtggc

SEQ ID NO: 1448934 - DNA, 25 bp, Homo sapien
gcctgtgggtagctgggaaggcatt

SEQ ID NO: 1448935 - DNA, 25 bp, Homo sapien
ctgtgggtagctgggaaggcattac

SEQ ID NO: 1448936 - DNA, 25 bp, Homo sapien
cctgtgggtagctgggaaggcatta

SEQ ID NO: 1448937 - DNA, 25 bp, Homo sapien
tgccgccgcattcggtcaatctgct

SEQ ID NO: 1448938 - DNA, 25 bp, Homo sapien
tcatggagccactctggtgccgccg

SEQ ID NO: 1448939 - DNA, 25 bp, Homo sapien
caggaaacacagcactcttggggcg

SEQ ID NO: 1448940 - DNA, 25 bp, Homo sapien
ctggtgccgccgcattcggtcaatc

SEQ ID NO: 1448941 - DNA, 25 bp, Homo sapien
tggcattccttcttaccactgctga

SEQ ID NO: 1448942 - DNA, 25 bp, Homo sapien
gagtccattggtgagcccactggca

SEQ ID NO: 1448943 - DNA, 25 bp, Homo sapien
ctcatcatcagtgggcgattttgtc

SEQ ID NO: 1448944 - DNA, 25 bp, Homo sapien
gattttgtccgagggggcacaacgc

SEQ ID NO: 1448945 - DNA, 25 bp, Homo sapien
atgtctctgggggtgtccaggggca

SEQ ID NO: 1448946 - DNA, 25 bp, Homo sapien
ggtgtccaggggcaatgtctggtgg

SEQ ID NO: 1448947 - DNA, 25 bp, Homo sapien
tctgcctctacctcttgcctggtgg

SEQ ID NO: 1448948 - DNA, 25 bp, Homo sapien
ttgctttgttcatagtttgccttgg

SEQ ID NO: 1448949 - DNA, 25 bp, Homo sapien
agactccagggggacgtaggctttg

SEQ ID NO: 1448950 - DNA, 25 bp, Homo sapien
ccagaagcggctctcgctagggagt

SEQ ID NO: 1448951 - DNA, 25 bp, Homo sapien
tgtctcgccactgcggtgccaggaa

SEQ ID NO: 1448952 - DNA, 25 bp, Homo sapien
ggagggacggctggaggagactcca

SEQ ID NO: 1448953 - DNA, 25 bp, Homo sapien
gattacgcaccctgccacgtgtgta

SEQ ID NO: 1448954 - DNA, 25 bp, Homo sapien
gattgactgactaggaaactgctcc

SEQ ID NO: 1448955 - DNA, 25 bp, Homo sapien
gaacaggcttcactgcaagggagct

SEQ ID NO: 1448956 - DNA, 25 bp, Homo sapien
taagagggcctcatggtaccccatg

SEQ ID NO: 1448957 - DNA, 25 bp, Homo sapien
gctgttggagctgtaggtggctgag

SEQ ID NO: 1448958 - DNA, 25 bp, Homo sapien
ctgagagcccgacaccagtgaaaag

SEQ ID NO: 1448959 - DNA, 25 bp, Homo sapien
ccctgagagcccgacaccagtgaaa

SEQ ID NO: 1448960 - DNA, 25 bp, Homo sapien
gctggccgggctgttggagctgtag

SEQ ID NO: 1448961 - DNA, 25 bp, Homo sapien
gaactgatactgttgtccctgaggt

SEQ ID NO: 1448962 - DNA, 25 bp, Homo sapien
cagggctcaaggaaaactctaaggt

SEQ ID NO: 1448963 - DNA, 25 bp, Homo sapien
ggtcacatgtcacaagtgggcccat

SEQ ID NO: 1448964 - DNA, 25 bp, Homo sapien
ggaagacggtagatggaactgatac

SEQ ID NO: 1448965 - DNA, 25 bp, Homo sapien
cctccatcacgtcctggatcctcca

SEQ ID NO: 1448966 - DNA, 25 bp, Homo sapien
ggatttgccggttcagcacctcatt

SEQ ID NO: 1448967 - DNA, 25 bp, Homo sapien
tcagcccctccatcacgtcctggat

SEQ ID NO: 1448968 - DNA, 25 bp, Homo sapien
ccttttggatttgccggttcagcac

SEQ ID NO: 1448969 - DNA, 25 bp, Homo sapien
ctcatactctatggtgctgtttgtc

SEQ ID NO: 1448970 - DNA, 25 bp, Homo sapien
tcccagaggtcatcgtgcagggcag

SEQ ID NO: 1448971 - DNA, 25 bp, Homo sapien
gggtgtccaaattgagctgctccca

SEQ ID NO: 1448972 - DNA, 25 bp, Homo sapien
ctcagactcgaggtgctcatactct

SEQ ID NO: 1448973 - DNA, 25 bp, Homo sapien
gactggaatgagcagactggctgac

SEQ ID NO: 1448974 - DNA, 25 bp, Homo sapien
tctgcacgggagtactcagctcttg

SEQ ID NO: 1448975 - DNA, 25 bp, Homo sapien
aaataagctcatttcctcggtggag

SEQ ID NO: 1448976 - DNA, 25 bp, Homo sapien
gcagcagaggtgttagcacagccaa

SEQ ID NO: 1448977 - DNA, 25 bp, Homo sapien
ctttttgtgtcgcagcttttctggg

SEQ ID NO: 1448978 - DNA, 25 bp, Homo sapien
tggtgggtccccatcaaggcacttt

SEQ ID NO: 1448979 - DNA, 25 bp, Homo sapien
gcagtgaatcctttttgtgtcgcag

SEQ ID NO: 1448980 - DNA, 25 bp, Homo sapien
cctgagacagctccacgcggatgtt

SEQ ID NO: 1448981 - DNA, 25 bp, Homo sapien
gaggcctgagcccttagaggttcaa

SEQ ID NO: 1448982 - DNA, 25 bp, Homo sapien
gctttgtcatctcagtcaggttgga

SEQ ID NO: 1448983 - DNA, 25 bp, Homo sapien
ccttagaggttcaacaggcagctga

SEQ ID NO: 1448984 - DNA, 25 bp, Homo sapien
ctgggattgaacagcagaggcctga

SEQ ID NO: 1448985 - DNA, 25 bp, Homo sapien
tctgctcacacaattttcccagcag

SEQ ID NO: 1448986 - DNA, 25 bp, Homo sapien
gacctgggagttataggcctggcct

SEQ ID NO: 1448987 - DNA, 25 bp, Homo sapien
ttacctgtagggactaatgccatgc

SEQ ID NO: 1448988 - DNA, 25 bp, Homo sapien
gacctcacctcttaggctggactga

SEQ ID NO: 1448989 - DNA, 25 bp, Homo sapien
ttcaaggcctaactcacatgctgct

SEQ ID NO: 1448990 - DNA, 25 bp, Homo sapien
tgctcgtttaacttgtaggtgtgga

SEQ ID NO: 1448991 - DNA, 25 bp, Homo sapien
tgtggaggctgtcccggaacacttc

SEQ ID NO: 1448992 - DNA, 25 bp, Homo sapien
cccggaacacttctgggtatggagg

SEQ ID NO: 1448993 - DNA, 25 bp, Homo sapien
ctgtgtcttgctcgtttaacttgta

SEQ ID NO: 1448994 - DNA, 25 bp, Homo sapien
tcctaggctgactccggagagatca

SEQ ID NO: 1448995 - DNA, 25 bp, Homo sapien
tatgcagggataggaagctaacatc

SEQ ID NO: 1448996 - DNA, 25 bp, Homo sapien
aattcagaagcgtctccggatccag

SEQ ID NO: 1448997 - DNA, 25 bp, Homo sapien
cctagtagactgaacacctgggctt

SEQ ID NO: 1448998 - DNA, 25 bp, Homo sapien
gagttttccaccatgcggttcacca

SEQ ID NO: 1448999 - DNA, 25 bp, Homo sapien
ttcaccatactgatgagagtctcgc

SEQ ID NO: 1449000 - DNA, 25 bp, Homo sapien
ccaccatgcggttcaccatactgat

SEQ ID NO: 1449001 - DNA, 25 bp, Homo sapien
tcaccatactgatgagagtctcgct

SEQ ID NO: 1449002 - DNA, 25 bp, Homo sapien
tcaagaatccttaggaacatggagg

SEQ ID NO: 1449003 - DNA, 25 bp, Homo sapien
ggctgtgtccctttaactccattgt

SEQ ID NO: 1449004 - DNA, 25 bp, Homo sapien
gaaagggcaggccaaccaatcaacc

SEQ ID NO: 1449005 - DNA, 25 bp, Homo sapien
gccacattagggaagattatctggg

SEQ ID NO: 1449006 - DNA, 25 bp, Homo sapien
gagtcactgtccaagctcggctgtt

SEQ ID NO: 1449007 - DNA, 25 bp, Homo sapien
gataatactccctctgtttgcactg

SEQ ID NO: 1449008 - DNA, 25 bp, Homo sapien
gctgcctccacaggacagtgttgtg

SEQ ID NO: 1449009 - DNA, 25 bp, Homo sapien
tctaggtcgtggtttgtagcacaga

SEQ ID NO: 1449010 - DNA, 25 bp, Homo sapien
tttctttgcaactgaagatctaaaa

SEQ ID NO: 1449011 - DNA, 25 bp, Homo sapien
ctgctgatccaaatactctaggttt

SEQ ID NO: 1449012 - DNA, 25 bp, Homo sapien
tgctgatccaaatactctaggtttc

SEQ ID NO: 1449013 - DNA, 25 bp, Homo sapien
tttgcaactgaagatctaaaagttc

SEQ ID NO: 1449014 - DNA, 25 bp, Homo sapien
tagttgtaggggaacagtcctgcag

SEQ ID NO: 1449015 - DNA, 25 bp, Homo sapien
ggactggccgcctgtctcccaggta

SEQ ID NO: 1449016 - DNA, 25 bp, Homo sapien
tcttatcgtggaccgtgggggatgg

SEQ ID NO: 1449017 - DNA, 25 bp, Homo sapien
ctgcagggactggccgcctgtctcc

SEQ ID NO: 1449018 - DNA, 25 bp, Homo sapien
gatccgatcataggccggcatggaa

SEQ ID NO: 1449019 - DNA, 25 bp, Homo sapien
cactcctggcgggtagtactgataa

SEQ ID NO: 1449020 - DNA, 25 bp, Homo sapien
tcatcataatagactggctgccggg

SEQ ID NO: 1449021 - DNA, 25 bp, Homo sapien
tagatgtcctcactgcgaggtggca

SEQ ID NO: 1449022 - DNA, 25 bp, Homo sapien
ggagctcttgcgctgggcaattttg

SEQ ID NO: 1449023 - DNA, 25 bp, Homo sapien
tccatcctgagacgggaaagctgtg

SEQ ID NO: 1449024 - DNA, 25 bp, Homo sapien
gaggccattggctttcaccggaggc

SEQ ID NO: 1449025 - DNA, 25 bp, Homo sapien
ttggtgcgtggtgggaaactccgcc

SEQ ID NO: 1449026 - DNA, 25 bp, Homo sapien
tcagtgactctagcccagcatggag

SEQ ID NO: 1449027 - DNA, 25 bp, Homo sapien
ctgtcagtgactctagcccagcatg

SEQ ID NO: 1449028 - DNA, 25 bp, Homo sapien
gggagatgctgtcagtgactctagc

SEQ ID NO: 1449029 - DNA, 25 bp, Homo sapien
gatgctgtcagtgactctagcccag

SEQ ID NO: 1449030 - DNA, 25 bp, Homo sapien
ggagggatctgtactcgagcagcct

SEQ ID NO: 1449031 - DNA, 25 bp, Homo sapien
tgaagaagtaggtgcggaccccggc

SEQ ID NO: 1449032 - DNA, 25 bp, Homo sapien
cggggctctcggcactgaagaagta

SEQ ID NO: 1449033 - DNA, 25 bp, Homo sapien
agcttggggcactgacttctgggct

SEQ ID NO: 1449034 - DNA, 25 bp, Homo sapien
gggagaggcagcgtgtggagctggc

SEQ ID NO: 1449035 - DNA, 25 bp, Homo sapien
tcggcctcatccacccagcacacag

SEQ ID NO: 1449036 - DNA, 25 bp, Homo sapien
gtgtggagctggcctcggcctcatc

SEQ ID NO: 1449037 - DNA, 25 bp, Homo sapien
tgtggggagaggcagcgtgtggagc

SEQ ID NO: 1449038 - DNA, 25 bp, Homo sapien
gtgtgtttccggctgatgttgtctg

SEQ ID NO: 1449039 - DNA, 25 bp, Homo sapien
gatgctgcccaggatactctcttcc

SEQ ID NO: 1449040 - DNA, 25 bp, Homo sapien
gctgcactgcggctacccggaagct

SEQ ID NO: 1449041 - DNA, 25 bp, Homo sapien
cttaaacgtgtgtttccggctgatg

SEQ ID NO: 1449042 - DNA, 25 bp, Homo sapien
caccaggacgaaccagcgcttgttc

SEQ ID NO: 1449043 - DNA, 25 bp, Homo sapien
gacgaaccagcgcttgttccactgc

SEQ ID NO: 1449044 - DNA, 25 bp, Homo sapien
gttccactgcttaaccccggagctg

SEQ ID NO: 1449045 - DNA, 25 bp, Homo sapien
agaagaggcagcgatccaccaggac

SEQ ID NO: 1449046 - DNA, 25 bp, Homo sapien
cttgccaaaggcgacggctttgcgg

SEQ ID NO: 1449047 - DNA, 25 bp, Homo sapien
ttcatggagtgtgagcgcttgccaa

SEQ ID NO: 1449048 - DNA, 25 bp, Homo sapien
tgcattggggttccgcttcatggag

SEQ ID NO: 1449049 - DNA, 25 bp, Homo sapien
cagcccgccttggtgacaggtgcat

SEQ ID NO: 1449050 - DNA, 25 bp, Homo sapien
gcaatagtccacctttctggaagca

SEQ ID NO: 1449051 - DNA, 25 bp, Homo sapien
tcctagctctgtgttgccacgtgga

SEQ ID NO: 1449052 - DNA, 25 bp, Homo sapien
tgtgttctggaagttaactccctgc

SEQ ID NO: 1449053 - DNA, 25 bp, Homo sapien
tgggagtcctgttcgtcatctcatg

SEQ ID NO: 1449054 - DNA, 25 bp, Homo sapien
gataaaatctccctaagctatagcc

SEQ ID NO: 1449055 - DNA, 25 bp, Homo sapien
ttgtctgccaggattaagtaagtgc

SEQ ID NO: 1449056 - DNA, 25 bp, Homo sapien
tgcctctcaaattccactaccgtgg

SEQ ID NO: 1449057 - DNA, 25 bp, Homo sapien
taccgtggtcttaaaggtcctcatc

SEQ ID NO: 1449058 - DNA, 25 bp, Homo sapien
ctttgcagggaggaacttttgtctt

SEQ ID NO: 1449059 - DNA, 25 bp, Homo sapien
cttccattgcaccatgagctctttg

SEQ ID NO: 1449060 - DNA, 25 bp, Homo sapien
tgtcacaatgcagctttctatctct

SEQ ID NO: 1449061 - DNA, 25 bp, Homo sapien
gagccagcaaggtatccagccataa

SEQ ID NO: 1449062 - DNA, 25 bp, Homo sapien
gacgctgggccgctctggagggacc

SEQ ID NO: 1449063 - DNA, 25 bp, Homo sapien
ctgggccgctctggagggacctcgg

SEQ ID NO: 1449064 - DNA, 25 bp, Homo sapien
gctctggagggacctcggacaccat

SEQ ID NO: 1449065 - DNA, 25 bp, Homo sapien
gggccgctctggagggacctcggac

SEQ ID NO: 1449066 - DNA, 25 bp, Homo sapien
gttgggtatgtcactgttggtggta

SEQ ID NO: 1449067 - DNA, 25 bp, Homo sapien
tggttgggtatgtcactgttggtgg

SEQ ID NO: 1449068 - DNA, 25 bp, Homo sapien
cactgttggtggtagccgggcgttt

SEQ ID NO: 1449069 - DNA, 25 bp, Homo sapien
gttgtggttgggtatgtcactgttg

SEQ ID NO: 1449070 - DNA, 25 bp, Homo sapien
cagattttctcagcgcttccgtcaa

SEQ ID NO: 1449071 - DNA, 25 bp, Homo sapien
tgctagaccctaggaaaagtggatg

SEQ ID NO: 1449072 - DNA, 25 bp, Homo sapien
cagtcctcagaaccgaggtgagtca

SEQ ID NO: 1449073 - DNA, 25 bp, Homo sapien
tgtcaagccagatgggtctcagatg

SEQ ID NO: 1449074 - DNA, 25 bp, Homo sapien
gtgtagaaatgtgttccgtctttca

SEQ ID NO: 1449075 - DNA, 25 bp, Homo sapien
gaaatgtgttccgtctttcattgtg

SEQ ID NO: 1449076 - DNA, 25 bp, Homo sapien
tagaaatgtgttccgtctttcattg

SEQ ID NO: 1449077 - DNA, 25 bp, Homo sapien
tgtagaaatgtgttccgtctttcat

SEQ ID NO: 1449078 - DNA, 25 bp, Homo sapien
gtcgatcagcccgaaacttcaacat

SEQ ID NO: 1449079 - DNA, 25 bp, Homo sapien
cgtcgatcagcccgaaacttcaaca

SEQ ID NO: 1449080 - DNA, 25 bp, Homo sapien
gaagtaagtcctctggtccaactcg

SEQ ID NO: 1449081 - DNA, 25 bp, Homo sapien
agaagtaagtcctctggtccaactc

SEQ ID NO: 1449082 - DNA, 25 bp, Homo sapien
aagtcctctggtccaactcgtaagg

SEQ ID NO: 1449083 - DNA, 25 bp, Homo sapien
agtaagtcctctggtccaactcgta

SEQ ID NO: 1449084 - DNA, 25 bp, Homo sapien
tcaccctgacccaaattggagaact

SEQ ID NO: 1449085 - DNA, 25 bp, Homo sapien
tggagctcctccttgtgctgtgtgc

SEQ ID NO: 1449086 - DNA, 25 bp, Homo sapien
gacaaaagagttaatgcctggcacc

SEQ ID NO: 1449087 - DNA, 25 bp, Homo sapien
gaactgcgattctaccacccagaag

SEQ ID NO: 1449088 - DNA, 25 bp, Homo sapien
tctaatgtagtgctgctcctcacct

SEQ ID NO: 1449089 - DNA, 25 bp, Homo sapien
cagcaggctctaatgtagtgctgct

SEQ ID NO: 1449090 - DNA, 25 bp, Homo sapien
gcaacagcaggctctaatgtagtgc

SEQ ID NO: 1449091 - DNA, 25 bp, Homo sapien
ctgcccagggagacccattctgcct

SEQ ID NO: 1449092 - DNA, 25 bp, Homo sapien
ccagggtcaaagagcacaaatgttt

SEQ ID NO: 1449093 - DNA, 25 bp, Homo sapien
tgcttctgaccagagctaccgagcg

SEQ ID NO: 1449094 - DNA, 25 bp, Homo sapien
taatgagtgaagagttctccccgca

SEQ ID NO: 1449095 - DNA, 25 bp, Homo sapien
tgacatcaggacagacaatggtttg

SEQ ID NO: 1449096 - DNA, 25 bp, Homo sapien
tctttgtggtgctcacccagcactg

SEQ ID NO: 1449097 - DNA, 25 bp, Homo sapien
ctttgtggtgctcacccagcactgg

SEQ ID NO: 1449098 - DNA, 25 bp, Homo sapien
ggtctttgtggtgctcacccagcac

SEQ ID NO: 1449099 - DNA, 25 bp, Homo sapien
tgccctggcttggtctttgtggtgc

SEQ ID NO: 1449100 - DNA, 25 bp, Homo sapien
atggccttcaaggtccaggttccgg

SEQ ID NO: 1449101 - DNA, 25 bp, Homo sapien
gaggaggggtcggggactgaatggc

SEQ ID NO: 1449102 - DNA, 25 bp, Homo sapien
aatggccttcaaggtccaggttccg

SEQ ID NO: 1449103 - DNA, 25 bp, Homo sapien
gggccattcccaggggataaatgac

SEQ ID NO: 1449104 - DNA, 25 bp, Homo sapien
ggccattcccaggggataaatgaca

SEQ ID NO: 1449105 - DNA, 25 bp, Homo sapien
cagccaggccaggctgcccacccac

SEQ ID NO: 1449106 - DNA, 25 bp, Homo sapien
atggcagccaggccaggctgcccac

SEQ ID NO: 1449107 - DNA, 25 bp, Homo sapien
ggcagccaggccaggctgcccaccc

SEQ ID NO: 1449108 - DNA, 25 bp, Homo sapien
tcagatggcagccaggccaggctgc

SEQ ID NO: 1449109 - DNA, 25 bp, Homo sapien
cctgtacaaggcagttctctgatct

SEQ ID NO: 1449110 - DNA, 25 bp, Homo sapien
gcccctgtacaaggcagttctctga

SEQ ID NO: 1449111 - DNA, 25 bp, Homo sapien
tacaaggcagttctctgatctctgc

SEQ ID NO: 1449112 - DNA, 25 bp, Homo sapien
ccttgccaccaagaaacaccacaca

SEQ ID NO: 1449113 - DNA, 25 bp, Homo sapien
cgcagactgccgactgagaaggagt

SEQ ID NO: 1449114 - DNA, 25 bp, Homo sapien
ttccatgccagatgtcaggacccag

SEQ ID NO: 1449115 - DNA, 25 bp, Homo sapien
gaaggagtgaagcaatacttctgat

SEQ ID NO: 1449116 - DNA, 25 bp, Homo sapien
tacttctgatcggagaaagctgccg

SEQ ID NO: 1449117 - DNA, 25 bp, Homo sapien
tgtctttctgtcactctattaacat

SEQ ID NO: 1449118 - DNA, 25 bp, Homo sapien
tgtagtatttactgttcctccagtg

SEQ ID NO: 1449119 - DNA, 25 bp, Homo sapien
cggcctcaagaaggtaattctaaat

SEQ ID NO: 1449120 - DNA, 25 bp, Homo sapien
tctgtcactctattaacatccatag

SEQ ID NO: 1449121 - DNA, 25 bp, Homo sapien
gcccatgggtcacagttggccgacc

SEQ ID NO: 1449122 - DNA, 25 bp, Homo sapien
tgtttgactactatgcatgcaagtg

SEQ ID NO: 1449123 - DNA, 25 bp, Homo sapien
tagcttaagggtcacgcaaaattag

SEQ ID NO: 1449124 - DNA, 25 bp, Homo sapien
gatagatcgagagagagactttcac

SEQ ID NO: 1449125 - DNA, 25 bp, Homo sapien
cggtagagatgctggtatggatgcc

SEQ ID NO: 1449126 - DNA, 25 bp, Homo sapien
tactcagggatggatctaggtcttc

SEQ ID NO: 1449127 - DNA, 25 bp, Homo sapien
ggtatggatgcccacaagcttttca

SEQ ID NO: 1449128 - DNA, 25 bp, Homo sapien
acagggacagcatgtatgctggtat

SEQ ID NO: 1449129 - DNA, 25 bp, Homo sapien
ctagaggtatcaatgtaggcctcgg

SEQ ID NO: 1449130 - DNA, 25 bp, Homo sapien
ggtatcaatgtaggcctcggtgccc

SEQ ID NO: 1449131 - DNA, 25 bp, Homo sapien
atcaatgtaggcctcggtgccctca

SEQ ID NO: 1449132 - DNA, 25 bp, Homo sapien
gaggtatcaatgtaggcctcggtgc

SEQ ID NO: 1449133 - DNA, 25 bp, Homo sapien
ctgtgccacatcaacccagtggaca

SEQ ID NO: 1449134 - DNA, 25 bp, Homo sapien
gtccaggctcaatcacactaggctc

SEQ ID NO: 1449135 - DNA, 25 bp, Homo sapien
acaaggctgttgtttcgggtcagaa

SEQ ID NO: 1449136 - DNA, 25 bp, Homo sapien
aatgaagcaggaggctatttccaag

SEQ ID NO: 1449137 - DNA, 25 bp, Homo sapien
gaatagtgttacccagaggccatgg

SEQ ID NO: 1449138 - DNA, 25 bp, Homo sapien
gcccggcctcacagtcaactttcaa

SEQ ID NO: 1449139 - DNA, 25 bp, Homo sapien
agtcttgcagctagatactagattg

SEQ ID NO: 1449140 - DNA, 25 bp, Homo sapien
tgcagctagatactagattgctatg

SEQ ID NO: 1449141 - DNA, 25 bp, Homo sapien
tgcctctcgggtttccctgcctcag

SEQ ID NO: 1449142 - DNA, 25 bp, Homo sapien
ggaaggcttccattttgcctgcccc

SEQ ID NO: 1449143 - DNA, 25 bp, Homo sapien
caaggctctggcagggcagtttgct

SEQ ID NO: 1449144 - DNA, 25 bp, Homo sapien
acaataaagaaagccaggtctaaag

SEQ ID NO: 1449145 - DNA, 25 bp, Homo sapien
gtctaaagaggcctcctccaaggct

SEQ ID NO: 1449146 - DNA, 25 bp, Homo sapien
gagggcaaacccgtcaactgcgttg

SEQ ID NO: 1449147 - DNA, 25 bp, Homo sapien
actgcgttgccagccataaagcatg

SEQ ID NO: 1449148 - DNA, 25 bp, Homo sapien
aagcatgccaggtgggtaaagtgct

SEQ ID NO: 1449149 - DNA, 25 bp, Homo sapien
aaagtgcttgtcaaagccttgagaa

SEQ ID NO: 1449150 - DNA, 25 bp, Homo sapien
ggctggcgctttagttgaatccagg

SEQ ID NO: 1449151 - DNA, 25 bp, Homo sapien
gctggcgctttagttgaatccaggt

SEQ ID NO: 1449152 - DNA, 25 bp, Homo sapien
caggctggcgctttagttgaatcca

SEQ ID NO: 1449153 - DNA, 25 bp, Homo sapien
tggcgctttagttgaatccaggtaa

SEQ ID NO: 1449154 - DNA, 25 bp, Homo sapien
atatcacctttcttatagactcgca

SEQ ID NO: 1449155 - DNA, 25 bp, Homo sapien
cttccagttttgccgtggtaacgcg

SEQ ID NO: 1449156 - DNA, 25 bp, Homo sapien
tggggcattcctttttgaacagtac

SEQ ID NO: 1449157 - DNA, 25 bp, Homo sapien
cagttttgccgtggtaacgcgtgtg

SEQ ID NO: 1449158 - DNA, 25 bp, Homo sapien
ctcctctttccctttgtattcgtca

SEQ ID NO: 1449159 - DNA, 25 bp, Homo sapien
tcctctttccctttgtattcgtcat

SEQ ID NO: 1449160 - DNA, 25 bp, Homo sapien
ctagagaacatacatcgggtgcctc

SEQ ID NO: 1449161 - DNA, 25 bp, Homo sapien
aacatacatcgggtgcctctcctct

SEQ ID NO: 1449162 - DNA, 25 bp, Homo sapien
cacacttggcagacatcctgctgac

SEQ ID NO: 1449163 - DNA, 25 bp, Homo sapien
gccacacttggcagacatcctgctg

SEQ ID NO: 1449164 - DNA, 25 bp, Homo sapien
ggccacacttggcagacatcctgct

SEQ ID NO: 1449165 - DNA, 25 bp, Homo sapien
ccacacttggcagacatcctgctga

SEQ ID NO: 1449166 - DNA, 25 bp, Homo sapien
ctcctcagtttcatactcttccagg

SEQ ID NO: 1449167 - DNA, 25 bp, Homo sapien
tcctcagtttcatactcttccaggg

SEQ ID NO: 1449168 - DNA, 25 bp, Homo sapien
cctcagtttcatactcttccagggt

SEQ ID NO: 1449169 - DNA, 25 bp, Homo sapien
ggatttcagggccacgtgactctcc

SEQ ID NO: 1449170 - DNA, 25 bp, Homo sapien
cccaagctgtcacttaggatcagga

SEQ ID NO: 1449171 - DNA, 25 bp, Homo sapien
taatcagtcatctctccggctggca

SEQ ID NO: 1449172 - DNA, 25 bp, Homo sapien
tgtggttactgcaggatccagcatc

SEQ ID NO: 1449173 - DNA, 25 bp, Homo sapien
ccaggacttggcaaggctgccaggt

SEQ ID NO: 1449174 - DNA, 25 bp, Homo sapien
ggggagagtctgctttcagtcagcc

SEQ ID NO: 1449175 - DNA, 25 bp, Homo sapien
cagtcagccaagatgaggggctctt

SEQ ID NO: 1449176 - DNA, 25 bp, Homo sapien
ctggctctccaggacttggcaaggc

SEQ ID NO: 1449177 - DNA, 25 bp, Homo sapien
ggccaacataaacagacgcactgat

SEQ ID NO: 1449178 - DNA, 25 bp, Homo sapien
ggttactgcccaggccaacataaac

SEQ ID NO: 1449179 - DNA, 25 bp, Homo sapien
caggactgacactggttactgccca

SEQ ID NO: 1449180 - DNA, 25 bp, Homo sapien
taaacagacgcactgatacatacgt

SEQ ID NO: 1449181 - DNA, 25 bp, Homo sapien
tgggtggaatccacttcccagccct

SEQ ID NO: 1449182 - DNA, 25 bp, Homo sapien
ttcctgggtggaatccacttcccag

SEQ ID NO: 1449183 - DNA, 25 bp, Homo sapien
ctccttcctgggtggaatccacttc

SEQ ID NO: 1449184 - DNA, 25 bp, Homo sapien
tggaatccacttcccagcccttggg

SEQ ID NO: 1449185 - DNA, 25 bp, Homo sapien
cattccttttgggagtgcgagcctc

SEQ ID NO: 1449186 - DNA, 25 bp, Homo sapien
tctctgtgggaggacgttgccattc

SEQ ID NO: 1449187 - DNA, 25 bp, Homo sapien
aagagtgcttatattcccatccagg

SEQ ID NO: 1449188 - DNA, 25 bp, Homo sapien
gacaggttcatcaactggctcaagg

SEQ ID NO: 1449189 - DNA, 25 bp, Homo sapien
tgtccagtccggtgaagcgctggaa

SEQ ID NO: 1449190 - DNA, 25 bp, Homo sapien
cttggaaccaggcgcctagtgtcca

SEQ ID NO: 1449191 - DNA, 25 bp, Homo sapien
catgattgacggaggccttggaacc

SEQ ID NO: 1449192 - DNA, 25 bp, Homo sapien
gcgcctagtgtccagtccggtgaag

SEQ ID NO: 1449193 - DNA, 25 bp, Homo sapien
tgactttgttccagggtgcacccag

SEQ ID NO: 1449194 - DNA, 25 bp, Homo sapien
tgggcaggaggtgtgtccactctgg

SEQ ID NO: 1449195 - DNA, 25 bp, Homo sapien
gtgcacccagctggttgacttttcc

SEQ ID NO: 1449196 - DNA, 25 bp, Homo sapien
ggaggtgtgtccactctggatgggt

SEQ ID NO: 1449197 - DNA, 25 bp, Homo sapien
ctccgtaggcccaccggccgggcag

SEQ ID NO: 1449198 - DNA, 25 bp, Homo sapien
caggtccagccagtcaatctcatcg

SEQ ID NO: 1449199 - DNA, 25 bp, Homo sapien
cgccgtcaactccgtaggcccaccg

SEQ ID NO: 1449200 - DNA, 25 bp, Homo sapien
ggccgggcaggtccagccagtcaat

SEQ ID NO: 1449201 - DNA, 25 bp, Homo sapien
agcacctcctccaagaagtctgcca

SEQ ID NO: 1449202 - DNA, 25 bp, Homo sapien
gcacctcctccaagaagtctgccat

SEQ ID NO: 1449203 - DNA, 25 bp, Homo sapien
tctttcccagcacctcctccaagaa

SEQ ID NO: 1449204 - DNA, 25 bp, Homo sapien
ctttctttcccagcacctcctccaa

SEQ ID NO: 1449205 - DNA, 25 bp, Homo sapien
gagatctcgcccctacagataactt

SEQ ID NO: 1449206 - DNA, 25 bp, Homo sapien
tctcgcccctacagataacttaaaa

SEQ ID NO: 1449207 - DNA, 25 bp, Homo sapien
tatagggagatctcgcccctacaga

SEQ ID NO: 1449208 - DNA, 25 bp, Homo sapien
ggcaatatagggagatctcgcccct

SEQ ID NO: 1449209 - DNA, 25 bp, Homo sapien
gcttttataaacaacgtgcattatg

SEQ ID NO: 1449210 - DNA, 25 bp, Homo sapien
aaggtacagagaatagagtccaaat

SEQ ID NO: 1449211 - DNA, 25 bp, Homo sapien
gagtccaaatgaagtctccaaatga

SEQ ID NO: 1449212 - DNA, 25 bp, Homo sapien
tctgaggtcagcaattaaatatttg

SEQ ID NO: 1449213 - DNA, 25 bp, Homo sapien
agacagtctcaatgatccatatatc

SEQ ID NO: 1449214 - DNA, 25 bp, Homo sapien
gtctcaatgatccatatatctagta

SEQ ID NO: 1449215 - DNA, 25 bp, Homo sapien
actgggtctataggctaggaccaca

SEQ ID NO: 1449216 - DNA, 25 bp, Homo sapien
atatctagtattaaagcatgattcc

SEQ ID NO: 1449217 - DNA, 25 bp, Homo sapien
gcactttaagttggtagcatacaca

SEQ ID NO: 1449218 - DNA, 25 bp, Homo sapien
tgacaggaagcacacggaatgaaag

SEQ ID NO: 1449219 - DNA, 25 bp, Homo sapien
catttggtagtgaggttagaatccc

SEQ ID NO: 1449220 - DNA, 25 bp, Homo sapien
cacagaggtgctaggtttaagaaac

SEQ ID NO: 1449221 - DNA, 25 bp, Homo sapien
tgtgttcaaatgtcaagcaatatcc

SEQ ID NO: 1449222 - DNA, 25 bp, Homo sapien
tcttgaattcgtttctggaacctgc

SEQ ID NO: 1449223 - DNA, 25 bp, Homo sapien
tggaacctgcatccatcccttgcaa

SEQ ID NO: 1449224 - DNA, 25 bp, Homo sapien
ccatggtcctttgcgatcctcatca

SEQ ID NO: 1449225 - DNA, 25 bp, Homo sapien
gttacatcagctaaccccaatgtgg

SEQ ID NO: 1449226 - DNA, 25 bp, Homo sapien
acctttgtattcaatatgctatcac

SEQ ID NO: 1449227 - DNA, 25 bp, Homo sapien
caatgtggcctactactttcgttcc

SEQ ID NO: 1449228 - DNA, 25 bp, Homo sapien
tctttctaagatatcaaactccaaa

SEQ ID NO: 1449229 - DNA, 25 bp, Homo sapien
gaacatatcaggcatgttaaaagac

SEQ ID NO: 1449230 - DNA, 25 bp, Homo sapien
tcagaacatatcaggcatgttaaaa

SEQ ID NO: 1449231 - DNA, 25 bp, Homo sapien
tcaggcatgttaaaagacaagaaac

SEQ ID NO: 1449232 - DNA, 25 bp, Homo sapien
catatcaggcatgttaaaagacaag

SEQ ID NO: 1449233 - DNA, 25 bp, Homo sapien
gaacgtcacgctgtaccgagtctgg

SEQ ID NO: 1449234 - DNA, 25 bp, Homo sapien
tacaagaaagtaaggtgtgacactc

SEQ ID NO: 1449235 - DNA, 25 bp, Homo sapien
ccaacagctgcaccttacaagaaag

SEQ ID NO: 1449236 - DNA, 25 bp, Homo sapien
gaattctctagatcagacttgccag

SEQ ID NO: 1449237 - DNA, 25 bp, Homo sapien
tcactggatgcacctcccaaaatat

SEQ ID NO: 1449238 - DNA, 25 bp, Homo sapien
gagctatcactatcaaaaccatcat

SEQ ID NO: 1449239 - DNA, 25 bp, Homo sapien
ttctggggattataaggatctacac

SEQ ID NO: 1449240 - DNA, 25 bp, Homo sapien
ataaggatctacactgcagaaagag

SEQ ID NO: 1449241 - DNA, 25 bp, Homo sapien
cagccctcagaagggctctcttctt

SEQ ID NO: 1449242 - DNA, 25 bp, Homo sapien
taggtatctcactagatggacagcc

SEQ ID NO: 1449243 - DNA, 25 bp, Homo sapien
gtaatcaactacacttattcggccc

SEQ ID NO: 1449244 - DNA, 25 bp, Homo sapien
tccaaagcaagtggaacctctgtag

SEQ ID NO: 1449245 - DNA, 25 bp, Homo sapien
ttccgtagaaagaggtggacatccc

SEQ ID NO: 1449246 - DNA, 25 bp, Homo sapien
caagttcccggttagagtacagacg

SEQ ID NO: 1449247 - DNA, 25 bp, Homo sapien
cacgaggccggaatgagttctgcac

SEQ ID NO: 1449248 - DNA, 25 bp, Homo sapien
tagcctgttgaaggaattccagccg

SEQ ID NO: 1449249 - DNA, 25 bp, Homo sapien
ccttctgaagcaatccggggagcgg

SEQ ID NO: 1449250 - DNA, 25 bp, Homo sapien
tgggagagcagtttcgtccagtaac

SEQ ID NO: 1449251 - DNA, 25 bp, Homo sapien
gagcggcgcaaggagctgggagagc

SEQ ID NO: 1449252 - DNA, 25 bp, Homo sapien
ggctccaaattagcaccttctgaag

SEQ ID NO: 1449253 - DNA, 25 bp, Homo sapien
ttagaagagcctgcttgcgatcgcc

SEQ ID NO: 1449254 - DNA, 25 bp, Homo sapien
gccaagaggcgtcgggaacttagaa

SEQ ID NO: 1449255 - DNA, 25 bp, Homo sapien
agggccaagccgtttccgcgatccg

SEQ ID NO: 1449256 - DNA, 25 bp, Homo sapien
cctgcttgcgatcgccgagggaaaa

SEQ ID NO: 1449257 - DNA, 25 bp, Homo sapien
cggctggaggtcgacgggattcgga

SEQ ID NO: 1449258 - DNA, 25 bp, Homo sapien
agcggctggaggtcgacgggattcg

SEQ ID NO: 1449259 - DNA, 25 bp, Homo sapien
tctcaggtagggccgcggcgctcag

SEQ ID NO: 1449260 - DNA, 25 bp, Homo sapien
ctcagcggctggaggtcgacgggat

SEQ ID NO: 1449261 - DNA, 25 bp, Homo sapien
tcttcgagccagcagaaaagccaca

SEQ ID NO: 1449262 - DNA, 25 bp, Homo sapien
aggcggcgactgatgcgacttccat

SEQ ID NO: 1449263 - DNA, 25 bp, Homo sapien
gaacagcccgcgcaataggcggcga

SEQ ID NO: 1449264 - DNA, 25 bp, Homo sapien
tgctccaggccgatcttcgagccag

SEQ ID NO: 1449265 - DNA, 25 bp, Homo sapien
gaaggaggttccctagtcggctcga

SEQ ID NO: 1449266 - DNA, 25 bp, Homo sapien
tccgactgacagagggttgaaaagc

SEQ ID NO: 1449267 - DNA, 25 bp, Homo sapien
ggctcgacgcttcaacaccatggat

SEQ ID NO: 1449268 - DNA, 25 bp, Homo sapien
tgagcaacgcgataccggaaggact

SEQ ID NO: 1449269 - DNA, 25 bp, Homo sapien
tgatggcctaatacacactgacgtg

SEQ ID NO: 1449270 - DNA, 25 bp, Homo sapien
gtagacaccagaatccgcagacggt

SEQ ID NO: 1449271 - DNA, 25 bp, Homo sapien
cagtcatcccctctcatgaaatggg

SEQ ID NO: 1449272 - DNA, 25 bp, Homo sapien
caacagccctctaggttaaaggtct

SEQ ID NO: 1449273 - DNA, 25 bp, Homo sapien
accgtgctcggccaatttttgcata

SEQ ID NO: 1449274 - DNA, 25 bp, Homo sapien
ccaccgtgctcggccaatttttgca

SEQ ID NO: 1449275 - DNA, 25 bp, Homo sapien
cccaggttggtttcaaactcagctc

SEQ ID NO: 1449276 - DNA, 25 bp, Homo sapien
caggttggtttcaaactcagctcaa

SEQ ID NO: 1449277 - DNA, 25 bp, Homo sapien
ctagggacagcagaaaaatctttag

SEQ ID NO: 1449278 - DNA, 25 bp, Homo sapien
actctgtaatagatacccctgaagt

SEQ ID NO: 1449279 - DNA, 25 bp, Homo sapien
tacccctgaagtcaagtaccaatta

SEQ ID NO: 1449280 - DNA, 25 bp, Homo sapien
gtggcagttatgagcactagggaca

SEQ ID NO: 1449281 - DNA, 25 bp, Homo sapien
ttattagaaaatacaattcccgaga

SEQ ID NO: 1449282 - DNA, 25 bp, Homo sapien
cagtagcatctgcagcctagggacc

SEQ ID NO: 1449283 - DNA, 25 bp, Homo sapien
gactaaataggtttatggccccaca

SEQ ID NO: 1449284 - DNA, 25 bp, Homo sapien
caagatgctcttgggtgaaactaca

SEQ ID NO: 1449285 - DNA, 25 bp, Homo sapien
gaagacaaccctttggagcgaaaca

SEQ ID NO: 1449286 - DNA, 25 bp, Homo sapien
tgggcccctccccagatagttccta

SEQ ID NO: 1449287 - DNA, 25 bp, Homo sapien
ggcccctccccagatagttcctata

SEQ ID NO: 1449288 - DNA, 25 bp, Homo sapien
gcccctccccagatagttcctatag

SEQ ID NO: 1449289 - DNA, 25 bp, Homo sapien
aagcattgctcccttgacacaaggt

SEQ ID NO: 1449290 - DNA, 25 bp, Homo sapien
cttcacaaggaggagtctcacaggg

SEQ ID NO: 1449291 - DNA, 25 bp, Homo sapien
tcatcacaaccaacccaagttcagt

SEQ ID NO: 1449292 - DNA, 25 bp, Homo sapien
ataggtacgtcccttctcgcaaggc

SEQ ID NO: 1449293 - DNA, 25 bp, Homo sapien
atcccagggcgaaccagccggtctt

SEQ ID NO: 1449294 - DNA, 25 bp, Homo sapien
aaggtgccatgacttcgagatccca

SEQ ID NO: 1449295 - DNA, 25 bp, Homo sapien
gcgaaccagccggtcttctcctgag

SEQ ID NO: 1449296 - DNA, 25 bp, Homo sapien
ccagctctcgcaggcggatgttcac

SEQ ID NO: 1449297 - DNA, 25 bp, Homo sapien
gcaggtcacccttggggatcccatc

SEQ ID NO: 1449298 - DNA, 25 bp, Homo sapien
ctgcaggtcacccttggggatccca

SEQ ID NO: 1449299 - DNA, 25 bp, Homo sapien
ggacgttctcccagaatccctgctc

SEQ ID NO: 1449300 - DNA, 25 bp, Homo sapien
aggacgttctcccagaatccctgct

SEQ ID NO: 1449301 - DNA, 25 bp, Homo sapien
aattttcacataggggtcagggtca

SEQ ID NO: 1449302 - DNA, 25 bp, Homo sapien
taggattgcaggttttccgggccac

SEQ ID NO: 1449303 - DNA, 25 bp, Homo sapien
tcttagtggttttctgagggtcagg

SEQ ID NO: 1449304 - DNA, 25 bp, Homo sapien
tcctcttagtggttttctgagggtc

SEQ ID NO: 1449305 - DNA, 25 bp, Homo sapien
caagccccgaatatgcatcaccatg

SEQ ID NO: 1449306 - DNA, 25 bp, Homo sapien
ctggtgcccatagccttctcatccc

SEQ ID NO: 1449307 - DNA, 25 bp, Homo sapien
gtggaagaaggtgtacaccaaatca

SEQ ID NO: 1449308 - DNA, 25 bp, Homo sapien
ggaagaaggtgtacaccaaatcaca

SEQ ID NO: 1449309 - DNA, 25 bp, Homo sapien
atcccggggcagtgggtggaagaag

SEQ ID NO: 1449310 - DNA, 25 bp, Homo sapien
gatgtaaccgtttagctcctccctc

SEQ ID NO: 1449311 - DNA, 25 bp, Homo sapien
gtgcgtggatcaagtgccagatgta

SEQ ID NO: 1449312 - DNA, 25 bp, Homo sapien
ggagcggccgatcacgaagcgacta

SEQ ID NO: 1449313 - DNA, 25 bp, Homo sapien
gccgatcacgaagcgactagggaag

SEQ ID NO: 1449314 - DNA, 25 bp, Homo sapien
catccctctgtgcagatagtaaagg

SEQ ID NO: 1449315 - DNA, 25 bp, Homo sapien
aaactccataccaggccaagcaaag

SEQ ID NO: 1449316 - DNA, 25 bp, Homo sapien
gagctcttgcgtgcaaggagagctt

SEQ ID NO: 1449317 - DNA, 25 bp, Homo sapien
gcaaagcaggcagatgtttagtcca

SEQ ID NO: 1449318 - DNA, 25 bp, Homo sapien
tctcgcatcacctttaccacatata

SEQ ID NO: 1449319 - DNA, 25 bp, Homo sapien
caacttattgtgtaattcctggaac

SEQ ID NO: 1449320 - DNA, 25 bp, Homo sapien
tgtaggtggcctcgtgagtgttctc

SEQ ID NO: 1449321 - DNA, 25 bp, Homo sapien
ctcaaaggtccgctggatgtaggtg

SEQ ID NO: 1449322 - DNA, 25 bp, Homo sapien
tgtaggaaaggtccggaagtgtatg

SEQ ID NO: 1449323 - DNA, 25 bp, Homo sapien
taggaaaggtccggaagtgtatgta

SEQ ID NO: 1449324 - DNA, 25 bp, Homo sapien
aaaggagagggtcagccggtcatct

SEQ ID NO: 1449325 - DNA, 25 bp, Homo sapien
tctgagcccgtgaacttcatctgag

SEQ ID NO: 1449326 - DNA, 25 bp, Homo sapien
cttgagagtgtgtgttcgggaggca

SEQ ID NO: 1449327 - DNA, 25 bp, Homo sapien
catctgagccagattatggatgaaa

SEQ ID NO: 1449328 - DNA, 25 bp, Homo sapien
catcaaaccaaggtagaaaggaact

SEQ ID NO: 1449329 - DNA, 25 bp, Homo sapien
ttcaaggttcattacaatagaacct

SEQ ID NO: 1449330 - DNA, 25 bp, Homo sapien
tgaaccccagggtcttatctcctcc

SEQ ID NO: 1449331 - DNA, 25 bp, Homo sapien
aaaggaactaggaactcactctctc

SEQ ID NO: 1449332 - DNA, 25 bp, Homo sapien
agggcatcgtacacatacttgaggt

SEQ ID NO: 1449333 - DNA, 25 bp, Homo sapien
tacttgaggtcctccaggtctgaga

SEQ ID NO: 1449334 - DNA, 25 bp, Homo sapien
gagttcagggatcccacaggacaac

SEQ ID NO: 1449335 - DNA, 25 bp, Homo sapien
cctcagggcatcgtacacatacttg

SEQ ID NO: 1449336 - DNA, 25 bp, Homo sapien
ccgttgatgacatacgccatgtccg

SEQ ID NO: 1449337 - DNA, 25 bp, Homo sapien
aatgaggttgtaggcttggcagcaa

SEQ ID NO: 1449338 - DNA, 25 bp, Homo sapien
ccatgtccgaggtgaagacaaaggg

SEQ ID NO: 1449339 - DNA, 25 bp, Homo sapien
gaaggcttgtcacccccgttgatga

SEQ ID NO: 1449340 - DNA, 25 bp, Homo sapien
atgcccaagacgtacgtggccacgc

SEQ ID NO: 1449341 - DNA, 25 bp, Homo sapien
gttgtcattatgtcggtcacagatg

SEQ ID NO: 1449342 - DNA, 25 bp, Homo sapien
agcgcaggagtagataaagttctcc

SEQ ID NO: 1449343 - DNA, 25 bp, Homo sapien
cttgatgttgccaaacatctgggca

SEQ ID NO: 1449344 - DNA, 25 bp, Homo sapien
tccacctggatcttacgcagggtct

SEQ ID NO: 1449345 - DNA, 25 bp, Homo sapien
agccagtctgccaggggccggtcct

SEQ ID NO: 1449346 - DNA, 25 bp, Homo sapien
tacgcagggtctcagcattagggat

SEQ ID NO: 1449347 - DNA, 25 bp, Homo sapien
ggccggtccttgaacgagccggtca

SEQ ID NO: 1449348 - DNA, 25 bp, Homo sapien
ttagcatgtcctggcgaaggtcgtc

SEQ ID NO: 1449349 - DNA, 25 bp, Homo sapien
tcctggacccagatcttgctcatga

SEQ ID NO: 1449350 - DNA, 25 bp, Homo sapien
tcatgatgcgaatcatctgcagcgt

SEQ ID NO: 1449351 - DNA, 25 bp, Homo sapien
gaagatgaccatgcgcatgtccagc

SEQ ID NO: 1449352 - DNA, 25 bp, Homo sapien
caggggatccacattttggaaggag

SEQ ID NO: 1449353 - DNA, 25 bp, Homo sapien
cttgaagatgacacggatgttctca

SEQ ID NO: 1449354 - DNA, 25 bp, Homo sapien
gatgacacggatgttctcacccagg

SEQ ID NO: 1449355 - DNA, 25 bp, Homo sapien
tcacccaggggatccacattttgga

SEQ ID NO: 1449356 - DNA, 25 bp, Homo sapien
caagcggcacgagccattgagggca

SEQ ID NO: 1449357 - DNA, 25 bp, Homo sapien
cacgagccattgagggcaaagaact

SEQ ID NO: 1449358 - DNA, 25 bp, Homo sapien
tcctccaggcccgtgcggaggattc

SEQ ID NO: 1449359 - DNA, 25 bp, Homo sapien
cacaattcccttaaccagcagactg

SEQ ID NO: 1449360 - DNA, 25 bp, Homo sapien
cttgcagatggggctgcctcccgga

SEQ ID NO: 1449361 - DNA, 25 bp, Homo sapien
ttgcagatggggctgcctcccggac

SEQ ID NO: 1449362 - DNA, 25 bp, Homo sapien
gccttgcagatggggctgcctcccg

SEQ ID NO: 1449363 - DNA, 25 bp, Homo sapien
ctgccttgcagatggggctgcctcc

SEQ ID NO: 1449364 - DNA, 25 bp, Homo sapien
gggcattgacaagccagcactggcg

SEQ ID NO: 1449365 - DNA, 25 bp, Homo sapien
tagcggatgctgaactgagagtcct

SEQ ID NO: 1449366 - DNA, 25 bp, Homo sapien
gtccttgaggccgtccttcagtaac

SEQ ID NO: 1449367 - DNA, 25 bp, Homo sapien
cagtaaggctgccagcagatactgg

SEQ ID NO: 1449368 - DNA, 25 bp, Homo sapien
cagaagaagtagtgagtcactctca

SEQ ID NO: 1449369 - DNA, 25 bp, Homo sapien
gacacagctcgtttcaggaggaagc

SEQ ID NO: 1449370 - DNA, 25 bp, Homo sapien
gaggaagcgcaccaacgggctgtcc

SEQ ID NO: 1449371 - DNA, 25 bp, Homo sapien
tcactctcaagtcagacacagctcg

SEQ ID NO: 1449372 - DNA, 25 bp, Homo sapien
acagccatacgacgcacctcctggt

SEQ ID NO: 1449373 - DNA, 25 bp, Homo sapien
gagagtgagccaatccactgcacag

SEQ ID NO: 1449374 - DNA, 25 bp, Homo sapien
gcaggtagtctagcagctcagcatc

SEQ ID NO: 1449375 - DNA, 25 bp, Homo sapien
ctggggcaggtagtctagcagctca

SEQ ID NO: 1449376 - DNA, 25 bp, Homo sapien
tcccacaggcgcttcttgtcagcat

SEQ ID NO: 1449377 - DNA, 25 bp, Homo sapien
gcagtaatatcgcttctcccacagg

SEQ ID NO: 1449378 - DNA, 25 bp, Homo sapien
ccacaggcgcttcttgtcagcatca

SEQ ID NO: 1449379 - DNA, 25 bp, Homo sapien
agctcacctccgagtggcagtaata

SEQ ID NO: 1449380 - DNA, 25 bp, Homo sapien
aacttgatgtcaaaggccgaggtgg

SEQ ID NO: 1449381 - DNA, 25 bp, Homo sapien
gctggtcttcttcccggaggctgcc

SEQ ID NO: 1449382 - DNA, 25 bp, Homo sapien
tgccaaactcatagcgggggctgaa

SEQ ID NO: 1449383 - DNA, 25 bp, Homo sapien
catgatgtctttaagcttgcgctgg

SEQ ID NO: 1449384 - DNA, 25 bp, Homo sapien
ctccaacgggcgctgggattttcct

SEQ ID NO: 1449385 - DNA, 25 bp, Homo sapien
gtggaaattaggtgcactccaacgg

SEQ ID NO: 1449386 - DNA, 25 bp, Homo sapien
aattaggtgcactccaacgggcgct

SEQ ID NO: 1449387 - DNA, 25 bp, Homo sapien
ggaaattaggtgcactccaacgggc

SEQ ID NO: 1449388 - DNA, 25 bp, Homo sapien
gagcatagagagtggcacacagcag

SEQ ID NO: 1449389 - DNA, 25 bp, Homo sapien
agtgtctcccgaggcagccggttca

SEQ ID NO: 1449390 - DNA, 25 bp, Homo sapien
cgccgctgcttattggcctctgagg

SEQ ID NO: 1449391 - DNA, 25 bp, Homo sapien
ggatgggcagagcatagagagtggc

SEQ ID NO: 1449392 - DNA, 25 bp, Homo sapien
ggcttcaagcaacaggtggcccagg

SEQ ID NO: 1449393 - DNA, 25 bp, Homo sapien
agtcaaattaggaggggccactcct

SEQ ID NO: 1449394 - DNA, 25 bp, Homo sapien
gaggggccactcctgtggcttcaag

SEQ ID NO: 1449395 - DNA, 25 bp, Homo sapien
gcttcaagcaacaggtggcccagga

SEQ ID NO: 1449396 - DNA, 25 bp, Homo sapien
catctacctattttgcatcctcggc

SEQ ID NO: 1449397 - DNA, 25 bp, Homo sapien
taagaattacctaagtgtgaagggc

SEQ ID NO: 1449398 - DNA, 25 bp, Homo sapien
tacaaatacttagcttgcagtgctg

SEQ ID NO: 1449399 - DNA, 25 bp, Homo sapien
gataaggcctctttgtgttgcccag

SEQ ID NO: 1449400 - DNA, 25 bp, Homo sapien
ttatagatacttctcattggatcct

SEQ ID NO: 1449401 - DNA, 25 bp, Homo sapien
tatagatacttctcattggatcctc

SEQ ID NO: 1449402 - DNA, 25 bp, Homo sapien
agtggtaattatacttggctccttt

SEQ ID NO: 1449403 - DNA, 25 bp, Homo sapien
ctttatagatacttctcattggatc

SEQ ID NO: 1449404 - DNA, 25 bp, Homo sapien
gagcctggttttatcattagtcctg

SEQ ID NO: 1449405 - DNA, 25 bp, Homo sapien
gccccagggatatttcagaggctga

SEQ ID NO: 1449406 - DNA, 25 bp, Homo sapien
tggactagttatctggccccaggga

SEQ ID NO: 1449407 - DNA, 25 bp, Homo sapien
gaatgacttgtccagttagggttaa

SEQ ID NO: 1449408 - DNA, 25 bp, Homo sapien
agaagtgagctcttcgggtctgcag

SEQ ID NO: 1449409 - DNA, 25 bp, Homo sapien
tccttgccgccatggctgagggagc

SEQ ID NO: 1449410 - DNA, 25 bp, Homo sapien
gctggtcccagacgatgaggtggaa

SEQ ID NO: 1449411 - DNA, 25 bp, Homo sapien
cagacgatgaggtggaagaggtact

SEQ ID NO: 1449412 - DNA, 25 bp, Homo sapien
ggcactgccgtctggaagtctgcgt

SEQ ID NO: 1449413 - DNA, 25 bp, Homo sapien
tctgcgttgaatgtgttgcagtaca

SEQ ID NO: 1449414 - DNA, 25 bp, Homo sapien
atgtgttgcagtacagctccaccag

SEQ ID NO: 1449415 - DNA, 25 bp, Homo sapien
actgccgtctggaagtctgcgttga

SEQ ID NO: 1449416 - DNA, 25 bp, Homo sapien
cacaagccctaccttgttgccatgg

SEQ ID NO: 1449417 - DNA, 25 bp, Homo sapien
ggtccccaaatgctagtcagtctct

SEQ ID NO: 1449418 - DNA, 25 bp, Homo sapien
tgtgacaaagttcacccatctgcgg

SEQ ID NO: 1449419 - DNA, 25 bp, Homo sapien
gttgccatggcattggctagaatgg

SEQ ID NO: 1449420 - DNA, 25 bp, Homo sapien
tcggttttccctcacagccaagaca

SEQ ID NO: 1449421 - DNA, 25 bp, Homo sapien
ctcggttttccctcacagccaagac

SEQ ID NO: 1449422 - DNA, 25 bp, Homo sapien
gaataaagcctttactggcctgggc

SEQ ID NO: 1449423 - DNA, 25 bp, Homo sapien
tgaagagctcttgcggttgaattcc

SEQ ID NO: 1449424 - DNA, 25 bp, Homo sapien
tcaacaagcagtcccaggtagctct

SEQ ID NO: 1449425 - DNA, 25 bp, Homo sapien
gaagaggagacacacttggcatcca

SEQ ID NO: 1449426 - DNA, 25 bp, Homo sapien
atctcaggggtttccacggcggcca

SEQ ID NO: 1449427 - DNA, 25 bp, Homo sapien
ctgaattttaggctgcatgcgggag

SEQ ID NO: 1449428 - DNA, 25 bp, Homo sapien
cagatggccttgacggactggacca

SEQ ID NO: 1449429 - DNA, 25 bp, Homo sapien
ctggttgagagcactggtgatctca

SEQ ID NO: 1449430 - DNA, 25 bp, Homo sapien
cacctcattgtggtaagtgtcgaac

SEQ ID NO: 1449431 - DNA, 25 bp, Homo sapien
aagtgtcgaacagaagactcagggc

SEQ ID NO: 1449432 - DNA, 25 bp, Homo sapien
tgtggtaagtgtcgaacagaagact

SEQ ID NO: 1449433 - DNA, 25 bp, Homo sapien
tgtcgaacagaagactcagggcctg

SEQ ID NO: 1449434 - DNA, 25 bp, Homo sapien
tgcttgacaggcctctcttggagat

SEQ ID NO: 1449435 - DNA, 25 bp, Homo sapien
ctgctgatggtctgcttgacaggcc

SEQ ID NO: 1449436 - DNA, 25 bp, Homo sapien
tcttggagatggacgaggtagttca

SEQ ID NO: 1449437 - DNA, 25 bp, Homo sapien
gcctctcttggagatggacgaggta

SEQ ID NO: 1449438 - DNA, 25 bp, Homo sapien
tgtagccgaatgtcaatgtcaaact

SEQ ID NO: 1449439 - DNA, 25 bp, Homo sapien
aggtcactgcgcacaaccttctgct

SEQ ID NO: 1449440 - DNA, 25 bp, Homo sapien
aaacttgcggcagtattggatgtac

SEQ ID NO: 1449441 - DNA, 25 bp, Homo sapien
gatgtactcatgactgcccaaggca

SEQ ID NO: 1449442 - DNA, 25 bp, Homo sapien
cctcaggtcatcatgggtgtagcac

SEQ ID NO: 1449443 - DNA, 25 bp, Homo sapien
tctggtagataagcaagtctacagt

SEQ ID NO: 1449444 - DNA, 25 bp, Homo sapien
gcccgcagggctttagcacaaagtc

SEQ ID NO: 1449445 - DNA, 25 bp, Homo sapien
tagcacagggtctggtagataagca

SEQ ID NO: 1449446 - DNA, 25 bp, Homo sapien
tgaggaagtagtcttggatgtcaga

SEQ ID NO: 1449447 - DNA, 25 bp, Homo sapien
gaagcctgtcacacaacacagtcac

SEQ ID NO: 1449448 - DNA, 25 bp, Homo sapien
tccagacatagccagtgaggaagta

SEQ ID NO: 1449449 - DNA, 25 bp, Homo sapien
cacagtcaccttcaggttgacctca

SEQ ID NO: 1449450 - DNA, 25 bp, Homo sapien
tctgagacctcaaacaactcatggc

SEQ ID NO: 1449451 - DNA, 25 bp, Homo sapien
gagacctcaaacaactcatggccat

SEQ ID NO: 1449452 - DNA, 25 bp, Homo sapien
cttctgagacctcaaacaactcatg

SEQ ID NO: 1449453 - DNA, 25 bp, Homo sapien
tgagacctcaaacaactcatggcca

SEQ ID NO: 1449454 - DNA, 25 bp, Homo sapien
gaagagcagacgactcagtgccttt

SEQ ID NO: 1449455 - DNA, 25 bp, Homo sapien
gaggtactccagacctaaactcaaa

SEQ ID NO: 1449456 - DNA, 25 bp, Homo sapien
ctccctatgaggtactccagaccta

SEQ ID NO: 1449457 - DNA, 25 bp, Homo sapien
ctttaagagaagagcagacgactca

SEQ ID NO: 1449458 - DNA, 25 bp, Homo sapien
ggctccgctggcctgggataaggag

SEQ ID NO: 1449459 - DNA, 25 bp, Homo sapien
ctctggctggaagcccgacgaaagc

SEQ ID NO: 1449460 - DNA, 25 bp, Homo sapien
ctggtggcatcacccgatgctggct

SEQ ID NO: 1449461 - DNA, 25 bp, Homo sapien
ggcggtggtataggccgagggccca

SEQ ID NO: 1449462 - DNA, 25 bp, Homo sapien
aacaagctgagccggggaggaccaa

SEQ ID NO: 1449463 - DNA, 25 bp, Homo sapien
aagctgagccggggaggaccaaggc

SEQ ID NO: 1449464 - DNA, 25 bp, Homo sapien
ctgcaacaagctgagccggggagga

SEQ ID NO: 1449465 - DNA, 25 bp, Homo sapien
gcaacaagctgagccggggaggacc

SEQ ID NO: 1449466 - DNA, 25 bp, Homo sapien
cagggtgccctgactcagtgagcag

SEQ ID NO: 1449467 - DNA, 25 bp, Homo sapien
tgccctgactcagtgagcaggccca

SEQ ID NO: 1449468 - DNA, 25 bp, Homo sapien
gccctgactcagtgagcaggcccag

SEQ ID NO: 1449469 - DNA, 25 bp, Homo sapien
ggtgccctgactcagtgagcaggcc

SEQ ID NO: 1449470 - DNA, 25 bp, Homo sapien
ctagtccctgtttctgaaggacatg

SEQ ID NO: 1449471 - DNA, 25 bp, Homo sapien
ccctgtttctgaaggacatggagaa

SEQ ID NO: 1449472 - DNA, 25 bp, Homo sapien
cagaagaaacacaagaaggtcctca

SEQ ID NO: 1449473 - DNA, 25 bp, Homo sapien
agaagaaacacaagaaggtcctcac

SEQ ID NO: 1449474 - DNA, 25 bp, Homo sapien
tagagatagtctccagacagggagc

SEQ ID NO: 1449475 - DNA, 25 bp, Homo sapien
gatgctctagcagtttgcccggcaa

SEQ ID NO: 1449476 - DNA, 25 bp, Homo sapien
gcttgctgtaaaagtctaccccagg

SEQ ID NO: 1449477 - DNA, 25 bp, Homo sapien
gaaatccggcggttcttgccaggcg

SEQ ID NO: 1449478 - DNA, 25 bp, Homo sapien
tgccaacgtcagttctggagggttg

SEQ ID NO: 1449479 - DNA, 25 bp, Homo sapien
tcctgccaacgtcagttctggaggg

SEQ ID NO: 1449480 - DNA, 25 bp, Homo sapien
tctacttcctgccaacgtcagttct

SEQ ID NO: 1449481 - DNA, 25 bp, Homo sapien
cgtcagttctggagggttgtgacat

SEQ ID NO: 1449482 - DNA, 25 bp, Homo sapien
tttgaagaggacagctctcatacac

SEQ ID NO: 1449483 - DNA, 25 bp, Homo sapien
gagatggaagcaaagcttctccagt

SEQ ID NO: 1449484 - DNA, 25 bp, Homo sapien
agaggcaccttctattagccaagaa

SEQ ID NO: 1449485 - DNA, 25 bp, Homo sapien
ggtcaacatacacctaacacaggat

SEQ ID NO: 1449486 - DNA, 25 bp, Homo sapien
tgtattaaggtcaagcaagccggct

SEQ ID NO: 1449487 - DNA, 25 bp, Homo sapien
taaactaaagcagccgcacatggtc

SEQ ID NO: 1449488 - DNA, 25 bp, Homo sapien
tagccatgtcggtcccttgaaagag

SEQ ID NO: 1449489 - DNA, 25 bp, Homo sapien
aatggaaagctctcaagcaaggcgg

SEQ ID NO: 1449490 - DNA, 25 bp, Homo sapien
tcatccagttcaccccaggttccaa

SEQ ID NO: 1449491 - DNA, 25 bp, Homo sapien
aagaaccaatccttctcatccagtt

SEQ ID NO: 1449492 - DNA, 25 bp, Homo sapien
agttcaccccaggttccaagggcat

SEQ ID NO: 1449493 - DNA, 25 bp, Homo sapien
ccaagaaccaatccttctcatccag

SEQ ID NO: 1449494 - DNA, 25 bp, Homo sapien
tctctgcgttccagcaggctgaggg

SEQ ID NO: 1449495 - DNA, 25 bp, Homo sapien
ccacgccgaggtcacattcttagtg

SEQ ID NO: 1449496 - DNA, 25 bp, Homo sapien
gagaatgccacagaaggagcctcag

SEQ ID NO: 1449497 - DNA, 25 bp, Homo sapien
cagaagagcttcacaagagccctct

SEQ ID NO: 1449498 - DNA, 25 bp, Homo sapien
tcaaggtgttagtccctcccagggc

SEQ ID NO: 1449499 - DNA, 25 bp, Homo sapien
tcctgagtgtaggaacctcttgccc

SEQ ID NO: 1449500 - DNA, 25 bp, Homo sapien
caggccctggaaatggtaagacttc

SEQ ID NO: 1449501 - DNA, 25 bp, Homo sapien
tcccagggccatttgcattaaaaag

SEQ ID NO: 1449502 - DNA, 25 bp, Homo sapien
cagggtgtgaccgtgtaagcatccg

SEQ ID NO: 1449503 - DNA, 25 bp, Homo sapien
tacagcccactgtagcaacgggagt

SEQ ID NO: 1449504 - DNA, 25 bp, Homo sapien
actgcttaagctggatgagcgacca

SEQ ID NO: 1449505 - DNA, 25 bp, Homo sapien
tccataggaactgtgtcgaaacacc

SEQ ID NO: 1449506 - DNA, 25 bp, Homo sapien
tcaaaatggaatccttttggccctc

SEQ ID NO: 1449507 - DNA, 25 bp, Homo sapien
tctacctggcaaggcaaactgtagt

SEQ ID NO: 1449508 - DNA, 25 bp, Homo sapien
tgattcttctacctggcaaggcaaa

SEQ ID NO: 1449509 - DNA, 25 bp, Homo sapien
tggaatccttttggccctctactct

SEQ ID NO: 1449510 - DNA, 25 bp, Homo sapien
gcctctgctaggtgagacttcctac

SEQ ID NO: 1449511 - DNA, 25 bp, Homo sapien
tctctgaaatactgtgaagcctctg

SEQ ID NO: 1449512 - DNA, 25 bp, Homo sapien
tcaggactacagtgaacctctctct

SEQ ID NO: 1449513 - DNA, 25 bp, Homo sapien
gacttcctacagagagttctcagga

SEQ ID NO: 1449514 - DNA, 25 bp, Homo sapien
cacagcctgggtctagggctccagc

SEQ ID NO: 1449515 - DNA, 25 bp, Homo sapien
gcagccacagcctgggtctagggct

SEQ ID NO: 1449516 - DNA, 25 bp, Homo sapien
ccaaaggccaaaggagaagcagcca

SEQ ID NO: 1449517 - DNA, 25 bp, Homo sapien
gccacagcctgggtctagggctcca

SEQ ID NO: 1449518 - DNA, 25 bp, Homo sapien
tctgcctggccatatcccaaatagg

SEQ ID NO: 1449519 - DNA, 25 bp, Homo sapien
aataggtagtttagagcaaggagga

SEQ ID NO: 1449520 - DNA, 25 bp, Homo sapien
ggtagccgcctgctaaagaatctgg

SEQ ID NO: 1449521 - DNA, 25 bp, Homo sapien
tggcccacttcttggagcccgggta

SEQ ID NO: 1449522 - DNA, 25 bp, Homo sapien
gcaaagggcgcaaggaccagcttgt

SEQ ID NO: 1449523 - DNA, 25 bp, Homo sapien
ggctctgctgcaacatccgacgtgt

SEQ ID NO: 1449524 - DNA, 25 bp, Homo sapien
gcctcttgcaccagcgcgagaggag

SEQ ID NO: 1449525 - DNA, 25 bp, Homo sapien
cccgggtgagacaatagcggcagca

SEQ ID NO: 1449526 - DNA, 25 bp, Homo sapien
cgcccgaacagggacttgaaccctg

SEQ ID NO: 1449527 - DNA, 25 bp, Homo sapien
ttgaaccctggaccctcagattaaa

SEQ ID NO: 1449528 - DNA, 25 bp, Homo sapien
cctcagattaaaagtctgatgctct

SEQ ID NO: 1449529 - DNA, 25 bp, Homo sapien
cctggaccctcagattaaaagtctg

SEQ ID NO: 1449530 - DNA, 25 bp, Homo sapien
gcattggaggttcttcccttccgta

SEQ ID NO: 1449531 - DNA, 25 bp, Homo sapien
ccctttgctatggagctggtgttga

SEQ ID NO: 1449532 - DNA, 25 bp, Homo sapien
gaaaactgaacatggcattgaagag

SEQ ID NO: 1449533 - DNA, 25 bp, Homo sapien
ttccgtagccatcagtaatttgagc

SEQ ID NO: 1449534 - DNA, 25 bp, Homo sapien
taaggaaggttactgccctgtgttc

SEQ ID NO: 1449535 - DNA, 25 bp, Homo sapien
cactttggagaagagaataaggctc

SEQ ID NO: 1449536 - DNA, 25 bp, Homo sapien
gagctttcttgggttacacagccag

SEQ ID NO: 1449537 - DNA, 25 bp, Homo sapien
tctgtatctagcattgggagccagg

SEQ ID NO: 1449538 - DNA, 25 bp, Homo sapien
ttctggatttgacttattaactgct

SEQ ID NO: 1449539 - DNA, 25 bp, Homo sapien
tctggatttgacttattaactgctt

SEQ ID NO: 1449540 - DNA, 25 bp, Homo sapien
gttctggatttgacttattaactgc

SEQ ID NO: 1449541 - DNA, 25 bp, Homo sapien
ctggggagtacaatcccaaagtgct

SEQ ID NO: 1449542 - DNA, 25 bp, Homo sapien
tctatggaagggtgcatctcacgga

SEQ ID NO: 1449543 - DNA, 25 bp, Homo sapien
gaaataaattttcgaagctgcaaat

SEQ ID NO: 1449544 - DNA, 25 bp, Homo sapien
agtctggcctctgttagaaataaat

SEQ ID NO: 1449545 - DNA, 25 bp, Homo sapien
acttctgtgttgttcccgtattggc

SEQ ID NO: 1449546 - DNA, 25 bp, Homo sapien
gagatggaagccgagcagagcgtgg

SEQ ID NO: 1449547 - DNA, 25 bp, Homo sapien
ctggagatggaagccgagcagagcg

SEQ ID NO: 1449548 - DNA, 25 bp, Homo sapien
gatggaagccgagcagagcgtggca

SEQ ID NO: 1449549 - DNA, 25 bp, Homo sapien
tggaagccgagcagagcgtggcagg

SEQ ID NO: 1449550 - DNA, 25 bp, Homo sapien
gaagctgagccgaatgttgccttgt

SEQ ID NO: 1449551 - DNA, 25 bp, Homo sapien
caggttgtagcccatttgggacaga

SEQ ID NO: 1449552 - DNA, 25 bp, Homo sapien
aactgggggctcaggttgtagccca

SEQ ID NO: 1449553 - DNA, 25 bp, Homo sapien
tacagctgtgtccttctcccggaag

SEQ ID NO: 1449554 - DNA, 25 bp, Homo sapien
gtagctaatggagcctgagttgtcc

SEQ ID NO: 1449555 - DNA, 25 bp, Homo sapien
agcctgagttgtcccagtcataact

SEQ ID NO: 1449556 - DNA, 25 bp, Homo sapien
tcccagtcataactgctggaagagc

SEQ ID NO: 1449557 - DNA, 25 bp, Homo sapien
gagttgtcccagtcataactgctgg

SEQ ID NO: 1449558 - DNA, 25 bp, Homo sapien
tgatcagagtcaccgactggaacca

SEQ ID NO: 1449559 - DNA, 25 bp, Homo sapien
tgaacaaggaccagttgcagttgac

SEQ ID NO: 1449560 - DNA, 25 bp, Homo sapien
tctcatcattgaacaaggaccagtt

SEQ ID NO: 1449561 - DNA, 25 bp, Homo sapien
tggcctgattaggtcttgtcaaaca

SEQ ID NO: 1449562 - DNA, 25 bp, Homo sapien
ctgctgggcaccgtaggaatttgga

SEQ ID NO: 1449563 - DNA, 25 bp, Homo sapien
gctgggcaccgtaggaatttggagg

SEQ ID NO: 1449564 - DNA, 25 bp, Homo sapien
tgggcaccgtaggaatttggaggtg

SEQ ID NO: 1449565 - DNA, 25 bp, Homo sapien
gggctgctgggcaccgtaggaattt

SEQ ID NO: 1449566 - DNA, 25 bp, Homo sapien
cagaggggaacatcccaggattgag

SEQ ID NO: 1449567 - DNA, 25 bp, Homo sapien
ttgaggtgtccatagggccctctac

SEQ ID NO: 1449568 - DNA, 25 bp, Homo sapien
catcccaggattgaggtgtccatag

SEQ ID NO: 1449569 - DNA, 25 bp, Homo sapien
caggattgaggtgtccatagggccc

SEQ ID NO: 1449570 - DNA, 25 bp, Homo sapien
agctggtggtccataaggccctcca

SEQ ID NO: 1449571 - DNA, 25 bp, Homo sapien
gctggtggtccataaggccctccag

SEQ ID NO: 1449572 - DNA, 25 bp, Homo sapien
ctccgcctccgtggcacaagcagtc

SEQ ID NO: 1449573 - DNA, 25 bp, Homo sapien
ggtttcctgggcataagtggtcttc

SEQ ID NO: 1449574 - DNA, 25 bp, Homo sapien
gagactatagactagcataaccaca

SEQ ID NO: 1449575 - DNA, 25 bp, Homo sapien
tagtctggcccttttgcaagacttt

SEQ ID NO: 1449576 - DNA, 25 bp, Homo sapien
tagtcatgaggcacctagtctggcc

SEQ ID NO: 1449577 - DNA, 25 bp, Homo sapien
cattttgaagaccaaggccctagaa

SEQ ID NO: 1449578 - DNA, 25 bp, Homo sapien
taaaaatgtccaaacgtgcagagac

SEQ ID NO: 1449579 - DNA, 25 bp, Homo sapien
tggtgtgttctcaagggtatgcatg

SEQ ID NO: 1449580 - DNA, 25 bp, Homo sapien
ttttggaatccttgccctagacagg

SEQ ID NO: 1449581 - DNA, 25 bp, Homo sapien
tatcttgggcgaaaagttcagagca

SEQ ID NO: 1449582 - DNA, 25 bp, Homo sapien
cttttagctgtagttattgggacca

SEQ ID NO: 1449583 - DNA, 25 bp, Homo sapien
gctgcaacgtgctgtagactatgaa

SEQ ID NO: 1449584 - DNA, 25 bp, Homo sapien
ggtaagccttgttcgagttgatatc

SEQ ID NO: 1449585 - DNA, 25 bp, Homo sapien
gatcttttgatgtgcactaatgcca

SEQ ID NO: 1449586 - DNA, 25 bp, Homo sapien
tattgaggcccctaaggctaaacaa

SEQ ID NO: 1449587 - DNA, 25 bp, Homo sapien
gatcctcattgaatcccctctggga

SEQ ID NO: 1449588 - DNA, 25 bp, Homo sapien
tagtggctaatgtggctccccaggc

SEQ ID NO: 1449589 - DNA, 25 bp, Homo sapien
tagagttaagtattgagtgccagtc

SEQ ID NO: 1449590 - DNA, 25 bp, Homo sapien
aatccgggagagcaattctgaagcc

SEQ ID NO: 1449591 - DNA, 25 bp, Homo sapien
tcagcacttggcaaggtagacctca

SEQ ID NO: 1449592 - DNA, 25 bp, Homo sapien
cagtcttgacgtccgtatgcctcag

SEQ ID NO: 1449593 - DNA, 25 bp, Homo sapien
caacaacttattgaatgtggccagc

SEQ ID NO: 1449594 - DNA, 25 bp, Homo sapien
tatttccgatcagagaatcacaaga

SEQ ID NO: 1449595 - DNA, 25 bp, Homo sapien
tctacatacacttgagtaggtggca

SEQ ID NO: 1449596 - DNA, 25 bp, Homo sapien
tgtggccagctcactagatgaggaa

SEQ ID NO: 1449597 - DNA, 25 bp, Homo sapien
tataaggtactctaatgcaatttca

SEQ ID NO: 1449598 - DNA, 25 bp, Homo sapien
tcaatggcataacgtgtttcctggg

SEQ ID NO: 1449599 - DNA, 25 bp, Homo sapien
cctgtataaggtactctaatgcaat

SEQ ID NO: 1449600 - DNA, 25 bp, Homo sapien
cctggtgctgtagatgtatcatttt

SEQ ID NO: 1449601 - DNA, 25 bp, Homo sapien
ttagtttccgagatctggcgtgttc

SEQ ID NO: 1449602 - DNA, 25 bp, Homo sapien
tttccgagatctggcgtgttcaggg

SEQ ID NO: 1449603 - DNA, 25 bp, Homo sapien
tagtttccgagatctggcgtgttca

SEQ ID NO: 1449604 - DNA, 25 bp, Homo sapien
agtttccgagatctggcgtgttcag

SEQ ID NO: 1449605 - DNA, 25 bp, Homo sapien
ttgactagaaaaagggtattggcca

SEQ ID NO: 1449606 - DNA, 25 bp, Homo sapien
agccaacaagaatattgactagaaa

SEQ ID NO: 1449607 - DNA, 25 bp, Homo sapien
atattgactagaaaaagggtattgg

SEQ ID NO: 1449608 - DNA, 25 bp, Homo sapien
aaagccaacaagaatattgactaga

SEQ ID NO: 1449609 - DNA, 25 bp, Homo sapien
ggacccaggtaatgttgctcaggca

SEQ ID NO: 1449610 - DNA, 25 bp, Homo sapien
cagaatgcatgtggaggctaacacc

SEQ ID NO: 1449611 - DNA, 25 bp, Homo sapien
tattcagcctcggtgtctggatgcc

SEQ ID NO: 1449612 - DNA, 25 bp, Homo sapien
gcatccccagggtcagtctgtaagt

SEQ ID NO: 1449613 - DNA, 25 bp, Homo sapien
ggcacccagcctattagatggtaac

SEQ ID NO: 1449614 - DNA, 25 bp, Homo sapien
tattagatggtaactatgcagagag

SEQ ID NO: 1449615 - DNA, 25 bp, Homo sapien
ccataggcgacatgacccctaaact

SEQ ID NO: 1449616 - DNA, 25 bp, Homo sapien
gactcttggagccataggcgacatg

SEQ ID NO: 1449617 - DNA, 25 bp, Homo sapien
cactcacgggaaatgcaaagcagac

SEQ ID NO: 1449618 - DNA, 25 bp, Homo sapien
ttgtgggtggcctataacacggtca

SEQ ID NO: 1449619 - DNA, 25 bp, Homo sapien
ttatcaggatgtgtacggcacccgc

SEQ ID NO: 1449620 - DNA, 25 bp, Homo sapien
tacttatgttgtgcaccgaggaggc

SEQ ID NO: 1449621 - DNA, 25 bp, Homo sapien
cagtttcgctgcagcttcaagggtt

SEQ ID NO: 1449622 - DNA, 25 bp, Homo sapien
ttgaatgacgtgcatcttatcagtc

SEQ ID NO: 1449623 - DNA, 25 bp, Homo sapien
cagtatcactaccttgggagagcct

SEQ ID NO: 1449624 - DNA, 25 bp, Homo sapien
tgcaaactccactcacattagcctt

SEQ ID NO: 1449625 - DNA, 25 bp, Homo sapien
ttatcaacactgttcgtgtgttcgt

SEQ ID NO: 1449626 - DNA, 25 bp, Homo sapien
cactgttcgtgtgttcgttggttgg

SEQ ID NO: 1449627 - DNA, 25 bp, Homo sapien
tgtgttcgttggttgggttgcaatt

SEQ ID NO: 1449628 - DNA, 25 bp, Homo sapien
ctgctgtagcaactttaaatattta

SEQ ID NO: 1449629 - DNA, 25 bp, Homo sapien
tgctttagatgacacaaacgactcc

SEQ ID NO: 1449630 - DNA, 25 bp, Homo sapien
tgtccctagaatatgaagctctggt

SEQ ID NO: 1449631 - DNA, 25 bp, Homo sapien
tctcctggacggcatgggagtgaaa

SEQ ID NO: 1449632 - DNA, 25 bp, Homo sapien
tctagttgtacagagacccctgccc

SEQ ID NO: 1449633 - DNA, 25 bp, Homo sapien
gtagcaaaatttagctccatctgga

SEQ ID NO: 1449634 - DNA, 25 bp, Homo sapien
acttggtagcaaaatttagctccat

SEQ ID NO: 1449635 - DNA, 25 bp, Homo sapien
tggtagcaaaatttagctccatctg

SEQ ID NO: 1449636 - DNA, 25 bp, Homo sapien
cttggtagcaaaatttagctccatc

SEQ ID NO: 1449637 - DNA, 25 bp, Homo sapien
tgctgtagcctaacagtccaggacc

SEQ ID NO: 1449638 - DNA, 25 bp, Homo sapien
agcctaacagtccaggacctgggga

SEQ ID NO: 1449639 - DNA, 25 bp, Homo sapien
tgtagcctaacagtccaggacctgg

SEQ ID NO: 1449640 - DNA, 25 bp, Homo sapien
gtagcctaacagtccaggacctggg

SEQ ID NO: 1449641 - DNA, 25 bp, Homo sapien
cgtgtcttttcagcctgagggatct

SEQ ID NO: 1449642 - DNA, 25 bp, Homo sapien
gagggatctaaagccttgggacttc

SEQ ID NO: 1449643 - DNA, 25 bp, Homo sapien
cctgagggatctaaagccttgggac

SEQ ID NO: 1449644 - DNA, 25 bp, Homo sapien
tagctattgactgacgaggggctct

SEQ ID NO: 1449645 - DNA, 25 bp, Homo sapien
gctgatggtcttcgcagagcctgct

SEQ ID NO: 1449646 - DNA, 25 bp, Homo sapien
tgatggtcttcgcagagcctgctgt

SEQ ID NO: 1449647 - DNA, 25 bp, Homo sapien
atggtcttcgcagagcctgctgtct

SEQ ID NO: 1449648 - DNA, 25 bp, Homo sapien
ttgctgatggtcttcgcagagcctg

SEQ ID NO: 1449649 - DNA, 25 bp, Homo sapien
ggctctagccaaagtccctcctgtt

SEQ ID NO: 1449650 - DNA, 25 bp, Homo sapien
ggcctcaagcacgtgggtccatgtc

SEQ ID NO: 1449651 - DNA, 25 bp, Homo sapien
gaaagtcagcttcggaatgccgagc

SEQ ID NO: 1449652 - DNA, 25 bp, Homo sapien
caactttttcgaggctgcagaagca

SEQ ID NO: 1449653 - DNA, 25 bp, Homo sapien
gtctccccttctgaggatctgggca

SEQ ID NO: 1449654 - DNA, 25 bp, Homo sapien
tctccccttctgaggatctgggcag

SEQ ID NO: 1449655 - DNA, 25 bp, Homo sapien
cacaacccggacagaaggggcactc

SEQ ID NO: 1449656 - DNA, 25 bp, Homo sapien
ggggagcagacacaacccggacaga

SEQ ID NO: 1449657 - DNA, 25 bp, Homo sapien
gagcagacacaacccggacagaagg

SEQ ID NO: 1449658 - DNA, 25 bp, Homo sapien
acacaacccggacagaaggggcact

SEQ ID NO: 1449659 - DNA, 25 bp, Homo sapien
ccagtactccgtggcctgaaggagg

SEQ ID NO: 1449660 - DNA, 25 bp, Homo sapien
tctgtggcaagaagtggcctctttg

SEQ ID NO: 1449661 - DNA, 25 bp, Homo sapien
tggcccatacacaagccaactgggt

SEQ ID NO: 1449662 - DNA, 25 bp, Homo sapien
aaggtgggccgctagcccagctgcc

SEQ ID NO: 1449663 - DNA, 25 bp, Homo sapien
ctggaggagagcacggcccacaacc

SEQ ID NO: 1449664 - DNA, 25 bp, Homo sapien
aggagagcacggcccacaaccacac

SEQ ID NO: 1449665 - DNA, 25 bp, Homo sapien
gagcacggcccacaaccacactaac

SEQ ID NO: 1449666 - DNA, 25 bp, Homo sapien
tggaggagagcacggcccacaacca

SEQ ID NO: 1449667 - DNA, 25 bp, Homo sapien
ttgggcagcatttcaaaccagcggc

SEQ ID NO: 1449668 - DNA, 25 bp, Homo sapien
caaacttgtcgatggagaccagctc

SEQ ID NO: 1449669 - DNA, 25 bp, Homo sapien
gaaatcacagtctcgggcatccgaa

SEQ ID NO: 1449670 - DNA, 25 bp, Homo sapien
aggtctaggaacttgagcccgggca

SEQ ID NO: 1449671 - DNA, 25 bp, Homo sapien
agccacccaagctagcaagagtggg

SEQ ID NO: 1449672 - DNA, 25 bp, Homo sapien
agtggcaccagccacccaagctagc

SEQ ID NO: 1449673 - DNA, 25 bp, Homo sapien
cacgggcacagcggcagtggcacca

SEQ ID NO: 1449674 - DNA, 25 bp, Homo sapien
gaacatgccagggtaccacgggcac

SEQ ID NO: 1449675 - DNA, 25 bp, Homo sapien
tcagtcattgccaggccccatcagg

SEQ ID NO: 1449676 - DNA, 25 bp, Homo sapien
agtcattctacaccgggcgtcactt

SEQ ID NO: 1449677 - DNA, 25 bp, Homo sapien
agggtaagggtcagcaaccctgcca

SEQ ID NO: 1449678 - DNA, 25 bp, Homo sapien
gcaggggaccattcacaagaagagt

SEQ ID NO: 1449679 - DNA, 25 bp, Homo sapien
gcttctaaaatctgggatgggctcc

SEQ ID NO: 1449680 - DNA, 25 bp, Homo sapien
ttgaggttaccgtgacatgccaccc

SEQ ID NO: 1449681 - DNA, 25 bp, Homo sapien
ttgactcaacaagccaaaggagctg

SEQ ID NO: 1449682 - DNA, 25 bp, Homo sapien
tacaagaatcaacccaagtccaggg

SEQ ID NO: 1449683 - DNA, 25 bp, Homo sapien
aagtctcagaggaaagatgtggcat

SEQ ID NO: 1449684 - DNA, 25 bp, Homo sapien
aaatgagtcccttcaactctagttg

SEQ ID NO: 1449685 - DNA, 25 bp, Homo sapien
ggcattcctgagtgtcttccatgta

SEQ ID NO: 1449686 - DNA, 25 bp, Homo sapien
gagtcccttcaactctagttgttgc

SEQ ID NO: 1449687 - DNA, 25 bp, Homo sapien
aggaaacagcattcgaggcaccatc

SEQ ID NO: 1449688 - DNA, 25 bp, Homo sapien
gaggaaacagcattcgaggcaccat

SEQ ID NO: 1449689 - DNA, 25 bp, Homo sapien
ggaaacagcattcgaggcaccatct

SEQ ID NO: 1449690 - DNA, 25 bp, Homo sapien
tgaaggcccgcttcctggttgatgg

SEQ ID NO: 1449691 - DNA, 25 bp, Homo sapien
ctgtagcaaacggagcctgtagaac

SEQ ID NO: 1449692 - DNA, 25 bp, Homo sapien
ttcagaccatagaggccaccaaaca

SEQ ID NO: 1449693 - DNA, 25 bp, Homo sapien
tgccctgtaacatcatcacactgag

SEQ ID NO: 1449694 - DNA, 25 bp, Homo sapien
tgatgggggaggtcactttctctcc

SEQ ID NO: 1449695 - DNA, 25 bp, Homo sapien
tctcaaagggtagaccccttggctg

SEQ ID NO: 1449696 - DNA, 25 bp, Homo sapien
tgacattccacagttgccatctggg

SEQ ID NO: 1449697 - DNA, 25 bp, Homo sapien
agggtagaccccttggctggcctag

SEQ ID NO: 1449698 - DNA, 25 bp, Homo sapien
cagtatttttagacccagctggaag

SEQ ID NO: 1449699 - DNA, 25 bp, Homo sapien
taatccacggattcatgaagggcta

SEQ ID NO: 1449700 - DNA, 25 bp, Homo sapien
tatttacagccgattggaaagggca

SEQ ID NO: 1449701 - DNA, 25 bp, Homo sapien
tgtcattcaaaagtggcagtcgctg

SEQ ID NO: 1449702 - DNA, 25 bp, Homo sapien
gagggtaagcctgtttggcccactg

SEQ ID NO: 1449703 - DNA, 25 bp, Homo sapien
ggacatctgtcttacggccacctaa

SEQ ID NO: 1449704 - DNA, 25 bp, Homo sapien
ggccacctaagagaatgaggtttaa

SEQ ID NO: 1449705 - DNA, 25 bp, Homo sapien
tattcaagtgctcctggaatggctt

SEQ ID NO: 1449706 - DNA, 25 bp, Homo sapien
cactggattggtgaactccctgcca

SEQ ID NO: 1449707 - DNA, 25 bp, Homo sapien
gcctgtaaaggcatctgtgagctgt

SEQ ID NO: 1449708 - DNA, 25 bp, Homo sapien
taccaagaaccaatgagttgatgcc

SEQ ID NO: 1449709 - DNA, 25 bp, Homo sapien
tctttccagaggaccctcaaggctg

SEQ ID NO: 1449710 - DNA, 25 bp, Homo sapien
atgtgatctccccaaggcctgagga

SEQ ID NO: 1449711 - DNA, 25 bp, Homo sapien
cacaggaagggtagccactgcagaa

SEQ ID NO: 1449712 - DNA, 25 bp, Homo sapien
tgctgcagcatagagaaagtacggt

SEQ ID NO: 1449713 - DNA, 25 bp, Homo sapien
gactgaagacccacagctaaaggtg

SEQ ID NO: 1449714 - DNA, 25 bp, Homo sapien
gaggctattacgctgctgtcgcaag

SEQ ID NO: 1449715 - DNA, 25 bp, Homo sapien
cagcctaggccccacaaaatgagag

SEQ ID NO: 1449716 - DNA, 25 bp, Homo sapien
gatccactgatacgtcaggccaagg

SEQ ID NO: 1449717 - DNA, 25 bp, Homo sapien
gactcttttagaaccggatccactg

SEQ ID NO: 1449718 - DNA, 25 bp, Homo sapien
caatgagaaggtgattccagcagcc

SEQ ID NO: 1449719 - DNA, 25 bp, Homo sapien
cccaggtgctgtttaggaggtagac

SEQ ID NO: 1449720 - DNA, 25 bp, Homo sapien
gactcccagttgatggcgtgcagaa

SEQ ID NO: 1449721 - DNA, 25 bp, Homo sapien
tgtagcaggagaatcacgactctgg

SEQ ID NO: 1449722 - DNA, 25 bp, Homo sapien
gaacagagctaatcagctggcaagt

SEQ ID NO: 1449723 - DNA, 25 bp, Homo sapien
ctgtgggtctttgaacgagcctggt

SEQ ID NO: 1449724 - DNA, 25 bp, Homo sapien
tggcaagtccagatacaagtgtggt

SEQ ID NO: 1449725 - DNA, 25 bp, Homo sapien
caagtgtggtcagcttgagacatgg

SEQ ID NO: 1449726 - DNA, 25 bp, Homo sapien
gcgctccttgagagcgccgcgcgtt

SEQ ID NO: 1449727 - DNA, 25 bp, Homo sapien
gcgttcgcaggtgcccggagcaggc

SEQ ID NO: 1449728 - DNA, 25 bp, Homo sapien
tggagttatcctgggagcggctcca

SEQ ID NO: 1449729 - DNA, 25 bp, Homo sapien
gcgccctccccaacgtggagttatc

SEQ ID NO: 1449730 - DNA, 25 bp, Homo sapien
tgtctttcgatgctctggcattttg

SEQ ID NO: 1449731 - DNA, 25 bp, Homo sapien
acttcccatgggccaattcttcagg

SEQ ID NO: 1449732 - DNA, 25 bp, Homo sapien
gggagccactttgtctttcgatgct

SEQ ID NO: 1449733 - DNA, 25 bp, Homo sapien
gagaagctcaagaaaaagacgtcct

SEQ ID NO: 1449734 - DNA, 25 bp, Homo sapien
tggtgaggtagccgcatggactcaa

SEQ ID NO: 1449735 - DNA, 25 bp, Homo sapien
aagagcagtttccaggtatgcctgg

SEQ ID NO: 1449736 - DNA, 25 bp, Homo sapien
gagaagctggtgaggtagccgcatg

SEQ ID NO: 1449737 - DNA, 25 bp, Homo sapien
gacatcatcattggcccttctcccc

SEQ ID NO: 1449738 - DNA, 25 bp, Homo sapien
tctaaggcatccattcgatagtgct

SEQ ID NO: 1449739 - DNA, 25 bp, Homo sapien
caggtgcctcggaccctgggtcaga

SEQ ID NO: 1449740 - DNA, 25 bp, Homo sapien
aaggcatccattcgatagtgctcca

SEQ ID NO: 1449741 - DNA, 25 bp, Homo sapien
gggtctaaggcatccattcgatagt

SEQ ID NO: 1449742 - DNA, 25 bp, Homo sapien
ccagatcaaaggaagtcaggtgtgt

SEQ ID NO: 1449743 - DNA, 25 bp, Homo sapien
tgtgttccggggggtatggctctag

SEQ ID NO: 1449744 - DNA, 25 bp, Homo sapien
tcaaaggaagtcaggtgtgttccgg

SEQ ID NO: 1449745 - DNA, 25 bp, Homo sapien
gcttcccagatcaaaggaagtcagg

SEQ ID NO: 1449746 - DNA, 25 bp, Homo sapien
aagggaaccgcctcagcagaggtgt

SEQ ID NO: 1449747 - DNA, 25 bp, Homo sapien
ccaagccaagtcctgaaagaggcac

SEQ ID NO: 1449748 - DNA, 25 bp, Homo sapien
aatggaaacactatctcaggacagg

SEQ ID NO: 1449749 - DNA, 25 bp, Homo sapien
tcatttgccattccaggtactgagt

SEQ ID NO: 1449750 - DNA, 25 bp, Homo sapien
caaatcagaaggttcccaatgagct

SEQ ID NO: 1449751 - DNA, 25 bp, Homo sapien
tggaggctgttaggatactctggcc

SEQ ID NO: 1449752 - DNA, 25 bp, Homo sapien
tcctgatccttagcaggcagagcag

SEQ ID NO: 1449753 - DNA, 25 bp, Homo sapien
tagacctgagctttcgatctggtgg

SEQ ID NO: 1449754 - DNA, 25 bp, Homo sapien
tgagccgagatcgcaccactgcact

SEQ ID NO: 1449755 - DNA, 25 bp, Homo sapien
gagaatagtgggaacccaggaggcg

SEQ ID NO: 1449756 - DNA, 25 bp, Homo sapien
agcttgtagtgagccgagatcgcac

SEQ ID NO: 1449757 - DNA, 25 bp, Homo sapien
ccagcctgggcgacagagcgagact

SEQ ID NO: 1449758 - DNA, 25 bp, Homo sapien
acacttgatgtgctgactactcccg

SEQ ID NO: 1449759 - DNA, 25 bp, Homo sapien
taataagcttatagtccggagagat

SEQ ID NO: 1449760 - DNA, 25 bp, Homo sapien
tcaccccggtgccaaacacttgatg

SEQ ID NO: 1449761 - DNA, 25 bp, Homo sapien
ggtgtttgttctgcggagcttccca

SEQ ID NO: 1449762 - DNA, 25 bp, Homo sapien
gaggcgccgccggactaaggtttca

SEQ ID NO: 1449763 - DNA, 25 bp, Homo sapien
tgccaatgggcaatggtcacacggt

SEQ ID NO: 1449764 - DNA, 25 bp, Homo sapien
taccagcaggtttcagggacagacc

SEQ ID NO: 1449765 - DNA, 25 bp, Homo sapien
caggaaccggcatctggaatccctt

SEQ ID NO: 1449766 - DNA, 25 bp, Homo sapien
ccttgatgcatctcctgggggcaat

SEQ ID NO: 1449767 - DNA, 25 bp, Homo sapien
gatgcatctcctgggggcaattaaa

SEQ ID NO: 1449768 - DNA, 25 bp, Homo sapien
tcccttgatgcatctcctgggggca

SEQ ID NO: 1449769 - DNA, 25 bp, Homo sapien
tttcttctctcccttgatgcatctc

SEQ ID NO: 1449770 - DNA, 25 bp, Homo sapien
cagactgtagcaggttaattggctg

SEQ ID NO: 1449771 - DNA, 25 bp, Homo sapien
ccaagtcaaactggcccaagctcat

SEQ ID NO: 1449772 - DNA, 25 bp, Homo sapien
gagaaccagactgtagcaggttaat

SEQ ID NO: 1449773 - DNA, 25 bp, Homo sapien
gggctgacagattccaagtcaaact

SEQ ID NO: 1449774 - DNA, 25 bp, Homo sapien
gcttgctacacaactatcattggga

SEQ ID NO: 1449775 - DNA, 25 bp, Homo sapien
gactctgttggtttgctgattctga

SEQ ID NO: 1449776 - DNA, 25 bp, Homo sapien
gatttcctcctagtgcattttgtcc

SEQ ID NO: 1449777 - DNA, 25 bp, Homo sapien
ggtagtcactaatcaaccttctgac

SEQ ID NO: 1449778 - DNA, 25 bp, Homo sapien
ttgctccacttggtccgtttccctc

SEQ ID NO: 1449779 - DNA, 25 bp, Homo sapien
agtggggcgactggtcctctgccag

SEQ ID NO: 1449780 - DNA, 25 bp, Homo sapien
tcagtggggcgactggtcctctgcc

SEQ ID NO: 1449781 - DNA, 25 bp, Homo sapien
agcacttgctccacttggtccgttt

SEQ ID NO: 1449782 - DNA, 25 bp, Homo sapien
gaagcaaaacgctctgtcccagaaa

SEQ ID NO: 1449783 - DNA, 25 bp, Homo sapien
caaaagccaccagtcaaaggggagc

SEQ ID NO: 1449784 - DNA, 25 bp, Homo sapien
gaacacacaggtctggatcaccatc

SEQ ID NO: 1449785 - DNA, 25 bp, Homo sapien
tccacggtcataaaatttggattgg

SEQ ID NO: 1449786 - DNA, 25 bp, Homo sapien
gcactgctatggatggtgggagaca

SEQ ID NO: 1449787 - DNA, 25 bp, Homo sapien
ggcactgctatggatggtgggagac

SEQ ID NO: 1449788 - DNA, 25 bp, Homo sapien
cactgctatggatggtgggagacat

SEQ ID NO: 1449789 - DNA, 25 bp, Homo sapien
caggcactgctatggatggtgggag

SEQ ID NO: 1449790 - DNA, 25 bp, Homo sapien
tcccttcacaggtcaaataagctct

SEQ ID NO: 1449791 - DNA, 25 bp, Homo sapien
aacaggtatgaatgggatttggccc

SEQ ID NO: 1449792 - DNA, 25 bp, Homo sapien
tacaaaaacaggtatgcggtccggc

SEQ ID NO: 1449793 - DNA, 25 bp, Homo sapien
gatttggccccgtttgcagatccct

SEQ ID NO: 1449794 - DNA, 25 bp, Homo sapien
tcattctgctcaggctttctgtgga

SEQ ID NO: 1449795 - DNA, 25 bp, Homo sapien
tccctgtgccaccaaagccttcatt

SEQ ID NO: 1449796 - DNA, 25 bp, Homo sapien
catttattccctgtgccaccaaagc

SEQ ID NO: 1449797 - DNA, 25 bp, Homo sapien
tgtgccaccaaagccttcattctgc

SEQ ID NO: 1449798 - DNA, 25 bp, Homo sapien
cagggctctatctgttcttctaggt

SEQ ID NO: 1449799 - DNA, 25 bp, Homo sapien
tcagggctctatctgttcttctagg

SEQ ID NO: 1449800 - DNA, 25 bp, Homo sapien
agggctctatctgttcttctaggtc

SEQ ID NO: 1449801 - DNA, 25 bp, Homo sapien
gggctctatctgttcttctaggtcc

SEQ ID NO: 1449802 - DNA, 25 bp, Homo sapien
tgcacctttgatgaaaccggtctcc

SEQ ID NO: 1449803 - DNA, 25 bp, Homo sapien
cacctttgatgaaaccggtctcctt

SEQ ID NO: 1449804 - DNA, 25 bp, Homo sapien
ttttgcacctttgatgaaaccggtc

SEQ ID NO: 1449805 - DNA, 25 bp, Homo sapien
ggtctcctttctccgaccttggaca

SEQ ID NO: 1449806 - DNA, 25 bp, Homo sapien
ctgagcaggttaaacaatcttcccc

SEQ ID NO: 1449807 - DNA, 25 bp, Homo sapien
agcttctgccatctgcggctgtccg

SEQ ID NO: 1449808 - DNA, 25 bp, Homo sapien
ggagctagatccaccgcaaagtcca

SEQ ID NO: 1449809 - DNA, 25 bp, Homo sapien
cagagacccctgagcaggttaaaca

SEQ ID NO: 1449810 - DNA, 25 bp, Homo sapien
ggaggggaatcaagtgccttgtaga

SEQ ID NO: 1449811 - DNA, 25 bp, Homo sapien
aagtgccttgtagattattgtgcct

SEQ ID NO: 1449812 - DNA, 25 bp, Homo sapien
tggagaccttgtacaaccttttcca

SEQ ID NO: 1449813 - DNA, 25 bp, Homo sapien
tgtagattattgtgccttcatggat

SEQ ID NO: 1449814 - DNA, 25 bp, Homo sapien
aaaattatgcctcagacctcactgg

SEQ ID NO: 1449815 - DNA, 25 bp, Homo sapien
ggtagcaacatctgattaaacctga

SEQ ID NO: 1449816 - DNA, 25 bp, Homo sapien
cctgagctgaactgacataagttaa

SEQ ID NO: 1449817 - DNA, 25 bp, Homo sapien
tatttggtgcgaaaacctgagctga

SEQ ID NO: 1449818 - DNA, 25 bp, Homo sapien
tagagaaaagttggccccagagcaa

SEQ ID NO: 1449819 - DNA, 25 bp, Homo sapien
gttatagcactgataccccatgttg

SEQ ID NO: 1449820 - DNA, 25 bp, Homo sapien
cagggtgtttgatgccaaccggacc

SEQ ID NO: 1449821 - DNA, 25 bp, Homo sapien
tgaacgcaggcctatttgtcagcct

SEQ ID NO: 1449822 - DNA, 25 bp, Homo sapien
ctctgacttagagtaaagtggactt

SEQ ID NO: 1449823 - DNA, 25 bp, Homo sapien
gaaaaaccatccatgatgccctgca

SEQ ID NO: 1449824 - DNA, 25 bp, Homo sapien
ctggctgtgagttttgccctgactt

SEQ ID NO: 1449825 - DNA, 25 bp, Homo sapien
gaaagccccatgctgaatccaaact

SEQ ID NO: 1449826 - DNA, 25 bp, Homo sapien
agaagagatttgttgggtctccatc

SEQ ID NO: 1449827 - DNA, 25 bp, Homo sapien
acagaagagatttgttgggtctcca

SEQ ID NO: 1449828 - DNA, 25 bp, Homo sapien
cacatggagccccatgatgcaggcc

SEQ ID NO: 1449829 - DNA, 25 bp, Homo sapien
tgctcttagacttccttttagtcac

SEQ ID NO: 1449830 - DNA, 25 bp, Homo sapien
tgtactggaaacagtgataattccc

SEQ ID NO: 1449831 - DNA, 25 bp, Homo sapien
tactggaaacagtgataattccccc

SEQ ID NO: 1449832 - DNA, 25 bp, Homo sapien
gtactggaaacagtgataattcccc

SEQ ID NO: 1449833 - DNA, 25 bp, Homo sapien
ctggaaacagtgataattcccccat

SEQ ID NO: 1449834 - DNA, 25 bp, Homo sapien
tcccaaatgaagctacacttcggga

SEQ ID NO: 1449835 - DNA, 25 bp, Homo sapien
agtgaatatacagacagatggctgt

SEQ ID NO: 1449836 - DNA, 25 bp, Homo sapien
tgttgcagacaaagcttcccaaatg

SEQ ID NO: 1449837 - DNA, 25 bp, Homo sapien
ccaagaagacccctaagagtactgg

SEQ ID NO: 1449838 - DNA, 25 bp, Homo sapien
gctttttgcggagtggagactgcct

SEQ ID NO: 1449839 - DNA, 25 bp, Homo sapien
ccctgctttctcttgccgcttccct

SEQ ID NO: 1449840 - DNA, 25 bp, Homo sapien
ttttgcggagtggagactgcctgca

SEQ ID NO: 1449841 - DNA, 25 bp, Homo sapien
aggctttttgcggagtggagactgc

SEQ ID NO: 1449842 - DNA, 25 bp, Homo sapien
gagctgagccttacactctaggaga

SEQ ID NO: 1449843 - DNA, 25 bp, Homo sapien
taaaggttacatgaccagctgccac

SEQ ID NO: 1449844 - DNA, 25 bp, Homo sapien
gagccattgttctgtgcgggagcca

SEQ ID NO: 1449845 - DNA, 25 bp, Homo sapien
gaggctctcgagcagaagtggacca

SEQ ID NO: 1449846 - DNA, 25 bp, Homo sapien
tctgggttggagtcactatccagtt

SEQ ID NO: 1449847 - DNA, 25 bp, Homo sapien
ggttggagtcactatccagttgagc

SEQ ID NO: 1449848 - DNA, 25 bp, Homo sapien
gctttactatgagtggggccttgtc

SEQ ID NO: 1449849 - DNA, 25 bp, Homo sapien
gtcactatccagttgagctttacta

SEQ ID NO: 1449850 - DNA, 25 bp, Homo sapien
tggcaagcactataggccataaggg

SEQ ID NO: 1449851 - DNA, 25 bp, Homo sapien
cacggcagcctgactgaataggagt

SEQ ID NO: 1449852 - DNA, 25 bp, Homo sapien
gggcacttcataccccaaaagtcga

SEQ ID NO: 1449853 - DNA, 25 bp, Homo sapien
caaggtgcagagttgagggcacttc

SEQ ID NO: 1449854 - DNA, 25 bp, Homo sapien
tgtttaaccaggaacctagcaggcc

SEQ ID NO: 1449855 - DNA, 25 bp, Homo sapien
tatgtgctcaggagtcagctggcag

SEQ ID NO: 1449856 - DNA, 25 bp, Homo sapien
gaagtcatgtcagcatgaaggcccc

SEQ ID NO: 1449857 - DNA, 25 bp, Homo sapien
agggagcatcgaccccgctctgtgg

SEQ ID NO: 1449858 - DNA, 25 bp, Homo sapien
tttcttggaagactgtcaaagcatg

SEQ ID NO: 1449859 - DNA, 25 bp, Homo sapien
ttttcttggaagactgtcaaagcat

SEQ ID NO: 1449860 - DNA, 25 bp, Homo sapien
ttcttggaagactgtcaaagcatgc

SEQ ID NO: 1449861 - DNA, 25 bp, Homo sapien
agtgggccagcataaggtcctatca

SEQ ID NO: 1449862 - DNA, 25 bp, Homo sapien
tggccatagaaccacaggcctgagc

SEQ ID NO: 1449863 - DNA, 25 bp, Homo sapien
gcagcttccatagtctggccataga

SEQ ID NO: 1449864 - DNA, 25 bp, Homo sapien
tggaaggccctttacaagccacaca

SEQ ID NO: 1449865 - DNA, 25 bp, Homo sapien
tctgagacctgaacccggatgtcct

SEQ ID NO: 1449866 - DNA, 25 bp, Homo sapien
gatctgagacctgaacccggatgtc

SEQ ID NO: 1449867 - DNA, 25 bp, Homo sapien
gaagatctgagacctgaacccggat

SEQ ID NO: 1449868 - DNA, 25 bp, Homo sapien
gacctgaacccggatgtcctgacac

SEQ ID NO: 1449869 - DNA, 25 bp, Homo sapien
ctgatcaggacagggaacccaggtg

SEQ ID NO: 1449870 - DNA, 25 bp, Homo sapien
cataacagtgcctcgacatcttggt

SEQ ID NO: 1449871 - DNA, 25 bp, Homo sapien
cagaagtattaagttgacgttggga

SEQ ID NO: 1449872 - DNA, 25 bp, Homo sapien
tgcgtctcacacagaagtattaagt

SEQ ID NO: 1449873 - DNA, 25 bp, Homo sapien
gattcaggaactttcaagcctcagg

SEQ ID NO: 1449874 - DNA, 25 bp, Homo sapien
cagtgattctccttggacatgtagc

SEQ ID NO: 1449875 - DNA, 25 bp, Homo sapien
catctatatgtagggcagcttgtac

SEQ ID NO: 1449876 - DNA, 25 bp, Homo sapien
catgtagctataatgtggctctctc

SEQ ID NO: 1449877 - DNA, 25 bp, Homo sapien
catcaccatcaccacgtgatggctg

SEQ ID NO: 1449878 - DNA, 25 bp, Homo sapien
ccatcaccacgtgatggctgggtgc

SEQ ID NO: 1449879 - DNA, 25 bp, Homo sapien
tcaccatcaccacgtgatggctggg

SEQ ID NO: 1449880 - DNA, 25 bp, Homo sapien
tatgatcatgtgataacatcaccat

SEQ ID NO: 1449881 - DNA, 25 bp, Homo sapien
ttcagccatagagcgcatggtctta

SEQ ID NO: 1449882 - DNA, 25 bp, Homo sapien
cttcagccatagagcgcatggtctt

SEQ ID NO: 1449883 - DNA, 25 bp, Homo sapien
tgactattcccgatttggacaccat

SEQ ID NO: 1449884 - DNA, 25 bp, Homo sapien
ctgactattcccgatttggacacca

SEQ ID NO: 1449885 - DNA, 25 bp, Homo sapien
gctgactattcccgatttggacacc

SEQ ID NO: 1449886 - DNA, 25 bp, Homo sapien
taggagccctcaggttctaaagcta

SEQ ID NO: 1449887 - DNA, 25 bp, Homo sapien
taccccagtcctaggtgttggagga

SEQ ID NO: 1449888 - DNA, 25 bp, Homo sapien
ccgacccagtcattttggaggagca

SEQ ID NO: 1449889 - DNA, 25 bp, Homo sapien
ggagcagtgaaagcataccccagtc

SEQ ID NO: 1449890 - DNA, 25 bp, Homo sapien
aaccactgcaaaagccgtaagtgct

SEQ ID NO: 1449891 - DNA, 25 bp, Homo sapien
gccttttcctgaaccactgcaaaag

SEQ ID NO: 1449892 - DNA, 25 bp, Homo sapien
gcagccatcagagggctttggaaca

SEQ ID NO: 1449893 - DNA, 25 bp, Homo sapien
ccatcagagggctttggaacatgac

SEQ ID NO: 1449894 - DNA, 25 bp, Homo sapien
atatcaccttgagcaagttctccat

SEQ ID NO: 1449895 - DNA, 25 bp, Homo sapien
gttttccttagaagctgcactattt

SEQ ID NO: 1449896 - DNA, 25 bp, Homo sapien
ttaattgtttgagaaactgacctgc

SEQ ID NO: 1449897 - DNA, 25 bp, Homo sapien
tatgagaaggtgtctcgttgtggtt

SEQ ID NO: 1449898 - DNA, 25 bp, Homo sapien
attctaatagatatgagaaggtgtc

SEQ ID NO: 1449899 - DNA, 25 bp, Homo sapien
tattctttgagtttgggcatctcta

SEQ ID NO: 1449900 - DNA, 25 bp, Homo sapien
ttgggcatctctacctcatcgaagg

SEQ ID NO: 1449901 - DNA, 25 bp, Homo sapien
catcgaaggtgtctttctcactcca

SEQ ID NO: 1449902 - DNA, 25 bp, Homo sapien
tccacctcactctcttgttgtcttt

SEQ ID NO: 1449903 - DNA, 25 bp, Homo sapien
tcctttctgctgcagtgatgcaatc

SEQ ID NO: 1449904 - DNA, 25 bp, Homo sapien
ctcctttctgctgcagtgatgcaat

SEQ ID NO: 1449905 - DNA, 25 bp, Homo sapien
ctttctgctgcagtgatgcaatcat

SEQ ID NO: 1449906 - DNA, 25 bp, Homo sapien
cctttctgctgcagtgatgcaatca

SEQ ID NO: 1449907 - DNA, 25 bp, Homo sapien
agcgctttgcaaccagacttctaga

SEQ ID NO: 1449908 - DNA, 25 bp, Homo sapien
tatgctctagcaaagggaggccctt

SEQ ID NO: 1449909 - DNA, 25 bp, Homo sapien
caaatggtgcatcttataactcagg

SEQ ID NO: 1449910 - DNA, 25 bp, Homo sapien
tggtataagcacttgcagccgccag

SEQ ID NO: 1449911 - DNA, 25 bp, Homo sapien
tcttaagaaatctttagctctgtcc

SEQ ID NO: 1449912 - DNA, 25 bp, Homo sapien
catgtccagcactaacagattctta

SEQ ID NO: 1449913 - DNA, 25 bp, Homo sapien
tgtccagcactaacagattcttaag

SEQ ID NO: 1449914 - DNA, 25 bp, Homo sapien
tgttttaccccagagatggccatga

SEQ ID NO: 1449915 - DNA, 25 bp, Homo sapien
tgtcactctggcttcaaaccctgca

SEQ ID NO: 1449916 - DNA, 25 bp, Homo sapien
gacctgtctttgcaaggttagtgcc

SEQ ID NO: 1449917 - DNA, 25 bp, Homo sapien
gagctctccgtgagcatgccctgga

SEQ ID NO: 1449918 - DNA, 25 bp, Homo sapien
ggttagtgccttcttaccattcagg

SEQ ID NO: 1449919 - DNA, 25 bp, Homo sapien
tatgccgagtcctaagacaggtgct

SEQ ID NO: 1449920 - DNA, 25 bp, Homo sapien
tcccacagccggtgagatcttttgt

SEQ ID NO: 1449921 - DNA, 25 bp, Homo sapien
cataagatgaacagatcatggtccc

SEQ ID NO: 1449922 - DNA, 25 bp, Homo sapien
gagtgctgtcgctgctagcttgaga

SEQ ID NO: 1449923 - DNA, 25 bp, Homo sapien
gacactcattccatactgcaccgta

SEQ ID NO: 1449924 - DNA, 25 bp, Homo sapien
catactgcaccgtacatgccagcgt

SEQ ID NO: 1449925 - DNA, 25 bp, Homo sapien
gtacatgccagcgtacccattgcac

SEQ ID NO: 1449926 - DNA, 25 bp, Homo sapien
tcattccatactgcaccgtacatgc

SEQ ID NO: 1449927 - DNA, 25 bp, Homo sapien
gctgagcatcagtcgcctgtgacgt

SEQ ID NO: 1449928 - DNA, 25 bp, Homo sapien
cagatgcgtatctgagggtgtcaca

SEQ ID NO: 1449929 - DNA, 25 bp, Homo sapien
tggagggccgtctaatacatggact

SEQ ID NO: 1449930 - DNA, 25 bp, Homo sapien
ggacttataaactgactgcatgagc

SEQ ID NO: 1449931 - DNA, 25 bp, Homo sapien
caccctctgattcaacgtgatgcgt

SEQ ID NO: 1449932 - DNA, 25 bp, Homo sapien
cgtgatgcgtgtgcacatccaccat

SEQ ID NO: 1449933 - DNA, 25 bp, Homo sapien
taatgtgtacagtcgtggagacacc

SEQ ID NO: 1449934 - DNA, 25 bp, Homo sapien
tagtgtgactggtataggaatgtgt

SEQ ID NO: 1449935 - DNA, 25 bp, Homo sapien
tctgactgctcagcttcgcgcagag

SEQ ID NO: 1449936 - DNA, 25 bp, Homo sapien
aggagttctgactgctcagcttcgc

SEQ ID NO: 1449937 - DNA, 25 bp, Homo sapien
gagttctgactgctcagcttcgcgc

SEQ ID NO: 1449938 - DNA, 25 bp, Homo sapien
actgctcagcttcgcgcagagacaa

SEQ ID NO: 1449939 - DNA, 25 bp, Homo sapien
cagctaacaatgcagtggcttcggg

SEQ ID NO: 1449940 - DNA, 25 bp, Homo sapien
cggaggcctgcagctaacaatgcag

SEQ ID NO: 1449941 - DNA, 25 bp, Homo sapien
gcctgcagctaacaatgcagtggct

SEQ ID NO: 1449942 - DNA, 25 bp, Homo sapien
tccatctgaagtctgtccccggagg

SEQ ID NO: 1449943 - DNA, 25 bp, Homo sapien
ccttcttgatcggttagagacccac

SEQ ID NO: 1449944 - DNA, 25 bp, Homo sapien
ggttagagacccactggattccatt

SEQ ID NO: 1449945 - DNA, 25 bp, Homo sapien
aggtcccttcttgatcggttagaga

SEQ ID NO: 1449946 - DNA, 25 bp, Homo sapien
ggattccattgctatcaatcttgtg

SEQ ID NO: 1449947 - DNA, 25 bp, Homo sapien
tgtccaggaattccagttggccagc

SEQ ID NO: 1449948 - DNA, 25 bp, Homo sapien
cctggccgaaaagctggaccccagg

SEQ ID NO: 1449949 - DNA, 25 bp, Homo sapien
tctctcaggccgagcctggccgaaa

SEQ ID NO: 1449950 - DNA, 25 bp, Homo sapien
aggaattccagttggccagcgggca

SEQ ID NO: 1449951 - DNA, 25 bp, Homo sapien
tgtgcttgcctgtgccagtctgtgc

SEQ ID NO: 1449952 - DNA, 25 bp, Homo sapien
gaaaaccttgtcgtgtgttggagcc

SEQ ID NO: 1449953 - DNA, 25 bp, Homo sapien
gctcagggttcgcagggccagctct

SEQ ID NO: 1449954 - DNA, 25 bp, Homo sapien
tggagccccactcatagccttctgt

SEQ ID NO: 1449955 - DNA, 25 bp, Homo sapien
ccctgtggtccctttccgaaatgag

SEQ ID NO: 1449956 - DNA, 25 bp, Homo sapien
cttagcattaagtgggaccctgtgg

SEQ ID NO: 1449957 - DNA, 25 bp, Homo sapien
gtccctttccgaaatgagtctgcag

SEQ ID NO: 1449958 - DNA, 25 bp, Homo sapien
agtcttagcattaagtgggaccctg

SEQ ID NO: 1449959 - DNA, 25 bp, Homo sapien
gaaaggtctcaatcttgccacaagg

SEQ ID NO: 1449960 - DNA, 25 bp, Homo sapien
tgatgacactgacgcctatacctga

SEQ ID NO: 1449961 - DNA, 25 bp, Homo sapien
tatacctgagctctaggctgcctgg

SEQ ID NO: 1449962 - DNA, 25 bp, Homo sapien
tacaaagcaccgtaggagtcggact

SEQ ID NO: 1449963 - DNA, 25 bp, Homo sapien
ggttactgcgcatagctcccaggag

SEQ ID NO: 1449964 - DNA, 25 bp, Homo sapien
caatgcttgcagtttcctgggtacc

SEQ ID NO: 1449965 - DNA, 25 bp, Homo sapien
aaaagctagcttggcttcctgggca

SEQ ID NO: 1449966 - DNA, 25 bp, Homo sapien
gcagccagttcttcaggagcaaggc

SEQ ID NO: 1449967 - DNA, 25 bp, Homo sapien
cccttagcgcacagaggacaatcct

SEQ ID NO: 1449968 - DNA, 25 bp, Homo sapien
aggcccccccttagcgcacagagga

SEQ ID NO: 1449969 - DNA, 25 bp, Homo sapien
ttagcgcacagaggacaatcctcac

SEQ ID NO: 1449970 - DNA, 25 bp, Homo sapien
tgcaggcccccccttagcgcacaga

SEQ ID NO: 1449971 - DNA, 25 bp, Homo sapien
gatgacacctcgagcaagtctccag

SEQ ID NO: 1449972 - DNA, 25 bp, Homo sapien
tctccaggtgaaccggaaagcttcc

SEQ ID NO: 1449973 - DNA, 25 bp, Homo sapien
gaaatggagcatcccacagatccag

SEQ ID NO: 1449974 - DNA, 25 bp, Homo sapien
agttggtcagacattctaagcgccg

SEQ ID NO: 1449975 - DNA, 25 bp, Homo sapien
gatggccagtgttttaggtgtagtc

SEQ ID NO: 1449976 - DNA, 25 bp, Homo sapien
gccagtgttttaggtgtagtcacca

SEQ ID NO: 1449977 - DNA, 25 bp, Homo sapien
agtgttttaggtgtagtcaccacca

SEQ ID NO: 1449978 - DNA, 25 bp, Homo sapien
tggccagtgttttaggtgtagtcac

SEQ ID NO: 1449979 - DNA, 25 bp, Homo sapien
cataacttgattcctttgacatgag

SEQ ID NO: 1449980 - DNA, 25 bp, Homo sapien
agccagcacccacaaggtattccag

SEQ ID NO: 1449981 - DNA, 25 bp, Homo sapien
cagtccttataaacaggtgaggcca

SEQ ID NO: 1449982 - DNA, 25 bp, Homo sapien
tcggtaggcgttttgccaccctcag

SEQ ID NO: 1449983 - DNA, 25 bp, Homo sapien
ttaaggttgtgttaaaggcagctcc

SEQ ID NO: 1449984 - DNA, 25 bp, Homo sapien
gaggaaggtcacttagagcactgaa

SEQ ID NO: 1449985 - DNA, 25 bp, Homo sapien
ctctggactaggaggcaagtaactt

SEQ ID NO: 1449986 - DNA, 25 bp, Homo sapien
ggccaagatgaccttttcaaatcag

SEQ ID NO: 1449987 - DNA, 25 bp, Homo sapien
gacgttttgcaactgactcagggag

SEQ ID NO: 1449988 - DNA, 25 bp, Homo sapien
gaaaccaagctacttcacacgtgga

SEQ ID NO: 1449989 - DNA, 25 bp, Homo sapien
gacgatccagattaagcacttccag

SEQ ID NO: 1449990 - DNA, 25 bp, Homo sapien
gacatgcattgaggaccgaaggcaa

SEQ ID NO: 1449991 - DNA, 25 bp, Homo sapien
tcataacagttctgagattgctcct

SEQ ID NO: 1449992 - DNA, 25 bp, Homo sapien
cataacagttctgagattgctcctc

SEQ ID NO: 1449993 - DNA, 25 bp, Homo sapien
gcagctcatgtttctataccgtcct

SEQ ID NO: 1449994 - DNA, 25 bp, Homo sapien
ggcagctcatgtttctataccgtcc

SEQ ID NO: 1449995 - DNA, 25 bp, Homo sapien
catgtttctataccgtccttgtttt

SEQ ID NO: 1449996 - DNA, 25 bp, Homo sapien
gctcatgtttctataccgtccttgt

SEQ ID NO: 1449997 - DNA, 25 bp, Homo sapien
tggccagattatctctatagtggtc

SEQ ID NO: 1449998 - DNA, 25 bp, Homo sapien
ttgacaggaaacaattttctatagc

SEQ ID NO: 1449999 - DNA, 25 bp, Homo sapien
acactgacaagctgtttgacaggaa

SEQ ID NO: 1450000 - DNA, 25 bp, Homo sapien
ctctatagtggtctctctgccaatt

SEQ ID NO: 1450001 - DNA, 25 bp, Homo sapien
gcaagccagacaatgctcccaatgt

SEQ ID NO: 1450002 - DNA, 25 bp, Homo sapien
aagcaagccagacaatgctcccaat

SEQ ID NO: 1450003 - DNA, 25 bp, Homo sapien
gacaatgctcccaatgtgtccttac

SEQ ID NO: 1450004 - DNA, 25 bp, Homo sapien
gccagacaatgctcccaatgtgtcc

SEQ ID NO: 1450005 - DNA, 25 bp, Homo sapien
ctgtcaagggctggctgagttccgc

SEQ ID NO: 1450006 - DNA, 25 bp, Homo sapien
ctctgtcccctttgtagagtttcgg

SEQ ID NO: 1450007 - DNA, 25 bp, Homo sapien
tgagttccgcctgcactttaccctt

SEQ ID NO: 1450008 - DNA, 25 bp, Homo sapien
tacccttcgctgatccttccagagg

SEQ ID NO: 1450009 - DNA, 25 bp, Homo sapien
tttgatcctttaggccggcctgctt

SEQ ID NO: 1450010 - DNA, 25 bp, Homo sapien
ttcacacccagtagtggatggactt

SEQ ID NO: 1450011 - DNA, 25 bp, Homo sapien
ccttcacacccagtagtggatggac

SEQ ID NO: 1450012 - DNA, 25 bp, Homo sapien
ccccttcacacccagtagtggatgg

SEQ ID NO: 1450013 - DNA, 25 bp, Homo sapien
catccatcaaggaggtttggactgc

SEQ ID NO: 1450014 - DNA, 25 bp, Homo sapien
catcatttggtactccttgaagttc

SEQ ID NO: 1450015 - DNA, 25 bp, Homo sapien
tgaagttctatattggttgttttgg

SEQ ID NO: 1450016 - DNA, 25 bp, Homo sapien
gggtaaatacaatagagcctttgaa

SEQ ID NO: 1450017 - DNA, 25 bp, Homo sapien
caatagggtccacgctggtgacatc

SEQ ID NO: 1450018 - DNA, 25 bp, Homo sapien
gcagcaatagggtccacgctggtga

SEQ ID NO: 1450019 - DNA, 25 bp, Homo sapien
tagggtccacgctggtgacatccac

SEQ ID NO: 1450020 - DNA, 25 bp, Homo sapien
gaaggcagcaatagggtccacgctg

SEQ ID NO: 1450021 - DNA, 25 bp, Homo sapien
gattccctttcttcgtattctacat

SEQ ID NO: 1450022 - DNA, 25 bp, Homo sapien
atcttcaatatcaaactctgattcc

SEQ ID NO: 1450023 - DNA, 25 bp, Homo sapien
caatatcaaactctgattccctttc

SEQ ID NO: 1450024 - DNA, 25 bp, Homo sapien
tgattccctttcttcgtattctaca

SEQ ID NO: 1450025 - DNA, 25 bp, Homo sapien
gaaatggatgctatgatgggtcgaa

SEQ ID NO: 1450026 - DNA, 25 bp, Homo sapien
tgctatgatgggtcgaacaggatgc

SEQ ID NO: 1450027 - DNA, 25 bp, Homo sapien
gattctgtgcccagatagataccac

SEQ ID NO: 1450028 - DNA, 25 bp, Homo sapien
ctatgatgggtcgaacaggatgcca

SEQ ID NO: 1450029 - DNA, 25 bp, Homo sapien
catgctgccgggcagaacctgccac

SEQ ID NO: 1450030 - DNA, 25 bp, Homo sapien
gaacctgccacgatgtattccccat

SEQ ID NO: 1450031 - DNA, 25 bp, Homo sapien
gagttctcctctcgtcccatggaga

SEQ ID NO: 1450032 - DNA, 25 bp, Homo sapien
agctacatccaagaggagttctcct

SEQ ID NO: 1450033 - DNA, 25 bp, Homo sapien
cttccacatgttaagatttctctgc

SEQ ID NO: 1450034 - DNA, 25 bp, Homo sapien
tttctgcataggttcaggctctcca

SEQ ID NO: 1450035 - DNA, 25 bp, Homo sapien
taaactctgattattcgatctgccg

SEQ ID NO: 1450036 - DNA, 25 bp, Homo sapien
cgatctgccgtgttaattaaaaagc

SEQ ID NO: 1450037 - DNA, 25 bp, Homo sapien
ctcaattgacttaatggctgtggta

SEQ ID NO: 1450038 - DNA, 25 bp, Homo sapien
tccccttccgggcaaactcaattga

SEQ ID NO: 1450039 - DNA, 25 bp, Homo sapien
ggctgtggtattgcttgttccagtt

SEQ ID NO: 1450040 - DNA, 25 bp, Homo sapien
tgaaggaagcaacaagatcctgaga

SEQ ID NO: 1450041 - DNA, 25 bp, Homo sapien
cacaacgttcaaatcggagtcatcg

SEQ ID NO: 1450042 - DNA, 25 bp, Homo sapien
tcgcctatcaaaagatgccacaacg

SEQ ID NO: 1450043 - DNA, 25 bp, Homo sapien
tcgtccaccggcagaacaacatgtt

SEQ ID NO: 1450044 - DNA, 25 bp, Homo sapien
gatttcatgggacacacgagaacct

SEQ ID NO: 1450045 - DNA, 25 bp, Homo sapien
gaaagaacatcccactgtgacacta

SEQ ID NO: 1450046 - DNA, 25 bp, Homo sapien
aagggaatcgaaacctctggtcaca

SEQ ID NO: 1450047 - DNA, 25 bp, Homo sapien
tgatctcgtggatgatattggactt

SEQ ID NO: 1450048 - DNA, 25 bp, Homo sapien
tctggtcacagtcgcctgaaagaac

SEQ ID NO: 1450049 - DNA, 25 bp, Homo sapien
attattttagcaatgcctcttgtca

SEQ ID NO: 1450050 - DNA, 25 bp, Homo sapien
acaattcggccatcattacagccaa

SEQ ID NO: 1450051 - DNA, 25 bp, Homo sapien
gcctcttgtcaagaaatcccagatg

SEQ ID NO: 1450052 - DNA, 25 bp, Homo sapien
tacagccaactgcaagcagtgtgcc

SEQ ID NO: 1450053 - DNA, 25 bp, Homo sapien
ctgttaaaggtgcaagtcaaagcca

SEQ ID NO: 1450054 - DNA, 25 bp, Homo sapien
ccatgctgatacaatccaaagttcc

SEQ ID NO: 1450055 - DNA, 25 bp, Homo sapien
agtcaaagccatgctgatacaatcc

SEQ ID NO: 1450056 - DNA, 25 bp, Homo sapien
tgttaaaggtgcaagtcaaagccat

SEQ ID NO: 1450057 - DNA, 25 bp, Homo sapien
aaaattgaaacaaatacaagaatag

SEQ ID NO: 1450058 - DNA, 25 bp, Homo sapien
tgaaacaaatacaagaatagaggca

SEQ ID NO: 1450059 - DNA, 25 bp, Homo sapien
aattgaaacaaatacaagaatagag

SEQ ID NO: 1450060 - DNA, 25 bp, Homo sapien
ttgaaacaaatacaagaatagaggc

SEQ ID NO: 1450061 - DNA, 25 bp, Homo sapien
ctctggatagttctgcccaaaggac

SEQ ID NO: 1450062 - DNA, 25 bp, Homo sapien
tctggatagttctgcccaaaggact

SEQ ID NO: 1450063 - DNA, 25 bp, Homo sapien
gagttgatggcacatgtaccacata

SEQ ID NO: 1450064 - DNA, 25 bp, Homo sapien
agttgatggcacatgtaccacatag

SEQ ID NO: 1450065 - DNA, 25 bp, Homo sapien
ttgatggcacatgtaccacatagca

SEQ ID NO: 1450066 - DNA, 25 bp, Homo sapien
gttgatggcacatgtaccacatagc

SEQ ID NO: 1450067 - DNA, 25 bp, Homo sapien
gtggccgcccggtctcagctccggc

SEQ ID NO: 1450068 - DNA, 25 bp, Homo sapien
ctccccggccggcttcagcaacttg

SEQ ID NO: 1450069 - DNA, 25 bp, Homo sapien
cccggccggcttcagcaacttgcgt

SEQ ID NO: 1450070 - DNA, 25 bp, Homo sapien
cagctccggcaacaacaccttctcc

SEQ ID NO: 1450071 - DNA, 25 bp, Homo sapien
cgcgaagagactggcgcaagctccg

SEQ ID NO: 1450072 - DNA, 25 bp, Homo sapien
acgccgcgaagagactggcgcaagc

SEQ ID NO: 1450073 - DNA, 25 bp, Homo sapien
ctaagtggtggacgccgcgaagaga

SEQ ID NO: 1450074 - DNA, 25 bp, Homo sapien
agactggcgcaagctccgaagactt

SEQ ID NO: 1450075 - DNA, 25 bp, Homo sapien
cctgtatgtaggtggcgttgcaggg

SEQ ID NO: 1450076 - DNA, 25 bp, Homo sapien
cagggtgtttcggtctcgtgaaaat

SEQ ID NO: 1450077 - DNA, 25 bp, Homo sapien
catttgtaaagatatgctattgatc

SEQ ID NO: 1450078 - DNA, 25 bp, Homo sapien
taggtggcgttgcagggtgtttcgg

SEQ ID NO: 1450079 - DNA, 25 bp, Homo sapien
tcagtctacatcttgcctgaggtct

SEQ ID NO: 1450080 - DNA, 25 bp, Homo sapien
cagtctacatcttgcctgaggtctt

SEQ ID NO: 1450081 - DNA, 25 bp, Homo sapien
ttccctggtgactagaagtggtgcc

SEQ ID NO: 1450082 - DNA, 25 bp, Homo sapien
tggtgcctgtctcttggcggtggcc

SEQ ID NO: 1450083 - DNA, 25 bp, Homo sapien
tgcctgtctcttggcggtggcccat

SEQ ID NO: 1450084 - DNA, 25 bp, Homo sapien
cttccctggtgactagaagtggtgc

SEQ ID NO: 1450085 - DNA, 25 bp, Homo sapien
actatcctatctcccattcccttgc

SEQ ID NO: 1450086 - DNA, 25 bp, Homo sapien
cccttttctccactatcctatctcc

SEQ ID NO: 1450087 - DNA, 25 bp, Homo sapien
ccactatcctatctcccattccctt

SEQ ID NO: 1450088 - DNA, 25 bp, Homo sapien
ttttctccactatcctatctcccat

SEQ ID NO: 1450089 - DNA, 25 bp, Homo sapien
aaagtacccagaggccaagagccat

SEQ ID NO: 1450090 - DNA, 25 bp, Homo sapien
tgtaaagtacccagaggccaagagc

SEQ ID NO: 1450091 - DNA, 25 bp, Homo sapien
gtaaagtacccagaggccaagagcc

SEQ ID NO: 1450092 - DNA, 25 bp, Homo sapien
taaagtacccagaggccaagagcca

SEQ ID NO: 1450093 - DNA, 25 bp, Homo sapien
catctggtatttgtgtatcccaaca

SEQ ID NO: 1450094 - DNA, 25 bp, Homo sapien
tacactaatgaagattaacccagag

SEQ ID NO: 1450095 - DNA, 25 bp, Homo sapien
gataaagactgaagtgtgtgccaaa

SEQ ID NO: 1450096 - DNA, 25 bp, Homo sapien
aatgcacacaattaagacggtcctg

SEQ ID NO: 1450097 - DNA, 25 bp, Homo sapien
tatctgacagcaaactaagccgtgg

SEQ ID NO: 1450098 - DNA, 25 bp, Homo sapien
aattctccccatggccaaaaggtga

SEQ ID NO: 1450099 - DNA, 25 bp, Homo sapien
catatgtggactttggctggcctag

SEQ ID NO: 1450100 - DNA, 25 bp, Homo sapien
tactgtaatcaccaattcccctggg

SEQ ID NO: 1450101 - DNA, 25 bp, Homo sapien
gagccgattcatgatgccctggagc

SEQ ID NO: 1450102 - DNA, 25 bp, Homo sapien
ctggagcatgggctggacaatgccc

SEQ ID NO: 1450103 - DNA, 25 bp, Homo sapien
tctagtcctctgtttggctgctcag

SEQ ID NO: 1450104 - DNA, 25 bp, Homo sapien
tcagaattggacttgcagagccgat

SEQ ID NO: 1450105 - DNA, 25 bp, Homo sapien
tatggagtggccagatgggatgaca

SEQ ID NO: 1450106 - DNA, 25 bp, Homo sapien
acaaggtagtacttgtggctcttac

SEQ ID NO: 1450107 - DNA, 25 bp, Homo sapien
gctcagtctgcgctagccaggggag

SEQ ID NO: 1450108 - DNA, 25 bp, Homo sapien
gagacccggtgacattgcctgggct

SEQ ID NO: 1450109 - DNA, 25 bp, Homo sapien
agaattccaaaagcgtagacatcca

SEQ ID NO: 1450110 - DNA, 25 bp, Homo sapien
gacagagcctgagcagatataccag

SEQ ID NO: 1450111 - DNA, 25 bp, Homo sapien
tccgcacattgttccagagatggtc

SEQ ID NO: 1450112 - DNA, 25 bp, Homo sapien
tcaaatgcctcagggagcttgacag

SEQ ID NO: 1450113 - DNA, 25 bp, Homo sapien
aacgtaatgagccacagagagtcag

SEQ ID NO: 1450114 - DNA, 25 bp, Homo sapien
gaaacgtaatgagccacagagagtc

SEQ ID NO: 1450115 - DNA, 25 bp, Homo sapien
tgaaacgtaatgagccacagagagt

SEQ ID NO: 1450116 - DNA, 25 bp, Homo sapien
ggatgaaacgtaatgagccacagag

SEQ ID NO: 1450117 - DNA, 25 bp, Homo sapien
ggcttgcagaatcctaagtcagtga

SEQ ID NO: 1450118 - DNA, 25 bp, Homo sapien
atcttggcacggttctgcttatcca

SEQ ID NO: 1450119 - DNA, 25 bp, Homo sapien
ggccatatggattggtgtccccaca

SEQ ID NO: 1450120 - DNA, 25 bp, Homo sapien
taagtcagtgatcttggcacggttc

SEQ ID NO: 1450121 - DNA, 25 bp, Homo sapien
gcactgtgctgcaacattacaacag

SEQ ID NO: 1450122 - DNA, 25 bp, Homo sapien
taacagagctgcttattatcaaata

SEQ ID NO: 1450123 - DNA, 25 bp, Homo sapien
atttgtcctaaggtcctgcccaagg

SEQ ID NO: 1450124 - DNA, 25 bp, Homo sapien
tatcagtaggtttacacgagcatca

SEQ ID NO: 1450125 - DNA, 25 bp, Homo sapien
gctaggtctatgatgaaactcctcc

SEQ ID NO: 1450126 - DNA, 25 bp, Homo sapien
tatatgggtcttcattgtaccactc

SEQ ID NO: 1450127 - DNA, 25 bp, Homo sapien
tctttcaccatgctgtcaactctac

SEQ ID NO: 1450128 - DNA, 25 bp, Homo sapien
gaaagagagagcgtacattttggag

SEQ ID NO: 1450129 - DNA, 25 bp, Homo sapien
catctagtgctatctgcaaacgtgt

SEQ ID NO: 1450130 - DNA, 25 bp, Homo sapien
gatatcacgatggacaagtccctgg

SEQ ID NO: 1450131 - DNA, 25 bp, Homo sapien
aggaagcggattccctccaccacat

SEQ ID NO: 1450132 - DNA, 25 bp, Homo sapien
gtgcaggaagcggattccctccacc

SEQ ID NO: 1450133 - DNA, 25 bp, Homo sapien
caatcgctcatgcttcggcagagac

SEQ ID NO: 1450134 - DNA, 25 bp, Homo sapien
ccaccatagttgtagtcaatgactg

SEQ ID NO: 1450135 - DNA, 25 bp, Homo sapien
gaaccatggagatccaccaatcgct

SEQ ID NO: 1450136 - DNA, 25 bp, Homo sapien
cagccctgtgtagagatcccggtgt

SEQ ID NO: 1450137 - DNA, 25 bp, Homo sapien
tagctcttggtacaaaatctaaacc

SEQ ID NO: 1450138 - DNA, 25 bp, Homo sapien
ctcttggtacaaaatctaaaccagg

SEQ ID NO: 1450139 - DNA, 25 bp, Homo sapien
tgctgtagctcttggtacaaaatct

SEQ ID NO: 1450140 - DNA, 25 bp, Homo sapien
gctgtagctcttggtacaaaatcta

SEQ ID NO: 1450141 - DNA, 25 bp, Homo sapien
ttctcatagagatgaatgaggccag

SEQ ID NO: 1450142 - DNA, 25 bp, Homo sapien
ctttctcatagagatgaatgaggcc

SEQ ID NO: 1450143 - DNA, 25 bp, Homo sapien
tttctcatagagatgaatgaggcca

SEQ ID NO: 1450144 - DNA, 25 bp, Homo sapien
aagccagatcattccagtgcttctc

SEQ ID NO: 1450145 - DNA, 25 bp, Homo sapien
tgtcacacaggtataccacaccata

SEQ ID NO: 1450146 - DNA, 25 bp, Homo sapien
caagggaagtgtcctccccagttgt

SEQ ID NO: 1450147 - DNA, 25 bp, Homo sapien
gcttctcatctggagggacaactga

SEQ ID NO: 1450148 - DNA, 25 bp, Homo sapien
agcaagacatcctgtaaagaacagc

SEQ ID NO: 1450149 - DNA, 25 bp, Homo sapien
ccgttttctctaaccggcctgagtg

SEQ ID NO: 1450150 - DNA, 25 bp, Homo sapien
ggagcatgatctttccgaaccctca

SEQ ID NO: 1450151 - DNA, 25 bp, Homo sapien
cctcagccatagatcttccgttttc

SEQ ID NO: 1450152 - DNA, 25 bp, Homo sapien
ttagccaatttggaggcgctgaggc

SEQ ID NO: 1450153 - DNA, 25 bp, Homo sapien
tgggaactattgagccgagtccgga

SEQ ID NO: 1450154 - DNA, 25 bp, Homo sapien
ccggaattggctgcaaatgctctta

SEQ ID NO: 1450155 - DNA, 25 bp, Homo sapien
gctgcaaaagcctcgtgggaactat

SEQ ID NO: 1450156 - DNA, 25 bp, Homo sapien
ccttgtaactgacgaccctgagtga

SEQ ID NO: 1450157 - DNA, 25 bp, Homo sapien
caacatgataggcagcatttaagat

SEQ ID NO: 1450158 - DNA, 25 bp, Homo sapien
gaccctgagtgaaacgtgacttcaa

SEQ ID NO: 1450159 - DNA, 25 bp, Homo sapien
gagtgaaacgtgacttcaacatgat

SEQ ID NO: 1450160 - DNA, 25 bp, Homo sapien
tgtttgagataattactggtgatgt

SEQ ID NO: 1450161 - DNA, 25 bp, Homo sapien
ctgtttgagataattactggtgatg

SEQ ID NO: 1450162 - DNA, 25 bp, Homo sapien
tttgagataattactggtgatgtga

SEQ ID NO: 1450163 - DNA, 25 bp, Homo sapien
gtttgagataattactggtgatgtg

SEQ ID NO: 1450164 - DNA, 25 bp, Homo sapien
gacatcgttccagggttccgacgaa

SEQ ID NO: 1450165 - DNA, 25 bp, Homo sapien
ttagccactgcctgattaagtcggg

SEQ ID NO: 1450166 - DNA, 25 bp, Homo sapien
gttcctggatctgtcggatgcagca

SEQ ID NO: 1450167 - DNA, 25 bp, Homo sapien
tactggttctccattctcagggaca

SEQ ID NO: 1450168 - DNA, 25 bp, Homo sapien
gaggccttggcatggtgctaccaca

SEQ ID NO: 1450169 - DNA, 25 bp, Homo sapien
cgagcccagtttcggcactttgaaa

SEQ ID NO: 1450170 - DNA, 25 bp, Homo sapien
gctgcatccaccaggcgagtctgta

SEQ ID NO: 1450171 - DNA, 25 bp, Homo sapien
caattagctggcgataaagcggtga

SEQ ID NO: 1450172 - DNA, 25 bp, Homo sapien
caggtcctttgcctcgtctgcactt

SEQ ID NO: 1450173 - DNA, 25 bp, Homo sapien
agagcatatgtccatctactgcatt

SEQ ID NO: 1450174 - DNA, 25 bp, Homo sapien
aagagcatatgtccatctactgcat

SEQ ID NO: 1450175 - DNA, 25 bp, Homo sapien
cacaggtcctttgcctcgtctgcac

SEQ ID NO: 1450176 - DNA, 25 bp, Homo sapien
gaaaacagttacattaggctgggtg

SEQ ID NO: 1450177 - DNA, 25 bp, Homo sapien
atgagataaagactaaaaggaaagg

SEQ ID NO: 1450178 - DNA, 25 bp, Homo sapien
aaaggaaaacagttacattaggctg

SEQ ID NO: 1450179 - DNA, 25 bp, Homo sapien
tgacaacattataatcacatataac

SEQ ID NO: 1450180 - DNA, 25 bp, Homo sapien
gccattgtactccagaatgggtgac

SEQ ID NO: 1450181 - DNA, 25 bp, Homo sapien
catgccattgtactccagaatgggt

SEQ ID NO: 1450182 - DNA, 25 bp, Homo sapien
tgccattgtactccagaatgggtga

SEQ ID NO: 1450183 - DNA, 25 bp, Homo sapien
atcatgccattgtactccagaatgg

SEQ ID NO: 1450184 - DNA, 25 bp, Homo sapien
tgtaagagagcatggtgcatcgtta

SEQ ID NO: 1450185 - DNA, 25 bp, Homo sapien
ctgtaagagagcatggtgcatcgtt

SEQ ID NO: 1450186 - DNA, 25 bp, Homo sapien
gtaagagagcatggtgcatcgttac

SEQ ID NO: 1450187 - DNA, 25 bp, Homo sapien
cacttgacgttacaatcctggccga

SEQ ID NO: 1450188 - DNA, 25 bp, Homo sapien
tcctggccgaggatcagtatgcaag

SEQ ID NO: 1450189 - DNA, 25 bp, Homo sapien
tgccctgatgagcaaccagcgtgtg

SEQ ID NO: 1450190 - DNA, 25 bp, Homo sapien
gacccgagtctgagtcccataggtg

SEQ ID NO: 1450191 - DNA, 25 bp, Homo sapien
cttaggtgggaaggaaatgcagctc

SEQ ID NO: 1450192 - DNA, 25 bp, Homo sapien
ttaggtgggaaggaaatgcagctca

SEQ ID NO: 1450193 - DNA, 25 bp, Homo sapien
gggaaggaaatgcagctcagttggc

SEQ ID NO: 1450194 - DNA, 25 bp, Homo sapien
ggtgggaaggaaatgcagctcagtt

SEQ ID NO: 1450195 - DNA, 25 bp, Homo sapien
tataatcatctaaagcaggaagaac

SEQ ID NO: 1450196 - DNA, 25 bp, Homo sapien
ctgtttataatcatctaaagcagga

SEQ ID NO: 1450197 - DNA, 25 bp, Homo sapien
tttataatcatctaaagcaggaaga

SEQ ID NO: 1450198 - DNA, 25 bp, Homo sapien
aatcatctaaagcaggaagaaccat

SEQ ID NO: 1450199 - DNA, 25 bp, Homo sapien
cacataagtgtctacgcatgaatgc

SEQ ID NO: 1450200 - DNA, 25 bp, Homo sapien
gcatgaatgcatactgacaaccttt

SEQ ID NO: 1450201 - DNA, 25 bp, Homo sapien
tgaaacaaagtgtcaactacaggac

SEQ ID NO: 1450202 - DNA, 25 bp, Homo sapien
tcacttttcaggacgagagggagag

SEQ ID NO: 1450203 - DNA, 25 bp, Homo sapien
ggtgctgaagttgatcccagtacac

SEQ ID NO: 1450204 - DNA, 25 bp, Homo sapien
tactgtcaaaacgaccaaagaccag

SEQ ID NO: 1450205 - DNA, 25 bp, Homo sapien
caaagaccagcgcagtaggaaaggg

SEQ ID NO: 1450206 - DNA, 25 bp, Homo sapien
cccagtacactgttagaagtccatg

SEQ ID NO: 1450207 - DNA, 25 bp, Homo sapien
taggcatggtgatgtactactcagg

SEQ ID NO: 1450208 - DNA, 25 bp, Homo sapien
ggaaatggatgctcaaaaaaccaaa

SEQ ID NO: 1450209 - DNA, 25 bp, Homo sapien
tactgtgagactctcctgggtgagt

SEQ ID NO: 1450210 - DNA, 25 bp, Homo sapien
tgtgaagactccttgaccctgggga

SEQ ID NO: 1450211 - DNA, 25 bp, Homo sapien
ctccaaagaaagcggtggtcaaaag

SEQ ID NO: 1450212 - DNA, 25 bp, Homo sapien
gtcaaaaggttcccacagccacgtg

SEQ ID NO: 1450213 - DNA, 25 bp, Homo sapien
agcccaactccaaagaaagcggtgg

SEQ ID NO: 1450214 - DNA, 25 bp, Homo sapien
caactccaaagaaagcggtggtcaa

SEQ ID NO: 1450215 - DNA, 25 bp, Homo sapien
tttttagtagagatagggtcaggct

SEQ ID NO: 1450216 - DNA, 25 bp, Homo sapien
ggagcacagtggggcaatctcgact

SEQ ID NO: 1450217 - DNA, 25 bp, Homo sapien
ctggagcacagtggggcaatctcga

SEQ ID NO: 1450218 - DNA, 25 bp, Homo sapien
agcacagtggggcaatctcgactca

SEQ ID NO: 1450219 - DNA, 25 bp, Homo sapien
agctgttttctggtagcctcacaga

SEQ ID NO: 1450220 - DNA, 25 bp, Homo sapien
gatactggttctctctacaagtcca

SEQ ID NO: 1450221 - DNA, 25 bp, Homo sapien
tgggtgcgggtgaaagtacacattc

SEQ ID NO: 1450222 - DNA, 25 bp, Homo sapien
gatcgtctcagaaaacattagccct

SEQ ID NO: 1450223 - DNA, 25 bp, Homo sapien
catttctggattcccagtcggatgt

SEQ ID NO: 1450224 - DNA, 25 bp, Homo sapien
ggatattaagcgcaaaactttggga

SEQ ID NO: 1450225 - DNA, 25 bp, Homo sapien
cccagtcggatgtaggatattaagc

SEQ ID NO: 1450226 - DNA, 25 bp, Homo sapien
gatgtaggatattaagcgcaaaact

SEQ ID NO: 1450227 - DNA, 25 bp, Homo sapien
ctgcagcccggtttcggcgacatcg

SEQ ID NO: 1450228 - DNA, 25 bp, Homo sapien
cggtttcggcgacatcgcctgcagg

SEQ ID NO: 1450229 - DNA, 25 bp, Homo sapien
agcccggtttcggcgacatcgcctg

SEQ ID NO: 1450230 - DNA, 25 bp, Homo sapien
tgcagcccggtttcggcgacatcgc

SEQ ID NO: 1450231 - DNA, 25 bp, Homo sapien
aggtagcggcggtagcggccgaagc

SEQ ID NO: 1450232 - DNA, 25 bp, Homo sapien
ggttctgtcgcagccgtcccaggta

SEQ ID NO: 1450233 - DNA, 25 bp, Homo sapien
gagacgggctcgctgccccatggca

SEQ ID NO: 1450234 - DNA, 25 bp, Homo sapien
gccccggcacagctcgcggatcatt

SEQ ID NO: 1450235 - DNA, 25 bp, Homo sapien
gcccgctctgtctttgcggctcggt

SEQ ID NO: 1450236 - DNA, 25 bp, Homo sapien
cctctgcccgctctgtctttgcggc

SEQ ID NO: 1450237 - DNA, 25 bp, Homo sapien
tctgtctttgcggctcggtccccgg

SEQ ID NO: 1450238 - DNA, 25 bp, Homo sapien
ctgtctttgcggctcggtccccggc

SEQ ID NO: 1450239 - DNA, 25 bp, Homo sapien
aagattcctgcaatctcaggtggga

SEQ ID NO: 1450240 - DNA, 25 bp, Homo sapien
tgtgatggttgcgatggctctctga

SEQ ID NO: 1450241 - DNA, 25 bp, Homo sapien
gaatgaagatatgtacgttccctgg

SEQ ID NO: 1450242 - DNA, 25 bp, Homo sapien
cggacgcctgggataagttttatca

SEQ ID NO: 1450243 - DNA, 25 bp, Homo sapien
tcaagggttccatccgtcagcaggt

SEQ ID NO: 1450244 - DNA, 25 bp, Homo sapien
aatgagtggtgcagataatgagcgc

SEQ ID NO: 1450245 - DNA, 25 bp, Homo sapien
ctctgccaggtaatgttagggacac

SEQ ID NO: 1450246 - DNA, 25 bp, Homo sapien
gcactagaagcgatgtcacaaggca

SEQ ID NO: 1450247 - DNA, 25 bp, Homo sapien
tcagagccccgggtacctcatcgcc

SEQ ID NO: 1450248 - DNA, 25 bp, Homo sapien
ccgggggcctgacacagtccgcaga

SEQ ID NO: 1450249 - DNA, 25 bp, Homo sapien
gcctgacacagtccgcagacagctg

SEQ ID NO: 1450250 - DNA, 25 bp, Homo sapien
cccgggtacctcatcgccggcacgg

SEQ ID NO: 1450251 - DNA, 25 bp, Homo sapien
tgggagggtccctagccttcgggca

SEQ ID NO: 1450252 - DNA, 25 bp, Homo sapien
gcctgtactggatctgttattttca

SEQ ID NO: 1450253 - DNA, 25 bp, Homo sapien
tctgctggccgcagagaacacaggg

SEQ ID NO: 1450254 - DNA, 25 bp, Homo sapien
tcagagcagctagtgtggagctcag

SEQ ID NO: 1450255 - DNA, 25 bp, Homo sapien
aggagagaggaatcccctagagcag

SEQ ID NO: 1450256 - DNA, 25 bp, Homo sapien
cgtggcctctcttttatccgtctat

SEQ ID NO: 1450257 - DNA, 25 bp, Homo sapien
tccatttagcctttggatcatcctg

SEQ ID NO: 1450258 - DNA, 25 bp, Homo sapien
gccagctgttgtgcaccttcctgag

SEQ ID NO: 1450259 - DNA, 25 bp, Homo sapien
gggcagcagagtccttacgctaaca

SEQ ID NO: 1450260 - DNA, 25 bp, Homo sapien
agagatttccatagctcggagcagg

SEQ ID NO: 1450261 - DNA, 25 bp, Homo sapien
tgatagaagggatgatatccacccc

SEQ ID NO: 1450262 - DNA, 25 bp, Homo sapien
tggttttctcagagccgtcagccag

SEQ ID NO: 1450263 - DNA, 25 bp, Homo sapien
gccacaggtgtcctagagcccacat

SEQ ID NO: 1450264 - DNA, 25 bp, Homo sapien
acaggtgtcctagagcccacattcc

SEQ ID NO: 1450265 - DNA, 25 bp, Homo sapien
cacaggtgtcctagagcccacattc

SEQ ID NO: 1450266 - DNA, 25 bp, Homo sapien
ccacaggtgtcctagagcccacatt

SEQ ID NO: 1450267 - DNA, 25 bp, Homo sapien
tatctacacaaatcaagaacttagg

SEQ ID NO: 1450268 - DNA, 25 bp, Homo sapien
caaaaccacaacaaccacgcaggtg

SEQ ID NO: 1450269 - DNA, 25 bp, Homo sapien
gacactgagcaggtaacatcacctc

SEQ ID NO: 1450270 - DNA, 25 bp, Homo sapien
tgcaaagccaactcaagggcaggtt

SEQ ID NO: 1450271 - DNA, 25 bp, Homo sapien
accccctgagctctggaacaccttt

SEQ ID NO: 1450272 - DNA, 25 bp, Homo sapien
tgtttacccagagtctagcccagag

SEQ ID NO: 1450273 - DNA, 25 bp, Homo sapien
gcccagagttccagcactgagtagg

SEQ ID NO: 1450274 - DNA, 25 bp, Homo sapien
gaatgaataaaggagcactgctacc

SEQ ID NO: 1450275 - DNA, 25 bp, Homo sapien
taagacctaagtactccagtgtcgc

SEQ ID NO: 1450276 - DNA, 25 bp, Homo sapien
taggagaaggctcaaaaacctgctc

SEQ ID NO: 1450277 - DNA, 25 bp, Homo sapien
ggctcaaaaacctgctcagcaccat

SEQ ID NO: 1450278 - DNA, 25 bp, Homo sapien
ggaacgagtattaggagaaggctca

SEQ ID NO: 1450279 - DNA, 25 bp, Homo sapien
cctggcagcctaggggaacgagtat

SEQ ID NO: 1450280 - DNA, 25 bp, Homo sapien
gcaatgtggactctgtcgcgggcat

SEQ ID NO: 1450281 - DNA, 25 bp, Homo sapien
taacgaagcgttactccagaccatt

SEQ ID NO: 1450282 - DNA, 25 bp, Homo sapien
tgtgtgtaaagaggtctggccccac

SEQ ID NO: 1450283 - DNA, 25 bp, Homo sapien
ccacggaggtccattaggtagagac

SEQ ID NO: 1450284 - DNA, 25 bp, Homo sapien
gcttgaagaagctgcacaccttggc

SEQ ID NO: 1450285 - DNA, 25 bp, Homo sapien
atgcctttgcgatggaggagcagcc

SEQ ID NO: 1450286 - DNA, 25 bp, Homo sapien
tccttgcgggacttcttgagcgaat

SEQ ID NO: 1450287 - DNA, 25 bp, Homo sapien
cgttcaggcaagtccagctggtcaa

SEQ ID NO: 1450288 - DNA, 25 bp, Homo sapien
tataatcaaacatgcccctgtggga

SEQ ID NO: 1450289 - DNA, 25 bp, Homo sapien
tttggcagctcccagaataggcact

SEQ ID NO: 1450290 - DNA, 25 bp, Homo sapien
tgacactgcatactcctgggtcgga

SEQ ID NO: 1450291 - DNA, 25 bp, Homo sapien
tccccttttgagctatgacactgca

SEQ ID NO: 1450292 - DNA, 25 bp, Homo sapien
catgatggactgttgcccgtttgac

SEQ ID NO: 1450293 - DNA, 25 bp, Homo sapien
gcccgtttgactttagtgccactgt

SEQ ID NO: 1450294 - DNA, 25 bp, Homo sapien
catgggccatgatggactgttgccc

SEQ ID NO: 1450295 - DNA, 25 bp, Homo sapien
gactgttgcccgtttgactttagtg

SEQ ID NO: 1450296 - DNA, 25 bp, Homo sapien
cttaggaatgagtgaaggacacccc

SEQ ID NO: 1450297 - DNA, 25 bp, Homo sapien
gataagaacgcccacacctcttact

SEQ ID NO: 1450298 - DNA, 25 bp, Homo sapien
aggaatgagtgaaggacaccccagg

SEQ ID NO: 1450299 - DNA, 25 bp, Homo sapien
ccccaggcctggataagaacgccca

SEQ ID NO: 1450300 - DNA, 25 bp, Homo sapien
tggtgccatgcaccaggatgtagag

SEQ ID NO: 1450301 - DNA, 25 bp, Homo sapien
caggatgtagaggagaacacccagg

SEQ ID NO: 1450302 - DNA, 25 bp, Homo sapien
ggtaggccccgttgctgatctgttt

SEQ ID NO: 1450303 - DNA, 25 bp, Homo sapien
ttcactaggatcttatggtcatgcc

SEQ ID NO: 1450304 - DNA, 25 bp, Homo sapien
gtcatagtaaacatctgaggcaggc

SEQ ID NO: 1450305 - DNA, 25 bp, Homo sapien
caatcgcatttcctgcgagggacag

SEQ ID NO: 1450306 - DNA, 25 bp, Homo sapien
tacatcactctcaggaggctggact

SEQ ID NO: 1450307 - DNA, 25 bp, Homo sapien
gaactaacctaggagtcaggagacc

SEQ ID NO: 1450308 - DNA, 25 bp, Homo sapien
acaatctctggcgaggcatagaggg

SEQ ID NO: 1450309 - DNA, 25 bp, Homo sapien
atagagggggctcccacagaatgtc

SEQ ID NO: 1450310 - DNA, 25 bp, Homo sapien
gagggggctcccacagaatgtctgc

SEQ ID NO: 1450311 - DNA, 25 bp, Homo sapien
cccattgacaatctctggcgaggca

SEQ ID NO: 1450312 - DNA, 25 bp, Homo sapien
agaggttggagagaccgaagtcagc

SEQ ID NO: 1450313 - DNA, 25 bp, Homo sapien
aggttggagagaccgaagtcagcaa

SEQ ID NO: 1450314 - DNA, 25 bp, Homo sapien
ggttggagagaccgaagtcagcaat

SEQ ID NO: 1450315 - DNA, 25 bp, Homo sapien
gtagaggttggagagaccgaagtca

SEQ ID NO: 1450316 - DNA, 25 bp, Homo sapien
gggcacaggtcatgtcaaggcctgg

SEQ ID NO: 1450317 - DNA, 25 bp, Homo sapien
ggaaacccaagctccaatagaagga

SEQ ID NO: 1450318 - DNA, 25 bp, Homo sapien
caagctccaatagaaggaaagggtc

SEQ ID NO: 1450319 - DNA, 25 bp, Homo sapien
aacccaagctccaatagaaggaaag

SEQ ID NO: 1450320 - DNA, 25 bp, Homo sapien
cactgagcactgtcagcatagctca

SEQ ID NO: 1450321 - DNA, 25 bp, Homo sapien
ctgagcactgtcagcatagctcagg

SEQ ID NO: 1450322 - DNA, 25 bp, Homo sapien
actgagcactgtcagcatagctcag

SEQ ID NO: 1450323 - DNA, 25 bp, Homo sapien
ctggaagaacgaaccctgaggagct

SEQ ID NO: 1450324 - DNA, 25 bp, Homo sapien
tcaataaggagcatctagacagagc

SEQ ID NO: 1450325 - DNA, 25 bp, Homo sapien
tgagggcagaacaaacatcagggct

SEQ ID NO: 1450326 - DNA, 25 bp, Homo sapien
ttgtgcaaagcacccctcagctgag

SEQ ID NO: 1450327 - DNA, 25 bp, Homo sapien
catccaagaggatgttctccagctt

SEQ ID NO: 1450328 - DNA, 25 bp, Homo sapien
ccaagaggatgttctccagcttgag

SEQ ID NO: 1450329 - DNA, 25 bp, Homo sapien
ttggcatccaagaggatgttctcca

SEQ ID NO: 1450330 - DNA, 25 bp, Homo sapien
ggcatccaagaggatgttctccagc

SEQ ID NO: 1450331 - DNA, 25 bp, Homo sapien
ggaacctctctggtccaaaacagcc

SEQ ID NO: 1450332 - DNA, 25 bp, Homo sapien
gagactgaggtaaacacaaagggag

SEQ ID NO: 1450333 - DNA, 25 bp, Homo sapien
tatgtgctgcaagaaatcacgggcc

SEQ ID NO: 1450334 - DNA, 25 bp, Homo sapien
tatccgcggagaagggactcaaagt

SEQ ID NO: 1450335 - DNA, 25 bp, Homo sapien
gaaatgcctagcttcgcgctcactg

SEQ ID NO: 1450336 - DNA, 25 bp, Homo sapien
gatgtagtcataaaggtcgccccgg

SEQ ID NO: 1450337 - DNA, 25 bp, Homo sapien
cggctggcatactccatgacgatca

SEQ ID NO: 1450338 - DNA, 25 bp, Homo sapien
tgatggcaatagtgcacggcagaga

SEQ ID NO: 1450339 - DNA, 25 bp, Homo sapien
cctggcttaaccaatactttgttgt

SEQ ID NO: 1450340 - DNA, 25 bp, Homo sapien
tctcaatctccctccgtatgtgcat

SEQ ID NO: 1450341 - DNA, 25 bp, Homo sapien
ccttccggattgacttgatggccac

SEQ ID NO: 1450342 - DNA, 25 bp, Homo sapien
tcaatctccctccgtatgtgcatca

SEQ ID NO: 1450343 - DNA, 25 bp, Homo sapien
ctcaatctccctccgtatgtgcatc

SEQ ID NO: 1450344 - DNA, 25 bp, Homo sapien
gcacagtaggcacagaataactcct

SEQ ID NO: 1450345 - DNA, 25 bp, Homo sapien
cccagagaggttagatgatgtgctc

SEQ ID NO: 1450346 - DNA, 25 bp, Homo sapien
gaggtgggcacaaaaagcatcatca

SEQ ID NO: 1450347 - DNA, 25 bp, Homo sapien
aaacgtgccaatctgcaccatgagg

SEQ ID NO: 1450348 - DNA, 25 bp, Homo sapien
caggggatgcgatggggctatcccc

SEQ ID NO: 1450349 - DNA, 25 bp, Homo sapien
gcgatggggctatcccccttctgct

SEQ ID NO: 1450350 - DNA, 25 bp, Homo sapien
atggagcctcctccccaagatgctg

SEQ ID NO: 1450351 - DNA, 25 bp, Homo sapien
agatgctgaagaggcccatgctgca

SEQ ID NO: 1450352 - DNA, 25 bp, Homo sapien
tactctccaaagtatccaagtttag

SEQ ID NO: 1450353 - DNA, 25 bp, Homo sapien
ggccacatgcctgagacagtcctgg

SEQ ID NO: 1450354 - DNA, 25 bp, Homo sapien
gggtaacaattgctgaaccaatcac

SEQ ID NO: 1450355 - DNA, 25 bp, Homo sapien
tggtctaattactaatattgcccct

SEQ ID NO: 1450356 - DNA, 25 bp, Homo sapien
ggttggttcccagtgactcttccca

SEQ ID NO: 1450357 - DNA, 25 bp, Homo sapien
ggactcagtacttggtcatccagga

SEQ ID NO: 1450358 - DNA, 25 bp, Homo sapien
tgtcaatgaaggactcggaccacct

SEQ ID NO: 1450359 - DNA, 25 bp, Homo sapien
caagcctgggctcatctcaagacca

SEQ ID NO: 1450360 - DNA, 25 bp, Homo sapien
caagtttgcgaccactgtccctgca

SEQ ID NO: 1450361 - DNA, 25 bp, Homo sapien
gggttcgcaagtttgcgaccactgt

SEQ ID NO: 1450362 - DNA, 25 bp, Homo sapien
cacagcagtacggtgttgctggctg

SEQ ID NO: 1450363 - DNA, 25 bp, Homo sapien
tccctgcaatcacggactgacacat

SEQ ID NO: 1450364 - DNA, 25 bp, Homo sapien
ggtctccaggaactcgtagcggtgc

SEQ ID NO: 1450365 - DNA, 25 bp, Homo sapien
cgcaggttgtgcttgtggtggtgcc

SEQ ID NO: 1450366 - DNA, 25 bp, Homo sapien
ccaggaactcgtagcggtgccgcag

SEQ ID NO: 1450367 - DNA, 25 bp, Homo sapien
tctccaggaactcgtagcggtgccg

SEQ ID NO: 1450368 - DNA, 25 bp, Homo sapien
tctgcggccgagggagtggggccgg

SEQ ID NO: 1450369 - DNA, 25 bp, Homo sapien
gagcgccgcgcgaaaaccagcgact

SEQ ID NO: 1450370 - DNA, 25 bp, Homo sapien
ttccgccagcggccgggctagctct

SEQ ID NO: 1450371 - DNA, 25 bp, Homo sapien
cttgatcagcccttccgccagcggc

SEQ ID NO: 1450372 - DNA, 25 bp, Homo sapien
gggagccacagcagtaccagagcgc

SEQ ID NO: 1450373 - DNA, 25 bp, Homo sapien
caggaggtgagcaagggcggcaggg

SEQ ID NO: 1450374 - DNA, 25 bp, Homo sapien
agcagtaccagagcgcgcagtaaag

SEQ ID NO: 1450375 - DNA, 25 bp, Homo sapien
cggcaggggaatcagtaggctgtgc

SEQ ID NO: 1450376 - DNA, 25 bp, Homo sapien
tggagaatttgtgccgcaaacactg

SEQ ID NO: 1450377 - DNA, 25 bp, Homo sapien
caattaccctgagaaaccgaatgtt

SEQ ID NO: 1450378 - DNA, 25 bp, Homo sapien
gccagccctggttctaaattctaaa

SEQ ID NO: 1450379 - DNA, 25 bp, Homo sapien
gaagtcggcttaggcaatttgttcc

SEQ ID NO: 1450380 - DNA, 25 bp, Homo sapien
gagtcgaggagcagctggacgtatt

SEQ ID NO: 1450381 - DNA, 25 bp, Homo sapien
agtcgaggagcagctggacgtattc

SEQ ID NO: 1450382 - DNA, 25 bp, Homo sapien
gtcgaggagcagctggacgtattca

SEQ ID NO: 1450383 - DNA, 25 bp, Homo sapien
cagagattggagttgtgccgccata

SEQ ID NO: 1450384 - DNA, 25 bp, Homo sapien
tataaggtcacgtgaaaatagaggc

SEQ ID NO: 1450385 - DNA, 25 bp, Homo sapien
tagagcaggtctagggaactaatac

SEQ ID NO: 1450386 - DNA, 25 bp, Homo sapien
gcttcagacttctagccgccagaat

SEQ ID NO: 1450387 - DNA, 25 bp, Homo sapien
gatcaaacagtaacggcagccatgg

SEQ ID NO: 1450388 - DNA, 25 bp, Homo sapien
tgccaggcacagaataggtgttaaa

SEQ ID NO: 1450389 - DNA, 25 bp, Homo sapien
tatagggcaggaatctagcaccatg

SEQ ID NO: 1450390 - DNA, 25 bp, Homo sapien
cctgtgagttgcactagcaaaggct

SEQ ID NO: 1450391 - DNA, 25 bp, Homo sapien
taacacgcagtctcaaggcaggaga

SEQ ID NO: 1450392 - DNA, 25 bp, Homo sapien
gctttggctgaatgaactgagacta

SEQ ID NO: 1450393 - DNA, 25 bp, Homo sapien
gacagccaagaacaggtagtcactg

SEQ ID NO: 1450394 - DNA, 25 bp, Homo sapien
ctagacataagaaggactgagctgc

SEQ ID NO: 1450395 - DNA, 25 bp, Homo sapien
ttgtggattttgatgccacagtgta

SEQ ID NO: 1450396 - DNA, 25 bp, Homo sapien
ctctgggggccttcggtgacaaaag

SEQ ID NO: 1450397 - DNA, 25 bp, Homo sapien
agtgcaattaatccatcttttgtgg

SEQ ID NO: 1450398 - DNA, 25 bp, Homo sapien
aaaggtgaagtggaattaggagaga

SEQ ID NO: 1450399 - DNA, 25 bp, Homo sapien
gacattcttggaagtagccccgact

SEQ ID NO: 1450400 - DNA, 25 bp, Homo sapien
cagcagtctatcctctcggtcagaa

SEQ ID NO: 1450401 - DNA, 25 bp, Homo sapien
tatagagaggtcaacttagagcccc

SEQ ID NO: 1450402 - DNA, 25 bp, Homo sapien
cactggttgctaacaggagctgaca

SEQ ID NO: 1450403 - DNA, 25 bp, Homo sapien
tccactgcgtcactcagaccctggt

SEQ ID NO: 1450404 - DNA, 25 bp, Homo sapien
actgcgtcactcagaccctggttga

SEQ ID NO: 1450405 - DNA, 25 bp, Homo sapien
agggcctccactgcgtcactcagac

SEQ ID NO: 1450406 - DNA, 25 bp, Homo sapien
gcgtcactcagaccctggttgacac

SEQ ID NO: 1450407 - DNA, 25 bp, Homo sapien
tcttgacgactatgctggagcaggc

SEQ ID NO: 1450408 - DNA, 25 bp, Homo sapien
tgggtggaatgcttccgccgtctcc

SEQ ID NO: 1450409 - DNA, 25 bp, Homo sapien
gcatggcagggaggatctcccattt

SEQ ID NO: 1450410 - DNA, 25 bp, Homo sapien
ctcccacggcgaggaggcagttctt

SEQ ID NO: 1450411 - DNA, 25 bp, Homo sapien
atctgcccgccgcttcttgaggaag

SEQ ID NO: 1450412 - DNA, 25 bp, Homo sapien
actatgacccgtccactcagagagc

SEQ ID NO: 1450413 - DNA, 25 bp, Homo sapien
gaacgatcgttccatcttcagccat

SEQ ID NO: 1450414 - DNA, 25 bp, Homo sapien
ttcttgaggaagaacgatcgttcca

SEQ ID NO: 1450415 - DNA, 25 bp, Homo sapien
gacctggtcctgtgtgaatattgta

SEQ ID NO: 1450416 - DNA, 25 bp, Homo sapien
tgctctgtaaggcatcatcatcccc

SEQ ID NO: 1450417 - DNA, 25 bp, Homo sapien
tgattccaagagtagccctgagtgg

SEQ ID NO: 1450418 - DNA, 25 bp, Homo sapien
ccttgacttctggttaggaggctaa

SEQ ID NO: 1450419 - DNA, 25 bp, Homo sapien
ccaggagcgagtctcgatgtcaaag

SEQ ID NO: 1450420 - DNA, 25 bp, Homo sapien
gcctcctaggctgtacaagtggttg

SEQ ID NO: 1450421 - DNA, 25 bp, Homo sapien
aaagacctcgaaagcgttgaccgcg

SEQ ID NO: 1450422 - DNA, 25 bp, Homo sapien
gagaaggcccgcttatagggaatgt

SEQ ID NO: 1450423 - DNA, 25 bp, Homo sapien
gggtgggcatgggtgctagggacac

SEQ ID NO: 1450424 - DNA, 25 bp, Homo sapien
ggtgctagggacacccacatgtcct

SEQ ID NO: 1450425 - DNA, 25 bp, Homo sapien
gggacacccacatgtccttcagcat

SEQ ID NO: 1450426 - DNA, 25 bp, Homo sapien
ggcatgggtgctagggacacccaca

SEQ ID NO: 1450427 - DNA, 25 bp, Homo sapien
ccgcctgccgcatatactcggtaat

SEQ ID NO: 1450428 - DNA, 25 bp, Homo sapien
tggttgtgtggacgtaggtccaggc

SEQ ID NO: 1450429 - DNA, 25 bp, Homo sapien
ggcccatcccgcctgccgcatatac

SEQ ID NO: 1450430 - DNA, 25 bp, Homo sapien
tgtggacgtaggtccaggcccatcc

SEQ ID NO: 1450431 - DNA, 25 bp, Homo sapien
taagaagaaaggccatacatgcccc

SEQ ID NO: 1450432 - DNA, 25 bp, Homo sapien
ctaagaagaaaggccatacatgccc

SEQ ID NO: 1450433 - DNA, 25 bp, Homo sapien
agaagaaaggccatacatgcccctg

SEQ ID NO: 1450434 - DNA, 25 bp, Homo sapien
aagaagaaaggccatacatgcccct

SEQ ID NO: 1450435 - DNA, 25 bp, Homo sapien
gttaaatctacagccccagcatctg

SEQ ID NO: 1450436 - DNA, 25 bp, Homo sapien
caatagactgtaggccgttgagaat

SEQ ID NO: 1450437 - DNA, 25 bp, Homo sapien
aactaactctttgggccttacactg

SEQ ID NO: 1450438 - DNA, 25 bp, Homo sapien
gaacccattcagtgccatagtaaga

SEQ ID NO: 1450439 - DNA, 25 bp, Homo sapien
tttggccgtgacagaaatgcccatg

SEQ ID NO: 1450440 - DNA, 25 bp, Homo sapien
cacttgccctcatcgatgttgtaca

SEQ ID NO: 1450441 - DNA, 25 bp, Homo sapien
gagtagacctcgaagcagtccatgg

SEQ ID NO: 1450442 - DNA, 25 bp, Homo sapien
tggaagtccttgacgttaggcacct

SEQ ID NO: 1450443 - DNA, 25 bp, Homo sapien
ggtccaccggctacttggcgccggc

SEQ ID NO: 1450444 - DNA, 25 bp, Homo sapien
ggccagtgcttcaccgtgccccgag

SEQ ID NO: 1450445 - DNA, 25 bp, Homo sapien
agcgccggacccagccagaccccgg

SEQ ID NO: 1450446 - DNA, 25 bp, Homo sapien
gcgccgggagaggtgcgagcgcggg

SEQ ID NO: 1450447 - DNA, 25 bp, Homo sapien
cggcggcgaggcgcagacgacgcat

SEQ ID NO: 1450448 - DNA, 25 bp, Homo sapien
cccgctgcacgggagccggggagag

SEQ ID NO: 1450449 - DNA, 25 bp, Homo sapien
cgccccgctgcacgggagccgggga

SEQ ID NO: 1450450 - DNA, 25 bp, Homo sapien
cccccgccccgctgcacgggagccg

SEQ ID NO: 1450451 - DNA, 25 bp, Homo sapien
cgctgcacgggagccggggagaggg

SEQ ID NO: 1450452 - DNA, 25 bp, Homo sapien
caggaaggagaagcggagccgccgc

SEQ ID NO: 1450453 - DNA, 25 bp, Homo sapien
aggaatccgcgtgcgtcccgggaca

SEQ ID NO: 1450454 - DNA, 25 bp, Homo sapien
cacctgtgcaggaatccgcgtgcgt

SEQ ID NO: 1450455 - DNA, 25 bp, Homo sapien
ggccggcgagcctgctccgctccgt

SEQ ID NO: 1450456 - DNA, 25 bp, Homo sapien
tcaaggaaagcagggcactagaacc

SEQ ID NO: 1450457 - DNA, 25 bp, Homo sapien
aagcacccagatgacgggcacagac

SEQ ID NO: 1450458 - DNA, 25 bp, Homo sapien
tgaagaggcggagagtccaattacc

SEQ ID NO: 1450459 - DNA, 25 bp, Homo sapien
tacacagactcagctcgtgacctgc

SEQ ID NO: 1450460 - DNA, 25 bp, Homo sapien
gaagcataacttacacatcaccctg

SEQ ID NO: 1450461 - DNA, 25 bp, Homo sapien
cttgcacatggaagcataacttaca

SEQ ID NO: 1450462 - DNA, 25 bp, Homo sapien
cgccctcgaaatagacacatccaca

SEQ ID NO: 1450463 - DNA, 25 bp, Homo sapien
tgccgccgccctcgaaatagacaca

SEQ ID NO: 1450464 - DNA, 25 bp, Homo sapien
ctggtgcagccacctcctagctgtg

SEQ ID NO: 1450465 - DNA, 25 bp, Homo sapien
aggaactccccgaggccaggatcac

SEQ ID NO: 1450466 - DNA, 25 bp, Homo sapien
gaccatgtggtcagcatcagacagg

SEQ ID NO: 1450467 - DNA, 25 bp, Homo sapien
tatgcaccagtcacttatgtccttg

SEQ ID NO: 1450468 - DNA, 25 bp, Homo sapien
ctaaatgagcagggccacagaccca

SEQ ID NO: 1450469 - DNA, 25 bp, Homo sapien
catggggctctgcaggcctagaggt

SEQ ID NO: 1450470 - DNA, 25 bp, Homo sapien
cagtccagccccatggggctctgca

SEQ ID NO: 1450471 - DNA, 25 bp, Homo sapien
ctctgcaggcctagaggtagagggc

SEQ ID NO: 1450472 - DNA, 25 bp, Homo sapien
ccaaggaatattgcggggatttgat

SEQ ID NO: 1450473 - DNA, 25 bp, Homo sapien
cagacatgtccaaggaatattgcgg

SEQ ID NO: 1450474 - DNA, 25 bp, Homo sapien
ggatttgatccctttatgaaccttg

SEQ ID NO: 1450475 - DNA, 25 bp, Homo sapien
atagatgaatgtgtggaaatggcga

SEQ ID NO: 1450476 - DNA, 25 bp, Homo sapien
gatgttctcaagacctatatgggag

SEQ ID NO: 1450477 - DNA, 25 bp, Homo sapien
taaggcacttcagttcatctcaggg

SEQ ID NO: 1450478 - DNA, 25 bp, Homo sapien
ccttgagagaaattggaagatggcc

SEQ ID NO: 1450479 - DNA, 25 bp, Homo sapien
agtcctcgggttgccagtttcctca

SEQ ID NO: 1450480 - DNA, 25 bp, Homo sapien
aaaaggatcgacacccggcgatcat

SEQ ID NO: 1450481 - DNA, 25 bp, Homo sapien
ggaaaaggatcgacacccggcgatc

SEQ ID NO: 1450482 - DNA, 25 bp, Homo sapien
gaaaaggatcgacacccggcgatca

SEQ ID NO: 1450483 - DNA, 25 bp, Homo sapien
ctctgaggcttgtcctaggagctgg

SEQ ID NO: 1450484 - DNA, 25 bp, Homo sapien
ctgggaatagagtcggcaaggtccc

SEQ ID NO: 1450485 - DNA, 25 bp, Homo sapien
caggcccctatgcacagggcatggg

SEQ ID NO: 1450486 - DNA, 25 bp, Homo sapien
cctctggctgatcgactgggatgca

SEQ ID NO: 1450487 - DNA, 25 bp, Homo sapien
agaagatttagggagccggactcct

SEQ ID NO: 1450488 - DNA, 25 bp, Homo sapien
gaagatttagggagccggactcctc

SEQ ID NO: 1450489 - DNA, 25 bp, Homo sapien
aagatttagggagccggactcctct

SEQ ID NO: 1450490 - DNA, 25 bp, Homo sapien
agatttagggagccggactcctctg

SEQ ID NO: 1450491 - DNA, 25 bp, Homo sapien
tccagcgtgggtgcgagattcccaa

SEQ ID NO: 1450492 - DNA, 25 bp, Homo sapien
caccgctggcaaagcgaaactcgtt

SEQ ID NO: 1450493 - DNA, 25 bp, Homo sapien
caaagcaacgtgttttaccaggtca

SEQ ID NO: 1450494 - DNA, 25 bp, Homo sapien
tttgcctttctatgcacagaggagg

SEQ ID NO: 1450495 - DNA, 25 bp, Homo sapien
atgatgttaaatctgactgcccgta

SEQ ID NO: 1450496 - DNA, 25 bp, Homo sapien
gatatggctttccttccgatggcct

SEQ ID NO: 1450497 - DNA, 25 bp, Homo sapien
gggctagcatcgatatggctttcct

SEQ ID NO: 1450498 - DNA, 25 bp, Homo sapien
tgactgcccgtagtttaaagaaagc

SEQ ID NO: 1450499 - DNA, 25 bp, Homo sapien
tgacagcttgcctgaaccataactg

SEQ ID NO: 1450500 - DNA, 25 bp, Homo sapien
ttgggtgatagtggagattggagtc

SEQ ID NO: 1450501 - DNA, 25 bp, Homo sapien
tcaagctgacagcttgcctgaacca

SEQ ID NO: 1450502 - DNA, 25 bp, Homo sapien
cctgaaccataactgcttgggtgat

SEQ ID NO: 1450503 - DNA, 25 bp, Homo sapien
tgaatacagagcctacagccttccc

SEQ ID NO: 1450504 - DNA, 25 bp, Homo sapien
caaacaggtaaaccgtagttgtctg

SEQ ID NO: 1450505 - DNA, 25 bp, Homo sapien
tgggcatagggccacactgaaccac

SEQ ID NO: 1450506 - DNA, 25 bp, Homo sapien
ctgatcgaaagaggcattgctgggc

SEQ ID NO: 1450507 - DNA, 25 bp, Homo sapien
tttctagtaatgcaagtgagagcaa

SEQ ID NO: 1450508 - DNA, 25 bp, Homo sapien
ttctagtaatgcaagtgagagcaac

SEQ ID NO: 1450509 - DNA, 25 bp, Homo sapien
tctagtaatgcaagtgagagcaaca

SEQ ID NO: 1450510 - DNA, 25 bp, Homo sapien
ttcacagcagcaaagccatccctgt

SEQ ID NO: 1450511 - DNA, 25 bp, Homo sapien
tcacagcagcaaagccatccctgtt

SEQ ID NO: 1450512 - DNA, 25 bp, Homo sapien
cagcagcaaagccatccctgttcat

SEQ ID NO: 1450513 - DNA, 25 bp, Homo sapien
gttcttcacagcagcaaagccatcc

SEQ ID NO: 1450514 - DNA, 25 bp, Homo sapien
acaggttgtggagttacccttctct

SEQ ID NO: 1450515 - DNA, 25 bp, Homo sapien
tggctctccaggaattagagttgtc

SEQ ID NO: 1450516 - DNA, 25 bp, Homo sapien
atggctctccaggaattagagttgt

SEQ ID NO: 1450517 - DNA, 25 bp, Homo sapien
ggctctccaggaattagagttgtca

SEQ ID NO: 1450518 - DNA, 25 bp, Homo sapien
cagggttgtgtttaggtgacgccca

SEQ ID NO: 1450519 - DNA, 25 bp, Homo sapien
taggtgacgcccacaaacgagaaca

SEQ ID NO: 1450520 - DNA, 25 bp, Homo sapien
tccacatctgcagtacctagaatag

SEQ ID NO: 1450521 - DNA, 25 bp, Homo sapien
gattgattcattaggcagggttgtg

SEQ ID NO: 1450522 - DNA, 25 bp, Homo sapien
ctggatgaccctcttaacaggttca

SEQ ID NO: 1450523 - DNA, 25 bp, Homo sapien
tgagcaagcttgttaaaagttagca

SEQ ID NO: 1450524 - DNA, 25 bp, Homo sapien
gaagcatgattgagctgtgcaccga

SEQ ID NO: 1450525 - DNA, 25 bp, Homo sapien
attgagctgtgcaccgaggcggcaa

SEQ ID NO: 1450526 - DNA, 25 bp, Homo sapien
gaatttcggcagttccaacgtgtca

SEQ ID NO: 1450527 - DNA, 25 bp, Homo sapien
tttcccctgggagtcggacagctgc

SEQ ID NO: 1450528 - DNA, 25 bp, Homo sapien
tctggatccttcatggaatttcggc

SEQ ID NO: 1450529 - DNA, 25 bp, Homo sapien
gctgcagctcagtcagaccaaacct

SEQ ID NO: 1450530 - DNA, 25 bp, Homo sapien
gaaaaattagagctccagtcaccga

SEQ ID NO: 1450531 - DNA, 25 bp, Homo sapien
aaaatcattgaactgtaaccctcag

SEQ ID NO: 1450532 - DNA, 25 bp, Homo sapien
aaccctcagtaggtgaattatatgg

SEQ ID NO: 1450533 - DNA, 25 bp, Homo sapien
tattgcgggaatgattgcataaccc

SEQ ID NO: 1450534 - DNA, 25 bp, Homo sapien
caggaggcctcgcttggagcattgc

SEQ ID NO: 1450535 - DNA, 25 bp, Homo sapien
tgagcccagacaccgatctgtgaga

SEQ ID NO: 1450536 - DNA, 25 bp, Homo sapien
tcatgctcttaacacaggtgcctgg

SEQ ID NO: 1450537 - DNA, 25 bp, Homo sapien
tggaagcacctttaatgagagttga

SEQ ID NO: 1450538 - DNA, 25 bp, Homo sapien
tgatgaaaataccaagcacagcaag

SEQ ID NO: 1450539 - DNA, 25 bp, Homo sapien
cttattttccacagtcaggtagaca

SEQ ID NO: 1450540 - DNA, 25 bp, Homo sapien
cacagtcaggtagacaaacaccaca

SEQ ID NO: 1450541 - DNA, 25 bp, Homo sapien
caatgatgaaaataccaagcacagc

SEQ ID NO: 1450542 - DNA, 25 bp, Homo sapien
cgcgcagtagtctctctctttggtg

SEQ ID NO: 1450543 - DNA, 25 bp, Homo sapien
tctcgatagtctggtcttccgcgca

SEQ ID NO: 1450544 - DNA, 25 bp, Homo sapien
tcccatatgtgattctggtgcttgg

SEQ ID NO: 1450545 - DNA, 25 bp, Homo sapien
ggtgatagtcccatatgtgattctg

SEQ ID NO: 1450546 - DNA, 25 bp, Homo sapien
cagtggctcttaggattgtggacag

SEQ ID NO: 1450547 - DNA, 25 bp, Homo sapien
ctgtggtgcacttgagtagcccctt

SEQ ID NO: 1450548 - DNA, 25 bp, Homo sapien
ctcttaggattgtggacagctgtgg

SEQ ID NO: 1450549 - DNA, 25 bp, Homo sapien
tggtgcacttgagtagccccttaaa

SEQ ID NO: 1450550 - DNA, 25 bp, Homo sapien
tataatccaagcaataggtatctac

SEQ ID NO: 1450551 - DNA, 25 bp, Homo sapien
tcttcccttggaaggcttataatcc

SEQ ID NO: 1450552 - DNA, 25 bp, Homo sapien
caataggtatctacagctttgcgtt

SEQ ID NO: 1450553 - DNA, 25 bp, Homo sapien
ctacagctttgcgtttagtggtgga

SEQ ID NO: 1450554 - DNA, 25 bp, Homo sapien
aatgtcaagaggaatttgtttccaa

SEQ ID NO: 1450555 - DNA, 25 bp, Homo sapien
atgtcaagaggaatttgtttccaat

SEQ ID NO: 1450556 - DNA, 25 bp, Homo sapien
tgtcaagaggaatttgtttccaatg

SEQ ID NO: 1450557 - DNA, 25 bp, Homo sapien
gtcaagaggaatttgtttccaatgt

SEQ ID NO: 1450558 - DNA, 25 bp, Homo sapien
ttggttccactatttcctcctgctg

SEQ ID NO: 1450559 - DNA, 25 bp, Homo sapien
atcagtgtttggttccactatttcc

SEQ ID NO: 1450560 - DNA, 25 bp, Homo sapien
tattatcatcttggaatcattataa

SEQ ID NO: 1450561 - DNA, 25 bp, Homo sapien
ttataatcagtgtttggttccacta

SEQ ID NO: 1450562 - DNA, 25 bp, Homo sapien
tctggagtatctgggattacaggca

SEQ ID NO: 1450563 - DNA, 25 bp, Homo sapien
ctctggagtatctgggattacaggc

SEQ ID NO: 1450564 - DNA, 25 bp, Homo sapien
gccactatgcccagttaattaattt

SEQ ID NO: 1450565 - DNA, 25 bp, Homo sapien
caagcatgcgtgccactatgcccag

SEQ ID NO: 1450566 - DNA, 25 bp, Homo sapien
tctggttgttggatgcagcagccct

SEQ ID NO: 1450567 - DNA, 25 bp, Homo sapien
gaatttcaggcataaagaacagttg

SEQ ID NO: 1450568 - DNA, 25 bp, Homo sapien
gatattccttaaaagatcacagggt

SEQ ID NO: 1450569 - DNA, 25 bp, Homo sapien
aagtggccattgagatattccttaa

SEQ ID NO: 1450570 - DNA, 25 bp, Homo sapien
aagtaatggttcatgggaagacagt

SEQ ID NO: 1450571 - DNA, 25 bp, Homo sapien
tgagagtatgatatttccttgcaaa

SEQ ID NO: 1450572 - DNA, 25 bp, Homo sapien
ttgagagtatgatatttccttgcaa

SEQ ID NO: 1450573 - DNA, 25 bp, Homo sapien
ctgttccctacccattctgtgacct

SEQ ID NO: 1450574 - DNA, 25 bp, Homo sapien
gttccctacccattctgtgacctga

SEQ ID NO: 1450575 - DNA, 25 bp, Homo sapien
tccctacccattctgtgacctgaaa

SEQ ID NO: 1450576 - DNA, 25 bp, Homo sapien
tgttccctacccattctgtgacctg

SEQ ID NO: 1450577 - DNA, 25 bp, Homo sapien
cagggaggtataatctggttcatct

SEQ ID NO: 1450578 - DNA, 25 bp, Homo sapien
cagtcagcataggaggggtttcagg

SEQ ID NO: 1450579 - DNA, 25 bp, Homo sapien
gtcagcataggaggggtttcaggga

SEQ ID NO: 1450580 - DNA, 25 bp, Homo sapien
gtttcagggaggtataatctggttc

SEQ ID NO: 1450581 - DNA, 25 bp, Homo sapien
atccccccaaaataatggtcagatt

SEQ ID NO: 1450582 - DNA, 25 bp, Homo sapien
gtcctcaaaggaggcccagaattta

SEQ ID NO: 1450583 - DNA, 25 bp, Homo sapien
caaagcagaagttgagtcctcaaag

SEQ ID NO: 1450584 - DNA, 25 bp, Homo sapien
cagatttatcaactgaggcaaagca

SEQ ID NO: 1450585 - DNA, 25 bp, Homo sapien
tgtaggaatttctgattgtaaggca

SEQ ID NO: 1450586 - DNA, 25 bp, Homo sapien
gtaggaatttctgattgtaaggcat

SEQ ID NO: 1450587 - DNA, 25 bp, Homo sapien
ctgtaggaatttctgattgtaaggc

SEQ ID NO: 1450588 - DNA, 25 bp, Homo sapien
taagtgcaaagttgccatctagcag

SEQ ID NO: 1450589 - DNA, 25 bp, Homo sapien
catctagcagtacagcttatggcgg

SEQ ID NO: 1450590 - DNA, 25 bp, Homo sapien
tagttagtaaaaggacatgcacgtt

SEQ ID NO: 1450591 - DNA, 25 bp, Homo sapien
catgcacgttgagcagtcattcccc

SEQ ID NO: 1450592 - DNA, 25 bp, Homo sapien
cactgtcctgcgctccatccagctc

SEQ ID NO: 1450593 - DNA, 25 bp, Homo sapien
actgtcctgcgctccatccagctct

SEQ ID NO: 1450594 - DNA, 25 bp, Homo sapien
catcactgtcctgcgctccatccag

SEQ ID NO: 1450595 - DNA, 25 bp, Homo sapien
tgtcatcactgtcctgcgctccatc

SEQ ID NO: 1450596 - DNA, 25 bp, Homo sapien
gggaggtgagaccaacaactgtact

SEQ ID NO: 1450597 - DNA, 25 bp, Homo sapien
gaggtgagaccaacaactgtactaa

SEQ ID NO: 1450598 - DNA, 25 bp, Homo sapien
ttttcatacaactttctggtggaag

SEQ ID NO: 1450599 - DNA, 25 bp, Homo sapien
ggtgagaccaacaactgtactaact

SEQ ID NO: 1450600 - DNA, 25 bp, Homo sapien
caagttggttctgcaatttacagtc

SEQ ID NO: 1450601 - DNA, 25 bp, Homo sapien
tattgggccaggtgaaaatccaagc

SEQ ID NO: 1450602 - DNA, 25 bp, Homo sapien
tgcaatttacagtcactcagacact

SEQ ID NO: 1450603 - DNA, 25 bp, Homo sapien
aatccaagcttctcaagttggttct

SEQ ID NO: 1450604 - DNA, 25 bp, Homo sapien
gatgatagaagtttggcctcttttc

SEQ ID NO: 1450605 - DNA, 25 bp, Homo sapien
atgatagaagtttggcctcttttct

SEQ ID NO: 1450606 - DNA, 25 bp, Homo sapien
aaaataacctccaatagagccctca

SEQ ID NO: 1450607 - DNA, 25 bp, Homo sapien
cctagagggaacacacatatggaag

SEQ ID NO: 1450608 - DNA, 25 bp, Homo sapien
ggaatccaactggatgattaattca

SEQ ID NO: 1450609 - DNA, 25 bp, Homo sapien
caagtggcactagacaattgcctag

SEQ ID NO: 1450610 - DNA, 25 bp, Homo sapien
tctaaagtctatgcaatcgagttgg

SEQ ID NO: 1450611 - DNA, 25 bp, Homo sapien
tcaaaaggcccatactagtagttgg

SEQ ID NO: 1450612 - DNA, 25 bp, Homo sapien
gcaatttgaccatctactccaggga

SEQ ID NO: 1450613 - DNA, 25 bp, Homo sapien
caaaaggaggtactggttgacttca

SEQ ID NO: 1450614 - DNA, 25 bp, Homo sapien
gcctctaaagaagggtgttcagggc

SEQ ID NO: 1450615 - DNA, 25 bp, Homo sapien
gctgatgatgggttgccatcctgga

SEQ ID NO: 1450616 - DNA, 25 bp, Homo sapien
gaggcctctaaagaagggtgttcag

SEQ ID NO: 1450617 - DNA, 25 bp, Homo sapien
cggtctggggccctctgaagctgat

SEQ ID NO: 1450618 - DNA, 25 bp, Homo sapien
actcctcatccccatcatctgtcac

SEQ ID NO: 1450619 - DNA, 25 bp, Homo sapien
catcatctgtcacccagcgagggca

SEQ ID NO: 1450620 - DNA, 25 bp, Homo sapien
tgtcacccagcgagggcagccggca

SEQ ID NO: 1450621 - DNA, 25 bp, Homo sapien
agccggcagccaggccgcggactgc

SEQ ID NO: 1450622 - DNA, 25 bp, Homo sapien
gtgacagaagaggcttcctatcata

SEQ ID NO: 1450623 - DNA, 25 bp, Homo sapien
tgacagaagaggcttcctatcatac

SEQ ID NO: 1450624 - DNA, 25 bp, Homo sapien
tgtgacagaagaggcttcctatcat

SEQ ID NO: 1450625 - DNA, 25 bp, Homo sapien
ctgtgacagaagaggcttcctatca

SEQ ID NO: 1450626 - DNA, 25 bp, Homo sapien
tctgtccgtgcgtacatacagccat

SEQ ID NO: 1450627 - DNA, 25 bp, Homo sapien
tagctctgtccgtgcgtacatacag

SEQ ID NO: 1450628 - DNA, 25 bp, Homo sapien
cagcagggtcattgctagctctgtc

SEQ ID NO: 1450629 - DNA, 25 bp, Homo sapien
cattgctagctctgtccgtgcgtac

SEQ ID NO: 1450630 - DNA, 25 bp, Homo sapien
gaattaatccagacctgtcgccagg

SEQ ID NO: 1450631 - DNA, 25 bp, Homo sapien
ttcgggaaaccatgcaacttgagcc

SEQ ID NO: 1450632 - DNA, 25 bp, Homo sapien
cacgagtcagttcagccgaggaaga

SEQ ID NO: 1450633 - DNA, 25 bp, Homo sapien
tattacagcaattaacagagcagcg

SEQ ID NO: 1450634 - DNA, 25 bp, Homo sapien
tctctcagggagaccatgcagagtt

SEQ ID NO: 1450635 - DNA, 25 bp, Homo sapien
tctcagggagaccatgcagagtttt

SEQ ID NO: 1450636 - DNA, 25 bp, Homo sapien
cagtctctcagggagaccatgcaga

SEQ ID NO: 1450637 - DNA, 25 bp, Homo sapien
tcagggagaccatgcagagttttga

SEQ ID NO: 1450638 - DNA, 25 bp, Homo sapien
gcagcccacgaggaaaacccttgaa

SEQ ID NO: 1450639 - DNA, 25 bp, Homo sapien
tcagtatgacgacttcctccaggga

SEQ ID NO: 1450640 - DNA, 25 bp, Homo sapien
gcctgagccaggtagaaaaccaaag

SEQ ID NO: 1450641 - DNA, 25 bp, Homo sapien
cgcccctcagatggaacacgggaat

SEQ ID NO: 1450642 - DNA, 25 bp, Homo sapien
caataaccccggcacagtgggcact

SEQ ID NO: 1450643 - DNA, 25 bp, Homo sapien
tcttcatgatctatagttcctatcc

SEQ ID NO: 1450644 - DNA, 25 bp, Homo sapien
tgggctcctccgtgaagagtcaagg

SEQ ID NO: 1450645 - DNA, 25 bp, Homo sapien
gaaatttagagaagcgaacccaggc

SEQ ID NO: 1450646 - DNA, 25 bp, Homo sapien
gaacattcattccttgggaacagat

SEQ ID NO: 1450647 - DNA, 25 bp, Homo sapien
gctcttgcttttgggtcagagagat

SEQ ID NO: 1450648 - DNA, 25 bp, Homo sapien
tctgtttcttggttcttgtggtact

SEQ ID NO: 1450649 - DNA, 25 bp, Homo sapien
tcttgtggtactgtcagcttgatca

SEQ ID NO: 1450650 - DNA, 25 bp, Homo sapien
gaggaacaccagacttcctggacca

SEQ ID NO: 1450651 - DNA, 25 bp, Homo sapien
ggaacaccagacttcctggaccagc

SEQ ID NO: 1450652 - DNA, 25 bp, Homo sapien
gaacaccagacttcctggaccagcc

SEQ ID NO: 1450653 - DNA, 25 bp, Homo sapien
aggaggaacaccagacttcctggac

SEQ ID NO: 1450654 - DNA, 25 bp, Homo sapien
cagttgtgaaccaagtatctgtctc

SEQ ID NO: 1450655 - DNA, 25 bp, Homo sapien
gataagtgtgccctttataatgcgt

SEQ ID NO: 1450656 - DNA, 25 bp, Homo sapien
tgggcacatctgataagtgtgccct

SEQ ID NO: 1450657 - DNA, 25 bp, Homo sapien
aagtgtgccctttataatgcgtgcc

SEQ ID NO: 1450658 - DNA, 25 bp, Homo sapien
aatttgccaaggtcaggagtcagtc

SEQ ID NO: 1450659 - DNA, 25 bp, Homo sapien
gactcatcgccacctgttatggagg

SEQ ID NO: 1450660 - DNA, 25 bp, Homo sapien
aaggaggaatcagtgccacgcagca

SEQ ID NO: 1450661 - DNA, 25 bp, Homo sapien
tgagaacgtacataagagtggcgcc

SEQ ID NO: 1450662 - DNA, 25 bp, Homo sapien
gtgcccctccctcaccccaagagct

SEQ ID NO: 1450663 - DNA, 25 bp, Homo sapien
cctccctcaccccaagagctcaggg

SEQ ID NO: 1450664 - DNA, 25 bp, Homo sapien
tgtgcccctccctcaccccaagagc

SEQ ID NO: 1450665 - DNA, 25 bp, Homo sapien
caggccaaccctagaaggagcagaa

SEQ ID NO: 1450666 - DNA, 25 bp, Homo sapien
aggccaaccctagaaggagcagaag

SEQ ID NO: 1450667 - DNA, 25 bp, Homo sapien
tctagtatccctctggagccaaggg

SEQ ID NO: 1450668 - DNA, 25 bp, Homo sapien
gaccccactggcctttattgctgaa

SEQ ID NO: 1450669 - DNA, 25 bp, Homo sapien
ttctaggattgcagcctcgcaggtg

SEQ ID NO: 1450670 - DNA, 25 bp, Homo sapien
tgaatcttgctgttcccttgaggga

SEQ ID NO: 1450671 - DNA, 25 bp, Homo sapien
tgactctcctatcttggggccttgc

SEQ ID NO: 1450672 - DNA, 25 bp, Homo sapien
tcctatcttggggccttgccctctc

SEQ ID NO: 1450673 - DNA, 25 bp, Homo sapien
tatcttggggccttgccctctctac

SEQ ID NO: 1450674 - DNA, 25 bp, Homo sapien
gactctcctatcttggggccttgcc

SEQ ID NO: 1450675 - DNA, 25 bp, Homo sapien
tagagggggtctgactttgctcctt

SEQ ID NO: 1450676 - DNA, 25 bp, Homo sapien
atgagggagaacaggcttacagaat

SEQ ID NO: 1450677 - DNA, 25 bp, Homo sapien
ggagaacaggcttacagaatctgcc

SEQ ID NO: 1450678 - DNA, 25 bp, Homo sapien
agggagaacaggcttacagaatctg

SEQ ID NO: 1450679 - DNA, 25 bp, Homo sapien
accacagaagcaggcgaaagtgaac

SEQ ID NO: 1450680 - DNA, 25 bp, Homo sapien
ggagaccacagaagcaggcgaaagt

SEQ ID NO: 1450681 - DNA, 25 bp, Homo sapien
acagaagcaggcgaaagtgaactgg

SEQ ID NO: 1450682 - DNA, 25 bp, Homo sapien
gccgtctcccgctctctgtgaactt

SEQ ID NO: 1450683 - DNA, 25 bp, Homo sapien
gcttcagtctgcaagagtatccctt

SEQ ID NO: 1450684 - DNA, 25 bp, Homo sapien
tcttccctggcacataagtctgagg

SEQ ID NO: 1450685 - DNA, 25 bp, Homo sapien
ggttaccccagcaaggcacatgtgc

SEQ ID NO: 1450686 - DNA, 25 bp, Homo sapien
tcaagccactcaagcggagaagctg

SEQ ID NO: 1450687 - DNA, 25 bp, Homo sapien
ggtgttggctctcccaatatgcagc

SEQ ID NO: 1450688 - DNA, 25 bp, Homo sapien
tcctatccatatgaacgtgggccaa

SEQ ID NO: 1450689 - DNA, 25 bp, Homo sapien
atgggttttggcaccagaccacgtg

SEQ ID NO: 1450690 - DNA, 25 bp, Homo sapien
tgtgcctcagaattcccataagtta

SEQ ID NO: 1450691 - DNA, 25 bp, Homo sapien
ctggcggactcaacaaggccccctt

SEQ ID NO: 1450692 - DNA, 25 bp, Homo sapien
ttccctcgcagtccgcctcacaatt

SEQ ID NO: 1450693 - DNA, 25 bp, Homo sapien
tcgcagtccgcctcacaattccccg

SEQ ID NO: 1450694 - DNA, 25 bp, Homo sapien
ccctttccctcgcagtccgcctcac

SEQ ID NO: 1450695 - DNA, 25 bp, Homo sapien
ggctgggagctctcccggctctttg

SEQ ID NO: 1450696 - DNA, 25 bp, Homo sapien
tgtggctgaggacgccgtcggcggc

SEQ ID NO: 1450697 - DNA, 25 bp, Homo sapien
ggctctttgcattcaccgcacagct

SEQ ID NO: 1450698 - DNA, 25 bp, Homo sapien
ggctgtggctgaggacgccgtcggc

SEQ ID NO: 1450699 - DNA, 25 bp, Homo sapien
cctgtcaaggctagcttttaaacaa

SEQ ID NO: 1450700 - DNA, 25 bp, Homo sapien
taaacaatgttagattgcttccaga

SEQ ID NO: 1450701 - DNA, 25 bp, Homo sapien
caattgatctgcctgtcaaggctag

SEQ ID NO: 1450702 - DNA, 25 bp, Homo sapien
caatgttagattgcttccagatgaa

SEQ ID NO: 1450703 - DNA, 25 bp, Homo sapien
gctcctctcgtgtgactgtttcaag

SEQ ID NO: 1450704 - DNA, 25 bp, Homo sapien
tgccctaagatgcaggagtccatct

SEQ ID NO: 1450705 - DNA, 25 bp, Homo sapien
cagaggcaggcagtgatttcccgat

SEQ ID NO: 1450706 - DNA, 25 bp, Homo sapien
tttcaggcggtccaaaaacagaggc

SEQ ID NO: 1450707 - DNA, 25 bp, Homo sapien
gacaagtcccactggatagggtaga

SEQ ID NO: 1450708 - DNA, 25 bp, Homo sapien
gagcccgagggctactattgtcaag

SEQ ID NO: 1450709 - DNA, 25 bp, Homo sapien
aaaatctgtccatgcacattcgttc

SEQ ID NO: 1450710 - DNA, 25 bp, Homo sapien
aagtcccactggatagggtagaagg

SEQ ID NO: 1450711 - DNA, 25 bp, Homo sapien
ctagggcgccaggtacagggaggta

SEQ ID NO: 1450712 - DNA, 25 bp, Homo sapien
tagggcgccaggtacagggaggtac

SEQ ID NO: 1450713 - DNA, 25 bp, Homo sapien
ccccaggacacgcgctgtgagtccc

SEQ ID NO: 1450714 - DNA, 25 bp, Homo sapien
cgcgctgtgagtcccgcgggcggtg

SEQ ID NO: 1450715 - DNA, 25 bp, Homo sapien
caggacacgcgctgtgagtcccgcg

SEQ ID NO: 1450716 - DNA, 25 bp, Homo sapien
cacgcgctgtgagtcccgcgggcgg

SEQ ID NO: 1450717 - DNA, 25 bp, Homo sapien
atccaaaatcgggtctggactggag

SEQ ID NO: 1450718 - DNA, 25 bp, Homo sapien
gtgccttgaggattctgctgtagtt

SEQ ID NO: 1450719 - DNA, 25 bp, Homo sapien
ctgaaatccaaaatcgggtctggac

SEQ ID NO: 1450720 - DNA, 25 bp, Homo sapien
ctgctgtagttgagggacaccatca

SEQ ID NO: 1450721 - DNA, 25 bp, Homo sapien
gggtcctggggacggcacccagata

SEQ ID NO: 1450722 - DNA, 25 bp, Homo sapien
catcccagggctctgattagccagg

SEQ ID NO: 1450723 - DNA, 25 bp, Homo sapien
cctggggacggcacccagatatgca

SEQ ID NO: 1450724 - DNA, 25 bp, Homo sapien
ggacggcacccagatatgcagagtc

SEQ ID NO: 1450725 - DNA, 25 bp, Homo sapien
aaggctcccctctgtatcccccagg

SEQ ID NO: 1450726 - DNA, 25 bp, Homo sapien
tggccggggcccctgaagaaggctc

SEQ ID NO: 1450727 - DNA, 25 bp, Homo sapien
aggctcccctctgtatcccccaggt

SEQ ID NO: 1450728 - DNA, 25 bp, Homo sapien
aggagcgagcagtctcgtacagaaa

SEQ ID NO: 1450729 - DNA, 25 bp, Homo sapien
aagctgactttgatagattgatgcc

SEQ ID NO: 1450730 - DNA, 25 bp, Homo sapien
gctgactttgatagattgatgccaa

SEQ ID NO: 1450731 - DNA, 25 bp, Homo sapien
gtctcgtacagaaaagctgactttg

SEQ ID NO: 1450732 - DNA, 25 bp, Homo sapien
tgcgttcagagccagaagttggctc

SEQ ID NO: 1450733 - DNA, 25 bp, Homo sapien
gctgtgggacgagtgcctagcattc

SEQ ID NO: 1450734 - DNA, 25 bp, Homo sapien
tagcattcaccttgctgtatcctgg

SEQ ID NO: 1450735 - DNA, 25 bp, Homo sapien
tatatatagtgaggagagagtttga

SEQ ID NO: 1450736 - DNA, 25 bp, Homo sapien
gtccaggtccggtactcacacctgt

SEQ ID NO: 1450737 - DNA, 25 bp, Homo sapien
gggctgcagttagctctaattgcac

SEQ ID NO: 1450738 - DNA, 25 bp, Homo sapien
cctgggtccaggtccggtactcaca

SEQ ID NO: 1450739 - DNA, 25 bp, Homo sapien
gtttgggctgcagttagctctaatt

SEQ ID NO: 1450740 - DNA, 25 bp, Homo sapien
ttatgctaagtacaggaaaccagac

SEQ ID NO: 1450741 - DNA, 25 bp, Homo sapien
gagggtgtattcatacattctcaca

SEQ ID NO: 1450742 - DNA, 25 bp, Homo sapien
tatgccacctcattccaaaaagagg

SEQ ID NO: 1450743 - DNA, 25 bp, Homo sapien
cagagttactatctgacacagcaaa

SEQ ID NO: 1450744 - DNA, 25 bp, Homo sapien
aagagtcgcacagttatatcccagg

SEQ ID NO: 1450745 - DNA, 25 bp, Homo sapien
catatctccggtgacaagagtcgca

SEQ ID NO: 1450746 - DNA, 25 bp, Homo sapien
caataggcatctctctggtgtgtct

SEQ ID NO: 1450747 - DNA, 25 bp, Homo sapien
tcctggaatccgtaagacaaacatg

SEQ ID NO: 1450748 - DNA, 25 bp, Homo sapien
tgagtgttctaccagaggctttgca

SEQ ID NO: 1450749 - DNA, 25 bp, Homo sapien
tagccccttgctacatgactgaatg

SEQ ID NO: 1450750 - DNA, 25 bp, Homo sapien
tctatatgaatgtgaggtgccatgc

SEQ ID NO: 1450751 - DNA, 25 bp, Homo sapien
tgctcatagacaagataggcaggct

SEQ ID NO: 1450752 - DNA, 25 bp, Homo sapien
gggaaggatccagactttggagtca

SEQ ID NO: 1450753 - DNA, 25 bp, Homo sapien
tttggagtcaggcaacgcaggctca

SEQ ID NO: 1450754 - DNA, 25 bp, Homo sapien
taacagctatcagcttatgcactag

SEQ ID NO: 1450755 - DNA, 25 bp, Homo sapien
tatctacctcacaggaccattgtga

SEQ ID NO: 1450756 - DNA, 25 bp, Homo sapien
ctggacgtgatggtgcacgtatgta

SEQ ID NO: 1450757 - DNA, 25 bp, Homo sapien
atcaggctggctaggttgggcatgg

SEQ ID NO: 1450758 - DNA, 25 bp, Homo sapien
gacgtgatggtgcacgtatgtaatc

SEQ ID NO: 1450759 - DNA, 25 bp, Homo sapien
tcaggctggctaggttgggcatggt

SEQ ID NO: 1450760 - DNA, 25 bp, Homo sapien
acagtgtatgatgattgtgcctgtg

SEQ ID NO: 1450761 - DNA, 25 bp, Homo sapien
tacagtgtatgatgattgtgcctgt

SEQ ID NO: 1450762 - DNA, 25 bp, Homo sapien
ctagagttccagcaactttgtaggc

SEQ ID NO: 1450763 - DNA, 25 bp, Homo sapien
gagttccagcaactttgtaggctga

SEQ ID NO: 1450764 - DNA, 25 bp, Homo sapien
aacaggtaacaagattgcacccatc

SEQ ID NO: 1450765 - DNA, 25 bp, Homo sapien
caagattgagccaaaaagaaaacct

SEQ ID NO: 1450766 - DNA, 25 bp, Homo sapien
ggtaacaagattgcacccatcatgc

SEQ ID NO: 1450767 - DNA, 25 bp, Homo sapien
taacaagattgcacccatcatgcca

SEQ ID NO: 1450768 - DNA, 25 bp, Homo sapien
acgcacagctcgctgccccagatct

SEQ ID NO: 1450769 - DNA, 25 bp, Homo sapien
gcttcggcctgtgcatcgccttcct

SEQ ID NO: 1450770 - DNA, 25 bp, Homo sapien
gtcagacgcacagctcgctgcccca

SEQ ID NO: 1450771 - DNA, 25 bp, Homo sapien
tactggagcgtcttcttcagcttcg

SEQ ID NO: 1450772 - DNA, 25 bp, Homo sapien
gagtgactactaatgaatataagat

SEQ ID NO: 1450773 - DNA, 25 bp, Homo sapien
tgactactaatgaatataagatttc

SEQ ID NO: 1450774 - DNA, 25 bp, Homo sapien
tagggctaagggtaaggtgtggaga

SEQ ID NO: 1450775 - DNA, 25 bp, Homo sapien
ctagggctaagggtaaggtgtggag

SEQ ID NO: 1450776 - DNA, 25 bp, Homo sapien
tattccgccttcgtgtacagctatg

SEQ ID NO: 1450777 - DNA, 25 bp, Homo sapien
tccacagtgcagtctgtaagctaag

SEQ ID NO: 1450778 - DNA, 25 bp, Homo sapien
tcctcagcttgagccaagtgtgtag

SEQ ID NO: 1450779 - DNA, 25 bp, Homo sapien
tgcgggcactcccatggagatccag

SEQ ID NO: 1450780 - DNA, 25 bp, Homo sapien
tctggagcagtacaaggatcgaaca

SEQ ID NO: 1450781 - DNA, 25 bp, Homo sapien
taagagtctagtttgggccacatgg

SEQ ID NO: 1450782 - DNA, 25 bp, Homo sapien
gacacttatacaggtgccccgtgat

SEQ ID NO: 1450783 - DNA, 25 bp, Homo sapien
tattgtagtccaggcgcaagaggga

SEQ ID NO: 1450784 - DNA, 25 bp, Homo sapien
tatataagtcgtatgtgctcactgc

SEQ ID NO: 1450785 - DNA, 25 bp, Homo sapien
tcagggcacacttggtataaattcc

SEQ ID NO: 1450786 - DNA, 25 bp, Homo sapien
tgactctgaagagatcctggccacg

SEQ ID NO: 1450787 - DNA, 25 bp, Homo sapien
ctggccacggtgaaaactgagggca

SEQ ID NO: 1450788 - DNA, 25 bp, Homo sapien
tctgctactcaggacatcatgctgg

SEQ ID NO: 1450789 - DNA, 25 bp, Homo sapien
tgtcacacagtacaactcgagagtt

SEQ ID NO: 1450790 - DNA, 25 bp, Homo sapien
tctccaagcctcaagggaataaatg

SEQ ID NO: 1450791 - DNA, 25 bp, Homo sapien
gaaataaggtagctatcacatgtca

SEQ ID NO: 1450792 - DNA, 25 bp, Homo sapien
gatcaatgggaaccagctggccaac

SEQ ID NO: 1450793 - DNA, 25 bp, Homo sapien
actgatggaagtctaaactaggacc

SEQ ID NO: 1450794 - DNA, 25 bp, Homo sapien
gctagctggtcaacagacagtgtgg

SEQ ID NO: 1450795 - DNA, 25 bp, Homo sapien
tgcagagtgatatcacagcacagag

SEQ ID NO: 1450796 - DNA, 25 bp, Homo sapien
tcatgggctcgagggaccctcctac

SEQ ID NO: 1450797 - DNA, 25 bp, Homo sapien
caattcatgggctcgagggaccctc

SEQ ID NO: 1450798 - DNA, 25 bp, Homo sapien
catgggctcgagggaccctcctacc

SEQ ID NO: 1450799 - DNA, 25 bp, Homo sapien
gcagatgctggttggttcggtatgt

SEQ ID NO: 1450800 - DNA, 25 bp, Homo sapien
gttaggctgtgcaaccacagtgctg

SEQ ID NO: 1450801 - DNA, 25 bp, Homo sapien
tggccagcaacctggattgtaatgc

SEQ ID NO: 1450802 - DNA, 25 bp, Homo sapien
caggagttggcgagatggtgctgca

SEQ ID NO: 1450803 - DNA, 25 bp, Homo sapien
tacaacagaggacacggaaactcag

SEQ ID NO: 1450804 - DNA, 25 bp, Homo sapien
caacagaggacacggaaactcagat

SEQ ID NO: 1450805 - DNA, 25 bp, Homo sapien
tttacaacagaggacacggaaactc

SEQ ID NO: 1450806 - DNA, 25 bp, Homo sapien
cagaggacacggaaactcagatgaa

SEQ ID NO: 1450807 - DNA, 25 bp, Homo sapien
ggacctcacatctagatcttccggc

SEQ ID NO: 1450808 - DNA, 25 bp, Homo sapien
atctccctcattgtgactccattct

SEQ ID NO: 1450809 - DNA, 25 bp, Homo sapien
cctcattgaaatgatgtgacatctg

SEQ ID NO: 1450810 - DNA, 25 bp, Homo sapien
tcattgaaatgatgtgacatctggg

SEQ ID NO: 1450811 - DNA, 25 bp, Homo sapien
aatgaaaccggtgctgactgctaaa

SEQ ID NO: 1450812 - DNA, 25 bp, Homo sapien
tagaaacacctagtatgactggagc

SEQ ID NO: 1450813 - DNA, 25 bp, Homo sapien
gcagaaaagaagtgcaaggccacca

SEQ ID NO: 1450814 - DNA, 25 bp, Homo sapien
tctcttggtgtgacgggcctcaact

SEQ ID NO: 1450815 - DNA, 25 bp, Homo sapien
actgcatcggctgtgtgcaaagcca

SEQ ID NO: 1450816 - DNA, 25 bp, Homo sapien
cagggactgcatcggctgtgtgcaa

SEQ ID NO: 1450817 - DNA, 25 bp, Homo sapien
agaaggtgcccaggcggagactctg

SEQ ID NO: 1450818 - DNA, 25 bp, Homo sapien
cccagggactgcatcggctgtgtgc

SEQ ID NO: 1450819 - DNA, 25 bp, Homo sapien
tcagtgggtgaacatatctacgctc

SEQ ID NO: 1450820 - DNA, 25 bp, Homo sapien
tctaaacgctcagtacaaaggccca

SEQ ID NO: 1450821 - DNA, 25 bp, Homo sapien
gagacagcagtactggttgcacaca

SEQ ID NO: 1450822 - DNA, 25 bp, Homo sapien
tatagcctcacttctgagacagcag

SEQ ID NO: 1450823 - DNA, 25 bp, Homo sapien
taagagctgtccagatacccagatg

SEQ ID NO: 1450824 - DNA, 25 bp, Homo sapien
catggaccatactctgggtttgaga

SEQ ID NO: 1450825 - DNA, 25 bp, Homo sapien
gcgcgcttcactccatttgtcacct

SEQ ID NO: 1450826 - DNA, 25 bp, Homo sapien
cctggttcagactgttggtaagagc

SEQ ID NO: 1450827 - DNA, 25 bp, Homo sapien
taagctggctcataccaacttagaa

SEQ ID NO: 1450828 - DNA, 25 bp, Homo sapien
taatgtagtggtatgctaagctggc

SEQ ID NO: 1450829 - DNA, 25 bp, Homo sapien
gttattccctggcatgctcaaagga

SEQ ID NO: 1450830 - DNA, 25 bp, Homo sapien
taggttgaaattgtaaagctccatg

SEQ ID NO: 1450831 - DNA, 25 bp, Homo sapien
atttcagaatcctgtggaatcaccc

SEQ ID NO: 1450832 - DNA, 25 bp, Homo sapien
cagttacacaagtaggactttcttc

SEQ ID NO: 1450833 - DNA, 25 bp, Homo sapien
tttcctctgctacttgtatatggaa

SEQ ID NO: 1450834 - DNA, 25 bp, Homo sapien
cctttcaggaatttggacatttcag

SEQ ID NO: 1450835 - DNA, 25 bp, Homo sapien
ggtgcccaagaaagtgccaagtgat

SEQ ID NO: 1450836 - DNA, 25 bp, Homo sapien
agatcccaggcctatgtgagcatga

SEQ ID NO: 1450837 - DNA, 25 bp, Homo sapien
taacactgatggagacgcactgcaa

SEQ ID NO: 1450838 - DNA, 25 bp, Homo sapien
gattctagactcctggcacgggtaa

SEQ ID NO: 1450839 - DNA, 25 bp, Homo sapien
tttgttcgaacacataaagtatgcc

SEQ ID NO: 1450840 - DNA, 25 bp, Homo sapien
tatgccatgagcaatataacatcac

SEQ ID NO: 1450841 - DNA, 25 bp, Homo sapien
ccagattgtttgtgcatacatttaa

SEQ ID NO: 1450842 - DNA, 25 bp, Homo sapien
aataaagaaggattactaagccagg

SEQ ID NO: 1450843 - DNA, 25 bp, Homo sapien
tcctttctgaactctaaggtggtag

SEQ ID NO: 1450844 - DNA, 25 bp, Homo sapien
tggctctgagccaactgtgcacatc

SEQ ID NO: 1450845 - DNA, 25 bp, Homo sapien
cagccacaggaggagtaactaattt

SEQ ID NO: 1450846 - DNA, 25 bp, Homo sapien
gatcactgaagtcagacatgatatt

SEQ ID NO: 1450847 - DNA, 25 bp, Homo sapien
agtttcaatggtgcccttggttcca

SEQ ID NO: 1450848 - DNA, 25 bp, Homo sapien
tccaaggtacctctgtgctgagaca

SEQ ID NO: 1450849 - DNA, 25 bp, Homo sapien
cactacagatataaaggcagctcac

SEQ ID NO: 1450850 - DNA, 25 bp, Homo sapien
tgaaccagtaacaagtctccgacac

SEQ ID NO: 1450851 - DNA, 25 bp, Homo sapien
tgttgacaggttcagacaggatcat

SEQ ID NO: 1450852 - DNA, 25 bp, Homo sapien
caaagggtcccaatagccagaagga

SEQ ID NO: 1450853 - DNA, 25 bp, Homo sapien
tacatatggctaagagatccaccct

SEQ ID NO: 1450854 - DNA, 25 bp, Homo sapien
tgaggtcccatattcttactaggtg

SEQ ID NO: 1450855 - DNA, 25 bp, Homo sapien
aatgtctgtttcttcgttcctcggt

SEQ ID NO: 1450856 - DNA, 25 bp, Homo sapien
tgtctgtttcttcgttcctcggttc

SEQ ID NO: 1450857 - DNA, 25 bp, Homo sapien
tgaatgtctgtttcttcgttcctcg

SEQ ID NO: 1450858 - DNA, 25 bp, Homo sapien
tctgtttcttcgttcctcggttctc

SEQ ID NO: 1450859 - DNA, 25 bp, Homo sapien
gcccagacagagtgaatggcccatg

SEQ ID NO: 1450860 - DNA, 25 bp, Homo sapien
ggcccatgactgttcagtacagaag

SEQ ID NO: 1450861 - DNA, 25 bp, Homo sapien
cagacagagtgaatggcccatgact

SEQ ID NO: 1450862 - DNA, 25 bp, Homo sapien
catgactgttcagtacagaaggaaa

SEQ ID NO: 1450863 - DNA, 25 bp, Homo sapien
aggactgagagtactccagaagtgg

SEQ ID NO: 1450864 - DNA, 25 bp, Homo sapien
tctggctggacttaggggagcaaca

SEQ ID NO: 1450865 - DNA, 25 bp, Homo sapien
gtgttagcaccttgcagtctggctg

SEQ ID NO: 1450866 - DNA, 25 bp, Homo sapien
ggcttggagtcagtatgatgggtgt

SEQ ID NO: 1450867 - DNA, 25 bp, Homo sapien
cctgaattcaggtacagaggaataa

SEQ ID NO: 1450868 - DNA, 25 bp, Homo sapien
ggaataatgggtaaccaagacacca

SEQ ID NO: 1450869 - DNA, 25 bp, Homo sapien
caccaacgagttttataagaccgag

SEQ ID NO: 1450870 - DNA, 25 bp, Homo sapien
tgttactcaacatcacaccagtcat

SEQ ID NO: 1450871 - DNA, 25 bp, Homo sapien
aattctggatttgcttaaaagggca

SEQ ID NO: 1450872 - DNA, 25 bp, Homo sapien
caaacttgagtgtataaattctgga

SEQ ID NO: 1450873 - DNA, 25 bp, Homo sapien
gaaagcaaacttgagtgtataaatt

SEQ ID NO: 1450874 - DNA, 25 bp, Homo sapien
gtgacaccataaagagcgagcaagc

SEQ ID NO: 1450875 - DNA, 25 bp, Homo sapien
ctcgtgatcacaagggtgggtgcca

SEQ ID NO: 1450876 - DNA, 25 bp, Homo sapien
aaatgctggtgtaagagaagctgta

SEQ ID NO: 1450877 - DNA, 25 bp, Homo sapien
ggagagatgggctcagtattcccag

SEQ ID NO: 1450878 - DNA, 25 bp, Homo sapien
agtgggcttggatcactgctcgtga

SEQ ID NO: 1450879 - DNA, 25 bp, Homo sapien
cctttgggtttcttggatcttgatg

SEQ ID NO: 1450880 - DNA, 25 bp, Homo sapien
tcttggatcttgatgaattatttac

SEQ ID NO: 1450881 - DNA, 25 bp, Homo sapien
ggtttcttggatcttgatgaattat

SEQ ID NO: 1450882 - DNA, 25 bp, Homo sapien
gtttcttggatcttgatgaattatt

SEQ ID NO: 1450883 - DNA, 25 bp, Homo sapien
tatgtagtcattgcggctagaggtc

SEQ ID NO: 1450884 - DNA, 25 bp, Homo sapien
gaatcctggtctttaggctccagtg

SEQ ID NO: 1450885 - DNA, 25 bp, Homo sapien
aaagcagtcattacgttagaggcag

SEQ ID NO: 1450886 - DNA, 25 bp, Homo sapien
tctgtgtcgatgtctgggtgagaac

SEQ ID NO: 1450887 - DNA, 25 bp, Homo sapien
tctgcctgcaaaagcttaaactgcc

SEQ ID NO: 1450888 - DNA, 25 bp, Homo sapien
gttaggcttgttcttgcgaatcccc

SEQ ID NO: 1450889 - DNA, 25 bp, Homo sapien
aactgccacagggtgatagcactgt

SEQ ID NO: 1450890 - DNA, 25 bp, Homo sapien
tgcccatcattagaggtccaacaga

SEQ ID NO: 1450891 - DNA, 25 bp, Homo sapien
tgctgtattctctcaggagaccacc

SEQ ID NO: 1450892 - DNA, 25 bp, Homo sapien
ttgtgtctatctcagggtggcccag

SEQ ID NO: 1450893 - DNA, 25 bp, Homo sapien
tacttttgctccaactggtttccat

SEQ ID NO: 1450894 - DNA, 25 bp, Homo sapien
acccggtttggttatctgcctgtga

SEQ ID NO: 1450895 - DNA, 25 bp, Homo sapien
tagttcagccgggttcccaacagga

SEQ ID NO: 1450896 - DNA, 25 bp, Homo sapien
caggttccttcagcccagcctagtt

SEQ ID NO: 1450897 - DNA, 25 bp, Homo sapien
caacaggatgaaattcgtgtacaaa

SEQ ID NO: 1450898 - DNA, 25 bp, Homo sapien
caaagaagagcatccgttcaagaaa

SEQ ID NO: 1450899 - DNA, 25 bp, Homo sapien
tgccacaatgggtcagctctaccag

SEQ ID NO: 1450900 - DNA, 25 bp, Homo sapien
ctccgagctgaggatgccttgtttt

SEQ ID NO: 1450901 - DNA, 25 bp, Homo sapien
aacaatgtcattctgcccaccagtg

SEQ ID NO: 1450902 - DNA, 25 bp, Homo sapien
tccagaagcgaattcatctccgagc

SEQ ID NO: 1450903 - DNA, 25 bp, Homo sapien
gtctacagtctgtgatgctgctacc

SEQ ID NO: 1450904 - DNA, 25 bp, Homo sapien
ctacagtgaccaaagtgtctacagt

SEQ ID NO: 1450905 - DNA, 25 bp, Homo sapien
caaagtgtctacagtctgtgatgct

SEQ ID NO: 1450906 - DNA, 25 bp, Homo sapien
gaccaaagtgtctacagtctgtgat

SEQ ID NO: 1450907 - DNA, 25 bp, Homo sapien
aattctaacaacatttaactcacag

SEQ ID NO: 1450908 - DNA, 25 bp, Homo sapien
taggtctgggaagactaattctaac

SEQ ID NO: 1450909 - DNA, 25 bp, Homo sapien
aaacttagattgtgttcatgcttgc

SEQ ID NO: 1450910 - DNA, 25 bp, Homo sapien
cacagcatattacacctaaggaggt

SEQ ID NO: 1450911 - DNA, 25 bp, Homo sapien
aatcctcacgattatcactttgaag

SEQ ID NO: 1450912 - DNA, 25 bp, Homo sapien
gcagagataagaaactgtagtggaa

SEQ ID NO: 1450913 - DNA, 25 bp, Homo sapien
aagctggttgtacagagacagtcac

SEQ ID NO: 1450914 - DNA, 25 bp, Homo sapien
aaaatgtcctccagtaatcctcacg

SEQ ID NO: 1450915 - DNA, 25 bp, Homo sapien
taaagacactacctcactaggaatg

SEQ ID NO: 1450916 - DNA, 25 bp, Homo sapien
aagcaccaagttttccaagccaggg

SEQ ID NO: 1450917 - DNA, 25 bp, Homo sapien
gatgtttccaattgatcttcccagg

SEQ ID NO: 1450918 - DNA, 25 bp, Homo sapien
tatcccgccccgaaagatgtttcca

SEQ ID NO: 1450919 - DNA, 25 bp, Homo sapien
aaagaaatgaaactcgacaccggat

SEQ ID NO: 1450920 - DNA, 25 bp, Homo sapien
tgtgcacaaggcggaaagtaaagag

SEQ ID NO: 1450921 - DNA, 25 bp, Homo sapien
cagcctcgatgcagctgtgcacaag

SEQ ID NO: 1450922 - DNA, 25 bp, Homo sapien
ggccgctggagcgaaagagaaaaag

SEQ ID NO: 1450923 - DNA, 25 bp, Homo sapien
cgtgtgccctacaggagatcaaagt

SEQ ID NO: 1450924 - DNA, 25 bp, Homo sapien
gagaggaagaaacgcggacggccgc

SEQ ID NO: 1450925 - DNA, 25 bp, Homo sapien
ggaagaggtgcaacctcaccgggcc

SEQ ID NO: 1450926 - DNA, 25 bp, Homo sapien
ctcaccgggccttggtaagcactga

SEQ ID NO: 1450927 - DNA, 25 bp, Homo sapien
cgatgcgcctctccgccctcagcct

SEQ ID NO: 1450928 - DNA, 25 bp, Homo sapien
gcctcgaacacgatgcgcctctccg

SEQ ID NO: 1450929 - DNA, 25 bp, Homo sapien
ctcggtctccgcctcgaacacgatg

SEQ ID NO: 1450930 - DNA, 25 bp, Homo sapien
ggtctccgcctcgaacacgatgcgc

SEQ ID NO: 1450931 - DNA, 25 bp, Homo sapien
gaaactcgaggacggcgcggcagcc

SEQ ID NO: 1450932 - DNA, 25 bp, Homo sapien
gctggaaactcgaggacggcgcggc

SEQ ID NO: 1450933 - DNA, 25 bp, Homo sapien
tggaaactcgaggacggcgcggcag

SEQ ID NO: 1450934 - DNA, 25 bp, Homo sapien
aggacggcgcggcagccgctgcgac

SEQ ID NO: 1450935 - DNA, 25 bp, Homo sapien
ccccgcggcggagccgtagaaggcg

SEQ ID NO: 1450936 - DNA, 25 bp, Homo sapien
gccaagccgagcccgccgggtgccc

SEQ ID NO: 1450937 - DNA, 25 bp, Homo sapien
ggcggagccgtagaaggcggcggcg

SEQ ID NO: 1450938 - DNA, 25 bp, Homo sapien
gcggcggccaagccgagcccgccgg

SEQ ID NO: 1450939 - DNA, 25 bp, Homo sapien
ttctcatcgaagtgccagatcccag

SEQ ID NO: 1450940 - DNA, 25 bp, Homo sapien
tacttgagcagtttagcaccagaag

SEQ ID NO: 1450941 - DNA, 25 bp, Homo sapien
gtagtcgctacacgtcacttccggg

SEQ ID NO: 1450942 - DNA, 25 bp, Homo sapien
aaaagcttgccctgacgatggaggc

SEQ ID NO: 1450943 - DNA, 25 bp, Homo sapien
caactcaggagtgtgacacagctac

SEQ ID NO: 1450944 - DNA, 25 bp, Homo sapien
aaaatttggcttgtgagtcgtgtac

SEQ ID NO: 1450945 - DNA, 25 bp, Homo sapien
ttccagtgggagacccctaaagcag

SEQ ID NO: 1450946 - DNA, 25 bp, Homo sapien
tctaggctcactctgtaaagtggga

SEQ ID NO: 1450947 - DNA, 25 bp, Homo sapien
ccacttgcccaaaagaaatacagtt

SEQ ID NO: 1450948 - DNA, 25 bp, Homo sapien
gagcgttaagctgaggttgtccact

SEQ ID NO: 1450949 - DNA, 25 bp, Homo sapien
acttttatcttaggcccagccacct

SEQ ID NO: 1450950 - DNA, 25 bp, Homo sapien
cacctgatattagaagctggagcgt

SEQ ID NO: 1450951 - DNA, 25 bp, Homo sapien
catccctactcaggggtcttttaga

SEQ ID NO: 1450952 - DNA, 25 bp, Homo sapien
agtcatcatgcccatccctactcag

SEQ ID NO: 1450953 - DNA, 25 bp, Homo sapien
tgcccatccctactcaggggtcttt

SEQ ID NO: 1450954 - DNA, 25 bp, Homo sapien
tcatcatgcccatccctactcaggg

SEQ ID NO: 1450955 - DNA, 25 bp, Homo sapien
gctagctgttaaccctgagcctggg

SEQ ID NO: 1450956 - DNA, 25 bp, Homo sapien
gagtccccgcattccagtgcatgga

SEQ ID NO: 1450957 - DNA, 25 bp, Homo sapien
aggcttgggaaaccgcactttgtgc

SEQ ID NO: 1450958 - DNA, 25 bp, Homo sapien
tgcagtagctccaaacagggttgtg

SEQ ID NO: 1450959 - DNA, 25 bp, Homo sapien
ctacgctgagtatttggccaagtcg

SEQ ID NO: 1450960 - DNA, 25 bp, Homo sapien
cgctgagtatttggccaagtcgctc

SEQ ID NO: 1450961 - DNA, 25 bp, Homo sapien
ctgagtatttggccaagtcgctctt

SEQ ID NO: 1450962 - DNA, 25 bp, Homo sapien
tacgctgagtatttggccaagtcgc

SEQ ID NO: 1450963 - DNA, 25 bp, Homo sapien
aaagtaaatggcgaccagacccagg

SEQ ID NO: 1450964 - DNA, 25 bp, Homo sapien
acacgtacggagacatcacaggcag

SEQ ID NO: 1450965 - DNA, 25 bp, Homo sapien
cagcacccacgtgtccattagggaa

SEQ ID NO: 1450966 - DNA, 25 bp, Homo sapien
tcccctcggtatttgggcaggaaca

SEQ ID NO: 1450967 - DNA, 25 bp, Homo sapien
tgagggcggctgaagctgtcaccac

SEQ ID NO: 1450968 - DNA, 25 bp, Homo sapien
cagccggtccatgaccagagagaag

SEQ ID NO: 1450969 - DNA, 25 bp, Homo sapien
gtgccgaatcgctgcaccagccggt

SEQ ID NO: 1450970 - DNA, 25 bp, Homo sapien
actggccaaatagactgctcgagtg

SEQ ID NO: 1450971 - DNA, 25 bp, Homo sapien
gagaatgtgggcaacgccccttgct

SEQ ID NO: 1450972 - DNA, 25 bp, Homo sapien
gacagctggccataggcttcaagac

SEQ ID NO: 1450973 - DNA, 25 bp, Homo sapien
tctagactttgaataagctccgcct

SEQ ID NO: 1450974 - DNA, 25 bp, Homo sapien
tcaagacgcttctaggacgcctgag

SEQ ID NO: 1450975 - DNA, 25 bp, Homo sapien
gaaggtcatgagtgccatccagctg

SEQ ID NO: 1450976 - DNA, 25 bp, Homo sapien
cccaagactgatcatgaaggcatag

SEQ ID NO: 1450977 - DNA, 25 bp, Homo sapien
tccgtgtaaaacagcgtgaaggtca

SEQ ID NO: 1450978 - DNA, 25 bp, Homo sapien
catagacagagtaggcctggcgaca

SEQ ID NO: 1450979 - DNA, 25 bp, Homo sapien
ctaggagcgggacacagaccaggcc

SEQ ID NO: 1450980 - DNA, 25 bp, Homo sapien
acagaccaggcccagcactggacca

SEQ ID NO: 1450981 - DNA, 25 bp, Homo sapien
taggagcgggacacagaccaggccc

SEQ ID NO: 1450982 - DNA, 25 bp, Homo sapien
gaccaggcccagcactggaccaatg

SEQ ID NO: 1450983 - DNA, 25 bp, Homo sapien
cataggtgatgcctgcggccaaaca

SEQ ID NO: 1450984 - DNA, 25 bp, Homo sapien
tggtcatgaacttctcctctacccc

SEQ ID NO: 1450985 - DNA, 25 bp, Homo sapien
cagcagaggcggcacataggtgatg

SEQ ID NO: 1450986 - DNA, 25 bp, Homo sapien
gccaaaggttagcaggttgaccagc

SEQ ID NO: 1450987 - DNA, 25 bp, Homo sapien
gaactgcttcgtctcggctctgctc

SEQ ID NO: 1450988 - DNA, 25 bp, Homo sapien
ttgctgccgccaactgcctaggaat

SEQ ID NO: 1450989 - DNA, 25 bp, Homo sapien
gcctaggaatcagccaggcgcccat

SEQ ID NO: 1450990 - DNA, 25 bp, Homo sapien
tggggacacgtctcatcactcagat

SEQ ID NO: 1450991 - DNA, 25 bp, Homo sapien
tcctggacagcctaagctagggctg

SEQ ID NO: 1450992 - DNA, 25 bp, Homo sapien
ccatggtgacagtcaatacagacac

SEQ ID NO: 1450993 - DNA, 25 bp, Homo sapien
caagggtcacctggcaatcccatgg

SEQ ID NO: 1450994 - DNA, 25 bp, Homo sapien
tagggctgaagcatggggactctcc

SEQ ID NO: 1450995 - DNA, 25 bp, Homo sapien
tgagcactttcagaacaacagagtc

SEQ ID NO: 1450996 - DNA, 25 bp, Homo sapien
cttcaaactcattctgctgactcaa

SEQ ID NO: 1450997 - DNA, 25 bp, Homo sapien
ttcaaactcattctgctgactcaag

SEQ ID NO: 1450998 - DNA, 25 bp, Homo sapien
ttcagaacaacagagtcctggctcc

SEQ ID NO: 1450999 - DNA, 25 bp, Homo sapien
ctcctctgggattcgcgcggggctc

SEQ ID NO: 1451000 - DNA, 25 bp, Homo sapien
cagagcgtgtgggacgcgccctcct

SEQ ID NO: 1451001 - DNA, 25 bp, Homo sapien
tgcaggcgccgggcactcggcaccc

SEQ ID NO: 1451002 - DNA, 25 bp, Homo sapien
cgcagcgccccggacggccacggcg

SEQ ID NO: 1451003 - DNA, 25 bp, Homo sapien
cgcgcggctgtcacccggagccagc

SEQ ID NO: 1451004 - DNA, 25 bp, Homo sapien
cgaggcgcgcggctgtcacccggag

SEQ ID NO: 1451005 - DNA, 25 bp, Homo sapien
gagccagcgcgtgcaggctggttcc

SEQ ID NO: 1451006 - DNA, 25 bp, Homo sapien
tgtcacccggagccagcgcgtgcag

SEQ ID NO: 1451007 - DNA, 25 bp, Homo sapien
ttgactgtcatcacaagatggcaga

SEQ ID NO: 1451008 - DNA, 25 bp, Homo sapien
agagccttggagttgctgacaaatg

SEQ ID NO: 1451009 - DNA, 25 bp, Homo sapien
agttgctgacaaatgagcccttcac

SEQ ID NO: 1451010 - DNA, 25 bp, Homo sapien
ccttggagttgctgacaaatgagcc

SEQ ID NO: 1451011 - DNA, 25 bp, Homo sapien
ttgctccaaggcatagtaccatttt

SEQ ID NO: 1451012 - DNA, 25 bp, Homo sapien
cttgctccaaggcatagtaccattt

SEQ ID NO: 1451013 - DNA, 25 bp, Homo sapien
tcttgctccaaggcatagtaccatt

SEQ ID NO: 1451014 - DNA, 25 bp, Homo sapien
tctttgaaaatagccgtcccttgca

SEQ ID NO: 1451015 - DNA, 25 bp, Homo sapien
taagcgcctcacatttgctcctcgg

SEQ ID NO: 1451016 - DNA, 25 bp, Homo sapien
gcacttccataagcgcctcacattt

SEQ ID NO: 1451017 - DNA, 25 bp, Homo sapien
ccgtcccttgcatggaaatggagcc

SEQ ID NO: 1451018 - DNA, 25 bp, Homo sapien
tgagaagtctggtaaaacaggactt

SEQ ID NO: 1451019 - DNA, 25 bp, Homo sapien
ctgagaagtctggtaaaacaggact

SEQ ID NO: 1451020 - DNA, 25 bp, Homo sapien
ctggcctttgcaaggacagagcctt

SEQ ID NO: 1451021 - DNA, 25 bp, Homo sapien
ggacagagcctttgcgtttgcattt

SEQ ID NO: 1451022 - DNA, 25 bp, Homo sapien
gacagagcctttgcgtttgcattta

SEQ ID NO: 1451023 - DNA, 25 bp, Homo sapien
tggcctttgcaaggacagagccttt

SEQ ID NO: 1451024 - DNA, 25 bp, Homo sapien
aaaagccaatccctaaaagtcacat

SEQ ID NO: 1451025 - DNA, 25 bp, Homo sapien
gaagtgtggttttaagacggcaaca

SEQ ID NO: 1451026 - DNA, 25 bp, Homo sapien
gaatctgtagggaattatgccaaga

SEQ ID NO: 1451027 - DNA, 25 bp, Homo sapien
aattggagggcagaatagtagttgc

SEQ ID NO: 1451028 - DNA, 25 bp, Homo sapien
catcctgaggtattaacttttgaac

SEQ ID NO: 1451029 - DNA, 25 bp, Homo sapien
tgggagctgattaacaaagctgtgt

SEQ ID NO: 1451030 - DNA, 25 bp, Homo sapien
ttaagaatccttacgcacccagtcc

SEQ ID NO: 1451031 - DNA, 25 bp, Homo sapien
taatcaaactggtaagtctactgct

SEQ ID NO: 1451032 - DNA, 25 bp, Homo sapien
ttgcttcatatgtcccaaaaagaga

SEQ ID NO: 1451033 - DNA, 25 bp, Homo sapien
aataacttgcttcatatgtcccaaa

SEQ ID NO: 1451034 - DNA, 25 bp, Homo sapien
atgccaacatgctcaacaataaagg

SEQ ID NO: 1451035 - DNA, 25 bp, Homo sapien
aacttgcttcatatgtcccaaaaag

SEQ ID NO: 1451036 - DNA, 25 bp, Homo sapien
tcagcccatggactagttaatacag

SEQ ID NO: 1451037 - DNA, 25 bp, Homo sapien
gaacttggctgttgcttaacctggc

SEQ ID NO: 1451038 - DNA, 25 bp, Homo sapien
gactgggagttttagagctggcaaa

SEQ ID NO: 1451039 - DNA, 25 bp, Homo sapien
aagaaaagagatgccccggtctcag

SEQ ID NO: 1451040 - DNA, 25 bp, Homo sapien
attaaaatgtatcctctgggcccac

SEQ ID NO: 1451041 - DNA, 25 bp, Homo sapien
catggcaacaggcaggtttacggga

SEQ ID NO: 1451042 - DNA, 25 bp, Homo sapien
tacaaagtgtatgcacaacggtggc

SEQ ID NO: 1451043 - DNA, 25 bp, Homo sapien
tagtcaaggatggtgccaatggcca

SEQ ID NO: 1451044 - DNA, 25 bp, Homo sapien
tagatgtgaaggatcaaacctacgg

SEQ ID NO: 1451045 - DNA, 25 bp, Homo sapien
gaatagggccaggaaaatagtgtcc

SEQ ID NO: 1451046 - DNA, 25 bp, Homo sapien
catggttaatgggacctgaatgcac

SEQ ID NO: 1451047 - DNA, 25 bp, Homo sapien
caatttattagcataccaggaccct

SEQ ID NO: 1451048 - DNA, 25 bp, Homo sapien
taaggtcaggtaaccccattgccca

SEQ ID NO: 1451049 - DNA, 25 bp, Homo sapien
tccactgtgacctgtagactgatct

SEQ ID NO: 1451050 - DNA, 25 bp, Homo sapien
taaaaggatcactggctccgagtct

SEQ ID NO: 1451051 - DNA, 25 bp, Homo sapien
gagtcaagccatagccaaaaccatg

SEQ ID NO: 1451052 - DNA, 25 bp, Homo sapien
cagatttctcgggtggggggcttgt

SEQ ID NO: 1451053 - DNA, 25 bp, Homo sapien
cccttcatccccagatttctcgggt

SEQ ID NO: 1451054 - DNA, 25 bp, Homo sapien
cagacccttcatccccagatttctc

SEQ ID NO: 1451055 - DNA, 25 bp, Homo sapien
cgggctttccggttcctcatcttct

SEQ ID NO: 1451056 - DNA, 25 bp, Homo sapien
gtagcctttagtctgggtttgggca

SEQ ID NO: 1451057 - DNA, 25 bp, Homo sapien
tagcctttagtctgggtttgggcat

SEQ ID NO: 1451058 - DNA, 25 bp, Homo sapien
ctgtagcctttagtctgggtttggg

SEQ ID NO: 1451059 - DNA, 25 bp, Homo sapien
agcctttagtctgggtttgggcatt

SEQ ID NO: 1451060 - DNA, 25 bp, Homo sapien
tttcgaactgccatagtcactatcg

SEQ ID NO: 1451061 - DNA, 25 bp, Homo sapien
ttttcgaactgccatagtcactatc

SEQ ID NO: 1451062 - DNA, 25 bp, Homo sapien
cgaactgccatagtcactatcgtca

SEQ ID NO: 1451063 - DNA, 25 bp, Homo sapien
ttcgaactgccatagtcactatcgt

SEQ ID NO: 1451064 - DNA, 25 bp, Homo sapien
aacacccttggattctatttggagc

SEQ ID NO: 1451065 - DNA, 25 bp, Homo sapien
tcttttaacacggagtatctaccca

SEQ ID NO: 1451066 - DNA, 25 bp, Homo sapien
caaatggtgggcaatcgtgagaatc

SEQ ID NO: 1451067 - DNA, 25 bp, Homo sapien
aatttgactggagtcatcactggcc

SEQ ID NO: 1451068 - DNA, 25 bp, Homo sapien
tctcctggaatggtgcctcatcctc

SEQ ID NO: 1451069 - DNA, 25 bp, Homo sapien
tcctggaatggtgcctcatcctcct

SEQ ID NO: 1451070 - DNA, 25 bp, Homo sapien
cttcttgttcttcctcactgcccac

SEQ ID NO: 1451071 - DNA, 25 bp, Homo sapien
ctggaatggtgcctcatcctcctct

SEQ ID NO: 1451072 - DNA, 25 bp, Homo sapien
ccgttgttggcgcacatttttatga

SEQ ID NO: 1451073 - DNA, 25 bp, Homo sapien
tgccgcctgccgttgttggcgcaca

SEQ ID NO: 1451074 - DNA, 25 bp, Homo sapien
tttagatgccgcctgccgttgttgg

SEQ ID NO: 1451075 - DNA, 25 bp, Homo sapien
ctgctttagatgccgcctgccgttg

SEQ ID NO: 1451076 - DNA, 25 bp, Homo sapien
tattcttagagtctattaatgaaaa

SEQ ID NO: 1451077 - DNA, 25 bp, Homo sapien
ggctatgtctccactaaaaagagtg

SEQ ID NO: 1451078 - DNA, 25 bp, Homo sapien
tttgggacaggacccagaatatgca

SEQ ID NO: 1451079 - DNA, 25 bp, Homo sapien
gatgactgtaataagccaccaggac

SEQ ID NO: 1451080 - DNA, 25 bp, Homo sapien
catttgcttttccacccagagtcca

SEQ ID NO: 1451081 - DNA, 25 bp, Homo sapien
gagaatcatccttcttggtcttcac

SEQ ID NO: 1451082 - DNA, 25 bp, Homo sapien
gaatcatccttcttggtcttcacat

SEQ ID NO: 1451083 - DNA, 25 bp, Homo sapien
aatcatccttcttggtcttcacatc

SEQ ID NO: 1451084 - DNA, 25 bp, Homo sapien
agaatcatccttcttggtcttcaca

SEQ ID NO: 1451085 - DNA, 25 bp, Homo sapien
caaatgcataaaagtcttagctcaa

SEQ ID NO: 1451086 - DNA, 25 bp, Homo sapien
aatgcataaaagtcttagctcaaaa

SEQ ID NO: 1451087 - DNA, 25 bp, Homo sapien
aaaagcaaatgcataaaagtcttag

SEQ ID NO: 1451088 - DNA, 25 bp, Homo sapien
agcaaatgcataaaagtcttagctc

SEQ ID NO: 1451089 - DNA, 25 bp, Homo sapien
gatcgaattttcttagtgggagggc

SEQ ID NO: 1451090 - DNA, 25 bp, Homo sapien
gagggcccgaatctcttccataatc

SEQ ID NO: 1451091 - DNA, 25 bp, Homo sapien
tccagatcgcctcttatttttagct

SEQ ID NO: 1451092 - DNA, 25 bp, Homo sapien
gggagatgatcgaattttcttagtg

SEQ ID NO: 1451093 - DNA, 25 bp, Homo sapien
tcagattcctgaaactgtgagtaat

SEQ ID NO: 1451094 - DNA, 25 bp, Homo sapien
cagattcctgaaactgtgagtaatc

SEQ ID NO: 1451095 - DNA, 25 bp, Homo sapien
actgtgagtaatcaacaaccttcct

SEQ ID NO: 1451096 - DNA, 25 bp, Homo sapien
catcagattcctgaaactgtgagta

SEQ ID NO: 1451097 - DNA, 25 bp, Homo sapien
acaaaacaatctcccgtctctcaaa

SEQ ID NO: 1451098 - DNA, 25 bp, Homo sapien
ctacaaaacaatctcccgtctctca

SEQ ID NO: 1451099 - DNA, 25 bp, Homo sapien
aaacaatctcccgtctctcaaaaca

SEQ ID NO: 1451100 - DNA, 25 bp, Homo sapien
tttctacaaaacaatctcccgtctc

SEQ ID NO: 1451101 - DNA, 25 bp, Homo sapien
agaactagttctggggatatatgca

SEQ ID NO: 1451102 - DNA, 25 bp, Homo sapien
aagtgaatggttagcctgtcctgac

SEQ ID NO: 1451103 - DNA, 25 bp, Homo sapien
tctggggatatatgcatggtcttaa

SEQ ID NO: 1451104 - DNA, 25 bp, Homo sapien
aaactagacctcaggaaagaactag

SEQ ID NO: 1451105 - DNA, 25 bp, Homo sapien
tctagagatatacatgtaagcttcc

SEQ ID NO: 1451106 - DNA, 25 bp, Homo sapien
taagtactccctatcaagtaacgta

SEQ ID NO: 1451107 - DNA, 25 bp, Homo sapien
cagcctacctggcaaaagagcctta

SEQ ID NO: 1451108 - DNA, 25 bp, Homo sapien
gcttccatgttagtacccaaacagc

SEQ ID NO: 1451109 - DNA, 25 bp, Homo sapien
gaagctgagtttatattaccaaaga

SEQ ID NO: 1451110 - DNA, 25 bp, Homo sapien
caatgtcaagtacttaacaatactg

SEQ ID NO: 1451111 - DNA, 25 bp, Homo sapien
gagggacctagagtagatgaattca

SEQ ID NO: 1451112 - DNA, 25 bp, Homo sapien
aagagttctttacaacaatgtcaag

SEQ ID NO: 1451113 - DNA, 25 bp, Homo sapien
tgagacaggcatgctcgctttggca

SEQ ID NO: 1451114 - DNA, 25 bp, Homo sapien
gaatcactacgactggcccaaaatt

SEQ ID NO: 1451115 - DNA, 25 bp, Homo sapien
caggcaggaatcactacgactggcc

SEQ ID NO: 1451116 - DNA, 25 bp, Homo sapien
aaaatttgagacaggcatgctcgct

SEQ ID NO: 1451117 - DNA, 25 bp, Homo sapien
gacacctaacagcaatgtggacctc

SEQ ID NO: 1451118 - DNA, 25 bp, Homo sapien
aatgacacctaacagcaatgtggac

SEQ ID NO: 1451119 - DNA, 25 bp, Homo sapien
acaatgacacctaacagcaatgtgg

SEQ ID NO: 1451120 - DNA, 25 bp, Homo sapien
gcacaatgacacctaacagcaatgt

SEQ ID NO: 1451121 - DNA, 25 bp, Homo sapien
gtgagcctgtgatcgcaccagtgca

SEQ ID NO: 1451122 - DNA, 25 bp, Homo sapien
attttaaatattgagttgagcaaaa

SEQ ID NO: 1451123 - DNA, 25 bp, Homo sapien
tgagcaaaaacgctaagttaaacat

SEQ ID NO: 1451124 - DNA, 25 bp, Homo sapien
caaagtcatcactggtaaactgaag

SEQ ID NO: 1451125 - DNA, 25 bp, Homo sapien
tacgcaaactatactctgaaagagc

SEQ ID NO: 1451126 - DNA, 25 bp, Homo sapien
tatactccgtaaccaacttgctctg

SEQ ID NO: 1451127 - DNA, 25 bp, Homo sapien
caggcagatgagataagaacgtcac

SEQ ID NO: 1451128 - DNA, 25 bp, Homo sapien
tattctacgtgagttgatggataca

SEQ ID NO: 1451129 - DNA, 25 bp, Homo sapien
tgagtacggacatttccccgaggaa

SEQ ID NO: 1451130 - DNA, 25 bp, Homo sapien
gaatggcataggacgattccaccga

SEQ ID NO: 1451131 - DNA, 25 bp, Homo sapien
aaaaatatcccgagacgcgtacgcg

SEQ ID NO: 1451132 - DNA, 25 bp, Homo sapien
atttgggccgtgctgttaacccgca

SEQ ID NO: 1451133 - DNA, 25 bp, Homo sapien
ggcttctcaaactccgctgctcttt

SEQ ID NO: 1451134 - DNA, 25 bp, Homo sapien
ggaccgagtcgagaagccaaagacc

SEQ ID NO: 1451135 - DNA, 25 bp, Homo sapien
gaacttcagccgatgggaccgctgc

SEQ ID NO: 1451136 - DNA, 25 bp, Homo sapien
ttcgctgtcgaaacaggaccgagtc

SEQ ID NO: 1451137 - DNA, 25 bp, Homo sapien
tggatgaatcaaaccagccgaaaat

SEQ ID NO: 1451138 - DNA, 25 bp, Homo sapien
aacccactagggtttgtgcgctcct

SEQ ID NO: 1451139 - DNA, 25 bp, Homo sapien
aaaatgcgccaaagccgccgtgcaa

SEQ ID NO: 1451140 - DNA, 25 bp, Homo sapien
actagggtttgtgcgctcctcccca

SEQ ID NO: 1451141 - DNA, 25 bp, Homo sapien
accattctccattctggaccttgag

SEQ ID NO: 1451142 - DNA, 25 bp, Homo sapien
cattaaagtcccagtctggtgcatt

SEQ ID NO: 1451143 - DNA, 25 bp, Homo sapien
ccattctggaccttgagatccactt

SEQ ID NO: 1451144 - DNA, 25 bp, Homo sapien
ttctccattctggaccttgagatcc

SEQ ID NO: 1451145 - DNA, 25 bp, Homo sapien
tttgactaagtgtattaccatcccc

SEQ ID NO: 1451146 - DNA, 25 bp, Homo sapien
gcgcccggctccatatatgttttga

SEQ ID NO: 1451147 - DNA, 25 bp, Homo sapien
tggcagagtgatcaccaagtggctt

SEQ ID NO: 1451148 - DNA, 25 bp, Homo sapien
tccccactattgtcagaatgccagg

SEQ ID NO: 1451149 - DNA, 25 bp, Homo sapien
tagtcttcaaagtggaaacctcttg

SEQ ID NO: 1451150 - DNA, 25 bp, Homo sapien
tctgtaatctgtagtagacacaaca

SEQ ID NO: 1451151 - DNA, 25 bp, Homo sapien
gcgttatcaccttcctcttagctat

SEQ ID NO: 1451152 - DNA, 25 bp, Homo sapien
gactccgtcttatgcctcactgtta

SEQ ID NO: 1451153 - DNA, 25 bp, Homo sapien
ttgggaaccactgacttaggacact

SEQ ID NO: 1451154 - DNA, 25 bp, Homo sapien
tatttcgaagcatcacagccagctg

SEQ ID NO: 1451155 - DNA, 25 bp, Homo sapien
taataaaattgtcaggtgggcaacc

SEQ ID NO: 1451156 - DNA, 25 bp, Homo sapien
tgagaagatcttacaccgaaggcac

SEQ ID NO: 1451157 - DNA, 25 bp, Homo sapien
gatgtagtccccttgggtggacaaa

SEQ ID NO: 1451158 - DNA, 25 bp, Homo sapien
caggaccagctggaggacttggttt

SEQ ID NO: 1451159 - DNA, 25 bp, Homo sapien
cagctggaggacttggtttgtagat

SEQ ID NO: 1451160 - DNA, 25 bp, Homo sapien
ttgtagattgatgtagtccccttgg

SEQ ID NO: 1451161 - DNA, 25 bp, Homo sapien
tctgtccaacctgtgaaaccgttct

SEQ ID NO: 1451162 - DNA, 25 bp, Homo sapien
tactgaaccggtcaatctggtcccg

SEQ ID NO: 1451163 - DNA, 25 bp, Homo sapien
aaccggtcaatctggtcccggctca

SEQ ID NO: 1451164 - DNA, 25 bp, Homo sapien
cgttctctttactgaaccggtcaat

SEQ ID NO: 1451165 - DNA, 25 bp, Homo sapien
cctcaacatcctttgaaggaggtag

SEQ ID NO: 1451166 - DNA, 25 bp, Homo sapien
tgaaggaggtagagatgattttgcc

SEQ ID NO: 1451167 - DNA, 25 bp, Homo sapien
ctcaacatcctttgaaggaggtaga

SEQ ID NO: 1451168 - DNA, 25 bp, Homo sapien
ttgaaggaggtagagatgattttgc

SEQ ID NO: 1451169 - DNA, 25 bp, Homo sapien
caggcagaggcatcccgataataca

SEQ ID NO: 1451170 - DNA, 25 bp, Homo sapien
ggcattggtaacgtcaaacataata

SEQ ID NO: 1451171 - DNA, 25 bp, Homo sapien
caatcgtgtcatagaggtgaagcgc

SEQ ID NO: 1451172 - DNA, 25 bp, Homo sapien
tctccattgggtagtgtgagcttgc

SEQ ID NO: 1451173 - DNA, 25 bp, Homo sapien
gaagccgcactatctcgtagtcaga

SEQ ID NO: 1451174 - DNA, 25 bp, Homo sapien
tatctcgtagtcagaccactggaga

SEQ ID NO: 1451175 - DNA, 25 bp, Homo sapien
cagctgaagccgcactatctcgtag

SEQ ID NO: 1451176 - DNA, 25 bp, Homo sapien
cgcactatctcgtagtcagaccact

SEQ ID NO: 1451177 - DNA, 25 bp, Homo sapien
aagctgtcctgggaatatcgctgca

SEQ ID NO: 1451178 - DNA, 25 bp, Homo sapien
gaatatcgctgcaccagcgacgtct

SEQ ID NO: 1451179 - DNA, 25 bp, Homo sapien
ccgtggacttgtagtgtttgctgaa

SEQ ID NO: 1451180 - DNA, 25 bp, Homo sapien
ctttgaacaggtggtcgcggctgcc

SEQ ID NO: 1451181 - DNA, 25 bp, Homo sapien
gctagcggggtgtgcgttttaggga

SEQ ID NO: 1451182 - DNA, 25 bp, Homo sapien
ttggatccggaccctcttcaaactg

SEQ ID NO: 1451183 - DNA, 25 bp, Homo sapien
ctagcggggtgtgcgttttagggag

SEQ ID NO: 1451184 - DNA, 25 bp, Homo sapien
gatccggaccctcttcaaactgaag

SEQ ID NO: 1451185 - DNA, 25 bp, Homo sapien
agaaactggaccaggcgccgcggaa

SEQ ID NO: 1451186 - DNA, 25 bp, Homo sapien
cctgactgccgagaaactggaccag

SEQ ID NO: 1451187 - DNA, 25 bp, Homo sapien
ctctgacgagaaagcaaaaaaggaa

SEQ ID NO: 1451188 - DNA, 25 bp, Homo sapien
tttgcactcaacctatacgcgcttc

SEQ ID NO: 1451189 - DNA, 25 bp, Homo sapien
gactgaatcccagtcagctccttac

SEQ ID NO: 1451190 - DNA, 25 bp, Homo sapien
gggaccctccccttgcagcacaaac

SEQ ID NO: 1451191 - DNA, 25 bp, Homo sapien
agcggctccaagtcagtgactgaat

SEQ ID NO: 1451192 - DNA, 25 bp, Homo sapien
cggctccaagtcagtgactgaatcc

SEQ ID NO: 1451193 - DNA, 25 bp, Homo sapien
caaattgtgaggaaggagcagccgg

SEQ ID NO: 1451194 - DNA, 25 bp, Homo sapien
aattgtgaggaaggagcagccggca

SEQ ID NO: 1451195 - DNA, 25 bp, Homo sapien
attgtgaggaaggagcagccggcac

SEQ ID NO: 1451196 - DNA, 25 bp, Homo sapien
aaattgtgaggaaggagcagccggc

SEQ ID NO: 1451197 - DNA, 25 bp, Homo sapien
tcgattccctagacgccctcccgcg

SEQ ID NO: 1451198 - DNA, 25 bp, Homo sapien
ccccttcctccgcaagcgtcacgtg

SEQ ID NO: 1451199 - DNA, 25 bp, Homo sapien
ctcgattccctagacgccctcccgc

SEQ ID NO: 1451200 - DNA, 25 bp, Homo sapien
cttcctccgcaagcgtcacgtgcag

SEQ ID NO: 1451201 - DNA, 25 bp, Homo sapien
ttgagaaatggtgcttcaaggcctg

SEQ ID NO: 1451202 - DNA, 25 bp, Homo sapien
caagtactcatgtgattgctacacc

SEQ ID NO: 1451203 - DNA, 25 bp, Homo sapien
gggtgacccaggttaatctgcattt

SEQ ID NO: 1451204 - DNA, 25 bp, Homo sapien
tattgcagcctttattggtcacctg

SEQ ID NO: 1451205 - DNA, 25 bp, Homo sapien
gtgtgtcacttttgactccccgaga

SEQ ID NO: 1451206 - DNA, 25 bp, Homo sapien
taccctccagtcgaaaatttgtgtg

SEQ ID NO: 1451207 - DNA, 25 bp, Homo sapien
gatttgcacatatagtggcccttga

SEQ ID NO: 1451208 - DNA, 25 bp, Homo sapien
tgcgcctggctgaaaggtgtatttc

SEQ ID NO: 1451209 - DNA, 25 bp, Homo sapien
gccagacattttcatgggtgccata

SEQ ID NO: 1451210 - DNA, 25 bp, Homo sapien
actatgcattattcggtttctgaag

SEQ ID NO: 1451211 - DNA, 25 bp, Homo sapien
gctaaaggagacaactaagttcagg

SEQ ID NO: 1451212 - DNA, 25 bp, Homo sapien
aaaagagagtctcaccaaattgccc

SEQ ID NO: 1451213 - DNA, 25 bp, Homo sapien
tggccagcgtactgacatgacctag

SEQ ID NO: 1451214 - DNA, 25 bp, Homo sapien
ccctgaatttatcccatggccagcg

SEQ ID NO: 1451215 - DNA, 25 bp, Homo sapien
tttagtatataccaggcacggagct

SEQ ID NO: 1451216 - DNA, 25 bp, Homo sapien
tcccaagccttgatcaggtgccctt

SEQ ID NO: 1451217 - DNA, 25 bp, Homo sapien
gatcattgcctaagccttcccttgg

SEQ ID NO: 1451218 - DNA, 25 bp, Homo sapien
gatgtccaccctgctagttctaaat

SEQ ID NO: 1451219 - DNA, 25 bp, Homo sapien
tctgtacacgtgtgactgcggatgg

SEQ ID NO: 1451220 - DNA, 25 bp, Homo sapien
tcccaattttgtgctaggcagagaa

SEQ ID NO: 1451221 - DNA, 25 bp, Homo sapien
gaagtagatgcaaatacttacaacg

SEQ ID NO: 1451222 - DNA, 25 bp, Homo sapien
tctggcttgaagtagatgcaaatac

SEQ ID NO: 1451223 - DNA, 25 bp, Homo sapien
tacaacgaggaaactttctctgcca

SEQ ID NO: 1451224 - DNA, 25 bp, Homo sapien
tgcaaatacttacaacgaggaaact

SEQ ID NO: 1451225 - DNA, 25 bp, Homo sapien
ggtttctcattagggccaagacagg

SEQ ID NO: 1451226 - DNA, 25 bp, Homo sapien
tctgcgagtgggaacgcttaggtcc

SEQ ID NO: 1451227 - DNA, 25 bp, Homo sapien
gacaaagtcatttgggcccagggag

SEQ ID NO: 1451228 - DNA, 25 bp, Homo sapien
tggcagcaatgagacacctgtggtt

SEQ ID NO: 1451229 - DNA, 25 bp, Homo sapien
tctgcgatgtacaggagaatcagca

SEQ ID NO: 1451230 - DNA, 25 bp, Homo sapien
ccagagcagtcaagtatgggatgga

SEQ ID NO: 1451231 - DNA, 25 bp, Homo sapien
ggtcccctatgagccagagaacatg

SEQ ID NO: 1451232 - DNA, 25 bp, Homo sapien
catggaagctgagtgctaggagccc

SEQ ID NO: 1451233 - DNA, 25 bp, Homo sapien
tgcagaagggtcccaaataaagagc

SEQ ID NO: 1451234 - DNA, 25 bp, Homo sapien
ctgcagaagggtcccaaataaagag

SEQ ID NO: 1451235 - DNA, 25 bp, Homo sapien
ggccaggaggcctttgggacatgcc

SEQ ID NO: 1451236 - DNA, 25 bp, Homo sapien
gcagaagggtcccaaataaagagca

SEQ ID NO: 1451237 - DNA, 25 bp, Homo sapien
gcttcttgagcaggccccaggacac

SEQ ID NO: 1451238 - DNA, 25 bp, Homo sapien
ctaggaagggaatggtagcagctgt

SEQ ID NO: 1451239 - DNA, 25 bp, Homo sapien
agcttcttgagcaggccccaggaca

SEQ ID NO: 1451240 - DNA, 25 bp, Homo sapien
ggtagcagctgtcctcacattccag

SEQ ID NO: 1451241 - DNA, 25 bp, Homo sapien
aacccactagcaatggaatgtggca

SEQ ID NO: 1451242 - DNA, 25 bp, Homo sapien
aatggaatgtggcagcttggctaac

SEQ ID NO: 1451243 - DNA, 25 bp, Homo sapien
tggaatgtggcagcttggctaactg

SEQ ID NO: 1451244 - DNA, 25 bp, Homo sapien
actggaacccactagcaatggaatg

SEQ ID NO: 1451245 - DNA, 25 bp, Homo sapien
tatagtggtggtcacacaaatctcc

SEQ ID NO: 1451246 - DNA, 25 bp, Homo sapien
tgtaaagggatagcataagggagcc

SEQ ID NO: 1451247 - DNA, 25 bp, Homo sapien
tatagaataggtttgaaggacacac

SEQ ID NO: 1451248 - DNA, 25 bp, Homo sapien
ggttcaatctgaataagcactgcag

SEQ ID NO: 1451249 - DNA, 25 bp, Homo sapien
agtgtgagggtggtgtgcccgccct

SEQ ID NO: 1451250 - DNA, 25 bp, Homo sapien
gcagtgcagctgtcatatagaagat

SEQ ID NO: 1451251 - DNA, 25 bp, Homo sapien
gccctgcatacagctgatggtgtag

SEQ ID NO: 1451252 - DNA, 25 bp, Homo sapien
ggagcagtgcagctgtcatatagaa

SEQ ID NO: 1451253 - DNA, 25 bp, Homo sapien
agttctctccgggcattccattcat

SEQ ID NO: 1451254 - DNA, 25 bp, Homo sapien
cagcggcgaggagcttgctcagagt

SEQ ID NO: 1451255 - DNA, 25 bp, Homo sapien
acagcggcgaggagcttgctcagag

SEQ ID NO: 1451256 - DNA, 25 bp, Homo sapien
tgacagtgccggaaaggatacgtgc

SEQ ID NO: 1451257 - DNA, 25 bp, Homo sapien
aatttagggtctatgtgggcatcac

SEQ ID NO: 1451258 - DNA, 25 bp, Homo sapien
tgttcccctggcaaagctgtgacag

SEQ ID NO: 1451259 - DNA, 25 bp, Homo sapien
cagagacacatacgggcttagacac

SEQ ID NO: 1451260 - DNA, 25 bp, Homo sapien
ttaatcacaggcgtgaagacagcca

SEQ ID NO: 1451261 - DNA, 25 bp, Homo sapien
gtcttgtccaagatgaggcctccca

SEQ ID NO: 1451262 - DNA, 25 bp, Homo sapien
agcaaagttggggtctgagacagtc

SEQ ID NO: 1451263 - DNA, 25 bp, Homo sapien
acaggcgtgaagacagccatcccag

SEQ ID NO: 1451264 - DNA, 25 bp, Homo sapien
tggcaatgataacaggctcccagcc

SEQ ID NO: 1451265 - DNA, 25 bp, Homo sapien
cacaaagaaagcacacaccagtggg

SEQ ID NO: 1451266 - DNA, 25 bp, Homo sapien
gctggacttcgtcgggccagcacca

SEQ ID NO: 1451267 - DNA, 25 bp, Homo sapien
ccagtgggtagatgtatcgccagtg

SEQ ID NO: 1451268 - DNA, 25 bp, Homo sapien
ctccaagaagccacactcttggtgg

SEQ ID NO: 1451269 - DNA, 25 bp, Homo sapien
agaagccacactcttggtggctcac

SEQ ID NO: 1451270 - DNA, 25 bp, Homo sapien
caggactccaagaagccacactctt

SEQ ID NO: 1451271 - DNA, 25 bp, Homo sapien
ggactccaagaagccacactcttgg

SEQ ID NO: 1451272 - DNA, 25 bp, Homo sapien
agttccaggtagagtccccagctga

SEQ ID NO: 1451273 - DNA, 25 bp, Homo sapien
tgagagcagcgccaaggtgatgagg

SEQ ID NO: 1451274 - DNA, 25 bp, Homo sapien
agcgccaaggtgatgaggtcgccca

SEQ ID NO: 1451275 - DNA, 25 bp, Homo sapien
tccaggtagagtccccagctgatgc

SEQ ID NO: 1451276 - DNA, 25 bp, Homo sapien
caatcttgcgagagccaatgatgac

SEQ ID NO: 1451277 - DNA, 25 bp, Homo sapien
tgtctgggttgatcccaatcttgcg

SEQ ID NO: 1451278 - DNA, 25 bp, Homo sapien
ggttgatcccaatcttgcgagagcc

SEQ ID NO: 1451279 - DNA, 25 bp, Homo sapien
caatgatgactccaatcatgatcat

SEQ ID NO: 1451280 - DNA, 25 bp, Homo sapien
cgtgcggaatactgaagtggccatc

SEQ ID NO: 1451281 - DNA, 25 bp, Homo sapien
cagtaccagggaggcaatgaaggct

SEQ ID NO: 1451282 - DNA, 25 bp, Homo sapien
atcagggatccagccaaagacgacg

SEQ ID NO: 1451283 - DNA, 25 bp, Homo sapien
aaagacgacggctgcgatggacgcc

SEQ ID NO: 1451284 - DNA, 25 bp, Homo sapien
gtgatcatccgccagagctccttgg

SEQ ID NO: 1451285 - DNA, 25 bp, Homo sapien
ttcccagtgatcatccgccagagct

SEQ ID NO: 1451286 - DNA, 25 bp, Homo sapien
agtgatcatccgccagagctccttg

SEQ ID NO: 1451287 - DNA, 25 bp, Homo sapien
cccagtgatcatccgccagagctcc

SEQ ID NO: 1451288 - DNA, 25 bp, Homo sapien
gcaggcactaggatgaagacctctg

SEQ ID NO: 1451289 - DNA, 25 bp, Homo sapien
ttccaggttccctttgagccccagc

SEQ ID NO: 1451290 - DNA, 25 bp, Homo sapien
aggttccctttgagccccagcagcg

SEQ ID NO: 1451291 - DNA, 25 bp, Homo sapien
caggcactaggatgaagacctctgt

SEQ ID NO: 1451292 - DNA, 25 bp, Homo sapien
ctcaaattgcaatccctggcccctt

SEQ ID NO: 1451293 - DNA, 25 bp, Homo sapien
ctttgcaatcccccctcaaattgca

SEQ ID NO: 1451294 - DNA, 25 bp, Homo sapien
ttgcaatcccccctcaaattgcaat

SEQ ID NO: 1451295 - DNA, 25 bp, Homo sapien
aaattgcaatccctggcccctttgc

SEQ ID NO: 1451296 - DNA, 25 bp, Homo sapien
gcatcctctaggtgtccaggaaagg

SEQ ID NO: 1451297 - DNA, 25 bp, Homo sapien
aggcatcctctaggtgtccaggaaa

SEQ ID NO: 1451298 - DNA, 25 bp, Homo sapien
ctggatatacggtgcaggacaaagc

SEQ ID NO: 1451299 - DNA, 25 bp, Homo sapien
gcaacacctggatatacggtgcagg

SEQ ID NO: 1451300 - DNA, 25 bp, Homo sapien
taatccctctaagctacaagttccc

SEQ ID NO: 1451301 - DNA, 25 bp, Homo sapien
caactggtgaaccatggccatggcg

SEQ ID NO: 1451302 - DNA, 25 bp, Homo sapien
tacctcatgggcctaccgaagagcc

SEQ ID NO: 1451303 - DNA, 25 bp, Homo sapien
caagttccctacctacaaaatggag

SEQ ID NO: 1451304 - DNA, 25 bp, Homo sapien
gaagggctcaagtcaaagttctcca

SEQ ID NO: 1451305 - DNA, 25 bp, Homo sapien
caaccaaaggtgcagggttcccctg

SEQ ID NO: 1451306 - DNA, 25 bp, Homo sapien
gatatcacagtcagggaacactggg

SEQ ID NO: 1451307 - DNA, 25 bp, Homo sapien
gctaagcttcgtgtccttctgggag

SEQ ID NO: 1451308 - DNA, 25 bp, Homo sapien
gccacggtctgtgctgacgtcgtca

SEQ ID NO: 1451309 - DNA, 25 bp, Homo sapien
tggcgttggcccgagactcaatcac

SEQ ID NO: 1451310 - DNA, 25 bp, Homo sapien
aaacagtacttgcagcccgatggaa

SEQ ID NO: 1451311 - DNA, 25 bp, Homo sapien
gtcactttcgttgctctggctcccg

SEQ ID NO: 1451312 - DNA, 25 bp, Homo sapien
cagtcccgttcagttggtggacgtc

SEQ ID NO: 1451313 - DNA, 25 bp, Homo sapien
gacgtccttcggctctggcttagag

SEQ ID NO: 1451314 - DNA, 25 bp, Homo sapien
aggcagaagggccagtcccgttcag

SEQ ID NO: 1451315 - DNA, 25 bp, Homo sapien
tcagttggtggacgtccttcggctc

SEQ ID NO: 1451316 - DNA, 25 bp, Homo sapien
tggggtgaacccaggcttgggcgcc

SEQ ID NO: 1451317 - DNA, 25 bp, Homo sapien
tcttcccacggctctccactcctac

SEQ ID NO: 1451318 - DNA, 25 bp, Homo sapien
aggacctcttcccacggctctccac

SEQ ID NO: 1451319 - DNA, 25 bp, Homo sapien
cttagtcttggggtgaacccaggct

SEQ ID NO: 1451320 - DNA, 25 bp, Homo sapien
ggcactgcaaaaactgatccaccaa

SEQ ID NO: 1451321 - DNA, 25 bp, Homo sapien
ctgcaaaaactgatccaccaacagg

SEQ ID NO: 1451322 - DNA, 25 bp, Homo sapien
gcactgcaaaaactgatccaccaac

SEQ ID NO: 1451323 - DNA, 25 bp, Homo sapien
cactgcaaaaactgatccaccaaca

SEQ ID NO: 1451324 - DNA, 25 bp, Homo sapien
caaatccctggtccttaaagtcacg

SEQ ID NO: 1451325 - DNA, 25 bp, Homo sapien
attcctcaccagacagccactaggg

SEQ ID NO: 1451326 - DNA, 25 bp, Homo sapien
tagaagagctcaaccaaattctggg

SEQ ID NO: 1451327 - DNA, 25 bp, Homo sapien
ccttcctgggaagagctaatacctc

SEQ ID NO: 1451328 - DNA, 25 bp, Homo sapien
ttctgcgttacagcgaggccgccgc

SEQ ID NO: 1451329 - DNA, 25 bp, Homo sapien
ggctcgctacatttcgcttctgcgt

SEQ ID NO: 1451330 - DNA, 25 bp, Homo sapien
aggatatatcgcttcgggcccggcg

SEQ ID NO: 1451331 - DNA, 25 bp, Homo sapien
aagtggcagcgtggcccgtggtctc

SEQ ID NO: 1451332 - DNA, 25 bp, Homo sapien
ttcttgcccgcggactcgggcccaa

SEQ ID NO: 1451333 - DNA, 25 bp, Homo sapien
ccaactggttggctgccggtggcaa

SEQ ID NO: 1451334 - DNA, 25 bp, Homo sapien
cttccttcgcttcgtgcccaggagg

SEQ ID NO: 1451335 - DNA, 25 bp, Homo sapien
atagattctcggatggacaacagca

SEQ ID NO: 1451336 - DNA, 25 bp, Homo sapien
taattggaaatttgtattgttccaa

SEQ ID NO: 1451337 - DNA, 25 bp, Homo sapien
tatccttgtgcgattgtgttgtttt

SEQ ID NO: 1451338 - DNA, 25 bp, Homo sapien
gtgttatccttgtgcgattgtgttg

SEQ ID NO: 1451339 - DNA, 25 bp, Homo sapien
ccttgtgcgattgtgttgttttaat

SEQ ID NO: 1451340 - DNA, 25 bp, Homo sapien
gaaagcatcccagcaagagtgccct

SEQ ID NO: 1451341 - DNA, 25 bp, Homo sapien
tatataagctctggagaaagcatcc

SEQ ID NO: 1451342 - DNA, 25 bp, Homo sapien
gagacagctcatgagtccaagaaga

SEQ ID NO: 1451343 - DNA, 25 bp, Homo sapien
cagtttgggtaagtccaggtccaga

SEQ ID NO: 1451344 - DNA, 25 bp, Homo sapien
tggtctgtgtcagcattctgaatca

SEQ ID NO: 1451345 - DNA, 25 bp, Homo sapien
cttgggtctcataggcttggactga

SEQ ID NO: 1451346 - DNA, 25 bp, Homo sapien
gattttctcgttgactccatggatg

SEQ ID NO: 1451347 - DNA, 25 bp, Homo sapien
aatttcacttgggtctcataggctt

SEQ ID NO: 1451348 - DNA, 25 bp, Homo sapien
tctgagaagtcaaaacacgcatcca

SEQ ID NO: 1451349 - DNA, 25 bp, Homo sapien
gggttaggttctacaatgtctccat

SEQ ID NO: 1451350 - DNA, 25 bp, Homo sapien
tagcacccaagggtaccgattccac

SEQ ID NO: 1451351 - DNA, 25 bp, Homo sapien
caatgagactctggcaataaggaca

SEQ ID NO: 1451352 - DNA, 25 bp, Homo sapien
tttgaagtcttcaggctgtatgtag

SEQ ID NO: 1451353 - DNA, 25 bp, Homo sapien
ggtagaacctgtagatgccagtggt

SEQ ID NO: 1451354 - DNA, 25 bp, Homo sapien
tggtgaggtttgtaaagaatcggct

SEQ ID NO: 1451355 - DNA, 25 bp, Homo sapien
tagaacctgtagatgccagtggtga

SEQ ID NO: 1451356 - DNA, 25 bp, Homo sapien
ccagccacagctgatgaagtcatta

SEQ ID NO: 1451357 - DNA, 25 bp, Homo sapien
cagccacagctgatgaagtcattac

SEQ ID NO: 1451358 - DNA, 25 bp, Homo sapien
gggtcaaaggcactcaacacatgga

SEQ ID NO: 1451359 - DNA, 25 bp, Homo sapien
ggtctggcggagcagctggtagccc

SEQ ID NO: 1451360 - DNA, 25 bp, Homo sapien
taatattgacttccgggaagacgga

SEQ ID NO: 1451361 - DNA, 25 bp, Homo sapien
aagacggactgtacggtctggcgga

SEQ ID NO: 1451362 - DNA, 25 bp, Homo sapien
tcagccacaatgttcttcgtgagtt

SEQ ID NO: 1451363 - DNA, 25 bp, Homo sapien
gaattccttttagctcagcctgatg

SEQ ID NO: 1451364 - DNA, 25 bp, Homo sapien
cattactgccttaggaagccctgcc

SEQ ID NO: 1451365 - DNA, 25 bp, Homo sapien
tgtttgtagcagaccattgcaaggc

SEQ ID NO: 1451366 - DNA, 25 bp, Homo sapien
catgatgttaatgacactccagcct

SEQ ID NO: 1451367 - DNA, 25 bp, Homo sapien
tttgattgctctggtactctgtacc

SEQ ID NO: 1451368 - DNA, 25 bp, Homo sapien
tctggaactagactgctagatatat

SEQ ID NO: 1451369 - DNA, 25 bp, Homo sapien
tatgggtataccttagaaaggtgcc

SEQ ID NO: 1451370 - DNA, 25 bp, Homo sapien
gtttagggttgtggctaaaagcaca

SEQ ID NO: 1451371 - DNA, 25 bp, Homo sapien
aatccggaagttgactgtggcctgg

SEQ ID NO: 1451372 - DNA, 25 bp, Homo sapien
tccagggtgaatccggaagttgact

SEQ ID NO: 1451373 - DNA, 25 bp, Homo sapien
actgtctgtccagggtgaatccgga

SEQ ID NO: 1451374 - DNA, 25 bp, Homo sapien
ttggactgtctgtccagggtgaatc

SEQ ID NO: 1451375 - DNA, 25 bp, Homo sapien
tgacccccatcatggcatagcacgg

SEQ ID NO: 1451376 - DNA, 25 bp, Homo sapien
gccagagcctctgttgacccccatc

SEQ ID NO: 1451377 - DNA, 25 bp, Homo sapien
cacggggctcacatcaggtttgatc

SEQ ID NO: 1451378 - DNA, 25 bp, Homo sapien
caggtttgatccttgagggggatga

SEQ ID NO: 1451379 - DNA, 25 bp, Homo sapien
cttgacccctgctttgaatatggtg

SEQ ID NO: 1451380 - DNA, 25 bp, Homo sapien
gagtgccgtggtggtcctgattatt

SEQ ID NO: 1451381 - DNA, 25 bp, Homo sapien
cctgattattgcattggttaaggga

SEQ ID NO: 1451382 - DNA, 25 bp, Homo sapien
tgacccctgctttgaatatggtgag

SEQ ID NO: 1451383 - DNA, 25 bp, Homo sapien
caggattatattgacagggaaggga

SEQ ID NO: 1451384 - DNA, 25 bp, Homo sapien
tcaggattatattgacagggaaggg

SEQ ID NO: 1451385 - DNA, 25 bp, Homo sapien
ggattatattgacagggaagggaaa

SEQ ID NO: 1451386 - DNA, 25 bp, Homo sapien
gctcaggattatattgacagggaag

SEQ ID NO: 1451387 - DNA, 25 bp, Homo sapien
accactgtcccgcttccaaatatga

SEQ ID NO: 1451388 - DNA, 25 bp, Homo sapien
tcatttgccagttgctgcaatacag

SEQ ID NO: 1451389 - DNA, 25 bp, Homo sapien
atatgataggcattggtgtctgctc

SEQ ID NO: 1451390 - DNA, 25 bp, Homo sapien
cagttgctgcaatacagtcaccact

SEQ ID NO: 1451391 - DNA, 25 bp, Homo sapien
catgtttacttgcagcatgaggttc

SEQ ID NO: 1451392 - DNA, 25 bp, Homo sapien
ctgaagagtggcctgaagtcatgtt

SEQ ID NO: 1451393 - DNA, 25 bp, Homo sapien
gcatgaggttcatggaacccttctc

SEQ ID NO: 1451394 - DNA, 25 bp, Homo sapien
tacttgcagcatgaggttcatggaa

SEQ ID NO: 1451395 - DNA, 25 bp, Homo sapien
ccctcgtccacaatgaaggctagct

SEQ ID NO: 1451396 - DNA, 25 bp, Homo sapien
tggacgccccttgactgtagcaggg

SEQ ID NO: 1451397 - DNA, 25 bp, Homo sapien
gggcttcttgaagttaggaatgaaa

SEQ ID NO: 1451398 - DNA, 25 bp, Homo sapien
cttgaagttaggaatgaaatcatcc

SEQ ID NO: 1451399 - DNA, 25 bp, Homo sapien
tcctctgagcccctgtccctgatga

SEQ ID NO: 1451400 - DNA, 25 bp, Homo sapien
ctgagatcctctgagcccctgtccc

SEQ ID NO: 1451401 - DNA, 25 bp, Homo sapien
gagatcctctgagcccctgtccctg

SEQ ID NO: 1451402 - DNA, 25 bp, Homo sapien
gatcctctgagcccctgtccctgat

SEQ ID NO: 1451403 - DNA, 25 bp, Homo sapien
tcgggggatgtacttcctgatcagc

SEQ ID NO: 1451404 - DNA, 25 bp, Homo sapien
aaatgaagaaagatcttcgggggat

SEQ ID NO: 1451405 - DNA, 25 bp, Homo sapien
aagaaagatcttcgggggatgtact

SEQ ID NO: 1451406 - DNA, 25 bp, Homo sapien
agatcttcgggggatgtacttcctg

SEQ ID NO: 1451407 - DNA, 25 bp, Homo sapien
catgctggataaagctggtgctgac

SEQ ID NO: 1451408 - DNA, 25 bp, Homo sapien
agtgtgccccgaccatagatgatgc

SEQ ID NO: 1451409 - DNA, 25 bp, Homo sapien
gagttcttgtcgtccagtgtgcccc

SEQ ID NO: 1451410 - DNA, 25 bp, Homo sapien
tccgagccttggatagtgaacaggt

SEQ ID NO: 1451411 - DNA, 25 bp, Homo sapien
ggctgtagtattggacttctcagag

SEQ ID NO: 1451412 - DNA, 25 bp, Homo sapien
tgaatgtattttccgaactcagcca

SEQ ID NO: 1451413 - DNA, 25 bp, Homo sapien
aagtcactgttggaatctggatggc

SEQ ID NO: 1451414 - DNA, 25 bp, Homo sapien
tctcagagctaaaagtcactgttgg

SEQ ID NO: 1451415 - DNA, 25 bp, Homo sapien
tctgaaatcaccaattgctttgatg

SEQ ID NO: 1451416 - DNA, 25 bp, Homo sapien
ctctgaaatcaccaattgctttgat

SEQ ID NO: 1451417 - DNA, 25 bp, Homo sapien
tcaaggcacccactgtcctgggtcc

SEQ ID NO: 1451418 - DNA, 25 bp, Homo sapien
tctcaaggcacccactgtcctgggt

SEQ ID NO: 1451419 - DNA, 25 bp, Homo sapien
ctcaaggcacccactgtcctgggtc

SEQ ID NO: 1451420 - DNA, 25 bp, Homo sapien
gctgcagtagcagatgctttgcggc

SEQ ID NO: 1451421 - DNA, 25 bp, Homo sapien
tttgcggcggaagcggggagtcacg

SEQ ID NO: 1451422 - DNA, 25 bp, Homo sapien
cagagttccaggagccaggtatggg

SEQ ID NO: 1451423 - DNA, 25 bp, Homo sapien
ccccagacaggggcacgatgtgctg

SEQ ID NO: 1451424 - DNA, 25 bp, Homo sapien
gacgcgttcctctttgctgaactga

SEQ ID NO: 1451425 - DNA, 25 bp, Homo sapien
gaaaactaggagcagcatagccacc

SEQ ID NO: 1451426 - DNA, 25 bp, Homo sapien
tcgggcccatcgatctggagacggt

SEQ ID NO: 1451427 - DNA, 25 bp, Homo sapien
gaactgagaagggattcgcgacgcc

SEQ ID NO: 1451428 - DNA, 25 bp, Homo sapien
cctgctgtcaggctaccggggtagt

SEQ ID NO: 1451429 - DNA, 25 bp, Homo sapien
ctcctgctgtcaggctaccggggta

SEQ ID NO: 1451430 - DNA, 25 bp, Homo sapien
caggctaccggggtagttctgacct

SEQ ID NO: 1451431 - DNA, 25 bp, Homo sapien
gctgtcaggctaccggggtagttct

SEQ ID NO: 1451432 - DNA, 25 bp, Homo sapien
tgcagccacgtcgaggctgacactg

SEQ ID NO: 1451433 - DNA, 25 bp, Homo sapien
gccacgtcgaggctgacactgagga

SEQ ID NO: 1451434 - DNA, 25 bp, Homo sapien
cctggttgcagccacgtcgaggctg

SEQ ID NO: 1451435 - DNA, 25 bp, Homo sapien
ggttgcagccacgtcgaggctgaca

SEQ ID NO: 1451436 - DNA, 25 bp, Homo sapien
tattcaacgttctcatatgtaacta

SEQ ID NO: 1451437 - DNA, 25 bp, Homo sapien
tctcatatgtaactaatgtgcacgt

SEQ ID NO: 1451438 - DNA, 25 bp, Homo sapien
cgttctcatatgtaactaatgtgca

SEQ ID NO: 1451439 - DNA, 25 bp, Homo sapien
aatattcaacgttctcatatgtaac

SEQ ID NO: 1451440 - DNA, 25 bp, Homo sapien
cataggagaagatggcctgaggtcc

SEQ ID NO: 1451441 - DNA, 25 bp, Homo sapien
agttaccaaggcctagactcctggg

SEQ ID NO: 1451442 - DNA, 25 bp, Homo sapien
taagaagacttgttagctgaccagc

SEQ ID NO: 1451443 - DNA, 25 bp, Homo sapien
tgtagcggatccctggaggacttcc

SEQ ID NO: 1451444 - DNA, 25 bp, Homo sapien
acagcctgacaccatctgacaccga

SEQ ID NO: 1451445 - DNA, 25 bp, Homo sapien
tgacagcctgacaccatctgacacc

SEQ ID NO: 1451446 - DNA, 25 bp, Homo sapien
atctgacaccgagccgtgtgggctc

SEQ ID NO: 1451447 - DNA, 25 bp, Homo sapien
ccatctgacaccgagccgtgtgggc

SEQ ID NO: 1451448 - DNA, 25 bp, Homo sapien
caaggtgtccttcagctgccaagga

SEQ ID NO: 1451449 - DNA, 25 bp, Homo sapien
ggtgtccttcagctgccaaggacag

SEQ ID NO: 1451450 - DNA, 25 bp, Homo sapien
agtgagcaggaggcttgtccattgc

SEQ ID NO: 1451451 - DNA, 25 bp, Homo sapien
aagtcaaggtgtccttcagctgcca

SEQ ID NO: 1451452 - DNA, 25 bp, Homo sapien
ctgacgggtgaagagtgggctcacc

SEQ ID NO: 1451453 - DNA, 25 bp, Homo sapien
gtgaagagtgggctcaccagactct

SEQ ID NO: 1451454 - DNA, 25 bp, Homo sapien
cgggtgaagagtgggctcaccagac

SEQ ID NO: 1451455 - DNA, 25 bp, Homo sapien
gacgggtgaagagtgggctcaccag

SEQ ID NO: 1451456 - DNA, 25 bp, Homo sapien
ctgtaagggtagcacccccctgctg

SEQ ID NO: 1451457 - DNA, 25 bp, Homo sapien
atcctttatggaagtcccaagtgcc

SEQ ID NO: 1451458 - DNA, 25 bp, Homo sapien
tgccaggcactctgtaggcagcatg

SEQ ID NO: 1451459 - DNA, 25 bp, Homo sapien
gccaggcactctgtaggcagcatga

SEQ ID NO: 1451460 - DNA, 25 bp, Homo sapien
ctcatcctttatggaagtcccaagt

SEQ ID NO: 1451461 - DNA, 25 bp, Homo sapien
gcgtgaaacatgctcccgaacatct

SEQ ID NO: 1451462 - DNA, 25 bp, Homo sapien
agggtctctgcgtgaaacatgctcc

SEQ ID NO: 1451463 - DNA, 25 bp, Homo sapien
tctgcgtgaaacatgctcccgaaca

SEQ ID NO: 1451464 - DNA, 25 bp, Homo sapien
ggtctctgcgtgaaacatgctcccg

SEQ ID NO: 1451465 - DNA, 25 bp, Homo sapien
taagtcccagtagctgcgaatgtcc

SEQ ID NO: 1451466 - DNA, 25 bp, Homo sapien
tcctcctctgagtcgtacaaggaga

SEQ ID NO: 1451467 - DNA, 25 bp, Homo sapien
gtcccagtagctgcgaatgtcctcc

SEQ ID NO: 1451468 - DNA, 25 bp, Homo sapien
gtacaaggagagctcagcatcccct

SEQ ID NO: 1451469 - DNA, 25 bp, Homo sapien
aggactgcgtcatgtatgctgggaa

SEQ ID NO: 1451470 - DNA, 25 bp, Homo sapien
gacgtgcttgcattctagactccca

SEQ ID NO: 1451471 - DNA, 25 bp, Homo sapien
catgtatgctgggaaagacgtgctt

SEQ ID NO: 1451472 - DNA, 25 bp, Homo sapien
tttgcctgggcaaagaggactgcgt

SEQ ID NO: 1451473 - DNA, 25 bp, Homo sapien
gccgatcttcccataggtggagctc

SEQ ID NO: 1451474 - DNA, 25 bp, Homo sapien
cttcacgccgatcttcccataggtg

SEQ ID NO: 1451475 - DNA, 25 bp, Homo sapien
ccaagaagaccttcacgccgatctt

SEQ ID NO: 1451476 - DNA, 25 bp, Homo sapien
catggatgttcaccaagaagacctt

SEQ ID NO: 1451477 - DNA, 25 bp, Homo sapien
ctttgtggcttcagacagaagctgc

SEQ ID NO: 1451478 - DNA, 25 bp, Homo sapien
ttgtggcttcagacagaagctgcag

SEQ ID NO: 1451479 - DNA, 25 bp, Homo sapien
ggctcagggagtctagagcttcagc

SEQ ID NO: 1451480 - DNA, 25 bp, Homo sapien
ggcttcagacagaagctgcagggga

SEQ ID NO: 1451481 - DNA, 25 bp, Homo sapien
tcagggctgaaggtgatataggaca

SEQ ID NO: 1451482 - DNA, 25 bp, Homo sapien
tgggacgctggccagcatgtcactg

SEQ ID NO: 1451483 - DNA, 25 bp, Homo sapien
ttgatgcccatcaagtccacgaagc

SEQ ID NO: 1451484 - DNA, 25 bp, Homo sapien
cgaagctgactccactcatgtccag

SEQ ID NO: 1451485 - DNA, 25 bp, Homo sapien
agacctcctctgttgtgtgggcctc

SEQ ID NO: 1451486 - DNA, 25 bp, Homo sapien
tgaggtatttttgcttggctagtaa

SEQ ID NO: 1451487 - DNA, 25 bp, Homo sapien
tgcttggctagtaatactttctggg

SEQ ID NO: 1451488 - DNA, 25 bp, Homo sapien
ttcatgaatagagacctcctctgtt

SEQ ID NO: 1451489 - DNA, 25 bp, Homo sapien
gggagcagtacgtgatgattttaat

SEQ ID NO: 1451490 - DNA, 25 bp, Homo sapien
attttaatcccctggatatcctggg

SEQ ID NO: 1451491 - DNA, 25 bp, Homo sapien
tctctgagttggcaaagtagagagg

SEQ ID NO: 1451492 - DNA, 25 bp, Homo sapien
aagatctctgagttggcaaagtaga

SEQ ID NO: 1451493 - DNA, 25 bp, Homo sapien
cctattataggtcttgggattcaca

SEQ ID NO: 1451494 - DNA, 25 bp, Homo sapien
aaacataagagaatgctaatggcac

SEQ ID NO: 1451495 - DNA, 25 bp, Homo sapien
acataagagaatgctaatggcacat

SEQ ID NO: 1451496 - DNA, 25 bp, Homo sapien
aacataagagaatgctaatggcaca

SEQ ID NO: 1451497 - DNA, 25 bp, Homo sapien
cataagagaatgctaatggcacatg

SEQ ID NO: 1451498 - DNA, 25 bp, Homo sapien
aactgagtctggaagaccacgacca

SEQ ID NO: 1451499 - DNA, 25 bp, Homo sapien
tgccacaccatagggcaggctgagg

SEQ ID NO: 1451500 - DNA, 25 bp, Homo sapien
ctggaagaccacgaccaggacggag

SEQ ID NO: 1451501 - DNA, 25 bp, Homo sapien
accaggacggagaaggcgacaccca

SEQ ID NO: 1451502 - DNA, 25 bp, Homo sapien
tggttgcctgatcttgtctgtgttt

SEQ ID NO: 1451503 - DNA, 25 bp, Homo sapien
tcctggattagccaaggccattctc

SEQ ID NO: 1451504 - DNA, 25 bp, Homo sapien
cctctttcccttagattgactgtgg

SEQ ID NO: 1451505 - DNA, 25 bp, Homo sapien
ggccattctctgttagtacaacctc

SEQ ID NO: 1451506 - DNA, 25 bp, Homo sapien
cagcgatcagggctcctagcacaga

SEQ ID NO: 1451507 - DNA, 25 bp, Homo sapien
tcttgagattgacagcgatcagggc

SEQ ID NO: 1451508 - DNA, 25 bp, Homo sapien
cttcctccacaggtagtaggggtcg

SEQ ID NO: 1451509 - DNA, 25 bp, Homo sapien
agttgcttgagggagttcttgagat

SEQ ID NO: 1451510 - DNA, 25 bp, Homo sapien
gggagaggatacagatagatcccca

SEQ ID NO: 1451511 - DNA, 25 bp, Homo sapien
aggagccaaagaagttgctgcagcc

SEQ ID NO: 1451512 - DNA, 25 bp, Homo sapien
caaagaagttgctgcagccgagagc

SEQ ID NO: 1451513 - DNA, 25 bp, Homo sapien
tgctgcagccgagagcgatcatctc

SEQ ID NO: 1451514 - DNA, 25 bp, Homo sapien
gaagttgctgcagccgagagcgatc

SEQ ID NO: 1451515 - DNA, 25 bp, Homo sapien
agggtccggcccatagccaggttga

SEQ ID NO: 1451516 - DNA, 25 bp, Homo sapien
tggttcgaatccacgtcgtagccgt

SEQ ID NO: 1451517 - DNA, 25 bp, Homo sapien
ccaggttgatgacgtagctcacgat

SEQ ID NO: 1451518 - DNA, 25 bp, Homo sapien
actgtgagaccacaggcgacaccgg

SEQ ID NO: 1451519 - DNA, 25 bp, Homo sapien
gaggctgagagaacctaacttgccc

SEQ ID NO: 1451520 - DNA, 25 bp, Homo sapien
catagggtagggaccatcactcctg

SEQ ID NO: 1451521 - DNA, 25 bp, Homo sapien
ggtgtgccgggatctttgcctaagt

SEQ ID NO: 1451522 - DNA, 25 bp, Homo sapien
gattctgaaccctgtatgctcacga

SEQ ID NO: 1451523 - DNA, 25 bp, Homo sapien
ccccggagatagctgttgccaccac

SEQ ID NO: 1451524 - DNA, 25 bp, Homo sapien
ttttgggcatcttacagcccccgga

SEQ ID NO: 1451525 - DNA, 25 bp, Homo sapien
ccgcgttggatttctcccacgatct

SEQ ID NO: 1451526 - DNA, 25 bp, Homo sapien
ttacagcccccggagatagctgttg

SEQ ID NO: 1451527 - DNA, 25 bp, Homo sapien
caccgctgatgagagcgaagatgag

SEQ ID NO: 1451528 - DNA, 25 bp, Homo sapien
cttgtgcatgtagcgagcattgagc

SEQ ID NO: 1451529 - DNA, 25 bp, Homo sapien
ggtttttgcaaatgtcaatgaaggt

SEQ ID NO: 1451530 - DNA, 25 bp, Homo sapien
cgaagatgagcgaggcgatgttggt

SEQ ID NO: 1451531 - DNA, 25 bp, Homo sapien
gatggtcagtccgaagatgtacttg

SEQ ID NO: 1451532 - DNA, 25 bp, Homo sapien
gatgtacttgagcaccgaaatcagg

SEQ ID NO: 1451533 - DNA, 25 bp, Homo sapien
ggccgtcatgaagccccggatgaag

SEQ ID NO: 1451534 - DNA, 25 bp, Homo sapien
ggactcggagaggtagatggccaca

SEQ ID NO: 1451535 - DNA, 25 bp, Homo sapien
aagaccaatgtggttcagcagttcc

SEQ ID NO: 1451536 - DNA, 25 bp, Homo sapien
gcagtagcttgagggaattggacca

SEQ ID NO: 1451537 - DNA, 25 bp, Homo sapien
acacgcaggtctggagctccgtgca

SEQ ID NO: 1451538 - DNA, 25 bp, Homo sapien
gctccgtgcagtcctagcgtagcag

SEQ ID NO: 1451539 - DNA, 25 bp, Homo sapien
caggctagcgtagctgacacgtgca

SEQ ID NO: 1451540 - DNA, 25 bp, Homo sapien
atgatggcggtgaggcaggctagcg

SEQ ID NO: 1451541 - DNA, 25 bp, Homo sapien
agacagatgttacccaccaggatgc

SEQ ID NO: 1451542 - DNA, 25 bp, Homo sapien
gacctggaatttcgactctggggcc

SEQ ID NO: 1451543 - DNA, 25 bp, Homo sapien
attgactgcaggaaggttggccagc

SEQ ID NO: 1451544 - DNA, 25 bp, Homo sapien
ggagtagaggccattgactgcagga

SEQ ID NO: 1451545 - DNA, 25 bp, Homo sapien
gagtagaggccattgactgcaggaa

SEQ ID NO: 1451546 - DNA, 25 bp, Homo sapien
gactgcaggaaggttggccagcaga

SEQ ID NO: 1451547 - DNA, 25 bp, Homo sapien
gtcaggaatgatgtagtctttaatc

SEQ ID NO: 1451548 - DNA, 25 bp, Homo sapien
agcaggtcaggaatgatgtagtctt

SEQ ID NO: 1451549 - DNA, 25 bp, Homo sapien
ccgctgagtccaccgagcaggtcag

SEQ ID NO: 1451550 - DNA, 25 bp, Homo sapien
tggatggatcccccgctgagtccac

SEQ ID NO: 1451551 - DNA, 25 bp, Homo sapien
tgaaggcattgcgaagtttctctcc

SEQ ID NO: 1451552 - DNA, 25 bp, Homo sapien
tatgcggctctgtctaccacgtagc

SEQ ID NO: 1451553 - DNA, 25 bp, Homo sapien
cccactgggtatgtccggtccttct

SEQ ID NO: 1451554 - DNA, 25 bp, Homo sapien
ttctcaaactcatcgtcgaagaggg

SEQ ID NO: 1451555 - DNA, 25 bp, Homo sapien
gttttgcttggcgctcagcacgtgg

SEQ ID NO: 1451556 - DNA, 25 bp, Homo sapien
ctgttttgcttggcgctcagcacgt

SEQ ID NO: 1451557 - DNA, 25 bp, Homo sapien
gcttggcgctcagcacgtggctggc

SEQ ID NO: 1451558 - DNA, 25 bp, Homo sapien
ttgcttggcgctcagcacgtggctg

SEQ ID NO: 1451559 - DNA, 25 bp, Homo sapien
aaaggtgttcctgaggtgtgtgaaa

SEQ ID NO: 1451560 - DNA, 25 bp, Homo sapien
gttcctgaggtgtgtgaaagggctc

SEQ ID NO: 1451561 - DNA, 25 bp, Homo sapien
ggtgttcctgaggtgtgtgaaaggg

SEQ ID NO: 1451562 - DNA, 25 bp, Homo sapien
gggagcgggcagccgaaaggtgttc

SEQ ID NO: 1451563 - DNA, 25 bp, Homo sapien
atgggagcttggcacttcctaaatc

SEQ ID NO: 1451564 - DNA, 25 bp, Homo sapien
ggagcttggcacttcctaaatccac

SEQ ID NO: 1451565 - DNA, 25 bp, Homo sapien
taggtcacattcagcggggctcctg

SEQ ID NO: 1451566 - DNA, 25 bp, Homo sapien
aatccaccccgaagacaataggtca

SEQ ID NO: 1451567 - DNA, 25 bp, Homo sapien
gggaatcttctggttgtatgtcctt

SEQ ID NO: 1451568 - DNA, 25 bp, Homo sapien
gttggagcgactagggctgcttttg

SEQ ID NO: 1451569 - DNA, 25 bp, Homo sapien
tggttgtatgtcctttagggcagag

SEQ ID NO: 1451570 - DNA, 25 bp, Homo sapien
cactgcccagctggttggagcgact

SEQ ID NO: 1451571 - DNA, 25 bp, Homo sapien
ggacttgagctgttccaccgagcag

SEQ ID NO: 1451572 - DNA, 25 bp, Homo sapien
gggctaattcctgtcagccctccag

SEQ ID NO: 1451573 - DNA, 25 bp, Homo sapien
tcagagggccgcattgttccctggg

SEQ ID NO: 1451574 - DNA, 25 bp, Homo sapien
gacgccaagcttgcgggcaggactt

SEQ ID NO: 1451575 - DNA, 25 bp, Homo sapien
agtattgtaccaatctaagaaaggg

SEQ ID NO: 1451576 - DNA, 25 bp, Homo sapien
taatataaatggcaacaatgaaatc

SEQ ID NO: 1451577 - DNA, 25 bp, Homo sapien
tttggtaaccactcaaagaatagta

SEQ ID NO: 1451578 - DNA, 25 bp, Homo sapien
tgtattaggtgttggcaattcaagg

SEQ ID NO: 1451579 - DNA, 25 bp, Homo sapien
cagatgggttgcttggctctttaac

SEQ ID NO: 1451580 - DNA, 25 bp, Homo sapien
gaaggtcctgaacgagctctactcg

SEQ ID NO: 1451581 - DNA, 25 bp, Homo sapien
gcagccatagtacatcagcaacaga

SEQ ID NO: 1451582 - DNA, 25 bp, Homo sapien
gagtaaagaagtcggccagcagctc

SEQ ID NO: 1451583 - DNA, 25 bp, Homo sapien
aggacaagtgcatggtccccactgg

SEQ ID NO: 1451584 - DNA, 25 bp, Homo sapien
cagggaccctgaactaatggcaagg

SEQ ID NO: 1451585 - DNA, 25 bp, Homo sapien
taatatgtgcctgtcggaaaggctt

SEQ ID NO: 1451586 - DNA, 25 bp, Homo sapien
gcctgcattgcactattaatatgtg

SEQ ID NO: 1451587 - DNA, 25 bp, Homo sapien
tcagatcttggattgatgtatggct

SEQ ID NO: 1451588 - DNA, 25 bp, Homo sapien
tagatggtacctttcgttcaactcc

SEQ ID NO: 1451589 - DNA, 25 bp, Homo sapien
ttggatgtgccagcctactatgtca

SEQ ID NO: 1451590 - DNA, 25 bp, Homo sapien
gctgatccagaagcctaggtgtggc

SEQ ID NO: 1451591 - DNA, 25 bp, Homo sapien
gttatacagctaatgcctttcaggg

SEQ ID NO: 1451592 - DNA, 25 bp, Homo sapien
aatgctttacttctgctcttttaga

SEQ ID NO: 1451593 - DNA, 25 bp, Homo sapien
gcgccaagaagagctattactcctt

SEQ ID NO: 1451594 - DNA, 25 bp, Homo sapien
tcttttagatcaatttctaagcgcc

SEQ ID NO: 1451595 - DNA, 25 bp, Homo sapien
tcctagcagagaattccctaagata

SEQ ID NO: 1451596 - DNA, 25 bp, Homo sapien
ttcagtcaagaaacagtctgcatgc

SEQ ID NO: 1451597 - DNA, 25 bp, Homo sapien
tgccaagtaggatctattgcctgga

SEQ ID NO: 1451598 - DNA, 25 bp, Homo sapien
taattagttaagctcagacttcctc

SEQ ID NO: 1451599 - DNA, 25 bp, Homo sapien
caatcctttggaagtcactactggt

SEQ ID NO: 1451600 - DNA, 25 bp, Homo sapien
gattgtttatctcattcgtcccaat

SEQ ID NO: 1451601 - DNA, 25 bp, Homo sapien
gggattggtcacaggcgcagctcaa

SEQ ID NO: 1451602 - DNA, 25 bp, Homo sapien
tgttgctggattggtccaatctgat

SEQ ID NO: 1451603 - DNA, 25 bp, Homo sapien
tccaatctgattcggcgggattggt

SEQ ID NO: 1451604 - DNA, 25 bp, Homo sapien
aggatttctaacattggaggaggga

SEQ ID NO: 1451605 - DNA, 25 bp, Homo sapien
tcctgcaaattactggaccactgct

SEQ ID NO: 1451606 - DNA, 25 bp, Homo sapien
aaaagtgtatgaaggaattaagctg

SEQ ID NO: 1451607 - DNA, 25 bp, Homo sapien
tgaaggaattaagctgacaaggatt

SEQ ID NO: 1451608 - DNA, 25 bp, Homo sapien
tcttagactccactggagcagtggg

SEQ ID NO: 1451609 - DNA, 25 bp, Homo sapien
aagtgcaggtcttcgtggcaccaca

SEQ ID NO: 1451610 - DNA, 25 bp, Homo sapien
gatggcaggagcgttcaaagccttt

SEQ ID NO: 1451611 - DNA, 25 bp, Homo sapien
tcagttaactctatgcaagggcagt

SEQ ID NO: 1451612 - DNA, 25 bp, Homo sapien
ctgccacaggttatccattgggggc

SEQ ID NO: 1451613 - DNA, 25 bp, Homo sapien
gctgcatgtgagtgctgctggtaac

SEQ ID NO: 1451614 - DNA, 25 bp, Homo sapien
caggttatccattgggggctgcatg

SEQ ID NO: 1451615 - DNA, 25 bp, Homo sapien
gagtgctgctggtaaccacggacat

SEQ ID NO: 1451616 - DNA, 25 bp, Homo sapien
ctggcccaacctcacttcttgaccc

SEQ ID NO: 1451617 - DNA, 25 bp, Homo sapien
gcaacctagaggcatcaagcaaaat

SEQ ID NO: 1451618 - DNA, 25 bp, Homo sapien
gcagctgaggcttaaggagattaaa

SEQ ID NO: 1451619 - DNA, 25 bp, Homo sapien
cagtctgaactgcaaagcaacctag

SEQ ID NO: 1451620 - DNA, 25 bp, Homo sapien
gatcacacagctaccaagtatcaga

SEQ ID NO: 1451621 - DNA, 25 bp, Homo sapien
cccgtgttcgtgcaaagattcagag

SEQ ID NO: 1451622 - DNA, 25 bp, Homo sapien
tgaggatgctgctacaagcctcggg

SEQ ID NO: 1451623 - DNA, 25 bp, Homo sapien
gaggccacgatgtccctaaggaaag

SEQ ID NO: 1451624 - DNA, 25 bp, Homo sapien
agctagctgccctcgtgctgtggaa

SEQ ID NO: 1451625 - DNA, 25 bp, Homo sapien
acaggctctcaagtcttcccaaggc

SEQ ID NO: 1451626 - DNA, 25 bp, Homo sapien
accccacaggctctcaagtcttccc

SEQ ID NO: 1451627 - DNA, 25 bp, Homo sapien
aatattctggctctactctggcctt

SEQ ID NO: 1451628 - DNA, 25 bp, Homo sapien
tattctggctctactctggcctttt

SEQ ID NO: 1451629 - DNA, 25 bp, Homo sapien
cctgtcgagaggactaggaaccgat

SEQ ID NO: 1451630 - DNA, 25 bp, Homo sapien
tcttccagggaatcgcaatgttgtg

SEQ ID NO: 1451631 - DNA, 25 bp, Homo sapien
gctatcccaggagtatcaggaccag

SEQ ID NO: 1451632 - DNA, 25 bp, Homo sapien
cagccaggctcatgggtctcagaca

SEQ ID NO: 1451633 - DNA, 25 bp, Homo sapien
aacagagagagcaacgagatgacct

SEQ ID NO: 1451634 - DNA, 25 bp, Homo sapien
gagagcaacgagatgaccttacagc

SEQ ID NO: 1451635 - DNA, 25 bp, Homo sapien
gcaacgagatgaccttacagccagc

SEQ ID NO: 1451636 - DNA, 25 bp, Homo sapien
cagagagagcaacgagatgacctta

SEQ ID NO: 1451637 - DNA, 25 bp, Homo sapien
cttccttgttttcaataaggactgt

SEQ ID NO: 1451638 - DNA, 25 bp, Homo sapien
gcctgttgccatgagaaccgtttcc

SEQ ID NO: 1451639 - DNA, 25 bp, Homo sapien
gtagagagtcttcccgctcaccatt

SEQ ID NO: 1451640 - DNA, 25 bp, Homo sapien
tccatttagcctgtgtgtggattct

SEQ ID NO: 1451641 - DNA, 25 bp, Homo sapien
tgggaaagtccctccaacattctat

SEQ ID NO: 1451642 - DNA, 25 bp, Homo sapien
aagtccctccaacattctatagaaa

SEQ ID NO: 1451643 - DNA, 25 bp, Homo sapien
tctatagaaacatggaatttcctgg

SEQ ID NO: 1451644 - DNA, 25 bp, Homo sapien
tggccatgggaaagtccctccaaca

SEQ ID NO: 1451645 - DNA, 25 bp, Homo sapien
gagacatagccctgctgtggacgca

SEQ ID NO: 1451646 - DNA, 25 bp, Homo sapien
cacacggcaagaggatgaggtaaca

SEQ ID NO: 1451647 - DNA, 25 bp, Homo sapien
tcctttaggagaacactaggtgccc

SEQ ID NO: 1451648 - DNA, 25 bp, Homo sapien
tttagccaaaagactcctgcaggtg

SEQ ID NO: 1451649 - DNA, 25 bp, Homo sapien
tgctccacactacggctctgaaggg

SEQ ID NO: 1451650 - DNA, 25 bp, Homo sapien
ctcttgagggtggtgcacgagacca

SEQ ID NO: 1451651 - DNA, 25 bp, Homo sapien
gaaatgagagcgtgggcagttcccc

SEQ ID NO: 1451652 - DNA, 25 bp, Homo sapien
ccatgtgtggatccgatggcagcta

SEQ ID NO: 1451653 - DNA, 25 bp, Homo sapien
gtggctggaggttgtttccttgcat

SEQ ID NO: 1451654 - DNA, 25 bp, Homo sapien
aaagaccagcactctaaaggcctgg

SEQ ID NO: 1451655 - DNA, 25 bp, Homo sapien
aaggtggctggaggttgtttccttg

SEQ ID NO: 1451656 - DNA, 25 bp, Homo sapien
tgtgcaaagaccagcactctaaagg

SEQ ID NO: 1451657 - DNA, 25 bp, Homo sapien
ccaggctgtatgatctcatgagcaa

SEQ ID NO: 1451658 - DNA, 25 bp, Homo sapien
cagagaccagctgccgccttgatgt

SEQ ID NO: 1451659 - DNA, 25 bp, Homo sapien
tgatgttcctgggtactagaccacc

SEQ ID NO: 1451660 - DNA, 25 bp, Homo sapien
ccatgtgcttggtggagctcagtga

SEQ ID NO: 1451661 - DNA, 25 bp, Homo sapien
agggcagccagtctaaggacaggat

SEQ ID NO: 1451662 - DNA, 25 bp, Homo sapien
taaggacaggatggatctcaaccat

SEQ ID NO: 1451663 - DNA, 25 bp, Homo sapien
cagtctaaggacaggatggatctca

SEQ ID NO: 1451664 - DNA, 25 bp, Homo sapien
gcagccagtctaaggacaggatgga

SEQ ID NO: 1451665 - DNA, 25 bp, Homo sapien
ggtctctctagtcttgttgctacgc

SEQ ID NO: 1451666 - DNA, 25 bp, Homo sapien
cgcttgtgggttctttgtgaaaaag

SEQ ID NO: 1451667 - DNA, 25 bp, Homo sapien
tacgctattggctgggttcagctcc

SEQ ID NO: 1451668 - DNA, 25 bp, Homo sapien
tgcacagctggaaccgcctgcgtga

SEQ ID NO: 1451669 - DNA, 25 bp, Homo sapien
aaggtcgtgcggttctgggatctct

SEQ ID NO: 1451670 - DNA, 25 bp, Homo sapien
caggccatgggtaggaaggtcgtgc

SEQ ID NO: 1451671 - DNA, 25 bp, Homo sapien
cagggtgctcccctatggacattag

SEQ ID NO: 1451672 - DNA, 25 bp, Homo sapien
ggcaaaacccgtgcaagaaacatgg

SEQ ID NO: 1451673 - DNA, 25 bp, Homo sapien
catattattaaaaggcagtaaatgt

SEQ ID NO: 1451674 - DNA, 25 bp, Homo sapien
cctaatgtcatattattaaaaggca

SEQ ID NO: 1451675 - DNA, 25 bp, Homo sapien
gcacctggccctaatgtcatattat

SEQ ID NO: 1451676 - DNA, 25 bp, Homo sapien
acctggccctaatgtcatattatta

SEQ ID NO: 1451677 - DNA, 25 bp, Homo sapien
gttccaggatagatcagccggccag

SEQ ID NO: 1451678 - DNA, 25 bp, Homo sapien
ttccagggttccaggatagatcagc

SEQ ID NO: 1451679 - DNA, 25 bp, Homo sapien
caggatagatcagccggccagccag

SEQ ID NO: 1451680 - DNA, 25 bp, Homo sapien
cagggttccaggatagatcagccgg

SEQ ID NO: 1451681 - DNA, 25 bp, Homo sapien
tccttaaaccctggagacatttctc

SEQ ID NO: 1451682 - DNA, 25 bp, Homo sapien
gggcccagcccacgccaatgtattt

SEQ ID NO: 1451683 - DNA, 25 bp, Homo sapien
aagcagtgggcttcctgagatgacc

SEQ ID NO: 1451684 - DNA, 25 bp, Homo sapien
gactcctgccacactttagaagcca

SEQ ID NO: 1451685 - DNA, 25 bp, Homo sapien
atgtagcagtgcaatagttgttcac

SEQ ID NO: 1451686 - DNA, 25 bp, Homo sapien
gatgtagcagtgcaatagttgttca

SEQ ID NO: 1451687 - DNA, 25 bp, Homo sapien
tgtagcagtgcaatagttgttcaca

SEQ ID NO: 1451688 - DNA, 25 bp, Homo sapien
atgctgcccgggatgttggaggatt

SEQ ID NO: 1451689 - DNA, 25 bp, Homo sapien
tgctgcccgggatgttggaggattg

SEQ ID NO: 1451690 - DNA, 25 bp, Homo sapien
gctgcccgggatgttggaggattgg

SEQ ID NO: 1451691 - DNA, 25 bp, Homo sapien
tgcccgggatgttggaggattggcc

SEQ ID NO: 1451692 - DNA, 25 bp, Homo sapien
gcaggggtacacagggggagaagag

SEQ ID NO: 1451693 - DNA, 25 bp, Homo sapien
cccccaaggagagcaggggtacaca

SEQ ID NO: 1451694 - DNA, 25 bp, Homo sapien
agagcaggggtacacagggggagaa

SEQ ID NO: 1451695 - DNA, 25 bp, Homo sapien
ccccaaggagagcaggggtacacag

SEQ ID NO: 1451696 - DNA, 25 bp, Homo sapien
tgcagcctggacgaggaactggaag

SEQ ID NO: 1451697 - DNA, 25 bp, Homo sapien
cccttgatgcgctggcggcctcggc

SEQ ID NO: 1451698 - DNA, 25 bp, Homo sapien
gaactccggggtagatgaccgtgga

SEQ ID NO: 1451699 - DNA, 25 bp, Homo sapien
cctggacgaggaactggaagactgc

SEQ ID NO: 1451700 - DNA, 25 bp, Homo sapien
tttttcagaaatgcgcagagcaaac

SEQ ID NO: 1451701 - DNA, 25 bp, Homo sapien
ctttttcagaaatgcgcagagcaaa

SEQ ID NO: 1451702 - DNA, 25 bp, Homo sapien
ttttcagaaatgcgcagagcaaaca

SEQ ID NO: 1451703 - DNA, 25 bp, Homo sapien
tttcagaaatgcgcagagcaaacat

SEQ ID NO: 1451704 - DNA, 25 bp, Homo sapien
gacagtgttcctcagcacgaggctg

SEQ ID NO: 1451705 - DNA, 25 bp, Homo sapien
cagtgttcctcagcacgaggctggc

SEQ ID NO: 1451706 - DNA, 25 bp, Homo sapien
catcttgactggatattcaggtcag

SEQ ID NO: 1451707 - DNA, 25 bp, Homo sapien
acagtgttcctcagcacgaggctgg

SEQ ID NO: 1451708 - DNA, 25 bp, Homo sapien
ctgggtgagcaagtgcaggggtgga

SEQ ID NO: 1451709 - DNA, 25 bp, Homo sapien
caggtaccccacacctgtgtatctt

SEQ ID NO: 1451710 - DNA, 25 bp, Homo sapien
gaatgaagacccaagccccagtggg

SEQ ID NO: 1451711 - DNA, 25 bp, Homo sapien
gatgtcagactccattaatctctcc

SEQ ID NO: 1451712 - DNA, 25 bp, Homo sapien
catggccccaaataggttatggttg

SEQ ID NO: 1451713 - DNA, 25 bp, Homo sapien
accctcagagagaagacatggcaaa

SEQ ID NO: 1451714 - DNA, 25 bp, Homo sapien
gggtattgggatccactcactcacc

SEQ ID NO: 1451715 - DNA, 25 bp, Homo sapien
tctgcatatcaatcccttatggcat

SEQ ID NO: 1451716 - DNA, 25 bp, Homo sapien
gagagagcttaggagagagttggcc

SEQ ID NO: 1451717 - DNA, 25 bp, Homo sapien
cacctacccaccgtccatccttaat

SEQ ID NO: 1451718 - DNA, 25 bp, Homo sapien
cacaggcacacacgactttagaggt

SEQ ID NO: 1451719 - DNA, 25 bp, Homo sapien
gctggaaagtatggtcacttctcca

SEQ ID NO: 1451720 - DNA, 25 bp, Homo sapien
ctgaacagctggaaagtatggtcac

SEQ ID NO: 1451721 - DNA, 25 bp, Homo sapien
cagcaggcatcgtgccacaggcaca

SEQ ID NO: 1451722 - DNA, 25 bp, Homo sapien
gaccaggacaaaactgtgattacct

SEQ ID NO: 1451723 - DNA, 25 bp, Homo sapien
taatagtgttctaggcaggagactc

SEQ ID NO: 1451724 - DNA, 25 bp, Homo sapien
gggaatcaaaatgccagggatctgg

SEQ ID NO: 1451725 - DNA, 25 bp, Homo sapien
gactggagaaattgcattgggaaac

SEQ ID NO: 1451726 - DNA, 25 bp, Homo sapien
ggaaatccaaggctcactgcactgt

SEQ ID NO: 1451727 - DNA, 25 bp, Homo sapien
tgtggccaatcagaagaaggactca

SEQ ID NO: 1451728 - DNA, 25 bp, Homo sapien
gacaccatagaggacaagacaggcg

SEQ ID NO: 1451729 - DNA, 25 bp, Homo sapien
tatgtgtcaagctggcactgggatc

SEQ ID NO: 1451730 - DNA, 25 bp, Homo sapien
aagtgccagatagtatagtgttgcc

SEQ ID NO: 1451731 - DNA, 25 bp, Homo sapien
tattagctgtagtgaatcatcgtca

SEQ ID NO: 1451732 - DNA, 25 bp, Homo sapien
tagctttaaccttcctgtggctcac

SEQ ID NO: 1451733 - DNA, 25 bp, Homo sapien
tgtggctcactttccttgactgtaa

SEQ ID NO: 1451734 - DNA, 25 bp, Homo sapien
ggtctgcaacagaatcaaggttcag

SEQ ID NO: 1451735 - DNA, 25 bp, Homo sapien
ggtggtctgcaacagaatcaaggtt

SEQ ID NO: 1451736 - DNA, 25 bp, Homo sapien
ctgcaacagaatcaaggttcagttc

SEQ ID NO: 1451737 - DNA, 25 bp, Homo sapien
tgggtggtctgcaacagaatcaagg

SEQ ID NO: 1451738 - DNA, 25 bp, Homo sapien
caaaagatgccgtcccatggtggct

SEQ ID NO: 1451739 - DNA, 25 bp, Homo sapien
gagcatgggccttagatggatttga

SEQ ID NO: 1451740 - DNA, 25 bp, Homo sapien
ttggtttaacagctgctcatcccag

SEQ ID NO: 1451741 - DNA, 25 bp, Homo sapien
cctacttagcttcttactagcaggg

SEQ ID NO: 1451742 - DNA, 25 bp, Homo sapien
acaggaggaacacaatgggacagac

SEQ ID NO: 1451743 - DNA, 25 bp, Homo sapien
tgtgaggcaggttgctaaacttctc

SEQ ID NO: 1451744 - DNA, 25 bp, Homo sapien
catactgactgtagggtgtgaggca

SEQ ID NO: 1451745 - DNA, 25 bp, Homo sapien
gggcatctgggaacatatgagaaga

SEQ ID NO: 1451746 - DNA, 25 bp, Homo sapien
tcctgccaggaagtgaacaatggcg

SEQ ID NO: 1451747 - DNA, 25 bp, Homo sapien
tctgttttgaagcatgggccagacc

SEQ ID NO: 1451748 - DNA, 25 bp, Homo sapien
gggagcctccaattcggccaacttg

SEQ ID NO: 1451749 - DNA, 25 bp, Homo sapien
tgataccagaccacattgacaggga

SEQ ID NO: 1451750 - DNA, 25 bp, Homo sapien
tcagatcagactctggcaggccaaa

SEQ ID NO: 1451751 - DNA, 25 bp, Homo sapien
aatatgtccctatgctgttcacagg

SEQ ID NO: 1451752 - DNA, 25 bp, Homo sapien
tcagcagagatcaacaaggcgggac

SEQ ID NO: 1451753 - DNA, 25 bp, Homo sapien
tcatggcagaattgtgggtcaaacc

SEQ ID NO: 1451754 - DNA, 25 bp, Homo sapien
tcataaaaattaccagcccagagct

SEQ ID NO: 1451755 - DNA, 25 bp, Homo sapien
gagcttggatttccaccggatccac

SEQ ID NO: 1451756 - DNA, 25 bp, Homo sapien
tttgtatttgcaaaagctgaaaatg

SEQ ID NO: 1451757 - DNA, 25 bp, Homo sapien
tccaccacgtgagacaaaagagtct

SEQ ID NO: 1451758 - DNA, 25 bp, Homo sapien
ttgagggccttttctagaccttgga

SEQ ID NO: 1451759 - DNA, 25 bp, Homo sapien
tctagaccttggatgtgttttcgag

SEQ ID NO: 1451760 - DNA, 25 bp, Homo sapien
cttcttcttgccaggtttgagggcc

SEQ ID NO: 1451761 - DNA, 25 bp, Homo sapien
tgttttcgagggagctgatactctt

SEQ ID NO: 1451762 - DNA, 25 bp, Homo sapien
tcaacttcgggactgaccacttacg

SEQ ID NO: 1451763 - DNA, 25 bp, Homo sapien
gctactttctgggtgtatttcaggc

SEQ ID NO: 1451764 - DNA, 25 bp, Homo sapien
aaaaagcacacactcctcagcggag

SEQ ID NO: 1451765 - DNA, 25 bp, Homo sapien
ttacgcctacacctcacagctgatg

SEQ ID NO: 1451766 - DNA, 25 bp, Homo sapien
gaggctgggttacccagagttagta

SEQ ID NO: 1451767 - DNA, 25 bp, Homo sapien
ggctgggttacccagagttagtaga

SEQ ID NO: 1451768 - DNA, 25 bp, Homo sapien
gctgggttacccagagttagtagaa

SEQ ID NO: 1451769 - DNA, 25 bp, Homo sapien
aggctgggttacccagagttagtag

SEQ ID NO: 1451770 - DNA, 25 bp, Homo sapien
tctcagggcaaggtacggaacctct

SEQ ID NO: 1451771 - DNA, 25 bp, Homo sapien
tctaaaaaagtttcgtgcccagctg

SEQ ID NO: 1451772 - DNA, 25 bp, Homo sapien
caatgggcctagcacaaaagtttgg

SEQ ID NO: 1451773 - DNA, 25 bp, Homo sapien
tcaagagtcagaggatctcagggca

SEQ ID NO: 1451774 - DNA, 25 bp, Homo sapien
ttgacggtggtgctagcctggcatc

SEQ ID NO: 1451775 - DNA, 25 bp, Homo sapien
gatggcagccactgagtatgggtcc

SEQ ID NO: 1451776 - DNA, 25 bp, Homo sapien
caagcaatagccagccgaggtggtg

SEQ ID NO: 1451777 - DNA, 25 bp, Homo sapien
agaccataggcctccaagttccgga

SEQ ID NO: 1451778 - DNA, 25 bp, Homo sapien
ggggacagagactgacggtggtgac

SEQ ID NO: 1451779 - DNA, 25 bp, Homo sapien
gtggggacagagactgacggtggtg

SEQ ID NO: 1451780 - DNA, 25 bp, Homo sapien
gggacagagactgacggtggtgact

SEQ ID NO: 1451781 - DNA, 25 bp, Homo sapien
ggacagagactgacggtggtgactg

SEQ ID NO: 1451782 - DNA, 25 bp, Homo sapien
gagctccagacccagaaaatcttag

SEQ ID NO: 1451783 - DNA, 25 bp, Homo sapien
gccttacgcttgtcaatgagctcca

SEQ ID NO: 1451784 - DNA, 25 bp, Homo sapien
gaggacgtatctcttccaattgccc

SEQ ID NO: 1451785 - DNA, 25 bp, Homo sapien
taaaagctccaactagccttacgct

SEQ ID NO: 1451786 - DNA, 25 bp, Homo sapien
ggcaacggctgcatttgaacccagt

SEQ ID NO: 1451787 - DNA, 25 bp, Homo sapien
gcccaggcacataaacacgggtgtt

SEQ ID NO: 1451788 - DNA, 25 bp, Homo sapien
gaataagtgccctactttgccaggg

SEQ ID NO: 1451789 - DNA, 25 bp, Homo sapien
tagaacaaaatcctagagggcagtg

SEQ ID NO: 1451790 - DNA, 25 bp, Homo sapien
atgggctcttgtccgggaagggtca

SEQ ID NO: 1451791 - DNA, 25 bp, Homo sapien
tagggtgatgtcaattggacagatt

SEQ ID NO: 1451792 - DNA, 25 bp, Homo sapien
gctcttgtccgggaagggtcacttg

SEQ ID NO: 1451793 - DNA, 25 bp, Homo sapien
tccgggaagggtcacttgataggca

SEQ ID NO: 1451794 - DNA, 25 bp, Homo sapien
gcttcatgactgtatgctgttcatt

SEQ ID NO: 1451795 - DNA, 25 bp, Homo sapien
agcttcatgactgtatgctgttcat

SEQ ID NO: 1451796 - DNA, 25 bp, Homo sapien
taggatgggatccaatctcacaaga

SEQ ID NO: 1451797 - DNA, 25 bp, Homo sapien
tctctaagatgcagtcacataggat

SEQ ID NO: 1451798 - DNA, 25 bp, Homo sapien
cttatgggtgggagatacacgaatg

SEQ ID NO: 1451799 - DNA, 25 bp, Homo sapien
gggtgggagatacacgaatgctttc

SEQ ID NO: 1451800 - DNA, 25 bp, Homo sapien
tgggtgggagatacacgaatgcttt

SEQ ID NO: 1451801 - DNA, 25 bp, Homo sapien
tatgggtgggagatacacgaatgct

SEQ ID NO: 1451802 - DNA, 25 bp, Homo sapien
catcaaaattggctagtgaggaaga

SEQ ID NO: 1451803 - DNA, 25 bp, Homo sapien
tcaggagcctttgctactaactaag

SEQ ID NO: 1451804 - DNA, 25 bp, Homo sapien
gtgagatgggataaatttgaagatc

SEQ ID NO: 1451805 - DNA, 25 bp, Homo sapien
cagctttctaagcttagcatcaaaa

SEQ ID NO: 1451806 - DNA, 25 bp, Homo sapien
ttcttggcgtagttaatgacgatcg

SEQ ID NO: 1451807 - DNA, 25 bp, Homo sapien
atttttcttggcgtagttaatgacg

SEQ ID NO: 1451808 - DNA, 25 bp, Homo sapien
aatgacgatcgttcggacctcactg

SEQ ID NO: 1451809 - DNA, 25 bp, Homo sapien
cgtagttaatgacgatcgttcggac

SEQ ID NO: 1451810 - DNA, 25 bp, Homo sapien
cagaaaagggtgagacctactcgtt

SEQ ID NO: 1451811 - DNA, 25 bp, Homo sapien
cctgactgaagtgagcatgaccatg

SEQ ID NO: 1451812 - DNA, 25 bp, Homo sapien
cagagcaggttttgccagtcgcaaa

SEQ ID NO: 1451813 - DNA, 25 bp, Homo sapien
catttagtccagaggaacttgccca

SEQ ID NO: 1451814 - DNA, 25 bp, Homo sapien
gatagggctgttccctgctaccctc

SEQ ID NO: 1451815 - DNA, 25 bp, Homo sapien
ggttttatatctggagggtgatagg

SEQ ID NO: 1451816 - DNA, 25 bp, Homo sapien
tgggacacagtagaggggttttata

SEQ ID NO: 1451817 - DNA, 25 bp, Homo sapien
ctcctggatagtctgggaggtcggg

SEQ ID NO: 1451818 - DNA, 25 bp, Homo sapien
agctccttcacctgtataatctgct

SEQ ID NO: 1451819 - DNA, 25 bp, Homo sapien
gctccttcacctgtataatctgctc

SEQ ID NO: 1451820 - DNA, 25 bp, Homo sapien
ctccttcacctgtataatctgctcc

SEQ ID NO: 1451821 - DNA, 25 bp, Homo sapien
gcatttgctgcaggaacttagagag

SEQ ID NO: 1451822 - DNA, 25 bp, Homo sapien
tatgtccagttgtcgtccttcaggg

SEQ ID NO: 1451823 - DNA, 25 bp, Homo sapien
tagcttgacttctttatgtccagtt

SEQ ID NO: 1451824 - DNA, 25 bp, Homo sapien
gtagcttgacttctttatgtccagt

SEQ ID NO: 1451825 - DNA, 25 bp, Homo sapien
ctttatgtccagttgtcgtccttca

SEQ ID NO: 1451826 - DNA, 25 bp, Homo sapien
aaactgaaaatagcgacatgtggcc

SEQ ID NO: 1451827 - DNA, 25 bp, Homo sapien
gaaataaattcaggccggacacagt

SEQ ID NO: 1451828 - DNA, 25 bp, Homo sapien
cgcaatagcagtggattctcgagga

SEQ ID NO: 1451829 - DNA, 25 bp, Homo sapien
tacaatggcagcatcgagcagttgc

SEQ ID NO: 1451830 - DNA, 25 bp, Homo sapien
tttgactcggcacttcaaggcatgt

SEQ ID NO: 1451831 - DNA, 25 bp, Homo sapien
tcagcctttttgactcggcacttca

SEQ ID NO: 1451832 - DNA, 25 bp, Homo sapien
aagtgctggtgagtaaagggaggtc

SEQ ID NO: 1451833 - DNA, 25 bp, Homo sapien
cttcaaggcatgtaagaagcattgc

SEQ ID NO: 1451834 - DNA, 25 bp, Homo sapien
tgaatccagggccagtggagcaatg

SEQ ID NO: 1451835 - DNA, 25 bp, Homo sapien
tatctgtggagtcttggttcaggcc

SEQ ID NO: 1451836 - DNA, 25 bp, Homo sapien
gagagacttgtcttcacgtgcctgg

SEQ ID NO: 1451837 - DNA, 25 bp, Homo sapien
tggagtccatctggacagacccctt

SEQ ID NO: 1451838 - DNA, 25 bp, Homo sapien
tgaaatggggagaataaatcttgtc

SEQ ID NO: 1451839 - DNA, 25 bp, Homo sapien
ggggagaataaatcttgtctcctcc

SEQ ID NO: 1451840 - DNA, 25 bp, Homo sapien
ctctgaaatggggagaataaatctt

SEQ ID NO: 1451841 - DNA, 25 bp, Homo sapien
aatggggagaataaatcttgtctcc

SEQ ID NO: 1451842 - DNA, 25 bp, Homo sapien
tttttcaaggtgcagcgagagaacc

SEQ ID NO: 1451843 - DNA, 25 bp, Homo sapien
tagacaacctgaccttgattgctgt

SEQ ID NO: 1451844 - DNA, 25 bp, Homo sapien
ttgcccagactgatagttaaacaac

SEQ ID NO: 1451845 - DNA, 25 bp, Homo sapien
ccaaagggtatgtttaggctattct

SEQ ID NO: 1451846 - DNA, 25 bp, Homo sapien
ttgcagtgagctgagatcacgccac

SEQ ID NO: 1451847 - DNA, 25 bp, Homo sapien
tgcactccaacctgggcgacagagc

SEQ ID NO: 1451848 - DNA, 25 bp, Homo sapien
gcaggagaatggagtgaaccgggag

SEQ ID NO: 1451849 - DNA, 25 bp, Homo sapien
aatggagtgaaccgggaggtggagc

SEQ ID NO: 1451850 - DNA, 25 bp, Homo sapien
tggacatggctgcaactccaatggc

SEQ ID NO: 1451851 - DNA, 25 bp, Homo sapien
cacaagtggtcctggtaagtgtgga

SEQ ID NO: 1451852 - DNA, 25 bp, Homo sapien
gccccttcccttcaggcctgacgtg

SEQ ID NO: 1451853 - DNA, 25 bp, Homo sapien
cttcaggcctgacgtgagcatctca

SEQ ID NO: 1451854 - DNA, 25 bp, Homo sapien
tctactctggaaaaatactagcaac

SEQ ID NO: 1451855 - DNA, 25 bp, Homo sapien
ggaggcaacctcaatgtccaccagg

SEQ ID NO: 1451856 - DNA, 25 bp, Homo sapien
tagcaacagtgtccctagaggcatc

SEQ ID NO: 1451857 - DNA, 25 bp, Homo sapien
ggaaataggctccatatatgctgca

SEQ ID NO: 1451858 - DNA, 25 bp, Homo sapien
taggacaatgacaagaaggacacac

SEQ ID NO: 1451859 - DNA, 25 bp, Homo sapien
gagatcctgtctgtatgtaaactgt

SEQ ID NO: 1451860 - DNA, 25 bp, Homo sapien
cattggaggctagacgtagtggctc

SEQ ID NO: 1451861 - DNA, 25 bp, Homo sapien
cgcttgaagccaacaatctgagacc

SEQ ID NO: 1451862 - DNA, 25 bp, Homo sapien
agaaatggcacagaggtcgcccttc

SEQ ID NO: 1451863 - DNA, 25 bp, Homo sapien
ccagcagggggcatcaccagtccag

SEQ ID NO: 1451864 - DNA, 25 bp, Homo sapien
cagcagggggcatcaccagtccagg

SEQ ID NO: 1451865 - DNA, 25 bp, Homo sapien
agcagggggcatcaccagtccaggc

SEQ ID NO: 1451866 - DNA, 25 bp, Homo sapien
agaagatcaggataggaccacagcg

SEQ ID NO: 1451867 - DNA, 25 bp, Homo sapien
tcaggataggaccacagcgtgtaca

SEQ ID NO: 1451868 - DNA, 25 bp, Homo sapien
accagtttctcgagcaccagaggcc

SEQ ID NO: 1451869 - DNA, 25 bp, Homo sapien
tctcgagcaccagaggccatgttgt

SEQ ID NO: 1451870 - DNA, 25 bp, Homo sapien
agatccagaaaacactactaccaaa

SEQ ID NO: 1451871 - DNA, 25 bp, Homo sapien
gagatccagaaaacactactaccaa

SEQ ID NO: 1451872 - DNA, 25 bp, Homo sapien
tcctttccaggtactaactcagaga

SEQ ID NO: 1451873 - DNA, 25 bp, Homo sapien
agttgtcacatcagctcgaagcttt

SEQ ID NO: 1451874 - DNA, 25 bp, Homo sapien
gggttaccaccactcacgtacacag

SEQ ID NO: 1451875 - DNA, 25 bp, Homo sapien
gtgagcatacaacttcacaatgttg

SEQ ID NO: 1451876 - DNA, 25 bp, Homo sapien
cgaccccttgatggccgtgttggac

SEQ ID NO: 1451877 - DNA, 25 bp, Homo sapien
ctgtccgaccccttgatggccgtgt

SEQ ID NO: 1451878 - DNA, 25 bp, Homo sapien
gacttgacccgaaaggccttggcaa

SEQ ID NO: 1451879 - DNA, 25 bp, Homo sapien
tggacttgacccgaaaggccttggc

SEQ ID NO: 1451880 - DNA, 25 bp, Homo sapien
gaagccagggaatgtcaagaaagcg

SEQ ID NO: 1451881 - DNA, 25 bp, Homo sapien
cagcttcgtggccgttgccgctggg

SEQ ID NO: 1451882 - DNA, 25 bp, Homo sapien
aatgtcaagaaagcgagggcgcagc

SEQ ID NO: 1451883 - DNA, 25 bp, Homo sapien
ggaaaccagggccgcgcagcttcgt

SEQ ID NO: 1451884 - DNA, 25 bp, Homo sapien
tcacacggaaatgagccttggatgg

SEQ ID NO: 1451885 - DNA, 25 bp, Homo sapien
ggcgcccgcgttcggcattctgaga

SEQ ID NO: 1451886 - DNA, 25 bp, Homo sapien
tacttggagtcacgagaacagagaa

SEQ ID NO: 1451887 - DNA, 25 bp, Homo sapien
aataagcgttctagtcccaccaggt

SEQ ID NO: 1451888 - DNA, 25 bp, Homo sapien
gctcatgaggaagcgcggctccttt

SEQ ID NO: 1451889 - DNA, 25 bp, Homo sapien
taacctccaacgatggaaatctgct

SEQ ID NO: 1451890 - DNA, 25 bp, Homo sapien
gttgcagggtagtcagacaaaggcc

SEQ ID NO: 1451891 - DNA, 25 bp, Homo sapien
ggctttgccgcttcatgctcatgag

SEQ ID NO: 1451892 - DNA, 25 bp, Homo sapien
ccaggaagtagtacagcatgattga

SEQ ID NO: 1451893 - DNA, 25 bp, Homo sapien
taaccacattgcgtaggtttgggaa

SEQ ID NO: 1451894 - DNA, 25 bp, Homo sapien
aggtgctaaatcatcatggccagga

SEQ ID NO: 1451895 - DNA, 25 bp, Homo sapien
gactctttggaagttggtagtccaa

SEQ ID NO: 1451896 - DNA, 25 bp, Homo sapien
tttgcagatcttcaacaagaggacc

SEQ ID NO: 1451897 - DNA, 25 bp, Homo sapien
gtcaagtccggcctgcagatcaaga

SEQ ID NO: 1451898 - DNA, 25 bp, Homo sapien
ggctgggcatcaacggcaaagtttt

SEQ ID NO: 1451899 - DNA, 25 bp, Homo sapien
agaggacccaggagaaattcgccct

SEQ ID NO: 1451900 - DNA, 25 bp, Homo sapien
tcgcaccaaaagtgggtcttcccat

SEQ ID NO: 1451901 - DNA, 25 bp, Homo sapien
gtctatatctaccttttccaccctg

SEQ ID NO: 1451902 - DNA, 25 bp, Homo sapien
caaacttgctgatacactcttacct

SEQ ID NO: 1451903 - DNA, 25 bp, Homo sapien
ttctccccagcttaagtggcttata

SEQ ID NO: 1451904 - DNA, 25 bp, Homo sapien
aatatttgaggagtcctgtgcacag

SEQ ID NO: 1451905 - DNA, 25 bp, Homo sapien
aaaatatttgaggagtcctgtgcac

SEQ ID NO: 1451906 - DNA, 25 bp, Homo sapien
cggaaaatatttgaggagtcctgtg

SEQ ID NO: 1451907 - DNA, 25 bp, Homo sapien
aacggaaaatatttgaggagtcctg

SEQ ID NO: 1451908 - DNA, 25 bp, Homo sapien
ttgggagtgacgtcctcaatctgtc

SEQ ID NO: 1451909 - DNA, 25 bp, Homo sapien
ggagtgacgtcctcaatctgtccga

SEQ ID NO: 1451910 - DNA, 25 bp, Homo sapien
gggttgggagtgacgtcctcaatct

SEQ ID NO: 1451911 - DNA, 25 bp, Homo sapien
gtgacgtcctcaatctgtccgatct

SEQ ID NO: 1451912 - DNA, 25 bp, Homo sapien
gcaagggccctgagggccacctggg

SEQ ID NO: 1451913 - DNA, 25 bp, Homo sapien
ctgagcgggcaagggccctgagggc

SEQ ID NO: 1451914 - DNA, 25 bp, Homo sapien
cgggcaagggccctgagggccacct

SEQ ID NO: 1451915 - DNA, 25 bp, Homo sapien
caggtccaggggtcttggttctact

SEQ ID NO: 1451916 - DNA, 25 bp, Homo sapien
tctgaggctgatgacctgttcttcc

SEQ ID NO: 1451917 - DNA, 25 bp, Homo sapien
ttgaaggatgcaaagatatggcaga

SEQ ID NO: 1451918 - DNA, 25 bp, Homo sapien
cttcagccacctgaggtctgaggct

SEQ ID NO: 1451919 - DNA, 25 bp, Homo sapien
ccagtcacacggcagatgatttctt

SEQ ID NO: 1451920 - DNA, 25 bp, Homo sapien
ccttgtaggccagatggtgtggttc

SEQ ID NO: 1451921 - DNA, 25 bp, Homo sapien
tgtaggccagatggtgtggttcctc

SEQ ID NO: 1451922 - DNA, 25 bp, Homo sapien
taggccagatggtgtggttcctcgt

SEQ ID NO: 1451923 - DNA, 25 bp, Homo sapien
ggccagatggtgtggttcctcgttt

SEQ ID NO: 1451924 - DNA, 25 bp, Homo sapien
tagtcagtgcttggactgagggaac

SEQ ID NO: 1451925 - DNA, 25 bp, Homo sapien
gagagagctgttgcatccactcaca

SEQ ID NO: 1451926 - DNA, 25 bp, Homo sapien
aggccagctatgtctccaaagggaa

SEQ ID NO: 1451927 - DNA, 25 bp, Homo sapien
tcgctggacactgagagctgtttaa

SEQ ID NO: 1451928 - DNA, 25 bp, Homo sapien
ctgtgatccagtgcatctcttcaga

SEQ ID NO: 1451929 - DNA, 25 bp, Homo sapien
cctgtgatccagtgcatctcttcag

SEQ ID NO: 1451930 - DNA, 25 bp, Homo sapien
ttcttaccctcagtggcccagagct

SEQ ID NO: 1451931 - DNA, 25 bp, Homo sapien
cctgcattggcattcttaccctcag

SEQ ID NO: 1451932 - DNA, 25 bp, Homo sapien
cagctccaatgagaaaagtgctact

SEQ ID NO: 1451933 - DNA, 25 bp, Homo sapien
ttggcttgatatccccaagtgcaag

SEQ ID NO: 1451934 - DNA, 25 bp, Homo sapien
ggacgtgaggtttggctacttcaga

SEQ ID NO: 1451935 - DNA, 25 bp, Homo sapien
ctgataattaacagacaggacgtga

SEQ ID NO: 1451936 - DNA, 25 bp, Homo sapien
cgtgaggtttggctacttcagaggc

SEQ ID NO: 1451937 - DNA, 25 bp, Homo sapien
taattaacagacaggacgtgaggtt

SEQ ID NO: 1451938 - DNA, 25 bp, Homo sapien
cgcttggcaggcatcctgcttttcc

SEQ ID NO: 1451939 - DNA, 25 bp, Homo sapien
gcacgcttggcaggcatcctgcttt

SEQ ID NO: 1451940 - DNA, 25 bp, Homo sapien
tgggcacgcttggcaggcatcctgc

SEQ ID NO: 1451941 - DNA, 25 bp, Homo sapien
gaggaggtcggatggggtctcccag

SEQ ID NO: 1451942 - DNA, 25 bp, Homo sapien
agctggagcttagtaggcatgtagt

SEQ ID NO: 1451943 - DNA, 25 bp, Homo sapien
ctgtcattccatccgtcagccccga

SEQ ID NO: 1451944 - DNA, 25 bp, Homo sapien
ggaacggcactgcagccgcgctctt

SEQ ID NO: 1451945 - DNA, 25 bp, Homo sapien
aacagcttggcagccttgcggctcc

SEQ ID NO: 1451946 - DNA, 25 bp, Homo sapien
gtgcccgcacatcgtacggatcgtg

SEQ ID NO: 1451947 - DNA, 25 bp, Homo sapien
cgtggatgtgtacgagaatctgtac

SEQ ID NO: 1451948 - DNA, 25 bp, Homo sapien
tggagctgcactggcgggcctccca

SEQ ID NO: 1451949 - DNA, 25 bp, Homo sapien
gaagtgcctgctgattgtcatggaa

SEQ ID NO: 1451950 - DNA, 25 bp, Homo sapien
gagaactctttagccgaatccagga

SEQ ID NO: 1451951 - DNA, 25 bp, Homo sapien
tctttagccgaatccaggatcgagg

SEQ ID NO: 1451952 - DNA, 25 bp, Homo sapien
gaatccaggatcgaggagaccaggc

SEQ ID NO: 1451953 - DNA, 25 bp, Homo sapien
tttggacggtggagaactctttagc

SEQ ID NO: 1451954 - DNA, 25 bp, Homo sapien
caacattgcccatcgggatgtcaag

SEQ ID NO: 1451955 - DNA, 25 bp, Homo sapien
tcggtgaggccatccagtatctgca

SEQ ID NO: 1451956 - DNA, 25 bp, Homo sapien
tgaagagcatcggtgaggccatcca

SEQ ID NO: 1451957 - DNA, 25 bp, Homo sapien
aagcatccgaaatcatgaagagcat

SEQ ID NO: 1451958 - DNA, 25 bp, Homo sapien
gagaatctcttatacacctccaaaa

SEQ ID NO: 1451959 - DNA, 25 bp, Homo sapien
ccttgttatacaccgtactatgtgg

SEQ ID NO: 1451960 - DNA, 25 bp, Homo sapien
tggctttgccaaggaaaccaccagc

SEQ ID NO: 1451961 - DNA, 25 bp, Homo sapien
caaaaggcccaacgccatcctgaaa

SEQ ID NO: 1451962 - DNA, 25 bp, Homo sapien
ccctgggtgtcatcatgtacatcct

SEQ ID NO: 1451963 - DNA, 25 bp, Homo sapien
ggtccctgggtgtcatcatgtacat

SEQ ID NO: 1451964 - DNA, 25 bp, Homo sapien
agagaagtatgacaagtcctgtgac

SEQ ID NO: 1451965 - DNA, 25 bp, Homo sapien
gtccctgggtgtcatcatgtacatc

SEQ ID NO: 1451966 - DNA, 25 bp, Homo sapien
gaagactcgcatccgaatgggccag

SEQ ID NO: 1451967 - DNA, 25 bp, Homo sapien
gaatggtcagaagtatcagaggaag

SEQ ID NO: 1451968 - DNA, 25 bp, Homo sapien
ggccttgccatctctccgggcatga

SEQ ID NO: 1451969 - DNA, 25 bp, Homo sapien
gctgtgtgggtatccccccttctac

SEQ ID NO: 1451970 - DNA, 25 bp, Homo sapien
gaccatcaccgagtttatgaaccac

SEQ ID NO: 1451971 - DNA, 25 bp, Homo sapien
acccagagaatgaccatcaccgagt

SEQ ID NO: 1451972 - DNA, 25 bp, Homo sapien
tgaagatgctcattcggaatctgct

SEQ ID NO: 1451973 - DNA, 25 bp, Homo sapien
ttcggaatctgctgaaaacagagcc

SEQ ID NO: 1451974 - DNA, 25 bp, Homo sapien
caaaggtccctcaaaccccactgca

SEQ ID NO: 1451975 - DNA, 25 bp, Homo sapien
aaggtccctcaaaccccactgcaca

SEQ ID NO: 1451976 - DNA, 25 bp, Homo sapien
ggtccctcaaaccccactgcacacc

SEQ ID NO: 1451977 - DNA, 25 bp, Homo sapien
tgcacaccagccgggtcctgaagga

SEQ ID NO: 1451978 - DNA, 25 bp, Homo sapien
gaattctgccttggttctggccacc

SEQ ID NO: 1451979 - DNA, 25 bp, Homo sapien
gaggagatgaccagtgccttggcca

SEQ ID NO: 1451980 - DNA, 25 bp, Homo sapien
ccttggccacaatgcgcgttgacta

SEQ ID NO: 1451981 - DNA, 25 bp, Homo sapien
cacgggaggacaagcaataactctc

SEQ ID NO: 1451982 - DNA, 25 bp, Homo sapien
gattctgaaacaggccctctgtggc

SEQ ID NO: 1451983 - DNA, 25 bp, Homo sapien
tctcagatggtgtgtccagcactcg

SEQ ID NO: 1451984 - DNA, 25 bp, Homo sapien
tctattagctgggttccgggaggca

SEQ ID NO: 1451985 - DNA, 25 bp, Homo sapien
cactgcgatcaggaagactggaccc

SEQ ID NO: 1451986 - DNA, 25 bp, Homo sapien
gtttgatcttgaccgggctacctgc

SEQ ID NO: 1451987 - DNA, 25 bp, Homo sapien
tcttgaccgggctacctgcttctct

SEQ ID NO: 1451988 - DNA, 25 bp, Homo sapien
atcttgaccgggctacctgcttctc

SEQ ID NO: 1451989 - DNA, 25 bp, Homo sapien
ctggtgtttgatcttgaccgggcta

SEQ ID NO: 1451990 - DNA, 25 bp, Homo sapien
tcgagataatgtactacctttggac

SEQ ID NO: 1451991 - DNA, 25 bp, Homo sapien
gagataatgtactacctttggacca

SEQ ID NO: 1451992 - DNA, 25 bp, Homo sapien
aatcaatcgagataatgtactacct

SEQ ID NO: 1451993 - DNA, 25 bp, Homo sapien
aatcgagataatgtactacctttgg

SEQ ID NO: 1451994 - DNA, 25 bp, Homo sapien
aatggtgcaatgcacgagccagcac

SEQ ID NO: 1451995 - DNA, 25 bp, Homo sapien
tgcaagctccaagtcagattctccg

SEQ ID NO: 1451996 - DNA, 25 bp, Homo sapien
gaatggtgcccctgaaatggtgcaa

SEQ ID NO: 1451997 - DNA, 25 bp, Homo sapien
tttgcttgctcccatcagtgcctgg

SEQ ID NO: 1451998 - DNA, 25 bp, Homo sapien
gggaatccctccgagacactggaag

SEQ ID NO: 1451999 - DNA, 25 bp, Homo sapien
tagtgtgtcaccctatggaaacagc

SEQ ID NO: 1452000 - DNA, 25 bp, Homo sapien
cagagccccagatccgattttggag

SEQ ID NO: 1452001 - DNA, 25 bp, Homo sapien
tagagtctatagagtcgccaccctg

SEQ ID NO: 1452002 - DNA, 25 bp, Homo sapien
tgaagatgtcaaactcactcatggc

SEQ ID NO: 1452003 - DNA, 25 bp, Homo sapien
actcatggctttgtagatgcctttc

SEQ ID NO: 1452004 - DNA, 25 bp, Homo sapien
taggcttctatgtagttgatgaaga

SEQ ID NO: 1452005 - DNA, 25 bp, Homo sapien
tgtcatgtaggcttctatgtagttg

SEQ ID NO: 1452006 - DNA, 25 bp, Homo sapien
tgttttcacagggaagaaatcgatg

SEQ ID NO: 1452007 - DNA, 25 bp, Homo sapien
tcttcacctgctccacggccttgct

SEQ ID NO: 1452008 - DNA, 25 bp, Homo sapien
tccacggccttgctcttgttttcac

SEQ ID NO: 1452009 - DNA, 25 bp, Homo sapien
ttattaaaggcattcttcacctgct

SEQ ID NO: 1452010 - DNA, 25 bp, Homo sapien
cagggagttcacatgcgccttgatg

SEQ ID NO: 1452011 - DNA, 25 bp, Homo sapien
gggagttcacatgcgccttgatgtc

SEQ ID NO: 1452012 - DNA, 25 bp, Homo sapien
gttcacatgcgccttgatgtctggg

SEQ ID NO: 1452013 - DNA, 25 bp, Homo sapien
cacatgcgccttgatgtctgggtct

SEQ ID NO: 1452014 - DNA, 25 bp, Homo sapien
tgcaactagcttaagaggacagctt

SEQ ID NO: 1452015 - DNA, 25 bp, Homo sapien
aactagcttaagaggacagcttggt

SEQ ID NO: 1452016 - DNA, 25 bp, Homo sapien
tgagtgagagattggcggaggtggc

SEQ ID NO: 1452017 - DNA, 25 bp, Homo sapien
aggtgagtgagagattggcggaggt

SEQ ID NO: 1452018 - DNA, 25 bp, Homo sapien
agcaaggactcctttaacaacaagt

SEQ ID NO: 1452019 - DNA, 25 bp, Homo sapien
caagttgtccagctgatccttcatt

SEQ ID NO: 1452020 - DNA, 25 bp, Homo sapien
ctttaacaacaagttgtccagctga

SEQ ID NO: 1452021 - DNA, 25 bp, Homo sapien
caaggactcctttaacaacaagttg

SEQ ID NO: 1452022 - DNA, 25 bp, Homo sapien
tacattcggctttaagggacaccta

SEQ ID NO: 1452023 - DNA, 25 bp, Homo sapien
gatgggaccatcacttaaatcaggt

SEQ ID NO: 1452024 - DNA, 25 bp, Homo sapien
ttctttctgcggagctacattcggc

SEQ ID NO: 1452025 - DNA, 25 bp, Homo sapien
tcaggtctggaaacgctctaagcag

SEQ ID NO: 1452026 - DNA, 25 bp, Homo sapien
tgctgaaggcatctcggagatctcg

SEQ ID NO: 1452027 - DNA, 25 bp, Homo sapien
aggcatctcggagatctcgaagcat

SEQ ID NO: 1452028 - DNA, 25 bp, Homo sapien
ctgaaggcatctcggagatctcgaa

SEQ ID NO: 1452029 - DNA, 25 bp, Homo sapien
gaaggcatctcggagatctcgaagc

SEQ ID NO: 1452030 - DNA, 25 bp, Homo sapien
tcaccccagtcaggaggaccaggca

SEQ ID NO: 1452031 - DNA, 25 bp, Homo sapien
agtcaggaggaccaggcaacagagc

SEQ ID NO: 1452032 - DNA, 25 bp, Homo sapien
cccagtcaggaggaccaggcaacag

SEQ ID NO: 1452033 - DNA, 25 bp, Homo sapien
agtgggtgcagctgttctcagactg

SEQ ID NO: 1452034 - DNA, 25 bp, Homo sapien
tttgcaagagcaagcccctgatgtg

SEQ ID NO: 1452035 - DNA, 25 bp, Homo sapien
ttgcaagagcaagcccctgatgtgt

SEQ ID NO: 1452036 - DNA, 25 bp, Homo sapien
tgtcttgtggtttggttttgcaaga

SEQ ID NO: 1452037 - DNA, 25 bp, Homo sapien
tggtttggttttgcaagagcaagcc

SEQ ID NO: 1452038 - DNA, 25 bp, Homo sapien
tccccatactccgtgtgttttgtgc

SEQ ID NO: 1452039 - DNA, 25 bp, Homo sapien
taaaacgtgccactgactctcaatc

SEQ ID NO: 1452040 - DNA, 25 bp, Homo sapien
catgctacttccactatgactgtca

SEQ ID NO: 1452041 - DNA, 25 bp, Homo sapien
tacatgtgcccctcttagctcatag

SEQ ID NO: 1452042 - DNA, 25 bp, Homo sapien
tgctgagagcagtggaaatcagaag

SEQ ID NO: 1452043 - DNA, 25 bp, Homo sapien
cagtttcgttgtgagtcaggcctgc

SEQ ID NO: 1452044 - DNA, 25 bp, Homo sapien
gggaggacgtgatgctgccttttcc

SEQ ID NO: 1452045 - DNA, 25 bp, Homo sapien
gaggttgcagtttcgttgtgagtca

SEQ ID NO: 1452046 - DNA, 25 bp, Homo sapien
taatggcatcatctggtcgaagggc

SEQ ID NO: 1452047 - DNA, 25 bp, Homo sapien
ttgttatgataacacctcggtggct

SEQ ID NO: 1452048 - DNA, 25 bp, Homo sapien
gtcacagtcatagttcgagtgcttg

SEQ ID NO: 1452049 - DNA, 25 bp, Homo sapien
tcggtggcttccttaactgttggta

SEQ ID NO: 1452050 - DNA, 25 bp, Homo sapien
cctaatcagaggcattgacctggag

SEQ ID NO: 1452051 - DNA, 25 bp, Homo sapien
catccatgggctttcgctgttgctg

SEQ ID NO: 1452052 - DNA, 25 bp, Homo sapien
gagtccccatctttcggaattagtg

SEQ ID NO: 1452053 - DNA, 25 bp, Homo sapien
ggaggccctgtgtaggagtccccat

SEQ ID NO: 1452054 - DNA, 25 bp, Homo sapien
gtatctttactctcaaaaacaagtc

SEQ ID NO: 1452055 - DNA, 25 bp, Homo sapien
caacaaagagtacaagctggatgct

SEQ ID NO: 1452056 - DNA, 25 bp, Homo sapien
gcgtcatctgagtcaaagcttgtat

SEQ ID NO: 1452057 - DNA, 25 bp, Homo sapien
gagtctccctccatgaacatgtgtg

SEQ ID NO: 1452058 - DNA, 25 bp, Homo sapien
aggatagaatgggtgctaactgcat

SEQ ID NO: 1452059 - DNA, 25 bp, Homo sapien
tttcaaggatagaatgggtgctaac

SEQ ID NO: 1452060 - DNA, 25 bp, Homo sapien
tgtatctttcaaggatagaatgggt

SEQ ID NO: 1452061 - DNA, 25 bp, Homo sapien
atctttcaaggatagaatgggtgct

SEQ ID NO: 1452062 - DNA, 25 bp, Homo sapien
aaatgatgtacagcaggccctcgaa

SEQ ID NO: 1452063 - DNA, 25 bp, Homo sapien
taacatcagcaaaataggagtagca

SEQ ID NO: 1452064 - DNA, 25 bp, Homo sapien
ctatataaaagagacatccatggga

SEQ ID NO: 1452065 - DNA, 25 bp, Homo sapien
tgattatccaccacgattttggaga

SEQ ID NO: 1452066 - DNA, 25 bp, Homo sapien
acagtactcatcagtgtgggactct

SEQ ID NO: 1452067 - DNA, 25 bp, Homo sapien
gctcttgtagtttctgcatggccaa

SEQ ID NO: 1452068 - DNA, 25 bp, Homo sapien
gctggtccagtgctctgttcttcct

SEQ ID NO: 1452069 - DNA, 25 bp, Homo sapien
ctaggtctgcatctccagatggctc

SEQ ID NO: 1452070 - DNA, 25 bp, Homo sapien
aatgccactggcaccgattatagcc

SEQ ID NO: 1452071 - DNA, 25 bp, Homo sapien
gatgtgcccatgaaatgtacccctg

SEQ ID NO: 1452072 - DNA, 25 bp, Homo sapien
tatagcctgactcccgggtttggaa

SEQ ID NO: 1452073 - DNA, 25 bp, Homo sapien
ggagcactagcaaggtgccaagcac

SEQ ID NO: 1452074 - DNA, 25 bp, Homo sapien
tacaagaacgttcatgtcagcttta

SEQ ID NO: 1452075 - DNA, 25 bp, Homo sapien
cattaacaagtgaataggtaaacta

SEQ ID NO: 1452076 - DNA, 25 bp, Homo sapien
taaactaattgcagtagatatgtgc

SEQ ID NO: 1452077 - DNA, 25 bp, Homo sapien
ctacatattcatccaagagaaaagg

SEQ ID NO: 1452078 - DNA, 25 bp, Homo sapien
caagctctgaatgtctagaccagga

SEQ ID NO: 1452079 - DNA, 25 bp, Homo sapien
caggtctattttaggcatggcaggt

SEQ ID NO: 1452080 - DNA, 25 bp, Homo sapien
catttcacctgtgcagtggattcag

SEQ ID NO: 1452081 - DNA, 25 bp, Homo sapien
tttagttggacgtagaagcagctct

SEQ ID NO: 1452082 - DNA, 25 bp, Homo sapien
tattacaactctatttaattaatgt

SEQ ID NO: 1452083 - DNA, 25 bp, Homo sapien
ttattacaactctatttaattaatg

SEQ ID NO: 1452084 - DNA, 25 bp, Homo sapien
ttcttcccaatagcaaggctgtgca

SEQ ID NO: 1452085 - DNA, 25 bp, Homo sapien
taagtgctattgcagagccgtggcc

SEQ ID NO: 1452086 - DNA, 25 bp, Homo sapien
tgtgttgtacagctagaaaaggcct

SEQ ID NO: 1452087 - DNA, 25 bp, Homo sapien
tgtgcatctagcctcaagctctggc

SEQ ID NO: 1452088 - DNA, 25 bp, Homo sapien
ctgaggtcagggcacttatgtgcat

SEQ ID NO: 1452089 - DNA, 25 bp, Homo sapien
cttatgtgcatcaagtgatggagac

SEQ ID NO: 1452090 - DNA, 25 bp, Homo sapien
acttatgtgcatcaagtgatggaga

SEQ ID NO: 1452091 - DNA, 25 bp, Homo sapien
gaggtcagggcacttatgtgcatca

SEQ ID NO: 1452092 - DNA, 25 bp, Homo sapien
caaccctgtggtcaaagacatggaa

SEQ ID NO: 1452093 - DNA, 25 bp, Homo sapien
cacagtctgttcgacggcttggaaa

SEQ ID NO: 1452094 - DNA, 25 bp, Homo sapien
gatgccatgtgatctagagcctggg

SEQ ID NO: 1452095 - DNA, 25 bp, Homo sapien
gatgcccgagacaatagctatgcct

SEQ ID NO: 1452096 - DNA, 25 bp, Homo sapien
tgtcctccatcatggcggcaggctg

SEQ ID NO: 1452097 - DNA, 25 bp, Homo sapien
gctggtggtagaggctcacgtattc

SEQ ID NO: 1452098 - DNA, 25 bp, Homo sapien
ggctcacgtattcacagctggtctt

SEQ ID NO: 1452099 - DNA, 25 bp, Homo sapien
catggagccagggagattcagacac

SEQ ID NO: 1452100 - DNA, 25 bp, Homo sapien
cgggccgcggctgccaatcagggca

SEQ ID NO: 1452101 - DNA, 25 bp, Homo sapien
agctgctgggaaacccgctctccgg

SEQ ID NO: 1452102 - DNA, 25 bp, Homo sapien
tgggaaacccgctctccggatcgcg

SEQ ID NO: 1452103 - DNA, 25 bp, Homo sapien
caatcagggcaggagcggagcttac

SEQ ID NO: 1452104 - DNA, 25 bp, Homo sapien
gcagcggggcggggggcaacggcgc

SEQ ID NO: 1452105 - DNA, 25 bp, Homo sapien
ctgcagcggggcggggggcaacggc

SEQ ID NO: 1452106 - DNA, 25 bp, Homo sapien
tgcagcggggcggggggcaacggcg

SEQ ID NO: 1452107 - DNA, 25 bp, Homo sapien
cagcggggcggggggcaacggcgct

SEQ ID NO: 1452108 - DNA, 25 bp, Homo sapien
gcaggcgctgtagatgttgttttgg

SEQ ID NO: 1452109 - DNA, 25 bp, Homo sapien
tttgggagcgcggtcgcggcgaccc

SEQ ID NO: 1452110 - DNA, 25 bp, Homo sapien
tgcagcgtccgctccacgagcgcgc

SEQ ID NO: 1452111 - DNA, 25 bp, Homo sapien
catcctcacggccagtcggcgggcc

SEQ ID NO: 1452112 - DNA, 25 bp, Homo sapien
ggatggtcgggatcaggatgtgaaa

SEQ ID NO: 1452113 - DNA, 25 bp, Homo sapien
atggtcgggatcaggatgtgaaatc

SEQ ID NO: 1452114 - DNA, 25 bp, Homo sapien
tggtcgggatcaggatgtgaaatcc

SEQ ID NO: 1452115 - DNA, 25 bp, Homo sapien
aggatggtcgggatcaggatgtgaa

SEQ ID NO: 1452116 - DNA, 25 bp, Homo sapien
cccagactgtgagccatagtccagt

SEQ ID NO: 1452117 - DNA, 25 bp, Homo sapien
ccctcccagactgtgagccatagtc

SEQ ID NO: 1452118 - DNA, 25 bp, Homo sapien
ctcccagactgtgagccatagtcca

SEQ ID NO: 1452119 - DNA, 25 bp, Homo sapien
agactgtgagccatagtccagtgct

SEQ ID NO: 1452120 - DNA, 25 bp, Homo sapien
caaagccaaggagggtgtctaataa

SEQ ID NO: 1452121 - DNA, 25 bp, Homo sapien
tcacagtggcctagagacaaagcca

SEQ ID NO: 1452122 - DNA, 25 bp, Homo sapien
actctagatcctggacagtggtctc

SEQ ID NO: 1452123 - DNA, 25 bp, Homo sapien
ttctttctacaggatcaatgctggg

SEQ ID NO: 1452124 - DNA, 25 bp, Homo sapien
gcccctccagagctgagatttttga

SEQ ID NO: 1452125 - DNA, 25 bp, Homo sapien
ctctgcctgtgcagcctggtgtggt

SEQ ID NO: 1452126 - DNA, 25 bp, Homo sapien
tggtggttgtagctgggcgtctggg

SEQ ID NO: 1452127 - DNA, 25 bp, Homo sapien
gcgtctggggcttgagcagcccctc

SEQ ID NO: 1452128 - DNA, 25 bp, Homo sapien
gggcttgtcacctgctactgaagat

SEQ ID NO: 1452129 - DNA, 25 bp, Homo sapien
aagatgctctggacactcgagggcg

SEQ ID NO: 1452130 - DNA, 25 bp, Homo sapien
cactcgagggcggtgggtgatttgg

SEQ ID NO: 1452131 - DNA, 25 bp, Homo sapien
tggtgaactggagggaccttgcccc

SEQ ID NO: 1452132 - DNA, 25 bp, Homo sapien
tagttgcaaaatagagttaaaatca

SEQ ID NO: 1452133 - DNA, 25 bp, Homo sapien
tcttttagttgcaaaatagagttaa

SEQ ID NO: 1452134 - DNA, 25 bp, Homo sapien
ttaatcttttagttgcaaaatagag

SEQ ID NO: 1452135 - DNA, 25 bp, Homo sapien
gcaaaatagagttaaaatcattaga

SEQ ID NO: 1452136 - DNA, 25 bp, Homo sapien
tggaagaactggcatatgcaggcat

SEQ ID NO: 1452137 - DNA, 25 bp, Homo sapien
gaatttggaagaactggcatatgca

SEQ ID NO: 1452138 - DNA, 25 bp, Homo sapien
tttggaagaactggcatatgcaggc

SEQ ID NO: 1452139 - DNA, 25 bp, Homo sapien
ttggaagaactggcatatgcaggca

SEQ ID NO: 1452140 - DNA, 25 bp, Homo sapien
gagtctcaggcattggctgctcttc

SEQ ID NO: 1452141 - DNA, 25 bp, Homo sapien
cattggctgctcttcccatgatggc

SEQ ID NO: 1452142 - DNA, 25 bp, Homo sapien
gatgaaaccattttggagtctcagg

SEQ ID NO: 1452143 - DNA, 25 bp, Homo sapien
ctggaacaaatagggcagatgaaac

SEQ ID NO: 1452144 - DNA, 25 bp, Homo sapien
tagtctgagcctccaatcagcggag

SEQ ID NO: 1452145 - DNA, 25 bp, Homo sapien
caacagtgtaagagtctaggagact

SEQ ID NO: 1452146 - DNA, 25 bp, Homo sapien
tctcatgggacaattacgttggata

SEQ ID NO: 1452147 - DNA, 25 bp, Homo sapien
cattatgtggcttatatggcaacag

SEQ ID NO: 1452148 - DNA, 25 bp, Homo sapien
gggtattgcttcagagtaactcggc

SEQ ID NO: 1452149 - DNA, 25 bp, Homo sapien
gcaggcatagactccgctgtcactt

SEQ ID NO: 1452150 - DNA, 25 bp, Homo sapien
gaacagattcttgcgtgggtattgc

SEQ ID NO: 1452151 - DNA, 25 bp, Homo sapien
gataccacggtaccacatgttccag

SEQ ID NO: 1452152 - DNA, 25 bp, Homo sapien
ctcccggcacagatatatcctcaca

SEQ ID NO: 1452153 - DNA, 25 bp, Homo sapien
tgatggtaactgatccgcccagctc

SEQ ID NO: 1452154 - DNA, 25 bp, Homo sapien
cacttgatggtaactgatccgccca

SEQ ID NO: 1452155 - DNA, 25 bp, Homo sapien
gggcacttgatggtaactgatccgc

SEQ ID NO: 1452156 - DNA, 25 bp, Homo sapien
ccttccttcctctctcttttctctt

SEQ ID NO: 1452157 - DNA, 25 bp, Homo sapien
ctggagagcagtggtatgatcatga

SEQ ID NO: 1452158 - DNA, 25 bp, Homo sapien
tttttttaataggatctcactctgt

SEQ ID NO: 1452159 - DNA, 25 bp, Homo sapien
tacgcaggctggagagcagtggtat

SEQ ID NO: 1452160 - DNA, 25 bp, Homo sapien
aggagcattaccatggagtgaggaa

SEQ ID NO: 1452161 - DNA, 25 bp, Homo sapien
tgtcctgccctaggtgttggttcac

SEQ ID NO: 1452162 - DNA, 25 bp, Homo sapien
aggcatccaacacctcacatggcct

SEQ ID NO: 1452163 - DNA, 25 bp, Homo sapien
ctgaaacaggagagtgtctggagtg

SEQ ID NO: 1452164 - DNA, 25 bp, Homo sapien
aggaagtaaagtggccaaagccaga

SEQ ID NO: 1452165 - DNA, 25 bp, Homo sapien
ggaagtaaagtggccaaagccagaa

SEQ ID NO: 1452166 - DNA, 25 bp, Homo sapien
gtcccttctagagtgcaaggtccat

SEQ ID NO: 1452167 - DNA, 25 bp, Homo sapien
tgtcccttctagagtgcaaggtcca

SEQ ID NO: 1452168 - DNA, 25 bp, Homo sapien
tggagacacgctgcttactcaggaa

SEQ ID NO: 1452169 - DNA, 25 bp, Homo sapien
atctggaactggaaagagatttcta

SEQ ID NO: 1452170 - DNA, 25 bp, Homo sapien
tagcccccacgaggaacaaagcttg

SEQ ID NO: 1452171 - DNA, 25 bp, Homo sapien
gaacaaagcttgacgatgaggaaat

SEQ ID NO: 1452172 - DNA, 25 bp, Homo sapien
ggtgccctggcactcttactcccag

SEQ ID NO: 1452173 - DNA, 25 bp, Homo sapien
tgactcacagggctaccatggtgcc

SEQ ID NO: 1452174 - DNA, 25 bp, Homo sapien
gtctaagctcgatttctcctttctg

SEQ ID NO: 1452175 - DNA, 25 bp, Homo sapien
ttttttctcgtctaagctcgatttc

SEQ ID NO: 1452176 - DNA, 25 bp, Homo sapien
cagcctgcgatgtggtcagagtgca

SEQ ID NO: 1452177 - DNA, 25 bp, Homo sapien
tacagatgggctaagaagaacgttt

SEQ ID NO: 1452178 - DNA, 25 bp, Homo sapien
gcaagtgttacaagggactcagcac

SEQ ID NO: 1452179 - DNA, 25 bp, Homo sapien
tgacctccgcatggccgggttacaa

SEQ ID NO: 1452180 - DNA, 25 bp, Homo sapien
ggaacgatttgctgtcattccagaa

SEQ ID NO: 1452181 - DNA, 25 bp, Homo sapien
tgctgtcattccagaaggtatgcat

SEQ ID NO: 1452182 - DNA, 25 bp, Homo sapien
cattttgatcctcctggaacgattt

SEQ ID NO: 1452183 - DNA, 25 bp, Homo sapien
tcctggaacgatttgctgtcattcc

SEQ ID NO: 1452184 - DNA, 25 bp, Homo sapien
tgagggccccaggatcgacatgatt

SEQ ID NO: 1452185 - DNA, 25 bp, Homo sapien
tcttgtagagagatccctggcccag

SEQ ID NO: 1452186 - DNA, 25 bp, Homo sapien
cactgagggcctttgagaaaaacgc

SEQ ID NO: 1452187 - DNA, 25 bp, Homo sapien
taaatacgccaagaagagctgtggc

SEQ ID NO: 1452188 - DNA, 25 bp, Homo sapien
gaagtctttgtaggccatctcggct

SEQ ID NO: 1452189 - DNA, 25 bp, Homo sapien
cctcggcggccacggtgctggactg

SEQ ID NO: 1452190 - DNA, 25 bp, Homo sapien
aggaagtctttgtaggccatctcgg

SEQ ID NO: 1452191 - DNA, 25 bp, Homo sapien
gcggccacggtgctggactggagca

SEQ ID NO: 1452192 - DNA, 25 bp, Homo sapien
tgtcatgtagtggggcttccttctt

SEQ ID NO: 1452193 - DNA, 25 bp, Homo sapien
tttgtcatgtagtggggcttccttc

SEQ ID NO: 1452194 - DNA, 25 bp, Homo sapien
tctttgtcatgtagtggggcttcct

SEQ ID NO: 1452195 - DNA, 25 bp, Homo sapien
gtggggcttccttcttcctcctcac

SEQ ID NO: 1452196 - DNA, 25 bp, Homo sapien
gggttctttggtctctgtggtgctc

SEQ ID NO: 1452197 - DNA, 25 bp, Homo sapien
tgccttcttgggttctttggtctct

SEQ ID NO: 1452198 - DNA, 25 bp, Homo sapien
tggtgctctcagtggtggcaacaaa

SEQ ID NO: 1452199 - DNA, 25 bp, Homo sapien
ctgtggtgctctcagtggtggcaac

SEQ ID NO: 1452200 - DNA, 25 bp, Homo sapien
tccctggagttctcgaagtctgaca

SEQ ID NO: 1452201 - DNA, 25 bp, Homo sapien
tctcctgagtgatcgaagaggctcc

SEQ ID NO: 1452202 - DNA, 25 bp, Homo sapien
tttcctccgagggatgtctcctgag

SEQ ID NO: 1452203 - DNA, 25 bp, Homo sapien
gctcccatgttgtcattggctccaa

SEQ ID NO: 1452204 - DNA, 25 bp, Homo sapien
ggagaccagcgctctggagcttcca

SEQ ID NO: 1452205 - DNA, 25 bp, Homo sapien
cagggtggagaccagcgctctggag

SEQ ID NO: 1452206 - DNA, 25 bp, Homo sapien
gacgttcttcctgtgccgggctctg

SEQ ID NO: 1452207 - DNA, 25 bp, Homo sapien
cgacgttcttcctgtgccgggctct

SEQ ID NO: 1452208 - DNA, 25 bp, Homo sapien
ttcgctaggctgacatcgcgggacc

SEQ ID NO: 1452209 - DNA, 25 bp, Homo sapien
caatctcccgaaaaccagagtctag

SEQ ID NO: 1452210 - DNA, 25 bp, Homo sapien
tttcctctgcaaaaagcctgggatc

SEQ ID NO: 1452211 - DNA, 25 bp, Homo sapien
tcatcaggagcagcgtctgccttcg

SEQ ID NO: 1452212 - DNA, 25 bp, Homo sapien
gctcttactcctcgaggtgaaggag

SEQ ID NO: 1452213 - DNA, 25 bp, Homo sapien
tatgctcttactcctcgaggtgaag

SEQ ID NO: 1452214 - DNA, 25 bp, Homo sapien
tctatgctcttactcctcgaggtga

SEQ ID NO: 1452215 - DNA, 25 bp, Homo sapien
tctctatgctcttactcctcgaggt

SEQ ID NO: 1452216 - DNA, 25 bp, Homo sapien
gcaccagtatttctcgtacgaggag

SEQ ID NO: 1452217 - DNA, 25 bp, Homo sapien
agtctctccatagaagtggccctgc

SEQ ID NO: 1452218 - DNA, 25 bp, Homo sapien
gacaagccggctgttctcgtcacag

SEQ ID NO: 1452219 - DNA, 25 bp, Homo sapien
tcttcaactgccacatagacggctg

SEQ ID NO: 1452220 - DNA, 25 bp, Homo sapien
tcccggctggtgagctggttgagga

SEQ ID NO: 1452221 - DNA, 25 bp, Homo sapien
gtcagacaccagtagaagccggcgt

SEQ ID NO: 1452222 - DNA, 25 bp, Homo sapien
tgatctccacggtggtcctccagag

SEQ ID NO: 1452223 - DNA, 25 bp, Homo sapien
gagagtatcgccgttggtcagacac

SEQ ID NO: 1452224 - DNA, 25 bp, Homo sapien
tggagtagggctgagtgggccagat

SEQ ID NO: 1452225 - DNA, 25 bp, Homo sapien
agtagggctgagtgggccagatggt

SEQ ID NO: 1452226 - DNA, 25 bp, Homo sapien
gctgagtgggccagatggtgctgaa

SEQ ID NO: 1452227 - DNA, 25 bp, Homo sapien
gtgggccagatggtgctgaaattca

SEQ ID NO: 1452228 - DNA, 25 bp, Homo sapien
tcctgcagctgaccatccgaatggg

SEQ ID NO: 1452229 - DNA, 25 bp, Homo sapien
gcacagaaatttggccacgtttgcc

SEQ ID NO: 1452230 - DNA, 25 bp, Homo sapien
tcattgacgaagagttgccaggcct

SEQ ID NO: 1452231 - DNA, 25 bp, Homo sapien
tcaggtcttcataaaccagctcggg

SEQ ID NO: 1452232 - DNA, 25 bp, Homo sapien
cttgaaagggcagttgatggtcacc

SEQ ID NO: 1452233 - DNA, 25 bp, Homo sapien
tattggaatcatccccagcctggca

SEQ ID NO: 1452234 - DNA, 25 bp, Homo sapien
tacaggcctatctgcttgtacaagg

SEQ ID NO: 1452235 - DNA, 25 bp, Homo sapien
ctttagcacttggaggtcagcattc

SEQ ID NO: 1452236 - DNA, 25 bp, Homo sapien
tatttgctggagacgtagccctccg

SEQ ID NO: 1452237 - DNA, 25 bp, Homo sapien
gacaggcctcggctattgatgccca

SEQ ID NO: 1452238 - DNA, 25 bp, Homo sapien
gaagttggtgaggttagccctgcct

SEQ ID NO: 1452239 - DNA, 25 bp, Homo sapien
cacaaatgtgccgttctccgggaag

SEQ ID NO: 1452240 - DNA, 25 bp, Homo sapien
aatatgggactcttcgtggagatgg

SEQ ID NO: 1452241 - DNA, 25 bp, Homo sapien
actattcacctcctcgggaccaaat

SEQ ID NO: 1452242 - DNA, 25 bp, Homo sapien
tcctcgggaccaaatatgggactct

SEQ ID NO: 1452243 - DNA, 25 bp, Homo sapien
gggaccaaatatgggactcttcgtg

SEQ ID NO: 1452244 - DNA, 25 bp, Homo sapien
tgtgggaacagaagagagaggcttt

SEQ ID NO: 1452245 - DNA, 25 bp, Homo sapien
ctgtgggaacagaagagagaggctt

SEQ ID NO: 1452246 - DNA, 25 bp, Homo sapien
gaacagaagagagaggctttctgag

SEQ ID NO: 1452247 - DNA, 25 bp, Homo sapien
cagaagagagaggctttctgaggcc

SEQ ID NO: 1452248 - DNA, 25 bp, Homo sapien
caggcaggtgagcacgaagagcagc

SEQ ID NO: 1452249 - DNA, 25 bp, Homo sapien
ggcaggtgagcacgaagagcagcat

SEQ ID NO: 1452250 - DNA, 25 bp, Homo sapien
gcaggcaggtgagcacgaagagcag

SEQ ID NO: 1452251 - DNA, 25 bp, Homo sapien
ctcaggccgacttctcctgtgcaat

SEQ ID NO: 1452252 - DNA, 25 bp, Homo sapien
accactcaggccgacttctcctgtg

SEQ ID NO: 1452253 - DNA, 25 bp, Homo sapien
ccgcaccactcaggccgacttctcc

SEQ ID NO: 1452254 - DNA, 25 bp, Homo sapien
tcccgagcgccgcaccactcaggcc

SEQ ID NO: 1452255 - DNA, 25 bp, Homo sapien
taaccatgggtataaccaggcatgt

SEQ ID NO: 1452256 - DNA, 25 bp, Homo sapien
tccactccaccatactgtgtcgatg

SEQ ID NO: 1452257 - DNA, 25 bp, Homo sapien
gcatgttgacgccaaagcctctttc

SEQ ID NO: 1452258 - DNA, 25 bp, Homo sapien
catactgtgtcgatgccagtgacat

SEQ ID NO: 1452259 - DNA, 25 bp, Homo sapien
aaagccacagaggtctagcggcact

SEQ ID NO: 1452260 - DNA, 25 bp, Homo sapien
tggctgtaccaaaacctcatcgttc

SEQ ID NO: 1452261 - DNA, 25 bp, Homo sapien
tagcggcactaggagataagcagag

SEQ ID NO: 1452262 - DNA, 25 bp, Homo sapien
gaatgagacgaaggtgtgaaagccc

SEQ ID NO: 1452263 - DNA, 25 bp, Homo sapien
cctgctggccagttggtaacccctg

SEQ ID NO: 1452264 - DNA, 25 bp, Homo sapien
gcactggacgctgctgccaaaactg

SEQ ID NO: 1452265 - DNA, 25 bp, Homo sapien
ttctctcccgttgatctgacttcag

SEQ ID NO: 1452266 - DNA, 25 bp, Homo sapien
tgcctctctaggagctactggcagg

SEQ ID NO: 1452267 - DNA, 25 bp, Homo sapien
tggtctcaagcgcctggcatcaagt

SEQ ID NO: 1452268 - DNA, 25 bp, Homo sapien
gtctcaagcgcctggcatcaagtga

SEQ ID NO: 1452269 - DNA, 25 bp, Homo sapien
cctcctgcctcacgctcccacagtg

SEQ ID NO: 1452270 - DNA, 25 bp, Homo sapien
ggctggtctcaagcgcctggcatca

SEQ ID NO: 1452271 - DNA, 25 bp, Homo sapien
accacatgcctgtagaggtgcagca

SEQ ID NO: 1452272 - DNA, 25 bp, Homo sapien
gggcattggcactggtgatcaccac

SEQ ID NO: 1452273 - DNA, 25 bp, Homo sapien
tcagctggccccttagagagtaggc

SEQ ID NO: 1452274 - DNA, 25 bp, Homo sapien
gcaatgcatccaggaggcaaacagt

SEQ ID NO: 1452275 - DNA, 25 bp, Homo sapien
aaaccaagctgtgtcactgtatgaa

SEQ ID NO: 1452276 - DNA, 25 bp, Homo sapien
aaaaatgaagagcttggtggtgctg

SEQ ID NO: 1452277 - DNA, 25 bp, Homo sapien
gctggaccctgaatgcagggtttgt

SEQ ID NO: 1452278 - DNA, 25 bp, Homo sapien
agctgtgtcactgtatgaaaaatga

SEQ ID NO: 1452279 - DNA, 25 bp, Homo sapien
gggaatgatcatgaaaccttccatg

SEQ ID NO: 1452280 - DNA, 25 bp, Homo sapien
tcctgggaatgatcatgaaaccttc

SEQ ID NO: 1452281 - DNA, 25 bp, Homo sapien
gaatgatcatgaaaccttccatgca

SEQ ID NO: 1452282 - DNA, 25 bp, Homo sapien
gatcatgaaaccttccatgcacaag

SEQ ID NO: 1452283 - DNA, 25 bp, Homo sapien
ggcacggcgatccagaacatagctg

SEQ ID NO: 1452284 - DNA, 25 bp, Homo sapien
tagatcataaatccaagcaaggggc

SEQ ID NO: 1452285 - DNA, 25 bp, Homo sapien
ttgctgaagtacacaccttgcagag

SEQ ID NO: 1452286 - DNA, 25 bp, Homo sapien
tgctgaagtacacaccttgcagagc

SEQ ID NO: 1452287 - DNA, 25 bp, Homo sapien
tgctataactaactgggttaactgg

SEQ ID NO: 1452288 - DNA, 25 bp, Homo sapien
gagttctctttgctagtcctcacag

SEQ ID NO: 1452289 - DNA, 25 bp, Homo sapien
ctgaaattctgcgattccatgtggt

SEQ ID NO: 1452290 - DNA, 25 bp, Homo sapien
tataagccataaaaccggcatctcc

SEQ ID NO: 1452291 - DNA, 25 bp, Homo sapien
ggtcctgaaggcctttgatcttggt

SEQ ID NO: 1452292 - DNA, 25 bp, Homo sapien
tttcttccatgggtggagcaccggc

SEQ ID NO: 1452293 - DNA, 25 bp, Homo sapien
tccttctcccatggtaactgagcag

SEQ ID NO: 1452294 - DNA, 25 bp, Homo sapien
cctttggacgtggataatgcttgac

SEQ ID NO: 1452295 - DNA, 25 bp, Homo sapien
tgcttgggggttcacttccagaaaa

SEQ ID NO: 1452296 - DNA, 25 bp, Homo sapien
tgtcatctgaattaaggtgaccctt

SEQ ID NO: 1452297 - DNA, 25 bp, Homo sapien
cttgggggttcacttccagaaaatg

SEQ ID NO: 1452298 - DNA, 25 bp, Homo sapien
tgtgtcatctgaattaaggtgaccc

SEQ ID NO: 1452299 - DNA, 25 bp, Homo sapien
ctgggtaaggacagcactgactttg

SEQ ID NO: 1452300 - DNA, 25 bp, Homo sapien
agagcagactgtgagggttctgggt

SEQ ID NO: 1452301 - DNA, 25 bp, Homo sapien
cagagcagactgtgagggttctggg

SEQ ID NO: 1452302 - DNA, 25 bp, Homo sapien
agtacttaaacctgggcatgttgct

SEQ ID NO: 1452303 - DNA, 25 bp, Homo sapien
agagtacttaaacctgggcatgttg

SEQ ID NO: 1452304 - DNA, 25 bp, Homo sapien
gagtacttaaacctgggcatgttgc

SEQ ID NO: 1452305 - DNA, 25 bp, Homo sapien
aagagtacttaaacctgggcatgtt

SEQ ID NO: 1452306 - DNA, 25 bp, Homo sapien
ttcctttgcaatagaaccagagcca

SEQ ID NO: 1452307 - DNA, 25 bp, Homo sapien
gagccataagcataaacagggccag

SEQ ID NO: 1452308 - DNA, 25 bp, Homo sapien
gaaccagagccataagcataaacag

SEQ ID NO: 1452309 - DNA, 25 bp, Homo sapien
gagcttcctttgcaatagaaccaga

SEQ ID NO: 1452310 - DNA, 25 bp, Homo sapien
gaaagtcctaatgaaggttccagcc

SEQ ID NO: 1452311 - DNA, 25 bp, Homo sapien
tcagggagcgttctcacagcaaggc

SEQ ID NO: 1452312 - DNA, 25 bp, Homo sapien
gactaggtgggagcaagcgactcca

SEQ ID NO: 1452313 - DNA, 25 bp, Homo sapien
tcccatggctggttagtgtcagagc

SEQ ID NO: 1452314 - DNA, 25 bp, Homo sapien
tctccagtggcagcatctaggtccc

SEQ ID NO: 1452315 - DNA, 25 bp, Homo sapien
cccagggtcctactgccggggtctg

SEQ ID NO: 1452316 - DNA, 25 bp, Homo sapien
agtggcagcatctaggtcccctgca

SEQ ID NO: 1452317 - DNA, 25 bp, Homo sapien
tggcagcatctaggtcccctgcagc

SEQ ID NO: 1452318 - DNA, 25 bp, Homo sapien
tcagccttggtagttgtcatctccc

SEQ ID NO: 1452319 - DNA, 25 bp, Homo sapien
gatttcccaggccaaagtttctgag

SEQ ID NO: 1452320 - DNA, 25 bp, Homo sapien
tctctggaatcggagcaggtgcttt

SEQ ID NO: 1452321 - DNA, 25 bp, Homo sapien
ggaaccctgagattgttgcttagaa

SEQ ID NO: 1452322 - DNA, 25 bp, Homo sapien
catgctgtcccctgtcctaaggtct

SEQ ID NO: 1452323 - DNA, 25 bp, Homo sapien
tgtcccctgtcctaaggtctgggtg

SEQ ID NO: 1452324 - DNA, 25 bp, Homo sapien
taggatctcatggtgagctccccag

SEQ ID NO: 1452325 - DNA, 25 bp, Homo sapien
ggccactggagacgctgttccatag

SEQ ID NO: 1452326 - DNA, 25 bp, Homo sapien
agggccacacggtcacgatagcgat

SEQ ID NO: 1452327 - DNA, 25 bp, Homo sapien
ctctgtggaaagtctgtgagggcca

SEQ ID NO: 1452328 - DNA, 25 bp, Homo sapien
gccgcagaggtagcatccgatgtca

SEQ ID NO: 1452329 - DNA, 25 bp, Homo sapien
taatggcactggatggtgacagctc

SEQ ID NO: 1452330 - DNA, 25 bp, Homo sapien
cccagatttcaggaattcccctgat

SEQ ID NO: 1452331 - DNA, 25 bp, Homo sapien
aaagtgtgcataccccagatttcag

SEQ ID NO: 1452332 - DNA, 25 bp, Homo sapien
gccctgataaagtgtgcatacccca

SEQ ID NO: 1452333 - DNA, 25 bp, Homo sapien
gacaatagtgatgatgccctgataa

SEQ ID NO: 1452334 - DNA, 25 bp, Homo sapien
tgttcccatggcccggagatgggtc

SEQ ID NO: 1452335 - DNA, 25 bp, Homo sapien
cgaggaaggcctgagtgttcccatg

SEQ ID NO: 1452336 - DNA, 25 bp, Homo sapien
aggagctctcctcccgccagcagag

SEQ ID NO: 1452337 - DNA, 25 bp, Homo sapien
agcagaggggcgaggaaggcctgag

SEQ ID NO: 1452338 - DNA, 25 bp, Homo sapien
tcccacagccatctcggatggggtc

SEQ ID NO: 1452339 - DNA, 25 bp, Homo sapien
cagccatctcggatggggtcttttt

SEQ ID NO: 1452340 - DNA, 25 bp, Homo sapien
ctggaggggagagagccctcccaca

SEQ ID NO: 1452341 - DNA, 25 bp, Homo sapien
ccacagccatctcggatggggtctt

SEQ ID NO: 1452342 - DNA, 25 bp, Homo sapien
catcagggggccatccatgtgtcca

SEQ ID NO: 1452343 - DNA, 25 bp, Homo sapien
aggaaggagatgggtcatcaggggg

SEQ ID NO: 1452344 - DNA, 25 bp, Homo sapien
aaggaaggagatgggtcatcagggg

SEQ ID NO: 1452345 - DNA, 25 bp, Homo sapien
tgtagcaggcacagtatgaggaaga

SEQ ID NO: 1452346 - DNA, 25 bp, Homo sapien
caggcacagtatgaggaagaggggc

SEQ ID NO: 1452347 - DNA, 25 bp, Homo sapien
ggcacagtatgaggaagaggggcat

SEQ ID NO: 1452348 - DNA, 25 bp, Homo sapien
cttgtagcaggcacagtatgaggaa

SEQ ID NO: 1452349 - DNA, 25 bp, Homo sapien
ttgtggtaaagtgccagcaatgagc

SEQ ID NO: 1452350 - DNA, 25 bp, Homo sapien
agattgtggtaaagtgccagcaatg

SEQ ID NO: 1452351 - DNA, 25 bp, Homo sapien
gagcctggagtagtccacttctctt

SEQ ID NO: 1452352 - DNA, 25 bp, Homo sapien
cagcaatgagcctggagtagtccac

SEQ ID NO: 1452353 - DNA, 25 bp, Homo sapien
tgttctccaggcttcactgtggcct

SEQ ID NO: 1452354 - DNA, 25 bp, Homo sapien
ttgttctccaggcttcactgtggcc

SEQ ID NO: 1452355 - DNA, 25 bp, Homo sapien
ggtgtttggacgacttctagttgct

SEQ ID NO: 1452356 - DNA, 25 bp, Homo sapien
tttggacgacttctagttgctctcc

SEQ ID NO: 1452357 - DNA, 25 bp, Homo sapien
cgacttctagttgctctcctttaaa

SEQ ID NO: 1452358 - DNA, 25 bp, Homo sapien
gatgcaggtgtttggacgacttcta

SEQ ID NO: 1452359 - DNA, 25 bp, Homo sapien
cggaaggtcggggtgcaaggcgtag

SEQ ID NO: 1452360 - DNA, 25 bp, Homo sapien
ggtcggggtgcaaggcgtagctctg

SEQ ID NO: 1452361 - DNA, 25 bp, Homo sapien
cagctggagctagcaacggaaggtc

SEQ ID NO: 1452362 - DNA, 25 bp, Homo sapien
caaggtggtattttggaaagcagct

SEQ ID NO: 1452363 - DNA, 25 bp, Homo sapien
gaggaagccagtcctaatcccttgt

SEQ ID NO: 1452364 - DNA, 25 bp, Homo sapien
tgaagaacttttccaggagtggtaa

SEQ ID NO: 1452365 - DNA, 25 bp, Homo sapien
tggtaacagtagcttcaaaaaagaa

SEQ ID NO: 1452366 - DNA, 25 bp, Homo sapien
aaaacactgatccatatccttcctc

SEQ ID NO: 1452367 - DNA, 25 bp, Homo sapien
gggtgccggaaaactctagattgct

SEQ ID NO: 1452368 - DNA, 25 bp, Homo sapien
caatatgctgttgtgtgtggaccct

SEQ ID NO: 1452369 - DNA, 25 bp, Homo sapien
gcatacacgcgggtccttgccattg

SEQ ID NO: 1452370 - DNA, 25 bp, Homo sapien
cattgcctctggtgacaagagctcc

SEQ ID NO: 1452371 - DNA, 25 bp, Homo sapien
gagtacatactcagttgcagcaaaa

SEQ ID NO: 1452372 - DNA, 25 bp, Homo sapien
tcaagccccgttttgactagtggtc

SEQ ID NO: 1452373 - DNA, 25 bp, Homo sapien
ttgtagcaagtacgaatcttagagt

SEQ ID NO: 1452374 - DNA, 25 bp, Homo sapien
cccggtgtgtgtcctgttatgctga

SEQ ID NO: 1452375 - DNA, 25 bp, Homo sapien
ttgaacccaggcctagaggtgtgag

SEQ ID NO: 1452376 - DNA, 25 bp, Homo sapien
tcatcccatcaccactgagctctcc

SEQ ID NO: 1452377 - DNA, 25 bp, Homo sapien
ccaggcctagaggtgtgagtccaga

SEQ ID NO: 1452378 - DNA, 25 bp, Homo sapien
gcctagaggtgtgagtccagatctc

SEQ ID NO: 1452379 - DNA, 25 bp, Homo sapien
catccgtacggaggtggcttcatct

SEQ ID NO: 1452380 - DNA, 25 bp, Homo sapien
ctttagccatccgtacggaggtggc

SEQ ID NO: 1452381 - DNA, 25 bp, Homo sapien
gccctctttagccatccgtacggag

SEQ ID NO: 1452382 - DNA, 25 bp, Homo sapien
tagccatccgtacggaggtggcttc

SEQ ID NO: 1452383 - DNA, 25 bp, Homo sapien
acttggccggttgtgggagtcctca

SEQ ID NO: 1452384 - DNA, 25 bp, Homo sapien
cacaggtgtggcaattcagaagagc

SEQ ID NO: 1452385 - DNA, 25 bp, Homo sapien
tatgagcaaacgtacacagaaaccg

SEQ ID NO: 1452386 - DNA, 25 bp, Homo sapien
ccactttcagggaggcggatgtcct

SEQ ID NO: 1452387 - DNA, 25 bp, Homo sapien
ggctttgatggtgctgcgtccatca

SEQ ID NO: 1452388 - DNA, 25 bp, Homo sapien
gccttaaaaggcacctttccagcaa

SEQ ID NO: 1452389 - DNA, 25 bp, Homo sapien
gctgcgtccatcaggacacagtcca

SEQ ID NO: 1452390 - DNA, 25 bp, Homo sapien
attctcagcagccttaaaaggcacc

SEQ ID NO: 1452391 - DNA, 25 bp, Homo sapien
gcagttcacaaccataagtaagatt

SEQ ID NO: 1452392 - DNA, 25 bp, Homo sapien
tttcggcatttgctcaagctgcaca

SEQ ID NO: 1452393 - DNA, 25 bp, Homo sapien
cacaacttggtcacggaatttgagg

SEQ ID NO: 1452394 - DNA, 25 bp, Homo sapien
caggagtcatgtctggccatgtctc

SEQ ID NO: 1452395 - DNA, 25 bp, Homo sapien
ttccctaaatggcaggctgacccgg

SEQ ID NO: 1452396 - DNA, 25 bp, Homo sapien
tgttctgctatcaatcaaccgagag

SEQ ID NO: 1452397 - DNA, 25 bp, Homo sapien
cactttgagatcttgaagggcctta

SEQ ID NO: 1452398 - DNA, 25 bp, Homo sapien
tacaagagcactggctaaggagagg

SEQ ID NO: 1452399 - DNA, 25 bp, Homo sapien
cctcttgtggagatcaccttcagaa

SEQ ID NO: 1452400 - DNA, 25 bp, Homo sapien
ggctggactctacccaatgtaagaa

SEQ ID NO: 1452401 - DNA, 25 bp, Homo sapien
tgggaactcaatggcacaacactga

SEQ ID NO: 1452402 - DNA, 25 bp, Homo sapien
caggacagggtctgtactggtcgca

SEQ ID NO: 1452403 - DNA, 25 bp, Homo sapien
gatcttgtccaagaaggagcccttt

SEQ ID NO: 1452404 - DNA, 25 bp, Homo sapien
taggacaggcgcttggagctctgct

SEQ ID NO: 1452405 - DNA, 25 bp, Homo sapien
tgaaaggtagctgctcagtcccacg

SEQ ID NO: 1452406 - DNA, 25 bp, Homo sapien
gaattacgtaagacactgggcgaga

SEQ ID NO: 1452407 - DNA, 25 bp, Homo sapien
tgggcccgtgtctccttgggtctga

SEQ ID NO: 1452408 - DNA, 25 bp, Homo sapien
gtgtctccttgggtctgatggagct

SEQ ID NO: 1452409 - DNA, 25 bp, Homo sapien
cagcagcaggaatagctgctgaggc

SEQ ID NO: 1452410 - DNA, 25 bp, Homo sapien
atgctgggcccgtgtctccttgggt

SEQ ID NO: 1452411 - DNA, 25 bp, Homo sapien
cttctctagagcttctttacgtgct

SEQ ID NO: 1452412 - DNA, 25 bp, Homo sapien
tcatcttgatcctggggtagcccca

SEQ ID NO: 1452413 - DNA, 25 bp, Homo sapien
cttgcagtgaacaggagatcaggcc

SEQ ID NO: 1452414 - DNA, 25 bp, Homo sapien
tctgctcttgcagtgaacaggagat

SEQ ID NO: 1452415 - DNA, 25 bp, Homo sapien
acaatattaggtggcagcttccggg

SEQ ID NO: 1452416 - DNA, 25 bp, Homo sapien
gtggaaactgcttcggctgctcttc

SEQ ID NO: 1452417 - DNA, 25 bp, Homo sapien
tggaaactgcttcggctgctcttca

SEQ ID NO: 1452418 - DNA, 25 bp, Homo sapien
tcttcagaacaatattaggtggcag

SEQ ID NO: 1452419 - DNA, 25 bp, Homo sapien
atgagcaccacgtccaagtcaaggg

SEQ ID NO: 1452420 - DNA, 25 bp, Homo sapien
gctagtcggctgtttgggtcctccc

SEQ ID NO: 1452421 - DNA, 25 bp, Homo sapien
tctccagggttgtgactgctagcct

SEQ ID NO: 1452422 - DNA, 25 bp, Homo sapien
tgcattctgaggcaaccctgcagga

SEQ ID NO: 1452423 - DNA, 25 bp, Homo sapien
cgctgtcagcctccgtgtccagtga

SEQ ID NO: 1452424 - DNA, 25 bp, Homo sapien
gcagtgctcggaaacctctgggagt

SEQ ID NO: 1452425 - DNA, 25 bp, Homo sapien
aggaagagcagacactccttctctt

SEQ ID NO: 1452426 - DNA, 25 bp, Homo sapien
tggctcagactcgtcagtggacagt

SEQ ID NO: 1452427 - DNA, 25 bp, Homo sapien
tagctccaaataagaagtgcaacat

SEQ ID NO: 1452428 - DNA, 25 bp, Homo sapien
cagattagaagcagtcccaagtttc

SEQ ID NO: 1452429 - DNA, 25 bp, Homo sapien
gtgcaacataacaatttgacctgaa

SEQ ID NO: 1452430 - DNA, 25 bp, Homo sapien
tgaagagctggaaacctttccctcc

SEQ ID NO: 1452431 - DNA, 25 bp, Homo sapien
gaaatttgggccaagtctcttcttg

SEQ ID NO: 1452432 - DNA, 25 bp, Homo sapien
agctctaaaaatatcctggagggag

SEQ ID NO: 1452433 - DNA, 25 bp, Homo sapien
gcccactcagatggccaggaaagat

SEQ ID NO: 1452434 - DNA, 25 bp, Homo sapien
gagagggttgcagaataacccttcc

SEQ ID NO: 1452435 - DNA, 25 bp, Homo sapien
tgaagctgacgccaagagtttcttg

SEQ ID NO: 1452436 - DNA, 25 bp, Homo sapien
gctgacgccaagagtttcttgaaga

SEQ ID NO: 1452437 - DNA, 25 bp, Homo sapien
aagcaagccccaaatatagcccctg

SEQ ID NO: 1452438 - DNA, 25 bp, Homo sapien
gacgccaagagtttcttgaagaaaa

SEQ ID NO: 1452439 - DNA, 25 bp, Homo sapien
tgccgacacgggtcacgggttctga

SEQ ID NO: 1452440 - DNA, 25 bp, Homo sapien
gggttctgagccagtccccgctggc

SEQ ID NO: 1452441 - DNA, 25 bp, Homo sapien
cagctgccgacacgggtcacgggtt

SEQ ID NO: 1452442 - DNA, 25 bp, Homo sapien
cacagctgccgacacgggtcacggg

SEQ ID NO: 1452443 - DNA, 25 bp, Homo sapien
cccgaaacaaggtgcagggatggca

SEQ ID NO: 1452444 - DNA, 25 bp, Homo sapien
acccgaaacaaggtgcagggatggc

SEQ ID NO: 1452445 - DNA, 25 bp, Homo sapien
ccgaaacaaggtgcagggatggcaa

SEQ ID NO: 1452446 - DNA, 25 bp, Homo sapien
cacccgaaacaaggtgcagggatgg

SEQ ID NO: 1452447 - DNA, 25 bp, Homo sapien
aggggaagtgaacaatgtcccaagc

SEQ ID NO: 1452448 - DNA, 25 bp, Homo sapien
aagtgaacaatgtcccaagccgggc

SEQ ID NO: 1452449 - DNA, 25 bp, Homo sapien
ggaagtgaacaatgtcccaagccgg

SEQ ID NO: 1452450 - DNA, 25 bp, Homo sapien
gcgaggggaagtgaacaatgtccca

SEQ ID NO: 1452451 - DNA, 25 bp, Homo sapien
ctgctatcacagtcaatatcatcaa

SEQ ID NO: 1452452 - DNA, 25 bp, Homo sapien
tgctatcacagtcaatatcatcaac

SEQ ID NO: 1452453 - DNA, 25 bp, Homo sapien
accgctacgatacccatctttaact

SEQ ID NO: 1452454 - DNA, 25 bp, Homo sapien
aacatcatcacaaccaccgctacga

SEQ ID NO: 1452455 - DNA, 25 bp, Homo sapien
ctgacttacctagataggtaaatgc

SEQ ID NO: 1452456 - DNA, 25 bp, Homo sapien
cctccctacctctcattccagctgt

SEQ ID NO: 1452457 - DNA, 25 bp, Homo sapien
cctcctgacttacctagataggtaa

SEQ ID NO: 1452458 - DNA, 25 bp, Homo sapien
ctcctgacttacctagataggtaaa

SEQ ID NO: 1452459 - DNA, 25 bp, Homo sapien
aacataaacatcacagtcgaagtta

SEQ ID NO: 1452460 - DNA, 25 bp, Homo sapien
aacatcacagtcgaagttacttaca

SEQ ID NO: 1452461 - DNA, 25 bp, Homo sapien
gtcgaagttacttacaagccttgag

SEQ ID NO: 1452462 - DNA, 25 bp, Homo sapien
tcacagtcgaagttacttacaagcc

SEQ ID NO: 1452463 - DNA, 25 bp, Homo sapien
actcatctgttctctccttctccat

SEQ ID NO: 1452464 - DNA, 25 bp, Homo sapien
ctgactcatctgttctctccttctc

SEQ ID NO: 1452465 - DNA, 25 bp, Homo sapien
gactcatctgttctctccttctcca

SEQ ID NO: 1452466 - DNA, 25 bp, Homo sapien
tgactcatctgttctctccttctcc

SEQ ID NO: 1452467 - DNA, 25 bp, Homo sapien
tcatcacatcccacacataagtgca

SEQ ID NO: 1452468 - DNA, 25 bp, Homo sapien
tgagagagtcatcacatcccacaca

SEQ ID NO: 1452469 - DNA, 25 bp, Homo sapien
caaggtttgagagagtcatcacatc

SEQ ID NO: 1452470 - DNA, 25 bp, Homo sapien
cataagtgcaaaaccccaatcatca

SEQ ID NO: 1452471 - DNA, 25 bp, Homo sapien
taggaaggccacctgatttgtcaaa

SEQ ID NO: 1452472 - DNA, 25 bp, Homo sapien
cctagagggccaacatgtaaacttt

SEQ ID NO: 1452473 - DNA, 25 bp, Homo sapien
cagcagtcaagcgtcaagggtacca

SEQ ID NO: 1452474 - DNA, 25 bp, Homo sapien
gacttcatggaataatcaagcggca

SEQ ID NO: 1452475 - DNA, 25 bp, Homo sapien
gctagagatcttaaacagggcacaa

SEQ ID NO: 1452476 - DNA, 25 bp, Homo sapien
cattaaaacacgaggccaacggtct

SEQ ID NO: 1452477 - DNA, 25 bp, Homo sapien
cagagtatcagtgtccaaccggtaa

SEQ ID NO: 1452478 - DNA, 25 bp, Homo sapien
tcaatctcaatcgtatgcccagtgg

SEQ ID NO: 1452479 - DNA, 25 bp, Homo sapien
ctccaaagttggtatggcctgtctc

SEQ ID NO: 1452480 - DNA, 25 bp, Homo sapien
cttctgcttgtccagttaatccttt

SEQ ID NO: 1452481 - DNA, 25 bp, Homo sapien
aagttggtatggcctgtctccttgg

SEQ ID NO: 1452482 - DNA, 25 bp, Homo sapien
caaagttggtatggcctgtctcctt

SEQ ID NO: 1452483 - DNA, 25 bp, Homo sapien
gcatctcagggtgaagcggttgaca

SEQ ID NO: 1452484 - DNA, 25 bp, Homo sapien
tagaagtctggatcgcttgctacaa

SEQ ID NO: 1452485 - DNA, 25 bp, Homo sapien
tacaatttgtgctatgaggcgtctc

SEQ ID NO: 1452486 - DNA, 25 bp, Homo sapien
cacggttctggtaagcacaggcaaa

SEQ ID NO: 1452487 - DNA, 25 bp, Homo sapien
tatgcctgtcaaacgaagtatctac

SEQ ID NO: 1452488 - DNA, 25 bp, Homo sapien
tatatttttgtggacgccgagggaa

SEQ ID NO: 1452489 - DNA, 25 bp, Homo sapien
gacaaggagttgctagacacttgcc

SEQ ID NO: 1452490 - DNA, 25 bp, Homo sapien
gtttcaaagccgaccagaaagcgga

SEQ ID NO: 1452491 - DNA, 25 bp, Homo sapien
gcgatcccggtgatggcggcaattt

SEQ ID NO: 1452492 - DNA, 25 bp, Homo sapien
gattggatgggcaagtcttccagaa

SEQ ID NO: 1452493 - DNA, 25 bp, Homo sapien
gatccaggcactcgggagggtatcc

SEQ ID NO: 1452494 - DNA, 25 bp, Homo sapien
tatccgacgaggattcgctgaccgc

SEQ ID NO: 1452495 - DNA, 25 bp, Homo sapien
cttggccttgcagcggagccgccac

SEQ ID NO: 1452496 - DNA, 25 bp, Homo sapien
ctgcaaaacatgggtgccgtccttg

SEQ ID NO: 1452497 - DNA, 25 bp, Homo sapien
tggccttgcagcggagccgccacat

SEQ ID NO: 1452498 - DNA, 25 bp, Homo sapien
caaaacatgggtgccgtccttggcc

SEQ ID NO: 1452499 - DNA, 25 bp, Homo sapien
cacaggccaggcacccgcggggcca

SEQ ID NO: 1452500 - DNA, 25 bp, Homo sapien
gaaaccaggcgccgggtggactcca

SEQ ID NO: 1452501 - DNA, 25 bp, Homo sapien
ccaggcgccgggtggactccaaaat

SEQ ID NO: 1452502 - DNA, 25 bp, Homo sapien
gccagctttggtcccggcagcctgt

SEQ ID NO: 1452503 - DNA, 25 bp, Homo sapien
ggtggttgcagttatcgcgacgctt

SEQ ID NO: 1452504 - DNA, 25 bp, Homo sapien
gcaagcgcgaactcttttaaagtga

SEQ ID NO: 1452505 - DNA, 25 bp, Homo sapien
cagttatcgcgacgcttcggtgcgg

SEQ ID NO: 1452506 - DNA, 25 bp, Homo sapien
ttcggtgcggcttctgccttagtac

SEQ ID NO: 1452507 - DNA, 25 bp, Homo sapien
tgctggtgcaattttcctccttggt

SEQ ID NO: 1452508 - DNA, 25 bp, Homo sapien
cctccttggttcttcaagacgactg

SEQ ID NO: 1452509 - DNA, 25 bp, Homo sapien
caagacgactgcaacggatgataca

SEQ ID NO: 1452510 - DNA, 25 bp, Homo sapien
ttttttgctggtgcaattttcctcc

SEQ ID NO: 1452511 - DNA, 25 bp, Homo sapien
tatggatctaatgaggttctgctgg

SEQ ID NO: 1452512 - DNA, 25 bp, Homo sapien
tgcagcattttctcgtcacccggca

SEQ ID NO: 1452513 - DNA, 25 bp, Homo sapien
ggcacacccgctctcaagacgccta

SEQ ID NO: 1452514 - DNA, 25 bp, Homo sapien
aatgagagcgttaatctttgcagca

SEQ ID NO: 1452515 - DNA, 25 bp, Homo sapien
gaattagctgttgaattgaaaccag

SEQ ID NO: 1452516 - DNA, 25 bp, Homo sapien
ttggaatagatcagccgggcacggt

SEQ ID NO: 1452517 - DNA, 25 bp, Homo sapien
caatattctggttggtgacacccct

SEQ ID NO: 1452518 - DNA, 25 bp, Homo sapien
ttgaacccagaaggatcaccttagc

SEQ ID NO: 1452519 - DNA, 25 bp, Homo sapien
taacaactgagtcgggttgcagcac

SEQ ID NO: 1452520 - DNA, 25 bp, Homo sapien
caatgggcacgggaaaaagtatcca

SEQ ID NO: 1452521 - DNA, 25 bp, Homo sapien
taatttagacccatactgtccagga

SEQ ID NO: 1452522 - DNA, 25 bp, Homo sapien
cattgtctttgccaagcccagaagc

SEQ ID NO: 1452523 - DNA, 25 bp, Homo sapien
ggaaggaattaagcactccacgtgt

SEQ ID NO: 1452524 - DNA, 25 bp, Homo sapien
aaatttgggtgttgcctgactaacg

SEQ ID NO: 1452525 - DNA, 25 bp, Homo sapien
cagagcctggagttgttacctttac

SEQ ID NO: 1452526 - DNA, 25 bp, Homo sapien
gactaacggtctagggtctgtaagc

SEQ ID NO: 1452527 - DNA, 25 bp, Homo sapien
tgggtatgtagcttatggtccaggt

SEQ ID NO: 1452528 - DNA, 25 bp, Homo sapien
tatcttgggtatgtagcttatggtc

SEQ ID NO: 1452529 - DNA, 25 bp, Homo sapien
catatcttgggtatgtagcttatgg

SEQ ID NO: 1452530 - DNA, 25 bp, Homo sapien
tcttgggtatgtagcttatggtcca

SEQ ID NO: 1452531 - DNA, 25 bp, Homo sapien
tcatgcatgtgtatggatgtgggga

SEQ ID NO: 1452532 - DNA, 25 bp, Homo sapien
cgctgcttggcagtgctgtaatagc

SEQ ID NO: 1452533 - DNA, 25 bp, Homo sapien
gctgtgcgcagacgcccctccgcag

SEQ ID NO: 1452534 - DNA, 25 bp, Homo sapien
ctctggctcgtaggcagcagagacc

SEQ ID NO: 1452535 - DNA, 25 bp, Homo sapien
cagtgctgtaatagctttgtgtctc

SEQ ID NO: 1452536 - DNA, 25 bp, Homo sapien
gggctgtacttaggtcaatctcctc

SEQ ID NO: 1452537 - DNA, 25 bp, Homo sapien
tgtatacctagagtagagcacaccg

SEQ ID NO: 1452538 - DNA, 25 bp, Homo sapien
tgacaaagctcttttgggctgtact

SEQ ID NO: 1452539 - DNA, 25 bp, Homo sapien
cactgtcctgatcctgtgctggtga

SEQ ID NO: 1452540 - DNA, 25 bp, Homo sapien
tattcatgacctgaggaaatagcca

SEQ ID NO: 1452541 - DNA, 25 bp, Homo sapien
gatgtattttggcagtagctactaa

SEQ ID NO: 1452542 - DNA, 25 bp, Homo sapien
gaaatagccatttacgtcagtgaga

SEQ ID NO: 1452543 - DNA, 25 bp, Homo sapien
taataaacaaagatcccctagagat

SEQ ID NO: 1452544 - DNA, 25 bp, Homo sapien
atagcttgagtccagaaatttgagg

SEQ ID NO: 1452545 - DNA, 25 bp, Homo sapien
agtccagaaatttgaggccagccta

SEQ ID NO: 1452546 - DNA, 25 bp, Homo sapien
ccagaaatttgaggccagcctagac

SEQ ID NO: 1452547 - DNA, 25 bp, Homo sapien
aggatagcttgagtccagaaatttg

SEQ ID NO: 1452548 - DNA, 25 bp, Homo sapien
accatctccctaggtactgtcctca

SEQ ID NO: 1452549 - DNA, 25 bp, Homo sapien
tctagcaccatctccctaggtactg

SEQ ID NO: 1452550 - DNA, 25 bp, Homo sapien
tggtctagcaccatctccctaggta

SEQ ID NO: 1452551 - DNA, 25 bp, Homo sapien
catctccctaggtactgtcctcatg

SEQ ID NO: 1452552 - DNA, 25 bp, Homo sapien
tctgtatcacaatgtgagatggact

SEQ ID NO: 1452553 - DNA, 25 bp, Homo sapien
tgtttcacaactcttatccacaggg

SEQ ID NO: 1452554 - DNA, 25 bp, Homo sapien
tctctcagggagttatttcttcagc

SEQ ID NO: 1452555 - DNA, 25 bp, Homo sapien
ttccacttgagctcacacgcttcat

SEQ ID NO: 1452556 - DNA, 25 bp, Homo sapien
ttccagatcccgcaggtgttgctgt

SEQ ID NO: 1452557 - DNA, 25 bp, Homo sapien
gtttccagatcccgcaggtgttgct

SEQ ID NO: 1452558 - DNA, 25 bp, Homo sapien
ccagatcccgcaggtgttgctgtga

SEQ ID NO: 1452559 - DNA, 25 bp, Homo sapien
cagatcccgcaggtgttgctgtgag

SEQ ID NO: 1452560 - DNA, 25 bp, Homo sapien
ttttagagcttagatgccagatgcc

SEQ ID NO: 1452561 - DNA, 25 bp, Homo sapien
taagcatgcattgaggctcaagggc

SEQ ID NO: 1452562 - DNA, 25 bp, Homo sapien
tcagagtcatgtggcctcactggca

SEQ ID NO: 1452563 - DNA, 25 bp, Homo sapien
taataccgagataacttaagcatgc

SEQ ID NO: 1452564 - DNA, 25 bp, Homo sapien
agtaggaggctcatatctgtcttgt

SEQ ID NO: 1452565 - DNA, 25 bp, Homo sapien
tccagtctgcaagttgatccaggaa

SEQ ID NO: 1452566 - DNA, 25 bp, Homo sapien
caggaagctcccaaaccagagtgtg

SEQ ID NO: 1452567 - DNA, 25 bp, Homo sapien
ctggctgtagaagggactcataaac

SEQ ID NO: 1452568 - DNA, 25 bp, Homo sapien
gctgtctccagcttcacaagattgt

SEQ ID NO: 1452569 - DNA, 25 bp, Homo sapien
tatgaagtcccagaatgttggtcct

SEQ ID NO: 1452570 - DNA, 25 bp, Homo sapien
tgatatgcaacctgcctggctctca

SEQ ID NO: 1452571 - DNA, 25 bp, Homo sapien
tacgtattggcagaattgccccggt

SEQ ID NO: 1452572 - DNA, 25 bp, Homo sapien
tattccccaaggagtaaagtctatg

SEQ ID NO: 1452573 - DNA, 25 bp, Homo sapien
gttagatcatctggccaattgcaag

SEQ ID NO: 1452574 - DNA, 25 bp, Homo sapien
taatttatcttgtgcatgtctgcca

SEQ ID NO: 1452575 - DNA, 25 bp, Homo sapien
aacttgacgtttacatcccactcag

SEQ ID NO: 1452576 - DNA, 25 bp, Homo sapien
gaagccactgatgccttgtgctcta

SEQ ID NO: 1452577 - DNA, 25 bp, Homo sapien
agttttgccctcacgaaatgtcaag

SEQ ID NO: 1452578 - DNA, 25 bp, Homo sapien
tgataacttggcactagactaggtg

SEQ ID NO: 1452579 - DNA, 25 bp, Homo sapien
gactaggtgcataacaaggattaac

SEQ ID NO: 1452580 - DNA, 25 bp, Homo sapien
ggatagccttctagtaacaatcaga

SEQ ID NO: 1452581 - DNA, 25 bp, Homo sapien
taccgtctggtgtcaattgctttca

SEQ ID NO: 1452582 - DNA, 25 bp, Homo sapien
tgtgtggattcaaattaccgtctgg

SEQ ID NO: 1452583 - DNA, 25 bp, Homo sapien
actgacataatgacctctgctgatg

SEQ ID NO: 1452584 - DNA, 25 bp, Homo sapien
tcttggaatgggtccaactttctcc

SEQ ID NO: 1452585 - DNA, 25 bp, Homo sapien
gactatttcaatgttcaagtcacca

SEQ ID NO: 1452586 - DNA, 25 bp, Homo sapien
gacctgatagtgttccctttcagag

SEQ ID NO: 1452587 - DNA, 25 bp, Homo sapien
cagtgtttgtggacctgatagtgtt

SEQ ID NO: 1452588 - DNA, 25 bp, Homo sapien
gtcctcttgactatttcaatgttca

SEQ ID NO: 1452589 - DNA, 25 bp, Homo sapien
ttagcctgaaagtgactaagtgtac

SEQ ID NO: 1452590 - DNA, 25 bp, Homo sapien
gatgatataacatccttacagtttc

SEQ ID NO: 1452591 - DNA, 25 bp, Homo sapien
gattgtggatgatataacatcctta

SEQ ID NO: 1452592 - DNA, 25 bp, Homo sapien
tgactcagagattgtggatgatata

SEQ ID NO: 1452593 - DNA, 25 bp, Homo sapien
gctgttggagaaacccactgctata

SEQ ID NO: 1452594 - DNA, 25 bp, Homo sapien
aagatgaagcccacatgtcagtcct

SEQ ID NO: 1452595 - DNA, 25 bp, Homo sapien
agaactctggccttttgaacattgg

SEQ ID NO: 1452596 - DNA, 25 bp, Homo sapien
tccccaatgtggaactattgaaagg

SEQ ID NO: 1452597 - DNA, 25 bp, Homo sapien
gctgccttttctgtatggttccatc

SEQ ID NO: 1452598 - DNA, 25 bp, Homo sapien
ctctagagtaggtcaaggccatatg

SEQ ID NO: 1452599 - DNA, 25 bp, Homo sapien
agctgccttttctgtatggttccat

SEQ ID NO: 1452600 - DNA, 25 bp, Homo sapien
aaggccatatggccaggatacagat

SEQ ID NO: 1452601 - DNA, 25 bp, Homo sapien
acgcacatccatatattcgacaaag

SEQ ID NO: 1452602 - DNA, 25 bp, Homo sapien
cacacgcacatccatatattcgaca

SEQ ID NO: 1452603 - DNA, 25 bp, Homo sapien
tacacacgcacatccatatattcga

SEQ ID NO: 1452604 - DNA, 25 bp, Homo sapien
gtacacacgcacatccatatattcg

SEQ ID NO: 1452605 - DNA, 25 bp, Homo sapien
aaggacagagtaatataatcacaag

SEQ ID NO: 1452606 - DNA, 25 bp, Homo sapien
caaggacagagtaatataatcacaa

SEQ ID NO: 1452607 - DNA, 25 bp, Homo sapien
acaaggacagagtaatataatcaca

SEQ ID NO: 1452608 - DNA, 25 bp, Homo sapien
aacaaggacagagtaatataatcac

SEQ ID NO: 1452609 - DNA, 25 bp, Homo sapien
tctttttctgttgctgcttcttttt

SEQ ID NO: 1452610 - DNA, 25 bp, Homo sapien
tcttctttttctgttgctgcttctt

SEQ ID NO: 1452611 - DNA, 25 bp, Homo sapien
ttttctgttgctgcttcttttttgt

SEQ ID NO: 1452612 - DNA, 25 bp, Homo sapien
tctgttgctgcttcttttttgttgc

SEQ ID NO: 1452613 - DNA, 25 bp, Homo sapien
gttatcttcagtttatcctgctaat

SEQ ID NO: 1452614 - DNA, 25 bp, Homo sapien
ccatcagttgttaattgagatctgc

SEQ ID NO: 1452615 - DNA, 25 bp, Homo sapien
taattgcaaatcagagtagccttcg

SEQ ID NO: 1452616 - DNA, 25 bp, Homo sapien
tagccttcgatggttgtggaaaaag

SEQ ID NO: 1452617 - DNA, 25 bp, Homo sapien
ttctcactcataggcaacgtctcca

SEQ ID NO: 1452618 - DNA, 25 bp, Homo sapien
gcacagcggtggagatcaagaattc

SEQ ID NO: 1452619 - DNA, 25 bp, Homo sapien
gaattctacacatatgcctcctctg

SEQ ID NO: 1452620 - DNA, 25 bp, Homo sapien
cctgcaccgtggagaatgaaacaat

SEQ ID NO: 1452621 - DNA, 25 bp, Homo sapien
tgggcaccgttaccgtgaccttcca

SEQ ID NO: 1452622 - DNA, 25 bp, Homo sapien
tactccactccaaccctcttactgt

SEQ ID NO: 1452623 - DNA, 25 bp, Homo sapien
ctccactccaaccctcttactgttt

SEQ ID NO: 1452624 - DNA, 25 bp, Homo sapien
actccactccaaccctcttactgtt

SEQ ID NO: 1452625 - DNA, 25 bp, Homo sapien
tgctctattctgttcaacttcctca

SEQ ID NO: 1452626 - DNA, 25 bp, Homo sapien
actttgtctgacattcctgctgctc

SEQ ID NO: 1452627 - DNA, 25 bp, Homo sapien
gctctattctgttcaacttcctcat

SEQ ID NO: 1452628 - DNA, 25 bp, Homo sapien
cagtgtttgtggaccctgacagtgt

SEQ ID NO: 1452629 - DNA, 25 bp, Homo sapien
gtgtttgtggaccctgacagtgttt

SEQ ID NO: 1452630 - DNA, 25 bp, Homo sapien
tgtttgtggaccctgacagtgtttc

SEQ ID NO: 1452631 - DNA, 25 bp, Homo sapien
agtgtttgtggaccctgacagtgtt

SEQ ID NO: 1452632 - DNA, 25 bp, Homo sapien
ctgccctaaaagagcaccaggcctg

SEQ ID NO: 1452633 - DNA, 25 bp, Homo sapien
ttttgtctctcaggcctgccctaaa

SEQ ID NO: 1452634 - DNA, 25 bp, Homo sapien
ctgagagattttgtctctcaggcct

SEQ ID NO: 1452635 - DNA, 25 bp, Homo sapien
ccaaatggtagagaccatcgaggct

SEQ ID NO: 1452636 - DNA, 25 bp, Homo sapien
gaaaactctgactctaggaccgcag

SEQ ID NO: 1452637 - DNA, 25 bp, Homo sapien
taaatggaggtaaagaacaactctc

SEQ ID NO: 1452638 - DNA, 25 bp, Homo sapien
ataatcatgccacccaaaggctatg

SEQ ID NO: 1452639 - DNA, 25 bp, Homo sapien
gaccgcagtgactaggtttacatca

SEQ ID NO: 1452640 - DNA, 25 bp, Homo sapien
tgcctgacggccgagggagaatact

SEQ ID NO: 1452641 - DNA, 25 bp, Homo sapien
ggagaatactttgctgagaccctag

SEQ ID NO: 1452642 - DNA, 25 bp, Homo sapien
taaaaatgatagtctcctccagagc

SEQ ID NO: 1452643 - DNA, 25 bp, Homo sapien
gaaggtctcatagatccagctgact

SEQ ID NO: 1452644 - DNA, 25 bp, Homo sapien
ttgaaatgttttcgagagaatggaa

SEQ ID NO: 1452645 - DNA, 25 bp, Homo sapien
gataatttctacaatataggtctat

SEQ ID NO: 1452646 - DNA, 25 bp, Homo sapien
aatgttttcgagagaatggaaaaat

SEQ ID NO: 1452647 - DNA, 25 bp, Homo sapien
ggataatttctacaatataggtcta

SEQ ID NO: 1452648 - DNA, 25 bp, Homo sapien
tcctcaagcaggtatcctttctatt

SEQ ID NO: 1452649 - DNA, 25 bp, Homo sapien
aaccaattgttactcttttagatat

SEQ ID NO: 1452650 - DNA, 25 bp, Homo sapien
atgtttagtcagatcgtttgctcac

SEQ ID NO: 1452651 - DNA, 25 bp, Homo sapien
ttttggactcatgaaccacccccca

SEQ ID NO: 1452652 - DNA, 25 bp, Homo sapien
tgatcagttgaaactcttccatact

SEQ ID NO: 1452653 - DNA, 25 bp, Homo sapien
agttgaaactcttccatacttaagc

SEQ ID NO: 1452654 - DNA, 25 bp, Homo sapien
gcttgatcagttgaaactcttccat

SEQ ID NO: 1452655 - DNA, 25 bp, Homo sapien
ctgcttgatcagttgaaactcttcc

SEQ ID NO: 1452656 - DNA, 25 bp, Homo sapien
gacaggttctcgtcctgtcacccag

SEQ ID NO: 1452657 - DNA, 25 bp, Homo sapien
aggctggtatgcggtggtgtgatcg

SEQ ID NO: 1452658 - DNA, 25 bp, Homo sapien
ctggtatgcggtggtgtgatcgtag

SEQ ID NO: 1452659 - DNA, 25 bp, Homo sapien
ttgagacaggttctcgtcctgtcac

SEQ ID NO: 1452660 - DNA, 25 bp, Homo sapien
aagatgctcatcctagtgacagacc

SEQ ID NO: 1452661 - DNA, 25 bp, Homo sapien
cagaccaagagacaatacaacccaa

SEQ ID NO: 1452662 - DNA, 25 bp, Homo sapien
taaggtgccgtgattccctacaagt

SEQ ID NO: 1452663 - DNA, 25 bp, Homo sapien
caaattggacaattaaggtgccgtg

SEQ ID NO: 1452664 - DNA, 25 bp, Homo sapien
tggaaaaagcctgtgaaaggtgtct

SEQ ID NO: 1452665 - DNA, 25 bp, Homo sapien
taaagtaatctttggctgtaaggca

SEQ ID NO: 1452666 - DNA, 25 bp, Homo sapien
tcatctttccttcgggttggcaaaa

SEQ ID NO: 1452667 - DNA, 25 bp, Homo sapien
tatttctgaatcgagatgtccatag

SEQ ID NO: 1452668 - DNA, 25 bp, Homo sapien
aactccctgacgtggaggagcaccc

SEQ ID NO: 1452669 - DNA, 25 bp, Homo sapien
ttgacacaaacaccgtagcctactg

SEQ ID NO: 1452670 - DNA, 25 bp, Homo sapien
tataccctgaatgaggtgccagcag

SEQ ID NO: 1452671 - DNA, 25 bp, Homo sapien
ccttccctggaatgtgtcacagttt

SEQ ID NO: 1452672 - DNA, 25 bp, Homo sapien
agcatggacagctcattgtcaatga

SEQ ID NO: 1452673 - DNA, 25 bp, Homo sapien
caagcatggacagctcattgtcaat

SEQ ID NO: 1452674 - DNA, 25 bp, Homo sapien
catggacagctcattgtcaatgatg

SEQ ID NO: 1452675 - DNA, 25 bp, Homo sapien
ctcaagcatggacagctcattgtca

SEQ ID NO: 1452676 - DNA, 25 bp, Homo sapien
taacagccacctgagagtaccacca

SEQ ID NO: 1452677 - DNA, 25 bp, Homo sapien
ccataacagccacctgagagtacca

SEQ ID NO: 1452678 - DNA, 25 bp, Homo sapien
acagccacctgagagtaccaccatt

SEQ ID NO: 1452679 - DNA, 25 bp, Homo sapien
gccacctgagagtaccaccattcat

SEQ ID NO: 1452680 - DNA, 25 bp, Homo sapien
gcaaagaagcaagtcaactactctg

SEQ ID NO: 1452681 - DNA, 25 bp, Homo sapien
aagcagcaaagaagcaagtcaacta

SEQ ID NO: 1452682 - DNA, 25 bp, Homo sapien
aaagaagcaagtcaactactctgtg

SEQ ID NO: 1452683 - DNA, 25 bp, Homo sapien
gcagcaaagaagcaagtcaactact

SEQ ID NO: 1452684 - DNA, 25 bp, Homo sapien
cagctgcttgagctagtggctccca

SEQ ID NO: 1452685 - DNA, 25 bp, Homo sapien
agcaggcacctttgtcagatccggg

SEQ ID NO: 1452686 - DNA, 25 bp, Homo sapien
catctgcaagatggatagctctgac

SEQ ID NO: 1452687 - DNA, 25 bp, Homo sapien
caagccagtcgagctatgtcctagc

SEQ ID NO: 1452688 - DNA, 25 bp, Homo sapien
taagcctgacccataagcattgggc

SEQ ID NO: 1452689 - DNA, 25 bp, Homo sapien
ggcacgcaggcccaatgtatatata

SEQ ID NO: 1452690 - DNA, 25 bp, Homo sapien
tcttcgaccaaagcacatccgtgta

SEQ ID NO: 1452691 - DNA, 25 bp, Homo sapien
cacgagccgctgtatagcattagca

SEQ ID NO: 1452692 - DNA, 25 bp, Homo sapien
tagggtctagggatgccttaggccc

SEQ ID NO: 1452693 - DNA, 25 bp, Homo sapien
gcaacaacagtcgaggcagcagtag

SEQ ID NO: 1452694 - DNA, 25 bp, Homo sapien
acttttgtgagcctaaagggcagca

SEQ ID NO: 1452695 - DNA, 25 bp, Homo sapien
taagtggcccatacgatgactgtaa

SEQ ID NO: 1452696 - DNA, 25 bp, Homo sapien
taggatgacccgatgacagcaatcc

SEQ ID NO: 1452697 - DNA, 25 bp, Homo sapien
agtatcacggccacctctggaggca

SEQ ID NO: 1452698 - DNA, 25 bp, Homo sapien
gcagacataggatgacccgatgaca

SEQ ID NO: 1452699 - DNA, 25 bp, Homo sapien
ctggaggcagacataggatgacccg

SEQ ID NO: 1452700 - DNA, 25 bp, Homo sapien
aagtaggtgctcattcaacaataag

SEQ ID NO: 1452701 - DNA, 25 bp, Homo sapien
gtgtcttttattctcctattgccta

SEQ ID NO: 1452702 - DNA, 25 bp, Homo sapien
tctcagctagccatataaaccatca

SEQ ID NO: 1452703 - DNA, 25 bp, Homo sapien
gcaatttactactgggcctaactaa

SEQ ID NO: 1452704 - DNA, 25 bp, Homo sapien
tgactcgctgccctaatccagaagt

SEQ ID NO: 1452705 - DNA, 25 bp, Homo sapien
caaggattctatctcctgggagaga

SEQ ID NO: 1452706 - DNA, 25 bp, Homo sapien
agtgcttacgatctcctcctgtgac

SEQ ID NO: 1452707 - DNA, 25 bp, Homo sapien
tctaaaggacatggatcttggagcg

SEQ ID NO: 1452708 - DNA, 25 bp, Homo sapien
gactgcctggaacatgtgcctgctt

SEQ ID NO: 1452709 - DNA, 25 bp, Homo sapien
agatgctgggtcatactctggtccc

SEQ ID NO: 1452710 - DNA, 25 bp, Homo sapien
gataaaacctacttgactagcgtcc

SEQ ID NO: 1452711 - DNA, 25 bp, Homo sapien
caattttgcaacgtggtcgagccag

SEQ ID NO: 1452712 - DNA, 25 bp, Homo sapien
tatgagtagaaagaccagatagcag

SEQ ID NO: 1452713 - DNA, 25 bp, Homo sapien
gcctatgctaatggaactttccttt

SEQ ID NO: 1452714 - DNA, 25 bp, Homo sapien
aaaataggcattaggaggccaaggc

SEQ ID NO: 1452715 - DNA, 25 bp, Homo sapien
tctggcatcaaatctaccaaggaag

SEQ ID NO: 1452716 - DNA, 25 bp, Homo sapien
aaacttgcgttggatctttcccatg

SEQ ID NO: 1452717 - DNA, 25 bp, Homo sapien
catctttaaagtacgaatgccgtcc

SEQ ID NO: 1452718 - DNA, 25 bp, Homo sapien
tcctgagtactacgggaggccattc

SEQ ID NO: 1452719 - DNA, 25 bp, Homo sapien
gataacctggtctggtcaagtccca

SEQ ID NO: 1452720 - DNA, 25 bp, Homo sapien
gcatgtgatcacagacatccaggtt

SEQ ID NO: 1452721 - DNA, 25 bp, Homo sapien
ccagatccagtgaatggcatggtgc

SEQ ID NO: 1452722 - DNA, 25 bp, Homo sapien
tcttgtactacagggtgagttggca

SEQ ID NO: 1452723 - DNA, 25 bp, Homo sapien
ttaagagttccagcacagcgatagt

SEQ ID NO: 1452724 - DNA, 25 bp, Homo sapien
agaggagaagccaatacctgggttc

SEQ ID NO: 1452725 - DNA, 25 bp, Homo sapien
cagccagtgctcatatagaagttgc

SEQ ID NO: 1452726 - DNA, 25 bp, Homo sapien
gatcactgacgaaggtgttacacta

SEQ ID NO: 1452727 - DNA, 25 bp, Homo sapien
gactttttaggagctaatgccgctg

SEQ ID NO: 1452728 - DNA, 25 bp, Homo sapien
gcctatgctaatggaactttccttt

SEQ ID NO: 1452729 - DNA, 25 bp, Homo sapien
tatgagtagaaagaccagatagcag

SEQ ID NO: 1452730 - DNA, 25 bp, Homo sapien
aaaataggcattaggaggccaaggc

SEQ ID NO: 1452731 - DNA, 25 bp, Homo sapien
tctggcatcaaatctaccaaggaag

SEQ ID NO: 1452732 - DNA, 25 bp, Homo sapien
aaacttgcgttggatctttcccatg

SEQ ID NO: 1452733 - DNA, 25 bp, Homo sapien
gataacctggtctggtcaagtccca

SEQ ID NO: 1452734 - DNA, 25 bp, Homo sapien
catctttaaagtacgaatgccgtcc

SEQ ID NO: 1452735 - DNA, 25 bp, Homo sapien
tcctgagtactacgggaggccattc

SEQ ID NO: 1452736 - DNA, 25 bp, Homo sapien
gcatgtgatcacagacatccaggtt

SEQ ID NO: 1452737 - DNA, 25 bp, Homo sapien
tcttgtactacagggtgagttggca

SEQ ID NO: 1452738 - DNA, 25 bp, Homo sapien
ccagatccagtgaatggcatggtgc

SEQ ID NO: 1452739 - DNA, 25 bp, Homo sapien
ttaagagttccagcacagcgatagt

SEQ ID NO: 1452740 - DNA, 25 bp, Homo sapien
agaggagaagccaatacctgggttc

SEQ ID NO: 1452741 - DNA, 25 bp, Homo sapien
gatcactgacgaaggtgttacacta

SEQ ID NO: 1452742 - DNA, 25 bp, Homo sapien
cagccagtgctcatatagaagttgc

SEQ ID NO: 1452743 - DNA, 25 bp, Homo sapien
gactttttaggagctaatgccgctg

SEQ ID NO: 1452744 - DNA, 25 bp, Homo sapien
gcctatgctaatggaactttccttt

SEQ ID NO: 1452745 - DNA, 25 bp, Homo sapien
tatgagtagaaagaccagatagcag

SEQ ID NO: 1452746 - DNA, 25 bp, Homo sapien
aaaataggcattaggaggccaaggc

SEQ ID NO: 1452747 - DNA, 25 bp, Homo sapien
tctggcatcaaatctaccaaggaag

SEQ ID NO: 1452748 - DNA, 25 bp, Homo sapien
gataacctggtctggtcaagtccca

SEQ ID NO: 1452749 - DNA, 25 bp, Homo sapien
catctttaaagtacgaatgccgtcc

SEQ ID NO: 1452750 - DNA, 25 bp, Homo sapien
aaacttgcgttggatctttcccatg

SEQ ID NO: 1452751 - DNA, 25 bp, Homo sapien
tcctgagtactacgggaggccattc

SEQ ID NO: 1452752 - DNA, 25 bp, Homo sapien
ttaagagttccagcacagcgatagt

SEQ ID NO: 1452753 - DNA, 25 bp, Homo sapien
ccagatccagtgaatggcatggtgc

SEQ ID NO: 1452754 - DNA, 25 bp, Homo sapien
tcttgtactacagggtgagttggca

SEQ ID NO: 1452755 - DNA, 25 bp, Homo sapien
gcatgtgatcacagacatccaggtt

SEQ ID NO: 1452756 - DNA, 25 bp, Homo sapien
agaggagaagccaatacctgggttc

SEQ ID NO: 1452757 - DNA, 25 bp, Homo sapien
gactttttaggagctaatgccgctg

SEQ ID NO: 1452758 - DNA, 25 bp, Homo sapien
cagccagtgctcatatagaagttgc

SEQ ID NO: 1452759 - DNA, 25 bp, Homo sapien
gatcactgacgaaggtgttacacta

SEQ ID NO: 1452760 - DNA, 25 bp, Homo sapien
gttatgttacagagtgctggtcccc

SEQ ID NO: 1452761 - DNA, 25 bp, Homo sapien
gcaacacgttcactcacattggctg

SEQ ID NO: 1452762 - DNA, 25 bp, Homo sapien
gagagcctaacacaagtcatgtcca

SEQ ID NO: 1452763 - DNA, 25 bp, Homo sapien
tattacttttgctagacacttaggg

SEQ ID NO: 1452764 - DNA, 25 bp, Homo sapien
ccaggaatttggcacttaggacacc

SEQ ID NO: 1452765 - DNA, 25 bp, Homo sapien
gattgtgaaaacaagacggccccga

SEQ ID NO: 1452766 - DNA, 25 bp, Homo sapien
gcaagggccccatagagtctcaata

SEQ ID NO: 1452767 - DNA, 25 bp, Homo sapien
ccgagacgatccagtagcaggcatt

SEQ ID NO: 1452768 - DNA, 25 bp, Homo sapien
tgtggactacaatttgacatgcgat

SEQ ID NO: 1452769 - DNA, 25 bp, Homo sapien
gacgggaggtgttgcgcacttttaa

SEQ ID NO: 1452770 - DNA, 25 bp, Homo sapien
ctacattaatggtttgaatttggga

SEQ ID NO: 1452771 - DNA, 25 bp, Homo sapien
accagatctcccaagcactcagtat

SEQ ID NO: 1452772 - DNA, 25 bp, Homo sapien
tagagctagccaatatgacttatcc

SEQ ID NO: 1452773 - DNA, 25 bp, Homo sapien
cagtgcctggtgtagagaaagctct

SEQ ID NO: 1452774 - DNA, 25 bp, Homo sapien
tctgatataaacaggaatatgacct

SEQ ID NO: 1452775 - DNA, 25 bp, Homo sapien
aggagggaggacatttgtatagcca

SEQ ID NO: 1452776 - DNA, 25 bp, Homo sapien
catcccacactgaatctctactcat

SEQ ID NO: 1452777 - DNA, 25 bp, Homo sapien
tatcattttgaccattttaagttta

SEQ ID NO: 1452778 - DNA, 25 bp, Homo sapien
atcatcccacactgaatctctactc

SEQ ID NO: 1452779 - DNA, 25 bp, Homo sapien
atcccacactgaatctctactcatt

SEQ ID NO: 1452780 - DNA, 25 bp, Homo sapien
taatttgtgttgtcccgtacagata

SEQ ID NO: 1452781 - DNA, 25 bp, Homo sapien
tcctggtttcttatagttgttggag

SEQ ID NO: 1452782 - DNA, 25 bp, Homo sapien
gttgcagtaatttgtgttgtcccgt

SEQ ID NO: 1452783 - DNA, 25 bp, Homo sapien
cttatagttgttggagttgcagtaa

SEQ ID NO: 1452784 - DNA, 25 bp, Homo sapien
aaacaaaacaaagtcgcattctgct

SEQ ID NO: 1452785 - DNA, 25 bp, Homo sapien
tctagctagcagttaatggtttttc

SEQ ID NO: 1452786 - DNA, 25 bp, Homo sapien
aaaagttacatatctacaacgtgag

SEQ ID NO: 1452787 - DNA, 25 bp, Homo sapien
tccataaggtttgcgtagaaacaag

SEQ ID NO: 1452788 - DNA, 25 bp, Homo sapien
gacgaaactcctaattgcctttgaa

SEQ ID NO: 1452789 - DNA, 25 bp, Homo sapien
cgaaactcctaattgcctttgaact

SEQ ID NO: 1452790 - DNA, 25 bp, Homo sapien
gagacgaaactcctaattgcctttg

SEQ ID NO: 1452791 - DNA, 25 bp, Homo sapien
gtgagagacgaaactcctaattgcc

SEQ ID NO: 1452792 - DNA, 25 bp, Homo sapien
cctgcctgtctagtgagctcccagt

SEQ ID NO: 1452793 - DNA, 25 bp, Homo sapien
gaacatactcgattggaaattcagc

SEQ ID NO: 1452794 - DNA, 25 bp, Homo sapien
gctgaatccaaagctaggctctctt

SEQ ID NO: 1452795 - DNA, 25 bp, Homo sapien
ggtgttgcccactactgatgtgcct

SEQ ID NO: 1452796 - DNA, 25 bp, Homo sapien
ataatgatggcctccccggcaaaga

SEQ ID NO: 1452797 - DNA, 25 bp, Homo sapien
tccaaagtggctagtccaatgtcag

SEQ ID NO: 1452798 - DNA, 25 bp, Homo sapien
ccatgcgtgactgctaaggacttcc

SEQ ID NO: 1452799 - DNA, 25 bp, Homo sapien
ttttgcagtcagaccctggcgatga

SEQ ID NO: 1452800 - DNA, 25 bp, Homo sapien
caatgtggcttgaatgtaggtagca

SEQ ID NO: 1452801 - DNA, 25 bp, Homo sapien
ggcttagctaatattgcaatgtggc

SEQ ID NO: 1452802 - DNA, 25 bp, Homo sapien
gcacagcatgcctggttgtattaaa

SEQ ID NO: 1452803 - DNA, 25 bp, Homo sapien
tgggtatgaacagattgcctgcttt

SEQ ID NO: 1452804 - DNA, 25 bp, Homo sapien
aatcttttttgttcaaagattaatg

SEQ ID NO: 1452805 - DNA, 25 bp, Homo sapien
tgaaatcttttttgttcaaagatta

SEQ ID NO: 1452806 - DNA, 25 bp, Homo sapien
gcttgaaatcttttttgttcaaaga

SEQ ID NO: 1452807 - DNA, 25 bp, Homo sapien
atcttttttgttcaaagattaatgc

SEQ ID NO: 1452808 - DNA, 25 bp, Homo sapien
taaacatgccctctaaaagtaggtg

SEQ ID NO: 1452809 - DNA, 25 bp, Homo sapien
tatgtttagttgcacaaattgggcc

SEQ ID NO: 1452810 - DNA, 25 bp, Homo sapien
tctgacagccataacaggagtgcca

SEQ ID NO: 1452811 - DNA, 25 bp, Homo sapien
caggtagcactttatactcaggcag

SEQ ID NO: 1452812 - DNA, 25 bp, Homo sapien
cataccagcagaacgtttgaacaaa

SEQ ID NO: 1452813 - DNA, 25 bp, Homo sapien
gtttgagtcattgctgtgattccca

SEQ ID NO: 1452814 - DNA, 25 bp, Homo sapien
ctttgtaaatcggagcactgctgcc

SEQ ID NO: 1452815 - DNA, 25 bp, Homo sapien
gactgtcacggcatttgacaatccc

SEQ ID NO: 1452816 - DNA, 25 bp, Homo sapien
aacatagtatttattaaggtcagga

SEQ ID NO: 1452817 - DNA, 25 bp, Homo sapien
gaacatagtatttattaaggtcagg

SEQ ID NO: 1452818 - DNA, 25 bp, Homo sapien
taaactatctcttacctctgcaata

SEQ ID NO: 1452819 - DNA, 25 bp, Homo sapien
tacagaatttagaacagcactacat

SEQ ID NO: 1452820 - DNA, 25 bp, Homo sapien
gcatgaatagactcttctcaacaga

SEQ ID NO: 1452821 - DNA, 25 bp, Homo sapien
catttcagcaaaatgcaactagaga

SEQ ID NO: 1452822 - DNA, 25 bp, Homo sapien
cccagagttggcatgaggcttcgag

SEQ ID NO: 1452823 - DNA, 25 bp, Homo sapien
ctgcccagagttggcatgaggcttc

SEQ ID NO: 1452824 - DNA, 25 bp, Homo sapien
ctgctgcccagagttggcatgaggc

SEQ ID NO: 1452825 - DNA, 25 bp, Homo sapien
gcccagagttggcatgaggcttcga

SEQ ID NO: 1452826 - DNA, 25 bp, Homo sapien
ccctacatcataaccgatttcaaat

SEQ ID NO: 1452827 - DNA, 25 bp, Homo sapien
ccccctacatcataaccgatttcaa

SEQ ID NO: 1452828 - DNA, 25 bp, Homo sapien
tccccctacatcataaccgatttca

SEQ ID NO: 1452829 - DNA, 25 bp, Homo sapien
cccctacatcataaccgatttcaaa

SEQ ID NO: 1452830 - DNA, 25 bp, Homo sapien
ggagaaatcggtcagcctgtgtaag

SEQ ID NO: 1452831 - DNA, 25 bp, Homo sapien
caccaggagaaatcggtcagcctgt

SEQ ID NO: 1452832 - DNA, 25 bp, Homo sapien
aaatcggtcagcctgtgtaagagat

SEQ ID NO: 1452833 - DNA, 25 bp, Homo sapien
ctgaacaccaggagaaatcggtcag

SEQ ID NO: 1452834 - DNA, 25 bp, Homo sapien
gggccagtggtgctcccagggtctg

SEQ ID NO: 1452835 - DNA, 25 bp, Homo sapien
gccagtggtgctcccagggtctgca

SEQ ID NO: 1452836 - DNA, 25 bp, Homo sapien
ccagtggtgctcccagggtctgcac

SEQ ID NO: 1452837 - DNA, 25 bp, Homo sapien
ggccagtggtgctcccagggtctgc

SEQ ID NO: 1452838 - DNA, 25 bp, Homo sapien
tatgacaatcgccacactcaaaggc

SEQ ID NO: 1452839 - DNA, 25 bp, Homo sapien
gcaagtctgatttcgggtgccccgc

SEQ ID NO: 1452840 - DNA, 25 bp, Homo sapien
gcaatcaacgccgaatactccaggg

SEQ ID NO: 1452841 - DNA, 25 bp, Homo sapien
aaatggtcctccaggtgtactgccc

SEQ ID NO: 1452842 - DNA, 25 bp, Homo sapien
tacgaacacattcatgctggtgatg

SEQ ID NO: 1452843 - DNA, 25 bp, Homo sapien
ctacgaacacattcatgctggtgat

SEQ ID NO: 1452844 - DNA, 25 bp, Homo sapien
acgaacacattcatgctggtgatgg

SEQ ID NO: 1452845 - DNA, 25 bp, Homo sapien
taggagtcaacagaaatagcatcac

SEQ ID NO: 1452846 - DNA, 25 bp, Homo sapien
gagaggagccagttccatgagcagc

SEQ ID NO: 1452847 - DNA, 25 bp, Homo sapien
caacaaactcaagagtgtattttgc

SEQ ID NO: 1452848 - DNA, 25 bp, Homo sapien
gaacagactcaagtggcaagaggag

SEQ ID NO: 1452849 - DNA, 25 bp, Homo sapien
aaaaatctaagccaccatgtgaaac

SEQ ID NO: 1452850 - DNA, 25 bp, Homo sapien
tggaaaaatctaagccaccatgtga

SEQ ID NO: 1452851 - DNA, 25 bp, Homo sapien
gatggaaaaatctaagccaccatgt

SEQ ID NO: 1452852 - DNA, 25 bp, Homo sapien
aaaatctaagccaccatgtgaaacc

SEQ ID NO: 1452853 - DNA, 25 bp, Homo sapien
cacagggctgcacaaggcaacatga

SEQ ID NO: 1452854 - DNA, 25 bp, Homo sapien
gagattcaatcggaagacccagcct

SEQ ID NO: 1452855 - DNA, 25 bp, Homo sapien
tccagctgctacacaaaggcgagtc

SEQ ID NO: 1452856 - DNA, 25 bp, Homo sapien
caagcaccctatctgcctgtggaat

SEQ ID NO: 1452857 - DNA, 25 bp, Homo sapien
ttcctttcaggcctctagatacagc

SEQ ID NO: 1452858 - DNA, 25 bp, Homo sapien
caaaagttgcggtgtttaattctca

SEQ ID NO: 1452859 - DNA, 25 bp, Homo sapien
tggttcctggcactaacagtatgtg

SEQ ID NO: 1452860 - DNA, 25 bp, Homo sapien
acagtatgtgttgctagaaggagaa

SEQ ID NO: 1452861 - DNA, 25 bp, Homo sapien
tgaagatgaacctgcaacaagcgat

SEQ ID NO: 1452862 - DNA, 25 bp, Homo sapien
acaggtgtcccgcagtgatcagaaa

SEQ ID NO: 1452863 - DNA, 25 bp, Homo sapien
tgatgacacctgtagccaacacctg

SEQ ID NO: 1452864 - DNA, 25 bp, Homo sapien
catctgggttctgcgaaagccgggt

SEQ ID NO: 1452865 - DNA, 25 bp, Homo sapien
actccagggaacctgtcatcctccc

SEQ ID NO: 1452866 - DNA, 25 bp, Homo sapien
cactccagggaacctgtcatcctcc

SEQ ID NO: 1452867 - DNA, 25 bp, Homo sapien
ccactccagggaacctgtcatcctc

SEQ ID NO: 1452868 - DNA, 25 bp, Homo sapien
cctgtcatcctccccgcagctcagg

SEQ ID NO: 1452869 - DNA, 25 bp, Homo sapien
cactgagggagttaacagaagccac

SEQ ID NO: 1452870 - DNA, 25 bp, Homo sapien
gactcttcgctgaaacaagctggtg

SEQ ID NO: 1452871 - DNA, 25 bp, Homo sapien
tagacctgtaagaaggcagcccatg

SEQ ID NO: 1452872 - DNA, 25 bp, Homo sapien
taagggaccattcggagtacagcag

SEQ ID NO: 1452873 - DNA, 25 bp, Homo sapien
tccagaacgtgggaaggttctgcca

SEQ ID NO: 1452874 - DNA, 25 bp, Homo sapien
cagtgtgtgcaaatccagaacgtgg

SEQ ID NO: 1452875 - DNA, 25 bp, Homo sapien
ctgcttgcttgtgctgcgctaccac

SEQ ID NO: 1452876 - DNA, 25 bp, Homo sapien
tgggtgctgagtcacagctacttac

SEQ ID NO: 1452877 - DNA, 25 bp, Homo sapien
tcctgtcattctaggcagcagcctg

SEQ ID NO: 1452878 - DNA, 25 bp, Homo sapien
gtcccaggccattgcatgtataaac

SEQ ID NO: 1452879 - DNA, 25 bp, Homo sapien
tgactgatgtgtgttccagccagat

SEQ ID NO: 1452880 - DNA, 25 bp, Homo sapien
ctggcagcaaggaagagctcatctt

SEQ ID NO: 1452881 - DNA, 25 bp, Homo sapien
gagagcacagcatctcaaaggagag

SEQ ID NO: 1452882 - DNA, 25 bp, Homo sapien
caccctgtggcgtgatgtagttcca

SEQ ID NO: 1452883 - DNA, 25 bp, Homo sapien
tcaagaacagtgagtagcaggagga

SEQ ID NO: 1452884 - DNA, 25 bp, Homo sapien
cctggtccacacacatggactgggc

SEQ ID NO: 1452885 - DNA, 25 bp, Homo sapien
agcaagggatgtacggtctcaaact

SEQ ID NO: 1452886 - DNA, 25 bp, Homo sapien
tagcaagggatgtacggtctcaaac

SEQ ID NO: 1452887 - DNA, 25 bp, Homo sapien
ctagcaagggatgtacggtctcaaa

SEQ ID NO: 1452888 - DNA, 25 bp, Homo sapien
caagggatgtacggtctcaaacttc

SEQ ID NO: 1452889 - DNA, 25 bp, Homo sapien
ggtttcagtatgagccaaggatgca

SEQ ID NO: 1452890 - DNA, 25 bp, Homo sapien
caaagttccagattcgatgaccaca

SEQ ID NO: 1452891 - DNA, 25 bp, Homo sapien
acagacttgggactgggaggatcct

SEQ ID NO: 1452892 - DNA, 25 bp, Homo sapien
tcagcagaggtgatgcacagttctc

SEQ ID NO: 1452893 - DNA, 25 bp, Homo sapien
aagtcctgctgtccaatactctgcc

SEQ ID NO: 1452894 - DNA, 25 bp, Homo sapien
caggcgctgtacattagccagcaaa

SEQ ID NO: 1452895 - DNA, 25 bp, Homo sapien
tgcctttaaggaaaactgacaccca

SEQ ID NO: 1452896 - DNA, 25 bp, Homo sapien
cataggcatgaggtgccatacagat

SEQ ID NO: 1452897 - DNA, 25 bp, Homo sapien
gacaggacggagcatctttcctaga

SEQ ID NO: 1452898 - DNA, 25 bp, Homo sapien
tcctgacagcaaggggcacagaccc

SEQ ID NO: 1452899 - DNA, 25 bp, Homo sapien
ctccagggtttagggccagacagga

SEQ ID NO: 1452900 - DNA, 25 bp, Homo sapien
gtcccttgggtcagccccttgcagg

SEQ ID NO: 1452901 - DNA, 25 bp, Homo sapien
tatcgtgagacgattagctctggga

SEQ ID NO: 1452902 - DNA, 25 bp, Homo sapien
gacctaacctgcacgtttccctgtg

SEQ ID NO: 1452903 - DNA, 25 bp, Homo sapien
aacggctcgttctggcaggacaggc

SEQ ID NO: 1452904 - DNA, 25 bp, Homo sapien
tttgaccaatggctcggcaaagacc

SEQ ID NO: 1452905 - DNA, 25 bp, Homo sapien
gaatgtatgccccatgaaagtggaa

SEQ ID NO: 1452906 - DNA, 25 bp, Homo sapien
tgtccatggctaccaaagggcattt

SEQ ID NO: 1452907 - DNA, 25 bp, Homo sapien
tcattattagcggtgtctctccaca

SEQ ID NO: 1452908 - DNA, 25 bp, Homo sapien
atagcagaggctccgtacacagcag

SEQ ID NO: 1452909 - DNA, 25 bp, Homo sapien
ggaccaacaactctgatgcccatct

SEQ ID NO: 1452910 - DNA, 25 bp, Homo sapien
gatgcccatctcataccttcatgcc

SEQ ID NO: 1452911 - DNA, 25 bp, Homo sapien
tgaaatcagataaggagaggagagc

SEQ ID NO: 1452912 - DNA, 25 bp, Homo sapien
tgcctcattatagaccctgatcggg

SEQ ID NO: 1452913 - DNA, 25 bp, Homo sapien
tcagtaccaggcactcagacgcaaa

SEQ ID NO: 1452914 - DNA, 25 bp, Homo sapien
cagtaccaggcactcagacgcaaat

SEQ ID NO: 1452915 - DNA, 25 bp, Homo sapien
tatctcagagggaggtaacacgccc

SEQ ID NO: 1452916 - DNA, 25 bp, Homo sapien
aacatatgagcagagagaggcgacc

SEQ ID NO: 1452917 - DNA, 25 bp, Homo sapien
taggcttgacactatggtaccaggc

SEQ ID NO: 1452918 - DNA, 25 bp, Homo sapien
aatggagacgtctgaggattccccg

SEQ ID NO: 1452919 - DNA, 25 bp, Homo sapien
tcagccatgtcacatgcccctagct

SEQ ID NO: 1452920 - DNA, 25 bp, Homo sapien
cctcagccatgtcacatgcccctag

SEQ ID NO: 1452921 - DNA, 25 bp, Homo sapien
ctcagccatgtcacatgcccctagc

SEQ ID NO: 1452922 - DNA, 25 bp, Homo sapien
agcaccttcatctagcacgaccttt

SEQ ID NO: 1452923 - DNA, 25 bp, Homo sapien
gcatctgcaatacaggaggaaagta

SEQ ID NO: 1452924 - DNA, 25 bp, Homo sapien
gaggaaagtaagcagccctgaacca

SEQ ID NO: 1452925 - DNA, 25 bp, Homo sapien
gacctttcaatctatcagcatctgc

SEQ ID NO: 1452926 - DNA, 25 bp, Homo sapien
gagggcagacacgtctgataagaat

SEQ ID NO: 1452927 - DNA, 25 bp, Homo sapien
aggcccttggagatggctcatgctc

SEQ ID NO: 1452928 - DNA, 25 bp, Homo sapien
cacgtctgataagaattgcttagca

SEQ ID NO: 1452929 - DNA, 25 bp, Homo sapien
ggttctggttctctgatagaagtgc

SEQ ID NO: 1452930 - DNA, 25 bp, Homo sapien
gcctgagtcgccaagaggttgtcac

SEQ ID NO: 1452931 - DNA, 25 bp, Homo sapien
tatccggcagtatgacggctgtctc

SEQ ID NO: 1452932 - DNA, 25 bp, Homo sapien
tgtcacccactcacagagcaagctg

SEQ ID NO: 1452933 - DNA, 25 bp, Homo sapien
tccaaatacatgcaagtgagccact

SEQ ID NO: 1452934 - DNA, 25 bp, Homo sapien
agggtcaagaactcaaggcccactg

SEQ ID NO: 1452935 - DNA, 25 bp, Homo sapien
ctgcggtatggagaaaagcctagaa

SEQ ID NO: 1452936 - DNA, 25 bp, Homo sapien
ctatagcgcaaagctgcggtatgga

SEQ ID NO: 1452937 - DNA, 25 bp, Homo sapien
acagccgccatgatgacgcaaacaa

SEQ ID NO: 1452938 - DNA, 25 bp, Homo sapien
cccggctcccgatacactgagtcat

SEQ ID NO: 1452939 - DNA, 25 bp, Homo sapien
tcccatcctgatgcccgggcggtgg

SEQ ID NO: 1452940 - DNA, 25 bp, Homo sapien
gctttcatgttgacagaacatcctg

SEQ ID NO: 1452941 - DNA, 25 bp, Homo sapien
tgaaaatgaccccaggctaaggatc

SEQ ID NO: 1452942 - DNA, 25 bp, Homo sapien
cagggtccccattgccgtcgactga

SEQ ID NO: 1452943 - DNA, 25 bp, Homo sapien
agggtccccattgccgtcgactgac

SEQ ID NO: 1452944 - DNA, 25 bp, Homo sapien
tccccattgccgtcgactgacgact

SEQ ID NO: 1452945 - DNA, 25 bp, Homo sapien
ccattgccgtcgactgacgactcac

SEQ ID NO: 1452946 - DNA, 25 bp, Homo sapien
tgctccgcggcccccgaattggtaa

SEQ ID NO: 1452947 - DNA, 25 bp, Homo sapien
tggctgtcgtcacactctgctccgc

SEQ ID NO: 1452948 - DNA, 25 bp, Homo sapien
taacgaggggcttcagggtgcccag

SEQ ID NO: 1452949 - DNA, 25 bp, Homo sapien
tcccgtgggactcagcagcgtcagg

SEQ ID NO: 1452950 - DNA, 25 bp, Homo sapien
ttgcaggcttgaagggcgtaacgcc

SEQ ID NO: 1452951 - DNA, 25 bp, Homo sapien
cactgggtagggatgggaacctatt

SEQ ID NO: 1452952 - DNA, 25 bp, Homo sapien
taacgcctaggttacctcctctgcg

SEQ ID NO: 1452953 - DNA, 25 bp, Homo sapien
cctgctgtgataccacttagggcac

SEQ ID NO: 1452954 - DNA, 25 bp, Homo sapien
agttaatccatcaatttcagctaca

SEQ ID NO: 1452955 - DNA, 25 bp, Homo sapien
gagtcagttaatccatcaatttcag

SEQ ID NO: 1452956 - DNA, 25 bp, Homo sapien
ggcaaccaggataactgagtcagtt

SEQ ID NO: 1452957 - DNA, 25 bp, Homo sapien
tctccctcctcttgtacgaggaagg

SEQ ID NO: 1452958 - DNA, 25 bp, Homo sapien
tttccaagcaccacgtagtagtagc

SEQ ID NO: 1452959 - DNA, 25 bp, Homo sapien
cataggaagaggcttcaactgggca

SEQ ID NO: 1452960 - DNA, 25 bp, Homo sapien
tattttgccgcaacactgaggtgtg

SEQ ID NO: 1452961 - DNA, 25 bp, Homo sapien
gccccggacgtcaatgcaaatctgt

SEQ ID NO: 1452962 - DNA, 25 bp, Homo sapien
gatggacgctgacacccaaacaact

SEQ ID NO: 1452963 - DNA, 25 bp, Homo sapien
aacttggagaaccagtctgtctgtc

SEQ ID NO: 1452964 - DNA, 25 bp, Homo sapien
acagacagatggacgctgacaccca

SEQ ID NO: 1452965 - DNA, 25 bp, Homo sapien
gctgacacccaaacaacttggagaa

SEQ ID NO: 1452966 - DNA, 25 bp, Homo sapien
catcaagtcctgaagcccgtcggac

SEQ ID NO: 1452967 - DNA, 25 bp, Homo sapien
caaatcttggtcccgccgtaaggtg

SEQ ID NO: 1452968 - DNA, 25 bp, Homo sapien
gtaaggtgccgcagtcccgaatgtt

SEQ ID NO: 1452969 - DNA, 25 bp, Homo sapien
ccgcctgcgcagacccaaatcttgg

SEQ ID NO: 1452970 - DNA, 25 bp, Homo sapien
ctctttgtgccacagacaagtccag

SEQ ID NO: 1452971 - DNA, 25 bp, Homo sapien
tgaccactgtcccattaactctttg

SEQ ID NO: 1452972 - DNA, 25 bp, Homo sapien
cagacaagtccaggattacagtcat

SEQ ID NO: 1452973 - DNA, 25 bp, Homo sapien
caggattacagtcatagctgatttc

SEQ ID NO: 1452974 - DNA, 25 bp, Homo sapien
cacagaatttgtacagaggccgact

SEQ ID NO: 1452975 - DNA, 25 bp, Homo sapien
catgagatccttctatcagggcagg

SEQ ID NO: 1452976 - DNA, 25 bp, Homo sapien
gagtccctgcaaagataagtcccca

SEQ ID NO: 1452977 - DNA, 25 bp, Homo sapien
tctgatgaccaaaggaacgtggcct

SEQ ID NO: 1452978 - DNA, 25 bp, Homo sapien
taacctgattctacaaggcaccaag

SEQ ID NO: 1452979 - DNA, 25 bp, Homo sapien
tgaattcagttccaaaaacatggga

SEQ ID NO: 1452980 - DNA, 25 bp, Homo sapien
gctcgagcctacaaggaagcagttt

SEQ ID NO: 1452981 - DNA, 25 bp, Homo sapien
tttacttagcaagcacgctcgagcc

SEQ ID NO: 1452982 - DNA, 25 bp, Homo sapien
cagacttcatgagcattccgtggcc

SEQ ID NO: 1452983 - DNA, 25 bp, Homo sapien
ggcctccgactgatctgggtcaaaa

SEQ ID NO: 1452984 - DNA, 25 bp, Homo sapien
gcttcagctcaagcccaacaggttg

SEQ ID NO: 1452985 - DNA, 25 bp, Homo sapien
ggcagctaccggactcaggaactaa

SEQ ID NO: 1452986 - DNA, 25 bp, Homo sapien
cccttgttcagggtgtggaatgcaa

SEQ ID NO: 1452987 - DNA, 25 bp, Homo sapien
ccgcccttgttcagggtgtggaatg

SEQ ID NO: 1452988 - DNA, 25 bp, Homo sapien
gcccttgttcagggtgtggaatgca

SEQ ID NO: 1452989 - DNA, 25 bp, Homo sapien
cgcccttgttcagggtgtggaatgc

SEQ ID NO: 1452990 - DNA, 25 bp, Homo sapien
actccagttcggcaggcaacagcca

SEQ ID NO: 1452991 - DNA, 25 bp, Homo sapien
acaaactccagttcggcaggcaaca

SEQ ID NO: 1452992 - DNA, 25 bp, Homo sapien
tccagttcggcaggcaacagccaga

SEQ ID NO: 1452993 - DNA, 25 bp, Homo sapien
ggccacaaactccagttcggcaggc

SEQ ID NO: 1452994 - DNA, 25 bp, Homo sapien
tggttcccaggctagctcacaaaag

SEQ ID NO: 1452995 - DNA, 25 bp, Homo sapien
caggtaatgaaggagtacagtggcc

SEQ ID NO: 1452996 - DNA, 25 bp, Homo sapien
tggtctcaggtggaactgacaggcc

SEQ ID NO: 1452997 - DNA, 25 bp, Homo sapien
gacaacaggcgcttggttaccacct

SEQ ID NO: 1452998 - DNA, 25 bp, Homo sapien
tgcataaccagtatcccaagagtac

SEQ ID NO: 1452999 - DNA, 25 bp, Homo sapien
tggatacccaaagctaccgaggagt

SEQ ID NO: 1453000 - DNA, 25 bp, Homo sapien
gagtagtgatagcatgtagccccaa

SEQ ID NO: 1453001 - DNA, 25 bp, Homo sapien
gcttagaacactatatggcacacag

SEQ ID NO: 1453002 - DNA, 25 bp, Homo sapien
tggaataagaggatgtaaccttggg

SEQ ID NO: 1453003 - DNA, 25 bp, Homo sapien
tcagccgatcatggaataagaggat

SEQ ID NO: 1453004 - DNA, 25 bp, Homo sapien
taagaggatgtaaccttgggtgtgc

SEQ ID NO: 1453005 - DNA, 25 bp, Homo sapien
gaggatgtaaccttgggtgtgctct

SEQ ID NO: 1453006 - DNA, 25 bp, Homo sapien
cctgaaggcaatattgttagatgcc

SEQ ID NO: 1453007 - DNA, 25 bp, Homo sapien
tcactaccaaggttccccataaata

SEQ ID NO: 1453008 - DNA, 25 bp, Homo sapien
gaccacaggagctttagcgatggct

SEQ ID NO: 1453009 - DNA, 25 bp, Homo sapien
tagcgatggcttggaaacaacttcc

SEQ ID NO: 1453010 - DNA, 25 bp, Homo sapien
ttttaactgatggtacagatacaca

SEQ ID NO: 1453011 - DNA, 25 bp, Homo sapien
agatacacattttatgggaatcttt

SEQ ID NO: 1453012 - DNA, 25 bp, Homo sapien
gatacacattttatgggaatctttt

SEQ ID NO: 1453013 - DNA, 25 bp, Homo sapien
taactgatggtacagatacacattt

SEQ ID NO: 1453014 - DNA, 25 bp, Homo sapien
cactcagtgcatttgggcaagtccc

SEQ ID NO: 1453015 - DNA, 25 bp, Homo sapien
ggctcaccagcctatagcaggattt

SEQ ID NO: 1453016 - DNA, 25 bp, Homo sapien
tgtcccctgctaagtggagcaaacg

SEQ ID NO: 1453017 - DNA, 25 bp, Homo sapien
ttatcaccaccataagagcgcagtg

SEQ ID NO: 1453018 - DNA, 25 bp, Homo sapien
tgctgatgggctcaccagtggtcca

SEQ ID NO: 1453019 - DNA, 25 bp, Homo sapien
tctgttgcagcaaagagagcatggg

SEQ ID NO: 1453020 - DNA, 25 bp, Homo sapien
caacgcccaagtagatgtgtctggc

SEQ ID NO: 1453021 - DNA, 25 bp, Homo sapien
cagtggtccaagcagcaagactagc

SEQ ID NO: 1453022 - DNA, 25 bp, Homo sapien
taagagatttaaccacagggctatc

SEQ ID NO: 1453023 - DNA, 25 bp, Homo sapien
acctgtattgtgcaagatggcagcc

SEQ ID NO: 1453024 - DNA, 25 bp, Homo sapien
taacatctgagcacagacccaaagg

SEQ ID NO: 1453025 - DNA, 25 bp, Homo sapien
ccagtgatgctggagcgaagtgcaa

SEQ ID NO: 1453026 - DNA, 25 bp, Homo sapien
tctaacataagtaaaatgagagaga

SEQ ID NO: 1453027 - DNA, 25 bp, Homo sapien
taagtaaaatgagagagaaccgtat

SEQ ID NO: 1453028 - DNA, 25 bp, Homo sapien
cataagtaaaatgagagagaaccgt

SEQ ID NO: 1453029 - DNA, 25 bp, Homo sapien
taaaatgagagagaaccgtataata

SEQ ID NO: 1453030 - DNA, 25 bp, Homo sapien
ggtatgttgctagtctcctgctggg

SEQ ID NO: 1453031 - DNA, 25 bp, Homo sapien
tcgaacccagactgctgaactctga

SEQ ID NO: 1453032 - DNA, 25 bp, Homo sapien
tatcacctccgatctggtatgttgc

SEQ ID NO: 1453033 - DNA, 25 bp, Homo sapien
tatctgcacaagaaacctcaggccc

SEQ ID NO: 1453034 - DNA, 25 bp, Homo sapien
catgtgccaggcattcctgcatcca

SEQ ID NO: 1453035 - DNA, 25 bp, Homo sapien
cacatctctgcccacgctctgctca

SEQ ID NO: 1453036 - DNA, 25 bp, Homo sapien
gtgccaggcattcctgcatccacat

SEQ ID NO: 1453037 - DNA, 25 bp, Homo sapien
gcatccacatctctgcccacgctct

SEQ ID NO: 1453038 - DNA, 25 bp, Homo sapien
cttccccctgcatctactccaactc

SEQ ID NO: 1453039 - DNA, 25 bp, Homo sapien
gccctgtgatgacgtccatgccctt

SEQ ID NO: 1453040 - DNA, 25 bp, Homo sapien
cctgccctgtgatgacgtccatgcc

SEQ ID NO: 1453041 - DNA, 25 bp, Homo sapien
atgcccttccccctgcatctactcc

SEQ ID NO: 1453042 - DNA, 25 bp, Homo sapien
tgctcgccctggaagattatataag

SEQ ID NO: 1453043 - DNA, 25 bp, Homo sapien
gacctgagagcggagacacagtgct

SEQ ID NO: 1453044 - DNA, 25 bp, Homo sapien
cagcccagtggagagtacagtaaaa

SEQ ID NO: 1453045 - DNA, 25 bp, Homo sapien
gggagtaggttcacccacaggcttc

SEQ ID NO: 1453046 - DNA, 25 bp, Homo sapien
cagaatgtaggagcacttgtttggg

SEQ ID NO: 1453047 - DNA, 25 bp, Homo sapien
ggggaacaagtgctgcaacagcagc

SEQ ID NO: 1453048 - DNA, 25 bp, Homo sapien
gtttggggaacaagtgctgcaacag

SEQ ID NO: 1453049 - DNA, 25 bp, Homo sapien
taggagcacttgtttggggaacaag

SEQ ID NO: 1453050 - DNA, 25 bp, Homo sapien
gcccggagctgctccaggccgcgac

SEQ ID NO: 1453051 - DNA, 25 bp, Homo sapien
ccctgcgcgcagctggccctggccc

SEQ ID NO: 1453052 - DNA, 25 bp, Homo sapien
cggagctgctccaggccgcgaccgc

SEQ ID NO: 1453053 - DNA, 25 bp, Homo sapien
cagagcctggggcccgcccggagct

SEQ ID NO: 1453054 - DNA, 25 bp, Homo sapien
gcgaggccagcagcgccccaaggcc

SEQ ID NO: 1453055 - DNA, 25 bp, Homo sapien
cggggtggggcgcgaccggagcgcg

SEQ ID NO: 1453056 - DNA, 25 bp, Homo sapien
cgcggcgaggccagcagcgccccaa

SEQ ID NO: 1453057 - DNA, 25 bp, Homo sapien
ggtggggcgcgaccggagcgcggcc

SEQ ID NO: 1453058 - DNA, 25 bp, Homo sapien
tccgggggtactgcgcaaacaggct

SEQ ID NO: 1453059 - DNA, 25 bp, Homo sapien
gctgcaggcccgagatgcgcagccg

SEQ ID NO: 1453060 - DNA, 25 bp, Homo sapien
gggtactgcgcaaacaggctctccc

SEQ ID NO: 1453061 - DNA, 25 bp, Homo sapien
gccctccgggggtactgcgcaaaca

SEQ ID NO: 1453062 - DNA, 25 bp, Homo sapien
gcacggtgatgagaggctttcccaa

SEQ ID NO: 1453063 - DNA, 25 bp, Homo sapien
cagagcttgttggaactcttgaaga

SEQ ID NO: 1453064 - DNA, 25 bp, Homo sapien
tcttgaagaatgacttgtgagtttc

SEQ ID NO: 1453065 - DNA, 25 bp, Homo sapien
aggcagagccctttgagcttgcaaa

SEQ ID NO: 1453066 - DNA, 25 bp, Homo sapien
tggacagatataagtgttgggatcc

SEQ ID NO: 1453067 - DNA, 25 bp, Homo sapien
gcattattgcaaaatagtcagcttc

SEQ ID NO: 1453068 - DNA, 25 bp, Homo sapien
tttcccttgctaagggaaggcacag

SEQ ID NO: 1453069 - DNA, 25 bp, Homo sapien
cacaggcagaatgggagaactcaag

SEQ ID NO: 1453070 - DNA, 25 bp, Homo sapien
gactatatcgaaatttttaagtaga

SEQ ID NO: 1453071 - DNA, 25 bp, Homo sapien
gagtgactatatcgaaatttttaag

SEQ ID NO: 1453072 - DNA, 25 bp, Homo sapien
aataaatgagtgactatatcgaaat

SEQ ID NO: 1453073 - DNA, 25 bp, Homo sapien
aatgagtgactatatcgaaattttt

SEQ ID NO: 1453074 - DNA, 25 bp, Homo sapien
cattctgggctattctcactctgag

SEQ ID NO: 1453075 - DNA, 25 bp, Homo sapien
gaaaatcgtcacactagcgtgccca

SEQ ID NO: 1453076 - DNA, 25 bp, Homo sapien
taactaaaggtcagggcaacatagg

SEQ ID NO: 1453077 - DNA, 25 bp, Homo sapien
gcaacataggactgtgacagcacca

SEQ ID NO: 1453078 - DNA, 25 bp, Homo sapien
attgatgtctaagaatgctagccag

SEQ ID NO: 1453079 - DNA, 25 bp, Homo sapien
gttgcccattgatgtctaagaatgc

SEQ ID NO: 1453080 - DNA, 25 bp, Homo sapien
gcccattgatgtctaagaatgctag

SEQ ID NO: 1453081 - DNA, 25 bp, Homo sapien
agttggttgcccattgatgtctaag

SEQ ID NO: 1453082 - DNA, 25 bp, Homo sapien
ggctgaggggtgagttaggcagaac

SEQ ID NO: 1453083 - DNA, 25 bp, Homo sapien
tgaggggtgagttaggcagaaccag

SEQ ID NO: 1453084 - DNA, 25 bp, Homo sapien
ggtgagttaggcagaaccagatgaa

SEQ ID NO: 1453085 - DNA, 25 bp, Homo sapien
gggtgagttaggcagaaccagatga

SEQ ID NO: 1453086 - DNA, 25 bp, Homo sapien
ttatcagaactcttcccagaaacgg

SEQ ID NO: 1453087 - DNA, 25 bp, Homo sapien
cccagaaacggtaatgaatgtaggt

SEQ ID NO: 1453088 - DNA, 25 bp, Homo sapien
cataagggattcaagaatatcactg

SEQ ID NO: 1453089 - DNA, 25 bp, Homo sapien
aagcgggctgggtcaccacaatcat

SEQ ID NO: 1453090 - DNA, 25 bp, Homo sapien
ttctaaggttttccaagcttcctca

SEQ ID NO: 1453091 - DNA, 25 bp, Homo sapien
gaggaggtttcagttcttccccaca

SEQ ID NO: 1453092 - DNA, 25 bp, Homo sapien
tgagttgtctcgcttgggatgtctc

SEQ ID NO: 1453093 - DNA, 25 bp, Homo sapien
catgagattgcagttgtactgttta

SEQ ID NO: 1453094 - DNA, 25 bp, Homo sapien
caccagggtggtatcagcagagatc

SEQ ID NO: 1453095 - DNA, 25 bp, Homo sapien
aatagtaacatatctagagccgcgg

SEQ ID NO: 1453096 - DNA, 25 bp, Homo sapien
catttccaagtggtctctgaggtca

SEQ ID NO: 1453097 - DNA, 25 bp, Homo sapien
gagaatagctggtgtagaacctgcc

SEQ ID NO: 1453098 - DNA, 25 bp, Homo sapien
taaaaaggccccatgtagtctgacc

SEQ ID NO: 1453099 - DNA, 25 bp, Homo sapien
tatccccagtctcaagaacagtgtc

SEQ ID NO: 1453100 - DNA, 25 bp, Homo sapien
gcacatttcgcgcagtgtctggcac

SEQ ID NO: 1453101 - DNA, 25 bp, Homo sapien
gactatgtcttatcccaggtgcctg

SEQ ID NO: 1453102 - DNA, 25 bp, Homo sapien
cattgctgtaccaggacgctcaggc

SEQ ID NO: 1453103 - DNA, 25 bp, Homo sapien
caactagatgcaagtgggctggact

SEQ ID NO: 1453104 - DNA, 25 bp, Homo sapien
aatgctccagaagtgaagtcccaaa

SEQ ID NO: 1453105 - DNA, 25 bp, Homo sapien
tccaactggagtaacacggaggact

SEQ ID NO: 1453106 - DNA, 25 bp, Homo sapien
taaagggtgcacaggacattgcccc

SEQ ID NO: 1453107 - DNA, 25 bp, Homo sapien
caggtctctagaacaacagtcccca

SEQ ID NO: 1453108 - DNA, 25 bp, Homo sapien
taaaggtccttagcatcctggctgg

SEQ ID NO: 1453109 - DNA, 25 bp, Homo sapien
gaagctccctggtacattcgggtct

SEQ ID NO: 1453110 - DNA, 25 bp, Homo sapien
acagcaaacaaggacctgggtcacc

SEQ ID NO: 1453111 - DNA, 25 bp, Homo sapien
ggacctgggtcacccacagaagagg

SEQ ID NO: 1453112 - DNA, 25 bp, Homo sapien
cgtcattgaaaccaggatccctgct

SEQ ID NO: 1453113 - DNA, 25 bp, Homo sapien
taggagctgatctgggctatgacca

SEQ ID NO: 1453114 - DNA, 25 bp, Homo sapien
ccagggagccgaatgtgtaaaggac

SEQ ID NO: 1453115 - DNA, 25 bp, Homo sapien
tgaggcaacagctcaacccaggagt

SEQ ID NO: 1453116 - DNA, 25 bp, Homo sapien
aaggccatcgattgttcctgggagc

SEQ ID NO: 1453117 - DNA, 25 bp, Homo sapien
ggttgggcgtaagagatgtcacctc

SEQ ID NO: 1453118 - DNA, 25 bp, Homo sapien
ggtcctgagctatagccctggcctc

SEQ ID NO: 1453119 - DNA, 25 bp, Homo sapien
ttcggtatcagccaccacgtgttgt

SEQ ID NO: 1453120 - DNA, 25 bp, Homo sapien
gttttcctgagcccctcggttcaca

SEQ ID NO: 1453121 - DNA, 25 bp, Homo sapien
cacgtgttgtcttgctgaatggccg

SEQ ID NO: 1453122 - DNA, 25 bp, Homo sapien
aataaagtagcattatctggtaagc

SEQ ID NO: 1453123 - DNA, 25 bp, Homo sapien
gctgcatgtgcagactcctttcttc

SEQ ID NO: 1453124 - DNA, 25 bp, Homo sapien
gcagctgcatgtgcagactcctttc

SEQ ID NO: 1453125 - DNA, 25 bp, Homo sapien
tatctggtaagcagggctgtgagac

SEQ ID NO: 1453126 - DNA, 25 bp, Homo sapien
ccccagaaacccactatcttcctca

SEQ ID NO: 1453127 - DNA, 25 bp, Homo sapien
gctccatgacatccactgaactccc

SEQ ID NO: 1453128 - DNA, 25 bp, Homo sapien
cctgctccatgacatccactgaact

SEQ ID NO: 1453129 - DNA, 25 bp, Homo sapien
tccccagaaacccactatcttcctc

SEQ ID NO: 1453130 - DNA, 25 bp, Homo sapien
gggaatagctctggtggcttgcaac

SEQ ID NO: 1453131 - DNA, 25 bp, Homo sapien
aaatagccagtgatgcccaagacag

SEQ ID NO: 1453132 - DNA, 25 bp, Homo sapien
tccagctgcggcgattcatcaggaa

SEQ ID NO: 1453133 - DNA, 25 bp, Homo sapien
caatcagggtcttttgggaatagct

SEQ ID NO: 1453134 - DNA, 25 bp, Homo sapien
ggtcagattggtgctttttcataag

SEQ ID NO: 1453135 - DNA, 25 bp, Homo sapien
gctttttcataagttggagtttgct

SEQ ID NO: 1453136 - DNA, 25 bp, Homo sapien
tggtgctttttcataagttggagtt

SEQ ID NO: 1453137 - DNA, 25 bp, Homo sapien
gattggtgctttttcataagttgga

SEQ ID NO: 1453138 - DNA, 25 bp, Homo sapien
gcaaggagcagggagcatacctggg

SEQ ID NO: 1453139 - DNA, 25 bp, Homo sapien
gagcagggagcatacctgggcccca

SEQ ID NO: 1453140 - DNA, 25 bp, Homo sapien
ctcacctcagactgggcaaggagca

SEQ ID NO: 1453141 - DNA, 25 bp, Homo sapien
tgttggccaagaccagcagtagaca

SEQ ID NO: 1453142 - DNA, 25 bp, Homo sapien
aattgtctcgttgaagcattgccca

SEQ ID NO: 1453143 - DNA, 25 bp, Homo sapien
gtttcaagattacagcagtccccaa

SEQ ID NO: 1453144 - DNA, 25 bp, Homo sapien
tcttcagtccggatggcagatggca

SEQ ID NO: 1453145 - DNA, 25 bp, Homo sapien
tcaggttgctgactgggccatcaga

SEQ ID NO: 1453146 - DNA, 25 bp, Homo sapien
ggcagatgccctgagtcaatttcac

SEQ ID NO: 1453147 - DNA, 25 bp, Homo sapien
gatgccctgagtcaatttcacttct

SEQ ID NO: 1453148 - DNA, 25 bp, Homo sapien
cagatgccctgagtcaatttcactt

SEQ ID NO: 1453149 - DNA, 25 bp, Homo sapien
tggaggtcttattttgctccaggca

SEQ ID NO: 1453150 - DNA, 25 bp, Homo sapien
caaggctagtgctagtggttgaaag

SEQ ID NO: 1453151 - DNA, 25 bp, Homo sapien
gaagatgatgtatagggtttagtgg

SEQ ID NO: 1453152 - DNA, 25 bp, Homo sapien
tatagggtttagtgggagatgttgc

SEQ ID NO: 1453153 - DNA, 25 bp, Homo sapien
gagatgttgcaaggctagtgctagt

SEQ ID NO: 1453154 - DNA, 25 bp, Homo sapien
tgacaggctaggcttcaaggttgtc

SEQ ID NO: 1453155 - DNA, 25 bp, Homo sapien
ggtgacaggctaggcttcaaggttg

SEQ ID NO: 1453156 - DNA, 25 bp, Homo sapien
gacaggctaggcttcaaggttgtct

SEQ ID NO: 1453157 - DNA, 25 bp, Homo sapien
aggtgacaggctaggcttcaaggtt

SEQ ID NO: 1453158 - DNA, 25 bp, Homo sapien
tgaggttatcacagaggtagatgtg

SEQ ID NO: 1453159 - DNA, 25 bp, Homo sapien
gactggacagaagagtttgtgtttc

SEQ ID NO: 1453160 - DNA, 25 bp, Homo sapien
ggtagatgtgaatttgactgtcgtt

SEQ ID NO: 1453161 - DNA, 25 bp, Homo sapien
tacagaggtctgtgactggacagaa

SEQ ID NO: 1453162 - DNA, 25 bp, Homo sapien
ccatgttgagacacagggtgcaggc

SEQ ID NO: 1453163 - DNA, 25 bp, Homo sapien
aatgttccctgggtaggtaactctg

SEQ ID NO: 1453164 - DNA, 25 bp, Homo sapien
tgatgtttgttgtggcctcattgcc

SEQ ID NO: 1453165 - DNA, 25 bp, Homo sapien
gcagtaccgttgttgtcaagactca

SEQ ID NO: 1453166 - DNA, 25 bp, Homo sapien
ggccttttccgttgcatctgaaggg

SEQ ID NO: 1453167 - DNA, 25 bp, Homo sapien
tccgttgcatctgaagggaagtaac

SEQ ID NO: 1453168 - DNA, 25 bp, Homo sapien
ccttttccgttgcatctgaagggaa

SEQ ID NO: 1453169 - DNA, 25 bp, Homo sapien
gttgcatctgaagggaagtaactca

SEQ ID NO: 1453170 - DNA, 25 bp, Homo sapien
ctgagagtggagttgggtaaccatc

SEQ ID NO: 1453171 - DNA, 25 bp, Homo sapien
gagttgggtaaccatccagccctga

SEQ ID NO: 1453172 - DNA, 25 bp, Homo sapien
tgggtaaccatccagccctgaaagt

SEQ ID NO: 1453173 - DNA, 25 bp, Homo sapien
tccagccctgaaagtaaacccaggc

SEQ ID NO: 1453174 - DNA, 25 bp, Homo sapien
gcaaactcagcaagcaaagcgcggt

SEQ ID NO: 1453175 - DNA, 25 bp, Homo sapien
gcagcaaactcagcaagcaaagcgc

SEQ ID NO: 1453176 - DNA, 25 bp, Homo sapien
aaactcagcaagcaaagcgcggtcc

SEQ ID NO: 1453177 - DNA, 25 bp, Homo sapien
tcagcaagcaaagcgcggtccagcc

SEQ ID NO: 1453178 - DNA, 25 bp, Homo sapien
cctgcgcgcgcgcccctgcggacca

SEQ ID NO: 1453179 - DNA, 25 bp, Homo sapien
cctgggccctgcgcgcgcgcccctg

SEQ ID NO: 1453180 - DNA, 25 bp, Homo sapien
cgcgcgcgcccctgcggaccagcat

SEQ ID NO: 1453181 - DNA, 25 bp, Homo sapien
gcgcgcgcgcccctgcggaccagca

SEQ ID NO: 1453182 - DNA, 25 bp, Homo sapien
cttggcaaggcagcgcctctccttg

SEQ ID NO: 1453183 - DNA, 25 bp, Homo sapien
tagagagacgcaccgagtggaagac

SEQ ID NO: 1453184 - DNA, 25 bp, Homo sapien
gtggaagacactactcggcttggcc

SEQ ID NO: 1453185 - DNA, 25 bp, Homo sapien
acttgagctcccctggttggtccca

SEQ ID NO: 1453186 - DNA, 25 bp, Homo sapien
gagagataagctgcgccgatgggtc

SEQ ID NO: 1453187 - DNA, 25 bp, Homo sapien
ctgcgccgatgggtcgggagcagca

SEQ ID NO: 1453188 - DNA, 25 bp, Homo sapien
tggtggttttctgccgccgaagtcc

SEQ ID NO: 1453189 - DNA, 25 bp, Homo sapien
tgggcagagagataagctgcgccga

SEQ ID NO: 1453190 - DNA, 25 bp, Homo sapien
cctgtctgggatgtttagtgctagc

SEQ ID NO: 1453191 - DNA, 25 bp, Homo sapien
tttgccatttgtgtacacgctgagg

SEQ ID NO: 1453192 - DNA, 25 bp, Homo sapien
tgctagctgcatatgtcctgggaac

SEQ ID NO: 1453193 - DNA, 25 bp, Homo sapien
gctatgggagcaccagtgacctgat

SEQ ID NO: 1453194 - DNA, 25 bp, Homo sapien
tagtctgacaagtcattgggtttga

SEQ ID NO: 1453195 - DNA, 25 bp, Homo sapien
ttagtctgacaagtcattgggtttg

SEQ ID NO: 1453196 - DNA, 25 bp, Homo sapien
aagtcattgggtttgatgttcccac

SEQ ID NO: 1453197 - DNA, 25 bp, Homo sapien
gacaagtcattgggtttgatgttcc

SEQ ID NO: 1453198 - DNA, 25 bp, Homo sapien
tcaaagagaacttctctattgttct

SEQ ID NO: 1453199 - DNA, 25 bp, Homo sapien
acggcgggtccgcagctgggtctgc

SEQ ID NO: 1453200 - DNA, 25 bp, Homo sapien
cctcgtgccgcaccccttgccttaa

SEQ ID NO: 1453201 - DNA, 25 bp, Homo sapien
cacgcttgcaacaccagggctgtac

SEQ ID NO: 1453202 - DNA, 25 bp, Homo sapien
caacaccagggctgtacggcgggtc

SEQ ID NO: 1453203 - DNA, 25 bp, Homo sapien
gaaagtagagttgcttgtcccttca

SEQ ID NO: 1453204 - DNA, 25 bp, Homo sapien
catggagtccctcaacctctgtaaa

SEQ ID NO: 1453205 - DNA, 25 bp, Homo sapien
tcctactgcatggtttaacacctgt

SEQ ID NO: 1453206 - DNA, 25 bp, Homo sapien
aaaaatcgtgctgctctggttcaag

SEQ ID NO: 1453207 - DNA, 25 bp, Homo sapien
atcatggagccggatgtgcacagcc

SEQ ID NO: 1453208 - DNA, 25 bp, Homo sapien
tgggctaccctggaatacagtgttg

SEQ ID NO: 1453209 - DNA, 25 bp, Homo sapien
tattaattaagacctagtgtgggcc

SEQ ID NO: 1453210 - DNA, 25 bp, Homo sapien
ccaacacctagaagacaagcaagag

SEQ ID NO: 1453211 - DNA, 25 bp, Homo sapien
tctgcaaatgcgacgttcccagtgg

SEQ ID NO: 1453212 - DNA, 25 bp, Homo sapien
tggaatcgtttcctgctctgagcct

SEQ ID NO: 1453213 - DNA, 25 bp, Homo sapien
ttcactggcaagctccatggccctg

SEQ ID NO: 1453214 - DNA, 25 bp, Homo sapien
ttcaagcagtaagaagacggtccac

SEQ ID NO: 1453215 - DNA, 25 bp, Homo sapien
aaaggatgaaggcgaccttgctcag

SEQ ID NO: 1453216 - DNA, 25 bp, Homo sapien
taaaggatgaaggcgaccttgctca

SEQ ID NO: 1453217 - DNA, 25 bp, Homo sapien
gtaaaggatgaaggcgaccttgctc

SEQ ID NO: 1453218 - DNA, 25 bp, Homo sapien
aaggatgaaggcgaccttgctcagg

SEQ ID NO: 1453219 - DNA, 25 bp, Homo sapien
gccggggaattcgttcccagctcca

SEQ ID NO: 1453220 - DNA, 25 bp, Homo sapien
gggctttcggctgcgaggtgcgaga

SEQ ID NO: 1453221 - DNA, 25 bp, Homo sapien
gtgcggtcagcgcaccgggctgggc

SEQ ID NO: 1453222 - DNA, 25 bp, Homo sapien
gggtgaaagcaaggcgagtgcggtc

SEQ ID NO: 1453223 - DNA, 25 bp, Homo sapien
ctgccctctcgtggccgcaaggcgc

SEQ ID NO: 1453224 - DNA, 25 bp, Homo sapien
cttggccagcgaccgcctcgggtcg

SEQ ID NO: 1453225 - DNA, 25 bp, Homo sapien
agccggaagcgctggccgggcgctt

SEQ ID NO: 1453226 - DNA, 25 bp, Homo sapien
ggtggtgtttctgcggcccgcggct

SEQ ID NO: 1453227 - DNA, 25 bp, Homo sapien
cggccgcttccacgcagcggaggtg

SEQ ID NO: 1453228 - DNA, 25 bp, Homo sapien
acggccgcttccacgcagcggaggt

SEQ ID NO: 1453229 - DNA, 25 bp, Homo sapien
ggcacggccgcttccacgcagcgga

SEQ ID NO: 1453230 - DNA, 25 bp, Homo sapien
gccgcttccacgcagcggaggtgcg

SEQ ID NO: 1453231 - DNA, 25 bp, Homo sapien
tgaagattagtcatgaaaaacatca

SEQ ID NO: 1453232 - DNA, 25 bp, Homo sapien
aagattagtcatgaaaaacatcact

SEQ ID NO: 1453233 - DNA, 25 bp, Homo sapien
tcgtccggggtttgaagattagtca

SEQ ID NO: 1453234 - DNA, 25 bp, Homo sapien
ctctcgtccggggtttgaagattag

SEQ ID NO: 1453235 - DNA, 25 bp, Homo sapien
gctcagtcttcgaaatgtcttctcc

SEQ ID NO: 1453236 - DNA, 25 bp, Homo sapien
agtgagtttacaagaccttgtgcag

SEQ ID NO: 1453237 - DNA, 25 bp, Homo sapien
aaatgctcagtcttcgaaatgtctt

SEQ ID NO: 1453238 - DNA, 25 bp, Homo sapien
ccctggtcctcttcattgtgatagt

SEQ ID NO: 1453239 - DNA, 25 bp, Homo sapien
cccctgcaggccatcaatagatgta

SEQ ID NO: 1453240 - DNA, 25 bp, Homo sapien
atagatgtagcagggaaacaagagc

SEQ ID NO: 1453241 - DNA, 25 bp, Homo sapien
caggccatcaatagatgtagcaggg

SEQ ID NO: 1453242 - DNA, 25 bp, Homo sapien
ggcatggggtggtcctataccgccc

SEQ ID NO: 1453243 - DNA, 25 bp, Homo sapien
gagatgttcattcctccgttgtcca

SEQ ID NO: 1453244 - DNA, 25 bp, Homo sapien
cattcttgaatgtgaacgtgaagtg

SEQ ID NO: 1453245 - DNA, 25 bp, Homo sapien
tccagttgggtgattggcctgacac

SEQ ID NO: 1453246 - DNA, 25 bp, Homo sapien
cccagggatcaaggctgaacttgcc

SEQ ID NO: 1453247 - DNA, 25 bp, Homo sapien
gatttgaccgatccttgcatcctga

SEQ ID NO: 1453248 - DNA, 25 bp, Homo sapien
ggatttgaccgatccttgcatcctg

SEQ ID NO: 1453249 - DNA, 25 bp, Homo sapien
tggatttgaccgatccttgcatcct

SEQ ID NO: 1453250 - DNA, 25 bp, Homo sapien
ctggatttgaccgatccttgcatcc

SEQ ID NO: 1453251 - DNA, 25 bp, Homo sapien
atggtttaggcttgttgagctttgc

SEQ ID NO: 1453252 - DNA, 25 bp, Homo sapien
tgagctttgcttcgtctccaactcc

SEQ ID NO: 1453253 - DNA, 25 bp, Homo sapien
tcaatacttccgagccactggtagt

SEQ ID NO: 1453254 - DNA, 25 bp, Homo sapien
cactggtagttgactcagccagaac

SEQ ID NO: 1453255 - DNA, 25 bp, Homo sapien
gacagtggctactcaagaaggttcc

SEQ ID NO: 1453256 - DNA, 25 bp, Homo sapien
aaaactggtaccctgtgccactagg

SEQ ID NO: 1453257 - DNA, 25 bp, Homo sapien
gatactaaaacgtcacacttcaggg

SEQ ID NO: 1453258 - DNA, 25 bp, Homo sapien
cagtttgcttattgggtggaggccc

SEQ ID NO: 1453259 - DNA, 25 bp, Homo sapien
cattggttcttggtggcccaaagcg

SEQ ID NO: 1453260 - DNA, 25 bp, Homo sapien
ctgtcttgccaagcacccttctggg

SEQ ID NO: 1453261 - DNA, 25 bp, Homo sapien
tcaatgaaacgaagcgaagctggat

SEQ ID NO: 1453262 - DNA, 25 bp, Homo sapien
caaagggtgtggacttcattggttc

SEQ ID NO: 1453263 - DNA, 25 bp, Homo sapien
taacttcttggtggagcaaagcctg

SEQ ID NO: 1453264 - DNA, 25 bp, Homo sapien
cagaaggtagtaacgtgggcatgcc

SEQ ID NO: 1453265 - DNA, 25 bp, Homo sapien
gatgctactgagatgtccgactgcc

SEQ ID NO: 1453266 - DNA, 25 bp, Homo sapien
tttcaaatggaacctcgtggaggcc

SEQ ID NO: 1453267 - DNA, 25 bp, Homo sapien
tgcctctcggcttgaagaaccacct

SEQ ID NO: 1453268 - DNA, 25 bp, Homo sapien
aactggctatgacgaaacttggctg

SEQ ID NO: 1453269 - DNA, 25 bp, Homo sapien
tcttcccaggaatgcgaggctcctc

SEQ ID NO: 1453270 - DNA, 25 bp, Homo sapien
tgagactcccagtgtgacagcttgg

SEQ ID NO: 1453271 - DNA, 25 bp, Homo sapien
tggcattaatgagctgctccacctt

SEQ ID NO: 1453272 - DNA, 25 bp, Homo sapien
tcagctctcaatggacatggcatta

SEQ ID NO: 1453273 - DNA, 25 bp, Homo sapien
catggcattaatgagctgctccacc

SEQ ID NO: 1453274 - DNA, 25 bp, Homo sapien
gctctcaatggacatggcattaatg

SEQ ID NO: 1453275 - DNA, 25 bp, Homo sapien
ctcggcgaggtaggcattcatgtcc

SEQ ID NO: 1453276 - DNA, 25 bp, Homo sapien
cattgagggcactcagcatgttgaa

SEQ ID NO: 1453277 - DNA, 25 bp, Homo sapien
ttgctgacataggagtagatctcat

SEQ ID NO: 1453278 - DNA, 25 bp, Homo sapien
gcatgttgaactccacggcgtgcag

SEQ ID NO: 1453279 - DNA, 25 bp, Homo sapien
ctgcccttgtggatgtcaaacacga

SEQ ID NO: 1453280 - DNA, 25 bp, Homo sapien
cacgaactgggggttcttaatcacg

SEQ ID NO: 1453281 - DNA, 25 bp, Homo sapien
aggcagagaagacttgagaatgcat

SEQ ID NO: 1453282 - DNA, 25 bp, Homo sapien
aaggcagagaagacttgagaatgca

SEQ ID NO: 1453283 - DNA, 25 bp, Homo sapien
gaaaggcagagaagacttgagaatg

SEQ ID NO: 1453284 - DNA, 25 bp, Homo sapien
gggaaaggcagagaagacttgagaa

SEQ ID NO: 1453285 - DNA, 25 bp, Homo sapien
ggtccagccagggttaatttagcca

SEQ ID NO: 1453286 - DNA, 25 bp, Homo sapien
caaagctgttactgacctgggagaa

SEQ ID NO: 1453287 - DNA, 25 bp, Homo sapien
caaatgtctcagtagtgccaggtct

SEQ ID NO: 1453288 - DNA, 25 bp, Homo sapien
taaaggactctgtgcccctaggcaa

SEQ ID NO: 1453289 - DNA, 25 bp, Homo sapien
caccgggcgtctcagtttaattcag

SEQ ID NO: 1453290 - DNA, 25 bp, Homo sapien
aggaagtgccttagaactgccccac

SEQ ID NO: 1453291 - DNA, 25 bp, Homo sapien
ggtgctgaccaacttcaccgggcgt

SEQ ID NO: 1453292 - DNA, 25 bp, Homo sapien
aatgccccacgatgtctggctgtga

SEQ ID NO: 1453293 - DNA, 25 bp, Homo sapien
gctgaacaaggtctcaaacaagtcg

SEQ ID NO: 1453294 - DNA, 25 bp, Homo sapien
caaggtctcaaacaagtcgtccaca

SEQ ID NO: 1453295 - DNA, 25 bp, Homo sapien
agagcgctgccccggtgcacagtgc

SEQ ID NO: 1453296 - DNA, 25 bp, Homo sapien
cggtgcacagtgctgaacaaggtct

SEQ ID NO: 1453297 - DNA, 25 bp, Homo sapien
gctgcaagccagtccggaaacagtg

SEQ ID NO: 1453298 - DNA, 25 bp, Homo sapien
gaaacagtgtccgaggaacaagctg

SEQ ID NO: 1453299 - DNA, 25 bp, Homo sapien
tccgggcttcccatgggtgaatgag

SEQ ID NO: 1453300 - DNA, 25 bp, Homo sapien
tccacacagggtgtaggctcagggt

SEQ ID NO: 1453301 - DNA, 25 bp, Homo sapien
aggagcacagcaggaccaggagagt

SEQ ID NO: 1453302 - DNA, 25 bp, Homo sapien
tggcaggagcacagcaggaccagga

SEQ ID NO: 1453303 - DNA, 25 bp, Homo sapien
gcaggagcacagcaggaccaggaga

SEQ ID NO: 1453304 - DNA, 25 bp, Homo sapien
ctggcaggagcacagcaggaccagg

SEQ ID NO: 1453305 - DNA, 25 bp, Homo sapien
ggacacactccagacatcctttctg

SEQ ID NO: 1453306 - DNA, 25 bp, Homo sapien
gactgtctgaatgggtcctcttgaa

SEQ ID NO: 1453307 - DNA, 25 bp, Homo sapien
ctggactgtctgaatgggtcctctt

SEQ ID NO: 1453308 - DNA, 25 bp, Homo sapien
tgtctgaatgggtcctcttgaagga

SEQ ID NO: 1453309 - DNA, 25 bp, Homo sapien
tggggtgatcatcggggcccgggac

SEQ ID NO: 1453310 - DNA, 25 bp, Homo sapien
ctgcccgtatacctgaaggaggagt

SEQ ID NO: 1453311 - DNA, 25 bp, Homo sapien
tccttctggtcaccgtggtcatggt

SEQ ID NO: 1453312 - DNA, 25 bp, Homo sapien
tcggggctgcccgtatacctgaagg

SEQ ID NO: 1453313 - DNA, 25 bp, Homo sapien
ccagccttgcttgtagaatccttcc

SEQ ID NO: 1453314 - DNA, 25 bp, Homo sapien
agggctgtgagtaacagtcaccagc

SEQ ID NO: 1453315 - DNA, 25 bp, Homo sapien
tgtagaatccttccagaatccctgc

SEQ ID NO: 1453316 - DNA, 25 bp, Homo sapien
ggctgtgagtaacagtcaccagcct

SEQ ID NO: 1453317 - DNA, 25 bp, Homo sapien
gggaccagagccaccaccgacctgt

SEQ ID NO: 1453318 - DNA, 25 bp, Homo sapien
tatctgctgatggacgtccgggaga

SEQ ID NO: 1453319 - DNA, 25 bp, Homo sapien
ggatgttgtaggaggaggtctgttt

SEQ ID NO: 1453320 - DNA, 25 bp, Homo sapien
ctgtttggggaccagagccaccacc

SEQ ID NO: 1453321 - DNA, 25 bp, Homo sapien
tctagagggttataagatagctgtg

SEQ ID NO: 1453322 - DNA, 25 bp, Homo sapien
aaggtacagtacaaaaggtgaatgt

SEQ ID NO: 1453323 - DNA, 25 bp, Homo sapien
gtgtcttgggaagttggatagtcaa

SEQ ID NO: 1453324 - DNA, 25 bp, Homo sapien
gagagcaaggagtacaggaatacca

SEQ ID NO: 1453325 - DNA, 25 bp, Homo sapien
tgaaatgtggttaatcccaactaag

SEQ ID NO: 1453326 - DNA, 25 bp, Homo sapien
catgtgtgtggattgagcatttgaa

SEQ ID NO: 1453327 - DNA, 25 bp, Homo sapien
aatcccaactaagatgagctgtgtc

SEQ ID NO: 1453328 - DNA, 25 bp, Homo sapien
agatgagctgtgtctaaattgagat

SEQ ID NO: 1453329 - DNA, 25 bp, Homo sapien
atgtcctcatcttgcagcacgaccc

SEQ ID NO: 1453330 - DNA, 25 bp, Homo sapien
gtgttgagccgcttccagtcaccct

SEQ ID NO: 1453331 - DNA, 25 bp, Homo sapien
catcttgcagcacgacccgggcgat

SEQ ID NO: 1453332 - DNA, 25 bp, Homo sapien
cgggcgatccggccttggcgccact

SEQ ID NO: 1453333 - DNA, 25 bp, Homo sapien
ctcggccgctgggaatagggcacat

SEQ ID NO: 1453334 - DNA, 25 bp, Homo sapien
taacaccttcactgggatctctgga

SEQ ID NO: 1453335 - DNA, 25 bp, Homo sapien
tctggactgttctcgttgtcagggt

SEQ ID NO: 1453336 - DNA, 25 bp, Homo sapien
tcttatacacggcatcaagaatctt

SEQ ID NO: 1453337 - DNA, 25 bp, Homo sapien
cagggtcttgtactcgatctgctgc

SEQ ID NO: 1453338 - DNA, 25 bp, Homo sapien
atgaagagtggctcccctgcgcact

SEQ ID NO: 1453339 - DNA, 25 bp, Homo sapien
gatggcacagtatagcatgaagagt

SEQ ID NO: 1453340 - DNA, 25 bp, Homo sapien
gggtcttgtactcgatctgctgccg

SEQ ID NO: 1453341 - DNA, 25 bp, Homo sapien
gcaggaggaaggcgaaccaattggt

SEQ ID NO: 1453342 - DNA, 25 bp, Homo sapien
tgtgcaggaggaaggcgaaccaatt

SEQ ID NO: 1453343 - DNA, 25 bp, Homo sapien
ggaggaaggcgaaccaattggtcag

SEQ ID NO: 1453344 - DNA, 25 bp, Homo sapien
gaggaaggcgaaccaattggtcagc

SEQ ID NO: 1453345 - DNA, 25 bp, Homo sapien
aacgcagggcgggagtcaggacacc

SEQ ID NO: 1453346 - DNA, 25 bp, Homo sapien
tggagcatgggagaacgcagggcgg

SEQ ID NO: 1453347 - DNA, 25 bp, Homo sapien
cacccagtaactagactgtgacctg

SEQ ID NO: 1453348 - DNA, 25 bp, Homo sapien
ctgggcttgccatgaggtctcccaa

SEQ ID NO: 1453349 - DNA, 25 bp, Homo sapien
caggttcttatcgatgaggtcagag

SEQ ID NO: 1453350 - DNA, 25 bp, Homo sapien
gacatcagtggcatattccaggcgg

SEQ ID NO: 1453351 - DNA, 25 bp, Homo sapien
ctgcaggccggtcatgatgagcgaa

SEQ ID NO: 1453352 - DNA, 25 bp, Homo sapien
atgagcgaagccacgttgccccggt

SEQ ID NO: 1453353 - DNA, 25 bp, Homo sapien
tcattgatatccgtctggagctcag

SEQ ID NO: 1453354 - DNA, 25 bp, Homo sapien
tagtccaggtaagggattcctgagc

SEQ ID NO: 1453355 - DNA, 25 bp, Homo sapien
catagcgtaggtacgatagtccagg

SEQ ID NO: 1453356 - DNA, 25 bp, Homo sapien
ccgggaacaggactcgcatagcgta

SEQ ID NO: 1453357 - DNA, 25 bp, Homo sapien
ctatgagaataagcagacggagagg

SEQ ID NO: 1453358 - DNA, 25 bp, Homo sapien
agaataagcagacggagaggctcgt

SEQ ID NO: 1453359 - DNA, 25 bp, Homo sapien
tgagaataagcagacggagaggctc

SEQ ID NO: 1453360 - DNA, 25 bp, Homo sapien
tatgagaataagcagacggagaggc

SEQ ID NO: 1453361 - DNA, 25 bp, Homo sapien
gggcattcttcattggacatctctg

SEQ ID NO: 1453362 - DNA, 25 bp, Homo sapien
cattcttcattggacatctctgacc

SEQ ID NO: 1453363 - DNA, 25 bp, Homo sapien
gcattcttcattggacatctctgac

SEQ ID NO: 1453364 - DNA, 25 bp, Homo sapien
ggcattcttcattggacatctctga

SEQ ID NO: 1453365 - DNA, 25 bp, Homo sapien
gaggtcattttctcgagacttgcgc

SEQ ID NO: 1453366 - DNA, 25 bp, Homo sapien
taggcaatgaggacgatgatgacga

SEQ ID NO: 1453367 - DNA, 25 bp, Homo sapien
tttgcagccgcttgagagtgaggtc

SEQ ID NO: 1453368 - DNA, 25 bp, Homo sapien
tcagcaagctgtctgagatgacact

SEQ ID NO: 1453369 - DNA, 25 bp, Homo sapien
acatacagacgcacatggatgcaca

SEQ ID NO: 1453370 - DNA, 25 bp, Homo sapien
acacaggtgtagagcccgggcatgc

SEQ ID NO: 1453371 - DNA, 25 bp, Homo sapien
cacacaggtgtagagcccgggcatg

SEQ ID NO: 1453372 - DNA, 25 bp, Homo sapien
cgcacatggatgcacacaggtgtag

SEQ ID NO: 1453373 - DNA, 25 bp, Homo sapien
ggttgggaggctcgcagagaagctg

SEQ ID NO: 1453374 - DNA, 25 bp, Homo sapien
ctcagatacggtgacagcacaaggg

SEQ ID NO: 1453375 - DNA, 25 bp, Homo sapien
tgctgcccggtgaggttgggaggct

SEQ ID NO: 1453376 - DNA, 25 bp, Homo sapien
agctgggtctcagatacggtgacag

SEQ ID NO: 1453377 - DNA, 25 bp, Homo sapien
cttcagaatgatgggcgatcctggc

SEQ ID NO: 1453378 - DNA, 25 bp, Homo sapien
gctaagcagttcaaaggtcgggttg

SEQ ID NO: 1453379 - DNA, 25 bp, Homo sapien
tctgggcgttccacagtgtccaggc

SEQ ID NO: 1453380 - DNA, 25 bp, Homo sapien
ttttgatccaagactccagtagggc

SEQ ID NO: 1453381 - DNA, 25 bp, Homo sapien
catacctcaccctagactctggagt

SEQ ID NO: 1453382 - DNA, 25 bp, Homo sapien
taggctcttttacccatggatcaag

SEQ ID NO: 1453383 - DNA, 25 bp, Homo sapien
tggatcaagttctacacctggcaga

SEQ ID NO: 1453384 - DNA, 25 bp, Homo sapien
gcagaaggaggcatgcgctcaccta

SEQ ID NO: 1453385 - DNA, 25 bp, Homo sapien
actcggatccttggctcctgaatga

SEQ ID NO: 1453386 - DNA, 25 bp, Homo sapien
ttgaatttgactcggatccttggct

SEQ ID NO: 1453387 - DNA, 25 bp, Homo sapien
tgccattgaatttgactcggatcct

SEQ ID NO: 1453388 - DNA, 25 bp, Homo sapien
gacagattctttgccattgaatttg

SEQ ID NO: 1453389 - DNA, 25 bp, Homo sapien
caggttgctatccacatgggctcgg

SEQ ID NO: 1453390 - DNA, 25 bp, Homo sapien
atgggctcggtcgacactcacagaa

SEQ ID NO: 1453391 - DNA, 25 bp, Homo sapien
tccactctggctcgatgcgctggac

SEQ ID NO: 1453392 - DNA, 25 bp, Homo sapien
ctggacccgagggtcatctatgtac

SEQ ID NO: 1453393 - DNA, 25 bp, Homo sapien
ccgtagaactcgcaggtctggttgc

SEQ ID NO: 1453394 - DNA, 25 bp, Homo sapien
tcggattgggttgagtgacagcaca

SEQ ID NO: 1453395 - DNA, 25 bp, Homo sapien
tcctgactcgggacctcggattggg

SEQ ID NO: 1453396 - DNA, 25 bp, Homo sapien
aggtaatggccggtaatggtcacca

SEQ ID NO: 1453397 - DNA, 25 bp, Homo sapien
tacacaggcgtactggcccggaggt

SEQ ID NO: 1453398 - DNA, 25 bp, Homo sapien
gggcatggcccatctcacagacaat

SEQ ID NO: 1453399 - DNA, 25 bp, Homo sapien
tactgctgatgggacttcgtcatga

SEQ ID NO: 1453400 - DNA, 25 bp, Homo sapien
gaactctggcttacactcgccaata

SEQ ID NO: 1453401 - DNA, 25 bp, Homo sapien
ctttcctcgggcatcagccgagccc

SEQ ID NO: 1453402 - DNA, 25 bp, Homo sapien
ggccataggtctctttcctcgggca

SEQ ID NO: 1453403 - DNA, 25 bp, Homo sapien
tttcctcgggcatcagccgagcccc

SEQ ID NO: 1453404 - DNA, 25 bp, Homo sapien
tggccataggtctctttcctcgggc

SEQ ID NO: 1453405 - DNA, 25 bp, Homo sapien
atggatggtcactcgcgtccctcct

SEQ ID NO: 1453406 - DNA, 25 bp, Homo sapien
ccggcggtccagacaccgtcaaaat

SEQ ID NO: 1453407 - DNA, 25 bp, Homo sapien
cctgcacatggtgggcgatctcgga

SEQ ID NO: 1453408 - DNA, 25 bp, Homo sapien
agcgatgatgtattcccctgggagg

SEQ ID NO: 1453409 - DNA, 25 bp, Homo sapien
ggagacaatttgcttttagttcctg

SEQ ID NO: 1453410 - DNA, 25 bp, Homo sapien
atttgcttttagttcctggttctct

SEQ ID NO: 1453411 - DNA, 25 bp, Homo sapien
ttaatccacttggaatgagcttcac

SEQ ID NO: 1453412 - DNA, 25 bp, Homo sapien
agacaatttgcttttagttcctggt

SEQ ID NO: 1453413 - DNA, 25 bp, Homo sapien
acctggaaagcagccgcggtgatgc

SEQ ID NO: 1453414 - DNA, 25 bp, Homo sapien
tccgtgggtgccatgacctggaaag

SEQ ID NO: 1453415 - DNA, 25 bp, Homo sapien
cattcttgcagccactaattgaaca

SEQ ID NO: 1453416 - DNA, 25 bp, Homo sapien
cagggcaccacagctaaatctgtat

SEQ ID NO: 1453417 - DNA, 25 bp, Homo sapien
agagcagatgcagccaattaattac

SEQ ID NO: 1453418 - DNA, 25 bp, Homo sapien
ggtgagagcagatgcagccaattaa

SEQ ID NO: 1453419 - DNA, 25 bp, Homo sapien
gatgcagccaattaattacagctgg

SEQ ID NO: 1453420 - DNA, 25 bp, Homo sapien
gcagatgcagccaattaattacagc

SEQ ID NO: 1453421 - DNA, 25 bp, Homo sapien
aatagaatgccacatgggatcctgg

SEQ ID NO: 1453422 - DNA, 25 bp, Homo sapien
cagaaaaaggacatcggtgggacaa

SEQ ID NO: 1453423 - DNA, 25 bp, Homo sapien
tcaggtgccctgttgataggtacca

SEQ ID NO: 1453424 - DNA, 25 bp, Homo sapien
gattcggcttctgagatccccttca

SEQ ID NO: 1453425 - DNA, 25 bp, Homo sapien
tgagaagcttgccttcggctggaaa

SEQ ID NO: 1453426 - DNA, 25 bp, Homo sapien
gggttaattagcctcgcgtagcctg

SEQ ID NO: 1453427 - DNA, 25 bp, Homo sapien
gaagcaagtctctgcctaatttaag

SEQ ID NO: 1453428 - DNA, 25 bp, Homo sapien
gaggtttcccagtgagaagcttgcc

SEQ ID NO: 1453429 - DNA, 25 bp, Homo sapien
tccctggtcacgatcaagaataaaa

SEQ ID NO: 1453430 - DNA, 25 bp, Homo sapien
cagccctgcattgtccgggatatgg

SEQ ID NO: 1453431 - DNA, 25 bp, Homo sapien
tctatctggtctatgaaaggtccgg

SEQ ID NO: 1453432 - DNA, 25 bp, Homo sapien
tatggtgtcttgtggatggattgca

SEQ ID NO: 1453433 - DNA, 25 bp, Homo sapien
tcaaacttccggtcggccttgaggc

SEQ ID NO: 1453434 - DNA, 25 bp, Homo sapien
gctggtggagggtgcacctgcgctc

SEQ ID NO: 1453435 - DNA, 25 bp, Homo sapien
tcccgctgggctgcacacttgtaga

SEQ ID NO: 1453436 - DNA, 25 bp, Homo sapien
ttgtggctggaccagtcgagccagg

SEQ ID NO: 1453437 - DNA, 25 bp, Homo sapien
tcctgagggttgtcaatgatgaaat

SEQ ID NO: 1453438 - DNA, 25 bp, Homo sapien
gaaatccacggccagattgctgatg

SEQ ID NO: 1453439 - DNA, 25 bp, Homo sapien
ttgccgttccacaccacagcgaaat

SEQ ID NO: 1453440 - DNA, 25 bp, Homo sapien
tgatgtccatgccatcatactggta

SEQ ID NO: 1453441 - DNA, 25 bp, Homo sapien
gctgttctgacactgaacgctggag

SEQ ID NO: 1453442 - DNA, 25 bp, Homo sapien
tgttgaggacacactcatagcctcg

SEQ ID NO: 1453443 - DNA, 25 bp, Homo sapien
tggaatcaagatctcctctgtgggc

SEQ ID NO: 1453444 - DNA, 25 bp, Homo sapien
gacccggtggatggctccttgtatg

SEQ ID NO: 1453445 - DNA, 25 bp, Homo sapien
tgggggaacaaacgaagaggctcca

SEQ ID NO: 1453446 - DNA, 25 bp, Homo sapien
gggaacaaacgaagaggctccatct

SEQ ID NO: 1453447 - DNA, 25 bp, Homo sapien
ggaacaaacgaagaggctccatctg

SEQ ID NO: 1453448 - DNA, 25 bp, Homo sapien
ggggaacaaacgaagaggctccatc

SEQ ID NO: 1453449 - DNA, 25 bp, Homo sapien
tggcagtgatgatgtgggaaccacc

SEQ ID NO: 1453450 - DNA, 25 bp, Homo sapien
gggaattctcataggaggctcccct

SEQ ID NO: 1453451 - DNA, 25 bp, Homo sapien
tcctcgggcagatgagcctggtagc

SEQ ID NO: 1453452 - DNA, 25 bp, Homo sapien
ggctgatgctgctacagggcctgca

SEQ ID NO: 1453453 - DNA, 25 bp, Homo sapien
gattttcttactccgaaccagctga

SEQ ID NO: 1453454 - DNA, 25 bp, Homo sapien
gggtataatggtctctctcgcactc

SEQ ID NO: 1453455 - DNA, 25 bp, Homo sapien
tttaggagccagtcactcaagctgc

SEQ ID NO: 1453456 - DNA, 25 bp, Homo sapien
aagatgagcaccactttagggaagc

SEQ ID NO: 1453457 - DNA, 25 bp, Homo sapien
tcatgagtgcagaggttgcggtact

SEQ ID NO: 1453458 - DNA, 25 bp, Homo sapien
ctctgaaatattgatccggccctcc

SEQ ID NO: 1453459 - DNA, 25 bp, Homo sapien
cggaaggcgctgttgacacaggaca

SEQ ID NO: 1453460 - DNA, 25 bp, Homo sapien
ttgcaccaatggcagcggaaggcgc

SEQ ID NO: 1453461 - DNA, 25 bp, Homo sapien
tgacatcatactctgttgccatgga

SEQ ID NO: 1453462 - DNA, 25 bp, Homo sapien
ccaccatgttggagtttgagaagga

SEQ ID NO: 1453463 - DNA, 25 bp, Homo sapien
gattcaaatgcagtggttagagggc

SEQ ID NO: 1453464 - DNA, 25 bp, Homo sapien
taagattgctctcacaaacaatgga

SEQ ID NO: 1453465 - DNA, 25 bp, Homo sapien
taaaacttgaactcggtgctgacaa

SEQ ID NO: 1453466 - DNA, 25 bp, Homo sapien
agttgtaaaacttgaactcggtgct

SEQ ID NO: 1453467 - DNA, 25 bp, Homo sapien
tcggtgctgacaaatatcttccctg

SEQ ID NO: 1453468 - DNA, 25 bp, Homo sapien
cttgaactcggtgctgacaaatatc

SEQ ID NO: 1453469 - DNA, 25 bp, Homo sapien
cgatacccgcagatagatcaggagc

SEQ ID NO: 1453470 - DNA, 25 bp, Homo sapien
ggtgagatgcagatgacctggctcc

SEQ ID NO: 1453471 - DNA, 25 bp, Homo sapien
tgtcaggttcccaaaggcacaggcg

SEQ ID NO: 1453472 - DNA, 25 bp, Homo sapien
gagcatcactcactaccaggctaag

SEQ ID NO: 1453473 - DNA, 25 bp, Homo sapien
gcgtgttccctagagtttgtgcttc

SEQ ID NO: 1453474 - DNA, 25 bp, Homo sapien
tggtggaagatagctagctcctcac

SEQ ID NO: 1453475 - DNA, 25 bp, Homo sapien
gagctcactaggttggtggaagata

SEQ ID NO: 1453476 - DNA, 25 bp, Homo sapien
gctgcgtgttccctagagtttgtgc

SEQ ID NO: 1453477 - DNA, 25 bp, Homo sapien
tgatgctggcagcaaatcgattagg

SEQ ID NO: 1453478 - DNA, 25 bp, Homo sapien
agcaaatcgattaggttcccaggcc

SEQ ID NO: 1453479 - DNA, 25 bp, Homo sapien
ggctgtgctcagatactgagatgct

SEQ ID NO: 1453480 - DNA, 25 bp, Homo sapien
caaccggctgtgctcagatactgag

SEQ ID NO: 1453481 - DNA, 25 bp, Homo sapien
aggcactccccacaagtcgtatact

SEQ ID NO: 1453482 - DNA, 25 bp, Homo sapien
gtcgtatactgctcacatgactcca

SEQ ID NO: 1453483 - DNA, 25 bp, Homo sapien
tatactgctcacatgactccacggg

SEQ ID NO: 1453484 - DNA, 25 bp, Homo sapien
cccacaagtcgtatactgctcacat

SEQ ID NO: 1453485 - DNA, 25 bp, Homo sapien
gtctgcattcagtttctctagtaaa

SEQ ID NO: 1453486 - DNA, 25 bp, Homo sapien
ctctgatgtctgcattcagtttctc

SEQ ID NO: 1453487 - DNA, 25 bp, Homo sapien
gcattcagtttctctagtaaatctc

SEQ ID NO: 1453488 - DNA, 25 bp, Homo sapien
ctggatccaattatcccattctctg

SEQ ID NO: 1453489 - DNA, 25 bp, Homo sapien
ttcggcccgtctgtcaaaacacagc

SEQ ID NO: 1453490 - DNA, 25 bp, Homo sapien
caagtgccacggagatagtgaaacc

SEQ ID NO: 1453491 - DNA, 25 bp, Homo sapien
aactgtctgcattgcattcggcccg

SEQ ID NO: 1453492 - DNA, 25 bp, Homo sapien
tgagaatggtggtccagtgcctagc

SEQ ID NO: 1453493 - DNA, 25 bp, Homo sapien
ggaattatacaatgggaggcccttc

SEQ ID NO: 1453494 - DNA, 25 bp, Homo sapien
gctgactcagagtttaacgggacac

SEQ ID NO: 1453495 - DNA, 25 bp, Homo sapien
aaggaccaagttcaagcctccgcag

SEQ ID NO: 1453496 - DNA, 25 bp, Homo sapien
gacccgcagtgctgcttcaaactgg

SEQ ID NO: 1453497 - DNA, 25 bp, Homo sapien
gccttccttggcctgattcagcggg

SEQ ID NO: 1453498 - DNA, 25 bp, Homo sapien
ggtgccttccttggcctgattcagc

SEQ ID NO: 1453499 - DNA, 25 bp, Homo sapien
ccttccttggcctgattcagcgggg

SEQ ID NO: 1453500 - DNA, 25 bp, Homo sapien
tgccttccttggcctgattcagcgg

SEQ ID NO: 1453501 - DNA, 25 bp, Homo sapien
gatgggactgactgttcgctcttct

SEQ ID NO: 1453502 - DNA, 25 bp, Homo sapien
gcgcttaagtcctcacttgcagtga

SEQ ID NO: 1453503 - DNA, 25 bp, Homo sapien
caaagtggccaactggaggagaatc

SEQ ID NO: 1453504 - DNA, 25 bp, Homo sapien
tgtatggacagagatcaataacgca

SEQ ID NO: 1453505 - DNA, 25 bp, Homo sapien
gaggctgtgagcaggctccacgttt

SEQ ID NO: 1453506 - DNA, 25 bp, Homo sapien
taggaccagaacgataatggaagag

SEQ ID NO: 1453507 - DNA, 25 bp, Homo sapien
agaacgataatggaagaggctgtga

SEQ ID NO: 1453508 - DNA, 25 bp, Homo sapien
tgtgagcaggctccacgttttccat

SEQ ID NO: 1453509 - DNA, 25 bp, Homo sapien
cagctatgtacacaaggaagcaggg

SEQ ID NO: 1453510 - DNA, 25 bp, Homo sapien
gactctgagtaggtaagaagccaca

SEQ ID NO: 1453511 - DNA, 25 bp, Homo sapien
cataggtgccggatctgagaccaga

SEQ ID NO: 1453512 - DNA, 25 bp, Homo sapien
agatttggcaaagcctgactgccca

SEQ ID NO: 1453513 - DNA, 25 bp, Homo sapien
atgtcatcgagcttctgggggtcac

SEQ ID NO: 1453514 - DNA, 25 bp, Homo sapien
gtaaccaatgtcatcgagcttctgg

SEQ ID NO: 1453515 - DNA, 25 bp, Homo sapien
ccaatgtcatcgagcttctgggggt

SEQ ID NO: 1453516 - DNA, 25 bp, Homo sapien
taaccaatgtcatcgagcttctggg

SEQ ID NO: 1453517 - DNA, 25 bp, Homo sapien
tgcatgccgggtccggtggaaaaaa

SEQ ID NO: 1453518 - DNA, 25 bp, Homo sapien
actgaacacttagcatcgagctgtg

SEQ ID NO: 1453519 - DNA, 25 bp, Homo sapien
gttttaatcagaacattgccggaga

SEQ ID NO: 1453520 - DNA, 25 bp, Homo sapien
tgatgtaattaggtgctcactgaac

SEQ ID NO: 1453521 - DNA, 25 bp, Homo sapien
cgtctggatacacaccacgggtgat

SEQ ID NO: 1453522 - DNA, 25 bp, Homo sapien
cacgggtgatgcattatcattccag

SEQ ID NO: 1453523 - DNA, 25 bp, Homo sapien
cgtaatctggcttcgtctggataca

SEQ ID NO: 1453524 - DNA, 25 bp, Homo sapien
tggacttttaaccacctgagcgtaa

SEQ ID NO: 1453525 - DNA, 25 bp, Homo sapien
ggagtacgaggctgaaaggtgaaag

SEQ ID NO: 1453526 - DNA, 25 bp, Homo sapien
caggagtacgaggctgaaaggtgaa

SEQ ID NO: 1453527 - DNA, 25 bp, Homo sapien
gcacaggagtacgaggctgaaaggt

SEQ ID NO: 1453528 - DNA, 25 bp, Homo sapien
ggcacaggagtacgaggctgaaagg

SEQ ID NO: 1453529 - DNA, 25 bp, Homo sapien
atatcacagacccagcgaaaggtgt

SEQ ID NO: 1453530 - DNA, 25 bp, Homo sapien
ccatatatattgttgtctaggagag

SEQ ID NO: 1453531 - DNA, 25 bp, Homo sapien
tatattgttgtctaggagagcaaca

SEQ ID NO: 1453532 - DNA, 25 bp, Homo sapien
gagcaacaaagccaccatatcacag

SEQ ID NO: 1453533 - DNA, 25 bp, Homo sapien
tccctgcaagctccatctccagggt

SEQ ID NO: 1453534 - DNA, 25 bp, Homo sapien
gctccctgcaagctccatctccagg

SEQ ID NO: 1453535 - DNA, 25 bp, Homo sapien
cggctccctgcaagctccatctcca

SEQ ID NO: 1453536 - DNA, 25 bp, Homo sapien
tctccagggttcacaccattctcct

SEQ ID NO: 1453537 - DNA, 25 bp, Homo sapien
tggtgagcttgccacagagagcacc

SEQ ID NO: 1453538 - DNA, 25 bp, Homo sapien
gctatattgggtggtgccctctcct

SEQ ID NO: 1453539 - DNA, 25 bp, Homo sapien
caagttctatgttgtagcagctggg

SEQ ID NO: 1453540 - DNA, 25 bp, Homo sapien
gctctgccagtatcaagttttggga

SEQ ID NO: 1453541 - DNA, 25 bp, Homo sapien
cagaaaccgtcctagtcatcagtgg

SEQ ID NO: 1453542 - DNA, 25 bp, Homo sapien
ttcatggctagaaggaatgcaccca

SEQ ID NO: 1453543 - DNA, 25 bp, Homo sapien
tcagggaacttaaccacaaggcatg

SEQ ID NO: 1453544 - DNA, 25 bp, Homo sapien
gatgtccctggataaaaggcctgag

SEQ ID NO: 1453545 - DNA, 25 bp, Homo sapien
gtttggtgtagactgtaacaagaac

SEQ ID NO: 1453546 - DNA, 25 bp, Homo sapien
ggctactgctaaacccctctgtttg

SEQ ID NO: 1453547 - DNA, 25 bp, Homo sapien
catcgtggctggctactgctaaacc

SEQ ID NO: 1453548 - DNA, 25 bp, Homo sapien
gtagactgtaacaagaactgggtac

SEQ ID NO: 1453549 - DNA, 25 bp, Homo sapien
tcatccctcatcccctgattcagac

SEQ ID NO: 1453550 - DNA, 25 bp, Homo sapien
catccctcatcccctgattcagact

SEQ ID NO: 1453551 - DNA, 25 bp, Homo sapien
atccctcatcccctgattcagactc

SEQ ID NO: 1453552 - DNA, 25 bp, Homo sapien
aatcacaccaagctgctccacgcag

SEQ ID NO: 1453553 - DNA, 25 bp, Homo sapien
tcatcacttactgagacaggggctg

SEQ ID NO: 1453554 - DNA, 25 bp, Homo sapien
cacgcagtctggcctgttcttgcag

SEQ ID NO: 1453555 - DNA, 25 bp, Homo sapien
ctcctaatcacaccaagctgctcca

SEQ ID NO: 1453556 - DNA, 25 bp, Homo sapien
ggggcttccgtccttgagcacagag

SEQ ID NO: 1453557 - DNA, 25 bp, Homo sapien
gacatgacgtacaggtagcgctgat

SEQ ID NO: 1453558 - DNA, 25 bp, Homo sapien
agaaggccatgtcccggaggatggg

SEQ ID NO: 1453559 - DNA, 25 bp, Homo sapien
tagcgctgatcaatggagaaggcca

SEQ ID NO: 1453560 - DNA, 25 bp, Homo sapien
tgtatgagaaacaagggtgtcctca

SEQ ID NO: 1453561 - DNA, 25 bp, Homo sapien
tgagaaacaagggtgtcctcagcat

SEQ ID NO: 1453562 - DNA, 25 bp, Homo sapien
tatgagaaacaagggtgtcctcagc

SEQ ID NO: 1453563 - DNA, 25 bp, Homo sapien
ctgtatgagaaacaagggtgtcctc

SEQ ID NO: 1453564 - DNA, 25 bp, Homo sapien
tggactcgatgtacatgggaaacag

SEQ ID NO: 1453565 - DNA, 25 bp, Homo sapien
tcagggtctagaggcaaggacacca

SEQ ID NO: 1453566 - DNA, 25 bp, Homo sapien
tgcctgaggcccttgtgctataccc

SEQ ID NO: 1453567 - DNA, 25 bp, Homo sapien
ccccacggatgaaaatggtaggtca

SEQ ID NO: 1453568 - DNA, 25 bp, Homo sapien
tgctgggcgacttgggggcttctgg

SEQ ID NO: 1453569 - DNA, 25 bp, Homo sapien
tctgggcctgaacttaaggaggtaa

SEQ ID NO: 1453570 - DNA, 25 bp, Homo sapien
ctgaacttaaggaggtaacctcaat

SEQ ID NO: 1453571 - DNA, 25 bp, Homo sapien
cacctgctttgctgggcgacttggg

SEQ ID NO: 1453572 - DNA, 25 bp, Homo sapien
cctccactgtgacaaagaaggccac

SEQ ID NO: 1453573 - DNA, 25 bp, Homo sapien
ctccactgtgacaaagaaggccacc

SEQ ID NO: 1453574 - DNA, 25 bp, Homo sapien
ggcagcagagggttagcaggtgcat

SEQ ID NO: 1453575 - DNA, 25 bp, Homo sapien
tgtcctttccaagggagcaggactg

SEQ ID NO: 1453576 - DNA, 25 bp, Homo sapien
ctctgtcctttccaagggagcagga

SEQ ID NO: 1453577 - DNA, 25 bp, Homo sapien
ggaggcagcagagggttagcaggtg

SEQ ID NO: 1453578 - DNA, 25 bp, Homo sapien
gatagatgctgataggtatattgtt

SEQ ID NO: 1453579 - DNA, 25 bp, Homo sapien
ttctttccgctaataacttggagga

SEQ ID NO: 1453580 - DNA, 25 bp, Homo sapien
gatgctgataggtatattgttctca

SEQ ID NO: 1453581 - DNA, 25 bp, Homo sapien
agaggctgcttaagtcaaatgattt

SEQ ID NO: 1453582 - DNA, 25 bp, Homo sapien
tcagtacatcttagcagttattaca

SEQ ID NO: 1453583 - DNA, 25 bp, Homo sapien
taccctaataggattatgtggtgag

SEQ ID NO: 1453584 - DNA, 25 bp, Homo sapien
agtaggtgctcagtacatcttagca

SEQ ID NO: 1453585 - DNA, 25 bp, Homo sapien
cctaataggattatgtggtgagaat

SEQ ID NO: 1453586 - DNA, 25 bp, Homo sapien
ggtggcaactatcccaaggaagctg

SEQ ID NO: 1453587 - DNA, 25 bp, Homo sapien
taagtacttccaagttaccgctgcc

SEQ ID NO: 1453588 - DNA, 25 bp, Homo sapien
ttatctcaccgctggaaagcttggc

SEQ ID NO: 1453589 - DNA, 25 bp, Homo sapien
catattgtgaaagaccagggatccc

SEQ ID NO: 1453590 - DNA, 25 bp, Homo sapien
gtcactgggcaagagtccttccttt

SEQ ID NO: 1453591 - DNA, 25 bp, Homo sapien
ccagtcactgggcaagagtccttcc

SEQ ID NO: 1453592 - DNA, 25 bp, Homo sapien
tccagtatggaatacagccagtcac

SEQ ID NO: 1453593 - DNA, 25 bp, Homo sapien
gtgaactgtggactccagtatggaa

SEQ ID NO: 1453594 - DNA, 25 bp, Homo sapien
aagaaacgcctctgcattcaagcgg

SEQ ID NO: 1453595 - DNA, 25 bp, Homo sapien
tatttactccgtttggcagacgagg

SEQ ID NO: 1453596 - DNA, 25 bp, Homo sapien
taactttcatgtatcaggcaccgcg

SEQ ID NO: 1453597 - DNA, 25 bp, Homo sapien
cattggcatccatcctagaaaggca

SEQ ID NO: 1453598 - DNA, 25 bp, Homo sapien
ctccttagtagctgggattgcaggc

SEQ ID NO: 1453599 - DNA, 25 bp, Homo sapien
ggattgcaggcatccgccaccaggc

SEQ ID NO: 1453600 - DNA, 25 bp, Homo sapien
cgattctcctgcctcctgcctcagc

SEQ ID NO: 1453601 - DNA, 25 bp, Homo sapien
ttgcaggcatccgccaccaggccca

SEQ ID NO: 1453602 - DNA, 25 bp, Homo sapien
gccagggcagccatttttgacagtt

SEQ ID NO: 1453603 - DNA, 25 bp, Homo sapien
tatgatgccggtaccagaactgtcc

SEQ ID NO: 1453604 - DNA, 25 bp, Homo sapien
tccgactcagagatccaggtccatg

SEQ ID NO: 1453605 - DNA, 25 bp, Homo sapien
gcaaattggtccctacccgaaggca

SEQ ID NO: 1453606 - DNA, 25 bp, Homo sapien
ttcgcaaccaaccacatcaacagga

SEQ ID NO: 1453607 - DNA, 25 bp, Homo sapien
tccctgggactaagaggctagagag

SEQ ID NO: 1453608 - DNA, 25 bp, Homo sapien
tgaatctcaagggaggtagacacct

SEQ ID NO: 1453609 - DNA, 25 bp, Homo sapien
tcaacaggagtcaccgttggtgtct

SEQ ID NO: 1453610 - DNA, 25 bp, Homo sapien
ggagaacttggccaactcaggtgtg

SEQ ID NO: 1453611 - DNA, 25 bp, Homo sapien
gaagcagccaaatcacaggtcagaa

SEQ ID NO: 1453612 - DNA, 25 bp, Homo sapien
tccgtcagggtttcaataaggccag

SEQ ID NO: 1453613 - DNA, 25 bp, Homo sapien
tgtcaagtacctcaaagcagcgtgg

SEQ ID NO: 1453614 - DNA, 25 bp, Homo sapien
gaagcctatcccatgagtgaacact

SEQ ID NO: 1453615 - DNA, 25 bp, Homo sapien
tagcactgctaggtgaacccagacc

SEQ ID NO: 1453616 - DNA, 25 bp, Homo sapien
tacatgatgtgacagggagagctca

SEQ ID NO: 1453617 - DNA, 25 bp, Homo sapien
tccatgtgccgaaaagccaagctag

SEQ ID NO: 1453618 - DNA, 25 bp, Homo sapien
caacatcaaagggtgagatgcagtg

SEQ ID NO: 1453619 - DNA, 25 bp, Homo sapien
gagctccagggtgatgtcaacatca

SEQ ID NO: 1453620 - DNA, 25 bp, Homo sapien
tgaggtcttgcatgttccttgatcc

SEQ ID NO: 1453621 - DNA, 25 bp, Homo sapien
ccaaggctctaaatggattaggagg

SEQ ID NO: 1453622 - DNA, 25 bp, Homo sapien
gattagctgagaccggaaagaatgt

SEQ ID NO: 1453623 - DNA, 25 bp, Homo sapien
tgagaccggaaagaatgtggctgct

SEQ ID NO: 1453624 - DNA, 25 bp, Homo sapien
cggaaagaatgtggctgctctaatc

SEQ ID NO: 1453625 - DNA, 25 bp, Homo sapien
gaaaagggattagctgagaccggaa

SEQ ID NO: 1453626 - DNA, 25 bp, Homo sapien
gctggaggaagtagctagaagctaa

SEQ ID NO: 1453627 - DNA, 25 bp, Homo sapien
cccaggtcttagaattgggaccagt

SEQ ID NO: 1453628 - DNA, 25 bp, Homo sapien
tacatacccaatgactgatggctgg

SEQ ID NO: 1453629 - DNA, 25 bp, Homo sapien
tacgcttgcattccttacataccca

SEQ ID NO: 1453630 - DNA, 25 bp, Homo sapien
tagttaaatctccaccaatagctac

SEQ ID NO: 1453631 - DNA, 25 bp, Homo sapien
aaagttgcctatagttaaatctcca

SEQ ID NO: 1453632 - DNA, 25 bp, Homo sapien
aataaagttgcctatagttaaatct

SEQ ID NO: 1453633 - DNA, 25 bp, Homo sapien
tgcctatagttaaatctccaccaat

SEQ ID NO: 1453634 - DNA, 25 bp, Homo sapien
ggaggtgaatggcattggagcatct

SEQ ID NO: 1453635 - DNA, 25 bp, Homo sapien
tgaatggcattggagcatctgaact

SEQ ID NO: 1453636 - DNA, 25 bp, Homo sapien
aatggcattggagcatctgaactca

SEQ ID NO: 1453637 - DNA, 25 bp, Homo sapien
ggtgaatggcattggagcatctgaa

SEQ ID NO: 1453638 - DNA, 25 bp, Homo sapien
gccgttgtaaacgtaggaggccaca

SEQ ID NO: 1453639 - DNA, 25 bp, Homo sapien
caaaaaccacgctgtagccgttgta

SEQ ID NO: 1453640 - DNA, 25 bp, Homo sapien
gtccagtccacagaagttatcatcg

SEQ ID NO: 1453641 - DNA, 25 bp, Homo sapien
atgcggtccctgctggtggtgtaca

SEQ ID NO: 1453642 - DNA, 25 bp, Homo sapien
ggtgaagtctctacacgacccatat

SEQ ID NO: 1453643 - DNA, 25 bp, Homo sapien
gggccctaatacaagctgcagacaa

SEQ ID NO: 1453644 - DNA, 25 bp, Homo sapien
taacagtggaggcatggtgaagtct

SEQ ID NO: 1453645 - DNA, 25 bp, Homo sapien
caggaccatggcattctgtgggatc

SEQ ID NO: 1453646 - DNA, 25 bp, Homo sapien
gaaggtccagtcacgattctcagag

SEQ ID NO: 1453647 - DNA, 25 bp, Homo sapien
gccagcaggcggttctcagagtagt

SEQ ID NO: 1453648 - DNA, 25 bp, Homo sapien
caaagagtacatcgtcctggctggt

SEQ ID NO: 1453649 - DNA, 25 bp, Homo sapien
gccgtgccgatgaagagcttgccat

SEQ ID NO: 1453650 - DNA, 25 bp, Homo sapien
gcggtgaggagacggctcctgtgtg

SEQ ID NO: 1453651 - DNA, 25 bp, Homo sapien
gtgaggagacggctcctgtgtgtgc

SEQ ID NO: 1453652 - DNA, 25 bp, Homo sapien
cggcggtgaggagacggctcctgtg

SEQ ID NO: 1453653 - DNA, 25 bp, Homo sapien
ttccccggttggccctcacatgatt

SEQ ID NO: 1453654 - DNA, 25 bp, Homo sapien
gcagagtggtcagaccaaaaataat

SEQ ID NO: 1453655 - DNA, 25 bp, Homo sapien
aggcagagtggtcagaccaaaaata

SEQ ID NO: 1453656 - DNA, 25 bp, Homo sapien
ggcagagtggtcagaccaaaaataa

SEQ ID NO: 1453657 - DNA, 25 bp, Homo sapien
tgtagccaacaagactgggattccc

SEQ ID NO: 1453658 - DNA, 25 bp, Homo sapien
tgaaagcttgttaggcaggccctcc

SEQ ID NO: 1453659 - DNA, 25 bp, Homo sapien
aagaagaacccctgatcactagctg

SEQ ID NO: 1453660 - DNA, 25 bp, Homo sapien
gattcccacatgtgccattccggag

SEQ ID NO: 1453661 - DNA, 25 bp, Homo sapien
tcctgaggccggtagcaggacgtga

SEQ ID NO: 1453662 - DNA, 25 bp, Homo sapien
gaggttatttttagctatgtcctga

SEQ ID NO: 1453663 - DNA, 25 bp, Homo sapien
gttatttttagctatgtcctgaggc

SEQ ID NO: 1453664 - DNA, 25 bp, Homo sapien
caggacgtgaattcctgaagaggag

SEQ ID NO: 1453665 - DNA, 25 bp, Homo sapien
taactcggagcgttcctgatgccaa

SEQ ID NO: 1453666 - DNA, 25 bp, Homo sapien
taaatattttatgtggagggcccga

SEQ ID NO: 1453667 - DNA, 25 bp, Homo sapien
cctctttgggaagcaagtgccacta

SEQ ID NO: 1453668 - DNA, 25 bp, Homo sapien
tgttagtagctctcatacccgtggg

SEQ ID NO: 1453669 - DNA, 25 bp, Homo sapien
ttatgaagggttccaagatgtgcac

SEQ ID NO: 1453670 - DNA, 25 bp, Homo sapien
gttccaagatgtgcactcatctgag

SEQ ID NO: 1453671 - DNA, 25 bp, Homo sapien
taaaagtttggagttgtatccctga

SEQ ID NO: 1453672 - DNA, 25 bp, Homo sapien
gagttgtatccctgaattatgaagg

SEQ ID NO: 1453673 - DNA, 25 bp, Homo sapien
ccattgtctgactttgccaggcaca

SEQ ID NO: 1453674 - DNA, 25 bp, Homo sapien
ggctgttgcccagatagactcagca

SEQ ID NO: 1453675 - DNA, 25 bp, Homo sapien
caaactggttggtctgttgagtccc

SEQ ID NO: 1453676 - DNA, 25 bp, Homo sapien
tgctaagcacccaagttcaagtcct

SEQ ID NO: 1453677 - DNA, 25 bp, Homo sapien
ttctccccgtgctgacctgaggtct

SEQ ID NO: 1453678 - DNA, 25 bp, Homo sapien
cttgtgttgctcttgctgggttgtc

SEQ ID NO: 1453679 - DNA, 25 bp, Homo sapien
ggtgatttaggaccacttgtgttgc

SEQ ID NO: 1453680 - DNA, 25 bp, Homo sapien
agtcctctcggaagaaacaaacagg

SEQ ID NO: 1453681 - DNA, 25 bp, Homo sapien
tgacgtccaggtacatctgagctaa

SEQ ID NO: 1453682 - DNA, 25 bp, Homo sapien
ccttagataagaaaagcctctggac

SEQ ID NO: 1453683 - DNA, 25 bp, Homo sapien
gatgaactatcaagggatgctatca

SEQ ID NO: 1453684 - DNA, 25 bp, Homo sapien
gatgctatcagattggaagagacgg

SEQ ID NO: 1453685 - DNA, 25 bp, Homo sapien
tcggaatcagggagacgaccaaatc

SEQ ID NO: 1453686 - DNA, 25 bp, Homo sapien
ttcgaggtttgctccgctggctgcg

SEQ ID NO: 1453687 - DNA, 25 bp, Homo sapien
ttttccagcgcgactttccgggctc

SEQ ID NO: 1453688 - DNA, 25 bp, Homo sapien
ttaaaatccacgtcaagccaccaga

SEQ ID NO: 1453689 - DNA, 25 bp, Homo sapien
aatatccctttgcttatggggtcat

SEQ ID NO: 1453690 - DNA, 25 bp, Homo sapien
tgcttatggggtcattgttgtccat

SEQ ID NO: 1453691 - DNA, 25 bp, Homo sapien
tatccctttgcttatggggtcattg

SEQ ID NO: 1453692 - DNA, 25 bp, Homo sapien
ccctttgcttatggggtcattgttg

SEQ ID NO: 1453693 - DNA, 25 bp, Homo sapien
gaactgccaagagtcaattccaact

SEQ ID NO: 1453694 - DNA, 25 bp, Homo sapien
gatgaaaatacccaagaccaaaggc

SEQ ID NO: 1453695 - DNA, 25 bp, Homo sapien
caaagtgtatgtcttggcgctaaca

SEQ ID NO: 1453696 - DNA, 25 bp, Homo sapien
caactctctgtttggataagataga

SEQ ID NO: 1453697 - DNA, 25 bp, Homo sapien
tcaagctttctgcagcgggagtgga

SEQ ID NO: 1453698 - DNA, 25 bp, Homo sapien
agtgtctggaagggatcaagcactg

SEQ ID NO: 1453699 - DNA, 25 bp, Homo sapien
tttctgcagcgggagtggaaagtgt

SEQ ID NO: 1453700 - DNA, 25 bp, Homo sapien
gtgtctggaagggatcaagcactgg

SEQ ID NO: 1453701 - DNA, 25 bp, Homo sapien
gggccgtaacccactttgctctcca

SEQ ID NO: 1453702 - DNA, 25 bp, Homo sapien
cgtataagaaatagatcataagcag

SEQ ID NO: 1453703 - DNA, 25 bp, Homo sapien
aaattaccgaatgcaatgatctggg

SEQ ID NO: 1453704 - DNA, 25 bp, Homo sapien
gctctccagcgcatttatcatattg

SEQ ID NO: 1453705 - DNA, 25 bp, Homo sapien
ctctgccatcgtaagaatattctcc

SEQ ID NO: 1453706 - DNA, 25 bp, Homo sapien
tgccatcgtaagaatattctccctg

SEQ ID NO: 1453707 - DNA, 25 bp, Homo sapien
ctggtgggttcagctgagactggaa

SEQ ID NO: 1453708 - DNA, 25 bp, Homo sapien
tggaaacccaagtgaacaaggtctc

SEQ ID NO: 1453709 - DNA, 25 bp, Homo sapien
gtgggaatgcggtccgaggccccca

SEQ ID NO: 1453710 - DNA, 25 bp, Homo sapien
tgggaatgcggtccgaggcccccat

SEQ ID NO: 1453711 - DNA, 25 bp, Homo sapien
aatccatccccagacactgagactc

SEQ ID NO: 1453712 - DNA, 25 bp, Homo sapien
aaatccatccccagacactgagact

SEQ ID NO: 1453713 - DNA, 25 bp, Homo sapien
gaaatccatccccagacactgagac

SEQ ID NO: 1453714 - DNA, 25 bp, Homo sapien
tccctgtcaccactgaagcatctgt

SEQ ID NO: 1453715 - DNA, 25 bp, Homo sapien
ctcccaatcctccaaagctgtctct

SEQ ID NO: 1453716 - DNA, 25 bp, Homo sapien
actgaagcatctgtgctcacggaaa

SEQ ID NO: 1453717 - DNA, 25 bp, Homo sapien
ctcacggaaatatctctggaaacct

SEQ ID NO: 1453718 - DNA, 25 bp, Homo sapien
ctttccgatagagtgtagaccacgg

SEQ ID NO: 1453719 - DNA, 25 bp, Homo sapien
tatctgcacaaacaccgagttctag

SEQ ID NO: 1453720 - DNA, 25 bp, Homo sapien
ccgatagagtgtagaccacggaggt

SEQ ID NO: 1453721 - DNA, 25 bp, Homo sapien
caccgagttctaggctttccgatag

SEQ ID NO: 1453722 - DNA, 25 bp, Homo sapien
caagtagaactaggtgacacgcagc

SEQ ID NO: 1453723 - DNA, 25 bp, Homo sapien
ggaagtagagcctgaattgccagca

SEQ ID NO: 1453724 - DNA, 25 bp, Homo sapien
gggcttcacttcctcgtagggtcca

SEQ ID NO: 1453725 - DNA, 25 bp, Homo sapien
tctgtgagccatgtagggtgcctgt

SEQ ID NO: 1453726 - DNA, 25 bp, Homo sapien
gggttgaagctatgtttaaatctct

SEQ ID NO: 1453727 - DNA, 25 bp, Homo sapien
ttctgtgtcagggacgatagggttg

SEQ ID NO: 1453728 - DNA, 25 bp, Homo sapien
tcttttcatgactgatcggctatgg

SEQ ID NO: 1453729 - DNA, 25 bp, Homo sapien
tgactgatcggctatggcaggatcc

SEQ ID NO: 1453730 - DNA, 25 bp, Homo sapien
tccctctcagctagggcagtctcag

SEQ ID NO: 1453731 - DNA, 25 bp, Homo sapien
cctctccctctcagctagggcagtc

SEQ ID NO: 1453732 - DNA, 25 bp, Homo sapien
tctcagctagggcagtctcagatgc

SEQ ID NO: 1453733 - DNA, 25 bp, Homo sapien
cagctagggcagtctcagatgcctt

SEQ ID NO: 1453734 - DNA, 25 bp, Homo sapien
caatccagggtgcactaaagagata

SEQ ID NO: 1453735 - DNA, 25 bp, Homo sapien
gcaatccagggtgcactaaagagat

SEQ ID NO: 1453736 - DNA, 25 bp, Homo sapien
ctgcaatccagggtgcactaaagag

SEQ ID NO: 1453737 - DNA, 25 bp, Homo sapien
atccagggtgcactaaagagataaa

SEQ ID NO: 1453738 - DNA, 25 bp, Homo sapien
gtggggcaaccagatgccattctga

SEQ ID NO: 1453739 - DNA, 25 bp, Homo sapien
tgtgcctgcttggaaagaaacttgg

SEQ ID NO: 1453740 - DNA, 25 bp, Homo sapien
cagcttgcaatgagtcctcttaggg

SEQ ID NO: 1453741 - DNA, 25 bp, Homo sapien
gaaacttgggattctgtccaggaag

SEQ ID NO: 1453742 - DNA, 25 bp, Homo sapien
cttctgggaccatcaacttctgtgc

SEQ ID NO: 1453743 - DNA, 25 bp, Homo sapien
catagaggggcagcatttccacaga

SEQ ID NO: 1453744 - DNA, 25 bp, Homo sapien
ttcaacatgccagggtctagccgga

SEQ ID NO: 1453745 - DNA, 25 bp, Homo sapien
attggctttgactagggcatagagg

SEQ ID NO: 1453746 - DNA, 25 bp, Homo sapien
tgtgaagcagtaacccggcttcaac

SEQ ID NO: 1453747 - DNA, 25 bp, Homo sapien
ggtccaggtagtagatcgttcaggc

SEQ ID NO: 1453748 - DNA, 25 bp, Homo sapien
aggctgcaggtccaggtagtagatc

SEQ ID NO: 1453749 - DNA, 25 bp, Homo sapien
tgcaggtccaggtagtagatcgttc

SEQ ID NO: 1453750 - DNA, 25 bp, Homo sapien
caggtccaggtagtagatcgttcag

SEQ ID NO: 1453751 - DNA, 25 bp, Homo sapien
gcttgataacactccttgtggaaaa

SEQ ID NO: 1453752 - DNA, 25 bp, Homo sapien
tttcctgcttgataacactccttgt

SEQ ID NO: 1453753 - DNA, 25 bp, Homo sapien
tgaattcatttctgagtccggtaat

SEQ ID NO: 1453754 - DNA, 25 bp, Homo sapien
tcatttctgagtccggtaatgagca

SEQ ID NO: 1453755 - DNA, 25 bp, Homo sapien
tacatagaacacctccatgcagtgc

SEQ ID NO: 1453756 - DNA, 25 bp, Homo sapien
tccatgcagtgctcggtctgggccc

SEQ ID NO: 1453757 - DNA, 25 bp, Homo sapien
tgagctacatagaacacctccatgc

SEQ ID NO: 1453758 - DNA, 25 bp, Homo sapien
tgaggtctctgagctacatagaaca

SEQ ID NO: 1453759 - DNA, 25 bp, Homo sapien
tcggaagagtctctcctttagtctc

SEQ ID NO: 1453760 - DNA, 25 bp, Homo sapien
gctctgacagcctacaaactcttgg

SEQ ID NO: 1453761 - DNA, 25 bp, Homo sapien
tagtctcttttgaggcgagcttctt

SEQ ID NO: 1453762 - DNA, 25 bp, Homo sapien
gtccactcggaagagtctctccttt

SEQ ID NO: 1453763 - DNA, 25 bp, Homo sapien
tagctgtatttgcagctccagcagg

SEQ ID NO: 1453764 - DNA, 25 bp, Homo sapien
tagctcatttgtgcaggagtagtgc

SEQ ID NO: 1453765 - DNA, 25 bp, Homo sapien
tggagctgtgactttccttaggaag

SEQ ID NO: 1453766 - DNA, 25 bp, Homo sapien
cagggagcccatttccattgaagag

SEQ ID NO: 1453767 - DNA, 25 bp, Homo sapien
taaactttctctttgtactcttcat

SEQ ID NO: 1453768 - DNA, 25 bp, Homo sapien
tgccaccttcacttcctttcttaaa

SEQ ID NO: 1453769 - DNA, 25 bp, Homo sapien
ttaaactttctctttgtactcttca

SEQ ID NO: 1453770 - DNA, 25 bp, Homo sapien
ctggtgccaccttcacttcctttct

SEQ ID NO: 1453771 - DNA, 25 bp, Homo sapien
aactcatgagtaggctcatttcatc

SEQ ID NO: 1453772 - DNA, 25 bp, Homo sapien
tgaactcatgagtaggctcatttca

SEQ ID NO: 1453773 - DNA, 25 bp, Homo sapien
aggtgaactcatgagtaggctcatt

SEQ ID NO: 1453774 - DNA, 25 bp, Homo sapien
catgagtaggctcatttcatccaac

SEQ ID NO: 1453775 - DNA, 25 bp, Homo sapien
gtttataacttgaagcccacaggct

SEQ ID NO: 1453776 - DNA, 25 bp, Homo sapien
ggagaaacatcttgaaagctagcat

SEQ ID NO: 1453777 - DNA, 25 bp, Homo sapien
cattcgcttagaggatgcagactcc

SEQ ID NO: 1453778 - DNA, 25 bp, Homo sapien
tgctcctaaactcaaatcatgatgg

SEQ ID NO: 1453779 - DNA, 25 bp, Homo sapien
gatgtcctcttgattggcaacttga

SEQ ID NO: 1453780 - DNA, 25 bp, Homo sapien
tgatcaatgatatctcccatgagga

SEQ ID NO: 1453781 - DNA, 25 bp, Homo sapien
cagtgagtgacccaggtcctctgtg

SEQ ID NO: 1453782 - DNA, 25 bp, Homo sapien
ccattccagttgtatcttcctccaa

SEQ ID NO: 1453783 - DNA, 25 bp, Homo sapien
cctgatgtttgggtaacagagtcga

SEQ ID NO: 1453784 - DNA, 25 bp, Homo sapien
gcttaggacttctctcaccaaagaa

SEQ ID NO: 1453785 - DNA, 25 bp, Homo sapien
aagagccctgggtatagctcagctg

SEQ ID NO: 1453786 - DNA, 25 bp, Homo sapien
cagggtcaaggagcactgcttagga

SEQ ID NO: 1453787 - DNA, 25 bp, Homo sapien
tcagaaaatgaggaacggtctgctt

SEQ ID NO: 1453788 - DNA, 25 bp, Homo sapien
aaatgaggaacggtctgctttgtct

SEQ ID NO: 1453789 - DNA, 25 bp, Homo sapien
tgtcagaaaatgaggaacggtctgc

SEQ ID NO: 1453790 - DNA, 25 bp, Homo sapien
tgaggaacggtctgctttgtcttct

SEQ ID NO: 1453791 - DNA, 25 bp, Homo sapien
cagacaccaagctgacatctgccat

SEQ ID NO: 1453792 - DNA, 25 bp, Homo sapien
gtgaagatgcctcagacaccaagct

SEQ ID NO: 1453793 - DNA, 25 bp, Homo sapien
ctgtgaagatgcctcagacaccaag

SEQ ID NO: 1453794 - DNA, 25 bp, Homo sapien
gcctcagacaccaagctgacatctg

SEQ ID NO: 1453795 - DNA, 25 bp, Homo sapien
gagaggggttaaaggcagcagagcg

SEQ ID NO: 1453796 - DNA, 25 bp, Homo sapien
aagagaggggttaaaggcagcagag

SEQ ID NO: 1453797 - DNA, 25 bp, Homo sapien
agagaggggttaaaggcagcagagc

SEQ ID NO: 1453798 - DNA, 25 bp, Homo sapien
agggcaagtgctctcaatgacagga

SEQ ID NO: 1453799 - DNA, 25 bp, Homo sapien
aaaggagggaccagcttctgaaagc

SEQ ID NO: 1453800 - DNA, 25 bp, Homo sapien
agcctccggcagaaaaagggcaaca

SEQ ID NO: 1453801 - DNA, 25 bp, Homo sapien
aatgacaggagaatgtactcacaca

SEQ ID NO: 1453802 - DNA, 25 bp, Homo sapien
tgcaaaatagctggcgaaccttctc

SEQ ID NO: 1453803 - DNA, 25 bp, Homo sapien
aatagctggcgaaccttctcttcat

SEQ ID NO: 1453804 - DNA, 25 bp, Homo sapien
aaggtgcaaaatagctggcgaacct

SEQ ID NO: 1453805 - DNA, 25 bp, Homo sapien
aaaatagctggcgaaccttctcttc

SEQ ID NO: 1453806 - DNA, 25 bp, Homo sapien
ccctgtgccagctggcatcgttgga

SEQ ID NO: 1453807 - DNA, 25 bp, Homo sapien
caccttgccccttggaaatttgagc

SEQ ID NO: 1453808 - DNA, 25 bp, Homo sapien
tgaatagcttcagcaccttgcccct

SEQ ID NO: 1453809 - DNA, 25 bp, Homo sapien
cccttggaaatttgagcttccttct

SEQ ID NO: 1453810 - DNA, 25 bp, Homo sapien
ttcctgcggcatgaagaaagtccat

SEQ ID NO: 1453811 - DNA, 25 bp, Homo sapien
gcctcaccagccttgaatgcaggca

SEQ ID NO: 1453812 - DNA, 25 bp, Homo sapien
gaaccattgcttcgccaccatgtac

SEQ ID NO: 1453813 - DNA, 25 bp, Homo sapien
tatcagttggagcttgaaccattgc

SEQ ID NO: 1453814 - DNA, 25 bp, Homo sapien
gcctttcgaaaatcaagacctatta

SEQ ID NO: 1453815 - DNA, 25 bp, Homo sapien
gaaaatcaagacctattatgtaagg

SEQ ID NO: 1453816 - DNA, 25 bp, Homo sapien
agacctattatgtaaggctggcatg

SEQ ID NO: 1453817 - DNA, 25 bp, Homo sapien
tgaacatagcctttcgaaaatcaag

SEQ ID NO: 1453818 - DNA, 25 bp, Homo sapien
gatcttgcttgcaatgctgttcaaa

SEQ ID NO: 1453819 - DNA, 25 bp, Homo sapien
aaataggattccagacagcactggg

SEQ ID NO: 1453820 - DNA, 25 bp, Homo sapien
tcctttaatccataaataggattcc

SEQ ID NO: 1453821 - DNA, 25 bp, Homo sapien
aactgtaatcttccagtatatgaat

SEQ ID NO: 1453822 - DNA, 25 bp, Homo sapien
ttgttttcactgtggaactgaccag

SEQ ID NO: 1453823 - DNA, 25 bp, Homo sapien
tactaaggctaaaaggccagattct

SEQ ID NO: 1453824 - DNA, 25 bp, Homo sapien
ccagttagtttatctgagtccaaca

SEQ ID NO: 1453825 - DNA, 25 bp, Homo sapien
cagattctgaggttcttgttttcac

SEQ ID NO: 1453826 - DNA, 25 bp, Homo sapien
ctgcagtctgggctaatgagacaaa

SEQ ID NO: 1453827 - DNA, 25 bp, Homo sapien
tctgggttgctgcagtctgggctaa

SEQ ID NO: 1453828 - DNA, 25 bp, Homo sapien
tgagacaaagggatgaatggtctga

SEQ ID NO: 1453829 - DNA, 25 bp, Homo sapien
cagtctgggctaatgagacaaaggg

SEQ ID NO: 1453830 - DNA, 25 bp, Homo sapien
tcctgtcattagtcccatcagctgc

SEQ ID NO: 1453831 - DNA, 25 bp, Homo sapien
aactcgctccggtccgcagctctct

SEQ ID NO: 1453832 - DNA, 25 bp, Homo sapien
tcagctcattgctagtcgggggcca

SEQ ID NO: 1453833 - DNA, 25 bp, Homo sapien
gtcgggggccatggcctgtcacaaa

SEQ ID NO: 1453834 - DNA, 25 bp, Homo sapien
gtagccctccaagtcagagttttga

SEQ ID NO: 1453835 - DNA, 25 bp, Homo sapien
cctgttcctatgtttgatgggtcca

SEQ ID NO: 1453836 - DNA, 25 bp, Homo sapien
tgacggcggtccttgccatttgcgc

SEQ ID NO: 1453837 - DNA, 25 bp, Homo sapien
gcgctgcgccttttagattgagaga

SEQ ID NO: 1453838 - DNA, 25 bp, Homo sapien
caacaaaaggctggctaatgtgcac

SEQ ID NO: 1453839 - DNA, 25 bp, Homo sapien
aaaggctggctaatgtgcactgaga

SEQ ID NO: 1453840 - DNA, 25 bp, Homo sapien
cttcggagaggcagccccaacaaaa

SEQ ID NO: 1453841 - DNA, 25 bp, Homo sapien
gcactgagaaagagcactctcgcct

SEQ ID NO: 1453842 - DNA, 25 bp, Homo sapien
agtgtggctctggagcctggaatat

SEQ ID NO: 1453843 - DNA, 25 bp, Homo sapien
aagtgtggctctggagcctggaata

SEQ ID NO: 1453844 - DNA, 25 bp, Homo sapien
agaagtgtggctctggagcctggaa

SEQ ID NO: 1453845 - DNA, 25 bp, Homo sapien
aagaagtgtggctctggagcctgga

SEQ ID NO: 1453846 - DNA, 25 bp, Homo sapien
gcaagttcagttgcaaggccctgaa

SEQ ID NO: 1453847 - DNA, 25 bp, Homo sapien
taatctggtcctgactactgactgc

SEQ ID NO: 1453848 - DNA, 25 bp, Homo sapien
taggcaagggctctagttttcatcc

SEQ ID NO: 1453849 - DNA, 25 bp, Homo sapien
tcatcctgagagctatgtagatccc

SEQ ID NO: 1453850 - DNA, 25 bp, Homo sapien
tgaagaacctgcaggtcttggaggt

SEQ ID NO: 1453851 - DNA, 25 bp, Homo sapien
gcaagttgcctgacctttctgtgta

SEQ ID NO: 1453852 - DNA, 25 bp, Homo sapien
gatgatgctgatggaggaatgactg

SEQ ID NO: 1453853 - DNA, 25 bp, Homo sapien
gtgtctgtggccagatagaaatcca

SEQ ID NO: 1453854 - DNA, 25 bp, Homo sapien
ttctgagcctaagtccacaaagagg

SEQ ID NO: 1453855 - DNA, 25 bp, Homo sapien
tctgagcctaagtccacaaagagga

SEQ ID NO: 1453856 - DNA, 25 bp, Homo sapien
tgagcctaagtccacaaagaggaag

SEQ ID NO: 1453857 - DNA, 25 bp, Homo sapien
gagcctaagtccacaaagaggaagg

SEQ ID NO: 1453858 - DNA, 25 bp, Homo sapien
caaaagcgatgggaacccttctgat

SEQ ID NO: 1453859 - DNA, 25 bp, Homo sapien
cgatgggaacccttctgatggcttg

SEQ ID NO: 1453860 - DNA, 25 bp, Homo sapien
cagctgcatcaaaagcgatgggaac

SEQ ID NO: 1453861 - DNA, 25 bp, Homo sapien
tgcatcaaaagcgatgggaaccctt

SEQ ID NO: 1453862 - DNA, 25 bp, Homo sapien
ctaaggcccttgtgactaaggccat

SEQ ID NO: 1453863 - DNA, 25 bp, Homo sapien
caccatccacatgtgtctctaaggc

SEQ ID NO: 1453864 - DNA, 25 bp, Homo sapien
tctctaaggcccttgtgactaaggc

SEQ ID NO: 1453865 - DNA, 25 bp, Homo sapien
catgtgtctctaaggcccttgtgac

SEQ ID NO: 1453866 - DNA, 25 bp, Homo sapien
ttctgccttgctgaatgtaacatat

SEQ ID NO: 1453867 - DNA, 25 bp, Homo sapien
aacttctgccttgctgaatgtaaca

SEQ ID NO: 1453868 - DNA, 25 bp, Homo sapien
gccttgctgaatgtaacatattcca

SEQ ID NO: 1453869 - DNA, 25 bp, Homo sapien
tctgccttgctgaatgtaacatatt

SEQ ID NO: 1453870 - DNA, 25 bp, Homo sapien
ctggattccataagaagttcaggac

SEQ ID NO: 1453871 - DNA, 25 bp, Homo sapien
agggtatccagggtgctggattcca

SEQ ID NO: 1453872 - DNA, 25 bp, Homo sapien
tcaccttgcggagaggagggtatcc

SEQ ID NO: 1453873 - DNA, 25 bp, Homo sapien
caccttgcggagaggagggtatcca

SEQ ID NO: 1453874 - DNA, 25 bp, Homo sapien
attgtctgataggatgaagatggac

SEQ ID NO: 1453875 - DNA, 25 bp, Homo sapien
aggtgctatggaatgtatcgcaggt

SEQ ID NO: 1453876 - DNA, 25 bp, Homo sapien
gtctgataggatgaagatggacttc

SEQ ID NO: 1453877 - DNA, 25 bp, Homo sapien
ggaatgtatcgcaggtatttggata

SEQ ID NO: 1453878 - DNA, 25 bp, Homo sapien
tttctgatggtccagtgttttggta

SEQ ID NO: 1453879 - DNA, 25 bp, Homo sapien
ttctgatggtccagtgttttggtaa

SEQ ID NO: 1453880 - DNA, 25 bp, Homo sapien
ctgatggtccagtgttttggtaaga

SEQ ID NO: 1453881 - DNA, 25 bp, Homo sapien
tctgatggtccagtgttttggtaag

SEQ ID NO: 1453882 - DNA, 25 bp, Homo sapien
gcgagtctttatccacttcatctgg

SEQ ID NO: 1453883 - DNA, 25 bp, Homo sapien
tcctcaaggttcagttgtttctcca

SEQ ID NO: 1453884 - DNA, 25 bp, Homo sapien
gccttctccacacagcgagtcttta

SEQ ID NO: 1453885 - DNA, 25 bp, Homo sapien
tcatctggtttatctgctgagagtc

SEQ ID NO: 1453886 - DNA, 25 bp, Homo sapien
gcaatttatctgattctaaacctga

SEQ ID NO: 1453887 - DNA, 25 bp, Homo sapien
tgcaatttatctgattctaaacctg

SEQ ID NO: 1453888 - DNA, 25 bp, Homo sapien
ttgcaatttatctgattctaaacct

SEQ ID NO: 1453889 - DNA, 25 bp, Homo sapien
agtttctgaactcttgcgcctcctg

SEQ ID NO: 1453890 - DNA, 25 bp, Homo sapien
gtagggctgttgagcatgtgctttc

SEQ ID NO: 1453891 - DNA, 25 bp, Homo sapien
gatctttgctgaatatctgacttca

SEQ ID NO: 1453892 - DNA, 25 bp, Homo sapien
gcctcctgtcggcagccaacaggtt

SEQ ID NO: 1453893 - DNA, 25 bp, Homo sapien
tggtgacacctccagttgagtttct

SEQ ID NO: 1453894 - DNA, 25 bp, Homo sapien
tttggtgtcctgttagggagcaata

SEQ ID NO: 1453895 - DNA, 25 bp, Homo sapien
actgtggtgacacctccagttgagt

SEQ ID NO: 1453896 - DNA, 25 bp, Homo sapien
tagggagcaatacttggtcagatct

SEQ ID NO: 1453897 - DNA, 25 bp, Homo sapien
tacttgattggatgattttgtgcca

SEQ ID NO: 1453898 - DNA, 25 bp, Homo sapien
aatacctcatggcttgttgtggctc

SEQ ID NO: 1453899 - DNA, 25 bp, Homo sapien
tgtggctctttgatacttgattgga

SEQ ID NO: 1453900 - DNA, 25 bp, Homo sapien
ttccccttgttcagttactgctaat

SEQ ID NO: 1453901 - DNA, 25 bp, Homo sapien
acactctaattgaggctctgagccc

SEQ ID NO: 1453902 - DNA, 25 bp, Homo sapien
tcagccacactctaattgaggctct

SEQ ID NO: 1453903 - DNA, 25 bp, Homo sapien
gtttgcttgaaataaagtgcccaca

SEQ ID NO: 1453904 - DNA, 25 bp, Homo sapien
tttggttttcgtggctccagctgag

SEQ ID NO: 1453905 - DNA, 25 bp, Homo sapien
ttctaaaataagcaggtatcctctc

SEQ ID NO: 1453906 - DNA, 25 bp, Homo sapien
taaaataagcaggtatcctctcaac

SEQ ID NO: 1453907 - DNA, 25 bp, Homo sapien
ccacttctaaaataagcaggtatcc

SEQ ID NO: 1453908 - DNA, 25 bp, Homo sapien
taagcaggtatcctctcaacaccca

SEQ ID NO: 1453909 - DNA, 25 bp, Homo sapien
catccacattgtactgagcggttga

SEQ ID NO: 1453910 - DNA, 25 bp, Homo sapien
tactgcacaattcacccagggccta

SEQ ID NO: 1453911 - DNA, 25 bp, Homo sapien
gcctaactcgtaagtagccactcca

SEQ ID NO: 1453912 - DNA, 25 bp, Homo sapien
taaacctggttcttcttgagaagag

SEQ ID NO: 1453913 - DNA, 25 bp, Homo sapien
aaaacaacacaatcgataaacgagc

SEQ ID NO: 1453914 - DNA, 25 bp, Homo sapien
tgcaaagctcctacgtctcaactgc

SEQ ID NO: 1453915 - DNA, 25 bp, Homo sapien
cgataaacgagcaatttcataagta

SEQ ID NO: 1453916 - DNA, 25 bp, Homo sapien
gaatttaattgcaaagctcctacgt

SEQ ID NO: 1453917 - DNA, 25 bp, Homo sapien
tcttcagtgctaggacccttccctg

SEQ ID NO: 1453918 - DNA, 25 bp, Homo sapien
atagccgagtgaggacctggcacca

SEQ ID NO: 1453919 - DNA, 25 bp, Homo sapien
cagtccctggttagtgatgagcctc

SEQ ID NO: 1453920 - DNA, 25 bp, Homo sapien
tgagtcccagtaagatgggccgccc

SEQ ID NO: 1453921 - DNA, 25 bp, Homo sapien
gggccatccacccttgaaacactgc

SEQ ID NO: 1453922 - DNA, 25 bp, Homo sapien
ggaagggccatccacccttgaaaca

SEQ ID NO: 1453923 - DNA, 25 bp, Homo sapien
ctgtttccaacaggaagggccatcc

SEQ ID NO: 1453924 - DNA, 25 bp, Homo sapien
catccacccttgaaacactgctatg

SEQ ID NO: 1453925 - DNA, 25 bp, Homo sapien
tgcagggcttgagaagccactaagc

SEQ ID NO: 1453926 - DNA, 25 bp, Homo sapien
cagggcttgagaagccactaagctt

SEQ ID NO: 1453927 - DNA, 25 bp, Homo sapien
gggcttgagaagccactaagcttgg

SEQ ID NO: 1453928 - DNA, 25 bp, Homo sapien
atgcagggcttgagaagccactaag

SEQ ID NO: 1453929 - DNA, 25 bp, Homo sapien
tctcaaagggacagccaaatattta

SEQ ID NO: 1453930 - DNA, 25 bp, Homo sapien
cttattctgacctgcctgtttgctc

SEQ ID NO: 1453931 - DNA, 25 bp, Homo sapien
catgctgatgttcggtgttggtgaa

SEQ ID NO: 1453932 - DNA, 25 bp, Homo sapien
caggcatacacattcttattctgac

SEQ ID NO: 1453933 - DNA, 25 bp, Homo sapien
acacaagcctgcgttgcctgtgagc

SEQ ID NO: 1453934 - DNA, 25 bp, Homo sapien
catcagcaagaaagggtagtgttga

SEQ ID NO: 1453935 - DNA, 25 bp, Homo sapien
taggaaggcttgcacatcagcaaga

SEQ ID NO: 1453936 - DNA, 25 bp, Homo sapien
ggtagtgttgagtacacaagcctgc

SEQ ID NO: 1453937 - DNA, 25 bp, Homo sapien
caattttccatgtgcggtgactcca

SEQ ID NO: 1453938 - DNA, 25 bp, Homo sapien
gcagcctcggtcaatcctgcttaaa

SEQ ID NO: 1453939 - DNA, 25 bp, Homo sapien
taaaagtctatcgactcagctggtg

SEQ ID NO: 1453940 - DNA, 25 bp, Homo sapien
gcagcttcaacactttgcagaatgc

SEQ ID NO: 1453941 - DNA, 25 bp, Homo sapien
cctccttcgggagagctctggtgtc

SEQ ID NO: 1453942 - DNA, 25 bp, Homo sapien
gcacctccttcgggagagctctggt

SEQ ID NO: 1453943 - DNA, 25 bp, Homo sapien
cacctccttcgggagagctctggtg

SEQ ID NO: 1453944 - DNA, 25 bp, Homo sapien
taataagtgaggcacctccttcggg

SEQ ID NO: 1453945 - DNA, 25 bp, Homo sapien
tgtcacagaacctgttgccacatga

SEQ ID NO: 1453946 - DNA, 25 bp, Homo sapien
tcacagaacctgttgccacatgatt

SEQ ID NO: 1453947 - DNA, 25 bp, Homo sapien
acagaacctgttgccacatgattca

SEQ ID NO: 1453948 - DNA, 25 bp, Homo sapien
cacatgtcacagaacctgttgccac

SEQ ID NO: 1453949 - DNA, 25 bp, Homo sapien
caaaacaccaaaacatctcctgctg

SEQ ID NO: 1453950 - DNA, 25 bp, Homo sapien
tttagcagttggtgtgctctctccc

SEQ ID NO: 1453951 - DNA, 25 bp, Homo sapien
ccatttccggatgaggttgggaaga

SEQ ID NO: 1453952 - DNA, 25 bp, Homo sapien
ccttttgggaggaactccataggct

SEQ ID NO: 1453953 - DNA, 25 bp, Homo sapien
tggtgtcatgatcgcaaaaggccat

SEQ ID NO: 1453954 - DNA, 25 bp, Homo sapien
tctcctcttggtatcgattctctgg

SEQ ID NO: 1453955 - DNA, 25 bp, Homo sapien
tcttggtatcgattctctggtgtca

SEQ ID NO: 1453956 - DNA, 25 bp, Homo sapien
attctctggtgtcatgatcgcaaaa

SEQ ID NO: 1453957 - DNA, 25 bp, Homo sapien
catatgggcaccaccagtagactca

SEQ ID NO: 1453958 - DNA, 25 bp, Homo sapien
ggccagggaaacaggatccagaaga

SEQ ID NO: 1453959 - DNA, 25 bp, Homo sapien
aacaggatccagaagacatatgggc

SEQ ID NO: 1453960 - DNA, 25 bp, Homo sapien
gatccagaagacatatgggcaccac

SEQ ID NO: 1453961 - DNA, 25 bp, Homo sapien
catatttgctgcacccttaatggtg

SEQ ID NO: 1453962 - DNA, 25 bp, Homo sapien
cagctcttgatggtttcagggtacc

SEQ ID NO: 1453963 - DNA, 25 bp, Homo sapien
tggtttcagggtaccaggccatatt

SEQ ID NO: 1453964 - DNA, 25 bp, Homo sapien
gatgtcacgtgggagcagctcttga

SEQ ID NO: 1453965 - DNA, 25 bp, Homo sapien
ctctcttagcacaatgattaagctg

SEQ ID NO: 1453966 - DNA, 25 bp, Homo sapien
gtcaatagagcccttttccactagt

SEQ ID NO: 1453967 - DNA, 25 bp, Homo sapien
gattaagctgctgtcaatagagccc

SEQ ID NO: 1453968 - DNA, 25 bp, Homo sapien
gcacaatgattaagctgctgtcaat

SEQ ID NO: 1453969 - DNA, 25 bp, Homo sapien
accaccttgcccctttgcctgggct

SEQ ID NO: 1453970 - DNA, 25 bp, Homo sapien
ggacttctctatatctgtgccacca

SEQ ID NO: 1453971 - DNA, 25 bp, Homo sapien
tctgttgaactaagagtcctctttt

SEQ ID NO: 1453972 - DNA, 25 bp, Homo sapien
ggaagctttggtgggagtgtttggc

SEQ ID NO: 1453973 - DNA, 25 bp, Homo sapien
agtttgcactcagctgtcgattcag

SEQ ID NO: 1453974 - DNA, 25 bp, Homo sapien
aagtttgcactcagctgtcgattca

SEQ ID NO: 1453975 - DNA, 25 bp, Homo sapien
gaagtttgcactcagctgtcgattc

SEQ ID NO: 1453976 - DNA, 25 bp, Homo sapien
gacctcagaacagcccctagttgat

SEQ ID NO: 1453977 - DNA, 25 bp, Homo sapien
cccctagttgatgctaaagtggctt

SEQ ID NO: 1453978 - DNA, 25 bp, Homo sapien
ttgcaacagctgtccggacctcaga

SEQ ID NO: 1453979 - DNA, 25 bp, Homo sapien
aacagctgtccggacctcagaacag

SEQ ID NO: 1453980 - DNA, 25 bp, Homo sapien
tagggcttggtaattctaagacgtc

SEQ ID NO: 1453981 - DNA, 25 bp, Homo sapien
tagttgtcattgtaccaagacctgc

SEQ ID NO: 1453982 - DNA, 25 bp, Homo sapien
aatctgcctgtgtcatgaccaaagc

SEQ ID NO: 1453983 - DNA, 25 bp, Homo sapien
tgggactcctggataaagccaattc

SEQ ID NO: 1453984 - DNA, 25 bp, Homo sapien
caggggacttgtttcattgtttagg

SEQ ID NO: 1453985 - DNA, 25 bp, Homo sapien
acgtgggcaggggacttgtttcatt

SEQ ID NO: 1453986 - DNA, 25 bp, Homo sapien
tctctgtgttgtcaacggcacccat

SEQ ID NO: 1453987 - DNA, 25 bp, Homo sapien
ttgtgccacaagaaaggtagaagac

SEQ ID NO: 1453988 - DNA, 25 bp, Homo sapien
gcagtactatgcatcatgggttatg

SEQ ID NO: 1453989 - DNA, 25 bp, Homo sapien
catcatgggttatgctcagtgcaga

SEQ ID NO: 1453990 - DNA, 25 bp, Homo sapien
cctgaagagcactgtacagcactgt

SEQ ID NO: 1453991 - DNA, 25 bp, Homo sapien
tacagcactgttctgcagtactatg

SEQ ID NO: 1453992 - DNA, 25 bp, Homo sapien
ggatgcagtgaactaacaataggta

SEQ ID NO: 1453993 - DNA, 25 bp, Homo sapien
taaagaaggcactaatgtggcaccc

SEQ ID NO: 1453994 - DNA, 25 bp, Homo sapien
ttatatgctgtactatgagaatcta

SEQ ID NO: 1453995 - DNA, 25 bp, Homo sapien
tgtggcacccatggcatcctagcct

SEQ ID NO: 1453996 - DNA, 25 bp, Homo sapien
cctgctctctcatggctggcctcac

SEQ ID NO: 1453997 - DNA, 25 bp, Homo sapien
atgcctgctctctcatggctggcct

SEQ ID NO: 1453998 - DNA, 25 bp, Homo sapien
gcctgctctctcatggctggcctca

SEQ ID NO: 1453999 - DNA, 25 bp, Homo sapien
catgcctgctctctcatggctggcc

SEQ ID NO: 1454000 - DNA, 25 bp, Homo sapien
tccatggtacccacgggcactttct

SEQ ID NO: 1454001 - DNA, 25 bp, Homo sapien
ccttccctggatccatggtacccac

SEQ ID NO: 1454002 - DNA, 25 bp, Homo sapien
ggatccatggtacccacgggcactt

SEQ ID NO: 1454003 - DNA, 25 bp, Homo sapien
cctggatccatggtacccacgggca

SEQ ID NO: 1454004 - DNA, 25 bp, Homo sapien
ctggttcctggccttttctgagaga

SEQ ID NO: 1454005 - DNA, 25 bp, Homo sapien
ggttcctggccttttctgagagaag

SEQ ID NO: 1454006 - DNA, 25 bp, Homo sapien
ttcctggccttttctgagagaagtc

SEQ ID NO: 1454007 - DNA, 25 bp, Homo sapien
tcttctggcctggctctggttcctg

SEQ ID NO: 1454008 - DNA, 25 bp, Homo sapien
ccttgatttcaaccaccctttggat

SEQ ID NO: 1454009 - DNA, 25 bp, Homo sapien
ccattcagctctagggtttctggag

SEQ ID NO: 1454010 - DNA, 25 bp, Homo sapien
ttccagtgtatgttttccagacggg

SEQ ID NO: 1454011 - DNA, 25 bp, Homo sapien
cctttggataatcctcggcctagtt

SEQ ID NO: 1454012 - DNA, 25 bp, Homo sapien
tcctgtggtcaatgctcgggtcatg

SEQ ID NO: 1454013 - DNA, 25 bp, Homo sapien
tagatgcgacagcacacacatcttt

SEQ ID NO: 1454014 - DNA, 25 bp, Homo sapien
tggaaatacttcacatagatgcgac

SEQ ID NO: 1454015 - DNA, 25 bp, Homo sapien
tcttttatgagctctggtgacttgg

SEQ ID NO: 1454016 - DNA, 25 bp, Homo sapien
ccagcaaaatccttgtgtagcctgg

SEQ ID NO: 1454017 - DNA, 25 bp, Homo sapien
aaatccttgtgtagcctggatcaaa

SEQ ID NO: 1454018 - DNA, 25 bp, Homo sapien
cccaatagtttagaaagccagcaaa

SEQ ID NO: 1454019 - DNA, 25 bp, Homo sapien
ttacccaatagtttagaaagccagc

SEQ ID NO: 1454020 - DNA, 25 bp, Homo sapien
gcacttggcctcatttagattctta

SEQ ID NO: 1454021 - DNA, 25 bp, Homo sapien
tactgtgcagcaagtagagtccctt

SEQ ID NO: 1454022 - DNA, 25 bp, Homo sapien
aatgtgctggcgaaagagtctgtct

SEQ ID NO: 1454023 - DNA, 25 bp, Homo sapien
gtccctttatctgcttggcacttgg

SEQ ID NO: 1454024 - DNA, 25 bp, Homo sapien
gcggctaaaggctgctgtacttgaa

SEQ ID NO: 1454025 - DNA, 25 bp, Homo sapien
tgaacgtccaagtaccaagagatgt

SEQ ID NO: 1454026 - DNA, 25 bp, Homo sapien
gaggcaatacctgagaaattctgtg

SEQ ID NO: 1454027 - DNA, 25 bp, Homo sapien
gatgtcctgtgattgtgtaagcggc

SEQ ID NO: 1454028 - DNA, 25 bp, Homo sapien
gcctcttccgtattcctggatggcc

SEQ ID NO: 1454029 - DNA, 25 bp, Homo sapien
cctcttccgtattcctggatggccc

SEQ ID NO: 1454030 - DNA, 25 bp, Homo sapien
agcagcctcttccgtattcctggat

SEQ ID NO: 1454031 - DNA, 25 bp, Homo sapien
cagcctcttccgtattcctggatgg

SEQ ID NO: 1454032 - DNA, 25 bp, Homo sapien
gaaagtaataggaagcctgatacaa

SEQ ID NO: 1454033 - DNA, 25 bp, Homo sapien
taataggaagcctgatacaagatcc

SEQ ID NO: 1454034 - DNA, 25 bp, Homo sapien
gaagaaagtaataggaagcctgata

SEQ ID NO: 1454035 - DNA, 25 bp, Homo sapien
taggaagcctgatacaagatccttc

SEQ ID NO: 1454036 - DNA, 25 bp, Homo sapien
gtgctgtagatttccttgcctctgg

SEQ ID NO: 1454037 - DNA, 25 bp, Homo sapien
taccaatcaggatgagctgaaagaa

SEQ ID NO: 1454038 - DNA, 25 bp, Homo sapien
ggacagtgctgtagatttccttgcc

SEQ ID NO: 1454039 - DNA, 25 bp, Homo sapien
ctgtgaggttgtaccaatcaggatg

SEQ ID NO: 1454040 - DNA, 25 bp, Homo sapien
gatttcaagggtccaggatcactcc

SEQ ID NO: 1454041 - DNA, 25 bp, Homo sapien
gggaagagtgatagaagggatttca

SEQ ID NO: 1454042 - DNA, 25 bp, Homo sapien
tttgggtctatgccatcatcaggga

SEQ ID NO: 1454043 - DNA, 25 bp, Homo sapien
tcatggggtaacgttcaagagtctg

SEQ ID NO: 1454044 - DNA, 25 bp, Homo sapien
taagccccttcgaaattgagattgt

SEQ ID NO: 1454045 - DNA, 25 bp, Homo sapien
tactgaagtaaaagttcactagccc

SEQ ID NO: 1454046 - DNA, 25 bp, Homo sapien
aacactgttggcataagccccttcg

SEQ ID NO: 1454047 - DNA, 25 bp, Homo sapien
gttgagacttcctaggccctagttc

SEQ ID NO: 1454048 - DNA, 25 bp, Homo sapien
gttttagtacgagccactgaaggac

SEQ ID NO: 1454049 - DNA, 25 bp, Homo sapien
ccagagtttggctgctaatttaggt

SEQ ID NO: 1454050 - DNA, 25 bp, Homo sapien
atttaggttttagtacgagccactg

SEQ ID NO: 1454051 - DNA, 25 bp, Homo sapien
tttatgcagataagatcatcatctg

SEQ ID NO: 1454052 - DNA, 25 bp, Homo sapien
tgcaagaatgattggatatattccc

SEQ ID NO: 1454053 - DNA, 25 bp, Homo sapien
tccccagatgcttacgtcctgcatt

SEQ ID NO: 1454054 - DNA, 25 bp, Homo sapien
tgacacgattagaggaagtattggg

SEQ ID NO: 1454055 - DNA, 25 bp, Homo sapien
tagatgacacgattagaggaagtat

SEQ ID NO: 1454056 - DNA, 25 bp, Homo sapien
gacatttgtggttctaggcaccttc

SEQ ID NO: 1454057 - DNA, 25 bp, Homo sapien
gaagacatttgtggttctaggcacc

SEQ ID NO: 1454058 - DNA, 25 bp, Homo sapien
catttgtggttctaggcaccttctc

SEQ ID NO: 1454059 - DNA, 25 bp, Homo sapien
aagaagacatttgtggttctaggca

SEQ ID NO: 1454060 - DNA, 25 bp, Homo sapien
ctcacacagtaatgtagcttcacaa

SEQ ID NO: 1454061 - DNA, 25 bp, Homo sapien
cacagtaatgtagcttcacaaacag

SEQ ID NO: 1454062 - DNA, 25 bp, Homo sapien
taatgtagcttcacaaacagcttgg

SEQ ID NO: 1454063 - DNA, 25 bp, Homo sapien
agcacataggcatcgaagacgctcg

SEQ ID NO: 1454064 - DNA, 25 bp, Homo sapien
tttctgcaatatctgctccacatgc

SEQ ID NO: 1454065 - DNA, 25 bp, Homo sapien
ttgtggccaaaagaccagcaattac

SEQ ID NO: 1454066 - DNA, 25 bp, Homo sapien
gggacccttgcattcattttctgca

SEQ ID NO: 1454067 - DNA, 25 bp, Homo sapien
taatagggttgttgggacccttgca

SEQ ID NO: 1454068 - DNA, 25 bp, Homo sapien
ttgtttcatccttagcttccattct

SEQ ID NO: 1454069 - DNA, 25 bp, Homo sapien
gacagcttgtttcatccttagcttc

SEQ ID NO: 1454070 - DNA, 25 bp, Homo sapien
caatttaattgctgtctttagacag

SEQ ID NO: 1454071 - DNA, 25 bp, Homo sapien
acaatttaattgctgtctttagaca

SEQ ID NO: 1454072 - DNA, 25 bp, Homo sapien
gaattactgttctggtcttgacaag

SEQ ID NO: 1454073 - DNA, 25 bp, Homo sapien
gccagtttgaatagaaatgttaccg

SEQ ID NO: 1454074 - DNA, 25 bp, Homo sapien
tgtctttatgttctgaagcaggaaa

SEQ ID NO: 1454075 - DNA, 25 bp, Homo sapien
ccgcggtcgctggagctgtcatact

SEQ ID NO: 1454076 - DNA, 25 bp, Homo sapien
gcaatgggccttacacaacgaaaca

SEQ ID NO: 1454077 - DNA, 25 bp, Homo sapien
cagggaacggcagaagcaaggcaat

SEQ ID NO: 1454078 - DNA, 25 bp, Homo sapien
aaggcaatgggccttacacaacgaa

SEQ ID NO: 1454079 - DNA, 25 bp, Homo sapien
tgtttgattgactccacagggaacg

SEQ ID NO: 1454080 - DNA, 25 bp, Homo sapien
taattgtggttgttaataatctgca

SEQ ID NO: 1454081 - DNA, 25 bp, Homo sapien
atctgcaaagcaccttccgctggca

SEQ ID NO: 1454082 - DNA, 25 bp, Homo sapien
agcaccttccgctggcagtgtcgag

SEQ ID NO: 1454083 - DNA, 25 bp, Homo sapien
tgtggttgttaataatctgcaaagc

SEQ ID NO: 1454084 - DNA, 25 bp, Homo sapien
tgggtacttttttgtccaggtgtga

SEQ ID NO: 1454085 - DNA, 25 bp, Homo sapien
ttttattgtatttgcacttcgccta

SEQ ID NO: 1454086 - DNA, 25 bp, Homo sapien
attacattgatctctctcatgctcc

SEQ ID NO: 1454087 - DNA, 25 bp, Homo sapien
ggcagcagttgaccaacagtgagct

SEQ ID NO: 1454088 - DNA, 25 bp, Homo sapien
aaaatttgcttcagggcgcttcatc

SEQ ID NO: 1454089 - DNA, 25 bp, Homo sapien
gacatttgactgaaaggtatacata

SEQ ID NO: 1454090 - DNA, 25 bp, Homo sapien
gtctcctaggatttgtgtatgacat

SEQ ID NO: 1454091 - DNA, 25 bp, Homo sapien
cacagccgtgaacttttcaccaggt

SEQ ID NO: 1454092 - DNA, 25 bp, Homo sapien
catgtgcatgctagtttgactttca

SEQ ID NO: 1454093 - DNA, 25 bp, Homo sapien
tgataatccccttcacatgtgcatg

SEQ ID NO: 1454094 - DNA, 25 bp, Homo sapien
ttttctggctgtaaagatccaggga

SEQ ID NO: 1454095 - DNA, 25 bp, Homo sapien
gcagggagtctttaacagctgttac

SEQ ID NO: 1454096 - DNA, 25 bp, Homo sapien
tagtggctttagcacccacacagtt

SEQ ID NO: 1454097 - DNA, 25 bp, Homo sapien
ttgaagaacatgtaccatgggctgc

SEQ ID NO: 1454098 - DNA, 25 bp, Homo sapien
cacacagttttaggtgccgatctca

SEQ ID NO: 1454099 - DNA, 25 bp, Homo sapien
gcagaactgatgagggaagatacaa

SEQ ID NO: 1454100 - DNA, 25 bp, Homo sapien
attattctgttttgattgaacgcca

SEQ ID NO: 1454101 - DNA, 25 bp, Homo sapien
tctgttttgattgaacgccagtaaa

SEQ ID NO: 1454102 - DNA, 25 bp, Homo sapien
tattctgttttgattgaacgccagt

SEQ ID NO: 1454103 - DNA, 25 bp, Homo sapien
tgattgaacgccagtaaaattaaat

SEQ ID NO: 1454104 - DNA, 25 bp, Homo sapien
tgcaaactgacgtgggcatctgcct

SEQ ID NO: 1454105 - DNA, 25 bp, Homo sapien
ggctgctggctaatgtgtagctcta

SEQ ID NO: 1454106 - DNA, 25 bp, Homo sapien
tgtagctctaaccttgtgccccaca

SEQ ID NO: 1454107 - DNA, 25 bp, Homo sapien
ggaatctggattcgccttgctgtgc

SEQ ID NO: 1454108 - DNA, 25 bp, Homo sapien
caggcccttagcatctttcctctga

SEQ ID NO: 1454109 - DNA, 25 bp, Homo sapien
cataaagattagagcttgtcaggcc

SEQ ID NO: 1454110 - DNA, 25 bp, Homo sapien
gctaagccattaacctgattggtat

SEQ ID NO: 1454111 - DNA, 25 bp, Homo sapien
taatcagaagtgtcccatgagtcat

SEQ ID NO: 1454112 - DNA, 25 bp, Homo sapien
taagcctgtgaccttggtgtcatca

SEQ ID NO: 1454113 - DNA, 25 bp, Homo sapien
catgactatgtcaacaagagaaccc

SEQ ID NO: 1454114 - DNA, 25 bp, Homo sapien
ggcaaaatgtggctataagacctct

SEQ ID NO: 1454115 - DNA, 25 bp, Homo sapien
taactgagctaaccagacacaggtg

SEQ ID NO: 1454116 - DNA, 25 bp, Homo sapien
tctaaacgatccacatgagtcagct

SEQ ID NO: 1454117 - DNA, 25 bp, Homo sapien
tcatccaaaggcagcagtatgtaat

SEQ ID NO: 1454118 - DNA, 25 bp, Homo sapien
ggccattagccgtagtgactccatc

SEQ ID NO: 1454119 - DNA, 25 bp, Homo sapien
tgtggtagaagatcatcatgaatcc

SEQ ID NO: 1454120 - DNA, 25 bp, Homo sapien
tgcttcatcacccatcactgagagg

SEQ ID NO: 1454121 - DNA, 25 bp, Homo sapien
cactgcccagagtgacaagcaatgg

SEQ ID NO: 1454122 - DNA, 25 bp, Homo sapien
ggacatatctaatggcagtttgtgc

SEQ ID NO: 1454123 - DNA, 25 bp, Homo sapien
tttatacactccttcaccctgtgaa

SEQ ID NO: 1454124 - DNA, 25 bp, Homo sapien
gagctgttgtagagaaggcccaagg

SEQ ID NO: 1454125 - DNA, 25 bp, Homo sapien
cccaagggagatgtcttcaaggaca

SEQ ID NO: 1454126 - DNA, 25 bp, Homo sapien
ggcccaagggagatgtcttcaagga

SEQ ID NO: 1454127 - DNA, 25 bp, Homo sapien
agagctgttgtagagaaggcccaag

SEQ ID NO: 1454128 - DNA, 25 bp, Homo sapien
cccatttgtgggtgacttactagga

SEQ ID NO: 1454129 - DNA, 25 bp, Homo sapien
tactaggatttgcaaaaagttccca

SEQ ID NO: 1454130 - DNA, 25 bp, Homo sapien
ggccaatggccatagccatgtttag

SEQ ID NO: 1454131 - DNA, 25 bp, Homo sapien
gtagagtatgacacccaaattggga

SEQ ID NO: 1454132 - DNA, 25 bp, Homo sapien
tctggatggagaaaatcatttcttg

SEQ ID NO: 1454133 - DNA, 25 bp, Homo sapien
atggagaaaatcatttcttggccac

SEQ ID NO: 1454134 - DNA, 25 bp, Homo sapien
cccttctggatggagaaaatcattt

SEQ ID NO: 1454135 - DNA, 25 bp, Homo sapien
tggatggagaaaatcatttcttggc

SEQ ID NO: 1454136 - DNA, 25 bp, Homo sapien
tggctcaaggtatccagaaaagata

SEQ ID NO: 1454137 - DNA, 25 bp, Homo sapien
tgtgccaacgcctggctcaaggtat

SEQ ID NO: 1454138 - DNA, 25 bp, Homo sapien
tgatgctgccttgtgccaacgcctg

SEQ ID NO: 1454139 - DNA, 25 bp, Homo sapien
aaaagataagttgatgttctgcatc

SEQ ID NO: 1454140 - DNA, 25 bp, Homo sapien
taatgatgtcgttttgccaaatagg

SEQ ID NO: 1454141 - DNA, 25 bp, Homo sapien
aataggattccattgacctaatacc

SEQ ID NO: 1454142 - DNA, 25 bp, Homo sapien
cattgacctaataccacattgaagg

SEQ ID NO: 1454143 - DNA, 25 bp, Homo sapien
attgtaatgatgtcgttttgccaaa

SEQ ID NO: 1454144 - DNA, 25 bp, Homo sapien
gagcctcctgtgtaaacaactgggc

SEQ ID NO: 1454145 - DNA, 25 bp, Homo sapien
gtgtgagagcctcctgtgtaaacaa

SEQ ID NO: 1454146 - DNA, 25 bp, Homo sapien
cccagagagcaacacacttgggttg

SEQ ID NO: 1454147 - DNA, 25 bp, Homo sapien
ctgctgcaggatccctgctctggct

SEQ ID NO: 1454148 - DNA, 25 bp, Homo sapien
gctccttcagagtcagcagaggtga

SEQ ID NO: 1454149 - DNA, 25 bp, Homo sapien
ccttcagagtcagcagaggtgaagg

SEQ ID NO: 1454150 - DNA, 25 bp, Homo sapien
ctccttcagagtcagcagaggtgaa

SEQ ID NO: 1454151 - DNA, 25 bp, Homo sapien
ggctccttcagagtcagcagaggtg

SEQ ID NO: 1454152 - DNA, 25 bp, Homo sapien
ccttggcgatggctgctcggtccct

SEQ ID NO: 1454153 - DNA, 25 bp, Homo sapien
gcgatggctgctcggtccctccatt

SEQ ID NO: 1454154 - DNA, 25 bp, Homo sapien
ctgctcggtccctccattccttttc

SEQ ID NO: 1454155 - DNA, 25 bp, Homo sapien
cattccttttcccacaggacactgg

SEQ ID NO: 1454156 - DNA, 25 bp, Homo sapien
cctccacactgtccgggccagaaat

SEQ ID NO: 1454157 - DNA, 25 bp, Homo sapien
cactgtccgggccagaaatagaaga

SEQ ID NO: 1454158 - DNA, 25 bp, Homo sapien
tccacactgtccgggccagaaatag

SEQ ID NO: 1454159 - DNA, 25 bp, Homo sapien
tgccctccacactgtccgggccaga

SEQ ID NO: 1454160 - DNA, 25 bp, Homo sapien
caactttgaggcactgcctccttta

SEQ ID NO: 1454161 - DNA, 25 bp, Homo sapien
cttcaggtagcaaggagttggaatg

SEQ ID NO: 1454162 - DNA, 25 bp, Homo sapien
caggtagcaaggagttggaatgcat

SEQ ID NO: 1454163 - DNA, 25 bp, Homo sapien
tcaggtagcaaggagttggaatgca

SEQ ID NO: 1454164 - DNA, 25 bp, Homo sapien
ttcaggtagcaaggagttggaatgc

SEQ ID NO: 1454165 - DNA, 25 bp, Homo sapien
gcactgtctataacttccatgctca

SEQ ID NO: 1454166 - DNA, 25 bp, Homo sapien
tactgagcactgtctataacttcca

SEQ ID NO: 1454167 - DNA, 25 bp, Homo sapien
gatgtgggataggtcacacttctgg

SEQ ID NO: 1454168 - DNA, 25 bp, Homo sapien
ggtagatgtgggataggtcacactt

SEQ ID NO: 1454169 - DNA, 25 bp, Homo sapien
ttgatgcagtaactgagagccttga

SEQ ID NO: 1454170 - DNA, 25 bp, Homo sapien
tgatgcagtaactgagagccttgag

SEQ ID NO: 1454171 - DNA, 25 bp, Homo sapien
atcactccaaggacctttgatgcag

SEQ ID NO: 1454172 - DNA, 25 bp, Homo sapien
ggaggtatgatttatgaggccagcc

SEQ ID NO: 1454173 - DNA, 25 bp, Homo sapien
tatgcaaacagtgtcaaagtctgcc

SEQ ID NO: 1454174 - DNA, 25 bp, Homo sapien
taagtaactgcagataggtgccaga

SEQ ID NO: 1454175 - DNA, 25 bp, Homo sapien
gccatgctgacatttttgagaggaa

SEQ ID NO: 1454176 - DNA, 25 bp, Homo sapien
tcacaagagtgactgggtgttttgt

SEQ ID NO: 1454177 - DNA, 25 bp, Homo sapien
tatactgtgtcacttccagcatggc

SEQ ID NO: 1454178 - DNA, 25 bp, Homo sapien
tactgactggcgtgaggacaggatt

SEQ ID NO: 1454179 - DNA, 25 bp, Homo sapien
caagagcctctttatggatggcaga

SEQ ID NO: 1454180 - DNA, 25 bp, Homo sapien
ttctgaaagctattcccgtgggcat

SEQ ID NO: 1454181 - DNA, 25 bp, Homo sapien
tttctgaaagctattcccgtgggca

SEQ ID NO: 1454182 - DNA, 25 bp, Homo sapien
tggcagcaacaatcactggcaccaa

SEQ ID NO: 1454183 - DNA, 25 bp, Homo sapien
ctggcaccaattgcttcaaagtgct

SEQ ID NO: 1454184 - DNA, 25 bp, Homo sapien
gcttttgacagttccaggtggcagc

SEQ ID NO: 1454185 - DNA, 25 bp, Homo sapien
gttccaggtggcagcaacaatcact

SEQ ID NO: 1454186 - DNA, 25 bp, Homo sapien
agcactggacctacgattgagtaca

SEQ ID NO: 1454187 - DNA, 25 bp, Homo sapien
gcagcactggacctacgattgagta

SEQ ID NO: 1454188 - DNA, 25 bp, Homo sapien
gcactggacctacgattgagtacat

SEQ ID NO: 1454189 - DNA, 25 bp, Homo sapien
tctgcagcactggacctacgattga

SEQ ID NO: 1454190 - DNA, 25 bp, Homo sapien
tttgctggtgacatttattaatgtt

SEQ ID NO: 1454191 - DNA, 25 bp, Homo sapien
cgtgaggtcgtccagtttcccctgg

SEQ ID NO: 1454192 - DNA, 25 bp, Homo sapien
tagaaaatatattcgtgaggtcgtc

SEQ ID NO: 1454193 - DNA, 25 bp, Homo sapien
tatattcgtgaggtcgtccagtttc

SEQ ID NO: 1454194 - DNA, 25 bp, Homo sapien
gctgctgtctcatggtaatagatca

SEQ ID NO: 1454195 - DNA, 25 bp, Homo sapien
caccctctgtaccatactagaaata

SEQ ID NO: 1454196 - DNA, 25 bp, Homo sapien
tactagaaataaggtgagaagtttg

SEQ ID NO: 1454197 - DNA, 25 bp, Homo sapien
ctcatggtaatagatcaaagaaatg

SEQ ID NO: 1454198 - DNA, 25 bp, Homo sapien
tatttatgagcttggactgtctcct

SEQ ID NO: 1454199 - DNA, 25 bp, Homo sapien
ggactgtctcctgtgttttacggac

SEQ ID NO: 1454200 - DNA, 25 bp, Homo sapien
ttgagcccatatttatgagcttgga

SEQ ID NO: 1454201 - DNA, 25 bp, Homo sapien
ttggactgtctcctgtgttttacgg

SEQ ID NO: 1454202 - DNA, 25 bp, Homo sapien
tgtcatcgtggaggtaacctgagat

SEQ ID NO: 1454203 - DNA, 25 bp, Homo sapien
tggacttgcctctaattccaacttg

SEQ ID NO: 1454204 - DNA, 25 bp, Homo sapien
catgtcatcgtggaggtaacctgag

SEQ ID NO: 1454205 - DNA, 25 bp, Homo sapien
catcgtggaggtaacctgagatctg

SEQ ID NO: 1454206 - DNA, 25 bp, Homo sapien
tccacgttgctgctaccacttgcag

SEQ ID NO: 1454207 - DNA, 25 bp, Homo sapien
agctcccagagtcccgcgatgcagc

SEQ ID NO: 1454208 - DNA, 25 bp, Homo sapien
caggggtcgccttctctcagtagat

SEQ ID NO: 1454209 - DNA, 25 bp, Homo sapien
agagtcccgcgatgcagccctcttt

SEQ ID NO: 1454210 - DNA, 25 bp, Homo sapien
aggcaggtgttagggaagcaactct

SEQ ID NO: 1454211 - DNA, 25 bp, Homo sapien
gcattccacccaacgttattgacgt

SEQ ID NO: 1454212 - DNA, 25 bp, Homo sapien
cgttattgacgtcattagcacaaag

SEQ ID NO: 1454213 - DNA, 25 bp, Homo sapien
cacccaacgttattgacgtcattag

SEQ ID NO: 1454214 - DNA, 25 bp, Homo sapien
acagccaattctcaatcgagtccat

SEQ ID NO: 1454215 - DNA, 25 bp, Homo sapien
ccacagccaattctcaatcgagtcc

SEQ ID NO: 1454216 - DNA, 25 bp, Homo sapien
cacagccaattctcaatcgagtcca

SEQ ID NO: 1454217 - DNA, 25 bp, Homo sapien
gcaatttgttcgcattttgctgtca

SEQ ID NO: 1454218 - DNA, 25 bp, Homo sapien
ccttggtggccgtggacctcgacat

SEQ ID NO: 1454219 - DNA, 25 bp, Homo sapien
ggttttgcaatttgttcgcattttg

SEQ ID NO: 1454220 - DNA, 25 bp, Homo sapien
ggcagcacaagcaggaattttatta

SEQ ID NO: 1454221 - DNA, 25 bp, Homo sapien
gaatgaacttgtgatcttagctctg

SEQ ID NO: 1454222 - DNA, 25 bp, Homo sapien
ctgcccttgtgccaagaatgaactt

SEQ ID NO: 1454223 - DNA, 25 bp, Homo sapien
gagatgggaggctgcccttgtgcca

SEQ ID NO: 1454224 - DNA, 25 bp, Homo sapien
ttagcagccttgagagatgggaggc

SEQ ID NO: 1454225 - DNA, 25 bp, Homo sapien
catcccaatctcagcacgaaaggtt

SEQ ID NO: 1454226 - DNA, 25 bp, Homo sapien
tctcagcacgaaaggttacaatttc

SEQ ID NO: 1454227 - DNA, 25 bp, Homo sapien
ttttctctaacccagacatcccaat

SEQ ID NO: 1454228 - DNA, 25 bp, Homo sapien
tcactcattttctctaacccagaca

SEQ ID NO: 1454229 - DNA, 25 bp, Homo sapien
cagcctgctgaaacactgctaaaaa

SEQ ID NO: 1454230 - DNA, 25 bp, Homo sapien
tgtgatatttctgcttggctgcaca

SEQ ID NO: 1454231 - DNA, 25 bp, Homo sapien
aggttttcacaaagagtgtgatatt

SEQ ID NO: 1454232 - DNA, 25 bp, Homo sapien
aaagagtgtgatatttctgcttggc

SEQ ID NO: 1454233 - DNA, 25 bp, Homo sapien
gaagcttgagaggacaagcccctgc

SEQ ID NO: 1454234 - DNA, 25 bp, Homo sapien
tggcatgcggcaaatcaggtgaaga

SEQ ID NO: 1454235 - DNA, 25 bp, Homo sapien
gagctgccactgattccgaaaactg

SEQ ID NO: 1454236 - DNA, 25 bp, Homo sapien
gatgcccaagccataaacatagagg

SEQ ID NO: 1454237 - DNA, 25 bp, Homo sapien
actggcaagccaaaagaacgcaggc

SEQ ID NO: 1454238 - DNA, 25 bp, Homo sapien
ccatggaccaaggaagagtgcattt

SEQ ID NO: 1454239 - DNA, 25 bp, Homo sapien
gcatttgccaactgtgcggagcata

SEQ ID NO: 1454240 - DNA, 25 bp, Homo sapien
tattgctgaaccgagaagaactggc

SEQ ID NO: 1454241 - DNA, 25 bp, Homo sapien
caactggtcctgcacgatctttttc

SEQ ID NO: 1454242 - DNA, 25 bp, Homo sapien
gaggattcttgctgggtctgccttc

SEQ ID NO: 1454243 - DNA, 25 bp, Homo sapien
ctacagccgtgaaccgggaatccag

SEQ ID NO: 1454244 - DNA, 25 bp, Homo sapien
tgaatgcagggagttactcagagct

SEQ ID NO: 1454245 - DNA, 25 bp, Homo sapien
caagagagagccaccatagcagaat

SEQ ID NO: 1454246 - DNA, 25 bp, Homo sapien
gatcatttaggccacaccattgggc

SEQ ID NO: 1454247 - DNA, 25 bp, Homo sapien
gcagatgtgtaacctcaaagagagt

SEQ ID NO: 1454248 - DNA, 25 bp, Homo sapien
ggaacaattagtgctcacccctttg

SEQ ID NO: 1454249 - DNA, 25 bp, Homo sapien
cgtaaaccttgtaaaggagtctgct

SEQ ID NO: 1454250 - DNA, 25 bp, Homo sapien
caggctgataagagtttgagggcaa

SEQ ID NO: 1454251 - DNA, 25 bp, Homo sapien
catgattgaaagtagggattaggcc

SEQ ID NO: 1454252 - DNA, 25 bp, Homo sapien
caagctctaatgttggctcaccgta

SEQ ID NO: 1454253 - DNA, 25 bp, Homo sapien
tcgtcataccccaaatagggcatga

SEQ ID NO: 1454254 - DNA, 25 bp, Homo sapien
tcctaatcgctgtttttaaacttgc

SEQ ID NO: 1454255 - DNA, 25 bp, Homo sapien
ctcctaatcgctgtttttaaacttg

SEQ ID NO: 1454256 - DNA, 25 bp, Homo sapien
taatcgctgtttttaaacttgccat

SEQ ID NO: 1454257 - DNA, 25 bp, Homo sapien
ctaatcgctgtttttaaacttgcca

SEQ ID NO: 1454258 - DNA, 25 bp, Homo sapien
cttgactggacatttaccccctcct

SEQ ID NO: 1454259 - DNA, 25 bp, Homo sapien
cctcagaagtgaaggcttaatgagc

SEQ ID NO: 1454260 - DNA, 25 bp, Homo sapien
ttaatgagcagagaaattaaagagt

SEQ ID NO: 1454261 - DNA, 25 bp, Homo sapien
cccctttgggagcaagatcattttt

SEQ ID NO: 1454262 - DNA, 25 bp, Homo sapien
aagtcattttcacacctcagaagtg

SEQ ID NO: 1454263 - DNA, 25 bp, Homo sapien
aaatttggatcgtcactgctgtatc

SEQ ID NO: 1454264 - DNA, 25 bp, Homo sapien
ggtagcatccacaaggaccattaga

SEQ ID NO: 1454265 - DNA, 25 bp, Homo sapien
catactttgccacgattagtgttac

SEQ ID NO: 1454266 - DNA, 25 bp, Homo sapien
ctaactgaactctaatggtagcatc

SEQ ID NO: 1454267 - DNA, 25 bp, Homo sapien
gatcaaatcagcaaagcagtttaga

SEQ ID NO: 1454268 - DNA, 25 bp, Homo sapien
gccgctatcacaggatgttggcact

SEQ ID NO: 1454269 - DNA, 25 bp, Homo sapien
agccgctatcacaggatgttggcac

SEQ ID NO: 1454270 - DNA, 25 bp, Homo sapien
aaggtggtatagggtcagaaagagg

SEQ ID NO: 1454271 - DNA, 25 bp, Homo sapien
cctttccttcgagggtcacagctga

SEQ ID NO: 1454272 - DNA, 25 bp, Homo sapien
gtgatccctttccttcgagggtcac

SEQ ID NO: 1454273 - DNA, 25 bp, Homo sapien
tccttcgagggtcacagctgacacc

SEQ ID NO: 1454274 - DNA, 25 bp, Homo sapien
gagatactgtcctgatagtctgagt

SEQ ID NO: 1454275 - DNA, 25 bp, Homo sapien
ggatagctttaccactttccttcag

SEQ ID NO: 1454276 - DNA, 25 bp, Homo sapien
tggtcctgttctcaataaagtatag

SEQ ID NO: 1454277 - DNA, 25 bp, Homo sapien
ttggaatccttcacattgccttggc

SEQ ID NO: 1454278 - DNA, 25 bp, Homo sapien
ctgtctcgaaatagaccctgtgctg

SEQ ID NO: 1454279 - DNA, 25 bp, Homo sapien
ggaactggattgccgctgaaggctc

SEQ ID NO: 1454280 - DNA, 25 bp, Homo sapien
gtcactggctgtctcgaaatagacc

SEQ ID NO: 1454281 - DNA, 25 bp, Homo sapien
actggattgccgctgaaggctccct

SEQ ID NO: 1454282 - DNA, 25 bp, Homo sapien
atctcatccaggagttgtccctgag

SEQ ID NO: 1454283 - DNA, 25 bp, Homo sapien
ctcatccaggagttgtccctgagtc

SEQ ID NO: 1454284 - DNA, 25 bp, Homo sapien
tcatccaggagttgtccctgagtcc

SEQ ID NO: 1454285 - DNA, 25 bp, Homo sapien
tctcatccaggagttgtccctgagt

SEQ ID NO: 1454286 - DNA, 25 bp, Homo sapien
tctttgaccagtgacaagatggcat

SEQ ID NO: 1454287 - DNA, 25 bp, Homo sapien
ggagtctgactcctcttggatgaat

SEQ ID NO: 1454288 - DNA, 25 bp, Homo sapien
gacagcgagaaatgctgaggcgctc

SEQ ID NO: 1454289 - DNA, 25 bp, Homo sapien
tgatgagttcccgaaggagtctgac

SEQ ID NO: 1454290 - DNA, 25 bp, Homo sapien
gccaaagatgttccgctgaattgac

SEQ ID NO: 1454291 - DNA, 25 bp, Homo sapien
tggtagactcagaaacagttctccc

SEQ ID NO: 1454292 - DNA, 25 bp, Homo sapien
tcacacaccactcatgccaaagatg

SEQ ID NO: 1454293 - DNA, 25 bp, Homo sapien
ggctttccgactcaatcgattggct

SEQ ID NO: 1454294 - DNA, 25 bp, Homo sapien
ctttagtttgcaaaagataaataca

SEQ ID NO: 1454295 - DNA, 25 bp, Homo sapien
tagtttgcaaaagataaatacacac

SEQ ID NO: 1454296 - DNA, 25 bp, Homo sapien
tttgcaaaagataaatacacactga

SEQ ID NO: 1454297 - DNA, 25 bp, Homo sapien
gtttgcaaaagataaatacacactg

SEQ ID NO: 1454298 - DNA, 25 bp, Homo sapien
gaacacacagggcccatcagacatg

SEQ ID NO: 1454299 - DNA, 25 bp, Homo sapien
cacacagggcccatcagacatggaa

SEQ ID NO: 1454300 - DNA, 25 bp, Homo sapien
cagggcccatcagacatggaaaaaa

SEQ ID NO: 1454301 - DNA, 25 bp, Homo sapien
cacagggcccatcagacatggaaaa

SEQ ID NO: 1454302 - DNA, 25 bp, Homo sapien
ggctgccatgtctatgtcccttgaa

SEQ ID NO: 1454303 - DNA, 25 bp, Homo sapien
gctgccatgtctatgtcccttgaaa

SEQ ID NO: 1454304 - DNA, 25 bp, Homo sapien
gccccaatgaatttggctgccatgt

SEQ ID NO: 1454305 - DNA, 25 bp, Homo sapien
tgccatgtctatgtcccttgaaatg

SEQ ID NO: 1454306 - DNA, 25 bp, Homo sapien
ctgccattgtctccggtcatttcaa

SEQ ID NO: 1454307 - DNA, 25 bp, Homo sapien
tgccattgtctccggtcatttcaac

SEQ ID NO: 1454308 - DNA, 25 bp, Homo sapien
ttgtctccggtcatttcaacaccac

SEQ ID NO: 1454309 - DNA, 25 bp, Homo sapien
attgtctccggtcatttcaacacca

SEQ ID NO: 1454310 - DNA, 25 bp, Homo sapien
cattagcaaaactggcactgataga

SEQ ID NO: 1454311 - DNA, 25 bp, Homo sapien
actgatagaacatccaggcagcccc

SEQ ID NO: 1454312 - DNA, 25 bp, Homo sapien
ggcactgatagaacatccaggcagc

SEQ ID NO: 1454313 - DNA, 25 bp, Homo sapien
ctggggcattagcaaaactggcact

SEQ ID NO: 1454314 - DNA, 25 bp, Homo sapien
tgctgaagcctgtccatgctgctct

SEQ ID NO: 1454315 - DNA, 25 bp, Homo sapien
agctgctgaagcctgtccatgctgc

SEQ ID NO: 1454316 - DNA, 25 bp, Homo sapien
ttctcatccatgaggagctgctgaa

SEQ ID NO: 1454317 - DNA, 25 bp, Homo sapien
catgctgctcttgggttggcagcca

SEQ ID NO: 1454318 - DNA, 25 bp, Homo sapien
ctgacaggatccttcatcaaacaca

SEQ ID NO: 1454319 - DNA, 25 bp, Homo sapien
tacacttgtagacctgacaggatcc

SEQ ID NO: 1454320 - DNA, 25 bp, Homo sapien
aggaggaggatgtacacttgtagac

SEQ ID NO: 1454321 - DNA, 25 bp, Homo sapien
tagacctgacaggatccttcatcaa

SEQ ID NO: 1454322 - DNA, 25 bp, Homo sapien
gcagacatatttgggctcagtgtgt

SEQ ID NO: 1454323 - DNA, 25 bp, Homo sapien
cagaagaaatatagccccttgaggc

SEQ ID NO: 1454324 - DNA, 25 bp, Homo sapien
gcttccccggaattgatggtaggca

SEQ ID NO: 1454325 - DNA, 25 bp, Homo sapien
caagaagatatggaagcatcagcca

SEQ ID NO: 1454326 - DNA, 25 bp, Homo sapien
tttgatgagcatagtgggaagtggg

SEQ ID NO: 1454327 - DNA, 25 bp, Homo sapien
cacatgagttcaactccccaggggc

SEQ ID NO: 1454328 - DNA, 25 bp, Homo sapien
aaatcctgatgtactacacctgtcc

SEQ ID NO: 1454329 - DNA, 25 bp, Homo sapien
cctgtcccacatgagttcaactccc

SEQ ID NO: 1454330 - DNA, 25 bp, Homo sapien
gagagatatacacagggctccccac

SEQ ID NO: 1454331 - DNA, 25 bp, Homo sapien
cccacgtgccttgcttccggaatgg

SEQ ID NO: 1454332 - DNA, 25 bp, Homo sapien
tccggaatgggaaaagccacttgaa

SEQ ID NO: 1454333 - DNA, 25 bp, Homo sapien
ttgaagcatgggaagaataatccgc

SEQ ID NO: 1454334 - DNA, 25 bp, Homo sapien
aattctcgatttcttgaatgagggc

SEQ ID NO: 1454335 - DNA, 25 bp, Homo sapien
ctcgatttcttgaatgagggccaag

SEQ ID NO: 1454336 - DNA, 25 bp, Homo sapien
ttctcgatttcttgaatgagggcca

SEQ ID NO: 1454337 - DNA, 25 bp, Homo sapien
tctcgatttcttgaatgagggccaa

SEQ ID NO: 1454338 - DNA, 25 bp, Homo sapien
ggcacggaggaagagcccaaaacaa

SEQ ID NO: 1454339 - DNA, 25 bp, Homo sapien
cacccacgaccaatccgggaatggt

SEQ ID NO: 1454340 - DNA, 25 bp, Homo sapien
ggtctaaatcccacccagaggtctg

SEQ ID NO: 1454341 - DNA, 25 bp, Homo sapien
catttcctagattggttctgcccag

SEQ ID NO: 1454342 - DNA, 25 bp, Homo sapien
tctccatacctaggataagctgctg

SEQ ID NO: 1454343 - DNA, 25 bp, Homo sapien
tttccaaatctgtcccgcgtccctc

SEQ ID NO: 1454344 - DNA, 25 bp, Homo sapien
tctatcctcatgtcctgtccaaggc

SEQ ID NO: 1454345 - DNA, 25 bp, Homo sapien
tccaagtgccaatccacatctctcc

SEQ ID NO: 1454346 - DNA, 25 bp, Homo sapien
agaaaagcaagaggcaattgtccat

SEQ ID NO: 1454347 - DNA, 25 bp, Homo sapien
caaggactcaggaacgtacttacgg

SEQ ID NO: 1454348 - DNA, 25 bp, Homo sapien
gactcaggaacgtacttacggagcc

SEQ ID NO: 1454349 - DNA, 25 bp, Homo sapien
aaggcaaggactcaggaacgtactt

SEQ ID NO: 1454350 - DNA, 25 bp, Homo sapien
tcaggaacgtacttacggagccttc

SEQ ID NO: 1454351 - DNA, 25 bp, Homo sapien
agggagaggaagcacggctgctgca

SEQ ID NO: 1454352 - DNA, 25 bp, Homo sapien
gctccttctgcgaccacagggagag

SEQ ID NO: 1454353 - DNA, 25 bp, Homo sapien
cctgctccttctgcgaccacaggga

SEQ ID NO: 1454354 - DNA, 25 bp, Homo sapien
tccttctgcgaccacagggagagga

SEQ ID NO: 1454355 - DNA, 25 bp, Homo sapien
gtgacagggatctttgttcagggct

SEQ ID NO: 1454356 - DNA, 25 bp, Homo sapien
atcttggtgacagggatctttgttc

SEQ ID NO: 1454357 - DNA, 25 bp, Homo sapien
cttggtgacagggatctttgttcag

SEQ ID NO: 1454358 - DNA, 25 bp, Homo sapien
ttggtgacagggatctttgttcagg

SEQ ID NO: 1454359 - DNA, 25 bp, Homo sapien
accaacataggtgggggcttgcaat

SEQ ID NO: 1454360 - DNA, 25 bp, Homo sapien
aaccaacataggtgggggcttgcaa

SEQ ID NO: 1454361 - DNA, 25 bp, Homo sapien
attaaccaacataggtgggggcttg

SEQ ID NO: 1454362 - DNA, 25 bp, Homo sapien
ttaaccaacataggtgggggcttgc

SEQ ID NO: 1454363 - DNA, 25 bp, Homo sapien
ctctgcaggctaagtagacatctga

SEQ ID NO: 1454364 - DNA, 25 bp, Homo sapien
ggatatgtgtaagttccctgcccat

SEQ ID NO: 1454365 - DNA, 25 bp, Homo sapien
tctggatatgtgtaagttccctgcc

SEQ ID NO: 1454366 - DNA, 25 bp, Homo sapien
tctgagaagggataaattccctctg

SEQ ID NO: 1454367 - DNA, 25 bp, Homo sapien
ctaggagtcagatccattaatagcc

SEQ ID NO: 1454368 - DNA, 25 bp, Homo sapien
ggagtcagatccattaatagcctga

SEQ ID NO: 1454369 - DNA, 25 bp, Homo sapien
taggagtcagatccattaatagcct

SEQ ID NO: 1454370 - DNA, 25 bp, Homo sapien
gagtcagatccattaatagcctgat

SEQ ID NO: 1454371 - DNA, 25 bp, Homo sapien
gaactcggatggaactgctgactgg

SEQ ID NO: 1454372 - DNA, 25 bp, Homo sapien
agagataatgtaaggtttatctgac

SEQ ID NO: 1454373 - DNA, 25 bp, Homo sapien
cagctgacacctatttgaaagtttc

SEQ ID NO: 1454374 - DNA, 25 bp, Homo sapien
tgctgactggggttcctgccaaact

SEQ ID NO: 1454375 - DNA, 25 bp, Homo sapien
tctgtaacaccacttcttgtattga

SEQ ID NO: 1454376 - DNA, 25 bp, Homo sapien
tggttgcagtgctccaggactctct

SEQ ID NO: 1454377 - DNA, 25 bp, Homo sapien
gactctctgacgttgcctggtgctg

SEQ ID NO: 1454378 - DNA, 25 bp, Homo sapien
ggtgcagatccctcggaagaggctt

SEQ ID NO: 1454379 - DNA, 25 bp, Homo sapien
gaagaataggtatcagaattttccc

SEQ ID NO: 1454380 - DNA, 25 bp, Homo sapien
ctcactgaggtattgtcccagacca

SEQ ID NO: 1454381 - DNA, 25 bp, Homo sapien
gaggtattgtcccagaccaagcttg

SEQ ID NO: 1454382 - DNA, 25 bp, Homo sapien
tgtcccagaccaagcttgtactcct

SEQ ID NO: 1454383 - DNA, 25 bp, Homo sapien
tccacagggctcagttggggggagt

SEQ ID NO: 1454384 - DNA, 25 bp, Homo sapien
ggggttgaagagctgactgcctcat

SEQ ID NO: 1454385 - DNA, 25 bp, Homo sapien
tttctttcatgctcaatccacaggg

SEQ ID NO: 1454386 - DNA, 25 bp, Homo sapien
agctttctttcatgctcaatccaca

SEQ ID NO: 1454387 - DNA, 25 bp, Homo sapien
gaagaacgctgcaaagctttcctgg

SEQ ID NO: 1454388 - DNA, 25 bp, Homo sapien
cttattttagaggtcgcatcctgca

SEQ ID NO: 1454389 - DNA, 25 bp, Homo sapien
tcaggcaagcttattttagaggtcg

SEQ ID NO: 1454390 - DNA, 25 bp, Homo sapien
aagccacgtagaagaacgctgcaaa

SEQ ID NO: 1454391 - DNA, 25 bp, Homo sapien
ctggtccttctattgaaagccttaa

SEQ ID NO: 1454392 - DNA, 25 bp, Homo sapien
agttttatcctataattcggacttg

SEQ ID NO: 1454393 - DNA, 25 bp, Homo sapien
aaaggtggacatgtacaatctggtc

SEQ ID NO: 1454394 - DNA, 25 bp, Homo sapien
tccagttttatcctataattcggac

SEQ ID NO: 1454395 - DNA, 25 bp, Homo sapien
tctcaagtacccatcttggagggta

SEQ ID NO: 1454396 - DNA, 25 bp, Homo sapien
ttggagggtacggaccccacatgag

SEQ ID NO: 1454397 - DNA, 25 bp, Homo sapien
tctagtggactgtacatgttgggag

SEQ ID NO: 1454398 - DNA, 25 bp, Homo sapien
ggagaagaattgactgccccttttg

SEQ ID NO: 1454399 - DNA, 25 bp, Homo sapien
gcttggagcactgccccaatttgga

SEQ ID NO: 1454400 - DNA, 25 bp, Homo sapien
ggcaccagtttgcagaccgcttgga

SEQ ID NO: 1454401 - DNA, 25 bp, Homo sapien
acctcaggtctatggtagatgccca

SEQ ID NO: 1454402 - DNA, 25 bp, Homo sapien
gccgatctctaggtgaaacttcaat

SEQ ID NO: 1454403 - DNA, 25 bp, Homo sapien
gaaggggcagtctctttcttgtctc

SEQ ID NO: 1454404 - DNA, 25 bp, Homo sapien
aaggcagaaggggcagtctctttct

SEQ ID NO: 1454405 - DNA, 25 bp, Homo sapien
ttcttgtctctttttcactcagccc

SEQ ID NO: 1454406 - DNA, 25 bp, Homo sapien
gcagaaggggcagtctctttcttgt

SEQ ID NO: 1454407 - DNA, 25 bp, Homo sapien
ggcagctctgacaccaggagtgtca

SEQ ID NO: 1454408 - DNA, 25 bp, Homo sapien
cccatcctgtgggttccatcaaaga

SEQ ID NO: 1454409 - DNA, 25 bp, Homo sapien
tcctgtgggttccatcaaagaaatt

SEQ ID NO: 1454410 - DNA, 25 bp, Homo sapien
cagactggaggtcactccccaagac

SEQ ID NO: 1454411 - DNA, 25 bp, Homo sapien
aaagttgccaacatgagggagatcc

SEQ ID NO: 1454412 - DNA, 25 bp, Homo sapien
tggcaaagttgccaacatgagggag

SEQ ID NO: 1454413 - DNA, 25 bp, Homo sapien
ttgccaacatgagggagatcctcac

SEQ ID NO: 1454414 - DNA, 25 bp, Homo sapien
agttgccaacatgagggagatcctc

SEQ ID NO: 1454415 - DNA, 25 bp, Homo sapien
tagctgagtcaatttatctactgca

SEQ ID NO: 1454416 - DNA, 25 bp, Homo sapien
tactgcaattagatccaggctccct

SEQ ID NO: 1454417 - DNA, 25 bp, Homo sapien
tgccctcctgaacgcctggctttta

SEQ ID NO: 1454418 - DNA, 25 bp, Homo sapien
cctccacgggggctctatttaacat

SEQ ID NO: 1454419 - DNA, 25 bp, Homo sapien
gccactcagagctaattttgaaagt

SEQ ID NO: 1454420 - DNA, 25 bp, Homo sapien
cttgccactcagagctaattttgaa

SEQ ID NO: 1454421 - DNA, 25 bp, Homo sapien
cactcagagctaattttgaaagttg

SEQ ID NO: 1454422 - DNA, 25 bp, Homo sapien
ttcttgccactcagagctaattttg

SEQ ID NO: 1454423 - DNA, 25 bp, Homo sapien
gccccagtcttgttatatccaaatt

SEQ ID NO: 1454424 - DNA, 25 bp, Homo sapien
tccaaattcctacttagccagccta

SEQ ID NO: 1454425 - DNA, 25 bp, Homo sapien
atattctagccttggaacacttgtt

SEQ ID NO: 1454426 - DNA, 25 bp, Homo sapien
tccccataactcatgagtccacata

SEQ ID NO: 1454427 - DNA, 25 bp, Homo sapien
aatctctgcatggaaagagattcgc

SEQ ID NO: 1454428 - DNA, 25 bp, Homo sapien
aaagagattcgccaagcatgaagca

SEQ ID NO: 1454429 - DNA, 25 bp, Homo sapien
aataaggatcccttcactttcacca

SEQ ID NO: 1454430 - DNA, 25 bp, Homo sapien
catgaagcacgttggcactagctcc

SEQ ID NO: 1454431 - DNA, 25 bp, Homo sapien
agttgctattaaatttcaattgaac

SEQ ID NO: 1454432 - DNA, 25 bp, Homo sapien
caaacaaatgggagcttggaaggaa

SEQ ID NO: 1454433 - DNA, 25 bp, Homo sapien
ttgctattaaatttcaattgaacag

SEQ ID NO: 1454434 - DNA, 25 bp, Homo sapien
gttgctattaaatttcaattgaaca

SEQ ID NO: 1454435 - DNA, 25 bp, Homo sapien
ccaggagaagatccacctgcatgaa

SEQ ID NO: 1454436 - DNA, 25 bp, Homo sapien
cagagatgccaataacaccaggaga

SEQ ID NO: 1454437 - DNA, 25 bp, Homo sapien
catcaggagtctgatcgcaggtgca

SEQ ID NO: 1454438 - DNA, 25 bp, Homo sapien
gcatgaatcttctcaaggcaggcct

SEQ ID NO: 1454439 - DNA, 25 bp, Homo sapien
gcttaaccctgtcaaactggtgtag

SEQ ID NO: 1454440 - DNA, 25 bp, Homo sapien
caattttgaggaggtcatctatttg

SEQ ID NO: 1454441 - DNA, 25 bp, Homo sapien
catctatttgagaaatcaaggctcc

SEQ ID NO: 1454442 - DNA, 25 bp, Homo sapien
aattccctggacctgcatttgctca

SEQ ID NO: 1454443 - DNA, 25 bp, Homo sapien
tctacagatgggttacagttgaaag

SEQ ID NO: 1454444 - DNA, 25 bp, Homo sapien
cagttgaaagatagtagagaatgaa

SEQ ID NO: 1454445 - DNA, 25 bp, Homo sapien
ctcctgtgggtaagactttgtgttc

SEQ ID NO: 1454446 - DNA, 25 bp, Homo sapien
aaagatagtagagaatgaaatcgac

SEQ ID NO: 1454447 - DNA, 25 bp, Homo sapien
gatgaagttgccaatgccaagtgcc

SEQ ID NO: 1454448 - DNA, 25 bp, Homo sapien
tagagcaccactgataagagctgat

SEQ ID NO: 1454449 - DNA, 25 bp, Homo sapien
cattcccagcacacatagccgtatt

SEQ ID NO: 1454450 - DNA, 25 bp, Homo sapien
gagctgatacagcaagacgcctaca

SEQ ID NO: 1454451 - DNA, 25 bp, Homo sapien
gtaataagaagtggcagcgactggc

SEQ ID NO: 1454452 - DNA, 25 bp, Homo sapien
caagtccacacagtagaacatgaga

SEQ ID NO: 1454453 - DNA, 25 bp, Homo sapien
tgagaactgctctgacatagatgac

SEQ ID NO: 1454454 - DNA, 25 bp, Homo sapien
gcagcgactggcccagagacaagtc

SEQ ID NO: 1454455 - DNA, 25 bp, Homo sapien
caacctggctagatgggcctgtcag

SEQ ID NO: 1454456 - DNA, 25 bp, Homo sapien
agaacctctatgctgaccaagggcc

SEQ ID NO: 1454457 - DNA, 25 bp, Homo sapien
tcactcagaacctctatgctgacca

SEQ ID NO: 1454458 - DNA, 25 bp, Homo sapien
gggaacttgcactgaggattcactc

SEQ ID NO: 1454459 - DNA, 25 bp, Homo sapien
ctgagtgagcagtcaatgcggccag

SEQ ID NO: 1454460 - DNA, 25 bp, Homo sapien
taaagggcttatgtcaaggcagtca

SEQ ID NO: 1454461 - DNA, 25 bp, Homo sapien
cttctactctcacctgttactgcgg

SEQ ID NO: 1454462 - DNA, 25 bp, Homo sapien
gacacctgtgcccattacaattatc

SEQ ID NO: 1454463 - DNA, 25 bp, Homo sapien
tccgacattttgacctcttctaacg

SEQ ID NO: 1454464 - DNA, 25 bp, Homo sapien
ttttgacctcttctaacgaggcgcc

SEQ ID NO: 1454465 - DNA, 25 bp, Homo sapien
tctgaaccaacacatgtccgacatt

SEQ ID NO: 1454466 - DNA, 25 bp, Homo sapien
tgctccaggtccgtcgaatagacat

SEQ ID NO: 1454467 - DNA, 25 bp, Homo sapien
tttgcaagatgcaagcattctactt

SEQ ID NO: 1454468 - DNA, 25 bp, Homo sapien
tctacttctagtttggcactgttca

SEQ ID NO: 1454469 - DNA, 25 bp, Homo sapien
tacttctagtttggcactgttcaaa

SEQ ID NO: 1454470 - DNA, 25 bp, Homo sapien
gatgcaagcattctacttctagttt

SEQ ID NO: 1454471 - DNA, 25 bp, Homo sapien
catgggctacacactatgctaagca

SEQ ID NO: 1454472 - DNA, 25 bp, Homo sapien
cagccagtctcttgcatcttggagt

SEQ ID NO: 1454473 - DNA, 25 bp, Homo sapien
tgtccatacaggtccaggtaactcc

SEQ ID NO: 1454474 - DNA, 25 bp, Homo sapien
ccagtgaggtagttgtgacaacagc

SEQ ID NO: 1454475 - DNA, 25 bp, Homo sapien
agtctctggaatacagactcttcag

SEQ ID NO: 1454476 - DNA, 25 bp, Homo sapien
gagctcttggtatcaaccacaggga

SEQ ID NO: 1454477 - DNA, 25 bp, Homo sapien
aagtctctggaatacagactcttca

SEQ ID NO: 1454478 - DNA, 25 bp, Homo sapien
ccatatcgagctcttggtatcaacc

SEQ ID NO: 1454479 - DNA, 25 bp, Homo sapien
ggggatgaaagggcatcagtgtttc

SEQ ID NO: 1454480 - DNA, 25 bp, Homo sapien
caatgatgcagcaccaaaaagccat

SEQ ID NO: 1454481 - DNA, 25 bp, Homo sapien
ggtgccccacgcatcacttctcatt

SEQ ID NO: 1454482 - DNA, 25 bp, Homo sapien
cacttctcattgcaatgatgcagca

SEQ ID NO: 1454483 - DNA, 25 bp, Homo sapien
actctaggcgtgaggctggtgcccc

SEQ ID NO: 1454484 - DNA, 25 bp, Homo sapien
tgagccctatgcacccagatgagca

SEQ ID NO: 1454485 - DNA, 25 bp, Homo sapien
tcagggtgagccctatgcacccaga

SEQ ID NO: 1454486 - DNA, 25 bp, Homo sapien
cctttggaacgacaagttgtctttg

SEQ ID NO: 1454487 - DNA, 25 bp, Homo sapien
ttgtcactgggccctccacggggac

SEQ ID NO: 1454488 - DNA, 25 bp, Homo sapien
agccatgtcggcaagaccaggagga

SEQ ID NO: 1454489 - DNA, 25 bp, Homo sapien
gataaggagagggtgtcatcgacca

SEQ ID NO: 1454490 - DNA, 25 bp, Homo sapien
aaagtattgagccatgtcggcaaga

SEQ ID NO: 1454491 - DNA, 25 bp, Homo sapien
ggagagggtgtcatcgaccacaaaa

SEQ ID NO: 1454492 - DNA, 25 bp, Homo sapien
cagtcttggacctgttcaccatcaa

SEQ ID NO: 1454493 - DNA, 25 bp, Homo sapien
acaggtagatgggtccactgaggac

SEQ ID NO: 1454494 - DNA, 25 bp, Homo sapien
cactgaggactcacaatgaaagatg

SEQ ID NO: 1454495 - DNA, 25 bp, Homo sapien
gaaagatgtaaacttggacttcaac

SEQ ID NO: 1454496 - DNA, 25 bp, Homo sapien
gtgattctgcctagagccaacctgc

SEQ ID NO: 1454497 - DNA, 25 bp, Homo sapien
tccagatgtagaatcaggtgccgag

SEQ ID NO: 1454498 - DNA, 25 bp, Homo sapien
tccagcctgccttcgtggataagcc

SEQ ID NO: 1454499 - DNA, 25 bp, Homo sapien
gacgggtctaccaagtgattctgcc

SEQ ID NO: 1454500 - DNA, 25 bp, Homo sapien
ctgctgctgctgagatgatctcctt

SEQ ID NO: 1454501 - DNA, 25 bp, Homo sapien
cccaacgttgtgctgttgctgctgc

SEQ ID NO: 1454502 - DNA, 25 bp, Homo sapien
ctgctgctgagatgatctccttcac

SEQ ID NO: 1454503 - DNA, 25 bp, Homo sapien
gctgctgctgctgagatgatctcct

SEQ ID NO: 1454504 - DNA, 25 bp, Homo sapien
tacccatgaggtacctagcctgcag

SEQ ID NO: 1454505 - DNA, 25 bp, Homo sapien
tcttacacctttgcaataatcttcc

SEQ ID NO: 1454506 - DNA, 25 bp, Homo sapien
tagcctgcaggatggtattctccct

SEQ ID NO: 1454507 - DNA, 25 bp, Homo sapien
catagctgtgagtaacctagatgca

SEQ ID NO: 1454508 - DNA, 25 bp, Homo sapien
gctcccaaggatgcccagcgggaga

SEQ ID NO: 1454509 - DNA, 25 bp, Homo sapien
gcagtaataggatcaagaagaaagc

SEQ ID NO: 1454510 - DNA, 25 bp, Homo sapien
ttcttttttcctcgtaatgaagcaa

SEQ ID NO: 1454511 - DNA, 25 bp, Homo sapien
taggatcaagaagaaagcctttctc

SEQ ID NO: 1454512 - DNA, 25 bp, Homo sapien
tagtcatccagacaccactcggaat

SEQ ID NO: 1454513 - DNA, 25 bp, Homo sapien
ttttaactaaaaagtcaggcatgac

SEQ ID NO: 1454514 - DNA, 25 bp, Homo sapien
aaagtcaggcatgaccttgtagtca

SEQ ID NO: 1454515 - DNA, 25 bp, Homo sapien
cactcggaatatccatccccagaac

SEQ ID NO: 1454516 - DNA, 25 bp, Homo sapien
cccatataacaacgggagtcgtggg

SEQ ID NO: 1454517 - DNA, 25 bp, Homo sapien
ggagcccgagcgtttggtcaaacca

SEQ ID NO: 1454518 - DNA, 25 bp, Homo sapien
gagcgtttggtcaaaccaccaatat

SEQ ID NO: 1454519 - DNA, 25 bp, Homo sapien
taggcagcacgcttctcctgggggc

SEQ ID NO: 1454520 - DNA, 25 bp, Homo sapien
gccaggaaggacatcaggattttta

SEQ ID NO: 1454521 - DNA, 25 bp, Homo sapien
ttcatgccaggaaggacatcaggat

SEQ ID NO: 1454522 - DNA, 25 bp, Homo sapien
gtactgtgacttagacccccttgga

SEQ ID NO: 1454523 - DNA, 25 bp, Homo sapien
acaccatcccaccagcctttgcaaa

SEQ ID NO: 1454524 - DNA, 25 bp, Homo sapien
gagtaatgctcctccaatatgggct

SEQ ID NO: 1454525 - DNA, 25 bp, Homo sapien
tatcacagcagataatatacttcaa

SEQ ID NO: 1454526 - DNA, 25 bp, Homo sapien
tctgcctatgccaggatcctcagag

SEQ ID NO: 1454527 - DNA, 25 bp, Homo sapien
ctgatagacgatggctggcaaactc

SEQ ID NO: 1454528 - DNA, 25 bp, Homo sapien
ccttaagtgaatcctccactcatgc

SEQ ID NO: 1454529 - DNA, 25 bp, Homo sapien
aatcctccactcatgctttggaggg

SEQ ID NO: 1454530 - DNA, 25 bp, Homo sapien
agacttggggcctcaactttagtag

SEQ ID NO: 1454531 - DNA, 25 bp, Homo sapien
caactttagtagtcacgtcttctca

SEQ ID NO: 1454532 - DNA, 25 bp, Homo sapien
ccacggaagccactctggtctgctc

SEQ ID NO: 1454533 - DNA, 25 bp, Homo sapien
cacggaagccactctggtctgctct

SEQ ID NO: 1454534 - DNA, 25 bp, Homo sapien
cccacggaagccactctggtctgct

SEQ ID NO: 1454535 - DNA, 25 bp, Homo sapien
gcagagaggcaggtgtgagtcagtg

SEQ ID NO: 1454536 - DNA, 25 bp, Homo sapien
tctgtacctctctggacaagcagag

SEQ ID NO: 1454537 - DNA, 25 bp, Homo sapien
aagtcattacttctctgtacctctc

SEQ ID NO: 1454538 - DNA, 25 bp, Homo sapien
ttcctcaagtccaagtcattacttc

SEQ ID NO: 1454539 - DNA, 25 bp, Homo sapien
ttgccagccgtcctttccctggccg

SEQ ID NO: 1454540 - DNA, 25 bp, Homo sapien
gcaagtttgatgatcccttccccag

SEQ ID NO: 1454541 - DNA, 25 bp, Homo sapien
agccttcagcaagtttgatgatccc

SEQ ID NO: 1454542 - DNA, 25 bp, Homo sapien
gaaactgagtggctccctcagagcc

SEQ ID NO: 1454543 - DNA, 25 bp, Homo sapien
aaatgagcacttaatttctcagaag

SEQ ID NO: 1454544 - DNA, 25 bp, Homo sapien
ggaaatgagcacttaatttctcaga

SEQ ID NO: 1454545 - DNA, 25 bp, Homo sapien
atgagcacttaatttctcagaagct

SEQ ID NO: 1454546 - DNA, 25 bp, Homo sapien
aatgagcacttaatttctcagaagc

SEQ ID NO: 1454547 - DNA, 25 bp, Homo sapien
gggacaataaatactctctgttgcc

SEQ ID NO: 1454548 - DNA, 25 bp, Homo sapien
agctcaattttagcctgtgggcctg

SEQ ID NO: 1454549 - DNA, 25 bp, Homo sapien
cacttactccagctcaattttagcc

SEQ ID NO: 1454550 - DNA, 25 bp, Homo sapien
aatactctctgttgccacttactcc

SEQ ID NO: 1454551 - DNA, 25 bp, Homo sapien
tcctggtcccaagaaatacctaggc

SEQ ID NO: 1454552 - DNA, 25 bp, Homo sapien
tcccaagaaatacctaggccccaga

SEQ ID NO: 1454553 - DNA, 25 bp, Homo sapien
ccaagaaatacctaggccccagact

SEQ ID NO: 1454554 - DNA, 25 bp, Homo sapien
agaaatacctaggccccagactcag

SEQ ID NO: 1454555 - DNA, 25 bp, Homo sapien
gagacaagttgctgctaagttaaaa

SEQ ID NO: 1454556 - DNA, 25 bp, Homo sapien
tgaatgagacaagttgctgctaagt

SEQ ID NO: 1454557 - DNA, 25 bp, Homo sapien
atgagacaagttgctgctaagttaa

SEQ ID NO: 1454558 - DNA, 25 bp, Homo sapien
cttttcttaataagttgaatgagac

SEQ ID NO: 1454559 - DNA, 25 bp, Homo sapien
tgtccatctgctcccacgtgggggt

SEQ ID NO: 1454560 - DNA, 25 bp, Homo sapien
caaacaactggctccgtccccctgt

SEQ ID NO: 1454561 - DNA, 25 bp, Homo sapien
ctgcaggaagaaatatcccccaccc

SEQ ID NO: 1454562 - DNA, 25 bp, Homo sapien
ccccaccctagatgagaggtgctgc

SEQ ID NO: 1454563 - DNA, 25 bp, Homo sapien
tgccaaggttgaatcgaggttgaaa

SEQ ID NO: 1454564 - DNA, 25 bp, Homo sapien
gatgggctctatctcgcgaaaccct

SEQ ID NO: 1454565 - DNA, 25 bp, Homo sapien
gaagtcctgaacaactagagagcct

SEQ ID NO: 1454566 - DNA, 25 bp, Homo sapien
ccctgcagcatgtttggacatggaa

SEQ ID NO: 1454567 - DNA, 25 bp, Homo sapien
gaagagcaaaggaacatcttacgtg

SEQ ID NO: 1454568 - DNA, 25 bp, Homo sapien
tgaaggaagagcaaaggaacatctt

SEQ ID NO: 1454569 - DNA, 25 bp, Homo sapien
agagcaaaggaacatcttacgtggt

SEQ ID NO: 1454570 - DNA, 25 bp, Homo sapien
aggaagagcaaaggaacatcttacg

SEQ ID NO: 1454571 - DNA, 25 bp, Homo sapien
tttggcaacaactcctgaatctcag

SEQ ID NO: 1454572 - DNA, 25 bp, Homo sapien
actgagctcggctccgctttggcaa

SEQ ID NO: 1454573 - DNA, 25 bp, Homo sapien
tctcagtgactttgcaccacagaag

SEQ ID NO: 1454574 - DNA, 25 bp, Homo sapien
tcgcttgtgctacccatggataaga

SEQ ID NO: 1454575 - DNA, 25 bp, Homo sapien
tactaagggcacatggagtagtggc

SEQ ID NO: 1454576 - DNA, 25 bp, Homo sapien
tgctcaaaggtgtgcttagcattac

SEQ ID NO: 1454577 - DNA, 25 bp, Homo sapien
tctggtccggtctccaggtggttaa

SEQ ID NO: 1454578 - DNA, 25 bp, Homo sapien
gagtagtggctaaagcaattctttc

SEQ ID NO: 1454579 - DNA, 25 bp, Homo sapien
atccatgggctagaagcagaatctc

SEQ ID NO: 1454580 - DNA, 25 bp, Homo sapien
catgggctagaagcagaatctctct

SEQ ID NO: 1454581 - DNA, 25 bp, Homo sapien
tgggctagaagcagaatctctctca

SEQ ID NO: 1454582 - DNA, 25 bp, Homo sapien
gctagaagcagaatctctctcaggg

SEQ ID NO: 1454583 - DNA, 25 bp, Homo sapien
ttgccctgaattctcccaccaaacc

SEQ ID NO: 1454584 - DNA, 25 bp, Homo sapien
ggcttggagtattgccttgatggct

SEQ ID NO: 1454585 - DNA, 25 bp, Homo sapien
cttgggcttggagtattgccttgat

SEQ ID NO: 1454586 - DNA, 25 bp, Homo sapien
ttgggcttggagtattgccttgatg

SEQ ID NO: 1454587 - DNA, 25 bp, Homo sapien
aatacaatccataacaaggactggc

SEQ ID NO: 1454588 - DNA, 25 bp, Homo sapien
gccaccttcacaagaatataattct

SEQ ID NO: 1454589 - DNA, 25 bp, Homo sapien
ctgaaagctaagatcaatacaatcc

SEQ ID NO: 1454590 - DNA, 25 bp, Homo sapien
gtctctttgcaatcctttaggctgg

SEQ ID NO: 1454591 - DNA, 25 bp, Homo sapien
gagagtcatcgcaaatgcctccagc

SEQ ID NO: 1454592 - DNA, 25 bp, Homo sapien
gatcagaagcaggttcccataggaa

SEQ ID NO: 1454593 - DNA, 25 bp, Homo sapien
aagtgactaggtcatagccagaaac

SEQ ID NO: 1454594 - DNA, 25 bp, Homo sapien
gaggcaagggatacttatgactacc

SEQ ID NO: 1454595 - DNA, 25 bp, Homo sapien
cccacgtcacccaaggtacagttag

SEQ ID NO: 1454596 - DNA, 25 bp, Homo sapien
gacataaccaaatgcttgatgaaca

SEQ ID NO: 1454597 - DNA, 25 bp, Homo sapien
cacccaaggtacagttagacataac

SEQ ID NO: 1454598 - DNA, 25 bp, Homo sapien
tgcttgatgaacactggcagaggct

SEQ ID NO: 1454599 - DNA, 25 bp, Homo sapien
ctctcaagtgaagatcttaaaagga

SEQ ID NO: 1454600 - DNA, 25 bp, Homo sapien
taaaaggaggtctggattcaccacc

SEQ ID NO: 1454601 - DNA, 25 bp, Homo sapien
gatcttaaaaggaggtctggattca

SEQ ID NO: 1454602 - DNA, 25 bp, Homo sapien
aagtgaagatcttaaaaggaggtct

SEQ ID NO: 1454603 - DNA, 25 bp, Homo sapien
agctccagaagagggagtgatggac

SEQ ID NO: 1454604 - DNA, 25 bp, Homo sapien
gctggaaggcggctcttcattggct

SEQ ID NO: 1454605 - DNA, 25 bp, Homo sapien
ctggaaggcggctcttcattggctg

SEQ ID NO: 1454606 - DNA, 25 bp, Homo sapien
tgatggacgcctggctcttggtccc

SEQ ID NO: 1454607 - DNA, 25 bp, Homo sapien
ctcgaagtcaagtgtcagcccacca

SEQ ID NO: 1454608 - DNA, 25 bp, Homo sapien
cgtgccctcgaagtcaagtgtcagc

SEQ ID NO: 1454609 - DNA, 25 bp, Homo sapien
gaagtcaagtgtcagcccaccactg

SEQ ID NO: 1454610 - DNA, 25 bp, Homo sapien
cactgccagtgagacctcctctggc

SEQ ID NO: 1454611 - DNA, 25 bp, Homo sapien
gagcccaggttgacaagaatttacc

SEQ ID NO: 1454612 - DNA, 25 bp, Homo sapien
tccctcttagagctcagtgaagtct

SEQ ID NO: 1454613 - DNA, 25 bp, Homo sapien
aacctgggagaacatcggagtcatc

SEQ ID NO: 1454614 - DNA, 25 bp, Homo sapien
gctagacttgtgctgtaggactcaa

SEQ ID NO: 1454615 - DNA, 25 bp, Homo sapien
cttttcgagaagatcaaggagggct

SEQ ID NO: 1454616 - DNA, 25 bp, Homo sapien
actgttctgggaccttcagtgccca

SEQ ID NO: 1454617 - DNA, 25 bp, Homo sapien
gaccttctagggatgactgtgccaa

SEQ ID NO: 1454618 - DNA, 25 bp, Homo sapien
tgcataaacactttacgggacctgt

SEQ ID NO: 1454619 - DNA, 25 bp, Homo sapien
tggaaagcattccaacccaatctgc

SEQ ID NO: 1454620 - DNA, 25 bp, Homo sapien
tgcagctcagggtaatcttactagc

SEQ ID NO: 1454621 - DNA, 25 bp, Homo sapien
aggctgtactttaggctgcatgaaa

SEQ ID NO: 1454622 - DNA, 25 bp, Homo sapien
tgtctgtcaagtgtaactgtcccat

SEQ ID NO: 1454623 - DNA, 25 bp, Homo sapien
tccagtcctgtcaggtccgctgagc

SEQ ID NO: 1454624 - DNA, 25 bp, Homo sapien
tggtcacggatctgctccacacgct

SEQ ID NO: 1454625 - DNA, 25 bp, Homo sapien
acgcgcccattgatgtggtcacgga

SEQ ID NO: 1454626 - DNA, 25 bp, Homo sapien
tcacttgcaggtggcatagtagagc

SEQ ID NO: 1454627 - DNA, 25 bp, Homo sapien
gcatggaactctgacccaaccggtc

SEQ ID NO: 1454628 - DNA, 25 bp, Homo sapien
ccagcatggaactctgacccaaccg

SEQ ID NO: 1454629 - DNA, 25 bp, Homo sapien
catggaactctgacccaaccggtcc

SEQ ID NO: 1454630 - DNA, 25 bp, Homo sapien
agcatggaactctgacccaaccggt

SEQ ID NO: 1454631 - DNA, 25 bp, Homo sapien
actcaatgcctgctcgctggcacct

SEQ ID NO: 1454632 - DNA, 25 bp, Homo sapien
cagcttttctgctggccgcagtacc

SEQ ID NO: 1454633 - DNA, 25 bp, Homo sapien
gctggcaccttccgcaagctgctgg

SEQ ID NO: 1454634 - DNA, 25 bp, Homo sapien
atccgtgtccagaagtcacccagct

SEQ ID NO: 1454635 - DNA, 25 bp, Homo sapien
gcaaccctgtcctggataagccgaa

SEQ ID NO: 1454636 - DNA, 25 bp, Homo sapien
taagccgaagggagcggctggtgcc

SEQ ID NO: 1454637 - DNA, 25 bp, Homo sapien
tggccctccactgcatgggctcggc

SEQ ID NO: 1454638 - DNA, 25 bp, Homo sapien
gccgcaggttcccaaccacatcttc

SEQ ID NO: 1454639 - DNA, 25 bp, Homo sapien
cctcgctgacctcctggatagtggc

SEQ ID NO: 1454640 - DNA, 25 bp, Homo sapien
tctgcagaacagtagctgagtctgt

SEQ ID NO: 1454641 - DNA, 25 bp, Homo sapien
cctgcttggtctgggacagcaccaa

SEQ ID NO: 1454642 - DNA, 25 bp, Homo sapien
gcgggcacgcgcaatgtcctgcttg

SEQ ID NO: 1454643 - DNA, 25 bp, Homo sapien
tggaagacaacacgcatttgactgt

SEQ ID NO: 1454644 - DNA, 25 bp, Homo sapien
gatacgaggcctctcctagctgagc

SEQ ID NO: 1454645 - DNA, 25 bp, Homo sapien
ttgtggaaggcacccacagtggccc

SEQ ID NO: 1454646 - DNA, 25 bp, Homo sapien
cactaacctccccagagatacgagg

SEQ ID NO: 1454647 - DNA, 25 bp, Homo sapien
tgttgcaggcctgggactagggagg

SEQ ID NO: 1454648 - DNA, 25 bp, Homo sapien
aagtggaggcctggatgttgcaggc

SEQ ID NO: 1454649 - DNA, 25 bp, Homo sapien
cactgaacatgggaatgcgggacag

SEQ ID NO: 1454650 - DNA, 25 bp, Homo sapien
ggctgatgcactgaacatgggaatg

SEQ ID NO: 1454651 - DNA, 25 bp, Homo sapien
ccaagcgctgggcactggattgaat

SEQ ID NO: 1454652 - DNA, 25 bp, Homo sapien
gagccgtgtgcgtctgacatcttcc

SEQ ID NO: 1454653 - DNA, 25 bp, Homo sapien
ctgttaggaagtcccggacctgctg

SEQ ID NO: 1454654 - DNA, 25 bp, Homo sapien
tcccggacctgctggattaggagcc

SEQ ID NO: 1454655 - DNA, 25 bp, Homo sapien
ctgggcattgaagccccgcagctgc

SEQ ID NO: 1454656 - DNA, 25 bp, Homo sapien
ctgccccgccatcaagaaggcccca

SEQ ID NO: 1454657 - DNA, 25 bp, Homo sapien
cctggtccgctggagctgggcattg

SEQ ID NO: 1454658 - DNA, 25 bp, Homo sapien
ctgcctggtccgctggagctgggca

SEQ ID NO: 1454659 - DNA, 25 bp, Homo sapien
tgatattggggtgcaagccatctgc

SEQ ID NO: 1454660 - DNA, 25 bp, Homo sapien
cttggggacatagctcaccagggca

SEQ ID NO: 1454661 - DNA, 25 bp, Homo sapien
attgtcttggggacatagctcacca

SEQ ID NO: 1454662 - DNA, 25 bp, Homo sapien
ggacacccctgcagcgggagccaca

SEQ ID NO: 1454663 - DNA, 25 bp, Homo sapien
ggcaaccactgagctcacagtgagc

SEQ ID NO: 1454664 - DNA, 25 bp, Homo sapien
gacatctccatgagagctaaggacc

SEQ ID NO: 1454665 - DNA, 25 bp, Homo sapien
tgagcagtacaagggtcgggatggc

SEQ ID NO: 1454666 - DNA, 25 bp, Homo sapien
ggaccagaaactggtttccttggca

SEQ ID NO: 1454667 - DNA, 25 bp, Homo sapien
ggctccaggaagtgggactccatgc

SEQ ID NO: 1454668 - DNA, 25 bp, Homo sapien
aagtgggactccatgccccaagtca

SEQ ID NO: 1454669 - DNA, 25 bp, Homo sapien
agcagttggtgtgtgacaagctggg

SEQ ID NO: 1454670 - DNA, 25 bp, Homo sapien
ggcagcagttggtgtgtgacaagct

SEQ ID NO: 1454671 - DNA, 25 bp, Homo sapien
gctggtccaaaaggcgcgagctgtc

SEQ ID NO: 1454672 - DNA, 25 bp, Homo sapien
cgagctgtcggagacctgctgagca

SEQ ID NO: 1454673 - DNA, 25 bp, Homo sapien
tgactgctcgtaggctgtgctcagc

SEQ ID NO: 1454674 - DNA, 25 bp, Homo sapien
gtcaggtcaggcaacgaagacatct

SEQ ID NO: 1454675 - DNA, 25 bp, Homo sapien
cagtgcccatgcccggggttatccg

SEQ ID NO: 1454676 - DNA, 25 bp, Homo sapien
gcagtgcccatgcccggggttatcc

SEQ ID NO: 1454677 - DNA, 25 bp, Homo sapien
agtgcccatgcccggggttatccgg

SEQ ID NO: 1454678 - DNA, 25 bp, Homo sapien
ctgaaggatcagcactgcttatttt

SEQ ID NO: 1454679 - DNA, 25 bp, Homo sapien
ttgaagcttctgtcaagactctcca

SEQ ID NO: 1454680 - DNA, 25 bp, Homo sapien
tgatacatagtaaggagaccattga

SEQ ID NO: 1454681 - DNA, 25 bp, Homo sapien
ggtctctcggaagggacaacgtctc

SEQ ID NO: 1454682 - DNA, 25 bp, Homo sapien
tctttgcatctaggatccgggaggc

SEQ ID NO: 1454683 - DNA, 25 bp, Homo sapien
gcacaccgggtagcgattacagtag

SEQ ID NO: 1454684 - DNA, 25 bp, Homo sapien
tgttccccggaaatcacagtcacag

SEQ ID NO: 1454685 - DNA, 25 bp, Homo sapien
cccggaggtccgcatcataggtctg

SEQ ID NO: 1454686 - DNA, 25 bp, Homo sapien
cggatggctgcagcgctgcacatca

SEQ ID NO: 1454687 - DNA, 25 bp, Homo sapien
aaagccttcccgacaggggcactgc

SEQ ID NO: 1454688 - DNA, 25 bp, Homo sapien
gtggccacgtctccataggtccggt

SEQ ID NO: 1454689 - DNA, 25 bp, Homo sapien
cggtctggacactggcggatggctg

SEQ ID NO: 1454690 - DNA, 25 bp, Homo sapien
catttgggacccaccacgttgggca

SEQ ID NO: 1454691 - DNA, 25 bp, Homo sapien
ccagcttccagtggtagggagcaca

SEQ ID NO: 1454692 - DNA, 25 bp, Homo sapien
acgttgggcagacaaaggcagcgcc

SEQ ID NO: 1454693 - DNA, 25 bp, Homo sapien
tccgggaccccaggatgttgcagtc

SEQ ID NO: 1454694 - DNA, 25 bp, Homo sapien
catgaaaaactcacccccagaggac

SEQ ID NO: 1454695 - DNA, 25 bp, Homo sapien
ctgagctcaggcagacgctccatga

SEQ ID NO: 1454696 - DNA, 25 bp, Homo sapien
tgctgagctcaggcagacgctccat

SEQ ID NO: 1454697 - DNA, 25 bp, Homo sapien
gctccatgaaaaactcacccccaga

SEQ ID NO: 1454698 - DNA, 25 bp, Homo sapien
cttccaactcggacgtgtgctgcca

SEQ ID NO: 1454699 - DNA, 25 bp, Homo sapien
gcgctgggtaagagggcaagaagtc

SEQ ID NO: 1454700 - DNA, 25 bp, Homo sapien
tgtctaccctgcagtgggatttcct

SEQ ID NO: 1454701 - DNA, 25 bp, Homo sapien
gcacagcatctggcgctgggtaaga

SEQ ID NO: 1454702 - DNA, 25 bp, Homo sapien
acacactgcccggtcactgggtcac

SEQ ID NO: 1454703 - DNA, 25 bp, Homo sapien
cagccctgcgggttggcgtaggtga

SEQ ID NO: 1454704 - DNA, 25 bp, Homo sapien
ttgcataggtcacagcgctctccct

SEQ ID NO: 1454705 - DNA, 25 bp, Homo sapien
taggtgagtccagtgaagcccggct

SEQ ID NO: 1454706 - DNA, 25 bp, Homo sapien
ctcctgaatggaagctcccgggcgc

SEQ ID NO: 1454707 - DNA, 25 bp, Homo sapien
gctgacaccgctcacagttcttgcc

SEQ ID NO: 1454708 - DNA, 25 bp, Homo sapien
gtggtcccggcaattgtcacacaca

SEQ ID NO: 1454709 - DNA, 25 bp, Homo sapien
cggttccggaaatagtgcagctgac

SEQ ID NO: 1454710 - DNA, 25 bp, Homo sapien
tggcggcaaacacagcggggtcaaa

SEQ ID NO: 1454711 - DNA, 25 bp, Homo sapien
aaagtgacatgtctctgagtgccca

SEQ ID NO: 1454712 - DNA, 25 bp, Homo sapien
tctgagtgcccattgcagtcgcacc

SEQ ID NO: 1454713 - DNA, 25 bp, Homo sapien
gacatgtctctgagtgcccattgca

SEQ ID NO: 1454714 - DNA, 25 bp, Homo sapien
gacatctgacccacacctttgctat

SEQ ID NO: 1454715 - DNA, 25 bp, Homo sapien
cagggctgacatctgacccacacct

SEQ ID NO: 1454716 - DNA, 25 bp, Homo sapien
ggctgacatctgacccacacctttg

SEQ ID NO: 1454717 - DNA, 25 bp, Homo sapien
tgacatctgacccacacctttgcta

SEQ ID NO: 1454718 - DNA, 25 bp, Homo sapien
ggggaggggtgatccaaagctccta

SEQ ID NO: 1454719 - DNA, 25 bp, Homo sapien
aggggaggggtgatccaaagctcct

SEQ ID NO: 1454720 - DNA, 25 bp, Homo sapien
gggaggggtgatccaaagctcctac

SEQ ID NO: 1454721 - DNA, 25 bp, Homo sapien
tgcacagcgctcacaatttgggccg

SEQ ID NO: 1454722 - DNA, 25 bp, Homo sapien
gaagggtgcacagcgctcacaattt

SEQ ID NO: 1454723 - DNA, 25 bp, Homo sapien
tgttgtagaagggtgcacagcgctc

SEQ ID NO: 1454724 - DNA, 25 bp, Homo sapien
cgctcacaatttgggccggcagtgt

SEQ ID NO: 1454725 - DNA, 25 bp, Homo sapien
tggcttagatcccaacccttccagg

SEQ ID NO: 1454726 - DNA, 25 bp, Homo sapien
caggaagcttcctctgaatgccgca

SEQ ID NO: 1454727 - DNA, 25 bp, Homo sapien
cctagtgaggtttttgcaagctcgc

SEQ ID NO: 1454728 - DNA, 25 bp, Homo sapien
aagctcgctgcttgcacttggacac

SEQ ID NO: 1454729 - DNA, 25 bp, Homo sapien
cccaggcttgggtgcgcagcgatca

SEQ ID NO: 1454730 - DNA, 25 bp, Homo sapien
agaggccccaggcttgggtgcgcag

SEQ ID NO: 1454731 - DNA, 25 bp, Homo sapien
ggcttgggtgcgcagcgatcagcat

SEQ ID NO: 1454732 - DNA, 25 bp, Homo sapien
gccccaggcttgggtgcgcagcgat

SEQ ID NO: 1454733 - DNA, 25 bp, Homo sapien
ctgcagacggagctgggacacagca

SEQ ID NO: 1454734 - DNA, 25 bp, Homo sapien
acggagctgggacacagcatagtag

SEQ ID NO: 1454735 - DNA, 25 bp, Homo sapien
agacggagctgggacacagcatagt

SEQ ID NO: 1454736 - DNA, 25 bp, Homo sapien
gagctgggacacagcatagtaggcg

SEQ ID NO: 1454737 - DNA, 25 bp, Homo sapien
agcctggtgaaattgactctcaagt

SEQ ID NO: 1454738 - DNA, 25 bp, Homo sapien
gaaattgactctcaagtttgtgatc

SEQ ID NO: 1454739 - DNA, 25 bp, Homo sapien
ggtgaaattgactctcaagtttgtg

SEQ ID NO: 1454740 - DNA, 25 bp, Homo sapien
tgactctcaagtttgtgatctcccc

SEQ ID NO: 1454741 - DNA, 25 bp, Homo sapien
ggacaagagaagtaaccacactgac

SEQ ID NO: 1454742 - DNA, 25 bp, Homo sapien
ttccatggacaagagaagtaaccac

SEQ ID NO: 1454743 - DNA, 25 bp, Homo sapien
catggacaagagaagtaaccacact

SEQ ID NO: 1454744 - DNA, 25 bp, Homo sapien
ccatagttccatggacaagagaagt

SEQ ID NO: 1454745 - DNA, 25 bp, Homo sapien
cactaaatccataaggttaagttgg

SEQ ID NO: 1454746 - DNA, 25 bp, Homo sapien
tgagttgctggaatcccagacacta

SEQ ID NO: 1454747 - DNA, 25 bp, Homo sapien
acactaaatccataaggttaagttg

SEQ ID NO: 1454748 - DNA, 25 bp, Homo sapien
agacactaaatccataaggttaagt

SEQ ID NO: 1454749 - DNA, 25 bp, Homo sapien
ctggaacctgagatagaccatggct

SEQ ID NO: 1454750 - DNA, 25 bp, Homo sapien
gaacctgagatagaccatggctatg

SEQ ID NO: 1454751 - DNA, 25 bp, Homo sapien
ctgagatagaccatggctatgaggc

SEQ ID NO: 1454752 - DNA, 25 bp, Homo sapien
gagatagaccatggctatgaggctt

SEQ ID NO: 1454753 - DNA, 25 bp, Homo sapien
cagtcggcagccaggtactggtaca

SEQ ID NO: 1454754 - DNA, 25 bp, Homo sapien
cccatttaggcgtgcattaggcctc

SEQ ID NO: 1454755 - DNA, 25 bp, Homo sapien
gtacactcgccaggtcttaccgaag

SEQ ID NO: 1454756 - DNA, 25 bp, Homo sapien
ggactggcaccgaacatcctgccag

SEQ ID NO: 1454757 - DNA, 25 bp, Homo sapien
gtcctctgctaaaaatcctccaata

SEQ ID NO: 1454758 - DNA, 25 bp, Homo sapien
tctgaccatgagtgaagaggcccca

SEQ ID NO: 1454759 - DNA, 25 bp, Homo sapien
gaacgaaatctgaacttctgaccat

SEQ ID NO: 1454760 - DNA, 25 bp, Homo sapien
gaaatgtcatttcctggtacagatc

SEQ ID NO: 1454761 - DNA, 25 bp, Homo sapien
acttcttgaagctggaatctcctgt

SEQ ID NO: 1454762 - DNA, 25 bp, Homo sapien
tgacttcttgaagctggaatctcct

SEQ ID NO: 1454763 - DNA, 25 bp, Homo sapien
ctggaactccatcatgacttcttga

SEQ ID NO: 1454764 - DNA, 25 bp, Homo sapien
gacttcttgaagctggaatctcctg

SEQ ID NO: 1454765 - DNA, 25 bp, Homo sapien
tgtgactgccaccagcgcatggggc

SEQ ID NO: 1454766 - DNA, 25 bp, Homo sapien
aggctgcctggagtcacacttgcag

SEQ ID NO: 1454767 - DNA, 25 bp, Homo sapien
actgtagtagttgtgaggctgcctg

SEQ ID NO: 1454768 - DNA, 25 bp, Homo sapien
ccacattctctactcggtgactgta

SEQ ID NO: 1454769 - DNA, 25 bp, Homo sapien
caaagagtctgagtggatatatggg

SEQ ID NO: 1454770 - DNA, 25 bp, Homo sapien
tgagtgatagaacctccctgcccaa

SEQ ID NO: 1454771 - DNA, 25 bp, Homo sapien
tcaccagaacaaagaaccgacccaa

SEQ ID NO: 1454772 - DNA, 25 bp, Homo sapien
gggcctatgccttgagtgatagaac

SEQ ID NO: 1454773 - DNA, 25 bp, Homo sapien
agagaactatcacccttcctagtgc

SEQ ID NO: 1454774 - DNA, 25 bp, Homo sapien
aatgaagagaactatcacccttcct

SEQ ID NO: 1454775 - DNA, 25 bp, Homo sapien
cccttcctagtgcttggaggtgccc

SEQ ID NO: 1454776 - DNA, 25 bp, Homo sapien
tatcacccttcctagtgcttggagg

SEQ ID NO: 1454777 - DNA, 25 bp, Homo sapien
cacccagagggggttcagggtacat

SEQ ID NO: 1454778 - DNA, 25 bp, Homo sapien
cctttagtatctatcttcattgctg

SEQ ID NO: 1454779 - DNA, 25 bp, Homo sapien
aaaaagggagtctctatgcctttag

SEQ ID NO: 1454780 - DNA, 25 bp, Homo sapien
acaaaaagggagtctctatgccttt

SEQ ID NO: 1454781 - DNA, 25 bp, Homo sapien
taggtctcaggcttggtcagtccac

SEQ ID NO: 1454782 - DNA, 25 bp, Homo sapien
caagcaggtccccaacaggtggata

SEQ ID NO: 1454783 - DNA, 25 bp, Homo sapien
caggtagatgaagctcggagaaacc

SEQ ID NO: 1454784 - DNA, 25 bp, Homo sapien
ccatactgggtgcagtaggtctcag

SEQ ID NO: 1454785 - DNA, 25 bp, Homo sapien
cttgttgggcatgcaggaggccagg

SEQ ID NO: 1454786 - DNA, 25 bp, Homo sapien
tgggcatgcaggaggccaggcaggg

SEQ ID NO: 1454787 - DNA, 25 bp, Homo sapien
ttgttgggcatgcaggaggccaggc

SEQ ID NO: 1454788 - DNA, 25 bp, Homo sapien
gttgggcatgcaggaggccaggcag

SEQ ID NO: 1454789 - DNA, 25 bp, Homo sapien
aacacaagaggaagaatggtctcat

SEQ ID NO: 1454790 - DNA, 25 bp, Homo sapien
aaacacaagaggaagaatggtctca

SEQ ID NO: 1454791 - DNA, 25 bp, Homo sapien
caaaacacaagaggaagaatggtct

SEQ ID NO: 1454792 - DNA, 25 bp, Homo sapien
aaaacacaagaggaagaatggtctc

SEQ ID NO: 1454793 - DNA, 25 bp, Homo sapien
cagccaatggggtgatccccagaaa

SEQ ID NO: 1454794 - DNA, 25 bp, Homo sapien
cttcagccaatggggtgatccccag

SEQ ID NO: 1454795 - DNA, 25 bp, Homo sapien
agccaatggggtgatccccagaaag

SEQ ID NO: 1454796 - DNA, 25 bp, Homo sapien
tcagccaatggggtgatccccagaa

SEQ ID NO: 1454797 - DNA, 25 bp, Homo sapien
aaagcaaactgggtacaacagtgca

SEQ ID NO: 1454798 - DNA, 25 bp, Homo sapien
gtgcaaacccctagagcacactagc

SEQ ID NO: 1454799 - DNA, 25 bp, Homo sapien
tagagcacactagccctttttcttt

SEQ ID NO: 1454800 - DNA, 25 bp, Homo sapien
ggtacaacagtgcaaacccctagag

SEQ ID NO: 1454801 - DNA, 25 bp, Homo sapien
aatgctggagctctagacccttgtc

SEQ ID NO: 1454802 - DNA, 25 bp, Homo sapien
ctaggacacttggagcagcagatac

SEQ ID NO: 1454803 - DNA, 25 bp, Homo sapien
tctcaagtggcatgtgactcacagg

SEQ ID NO: 1454804 - DNA, 25 bp, Homo sapien
gaaagggccaagacctagttccagc

SEQ ID NO: 1454805 - DNA, 25 bp, Homo sapien
ctgctttcttctaagccactgaggt

SEQ ID NO: 1454806 - DNA, 25 bp, Homo sapien
ctcttttgtgctcaaccccggatct

SEQ ID NO: 1454807 - DNA, 25 bp, Homo sapien
cactgaggtgcttatcaaatgtgaa

SEQ ID NO: 1454808 - DNA, 25 bp, Homo sapien
tcaaccccggatctgaacctgcttt

SEQ ID NO: 1454809 - DNA, 25 bp, Homo sapien
ataaatcaggccctgaaaccaggcc

SEQ ID NO: 1454810 - DNA, 25 bp, Homo sapien
gaggaataaatcaggccctgaaacc

SEQ ID NO: 1454811 - DNA, 25 bp, Homo sapien
ggaagaggaataaatcaggccctga

SEQ ID NO: 1454812 - DNA, 25 bp, Homo sapien
aatcaggccctgaaaccaggcccca

SEQ ID NO: 1454813 - DNA, 25 bp, Homo sapien
aggaatctggcagccgtcacaccca

SEQ ID NO: 1454814 - DNA, 25 bp, Homo sapien
cgcctgaaagctcctcttgaatgtg

SEQ ID NO: 1454815 - DNA, 25 bp, Homo sapien
ctttctccagatcgcctgaaagctc

SEQ ID NO: 1454816 - DNA, 25 bp, Homo sapien
ctggctgggtgtagccccaccgcag

SEQ ID NO: 1454817 - DNA, 25 bp, Homo sapien
gaggatgacacaacttcccctttgc

SEQ ID NO: 1454818 - DNA, 25 bp, Homo sapien
gaaggtgaccgcaacattctggtga

SEQ ID NO: 1454819 - DNA, 25 bp, Homo sapien
ttctggtgagctgacaaggtgaagc

SEQ ID NO: 1454820 - DNA, 25 bp, Homo sapien
tctgactaaggacaggagcacgcca

SEQ ID NO: 1454821 - DNA, 25 bp, Homo sapien
gggcaatgagcaggcttgggccatt

SEQ ID NO: 1454822 - DNA, 25 bp, Homo sapien
gcaatgagcaggcttgggccattcc

SEQ ID NO: 1454823 - DNA, 25 bp, Homo sapien
tgggcaatgagcaggcttgggccat

SEQ ID NO: 1454824 - DNA, 25 bp, Homo sapien
ggcaatgagcaggcttgggccattc

SEQ ID NO: 1454825 - DNA, 25 bp, Homo sapien
ggttcacacaaggaaacatgcaaga

SEQ ID NO: 1454826 - DNA, 25 bp, Homo sapien
catgcaagacaatggtgagaagagg

SEQ ID NO: 1454827 - DNA, 25 bp, Homo sapien
aagagggatcctctgttccatacca

SEQ ID NO: 1454828 - DNA, 25 bp, Homo sapien
caaggtcagatagggcatggcagac

SEQ ID NO: 1454829 - DNA, 25 bp, Homo sapien
tcattgactggaactactcacaggg

SEQ ID NO: 1454830 - DNA, 25 bp, Homo sapien
tcttaggtaattttcctatgtgccc

SEQ ID NO: 1454831 - DNA, 25 bp, Homo sapien
cacaatcaatctggcttacaactca

SEQ ID NO: 1454832 - DNA, 25 bp, Homo sapien
tctggcttacaactcattgactgga

SEQ ID NO: 1454833 - DNA, 25 bp, Homo sapien
cgttggatttggtatggactttatc

SEQ ID NO: 1454834 - DNA, 25 bp, Homo sapien
ttatcctgcatactctccatcatct

SEQ ID NO: 1454835 - DNA, 25 bp, Homo sapien
gttctccatttgctaggcgttggat

SEQ ID NO: 1454836 - DNA, 25 bp, Homo sapien
ggactttatcctgcatactctccat

SEQ ID NO: 1454837 - DNA, 25 bp, Homo sapien
ctcctgctcgcgccgtgccactaag

SEQ ID NO: 1454838 - DNA, 25 bp, Homo sapien
agcacgcctcctaggaactgtggga

SEQ ID NO: 1454839 - DNA, 25 bp, Homo sapien
gagaaaccgctgacatctagaactg

SEQ ID NO: 1454840 - DNA, 25 bp, Homo sapien
tcttcggcgtggtgctcggcctgat

SEQ ID NO: 1454841 - DNA, 25 bp, Homo sapien
ccagagccgagatggaaacggtcca

SEQ ID NO: 1454842 - DNA, 25 bp, Homo sapien
tttaatcctagtccagctgggctgc

SEQ ID NO: 1454843 - DNA, 25 bp, Homo sapien
caagggaggcctaaacgtgtccatc

SEQ ID NO: 1454844 - DNA, 25 bp, Homo sapien
ttccaacagagcttaccagtatcag

SEQ ID NO: 1454845 - DNA, 25 bp, Homo sapien
ccagagggttgtggcttagtgatcc

SEQ ID NO: 1454846 - DNA, 25 bp, Homo sapien
tccagattatgaacgggcctcagaa

SEQ ID NO: 1454847 - DNA, 25 bp, Homo sapien
tgtgtagacgtgtcatccatagggc

SEQ ID NO: 1454848 - DNA, 25 bp, Homo sapien
ggcaatttatcccttgccacagttg

SEQ ID NO: 1454849 - DNA, 25 bp, Homo sapien
gtgaacgtaagcatttacatgaggg

SEQ ID NO: 1454850 - DNA, 25 bp, Homo sapien
taaactgtgttggagactcacagtc

SEQ ID NO: 1454851 - DNA, 25 bp, Homo sapien
tgtgttggagactcacagtcatatt

SEQ ID NO: 1454852 - DNA, 25 bp, Homo sapien
tttccttaaactgtgttggagactc

SEQ ID NO: 1454853 - DNA, 25 bp, Homo sapien
ctttccttaaactgtgttggagact

SEQ ID NO: 1454854 - DNA, 25 bp, Homo sapien
tgggcagaattggaaatggctccag

SEQ ID NO: 1454855 - DNA, 25 bp, Homo sapien
caggctgtccttttgggcagaattg

SEQ ID NO: 1454856 - DNA, 25 bp, Homo sapien
tcaggctgtccttttgggcagaatt

SEQ ID NO: 1454857 - DNA, 25 bp, Homo sapien
ttcgagtcaccaacaggacatcacg

SEQ ID NO: 1454858 - DNA, 25 bp, Homo sapien
caacaggacatcacggcatgtggat

SEQ ID NO: 1454859 - DNA, 25 bp, Homo sapien
tgtggccaacttcgagtcaccaaca

SEQ ID NO: 1454860 - DNA, 25 bp, Homo sapien
ggccaacttcgagtcaccaacagga

SEQ ID NO: 1454861 - DNA, 25 bp, Homo sapien
aaggtgtcagtgagacctgcagtca

SEQ ID NO: 1454862 - DNA, 25 bp, Homo sapien
gacatgggatgctcacactcttcca

SEQ ID NO: 1454863 - DNA, 25 bp, Homo sapien
ccattctaagggcatcagcatcctg

SEQ ID NO: 1454864 - DNA, 25 bp, Homo sapien
ctgaagacatgggatgctcacactc

SEQ ID NO: 1454865 - DNA, 25 bp, Homo sapien
gatgatgctgacagcttgaatggat

SEQ ID NO: 1454866 - DNA, 25 bp, Homo sapien
ttgatgatgctgacagcttgaatgg

SEQ ID NO: 1454867 - DNA, 25 bp, Homo sapien
atgctgacagcttgaatggattcta

SEQ ID NO: 1454868 - DNA, 25 bp, Homo sapien
gtgttgatgatgctgacagcttgaa

SEQ ID NO: 1454869 - DNA, 25 bp, Homo sapien
ggagtctggagttctaaacccatgg

SEQ ID NO: 1454870 - DNA, 25 bp, Homo sapien
tctcgtgtctcttctaataatggca

SEQ ID NO: 1454871 - DNA, 25 bp, Homo sapien
gagagcactcttcccactatgcaga

SEQ ID NO: 1454872 - DNA, 25 bp, Homo sapien
tctttcaagaggctccaggcagtgg

SEQ ID NO: 1454873 - DNA, 25 bp, Homo sapien
caacaattaagaacgatgccagtca

SEQ ID NO: 1454874 - DNA, 25 bp, Homo sapien
catctctcaggtactcagacaaagg

SEQ ID NO: 1454875 - DNA, 25 bp, Homo sapien
cagttctggataaggtaagcacata

SEQ ID NO: 1454876 - DNA, 25 bp, Homo sapien
acaccaccgtggtaagagcagagcc

SEQ ID NO: 1454877 - DNA, 25 bp, Homo sapien
gatggactacatgacctcctggagt

SEQ ID NO: 1454878 - DNA, 25 bp, Homo sapien
ttttaaggactgatcattggctctg

SEQ ID NO: 1454879 - DNA, 25 bp, Homo sapien
ccagttctgggagtctgttaagtcc

SEQ ID NO: 1454880 - DNA, 25 bp, Homo sapien
tatgctagcatagacaagttccttg

SEQ ID NO: 1454881 - DNA, 25 bp, Homo sapien
catgaaagtctatggtgacacaaac

SEQ ID NO: 1454882 - DNA, 25 bp, Homo sapien
tcaactcactgttagccctagagag

SEQ ID NO: 1454883 - DNA, 25 bp, Homo sapien
taaattttaggatatgactgccatc

SEQ ID NO: 1454884 - DNA, 25 bp, Homo sapien
tttcaccaagactaagactgcaggg

SEQ ID NO: 1454885 - DNA, 25 bp, Homo sapien
tgcgaaatagcagagaaacctggga

SEQ ID NO: 1454886 - DNA, 25 bp, Homo sapien
aaaagaagactttgcagctccaggc

SEQ ID NO: 1454887 - DNA, 25 bp, Homo sapien
gagaatgccatcagtctagccaaga

SEQ ID NO: 1454888 - DNA, 25 bp, Homo sapien
caggctttgcccgtgtggagtccaa

SEQ ID NO: 1454889 - DNA, 25 bp, Homo sapien
caagacaggtgacaaaatgggagac

SEQ ID NO: 1454890 - DNA, 25 bp, Homo sapien
tggtccctgatggatacggctccct

SEQ ID NO: 1454891 - DNA, 25 bp, Homo sapien
taagctgcagcactgtcgagaagag

SEQ ID NO: 1454892 - DNA, 25 bp, Homo sapien
cgagtatctctcctgcctgcgtaag

SEQ ID NO: 1454893 - DNA, 25 bp, Homo sapien
taagcatactggtggtctactctcc

SEQ ID NO: 1454894 - DNA, 25 bp, Homo sapien
catttgtggccaactgatctacagc

SEQ ID NO: 1454895 - DNA, 25 bp, Homo sapien
tacaaggttaccatgcaagagtgtt

SEQ ID NO: 1454896 - DNA, 25 bp, Homo sapien
catctccactaagaggacttcctag

SEQ ID NO: 1454897 - DNA, 25 bp, Homo sapien
tgacctagcaaccatgagatccggg

SEQ ID NO: 1454898 - DNA, 25 bp, Homo sapien
cagccggcagtgtgactatctcaga

SEQ ID NO: 1454899 - DNA, 25 bp, Homo sapien
tctgagtcctaaatcgggttctgag

SEQ ID NO: 1454900 - DNA, 25 bp, Homo sapien
aaggtatagggaacaggatagccca

SEQ ID NO: 1454901 - DNA, 25 bp, Homo sapien
agctagcccgagttcccttccctgg

SEQ ID NO: 1454902 - DNA, 25 bp, Homo sapien
gaatggcctccttagctagcccgag

SEQ ID NO: 1454903 - DNA, 25 bp, Homo sapien
tggcctccttagctagcccgagttc

SEQ ID NO: 1454904 - DNA, 25 bp, Homo sapien
caagaatggcctccttagctagccc

SEQ ID NO: 1454905 - DNA, 25 bp, Homo sapien
accagagcatgttatagtgatttgc

SEQ ID NO: 1454906 - DNA, 25 bp, Homo sapien
tgctaaatgaggcataagtctgtct

SEQ ID NO: 1454907 - DNA, 25 bp, Homo sapien
ttatagtgatttgctaaatgaggca

SEQ ID NO: 1454908 - DNA, 25 bp, Homo sapien
ccacaccagagcatgttatagtgat

SEQ ID NO: 1454909 - DNA, 25 bp, Homo sapien
tgccagaaaggcagctagtccccca

SEQ ID NO: 1454910 - DNA, 25 bp, Homo sapien
ccgctacaggttcgggggctcagaa

SEQ ID NO: 1454911 - DNA, 25 bp, Homo sapien
cacgtccgctacaggttcgggggct

SEQ ID NO: 1454912 - DNA, 25 bp, Homo sapien
agaaactttttgcggcttcctgcct

SEQ ID NO: 1454913 - DNA, 25 bp, Homo sapien
caagtaacactggaaaacccgcctg

SEQ ID NO: 1454914 - DNA, 25 bp, Homo sapien
aacactggaaaacccgcctgcgctg

SEQ ID NO: 1454915 - DNA, 25 bp, Homo sapien
gcctgcgctgggaagaccctcgcag

SEQ ID NO: 1454916 - DNA, 25 bp, Homo sapien
gcccagccgcaagtaacactggaaa

SEQ ID NO: 1454917 - DNA, 25 bp, Homo sapien
tctttccccccattccgtgacgtca

SEQ ID NO: 1454918 - DNA, 25 bp, Homo sapien
ccactcgagtgccgccctctttccc

SEQ ID NO: 1454919 - DNA, 25 bp, Homo sapien
cgagtgccgccctctttccccccat

SEQ ID NO: 1454920 - DNA, 25 bp, Homo sapien
ctttccccccattccgtgacgtcat

SEQ ID NO: 1454921 - DNA, 25 bp, Homo sapien
cactagctaggcagccttactgcgc

SEQ ID NO: 1454922 - DNA, 25 bp, Homo sapien
tagctaggcagccttactgcgcgcc

SEQ ID NO: 1454923 - DNA, 25 bp, Homo sapien
taggcagccttactgcgcgccggaa

SEQ ID NO: 1454924 - DNA, 25 bp, Homo sapien
ggcagccttactgcgcgccggaagt

SEQ ID NO: 1454925 - DNA, 25 bp, Homo sapien
atctgtcggcttaggaactgggaag

SEQ ID NO: 1454926 - DNA, 25 bp, Homo sapien
gccgaacgtcctccctgtgttatga

SEQ ID NO: 1454927 - DNA, 25 bp, Homo sapien
gctgccctcattttgcttcgccgaa

SEQ ID NO: 1454928 - DNA, 25 bp, Homo sapien
cctgtgttatgacgtctggtgtccc

SEQ ID NO: 1454929 - DNA, 25 bp, Homo sapien
tcagcatgggaggaggaccagctta

SEQ ID NO: 1454930 - DNA, 25 bp, Homo sapien
gaccagcttataggagttaccagcc

SEQ ID NO: 1454931 - DNA, 25 bp, Homo sapien
ccatgccacgaagggaaaggatttc

SEQ ID NO: 1454932 - DNA, 25 bp, Homo sapien
taactaccagcgatttgacccatgc

SEQ ID NO: 1454933 - DNA, 25 bp, Homo sapien
catggtggttaacagtaaatcccta

SEQ ID NO: 1454934 - DNA, 25 bp, Homo sapien
tcccatggtggttaacagtaaatcc

SEQ ID NO: 1454935 - DNA, 25 bp, Homo sapien
ttcccatggtggttaacagtaaatc

SEQ ID NO: 1454936 - DNA, 25 bp, Homo sapien
ccatggtggttaacagtaaatccct

SEQ ID NO: 1454937 - DNA, 25 bp, Homo sapien
cagtcaagcaggatgcggatgctga

SEQ ID NO: 1454938 - DNA, 25 bp, Homo sapien
ttgcagtcaagcaggatgcggatgc

SEQ ID NO: 1454939 - DNA, 25 bp, Homo sapien
aaacagtccctaccttcagcaagtt

SEQ ID NO: 1454940 - DNA, 25 bp, Homo sapien
aacagtccctaccttcagcaagttt

SEQ ID NO: 1454941 - DNA, 25 bp, Homo sapien
taaaggtaccagactagacatgggc

SEQ ID NO: 1454942 - DNA, 25 bp, Homo sapien
ccactagtaagggagacaagcaggt

SEQ ID NO: 1454943 - DNA, 25 bp, Homo sapien
gtgagctttcactccacaggctggg

SEQ ID NO: 1454944 - DNA, 25 bp, Homo sapien
gcctttccagaagagtactgcccag

SEQ ID NO: 1454945 - DNA, 25 bp, Homo sapien
gatcatccgagccactactggaatg

SEQ ID NO: 1454946 - DNA, 25 bp, Homo sapien
ggacactgccactatcaaaggatcg

SEQ ID NO: 1454947 - DNA, 25 bp, Homo sapien
gaaggatgcggtacagctgcttcag

SEQ ID NO: 1454948 - DNA, 25 bp, Homo sapien
cttcagctgagcaacgatgttatcc

SEQ ID NO: 1454949 - DNA, 25 bp, Homo sapien
tagcacaatggacccaagattgaag

SEQ ID NO: 1454950 - DNA, 25 bp, Homo sapien
tctgccaaggctcactgtggaagtt

SEQ ID NO: 1454951 - DNA, 25 bp, Homo sapien
gattgaaggacagaccaaagaggcc

SEQ ID NO: 1454952 - DNA, 25 bp, Homo sapien
cccattctgatgtctaaatatagga

SEQ ID NO: 1454953 - DNA, 25 bp, Homo sapien
ctcaaacggtggctgcttctctatc

SEQ ID NO: 1454954 - DNA, 25 bp, Homo sapien
ttccccaaagcataagtagatctca

SEQ ID NO: 1454955 - DNA, 25 bp, Homo sapien
caaagcataagtagatctcaaacgg

SEQ ID NO: 1454956 - DNA, 25 bp, Homo sapien
taagtagatctcaaacggtggctgc

SEQ ID NO: 1454957 - DNA, 25 bp, Homo sapien
gaggtgtaatgacagggctgtctcc

SEQ ID NO: 1454958 - DNA, 25 bp, Homo sapien
cacgctggtaacatttgaggtgtaa

SEQ ID NO: 1454959 - DNA, 25 bp, Homo sapien
aacatttgaggtgtaatgacagggc

SEQ ID NO: 1454960 - DNA, 25 bp, Homo sapien
caaagttaaagacacgctggtaaca

SEQ ID NO: 1454961 - DNA, 25 bp, Homo sapien
gttgctcacggtcatggtctgcccg

SEQ ID NO: 1454962 - DNA, 25 bp, Homo sapien
gcataaatggcatgaccgctgacct

SEQ ID NO: 1454963 - DNA, 25 bp, Homo sapien
cattggtaatatgctcaggacctgg

SEQ ID NO: 1454964 - DNA, 25 bp, Homo sapien
aggtccccatagaagagtcggcagc

SEQ ID NO: 1454965 - DNA, 25 bp, Homo sapien
tagagatgacagtgagagtcctgct

SEQ ID NO: 1454966 - DNA, 25 bp, Homo sapien
caggaaggccactgccatagttatc

SEQ ID NO: 1454967 - DNA, 25 bp, Homo sapien
catccctgtgactcatgcaagtcca

SEQ ID NO: 1454968 - DNA, 25 bp, Homo sapien
tgcaagtccattaagatcaagccac

SEQ ID NO: 1454969 - DNA, 25 bp, Homo sapien
tatagaagggctgtataggtgcctg

SEQ ID NO: 1454970 - DNA, 25 bp, Homo sapien
cccacactggctggcgccatgggag

SEQ ID NO: 1454971 - DNA, 25 bp, Homo sapien
agctatagaagggctgtataggtgc

SEQ ID NO: 1454972 - DNA, 25 bp, Homo sapien
gcagttgcccacactgcaattgccc

SEQ ID NO: 1454973 - DNA, 25 bp, Homo sapien
tgtcttccataaaacgaactcagct

SEQ ID NO: 1454974 - DNA, 25 bp, Homo sapien
gggtaccacacgtgcacatcacttg

SEQ ID NO: 1454975 - DNA, 25 bp, Homo sapien
ggtcagtagacaagaaccaaacact

SEQ ID NO: 1454976 - DNA, 25 bp, Homo sapien
cgcaataagaaataaggttcccctg

SEQ ID NO: 1454977 - DNA, 25 bp, Homo sapien
gatgttcaatttcactaagcgggaa

SEQ ID NO: 1454978 - DNA, 25 bp, Homo sapien
cagacatttgagaaaggatcccaca

SEQ ID NO: 1454979 - DNA, 25 bp, Homo sapien
atataggtgaattacatgtcccggg

SEQ ID NO: 1454980 - DNA, 25 bp, Homo sapien
taagcgggaatgtaacgtgtggcaa

SEQ ID NO: 1454981 - DNA, 25 bp, Homo sapien
cattatccttctcatcccagggagc

SEQ ID NO: 1454982 - DNA, 25 bp, Homo sapien
atcattatccttctcatcccaggga

SEQ ID NO: 1454983 - DNA, 25 bp, Homo sapien
atgggaacatggtgctgcgactgat

SEQ ID NO: 1454984 - DNA, 25 bp, Homo sapien
gctgcgactgatccagctcatcttc

SEQ ID NO: 1454985 - DNA, 25 bp, Homo sapien
ggctgagggatgtcacacacttgat

SEQ ID NO: 1454986 - DNA, 25 bp, Homo sapien
tcttattgagagcacagcgcagctg

SEQ ID NO: 1454987 - DNA, 25 bp, Homo sapien
catttagctgggtcagggtcatcca

SEQ ID NO: 1454988 - DNA, 25 bp, Homo sapien
tatatcttcactgggttcatgggca

SEQ ID NO: 1454989 - DNA, 25 bp, Homo sapien
gccagggctttagccggactctgcg

SEQ ID NO: 1454990 - DNA, 25 bp, Homo sapien
tgtagccagatgagcccagggtaga

SEQ ID NO: 1454991 - DNA, 25 bp, Homo sapien
gaagcgtttagagtccctgtgtagc

SEQ ID NO: 1454992 - DNA, 25 bp, Homo sapien
tcttcttgttgagggctatgccggg

SEQ ID NO: 1454993 - DNA, 25 bp, Homo sapien
gaagagtcggcttgtctttcccttg

SEQ ID NO: 1454994 - DNA, 25 bp, Homo sapien
gggatctgaagagtcggcttgtctt

SEQ ID NO: 1454995 - DNA, 25 bp, Homo sapien
tgtctttcccttgaccgctcaaaga

SEQ ID NO: 1454996 - DNA, 25 bp, Homo sapien
agtcggcttgtctttcccttgaccg

SEQ ID NO: 1454997 - DNA, 25 bp, Homo sapien
gcgacaaaggctgagaacacgtctc

SEQ ID NO: 1454998 - DNA, 25 bp, Homo sapien
tccatacaacaatccagtgtctggg

SEQ ID NO: 1454999 - DNA, 25 bp, Homo sapien
gcttgggaacactggcgacaaaggc

SEQ ID NO: 1455000 - DNA, 25 bp, Homo sapien
aggaggggtctcagctggctatcca

SEQ ID NO: 1455001 - DNA, 25 bp, Homo sapien
cgctcctcgacgtcttagccaaggg

SEQ ID NO: 1455002 - DNA, 25 bp, Homo sapien
tcaatctgtccaccagaagcggacg

SEQ ID NO: 1455003 - DNA, 25 bp, Homo sapien
ggcgcctggctctacccaagtaggg

SEQ ID NO: 1455004 - DNA, 25 bp, Homo sapien
tccgaaccaagtccgcagcgaagat

SEQ ID NO: 1455005 - DNA, 25 bp, Homo sapien
tgaactgccgacatatccacacttt

SEQ ID NO: 1455006 - DNA, 25 bp, Homo sapien
tgcctctgtacaactcctaggtagt

SEQ ID NO: 1455007 - DNA, 25 bp, Homo sapien
tagcaggaagcaacaagcatgaact

SEQ ID NO: 1455008 - DNA, 25 bp, Homo sapien
ggtctactattctttcccatgatac

SEQ ID NO: 1455009 - DNA, 25 bp, Homo sapien
cagcctagaagagtacattgattta

SEQ ID NO: 1455010 - DNA, 25 bp, Homo sapien
ggaatacacattgcttgcgagaact

SEQ ID NO: 1455011 - DNA, 25 bp, Homo sapien
gagacattggaatacttcttgctgc

SEQ ID NO: 1455012 - DNA, 25 bp, Homo sapien
gaagtaattttgttgaaactccatg

SEQ ID NO: 1455013 - DNA, 25 bp, Homo sapien
acctctggtcacgttgccattattc

SEQ ID NO: 1455014 - DNA, 25 bp, Homo sapien
acacctctggtcacgttgccattat

SEQ ID NO: 1455015 - DNA, 25 bp, Homo sapien
cttacacctctggtcacgttgccat

SEQ ID NO: 1455016 - DNA, 25 bp, Homo sapien
tacacctctggtcacgttgccatta

SEQ ID NO: 1455017 - DNA, 25 bp, Homo sapien
tgaggaggtgtcaacaggaggcgaa

SEQ ID NO: 1455018 - DNA, 25 bp, Homo sapien
tcaacaggaggcgaatggctgtgga

SEQ ID NO: 1455019 - DNA, 25 bp, Homo sapien
tgccctgcaccctggaattcacgtt

SEQ ID NO: 1455020 - DNA, 25 bp, Homo sapien
tgcaccctggaattcacgttttttg

SEQ ID NO: 1455021 - DNA, 25 bp, Homo sapien
tcctagacttatgagcgagactttc

SEQ ID NO: 1455022 - DNA, 25 bp, Homo sapien
agcttaagtcctagacttatgagcg

SEQ ID NO: 1455023 - DNA, 25 bp, Homo sapien
tccttgtctgacagcttaagtccta

SEQ ID NO: 1455024 - DNA, 25 bp, Homo sapien
ccttgtctgacagcttaagtcctag

SEQ ID NO: 1455025 - DNA, 25 bp, Homo sapien
agcccctgagcccgtttctctctag

SEQ ID NO: 1455026 - DNA, 25 bp, Homo sapien
ctaaagaacatttggtcttcttggt

SEQ ID NO: 1455027 - DNA, 25 bp, Homo sapien
ttctttagcagctcagaaagatttc

SEQ ID NO: 1455028 - DNA, 25 bp, Homo sapien
cgtttctctctagcttctaaagaac

SEQ ID NO: 1455029 - DNA, 25 bp, Homo sapien
gagcgtggcagcaccggctgctctg

SEQ ID NO: 1455030 - DNA, 25 bp, Homo sapien
cgagtggtgacttctgattagtgga

SEQ ID NO: 1455031 - DNA, 25 bp, Homo sapien
tgtcgcgcctcagagactggcgttt

SEQ ID NO: 1455032 - DNA, 25 bp, Homo sapien
cctatcggcagcgagtggtgacttc

SEQ ID NO: 1455033 - DNA, 25 bp, Homo sapien
ctctgccttatgtaaaaatccctct

SEQ ID NO: 1455034 - DNA, 25 bp, Homo sapien
cacaaatgactctgccttatgtaaa

SEQ ID NO: 1455035 - DNA, 25 bp, Homo sapien
tgagcacaaatgactctgccttatg

SEQ ID NO: 1455036 - DNA, 25 bp, Homo sapien
agcttaatgagcacaaatgactctg

SEQ ID NO: 1455037 - DNA, 25 bp, Homo sapien
ggtctgtcaagcatgtctcccatgg

SEQ ID NO: 1455038 - DNA, 25 bp, Homo sapien
agggccccacgcagtcatagcagtg

SEQ ID NO: 1455039 - DNA, 25 bp, Homo sapien
caattgtagccgtcagcattttgtg

SEQ ID NO: 1455040 - DNA, 25 bp, Homo sapien
gaaagtgtccatgttccctggaaga

SEQ ID NO: 1455041 - DNA, 25 bp, Homo sapien
gggagactgattccttagcagctgg

SEQ ID NO: 1455042 - DNA, 25 bp, Homo sapien
ggcactgtgtaagactacgtcacct

SEQ ID NO: 1455043 - DNA, 25 bp, Homo sapien
tgggtgatccaagaattcctagact

SEQ ID NO: 1455044 - DNA, 25 bp, Homo sapien
gctagggtgagtaagcaggctcccc

SEQ ID NO: 1455045 - DNA, 25 bp, Homo sapien
ttcttgacttcctggatagcacaga

SEQ ID NO: 1455046 - DNA, 25 bp, Homo sapien
ttgacttcctggatagcacagagaa

SEQ ID NO: 1455047 - DNA, 25 bp, Homo sapien
cttgacttcctggatagcacagaga

SEQ ID NO: 1455048 - DNA, 25 bp, Homo sapien
attttcttgacttcctggatagcac

SEQ ID NO: 1455049 - DNA, 25 bp, Homo sapien
tatttacatgcatatttgctggaga

SEQ ID NO: 1455050 - DNA, 25 bp, Homo sapien
ttatttacatgcatatttgctggag

SEQ ID NO: 1455051 - DNA, 25 bp, Homo sapien
atttacatgcatatttgctggagag

SEQ ID NO: 1455052 - DNA, 25 bp, Homo sapien
agaatactcagcatggcagatacgc

SEQ ID NO: 1455053 - DNA, 25 bp, Homo sapien
tggcagatacgcttccagatctata

SEQ ID NO: 1455054 - DNA, 25 bp, Homo sapien
ctatatagaatgtctcctaaggctt

SEQ ID NO: 1455055 - DNA, 25 bp, Homo sapien
tagaatgtctcctaaggctttagta

SEQ ID NO: 1455056 - DNA, 25 bp, Homo sapien
gagagtgtatgtgttgaggaatgta

SEQ ID NO: 1455057 - DNA, 25 bp, Homo sapien
ggagagtgtatgtgttgaggaatgt

SEQ ID NO: 1455058 - DNA, 25 bp, Homo sapien
agagtgtatgtgttgaggaatgtat

SEQ ID NO: 1455059 - DNA, 25 bp, Homo sapien
gagtgtatgtgttgaggaatgtatc

SEQ ID NO: 1455060 - DNA, 25 bp, Homo sapien
gatgatagctatactttctgggtct

SEQ ID NO: 1455061 - DNA, 25 bp, Homo sapien
ttaggtcacacccattcagcagcat

SEQ ID NO: 1455062 - DNA, 25 bp, Homo sapien
caaggctgggattctagtagtagac

SEQ ID NO: 1455063 - DNA, 25 bp, Homo sapien
aagtggtgccaccaaaatgcactct

SEQ ID NO: 1455064 - DNA, 25 bp, Homo sapien
gctgaggcccttattcaagtgcgct

SEQ ID NO: 1455065 - DNA, 25 bp, Homo sapien
gaccatgatgcaatctgactctaag

SEQ ID NO: 1455066 - DNA, 25 bp, Homo sapien
taggagttctaccaagggcattctc

SEQ ID NO: 1455067 - DNA, 25 bp, Homo sapien
cacactcagttactggtggcagcaa

SEQ ID NO: 1455068 - DNA, 25 bp, Homo sapien
cattcagcaatagtaatatgactct

SEQ ID NO: 1455069 - DNA, 25 bp, Homo sapien
cagcaatagtaatatgactcttaca

SEQ ID NO: 1455070 - DNA, 25 bp, Homo sapien
taatatgactcttacaattcctcag

SEQ ID NO: 1455071 - DNA, 25 bp, Homo sapien
tagtaatatgactcttacaattcct

SEQ ID NO: 1455072 - DNA, 25 bp, Homo sapien
tctacaaaattgattggctaaagca

SEQ ID NO: 1455073 - DNA, 25 bp, Homo sapien
gatctatagtctatctagaattggt

SEQ ID NO: 1455074 - DNA, 25 bp, Homo sapien
ttatatcctcgattttccaagcaca

SEQ ID NO: 1455075 - DNA, 25 bp, Homo sapien
ccaagcacaatgcattcaaaacatg

SEQ ID NO: 1455076 - DNA, 25 bp, Homo sapien
aataattctctatgtccaaacccag

SEQ ID NO: 1455077 - DNA, 25 bp, Homo sapien
taaaatctggagttaacagctagca

SEQ ID NO: 1455078 - DNA, 25 bp, Homo sapien
taagttactcaccagtgaattgtgt

SEQ ID NO: 1455079 - DNA, 25 bp, Homo sapien
taagatcttagtgtttcacatcact

SEQ ID NO: 1455080 - DNA, 25 bp, Homo sapien
tccgagttgagaatgcatatctagc

SEQ ID NO: 1455081 - DNA, 25 bp, Homo sapien
attgttaccgttatatccatgtgac

SEQ ID NO: 1455082 - DNA, 25 bp, Homo sapien
ctatctaggtcggtgtttctcagcc

SEQ ID NO: 1455083 - DNA, 25 bp, Homo sapien
tcatttgggcgtgacattgtccgag

SEQ ID NO: 1455084 - DNA, 25 bp, Homo sapien
agtatcagccccatatgttatttgc

SEQ ID NO: 1455085 - DNA, 25 bp, Homo sapien
tgaagtcatccaaactccttataga

SEQ ID NO: 1455086 - DNA, 25 bp, Homo sapien
agttgcccttgaagataatttgtga

SEQ ID NO: 1455087 - DNA, 25 bp, Homo sapien
ttgctgtatggcagaaaggatttgc

SEQ ID NO: 1455088 - DNA, 25 bp, Homo sapien
tctgacaagtcgtagtatgtgttaa

SEQ ID NO: 1455089 - DNA, 25 bp, Homo sapien
caagtcgtagtatgtgttaaacaag

SEQ ID NO: 1455090 - DNA, 25 bp, Homo sapien
ttaaatatctgacaagtcgtagtat

SEQ ID NO: 1455091 - DNA, 25 bp, Homo sapien
gtagtatgtgttaaacaagttggcc

SEQ ID NO: 1455092 - DNA, 25 bp, Homo sapien
tggctcctgcaaggctaataactgc

SEQ ID NO: 1455093 - DNA, 25 bp, Homo sapien
gctcctgcaaggctaataactgcac

SEQ ID NO: 1455094 - DNA, 25 bp, Homo sapien
tcctgcaaggctaataactgcacag

SEQ ID NO: 1455095 - DNA, 25 bp, Homo sapien
cttggctcctgcaaggctaataact

SEQ ID NO: 1455096 - DNA, 25 bp, Homo sapien
gctctaactttgcagcaggtgactt

SEQ ID NO: 1455097 - DNA, 25 bp, Homo sapien
cagctctaactttgcagcaggtgac

SEQ ID NO: 1455098 - DNA, 25 bp, Homo sapien
agctcatcattagcggcagctctaa

SEQ ID NO: 1455099 - DNA, 25 bp, Homo sapien
agggagccttgctgctagagatgaa

SEQ ID NO: 1455100 - DNA, 25 bp, Homo sapien
tattccgatgagattttaatggcag

SEQ ID NO: 1455101 - DNA, 25 bp, Homo sapien
actatgtatacaccgattgtctcgg

SEQ ID NO: 1455102 - DNA, 25 bp, Homo sapien
tgctgacctctgtgaaaacagtgta

SEQ ID NO: 1455103 - DNA, 25 bp, Homo sapien
cacatggaatgggtaaacatctgac

SEQ ID NO: 1455104 - DNA, 25 bp, Homo sapien
taaacatgcaaattagatagagttc

SEQ ID NO: 1455105 - DNA, 25 bp, Homo sapien
ggaaattcacttaactgcatgtcag

SEQ ID NO: 1455106 - DNA, 25 bp, Homo sapien
gcgtcttcttgattcctagggagcc

SEQ ID NO: 1455107 - DNA, 25 bp, Homo sapien
attttcagtctgtgcgtcttcttga

SEQ ID NO: 1455108 - DNA, 25 bp, Homo sapien
gaaatgacccatctcgactatggag

SEQ ID NO: 1455109 - DNA, 25 bp, Homo sapien
cacatctggtatagtggcagtaaac

SEQ ID NO: 1455110 - DNA, 25 bp, Homo sapien
gcaggtgccttctcccgattttatt

SEQ ID NO: 1455111 - DNA, 25 bp, Homo sapien
ttgtaacacttttgtgcaggtgcct

SEQ ID NO: 1455112 - DNA, 25 bp, Homo sapien
gaatacattattcggctggagccaa

SEQ ID NO: 1455113 - DNA, 25 bp, Homo sapien
ggagaataactgtttggtcctgcaa

SEQ ID NO: 1455114 - DNA, 25 bp, Homo sapien
tcatctccgtttgctgtggcaaagg

SEQ ID NO: 1455115 - DNA, 25 bp, Homo sapien
gacaagatatctcggaaggttccag

SEQ ID NO: 1455116 - DNA, 25 bp, Homo sapien
ataaccgtctgcagcgacggcggcg

SEQ ID NO: 1455117 - DNA, 25 bp, Homo sapien
gattgacgggtttcacacgctcctc

SEQ ID NO: 1455118 - DNA, 25 bp, Homo sapien
tcctcgctagacagagccgctcatt

SEQ ID NO: 1455119 - DNA, 25 bp, Homo sapien
agaacctctcctcggaaatccacgg

SEQ ID NO: 1455120 - DNA, 25 bp, Homo sapien
tcctgccctcgcagacgggcaccca

SEQ ID NO: 1455121 - DNA, 25 bp, Homo sapien
cgcggcgccttcaccagggcgggaa

SEQ ID NO: 1455122 - DNA, 25 bp, Homo sapien
ttttccctgggctagcgtgcgccgc

SEQ ID NO: 1455123 - DNA, 25 bp, Homo sapien
tgtgccgaggtcaccgagtggactc

SEQ ID NO: 1455124 - DNA, 25 bp, Homo sapien
atggtcctccgtggccgcttagtcc

SEQ ID NO: 1455125 - DNA, 25 bp, Homo sapien
cgtggccgcttagtccctcatcgta

SEQ ID NO: 1455126 - DNA, 25 bp, Homo sapien
tcatggtcctccgtggccgcttagt

SEQ ID NO: 1455127 - DNA, 25 bp, Homo sapien
tggccgcttagtccctcatcgtagg

SEQ ID NO: 1455128 - DNA, 25 bp, Homo sapien
tcctcccaggcagcagagctgcgct

SEQ ID NO: 1455129 - DNA, 25 bp, Homo sapien
gcagcagagctgcgctgcgggcggc

SEQ ID NO: 1455130 - DNA, 25 bp, Homo sapien
cggcggctcctctgtcctcagctca

SEQ ID NO: 1455131 - DNA, 25 bp, Homo sapien
ggcggcggctcctctgtcctcagct

SEQ ID NO: 1455132 - DNA, 25 bp, Homo sapien
cgcagaagcagggaataggcgtcct

SEQ ID NO: 1455133 - DNA, 25 bp, Homo sapien
tcttcggccctagcaactttccgag

SEQ ID NO: 1455134 - DNA, 25 bp, Homo sapien
cgagtgcccagctgtggtcgcagaa

SEQ ID NO: 1455135 - DNA, 25 bp, Homo sapien
ctgccagccgctgtgagtcatttcc

SEQ ID NO: 1455136 - DNA, 25 bp, Homo sapien
gctgcggcaccgtagaaagacaact

SEQ ID NO: 1455137 - DNA, 25 bp, Homo sapien
acacggctgcggcaccgtagaaaga

SEQ ID NO: 1455138 - DNA, 25 bp, Homo sapien
aataatagctcttattcttcagaag

SEQ ID NO: 1455139 - DNA, 25 bp, Homo sapien
cgtagaaagacaacttgcctttgtt

SEQ ID NO: 1455140 - DNA, 25 bp, Homo sapien
tcgcagtgttttgactggaggcaga

SEQ ID NO: 1455141 - DNA, 25 bp, Homo sapien
agggctggtggaaacaactaccaag

SEQ ID NO: 1455142 - DNA, 25 bp, Homo sapien
tcttcatctcgcagtgttttgactg

SEQ ID NO: 1455143 - DNA, 25 bp, Homo sapien
aactaccaagtgtctctctgtctgc

SEQ ID NO: 1455144 - DNA, 25 bp, Homo sapien
tgacagctacggaggcccaagcccc

SEQ ID NO: 1455145 - DNA, 25 bp, Homo sapien
tcctttgcagggagaccggggagct

SEQ ID NO: 1455146 - DNA, 25 bp, Homo sapien
actatgggaggctgacagctacgga

SEQ ID NO: 1455147 - DNA, 25 bp, Homo sapien
tgctgggtaccaaacactatgggag

SEQ ID NO: 1455148 - DNA, 25 bp, Homo sapien
ctgcctgtgcgcctctcataagtga

SEQ ID NO: 1455149 - DNA, 25 bp, Homo sapien
gcgcctctcataagtgagtccagag

SEQ ID NO: 1455150 - DNA, 25 bp, Homo sapien
gcctgtgcgcctctcataagtgagt

SEQ ID NO: 1455151 - DNA, 25 bp, Homo sapien
tgtgcgcctctcataagtgagtcca

SEQ ID NO: 1455152 - DNA, 25 bp, Homo sapien
tactttaagaggaagtatgtggaag

SEQ ID NO: 1455153 - DNA, 25 bp, Homo sapien
gatcacatactttaagaggaagtat

SEQ ID NO: 1455154 - DNA, 25 bp, Homo sapien
gggaatttcaaatcctataacaaca

SEQ ID NO: 1455155 - DNA, 25 bp, Homo sapien
cctataacaacatccaagatcacat

SEQ ID NO: 1455156 - DNA, 25 bp, Homo sapien
caccgaactttgaagcatgcacagc

SEQ ID NO: 1455157 - DNA, 25 bp, Homo sapien
ccaaggagcctgtcactagctaaga

SEQ ID NO: 1455158 - DNA, 25 bp, Homo sapien
caacagtcttacacagagagggtat

SEQ ID NO: 1455159 - DNA, 25 bp, Homo sapien
tatagcaggcatcagcgagcttctt

SEQ ID NO: 1455160 - DNA, 25 bp, Homo sapien
tataagacaaggatacaaggattcc

SEQ ID NO: 1455161 - DNA, 25 bp, Homo sapien
tcaacttcgcaacaaatataagaca

SEQ ID NO: 1455162 - DNA, 25 bp, Homo sapien
gatgcagctaggtttttatatcctt

SEQ ID NO: 1455163 - DNA, 25 bp, Homo sapien
gaccattaagagacatcaacttcgc

SEQ ID NO: 1455164 - DNA, 25 bp, Homo sapien
gggaatttacacaagctagtctggt

SEQ ID NO: 1455165 - DNA, 25 bp, Homo sapien
tctttggtaaacaatccgctggtgg

SEQ ID NO: 1455166 - DNA, 25 bp, Homo sapien
tgtgacaggctgaagaacgatgact

SEQ ID NO: 1455167 - DNA, 25 bp, Homo sapien
ggtgtttgcaaaccatcgccatgag

SEQ ID NO: 1455168 - DNA, 25 bp, Homo sapien
aggagtaactataggcttgcaggca

SEQ ID NO: 1455169 - DNA, 25 bp, Homo sapien
gggaaaggagtaactataggcttgc

SEQ ID NO: 1455170 - DNA, 25 bp, Homo sapien
taactataggcttgcaggcagcatc

SEQ ID NO: 1455171 - DNA, 25 bp, Homo sapien
tctacagagagaacctcagtgctgg

SEQ ID NO: 1455172 - DNA, 25 bp, Homo sapien
tcccagggactgcccagtgaaaact

SEQ ID NO: 1455173 - DNA, 25 bp, Homo sapien
ccagagagggttgtgtgggactatc

SEQ ID NO: 1455174 - DNA, 25 bp, Homo sapien
ggctggccggctctgatctacaccc

SEQ ID NO: 1455175 - DNA, 25 bp, Homo sapien
cggcaccagagggtcaacgttttgg

SEQ ID NO: 1455176 - DNA, 25 bp, Homo sapien
atccccacggcccagagagggttgt

SEQ ID NO: 1455177 - DNA, 25 bp, Homo sapien
tcctacttccttgactgctgtctgc

SEQ ID NO: 1455178 - DNA, 25 bp, Homo sapien
cgtcctacttccttgactgctgtct

SEQ ID NO: 1455179 - DNA, 25 bp, Homo sapien
cccgtcctacttccttgactgctgt

SEQ ID NO: 1455180 - DNA, 25 bp, Homo sapien
gcccgtcctacttccttgactgctg

SEQ ID NO: 1455181 - DNA, 25 bp, Homo sapien
tgtgacatatttgctaggtgctgag

SEQ ID NO: 1455182 - DNA, 25 bp, Homo sapien
gatgaccaagaatttcattgattcc

SEQ ID NO: 1455183 - DNA, 25 bp, Homo sapien
ctggatgaccaagaatttcattgat

SEQ ID NO: 1455184 - DNA, 25 bp, Homo sapien
aactttgggttgttctggtattgtg

SEQ ID NO: 1455185 - DNA, 25 bp, Homo sapien
ctccagtgttctgcaattgtgccct

SEQ ID NO: 1455186 - DNA, 25 bp, Homo sapien
gaagcgcatttccttggtgtatgga

SEQ ID NO: 1455187 - DNA, 25 bp, Homo sapien
tccggaggcggtcggcgaagctgag

SEQ ID NO: 1455188 - DNA, 25 bp, Homo sapien
ttggtgtatggaacactcagatcct

SEQ ID NO: 1455189 - DNA, 25 bp, Homo sapien
aaggcccgaagttcattcgctttgt

SEQ ID NO: 1455190 - DNA, 25 bp, Homo sapien
tgctctgtgagcctgtagcagtagc

SEQ ID NO: 1455191 - DNA, 25 bp, Homo sapien
tctgtgagcctgtagcagtagctga

SEQ ID NO: 1455192 - DNA, 25 bp, Homo sapien
ctgtagcagtagctgaatacaggat

SEQ ID NO: 1455193 - DNA, 25 bp, Homo sapien
gagcctgtagcagtagctgaataca

SEQ ID NO: 1455194 - DNA, 25 bp, Homo sapien
gtagaagtgcctatatagtgcatgg

SEQ ID NO: 1455195 - DNA, 25 bp, Homo sapien
gtgcatggtgtagacgagacgcatt

SEQ ID NO: 1455196 - DNA, 25 bp, Homo sapien
gacgcattgagaagtgctgactcct

SEQ ID NO: 1455197 - DNA, 25 bp, Homo sapien
tgtttgtgctttgccgggaatttgg

SEQ ID NO: 1455198 - DNA, 25 bp, Homo sapien
caagcaggcgccttgggtcacttgt

SEQ ID NO: 1455199 - DNA, 25 bp, Homo sapien
cgtttggtgccaagcaggcgccttg

SEQ ID NO: 1455200 - DNA, 25 bp, Homo sapien
ggcgccttgggtcacttgtttctgc

SEQ ID NO: 1455201 - DNA, 25 bp, Homo sapien
ctgaggagtcgtttggtgccaagca

SEQ ID NO: 1455202 - DNA, 25 bp, Homo sapien
gacagatattcagtatggtcacaga

SEQ ID NO: 1455203 - DNA, 25 bp, Homo sapien
caagttggaactgggtctctcctct

SEQ ID NO: 1455204 - DNA, 25 bp, Homo sapien
taggcacattgaccaactgacagat

SEQ ID NO: 1455205 - DNA, 25 bp, Homo sapien
tctcagcctggggacaactgtgtct

SEQ ID NO: 1455206 - DNA, 25 bp, Homo sapien
ctcagggtcttgctcagagccatcc

SEQ ID NO: 1455207 - DNA, 25 bp, Homo sapien
ttccaggactctaaaccatatttcc

SEQ ID NO: 1455208 - DNA, 25 bp, Homo sapien
ggtaatggaattagctttcatgttt

SEQ ID NO: 1455209 - DNA, 25 bp, Homo sapien
aaggggtaatggaattagctttcat

SEQ ID NO: 1455210 - DNA, 25 bp, Homo sapien
aggactctaaaccatatttcctgtc

SEQ ID NO: 1455211 - DNA, 25 bp, Homo sapien
ttcctaagcaacagacgtacctttc

SEQ ID NO: 1455212 - DNA, 25 bp, Homo sapien
acctttccagactcaccaacttaga

SEQ ID NO: 1455213 - DNA, 25 bp, Homo sapien
ccagactcaccaacttagaagcaca

SEQ ID NO: 1455214 - DNA, 25 bp, Homo sapien
gcaacagacgtacctttccagactc

SEQ ID NO: 1455215 - DNA, 25 bp, Homo sapien
ccaagatgaatacataaatctttcc

SEQ ID NO: 1455216 - DNA, 25 bp, Homo sapien
ataataggtgaagcctgcacacagg

SEQ ID NO: 1455217 - DNA, 25 bp, Homo sapien
gctgggcactgacataataggtgaa

SEQ ID NO: 1455218 - DNA, 25 bp, Homo sapien
tgctaggccactctctaggaacagt

SEQ ID NO: 1455219 - DNA, 25 bp, Homo sapien
tgaatgtgttatccaaagggcagct

SEQ ID NO: 1455220 - DNA, 25 bp, Homo sapien
ttagatggagagatttgctcaggac

SEQ ID NO: 1455221 - DNA, 25 bp, Homo sapien
tgctcaggacatgagacagcttcag

SEQ ID NO: 1455222 - DNA, 25 bp, Homo sapien
tctttatgccgtggctctgagccca

SEQ ID NO: 1455223 - DNA, 25 bp, Homo sapien
agtcaaagaccagcacgatcagaca

SEQ ID NO: 1455224 - DNA, 25 bp, Homo sapien
ctaaggactctggaacctttccacg

SEQ ID NO: 1455225 - DNA, 25 bp, Homo sapien
tcaaagaccagcacgatcagacaca

SEQ ID NO: 1455226 - DNA, 25 bp, Homo sapien
aagaccagcacgatcagacacacac

SEQ ID NO: 1455227 - DNA, 25 bp, Homo sapien
gcagtaccaccgtgactgctaccat

SEQ ID NO: 1455228 - DNA, 25 bp, Homo sapien
cagttttcatccgagtagtaatgta

SEQ ID NO: 1455229 - DNA, 25 bp, Homo sapien
gtaatgtatccgatgtccactggct

SEQ ID NO: 1455230 - DNA, 25 bp, Homo sapien
tgaggatttgaccagttttcatccg

SEQ ID NO: 1455231 - DNA, 25 bp, Homo sapien
agggcctcttctgcgtcccttttgg

SEQ ID NO: 1455232 - DNA, 25 bp, Homo sapien
ggcctcttctgcgtcccttttggtg

SEQ ID NO: 1455233 - DNA, 25 bp, Homo sapien
agatttttccccagcctcgccaaga

SEQ ID NO: 1455234 - DNA, 25 bp, Homo sapien
cctcttctgcgtcccttttggtggc

SEQ ID NO: 1455235 - DNA, 25 bp, Homo sapien
tgacggcccacctcgagtttcaggt

SEQ ID NO: 1455236 - DNA, 25 bp, Homo sapien
gagagatatgcacgccagggtcagt

SEQ ID NO: 1455237 - DNA, 25 bp, Homo sapien
gctaagttcacacagtaagccctcg

SEQ ID NO: 1455238 - DNA, 25 bp, Homo sapien
ccactggtgttggaatgacggccca

SEQ ID NO: 1455239 - DNA, 25 bp, Homo sapien
gcgcgcgtgaacgttgccgtcgccg

SEQ ID NO: 1455240 - DNA, 25 bp, Homo sapien
ccggaggttggtaactggtgaccat

SEQ ID NO: 1455241 - DNA, 25 bp, Homo sapien
ccgccgatgtcgctgggactcggaa

SEQ ID NO: 1455242 - DNA, 25 bp, Homo sapien
gtgttgggaactcgcggcgcgcgtg

SEQ ID NO: 1455243 - DNA, 25 bp, Homo sapien
tacgggtagcattggtgttaagaaa

SEQ ID NO: 1455244 - DNA, 25 bp, Homo sapien
gcattggtgttaagaaatgtgctgc

SEQ ID NO: 1455245 - DNA, 25 bp, Homo sapien
cagaggtactttacgggtagcattg

SEQ ID NO: 1455246 - DNA, 25 bp, Homo sapien
gtgttaagaaatgtgctgctacctg

SEQ ID NO: 1455247 - DNA, 25 bp, Homo sapien
catgctgccccgatgggaactggca

SEQ ID NO: 1455248 - DNA, 25 bp, Homo sapien
gcactttacctacttgcctcactag

SEQ ID NO: 1455249 - DNA, 25 bp, Homo sapien
tcagcgtaggcatcgggaaccttcg

SEQ ID NO: 1455250 - DNA, 25 bp, Homo sapien
gaaccttcgtgccaaggagccatgc

SEQ ID NO: 1455251 - DNA, 25 bp, Homo sapien
gaggtaaggccccaagcttttcaga

SEQ ID NO: 1455252 - DNA, 25 bp, Homo sapien
ttacaaagtctccagaggtaaggcc

SEQ ID NO: 1455253 - DNA, 25 bp, Homo sapien
ctccagaggtaaggccccaagcttt

SEQ ID NO: 1455254 - DNA, 25 bp, Homo sapien
taaggccccaagcttttcagacctc

SEQ ID NO: 1455255 - DNA, 25 bp, Homo sapien
gaagtaggtcactggaaaaatcgtc

SEQ ID NO: 1455256 - DNA, 25 bp, Homo sapien
taggtcactggaaaaatcgtcttta

SEQ ID NO: 1455257 - DNA, 25 bp, Homo sapien
tggaaaaatcgtctttactctgaac

SEQ ID NO: 1455258 - DNA, 25 bp, Homo sapien
ccacattgtagaagtaggtcactgg

SEQ ID NO: 1455259 - DNA, 25 bp, Homo sapien
tcaacagctgacatggtaatcagga

SEQ ID NO: 1455260 - DNA, 25 bp, Homo sapien
caggcagttttgtggagcactgaat

SEQ ID NO: 1455261 - DNA, 25 bp, Homo sapien
ctcaggcagttttgtggagcactga

SEQ ID NO: 1455262 - DNA, 25 bp, Homo sapien
ggtaatcaggactcatcagcagaaa

SEQ ID NO: 1455263 - DNA, 25 bp, Homo sapien
tccaggtatcagattcagcagcaat

SEQ ID NO: 1455264 - DNA, 25 bp, Homo sapien
ggaaggcgttcccagggtctctatg

SEQ ID NO: 1455265 - DNA, 25 bp, Homo sapien
gcagcaatctggaatgaagcaccct

SEQ ID NO: 1455266 - DNA, 25 bp, Homo sapien
catttgtatttggagtcgatccagg

SEQ ID NO: 1455267 - DNA, 25 bp, Homo sapien
ctacttgacctagccagatccatca

SEQ ID NO: 1455268 - DNA, 25 bp, Homo sapien
aaacttcctacttgacctagccaga

SEQ ID NO: 1455269 - DNA, 25 bp, Homo sapien
cttgacctagccagatccatcagaa

SEQ ID NO: 1455270 - DNA, 25 bp, Homo sapien
ttcctacttgacctagccagatcca

SEQ ID NO: 1455271 - DNA, 25 bp, Homo sapien
ctgagtgtccctggctgtccatgct

SEQ ID NO: 1455272 - DNA, 25 bp, Homo sapien
tgcaggaacatcttccttctggcct

SEQ ID NO: 1455273 - DNA, 25 bp, Homo sapien
tggcctctgagtgtccctggctgtc

SEQ ID NO: 1455274 - DNA, 25 bp, Homo sapien
ccggcagctgcaggaacatcttcct

SEQ ID NO: 1455275 - DNA, 25 bp, Homo sapien
ctgggaattcacatccctcgtccct

SEQ ID NO: 1455276 - DNA, 25 bp, Homo sapien
gctgggaattcacatccctcgtccc

SEQ ID NO: 1455277 - DNA, 25 bp, Homo sapien
tggctggctcgcttgtcttcagcag

SEQ ID NO: 1455278 - DNA, 25 bp, Homo sapien
ccaggtggctggctcgcttgtcttc

SEQ ID NO: 1455279 - DNA, 25 bp, Homo sapien
aggtggctggctcgcttgtcttcag

SEQ ID NO: 1455280 - DNA, 25 bp, Homo sapien
gtggctggctcgcttgtcttcagca

SEQ ID NO: 1455281 - DNA, 25 bp, Homo sapien
caacagctctcataacaggtctggg

SEQ ID NO: 1455282 - DNA, 25 bp, Homo sapien
ccttcacagaaaagtccacgtggca

SEQ ID NO: 1455283 - DNA, 25 bp, Homo sapien
tgggagctccaaggattccgtcttt

SEQ ID NO: 1455284 - DNA, 25 bp, Homo sapien
aattctgccttcacagaaaagtcca

SEQ ID NO: 1455285 - DNA, 25 bp, Homo sapien
tagcttataactgatttgtttctct

SEQ ID NO: 1455286 - DNA, 25 bp, Homo sapien
attagcttataactgatttgtttct

SEQ ID NO: 1455287 - DNA, 25 bp, Homo sapien
aattagcttataactgatttgtttc

SEQ ID NO: 1455288 - DNA, 25 bp, Homo sapien
ttagcttataactgatttgtttctc

SEQ ID NO: 1455289 - DNA, 25 bp, Homo sapien
gtacacaacatctgctgccacatag

SEQ ID NO: 1455290 - DNA, 25 bp, Homo sapien
ggctctggtgccacatctgacagct

SEQ ID NO: 1455291 - DNA, 25 bp, Homo sapien
tcttcagaagtctcacagaccatac

SEQ ID NO: 1455292 - DNA, 25 bp, Homo sapien
gaagtctcacagaccatacattgtt

SEQ ID NO: 1455293 - DNA, 25 bp, Homo sapien
attttcttcagaagtctcacagacc

SEQ ID NO: 1455294 - DNA, 25 bp, Homo sapien
gtctcacagaccatacattgtttct

SEQ ID NO: 1455295 - DNA, 25 bp, Homo sapien
cacatgtccactgttgtcagaggtt

SEQ ID NO: 1455296 - DNA, 25 bp, Homo sapien
gagcttcatagatgtggaacctggt

SEQ ID NO: 1455297 - DNA, 25 bp, Homo sapien
ccacatgtccactgttgtcagaggt

SEQ ID NO: 1455298 - DNA, 25 bp, Homo sapien
acacagaatgccacatggacacaga

SEQ ID NO: 1455299 - DNA, 25 bp, Homo sapien
gacaggtggactaggcttcttctct

SEQ ID NO: 1455300 - DNA, 25 bp, Homo sapien
tccaatatcagtaggaggtattcct

SEQ ID NO: 1455301 - DNA, 25 bp, Homo sapien
tctctcatcctctgggtgaccacgg

SEQ ID NO: 1455302 - DNA, 25 bp, Homo sapien
gaccacgggtttgatttgtgagaca

SEQ ID NO: 1455303 - DNA, 25 bp, Homo sapien
gatgtcacgggtcagacagttgcct

SEQ ID NO: 1455304 - DNA, 25 bp, Homo sapien
tgtggcctcactaccacctgagaca

SEQ ID NO: 1455305 - DNA, 25 bp, Homo sapien
cctggataaggctctctctttgggt

SEQ ID NO: 1455306 - DNA, 25 bp, Homo sapien
tcctttcatgaacgccaactgtggc

SEQ ID NO: 1455307 - DNA, 25 bp, Homo sapien
tcctactctgaagctggagcagtca

SEQ ID NO: 1455308 - DNA, 25 bp, Homo sapien
ttaggcaaccatttaggcaagtgtg

SEQ ID NO: 1455309 - DNA, 25 bp, Homo sapien
ttctgagagtcaaacgggataatct

SEQ ID NO: 1455310 - DNA, 25 bp, Homo sapien
tgtgccctgcatcaacacagtgatg

SEQ ID NO: 1455311 - DNA, 25 bp, Homo sapien
gtttcttaacagtgcagattggtat

SEQ ID NO: 1455312 - DNA, 25 bp, Homo sapien
tatggctgcataaaatatcttcctg

SEQ ID NO: 1455313 - DNA, 25 bp, Homo sapien
ttaacagtgcagattggtatggctg

SEQ ID NO: 1455314 - DNA, 25 bp, Homo sapien
tgcagattggtatggctgcataaaa

SEQ ID NO: 1455315 - DNA, 25 bp, Homo sapien
aattcacttcaaattttccagcatg

SEQ ID NO: 1455316 - DNA, 25 bp, Homo sapien
ggctgaacgaaattgaattcacttc

SEQ ID NO: 1455317 - DNA, 25 bp, Homo sapien
tgtttagtggtataaggctgaacga

SEQ ID NO: 1455318 - DNA, 25 bp, Homo sapien
caaattttccagcatgtttatgaat

SEQ ID NO: 1455319 - DNA, 25 bp, Homo sapien
catcccatgattagttgtaaccagg

SEQ ID NO: 1455320 - DNA, 25 bp, Homo sapien
tgtggccataactgcatcatctggg

SEQ ID NO: 1455321 - DNA, 25 bp, Homo sapien
atctcacaagaagcatctccagcag

SEQ ID NO: 1455322 - DNA, 25 bp, Homo sapien
cccctttatgtaccttgtggccata

SEQ ID NO: 1455323 - DNA, 25 bp, Homo sapien
ctcctcagggtctccgtctctccag

SEQ ID NO: 1455324 - DNA, 25 bp, Homo sapien
gctcctcagggtctccgtctctcca

SEQ ID NO: 1455325 - DNA, 25 bp, Homo sapien
tcctcagggtctccgtctctccagg

SEQ ID NO: 1455326 - DNA, 25 bp, Homo sapien
cctcagggtctccgtctctccaggc

SEQ ID NO: 1455327 - DNA, 25 bp, Homo sapien
gggccatctcacatataaggttgca

SEQ ID NO: 1455328 - DNA, 25 bp, Homo sapien
tgtggctaggtggatcagataactc

SEQ ID NO: 1455329 - DNA, 25 bp, Homo sapien
tgaatgaattagagtggcctgcaca

SEQ ID NO: 1455330 - DNA, 25 bp, Homo sapien
gaagaggtctaccaaagctgtgcct

SEQ ID NO: 1455331 - DNA, 25 bp, Homo sapien
caagctctctgagtgcataatttga

SEQ ID NO: 1455332 - DNA, 25 bp, Homo sapien
gacttagagaagatacgaggcccca

SEQ ID NO: 1455333 - DNA, 25 bp, Homo sapien
gcataatttgacttcttatgtggct

SEQ ID NO: 1455334 - DNA, 25 bp, Homo sapien
tcaggtggcagaatatccctgtgga

SEQ ID NO: 1455335 - DNA, 25 bp, Homo sapien
gagtcctcaggtttagagggagcct

SEQ ID NO: 1455336 - DNA, 25 bp, Homo sapien
cctgagtcctcaggtttagagggag

SEQ ID NO: 1455337 - DNA, 25 bp, Homo sapien
agtcctcaggtttagagggagcctc

SEQ ID NO: 1455338 - DNA, 25 bp, Homo sapien
tgagtcctcaggtttagagggagcc

SEQ ID NO: 1455339 - DNA, 25 bp, Homo sapien
gctgtgtgggatcttcttccctgca

SEQ ID NO: 1455340 - DNA, 25 bp, Homo sapien
tgctgtgtgggatcttcttccctgc

SEQ ID NO: 1455341 - DNA, 25 bp, Homo sapien
tttcttgaatcaagtacaagatgtc

SEQ ID NO: 1455342 - DNA, 25 bp, Homo sapien
gaatcaagtacaagatgtcagcagg

SEQ ID NO: 1455343 - DNA, 25 bp, Homo sapien
gtgaactgctcaccagccagatgca

SEQ ID NO: 1455344 - DNA, 25 bp, Homo sapien
ctcaccagccagatgcagcgggttc

SEQ ID NO: 1455345 - DNA, 25 bp, Homo sapien
accagccagatgcagcgggttcctg

SEQ ID NO: 1455346 - DNA, 25 bp, Homo sapien
tgtgaactgctcaccagccagatgc

SEQ ID NO: 1455347 - DNA, 25 bp, Homo sapien
ttgctgctctggagtatgtggcagc

SEQ ID NO: 1455348 - DNA, 25 bp, Homo sapien
ctgctctggagtatgtggcagctgt

SEQ ID NO: 1455349 - DNA, 25 bp, Homo sapien
gctgctctggagtatgtggcagctg

SEQ ID NO: 1455350 - DNA, 25 bp, Homo sapien
tgctgctctggagtatgtggcagct

SEQ ID NO: 1455351 - DNA, 25 bp, Homo sapien
ccagaggtgactgagaggtcctcct

SEQ ID NO: 1455352 - DNA, 25 bp, Homo sapien
gaagtgagcagtgatgggactggct

SEQ ID NO: 1455353 - DNA, 25 bp, Homo sapien
gctctgcaccggagatgtgatgatt

SEQ ID NO: 1455354 - DNA, 25 bp, Homo sapien
tcctcctgctaatgggccgggtagg

SEQ ID NO: 1455355 - DNA, 25 bp, Homo sapien
atccttgtgttacaaagagcaatcc

SEQ ID NO: 1455356 - DNA, 25 bp, Homo sapien
tccttgtgttacaaagagcaatcca

SEQ ID NO: 1455357 - DNA, 25 bp, Homo sapien
tacatccttgtgttacaaagagcaa

SEQ ID NO: 1455358 - DNA, 25 bp, Homo sapien
catccttgtgttacaaagagcaatc

SEQ ID NO: 1455359 - DNA, 25 bp, Homo sapien
tttcaggatgccatggggtgacctg

SEQ ID NO: 1455360 - DNA, 25 bp, Homo sapien
aacatgggactgaataatttcatcc

SEQ ID NO: 1455361 - DNA, 25 bp, Homo sapien
ggaagctagaacatgggactgaata

SEQ ID NO: 1455362 - DNA, 25 bp, Homo sapien
gctagaacatgggactgaataattt

SEQ ID NO: 1455363 - DNA, 25 bp, Homo sapien
gatctcttggctgttgtactctgac

SEQ ID NO: 1455364 - DNA, 25 bp, Homo sapien
gtgatctcttggctgttgtactctg

SEQ ID NO: 1455365 - DNA, 25 bp, Homo sapien
ttaaagtgtgatctcttggctgttg

SEQ ID NO: 1455366 - DNA, 25 bp, Homo sapien
aagtgtgatctcttggctgttgtac

SEQ ID NO: 1455367 - DNA, 25 bp, Homo sapien
cagcatcacactgaacagagtgtcc

SEQ ID NO: 1455368 - DNA, 25 bp, Homo sapien
gtagcaaacagtttgtcagctgttc

SEQ ID NO: 1455369 - DNA, 25 bp, Homo sapien
cagagtgtcccctatcgtttgacct

SEQ ID NO: 1455370 - DNA, 25 bp, Homo sapien
ctgttcccgggcaagttttatcagc

SEQ ID NO: 1455371 - DNA, 25 bp, Homo sapien
tctcccctccatcattaaatcctgc

SEQ ID NO: 1455372 - DNA, 25 bp, Homo sapien
tgatttgctgattatactgtggctt

SEQ ID NO: 1455373 - DNA, 25 bp, Homo sapien
ttgctgattatactgtggctttgaa

SEQ ID NO: 1455374 - DNA, 25 bp, Homo sapien
aaagcttgatttgctgattatactg

SEQ ID NO: 1455375 - DNA, 25 bp, Homo sapien
ttttcagatttcactcctaagatgt

SEQ ID NO: 1455376 - DNA, 25 bp, Homo sapien
gcataggcagtaggagaggacgggc

SEQ ID NO: 1455377 - DNA, 25 bp, Homo sapien
aggaatgagtgttgccaggccatgc

SEQ ID NO: 1455378 - DNA, 25 bp, Homo sapien
tccagatcttgatgcagaggcatag

SEQ ID NO: 1455379 - DNA, 25 bp, Homo sapien
gctgcttttggttgccttctgggca

SEQ ID NO: 1455380 - DNA, 25 bp, Homo sapien
ctgcttttggttgccttctgggcat

SEQ ID NO: 1455381 - DNA, 25 bp, Homo sapien
ccttcagcagtgtgaaatgcccaga

SEQ ID NO: 1455382 - DNA, 25 bp, Homo sapien
aatgcccagatctcaagcttgtggg

SEQ ID NO: 1455383 - DNA, 25 bp, Homo sapien
cccagatctcaagcttgtgggccat

SEQ ID NO: 1455384 - DNA, 25 bp, Homo sapien
gcagtgtgaaatgcccagatctcaa

SEQ ID NO: 1455385 - DNA, 25 bp, Homo sapien
gacatttattgctttccggaaggct

SEQ ID NO: 1455386 - DNA, 25 bp, Homo sapien
tattgctttccggaaggctctggtt

SEQ ID NO: 1455387 - DNA, 25 bp, Homo sapien
ggctctggttcttgcccttatgaag

SEQ ID NO: 1455388 - DNA, 25 bp, Homo sapien
tcactcaacgacatttattgctttc

SEQ ID NO: 1455389 - DNA, 25 bp, Homo sapien
ggagaagcaggtgggcttccctgga

SEQ ID NO: 1455390 - DNA, 25 bp, Homo sapien
gaagcaggtgggcttccctggagca

SEQ ID NO: 1455391 - DNA, 25 bp, Homo sapien
ggcttccctggagcagggcagccat

SEQ ID NO: 1455392 - DNA, 25 bp, Homo sapien
ctggggagaagcaggtgggcttccc

SEQ ID NO: 1455393 - DNA, 25 bp, Homo sapien
gtcgccggaagctagggacaggcag

SEQ ID NO: 1455394 - DNA, 25 bp, Homo sapien
acaggcgtcagaccccccctcgagg

SEQ ID NO: 1455395 - DNA, 25 bp, Homo sapien
agggtgtcgccggaagctagggaca

SEQ ID NO: 1455396 - DNA, 25 bp, Homo sapien
tcaagggtgtcgccggaagctaggg

SEQ ID NO: 1455397 - DNA, 25 bp, Homo sapien
cacagatagtagtgtgtgaactgct

SEQ ID NO: 1455398 - DNA, 25 bp, Homo sapien
tctccaggatccagacacagatagt

SEQ ID NO: 1455399 - DNA, 25 bp, Homo sapien
aaggctcatccaagtctgcacaatg

SEQ ID NO: 1455400 - DNA, 25 bp, Homo sapien
tgcacaatgaaatctcctcggcctc

SEQ ID NO: 1455401 - DNA, 25 bp, Homo sapien
cgtttagacctttttgggctctgag

SEQ ID NO: 1455402 - DNA, 25 bp, Homo sapien
agctggagatgagccactctttttt

SEQ ID NO: 1455403 - DNA, 25 bp, Homo sapien
gtttagacctttttgggctctgagc

SEQ ID NO: 1455404 - DNA, 25 bp, Homo sapien
gaagagagctggagatgagccactc

SEQ ID NO: 1455405 - DNA, 25 bp, Homo sapien
tctttgactttgcttatggccatcc

SEQ ID NO: 1455406 - DNA, 25 bp, Homo sapien
tttgactttgcttatggccatccat

SEQ ID NO: 1455407 - DNA, 25 bp, Homo sapien
ggcttttctttgactttgcttatgg

SEQ ID NO: 1455408 - DNA, 25 bp, Homo sapien
ttttctttgactttgcttatggcca

SEQ ID NO: 1455409 - DNA, 25 bp, Homo sapien
tcatggggaaggttctcccaagatc

SEQ ID NO: 1455410 - DNA, 25 bp, Homo sapien
aaggtggagggaaaagcatatcaaa

SEQ ID NO: 1455411 - DNA, 25 bp, Homo sapien
gtggagggaaaagcatatcaaaccc

SEQ ID NO: 1455412 - DNA, 25 bp, Homo sapien
aggttctcccaagatctttggggtg

SEQ ID NO: 1455413 - DNA, 25 bp, Homo sapien
acaaaaaaggcccggcttgaatgag

SEQ ID NO: 1455414 - DNA, 25 bp, Homo sapien
aaggcccggcttgaatgagtttgtg

SEQ ID NO: 1455415 - DNA, 25 bp, Homo sapien
gtttctgagaaatcaatcctgactc

SEQ ID NO: 1455416 - DNA, 25 bp, Homo sapien
ggcttgaatgagtttgtgctggcac

SEQ ID NO: 1455417 - DNA, 25 bp, Homo sapien
gcggcttggtgatgcagaatactca

SEQ ID NO: 1455418 - DNA, 25 bp, Homo sapien
cttggtgatgcagaatactcacggg

SEQ ID NO: 1455419 - DNA, 25 bp, Homo sapien
gaatactcacgggtccccaaactca

SEQ ID NO: 1455420 - DNA, 25 bp, Homo sapien
ctggcggcttggtgatgcagaatac

SEQ ID NO: 1455421 - DNA, 25 bp, Homo sapien
gtggaagatggcgttaggcaggagg

SEQ ID NO: 1455422 - DNA, 25 bp, Homo sapien
ctgtggaagatggcgttaggcagga

SEQ ID NO: 1455423 - DNA, 25 bp, Homo sapien
tgtggaagatggcgttaggcaggag

SEQ ID NO: 1455424 - DNA, 25 bp, Homo sapien
cagaaagctcacttgtctgaaaatg

SEQ ID NO: 1455425 - DNA, 25 bp, Homo sapien
tagtctgttgcaagcagaaaggtgg

SEQ ID NO: 1455426 - DNA, 25 bp, Homo sapien
cccaccagttcagaaacatagtctg

SEQ ID NO: 1455427 - DNA, 25 bp, Homo sapien
tgtgcatgctgtgctacgaagtccc

SEQ ID NO: 1455428 - DNA, 25 bp, Homo sapien
tcatgtttagccacttgaccagcat

SEQ ID NO: 1455429 - DNA, 25 bp, Homo sapien
tcctgtgaatccaatagactgtggg

SEQ ID NO: 1455430 - DNA, 25 bp, Homo sapien
taagaacatcctgtgcatggagtat

SEQ ID NO: 1455431 - DNA, 25 bp, Homo sapien
tgtgtccccaaatcttcctgtgaat

SEQ ID NO: 1455432 - DNA, 25 bp, Homo sapien
atggtcatccctctggtgtatttca

SEQ ID NO: 1455433 - DNA, 25 bp, Homo sapien
cagggacatggtcatccctctggtg

SEQ ID NO: 1455434 - DNA, 25 bp, Homo sapien
tccctctggtgtatttcaaaacaca

SEQ ID NO: 1455435 - DNA, 25 bp, Homo sapien
ggacatggtcatccctctggtgtat

SEQ ID NO: 1455436 - DNA, 25 bp, Homo sapien
tacccgttctccatattgtaatgag

SEQ ID NO: 1455437 - DNA, 25 bp, Homo sapien
tactccagtgattaccaatgctttg

SEQ ID NO: 1455438 - DNA, 25 bp, Homo sapien
caaggcatttgcacaagctattcca

SEQ ID NO: 1455439 - DNA, 25 bp, Homo sapien
tcttttggtcccttggatgcccatt

SEQ ID NO: 1455440 - DNA, 25 bp, Homo sapien
actgtcctcagagtcgccattgtct

SEQ ID NO: 1455441 - DNA, 25 bp, Homo sapien
cctcagagtcgccattgtcttatgg

SEQ ID NO: 1455442 - DNA, 25 bp, Homo sapien
tcatacccgactatagtcactgacc

SEQ ID NO: 1455443 - DNA, 25 bp, Homo sapien
gactatagtcactgacccagcagtg

SEQ ID NO: 1455444 - DNA, 25 bp, Homo sapien
gattggcagagtgtggtattgtggg

SEQ ID NO: 1455445 - DNA, 25 bp, Homo sapien
gtattgtggggaggtttatattcag

SEQ ID NO: 1455446 - DNA, 25 bp, Homo sapien
aggatggattggcagagtgtggtat

SEQ ID NO: 1455447 - DNA, 25 bp, Homo sapien
gtctagggtaagctggcaggacttc

SEQ ID NO: 1455448 - DNA, 25 bp, Homo sapien
aaattggattatcagctcccagcct

SEQ ID NO: 1455449 - DNA, 25 bp, Homo sapien
cccaggtactttacagaagcttttg

SEQ ID NO: 1455450 - DNA, 25 bp, Homo sapien
gcctttgtaaatagacgtgcaagcc

SEQ ID NO: 1455451 - DNA, 25 bp, Homo sapien
ccttcaaggccatctcatttgtgcc

SEQ ID NO: 1455452 - DNA, 25 bp, Homo sapien
tattgattggcttgagggtggcttt

SEQ ID NO: 1455453 - DNA, 25 bp, Homo sapien
gttgcttcgtctccagcattattga

SEQ ID NO: 1455454 - DNA, 25 bp, Homo sapien
tgctgcagttgcttcgtctccagca

SEQ ID NO: 1455455 - DNA, 25 bp, Homo sapien
tcgtctccagcattattgattggct

SEQ ID NO: 1455456 - DNA, 25 bp, Homo sapien
taacttacatgtccgatttgtgtcc

SEQ ID NO: 1455457 - DNA, 25 bp, Homo sapien
gggactcacacaactttcagagggc

SEQ ID NO: 1455458 - DNA, 25 bp, Homo sapien
caggtagattcttcagggactcaca

SEQ ID NO: 1455459 - DNA, 25 bp, Homo sapien
taaacagacttgtggagagcgagga

SEQ ID NO: 1455460 - DNA, 25 bp, Homo sapien
ctgcaagctgagagaacaagcaaca

SEQ ID NO: 1455461 - DNA, 25 bp, Homo sapien
gaagaattttaagttgtgcgtaaga

SEQ ID NO: 1455462 - DNA, 25 bp, Homo sapien
tattaatgtcgatgtttggaggccc

SEQ ID NO: 1455463 - DNA, 25 bp, Homo sapien
tttgcttattaatgtcgatgtttgg

SEQ ID NO: 1455464 - DNA, 25 bp, Homo sapien
gcttattaatgtcgatgtttggagg

SEQ ID NO: 1455465 - DNA, 25 bp, Homo sapien
taatgtcgatgtttggaggccctgt

SEQ ID NO: 1455466 - DNA, 25 bp, Homo sapien
tcatcactggctgtgagaaagaaca

SEQ ID NO: 1455467 - DNA, 25 bp, Homo sapien
gccaaggccaaagctagagccaggg

SEQ ID NO: 1455468 - DNA, 25 bp, Homo sapien
gaacactaaaatgtgggccaaggcc

SEQ ID NO: 1455469 - DNA, 25 bp, Homo sapien
ttgggtcaggggagctactgcccat

SEQ ID NO: 1455470 - DNA, 25 bp, Homo sapien
ctcggctcagtgcaggaaaccgtag

SEQ ID NO: 1455471 - DNA, 25 bp, Homo sapien
ctcagtgcaggaaaccgtagtaaaa

SEQ ID NO: 1455472 - DNA, 25 bp, Homo sapien
gtgcaggaaaccgtagtaaaagcca

SEQ ID NO: 1455473 - DNA, 25 bp, Homo sapien
cggctcagtgcaggaaaccgtagta

SEQ ID NO: 1455474 - DNA, 25 bp, Homo sapien
tgtcagtgtctggtgcttcatcttc

SEQ ID NO: 1455475 - DNA, 25 bp, Homo sapien
tctgtcagtgtctggtgcttcatct

SEQ ID NO: 1455476 - DNA, 25 bp, Homo sapien
gtctgtcagtgtctggtgcttcatc

SEQ ID NO: 1455477 - DNA, 25 bp, Homo sapien
tcagtgtctggtgcttcatcttcat

SEQ ID NO: 1455478 - DNA, 25 bp, Homo sapien
gactagcattgcaggctgggagaac

SEQ ID NO: 1455479 - DNA, 25 bp, Homo sapien
cagtgcgtgcgctacctgaagtcag

SEQ ID NO: 1455480 - DNA, 25 bp, Homo sapien
ggcattctgtatccaggtcacgagg

SEQ ID NO: 1455481 - DNA, 25 bp, Homo sapien
tggagaatcaacagtaggatttggc

SEQ ID NO: 1455482 - DNA, 25 bp, Homo sapien
gagaaaccataatctcaggaacgag

SEQ ID NO: 1455483 - DNA, 25 bp, Homo sapien
caggaacgagtactgagccaaagat

SEQ ID NO: 1455484 - DNA, 25 bp, Homo sapien
tgaatgtaaatggttgaaactggct

SEQ ID NO: 1455485 - DNA, 25 bp, Homo sapien
gccaaagatgagatccatagtgtga

SEQ ID NO: 1455486 - DNA, 25 bp, Homo sapien
actgtggccgttcttctctttcttg

SEQ ID NO: 1455487 - DNA, 25 bp, Homo sapien
tcctctcttaccctctggttagcat

SEQ ID NO: 1455488 - DNA, 25 bp, Homo sapien
caacccctcccttgccattgccttt

SEQ ID NO: 1455489 - DNA, 25 bp, Homo sapien
ggcctcatctttacagtctgtgggg

SEQ ID NO: 1455490 - DNA, 25 bp, Homo sapien
aggaagcttggaattggcggctaca

SEQ ID NO: 1455491 - DNA, 25 bp, Homo sapien
ttggcggctacaccttgcctgtctg

SEQ ID NO: 1455492 - DNA, 25 bp, Homo sapien
gaagcttggaattggcggctacacc

SEQ ID NO: 1455493 - DNA, 25 bp, Homo sapien
cggctacaccttgcctgtctgtggc

SEQ ID NO: 1455494 - DNA, 25 bp, Homo sapien
tgttggagcagagagccgtgggtgg

SEQ ID NO: 1455495 - DNA, 25 bp, Homo sapien
acttgcgtctggcagcagtaaaagc

SEQ ID NO: 1455496 - DNA, 25 bp, Homo sapien
ttccacagtgatgttggagcagaga

SEQ ID NO: 1455497 - DNA, 25 bp, Homo sapien
cacacttgcgtctggcagcagtaaa

SEQ ID NO: 1455498 - DNA, 25 bp, Homo sapien
catgtcccgctgctgtgctgtacct

SEQ ID NO: 1455499 - DNA, 25 bp, Homo sapien
ttgtttgctttatgaaatccctggg

SEQ ID NO: 1455500 - DNA, 25 bp, Homo sapien
cccagaacagtcaggataaaggctt

SEQ ID NO: 1455501 - DNA, 25 bp, Homo sapien
gtgctgatagggctcgcacactcca

SEQ ID NO: 1455502 - DNA, 25 bp, Homo sapien
gagaaagctggatggtatcttagcc

SEQ ID NO: 1455503 - DNA, 25 bp, Homo sapien
tgacagagaaagctggatggtatct

SEQ ID NO: 1455504 - DNA, 25 bp, Homo sapien
tgccatttttcccgtaggcccgata

SEQ ID NO: 1455505 - DNA, 25 bp, Homo sapien
gatggtatcttagccccattttttc

SEQ ID NO: 1455506 - DNA, 25 bp, Homo sapien
aagctcgccgtcgattccacgctgc

SEQ ID NO: 1455507 - DNA, 25 bp, Homo sapien
ctcgccgtcgattccacgctgccct

SEQ ID NO: 1455508 - DNA, 25 bp, Homo sapien
acctcgatgctgatcctgtccaacc

SEQ ID NO: 1455509 - DNA, 25 bp, Homo sapien
tgttccacctcgatgctgatcctgt

SEQ ID NO: 1455510 - DNA, 25 bp, Homo sapien
tacaaggtaagttgcttgacagtgc

SEQ ID NO: 1455511 - DNA, 25 bp, Homo sapien
ggtaagttgcttgacagtgctgttt

SEQ ID NO: 1455512 - DNA, 25 bp, Homo sapien
aagttgcttgacagtgctgttttca

SEQ ID NO: 1455513 - DNA, 25 bp, Homo sapien
cttcatacaaggtaagttgcttgac

SEQ ID NO: 1455514 - DNA, 25 bp, Homo sapien
ctttgggaagctttgccaagtggtg

SEQ ID NO: 1455515 - DNA, 25 bp, Homo sapien
cacagctgcagtattccagaatggc

SEQ ID NO: 1455516 - DNA, 25 bp, Homo sapien
aatggcagaccatgggcctaaactg

SEQ ID NO: 1455517 - DNA, 25 bp, Homo sapien
tgatgacataactctgcacagctgg

SEQ ID NO: 1455518 - DNA, 25 bp, Homo sapien
ctttgacagccttgtagtcttggca

SEQ ID NO: 1455519 - DNA, 25 bp, Homo sapien
ccctgggacacatgatcagttcctg

SEQ ID NO: 1455520 - DNA, 25 bp, Homo sapien
gacacatgatcagttcctgttgctc

SEQ ID NO: 1455521 - DNA, 25 bp, Homo sapien
atagagtgaagcgagtgagaacgct

SEQ ID NO: 1455522 - DNA, 25 bp, Homo sapien
ggaaatagagtgaagcgagtgagaa

SEQ ID NO: 1455523 - DNA, 25 bp, Homo sapien
ctgaggaaatagagtgaagcgagtg

SEQ ID NO: 1455524 - DNA, 25 bp, Homo sapien
aaatagagtgaagcgagtgagaacg

SEQ ID NO: 1455525 - DNA, 25 bp, Homo sapien
aaggccagtccccataaaccagctg

SEQ ID NO: 1455526 - DNA, 25 bp, Homo sapien
tcttcaacaagcagctgaatagagc

SEQ ID NO: 1455527 - DNA, 25 bp, Homo sapien
cagctgtgacctaagcatcttggca

SEQ ID NO: 1455528 - DNA, 25 bp, Homo sapien
gagttgtaactccagaccagcaagg

SEQ ID NO: 1455529 - DNA, 25 bp, Homo sapien
ctgagagttctagaagagtttgaga

SEQ ID NO: 1455530 - DNA, 25 bp, Homo sapien
aagagtttgagaagcaggtgcttcc

SEQ ID NO: 1455531 - DNA, 25 bp, Homo sapien
ctctgagagttctagaagagtttga

SEQ ID NO: 1455532 - DNA, 25 bp, Homo sapien
aagcaggtgcttcctgtgcatcata

SEQ ID NO: 1455533 - DNA, 25 bp, Homo sapien
tcttggttccaagctgggtcgcctc

SEQ ID NO: 1455534 - DNA, 25 bp, Homo sapien
ccccattgtttacatgttgggtaga

SEQ ID NO: 1455535 - DNA, 25 bp, Homo sapien
tgttctgagggttgtcaatcataga

SEQ ID NO: 1455536 - DNA, 25 bp, Homo sapien
ggtagatgggaccactctcatttgt

SEQ ID NO: 1455537 - DNA, 25 bp, Homo sapien
cgtatccaatctgcttattcagtgc

SEQ ID NO: 1455538 - DNA, 25 bp, Homo sapien
ccagcagtgtacttggtgaggacag

SEQ ID NO: 1455539 - DNA, 25 bp, Homo sapien
gacaaggttctttccgtctttgcag

SEQ ID NO: 1455540 - DNA, 25 bp, Homo sapien
cagtgctatttggttattatcccaa

SEQ ID NO: 1455541 - DNA, 25 bp, Homo sapien
gtgtaccatagcagcccttggaatg

SEQ ID NO: 1455542 - DNA, 25 bp, Homo sapien
tgttgccagaatgacagcttctccc

SEQ ID NO: 1455543 - DNA, 25 bp, Homo sapien
ttagtgaccaacaagcctgcatgac

SEQ ID NO: 1455544 - DNA, 25 bp, Homo sapien
ttggaatgttgccagaatgacagct

SEQ ID NO: 1455545 - DNA, 25 bp, Homo sapien
tcagtgcttgcttagcaggcccaca

SEQ ID NO: 1455546 - DNA, 25 bp, Homo sapien
atgaagatgaggctctgccccaagc

SEQ ID NO: 1455547 - DNA, 25 bp, Homo sapien
cattccactgttatttgagctgctg

SEQ ID NO: 1455548 - DNA, 25 bp, Homo sapien
caggcccacagtcagagaccttgtg

SEQ ID NO: 1455549 - DNA, 25 bp, Homo sapien
atagccacgggtgccaagcagagct

SEQ ID NO: 1455550 - DNA, 25 bp, Homo sapien
cagccctgtgtgttacgcggaagct

SEQ ID NO: 1455551 - DNA, 25 bp, Homo sapien
tcttggggacagtcttccttacagc

SEQ ID NO: 1455552 - DNA, 25 bp, Homo sapien
cagggtgtcacttgatagccacggg

SEQ ID NO: 1455553 - DNA, 25 bp, Homo sapien
tgatgcctcactccaaacacagctg

SEQ ID NO: 1455554 - DNA, 25 bp, Homo sapien
ctggagtccaggagtgctttctgtg

SEQ ID NO: 1455555 - DNA, 25 bp, Homo sapien
tctgggctccatgtttaccaaacac

SEQ ID NO: 1455556 - DNA, 25 bp, Homo sapien
taccaaacactgctgatgcctcact

SEQ ID NO: 1455557 - DNA, 25 bp, Homo sapien
ttgccaaggacaagccacgtctgca

SEQ ID NO: 1455558 - DNA, 25 bp, Homo sapien
cattgccaaggacaagccacgtctg

SEQ ID NO: 1455559 - DNA, 25 bp, Homo sapien
attgccaaggacaagccacgtctgc

SEQ ID NO: 1455560 - DNA, 25 bp, Homo sapien
tgccaaggacaagccacgtctgcat

SEQ ID NO: 1455561 - DNA, 25 bp, Homo sapien
gaacaactaatggatccgtcggatg

SEQ ID NO: 1455562 - DNA, 25 bp, Homo sapien
tcagcaacgtgtatctccaccaggg

SEQ ID NO: 1455563 - DNA, 25 bp, Homo sapien
gacatagtggtcagtgcaacaaggg

SEQ ID NO: 1455564 - DNA, 25 bp, Homo sapien
tatcatcaatggaagggcctgcacg

SEQ ID NO: 1455565 - DNA, 25 bp, Homo sapien
gaaaacatggtgacgtcagacacgg

SEQ ID NO: 1455566 - DNA, 25 bp, Homo sapien
cagcttcaagtgtctatgggaggca

SEQ ID NO: 1455567 - DNA, 25 bp, Homo sapien
tcagacacgggctgtacaaggacgg

SEQ ID NO: 1455568 - DNA, 25 bp, Homo sapien
gaaagagcacgtctaagccactggc

SEQ ID NO: 1455569 - DNA, 25 bp, Homo sapien
aagcatctttgaagcgggcccagct

SEQ ID NO: 1455570 - DNA, 25 bp, Homo sapien
tgtagctttgcgtggtctggcaccc

SEQ ID NO: 1455571 - DNA, 25 bp, Homo sapien
tgatgccactgtcacacgagtctgt

SEQ ID NO: 1455572 - DNA, 25 bp, Homo sapien
aacgaatgcttgacctctgccagga

SEQ ID NO: 1455573 - DNA, 25 bp, Homo sapien
gaggcagccatgaccacgcattttg

SEQ ID NO: 1455574 - DNA, 25 bp, Homo sapien
cttttctggagaagttagtcacgga

SEQ ID NO: 1455575 - DNA, 25 bp, Homo sapien
gacaatgaggtctgtgccaccagca

SEQ ID NO: 1455576 - DNA, 25 bp, Homo sapien
tagtcacggagtctgtctcagaggc

SEQ ID NO: 1455577 - DNA, 25 bp, Homo sapien
tgggaacgatgggcatgactcccaa

SEQ ID NO: 1455578 - DNA, 25 bp, Homo sapien
caggatgctccctgtactggacagg

SEQ ID NO: 1455579 - DNA, 25 bp, Homo sapien
ccctgtactggacaggtgatggatg

SEQ ID NO: 1455580 - DNA, 25 bp, Homo sapien
gatgctccctgtactggacaggtga

SEQ ID NO: 1455581 - DNA, 25 bp, Homo sapien
ctagggaacaagtgtgtccaaagta

SEQ ID NO: 1455582 - DNA, 25 bp, Homo sapien
gggaacaagtgtgtccaaagtattc

SEQ ID NO: 1455583 - DNA, 25 bp, Homo sapien
ggaacaagtgtgtccaaagtattcc

SEQ ID NO: 1455584 - DNA, 25 bp, Homo sapien
tagggaacaagtgtgtccaaagtat

SEQ ID NO: 1455585 - DNA, 25 bp, Homo sapien
actaagaggaaacgcgcaggccctg

SEQ ID NO: 1455586 - DNA, 25 bp, Homo sapien
gggatgaccctggtgagtctctccc

SEQ ID NO: 1455587 - DNA, 25 bp, Homo sapien
ctttcttagatctgacaaaaagctg

SEQ ID NO: 1455588 - DNA, 25 bp, Homo sapien
ctctggtccctgaaggatgactaag

SEQ ID NO: 1455589 - DNA, 25 bp, Homo sapien
ggtggtgggagtaggcagtattccc

SEQ ID NO: 1455590 - DNA, 25 bp, Homo sapien
ttatcctgggtagaggcccgaggca

SEQ ID NO: 1455591 - DNA, 25 bp, Homo sapien
gcccgaggcactggatctgaagcca

SEQ ID NO: 1455592 - DNA, 25 bp, Homo sapien
gtattcccatccatgctgcctgagc

SEQ ID NO: 1455593 - DNA, 25 bp, Homo sapien
attcagaggatctgctgttcctaaa

SEQ ID NO: 1455594 - DNA, 25 bp, Homo sapien
ctgctgttcctaaagctttcagaga

SEQ ID NO: 1455595 - DNA, 25 bp, Homo sapien
tccttgctactcagtctatttttct

SEQ ID NO: 1455596 - DNA, 25 bp, Homo sapien
gaggatctgctgttcctaaagcttt

SEQ ID NO: 1455597 - DNA, 25 bp, Homo sapien
ggcagactgtacactcatgttattg

SEQ ID NO: 1455598 - DNA, 25 bp, Homo sapien
gactgtacactcatgttattgccac

SEQ ID NO: 1455599 - DNA, 25 bp, Homo sapien
cctggcagactgtacactcatgtta

SEQ ID NO: 1455600 - DNA, 25 bp, Homo sapien
acactcatgttattgccactcattg

SEQ ID NO: 1455601 - DNA, 25 bp, Homo sapien
ttgagaagccgtctttggagcagga

SEQ ID NO: 1455602 - DNA, 25 bp, Homo sapien
tctgccgaggaggagctttgagaag

SEQ ID NO: 1455603 - DNA, 25 bp, Homo sapien
gcatgagtacaagaatggccaagag

SEQ ID NO: 1455604 - DNA, 25 bp, Homo sapien
tggaatctctcaggcctaggtaggt

SEQ ID NO: 1455605 - DNA, 25 bp, Homo sapien
gttcctgtgtgccttcctgtgctcc

SEQ ID NO: 1455606 - DNA, 25 bp, Homo sapien
tgtgctccacacccccaaccctgcc

SEQ ID NO: 1455607 - DNA, 25 bp, Homo sapien
cctgtgctccacacccccaaccctg

SEQ ID NO: 1455608 - DNA, 25 bp, Homo sapien
ctgttcctgtgtgccttcctgtgct

SEQ ID NO: 1455609 - DNA, 25 bp, Homo sapien
gctgcaggtatggagtgtccgagcc

SEQ ID NO: 1455610 - DNA, 25 bp, Homo sapien
tatggagtgtccgagccagcttcat

SEQ ID NO: 1455611 - DNA, 25 bp, Homo sapien
caggtatggagtgtccgagccagct

SEQ ID NO: 1455612 - DNA, 25 bp, Homo sapien
ctgcaggtatggagtgtccgagcca

SEQ ID NO: 1455613 - DNA, 25 bp, Homo sapien
gttctggaagaaccaatgtgctgcc

SEQ ID NO: 1455614 - DNA, 25 bp, Homo sapien
ctcaggcacttgagtgagcctcctg

SEQ ID NO: 1455615 - DNA, 25 bp, Homo sapien
tgtgctgcctacaccagatgactca

SEQ ID NO: 1455616 - DNA, 25 bp, Homo sapien
gcagagataggcttccacccactct

SEQ ID NO: 1455617 - DNA, 25 bp, Homo sapien
tccactgccaatcaatccaccagtg

SEQ ID NO: 1455618 - DNA, 25 bp, Homo sapien
cactgccaatcaatccaccagtggg

SEQ ID NO: 1455619 - DNA, 25 bp, Homo sapien
ctgccaatcaatccaccagtgggca

SEQ ID NO: 1455620 - DNA, 25 bp, Homo sapien
tccctccactgccaatcaatccacc

SEQ ID NO: 1455621 - DNA, 25 bp, Homo sapien
catagccagtgtctctcgtggtctc

SEQ ID NO: 1455622 - DNA, 25 bp, Homo sapien
atagccagtgtctctcgtggtctct

SEQ ID NO: 1455623 - DNA, 25 bp, Homo sapien
ccatagccagtgtctctcgtggtct

SEQ ID NO: 1455624 - DNA, 25 bp, Homo sapien
aattttctgtggacagagcctgtgc

SEQ ID NO: 1455625 - DNA, 25 bp, Homo sapien
tcaggtccccttgggctagttcaca

SEQ ID NO: 1455626 - DNA, 25 bp, Homo sapien
caacttcttagactcaatgctgaca

SEQ ID NO: 1455627 - DNA, 25 bp, Homo sapien
tagactcaatgctgacaggaccagg

SEQ ID NO: 1455628 - DNA, 25 bp, Homo sapien
tcaaccatttctgattttctgtgca

SEQ ID NO: 1455629 - DNA, 25 bp, Homo sapien
ctcaaccatttctgattttctgtgc

SEQ ID NO: 1455630 - DNA, 25 bp, Homo sapien
ttctgattttctgtgcaaagctgac

SEQ ID NO: 1455631 - DNA, 25 bp, Homo sapien
catttctgattttctgtgcaaagct

SEQ ID NO: 1455632 - DNA, 25 bp, Homo sapien
gataaatttgttttacaggaactgc

SEQ ID NO: 1455633 - DNA, 25 bp, Homo sapien
tttgttttacaggaactgctcccca

SEQ ID NO: 1455634 - DNA, 25 bp, Homo sapien
tgttttacaggaactgctccccaaa

SEQ ID NO: 1455635 - DNA, 25 bp, Homo sapien
ttacaggaactgctccccaaatctc

SEQ ID NO: 1455636 - DNA, 25 bp, Homo sapien
agtaagtggcccacggtgagatcat

SEQ ID NO: 1455637 - DNA, 25 bp, Homo sapien
cacggtgagatcatgagcaaaaggc

SEQ ID NO: 1455638 - DNA, 25 bp, Homo sapien
ggtacaccaccagctcgggcatcaa

SEQ ID NO: 1455639 - DNA, 25 bp, Homo sapien
tctgggggtacaccaccagctcggg

SEQ ID NO: 1455640 - DNA, 25 bp, Homo sapien
ctacttccagtatttgttgtctgcc

SEQ ID NO: 1455641 - DNA, 25 bp, Homo sapien
tctacttccagtatttgttgtctgc

SEQ ID NO: 1455642 - DNA, 25 bp, Homo sapien
ttctacttccagtatttgttgtctg

SEQ ID NO: 1455643 - DNA, 25 bp, Homo sapien
actaggctccggtgccgtggcacaa

SEQ ID NO: 1455644 - DNA, 25 bp, Homo sapien
cactaggctccggtgccgtggcaca

SEQ ID NO: 1455645 - DNA, 25 bp, Homo sapien
tcactaggctccggtgccgtggcac

SEQ ID NO: 1455646 - DNA, 25 bp, Homo sapien
gtcactaggctccggtgccgtggca

SEQ ID NO: 1455647 - DNA, 25 bp, Homo sapien
tctaggaatgatcctcagtctaaag

SEQ ID NO: 1455648 - DNA, 25 bp, Homo sapien
aaaataatattgacaggtgcccata

SEQ ID NO: 1455649 - DNA, 25 bp, Homo sapien
tctctaaaatgtgagttaacccctc

SEQ ID NO: 1455650 - DNA, 25 bp, Homo sapien
catgagagttctagtcagacagatt

SEQ ID NO: 1455651 - DNA, 25 bp, Homo sapien
tggtccactgcaggctatgataaag

SEQ ID NO: 1455652 - DNA, 25 bp, Homo sapien
taaagtggtcactaggatccttcga

SEQ ID NO: 1455653 - DNA, 25 bp, Homo sapien
ttccacctagggagacacatgctca

SEQ ID NO: 1455654 - DNA, 25 bp, Homo sapien
aatgatgccgtcacatgatccatga

SEQ ID NO: 1455655 - DNA, 25 bp, Homo sapien
cttctcatgggccttagggctctcc

SEQ ID NO: 1455656 - DNA, 25 bp, Homo sapien
tgtgcctttctatggcccttcatta

SEQ ID NO: 1455657 - DNA, 25 bp, Homo sapien
ctccggtgccaggcagaaggctttc

SEQ ID NO: 1455658 - DNA, 25 bp, Homo sapien
gaaggctttcctagaccactcctgt

SEQ ID NO: 1455659 - DNA, 25 bp, Homo sapien
tattgataaatatggggcagtgacc

SEQ ID NO: 1455660 - DNA, 25 bp, Homo sapien
agaggcccattcttcgagagctggg

SEQ ID NO: 1455661 - DNA, 25 bp, Homo sapien
tctagttgatcctgttattgataaa

SEQ ID NO: 1455662 - DNA, 25 bp, Homo sapien
gaggctgtggtatgccaatttcttt

SEQ ID NO: 1455663 - DNA, 25 bp, Homo sapien
gctcggcaaccgagatagaaatcag

SEQ ID NO: 1455664 - DNA, 25 bp, Homo sapien
gctgctcggcaaccgagatagaaat

SEQ ID NO: 1455665 - DNA, 25 bp, Homo sapien
gtgcagctgctcggcaaccgagata

SEQ ID NO: 1455666 - DNA, 25 bp, Homo sapien
cggcaaccgagatagaaatcagggt

SEQ ID NO: 1455667 - DNA, 25 bp, Homo sapien
tcaggcacaatggcactgccagcca

SEQ ID NO: 1455668 - DNA, 25 bp, Homo sapien
caggcacaatggcactgccagccac

SEQ ID NO: 1455669 - DNA, 25 bp, Homo sapien
ctggtttcactctgtaggcggcaca

SEQ ID NO: 1455670 - DNA, 25 bp, Homo sapien
tagtgggtatctgggctctcttatc

SEQ ID NO: 1455671 - DNA, 25 bp, Homo sapien
gatgcatcatgtgtcaggtgcagga

SEQ ID NO: 1455672 - DNA, 25 bp, Homo sapien
cacgtgctcctgtgtccaggtggcc

SEQ ID NO: 1455673 - DNA, 25 bp, Homo sapien
tgttcacagactctccttgccctgt

SEQ ID NO: 1455674 - DNA, 25 bp, Homo sapien
gtttcctgttcacagactctccttg

SEQ ID NO: 1455675 - DNA, 25 bp, Homo sapien
caggctctcctgctttcggtagcca

SEQ ID NO: 1455676 - DNA, 25 bp, Homo sapien
tttcggtagccaggtttggcctcat

SEQ ID NO: 1455677 - DNA, 25 bp, Homo sapien
agggtcccactatgtccacccagcc

SEQ ID NO: 1455678 - DNA, 25 bp, Homo sapien
ttgataccctgcagtccctcgtctt

SEQ ID NO: 1455679 - DNA, 25 bp, Homo sapien
gtcccactatgtccacccagcccct

SEQ ID NO: 1455680 - DNA, 25 bp, Homo sapien
agaatcctaataagaaagttcttca

SEQ ID NO: 1455681 - DNA, 25 bp, Homo sapien
ggtatctgcagaggctgagagacct

SEQ ID NO: 1455682 - DNA, 25 bp, Homo sapien
tctgcagaggctgagagacctctac

SEQ ID NO: 1455683 - DNA, 25 bp, Homo sapien
cagaggctgagagacctctacaatc

SEQ ID NO: 1455684 - DNA, 25 bp, Homo sapien
caccaggggtatctgcagaggctga

SEQ ID NO: 1455685 - DNA, 25 bp, Homo sapien
gtcaagcagccataagaaggaagca

SEQ ID NO: 1455686 - DNA, 25 bp, Homo sapien
gcagccataagaaggaagcactcca

SEQ ID NO: 1455687 - DNA, 25 bp, Homo sapien
caagcagccataagaaggaagcact

SEQ ID NO: 1455688 - DNA, 25 bp, Homo sapien
tagtcaagcagccataagaaggaag

SEQ ID NO: 1455689 - DNA, 25 bp, Homo sapien
gagtttggagcccattgcatgatcc

SEQ ID NO: 1455690 - DNA, 25 bp, Homo sapien
agtttggagcccattgcatgatcca

SEQ ID NO: 1455691 - DNA, 25 bp, Homo sapien
ctttgtgtcctgagaattctgtggg

SEQ ID NO: 1455692 - DNA, 25 bp, Homo sapien
gaagagctttgtgtcctgagaattc

SEQ ID NO: 1455693 - DNA, 25 bp, Homo sapien
ttaatgaagagctttgtgtcctgag

SEQ ID NO: 1455694 - DNA, 25 bp, Homo sapien
gagctttgtgtcctgagaattctgt

SEQ ID NO: 1455695 - DNA, 25 bp, Homo sapien
gagaaggccgtgtagaattccagca

SEQ ID NO: 1455696 - DNA, 25 bp, Homo sapien
tgtacgtcagaatcaggttccggga

SEQ ID NO: 1455697 - DNA, 25 bp, Homo sapien
cagaatcaggttccgggagaaggaa

SEQ ID NO: 1455698 - DNA, 25 bp, Homo sapien
tcttcctcaagttgtacgtcagaat

SEQ ID NO: 1455699 - DNA, 25 bp, Homo sapien
gcttgatcacatgcagatcacagta

SEQ ID NO: 1455700 - DNA, 25 bp, Homo sapien
tcacatgcagatcacagtaggtcaa

SEQ ID NO: 1455701 - DNA, 25 bp, Homo sapien
ggccctaacattggcacaggactgg

SEQ ID NO: 1455702 - DNA, 25 bp, Homo sapien
cacagtaggtcaaggccctaacatt

SEQ ID NO: 1455703 - DNA, 25 bp, Homo sapien
acacatctccaaacacgtctccttt

SEQ ID NO: 1455704 - DNA, 25 bp, Homo sapien
cacatctccaaacacgtctcctttt

SEQ ID NO: 1455705 - DNA, 25 bp, Homo sapien
caggagaggtctgcccatccagctg

SEQ ID NO: 1455706 - DNA, 25 bp, Homo sapien
ggccaggagaggtctgcccatccag

SEQ ID NO: 1455707 - DNA, 25 bp, Homo sapien
aagtgttggccaggagaggtctgcc

SEQ ID NO: 1455708 - DNA, 25 bp, Homo sapien
cccagaattgctgtcctttcagcat

SEQ ID NO: 1455709 - DNA, 25 bp, Homo sapien
gagctggcatcccccacttccttcc

SEQ ID NO: 1455710 - DNA, 25 bp, Homo sapien
ctgagctggcatcccccacttcctt

SEQ ID NO: 1455711 - DNA, 25 bp, Homo sapien
ctctgagctggcatcccccacttcc

SEQ ID NO: 1455712 - DNA, 25 bp, Homo sapien
tcatcccaactctgagctggcatcc

SEQ ID NO: 1455713 - DNA, 25 bp, Homo sapien
gggtggctctaagaggggcagattt

SEQ ID NO: 1455714 - DNA, 25 bp, Homo sapien
ctaagaggggcagattttcctctgg

SEQ ID NO: 1455715 - DNA, 25 bp, Homo sapien
tgaaagaatgatacaagagagagca

SEQ ID NO: 1455716 - DNA, 25 bp, Homo sapien
ctgaaagaatgatacaagagagagc

SEQ ID NO: 1455717 - DNA, 25 bp, Homo sapien
gagtgagtagctgtttaaaggttta

SEQ ID NO: 1455718 - DNA, 25 bp, Homo sapien
cactactctgttggcggcttctctg

SEQ ID NO: 1455719 - DNA, 25 bp, Homo sapien
tgagaaacatcagcttgttgagtga

SEQ ID NO: 1455720 - DNA, 25 bp, Homo sapien
taaaggtttagatccactactctgt

SEQ ID NO: 1455721 - DNA, 25 bp, Homo sapien
tatcccactgcctttattcctcttc

SEQ ID NO: 1455722 - DNA, 25 bp, Homo sapien
tcctcttccctagggtatcaggaag

SEQ ID NO: 1455723 - DNA, 25 bp, Homo sapien
caccaagtacagtaagggttgccct

SEQ ID NO: 1455724 - DNA, 25 bp, Homo sapien
cctttgtcctcatgccatttcagga

SEQ ID NO: 1455725 - DNA, 25 bp, Homo sapien
cacctatgtgaaatccaggccctct

SEQ ID NO: 1455726 - DNA, 25 bp, Homo sapien
caggccctctcttcagttcgtacag

SEQ ID NO: 1455727 - DNA, 25 bp, Homo sapien
gcaagcctaggttcaacccatcgag

SEQ ID NO: 1455728 - DNA, 25 bp, Homo sapien
gttcgtacagccatgactaagacaa

SEQ ID NO: 1455729 - DNA, 25 bp, Homo sapien
tactccggactgtgaggctcttcaa

SEQ ID NO: 1455730 - DNA, 25 bp, Homo sapien
tgccttcctttcaattgcattccat

SEQ ID NO: 1455731 - DNA, 25 bp, Homo sapien
gctcttcaaagcctaacctctgcct

SEQ ID NO: 1455732 - DNA, 25 bp, Homo sapien
ttactccggactgtgaggctcttca

SEQ ID NO: 1455733 - DNA, 25 bp, Homo sapien
gaaggccgggtgctccttgaacacc

SEQ ID NO: 1455734 - DNA, 25 bp, Homo sapien
tcaggtgcacgcagatgtcggctct

SEQ ID NO: 1455735 - DNA, 25 bp, Homo sapien
ggctgtcaacgctctctcctgcatg

SEQ ID NO: 1455736 - DNA, 25 bp, Homo sapien
cagtgcaccgtctggaactccatgg

SEQ ID NO: 1455737 - DNA, 25 bp, Homo sapien
cattcccgaagatggtggcatagag

SEQ ID NO: 1455738 - DNA, 25 bp, Homo sapien
caatccttttggcacctggtagagc

SEQ ID NO: 1455739 - DNA, 25 bp, Homo sapien
tctggacatggaccaagtggacaca

SEQ ID NO: 1455740 - DNA, 25 bp, Homo sapien
tcaggaagtcccgaacactgttgag

SEQ ID NO: 1455741 - DNA, 25 bp, Homo sapien
caaaagaagaaataacaagttagtg

SEQ ID NO: 1455742 - DNA, 25 bp, Homo sapien
ggtgaggaggaggagcaaaagaaga

SEQ ID NO: 1455743 - DNA, 25 bp, Homo sapien
gaggaggagcaaaagaagaaataac

SEQ ID NO: 1455744 - DNA, 25 bp, Homo sapien
ctagaggtgaggaggaggagcaaaa

SEQ ID NO: 1455745 - DNA, 25 bp, Homo sapien
gccacgatcatcttggtggtccatg

SEQ ID NO: 1455746 - DNA, 25 bp, Homo sapien
tggtggtccatgcagcaacatctgt

SEQ ID NO: 1455747 - DNA, 25 bp, Homo sapien
gatcatcttggtggtccatgcagca

SEQ ID NO: 1455748 - DNA, 25 bp, Homo sapien
gcagtttggccacgatcatcttggt

SEQ ID NO: 1455749 - DNA, 25 bp, Homo sapien
tggaattaaatacttggaagaacac

SEQ ID NO: 1455750 - DNA, 25 bp, Homo sapien
gacctggaattaaatacttggaaga

SEQ ID NO: 1455751 - DNA, 25 bp, Homo sapien
gaattaaatacttggaagaacacac

SEQ ID NO: 1455752 - DNA, 25 bp, Homo sapien
ctggaattaaatacttggaagaaca

SEQ ID NO: 1455753 - DNA, 25 bp, Homo sapien
tggcccacgtatcctcagaagacaa

SEQ ID NO: 1455754 - DNA, 25 bp, Homo sapien
catggcccacgtatcctcagaagac

SEQ ID NO: 1455755 - DNA, 25 bp, Homo sapien
atatttgtcttcatggcccacgtat

SEQ ID NO: 1455756 - DNA, 25 bp, Homo sapien
gtcttcatggcccacgtatcctcag

SEQ ID NO: 1455757 - DNA, 25 bp, Homo sapien
tgtggcagagcttatgtctgaaagg

SEQ ID NO: 1455758 - DNA, 25 bp, Homo sapien
caacttttacccatggcagctttgg

SEQ ID NO: 1455759 - DNA, 25 bp, Homo sapien
gcagctttgggagcatctctgaaga

SEQ ID NO: 1455760 - DNA, 25 bp, Homo sapien
aaaacctggatctacagagccaact

SEQ ID NO: 1455761 - DNA, 25 bp, Homo sapien
gctggcccatcaaaggtgtgggcat

SEQ ID NO: 1455762 - DNA, 25 bp, Homo sapien
gcattgtggccatggttacagggac

SEQ ID NO: 1455763 - DNA, 25 bp, Homo sapien
cattgtggccatggttacagggacc

SEQ ID NO: 1455764 - DNA, 25 bp, Homo sapien
tcatccacctagggctggcccatca

SEQ ID NO: 1455765 - DNA, 25 bp, Homo sapien
gtaagcttctaagcaaaattgattt

SEQ ID NO: 1455766 - DNA, 25 bp, Homo sapien
actgtaagcttctaagcaaaattga

SEQ ID NO: 1455767 - DNA, 25 bp, Homo sapien
gcaaaattgatttcccctgttccca

SEQ ID NO: 1455768 - DNA, 25 bp, Homo sapien
ctgtaagcttctaagcaaaattgat

SEQ ID NO: 1455769 - DNA, 25 bp, Homo sapien
ccagtggccaatagctccatcaaag

SEQ ID NO: 1455770 - DNA, 25 bp, Homo sapien
tccagtggccaatagctccatcaaa

SEQ ID NO: 1455771 - DNA, 25 bp, Homo sapien
tgttgatttttaggatgtggccttg

SEQ ID NO: 1455772 - DNA, 25 bp, Homo sapien
ctgttgatttttaggatgtggcctt

SEQ ID NO: 1455773 - DNA, 25 bp, Homo sapien
ttgatttttaggatgtggccttgac

SEQ ID NO: 1455774 - DNA, 25 bp, Homo sapien
tgatttttaggatgtggccttgacc

SEQ ID NO: 1455775 - DNA, 25 bp, Homo sapien
ctgaagggtgaggtgatgagaaagt

SEQ ID NO: 1455776 - DNA, 25 bp, Homo sapien
aagggtgaggtgatgagaaagttga

SEQ ID NO: 1455777 - DNA, 25 bp, Homo sapien
gaagggtgaggtgatgagaaagttg

SEQ ID NO: 1455778 - DNA, 25 bp, Homo sapien
tgaagggtgaggtgatgagaaagtt

SEQ ID NO: 1455779 - DNA, 25 bp, Homo sapien
gaattcaagtccctgtcagaagtga

SEQ ID NO: 1455780 - DNA, 25 bp, Homo sapien
gattaccttatcttattcgcatata

SEQ ID NO: 1455781 - DNA, 25 bp, Homo sapien
atcagattaccttatcttattcgca

SEQ ID NO: 1455782 - DNA, 25 bp, Homo sapien
taaatactcacttctacactgacag

SEQ ID NO: 1455783 - DNA, 25 bp, Homo sapien
ctgtccatctactgatcattagttt

SEQ ID NO: 1455784 - DNA, 25 bp, Homo sapien
agaccatgagtcagaccctgatccc

SEQ ID NO: 1455785 - DNA, 25 bp, Homo sapien
gattatgatttcgaatggtttgaaa

SEQ ID NO: 1455786 - DNA, 25 bp, Homo sapien
ttatgatttcgaatggtttgaaaga

SEQ ID NO: 1455787 - DNA, 25 bp, Homo sapien
aggattatgatttcgaatggtttga

SEQ ID NO: 1455788 - DNA, 25 bp, Homo sapien
ggattatgatttcgaatggtttgaa

SEQ ID NO: 1455789 - DNA, 25 bp, Homo sapien
ttcatcatcaatgattgtggaatag

SEQ ID NO: 1455790 - DNA, 25 bp, Homo sapien
cttcatcatcaatgattgtggaata

SEQ ID NO: 1455791 - DNA, 25 bp, Homo sapien
tgcttagccagaatctccaaatatt

SEQ ID NO: 1455792 - DNA, 25 bp, Homo sapien
ctgcttagccagaatctccaaatat

SEQ ID NO: 1455793 - DNA, 25 bp, Homo sapien
caaaatctgtccagaaacctgattt

SEQ ID NO: 1455794 - DNA, 25 bp, Homo sapien
aatctgtccagaaacctgatttaaa

SEQ ID NO: 1455795 - DNA, 25 bp, Homo sapien
tctgttccatatcaataagagcaca

SEQ ID NO: 1455796 - DNA, 25 bp, Homo sapien
gggtatctgttccatatcaataaga

SEQ ID NO: 1455797 - DNA, 25 bp, Homo sapien
gcactggtcaacgtgacgccctttg

SEQ ID NO: 1455798 - DNA, 25 bp, Homo sapien
gaatgcactggtcaacgtgacgccc

SEQ ID NO: 1455799 - DNA, 25 bp, Homo sapien
ggtcaacgtgacgccctttgcactg

SEQ ID NO: 1455800 - DNA, 25 bp, Homo sapien
tggtcaacgtgacgccctttgcact

SEQ ID NO: 1455801 - DNA, 25 bp, Homo sapien
attttgccgtatgacacgctgcatc

SEQ ID NO: 1455802 - DNA, 25 bp, Homo sapien
aacaattttgccgtatgacacgctg

SEQ ID NO: 1455803 - DNA, 25 bp, Homo sapien
tctaacaattttgccgtatgacacg

SEQ ID NO: 1455804 - DNA, 25 bp, Homo sapien
caattttgccgtatgacacgctgca

SEQ ID NO: 1455805 - DNA, 25 bp, Homo sapien
tactggaagaatcttttgtgcacat

SEQ ID NO: 1455806 - DNA, 25 bp, Homo sapien
actggaagaatcttttgtgcacata

SEQ ID NO: 1455807 - DNA, 25 bp, Homo sapien
ctggaagaatcttttgtgcacatac

SEQ ID NO: 1455808 - DNA, 25 bp, Homo sapien
ctactggaagaatcttttgtgcaca

SEQ ID NO: 1455809 - DNA, 25 bp, Homo sapien
ggctatgcgctaaagagatgtcctc

SEQ ID NO: 1455810 - DNA, 25 bp, Homo sapien
cttgttgacatgtcaggctatgcgc

SEQ ID NO: 1455811 - DNA, 25 bp, Homo sapien
catgtcaggctatgcgctaaagaga

SEQ ID NO: 1455812 - DNA, 25 bp, Homo sapien
gagatgtcctcatagaattctgaga

SEQ ID NO: 1455813 - DNA, 25 bp, Homo sapien
cagtaactgctttgtcatcactacc

SEQ ID NO: 1455814 - DNA, 25 bp, Homo sapien
taactgctttgtcatcactaccttc

SEQ ID NO: 1455815 - DNA, 25 bp, Homo sapien
atagcagtaactgctttgtcatcac

SEQ ID NO: 1455816 - DNA, 25 bp, Homo sapien
ctgctttgtcatcactaccttcttc

SEQ ID NO: 1455817 - DNA, 25 bp, Homo sapien
tgataaatacttgaaggacaatggc

SEQ ID NO: 1455818 - DNA, 25 bp, Homo sapien
aaatgctgtgatacattctttagat

SEQ ID NO: 1455819 - DNA, 25 bp, Homo sapien
tacttgaaggacaatggcagcttcc

SEQ ID NO: 1455820 - DNA, 25 bp, Homo sapien
tagatttttcttgattgctgataaa

SEQ ID NO: 1455821 - DNA, 25 bp, Homo sapien
gctgtttgaatgttctgatcacttt

SEQ ID NO: 1455822 - DNA, 25 bp, Homo sapien
gtcatcaatcagacatcttcttgtt

SEQ ID NO: 1455823 - DNA, 25 bp, Homo sapien
ctctgtcatcaatcagacatcttct

SEQ ID NO: 1455824 - DNA, 25 bp, Homo sapien
ttcttgttagctctaaagctgtttg

SEQ ID NO: 1455825 - DNA, 25 bp, Homo sapien
aaggaaatgaaatcttcagacacat

SEQ ID NO: 1455826 - DNA, 25 bp, Homo sapien
aggaaatgaaatcttcagacacatc

SEQ ID NO: 1455827 - DNA, 25 bp, Homo sapien
tggataatgccttgtatatggggct

SEQ ID NO: 1455828 - DNA, 25 bp, Homo sapien
ttggataatgccttgtatatggggc

SEQ ID NO: 1455829 - DNA, 25 bp, Homo sapien
ggataatgccttgtatatggggctt

SEQ ID NO: 1455830 - DNA, 25 bp, Homo sapien
tatgataactcaggtcggtcatctt

SEQ ID NO: 1455831 - DNA, 25 bp, Homo sapien
cagttccagtggtatagagtataga

SEQ ID NO: 1455832 - DNA, 25 bp, Homo sapien
caattcgaagtgtttcagtctttaa

SEQ ID NO: 1455833 - DNA, 25 bp, Homo sapien
tcttcaattcgaagtgtttcagtct

SEQ ID NO: 1455834 - DNA, 25 bp, Homo sapien
gacagactgatcagactggtcagaa

SEQ ID NO: 1455835 - DNA, 25 bp, Homo sapien
cagactgatcagactggtcagaaag

SEQ ID NO: 1455836 - DNA, 25 bp, Homo sapien
actgatcagactggtcagaaagaag

SEQ ID NO: 1455837 - DNA, 25 bp, Homo sapien
gactgatcagactggtcagaaagaa

SEQ ID NO: 1455838 - DNA, 25 bp, Homo sapien
ccactcctctagttttttatactca

SEQ ID NO: 1455839 - DNA, 25 bp, Homo sapien
taaaggcaaataattcctatccaac

SEQ ID NO: 1455840 - DNA, 25 bp, Homo sapien
cagcagcttggataatcacgtttgg

SEQ ID NO: 1455841 - DNA, 25 bp, Homo sapien
cagcttggataatcacgtttggtga

SEQ ID NO: 1455842 - DNA, 25 bp, Homo sapien
ggaggatggataatggcttctacaa

SEQ ID NO: 1455843 - DNA, 25 bp, Homo sapien
aggatggataatggcttctacaata

SEQ ID NO: 1455844 - DNA, 25 bp, Homo sapien
caggaggatggataatggcttctac

SEQ ID NO: 1455845 - DNA, 25 bp, Homo sapien
tcaggaggatggataatggcttcta

SEQ ID NO: 1455846 - DNA, 25 bp, Homo sapien
aaatccagctgttccgacatagtaa

SEQ ID NO: 1455847 - DNA, 25 bp, Homo sapien
aggtaaatccagctgttccgacata

SEQ ID NO: 1455848 - DNA, 25 bp, Homo sapien
gctgttccgacatagtaatctggag

SEQ ID NO: 1455849 - DNA, 25 bp, Homo sapien
gcctcgataatggtgttggggtcca

SEQ ID NO: 1455850 - DNA, 25 bp, Homo sapien
aaatactaactgtgatttgcccatt

SEQ ID NO: 1455851 - DNA, 25 bp, Homo sapien
tgagcaacattactgacaatgatgg

SEQ ID NO: 1455852 - DNA, 25 bp, Homo sapien
cattttctacatttgcatcaggacc

SEQ ID NO: 1455853 - DNA, 25 bp, Homo sapien
gatgggaccctcatcactatccaaa

SEQ ID NO: 1455854 - DNA, 25 bp, Homo sapien
cacattgaagtcacacgatgctcca

SEQ ID NO: 1455855 - DNA, 25 bp, Homo sapien
tcctcaaatggagattgagcaaggg

SEQ ID NO: 1455856 - DNA, 25 bp, Homo sapien
agacaccaagcaggtaagcaatatt

SEQ ID NO: 1455857 - DNA, 25 bp, Homo sapien
gacaccaagcaggtaagcaatattc

SEQ ID NO: 1455858 - DNA, 25 bp, Homo sapien
gagattgagcaagggtcatcctcat

SEQ ID NO: 1455859 - DNA, 25 bp, Homo sapien
ggaagagctgctagatatctctcca

SEQ ID NO: 1455860 - DNA, 25 bp, Homo sapien
agccgtgctggaagagctgctagat

SEQ ID NO: 1455861 - DNA, 25 bp, Homo sapien
gctgctagatatctctccacaaatt

SEQ ID NO: 1455862 - DNA, 25 bp, Homo sapien
gatatctctccacaaattgccctgc

SEQ ID NO: 1455863 - DNA, 25 bp, Homo sapien
gtttgtaccgcgattcctgaactga

SEQ ID NO: 1455864 - DNA, 25 bp, Homo sapien
tcatgccagtttgtaccgcgattcc

SEQ ID NO: 1455865 - DNA, 25 bp, Homo sapien
taacggcatattcagaagactgtct

SEQ ID NO: 1455866 - DNA, 25 bp, Homo sapien
ttcctgaactgatggcttaacggca

SEQ ID NO: 1455867 - DNA, 25 bp, Homo sapien
gccttcgataagattcaacagacct

SEQ ID NO: 1455868 - DNA, 25 bp, Homo sapien
taaataagcataatccctctcataa

SEQ ID NO: 1455869 - DNA, 25 bp, Homo sapien
taagcataatccctctcataaacag

SEQ ID NO: 1455870 - DNA, 25 bp, Homo sapien
taatgagagctatttatgaccaccc

SEQ ID NO: 1455871 - DNA, 25 bp, Homo sapien
tagggagagggatagtagcactaga

SEQ ID NO: 1455872 - DNA, 25 bp, Homo sapien
gtagggagagggatagtagcactag

SEQ ID NO: 1455873 - DNA, 25 bp, Homo sapien
atagtagcactagaagagtgaaaag

SEQ ID NO: 1455874 - DNA, 25 bp, Homo sapien
gggatagtagcactagaagagtgaa

SEQ ID NO: 1455875 - DNA, 25 bp, Homo sapien
catctggggcacttttaaagggtat

SEQ ID NO: 1455876 - DNA, 25 bp, Homo sapien
agtaaaagtcatgggctctattttc

SEQ ID NO: 1455877 - DNA, 25 bp, Homo sapien
atcaggtctgaactcccagaagtaa

SEQ ID NO: 1455878 - DNA, 25 bp, Homo sapien
cagaagtaaaagtcatgggctctat

SEQ ID NO: 1455879 - DNA, 25 bp, Homo sapien
ccatcaggtctgaactcccagaagt

SEQ ID NO: 1455880 - DNA, 25 bp, Homo sapien
cactgatagatttcagaagctcccc

SEQ ID NO: 1455881 - DNA, 25 bp, Homo sapien
attcactcggattctctcactgata

SEQ ID NO: 1455882 - DNA, 25 bp, Homo sapien
gatttcagaagctccccctgcaagt

SEQ ID NO: 1455883 - DNA, 25 bp, Homo sapien
gattctctcactgatagatttcaga

SEQ ID NO: 1455884 - DNA, 25 bp, Homo sapien
tgcttgccaagaataagctttgtct

SEQ ID NO: 1455885 - DNA, 25 bp, Homo sapien
ggtccaaaaagccaattgccaaagc

SEQ ID NO: 1455886 - DNA, 25 bp, Homo sapien
tccatatgtagatgcttgccaagaa

SEQ ID NO: 1455887 - DNA, 25 bp, Homo sapien
gctttgtctaggaacattggtatcg

SEQ ID NO: 1455888 - DNA, 25 bp, Homo sapien
tcataaatcgtccttgctgtctagg

SEQ ID NO: 1455889 - DNA, 25 bp, Homo sapien
gatgactttcataaatcgtccttgc

SEQ ID NO: 1455890 - DNA, 25 bp, Homo sapien
taaatcgtccttgctgtctaggtag

SEQ ID NO: 1455891 - DNA, 25 bp, Homo sapien
ccttgctgtctaggtagtctccttt

SEQ ID NO: 1455892 - DNA, 25 bp, Homo sapien
ctagaaatataaggacacagctcca

SEQ ID NO: 1455893 - DNA, 25 bp, Homo sapien
aatgtttcctagtatcaactgacgg

SEQ ID NO: 1455894 - DNA, 25 bp, Homo sapien
cctagtatcaactgacggaataaga

SEQ ID NO: 1455895 - DNA, 25 bp, Homo sapien
gctgtggaggactaatgtttcctag

SEQ ID NO: 1455896 - DNA, 25 bp, Homo sapien
cttaaatactctcaggaaaactctg

SEQ ID NO: 1455897 - DNA, 25 bp, Homo sapien
cattccttaaatactctcaggaaaa

SEQ ID NO: 1455898 - DNA, 25 bp, Homo sapien
gacacattccttaaatactctcagg

SEQ ID NO: 1455899 - DNA, 25 bp, Homo sapien
tagacacattccttaaatactctca

SEQ ID NO: 1455900 - DNA, 25 bp, Homo sapien
cggagcagccggacaacttttagag

SEQ ID NO: 1455901 - DNA, 25 bp, Homo sapien
acttttagagagctgaacaggctgc

SEQ ID NO: 1455902 - DNA, 25 bp, Homo sapien
ggtgtcctcgtcaaagatctcatag

SEQ ID NO: 1455903 - DNA, 25 bp, Homo sapien
gggtgccaatgtccatcgctagttg

SEQ ID NO: 1455904 - DNA, 25 bp, Homo sapien
tccctcttactttgtcctttctcca

SEQ ID NO: 1455905 - DNA, 25 bp, Homo sapien
ccctcttactttgtcctttctccat

SEQ ID NO: 1455906 - DNA, 25 bp, Homo sapien
tttaacacagtcctcaattgttacg

SEQ ID NO: 1455907 - DNA, 25 bp, Homo sapien
caattgttacgtcccagtctgtttt

SEQ ID NO: 1455908 - DNA, 25 bp, Homo sapien
acatgacagtaacatcaagggcagc

SEQ ID NO: 1455909 - DNA, 25 bp, Homo sapien
tattaagcaaagtgaacatagttgt

SEQ ID NO: 1455910 - DNA, 25 bp, Homo sapien
tctgtctttgcacgagtagggagag

SEQ ID NO: 1455911 - DNA, 25 bp, Homo sapien
ctttgcacgagtagggagaggacaa

SEQ ID NO: 1455912 - DNA, 25 bp, Homo sapien
tagggagaggacaagctgtctccag

SEQ ID NO: 1455913 - DNA, 25 bp, Homo sapien
gggtctgtctttgcacgagtaggga

SEQ ID NO: 1455914 - DNA, 25 bp, Homo sapien
agtcccgtcttccatgtgaagcctc

SEQ ID NO: 1455915 - DNA, 25 bp, Homo sapien
caaggcacagcatctacagtcccgt

SEQ ID NO: 1455916 - DNA, 25 bp, Homo sapien
gactccggtgcgtgtgcaaggcaca

SEQ ID NO: 1455917 - DNA, 25 bp, Homo sapien
cccaggtaggatcatgactccggtg

SEQ ID NO: 1455918 - DNA, 25 bp, Homo sapien
tgagctcttggcaagtgtcagctgc

SEQ ID NO: 1455919 - DNA, 25 bp, Homo sapien
tttcattggcacattttgctcctgt

SEQ ID NO: 1455920 - DNA, 25 bp, Homo sapien
gcatcactggcactagctggttgtg

SEQ ID NO: 1455921 - DNA, 25 bp, Homo sapien
agaaggtaagtatctcccatgagtg

SEQ ID NO: 1455922 - DNA, 25 bp, Homo sapien
agagctacccttcactggaaagaga

SEQ ID NO: 1455923 - DNA, 25 bp, Homo sapien
gtaggaagagctacccttcactgga

SEQ ID NO: 1455924 - DNA, 25 bp, Homo sapien
ggaagagctacccttcactggaaag

SEQ ID NO: 1455925 - DNA, 25 bp, Homo sapien
tgtcccaccaaccgctggtactgat

SEQ ID NO: 1455926 - DNA, 25 bp, Homo sapien
ttaattattcttctgttgaccaccc

SEQ ID NO: 1455927 - DNA, 25 bp, Homo sapien
ccctggatcacccataaaggcacta

SEQ ID NO: 1455928 - DNA, 25 bp, Homo sapien
ctggatcacccataaaggcactaac

SEQ ID NO: 1455929 - DNA, 25 bp, Homo sapien
gatcagcaaaaccaatcttccctgg

SEQ ID NO: 1455930 - DNA, 25 bp, Homo sapien
agtggtggtggaatctgatcagcaa

SEQ ID NO: 1455931 - DNA, 25 bp, Homo sapien
cacgtcttcaggtagttcatgcgga

SEQ ID NO: 1455932 - DNA, 25 bp, Homo sapien
tgagcacaatgtccaccaaaaagat

SEQ ID NO: 1455933 - DNA, 25 bp, Homo sapien
gatcaagatgatccaatcccacgtg

SEQ ID NO: 1455934 - DNA, 25 bp, Homo sapien
ccaagatggctgtatagaaggtcaa

SEQ ID NO: 1455935 - DNA, 25 bp, Homo sapien
cagaacccctgaatgatagcaacat

SEQ ID NO: 1455936 - DNA, 25 bp, Homo sapien
gaatgatagcaacatgccttcctgt

SEQ ID NO: 1455937 - DNA, 25 bp, Homo sapien
ctgtcatcttatgcaaccagctcct

SEQ ID NO: 1455938 - DNA, 25 bp, Homo sapien
cttcctgtcatcttatgcaaccagc

SEQ ID NO: 1455939 - DNA, 25 bp, Homo sapien
tctccactagaggtatggaactctg

SEQ ID NO: 1455940 - DNA, 25 bp, Homo sapien
cgtggatcaaggactgaccagccat

SEQ ID NO: 1455941 - DNA, 25 bp, Homo sapien
tgtgagctgcatcatgttggtagtg

SEQ ID NO: 1455942 - DNA, 25 bp, Homo sapien
gacattactgcatatattcagaaca

SEQ ID NO: 1455943 - DNA, 25 bp, Homo sapien
cgggagtgcttgtggacattctcgc

SEQ ID NO: 1455944 - DNA, 25 bp, Homo sapien
tcagtgctcttgtcagccgagcaaa

SEQ ID NO: 1455945 - DNA, 25 bp, Homo sapien
cattctcgcctttttgcacgcttgg

SEQ ID NO: 1455946 - DNA, 25 bp, Homo sapien
ttttgcacgcttggagccagctgct

SEQ ID NO: 1455947 - DNA, 25 bp, Homo sapien
agagtgaaaagacagggtcaaccac

SEQ ID NO: 1455948 - DNA, 25 bp, Homo sapien
agtgaaaagacagggtcaaccacat

SEQ ID NO: 1455949 - DNA, 25 bp, Homo sapien
gaagagtgaaaagacagggtcaacc

SEQ ID NO: 1455950 - DNA, 25 bp, Homo sapien
ctgaagcaagtggaagagtgaaaag

SEQ ID NO: 1455951 - DNA, 25 bp, Homo sapien
agatgtctgagtgatcttgacacct

SEQ ID NO: 1455952 - DNA, 25 bp, Homo sapien
aagatgtctgagtgatcttgacacc

SEQ ID NO: 1455953 - DNA, 25 bp, Homo sapien
tcctcaattggctgtttgaaagctg

SEQ ID NO: 1455954 - DNA, 25 bp, Homo sapien
gctgttatgtcactgaaagtgcaaa

SEQ ID NO: 1455955 - DNA, 25 bp, Homo sapien
ttcgaattggagcaattttcacaaa

SEQ ID NO: 1455956 - DNA, 25 bp, Homo sapien
ccactttatcctgttcgtttcgaat

SEQ ID NO: 1455957 - DNA, 25 bp, Homo sapien
ttcaaaggaattcatctcatagttc

SEQ ID NO: 1455958 - DNA, 25 bp, Homo sapien
catctcatagttctcaaatgtttgc

SEQ ID NO: 1455959 - DNA, 25 bp, Homo sapien
tatcagtcagctccccatacataaa

SEQ ID NO: 1455960 - DNA, 25 bp, Homo sapien
tgtttgccgcactttttcaatcgtg

SEQ ID NO: 1455961 - DNA, 25 bp, Homo sapien
tatcacagttgttatcttatgtccc

SEQ ID NO: 1455962 - DNA, 25 bp, Homo sapien
gagtcctagctgttgactttgtgaa

SEQ ID NO: 1455963 - DNA, 25 bp, Homo sapien
tggttgtccttacgcactcatgtag

SEQ ID NO: 1455964 - DNA, 25 bp, Homo sapien
caaattctggtacccaataagaaga

SEQ ID NO: 1455965 - DNA, 25 bp, Homo sapien
agccaggaaacggaaaactgagctt

SEQ ID NO: 1455966 - DNA, 25 bp, Homo sapien
gccaggaaacggaaaactgagcttg

SEQ ID NO: 1455967 - DNA, 25 bp, Homo sapien
ccatcattgctgtacacaataggcc

SEQ ID NO: 1455968 - DNA, 25 bp, Homo sapien
aataggccagtccactatctgagca

SEQ ID NO: 1455969 - DNA, 25 bp, Homo sapien
gccctgtgatagccagacagcttgc

SEQ ID NO: 1455970 - DNA, 25 bp, Homo sapien
gacagcttgcaaaatccatcattgc

SEQ ID NO: 1455971 - DNA, 25 bp, Homo sapien
caagagagagcccaaaagtaattta

SEQ ID NO: 1455972 - DNA, 25 bp, Homo sapien
cttgctgattttgaaacgcagccac

SEQ ID NO: 1455973 - DNA, 25 bp, Homo sapien
gatgctcacacaacaggaccttctt

SEQ ID NO: 1455974 - DNA, 25 bp, Homo sapien
ccttggtgaggaatagtaactagac

SEQ ID NO: 1455975 - DNA, 25 bp, Homo sapien
tgtagaggctgatcaagatgctcac

SEQ ID NO: 1455976 - DNA, 25 bp, Homo sapien
ttttcacaatatgggtaaccatccc

SEQ ID NO: 1455977 - DNA, 25 bp, Homo sapien
tttttcacaatatgggtaaccatcc

SEQ ID NO: 1455978 - DNA, 25 bp, Homo sapien
ttttttcacaatatgggtaaccatc

SEQ ID NO: 1455979 - DNA, 25 bp, Homo sapien
gcttgggaaaatgattccacttcat

SEQ ID NO: 1455980 - DNA, 25 bp, Homo sapien
ttcttgatttggcaggcttgggaaa

SEQ ID NO: 1455981 - DNA, 25 bp, Homo sapien
caaaagacttggaagaagacagggc

SEQ ID NO: 1455982 - DNA, 25 bp, Homo sapien
gacaaaagacttggaagaagacagg

SEQ ID NO: 1455983 - DNA, 25 bp, Homo sapien
gcagacaccactgaagacaaaagac

SEQ ID NO: 1455984 - DNA, 25 bp, Homo sapien
aagacaaaagacttggaagaagaca

SEQ ID NO: 1455985 - DNA, 25 bp, Homo sapien
gactcctagtcgctctgcaagtgct

SEQ ID NO: 1455986 - DNA, 25 bp, Homo sapien
catttgatgaactcgtgcgctgcgc

SEQ ID NO: 1455987 - DNA, 25 bp, Homo sapien
tctcaaggcttcatgctaccgtcga

SEQ ID NO: 1455988 - DNA, 25 bp, Homo sapien
tctccctggtagaagaatgtcatct

SEQ ID NO: 1455989 - DNA, 25 bp, Homo sapien
cttcgaaggtgagccttaacttcac

SEQ ID NO: 1455990 - DNA, 25 bp, Homo sapien
gaccatttagttcgctctgcacctg

SEQ ID NO: 1455991 - DNA, 25 bp, Homo sapien
acgccaggaaaaccatctgcccctc

SEQ ID NO: 1455992 - DNA, 25 bp, Homo sapien
ctgtgaccatttagttcgctctgca

SEQ ID NO: 1455993 - DNA, 25 bp, Homo sapien
agccccagagccttcgcggaagggt

SEQ ID NO: 1455994 - DNA, 25 bp, Homo sapien
aaggtggaggcagccggatcctccc

SEQ ID NO: 1455995 - DNA, 25 bp, Homo sapien
cccgacacctcggacttttcagttg

SEQ ID NO: 1455996 - DNA, 25 bp, Homo sapien
gacttttcagttgcagggatggaag

SEQ ID NO: 1455997 - DNA, 25 bp, Homo sapien
aaaaggcgtccccagaagagctctc

SEQ ID NO: 1455998 - DNA, 25 bp, Homo sapien
cccaaaaggcgtccccagaagagct

SEQ ID NO: 1455999 - DNA, 25 bp, Homo sapien
caaaaggcgtccccagaagagctct

SEQ ID NO: 1456000 - DNA, 25 bp, Homo sapien
gcccaaaaggcgtccccagaagagc

SEQ ID NO: 1456001 - DNA, 25 bp, Homo sapien
ttagcagagctcgcgggttctgctg

SEQ ID NO: 1456002 - DNA, 25 bp, Homo sapien
gcagagctcgcgggttctgctgcat

SEQ ID NO: 1456003 - DNA, 25 bp, Homo sapien
cgcgccgcggctccttagcagagct

SEQ ID NO: 1456004 - DNA, 25 bp, Homo sapien
tagcagagctcgcgggttctgctgc

SEQ ID NO: 1456005 - DNA, 25 bp, Homo sapien
cgcccgggtaatcgaaatccgaatg

SEQ ID NO: 1456006 - DNA, 25 bp, Homo sapien
gcaataaaggcacggataaaacgcc

SEQ ID NO: 1456007 - DNA, 25 bp, Homo sapien
atcgaaatccgaatgcacctcttac

SEQ ID NO: 1456008 - DNA, 25 bp, Homo sapien
ctccgagcggcgagaggttctgcaa

SEQ ID NO: 1456009 - DNA, 25 bp, Homo sapien
tccagaaacgtgttttgaggggcca

SEQ ID NO: 1456010 - DNA, 25 bp, Homo sapien
cagaaacgtgttttgaggggccact

SEQ ID NO: 1456011 - DNA, 25 bp, Homo sapien
agtcccggctcgaagcgccccatgc

SEQ ID NO: 1456012 - DNA, 25 bp, Homo sapien
tcttacgacagcaggaaactggcct

SEQ ID NO: 1456013 - DNA, 25 bp, Homo sapien
tccggcgggcgtcctggcgcggctt

SEQ ID NO: 1456014 - DNA, 25 bp, Homo sapien
ctggcgcggcttcttacgacagcag

SEQ ID NO: 1456015 - DNA, 25 bp, Homo sapien
taatgaagtcgtattgcaatagtgc

SEQ ID NO: 1456016 - DNA, 25 bp, Homo sapien
agagtgactggcagattcagcttca

SEQ ID NO: 1456017 - DNA, 25 bp, Homo sapien
ttggtatgatcagtatcaaactgcc

SEQ ID NO: 1456018 - DNA, 25 bp, Homo sapien
taccgtagacacaaatgcaggctcc

SEQ ID NO: 1456019 - DNA, 25 bp, Homo sapien
ggtggcttttaggtcaagatcacag

SEQ ID NO: 1456020 - DNA, 25 bp, Homo sapien
tttaggtcaagatcacagtcattac

SEQ ID NO: 1456021 - DNA, 25 bp, Homo sapien
gcttttaggtcaagatcacagtcat

SEQ ID NO: 1456022 - DNA, 25 bp, Homo sapien
actaaggtggcttttaggtcaagat

SEQ ID NO: 1456023 - DNA, 25 bp, Homo sapien
ctttccttgtaatgcttttgtatag

SEQ ID NO: 1456024 - DNA, 25 bp, Homo sapien
aataatggtctgtagttctctttcc

SEQ ID NO: 1456025 - DNA, 25 bp, Homo sapien
tccttcttctgtaaggaacattctt

SEQ ID NO: 1456026 - DNA, 25 bp, Homo sapien
tctttccttgtaatgcttttgtata

SEQ ID NO: 1456027 - DNA, 25 bp, Homo sapien
tattacatgttggtagtgatagtga

SEQ ID NO: 1456028 - DNA, 25 bp, Homo sapien
gaaatacaacattttggtgagctat

SEQ ID NO: 1456029 - DNA, 25 bp, Homo sapien
tttggtgagctattacatgttggta

SEQ ID NO: 1456030 - DNA, 25 bp, Homo sapien
ttttatctgcccagttgaaatacaa

SEQ ID NO: 1456031 - DNA, 25 bp, Homo sapien
ctccccttagtgattcaagtttcca

SEQ ID NO: 1456032 - DNA, 25 bp, Homo sapien
tcctccccttagtgattcaagtttc

SEQ ID NO: 1456033 - DNA, 25 bp, Homo sapien
atacagagcaatcccatggcggcag

SEQ ID NO: 1456034 - DNA, 25 bp, Homo sapien
acagagcaatcccatggcggcaggc

SEQ ID NO: 1456035 - DNA, 25 bp, Homo sapien
tacagagcaatcccatggcggcagg

SEQ ID NO: 1456036 - DNA, 25 bp, Homo sapien
ggcattggtctcttatctcactgtg

SEQ ID NO: 1456037 - DNA, 25 bp, Homo sapien
tgagtaacactgactagagtaacac

SEQ ID NO: 1456038 - DNA, 25 bp, Homo sapien
ctggtacctgtctgtgaactagctt

SEQ ID NO: 1456039 - DNA, 25 bp, Homo sapien
tgaatagtttgtggactggtacctg

SEQ ID NO: 1456040 - DNA, 25 bp, Homo sapien
caataccgctcagcatacatctgca

SEQ ID NO: 1456041 - DNA, 25 bp, Homo sapien
tcagtaaggtttgctctggccagag

SEQ ID NO: 1456042 - DNA, 25 bp, Homo sapien
gaaccagatagttttgtacacacac

SEQ ID NO: 1456043 - DNA, 25 bp, Homo sapien
tccactctggattgacccataatag

SEQ ID NO: 1456044 - DNA, 25 bp, Homo sapien
agacatctgaggaacgccgcgctca

SEQ ID NO: 1456045 - DNA, 25 bp, Homo sapien
cggacaccgggaaactgagcggcct

SEQ ID NO: 1456046 - DNA, 25 bp, Homo sapien
aagagtcccgctccctcgtgtgcat

SEQ ID NO: 1456047 - DNA, 25 bp, Homo sapien
tttctcagggtgaccgcgttccttc

SEQ ID NO: 1456048 - DNA, 25 bp, Homo sapien
tactgcaagttgtgtgtacagaaga

SEQ ID NO: 1456049 - DNA, 25 bp, Homo sapien
tctgttaaactgcaagagaatgaca

SEQ ID NO: 1456050 - DNA, 25 bp, Homo sapien
ttgcttaggcagtgtgccagatgcc

SEQ ID NO: 1456051 - DNA, 25 bp, Homo sapien
gaagatcctcgatatccaactggtc

SEQ ID NO: 1456052 - DNA, 25 bp, Homo sapien
taataatgtcagacctcctgtccag

SEQ ID NO: 1456053 - DNA, 25 bp, Homo sapien
gaattccccttagagtcaagcccag

SEQ ID NO: 1456054 - DNA, 25 bp, Homo sapien
tcaaactggaaatcaacctcatggg

SEQ ID NO: 1456055 - DNA, 25 bp, Homo sapien
gcccagctagtttaatgtagtcaga

SEQ ID NO: 1456056 - DNA, 25 bp, Homo sapien
ggtagtgatgatgagcacaagtgct

SEQ ID NO: 1456057 - DNA, 25 bp, Homo sapien
tgttggtaccctggtgctataggca

SEQ ID NO: 1456058 - DNA, 25 bp, Homo sapien
ccaccaacttgtgatgattctcctg

SEQ ID NO: 1456059 - DNA, 25 bp, Homo sapien
agtgctcttcaggtagtcattactg

SEQ ID NO: 1456060 - DNA, 25 bp, Homo sapien
taaagatgcctgtttggtagcctca

SEQ ID NO: 1456061 - DNA, 25 bp, Homo sapien
tttctagatactgaggctgcgaact

SEQ ID NO: 1456062 - DNA, 25 bp, Homo sapien
cgaactagttctgtggcagtggact

SEQ ID NO: 1456063 - DNA, 25 bp, Homo sapien
tcttcagtggtgcatctctcgtgac

SEQ ID NO: 1456064 - DNA, 25 bp, Homo sapien
tcatagtcaaggctcttagtacagg

SEQ ID NO: 1456065 - DNA, 25 bp, Homo sapien
aggctcttagtacaggaatattgac

SEQ ID NO: 1456066 - DNA, 25 bp, Homo sapien
tagtcaaggctcttagtacaggaat

SEQ ID NO: 1456067 - DNA, 25 bp, Homo sapien
caggaatattgacttaggaattgtg

SEQ ID NO: 1456068 - DNA, 25 bp, Homo sapien
taacatacagtttagggtcctagcg

SEQ ID NO: 1456069 - DNA, 25 bp, Homo sapien
caaagaatgtactgaacctactaac

SEQ ID NO: 1456070 - DNA, 25 bp, Homo sapien
ggtcctagcgcagagtccttgttta

SEQ ID NO: 1456071 - DNA, 25 bp, Homo sapien
gccagcatttccgattttgacatat

SEQ ID NO: 1456072 - DNA, 25 bp, Homo sapien
ttgcagccaacctgtattcgtggga

SEQ ID NO: 1456073 - DNA, 25 bp, Homo sapien
cattatttgtgcaaagggacagaca

SEQ ID NO: 1456074 - DNA, 25 bp, Homo sapien
taactagtagttgcctacatctggg

SEQ ID NO: 1456075 - DNA, 25 bp, Homo sapien
tatactagtggacataggctacatg

SEQ ID NO: 1456076 - DNA, 25 bp, Homo sapien
tattccctattgttggctccacagc

SEQ ID NO: 1456077 - DNA, 25 bp, Homo sapien
attccctattgttggctccacagcc

SEQ ID NO: 1456078 - DNA, 25 bp, Homo sapien
gtattccctattgttggctccacag

SEQ ID NO: 1456079 - DNA, 25 bp, Homo sapien
tgtcagtagaccttcagtacacagt

SEQ ID NO: 1456080 - DNA, 25 bp, Homo sapien
cagtatgtgggatatgtcagtcaag

SEQ ID NO: 1456081 - DNA, 25 bp, Homo sapien
aaatctcttctatcccagacatggg

SEQ ID NO: 1456082 - DNA, 25 bp, Homo sapien
cataaataccctacgtactggcata

SEQ ID NO: 1456083 - DNA, 25 bp, Homo sapien
gcagctgctgaatgcacatacacag

SEQ ID NO: 1456084 - DNA, 25 bp, Homo sapien
aaatttacatcggtccctgccccat

SEQ ID NO: 1456085 - DNA, 25 bp, Homo sapien
tggtggtcagcacactgacaggcag

SEQ ID NO: 1456086 - DNA, 25 bp, Homo sapien
acatacacaggttcttttgcaaagg

SEQ ID NO: 1456087 - DNA, 25 bp, Homo sapien
gagatctgcattttgcctggaagtg

SEQ ID NO: 1456088 - DNA, 25 bp, Homo sapien
gtctcaatacaacacctacttagtg

SEQ ID NO: 1456089 - DNA, 25 bp, Homo sapien
ctctgtgcacaagaccctgagatct

SEQ ID NO: 1456090 - DNA, 25 bp, Homo sapien
cttagtgagcaagctgagtattctc

SEQ ID NO: 1456091 - DNA, 25 bp, Homo sapien
tattctccccttttattgacgagga

SEQ ID NO: 1456092 - DNA, 25 bp, Homo sapien
gagtttttgactcccaaggtgtgta

SEQ ID NO: 1456093 - DNA, 25 bp, Homo sapien
gacggtaactgaaactcagagcagt

SEQ ID NO: 1456094 - DNA, 25 bp, Homo sapien
cagagcagttaagtacttttcccac

SEQ ID NO: 1456095 - DNA, 25 bp, Homo sapien
ggagcggtgcggagcgggtttctta

SEQ ID NO: 1456096 - DNA, 25 bp, Homo sapien
gggacagcgggagcggtgcggagcg

SEQ ID NO: 1456097 - DNA, 25 bp, Homo sapien
ctttgaaaccgaaagcgcctgctgg

SEQ ID NO: 1456098 - DNA, 25 bp, Homo sapien
cgcctgctggcgtccggccggtccc

SEQ ID NO: 1456099 - DNA, 25 bp, Homo sapien
ctggggagctggtccagagggcggc

SEQ ID NO: 1456100 - DNA, 25 bp, Homo sapien
gctggggagctggtccagagggcgg

SEQ ID NO: 1456101 - DNA, 25 bp, Homo sapien
tctggctggccgactttctctgctc

SEQ ID NO: 1456102 - DNA, 25 bp, Homo sapien
tctgagaattttcggggccacgctc

SEQ ID NO: 1456103 - DNA, 25 bp, Homo sapien
ttcctgttctgcagggtcttggtgg

SEQ ID NO: 1456104 - DNA, 25 bp, Homo sapien
cagatggtctccactttgttcctgt

SEQ ID NO: 1456105 - DNA, 25 bp, Homo sapien
ccagcatctggaacatgggaagtga

SEQ ID NO: 1456106 - DNA, 25 bp, Homo sapien
caggagaaagtgtctgagccagcat

SEQ ID NO: 1456107 - DNA, 25 bp, Homo sapien
gagaaggcgacttctcccacggcct

SEQ ID NO: 1456108 - DNA, 25 bp, Homo sapien
aagagtgtggaaaagagctgccgtc

SEQ ID NO: 1456109 - DNA, 25 bp, Homo sapien
cagcagaggtgtagcaagtgagtat

SEQ ID NO: 1456110 - DNA, 25 bp, Homo sapien
tctgcccaggttgtggctttttctg

SEQ ID NO: 1456111 - DNA, 25 bp, Homo sapien
gggattctggataggagttctagct

SEQ ID NO: 1456112 - DNA, 25 bp, Homo sapien
taggagttctagctccagcagaggt

SEQ ID NO: 1456113 - DNA, 25 bp, Homo sapien
tgctgcgctgctctgattgtcctgt

SEQ ID NO: 1456114 - DNA, 25 bp, Homo sapien
tctccttggaggttgctacaccgtc

SEQ ID NO: 1456115 - DNA, 25 bp, Homo sapien
gacaagcttctgtaaagagtggaca

SEQ ID NO: 1456116 - DNA, 25 bp, Homo sapien
tgtgtaggtttccaggacctggtac

SEQ ID NO: 1456117 - DNA, 25 bp, Homo sapien
taaaacattgggtggagttattcca

SEQ ID NO: 1456118 - DNA, 25 bp, Homo sapien
gcctccctgttaaaggcagaataat

SEQ ID NO: 1456119 - DNA, 25 bp, Homo sapien
agtgattaaaacattgggtggagtt

SEQ ID NO: 1456120 - DNA, 25 bp, Homo sapien
caaaggcttacatgctcagcagatg

SEQ ID NO: 1456121 - DNA, 25 bp, Homo sapien
ctggaagctgccacgatgatctgac

SEQ ID NO: 1456122 - DNA, 25 bp, Homo sapien
gccacgatgatctgactggtgctcc

SEQ ID NO: 1456123 - DNA, 25 bp, Homo sapien
gctgccacgatgatctgactggtgc

SEQ ID NO: 1456124 - DNA, 25 bp, Homo sapien
gaagctgccacgatgatctgactgg

SEQ ID NO: 1456125 - DNA, 25 bp, Homo sapien
ctgaataaagctggctaggagggca

SEQ ID NO: 1456126 - DNA, 25 bp, Homo sapien
agactttgcatgtgaccggcactga

SEQ ID NO: 1456127 - DNA, 25 bp, Homo sapien
gagctgtctggtaacccactctcct

SEQ ID NO: 1456128 - DNA, 25 bp, Homo sapien
cccataatacaatagggcgcagact

SEQ ID NO: 1456129 - DNA, 25 bp, Homo sapien
cacgcaaggatgagtatgggccatg

SEQ ID NO: 1456130 - DNA, 25 bp, Homo sapien
tagagctgcttacctggtgatgacc

SEQ ID NO: 1456131 - DNA, 25 bp, Homo sapien
aaaaatgccaagttgtcctgagccc

SEQ ID NO: 1456132 - DNA, 25 bp, Homo sapien
ttgtaagctgctatgcaaatgggca

SEQ ID NO: 1456133 - DNA, 25 bp, Homo sapien
gagcaccaatcgtaggttttataat

SEQ ID NO: 1456134 - DNA, 25 bp, Homo sapien
tggttgtacaggagactgccgtttt

SEQ ID NO: 1456135 - DNA, 25 bp, Homo sapien
ttcctgagtggaagccacaagacca

SEQ ID NO: 1456136 - DNA, 25 bp, Homo sapien
tctccctgaaaattcggagactggg

SEQ ID NO: 1456137 - DNA, 25 bp, Homo sapien
ctccggctactattcagtgttgcac

SEQ ID NO: 1456138 - DNA, 25 bp, Homo sapien
ccggctactattcagtgttgcactg

SEQ ID NO: 1456139 - DNA, 25 bp, Homo sapien
tccggctactattcagtgttgcact

SEQ ID NO: 1456140 - DNA, 25 bp, Homo sapien
ctgaaaaacaaagggagaactgaat

SEQ ID NO: 1456141 - DNA, 25 bp, Homo sapien
cagtttccagtaagtgaccgttcca

SEQ ID NO: 1456142 - DNA, 25 bp, Homo sapien
tgtcaagtcggaccaaacaggttgt

SEQ ID NO: 1456143 - DNA, 25 bp, Homo sapien
tggttgttcagcaccttcggtccgg

SEQ ID NO: 1456144 - DNA, 25 bp, Homo sapien
ctgtgacgttccctacgcggtcggg

SEQ ID NO: 1456145 - DNA, 25 bp, Homo sapien
agagtgtgaaggcaaaccggtagaa

SEQ ID NO: 1456146 - DNA, 25 bp, Homo sapien
tgtgaaggcaaaccggtagaagccg

SEQ ID NO: 1456147 - DNA, 25 bp, Homo sapien
aggcaaaccggtagaagccgcgccg

SEQ ID NO: 1456148 - DNA, 25 bp, Homo sapien
gaaggcaaaccggtagaagccgcgc

SEQ ID NO: 1456149 - DNA, 25 bp, Homo sapien
gggactgttggtagcccccctctgc

SEQ ID NO: 1456150 - DNA, 25 bp, Homo sapien
gaggccgctcccaagctctgagttt

SEQ ID NO: 1456151 - DNA, 25 bp, Homo sapien
ctaatgaggccgctcccaagctctg

SEQ ID NO: 1456152 - DNA, 25 bp, Homo sapien
aatctcccttcggtcactccgaggg

SEQ ID NO: 1456153 - DNA, 25 bp, Homo sapien
ctgcagtaaacatacgtgtgagtgt

SEQ ID NO: 1456154 - DNA, 25 bp, Homo sapien
ctattattgaaggacttttaggttg

SEQ ID NO: 1456155 - DNA, 25 bp, Homo sapien
ccagtctattattgaaggactttta

SEQ ID NO: 1456156 - DNA, 25 bp, Homo sapien
taatccagtctattattgaaggact

SEQ ID NO: 1456157 - DNA, 25 bp, Homo sapien
tcttagaaccgacaaatgaatttag

SEQ ID NO: 1456158 - DNA, 25 bp, Homo sapien
tatatgctaacagcaatcagcctga

SEQ ID NO: 1456159 - DNA, 25 bp, Homo sapien
tcagcatgcaaaaatcaggagtgtt

SEQ ID NO: 1456160 - DNA, 25 bp, Homo sapien
gaatgtctgtactacccagagtgag

SEQ ID NO: 1456161 - DNA, 25 bp, Homo sapien
gccaagaccttttgtgttgcacgta

SEQ ID NO: 1456162 - DNA, 25 bp, Homo sapien
gaagtgttcgactacagttacagag

SEQ ID NO: 1456163 - DNA, 25 bp, Homo sapien
tgcattctgtcctggtatggaaacc

SEQ ID NO: 1456164 - DNA, 25 bp, Homo sapien
gacctgaaaggtgctaatgccagac

SEQ ID NO: 1456165 - DNA, 25 bp, Homo sapien
cggaaccctggaattgagaaacctg

SEQ ID NO: 1456166 - DNA, 25 bp, Homo sapien
cagattttccatgggtgatccacac

SEQ ID NO: 1456167 - DNA, 25 bp, Homo sapien
gagcagtctgcttaccaagggtcac

SEQ ID NO: 1456168 - DNA, 25 bp, Homo sapien
caaggtaagagatggatcaggccac

SEQ ID NO: 1456169 - DNA, 25 bp, Homo sapien
accgagcggaagagctgggacacct

SEQ ID NO: 1456170 - DNA, 25 bp, Homo sapien
atgcgcgcgcgggtcttgaaggtgg

SEQ ID NO: 1456171 - DNA, 25 bp, Homo sapien
tggcgcgtcagcttgtgggcctcct

SEQ ID NO: 1456172 - DNA, 25 bp, Homo sapien
gatggtcctgatgtcgctggcgaag

SEQ ID NO: 1456173 - DNA, 25 bp, Homo sapien
aaccccgaggggctgcccgtgcatc

SEQ ID NO: 1456174 - DNA, 25 bp, Homo sapien
ccgaggggctgcccgtgcatcctca

SEQ ID NO: 1456175 - DNA, 25 bp, Homo sapien
tctaaccccgaggggctgcccgtgc

SEQ ID NO: 1456176 - DNA, 25 bp, Homo sapien
cccgaggggctgcccgtgcatcctc

SEQ ID NO: 1456177 - DNA, 25 bp, Homo sapien
caatcatgacctgtgtgtacccagc

SEQ ID NO: 1456178 - DNA, 25 bp, Homo sapien
caccagattgagagtcaggacttcc

SEQ ID NO: 1456179 - DNA, 25 bp, Homo sapien
gaagaatcacttgtggccccgacat

SEQ ID NO: 1456180 - DNA, 25 bp, Homo sapien
cccagcagtgacatgagaccggaaa

SEQ ID NO: 1456181 - DNA, 25 bp, Homo sapien
tcagcaccaatccttctgagacagg

SEQ ID NO: 1456182 - DNA, 25 bp, Homo sapien
ttccttgacatcagcaccaatcctt

SEQ ID NO: 1456183 - DNA, 25 bp, Homo sapien
gaaattactcgatgcttccttgaca

SEQ ID NO: 1456184 - DNA, 25 bp, Homo sapien
tgagggaagattttgggagactaac

SEQ ID NO: 1456185 - DNA, 25 bp, Homo sapien
agctgtagtccacaccggtgcagac

SEQ ID NO: 1456186 - DNA, 25 bp, Homo sapien
ggatagcaggcccacaataggatgg

SEQ ID NO: 1456187 - DNA, 25 bp, Homo sapien
ggatcttaacgcagacatcttccag

SEQ ID NO: 1456188 - DNA, 25 bp, Homo sapien
tcttccagctgcaaccgctcaatgg

SEQ ID NO: 1456189 - DNA, 25 bp, Homo sapien
cagccgggatggggcctcgttccac

SEQ ID NO: 1456190 - DNA, 25 bp, Homo sapien
tcgttccaccgaagccatgagatga

SEQ ID NO: 1456191 - DNA, 25 bp, Homo sapien
cgttccaccgaagccatgagatgag

SEQ ID NO: 1456192 - DNA, 25 bp, Homo sapien
gttccaccgaagccatgagatgaga

SEQ ID NO: 1456193 - DNA, 25 bp, Homo sapien
ctgatcctgaacaagaaggcatttt

SEQ ID NO: 1456194 - DNA, 25 bp, Homo sapien
atcctgaacaagaaggcattttcca

SEQ ID NO: 1456195 - DNA, 25 bp, Homo sapien
attttccaaagctccttagggagct

SEQ ID NO: 1456196 - DNA, 25 bp, Homo sapien
gcattttccaaagctccttagggag

SEQ ID NO: 1456197 - DNA, 25 bp, Homo sapien
aactctggccaggactggaggcttt

SEQ ID NO: 1456198 - DNA, 25 bp, Homo sapien
ccagaaggctcttcagtgggtccga

SEQ ID NO: 1456199 - DNA, 25 bp, Homo sapien
gctcttcagtgggtccgattaagtt

SEQ ID NO: 1456200 - DNA, 25 bp, Homo sapien
actctggccaggactggaggctttg

SEQ ID NO: 1456201 - DNA, 25 bp, Homo sapien
tcaccgtgttgggagagctgagcct

SEQ ID NO: 1456202 - DNA, 25 bp, Homo sapien
ttttctaggaacgtgtccacaggct

SEQ ID NO: 1456203 - DNA, 25 bp, Homo sapien
cctccctgtttcaagagaaggccca

SEQ ID NO: 1456204 - DNA, 25 bp, Homo sapien
gaggcctcaggtttacagagcagag

SEQ ID NO: 1456205 - DNA, 25 bp, Homo sapien
agctctgtgtttgataaggcccaag

SEQ ID NO: 1456206 - DNA, 25 bp, Homo sapien
gtgacccgccggacccaggcataga

SEQ ID NO: 1456207 - DNA, 25 bp, Homo sapien
gctcagtctgggcagagacttctca

SEQ ID NO: 1456208 - DNA, 25 bp, Homo sapien
agggcgtgcagaccttgcccaggaa

SEQ ID NO: 1456209 - DNA, 25 bp, Homo sapien
tatgcgtgtatgtatcccgcgaggc

SEQ ID NO: 1456210 - DNA, 25 bp, Homo sapien
cctaggtgtacctgctgttggcaaa

SEQ ID NO: 1456211 - DNA, 25 bp, Homo sapien
tgatctgacacaaaagcctgaggcg

SEQ ID NO: 1456212 - DNA, 25 bp, Homo sapien
cctagaagccatgtgtgggccagct

SEQ ID NO: 1456213 - DNA, 25 bp, Homo sapien
atttgtgattatccttgctgagtgt

SEQ ID NO: 1456214 - DNA, 25 bp, Homo sapien
ttgtgattatccttgctgagtgtga

SEQ ID NO: 1456215 - DNA, 25 bp, Homo sapien
tgtgattatccttgctgagtgtgaa

SEQ ID NO: 1456216 - DNA, 25 bp, Homo sapien
tgattatccttgctgagtgtgaatt

SEQ ID NO: 1456217 - DNA, 25 bp, Homo sapien
ggactgaacccatggcagtgagata

SEQ ID NO: 1456218 - DNA, 25 bp, Homo sapien
ctggaccagctccatatgcagaaga

SEQ ID NO: 1456219 - DNA, 25 bp, Homo sapien
cagtgagatactgcgtccaggagaa

SEQ ID NO: 1456220 - DNA, 25 bp, Homo sapien
gactgagccaatggtgatgagacat

SEQ ID NO: 1456221 - DNA, 25 bp, Homo sapien
ttgccagaaggcagcggcaggttct

SEQ ID NO: 1456222 - DNA, 25 bp, Homo sapien
tgagtgggatgtcactgcatgtccc

SEQ ID NO: 1456223 - DNA, 25 bp, Homo sapien
tgtgtaagaccccatgctggctgct

SEQ ID NO: 1456224 - DNA, 25 bp, Homo sapien
ggttcctttcaccagtgtccttagc

SEQ ID NO: 1456225 - DNA, 25 bp, Homo sapien
catgtcatttacataggtgctcggt

SEQ ID NO: 1456226 - DNA, 25 bp, Homo sapien
tcacacatctaggagccttgtggct

SEQ ID NO: 1456227 - DNA, 25 bp, Homo sapien
ggctcctgaaggtgagtctacaacc

SEQ ID NO: 1456228 - DNA, 25 bp, Homo sapien
aaggtgagtctacaacctctccaca

SEQ ID NO: 1456229 - DNA, 25 bp, Homo sapien
aattgcactgctcagattgatctgt

SEQ ID NO: 1456230 - DNA, 25 bp, Homo sapien
ggcagagcagggtcaattgcactgc

SEQ ID NO: 1456231 - DNA, 25 bp, Homo sapien
cctacatccatagctcttccttgat

SEQ ID NO: 1456232 - DNA, 25 bp, Homo sapien
atctgttgacccctgagactcttac

SEQ ID NO: 1456233 - DNA, 25 bp, Homo sapien
aaacagatacaaagatgctcaagct

SEQ ID NO: 1456234 - DNA, 25 bp, Homo sapien
caaagatgctcaagctttgggctcc

SEQ ID NO: 1456235 - DNA, 25 bp, Homo sapien
acagatacaaagatgctcaagcttt

SEQ ID NO: 1456236 - DNA, 25 bp, Homo sapien
gatacaaagatgctcaagctttggg

SEQ ID NO: 1456237 - DNA, 25 bp, Homo sapien
gacactcttgtctcttcaagcccca

SEQ ID NO: 1456238 - DNA, 25 bp, Homo sapien
tggacccagggactgtgggagaaga

SEQ ID NO: 1456239 - DNA, 25 bp, Homo sapien
aagaaagtacaattgttccttgttg

SEQ ID NO: 1456240 - DNA, 25 bp, Homo sapien
tacaattgttccttgttgggcagga

SEQ ID NO: 1456241 - DNA, 25 bp, Homo sapien
tctaggtgaacaggctccaggacag

SEQ ID NO: 1456242 - DNA, 25 bp, Homo sapien
ggcttcctctaggtgaacaggctcc

SEQ ID NO: 1456243 - DNA, 25 bp, Homo sapien
ggacggataggaatccaaatgattt

SEQ ID NO: 1456244 - DNA, 25 bp, Homo sapien
tgaaggggacggataggaatccaaa

SEQ ID NO: 1456245 - DNA, 25 bp, Homo sapien
ttgggcatggcagagcctccctgac

SEQ ID NO: 1456246 - DNA, 25 bp, Homo sapien
gctattgggcatggcagagcctccc

SEQ ID NO: 1456247 - DNA, 25 bp, Homo sapien
tattgggcatggcagagcctccctg

SEQ ID NO: 1456248 - DNA, 25 bp, Homo sapien
ctagctattgggcatggcagagcct

SEQ ID NO: 1456249 - DNA, 25 bp, Homo sapien
tccatgcattccctggacagctgta

SEQ ID NO: 1456250 - DNA, 25 bp, Homo sapien
taccagtgaccccatgttggcaggc

SEQ ID NO: 1456251 - DNA, 25 bp, Homo sapien
cagctgtaggttcagggccatcgaa

SEQ ID NO: 1456252 - DNA, 25 bp, Homo sapien
gggaaacagtagagcagccgaatac

SEQ ID NO: 1456253 - DNA, 25 bp, Homo sapien
cttgggctccctcagccctgattac

SEQ ID NO: 1456254 - DNA, 25 bp, Homo sapien
aggatgatgccggaccaggctgcac

SEQ ID NO: 1456255 - DNA, 25 bp, Homo sapien
ccagaggcccgacggcgtcgctggg

SEQ ID NO: 1456256 - DNA, 25 bp, Homo sapien
tgcaggcgcctgcatgcctcattta

SEQ ID NO: 1456257 - DNA, 25 bp, Homo sapien
gagactctcacacgccttgtccttg

SEQ ID NO: 1456258 - DNA, 25 bp, Homo sapien
actgtccctgtattaagtggagtgg

SEQ ID NO: 1456259 - DNA, 25 bp, Homo sapien
gggaatgaagccataacagcagcca

SEQ ID NO: 1456260 - DNA, 25 bp, Homo sapien
tccctgtattaagtggagtggcccc

SEQ ID NO: 1456261 - DNA, 25 bp, Homo sapien
cctgtattaagtggagtggccccgg

SEQ ID NO: 1456262 - DNA, 25 bp, Homo sapien
tcaggaatccgcttctgagaaggag

SEQ ID NO: 1456263 - DNA, 25 bp, Homo sapien
ttcaggaatccgcttctgagaagga

SEQ ID NO: 1456264 - DNA, 25 bp, Homo sapien
gggcctttcaggaatccgcttctga

SEQ ID NO: 1456265 - DNA, 25 bp, Homo sapien
cctttcaggaatccgcttctgagaa

SEQ ID NO: 1456266 - DNA, 25 bp, Homo sapien
acgctgccgtcggccttagaacagt

SEQ ID NO: 1456267 - DNA, 25 bp, Homo sapien
taccccaggctctggtagactgatt

SEQ ID NO: 1456268 - DNA, 25 bp, Homo sapien
ccatttaccaagtgcccatagggac

SEQ ID NO: 1456269 - DNA, 25 bp, Homo sapien
taagcaggccattgcaaccagagaa

SEQ ID NO: 1456270 - DNA, 25 bp, Homo sapien
agcactaattttgggctcagcagca

SEQ ID NO: 1456271 - DNA, 25 bp, Homo sapien
gatcctttacaaagagaagacaggc

SEQ ID NO: 1456272 - DNA, 25 bp, Homo sapien
tgtctgggtatcatgctgggctccg

SEQ ID NO: 1456273 - DNA, 25 bp, Homo sapien
cactgttacaccctaagtgatgtag

SEQ ID NO: 1456274 - DNA, 25 bp, Homo sapien
gcccagccgggattagtctattttc

SEQ ID NO: 1456275 - DNA, 25 bp, Homo sapien
atgggtgtcacaataggctgccacc

SEQ ID NO: 1456276 - DNA, 25 bp, Homo sapien
catcaacatcctgttggcaatgggt

SEQ ID NO: 1456277 - DNA, 25 bp, Homo sapien
tcaacatcctgttggcaatgggtgt

SEQ ID NO: 1456278 - DNA, 25 bp, Homo sapien
tgggtgtcacaataggctgccacct

SEQ ID NO: 1456279 - DNA, 25 bp, Homo sapien
taccacctcatgagactgcaggtcc

SEQ ID NO: 1456280 - DNA, 25 bp, Homo sapien
ctcatgagactgcaggtccttgagg

SEQ ID NO: 1456281 - DNA, 25 bp, Homo sapien
ggcacgtaccacctcatgagactgc

SEQ ID NO: 1456282 - DNA, 25 bp, Homo sapien
gacctgctccggaggccttgccagg

SEQ ID NO: 1456283 - DNA, 25 bp, Homo sapien
ctaggcaaaccctcctctttcatcc

SEQ ID NO: 1456284 - DNA, 25 bp, Homo sapien
gctggttgtgctcaaaaagctccat

SEQ ID NO: 1456285 - DNA, 25 bp, Homo sapien
tttaattcaggcacatgcagcacct

SEQ ID NO: 1456286 - DNA, 25 bp, Homo sapien
ctcaaaaggtgagtcagtgcccact

SEQ ID NO: 1456287 - DNA, 25 bp, Homo sapien
cacatctggcccaaaggacaggcaa

SEQ ID NO: 1456288 - DNA, 25 bp, Homo sapien
cactacttggcaaacttagaatttc

SEQ ID NO: 1456289 - DNA, 25 bp, Homo sapien
tatagaactctgttatgcagtccca

SEQ ID NO: 1456290 - DNA, 25 bp, Homo sapien
aatgtaacatagtgttaaaactggc

SEQ ID NO: 1456291 - DNA, 25 bp, Homo sapien
ttaaactgtgtgaccagacaaggac

SEQ ID NO: 1456292 - DNA, 25 bp, Homo sapien
tccacgcatgttaagttgtccagcc

SEQ ID NO: 1456293 - DNA, 25 bp, Homo sapien
gatctaaatatagcacccagcaagg

SEQ ID NO: 1456294 - DNA, 25 bp, Homo sapien
taaacaagaaatgctaactgctggg

SEQ ID NO: 1456295 - DNA, 25 bp, Homo sapien
cactgggttctgcaggcaagttcac

SEQ ID NO: 1456296 - DNA, 25 bp, Homo sapien
atcaccacttctggggttttctggg

SEQ ID NO: 1456297 - DNA, 25 bp, Homo sapien
tatcaccacttctggggttttctgg

SEQ ID NO: 1456298 - DNA, 25 bp, Homo sapien
gtatcaccacttctggggttttctg

SEQ ID NO: 1456299 - DNA, 25 bp, Homo sapien
ctgtatcaccacttctggggttttc

SEQ ID NO: 1456300 - DNA, 25 bp, Homo sapien
aggtttccagcacccaactactggg

SEQ ID NO: 1456301 - DNA, 25 bp, Homo sapien
caagtctccagcaaagttgctgcag

SEQ ID NO: 1456302 - DNA, 25 bp, Homo sapien
gggaagcatttctgacgctgttata

SEQ ID NO: 1456303 - DNA, 25 bp, Homo sapien
ttataaccataaccagacaagtctc

SEQ ID NO: 1456304 - DNA, 25 bp, Homo sapien
tttttcttagggtctgacccacagc

SEQ ID NO: 1456305 - DNA, 25 bp, Homo sapien
tttcttagggtctgacccacagccc

SEQ ID NO: 1456306 - DNA, 25 bp, Homo sapien
ttttcttagggtctgacccacagcc

SEQ ID NO: 1456307 - DNA, 25 bp, Homo sapien
ctttttcttagggtctgacccacag

SEQ ID NO: 1456308 - DNA, 25 bp, Homo sapien
tccttgcacccgactgagggggttc

SEQ ID NO: 1456309 - DNA, 25 bp, Homo sapien
ctacaaatatgccagacgcgtcgcc

SEQ ID NO: 1456310 - DNA, 25 bp, Homo sapien
aaatatgccagacgcgtcgccggct

SEQ ID NO: 1456311 - DNA, 25 bp, Homo sapien
gcacccgactgagggggttctgatt

SEQ ID NO: 1456312 - DNA, 25 bp, Homo sapien
agttgctggtattggccaccagggt

SEQ ID NO: 1456313 - DNA, 25 bp, Homo sapien
caatttcagcccgttggagttgctg

SEQ ID NO: 1456314 - DNA, 25 bp, Homo sapien
gtccaatttcagcccgttggagttg

SEQ ID NO: 1456315 - DNA, 25 bp, Homo sapien
tttcagcccgttggagttgctggta

SEQ ID NO: 1456316 - DNA, 25 bp, Homo sapien
gggccacgttgatgtcgctgctccc

SEQ ID NO: 1456317 - DNA, 25 bp, Homo sapien
gagtcctggctgaagccgctgtgat

SEQ ID NO: 1456318 - DNA, 25 bp, Homo sapien
gcgggtgctcttaacgcgaggcccc

SEQ ID NO: 1456319 - DNA, 25 bp, Homo sapien
tgctcttaacgcgaggccccttggg

SEQ ID NO: 1456320 - DNA, 25 bp, Homo sapien
ggctcggatccagccgaacgtgttc

SEQ ID NO: 1456321 - DNA, 25 bp, Homo sapien
gctgcatctcgtgcggctcgatgaa

SEQ ID NO: 1456322 - DNA, 25 bp, Homo sapien
cagcaggatggcgaaacagaggcca

SEQ ID NO: 1456323 - DNA, 25 bp, Homo sapien
caggaagatggcgttcaccagagcc

SEQ ID NO: 1456324 - DNA, 25 bp, Homo sapien
ggcccggagactggtgcagcggcgg

SEQ ID NO: 1456325 - DNA, 25 bp, Homo sapien
ccggcccggagactggtgcagcggc

SEQ ID NO: 1456326 - DNA, 25 bp, Homo sapien
gcccggcccggagactggtgcagcg

SEQ ID NO: 1456327 - DNA, 25 bp, Homo sapien
gagcccggcccggagactggtgcag

SEQ ID NO: 1456328 - DNA, 25 bp, Homo sapien
agcttcgcgccgagaaagctccgag

SEQ ID NO: 1456329 - DNA, 25 bp, Homo sapien
aggagagggcgacgggcagcttcgc

SEQ ID NO: 1456330 - DNA, 25 bp, Homo sapien
gctcctcaggcgtccgtcctcagag

SEQ ID NO: 1456331 - DNA, 25 bp, Homo sapien
cgagccccgcgcctgtgggcgttct

SEQ ID NO: 1456332 - DNA, 25 bp, Homo sapien
aggagctagagaggcggcggccacg

SEQ ID NO: 1456333 - DNA, 25 bp, Homo sapien
tgaggagctagagaggcggcggcca

SEQ ID NO: 1456334 - DNA, 25 bp, Homo sapien
ctgaggagctagagaggcggcggcc

SEQ ID NO: 1456335 - DNA, 25 bp, Homo sapien
ggagctagagaggcggcggccacgg

SEQ ID NO: 1456336 - DNA, 25 bp, Homo sapien
taggatgacagttcagggactggcc

SEQ ID NO: 1456337 - DNA, 25 bp, Homo sapien
gagctgcctagtgcatattctcaga

SEQ ID NO: 1456338 - DNA, 25 bp, Homo sapien
gaattatttcacctaggcgaactca

SEQ ID NO: 1456339 - DNA, 25 bp, Homo sapien
tcatccctaaacatgccggccagta

SEQ ID NO: 1456340 - DNA, 25 bp, Homo sapien
tgcatgaggacggaactaggctgca

SEQ ID NO: 1456341 - DNA, 25 bp, Homo sapien
tcacggctgagatcttgcagtggcc

SEQ ID NO: 1456342 - DNA, 25 bp, Homo sapien
ccagtgctaggagaaggagaaccaa

SEQ ID NO: 1456343 - DNA, 25 bp, Homo sapien
taggcagaacctcacggaaggaagg

SEQ ID NO: 1456344 - DNA, 25 bp, Homo sapien
accagataaagaggggactggcctt

SEQ ID NO: 1456345 - DNA, 25 bp, Homo sapien
gatgtcgctccaccagataaagagg

SEQ ID NO: 1456346 - DNA, 25 bp, Homo sapien
tccaccagataaagaggggactggc

SEQ ID NO: 1456347 - DNA, 25 bp, Homo sapien
atgtcgctccaccagataaagaggg

SEQ ID NO: 1456348 - DNA, 25 bp, Homo sapien
tgctatcctttcgaagggttcaccc

SEQ ID NO: 1456349 - DNA, 25 bp, Homo sapien
ttaaacctgtactagtgtaatacag

SEQ ID NO: 1456350 - DNA, 25 bp, Homo sapien
catacagtaaagttcgctcttcggg

SEQ ID NO: 1456351 - DNA, 25 bp, Homo sapien
acagagttgtgtaggcacggcagca

SEQ ID NO: 1456352 - DNA, 25 bp, Homo sapien
tcacgtagagctggcaatgaaaggc

SEQ ID NO: 1456353 - DNA, 25 bp, Homo sapien
tctgctgtcacgtgcttcaagggac

SEQ ID NO: 1456354 - DNA, 25 bp, Homo sapien
tctacgtacatcatcccatgcaggc

SEQ ID NO: 1456355 - DNA, 25 bp, Homo sapien
taacagaagttagcaacacggccca

SEQ ID NO: 1456356 - DNA, 25 bp, Homo sapien
ctgataggcgaagggtattagtaaa

SEQ ID NO: 1456357 - DNA, 25 bp, Homo sapien
gataggcgaagggtattagtaaatg

SEQ ID NO: 1456358 - DNA, 25 bp, Homo sapien
taggcgaagggtattagtaaatggc

SEQ ID NO: 1456359 - DNA, 25 bp, Homo sapien
ggcgaagggtattagtaaatggcat

SEQ ID NO: 1456360 - DNA, 25 bp, Homo sapien
gtccggcgtccctagacaaaggctg

SEQ ID NO: 1456361 - DNA, 25 bp, Homo sapien
ccctgtgagtgaggagacagctctc

SEQ ID NO: 1456362 - DNA, 25 bp, Homo sapien
gggacccagtacgaacaggacagag

SEQ ID NO: 1456363 - DNA, 25 bp, Homo sapien
gatgagggagcaatggatgcttccc

SEQ ID NO: 1456364 - DNA, 25 bp, Homo sapien
ggcgcatgccaccaggctcagctaa

SEQ ID NO: 1456365 - DNA, 25 bp, Homo sapien
ggcttactgcaacctctgcctccca

SEQ ID NO: 1456366 - DNA, 25 bp, Homo sapien
ggctggaatgcaatggcaccatctt

SEQ ID NO: 1456367 - DNA, 25 bp, Homo sapien
gaaacagtttcacttttgctgccca

SEQ ID NO: 1456368 - DNA, 25 bp, Homo sapien
ctgctgccaaccatcgtggttctca

SEQ ID NO: 1456369 - DNA, 25 bp, Homo sapien
ttccccaggtcctcttcatgctttt

SEQ ID NO: 1456370 - DNA, 25 bp, Homo sapien
ctttccccaggtcctcttcatgctt

SEQ ID NO: 1456371 - DNA, 25 bp, Homo sapien
cccaggtcctcttcatgcttttcca

SEQ ID NO: 1456372 - DNA, 25 bp, Homo sapien
ccaggtcctcttcatgcttttccat

SEQ ID NO: 1456373 - DNA, 25 bp, Homo sapien
caaccaattgccagacagacgtgta

SEQ ID NO: 1456374 - DNA, 25 bp, Homo sapien
cagacgtgtaggctgaagcgccagc

SEQ ID NO: 1456375 - DNA, 25 bp, Homo sapien
tgaagcgagctcatcagccagatgc

SEQ ID NO: 1456376 - DNA, 25 bp, Homo sapien
gcaaaagacaatccattctgaacca

SEQ ID NO: 1456377 - DNA, 25 bp, Homo sapien
ctgatggcccaaggcccggtggaac

SEQ ID NO: 1456378 - DNA, 25 bp, Homo sapien
aaatgccatttctgtcttcgctgtt

SEQ ID NO: 1456379 - DNA, 25 bp, Homo sapien
ctgctgatggcccaaggcccggtgg

SEQ ID NO: 1456380 - DNA, 25 bp, Homo sapien
aatgccatttctgtcttcgctgttg

SEQ ID NO: 1456381 - DNA, 25 bp, Homo sapien
tgggaagtaggggagtagctgatgg

SEQ ID NO: 1456382 - DNA, 25 bp, Homo sapien
aatttgggaagtaggggagtagctg

SEQ ID NO: 1456383 - DNA, 25 bp, Homo sapien
cataagagaatttgggaagtagggg

SEQ ID NO: 1456384 - DNA, 25 bp, Homo sapien
gtaggggagtagctgatggggagac

SEQ ID NO: 1456385 - DNA, 25 bp, Homo sapien
tatccttctcaacgggtttcacagg

SEQ ID NO: 1456386 - DNA, 25 bp, Homo sapien
cctccggaaggataacaaggctaca

SEQ ID NO: 1456387 - DNA, 25 bp, Homo sapien
tctcatgagttaccgcctccggaag

SEQ ID NO: 1456388 - DNA, 25 bp, Homo sapien
ggcattactgggatgtgttcctgca

SEQ ID NO: 1456389 - DNA, 25 bp, Homo sapien
ccccagcagtgccaagtgtgtaagg

SEQ ID NO: 1456390 - DNA, 25 bp, Homo sapien
tgtgtaaggcgttgctctcagagct

SEQ ID NO: 1456391 - DNA, 25 bp, Homo sapien
gtgtgtaaggcgttgctctcagagc

SEQ ID NO: 1456392 - DNA, 25 bp, Homo sapien
cagcagtgccaagtgtgtaaggcgt

SEQ ID NO: 1456393 - DNA, 25 bp, Homo sapien
gataggtactggcagccgaggtacc

SEQ ID NO: 1456394 - DNA, 25 bp, Homo sapien
gctaaaggaggctgcccgacatcgc

SEQ ID NO: 1456395 - DNA, 25 bp, Homo sapien
tatggaattcccctcggcaagggcc

SEQ ID NO: 1456396 - DNA, 25 bp, Homo sapien
ggcactgccagacaaaagcgctaat

SEQ ID NO: 1456397 - DNA, 25 bp, Homo sapien
gctgtgctccgaggcacgggcctgt

SEQ ID NO: 1456398 - DNA, 25 bp, Homo sapien
agaaggtctccgctggcagctcact

SEQ ID NO: 1456399 - DNA, 25 bp, Homo sapien
gcacgggcctgtatctgtggctgga

SEQ ID NO: 1456400 - DNA, 25 bp, Homo sapien
ctgtgcctggctggagaacgctcag

SEQ ID NO: 1456401 - DNA, 25 bp, Homo sapien
ggcagatagggacatgtgagagccc

SEQ ID NO: 1456402 - DNA, 25 bp, Homo sapien
aggcagatagggacatgtgagagcc

SEQ ID NO: 1456403 - DNA, 25 bp, Homo sapien
gcagatagggacatgtgagagccct

SEQ ID NO: 1456404 - DNA, 25 bp, Homo sapien
taattcccacttctctgtggttctg

SEQ ID NO: 1456405 - DNA, 25 bp, Homo sapien
aattcccacttctctgtggttctgt

SEQ ID NO: 1456406 - DNA, 25 bp, Homo sapien
gctcatagctgtaagagacctaaac

SEQ ID NO: 1456407 - DNA, 25 bp, Homo sapien
tcatctaggcggctcatagctgtaa

SEQ ID NO: 1456408 - DNA, 25 bp, Homo sapien
ggcaacttctcggaagatgcatcat

SEQ ID NO: 1456409 - DNA, 25 bp, Homo sapien
taggcggctcatagctgtaagagac

SEQ ID NO: 1456410 - DNA, 25 bp, Homo sapien
agtccagtggcccagcgatccatgc

SEQ ID NO: 1456411 - DNA, 25 bp, Homo sapien
tgcagccgtgttctccttcaagcct

SEQ ID NO: 1456412 - DNA, 25 bp, Homo sapien
caagccttgcttcatgcacaagctg

SEQ ID NO: 1456413 - DNA, 25 bp, Homo sapien
tccaaaggttcgtggattgccacct

SEQ ID NO: 1456414 - DNA, 25 bp, Homo sapien
gaattagacagaatttaggctgcag

SEQ ID NO: 1456415 - DNA, 25 bp, Homo sapien
catgtgatgtatatggccaggtgtg

SEQ ID NO: 1456416 - DNA, 25 bp, Homo sapien
gcccatgtccatcgatagacgaatg

SEQ ID NO: 1456417 - DNA, 25 bp, Homo sapien
gcagtgaccagcctaaaaaggtgga

SEQ ID NO: 1456418 - DNA, 25 bp, Homo sapien
gaactgcgtcatctggttccacact

SEQ ID NO: 1456419 - DNA, 25 bp, Homo sapien
cacactcgctccagtgatgtttgag

SEQ ID NO: 1456420 - DNA, 25 bp, Homo sapien
ggcagaagctagaccaagtttcaca

SEQ ID NO: 1456421 - DNA, 25 bp, Homo sapien
cacagttgagaggagacgtgcatag

SEQ ID NO: 1456422 - DNA, 25 bp, Homo sapien
tggacattgttttccgtgcttttct

SEQ ID NO: 1456423 - DNA, 25 bp, Homo sapien
ggacattgttttccgtgcttttctc

SEQ ID NO: 1456424 - DNA, 25 bp, Homo sapien
ggttaattagggtctggccattgct

SEQ ID NO: 1456425 - DNA, 25 bp, Homo sapien
tttaaggtatggtctcccaggtgga

SEQ ID NO: 1456426 - DNA, 25 bp, Homo sapien
caggtggattctgagacagctttca

SEQ ID NO: 1456427 - DNA, 25 bp, Homo sapien
ggccattgctcatgcgaagatagaa

SEQ ID NO: 1456428 - DNA, 25 bp, Homo sapien
ctaacccagggaagcagggaggaga

SEQ ID NO: 1456429 - DNA, 25 bp, Homo sapien
aagcagggaggagaggcccatgagc

SEQ ID NO: 1456430 - DNA, 25 bp, Homo sapien
gggaagcagggaggagaggcccatg

SEQ ID NO: 1456431 - DNA, 25 bp, Homo sapien
actaacccagggaagcagggaggag

SEQ ID NO: 1456432 - DNA, 25 bp, Homo sapien
ctgcagtgccgtgggcttgcaccag

SEQ ID NO: 1456433 - DNA, 25 bp, Homo sapien
aggcagagctcatggacagggacct

SEQ ID NO: 1456434 - DNA, 25 bp, Homo sapien
gacttgtgacacctgagactttgaa

SEQ ID NO: 1456435 - DNA, 25 bp, Homo sapien
aaaacataaggctccgctggccact

SEQ ID NO: 1456436 - DNA, 25 bp, Homo sapien
caataaaaggagtccccattaggtg

SEQ ID NO: 1456437 - DNA, 25 bp, Homo sapien
tccccattaggtgggcatggctgca

SEQ ID NO: 1456438 - DNA, 25 bp, Homo sapien
ttccagattcaagggcagccaaaca

SEQ ID NO: 1456439 - DNA, 25 bp, Homo sapien
gcttggtgctcctggcttggtgtct

SEQ ID NO: 1456440 - DNA, 25 bp, Homo sapien
cctgggccctcttggtaatgtggta

SEQ ID NO: 1456441 - DNA, 25 bp, Homo sapien
ctgggccctcttggtaatgtggtac

SEQ ID NO: 1456442 - DNA, 25 bp, Homo sapien
tcctgggccctcttggtaatgtggt

SEQ ID NO: 1456443 - DNA, 25 bp, Homo sapien
ctctggaagtcctcatggcattgct

SEQ ID NO: 1456444 - DNA, 25 bp, Homo sapien
tcatggcattgctcaagggagtggt

SEQ ID NO: 1456445 - DNA, 25 bp, Homo sapien
gcccagtctgtctctggcaatcctg

SEQ ID NO: 1456446 - DNA, 25 bp, Homo sapien
tctaggtgactgtctggtccatgag

SEQ ID NO: 1456447 - DNA, 25 bp, Homo sapien
ccaaaagcctgagctccggagctgt

SEQ ID NO: 1456448 - DNA, 25 bp, Homo sapien
tatgacgcttaacccatcactgtgg

SEQ ID NO: 1456449 - DNA, 25 bp, Homo sapien
ttttgctgtcttgcggaggcaggca

SEQ ID NO: 1456450 - DNA, 25 bp, Homo sapien
tctcctggcacgcaagtctggaaag

SEQ ID NO: 1456451 - DNA, 25 bp, Homo sapien
tcctgcttttcgaacaagagtcccg

SEQ ID NO: 1456452 - DNA, 25 bp, Homo sapien
tagcaaataacatcacaataagcag

SEQ ID NO: 1456453 - DNA, 25 bp, Homo sapien
tatagctggccaggagttatactca

SEQ ID NO: 1456454 - DNA, 25 bp, Homo sapien
aagagtcccgcattaccattttgca

SEQ ID NO: 1456455 - DNA, 25 bp, Homo sapien
cactattgacattgggagccgatca

SEQ ID NO: 1456456 - DNA, 25 bp, Homo sapien
cataatgctgaagtcccaaaaggtc

SEQ ID NO: 1456457 - DNA, 25 bp, Homo sapien
tagatcaggtttctcaaaagtggca

SEQ ID NO: 1456458 - DNA, 25 bp, Homo sapien
gagccgatcatagtcccaggagata

SEQ ID NO: 1456459 - DNA, 25 bp, Homo sapien
tggcagtgccaactttgtcagtcac

SEQ ID NO: 1456460 - DNA, 25 bp, Homo sapien
ctgccatatgcatggctgcagctat

SEQ ID NO: 1456461 - DNA, 25 bp, Homo sapien
cagaagcatagcatcattgacagca

SEQ ID NO: 1456462 - DNA, 25 bp, Homo sapien
tccccagtgggtgagggatgaatcc

SEQ ID NO: 1456463 - DNA, 25 bp, Homo sapien
aatagggctgctcccaacaacagag

SEQ ID NO: 1456464 - DNA, 25 bp, Homo sapien
ttttccttgaatctgcgaagatcca

SEQ ID NO: 1456465 - DNA, 25 bp, Homo sapien
accatcagggcccgctggaaactat

SEQ ID NO: 1456466 - DNA, 25 bp, Homo sapien
atcagggcccgctggaaactatcag

SEQ ID NO: 1456467 - DNA, 25 bp, Homo sapien
agttccacacaccaacccaccatca

SEQ ID NO: 1456468 - DNA, 25 bp, Homo sapien
cagttccacacaccaacccaccatc

SEQ ID NO: 1456469 - DNA, 25 bp, Homo sapien
gataacttgcctccgatggcattgt

SEQ ID NO: 1456470 - DNA, 25 bp, Homo sapien
acaatccgggagaagtgctgaatga

SEQ ID NO: 1456471 - DNA, 25 bp, Homo sapien
ccccggtgataacttgcctccgatg

SEQ ID NO: 1456472 - DNA, 25 bp, Homo sapien
aacaatccgggagaagtgctgaatg

SEQ ID NO: 1456473 - DNA, 25 bp, Homo sapien
aatgaccaaattgcatctaactggg

SEQ ID NO: 1456474 - DNA, 25 bp, Homo sapien
taaatgacagacagctcatattctg

SEQ ID NO: 1456475 - DNA, 25 bp, Homo sapien
gtaaaaccaattccgaaatatcatg

SEQ ID NO: 1456476 - DNA, 25 bp, Homo sapien
tagtgggaaagaagtaggtaaatga

SEQ ID NO: 1456477 - DNA, 25 bp, Homo sapien
cagctgggcagcgtgaagccttttc

SEQ ID NO: 1456478 - DNA, 25 bp, Homo sapien
gctgggcagcgtgaagccttttctt

SEQ ID NO: 1456479 - DNA, 25 bp, Homo sapien
ccgcagctgggcagcgtgaagcctt

SEQ ID NO: 1456480 - DNA, 25 bp, Homo sapien
gcagcgtgaagccttttcttcaggt

SEQ ID NO: 1456481 - DNA, 25 bp, Homo sapien
aaaagggctctgagttacttgaaca

SEQ ID NO: 1456482 - DNA, 25 bp, Homo sapien
aagggctctgagttacttgaacaga

SEQ ID NO: 1456483 - DNA, 25 bp, Homo sapien
agaaaaagggctctgagttacttga

SEQ ID NO: 1456484 - DNA, 25 bp, Homo sapien
gggctctgagttacttgaacagagt

SEQ ID NO: 1456485 - DNA, 25 bp, Homo sapien
actgtgaaccaaacaaaggccctat

SEQ ID NO: 1456486 - DNA, 25 bp, Homo sapien
ggcaacactattaactgctgacaga

SEQ ID NO: 1456487 - DNA, 25 bp, Homo sapien
actgagctcataggatgggccactg

SEQ ID NO: 1456488 - DNA, 25 bp, Homo sapien
ggctggaggcttacagattctagaa

SEQ ID NO: 1456489 - DNA, 25 bp, Homo sapien
gaaatggtagactgcaatattggga

SEQ ID NO: 1456490 - DNA, 25 bp, Homo sapien
aaatgctgccaatgctcactaaatt

SEQ ID NO: 1456491 - DNA, 25 bp, Homo sapien
gatcatcaatctaacttaagtaggg

SEQ ID NO: 1456492 - DNA, 25 bp, Homo sapien
tgaagccaaagtttcatataatcct

SEQ ID NO: 1456493 - DNA, 25 bp, Homo sapien
taaccacatctcagtgcggcagagt

SEQ ID NO: 1456494 - DNA, 25 bp, Homo sapien
caaagatccaaacgtgacagcctat

SEQ ID NO: 1456495 - DNA, 25 bp, Homo sapien
gacaatggttcactggtatatacga

SEQ ID NO: 1456496 - DNA, 25 bp, Homo sapien
cactttgggagcaacactggtgcac

SEQ ID NO: 1456497 - DNA, 25 bp, Homo sapien
cagcttctgttgaccaagttgattc

SEQ ID NO: 1456498 - DNA, 25 bp, Homo sapien
ctgttgaccaagttgattctcatac

SEQ ID NO: 1456499 - DNA, 25 bp, Homo sapien
gtagcaccagcttctgttgaccaag

SEQ ID NO: 1456500 - DNA, 25 bp, Homo sapien
tcatttgtagcaccagcttctgttg

SEQ ID NO: 1456501 - DNA, 25 bp, Homo sapien
cagattttctgctctagccagtttg

SEQ ID NO: 1456502 - DNA, 25 bp, Homo sapien
tagtctctcacgaacacaaagctcc

SEQ ID NO: 1456503 - DNA, 25 bp, Homo sapien
ccgttcctttagcaagctgtagttc

SEQ ID NO: 1456504 - DNA, 25 bp, Homo sapien
ggattacttgccagagacaggaact

SEQ ID NO: 1456505 - DNA, 25 bp, Homo sapien
tctggctctcctaattgtcgccctc

SEQ ID NO: 1456506 - DNA, 25 bp, Homo sapien
ctaattgtcgccctcttctctcaag

SEQ ID NO: 1456507 - DNA, 25 bp, Homo sapien
cttcaacagaaggtcgatggtaatc

SEQ ID NO: 1456508 - DNA, 25 bp, Homo sapien
tttcttcaacagaaggtcgatggta

SEQ ID NO: 1456509 - DNA, 25 bp, Homo sapien
gaaaggactcctttatggctaggtc

SEQ ID NO: 1456510 - DNA, 25 bp, Homo sapien
cagaatagtcctcctaagacagcag

SEQ ID NO: 1456511 - DNA, 25 bp, Homo sapien
ggactcctttatggctaggtcttaa

SEQ ID NO: 1456512 - DNA, 25 bp, Homo sapien
tactcagtattatagtcagattgca

SEQ ID NO: 1456513 - DNA, 25 bp, Homo sapien
ttcaattcatcagagtaacggtatg

SEQ ID NO: 1456514 - DNA, 25 bp, Homo sapien
atcagagtaacggtatggaattcgc

SEQ ID NO: 1456515 - DNA, 25 bp, Homo sapien
taacggtatggaattcgcctgaatt

SEQ ID NO: 1456516 - DNA, 25 bp, Homo sapien
caattcatcagagtaacggtatgga

SEQ ID NO: 1456517 - DNA, 25 bp, Homo sapien
cttagactaggaatctgtcttcatc

SEQ ID NO: 1456518 - DNA, 25 bp, Homo sapien
ttagactaggaatctgtcttcatca

SEQ ID NO: 1456519 - DNA, 25 bp, Homo sapien
tagactaggaatctgtcttcatcat

SEQ ID NO: 1456520 - DNA, 25 bp, Homo sapien
gactaggaatctgtcttcatcatac

SEQ ID NO: 1456521 - DNA, 25 bp, Homo sapien
gcacataactcatacagcaagcagc

SEQ ID NO: 1456522 - DNA, 25 bp, Homo sapien
tgcacataactcatacagcaagcag

SEQ ID NO: 1456523 - DNA, 25 bp, Homo sapien
cacataactcatacagcaagcagcc

SEQ ID NO: 1456524 - DNA, 25 bp, Homo sapien
atgcacataactcatacagcaagca

SEQ ID NO: 1456525 - DNA, 25 bp, Homo sapien
cgatgcaatacggtatgaccaccat

SEQ ID NO: 1456526 - DNA, 25 bp, Homo sapien
gtttcagatcccgatgcaatacggt

SEQ ID NO: 1456527 - DNA, 25 bp, Homo sapien
gatcccgatgcaatacggtatgacc

SEQ ID NO: 1456528 - DNA, 25 bp, Homo sapien
atacggtatgaccaccatcacttcg

SEQ ID NO: 1456529 - DNA, 25 bp, Homo sapien
aaccaaagcagttatacagcatata

SEQ ID NO: 1456530 - DNA, 25 bp, Homo sapien
aaagcagttatacagcatataactt

SEQ ID NO: 1456531 - DNA, 25 bp, Homo sapien
ctaaaaccaaagcagttatacagca

SEQ ID NO: 1456532 - DNA, 25 bp, Homo sapien
aaaaccaaagcagttatacagcata

SEQ ID NO: 1456533 - DNA, 25 bp, Homo sapien
gccagatcccctccttcacaatatt

SEQ ID NO: 1456534 - DNA, 25 bp, Homo sapien
aattacactagccagatcccctcct

SEQ ID NO: 1456535 - DNA, 25 bp, Homo sapien
tagccagatcccctccttcacaata

SEQ ID NO: 1456536 - DNA, 25 bp, Homo sapien
tacactagccagatcccctccttca

SEQ ID NO: 1456537 - DNA, 25 bp, Homo sapien
caatggtgtacaacacttcatagtc

SEQ ID NO: 1456538 - DNA, 25 bp, Homo sapien
acacttcatagtcctcagcccggga

SEQ ID NO: 1456539 - DNA, 25 bp, Homo sapien
ccgtaggagcctgtgccaatggtgt

SEQ ID NO: 1456540 - DNA, 25 bp, Homo sapien
ggatcttctggcagcggccgtagga

SEQ ID NO: 1456541 - DNA, 25 bp, Homo sapien
agtcgcgctgcctcacgcaggttgc

SEQ ID NO: 1456542 - DNA, 25 bp, Homo sapien
tgcctcacgcaggttgcgccgccaa

SEQ ID NO: 1456543 - DNA, 25 bp, Homo sapien
gtcgcgctgcctcacgcaggttgcg

SEQ ID NO: 1456544 - DNA, 25 bp, Homo sapien
ctcacgcaggttgcgccgccaagtg

SEQ ID NO: 1456545 - DNA, 25 bp, Homo sapien
gagaagcccccgagcagcactgacc

SEQ ID NO: 1456546 - DNA, 25 bp, Homo sapien
caggttccagtaccctgaacctggg

SEQ ID NO: 1456547 - DNA, 25 bp, Homo sapien
ggcacacgcattcctcgctcaggtt

SEQ ID NO: 1456548 - DNA, 25 bp, Homo sapien
actctggcccctcacactacctact

SEQ ID NO: 1456549 - DNA, 25 bp, Homo sapien
gggtcacgttgaggatatgctgaga

SEQ ID NO: 1456550 - DNA, 25 bp, Homo sapien
cagccccatgtttaccagggaagga

SEQ ID NO: 1456551 - DNA, 25 bp, Homo sapien
aacagccccatgtttaccagggaag

SEQ ID NO: 1456552 - DNA, 25 bp, Homo sapien
gaacagccccatgtttaccagggaa

SEQ ID NO: 1456553 - DNA, 25 bp, Homo sapien
ggaaggaggacttagaggcctccat

SEQ ID NO: 1456554 - DNA, 25 bp, Homo sapien
tgcatttgtccagaatactgtccaa

SEQ ID NO: 1456555 - DNA, 25 bp, Homo sapien
catttgtccagaatactgtccaacc

SEQ ID NO: 1456556 - DNA, 25 bp, Homo sapien
tgtccagaatactgtccaacccact

SEQ ID NO: 1456557 - DNA, 25 bp, Homo sapien
gattgcatttgtccagaatactgtc

SEQ ID NO: 1456558 - DNA, 25 bp, Homo sapien
ctgcaggggctctgatcgaccttgg

SEQ ID NO: 1456559 - DNA, 25 bp, Homo sapien
tctggaccatccagaagccacgaga

SEQ ID NO: 1456560 - DNA, 25 bp, Homo sapien
ggtctggctcacttatctccaagaa

SEQ ID NO: 1456561 - DNA, 25 bp, Homo sapien
cacgagatggtaacagtgcttcctc

SEQ ID NO: 1456562 - DNA, 25 bp, Homo sapien
gaagtccattccgagtccttgggca

SEQ ID NO: 1456563 - DNA, 25 bp, Homo sapien
tgtaattagacgatgaacttttctg

SEQ ID NO: 1456564 - DNA, 25 bp, Homo sapien
gcaggaagcaggtgtaattagacga

SEQ ID NO: 1456565 - DNA, 25 bp, Homo sapien
cattccgagtccttgggcatctacc

SEQ ID NO: 1456566 - DNA, 25 bp, Homo sapien
agtgtctgttggtcattcttgtgcc

SEQ ID NO: 1456567 - DNA, 25 bp, Homo sapien
ctgtctaaactggagtgtctgttgg

SEQ ID NO: 1456568 - DNA, 25 bp, Homo sapien
cttctagggcactgtctaaactgga

SEQ ID NO: 1456569 - DNA, 25 bp, Homo sapien
catggttttgcttctactccctcct

SEQ ID NO: 1456570 - DNA, 25 bp, Homo sapien
tgaatgcagtcaaaggtgtcaaggg

SEQ ID NO: 1456571 - DNA, 25 bp, Homo sapien
ccctgatgtctaaattgccaattgg

SEQ ID NO: 1456572 - DNA, 25 bp, Homo sapien
ccgccatggagccacgtgattggaa

SEQ ID NO: 1456573 - DNA, 25 bp, Homo sapien
gaagagggccctactagagcatggt

SEQ ID NO: 1456574 - DNA, 25 bp, Homo sapien
ctcagtttctaagccctgagattcc

SEQ ID NO: 1456575 - DNA, 25 bp, Homo sapien
agtttctaagccctgagattccaca

SEQ ID NO: 1456576 - DNA, 25 bp, Homo sapien
tctcagtttctaagccctgagattc

SEQ ID NO: 1456577 - DNA, 25 bp, Homo sapien
cagtttctaagccctgagattccac

SEQ ID NO: 1456578 - DNA, 25 bp, Homo sapien
agacagagtctgaggcaatgcttcc

SEQ ID NO: 1456579 - DNA, 25 bp, Homo sapien
caaggcctaataaagaggaagacag

SEQ ID NO: 1456580 - DNA, 25 bp, Homo sapien
ccaggtttctgcatccctcagacat

SEQ ID NO: 1456581 - DNA, 25 bp, Homo sapien
tgggctggtgaggtaaccctgctgt

SEQ ID NO: 1456582 - DNA, 25 bp, Homo sapien
ccaatgacaatttcaattattattc

SEQ ID NO: 1456583 - DNA, 25 bp, Homo sapien
tgtcaattctcaagatataaacttc

SEQ ID NO: 1456584 - DNA, 25 bp, Homo sapien
ttctcaagatataaacttctgagac

SEQ ID NO: 1456585 - DNA, 25 bp, Homo sapien
actggaaggtaaagtgtcaattctc

SEQ ID NO: 1456586 - DNA, 25 bp, Homo sapien
ggtaaagtgtcaattctcaagatat

SEQ ID NO: 1456587 - DNA, 25 bp, Homo sapien
caactcatgaggaatagggctggtc

SEQ ID NO: 1456588 - DNA, 25 bp, Homo sapien
caaaagttcgctgtgtaggactgac

SEQ ID NO: 1456589 - DNA, 25 bp, Homo sapien
ccctggccagggtcagtgataggaa

SEQ ID NO: 1456590 - DNA, 25 bp, Homo sapien
tactgattcccaagacccagtggtc

SEQ ID NO: 1456591 - DNA, 25 bp, Homo sapien
gtttctgaagttaagggtgacctgc

SEQ ID NO: 1456592 - DNA, 25 bp, Homo sapien
tctctagtgcaagcaggagaactcc

SEQ ID NO: 1456593 - DNA, 25 bp, Homo sapien
tctattggcatttgtcaccctggag

SEQ ID NO: 1456594 - DNA, 25 bp, Homo sapien
gattaaccaggtccaactagttcag

SEQ ID NO: 1456595 - DNA, 25 bp, Homo sapien
gaaagtctgaactcctacggtgacc

SEQ ID NO: 1456596 - DNA, 25 bp, Homo sapien
gcacagtgatggcaaaagtggccct

SEQ ID NO: 1456597 - DNA, 25 bp, Homo sapien
gcaatagaggcatcacgtcagggtg

SEQ ID NO: 1456598 - DNA, 25 bp, Homo sapien
ggaaagagttcttcacgaggtgcca

SEQ ID NO: 1456599 - DNA, 25 bp, Homo sapien
gtaaaaatactgaatgatgttgtac

SEQ ID NO: 1456600 - DNA, 25 bp, Homo sapien
tggtaaaaatactgaatgatgttgt

SEQ ID NO: 1456601 - DNA, 25 bp, Homo sapien
aaaacaggcaatggtaaaaatactg

SEQ ID NO: 1456602 - DNA, 25 bp, Homo sapien
aatggtaaaaatactgaatgatgtt

SEQ ID NO: 1456603 - DNA, 25 bp, Homo sapien
tatgagaaatatccacaagttgctg

SEQ ID NO: 1456604 - DNA, 25 bp, Homo sapien
cacatatagcctgacaaaaatgcaa

SEQ ID NO: 1456605 - DNA, 25 bp, Homo sapien
aagactgtatgagaaatatccacaa

SEQ ID NO: 1456606 - DNA, 25 bp, Homo sapien
aaatatccacaagttgctgagggtc

SEQ ID NO: 1456607 - DNA, 25 bp, Homo sapien
ccaagtggtaaggtcatcagtctcc

SEQ ID NO: 1456608 - DNA, 25 bp, Homo sapien
ctgatagagccaagtggtaaggtca

SEQ ID NO: 1456609 - DNA, 25 bp, Homo sapien
catcagtctccaggggtacatcttt

SEQ ID NO: 1456610 - DNA, 25 bp, Homo sapien
tccaggggtacatctttaattggaa

SEQ ID NO: 1456611 - DNA, 25 bp, Homo sapien
tgtatagtctggtcctccatgtcac

SEQ ID NO: 1456612 - DNA, 25 bp, Homo sapien
ccccatgtactattaggaattctag

SEQ ID NO: 1456613 - DNA, 25 bp, Homo sapien
tctttcaagagttcaggtccattag

SEQ ID NO: 1456614 - DNA, 25 bp, Homo sapien
taaagagctcctattgttctcagtc

SEQ ID NO: 1456615 - DNA, 25 bp, Homo sapien
tacaaactatcacgccaggtgcggt

SEQ ID NO: 1456616 - DNA, 25 bp, Homo sapien
cagtgtggcctagtgattaagcata

SEQ ID NO: 1456617 - DNA, 25 bp, Homo sapien
aaaaaagctattgggcagactgcct

SEQ ID NO: 1456618 - DNA, 25 bp, Homo sapien
accacttgccagttgcgtgaccttg

SEQ ID NO: 1456619 - DNA, 25 bp, Homo sapien
atataatgctaggcttacatctcct

SEQ ID NO: 1456620 - DNA, 25 bp, Homo sapien
tataatgctaggcttacatctcctc

SEQ ID NO: 1456621 - DNA, 25 bp, Homo sapien
catataatgctaggcttacatctcc

SEQ ID NO: 1456622 - DNA, 25 bp, Homo sapien
aatgggctcataaccaattagggcc

SEQ ID NO: 1456623 - DNA, 25 bp, Homo sapien
attaaaaacccatgtcagacctgtc

SEQ ID NO: 1456624 - DNA, 25 bp, Homo sapien
gcaggaatcctctcaccaagggaaa

SEQ ID NO: 1456625 - DNA, 25 bp, Homo sapien
caattctggtagtcttggcaccctt

SEQ ID NO: 1456626 - DNA, 25 bp, Homo sapien
tacattgaataccagtcctcttgaa

SEQ ID NO: 1456627 - DNA, 25 bp, Homo sapien
actccaaaatgtgagctgacaaaca

SEQ ID NO: 1456628 - DNA, 25 bp, Homo sapien
tgactaatcccctaatatggcaaag

SEQ ID NO: 1456629 - DNA, 25 bp, Homo sapien
tattactctgattggtcaccatagg

SEQ ID NO: 1456630 - DNA, 25 bp, Homo sapien
ttcacatggaaacatagtaaggcta

SEQ ID NO: 1456631 - DNA, 25 bp, Homo sapien
tggaaacatagtaaggctaaaaggc

SEQ ID NO: 1456632 - DNA, 25 bp, Homo sapien
tgtccttggtagttgccacgggttg

SEQ ID NO: 1456633 - DNA, 25 bp, Homo sapien
cgggttgaggtctttcacatggaaa

SEQ ID NO: 1456634 - DNA, 25 bp, Homo sapien
cactggaggccttttgatttgctgt

SEQ ID NO: 1456635 - DNA, 25 bp, Homo sapien
tctataggttcagctttgggataag

SEQ ID NO: 1456636 - DNA, 25 bp, Homo sapien
tgaatatctataggttcagctttgg

SEQ ID NO: 1456637 - DNA, 25 bp, Homo sapien
aatatctataggttcagctttggga

SEQ ID NO: 1456638 - DNA, 25 bp, Homo sapien
ttttgttgccccagaccttggcaga

SEQ ID NO: 1456639 - DNA, 25 bp, Homo sapien
tgcctgacttgtttctcgcctcttc

SEQ ID NO: 1456640 - DNA, 25 bp, Homo sapien
ttttcttggcaaatgcctgacttgt

SEQ ID NO: 1456641 - DNA, 25 bp, Homo sapien
caaaacaatccattttcgatctctg

SEQ ID NO: 1456642 - DNA, 25 bp, Homo sapien
taagatagctattaagttctcaaga

SEQ ID NO: 1456643 - DNA, 25 bp, Homo sapien
taagacattttgttagtcagtttgc

SEQ ID NO: 1456644 - DNA, 25 bp, Homo sapien
cagccaacaaaattacagaaactcc

SEQ ID NO: 1456645 - DNA, 25 bp, Homo sapien
gatcaaatgtatcccaaatgcaaaa

SEQ ID NO: 1456646 - DNA, 25 bp, Homo sapien
gcccctcttcttgatgcctgatgat

SEQ ID NO: 1456647 - DNA, 25 bp, Homo sapien
ggatccctgagactgctaagctttc

SEQ ID NO: 1456648 - DNA, 25 bp, Homo sapien
taattgttggttccgctgccttctc

SEQ ID NO: 1456649 - DNA, 25 bp, Homo sapien
aaatgaggtaaggtgctcagctagc

SEQ ID NO: 1456650 - DNA, 25 bp, Homo sapien
aaaaatatgatccatcaaccacatc

SEQ ID NO: 1456651 - DNA, 25 bp, Homo sapien
gctcaacttagtgcagactgcctat

SEQ ID NO: 1456652 - DNA, 25 bp, Homo sapien
gcagactgcctatcagcatagagaa

SEQ ID NO: 1456653 - DNA, 25 bp, Homo sapien
ctagttgttcactgctcccaggagg

SEQ ID NO: 1456654 - DNA, 25 bp, Homo sapien
ggttcacccttcttgtgtgacctag

SEQ ID NO: 1456655 - DNA, 25 bp, Homo sapien
tcaccctgttgtcctggatggcctc

SEQ ID NO: 1456656 - DNA, 25 bp, Homo sapien
ttcaccctgttgtcctggatggcct

SEQ ID NO: 1456657 - DNA, 25 bp, Homo sapien
caccctgttgtcctggatggcctcg

SEQ ID NO: 1456658 - DNA, 25 bp, Homo sapien
atcagtgtgcacacatctcctgttg

SEQ ID NO: 1456659 - DNA, 25 bp, Homo sapien
tcagtgtgcacacatctcctgttgc

SEQ ID NO: 1456660 - DNA, 25 bp, Homo sapien
gattatgccttgctattccaggacc

SEQ ID NO: 1456661 - DNA, 25 bp, Homo sapien
tcctgaggtagcaataaggtcgtgt

SEQ ID NO: 1456662 - DNA, 25 bp, Homo sapien
taaaagagccctatgcctactgtgt

SEQ ID NO: 1456663 - DNA, 25 bp, Homo sapien
tattatgcccgcaagctgatgcaac

SEQ ID NO: 1456664 - DNA, 25 bp, Homo sapien
caaacttacatagttaggaagtagg

SEQ ID NO: 1456665 - DNA, 25 bp, Homo sapien
tatcatccccaatatgcaaatgagg

SEQ ID NO: 1456666 - DNA, 25 bp, Homo sapien
gccatgcactagtacttagtaatag

SEQ ID NO: 1456667 - DNA, 25 bp, Homo sapien
cattgtacacactaggaaatcatgg

SEQ ID NO: 1456668 - DNA, 25 bp, Homo sapien
tgtgaagggctctatgttatcccca

SEQ ID NO: 1456669 - DNA, 25 bp, Homo sapien
tagggaatttgatcacctcaagagg

SEQ ID NO: 1456670 - DNA, 25 bp, Homo sapien
tccccacttccagcttgaaacaagg

SEQ ID NO: 1456671 - DNA, 25 bp, Homo sapien
ccaataagattaccctacagtgagg

SEQ ID NO: 1456672 - DNA, 25 bp, Homo sapien
cagcattaagagaacaaactaccca

SEQ ID NO: 1456673 - DNA, 25 bp, Homo sapien
aagtatatagaaaactcacgcctgt

SEQ ID NO: 1456674 - DNA, 25 bp, Homo sapien
tgggcaaagtactcttagacatgac

SEQ ID NO: 1456675 - DNA, 25 bp, Homo sapien
taagaaaagacttggacacttcacc

SEQ ID NO: 1456676 - DNA, 25 bp, Homo sapien
tgagcatcaggtaacaaatcagacc

SEQ ID NO: 1456677 - DNA, 25 bp, Homo sapien
tactctgtgagcatcaggtaacaaa

SEQ ID NO: 1456678 - DNA, 25 bp, Homo sapien
tctgtgagcatcaggtaacaaatca

SEQ ID NO: 1456679 - DNA, 25 bp, Homo sapien
agtactctgtgagcatcaggtaaca

SEQ ID NO: 1456680 - DNA, 25 bp, Homo sapien
tcaacgtgagatatctgtacagcac

SEQ ID NO: 1456681 - DNA, 25 bp, Homo sapien
tgtacagcacttcctactaaagaaa

SEQ ID NO: 1456682 - DNA, 25 bp, Homo sapien
caaataaagcatgcagaagtggatc

SEQ ID NO: 1456683 - DNA, 25 bp, Homo sapien
taccaatcatcacttaaactccggg

SEQ ID NO: 1456684 - DNA, 25 bp, Homo sapien
cagctctgagaatgcaaactaaagt

SEQ ID NO: 1456685 - DNA, 25 bp, Homo sapien
taagttcttgggcttactggcctca

SEQ ID NO: 1456686 - DNA, 25 bp, Homo sapien
cattactactttagtagcaagccgg

SEQ ID NO: 1456687 - DNA, 25 bp, Homo sapien
tgtaacttaaagtcagaaacagacc

SEQ ID NO: 1456688 - DNA, 25 bp, Homo sapien
catgaacatacttaatctgctgagc

SEQ ID NO: 1456689 - DNA, 25 bp, Homo sapien
caacataagtcctcatcagcagagc

SEQ ID NO: 1456690 - DNA, 25 bp, Homo sapien
ggtttcctcataagtggtttctcaa

SEQ ID NO: 1456691 - DNA, 25 bp, Homo sapien
tctgctgagcagaattcctttggca

SEQ ID NO: 1456692 - DNA, 25 bp, Homo sapien
cttctcttgcgtgtgtggataaaat

SEQ ID NO: 1456693 - DNA, 25 bp, Homo sapien
ttctcttgcgtgtgtggataaaatg

SEQ ID NO: 1456694 - DNA, 25 bp, Homo sapien
taaagaaaagtgttctcactcttac

SEQ ID NO: 1456695 - DNA, 25 bp, Homo sapien
ttaaagaaaagtgttctcactctta

SEQ ID NO: 1456696 - DNA, 25 bp, Homo sapien
tgttgacgaccatgaaggcaaacct

SEQ ID NO: 1456697 - DNA, 25 bp, Homo sapien
cgcttactgtccagcactcgaaggg

SEQ ID NO: 1456698 - DNA, 25 bp, Homo sapien
gattccttcgatataccagaaccgc

SEQ ID NO: 1456699 - DNA, 25 bp, Homo sapien
gtatatccagcataccatccccagg

SEQ ID NO: 1456700 - DNA, 25 bp, Homo sapien
gagctgttcaccgaggcacgaagta

SEQ ID NO: 1456701 - DNA, 25 bp, Homo sapien
tgagatttccgaccagagggcaagg

SEQ ID NO: 1456702 - DNA, 25 bp, Homo sapien
attcagtaatcggtggccgtccccg

SEQ ID NO: 1456703 - DNA, 25 bp, Homo sapien
cacaagtgacatgaccgaaacaggg

SEQ ID NO: 1456704 - DNA, 25 bp, Homo sapien
tggcgccctactcccctcgcggctg

SEQ ID NO: 1456705 - DNA, 25 bp, Homo sapien
cccgccgaggggtcgcggtcatgga

SEQ ID NO: 1456706 - DNA, 25 bp, Homo sapien
cggtggcggcccaagcggcccgagg

SEQ ID NO: 1456707 - DNA, 25 bp, Homo sapien
gtcgcggtcatggacgcggtggcgg

SEQ ID NO: 1456708 - DNA, 25 bp, Homo sapien
cgctccggctgtggcgcggcccgcg

SEQ ID NO: 1456709 - DNA, 25 bp, Homo sapien
agaggagccggaagaatgcatggcc

SEQ ID NO: 1456710 - DNA, 25 bp, Homo sapien
ggaagaatgcatggccggcggcggg

SEQ ID NO: 1456711 - DNA, 25 bp, Homo sapien
cggcgccgagactcggtccccaagg

SEQ ID NO: 1456712 - DNA, 25 bp, Homo sapien
tatccaagccttctgtcgtatagct

SEQ ID NO: 1456713 - DNA, 25 bp, Homo sapien
tgtcgtatagcttggctctttccat

SEQ ID NO: 1456714 - DNA, 25 bp, Homo sapien
cctcttatccaagccttctgtcgta

SEQ ID NO: 1456715 - DNA, 25 bp, Homo sapien
ccttctgtcgtatagcttggctctt

SEQ ID NO: 1456716 - DNA, 25 bp, Homo sapien
catgtcaggaatcttagttactaaa

SEQ ID NO: 1456717 - DNA, 25 bp, Homo sapien
ttgataacatagacaccctctatta

SEQ ID NO: 1456718 - DNA, 25 bp, Homo sapien
gaatgaagatcctgtacatgtcagg

SEQ ID NO: 1456719 - DNA, 25 bp, Homo sapien
caatagcagtaacaatgttgataac

SEQ ID NO: 1456720 - DNA, 25 bp, Homo sapien
ctatagtttaatttggctggataac

SEQ ID NO: 1456721 - DNA, 25 bp, Homo sapien
tatagtttaatttggctggataacc

SEQ ID NO: 1456722 - DNA, 25 bp, Homo sapien
tcctattatctggtgtttgcaacca

SEQ ID NO: 1456723 - DNA, 25 bp, Homo sapien
aactgccgatcagctacaggtccag

SEQ ID NO: 1456724 - DNA, 25 bp, Homo sapien
gcatcagcagcgcttttcctattat

SEQ ID NO: 1456725 - DNA, 25 bp, Homo sapien
gaagcgcaatctgcaaactgccgat

SEQ ID NO: 1456726 - DNA, 25 bp, Homo sapien
tcaaagacttcccaggaagatctgc

SEQ ID NO: 1456727 - DNA, 25 bp, Homo sapien
cccatcaaagacttcccaggaagat

SEQ ID NO: 1456728 - DNA, 25 bp, Homo sapien
aattcccatcaaagacttcccagga

SEQ ID NO: 1456729 - DNA, 25 bp, Homo sapien
ttcccatcaaagacttcccaggaag

SEQ ID NO: 1456730 - DNA, 25 bp, Homo sapien
cccacagcgagggagtcatggaaac

SEQ ID NO: 1456731 - DNA, 25 bp, Homo sapien
ctccaaagcccacagcgagggagtc

SEQ ID NO: 1456732 - DNA, 25 bp, Homo sapien
aaagcccacagcgagggagtcatgg

SEQ ID NO: 1456733 - DNA, 25 bp, Homo sapien
ccaaagcccacagcgagggagtcat

SEQ ID NO: 1456734 - DNA, 25 bp, Homo sapien
ccctggcattgtgtggacagatgct

SEQ ID NO: 1456735 - DNA, 25 bp, Homo sapien
tgtgggtcaaggtctccaactgctg

SEQ ID NO: 1456736 - DNA, 25 bp, Homo sapien
tggcccgacactgttggagccttgc

SEQ ID NO: 1456737 - DNA, 25 bp, Homo sapien
tgtattcccctgagaagtttggcct

SEQ ID NO: 1456738 - DNA, 25 bp, Homo sapien
gctgaaaatggagccccggaatctg

SEQ ID NO: 1456739 - DNA, 25 bp, Homo sapien
tccaagtccactaagggaatttgct

SEQ ID NO: 1456740 - DNA, 25 bp, Homo sapien
ctgatgacagctaggtttgggaacc

SEQ ID NO: 1456741 - DNA, 25 bp, Homo sapien
tatgatcttagccacttgttcccaa

SEQ ID NO: 1456742 - DNA, 25 bp, Homo sapien
tttgaattaatgttgactttgaaga

SEQ ID NO: 1456743 - DNA, 25 bp, Homo sapien
ctttgaattaatgttgactttgaag

SEQ ID NO: 1456744 - DNA, 25 bp, Homo sapien
cctttgaattaatgttgactttgaa

SEQ ID NO: 1456745 - DNA, 25 bp, Homo sapien
tagtgactggtcagaacctcccaat

SEQ ID NO: 1456746 - DNA, 25 bp, Homo sapien
gctttaccttaggagctgcatccgg

SEQ ID NO: 1456747 - DNA, 25 bp, Homo sapien
cctaggtctaagtcaggcagcaaat

SEQ ID NO: 1456748 - DNA, 25 bp, Homo sapien
gaaggctggatgttgcacggaacac

SEQ ID NO: 1456749 - DNA, 25 bp, Homo sapien
acgcccagctgtcagacaaaatttt

SEQ ID NO: 1456750 - DNA, 25 bp, Homo sapien
cacgcccagctgtcagacaaaattt

SEQ ID NO: 1456751 - DNA, 25 bp, Homo sapien
ctcttgagagtctgcagtgcattca

SEQ ID NO: 1456752 - DNA, 25 bp, Homo sapien
tacttattccatatgaaaaaccaaa

SEQ ID NO: 1456753 - DNA, 25 bp, Homo sapien
atctcttgagagtctgcagtgcatt

SEQ ID NO: 1456754 - DNA, 25 bp, Homo sapien
tctcttgagagtctgcagtgcattc

SEQ ID NO: 1456755 - DNA, 25 bp, Homo sapien
ttccaaggatagcaaagttcaacag

SEQ ID NO: 1456756 - DNA, 25 bp, Homo sapien
caaatatggtagttctgggaccagt

SEQ ID NO: 1456757 - DNA, 25 bp, Homo sapien
gctgttgtaagcgaatttgctggga

SEQ ID NO: 1456758 - DNA, 25 bp, Homo sapien
gggaccagtcttccatactatacca

SEQ ID NO: 1456759 - DNA, 25 bp, Homo sapien
attgttaactaacaacaatggctaa

SEQ ID NO: 1456760 - DNA, 25 bp, Homo sapien
tactatgagttaggccctgttctaa

SEQ ID NO: 1456761 - DNA, 25 bp, Homo sapien
caattgttaactaacaacaatggct

SEQ ID NO: 1456762 - DNA, 25 bp, Homo sapien
aacaattgttaactaacaacaatgg

SEQ ID NO: 1456763 - DNA, 25 bp, Homo sapien
tagtaatgaactgacgtcaccaacc

SEQ ID NO: 1456764 - DNA, 25 bp, Homo sapien
taagcactgttttgttcagactgga

SEQ ID NO: 1456765 - DNA, 25 bp, Homo sapien
gaataaaacctgctgacgtactctt

SEQ ID NO: 1456766 - DNA, 25 bp, Homo sapien
tgagtagaatgagctcccagagccg

SEQ ID NO: 1456767 - DNA, 25 bp, Homo sapien
gacagacagactgaattttgcggaa

SEQ ID NO: 1456768 - DNA, 25 bp, Homo sapien
cagctgctggttattctggacagca

SEQ ID NO: 1456769 - DNA, 25 bp, Homo sapien
tccagatttactctgcagtgtggaa

SEQ ID NO: 1456770 - DNA, 25 bp, Homo sapien
gagtcctggtttagatccgtgctga

SEQ ID NO: 1456771 - DNA, 25 bp, Homo sapien
gatgctggtagactgtagtttctgg

SEQ ID NO: 1456772 - DNA, 25 bp, Homo sapien
gactgtagtttctggaaaaaatatc

SEQ ID NO: 1456773 - DNA, 25 bp, Homo sapien
cttgatgctggtagactgtagtttc

SEQ ID NO: 1456774 - DNA, 25 bp, Homo sapien
gctggtagactgtagtttctggaaa

SEQ ID NO: 1456775 - DNA, 25 bp, Homo sapien
agaaaggggaactttcagcaaagca

SEQ ID NO: 1456776 - DNA, 25 bp, Homo sapien
caaagcaatgatggcattgcagagg

SEQ ID NO: 1456777 - DNA, 25 bp, Homo sapien
ctttcagcaaagcaatgatggcatt

SEQ ID NO: 1456778 - DNA, 25 bp, Homo sapien
cagcaaagcaatgatggcattgcag

SEQ ID NO: 1456779 - DNA, 25 bp, Homo sapien
tatttgcagagacatccacctttgg

SEQ ID NO: 1456780 - DNA, 25 bp, Homo sapien
cacctttggtggacctctgatgcca

SEQ ID NO: 1456781 - DNA, 25 bp, Homo sapien
tcagaggaccacaagggacttcagg

SEQ ID NO: 1456782 - DNA, 25 bp, Homo sapien
ctttgaagcgtggactcagaggacc

SEQ ID NO: 1456783 - DNA, 25 bp, Homo sapien
aggttaatttgttgaactcacacag

SEQ ID NO: 1456784 - DNA, 25 bp, Homo sapien
aatttgttgaactcacacagtaagt

SEQ ID NO: 1456785 - DNA, 25 bp, Homo sapien
gttaatttgttgaactcacacagta

SEQ ID NO: 1456786 - DNA, 25 bp, Homo sapien
taatttgttgaactcacacagtaag

SEQ ID NO: 1456787 - DNA, 25 bp, Homo sapien
gggtatatttccgattgagtgattc

SEQ ID NO: 1456788 - DNA, 25 bp, Homo sapien
tatatttccgattgagtgattctac

SEQ ID NO: 1456789 - DNA, 25 bp, Homo sapien
aaacaggggtatatttccgattgag

SEQ ID NO: 1456790 - DNA, 25 bp, Homo sapien
catataagaaacaggggtatatttc

SEQ ID NO: 1456791 - DNA, 25 bp, Homo sapien
tacagacatcattcttctttcatat

SEQ ID NO: 1456792 - DNA, 25 bp, Homo sapien
catattcactatcagcatgggctgt

SEQ ID NO: 1456793 - DNA, 25 bp, Homo sapien
tatacagacatcattcttctttcat

SEQ ID NO: 1456794 - DNA, 25 bp, Homo sapien
atgggctgttccagtagatccatat

SEQ ID NO: 1456795 - DNA, 25 bp, Homo sapien
ccatagtactagctccaaaatagtc

SEQ ID NO: 1456796 - DNA, 25 bp, Homo sapien
tagaaagtgttctgtaacgccaact

SEQ ID NO: 1456797 - DNA, 25 bp, Homo sapien
gctcatattcaaagaatgtcttccc

SEQ ID NO: 1456798 - DNA, 25 bp, Homo sapien
caaaatagtcttctgatgattaggt

SEQ ID NO: 1456799 - DNA, 25 bp, Homo sapien
gatatcagtaaacagctctgctgct

SEQ ID NO: 1456800 - DNA, 25 bp, Homo sapien
tctattgcatgagatatcagtaaac

SEQ ID NO: 1456801 - DNA, 25 bp, Homo sapien
atatcagtaaacagctctgctgctg

SEQ ID NO: 1456802 - DNA, 25 bp, Homo sapien
gggcttctattgcatgagatatcag

SEQ ID NO: 1456803 - DNA, 25 bp, Homo sapien
caagaagggtacttcggaggctact

SEQ ID NO: 1456804 - DNA, 25 bp, Homo sapien
tctgttccaagaagggtacttcgga

SEQ ID NO: 1456805 - DNA, 25 bp, Homo sapien
taagggatatacattgtctataata

SEQ ID NO: 1456806 - DNA, 25 bp, Homo sapien
taatagtgatcctcagactctgttc

SEQ ID NO: 1456807 - DNA, 25 bp, Homo sapien
ttaaaagtgacgaccaggctgggca

SEQ ID NO: 1456808 - DNA, 25 bp, Homo sapien
ggaaatcaagtgataggccccgtga

SEQ ID NO: 1456809 - DNA, 25 bp, Homo sapien
taatctagtgctcaagaggtctggc

SEQ ID NO: 1456810 - DNA, 25 bp, Homo sapien
gcagagggcccatagcattcactgg

SEQ ID NO: 1456811 - DNA, 25 bp, Homo sapien
aaagaacaagaagtactagggcaag

SEQ ID NO: 1456812 - DNA, 25 bp, Homo sapien
atctgaggtagtccgtatttaaaag

SEQ ID NO: 1456813 - DNA, 25 bp, Homo sapien
catatctgaggtagtccgtatttaa

SEQ ID NO: 1456814 - DNA, 25 bp, Homo sapien
aagtactagggcaagcttgggatac

SEQ ID NO: 1456815 - DNA, 25 bp, Homo sapien
gaagcaaggcttcgaaattcttcca

SEQ ID NO: 1456816 - DNA, 25 bp, Homo sapien
gcctggtaaagatctccatatcgag

SEQ ID NO: 1456817 - DNA, 25 bp, Homo sapien
tctccatatcgagaagcaaggcttc

SEQ ID NO: 1456818 - DNA, 25 bp, Homo sapien
cagcatcaaaagatgcctggtaaag

SEQ ID NO: 1456819 - DNA, 25 bp, Homo sapien
tgcaggtggtgggcttgtcttcagg

SEQ ID NO: 1456820 - DNA, 25 bp, Homo sapien
tttcctaaggtcatggcaattgttg

SEQ ID NO: 1456821 - DNA, 25 bp, Homo sapien
caattgttgtggcaattgcaggtgg

SEQ ID NO: 1456822 - DNA, 25 bp, Homo sapien
ggaggtcatttcctaaggtcatggc

SEQ ID NO: 1456823 - DNA, 25 bp, Homo sapien
cagataagttgagagaaggcttgta

SEQ ID NO: 1456824 - DNA, 25 bp, Homo sapien
taaaggattcagtggtgtactagct

SEQ ID NO: 1456825 - DNA, 25 bp, Homo sapien
ttcacactgaaagcttaaaggattc

SEQ ID NO: 1456826 - DNA, 25 bp, Homo sapien
ggtcaatcctgagttttacaaattc

SEQ ID NO: 1456827 - DNA, 25 bp, Homo sapien
tttatcagtttgtggtcaagtgcag

SEQ ID NO: 1456828 - DNA, 25 bp, Homo sapien
tgtatgtacaaccactattcaaagg

SEQ ID NO: 1456829 - DNA, 25 bp, Homo sapien
tcaagaagataatcacggccaggtg

SEQ ID NO: 1456830 - DNA, 25 bp, Homo sapien
tcaagtgcagtagttctctaaaaac

SEQ ID NO: 1456831 - DNA, 25 bp, Homo sapien
ggtatcattctatcacccaggccgg

SEQ ID NO: 1456832 - DNA, 25 bp, Homo sapien
tagccgggactaagggtgcgtacca

SEQ ID NO: 1456833 - DNA, 25 bp, Homo sapien
ggctcaaattatccccccacctgag

SEQ ID NO: 1456834 - DNA, 25 bp, Homo sapien
ccacctgagtttcccaagtagccgg

SEQ ID NO: 1456835 - DNA, 25 bp, Homo sapien
taattttcctcttgcaacccagtga

SEQ ID NO: 1456836 - DNA, 25 bp, Homo sapien
gcaatgcaagaaagtgctgaactat

SEQ ID NO: 1456837 - DNA, 25 bp, Homo sapien
aaactccttcaaactatttagccag

SEQ ID NO: 1456838 - DNA, 25 bp, Homo sapien
aatgttctgaggcaacctgagtcag

SEQ ID NO: 1456839 - DNA, 25 bp, Homo sapien
cttaattactgccttactttccaca

SEQ ID NO: 1456840 - DNA, 25 bp, Homo sapien
cattggagacactttcaagctgctg

SEQ ID NO: 1456841 - DNA, 25 bp, Homo sapien
tggaagcctgtctggcaatacggta

SEQ ID NO: 1456842 - DNA, 25 bp, Homo sapien
cggtatacagtccatccattggaga

SEQ ID NO: 1456843 - DNA, 25 bp, Homo sapien
aaagtaattcccactagaccagatc

SEQ ID NO: 1456844 - DNA, 25 bp, Homo sapien
gatcctagtcattcaaaggagattc

SEQ ID NO: 1456845 - DNA, 25 bp, Homo sapien
taattcccactagaccagatcctag

SEQ ID NO: 1456846 - DNA, 25 bp, Homo sapien
cactagaccagatcctagtcattca

SEQ ID NO: 1456847 - DNA, 25 bp, Homo sapien
tggcacatcaaaatccgggcagcgt

SEQ ID NO: 1456848 - DNA, 25 bp, Homo sapien
tctcaactactgactggctaagatg

SEQ ID NO: 1456849 - DNA, 25 bp, Homo sapien
tgtgcaattgagtcaacaaggtctc

SEQ ID NO: 1456850 - DNA, 25 bp, Homo sapien
cagcaccggcagttgcatggcaatg

SEQ ID NO: 1456851 - DNA, 25 bp, Homo sapien
ctttaaagtggcctgagcacctgga

SEQ ID NO: 1456852 - DNA, 25 bp, Homo sapien
tcttgactacaaagtaccagtaggg

SEQ ID NO: 1456853 - DNA, 25 bp, Homo sapien
gagcacctggactatcatcttgact

SEQ ID NO: 1456854 - DNA, 25 bp, Homo sapien
tagggattccaggccaaagacagca

SEQ ID NO: 1456855 - DNA, 25 bp, Homo sapien
gctgcaatgcccctgttattatggt

SEQ ID NO: 1456856 - DNA, 25 bp, Homo sapien
aaacagttatattagttaggactct

SEQ ID NO: 1456857 - DNA, 25 bp, Homo sapien
tggtaacagcactcttgggctaatt

SEQ ID NO: 1456858 - DNA, 25 bp, Homo sapien
taggactctaactccatgagctgca

SEQ ID NO: 1456859 - DNA, 25 bp, Homo sapien
tgaccccaagtgaggccaataggac

SEQ ID NO: 1456860 - DNA, 25 bp, Homo sapien
aaggtcatggttttaagctactcgg

SEQ ID NO: 1456861 - DNA, 25 bp, Homo sapien
taaataagaaaaacgccagggagca

SEQ ID NO: 1456862 - DNA, 25 bp, Homo sapien
ttacagggtaccagacatagcaaac

SEQ ID NO: 1456863 - DNA, 25 bp, Homo sapien
agtaatgtttgatggcgatggtccc

SEQ ID NO: 1456864 - DNA, 25 bp, Homo sapien
ccctgatagtgtggaaaggacagac

SEQ ID NO: 1456865 - DNA, 25 bp, Homo sapien
tatactgaagtaatgtttgatggcg

SEQ ID NO: 1456866 - DNA, 25 bp, Homo sapien
taaggagtctggagggcacactcac

SEQ ID NO: 1456867 - DNA, 25 bp, Homo sapien
tttgggcccctacaacctagtctca

SEQ ID NO: 1456868 - DNA, 25 bp, Homo sapien
tagtctcaatatagctaagccagag

SEQ ID NO: 1456869 - DNA, 25 bp, Homo sapien
tcttaaatgttctcccggcttctgc

SEQ ID NO: 1456870 - DNA, 25 bp, Homo sapien
cgattatttgtaactgcctcttaaa

SEQ ID NO: 1456871 - DNA, 25 bp, Homo sapien
gaatagcaagtctctttactgcctt

SEQ ID NO: 1456872 - DNA, 25 bp, Homo sapien
cttgaatagcaagtctctttactgc

SEQ ID NO: 1456873 - DNA, 25 bp, Homo sapien
tccctactccaagtatgtggtgttt

SEQ ID NO: 1456874 - DNA, 25 bp, Homo sapien
ggtgttttattagcaagtaatttca

SEQ ID NO: 1456875 - DNA, 25 bp, Homo sapien
tcaagggctcccaacaatcagtact

SEQ ID NO: 1456876 - DNA, 25 bp, Homo sapien
taatgtcctcaagacttgtgggcca

SEQ ID NO: 1456877 - DNA, 25 bp, Homo sapien
tagagaaaagaaccttaatgtcctc

SEQ ID NO: 1456878 - DNA, 25 bp, Homo sapien
tttatacggccaacttcacacccag

SEQ ID NO: 1456879 - DNA, 25 bp, Homo sapien
cgctgcaagcagagtgaaagtgtgc

SEQ ID NO: 1456880 - DNA, 25 bp, Homo sapien
gctgacgagcactggaagccaagat

SEQ ID NO: 1456881 - DNA, 25 bp, Homo sapien
taggtgtatcaaccaaagatgacgc

SEQ ID NO: 1456882 - DNA, 25 bp, Homo sapien
caccattttggtggacggataggat

SEQ ID NO: 1456883 - DNA, 25 bp, Homo sapien
cttcaagtctactggtgtcgctaaa

SEQ ID NO: 1456884 - DNA, 25 bp, Homo sapien
gtgctgtagaatgggtatcaatttt

SEQ ID NO: 1456885 - DNA, 25 bp, Homo sapien
ttcaagtctactggtgtcgctaaac

SEQ ID NO: 1456886 - DNA, 25 bp, Homo sapien
tgggtatcaattttagcttcaagtc

SEQ ID NO: 1456887 - DNA, 25 bp, Homo sapien
tctacttgggtttgccagagggaaa

SEQ ID NO: 1456888 - DNA, 25 bp, Homo sapien
taaactcccttgctagatggcctct

SEQ ID NO: 1456889 - DNA, 25 bp, Homo sapien
tcctgtcaacagtggagcgaaacca

SEQ ID NO: 1456890 - DNA, 25 bp, Homo sapien
tattgcatacacgactggatccatg

SEQ ID NO: 1456891 - DNA, 25 bp, Homo sapien
tttcactgattttgttacagattcc

SEQ ID NO: 1456892 - DNA, 25 bp, Homo sapien
tgattttgttacagattcctacagc

SEQ ID NO: 1456893 - DNA, 25 bp, Homo sapien
cactgattttgttacagattcctac

SEQ ID NO: 1456894 - DNA, 25 bp, Homo sapien
tcatttcactgattttgttacagat

SEQ ID NO: 1456895 - DNA, 25 bp, Homo sapien
cacaattagcgcagaagaaatacaa

SEQ ID NO: 1456896 - DNA, 25 bp, Homo sapien
tattccaaactgcaactaatattcc

SEQ ID NO: 1456897 - DNA, 25 bp, Homo sapien
aataaaacacaattagcgcagaaga

SEQ ID NO: 1456898 - DNA, 25 bp, Homo sapien
tgcaactaatattccaaggtcaggt

SEQ ID NO: 1456899 - DNA, 25 bp, Homo sapien
aattaacattagaagacagtaagta

SEQ ID NO: 1456900 - DNA, 25 bp, Homo sapien
tagtattacagatctatatgtctgg

SEQ ID NO: 1456901 - DNA, 25 bp, Homo sapien
aacaaattaacattagaagacagta

SEQ ID NO: 1456902 - DNA, 25 bp, Homo sapien
atttagtattacagatctatatgtc

SEQ ID NO: 1456903 - DNA, 25 bp, Homo sapien
ctctcaggaattattgatgccagac

SEQ ID NO: 1456904 - DNA, 25 bp, Homo sapien
atgtgaatctaaactctgacgaata

SEQ ID NO: 1456905 - DNA, 25 bp, Homo sapien
tctgacgaatactatgatgagcatt

SEQ ID NO: 1456906 - DNA, 25 bp, Homo sapien
ttcctctcaggaattattgatgcca

SEQ ID NO: 1456907 - DNA, 25 bp, Homo sapien
caaatgtcctcaagatcaagaaagc

SEQ ID NO: 1456908 - DNA, 25 bp, Homo sapien
cagaaggtaaagcttggaaaacaca

SEQ ID NO: 1456909 - DNA, 25 bp, Homo sapien
cagaatcaacaacggtgcagaaggt

SEQ ID NO: 1456910 - DNA, 25 bp, Homo sapien
gtaactccagttaataaagcataac

SEQ ID NO: 1456911 - DNA, 25 bp, Homo sapien
caggatcattactatgaatcacaga

SEQ ID NO: 1456912 - DNA, 25 bp, Homo sapien
taagaacacatagcctcaggaaatt

SEQ ID NO: 1456913 - DNA, 25 bp, Homo sapien
aactttaagaacacatagcctcagg

SEQ ID NO: 1456914 - DNA, 25 bp, Homo sapien
tgttgggtaactttaagaacacata

SEQ ID NO: 1456915 - DNA, 25 bp, Homo sapien
ttcaggtacttcacagacatgcatc

SEQ ID NO: 1456916 - DNA, 25 bp, Homo sapien
tgtttcaggtacttcacagacatgc

SEQ ID NO: 1456917 - DNA, 25 bp, Homo sapien
gtttcaggtacttcacagacatgca

SEQ ID NO: 1456918 - DNA, 25 bp, Homo sapien
aggtacttcacagacatgcatctca

SEQ ID NO: 1456919 - DNA, 25 bp, Homo sapien
gaatagggaatggatacttctgaaa

SEQ ID NO: 1456920 - DNA, 25 bp, Homo sapien
gtctgggaaagcgaacaactgcttc

SEQ ID NO: 1456921 - DNA, 25 bp, Homo sapien
gcttcacactgttcaccaagtttgc

SEQ ID NO: 1456922 - DNA, 25 bp, Homo sapien
catcagctaactttaggaatgcaga

SEQ ID NO: 1456923 - DNA, 25 bp, Homo sapien
caaagaaacatagtagtactgcaga

SEQ ID NO: 1456924 - DNA, 25 bp, Homo sapien
aacatagtagtactgcagaaacatt

SEQ ID NO: 1456925 - DNA, 25 bp, Homo sapien
agaaacatagtagtactgcagaaac

SEQ ID NO: 1456926 - DNA, 25 bp, Homo sapien
gaaacatagtagtactgcagaaaca

SEQ ID NO: 1456927 - DNA, 25 bp, Homo sapien
cccattcagccctctctttcgaata

SEQ ID NO: 1456928 - DNA, 25 bp, Homo sapien
tcacccattcagccctctctttcga

SEQ ID NO: 1456929 - DNA, 25 bp, Homo sapien
ccattcagccctctctttcgaatac

SEQ ID NO: 1456930 - DNA, 25 bp, Homo sapien
acccattcagccctctctttcgaat

SEQ ID NO: 1456931 - DNA, 25 bp, Homo sapien
atccagttcctgttcgccatagccg

SEQ ID NO: 1456932 - DNA, 25 bp, Homo sapien
tccagttcctgttcgccatagccgg

SEQ ID NO: 1456933 - DNA, 25 bp, Homo sapien
agttcctgttcgccatagccggcat

SEQ ID NO: 1456934 - DNA, 25 bp, Homo sapien
gcatccagttcctgttcgccatagc

SEQ ID NO: 1456935 - DNA, 25 bp, Homo sapien
ctgccaggaaagacttagttgagtt

SEQ ID NO: 1456936 - DNA, 25 bp, Homo sapien
gacccgaatagttactcgactagcc

SEQ ID NO: 1456937 - DNA, 25 bp, Homo sapien
gaatagttactcgactagcctagtc

SEQ ID NO: 1456938 - DNA, 25 bp, Homo sapien
tcgactagcctagtcagaaagcttg

SEQ ID NO: 1456939 - DNA, 25 bp, Homo sapien
tagtcagaaagcttgcaaactctac

SEQ ID NO: 1456940 - DNA, 25 bp, Homo sapien
ctgtcaagccctgttacgcatgcgc

SEQ ID NO: 1456941 - DNA, 25 bp, Homo sapien
ctggtttttcttccgcgcgctgtca

SEQ ID NO: 1456942 - DNA, 25 bp, Homo sapien
gctcaaggagctcttggactccagg

SEQ ID NO: 1456943 - DNA, 25 bp, Homo sapien
accccgcggtttgtccgcgcctctg

SEQ ID NO: 1456944 - DNA, 25 bp, Homo sapien
ggcatttctacgacttttctctcag

SEQ ID NO: 1456945 - DNA, 25 bp, Homo sapien
gcgataacgatttgtgttgtgagag

SEQ ID NO: 1456946 - DNA, 25 bp, Homo sapien
ggcgcaagctgcgatttctgctgaa

SEQ ID NO: 1456947 - DNA, 25 bp, Homo sapien
gctgcgatttctgctgaacttggag

SEQ ID NO: 1456948 - DNA, 25 bp, Homo sapien
tggtgagtaacggtcccaaccgctg

SEQ ID NO: 1456949 - DNA, 25 bp, Homo sapien
cctgatgctcttcaattcggtgctc

SEQ ID NO: 1456950 - DNA, 25 bp, Homo sapien
tgctcttcaattcggtgctccgcca

SEQ ID NO: 1456951 - DNA, 25 bp, Homo sapien
taacggtcccaaccgctgctcggag

SEQ ID NO: 1456952 - DNA, 25 bp, Homo sapien
cagaaatcggatcaaaacgtccagt

SEQ ID NO: 1456953 - DNA, 25 bp, Homo sapien
tggtataagttgaacgtattcccat

SEQ ID NO: 1456954 - DNA, 25 bp, Homo sapien
tcactttaatggtataagttgaacg

SEQ ID NO: 1456955 - DNA, 25 bp, Homo sapien
ttattttcagaaatcggatcaaaac

SEQ ID NO: 1456956 - DNA, 25 bp, Homo sapien
acagtacccgttcccttgatgtcta

SEQ ID NO: 1456957 - DNA, 25 bp, Homo sapien
aagctatctcggctcttagaatgct

SEQ ID NO: 1456958 - DNA, 25 bp, Homo sapien
gctatctcggctcttagaatgctta

SEQ ID NO: 1456959 - DNA, 25 bp, Homo sapien
tatctcggctcttagaatgcttaat

SEQ ID NO: 1456960 - DNA, 25 bp, Homo sapien
tcctctttccctttgtgtttgtcat

SEQ ID NO: 1456961 - DNA, 25 bp, Homo sapien
tagagaacatatatcgggtgcctct

SEQ ID NO: 1456962 - DNA, 25 bp, Homo sapien
aaaaggcctagagaacatatatcgg

SEQ ID NO: 1456963 - DNA, 25 bp, Homo sapien
aggcctagagaacatatatcgggtg

SEQ ID NO: 1456964 - DNA, 25 bp, Homo sapien
gcgaattactggaagatggcggttc

SEQ ID NO: 1456965 - DNA, 25 bp, Homo sapien
tttggcgaattactggaagatggcg

SEQ ID NO: 1456966 - DNA, 25 bp, Homo sapien
cgaattactggaagatggcggttcc

SEQ ID NO: 1456967 - DNA, 25 bp, Homo sapien
tggcgaattactggaagatggcggt

SEQ ID NO: 1456968 - DNA, 25 bp, Homo sapien
ggaaacattgcaactgataatacag

SEQ ID NO: 1456969 - DNA, 25 bp, Homo sapien
acctgatcaaatcaatagtaacaag

SEQ ID NO: 1456970 - DNA, 25 bp, Homo sapien
aggaaacctgatcaaatcaatagta

SEQ ID NO: 1456971 - DNA, 25 bp, Homo sapien
gaaactattgtgtacaactatacac

SEQ ID NO: 1456972 - DNA, 25 bp, Homo sapien
ctcctcttatcaggaatggttgtcc

SEQ ID NO: 1456973 - DNA, 25 bp, Homo sapien
agaccgattctcctcttatcaggaa

SEQ ID NO: 1456974 - DNA, 25 bp, Homo sapien
tgactgaagaccgattctcctctta

SEQ ID NO: 1456975 - DNA, 25 bp, Homo sapien
tcttatcaggaatggttgtcctctt

SEQ ID NO: 1456976 - DNA, 25 bp, Homo sapien
gcaatctgctatgtcagccaaccca

SEQ ID NO: 1456977 - DNA, 25 bp, Homo sapien
tcttcggagaaactaggagaacaac

SEQ ID NO: 1456978 - DNA, 25 bp, Homo sapien
caggtccccatgttttcaccaagca

SEQ ID NO: 1456979 - DNA, 25 bp, Homo sapien
tcccgtatgagatttcaggtcccca

SEQ ID NO: 1456980 - DNA, 25 bp, Homo sapien
tactgggtataacatgtctcacttg

SEQ ID NO: 1456981 - DNA, 25 bp, Homo sapien
tggtcaaaaccaagcacaccatagc

SEQ ID NO: 1456982 - DNA, 25 bp, Homo sapien
gaaattataccgagtctactgggta

SEQ ID NO: 1456983 - DNA, 25 bp, Homo sapien
ttaaatgggtgccaaaggtcaactg

SEQ ID NO: 1456984 - DNA, 25 bp, Homo sapien
cacatgggaccaaaggatgctcgaa

SEQ ID NO: 1456985 - DNA, 25 bp, Homo sapien
gaaaatctagtactatagctcacta

SEQ ID NO: 1456986 - DNA, 25 bp, Homo sapien
aatatgactactgtgctctgaaaat

SEQ ID NO: 1456987 - DNA, 25 bp, Homo sapien
ctggcctaaggcaacgaaatactac

SEQ ID NO: 1456988 - DNA, 25 bp, Homo sapien
ggagctctcaatgtgagaggcatca

SEQ ID NO: 1456989 - DNA, 25 bp, Homo sapien
tactttggcggaaaaccagtcctga

SEQ ID NO: 1456990 - DNA, 25 bp, Homo sapien
cttttgccttattcccaggctatac

SEQ ID NO: 1456991 - DNA, 25 bp, Homo sapien
agaggcatcaccacggactggcaag

SEQ ID NO: 1456992 - DNA, 25 bp, Homo sapien
gaacctggtgtgagtagaagctgaa

SEQ ID NO: 1456993 - DNA, 25 bp, Homo sapien
gaagctgaaatggaaggggcacatc

SEQ ID NO: 1456994 - DNA, 25 bp, Homo sapien
gaaatggaaggggcacatcagaaac

SEQ ID NO: 1456995 - DNA, 25 bp, Homo sapien
tcaagaacctggtgtgagtagaagc

SEQ ID NO: 1456996 - DNA, 25 bp, Homo sapien
tgagctagccttgcagactgagtag

SEQ ID NO: 1456997 - DNA, 25 bp, Homo sapien
ggaagcaacccaattaaggatctag

SEQ ID NO: 1456998 - DNA, 25 bp, Homo sapien
taaggatctagagcaagccacaagc

SEQ ID NO: 1456999 - DNA, 25 bp, Homo sapien
ccacaagcacgcgagaacggtatga

SEQ ID NO: 1457000 - DNA, 25 bp, Homo sapien
gctgcatctgctgcactgggggtga

SEQ ID NO: 1457001 - DNA, 25 bp, Homo sapien
ggctgcatctgctgcactgggggtg

SEQ ID NO: 1457002 - DNA, 25 bp, Homo sapien
ctgcatctgctgcactgggggtgac

SEQ ID NO: 1457003 - DNA, 25 bp, Homo sapien
gcctgttgggtgactgtgcctcaga

SEQ ID NO: 1457004 - DNA, 25 bp, Homo sapien
ggattaataagcttcctgggcctgt

SEQ ID NO: 1457005 - DNA, 25 bp, Homo sapien
gttgggaaccgtaatcacaccctga

SEQ ID NO: 1457006 - DNA, 25 bp, Homo sapien
cagagctgggtctatccccatagca

SEQ ID NO: 1457007 - DNA, 25 bp, Homo sapien
tcaccacagatgagttagataggca

SEQ ID NO: 1457008 - DNA, 25 bp, Homo sapien
cactcagtccctacatgtatagagg

SEQ ID NO: 1457009 - DNA, 25 bp, Homo sapien
tcccattggctagagaggtcttcca

SEQ ID NO: 1457010 - DNA, 25 bp, Homo sapien
tgaggcagggttacgaaacaacgtg

SEQ ID NO: 1457011 - DNA, 25 bp, Homo sapien
tccagtatcagggagctcagagaca

SEQ ID NO: 1457012 - DNA, 25 bp, Homo sapien
ttccagtatcagggagctcagagac

SEQ ID NO: 1457013 - DNA, 25 bp, Homo sapien
ccagtatcagggagctcagagacag

SEQ ID NO: 1457014 - DNA, 25 bp, Homo sapien
ctggttgtgctaaagaattctccat

SEQ ID NO: 1457015 - DNA, 25 bp, Homo sapien
gacagtaaaagcagaaatcctgtga

SEQ ID NO: 1457016 - DNA, 25 bp, Homo sapien
ggaagcttcgtgggagaagtaggat

SEQ ID NO: 1457017 - DNA, 25 bp, Homo sapien
cagacagtaaaagcagaaatcctgt

SEQ ID NO: 1457018 - DNA, 25 bp, Homo sapien
acagtaaaagcagaaatcctgtgag

SEQ ID NO: 1457019 - DNA, 25 bp, Homo sapien
atttctgtggacgagaaacagatct

SEQ ID NO: 1457020 - DNA, 25 bp, Homo sapien
tatttctgtggacgagaaacagatc

SEQ ID NO: 1457021 - DNA, 25 bp, Homo sapien
ctgtggacgagaaacagatctgtct

SEQ ID NO: 1457022 - DNA, 25 bp, Homo sapien
tttctgtggacgagaaacagatctg

SEQ ID NO: 1457023 - DNA, 25 bp, Homo sapien
taggatttggctgaatgtggcatct

SEQ ID NO: 1457024 - DNA, 25 bp, Homo sapien
aatgccaggaatcagcagggctggc

SEQ ID NO: 1457025 - DNA, 25 bp, Homo sapien
ataggatttggctgaatgtggcatc

SEQ ID NO: 1457026 - DNA, 25 bp, Homo sapien
aggaggtgaatgccaggaatcagca

SEQ ID NO: 1457027 - DNA, 25 bp, Homo sapien
caggagggcaaaaatctccttccta

SEQ ID NO: 1457028 - DNA, 25 bp, Homo sapien
tccttcctaactccatttctatctt

SEQ ID NO: 1457029 - DNA, 25 bp, Homo sapien
gagccaggagggcaaaaatctcctt

SEQ ID NO: 1457030 - DNA, 25 bp, Homo sapien
gagaaggaagacaagagccaggagg

SEQ ID NO: 1457031 - DNA, 25 bp, Homo sapien
gcccatcaacgaggtagttctgcag

SEQ ID NO: 1457032 - DNA, 25 bp, Homo sapien
cagttgtgcctctaggtctaggagc

SEQ ID NO: 1457033 - DNA, 25 bp, Homo sapien
gagcagaccttgttccaggtaggag

SEQ ID NO: 1457034 - DNA, 25 bp, Homo sapien
tctcagccagtagcccatcaacgag

SEQ ID NO: 1457035 - DNA, 25 bp, Homo sapien
ggcacaatgccaggactttttatgg

SEQ ID NO: 1457036 - DNA, 25 bp, Homo sapien
ccattggttaacagtgatcgtgtcg

SEQ ID NO: 1457037 - DNA, 25 bp, Homo sapien
tcaggaccttgaatttggtttgggc

SEQ ID NO: 1457038 - DNA, 25 bp, Homo sapien
tgtcgttaagaaagacaatggagaa

SEQ ID NO: 1457039 - DNA, 25 bp, Homo sapien
ggattgtgaaaatggatgtcatttc

SEQ ID NO: 1457040 - DNA, 25 bp, Homo sapien
ctcttccattgctctgtttttattc

SEQ ID NO: 1457041 - DNA, 25 bp, Homo sapien
tattcccttcagatgcatctttcct

SEQ ID NO: 1457042 - DNA, 25 bp, Homo sapien
agtggattctgtgtagcaggaagca

SEQ ID NO: 1457043 - DNA, 25 bp, Homo sapien
tgatggcctcttctcctctggtagc

SEQ ID NO: 1457044 - DNA, 25 bp, Homo sapien
tctcctctggtagcccccgaagcct

SEQ ID NO: 1457045 - DNA, 25 bp, Homo sapien
gagcaagaaaggctcttaggatggt

SEQ ID NO: 1457046 - DNA, 25 bp, Homo sapien
tttttctccctatcagagcaagaaa

SEQ ID NO: 1457047 - DNA, 25 bp, Homo sapien
cactgcgcccgccctcttctttttt

SEQ ID NO: 1457048 - DNA, 25 bp, Homo sapien
gccactgcgcccgccctcttctttt

SEQ ID NO: 1457049 - DNA, 25 bp, Homo sapien
ccactgcgcccgccctcttcttttt

SEQ ID NO: 1457050 - DNA, 25 bp, Homo sapien
gagccactgcgcccgccctcttctt

SEQ ID NO: 1457051 - DNA, 25 bp, Homo sapien
tggcaggccaggtcattcacatggt

SEQ ID NO: 1457052 - DNA, 25 bp, Homo sapien
aggtcattcacatggtttatgagca

SEQ ID NO: 1457053 - DNA, 25 bp, Homo sapien
ggcaggccaggtcattcacatggtt

SEQ ID NO: 1457054 - DNA, 25 bp, Homo sapien
gccaggtcattcacatggtttatga

SEQ ID NO: 1457055 - DNA, 25 bp, Homo sapien
attccaaggtatctgctcagatggt

SEQ ID NO: 1457056 - DNA, 25 bp, Homo sapien
ccaaggtatctgctcagatggttga

SEQ ID NO: 1457057 - DNA, 25 bp, Homo sapien
ctgaaatctggggacattccaaggt

SEQ ID NO: 1457058 - DNA, 25 bp, Homo sapien
tatctgctcagatggttgatcctgg

SEQ ID NO: 1457059 - DNA, 25 bp, Homo sapien
cacatgctgtaggaggttctgggtt

SEQ ID NO: 1457060 - DNA, 25 bp, Homo sapien
gctggctctgcgttgaacacaaagc

SEQ ID NO: 1457061 - DNA, 25 bp, Homo sapien
tctacattttgtcagccctggcaca

SEQ ID NO: 1457062 - DNA, 25 bp, Homo sapien
ggtgacaacttccagtcccaagagt

SEQ ID NO: 1457063 - DNA, 25 bp, Homo sapien
aaggcacagtggagggtaaaatgga

SEQ ID NO: 1457064 - DNA, 25 bp, Homo sapien
cacagtggagggtaaaatggaacag

SEQ ID NO: 1457065 - DNA, 25 bp, Homo sapien
ggcacagtggagggtaaaatggaac

SEQ ID NO: 1457066 - DNA, 25 bp, Homo sapien
cagtggagggtaaaatggaacagaa

SEQ ID NO: 1457067 - DNA, 25 bp, Homo sapien
tataaatccctgatcctttatgtag

SEQ ID NO: 1457068 - DNA, 25 bp, Homo sapien
tttatgtagcgcattttttctactc

SEQ ID NO: 1457069 - DNA, 25 bp, Homo sapien
tttttctactctgcgcttagtctga

SEQ ID NO: 1457070 - DNA, 25 bp, Homo sapien
tactctgcgcttagtctgaatgttg

SEQ ID NO: 1457071 - DNA, 25 bp, Homo sapien
tctccaaatgtcagggttggtacct

SEQ ID NO: 1457072 - DNA, 25 bp, Homo sapien
tggtacctgggtccaaagatttgcc

SEQ ID NO: 1457073 - DNA, 25 bp, Homo sapien
gttctgtttgctacggatcttccca

SEQ ID NO: 1457074 - DNA, 25 bp, Homo sapien
ctggtgcccaccctatgagagtctt

SEQ ID NO: 1457075 - DNA, 25 bp, Homo sapien
acttccaccccgcgagagaaatcag

SEQ ID NO: 1457076 - DNA, 25 bp, Homo sapien
aatcagcatagatgggtctctcctc

SEQ ID NO: 1457077 - DNA, 25 bp, Homo sapien
ccccgcgagagaaatcagcatagat

SEQ ID NO: 1457078 - DNA, 25 bp, Homo sapien
aaatcagcatagatgggtctctcct

SEQ ID NO: 1457079 - DNA, 25 bp, Homo sapien
tggagtgcctgctccccgctactgg

SEQ ID NO: 1457080 - DNA, 25 bp, Homo sapien
tgggtgtttacttgaaggcttggat

SEQ ID NO: 1457081 - DNA, 25 bp, Homo sapien
cagacacccaggttgggtgtttact

SEQ ID NO: 1457082 - DNA, 25 bp, Homo sapien
cataagggggtctgtctccagacac

SEQ ID NO: 1457083 - DNA, 25 bp, Homo sapien
gctgttacccaggtccaggcatgag

SEQ ID NO: 1457084 - DNA, 25 bp, Homo sapien
aatgtggataatgctggcgtgagtc

SEQ ID NO: 1457085 - DNA, 25 bp, Homo sapien
aaagcttgcattgtacagaagtgac

SEQ ID NO: 1457086 - DNA, 25 bp, Homo sapien
ttatgaagctagtatgggtgaggca

SEQ ID NO: 1457087 - DNA, 25 bp, Homo sapien
ttgcttcctgttgtgataggagaac

SEQ ID NO: 1457088 - DNA, 25 bp, Homo sapien
gaaacctcgcttttgacatcctgct

SEQ ID NO: 1457089 - DNA, 25 bp, Homo sapien
catcctgctctcctgtgactttgct

SEQ ID NO: 1457090 - DNA, 25 bp, Homo sapien
gagacaagttggtgtctccacaggt

SEQ ID NO: 1457091 - DNA, 25 bp, Homo sapien
gtcattctgtttacaccgagctgcc

SEQ ID NO: 1457092 - DNA, 25 bp, Homo sapien
cgagctgcctctcggttggataact

SEQ ID NO: 1457093 - DNA, 25 bp, Homo sapien
gcctctcggttggataactgtgtgg

SEQ ID NO: 1457094 - DNA, 25 bp, Homo sapien
tccatggggcatggctctagagtca

SEQ ID NO: 1457095 - DNA, 25 bp, Homo sapien
cttgtgttgtgaggtaagcccatga

SEQ ID NO: 1457096 - DNA, 25 bp, Homo sapien
ggtaagcccatgagtcatggttgaa

SEQ ID NO: 1457097 - DNA, 25 bp, Homo sapien
ctgaaccttgtgttgtgaggtaagc

SEQ ID NO: 1457098 - DNA, 25 bp, Homo sapien
taagcccatgagtcatggttgaaca

SEQ ID NO: 1457099 - DNA, 25 bp, Homo sapien
gttttgttgcctgaactcatggcag

SEQ ID NO: 1457100 - DNA, 25 bp, Homo sapien
aaaggagccagtacaactgcttgac

SEQ ID NO: 1457101 - DNA, 25 bp, Homo sapien
gagaagggcaattctggctacagca

SEQ ID NO: 1457102 - DNA, 25 bp, Homo sapien
tatacagccatgatcctcttaggag

SEQ ID NO: 1457103 - DNA, 25 bp, Homo sapien
tgatgcaatcctggcctctaaattg

SEQ ID NO: 1457104 - DNA, 25 bp, Homo sapien
ccttggtctggtgttctattggagc

SEQ ID NO: 1457105 - DNA, 25 bp, Homo sapien
tgattctgtagatccggcaccttgg

SEQ ID NO: 1457106 - DNA, 25 bp, Homo sapien
ttctcaacaaaaggataaggtcagt

SEQ ID NO: 1457107 - DNA, 25 bp, Homo sapien
tcttcattggccagcagagaggtga

SEQ ID NO: 1457108 - DNA, 25 bp, Homo sapien
tccattggcgcaaagggaggctgac

SEQ ID NO: 1457109 - DNA, 25 bp, Homo sapien
tcgcaacgattggacgagctcacct

SEQ ID NO: 1457110 - DNA, 25 bp, Homo sapien
taacggccaccgtatggaaagcact

SEQ ID NO: 1457111 - DNA, 25 bp, Homo sapien
cttagccgtgtgattggctaagagg

SEQ ID NO: 1457112 - DNA, 25 bp, Homo sapien
ctcaagaggccgcacctcacgccgt

SEQ ID NO: 1457113 - DNA, 25 bp, Homo sapien
tgccgcttagccgtgtgattggcta

SEQ ID NO: 1457114 - DNA, 25 bp, Homo sapien
ccgtcgctgccgcttagccgtgtga

SEQ ID NO: 1457115 - DNA, 25 bp, Homo sapien
ggcgttgaccgggaagagcgggcac

SEQ ID NO: 1457116 - DNA, 25 bp, Homo sapien
gggcaccgcggcagtggctccgagg

SEQ ID NO: 1457117 - DNA, 25 bp, Homo sapien
cgccccgggcgatgaggggccggcg

SEQ ID NO: 1457118 - DNA, 25 bp, Homo sapien
ggaagagcgggcaccgcggcagtgg

SEQ ID NO: 1457119 - DNA, 25 bp, Homo sapien
gcagcgccctgagaggaggctccag

SEQ ID NO: 1457120 - DNA, 25 bp, Homo sapien
ggcagcgccctgagaggaggctcca

SEQ ID NO: 1457121 - DNA, 25 bp, Homo sapien
tggcagcgccctgagaggaggctcc

SEQ ID NO: 1457122 - DNA, 25 bp, Homo sapien
gttgtctaaacttcgggctctcttc

SEQ ID NO: 1457123 - DNA, 25 bp, Homo sapien
ctccagcgctgagatgtggccgtga

SEQ ID NO: 1457124 - DNA, 25 bp, Homo sapien
gggcagaagcgacgagaggcgcgct

SEQ ID NO: 1457125 - DNA, 25 bp, Homo sapien
tctgcgcgcccagagtcaacaactt

SEQ ID NO: 1457126 - DNA, 25 bp, Homo sapien
atctcggcctcggagaaagtggacg

SEQ ID NO: 1457127 - DNA, 25 bp, Homo sapien
ggctcgtcgcagtttcgcagccagg

SEQ ID NO: 1457128 - DNA, 25 bp, Homo sapien
agtggacggcttcacccggaaatcg

SEQ ID NO: 1457129 - DNA, 25 bp, Homo sapien
tcaaaggtaacctccgagggcgcag

SEQ ID NO: 1457130 - DNA, 25 bp, Homo sapien
tatttagccagctagactcagttta

SEQ ID NO: 1457131 - DNA, 25 bp, Homo sapien
tatatttagccagctagactcagtt

SEQ ID NO: 1457132 - DNA, 25 bp, Homo sapien
tatatatttagccagctagactcag

SEQ ID NO: 1457133 - DNA, 25 bp, Homo sapien
atatatatatttagccagctagact

SEQ ID NO: 1457134 - DNA, 25 bp, Homo sapien
ttgtcttcggctttagaaggggcag

SEQ ID NO: 1457135 - DNA, 25 bp, Homo sapien
ccttcgctttgtcttcggctttaga

SEQ ID NO: 1457136 - DNA, 25 bp, Homo sapien
cgctttgtcttcggctttagaaggg

SEQ ID NO: 1457137 - DNA, 25 bp, Homo sapien
tgaccttggccacattggtgtcata

SEQ ID NO: 1457138 - DNA, 25 bp, Homo sapien
tcttaaactccagtactgttgtcca

SEQ ID NO: 1457139 - DNA, 25 bp, Homo sapien
taaactccagtactgttgtccaggc

SEQ ID NO: 1457140 - DNA, 25 bp, Homo sapien
cccatcttaaactccagtactgttg

SEQ ID NO: 1457141 - DNA, 25 bp, Homo sapien
aaacccatcttaaactccagtactg

SEQ ID NO: 1457142 - DNA, 25 bp, Homo sapien
tatatatctgttatgatcgcctcca

SEQ ID NO: 1457143 - DNA, 25 bp, Homo sapien
gcatcatgaaccatagccatataag

SEQ ID NO: 1457144 - DNA, 25 bp, Homo sapien
agatgtcacacttaatcagtaggtg

SEQ ID NO: 1457145 - DNA, 25 bp, Homo sapien
tggaaggtttttggcaaacctgcat

SEQ ID NO: 1457146 - DNA, 25 bp, Homo sapien
ccttggttaatacttgggaagatca

SEQ ID NO: 1457147 - DNA, 25 bp, Homo sapien
gactacaagttgatactgcaggtta

SEQ ID NO: 1457148 - DNA, 25 bp, Homo sapien
agtaaatccttagctctgatgctga

SEQ ID NO: 1457149 - DNA, 25 bp, Homo sapien
caggaggctatgcataggttaatgc

SEQ ID NO: 1457150 - DNA, 25 bp, Homo sapien
atagatgccacttcaaatgaacaac

SEQ ID NO: 1457151 - DNA, 25 bp, Homo sapien
agatgccacttcaaatgaacaacaa

SEQ ID NO: 1457152 - DNA, 25 bp, Homo sapien
tagatgccacttcaaatgaacaaca

SEQ ID NO: 1457153 - DNA, 25 bp, Homo sapien
gatgccacttcaaatgaacaacaag

SEQ ID NO: 1457154 - DNA, 25 bp, Homo sapien
tagaatcattgtgaggaatttgggc

SEQ ID NO: 1457155 - DNA, 25 bp, Homo sapien
ggtatgaccattcaatccatgggca

SEQ ID NO: 1457156 - DNA, 25 bp, Homo sapien
taggctcctttcctaagtatcaatt

SEQ ID NO: 1457157 - DNA, 25 bp, Homo sapien
tggaatcattaagaacgtaaggagg

SEQ ID NO: 1457158 - DNA, 25 bp, Homo sapien
tggaagttactccaaggttaacatc

SEQ ID NO: 1457159 - DNA, 25 bp, Homo sapien
tgttcagtatgtggtcttaatgtca

SEQ ID NO: 1457160 - DNA, 25 bp, Homo sapien
aaggttaacatcagttgtattctat

SEQ ID NO: 1457161 - DNA, 25 bp, Homo sapien
ttatatacgtatacctttatcaagt

SEQ ID NO: 1457162 - DNA, 25 bp, Homo sapien
tacagagcactagttgtcactgcct

SEQ ID NO: 1457163 - DNA, 25 bp, Homo sapien
tctccagagtggtaacagatgggta

SEQ ID NO: 1457164 - DNA, 25 bp, Homo sapien
taggcaaaaccttaaatctccaggc

SEQ ID NO: 1457165 - DNA, 25 bp, Homo sapien
ggtgaattacccagcttgcctctca

SEQ ID NO: 1457166 - DNA, 25 bp, Homo sapien
tgggggacagcgcagttaaaaatga

SEQ ID NO: 1457167 - DNA, 25 bp, Homo sapien
cagctgggggacagcgcagttaaaa

SEQ ID NO: 1457168 - DNA, 25 bp, Homo sapien
ctagtattgctgacagctgggggac

SEQ ID NO: 1457169 - DNA, 25 bp, Homo sapien
gggacagcgcagttaaaaatgatga

SEQ ID NO: 1457170 - DNA, 25 bp, Homo sapien
cagttagaacataccttgggagtca

SEQ ID NO: 1457171 - DNA, 25 bp, Homo sapien
cagatccatcttgggagtccagact

SEQ ID NO: 1457172 - DNA, 25 bp, Homo sapien
taattgtgcccgatgattgagcaga

SEQ ID NO: 1457173 - DNA, 25 bp, Homo sapien
ccctttggattatcggaagccagat

SEQ ID NO: 1457174 - DNA, 25 bp, Homo sapien
ctttgtgtacagtgcataggctcca

SEQ ID NO: 1457175 - DNA, 25 bp, Homo sapien
cattctagccggacaagtaggtggc

SEQ ID NO: 1457176 - DNA, 25 bp, Homo sapien
tcagaggctggacatcaatggcaga

SEQ ID NO: 1457177 - DNA, 25 bp, Homo sapien
tagagccttcattaccctagtagag

SEQ ID NO: 1457178 - DNA, 25 bp, Homo sapien
gctctacaccgcctcttttgggacg

SEQ ID NO: 1457179 - DNA, 25 bp, Homo sapien
ggacagttctctaaacaacgcgagg

SEQ ID NO: 1457180 - DNA, 25 bp, Homo sapien
cagctcccattgatgtggacagttc

SEQ ID NO: 1457181 - DNA, 25 bp, Homo sapien
tacaaagtggaagtgatgacagctc

SEQ ID NO: 1457182 - DNA, 25 bp, Homo sapien
cagcttatgtggctcgttgcctgac

SEQ ID NO: 1457183 - DNA, 25 bp, Homo sapien
tcagcttatgtggctcgttgcctga

SEQ ID NO: 1457184 - DNA, 25 bp, Homo sapien
ttgtgttccaaggattggcagtgac

SEQ ID NO: 1457185 - DNA, 25 bp, Homo sapien
ccaagaaggcgccacagagaagagc

SEQ ID NO: 1457186 - DNA, 25 bp, Homo sapien
cagagaagagcaattgtgttccaag

SEQ ID NO: 1457187 - DNA, 25 bp, Homo sapien
tgttccaaggattggcagtgactat

SEQ ID NO: 1457188 - DNA, 25 bp, Homo sapien
tgttcccatctcatagttaccatag

SEQ ID NO: 1457189 - DNA, 25 bp, Homo sapien
tgtggcctaatccaacaataagtga

SEQ ID NO: 1457190 - DNA, 25 bp, Homo sapien
actatacccagtccataagaaggtg

SEQ ID NO: 1457191 - DNA, 25 bp, Homo sapien
ttaatgtccatagctcagtttgagg

SEQ ID NO: 1457192 - DNA, 25 bp, Homo sapien
tataggctattgctcccaaatggca

SEQ ID NO: 1457193 - DNA, 25 bp, Homo sapien
gactttgccttggaacctagtacca

SEQ ID NO: 1457194 - DNA, 25 bp, Homo sapien
tctgggcccactttacaatagacta

SEQ ID NO: 1457195 - DNA, 25 bp, Homo sapien
aatcggccaccctagcaggatggac

SEQ ID NO: 1457196 - DNA, 25 bp, Homo sapien
ggtcaatgtagttaaccacacttgt

SEQ ID NO: 1457197 - DNA, 25 bp, Homo sapien
ctctggtcaatgtagttaaccacac

SEQ ID NO: 1457198 - DNA, 25 bp, Homo sapien
aaacaattgagcactttttttggca

SEQ ID NO: 1457199 - DNA, 25 bp, Homo sapien
ctggcctctggtcaatgtagttaac

SEQ ID NO: 1457200 - DNA, 25 bp, Homo sapien
gccagtgatggcctagttgactgga

SEQ ID NO: 1457201 - DNA, 25 bp, Homo sapien
tggcctagttgactggagtgtgtcc

SEQ ID NO: 1457202 - DNA, 25 bp, Homo sapien
tgctccagatgagcatcccgagcca

SEQ ID NO: 1457203 - DNA, 25 bp, Homo sapien
ttctgctccagatgagcatcccgag

SEQ ID NO: 1457204 - DNA, 25 bp, Homo sapien
ccttggtctttaccagtgacatctt

SEQ ID NO: 1457205 - DNA, 25 bp, Homo sapien
ctctcacaggcctgcatgaagccta

SEQ ID NO: 1457206 - DNA, 25 bp, Homo sapien
gcggaagcccccagagaacttccag

SEQ ID NO: 1457207 - DNA, 25 bp, Homo sapien
cctgcatgaagcctaccctgtttgg

SEQ ID NO: 1457208 - DNA, 25 bp, Homo sapien
tctaggtggcagaaagggtggaaaa

SEQ ID NO: 1457209 - DNA, 25 bp, Homo sapien
aatgctaaggcagaggctccgagct

SEQ ID NO: 1457210 - DNA, 25 bp, Homo sapien
aattctaggtggcagaaagggtgga

SEQ ID NO: 1457211 - DNA, 25 bp, Homo sapien
ggaaaatgctaaggcagaggctccg

SEQ ID NO: 1457212 - DNA, 25 bp, Homo sapien
agtggaccggccaagctcatgaggt

SEQ ID NO: 1457213 - DNA, 25 bp, Homo sapien
tctagaaccagccagcactatgtgc

SEQ ID NO: 1457214 - DNA, 25 bp, Homo sapien
cacaagaacttgctctcaaagggac

SEQ ID NO: 1457215 - DNA, 25 bp, Homo sapien
cagccccaggcaatggtgagaccaa

SEQ ID NO: 1457216 - DNA, 25 bp, Homo sapien
gaagaccagctcccgctttttcact

SEQ ID NO: 1457217 - DNA, 25 bp, Homo sapien
gaggtaatcaatggcgctgaagtcc

SEQ ID NO: 1457218 - DNA, 25 bp, Homo sapien
ttcaggcggaactggaggaagacca

SEQ ID NO: 1457219 - DNA, 25 bp, Homo sapien
ggcgctgaagtcctcactactcttg

SEQ ID NO: 1457220 - DNA, 25 bp, Homo sapien
tgcagagcagagctgcgggcccttc

SEQ ID NO: 1457221 - DNA, 25 bp, Homo sapien
gagctgcgggcccttccccttcttc

SEQ ID NO: 1457222 - DNA, 25 bp, Homo sapien
gctctactgctctcatcatattctt

SEQ ID NO: 1457223 - DNA, 25 bp, Homo sapien
ttttccaaatgggagctctactgct

SEQ ID NO: 1457224 - DNA, 25 bp, Homo sapien
tgaatgcaagtgagccaaccacagc

SEQ ID NO: 1457225 - DNA, 25 bp, Homo sapien
cacagccaagtgtccacatggcaca

SEQ ID NO: 1457226 - DNA, 25 bp, Homo sapien
atggcacagccgcatgtctccttgg

SEQ ID NO: 1457227 - DNA, 25 bp, Homo sapien
gggactaaggccccacactgagtga

SEQ ID NO: 1457228 - DNA, 25 bp, Homo sapien
gtgcaattcatgtcacccggctggc

SEQ ID NO: 1457229 - DNA, 25 bp, Homo sapien
gaaggggtccgtgtagttgatcctc

SEQ ID NO: 1457230 - DNA, 25 bp, Homo sapien
gcttgtcagaggaggaatgacctcg

SEQ ID NO: 1457231 - DNA, 25 bp, Homo sapien
ctcgtaatggtgcttacagctgagc

SEQ ID NO: 1457232 - DNA, 25 bp, Homo sapien
ttctgtcctcagcacgtaacacact

SEQ ID NO: 1457233 - DNA, 25 bp, Homo sapien
agctccttgggcatagactctatac

SEQ ID NO: 1457234 - DNA, 25 bp, Homo sapien
tgacccctctagtagcctgcagtag

SEQ ID NO: 1457235 - DNA, 25 bp, Homo sapien
gactatgcttggttggactcctctg

SEQ ID NO: 1457236 - DNA, 25 bp, Homo sapien
gtccggtagaccagaaagacggcca

SEQ ID NO: 1457237 - DNA, 25 bp, Homo sapien
gatccacttccttgtaagacacaga

SEQ ID NO: 1457238 - DNA, 25 bp, Homo sapien
tgagtaggaccgagaagacgttctt

SEQ ID NO: 1457239 - DNA, 25 bp, Homo sapien
gacagggtgcttgagtttctcacga

SEQ ID NO: 1457240 - DNA, 25 bp, Homo sapien
agccccgaaagctttttgcttggca

SEQ ID NO: 1457241 - DNA, 25 bp, Homo sapien
catcctaagccccgaaagctttttg

SEQ ID NO: 1457242 - DNA, 25 bp, Homo sapien
atgcttcactcatcctaagccccga

SEQ ID NO: 1457243 - DNA, 25 bp, Homo sapien
ttcactcatcctaagccccgaaagc

SEQ ID NO: 1457244 - DNA, 25 bp, Homo sapien
gacagagtagcttggtcacgccatc

SEQ ID NO: 1457245 - DNA, 25 bp, Homo sapien
agtgacagagtagcttggtcacgcc

SEQ ID NO: 1457246 - DNA, 25 bp, Homo sapien
tgacagagtagcttggtcacgccat

SEQ ID NO: 1457247 - DNA, 25 bp, Homo sapien
gtgacagagtagcttggtcacgcca

SEQ ID NO: 1457248 - DNA, 25 bp, Homo sapien
tcaccctctttgtggtgtcagcact

SEQ ID NO: 1457249 - DNA, 25 bp, Homo sapien
tgtggtgtcagcacttggcataaca

SEQ ID NO: 1457250 - DNA, 25 bp, Homo sapien
taacaagtgaagcagtccttaattg

SEQ ID NO: 1457251 - DNA, 25 bp, Homo sapien
cagcacttggcataacaagtgaagc

SEQ ID NO: 1457252 - DNA, 25 bp, Homo sapien
gcacagcaaagcaccaaacgcactc

SEQ ID NO: 1457253 - DNA, 25 bp, Homo sapien
acagcaaagcaccaaacgcactcac

SEQ ID NO: 1457254 - DNA, 25 bp, Homo sapien
cacagcaaagcaccaaacgcactca

SEQ ID NO: 1457255 - DNA, 25 bp, Homo sapien
taagatacccggaccttggactctg

SEQ ID NO: 1457256 - DNA, 25 bp, Homo sapien
tgagttctcaaccacctggaccaac

SEQ ID NO: 1457257 - DNA, 25 bp, Homo sapien
tctccttgtcctgctcgtctgccag

SEQ ID NO: 1457258 - DNA, 25 bp, Homo sapien
ggactctgaccgtctccttgtcctg

SEQ ID NO: 1457259 - DNA, 25 bp, Homo sapien
agaaagacgccggccattttctggg

SEQ ID NO: 1457260 - DNA, 25 bp, Homo sapien
gaagaaagacgccggccattttctg

SEQ ID NO: 1457261 - DNA, 25 bp, Homo sapien
aaagacgccggccattttctgggtg

SEQ ID NO: 1457262 - DNA, 25 bp, Homo sapien
gacgccggccattttctgggtggcc

SEQ ID NO: 1457263 - DNA, 25 bp, Homo sapien
gcagggcttgcttgaaggaagcgct

SEQ ID NO: 1457264 - DNA, 25 bp, Homo sapien
gaactgcctgactttggccaatgag

SEQ ID NO: 1457265 - DNA, 25 bp, Homo sapien
aggaggagagcagtttcactaatac

SEQ ID NO: 1457266 - DNA, 25 bp, Homo sapien
agaggacggttgccaaagatgacca

SEQ ID NO: 1457267 - DNA, 25 bp, Homo sapien
ccttccgtctctcacaacctcgtac

SEQ ID NO: 1457268 - DNA, 25 bp, Homo sapien
tcggtccctcggaagagccctctgc

SEQ ID NO: 1457269 - DNA, 25 bp, Homo sapien
ccctctgccgcgcagccccgacacc

SEQ ID NO: 1457270 - DNA, 25 bp, Homo sapien
cgcctcaaacttcccttccgtctct

SEQ ID NO: 1457271 - DNA, 25 bp, Homo sapien
aggatgtggagcgctcctgccggat

SEQ ID NO: 1457272 - DNA, 25 bp, Homo sapien
gatgtggagcgctcctgccggatca

SEQ ID NO: 1457273 - DNA, 25 bp, Homo sapien
atgtggagcgctcctgccggatcat

SEQ ID NO: 1457274 - DNA, 25 bp, Homo sapien
ggtaggatgtggagcgctcctgccg

SEQ ID NO: 1457275 - DNA, 25 bp, Homo sapien
gcggcgcacggacgcagcactgcgg

SEQ ID NO: 1457276 - DNA, 25 bp, Homo sapien
gcacggacgcagcactgcggccgct

SEQ ID NO: 1457277 - DNA, 25 bp, Homo sapien
acggacgcagcactgcggccgctgc

SEQ ID NO: 1457278 - DNA, 25 bp, Homo sapien
cagcccgcggcgcacggacgcagca

SEQ ID NO: 1457279 - DNA, 25 bp, Homo sapien
ccaggcgtggcgatactcggcgcat

SEQ ID NO: 1457280 - DNA, 25 bp, Homo sapien
gtccggaggggcgtcccagagacca

SEQ ID NO: 1457281 - DNA, 25 bp, Homo sapien
cagagaccaggcgtggcgatactcg

SEQ ID NO: 1457282 - DNA, 25 bp, Homo sapien
tcccagagaccaggcgtggcgatac

SEQ ID NO: 1457283 - DNA, 25 bp, Homo sapien
aagggagtggtgtttgatgtcacct

SEQ ID NO: 1457284 - DNA, 25 bp, Homo sapien
gagtggtgtttgatgtcacctccgg

SEQ ID NO: 1457285 - DNA, 25 bp, Homo sapien
gtgtttgatgtcacctccggaaagg

SEQ ID NO: 1457286 - DNA, 25 bp, Homo sapien
tggtgtttgatgtcacctccggaaa

SEQ ID NO: 1457287 - DNA, 25 bp, Homo sapien
gaaggactccactagaggggtagcc

SEQ ID NO: 1457288 - DNA, 25 bp, Homo sapien
cttgacggggaaggactccactaga

SEQ ID NO: 1457289 - DNA, 25 bp, Homo sapien
cactagaggggtagccaagatgtcc

SEQ ID NO: 1457290 - DNA, 25 bp, Homo sapien
gagccccctacaatgccttgacggg

SEQ ID NO: 1457291 - DNA, 25 bp, Homo sapien
aaataccccatcgtcggctacactg

SEQ ID NO: 1457292 - DNA, 25 bp, Homo sapien
gacactaggtgctgaatctcctgca

SEQ ID NO: 1457293 - DNA, 25 bp, Homo sapien
gaccagccccattttgacatcaagg

SEQ ID NO: 1457294 - DNA, 25 bp, Homo sapien
aggatggcagccctaacctggactt

SEQ ID NO: 1457295 - DNA, 25 bp, Homo sapien
agatgtcagtatcagctggctgggc

SEQ ID NO: 1457296 - DNA, 25 bp, Homo sapien
tgcttgacagattttcagccatgac

SEQ ID NO: 1457297 - DNA, 25 bp, Homo sapien
agtggaattttgagcgacctttact

SEQ ID NO: 1457298 - DNA, 25 bp, Homo sapien
agccatgaccatgttcactttataa

SEQ ID NO: 1457299 - DNA, 25 bp, Homo sapien
cggcaccagcagcggagtcaaggcc

SEQ ID NO: 1457300 - DNA, 25 bp, Homo sapien
accagcagcggagtcaaggcctcct

SEQ ID NO: 1457301 - DNA, 25 bp, Homo sapien
tgtggggctctagggcttcatgcca

SEQ ID NO: 1457302 - DNA, 25 bp, Homo sapien
ggcaccagcagcggagtcaaggcct

SEQ ID NO: 1457303 - DNA, 25 bp, Homo sapien
tccttcagaagcctgcttttcatgc

SEQ ID NO: 1457304 - DNA, 25 bp, Homo sapien
caagggcctgaacaaagcaaactca

SEQ ID NO: 1457305 - DNA, 25 bp, Homo sapien
tgccccaatctccaaaaagcatggt

SEQ ID NO: 1457306 - DNA, 25 bp, Homo sapien
gaagcctgcttttcatgccccaatc

SEQ ID NO: 1457307 - DNA, 25 bp, Homo sapien
ccctcccctggatcactgtgatgac

SEQ ID NO: 1457308 - DNA, 25 bp, Homo sapien
ctgagaggcaatgagtgccctggtt

SEQ ID NO: 1457309 - DNA, 25 bp, Homo sapien
aatgagtgccctggttccaggccct

SEQ ID NO: 1457310 - DNA, 25 bp, Homo sapien
agaggcaatgagtgccctggttcca

SEQ ID NO: 1457311 - DNA, 25 bp, Homo sapien
ctcctagtctcatggcttcctggag

SEQ ID NO: 1457312 - DNA, 25 bp, Homo sapien
ctctcctagtctcatggcttcctgg

SEQ ID NO: 1457313 - DNA, 25 bp, Homo sapien
ggctggccagcgtgccctctgagct

SEQ ID NO: 1457314 - DNA, 25 bp, Homo sapien
gccagcgtgccctctgagctgcctc

SEQ ID NO: 1457315 - DNA, 25 bp, Homo sapien
cctctctgtagggtcaccaagggcc

SEQ ID NO: 1457316 - DNA, 25 bp, Homo sapien
tctgggtagtcagaggacttcagaa

SEQ ID NO: 1457317 - DNA, 25 bp, Homo sapien
tctctgtagggtcaccaagggcctc

SEQ ID NO: 1457318 - DNA, 25 bp, Homo sapien
tgtccagtgccttatctgggtagtc

SEQ ID NO: 1457319 - DNA, 25 bp, Homo sapien
aaagtttagtgtaggtgctgcccaa

SEQ ID NO: 1457320 - DNA, 25 bp, Homo sapien
ccaaagtttagtgtaggtgctgccc

SEQ ID NO: 1457321 - DNA, 25 bp, Homo sapien
cctccaccaaagtttagtgtaggtg

SEQ ID NO: 1457322 - DNA, 25 bp, Homo sapien
caccaaagtttagtgtaggtgctgc

SEQ ID NO: 1457323 - DNA, 25 bp, Homo sapien
ctgggaaggcattgccaagctggct

SEQ ID NO: 1457324 - DNA, 25 bp, Homo sapien
ttctgcatgctaaacccttggggtg

SEQ ID NO: 1457325 - DNA, 25 bp, Homo sapien
gtgacagttgggagcacgggctggg

SEQ ID NO: 1457326 - DNA, 25 bp, Homo sapien
gctggctgcaaaccgtccacaggaa

SEQ ID NO: 1457327 - DNA, 25 bp, Homo sapien
cctgcctcttgtccaagtcggtgct

SEQ ID NO: 1457328 - DNA, 25 bp, Homo sapien
tgctgatggtcattgcaatagcggc

SEQ ID NO: 1457329 - DNA, 25 bp, Homo sapien
gtcattgcaatagcggcactgggct

SEQ ID NO: 1457330 - DNA, 25 bp, Homo sapien
tgtccaagtcggtgctgatggtcat

SEQ ID NO: 1457331 - DNA, 25 bp, Homo sapien
ctgaaagcccaggtatctctccaga

SEQ ID NO: 1457332 - DNA, 25 bp, Homo sapien
cctgaaagcccaggtatctctccag

SEQ ID NO: 1457333 - DNA, 25 bp, Homo sapien
gaggtttgctgactttgcgtgacac

SEQ ID NO: 1457334 - DNA, 25 bp, Homo sapien
agaaaagtctctgtagtcaaggcct

SEQ ID NO: 1457335 - DNA, 25 bp, Homo sapien
caaagcgtaggacccacaatcaaat

SEQ ID NO: 1457336 - DNA, 25 bp, Homo sapien
ttgaggccggagtttcagaatcaga

SEQ ID NO: 1457337 - DNA, 25 bp, Homo sapien
gtggagagggcgcttgtggtccatg

SEQ ID NO: 1457338 - DNA, 25 bp, Homo sapien
ttgtggtccatgtgtaggtgtatac

SEQ ID NO: 1457339 - DNA, 25 bp, Homo sapien
cgcttgtggtccatgtgtaggtgta

SEQ ID NO: 1457340 - DNA, 25 bp, Homo sapien
gagagggcgcttgtggtccatgtgt

SEQ ID NO: 1457341 - DNA, 25 bp, Homo sapien
cctttgcaaggtgaacccaagaaag

SEQ ID NO: 1457342 - DNA, 25 bp, Homo sapien
tgtatggccctcctcgaggactgac

SEQ ID NO: 1457343 - DNA, 25 bp, Homo sapien
ggagccctgaacacatgtatggccc

SEQ ID NO: 1457344 - DNA, 25 bp, Homo sapien
gacaaggaacccaacatccacagag

SEQ ID NO: 1457345 - DNA, 25 bp, Homo sapien
caccaggcaggatcagagcagttcc

SEQ ID NO: 1457346 - DNA, 25 bp, Homo sapien
gcaggtggcccaccaggcaggatca

SEQ ID NO: 1457347 - DNA, 25 bp, Homo sapien
tttgcctagctcttctgtgtttgta

SEQ ID NO: 1457348 - DNA, 25 bp, Homo sapien
gaacactagatgtgaaaacttccac

SEQ ID NO: 1457349 - DNA, 25 bp, Homo sapien
agaaggtgctacatcacaggtagag

SEQ ID NO: 1457350 - DNA, 25 bp, Homo sapien
cagcgatctggggtgatatctgcag

SEQ ID NO: 1457351 - DNA, 25 bp, Homo sapien
ccacagagtgtcccggactgccgtg

SEQ ID NO: 1457352 - DNA, 25 bp, Homo sapien
ccaaagctcgagaaggtgctacatc

SEQ ID NO: 1457353 - DNA, 25 bp, Homo sapien
ttggaggggagacacgtgcatctgc

SEQ ID NO: 1457354 - DNA, 25 bp, Homo sapien
cttggaggggagacacgtgcatctg

SEQ ID NO: 1457355 - DNA, 25 bp, Homo sapien
tggaggggagacacgtgcatctgcc

SEQ ID NO: 1457356 - DNA, 25 bp, Homo sapien
gctccgtaggagtttcccaggttgc

SEQ ID NO: 1457357 - DNA, 25 bp, Homo sapien
cagggcagctccgtaggagtttccc

SEQ ID NO: 1457358 - DNA, 25 bp, Homo sapien
ggttgcaaagctggatccatgcgag

SEQ ID NO: 1457359 - DNA, 25 bp, Homo sapien
gatccatgcgagacctgaagctgag

SEQ ID NO: 1457360 - DNA, 25 bp, Homo sapien
gctcttgccactggagctggacact

SEQ ID NO: 1457361 - DNA, 25 bp, Homo sapien
tcagacactcttgtttgccctgtcc

SEQ ID NO: 1457362 - DNA, 25 bp, Homo sapien
cactatatcgttgggatgccctctc

SEQ ID NO: 1457363 - DNA, 25 bp, Homo sapien
tctcccagccggagctgacaggtgg

SEQ ID NO: 1457364 - DNA, 25 bp, Homo sapien
cccaggaggactagggccttccctg

SEQ ID NO: 1457365 - DNA, 25 bp, Homo sapien
ctccaggaagatcaaaggaggacga

SEQ ID NO: 1457366 - DNA, 25 bp, Homo sapien
ccaggaggactagggccttccctgc

SEQ ID NO: 1457367 - DNA, 25 bp, Homo sapien
gattcctgtctacctttgcagtttc

SEQ ID NO: 1457368 - DNA, 25 bp, Homo sapien
taggaagctcggattcctgtctacc

SEQ ID NO: 1457369 - DNA, 25 bp, Homo sapien
gcctgtcctcctaggaagctcggat

SEQ ID NO: 1457370 - DNA, 25 bp, Homo sapien
cagctggtgcctccggggacatctg

SEQ ID NO: 1457371 - DNA, 25 bp, Homo sapien
gaagctgccagtatgctctgaaaac

SEQ ID NO: 1457372 - DNA, 25 bp, Homo sapien
ctgaaaactgttgagtgctgttgac

SEQ ID NO: 1457373 - DNA, 25 bp, Homo sapien
ttgacacgcaaggtgctgctgtggc

SEQ ID NO: 1457374 - DNA, 25 bp, Homo sapien
gtgaagctgccagtatgctctgaaa

SEQ ID NO: 1457375 - DNA, 25 bp, Homo sapien
ctggtccaggacgtcagctgagcag

SEQ ID NO: 1457376 - DNA, 25 bp, Homo sapien
tagtcctggatgaactaatttgccc

SEQ ID NO: 1457377 - DNA, 25 bp, Homo sapien
gggaaataccccacaagtgatggaa

SEQ ID NO: 1457378 - DNA, 25 bp, Homo sapien
ggaacttttgactcaggagggctca

SEQ ID NO: 1457379 - DNA, 25 bp, Homo sapien
gatgggtgacctgaacccagagatg

SEQ ID NO: 1457380 - DNA, 25 bp, Homo sapien
tggattaaatgagcctaaatccatc

SEQ ID NO: 1457381 - DNA, 25 bp, Homo sapien
gaaatggagtcgagtttggattaaa

SEQ ID NO: 1457382 - DNA, 25 bp, Homo sapien
cagtggagttggatgggtgacctga

SEQ ID NO: 1457383 - DNA, 25 bp, Homo sapien
aagaactggttgtggcactgactcc

SEQ ID NO: 1457384 - DNA, 25 bp, Homo sapien
ataagaactggttgtggcactgact

SEQ ID NO: 1457385 - DNA, 25 bp, Homo sapien
agaccatgctgtcccgaggcatctc

SEQ ID NO: 1457386 - DNA, 25 bp, Homo sapien
aagacaaaagaccatgctgtcccga

SEQ ID NO: 1457387 - DNA, 25 bp, Homo sapien
tctcctcagacacctcttggttagc

SEQ ID NO: 1457388 - DNA, 25 bp, Homo sapien
agccactgtctgcaatctcctcaga

SEQ ID NO: 1457389 - DNA, 25 bp, Homo sapien
ctttttcaccttccgtctccagcca

SEQ ID NO: 1457390 - DNA, 25 bp, Homo sapien
tcttggttagcccatggcagcccca

SEQ ID NO: 1457391 - DNA, 25 bp, Homo sapien
aaaggattgctggaaaaccctcgag

SEQ ID NO: 1457392 - DNA, 25 bp, Homo sapien
tgtgatctccctatcttctgccaag

SEQ ID NO: 1457393 - DNA, 25 bp, Homo sapien
tagttagcccaactcgcaacagagg

SEQ ID NO: 1457394 - DNA, 25 bp, Homo sapien
cattccgtgagtcagaaaacaccgt

SEQ ID NO: 1457395 - DNA, 25 bp, Homo sapien
ccttgacccctggagtataatctga

SEQ ID NO: 1457396 - DNA, 25 bp, Homo sapien
tcatctcaggaaaagagcgttccga

SEQ ID NO: 1457397 - DNA, 25 bp, Homo sapien
gctccggtccattgaactccattga

SEQ ID NO: 1457398 - DNA, 25 bp, Homo sapien
ccatttgcctttgggcgtggacctg

SEQ ID NO: 1457399 - DNA, 25 bp, Homo sapien
tcatcacccgtgctcatagactgtc

SEQ ID NO: 1457400 - DNA, 25 bp, Homo sapien
tagactgtccccatgtagattccgc

SEQ ID NO: 1457401 - DNA, 25 bp, Homo sapien
gcagcgaatcccctcattgggctca

SEQ ID NO: 1457402 - DNA, 25 bp, Homo sapien
attccgcagatggtgaaccttcagc

SEQ ID NO: 1457403 - DNA, 25 bp, Homo sapien
catactgtggcaaggactgtggagc

SEQ ID NO: 1457404 - DNA, 25 bp, Homo sapien
tgttcatactgtggcaaggactgtg

SEQ ID NO: 1457405 - DNA, 25 bp, Homo sapien
actgtggagccagggtccctcaaag

SEQ ID NO: 1457406 - DNA, 25 bp, Homo sapien
ggagccagggtccctcaaagccagc

SEQ ID NO: 1457407 - DNA, 25 bp, Homo sapien
ccttttggagaaggtcatcttccct

SEQ ID NO: 1457408 - DNA, 25 bp, Homo sapien
ttttggagaaggtcatcttccctga

SEQ ID NO: 1457409 - DNA, 25 bp, Homo sapien
gcccttttggagaaggtcatcttcc

SEQ ID NO: 1457410 - DNA, 25 bp, Homo sapien
tttggagaaggtcatcttccctgaa

SEQ ID NO: 1457411 - DNA, 25 bp, Homo sapien
tctcccattcacagaaagtgggtct

SEQ ID NO: 1457412 - DNA, 25 bp, Homo sapien
aggccagtgagccatggccagacca

SEQ ID NO: 1457413 - DNA, 25 bp, Homo sapien
ccattcacagaaagtgggtctgtgc

SEQ ID NO: 1457414 - DNA, 25 bp, Homo sapien
acaggccagtgagccatggccagac

SEQ ID NO: 1457415 - DNA, 25 bp, Homo sapien
atcagtatgccagttatcaatgcta

SEQ ID NO: 1457416 - DNA, 25 bp, Homo sapien
taatcagtatgccagttatcaatgc

SEQ ID NO: 1457417 - DNA, 25 bp, Homo sapien
tatgccagttatcaatgctaaaaaa

SEQ ID NO: 1457418 - DNA, 25 bp, Homo sapien
cagtatgccagttatcaatgctaaa

SEQ ID NO: 1457419 - DNA, 25 bp, Homo sapien
tccaactcttgccagcgacggtcaa

SEQ ID NO: 1457420 - DNA, 25 bp, Homo sapien
ggggctccaagtatgtgggcaggtc

SEQ ID NO: 1457421 - DNA, 25 bp, Homo sapien
tgccagcgacggtcaagattttggg

SEQ ID NO: 1457422 - DNA, 25 bp, Homo sapien
tgggcaggtccgtggctttcttcca

SEQ ID NO: 1457423 - DNA, 25 bp, Homo sapien
ggtctcttggcatctgccacgccat

SEQ ID NO: 1457424 - DNA, 25 bp, Homo sapien
cttcacttttatgcgcagagctggc

SEQ ID NO: 1457425 - DNA, 25 bp, Homo sapien
catcttcacttttatgcgcagagct

SEQ ID NO: 1457426 - DNA, 25 bp, Homo sapien
tctgcacagcccctttgtgggtctc

SEQ ID NO: 1457427 - DNA, 25 bp, Homo sapien
aacagatgtcctctgcgggattcac

SEQ ID NO: 1457428 - DNA, 25 bp, Homo sapien
cagtatccacccaacagaaccagga

SEQ ID NO: 1457429 - DNA, 25 bp, Homo sapien
agacagagaggtgtgtcagttgccc

SEQ ID NO: 1457430 - DNA, 25 bp, Homo sapien
ggtttgagtgtggtcattcctcaca

SEQ ID NO: 1457431 - DNA, 25 bp, Homo sapien
gttcccgcagaagtcaccagtatcc

SEQ ID NO: 1457432 - DNA, 25 bp, Homo sapien
aagcaaggcagctgcagttttataa

SEQ ID NO: 1457433 - DNA, 25 bp, Homo sapien
gaaagcaaggcagctgcagttttat

SEQ ID NO: 1457434 - DNA, 25 bp, Homo sapien
ggaaagcaaggcagctgcagtttta

SEQ ID NO: 1457435 - DNA, 25 bp, Homo sapien
gcaaggcagctgcagttttataatg

SEQ ID NO: 1457436 - DNA, 25 bp, Homo sapien
caactcgtccttagggacagatgag

SEQ ID NO: 1457437 - DNA, 25 bp, Homo sapien
accaatgacaggagcatggcagagg

SEQ ID NO: 1457438 - DNA, 25 bp, Homo sapien
actcttgaataaacaactcgtcctt

SEQ ID NO: 1457439 - DNA, 25 bp, Homo sapien
gaagggcagagttgcattctattgc

SEQ ID NO: 1457440 - DNA, 25 bp, Homo sapien
ggaacacgtgagatccccagcatgt

SEQ ID NO: 1457441 - DNA, 25 bp, Homo sapien
gatgatctaaggttctccagccata

SEQ ID NO: 1457442 - DNA, 25 bp, Homo sapien
gaccaagcctcaagcattcatgtgg

SEQ ID NO: 1457443 - DNA, 25 bp, Homo sapien
tggccacgcttggtcaggaacacgt

SEQ ID NO: 1457444 - DNA, 25 bp, Homo sapien
gcttagcactggcacatgtggagaa

SEQ ID NO: 1457445 - DNA, 25 bp, Homo sapien
aaagccttcccaagcgtggctgacc

SEQ ID NO: 1457446 - DNA, 25 bp, Homo sapien
tttcctggccggcattagcgttgcc

SEQ ID NO: 1457447 - DNA, 25 bp, Homo sapien
cagtaacttcggtgtcagacacggg

SEQ ID NO: 1457448 - DNA, 25 bp, Homo sapien
gaggatccagctacccagtgggctg

SEQ ID NO: 1457449 - DNA, 25 bp, Homo sapien
tgaggatccagctacccagtgggct

SEQ ID NO: 1457450 - DNA, 25 bp, Homo sapien
ggtgaggatccagctacccagtggg

SEQ ID NO: 1457451 - DNA, 25 bp, Homo sapien
ggatccagctacccagtgggctgtg

SEQ ID NO: 1457452 - DNA, 25 bp, Homo sapien
ctccagtagggaattctacccagaa

SEQ ID NO: 1457453 - DNA, 25 bp, Homo sapien
cagtagggaattctacccagaagtc

SEQ ID NO: 1457454 - DNA, 25 bp, Homo sapien
tccagtagggaattctacccagaag

SEQ ID NO: 1457455 - DNA, 25 bp, Homo sapien
tagggaattctacccagaagtccaa

SEQ ID NO: 1457456 - DNA, 25 bp, Homo sapien
gggatactctcgaaatgcctgcctc

SEQ ID NO: 1457457 - DNA, 25 bp, Homo sapien
tcatctatgtctgcacagttgaagc

SEQ ID NO: 1457458 - DNA, 25 bp, Homo sapien
ggctgacctgtcaaatctcttgttc

SEQ ID NO: 1457459 - DNA, 25 bp, Homo sapien
tatttcaagttctggtggtgggcga

SEQ ID NO: 1457460 - DNA, 25 bp, Homo sapien
agtgcccagggcaacatgtggcaca

SEQ ID NO: 1457461 - DNA, 25 bp, Homo sapien
aagtgcccagggcaacatgtggcac

SEQ ID NO: 1457462 - DNA, 25 bp, Homo sapien
gtgcccagggcaacatgtggcacag

SEQ ID NO: 1457463 - DNA, 25 bp, Homo sapien
taagctacatgaggacagaagtctc

SEQ ID NO: 1457464 - DNA, 25 bp, Homo sapien
cagtttccacaagcagccaatggga

SEQ ID NO: 1457465 - DNA, 25 bp, Homo sapien
tctactgcatgggtcaggatacctc

SEQ ID NO: 1457466 - DNA, 25 bp, Homo sapien
aaaggtttgcagcatccaaccctgg

SEQ ID NO: 1457467 - DNA, 25 bp, Homo sapien
ccacagctggtcacaatgagaagtg

SEQ ID NO: 1457468 - DNA, 25 bp, Homo sapien
tgtcccttggtatgctggcatccac

SEQ ID NO: 1457469 - DNA, 25 bp, Homo sapien
gtgtcccttggtatgctggcatcca

SEQ ID NO: 1457470 - DNA, 25 bp, Homo sapien
cagctggtcacaatgagaagtgcgg

SEQ ID NO: 1457471 - DNA, 25 bp, Homo sapien
tcagccctttcatggactggctgcc

SEQ ID NO: 1457472 - DNA, 25 bp, Homo sapien
tttgtgctcagccctttcatggact

SEQ ID NO: 1457473 - DNA, 25 bp, Homo sapien
ccctaccccagttgctgcccactgg

SEQ ID NO: 1457474 - DNA, 25 bp, Homo sapien
gctgcccactgggaaggtttggcca

SEQ ID NO: 1457475 - DNA, 25 bp, Homo sapien
cattggctggcctggaaaatacaag

SEQ ID NO: 1457476 - DNA, 25 bp, Homo sapien
gattctgtggagcaccttggttcac

SEQ ID NO: 1457477 - DNA, 25 bp, Homo sapien
ccacgtttagcaggaggtcttccca

SEQ ID NO: 1457478 - DNA, 25 bp, Homo sapien
tactgatgtgctctggtgtgaacct

SEQ ID NO: 1457479 - DNA, 25 bp, Homo sapien
gaggtattattagccctagttgaca

SEQ ID NO: 1457480 - DNA, 25 bp, Homo sapien
cagggtcagactcggaattcattca

SEQ ID NO: 1457481 - DNA, 25 bp, Homo sapien
caccagggaagttccggatgcggct

SEQ ID NO: 1457482 - DNA, 25 bp, Homo sapien
gaagcccatggtcggtgaccagctg

SEQ ID NO: 1457483 - DNA, 25 bp, Homo sapien
ctcgctcatgcatgcgacactgctg

SEQ ID NO: 1457484 - DNA, 25 bp, Homo sapien
gctgacattgcacatctcgctcatg

SEQ ID NO: 1457485 - DNA, 25 bp, Homo sapien
gacactgctgcagacgaggctcagt

SEQ ID NO: 1457486 - DNA, 25 bp, Homo sapien
aggcagccgagctgtcgcttccgga

SEQ ID NO: 1457487 - DNA, 25 bp, Homo sapien
attcagaccaaatgacccttcccca

SEQ ID NO: 1457488 - DNA, 25 bp, Homo sapien
ccctactgccttccatcagggagga

SEQ ID NO: 1457489 - DNA, 25 bp, Homo sapien
gcagtttggaaaccacattcagacc

SEQ ID NO: 1457490 - DNA, 25 bp, Homo sapien
agccctctctacctgcagcagcctc

SEQ ID NO: 1457491 - DNA, 25 bp, Homo sapien
ctccttgagcttctgcgttgggggc

SEQ ID NO: 1457492 - DNA, 25 bp, Homo sapien
agcttctgcgttgggggcggttggg

SEQ ID NO: 1457493 - DNA, 25 bp, Homo sapien
ttgagcttctgcgttgggggcggtt

SEQ ID NO: 1457494 - DNA, 25 bp, Homo sapien
ccttgagcttctgcgttgggggcgg

SEQ ID NO: 1457495 - DNA, 25 bp, Homo sapien
ttgctagaccttcatacacaccttc

SEQ ID NO: 1457496 - DNA, 25 bp, Homo sapien
ggagcctagaacttgctagaccttc

SEQ ID NO: 1457497 - DNA, 25 bp, Homo sapien
tgtggaggaaggagcctagaacttg

SEQ ID NO: 1457498 - DNA, 25 bp, Homo sapien
aggaaggagcctagaacttgctaga

SEQ ID NO: 1457499 - DNA, 25 bp, Homo sapien
ttagcataatcaccaattacactct

SEQ ID NO: 1457500 - DNA, 25 bp, Homo sapien
tcaccaattacactctctccactag

SEQ ID NO: 1457501 - DNA, 25 bp, Homo sapien
gaaggaattagcataatcaccaatt

SEQ ID NO: 1457502 - DNA, 25 bp, Homo sapien
gaattagcataatcaccaattacac

SEQ ID NO: 1457503 - DNA, 25 bp, Homo sapien
cagtcattgcttgatgttgggtcca

SEQ ID NO: 1457504 - DNA, 25 bp, Homo sapien
tcaagcagggattgcaaggatgtct

SEQ ID NO: 1457505 - DNA, 25 bp, Homo sapien
ggcattgggttactcagaagctcac

SEQ ID NO: 1457506 - DNA, 25 bp, Homo sapien
tcttctgtagggtatggctagcagg

SEQ ID NO: 1457507 - DNA, 25 bp, Homo sapien
gcagccaacagggaagaccttactg

SEQ ID NO: 1457508 - DNA, 25 bp, Homo sapien
tgatgacaataaaaggacacccatg

SEQ ID NO: 1457509 - DNA, 25 bp, Homo sapien
ctgatgacaataaaaggacacccat

SEQ ID NO: 1457510 - DNA, 25 bp, Homo sapien
aataaaaggacacccatgcaagggc

SEQ ID NO: 1457511 - DNA, 25 bp, Homo sapien
gacaataaaaggacacccatgcaag

SEQ ID NO: 1457512 - DNA, 25 bp, Homo sapien
gcattggaacgaaatgcagggttca

SEQ ID NO: 1457513 - DNA, 25 bp, Homo sapien
aaccagggaaatggagcaggcttca

SEQ ID NO: 1457514 - DNA, 25 bp, Homo sapien
aggcttcagcatagttggcattgga

SEQ ID NO: 1457515 - DNA, 25 bp, Homo sapien
ggaaatggagcaggcttcagcatag

SEQ ID NO: 1457516 - DNA, 25 bp, Homo sapien
gccttcggcagctcaaggagaagct

SEQ ID NO: 1457517 - DNA, 25 bp, Homo sapien
aagagctgaatttctcgtactgtcc

SEQ ID NO: 1457518 - DNA, 25 bp, Homo sapien
caggagaaagagtgccttcggcagc

SEQ ID NO: 1457519 - DNA, 25 bp, Homo sapien
gaatttctcgtactgtccagatcca

SEQ ID NO: 1457520 - DNA, 25 bp, Homo sapien
tgcatctgccttgcaatcagtgggt

SEQ ID NO: 1457521 - DNA, 25 bp, Homo sapien
gaagtcacatgtgtctttgagggac

SEQ ID NO: 1457522 - DNA, 25 bp, Homo sapien
ttgattctgatgactatggtgagct

SEQ ID NO: 1457523 - DNA, 25 bp, Homo sapien
gggacgccgtcccagatctcatgac

SEQ ID NO: 1457524 - DNA, 25 bp, Homo sapien
tcctctacttgcacacgacggggag

SEQ ID NO: 1457525 - DNA, 25 bp, Homo sapien
gtgagctttcctgggtcgtggtggt

SEQ ID NO: 1457526 - DNA, 25 bp, Homo sapien
tcctgggtcgtggtggttgtcgtgg

SEQ ID NO: 1457527 - DNA, 25 bp, Homo sapien
tacttgcacacgacggggagctcat

SEQ ID NO: 1457528 - DNA, 25 bp, Homo sapien
ttacaccctttttcgatgtagtatc

SEQ ID NO: 1457529 - DNA, 25 bp, Homo sapien
tcgatgtagtatcttacaactgaaa

SEQ ID NO: 1457530 - DNA, 25 bp, Homo sapien
ttttcgatgtagtatcttacaactg

SEQ ID NO: 1457531 - DNA, 25 bp, Homo sapien
ccctttttcgatgtagtatcttaca

SEQ ID NO: 1457532 - DNA, 25 bp, Homo sapien
taagagttcactttacgctgacgga

SEQ ID NO: 1457533 - DNA, 25 bp, Homo sapien
gtcatactggttcgcgcagggctcg

SEQ ID NO: 1457534 - DNA, 25 bp, Homo sapien
tacaatctacctagggaggcaatgg

SEQ ID NO: 1457535 - DNA, 25 bp, Homo sapien
tgaaacacaccacaccaatgacagg

SEQ ID NO: 1457536 - DNA, 25 bp, Homo sapien
aacacttggttatctcctctttcat

SEQ ID NO: 1457537 - DNA, 25 bp, Homo sapien
tctgcccaagtgcagaagaaacact

SEQ ID NO: 1457538 - DNA, 25 bp, Homo sapien
ggcctaccagcgaccagatctgccc

SEQ ID NO: 1457539 - DNA, 25 bp, Homo sapien
gcgaccagatctgcccaagtgcaga

SEQ ID NO: 1457540 - DNA, 25 bp, Homo sapien
ttccttttaggtatattgcgctaag

SEQ ID NO: 1457541 - DNA, 25 bp, Homo sapien
tttaggtatattgcgctaagtgaaa

SEQ ID NO: 1457542 - DNA, 25 bp, Homo sapien
aatacttaggattttggtcttggtg

SEQ ID NO: 1457543 - DNA, 25 bp, Homo sapien
ctgtaaggcacgtaagtttaagctt

SEQ ID NO: 1457544 - DNA, 25 bp, Homo sapien
tagcgttggatatgggcagcattag

SEQ ID NO: 1457545 - DNA, 25 bp, Homo sapien
ggcagcattagggaagcaggataat

SEQ ID NO: 1457546 - DNA, 25 bp, Homo sapien
agttagcgttggatatgggcagcat

SEQ ID NO: 1457547 - DNA, 25 bp, Homo sapien
gggaagcaggataatgtactttcat

SEQ ID NO: 1457548 - DNA, 25 bp, Homo sapien
cttcaaaggctatcacagtctgttc

SEQ ID NO: 1457549 - DNA, 25 bp, Homo sapien
tgagtgaacaacatacgagagtggg

SEQ ID NO: 1457550 - DNA, 25 bp, Homo sapien
tcctgctcagcaattgcctcactgt

SEQ ID NO: 1457551 - DNA, 25 bp, Homo sapien
gatggcctcacctgaccagtgttgc

SEQ ID NO: 1457552 - DNA, 25 bp, Homo sapien
ccttctaaggcgagacagccattct

SEQ ID NO: 1457553 - DNA, 25 bp, Homo sapien
ttcagcaggcatttcacggttctcc

SEQ ID NO: 1457554 - DNA, 25 bp, Homo sapien
ttagatttggttgccacgagtgggc

SEQ ID NO: 1457555 - DNA, 25 bp, Homo sapien
actctcctgtggcaaagacctcagg

SEQ ID NO: 1457556 - DNA, 25 bp, Homo sapien
aggcaggtgcgaaagtcccaggcca

SEQ ID NO: 1457557 - DNA, 25 bp, Homo sapien
ccaggcaggtgcgaaagtcccaggc

SEQ ID NO: 1457558 - DNA, 25 bp, Homo sapien
gcaggtgcgaaagtcccaggccaca

SEQ ID NO: 1457559 - DNA, 25 bp, Homo sapien
aggtgcgaaagtcccaggccacact

SEQ ID NO: 1457560 - DNA, 25 bp, Homo sapien
tgaggtctcagctcgaatctcggac

SEQ ID NO: 1457561 - DNA, 25 bp, Homo sapien
tcatccacgggcagtcaagaaggtt

SEQ ID NO: 1457562 - DNA, 25 bp, Homo sapien
gtggtcattgcgtccccattccggg

SEQ ID NO: 1457563 - DNA, 25 bp, Homo sapien
caagaaggttccttggttctgccgc

SEQ ID NO: 1457564 - DNA, 25 bp, Homo sapien
ctgggagcagaagaacacgtgaaag

SEQ ID NO: 1457565 - DNA, 25 bp, Homo sapien
gaacacgtgaaagctgaacatgggt

SEQ ID NO: 1457566 - DNA, 25 bp, Homo sapien
agaacacgtgaaagctgaacatggg

SEQ ID NO: 1457567 - DNA, 25 bp, Homo sapien
cacgtgaaagctgaacatgggtttt

SEQ ID NO: 1457568 - DNA, 25 bp, Homo sapien
tcttgtcaatttcaaacgctttgtg

SEQ ID NO: 1457569 - DNA, 25 bp, Homo sapien
ctcgccctagtttcggagcccggag

SEQ ID NO: 1457570 - DNA, 25 bp, Homo sapien
cggagctgtcctgcgtgtgcgtcca

SEQ ID NO: 1457571 - DNA, 25 bp, Homo sapien
atcgaaccgatacggtcctaccact

SEQ ID NO: 1457572 - DNA, 25 bp, Homo sapien
aagtgggtgaccagctgccctcctt

SEQ ID NO: 1457573 - DNA, 25 bp, Homo sapien
gaccagctgccctccttcctggact

SEQ ID NO: 1457574 - DNA, 25 bp, Homo sapien
caaagtgggtgaccagctgccctcc

SEQ ID NO: 1457575 - DNA, 25 bp, Homo sapien
ccagctgccctccttcctggactcc

SEQ ID NO: 1457576 - DNA, 25 bp, Homo sapien
tctctgcctcggaagtgagtgcttc

SEQ ID NO: 1457577 - DNA, 25 bp, Homo sapien
tgaggtttgccatccagaacaagca

SEQ ID NO: 1457578 - DNA, 25 bp, Homo sapien
caccggatgtcctctgcgctggaat

SEQ ID NO: 1457579 - DNA, 25 bp, Homo sapien
gattttgctaacctgacgccctttg

SEQ ID NO: 1457580 - DNA, 25 bp, Homo sapien
aggatgcccaccgttaggattcagg

SEQ ID NO: 1457581 - DNA, 25 bp, Homo sapien
tgtgtacctctagaatcccagcagc

SEQ ID NO: 1457582 - DNA, 25 bp, Homo sapien
tcaggtggccagaagagcttgtcag

SEQ ID NO: 1457583 - DNA, 25 bp, Homo sapien
tgtcaccacgtgcagtatctcaaga

SEQ ID NO: 1457584 - DNA, 25 bp, Homo sapien
tattatacggcccagagtggctcca

SEQ ID NO: 1457585 - DNA, 25 bp, Homo sapien
cagagagggtcgtcacttcctgtca

SEQ ID NO: 1457586 - DNA, 25 bp, Homo sapien
tgtgctgaaagacaaccatgaatgc

SEQ ID NO: 1457587 - DNA, 25 bp, Homo sapien
tgcagagacatctttgtgacccagg

SEQ ID NO: 1457588 - DNA, 25 bp, Homo sapien
tgcccctgaggtttgtacggatctc

SEQ ID NO: 1457589 - DNA, 25 bp, Homo sapien
gctcttgacacacgggatgacctct

SEQ ID NO: 1457590 - DNA, 25 bp, Homo sapien
gatgacctctttgcctattgggaaa

SEQ ID NO: 1457591 - DNA, 25 bp, Homo sapien
tacctgtggcattccagctgaagac

SEQ ID NO: 1457592 - DNA, 25 bp, Homo sapien
ccaccatcggtgcaggaggaaacaa

SEQ ID NO: 1457593 - DNA, 25 bp, Homo sapien
tgtttccagcgcatccatgagcctt

SEQ ID NO: 1457594 - DNA, 25 bp, Homo sapien
cacagggactcgcataaaggtgtca

SEQ ID NO: 1457595 - DNA, 25 bp, Homo sapien
aaaggagaaaggctgtggcaacccg

SEQ ID NO: 1457596 - DNA, 25 bp, Homo sapien
tatgacaccggacatcatggagaca

SEQ ID NO: 1457597 - DNA, 25 bp, Homo sapien
tgtgaacgtcatggctaagatggcg

SEQ ID NO: 1457598 - DNA, 25 bp, Homo sapien
tctgggaggagcttatggaccacca

SEQ ID NO: 1457599 - DNA, 25 bp, Homo sapien
ttccggttccagcaagggacttggc

SEQ ID NO: 1457600 - DNA, 25 bp, Homo sapien
gcattttaatacctctggaatcaga

SEQ ID NO: 1457601 - DNA, 25 bp, Homo sapien
taagatataattctacctacaggac

SEQ ID NO: 1457602 - DNA, 25 bp, Homo sapien
ggaatcagaatggtcctacaaccac

SEQ ID NO: 1457603 - DNA, 25 bp, Homo sapien
caagagattggatcaaggaggtgaa

SEQ ID NO: 1457604 - DNA, 25 bp, Homo sapien
cagagcgtggaatggctgcaagaca

SEQ ID NO: 1457605 - DNA, 25 bp, Homo sapien
taaagatgagcgtcatccaggcagt

SEQ ID NO: 1457606 - DNA, 25 bp, Homo sapien
cagagctgcgagctggtaaagatga

SEQ ID NO: 1457607 - DNA, 25 bp, Homo sapien
ggcagtgtggctctagtctcctggc

SEQ ID NO: 1457608 - DNA, 25 bp, Homo sapien
agcacgcagaaggaggctttgcaga

SEQ ID NO: 1457609 - DNA, 25 bp, Homo sapien
gaagggcttgggtgacatgggcctc

SEQ ID NO: 1457610 - DNA, 25 bp, Homo sapien
aagaggctatggcatgacagggaaa

SEQ ID NO: 1457611 - DNA, 25 bp, Homo sapien
tgtgcccaggcgcaatgtgtgatgt

SEQ ID NO: 1457612 - DNA, 25 bp, Homo sapien
tccaggtctccattcccgaatgctg

SEQ ID NO: 1457613 - DNA, 25 bp, Homo sapien
ctctttgctatacaatattccatgg

SEQ ID NO: 1457614 - DNA, 25 bp, Homo sapien
tctttgctatacaatattccatggt

SEQ ID NO: 1457615 - DNA, 25 bp, Homo sapien
tctctttgctatacaatattccatg

SEQ ID NO: 1457616 - DNA, 25 bp, Homo sapien
ttctctttgctatacaatattccat

SEQ ID NO: 1457617 - DNA, 25 bp, Homo sapien
caacactgcttcattgagacctcat

SEQ ID NO: 1457618 - DNA, 25 bp, Homo sapien
cttcttggctcgagatgatgaaccc

SEQ ID NO: 1457619 - DNA, 25 bp, Homo sapien
ctcgagatgatgaacccgggtattt

SEQ ID NO: 1457620 - DNA, 25 bp, Homo sapien
cttaatcttcttggctcgagatgat

SEQ ID NO: 1457621 - DNA, 25 bp, Homo sapien
tagctgataatgactgcggtcaggc

SEQ ID NO: 1457622 - DNA, 25 bp, Homo sapien
gcaactccgtcatgttcaagtctgt

SEQ ID NO: 1457623 - DNA, 25 bp, Homo sapien
ccatcccatagcattagcggctgga

SEQ ID NO: 1457624 - DNA, 25 bp, Homo sapien
ctagtgctgaagtccagggattctc

SEQ ID NO: 1457625 - DNA, 25 bp, Homo sapien
gctccggaatccgaatagttagtga

SEQ ID NO: 1457626 - DNA, 25 bp, Homo sapien
ttggcaccgtgctccggaatccgaa

SEQ ID NO: 1457627 - DNA, 25 bp, Homo sapien
gggcttggcaccgtgctccggaatc

SEQ ID NO: 1457628 - DNA, 25 bp, Homo sapien
caccgtgctccggaatccgaatagt

SEQ ID NO: 1457629 - DNA, 25 bp, Homo sapien
caggcatgatggcatccgtacatcc

SEQ ID NO: 1457630 - DNA, 25 bp, Homo sapien
ttccagcagatctccgctagctctg

SEQ ID NO: 1457631 - DNA, 25 bp, Homo sapien
gatctccgctagctctgacaggagg

SEQ ID NO: 1457632 - DNA, 25 bp, Homo sapien
ggcatgatggcatccgtacatcccc

SEQ ID NO: 1457633 - DNA, 25 bp, Homo sapien
tagaaacaagttatggaggggcctg

SEQ ID NO: 1457634 - DNA, 25 bp, Homo sapien
gggcctgtgcctttcttcgtgccag

SEQ ID NO: 1457635 - DNA, 25 bp, Homo sapien
ctcaaaggggagtggtagaaacaag

SEQ ID NO: 1457636 - DNA, 25 bp, Homo sapien
aggggcctgtgcctttcttcgtgcc

SEQ ID NO: 1457637 - DNA, 25 bp, Homo sapien
ccgtggctgcagcaactgaagttga

SEQ ID NO: 1457638 - DNA, 25 bp, Homo sapien
agcagctgccacatcgggcacggag

SEQ ID NO: 1457639 - DNA, 25 bp, Homo sapien
tgccgtggctgcagcaactgaagtt

SEQ ID NO: 1457640 - DNA, 25 bp, Homo sapien
atcgggcacggagccaagcaactgg

SEQ ID NO: 1457641 - DNA, 25 bp, Homo sapien
aagctctgcaatctttctattgcat

SEQ ID NO: 1457642 - DNA, 25 bp, Homo sapien
caagctctgcaatctttctattgca

SEQ ID NO: 1457643 - DNA, 25 bp, Homo sapien
tttacttcccatcgcagtctgtcgg

SEQ ID NO: 1457644 - DNA, 25 bp, Homo sapien
cagccagttcaggactttcactggc

SEQ ID NO: 1457645 - DNA, 25 bp, Homo sapien
tgcagcgtgcttaggcaaacctcgc

SEQ ID NO: 1457646 - DNA, 25 bp, Homo sapien
tgtgcgcatgcacatcgctggctgt

SEQ ID NO: 1457647 - DNA, 25 bp, Homo sapien
actcgcaagcgtgttcgggagctga

SEQ ID NO: 1457648 - DNA, 25 bp, Homo sapien
cactcaggtgtgatgtatccagctg

SEQ ID NO: 1457649 - DNA, 25 bp, Homo sapien
tccagggactcgcaagcgtgttcgg

SEQ ID NO: 1457650 - DNA, 25 bp, Homo sapien
tctggtgtctcggagcctttccaca

SEQ ID NO: 1457651 - DNA, 25 bp, Homo sapien
gaagcatatagtcgtgacttgcttc

SEQ ID NO: 1457652 - DNA, 25 bp, Homo sapien
catatgaagcatatagtcgtgactt

SEQ ID NO: 1457653 - DNA, 25 bp, Homo sapien
atgaagcatatagtcgtgacttgct

SEQ ID NO: 1457654 - DNA, 25 bp, Homo sapien
tatgaagcatatagtcgtgacttgc

SEQ ID NO: 1457655 - DNA, 25 bp, Homo sapien
tcacctgggaagtcaatgcctgaga

SEQ ID NO: 1457656 - DNA, 25 bp, Homo sapien
tcactcagaataggcgctgcaagtc

SEQ ID NO: 1457657 - DNA, 25 bp, Homo sapien
tcaaaagagtgaaccagaactaggg

SEQ ID NO: 1457658 - DNA, 25 bp, Homo sapien
tgagggtagcaccaaaagattctct

SEQ ID NO: 1457659 - DNA, 25 bp, Homo sapien
cagacatagtctggagggtagggga

SEQ ID NO: 1457660 - DNA, 25 bp, Homo sapien
atgagatgagagagtagaggatggc

SEQ ID NO: 1457661 - DNA, 25 bp, Homo sapien
tcagacatagtctggagggtagggg

SEQ ID NO: 1457662 - DNA, 25 bp, Homo sapien
ggtaggggagacattgatgagatga

SEQ ID NO: 1457663 - DNA, 25 bp, Homo sapien
catccagcccaattaacttcagaaa

SEQ ID NO: 1457664 - DNA, 25 bp, Homo sapien
gtatcccttcaggagccacatccag

SEQ ID NO: 1457665 - DNA, 25 bp, Homo sapien
gaccccatgaggtgaaccttgagaa

SEQ ID NO: 1457666 - DNA, 25 bp, Homo sapien
gtgtcagtggtacccccctctcttg

SEQ ID NO: 1457667 - DNA, 25 bp, Homo sapien
aaggaggcactgagtagggaaggat

SEQ ID NO: 1457668 - DNA, 25 bp, Homo sapien
ggaggcactgagtagggaaggatgg

SEQ ID NO: 1457669 - DNA, 25 bp, Homo sapien
aggaggcactgagtagggaaggatg

SEQ ID NO: 1457670 - DNA, 25 bp, Homo sapien
cttcctgtaggcagatgtgggagca

SEQ ID NO: 1457671 - DNA, 25 bp, Homo sapien
tcactgatgggaagagctcctgttt

SEQ ID NO: 1457672 - DNA, 25 bp, Homo sapien
tgatgggaagagctcctgtttcctt

SEQ ID NO: 1457673 - DNA, 25 bp, Homo sapien
gatgggaagagctcctgtttccttg

SEQ ID NO: 1457674 - DNA, 25 bp, Homo sapien
cactgatgggaagagctcctgtttc

SEQ ID NO: 1457675 - DNA, 25 bp, Homo sapien
tgccctggtaactgtccggtttcca

SEQ ID NO: 1457676 - DNA, 25 bp, Homo sapien
caaatattgggttttgggtgccctg

SEQ ID NO: 1457677 - DNA, 25 bp, Homo sapien
tgcctgtaaattcccagaactggag

SEQ ID NO: 1457678 - DNA, 25 bp, Homo sapien
aggaagtgtattgtgcctgtaaatt

SEQ ID NO: 1457679 - DNA, 25 bp, Homo sapien
ggaaaaggaagtgtattgtgcctgt

SEQ ID NO: 1457680 - DNA, 25 bp, Homo sapien
ccaggaaaaggaagtgtattgtgcc

SEQ ID NO: 1457681 - DNA, 25 bp, Homo sapien
gaacctactagctgccagggtggat

SEQ ID NO: 1457682 - DNA, 25 bp, Homo sapien
tacaattgtgaaggaaaagccttcc

SEQ ID NO: 1457683 - DNA, 25 bp, Homo sapien
gaagtcactcctgagggtggcctcc

SEQ ID NO: 1457684 - DNA, 25 bp, Homo sapien
ctctgtgagtttggcgcctgttgga

SEQ ID NO: 1457685 - DNA, 25 bp, Homo sapien
tgtcagcttcccgatctctctccgc

SEQ ID NO: 1457686 - DNA, 25 bp, Homo sapien
tcatcggggcaagcagccggccaca

SEQ ID NO: 1457687 - DNA, 25 bp, Homo sapien
tgtcaggtgcttcagctcctctgtc

SEQ ID NO: 1457688 - DNA, 25 bp, Homo sapien
ctctctccgcagcatggtgttttct

SEQ ID NO: 1457689 - DNA, 25 bp, Homo sapien
gcttttttcaatatcgcagttcttg

SEQ ID NO: 1457690 - DNA, 25 bp, Homo sapien
catctagtagatccaatgctttttt

SEQ ID NO: 1457691 - DNA, 25 bp, Homo sapien
aaatgttaggatacagcatctcagg

SEQ ID NO: 1457692 - DNA, 25 bp, Homo sapien
catttaatagaaccacatctagtag

SEQ ID NO: 1457693 - DNA, 25 bp, Homo sapien
ccctctctgggtatttgtcgggaca

SEQ ID NO: 1457694 - DNA, 25 bp, Homo sapien
tttgaggttgctgtgctccctctct

SEQ ID NO: 1457695 - DNA, 25 bp, Homo sapien
gaaattcctggagtaaacgcaaaca

SEQ ID NO: 1457696 - DNA, 25 bp, Homo sapien
cctctagctcgaattctgccaagtt

SEQ ID NO: 1457697 - DNA, 25 bp, Homo sapien
tctgcagaaggtttgggatatactt

SEQ ID NO: 1457698 - DNA, 25 bp, Homo sapien
tgtgaccaacgacacttgtgtggag

SEQ ID NO: 1457699 - DNA, 25 bp, Homo sapien
tcctttggttctgcagaaggtttgg

SEQ ID NO: 1457700 - DNA, 25 bp, Homo sapien
tccattttcctaagccagtcgtctg

SEQ ID NO: 1457701 - DNA, 25 bp, Homo sapien
tctctgagcagcaactcggtttttt

SEQ ID NO: 1457702 - DNA, 25 bp, Homo sapien
gacttctctgagcagcaactcggtt

SEQ ID NO: 1457703 - DNA, 25 bp, Homo sapien
tccgacttctctgagcagcaactcg

SEQ ID NO: 1457704 - DNA, 25 bp, Homo sapien
ctccttcggaccttcctgtcatcat

SEQ ID NO: 1457705 - DNA, 25 bp, Homo sapien
ggtgtgaccgccgtttaaaagatga

SEQ ID NO: 1457706 - DNA, 25 bp, Homo sapien
tgcagacttggtgctaacagcctaa

SEQ ID NO: 1457707 - DNA, 25 bp, Homo sapien
tagtgatcatgaaacaggcaggcgg

SEQ ID NO: 1457708 - DNA, 25 bp, Homo sapien
atgagaagacaccaccaagcgggaa

SEQ ID NO: 1457709 - DNA, 25 bp, Homo sapien
ggccctccctgagcctctcgccctc

SEQ ID NO: 1457710 - DNA, 25 bp, Homo sapien
cctccctgagcctctcgccctctac

SEQ ID NO: 1457711 - DNA, 25 bp, Homo sapien
ccacggccctccctgagcctctcgc

SEQ ID NO: 1457712 - DNA, 25 bp, Homo sapien
acggccctccctgagcctctcgccc

SEQ ID NO: 1457713 - DNA, 25 bp, Homo sapien
gcgccgcgacgctcctctgcaggac

SEQ ID NO: 1457714 - DNA, 25 bp, Homo sapien
cgggcgccgcgacgctcctctgcag

SEQ ID NO: 1457715 - DNA, 25 bp, Homo sapien
ttcccgggcgccgcgacgctcctct

SEQ ID NO: 1457716 - DNA, 25 bp, Homo sapien
cccgggcgccgcgacgctcctctgc

SEQ ID NO: 1457717 - DNA, 25 bp, Homo sapien
ggggctgcctacgggcgctgtcccg

SEQ ID NO: 1457718 - DNA, 25 bp, Homo sapien
ccgccgccggcatcctcgtgccgca

SEQ ID NO: 1457719 - DNA, 25 bp, Homo sapien
gccgtccttcccgtcccacgtctgc

SEQ ID NO: 1457720 - DNA, 25 bp, Homo sapien
ctactccacgcgtcggcccagtgtc

SEQ ID NO: 1457721 - DNA, 25 bp, Homo sapien
agactagaagagattcctaaaaatg

SEQ ID NO: 1457722 - DNA, 25 bp, Homo sapien
cagcaataattattgatcattaata

SEQ ID NO: 1457723 - DNA, 25 bp, Homo sapien
acagaagactagaagagattcctaa

SEQ ID NO: 1457724 - DNA, 25 bp, Homo sapien
aattcagttattgttaccaccaata

SEQ ID NO: 1457725 - DNA, 25 bp, Homo sapien
agaagtgttggcctcgagctctgcc

SEQ ID NO: 1457726 - DNA, 25 bp, Homo sapien
gacttaacaacacggatgatcggca

SEQ ID NO: 1457727 - DNA, 25 bp, Homo sapien
tgcactgctttcagcgttccaggac

SEQ ID NO: 1457728 - DNA, 25 bp, Homo sapien
tcctcttggcaggtgagtctcattc

SEQ ID NO: 1457729 - DNA, 25 bp, Homo sapien
taggtactggagatgtagtgcccat

SEQ ID NO: 1457730 - DNA, 25 bp, Homo sapien
gcaagtaattgctcagactttgcct

SEQ ID NO: 1457731 - DNA, 25 bp, Homo sapien
agaacctgttctatatttccagtgg

SEQ ID NO: 1457732 - DNA, 25 bp, Homo sapien
tatatgtgcagcattagccagattc

SEQ ID NO: 1457733 - DNA, 25 bp, Homo sapien
gcccagctcagattatagaattgtg

SEQ ID NO: 1457734 - DNA, 25 bp, Homo sapien
gagtaatatacgatcttccaaagca

SEQ ID NO: 1457735 - DNA, 25 bp, Homo sapien
agtgtcccaaagaacccagtctcca

SEQ ID NO: 1457736 - DNA, 25 bp, Homo sapien
cagccaacccaactgaatacagaca

SEQ ID NO: 1457737 - DNA, 25 bp, Homo sapien
gaatttgttctaggcttgtgtcccc

SEQ ID NO: 1457738 - DNA, 25 bp, Homo sapien
aacaggtggttagctctctggaaga

SEQ ID NO: 1457739 - DNA, 25 bp, Homo sapien
gaggtaacactgtccctatgggaag

SEQ ID NO: 1457740 - DNA, 25 bp, Homo sapien
catctgatgataacgtctgtggctg

SEQ ID NO: 1457741 - DNA, 25 bp, Homo sapien
accgctgagccactctgcagtcctc

SEQ ID NO: 1457742 - DNA, 25 bp, Homo sapien
gaccgctgagccactctgcagtcct

SEQ ID NO: 1457743 - DNA, 25 bp, Homo sapien
atgtccagaccgctgagccactctg

SEQ ID NO: 1457744 - DNA, 25 bp, Homo sapien
cttcaatgtccagaccgctgagcca

SEQ ID NO: 1457745 - DNA, 25 bp, Homo sapien
cagccacctcggtggggtcctccca

SEQ ID NO: 1457746 - DNA, 25 bp, Homo sapien
tggtgtccctccctctgatggacac

SEQ ID NO: 1457747 - DNA, 25 bp, Homo sapien
ctgtgcaacaacagagccgagcccg

SEQ ID NO: 1457748 - DNA, 25 bp, Homo sapien
ggctggatggtgtccctccctctga

SEQ ID NO: 1457749 - DNA, 25 bp, Homo sapien
gtgcaacaacagagccgagcccggt

SEQ ID NO: 1457750 - DNA, 25 bp, Homo sapien
tctctcctaaactgcccctagagct

SEQ ID NO: 1457751 - DNA, 25 bp, Homo sapien
cagtccagtctactccggccttgga

SEQ ID NO: 1457752 - DNA, 25 bp, Homo sapien
cttcatcttgccagttcaccagagg

SEQ ID NO: 1457753 - DNA, 25 bp, Homo sapien
cacagggagagtgtgcttcctggct

SEQ ID NO: 1457754 - DNA, 25 bp, Homo sapien
gacaatgaattagacgtgtgccaca

SEQ ID NO: 1457755 - DNA, 25 bp, Homo sapien
cacatggcaggaaggtcacttaacc

SEQ ID NO: 1457756 - DNA, 25 bp, Homo sapien
gcttcccacgatgaaagaatgacta

SEQ ID NO: 1457757 - DNA, 25 bp, Homo sapien
tatcataactataccactggagaga

SEQ ID NO: 1457758 - DNA, 25 bp, Homo sapien
ggagatgctcggctataaaacggct

SEQ ID NO: 1457759 - DNA, 25 bp, Homo sapien
ttttcctatccgctcttctggtgga

SEQ ID NO: 1457760 - DNA, 25 bp, Homo sapien
ctataaaacggctcaaaagaacagc

SEQ ID NO: 1457761 - DNA, 25 bp, Homo sapien
tatccgctcttctggtggagatgct

SEQ ID NO: 1457762 - DNA, 25 bp, Homo sapien
gctagcacagtgatgtcactgaggg

SEQ ID NO: 1457763 - DNA, 25 bp, Homo sapien
tgctagcacagtgatgtcactgagg

SEQ ID NO: 1457764 - DNA, 25 bp, Homo sapien
ctgctagcacagtgatgtcactgag

SEQ ID NO: 1457765 - DNA, 25 bp, Homo sapien
gaatattagtttacagcccatgggc

SEQ ID NO: 1457766 - DNA, 25 bp, Homo sapien
caaagtatgagcaatgtagagacac

SEQ ID NO: 1457767 - DNA, 25 bp, Homo sapien
gacacagcaacgaattacaagggat

SEQ ID NO: 1457768 - DNA, 25 bp, Homo sapien
acccccttcagtggttctctagaga

SEQ ID NO: 1457769 - DNA, 25 bp, Homo sapien
aaaatatctcttttggagtcctaca

SEQ ID NO: 1457770 - DNA, 25 bp, Homo sapien
gcctctactgtagtgaataactgcc

SEQ ID NO: 1457771 - DNA, 25 bp, Homo sapien
tctgcatagttaacattatcactcg

SEQ ID NO: 1457772 - DNA, 25 bp, Homo sapien
tcactggagaactaatttgtaacca

SEQ ID NO: 1457773 - DNA, 25 bp, Homo sapien
cattatttaatagcattccgatttt

SEQ ID NO: 1457774 - DNA, 25 bp, Homo sapien
gaacattatttaatagcattccgat

SEQ ID NO: 1457775 - DNA, 25 bp, Homo sapien
tatttaatagcattccgattttcca

SEQ ID NO: 1457776 - DNA, 25 bp, Homo sapien
tagcattccgattttccaaaaaatg

SEQ ID NO: 1457777 - DNA, 25 bp, Homo sapien
tatacagccatgtgagcaccactca

SEQ ID NO: 1457778 - DNA, 25 bp, Homo sapien
tgtttcccgtgccattcccagttaa

SEQ ID NO: 1457779 - DNA, 25 bp, Homo sapien
tcagaataacgctatgaggtaggca

SEQ ID NO: 1457780 - DNA, 25 bp, Homo sapien
tcctgaaggcaacacttgtcctgag

SEQ ID NO: 1457781 - DNA, 25 bp, Homo sapien
tcatctacaagtcgggaagacagcc

SEQ ID NO: 1457782 - DNA, 25 bp, Homo sapien
aggacatagtaaggaggtggtcatc

SEQ ID NO: 1457783 - DNA, 25 bp, Homo sapien
tctgttatagtagcctaaataaaca

SEQ ID NO: 1457784 - DNA, 25 bp, Homo sapien
tcagaaaccagctttgacagtgttc

SEQ ID NO: 1457785 - DNA, 25 bp, Homo sapien
ttcagaaacgcagggtgctgaccca

SEQ ID NO: 1457786 - DNA, 25 bp, Homo sapien
gagggaccatgttcttatataatca

SEQ ID NO: 1457787 - DNA, 25 bp, Homo sapien
ttcttcactgagacagaccttctgg

SEQ ID NO: 1457788 - DNA, 25 bp, Homo sapien
aacagttggtaagtttgatggccct

SEQ ID NO: 1457789 - DNA, 25 bp, Homo sapien
agatgtataccagggaaacacaaca

SEQ ID NO: 1457790 - DNA, 25 bp, Homo sapien
tattatatcatatccccgcacagag

SEQ ID NO: 1457791 - DNA, 25 bp, Homo sapien
gtcaaagccagtattatcatcagca

SEQ ID NO: 1457792 - DNA, 25 bp, Homo sapien
caaaagctacaagggagctgagagt

SEQ ID NO: 1457793 - DNA, 25 bp, Homo sapien
taaagttctcaggtttagcatctgg

SEQ ID NO: 1457794 - DNA, 25 bp, Homo sapien
ttcagtaccatgtcagaggttttcc

SEQ ID NO: 1457795 - DNA, 25 bp, Homo sapien
gattaattttctttggccgcaatgg

SEQ ID NO: 1457796 - DNA, 25 bp, Homo sapien
cctatgacaactggaaaagacttct

SEQ ID NO: 1457797 - DNA, 25 bp, Homo sapien
tggaggtggataacaggctgcatcc

SEQ ID NO: 1457798 - DNA, 25 bp, Homo sapien
gaatgcaaatacctagccatacatt

SEQ ID NO: 1457799 - DNA, 25 bp, Homo sapien
aatgttgaatgcaaatacctagcca

SEQ ID NO: 1457800 - DNA, 25 bp, Homo sapien
ttatttaaaggaccgctgagaattc

SEQ ID NO: 1457801 - DNA, 25 bp, Homo sapien
tgagaattcctgttagagcagacta

SEQ ID NO: 1457802 - DNA, 25 bp, Homo sapien
ttgctactgtttcccctctgcattt

SEQ ID NO: 1457803 - DNA, 25 bp, Homo sapien
cgagtagtcataacactgtgtgccc

SEQ ID NO: 1457804 - DNA, 25 bp, Homo sapien
ctgtgtgcccctaaaagagagttca

SEQ ID NO: 1457805 - DNA, 25 bp, Homo sapien
caaaaatctgctaggacgattcacc

SEQ ID NO: 1457806 - DNA, 25 bp, Homo sapien
ggcatatagatgctatctggacaaa

SEQ ID NO: 1457807 - DNA, 25 bp, Homo sapien
ctgcacagttctagtacaatgcctg

SEQ ID NO: 1457808 - DNA, 25 bp, Homo sapien
gaatggaccctgccttgctacaggc

SEQ ID NO: 1457809 - DNA, 25 bp, Homo sapien
aatggaccctgccttgctacaggct

SEQ ID NO: 1457810 - DNA, 25 bp, Homo sapien
ggtcctgcacagttctagtacaatg

SEQ ID NO: 1457811 - DNA, 25 bp, Homo sapien
tgagacatctagtatgcctggcccc

SEQ ID NO: 1457812 - DNA, 25 bp, Homo sapien
gaacagagtgcctaacgtgtacagt

SEQ ID NO: 1457813 - DNA, 25 bp, Homo sapien
ttttcaaagggtccactagagggca

SEQ ID NO: 1457814 - DNA, 25 bp, Homo sapien
gatcaatctaacaagggaaccgaag

SEQ ID NO: 1457815 - DNA, 25 bp, Homo sapien
tgctttgtcaggaattatactgtcc

SEQ ID NO: 1457816 - DNA, 25 bp, Homo sapien
cattcctatagtagtatgggctgac

SEQ ID NO: 1457817 - DNA, 25 bp, Homo sapien
tatctgtaaatgcatgaaaaaggca

SEQ ID NO: 1457818 - DNA, 25 bp, Homo sapien
tatgcaattttagcaaccctgggag

SEQ ID NO: 1457819 - DNA, 25 bp, Homo sapien
ctcgaagtaataaaaaccatatatg

SEQ ID NO: 1457820 - DNA, 25 bp, Homo sapien
aaaaaccatatatgacaaatccaca

SEQ ID NO: 1457821 - DNA, 25 bp, Homo sapien
aaaagttgaaagcattcccgttgag

SEQ ID NO: 1457822 - DNA, 25 bp, Homo sapien
ccaacatcatgttgaatggggaaaa

SEQ ID NO: 1457823 - DNA, 25 bp, Homo sapien
tagtctgggtcaggcaagaacttta

SEQ ID NO: 1457824 - DNA, 25 bp, Homo sapien
gagtcaatgggtgtaaagctagtcc

SEQ ID NO: 1457825 - DNA, 25 bp, Homo sapien
ttaaagcatcaaagggagaatatcc

SEQ ID NO: 1457826 - DNA, 25 bp, Homo sapien
tgatggttactgcaccaggtgtgac

SEQ ID NO: 1457827 - DNA, 25 bp, Homo sapien
ggtcatattttaggtccagtggatg

SEQ ID NO: 1457828 - DNA, 25 bp, Homo sapien
tttaggtccagtggatgtacaacag

SEQ ID NO: 1457829 - DNA, 25 bp, Homo sapien
tattttaggtccagtggatgtacaa

SEQ ID NO: 1457830 - DNA, 25 bp, Homo sapien
catattttaggtccagtggatgtac

SEQ ID NO: 1457831 - DNA, 25 bp, Homo sapien
gtcacttatctccacgtagagcctt

SEQ ID NO: 1457832 - DNA, 25 bp, Homo sapien
tgtcatagtacaacttagaagagta

SEQ ID NO: 1457833 - DNA, 25 bp, Homo sapien
gaagagtaaagtcttacaagagaca

SEQ ID NO: 1457834 - DNA, 25 bp, Homo sapien
aacaatactaattgaggcaggaaag

SEQ ID NO: 1457835 - DNA, 25 bp, Homo sapien
gatcttcaagtactttgatgtcaga

SEQ ID NO: 1457836 - DNA, 25 bp, Homo sapien
tttctgggatactgcttacgttttg

SEQ ID NO: 1457837 - DNA, 25 bp, Homo sapien
ccaggatctttctgggatactgctt

SEQ ID NO: 1457838 - DNA, 25 bp, Homo sapien
tttatggttttgatgacacattcca

SEQ ID NO: 1457839 - DNA, 25 bp, Homo sapien
aacaattatctgaagcttcctgcca

SEQ ID NO: 1457840 - DNA, 25 bp, Homo sapien
aagcttcctgccatgcttgcccatt

SEQ ID NO: 1457841 - DNA, 25 bp, Homo sapien
cctgccatgcttgcccattaatgct

SEQ ID NO: 1457842 - DNA, 25 bp, Homo sapien
catgcttgcccattaatgctgatat

SEQ ID NO: 1457843 - DNA, 25 bp, Homo sapien
cgaactggttctacagtagcctggg

SEQ ID NO: 1457844 - DNA, 25 bp, Homo sapien
ggacagcgctggtctaagtaattaa

SEQ ID NO: 1457845 - DNA, 25 bp, Homo sapien
tctcctctagcgtttctcgaactgg

SEQ ID NO: 1457846 - DNA, 25 bp, Homo sapien
taagacccagctgacattagcatct

SEQ ID NO: 1457847 - DNA, 25 bp, Homo sapien
gagtaaagaactggctaactggtcc

SEQ ID NO: 1457848 - DNA, 25 bp, Homo sapien
ccaaggcctggcgtgggatctttct

SEQ ID NO: 1457849 - DNA, 25 bp, Homo sapien
tcctaagatcctgggtgttgggtaa

SEQ ID NO: 1457850 - DNA, 25 bp, Homo sapien
tctgaatcctaagatcctgggtgtt

SEQ ID NO: 1457851 - DNA, 25 bp, Homo sapien
gaagcggccgcacagttgtagcatt

SEQ ID NO: 1457852 - DNA, 25 bp, Homo sapien
tgtagcatttcggtcacagcccgct

SEQ ID NO: 1457853 - DNA, 25 bp, Homo sapien
gagcgtccccgagcttttgcacgaa

SEQ ID NO: 1457854 - DNA, 25 bp, Homo sapien
tgcagcgcacccgaaagtcttctcg

SEQ ID NO: 1457855 - DNA, 25 bp, Homo sapien
tcccatggagggtcaaggaccacca

SEQ ID NO: 1457856 - DNA, 25 bp, Homo sapien
cttgtcccatggagggtcaaggacc

SEQ ID NO: 1457857 - DNA, 25 bp, Homo sapien
tctgtgccagccgcgagctccttgt

SEQ ID NO: 1457858 - DNA, 25 bp, Homo sapien
aggaccaccaactcaggagaccccg

SEQ ID NO: 1457859 - DNA, 25 bp, Homo sapien
aaggagtaagagctgggtacttctt

SEQ ID NO: 1457860 - DNA, 25 bp, Homo sapien
cggccatctgtagccatggaaggag

SEQ ID NO: 1457861 - DNA, 25 bp, Homo sapien
gcatgcatttgatggtcggccatct

SEQ ID NO: 1457862 - DNA, 25 bp, Homo sapien
gctgggtacttcttctcaattcccc

SEQ ID NO: 1457863 - DNA, 25 bp, Homo sapien
gaatgtctggttttctatgctgtca

SEQ ID NO: 1457864 - DNA, 25 bp, Homo sapien
tgaggccagtggtttaaacaatcat

SEQ ID NO: 1457865 - DNA, 25 bp, Homo sapien
aatacaccaattgtaagttctggtc

SEQ ID NO: 1457866 - DNA, 25 bp, Homo sapien
tcccataggagttagccagtgaagg

SEQ ID NO: 1457867 - DNA, 25 bp, Homo sapien
taggtcagattgtccaaaccagact

SEQ ID NO: 1457868 - DNA, 25 bp, Homo sapien
tataggctgcccactagtctaggtt

SEQ ID NO: 1457869 - DNA, 25 bp, Homo sapien
taatcaaggagatagccaagtggac

SEQ ID NO: 1457870 - DNA, 25 bp, Homo sapien
gaagtgctattgttagaggaacccc

SEQ ID NO: 1457871 - DNA, 25 bp, Homo sapien
gggaccaaatgggagacaatagcac

SEQ ID NO: 1457872 - DNA, 25 bp, Homo sapien
tgaagaagaatcaaagagaatgtat

SEQ ID NO: 1457873 - DNA, 25 bp, Homo sapien
atttgtaaataatttagacacactg

SEQ ID NO: 1457874 - DNA, 25 bp, Homo sapien
taaataatttagacacactgaagaa

SEQ ID NO: 1457875 - DNA, 25 bp, Homo sapien
agaagaatcaaagagaatgtatttc

SEQ ID NO: 1457876 - DNA, 25 bp, Homo sapien
gtgtctctggagatgcactttatcc

SEQ ID NO: 1457877 - DNA, 25 bp, Homo sapien
gtctctggagatgcactttatccaa

SEQ ID NO: 1457878 - DNA, 25 bp, Homo sapien
ctctggagatgcactttatccaaat

SEQ ID NO: 1457879 - DNA, 25 bp, Homo sapien
cgtgtgtctctggagatgcacttta

SEQ ID NO: 1457880 - DNA, 25 bp, Homo sapien
gcttcgttccaccaagcagttggat

SEQ ID NO: 1457881 - DNA, 25 bp, Homo sapien
gaagtgcctcttttgaactctcagt

SEQ ID NO: 1457882 - DNA, 25 bp, Homo sapien
gactgataggcatccgggaagtgcc

SEQ ID NO: 1457883 - DNA, 25 bp, Homo sapien
aaggagactcagcttgatccaggag

SEQ ID NO: 1457884 - DNA, 25 bp, Homo sapien
tatggtcacaaaccaattgtcaagt

SEQ ID NO: 1457885 - DNA, 25 bp, Homo sapien
taccatacagcaacccaaagcgtgt

SEQ ID NO: 1457886 - DNA, 25 bp, Homo sapien
cgtgtttcaagtccactggtgtgga

SEQ ID NO: 1457887 - DNA, 25 bp, Homo sapien
caacccaaagcgtgtttcaagtcca

SEQ ID NO: 1457888 - DNA, 25 bp, Homo sapien
tagcatactaccatacagcaaccca

SEQ ID NO: 1457889 - DNA, 25 bp, Homo sapien
gcctagccagggtgaaggtacctta

SEQ ID NO: 1457890 - DNA, 25 bp, Homo sapien
gataaaagaacaatagggcctagcc

SEQ ID NO: 1457891 - DNA, 25 bp, Homo sapien
taataaggcccagcatggaactagg

SEQ ID NO: 1457892 - DNA, 25 bp, Homo sapien
taccttaaggcaacaagagagggag

SEQ ID NO: 1457893 - DNA, 25 bp, Homo sapien
tgcacatccaatagcattgttctgg

SEQ ID NO: 1457894 - DNA, 25 bp, Homo sapien
tttgcatcttaacctctgaggctcg

SEQ ID NO: 1457895 - DNA, 25 bp, Homo sapien
cctttgttcagggacagctacatca

SEQ ID NO: 1457896 - DNA, 25 bp, Homo sapien
gtaaactgtggcaaacctttgttca

SEQ ID NO: 1457897 - DNA, 25 bp, Homo sapien
cttttttgacagagattaaggttca

SEQ ID NO: 1457898 - DNA, 25 bp, Homo sapien
gccaaacgatgctcccagtagtatc

SEQ ID NO: 1457899 - DNA, 25 bp, Homo sapien
gaagtgttacttattcaaatctctc

SEQ ID NO: 1457900 - DNA, 25 bp, Homo sapien
gcattccacacccataaagtagctc

SEQ ID NO: 1457901 - DNA, 25 bp, Homo sapien
aaacatagcttcccaaggagcagaa

SEQ ID NO: 1457902 - DNA, 25 bp, Homo sapien
caggaagaccgcaaggctactgtgc

SEQ ID NO: 1457903 - DNA, 25 bp, Homo sapien
ttttctctagttccaggaagaccgc

SEQ ID NO: 1457904 - DNA, 25 bp, Homo sapien
gaacttttgtactatatacacctag

SEQ ID NO: 1457905 - DNA, 25 bp, Homo sapien
caagacggtgtctggcacataccat

SEQ ID NO: 1457906 - DNA, 25 bp, Homo sapien
gagaaggtcgagcaaccggatctgc

SEQ ID NO: 1457907 - DNA, 25 bp, Homo sapien
tggtacctggaacccactgaatatg

SEQ ID NO: 1457908 - DNA, 25 bp, Homo sapien
tccaacttcacaagggcagatttct

SEQ ID NO: 1457909 - DNA, 25 bp, Homo sapien
tctcaccgacaaggacagcgatgct

SEQ ID NO: 1457910 - DNA, 25 bp, Homo sapien
tgaacttatgaaacgtggtcctgtc

SEQ ID NO: 1457911 - DNA, 25 bp, Homo sapien
cacttgttagaggagccactgctta

SEQ ID NO: 1457912 - DNA, 25 bp, Homo sapien
gtttcggtggctctctcgttcccag

SEQ ID NO: 1457913 - DNA, 25 bp, Homo sapien
tataaggttaatgctaaaggtctga

SEQ ID NO: 1457914 - DNA, 25 bp, Homo sapien
tgagtaactaggcactcacaaggca

SEQ ID NO: 1457915 - DNA, 25 bp, Homo sapien
aataaaacatggctagagcgactgc

SEQ ID NO: 1457916 - DNA, 25 bp, Homo sapien
aaaatagccgcattctaagctgacc

SEQ ID NO: 1457917 - DNA, 25 bp, Homo sapien
taggttgaaggattaatggtcatta

SEQ ID NO: 1457918 - DNA, 25 bp, Homo sapien
tctactcagagataacgtcaatgcg

SEQ ID NO: 1457919 - DNA, 25 bp, Homo sapien
ggtcattagtgcaccaacagcccct

SEQ ID NO: 1457920 - DNA, 25 bp, Homo sapien
acgtcaatgcgcaggcttaggttga

SEQ ID NO: 1457921 - DNA, 25 bp, Homo sapien
gcacatcagcacattccacgattaa

SEQ ID NO: 1457922 - DNA, 25 bp, Homo sapien
tctgaggacttgcactctctaacgg

SEQ ID NO: 1457923 - DNA, 25 bp, Homo sapien
cacagctgcctctaagtagtgacac

SEQ ID NO: 1457924 - DNA, 25 bp, Homo sapien
tgacactaccgaaggacgggagttc

SEQ ID NO: 1457925 - DNA, 25 bp, Homo sapien
gtagattccaataaacttgcttcct

SEQ ID NO: 1457926 - DNA, 25 bp, Homo sapien
tccttccgggcaggaaaatgtcagc

SEQ ID NO: 1457927 - DNA, 25 bp, Homo sapien
ttccgggcaggaaaatgtcagccag

SEQ ID NO: 1457928 - DNA, 25 bp, Homo sapien
gcatccttccgggcaggaaaatgtc

SEQ ID NO: 1457929 - DNA, 25 bp, Homo sapien
aaaatgtcagccagcgctcgccggc

SEQ ID NO: 1457930 - DNA, 25 bp, Homo sapien
gatcccatttagagttgcccagtca

SEQ ID NO: 1457931 - DNA, 25 bp, Homo sapien
cttggatatctcatgggaacacacc

SEQ ID NO: 1457932 - DNA, 25 bp, Homo sapien
tcatacagatactggccagctggat

SEQ ID NO: 1457933 - DNA, 25 bp, Homo sapien
gaatgtacacagctgtatcaccagc

SEQ ID NO: 1457934 - DNA, 25 bp, Homo sapien
acaagtgtttcaatactctatgtat

SEQ ID NO: 1457935 - DNA, 25 bp, Homo sapien
caagtgtttcaatactctatgtatt

SEQ ID NO: 1457936 - DNA, 25 bp, Homo sapien
gacttcatgacagagctacattctg

SEQ ID NO: 1457937 - DNA, 25 bp, Homo sapien
tcaattgttgatcgaaacatgactg

SEQ ID NO: 1457938 - DNA, 25 bp, Homo sapien
gatggcaaagtctgtcgcttctggg

SEQ ID NO: 1457939 - DNA, 25 bp, Homo sapien
tgcacacctgggctagatggcaaag

SEQ ID NO: 1457940 - DNA, 25 bp, Homo sapien
tcatagctaagcgttgggaaaggct

SEQ ID NO: 1457941 - DNA, 25 bp, Homo sapien
gcatcactctttgaagttggcacag

SEQ ID NO: 1457942 - DNA, 25 bp, Homo sapien
gaagtcctacgtggaagttccagca

SEQ ID NO: 1457943 - DNA, 25 bp, Homo sapien
ctcccatgggagaaggtgatagcat

SEQ ID NO: 1457944 - DNA, 25 bp, Homo sapien
gacatcccgccctgaagtaatttca

SEQ ID NO: 1457945 - DNA, 25 bp, Homo sapien
ctaataggtgacatcccgccctgaa

SEQ ID NO: 1457946 - DNA, 25 bp, Homo sapien
tcaccggagatacgatatttttggg

SEQ ID NO: 1457947 - DNA, 25 bp, Homo sapien
ctttatgacctttcaccggagatac

SEQ ID NO: 1457948 - DNA, 25 bp, Homo sapien
ccgcatgctttctccattcccagtc

SEQ ID NO: 1457949 - DNA, 25 bp, Homo sapien
cgcatgctttctccattcccagtcc

SEQ ID NO: 1457950 - DNA, 25 bp, Homo sapien
aattcagaaacggaagacatggtgg

SEQ ID NO: 1457951 - DNA, 25 bp, Homo sapien
cagggagcattcctaggtttcaacc

SEQ ID NO: 1457952 - DNA, 25 bp, Homo sapien
aaagtgacttcccacccagtgaagg

SEQ ID NO: 1457953 - DNA, 25 bp, Homo sapien
agactgcacaggagatccaccgctt

SEQ ID NO: 1457954 - DNA, 25 bp, Homo sapien
cccgcgcccgaccttctttctgtct

SEQ ID NO: 1457955 - DNA, 25 bp, Homo sapien
tgtaccagatgtgttgttgtaaaaa

SEQ ID NO: 1457956 - DNA, 25 bp, Homo sapien
ctgtaccagatgtgttgttgtaaaa

SEQ ID NO: 1457957 - DNA, 25 bp, Homo sapien
taccagatgtgttgttgtaaaaata

SEQ ID NO: 1457958 - DNA, 25 bp, Homo sapien
gtaccagatgtgttgttgtaaaaat

SEQ ID NO: 1457959 - DNA, 25 bp, Homo sapien
atctgtactctgagggtctgtggcc

SEQ ID NO: 1457960 - DNA, 25 bp, Homo sapien
acagtggggcatccaaggaccacca

SEQ ID NO: 1457961 - DNA, 25 bp, Homo sapien
cgtggtgcacccagaagaacagtgg

SEQ ID NO: 1457962 - DNA, 25 bp, Homo sapien
gcttttgagtgatctgtactctgag

SEQ ID NO: 1457963 - DNA, 25 bp, Homo sapien
tcccttttatctctgagtgaaacac

SEQ ID NO: 1457964 - DNA, 25 bp, Homo sapien
catggggtatgtgccagtgtcctga

SEQ ID NO: 1457965 - DNA, 25 bp, Homo sapien
gatgcatgaggtagtctctgtctgt

SEQ ID NO: 1457966 - DNA, 25 bp, Homo sapien
ttatttggttctgtgacgtctgatc

SEQ ID NO: 1457967 - DNA, 25 bp, Homo sapien
ttgtctttctgaagtgccagggagc

SEQ ID NO: 1457968 - DNA, 25 bp, Homo sapien
gagcccaaaggggaacttccacaca

SEQ ID NO: 1457969 - DNA, 25 bp, Homo sapien
tcatttttgtctttctgaagtgcca

SEQ ID NO: 1457970 - DNA, 25 bp, Homo sapien
tctgaagtgccagggagcccaaagg

SEQ ID NO: 1457971 - DNA, 25 bp, Homo sapien
cctgcggctgcactgttaaaaaggt

SEQ ID NO: 1457972 - DNA, 25 bp, Homo sapien
caggatggctgctttcctaggaagg

SEQ ID NO: 1457973 - DNA, 25 bp, Homo sapien
cacccctgctgtcccaaggcatctg

SEQ ID NO: 1457974 - DNA, 25 bp, Homo sapien
aacagctcccctctgtataaatctg

SEQ ID NO: 1457975 - DNA, 25 bp, Homo sapien
ggcaaaagtttgaagtaacagggca

SEQ ID NO: 1457976 - DNA, 25 bp, Homo sapien
tgggaagtgtctgttattaccactt

SEQ ID NO: 1457977 - DNA, 25 bp, Homo sapien
ccagccacttcccttggaggcaaaa

SEQ ID NO: 1457978 - DNA, 25 bp, Homo sapien
gataggtcagagatgtagatgaatc

SEQ ID NO: 1457979 - DNA, 25 bp, Homo sapien
tcttatatagcaggaggtaggaatc

SEQ ID NO: 1457980 - DNA, 25 bp, Homo sapien
ggaatccagcttcaacttggttgtg

SEQ ID NO: 1457981 - DNA, 25 bp, Homo sapien
tactatggcacaacaccataaggct

SEQ ID NO: 1457982 - DNA, 25 bp, Homo sapien
tgatgaagctatgactgacaaactc

SEQ ID NO: 1457983 - DNA, 25 bp, Homo sapien
cctgtggaagagaagttccagttcc

SEQ ID NO: 1457984 - DNA, 25 bp, Homo sapien
ttccagttccatgacaggcaacttg

SEQ ID NO: 1457985 - DNA, 25 bp, Homo sapien
ctcctgtggaagagaagttccagtt

SEQ ID NO: 1457986 - DNA, 25 bp, Homo sapien
caacttgtcaggataagcatccaga

SEQ ID NO: 1457987 - DNA, 25 bp, Homo sapien
tctttgttgcggtggccaatagacg

SEQ ID NO: 1457988 - DNA, 25 bp, Homo sapien
gtggccaatagacgcattcggaaca

SEQ ID NO: 1457989 - DNA, 25 bp, Homo sapien
cgcccctctttgttgcggtggccaa

SEQ ID NO: 1457990 - DNA, 25 bp, Homo sapien
tgttgcggtggccaatagacgcatt

SEQ ID NO: 1457991 - DNA, 25 bp, Homo sapien
catccgcaggttgtttgcagtcagg

SEQ ID NO: 1457992 - DNA, 25 bp, Homo sapien
caggttgtttgcagtcaggattaca

SEQ ID NO: 1457993 - DNA, 25 bp, Homo sapien
gcagtcaggattacatcagttctga

SEQ ID NO: 1457994 - DNA, 25 bp, Homo sapien
ctttcttctccgcatccgcaggttg

SEQ ID NO: 1457995 - DNA, 25 bp, Homo sapien
cttctctgacccattatgactgcga

SEQ ID NO: 1457996 - DNA, 25 bp, Homo sapien
gaaggtcaatgaccaacagcatcac

SEQ ID NO: 1457997 - DNA, 25 bp, Homo sapien
tatgactgcgaaggtcaatgaccaa

SEQ ID NO: 1457998 - DNA, 25 bp, Homo sapien
attttcatggttgccctgaaggatc

SEQ ID NO: 1457999 - DNA, 25 bp, Homo sapien
gggacttcctactgctttgtcctgg

SEQ ID NO: 1458000 - DNA, 25 bp, Homo sapien
gactggttggcatcagtcctgactg

SEQ ID NO: 1458001 - DNA, 25 bp, Homo sapien
gggataggaaaggacaaatcctgcc

SEQ ID NO: 1458002 - DNA, 25 bp, Homo sapien
actgtgaatgtgctcagctggcggt

SEQ ID NO: 1458003 - DNA, 25 bp, Homo sapien
tcctctcccaacctctattcccgta

SEQ ID NO: 1458004 - DNA, 25 bp, Homo sapien
tctattcccgtagcccatggctcag

SEQ ID NO: 1458005 - DNA, 25 bp, Homo sapien
ctctctcctacattcgagctgccag

SEQ ID NO: 1458006 - DNA, 25 bp, Homo sapien
tctcctacattcgagctgccagctt

SEQ ID NO: 1458007 - DNA, 25 bp, Homo sapien
caggtcccaaggctttaccagttga

SEQ ID NO: 1458008 - DNA, 25 bp, Homo sapien
ggtcccaaggctttaccagttgaca

SEQ ID NO: 1458009 - DNA, 25 bp, Homo sapien
ccaggtcccaaggctttaccagttg

SEQ ID NO: 1458010 - DNA, 25 bp, Homo sapien
ggagtgatcagcaggtcttcagaac

SEQ ID NO: 1458011 - DNA, 25 bp, Homo sapien
ccaagaatcaaactaagggaggact

SEQ ID NO: 1458012 - DNA, 25 bp, Homo sapien
gcacaagaggtcacgtactattata

SEQ ID NO: 1458013 - DNA, 25 bp, Homo sapien
tagcggtactggatttacctctgac

SEQ ID NO: 1458014 - DNA, 25 bp, Homo sapien
atcttgatagcaaaaggtacagtaa

SEQ ID NO: 1458015 - DNA, 25 bp, Homo sapien
gatagtataacacttgagactgaga

SEQ ID NO: 1458016 - DNA, 25 bp, Homo sapien
agtgcaaatgacttgacgcctctct

SEQ ID NO: 1458017 - DNA, 25 bp, Homo sapien
taaaagcagacagtaactaaattcc

SEQ ID NO: 1458018 - DNA, 25 bp, Homo sapien
tttggcaggtaagtacaggctctgg

SEQ ID NO: 1458019 - DNA, 25 bp, Homo sapien
gaatttagagctcacttgtcacgaa

SEQ ID NO: 1458020 - DNA, 25 bp, Homo sapien
tacctgtgaatgacccaaggctttc

SEQ ID NO: 1458021 - DNA, 25 bp, Homo sapien
tcatactggtgcatcacggtaaaag

SEQ ID NO: 1458022 - DNA, 25 bp, Homo sapien
tgaactttgccaataaaggcagatg

SEQ ID NO: 1458023 - DNA, 25 bp, Homo sapien
aagtccattaacagtccataagtct

SEQ ID NO: 1458024 - DNA, 25 bp, Homo sapien
ctgaagagttattttcgtttggaag

SEQ ID NO: 1458025 - DNA, 25 bp, Homo sapien
gtccattaacagtccataagtcttg

SEQ ID NO: 1458026 - DNA, 25 bp, Homo sapien
tagaagtttcaagccaccaaccaaa

SEQ ID NO: 1458027 - DNA, 25 bp, Homo sapien
tagctagaagtttcaagccaccaac

SEQ ID NO: 1458028 - DNA, 25 bp, Homo sapien
gacagtctagctagaagtttcaagc

SEQ ID NO: 1458029 - DNA, 25 bp, Homo sapien
tgtaagaagtgacagtctagctaga

SEQ ID NO: 1458030 - DNA, 25 bp, Homo sapien
taatccacagttatggcacttcggg

SEQ ID NO: 1458031 - DNA, 25 bp, Homo sapien
gcacttcgggaatgacaggtggtca

SEQ ID NO: 1458032 - DNA, 25 bp, Homo sapien
tcgggaatgacaggtggtcacttct

SEQ ID NO: 1458033 - DNA, 25 bp, Homo sapien
atataatccacagttatggcacttc

SEQ ID NO: 1458034 - DNA, 25 bp, Homo sapien
aaacagatgacaaactgaaatggtg

SEQ ID NO: 1458035 - DNA, 25 bp, Homo sapien
gaataaacagatgacaaactgaaat

SEQ ID NO: 1458036 - DNA, 25 bp, Homo sapien
ataaacagatgacaaactgaaatgg

SEQ ID NO: 1458037 - DNA, 25 bp, Homo sapien
tgaataaacagatgacaaactgaaa

SEQ ID NO: 1458038 - DNA, 25 bp, Homo sapien
ttttcagctgtcactaggacctctg

SEQ ID NO: 1458039 - DNA, 25 bp, Homo sapien
ttcagctgtcactaggacctctgtt

SEQ ID NO: 1458040 - DNA, 25 bp, Homo sapien
tttcagctgtcactaggacctctgt

SEQ ID NO: 1458041 - DNA, 25 bp, Homo sapien
aacatgattacccagcagactgcca

SEQ ID NO: 1458042 - DNA, 25 bp, Homo sapien
tttcgatggcctccagaattaggaa

SEQ ID NO: 1458043 - DNA, 25 bp, Homo sapien
ggttagaaagatgcctagttacatg

SEQ ID NO: 1458044 - DNA, 25 bp, Homo sapien
aaacaattccaaagcaacatgcaag

SEQ ID NO: 1458045 - DNA, 25 bp, Homo sapien
ggccaaattggaatagataaaattc

SEQ ID NO: 1458046 - DNA, 25 bp, Homo sapien
agttctgtgagatacctaggtttgg

SEQ ID NO: 1458047 - DNA, 25 bp, Homo sapien
tgctgtacctcatacacacagttct

SEQ ID NO: 1458048 - DNA, 25 bp, Homo sapien
tttgtccccgtgaagactgttcctg

SEQ ID NO: 1458049 - DNA, 25 bp, Homo sapien
gtactgcgggtttggtttcaggcca

SEQ ID NO: 1458050 - DNA, 25 bp, Homo sapien
tataggcatgctcacaggtactgcg

SEQ ID NO: 1458051 - DNA, 25 bp, Homo sapien
ggtgccttgtgaacgaacagtaatc

SEQ ID NO: 1458052 - DNA, 25 bp, Homo sapien
gaatagtggtctcagcagtgtgctt

SEQ ID NO: 1458053 - DNA, 25 bp, Homo sapien
gaagagacttaatgcattcctctgg

SEQ ID NO: 1458054 - DNA, 25 bp, Homo sapien
tgccttcatacactggagtagcact

SEQ ID NO: 1458055 - DNA, 25 bp, Homo sapien
gctttgactcaagggaatcctgtgg

SEQ ID NO: 1458056 - DNA, 25 bp, Homo sapien
tgattcaaagtgagacatgtgagtc

SEQ ID NO: 1458057 - DNA, 25 bp, Homo sapien
tatttgctacgcagattgcagggca

SEQ ID NO: 1458058 - DNA, 25 bp, Homo sapien
gaattccactgggttcactgacaag

SEQ ID NO: 1458059 - DNA, 25 bp, Homo sapien
gtcaccacacataacaatagggcag

SEQ ID NO: 1458060 - DNA, 25 bp, Homo sapien
aatatcagggcggaagaattccact

SEQ ID NO: 1458061 - DNA, 25 bp, Homo sapien
tctgaacaatgtttaccaaactgta

SEQ ID NO: 1458062 - DNA, 25 bp, Homo sapien
ctgaacaatgtttaccaaactgtat

SEQ ID NO: 1458063 - DNA, 25 bp, Homo sapien
ctgatacttctgaacaatgtttacc

SEQ ID NO: 1458064 - DNA, 25 bp, Homo sapien
tacttctgaacaatgtttaccaaac

SEQ ID NO: 1458065 - DNA, 25 bp, Homo sapien
tatccattaggtagacactggcagg

SEQ ID NO: 1458066 - DNA, 25 bp, Homo sapien
gctcagaagcttataggtctacagg

SEQ ID NO: 1458067 - DNA, 25 bp, Homo sapien
tgatgaacgagacaaaatggtctcc

SEQ ID NO: 1458068 - DNA, 25 bp, Homo sapien
tctacaggtggacagaacaactcct

SEQ ID NO: 1458069 - DNA, 25 bp, Homo sapien
gctaaaagttacattgccttgtctc

SEQ ID NO: 1458070 - DNA, 25 bp, Homo sapien
tttgtcagcaagttatactttaatg

SEQ ID NO: 1458071 - DNA, 25 bp, Homo sapien
tactttaatgacacatgaattttca

SEQ ID NO: 1458072 - DNA, 25 bp, Homo sapien
taaatttggctaaaagttacattgc

SEQ ID NO: 1458073 - DNA, 25 bp, Homo sapien
tcaggaagccgaaatgagaggatta

SEQ ID NO: 1458074 - DNA, 25 bp, Homo sapien
ctgcactccagttgggcgacagagt

SEQ ID NO: 1458075 - DNA, 25 bp, Homo sapien
gattacttgagcccagtaggttgag

SEQ ID NO: 1458076 - DNA, 25 bp, Homo sapien
gctgtagtgagccatgattgtgcca

SEQ ID NO: 1458077 - DNA, 25 bp, Homo sapien
ctgctccataatgatcttcttgaac

SEQ ID NO: 1458078 - DNA, 25 bp, Homo sapien
tctctgctccataatgatcttcttg

SEQ ID NO: 1458079 - DNA, 25 bp, Homo sapien
ctctgctccataatgatcttcttga

SEQ ID NO: 1458080 - DNA, 25 bp, Homo sapien
tctgctccataatgatcttcttgaa

SEQ ID NO: 1458081 - DNA, 25 bp, Homo sapien
aaaaaatagcttgaattagaacaca

SEQ ID NO: 1458082 - DNA, 25 bp, Homo sapien
gaaaaaaatagcttgaattagaaca

SEQ ID NO: 1458083 - DNA, 25 bp, Homo sapien
aaaaatagcttgaattagaacacag

SEQ ID NO: 1458084 - DNA, 25 bp, Homo sapien
aaatagcttgaattagaacacagag

SEQ ID NO: 1458085 - DNA, 25 bp, Homo sapien
aaccatttagttcataaatgcacaa

SEQ ID NO: 1458086 - DNA, 25 bp, Homo sapien
gataaaaccatttagttcataaatg

SEQ ID NO: 1458087 - DNA, 25 bp, Homo sapien
taaaaccatttagttcataaatgca

SEQ ID NO: 1458088 - DNA, 25 bp, Homo sapien
tcttatgtgaagaatttcaataata

SEQ ID NO: 1458089 - DNA, 25 bp, Homo sapien
ccggcaatgtctataaaggtgagag

SEQ ID NO: 1458090 - DNA, 25 bp, Homo sapien
aactccagtgtaatactggccgccg

SEQ ID NO: 1458091 - DNA, 25 bp, Homo sapien
actggccgccggcaatgtctataaa

SEQ ID NO: 1458092 - DNA, 25 bp, Homo sapien
cttccagtaaatcttgtgaaagtat

SEQ ID NO: 1458093 - DNA, 25 bp, Homo sapien
agtcaaacttgttctcactgtcttc

SEQ ID NO: 1458094 - DNA, 25 bp, Homo sapien
tttctttatcatggctacatatata

SEQ ID NO: 1458095 - DNA, 25 bp, Homo sapien
caaacttgttctcactgtcttcaca

SEQ ID NO: 1458096 - DNA, 25 bp, Homo sapien
catatatattcccaattccgcttta

SEQ ID NO: 1458097 - DNA, 25 bp, Homo sapien
cctgatcaggtttttagggtgccta

SEQ ID NO: 1458098 - DNA, 25 bp, Homo sapien
tcacaaatatggcttaacgaagagc

SEQ ID NO: 1458099 - DNA, 25 bp, Homo sapien
aaagtaagcaataggcctgatcagg

SEQ ID NO: 1458100 - DNA, 25 bp, Homo sapien
gaggaacaaggtgatcacagcagag

SEQ ID NO: 1458101 - DNA, 25 bp, Homo sapien
aaggctcatctccctcagcgttcat

SEQ ID NO: 1458102 - DNA, 25 bp, Homo sapien
tttcttcgttttgatgaaggctcat

SEQ ID NO: 1458103 - DNA, 25 bp, Homo sapien
tcttcgttttgatgaaggctcatct

SEQ ID NO: 1458104 - DNA, 25 bp, Homo sapien
gaaggctcatctccctcagcgttca

SEQ ID NO: 1458105 - DNA, 25 bp, Homo sapien
ccagttacagtactggaactgagtt

SEQ ID NO: 1458106 - DNA, 25 bp, Homo sapien
ggtctccagttacagtactggaact

SEQ ID NO: 1458107 - DNA, 25 bp, Homo sapien
gagagatgaatcaaagatgtctggc

SEQ ID NO: 1458108 - DNA, 25 bp, Homo sapien
gtctggctcaggttgtcaggtctcc

SEQ ID NO: 1458109 - DNA, 25 bp, Homo sapien
tttagtgaaaaatgcctactactga

SEQ ID NO: 1458110 - DNA, 25 bp, Homo sapien
taaggagctcgagagtaatgtccag

SEQ ID NO: 1458111 - DNA, 25 bp, Homo sapien
gagtaatgtccaggccacctcatac

SEQ ID NO: 1458112 - DNA, 25 bp, Homo sapien
actgaagtatgggtaaggagctcga

SEQ ID NO: 1458113 - DNA, 25 bp, Homo sapien
gactcctcgagtgatggggaaacat

SEQ ID NO: 1458114 - DNA, 25 bp, Homo sapien
tcccacggtgtagtccagtctctgc

SEQ ID NO: 1458115 - DNA, 25 bp, Homo sapien
tgcagattctcccacggtgtagtcc

SEQ ID NO: 1458116 - DNA, 25 bp, Homo sapien
aatatgtctgttccagcaacacctt

SEQ ID NO: 1458117 - DNA, 25 bp, Homo sapien
caagaacttggccataacagtaagg

SEQ ID NO: 1458118 - DNA, 25 bp, Homo sapien
taatacacgtgaaacaagaacttgg

SEQ ID NO: 1458119 - DNA, 25 bp, Homo sapien
gaaacaagaacttggccataacagt

SEQ ID NO: 1458120 - DNA, 25 bp, Homo sapien
gccataacagtaagggatgacatac

SEQ ID NO: 1458121 - DNA, 25 bp, Homo sapien
gctgcgcggcgggtttacctatccc

SEQ ID NO: 1458122 - DNA, 25 bp, Homo sapien
ctcggttcccgggacggtgctgcgg

SEQ ID NO: 1458123 - DNA, 25 bp, Homo sapien
tacctatcccgcttggtctctggag

SEQ ID NO: 1458124 - DNA, 25 bp, Homo sapien
ggccagggatccaaagccactggca

SEQ ID NO: 1458125 - DNA, 25 bp, Homo sapien
cccaccacacagtggccgtagccct

SEQ ID NO: 1458126 - DNA, 25 bp, Homo sapien
gtggccgtagcccttcctcacacag

SEQ ID NO: 1458127 - DNA, 25 bp, Homo sapien
acagtggccgtagcccttcctcaca

SEQ ID NO: 1458128 - DNA, 25 bp, Homo sapien
cacacagtggccgtagcccttcctc

SEQ ID NO: 1458129 - DNA, 25 bp, Homo sapien
cacctcaatctctataatcgatgcg

SEQ ID NO: 1458130 - DNA, 25 bp, Homo sapien
gatgcgacggcctaaagtatctagg

SEQ ID NO: 1458131 - DNA, 25 bp, Homo sapien
gaaccccatcactcttaagtaccga

SEQ ID NO: 1458132 - DNA, 25 bp, Homo sapien
tcttaagtaccgactccagtcctgg

SEQ ID NO: 1458133 - DNA, 25 bp, Homo sapien
cttgcaggagtcaggattcacatct

SEQ ID NO: 1458134 - DNA, 25 bp, Homo sapien
ccccttctctgatttccaaagcgat

SEQ ID NO: 1458135 - DNA, 25 bp, Homo sapien
ccagcatgggcgttagggccattat

SEQ ID NO: 1458136 - DNA, 25 bp, Homo sapien
ctctgatttccaaagcgataaaagc

SEQ ID NO: 1458137 - DNA, 25 bp, Homo sapien
tatttcacaggtagggcatttatta

SEQ ID NO: 1458138 - DNA, 25 bp, Homo sapien
cacaggtagggcatttattagtaat

SEQ ID NO: 1458139 - DNA, 25 bp, Homo sapien
tataactacttcgatatactttggg

SEQ ID NO: 1458140 - DNA, 25 bp, Homo sapien
ttcacaggtagggcatttattagta

SEQ ID NO: 1458141 - DNA, 25 bp, Homo sapien
taatgctaatgaaacacaattgctc

SEQ ID NO: 1458142 - DNA, 25 bp, Homo sapien
gttctgaattaattggtcctgctga

SEQ ID NO: 1458143 - DNA, 25 bp, Homo sapien
cctgagtgtagtacggaaggtaaga

SEQ ID NO: 1458144 - DNA, 25 bp, Homo sapien
aattgctcttatctctttagggtgg

SEQ ID NO: 1458145 - DNA, 25 bp, Homo sapien
cctgtctgtatatggagggtcctaa

SEQ ID NO: 1458146 - DNA, 25 bp, Homo sapien
tcttgggtttgtcggtaccattcag

SEQ ID NO: 1458147 - DNA, 25 bp, Homo sapien
taccattcagattaccagtctcctg

SEQ ID NO: 1458148 - DNA, 25 bp, Homo sapien
tatgcctagtatcctgtagtccaga

SEQ ID NO: 1458149 - DNA, 25 bp, Homo sapien
tatagctcgaataacagagacagtc

SEQ ID NO: 1458150 - DNA, 25 bp, Homo sapien
tgtgttgtgccaattcctcccttct

SEQ ID NO: 1458151 - DNA, 25 bp, Homo sapien
taagttcgttctttcacattggcct

SEQ ID NO: 1458152 - DNA, 25 bp, Homo sapien
ttaagtctcgtatatctgctttctg

SEQ ID NO: 1458153 - DNA, 25 bp, Homo sapien
gaaaagtgatgtttagagcagatta

SEQ ID NO: 1458154 - DNA, 25 bp, Homo sapien
tatgtcggaccctatgttaggcatt

SEQ ID NO: 1458155 - DNA, 25 bp, Homo sapien
taggcattttatatgatacaatctt

SEQ ID NO: 1458156 - DNA, 25 bp, Homo sapien
tcacatagctaatttaggatggtgc

SEQ ID NO: 1458157 - DNA, 25 bp, Homo sapien
tggcttgaagggtcctacgtacacg

SEQ ID NO: 1458158 - DNA, 25 bp, Homo sapien
ggtcctacgtacacggagcttcgct

SEQ ID NO: 1458159 - DNA, 25 bp, Homo sapien
tgaagggtcctacgtacacggagct

SEQ ID NO: 1458160 - DNA, 25 bp, Homo sapien
gcgcctggcttgaagggtcctacgt

SEQ ID NO: 1458161 - DNA, 25 bp, Homo sapien
atgaagggaagcccaccagactagc

SEQ ID NO: 1458162 - DNA, 25 bp, Homo sapien
tgaagggaagcccaccagactagca

SEQ ID NO: 1458163 - DNA, 25 bp, Homo sapien
cccatgaagggaagcccaccagact

SEQ ID NO: 1458164 - DNA, 25 bp, Homo sapien
ttacccatgaagggaagcccaccag

SEQ ID NO: 1458165 - DNA, 25 bp, Homo sapien
tattccattaggagtagtatttctc

SEQ ID NO: 1458166 - DNA, 25 bp, Homo sapien
tgttcagccattggagtcccctgtg

SEQ ID NO: 1458167 - DNA, 25 bp, Homo sapien
atattccattaggagtagtatttct

SEQ ID NO: 1458168 - DNA, 25 bp, Homo sapien
ttttgttcagccattggagtcccct

SEQ ID NO: 1458169 - DNA, 25 bp, Homo sapien
cccttatgctgacttaggcaatatt

SEQ ID NO: 1458170 - DNA, 25 bp, Homo sapien
ggtactttttccataggcgaactga

SEQ ID NO: 1458171 - DNA, 25 bp, Homo sapien
aactgatgcttcatgacgttctgtg

SEQ ID NO: 1458172 - DNA, 25 bp, Homo sapien
tggtagcttgcctgttgcctgcctc

SEQ ID NO: 1458173 - DNA, 25 bp, Homo sapien
tggtaaaccttcaggctgccaccag

SEQ ID NO: 1458174 - DNA, 25 bp, Homo sapien
agtgactttgggtagcagcagatgg

SEQ ID NO: 1458175 - DNA, 25 bp, Homo sapien
ctgaaggtggccacagtgactttgg

SEQ ID NO: 1458176 - DNA, 25 bp, Homo sapien
cagcagatggtaaaccttcaggctg

SEQ ID NO: 1458177 - DNA, 25 bp, Homo sapien
ttggaaagttaacgtttgatgaaga

SEQ ID NO: 1458178 - DNA, 25 bp, Homo sapien
gaagaatcagtagtgcatatgaaag

SEQ ID NO: 1458179 - DNA, 25 bp, Homo sapien
cagtagtgcatatgaaagaactttc

SEQ ID NO: 1458180 - DNA, 25 bp, Homo sapien
gttaacgtttgatgaagaatcagta

SEQ ID NO: 1458181 - DNA, 25 bp, Homo sapien
gatgcagcgacttctgatgagctaa

SEQ ID NO: 1458182 - DNA, 25 bp, Homo sapien
tgagctaaagctgtaggcacaacat

SEQ ID NO: 1458183 - DNA, 25 bp, Homo sapien
tagttggtgattcttgactctgccg

SEQ ID NO: 1458184 - DNA, 25 bp, Homo sapien
caaatgaaacattggtaaggctcca

SEQ ID NO: 1458185 - DNA, 25 bp, Homo sapien
ttgaaagagagtgtagcaagtacaa

SEQ ID NO: 1458186 - DNA, 25 bp, Homo sapien
aaagagagtgtagcaagtacaatca

SEQ ID NO: 1458187 - DNA, 25 bp, Homo sapien
aagagagtgtagcaagtacaatcat

SEQ ID NO: 1458188 - DNA, 25 bp, Homo sapien
tttgaaagagagtgtagcaagtaca

SEQ ID NO: 1458189 - DNA, 25 bp, Homo sapien
cagttgatatctcatccagattata

SEQ ID NO: 1458190 - DNA, 25 bp, Homo sapien
gcagcaaacacaaatccggttatat

SEQ ID NO: 1458191 - DNA, 25 bp, Homo sapien
caaatccggttatatgtgacaccat

SEQ ID NO: 1458192 - DNA, 25 bp, Homo sapien
gatatctcatccagattataagcag

SEQ ID NO: 1458193 - DNA, 25 bp, Homo sapien
ggctaataatttccaagcagctaaa

SEQ ID NO: 1458194 - DNA, 25 bp, Homo sapien
tgaggttgaagcgtgtaaatttgga

SEQ ID NO: 1458195 - DNA, 25 bp, Homo sapien
aatgcagtcgtttctctttgtgtac

SEQ ID NO: 1458196 - DNA, 25 bp, Homo sapien
tgtacagctgtatggctaataattt

SEQ ID NO: 1458197 - DNA, 25 bp, Homo sapien
gccctgtacggctcagttgaagagg

SEQ ID NO: 1458198 - DNA, 25 bp, Homo sapien
acggctcagttgaagaggtatatcc

SEQ ID NO: 1458199 - DNA, 25 bp, Homo sapien
agaggtatatccagaggccaattta

SEQ ID NO: 1458200 - DNA, 25 bp, Homo sapien
tcaccagccctgtacggctcagttg

SEQ ID NO: 1458201 - DNA, 25 bp, Homo sapien
cttctctggattcacgccagatgcc

SEQ ID NO: 1458202 - DNA, 25 bp, Homo sapien
tctctggattcacgccagatgccat

SEQ ID NO: 1458203 - DNA, 25 bp, Homo sapien
ccttctctggattcacgccagatgc

SEQ ID NO: 1458204 - DNA, 25 bp, Homo sapien
ttctctggattcacgccagatgcca

SEQ ID NO: 1458205 - DNA, 25 bp, Homo sapien
tgcccagaaacttaacaccttgtgt

SEQ ID NO: 1458206 - DNA, 25 bp, Homo sapien
gatatactcagccaagctcaagcag

SEQ ID NO: 1458207 - DNA, 25 bp, Homo sapien
tcttaatgcctgtagtgtgccacta

SEQ ID NO: 1458208 - DNA, 25 bp, Homo sapien
ggatactgttttaccaagcctagaa

SEQ ID NO: 1458209 - DNA, 25 bp, Homo sapien
tccttagatgggaccagcagtgtct

SEQ ID NO: 1458210 - DNA, 25 bp, Homo sapien
taaagatgacattcagcctagctgc

SEQ ID NO: 1458211 - DNA, 25 bp, Homo sapien
aatgaagcaggctgtccgtggaaga

SEQ ID NO: 1458212 - DNA, 25 bp, Homo sapien
cagcttagctaaagtgtctccagca

SEQ ID NO: 1458213 - DNA, 25 bp, Homo sapien
taggcacctgagtaccacttacatg

SEQ ID NO: 1458214 - DNA, 25 bp, Homo sapien
gcattggttaaaaggctaggcacct

SEQ ID NO: 1458215 - DNA, 25 bp, Homo sapien
gggttctcccacacaagtacattga

SEQ ID NO: 1458216 - DNA, 25 bp, Homo sapien
gctgtttgaacctcagaaaaaggga

SEQ ID NO: 1458217 - DNA, 25 bp, Homo sapien
tgaatgtggtcccagattatttctg

SEQ ID NO: 1458218 - DNA, 25 bp, Homo sapien
gtcatcaatgaaacttaaaagcgag

SEQ ID NO: 1458219 - DNA, 25 bp, Homo sapien
tagagaagggttcatataaacactc

SEQ ID NO: 1458220 - DNA, 25 bp, Homo sapien
tacacataatttctgacggaaaacc

SEQ ID NO: 1458221 - DNA, 25 bp, Homo sapien
caactcgctgggtttagaatgctcc

SEQ ID NO: 1458222 - DNA, 25 bp, Homo sapien
tggtagcagctttccaacgagtctt

SEQ ID NO: 1458223 - DNA, 25 bp, Homo sapien
tatatcccgtagcttatctccactg

SEQ ID NO: 1458224 - DNA, 25 bp, Homo sapien
cactgtgggctatcatggtttgagg

SEQ ID NO: 1458225 - DNA, 25 bp, Homo sapien
ctattggatcctgctggatgtagcc

SEQ ID NO: 1458226 - DNA, 25 bp, Homo sapien
gatgtagccttatcaggtagaagcc

SEQ ID NO: 1458227 - DNA, 25 bp, Homo sapien
tattggatcctgctggatgtagcct

SEQ ID NO: 1458228 - DNA, 25 bp, Homo sapien
atgtagccttatcaggtagaagcct

SEQ ID NO: 1458229 - DNA, 25 bp, Homo sapien
tcataggtgcctctccaaagtccag

SEQ ID NO: 1458230 - DNA, 25 bp, Homo sapien
aggagaccgtgcatcacactgtgtg

SEQ ID NO: 1458231 - DNA, 25 bp, Homo sapien
tctgggccccgttgcttcaaggtgc

SEQ ID NO: 1458232 - DNA, 25 bp, Homo sapien
tagtaaggttgagcatctgggcccc

SEQ ID NO: 1458233 - DNA, 25 bp, Homo sapien
tctgatttgttggtgtagacttgaa

SEQ ID NO: 1458234 - DNA, 25 bp, Homo sapien
gacttgaataacacctctctggcca

SEQ ID NO: 1458235 - DNA, 25 bp, Homo sapien
ggcggtaggattatgcaaattcaca

SEQ ID NO: 1458236 - DNA, 25 bp, Homo sapien
ggccctcttaaactatgatcgggta

SEQ ID NO: 1458237 - DNA, 25 bp, Homo sapien
tgagaaatctgagttttgccaagga

SEQ ID NO: 1458238 - DNA, 25 bp, Homo sapien
catccattggatgagaaatctgagt

SEQ ID NO: 1458239 - DNA, 25 bp, Homo sapien
ccattggatgagaaatctgagtttt

SEQ ID NO: 1458240 - DNA, 25 bp, Homo sapien
ggatgagaaatctgagttttgccaa

SEQ ID NO: 1458241 - DNA, 25 bp, Homo sapien
aagcacgttccgtaccctggctgtg

SEQ ID NO: 1458242 - DNA, 25 bp, Homo sapien
ggaaacttgacaccatctgagactc

SEQ ID NO: 1458243 - DNA, 25 bp, Homo sapien
cttggatattagatcagatgtcatg

SEQ ID NO: 1458244 - DNA, 25 bp, Homo sapien
cctttggcgatcctggaaacttgac

SEQ ID NO: 1458245 - DNA, 25 bp, Homo sapien
ctgttttgtaccagtcgatttgctt

SEQ ID NO: 1458246 - DNA, 25 bp, Homo sapien
tgctttttcatcgactgacttgacc

SEQ ID NO: 1458247 - DNA, 25 bp, Homo sapien
ctgacttgaccctgtaacttctgag

SEQ ID NO: 1458248 - DNA, 25 bp, Homo sapien
tctgagaatctagtcaccactccta

SEQ ID NO: 1458249 - DNA, 25 bp, Homo sapien
agtctcccgcattccagaaagcaca

SEQ ID NO: 1458250 - DNA, 25 bp, Homo sapien
cagtacttgcttgggaccttctcat

SEQ ID NO: 1458251 - DNA, 25 bp, Homo sapien
cccagtctcccgcattccagaaagc

SEQ ID NO: 1458252 - DNA, 25 bp, Homo sapien
ctcccgcattccagaaagcacagta

SEQ ID NO: 1458253 - DNA, 25 bp, Homo sapien
agcaagtcaaggtctgtgccagcct

SEQ ID NO: 1458254 - DNA, 25 bp, Homo sapien
cctgtagtgggcagcaagtcaaggt

SEQ ID NO: 1458255 - DNA, 25 bp, Homo sapien
tgggcagcaagtcaaggtctgtgcc

SEQ ID NO: 1458256 - DNA, 25 bp, Homo sapien
tagtgggcagcaagtcaaggtctgt

SEQ ID NO: 1458257 - DNA, 25 bp, Homo sapien
caacattttcaagtcgctgttttta

SEQ ID NO: 1458258 - DNA, 25 bp, Homo sapien
taatgacagtaataatgtacacaac

SEQ ID NO: 1458259 - DNA, 25 bp, Homo sapien
ctttctcgaggtgttttgagttagt

SEQ ID NO: 1458260 - DNA, 25 bp, Homo sapien
tcttacagttggtggataatgacag

SEQ ID NO: 1458261 - DNA, 25 bp, Homo sapien
agtgtctgattgaacatcaaataat

SEQ ID NO: 1458262 - DNA, 25 bp, Homo sapien
tctccagtgtgagtatcagacatca

SEQ ID NO: 1458263 - DNA, 25 bp, Homo sapien
ctccagtgtgagtatcagacatcat

SEQ ID NO: 1458264 - DNA, 25 bp, Homo sapien
tgcaagtgtctgattgaacatcaaa

SEQ ID NO: 1458265 - DNA, 25 bp, Homo sapien
ggtacgcgctccatgcactttgcat

SEQ ID NO: 1458266 - DNA, 25 bp, Homo sapien
cacggatagatggtaagtttcccca

SEQ ID NO: 1458267 - DNA, 25 bp, Homo sapien
gagttctctttctagtgcccttgcc

SEQ ID NO: 1458268 - DNA, 25 bp, Homo sapien
aaaagaatccgcagtggtttgcagg

SEQ ID NO: 1458269 - DNA, 25 bp, Homo sapien
cagctccctcttcttcagtgttact

SEQ ID NO: 1458270 - DNA, 25 bp, Homo sapien
ctgttttgcccattcaagaaaatga

SEQ ID NO: 1458271 - DNA, 25 bp, Homo sapien
gtgttactagggatgctgttttgtt

SEQ ID NO: 1458272 - DNA, 25 bp, Homo sapien
cttcttcagtgttactagggatgct

SEQ ID NO: 1458273 - DNA, 25 bp, Homo sapien
aggaaactcagtgaggtgtctccca

SEQ ID NO: 1458274 - DNA, 25 bp, Homo sapien
ccaacggccttgatcccatttccaa

SEQ ID NO: 1458275 - DNA, 25 bp, Homo sapien
caggaaactcagtgaggtgtctccc

SEQ ID NO: 1458276 - DNA, 25 bp, Homo sapien
gaggtgtctcccaacggccttgatc

SEQ ID NO: 1458277 - DNA, 25 bp, Homo sapien
ttattttggtaactatctggggcat

SEQ ID NO: 1458278 - DNA, 25 bp, Homo sapien
gctcccagatgttgcggccattggt

SEQ ID NO: 1458279 - DNA, 25 bp, Homo sapien
ttgggctcccagatgttgcggccat

SEQ ID NO: 1458280 - DNA, 25 bp, Homo sapien
gttgcggccattggttattttggta

SEQ ID NO: 1458281 - DNA, 25 bp, Homo sapien
ggaagagtctcattagttaattcgg

SEQ ID NO: 1458282 - DNA, 25 bp, Homo sapien
tagttaattcggtgtgggccagatc

SEQ ID NO: 1458283 - DNA, 25 bp, Homo sapien
ggggactctaatccatctctggcag

SEQ ID NO: 1458284 - DNA, 25 bp, Homo sapien
cctgagagaggcctataggaagagt

SEQ ID NO: 1458285 - DNA, 25 bp, Homo sapien
tttcatgtttagtggaaacattcat

SEQ ID NO: 1458286 - DNA, 25 bp, Homo sapien
ccatgtggtgattgtttcatgttta

SEQ ID NO: 1458287 - DNA, 25 bp, Homo sapien
gattgtttcatgtttagtggaaaca

SEQ ID NO: 1458288 - DNA, 25 bp, Homo sapien
ggtgattgtttcatgtttagtggaa

SEQ ID NO: 1458289 - DNA, 25 bp, Homo sapien
cacaaaagaagtggtgtaactacat

SEQ ID NO: 1458290 - DNA, 25 bp, Homo sapien
tgcttgtgaaggtttctaattcggg

SEQ ID NO: 1458291 - DNA, 25 bp, Homo sapien
cagagcctctgctttgctgccggat

SEQ ID NO: 1458292 - DNA, 25 bp, Homo sapien
cctgttttcatgagccctgtgatgc

SEQ ID NO: 1458293 - DNA, 25 bp, Homo sapien
caaaacttgtctttaggaatggagc

SEQ ID NO: 1458294 - DNA, 25 bp, Homo sapien
gtgcccgtgactctgactgtggtca

SEQ ID NO: 1458295 - DNA, 25 bp, Homo sapien
tgtgacccagcattcttgattcttg

SEQ ID NO: 1458296 - DNA, 25 bp, Homo sapien
tcttagatgcttaggagcctgcctg

SEQ ID NO: 1458297 - DNA, 25 bp, Homo sapien
tgcacagtctagctggctctgggtc

SEQ ID NO: 1458298 - DNA, 25 bp, Homo sapien
tggtgattgttaggcaacgactcct

SEQ ID NO: 1458299 - DNA, 25 bp, Homo sapien
ctcctcaaaggtgggcccgtgtgtc

SEQ ID NO: 1458300 - DNA, 25 bp, Homo sapien
ccttgctcttccctagtggtgcaca

SEQ ID NO: 1458301 - DNA, 25 bp, Homo sapien
atgaccacagtggtcctctcactag

SEQ ID NO: 1458302 - DNA, 25 bp, Homo sapien
tttgtatgaccacagtggtcctctc

SEQ ID NO: 1458303 - DNA, 25 bp, Homo sapien
accacagtggtcctctcactagggc

SEQ ID NO: 1458304 - DNA, 25 bp, Homo sapien
tgtatgaccacagtggtcctctcac

SEQ ID NO: 1458305 - DNA, 25 bp, Homo sapien
catttgtcacgtagttctcatgcca

SEQ ID NO: 1458306 - DNA, 25 bp, Homo sapien
gtgcatttgtcacgtagttctcatg

SEQ ID NO: 1458307 - DNA, 25 bp, Homo sapien
cccatagtcccacattttttggagg

SEQ ID NO: 1458308 - DNA, 25 bp, Homo sapien
ccattagtctaatcttttttcaaga

SEQ ID NO: 1458309 - DNA, 25 bp, Homo sapien
caggcctggatcagggatgtcaggt

SEQ ID NO: 1458310 - DNA, 25 bp, Homo sapien
tgtattgccagggtaccaggcctgg

SEQ ID NO: 1458311 - DNA, 25 bp, Homo sapien
ctggaacctgttcaaggggagctat

SEQ ID NO: 1458312 - DNA, 25 bp, Homo sapien
gagctatttgtaccgagggagaggg

SEQ ID NO: 1458313 - DNA, 25 bp, Homo sapien
cctactgggctatctgtgagggtct

SEQ ID NO: 1458314 - DNA, 25 bp, Homo sapien
tcctactgggctatctgtgagggtc

SEQ ID NO: 1458315 - DNA, 25 bp, Homo sapien
agctcctactgggctatctgtgagg

SEQ ID NO: 1458316 - DNA, 25 bp, Homo sapien
gctcctactgggctatctgtgaggg

SEQ ID NO: 1458317 - DNA, 25 bp, Homo sapien
tctccaggcatttgaacttgtgagt

SEQ ID NO: 1458318 - DNA, 25 bp, Homo sapien
ctctccaggcatttgaacttgtgag

SEQ ID NO: 1458319 - DNA, 25 bp, Homo sapien
ggattgggcatctgcgtgtggccca

SEQ ID NO: 1458320 - DNA, 25 bp, Homo sapien
gggattgggcatctgcgtgtggccc

SEQ ID NO: 1458321 - DNA, 25 bp, Homo sapien
gattgggcatctgcgtgtggcccat

SEQ ID NO: 1458322 - DNA, 25 bp, Homo sapien
gggaagccctacctctgagcttgac

SEQ ID NO: 1458323 - DNA, 25 bp, Homo sapien
agccctacctctgagcttgacagca

SEQ ID NO: 1458324 - DNA, 25 bp, Homo sapien
catggggaagccctacctctgagct

SEQ ID NO: 1458325 - DNA, 25 bp, Homo sapien
cttcatggggaagccctacctctga

SEQ ID NO: 1458326 - DNA, 25 bp, Homo sapien
acaaagtgtgctgcgaagtgccaac

SEQ ID NO: 1458327 - DNA, 25 bp, Homo sapien
tttgtgctgtgacaccgagagctgc

SEQ ID NO: 1458328 - DNA, 25 bp, Homo sapien
gacaccctcgtgcagcttctgtgag

SEQ ID NO: 1458329 - DNA, 25 bp, Homo sapien
catgaactaggtgatggcagctgta

SEQ ID NO: 1458330 - DNA, 25 bp, Homo sapien
acagaggcgagtgtgcacacccagg

SEQ ID NO: 1458331 - DNA, 25 bp, Homo sapien
tggcacagaggcgagtgtgcacacc

SEQ ID NO: 1458332 - DNA, 25 bp, Homo sapien
cacacaccaaatgccgatttttttg

SEQ ID NO: 1458333 - DNA, 25 bp, Homo sapien
ttcccttccgtgttggctctgattg

SEQ ID NO: 1458334 - DNA, 25 bp, Homo sapien
gggcatctgtctccgaagcctcctt

SEQ ID NO: 1458335 - DNA, 25 bp, Homo sapien
tgggcatctgtctccgaagcctcct

SEQ ID NO: 1458336 - DNA, 25 bp, Homo sapien
gctttggggaaggtgtctgtatggc

SEQ ID NO: 1458337 - DNA, 25 bp, Homo sapien
aggtgtctgtatggcgagctggttt

SEQ ID NO: 1458338 - DNA, 25 bp, Homo sapien
tttgccagtgcataagcgaagcctc

SEQ ID NO: 1458339 - DNA, 25 bp, Homo sapien
tcttcacgggttagattggcattca

SEQ ID NO: 1458340 - DNA, 25 bp, Homo sapien
gagcctccaagctgggtcgtgtgtc

SEQ ID NO: 1458341 - DNA, 25 bp, Homo sapien
ttttcatcgctgtgctggacacccg

SEQ ID NO: 1458342 - DNA, 25 bp, Homo sapien
tccacagccctcgaggggctctttg

SEQ ID NO: 1458343 - DNA, 25 bp, Homo sapien
ggctctttgggagttctgtgcccag

SEQ ID NO: 1458344 - DNA, 25 bp, Homo sapien
ggatctccacagccctcgaggggct

SEQ ID NO: 1458345 - DNA, 25 bp, Homo sapien
tcgaggggctctttgggagttctgt

SEQ ID NO: 1458346 - DNA, 25 bp, Homo sapien
tgcccatttgctggttgtgtgctcc

SEQ ID NO: 1458347 - DNA, 25 bp, Homo sapien
aaagtagacctttgggatgactgcc

SEQ ID NO: 1458348 - DNA, 25 bp, Homo sapien
tgctccagggcaagaatttcatatc

SEQ ID NO: 1458349 - DNA, 25 bp, Homo sapien
tcatatccgcatctgtaaactctac

SEQ ID NO: 1458350 - DNA, 25 bp, Homo sapien
tgccaacctcccttgcagagttggg

SEQ ID NO: 1458351 - DNA, 25 bp, Homo sapien
tcagtccaaccgagctattgtaggg

SEQ ID NO: 1458352 - DNA, 25 bp, Homo sapien
tgtactgccaacctcccttgcagag

SEQ ID NO: 1458353 - DNA, 25 bp, Homo sapien
gttggagatgtactgccaacctccc

SEQ ID NO: 1458354 - DNA, 25 bp, Homo sapien
gcggatttatcagcgcagccatgcc

SEQ ID NO: 1458355 - DNA, 25 bp, Homo sapien
agtcagtgccttgcttggcagagga

SEQ ID NO: 1458356 - DNA, 25 bp, Homo sapien
cttatattcctgcagagatcgacag

SEQ ID NO: 1458357 - DNA, 25 bp, Homo sapien
cagagatcgacaggacggttctcct

SEQ ID NO: 1458358 - DNA, 25 bp, Homo sapien
acatggctgtctcgcgtctgcatcc

SEQ ID NO: 1458359 - DNA, 25 bp, Homo sapien
gtctgcatccgcgtgcacactgatg

SEQ ID NO: 1458360 - DNA, 25 bp, Homo sapien
atgcgtgtggacatggctgtctcgc

SEQ ID NO: 1458361 - DNA, 25 bp, Homo sapien
aagaggctcgcgtgcacatgcgtgt

SEQ ID NO: 1458362 - DNA, 25 bp, Homo sapien
gcagcaagaccagtgtcacccccga

SEQ ID NO: 1458363 - DNA, 25 bp, Homo sapien
cagcaagaccagtgtcacccccgag

SEQ ID NO: 1458364 - DNA, 25 bp, Homo sapien
tgaacatccgtggctcccttccctt

SEQ ID NO: 1458365 - DNA, 25 bp, Homo sapien
tctcctgaacatccgtggctccctt

SEQ ID NO: 1458366 - DNA, 25 bp, Homo sapien
tcctgaacatccgtggctcccttcc

SEQ ID NO: 1458367 - DNA, 25 bp, Homo sapien
ctgaacatccgtggctcccttccct

SEQ ID NO: 1458368 - DNA, 25 bp, Homo sapien
aatccttccgttgtaatacaacctg

SEQ ID NO: 1458369 - DNA, 25 bp, Homo sapien
gcttgattccgttttccagatcttg

SEQ ID NO: 1458370 - DNA, 25 bp, Homo sapien
tgcatccatttcctcattaatcctt

SEQ ID NO: 1458371 - DNA, 25 bp, Homo sapien
cagatcttgtctgagagctgctatt

SEQ ID NO: 1458372 - DNA, 25 bp, Homo sapien
cctcagggtctcagctgatagtggg

SEQ ID NO: 1458373 - DNA, 25 bp, Homo sapien
ggaataaggcacagacatccctcag

SEQ ID NO: 1458374 - DNA, 25 bp, Homo sapien
catacgcgtttgtggcgctcctgca

SEQ ID NO: 1458375 - DNA, 25 bp, Homo sapien
cacctggcactgtgctcatcgctgg

SEQ ID NO: 1458376 - DNA, 25 bp, Homo sapien
ggaggtgtgcatccatgccatggcc

SEQ ID NO: 1458377 - DNA, 25 bp, Homo sapien
ccatggccaacgtaggcacaggctc

SEQ ID NO: 1458378 - DNA, 25 bp, Homo sapien
tgtagaggcttccataaagcccttt

SEQ ID NO: 1458379 - DNA, 25 bp, Homo sapien
gctcatgggtcttgccagggtctcc

SEQ ID NO: 1458380 - DNA, 25 bp, Homo sapien
aggctattccgatcccaacaaagct

SEQ ID NO: 1458381 - DNA, 25 bp, Homo sapien
ctattccgatcccaacaaagcttcc

SEQ ID NO: 1458382 - DNA, 25 bp, Homo sapien
caggctattccgatcccaacaaagc

SEQ ID NO: 1458383 - DNA, 25 bp, Homo sapien
ggctattccgatcccaacaaagctt

SEQ ID NO: 1458384 - DNA, 25 bp, Homo sapien
cactgctgtagaagcccggcgatga

SEQ ID NO: 1458385 - DNA, 25 bp, Homo sapien
gcccggcgatgaatggcaggcacta

SEQ ID NO: 1458386 - DNA, 25 bp, Homo sapien
tgagctaactgcctggtgcccactg

SEQ ID NO: 1458387 - DNA, 25 bp, Homo sapien
gagctgagctaactgcctggtgccc

SEQ ID NO: 1458388 - DNA, 25 bp, Homo sapien
atgatattgagggtcctaaaatgac

SEQ ID NO: 1458389 - DNA, 25 bp, Homo sapien
gcacacagattccaacatcccattg

SEQ ID NO: 1458390 - DNA, 25 bp, Homo sapien
tgatattgagggtcctaaaatgact

SEQ ID NO: 1458391 - DNA, 25 bp, Homo sapien
tccaacatcccattgaatcctgatg

SEQ ID NO: 1458392 - DNA, 25 bp, Homo sapien
tggagagcatccagggggcccgatg

SEQ ID NO: 1458393 - DNA, 25 bp, Homo sapien
gctggagagcatccagggggcccga

SEQ ID NO: 1458394 - DNA, 25 bp, Homo sapien
ctgctggggctggagagcatccagg

SEQ ID NO: 1458395 - DNA, 25 bp, Homo sapien
gggctggagagcatccagggggccc

SEQ ID NO: 1458396 - DNA, 25 bp, Homo sapien
cacactgcctggaaaacaggagctg

SEQ ID NO: 1458397 - DNA, 25 bp, Homo sapien
gtgagtcccgaggtgtctgccctct

SEQ ID NO: 1458398 - DNA, 25 bp, Homo sapien
ccagtgacccggagtgagcaggaat

SEQ ID NO: 1458399 - DNA, 25 bp, Homo sapien
tcagaaaagctgacgcagatggagg

SEQ ID NO: 1458400 - DNA, 25 bp, Homo sapien
ttccagattagtcaccatgcacaca

SEQ ID NO: 1458401 - DNA, 25 bp, Homo sapien
ctcagagggaccatcgggccctcat

SEQ ID NO: 1458402 - DNA, 25 bp, Homo sapien
tttgctacgaatctttatttccaga

SEQ ID NO: 1458403 - DNA, 25 bp, Homo sapien
cccagggatgggctactgtccctcc

SEQ ID NO: 1458404 - DNA, 25 bp, Homo sapien
ccatgaggcaggtgataccggtcat

SEQ ID NO: 1458405 - DNA, 25 bp, Homo sapien
ctgaaccttaacttttccatgaggc

SEQ ID NO: 1458406 - DNA, 25 bp, Homo sapien
tgataccggtcattaaattcccttc

SEQ ID NO: 1458407 - DNA, 25 bp, Homo sapien
cccacaaattcccatggtgtgacac

SEQ ID NO: 1458408 - DNA, 25 bp, Homo sapien
gcactgggcggcagctgactctggg

SEQ ID NO: 1458409 - DNA, 25 bp, Homo sapien
ttcaagtcgttggagctttgttcat

SEQ ID NO: 1458410 - DNA, 25 bp, Homo sapien
tgctctcattttcaagtcgttggag

SEQ ID NO: 1458411 - DNA, 25 bp, Homo sapien
cctgagcactgggcggcagctgact

SEQ ID NO: 1458412 - DNA, 25 bp, Homo sapien
actctcttccccagtacagatttca

SEQ ID NO: 1458413 - DNA, 25 bp, Homo sapien
ctaaatgaggactctcttccccagt

SEQ ID NO: 1458414 - DNA, 25 bp, Homo sapien
aatgaggactctcttccccagtaca

SEQ ID NO: 1458415 - DNA, 25 bp, Homo sapien
tgaggactctcttccccagtacaga

SEQ ID NO: 1458416 - DNA, 25 bp, Homo sapien
tcctgttccgaccccaggagaaatc

SEQ ID NO: 1458417 - DNA, 25 bp, Homo sapien
tttctagccctctcaggtgaaacag

SEQ ID NO: 1458418 - DNA, 25 bp, Homo sapien
tggctggccgggtcctgttccgacc

SEQ ID NO: 1458419 - DNA, 25 bp, Homo sapien
gggtgagcgttttctagccctctca

SEQ ID NO: 1458420 - DNA, 25 bp, Homo sapien
tgctgctcttgtgttgcgtttcccg

SEQ ID NO: 1458421 - DNA, 25 bp, Homo sapien
gctgctcttgtgttgcgtttcccgt

SEQ ID NO: 1458422 - DNA, 25 bp, Homo sapien
tgttctgaattgagcccaagctccc

SEQ ID NO: 1458423 - DNA, 25 bp, Homo sapien
tggctttgttccagtggaaatctgc

SEQ ID NO: 1458424 - DNA, 25 bp, Homo sapien
tttgttccagtggaaatctgccacc

SEQ ID NO: 1458425 - DNA, 25 bp, Homo sapien
gttccagtggaaatctgccacctac

SEQ ID NO: 1458426 - DNA, 25 bp, Homo sapien
tctgtggctttgttccagtggaaat

SEQ ID NO: 1458427 - DNA, 25 bp, Homo sapien
tttggctgtccttggcacccctgca

SEQ ID NO: 1458428 - DNA, 25 bp, Homo sapien
gctgtccttggcacccctgcacagc

SEQ ID NO: 1458429 - DNA, 25 bp, Homo sapien
atgggtttggctgtccttggcaccc

SEQ ID NO: 1458430 - DNA, 25 bp, Homo sapien
tgggtttggctgtccttggcacccc

SEQ ID NO: 1458431 - DNA, 25 bp, Homo sapien
ttctttaatgcacggaaacatttcc

SEQ ID NO: 1458432 - DNA, 25 bp, Homo sapien
tttaatgcacggaaacatttccatt

SEQ ID NO: 1458433 - DNA, 25 bp, Homo sapien
attttctttaatgcacggaaacatt

SEQ ID NO: 1458434 - DNA, 25 bp, Homo sapien
gattttctttaatgcacggaaacat

SEQ ID NO: 1458435 - DNA, 25 bp, Homo sapien
cagcccaggatgagagagaaatgcg

SEQ ID NO: 1458436 - DNA, 25 bp, Homo sapien
gctccttttccatctgacacgaatg

SEQ ID NO: 1458437 - DNA, 25 bp, Homo sapien
gagctgaggacaagctgcccatctt

SEQ ID NO: 1458438 - DNA, 25 bp, Homo sapien
gacacgaatgtcatgtggctgaatg

SEQ ID NO: 1458439 - DNA, 25 bp, Homo sapien
tctaattgggcaaaccactgcatct

SEQ ID NO: 1458440 - DNA, 25 bp, Homo sapien
catctgcctcgtgtggaaaaacggc

SEQ ID NO: 1458441 - DNA, 25 bp, Homo sapien
ccaccacaatgagaggaggcgacgt

SEQ ID NO: 1458442 - DNA, 25 bp, Homo sapien
cgacgtggagggatatggtctctaa

SEQ ID NO: 1458443 - DNA, 25 bp, Homo sapien
ttaattagtcagagtttttgaggtc

SEQ ID NO: 1458444 - DNA, 25 bp, Homo sapien
taattagtcagagtttttgaggtct

SEQ ID NO: 1458445 - DNA, 25 bp, Homo sapien
aattagtcagagtttttgaggtctg

SEQ ID NO: 1458446 - DNA, 25 bp, Homo sapien
attagtcagagtttttgaggtctgt

SEQ ID NO: 1458447 - DNA, 25 bp, Homo sapien
tcaggattgctgtccctgctgctgc

SEQ ID NO: 1458448 - DNA, 25 bp, Homo sapien
gctgctgctgctgcggtggcggtgg

SEQ ID NO: 1458449 - DNA, 25 bp, Homo sapien
gcggtggtggtggccggggcggatg

SEQ ID NO: 1458450 - DNA, 25 bp, Homo sapien
tgctgctgctgcggtggcggtggtg

SEQ ID NO: 1458451 - DNA, 25 bp, Homo sapien
gtgaccagcgggaaggtggggaggc

SEQ ID NO: 1458452 - DNA, 25 bp, Homo sapien
tggtgaccagcgggaaggtggggag

SEQ ID NO: 1458453 - DNA, 25 bp, Homo sapien
gatggtgaccagcgggaaggtgggg

SEQ ID NO: 1458454 - DNA, 25 bp, Homo sapien
tgaccagcgggaaggtggggaggct

SEQ ID NO: 1458455 - DNA, 25 bp, Homo sapien
tggcctccgcactgccagggtgtga

SEQ ID NO: 1458456 - DNA, 25 bp, Homo sapien
cagagttaacctgaggacgaggaca

SEQ ID NO: 1458457 - DNA, 25 bp, Homo sapien
caggtgacctctccaactggctgtg

SEQ ID NO: 1458458 - DNA, 25 bp, Homo sapien
cctttgcggcagagccagagttaac

SEQ ID NO: 1458459 - DNA, 25 bp, Homo sapien
tcaaagtggtgacagatgcgtaggt

SEQ ID NO: 1458460 - DNA, 25 bp, Homo sapien
gatttttcaaagtggtgacagatgc

SEQ ID NO: 1458461 - DNA, 25 bp, Homo sapien
tgacagatgcgtaggtaaccaacac

SEQ ID NO: 1458462 - DNA, 25 bp, Homo sapien
agtggtgacagatgcgtaggtaacc

SEQ ID NO: 1458463 - DNA, 25 bp, Homo sapien
catcttcgttatattttctggacaa

SEQ ID NO: 1458464 - DNA, 25 bp, Homo sapien
cttgtttgctgaaccctcatcttcg

SEQ ID NO: 1458465 - DNA, 25 bp, Homo sapien
tttgctgaaccctcatcttcgttat

SEQ ID NO: 1458466 - DNA, 25 bp, Homo sapien
gctgaaccctcatcttcgttatatt

SEQ ID NO: 1458467 - DNA, 25 bp, Homo sapien
gatgtgctttctggtcaccacttca

SEQ ID NO: 1458468 - DNA, 25 bp, Homo sapien
tcttgaggtccactcgatggctgcc

SEQ ID NO: 1458469 - DNA, 25 bp, Homo sapien
gatggctgcccttgtgactgttgat

SEQ ID NO: 1458470 - DNA, 25 bp, Homo sapien
gacacagtatgagacactcctcatt

SEQ ID NO: 1458471 - DNA, 25 bp, Homo sapien
gcagtccagggagaaactgatgaaa

SEQ ID NO: 1458472 - DNA, 25 bp, Homo sapien
gagaaactgatgaaattcaggaagt

SEQ ID NO: 1458473 - DNA, 25 bp, Homo sapien
gggaaagcagtccagggagaaactg

SEQ ID NO: 1458474 - DNA, 25 bp, Homo sapien
gtccagggagaaactgatgaaattc

SEQ ID NO: 1458475 - DNA, 25 bp, Homo sapien
gctgactgctaagtggccggtttct

SEQ ID NO: 1458476 - DNA, 25 bp, Homo sapien
tattgtggcccacactttcgcctgg

SEQ ID NO: 1458477 - DNA, 25 bp, Homo sapien
aagtaccaggtacccctcgcattca

SEQ ID NO: 1458478 - DNA, 25 bp, Homo sapien
gccggtttctggctgcaagtaccag

SEQ ID NO: 1458479 - DNA, 25 bp, Homo sapien
gtgaggatagcaccctgctaacatg

SEQ ID NO: 1458480 - DNA, 25 bp, Homo sapien
caatctgtccatggattactagtga

SEQ ID NO: 1458481 - DNA, 25 bp, Homo sapien
ctggctggttccgctttgcttgggt

SEQ ID NO: 1458482 - DNA, 25 bp, Homo sapien
cttgggtgaatagtgttagcatttc

SEQ ID NO: 1458483 - DNA, 25 bp, Homo sapien
cttctctttagattttcatggcccc

SEQ ID NO: 1458484 - DNA, 25 bp, Homo sapien
gtaacctcttttataattccagtgc

SEQ ID NO: 1458485 - DNA, 25 bp, Homo sapien
ttccagtgcttctctttagattttc

SEQ ID NO: 1458486 - DNA, 25 bp, Homo sapien
tctttagattttcatggcccctcat

SEQ ID NO: 1458487 - DNA, 25 bp, Homo sapien
gcccggatcccagttcccaagcaga

SEQ ID NO: 1458488 - DNA, 25 bp, Homo sapien
agcgaactggtgctctaagtcctgg

SEQ ID NO: 1458489 - DNA, 25 bp, Homo sapien
caactgctcctatcggtctgcctgg

SEQ ID NO: 1458490 - DNA, 25 bp, Homo sapien
agggacctgaagcttgcagcgaact

SEQ ID NO: 1458491 - DNA, 25 bp, Homo sapien
tctgcttcctctgctagagaagttt

SEQ ID NO: 1458492 - DNA, 25 bp, Homo sapien
tctgctagagaagtttcatgcagct

SEQ ID NO: 1458493 - DNA, 25 bp, Homo sapien
cttcctctgctagagaagtttcatg

SEQ ID NO: 1458494 - DNA, 25 bp, Homo sapien
ctagagaagtttcatgcagctgagg

SEQ ID NO: 1458495 - DNA, 25 bp, Homo sapien
ctctggcttcactatcaagtgcctg

SEQ ID NO: 1458496 - DNA, 25 bp, Homo sapien
tctggcttcactatcaagtgcctga

SEQ ID NO: 1458497 - DNA, 25 bp, Homo sapien
tctctggcttcactatcaagtgcct

SEQ ID NO: 1458498 - DNA, 25 bp, Homo sapien
tgcattgcgggcctccggaatggtt

SEQ ID NO: 1458499 - DNA, 25 bp, Homo sapien
cagcattgagtgttttgatcaaaca

SEQ ID NO: 1458500 - DNA, 25 bp, Homo sapien
catccaccgctcagagccctggtgg

SEQ ID NO: 1458501 - DNA, 25 bp, Homo sapien
cctccggaatggttctattacagca

SEQ ID NO: 1458502 - DNA, 25 bp, Homo sapien
gcatatggtcctactctcacaaggg

SEQ ID NO: 1458503 - DNA, 25 bp, Homo sapien
taacgtcatgtttccccagatctgc

SEQ ID NO: 1458504 - DNA, 25 bp, Homo sapien
tgcttgaagcctccatctggcctgg

SEQ ID NO: 1458505 - DNA, 25 bp, Homo sapien
tcacaagggccttatagcaggaggt

SEQ ID NO: 1458506 - DNA, 25 bp, Homo sapien
caaccaacttggagcgggcaccaag

SEQ ID NO: 1458507 - DNA, 25 bp, Homo sapien
ggctgcccatcaaaacacattgttg

SEQ ID NO: 1458508 - DNA, 25 bp, Homo sapien
aagagatggcaattgcccccttctg

SEQ ID NO: 1458509 - DNA, 25 bp, Homo sapien
ggcaccaagccatcccagcagatgg

SEQ ID NO: 1458510 - DNA, 25 bp, Homo sapien
ctggaaagtggttacggatgagcct

SEQ ID NO: 1458511 - DNA, 25 bp, Homo sapien
tcacatgggtatagccacgggagct

SEQ ID NO: 1458512 - DNA, 25 bp, Homo sapien
tgacgctgagtcttgttgaaaagct

SEQ ID NO: 1458513 - DNA, 25 bp, Homo sapien
gcctagagatgctcataaatgacgc

SEQ ID NO: 1458514 - DNA, 25 bp, Homo sapien
gaggccagcggcacggagtcctttt

SEQ ID NO: 1458515 - DNA, 25 bp, Homo sapien
cacggagtccttttagtgacccaga

SEQ ID NO: 1458516 - DNA, 25 bp, Homo sapien
cagcggcacggagtccttttagtga

SEQ ID NO: 1458517 - DNA, 25 bp, Homo sapien
aggatggattggaggccagcggcac

SEQ ID NO: 1458518 - DNA, 25 bp, Homo sapien
gaaagtgaaggcgagagaatccttc

SEQ ID NO: 1458519 - DNA, 25 bp, Homo sapien
aagtgaaggcgagagaatccttctg

SEQ ID NO: 1458520 - DNA, 25 bp, Homo sapien
gcagaaagtgaaggcgagagaatcc

SEQ ID NO: 1458521 - DNA, 25 bp, Homo sapien
cagaaagtgaaggcgagagaatcct

SEQ ID NO: 1458522 - DNA, 25 bp, Homo sapien
tagccatgtgcttgatcccagtgaa

SEQ ID NO: 1458523 - DNA, 25 bp, Homo sapien
tattcaggagcgttgtaaatgtctc

SEQ ID NO: 1458524 - DNA, 25 bp, Homo sapien
taaatgtctcccctgtaatcaggcc

SEQ ID NO: 1458525 - DNA, 25 bp, Homo sapien
gggcactagctccttgatactgggc

SEQ ID NO: 1458526 - DNA, 25 bp, Homo sapien
ctcacctggaccgaagcccagaaat

SEQ ID NO: 1458527 - DNA, 25 bp, Homo sapien
cccagaaatgggtcgaatgttcctt

SEQ ID NO: 1458528 - DNA, 25 bp, Homo sapien
cacctggaccgaagcccagaaatgg

SEQ ID NO: 1458529 - DNA, 25 bp, Homo sapien
aagcccagaaatgggtcgaatgttc

SEQ ID NO: 1458530 - DNA, 25 bp, Homo sapien
gaacctggaattctcagcaaccacc

SEQ ID NO: 1458531 - DNA, 25 bp, Homo sapien
tctcagcaaccaccttttttctatc

SEQ ID NO: 1458532 - DNA, 25 bp, Homo sapien
ccagaacctggaattctcagcaacc

SEQ ID NO: 1458533 - DNA, 25 bp, Homo sapien
attctcagcaaccaccttttttcta

SEQ ID NO: 1458534 - DNA, 25 bp, Homo sapien
tctctttgagggaaagtaccataat

SEQ ID NO: 1458535 - DNA, 25 bp, Homo sapien
gtataaaattctgggtacacaggca

SEQ ID NO: 1458536 - DNA, 25 bp, Homo sapien
tacatttctcccttgacagatggct

SEQ ID NO: 1458537 - DNA, 25 bp, Homo sapien
taggttctgccaatagagggcacaa

SEQ ID NO: 1458538 - DNA, 25 bp, Homo sapien
ttattgacccacttcacattcccac

SEQ ID NO: 1458539 - DNA, 25 bp, Homo sapien
gacccacttcacattcccacacttt

SEQ ID NO: 1458540 - DNA, 25 bp, Homo sapien
cacttcacattcccacacttttggg

SEQ ID NO: 1458541 - DNA, 25 bp, Homo sapien
tattgacccacttcacattcccaca

SEQ ID NO: 1458542 - DNA, 25 bp, Homo sapien
gagaaagcatatctttgtccttcag

SEQ ID NO: 1458543 - DNA, 25 bp, Homo sapien
catgtgagaaagcatatctttgtcc

SEQ ID NO: 1458544 - DNA, 25 bp, Homo sapien
gccccaggagaataaccatgtgaga

SEQ ID NO: 1458545 - DNA, 25 bp, Homo sapien
gagaataaccatgtgagaaagcata

SEQ ID NO: 1458546 - DNA, 25 bp, Homo sapien
gagatttggcggaaacctcgaccat

SEQ ID NO: 1458547 - DNA, 25 bp, Homo sapien
aacgagtcgtctgtttgcaagagcg

SEQ ID NO: 1458548 - DNA, 25 bp, Homo sapien
gaagcacaggcgactcgtttcctga

SEQ ID NO: 1458549 - DNA, 25 bp, Homo sapien
gcactgagacgtggaagagtcccca

SEQ ID NO: 1458550 - DNA, 25 bp, Homo sapien
cttggaagaagtgtcccacactgcc

SEQ ID NO: 1458551 - DNA, 25 bp, Homo sapien
cagacactgaggtgtacctgacgaa

SEQ ID NO: 1458552 - DNA, 25 bp, Homo sapien
ggatctaaaagagttccagacactg

SEQ ID NO: 1458553 - DNA, 25 bp, Homo sapien
ccctgcatatttgtacttccaccaa

SEQ ID NO: 1458554 - DNA, 25 bp, Homo sapien
ctcagaaaacctgcccacaggacag

SEQ ID NO: 1458555 - DNA, 25 bp, Homo sapien
taatagggcccgtcctagaggcagt

SEQ ID NO: 1458556 - DNA, 25 bp, Homo sapien
tgcctcgatcgatccattcagaagc

SEQ ID NO: 1458557 - DNA, 25 bp, Homo sapien
ctgtagaaggaaggcgattgcagtt

SEQ ID NO: 1458558 - DNA, 25 bp, Homo sapien
tctgtggcaacctggctgtagaagg

SEQ ID NO: 1458559 - DNA, 25 bp, Homo sapien
tcaacagcattgactgaaggtctat

SEQ ID NO: 1458560 - DNA, 25 bp, Homo sapien
cacatcaatcagtctgtcaacagca

SEQ ID NO: 1458561 - DNA, 25 bp, Homo sapien
ttctgtgaagaaccatggatgggca

SEQ ID NO: 1458562 - DNA, 25 bp, Homo sapien
tttcagacacatcaatcagtctgtc

SEQ ID NO: 1458563 - DNA, 25 bp, Homo sapien
atccacctgcccgagatgtcgcact

SEQ ID NO: 1458564 - DNA, 25 bp, Homo sapien
gcaaaaccagggttaccgctggaca

SEQ ID NO: 1458565 - DNA, 25 bp, Homo sapien
aaaccagggttaccgctggacactg

SEQ ID NO: 1458566 - DNA, 25 bp, Homo sapien
cccgagatgtcgcactgggcagtga

SEQ ID NO: 1458567 - DNA, 25 bp, Homo sapien
gaaattgtcatagacaacctggtca

SEQ ID NO: 1458568 - DNA, 25 bp, Homo sapien
tgtcatagacaacctggtcattctt

SEQ ID NO: 1458569 - DNA, 25 bp, Homo sapien
tgggtctgaaattgtcatagacaac

SEQ ID NO: 1458570 - DNA, 25 bp, Homo sapien
atagacaacctggtcattctttgga

SEQ ID NO: 1458571 - DNA, 25 bp, Homo sapien
cctatacagcctatgagtacgttca

SEQ ID NO: 1458572 - DNA, 25 bp, Homo sapien
ctatacagcctatgagtacgttcaa

SEQ ID NO: 1458573 - DNA, 25 bp, Homo sapien
tcctatacagcctatgagtacgttc

SEQ ID NO: 1458574 - DNA, 25 bp, Homo sapien
tctcctatacagcctatgagtacgt

SEQ ID NO: 1458575 - DNA, 25 bp, Homo sapien
gcatttgcatctatgtccgcatccg

SEQ ID NO: 1458576 - DNA, 25 bp, Homo sapien
cagcatttgcatctatgtccgcatc

SEQ ID NO: 1458577 - DNA, 25 bp, Homo sapien
atttgcatctatgtccgcatccggg

SEQ ID NO: 1458578 - DNA, 25 bp, Homo sapien
ttgcatctatgtccgcatccgggcc

SEQ ID NO: 1458579 - DNA, 25 bp, Homo sapien
gtgttcggacatccaacataagata

SEQ ID NO: 1458580 - DNA, 25 bp, Homo sapien
tgttcggacatccaacataagatac

SEQ ID NO: 1458581 - DNA, 25 bp, Homo sapien
tgtgttcggacatccaacataagat

SEQ ID NO: 1458582 - DNA, 25 bp, Homo sapien
cttgtgttcggacatccaacataag

SEQ ID NO: 1458583 - DNA, 25 bp, Homo sapien
tattatttgaaggcctctccttcat

SEQ ID NO: 1458584 - DNA, 25 bp, Homo sapien
gaaacaatgcccctgcctggtccat

SEQ ID NO: 1458585 - DNA, 25 bp, Homo sapien
catataggccataggttgctgtcca

SEQ ID NO: 1458586 - DNA, 25 bp, Homo sapien
ttgcatggcctccttggtccacgac

SEQ ID NO: 1458587 - DNA, 25 bp, Homo sapien
cagccaatgggctggctactatgga

SEQ ID NO: 1458588 - DNA, 25 bp, Homo sapien
aacagacagcaaagattcctcttgc

SEQ ID NO: 1458589 - DNA, 25 bp, Homo sapien
gaacagacagcaaagattcctcttg

SEQ ID NO: 1458590 - DNA, 25 bp, Homo sapien
ggaacagacagcaaagattcctctt

SEQ ID NO: 1458591 - DNA, 25 bp, Homo sapien
gaagctgcaaagtgcacctgctctt

SEQ ID NO: 1458592 - DNA, 25 bp, Homo sapien
tttcctgttgttcatcggtggtggg

SEQ ID NO: 1458593 - DNA, 25 bp, Homo sapien
cactgaaccttgaatatccctcctt

SEQ ID NO: 1458594 - DNA, 25 bp, Homo sapien
tgatttcctgttgttcatcggtggt

SEQ ID NO: 1458595 - DNA, 25 bp, Homo sapien
tgttccaggcgtggcctgtggcttc

SEQ ID NO: 1458596 - DNA, 25 bp, Homo sapien
ctgctcctctgatgttccaggcgtg

SEQ ID NO: 1458597 - DNA, 25 bp, Homo sapien
tgacgctgtaacaccctgagctgct

SEQ ID NO: 1458598 - DNA, 25 bp, Homo sapien
ctgtgtagactctgacgctgtaaca

SEQ ID NO: 1458599 - DNA, 25 bp, Homo sapien
cttgccccacccactagggaccttg

SEQ ID NO: 1458600 - DNA, 25 bp, Homo sapien
tgccccacccactagggaccttggc

SEQ ID NO: 1458601 - DNA, 25 bp, Homo sapien
acctttccaggcaccactttatagc

SEQ ID NO: 1458602 - DNA, 25 bp, Homo sapien
gcactgggaagtcctcgctaactgg

SEQ ID NO: 1458603 - DNA, 25 bp, Homo sapien
ccactttatagccataacaaagagc

SEQ ID NO: 1458604 - DNA, 25 bp, Homo sapien
gtcctcgctaactggaattacctgg

SEQ ID NO: 1458605 - DNA, 25 bp, Homo sapien
ttccacacactcaatgacccaggca

SEQ ID NO: 1458606 - DNA, 25 bp, Homo sapien
aaattctgttgattccggattcagc

SEQ ID NO: 1458607 - DNA, 25 bp, Homo sapien
cacaccacagtcaccacctactctg

SEQ ID NO: 1458608 - DNA, 25 bp, Homo sapien
aatgtatctgtgatatgaaattctg

SEQ ID NO: 1458609 - DNA, 25 bp, Homo sapien
gggatcaatgtacacccattgacat

SEQ ID NO: 1458610 - DNA, 25 bp, Homo sapien
aagtgcagtctcatggagtgtggtt

SEQ ID NO: 1458611 - DNA, 25 bp, Homo sapien
tacactcaatgtatggtccagggac

SEQ ID NO: 1458612 - DNA, 25 bp, Homo sapien
gctgttagattttcccaaagagtcc

SEQ ID NO: 1458613 - DNA, 25 bp, Homo sapien
ctgcaagctccaggaaacaggccat

SEQ ID NO: 1458614 - DNA, 25 bp, Homo sapien
ctgagcctgcaagctccaggaaaca

SEQ ID NO: 1458615 - DNA, 25 bp, Homo sapien
aaactgagcctgcaagctccaggaa

SEQ ID NO: 1458616 - DNA, 25 bp, Homo sapien
gagcctgcaagctccaggaaacagg

SEQ ID NO: 1458617 - DNA, 25 bp, Homo sapien
ggctcttctaggcagattggcttga

SEQ ID NO: 1458618 - DNA, 25 bp, Homo sapien
ttgggcatcaacttccaccctggga

SEQ ID NO: 1458619 - DNA, 25 bp, Homo sapien
tcaacctgcagataaacgttgctgc

SEQ ID NO: 1458620 - DNA, 25 bp, Homo sapien
gggacggccatcaatccccaggatt

SEQ ID NO: 1458621 - DNA, 25 bp, Homo sapien
agggtgcatagaggggccaatcaaa

SEQ ID NO: 1458622 - DNA, 25 bp, Homo sapien
tagaggggccaatcaaagtcagcag

SEQ ID NO: 1458623 - DNA, 25 bp, Homo sapien
gaaccagagggatggttcagattgt

SEQ ID NO: 1458624 - DNA, 25 bp, Homo sapien
accagagggatggttcagattgtga

SEQ ID NO: 1458625 - DNA, 25 bp, Homo sapien
caacctctgtttcttgaacggcttg

SEQ ID NO: 1458626 - DNA, 25 bp, Homo sapien
tcttgaacggcttgttctcatccag

SEQ ID NO: 1458627 - DNA, 25 bp, Homo sapien
ctgtttcttgaacggcttgttctca

SEQ ID NO: 1458628 - DNA, 25 bp, Homo sapien
acggcttgttctcatccagcactgg

SEQ ID NO: 1458629 - DNA, 25 bp, Homo sapien
gctctatgagtaagaccgtggctgg

SEQ ID NO: 1458630 - DNA, 25 bp, Homo sapien
cacaaggggctctatgagtaagacc

SEQ ID NO: 1458631 - DNA, 25 bp, Homo sapien
ctgagatcacaaggggctctatgag

SEQ ID NO: 1458632 - DNA, 25 bp, Homo sapien
gggctctatgagtaagaccgtggct

SEQ ID NO: 1458633 - DNA, 25 bp, Homo sapien
tatttccctcttgtaacccagaaca

SEQ ID NO: 1458634 - DNA, 25 bp, Homo sapien
gggccagtgaatcaacctgcttact

SEQ ID NO: 1458635 - DNA, 25 bp, Homo sapien
agatcgactcctttggtgtcctggg

SEQ ID NO: 1458636 - DNA, 25 bp, Homo sapien
ttgagggcttgaaatcgtgcagtat

SEQ ID NO: 1458637 - DNA, 25 bp, Homo sapien
tggtcttgagaagtcaggtgagttt

SEQ ID NO: 1458638 - DNA, 25 bp, Homo sapien
ctcagagtgtccaggatagctactg

SEQ ID NO: 1458639 - DNA, 25 bp, Homo sapien
ctggcaatgttgctcctaagctcag

SEQ ID NO: 1458640 - DNA, 25 bp, Homo sapien
ttcttatgtgaaagtgaagtctctg

SEQ ID NO: 1458641 - DNA, 25 bp, Homo sapien
tattactgatcttgtctgagcgccc

SEQ ID NO: 1458642 - DNA, 25 bp, Homo sapien
tactgatcttgtctgagcgcccagc

SEQ ID NO: 1458643 - DNA, 25 bp, Homo sapien
actgatcttgtctgagcgcccagcc

SEQ ID NO: 1458644 - DNA, 25 bp, Homo sapien
tcagcattgattggggttgtattac

SEQ ID NO: 1458645 - DNA, 25 bp, Homo sapien
cttcaatctcacctttacctgagag

SEQ ID NO: 1458646 - DNA, 25 bp, Homo sapien
tcccagccagacttcaatctcacct

SEQ ID NO: 1458647 - DNA, 25 bp, Homo sapien
cagacttcaatctcacctttacctg

SEQ ID NO: 1458648 - DNA, 25 bp, Homo sapien
cagccagacttcaatctcaccttta

SEQ ID NO: 1458649 - DNA, 25 bp, Homo sapien
gaagcctaaggtcaactctactgca

SEQ ID NO: 1458650 - DNA, 25 bp, Homo sapien
ccatgtgcatggagtaggtaggaca

SEQ ID NO: 1458651 - DNA, 25 bp, Homo sapien
gggttcagactcattgatgagcatc

SEQ ID NO: 1458652 - DNA, 25 bp, Homo sapien
gagcatctgtaagagagtgtttggc

SEQ ID NO: 1458653 - DNA, 25 bp, Homo sapien
tttatctctgtttgttcttgcttgg

SEQ ID NO: 1458654 - DNA, 25 bp, Homo sapien
cagctgccctgatgtggacagggct

SEQ ID NO: 1458655 - DNA, 25 bp, Homo sapien
cacctgccgctctagaagacaagcc

SEQ ID NO: 1458656 - DNA, 25 bp, Homo sapien
ccagctgccctgatgtggacagggc

SEQ ID NO: 1458657 - DNA, 25 bp, Homo sapien
tgccgctctagaagacaagcccagc

SEQ ID NO: 1458658 - DNA, 25 bp, Homo sapien
cttatgcaaacctttccaggaccac

SEQ ID NO: 1458659 - DNA, 25 bp, Homo sapien
tgttgctcaccgtctttgtttccca

SEQ ID NO: 1458660 - DNA, 25 bp, Homo sapien
agtatctccttatgcaaacctttcc

SEQ ID NO: 1458661 - DNA, 25 bp, Homo sapien
gctcaccgtctttgtttcccagtgt

SEQ ID NO: 1458662 - DNA, 25 bp, Homo sapien
gagatcaagtcatgaatttctgctc

SEQ ID NO: 1458663 - DNA, 25 bp, Homo sapien
tggcatcccgtttgtctgtccagat

SEQ ID NO: 1458664 - DNA, 25 bp, Homo sapien
tgggtttttacgctgtttgattgag

SEQ ID NO: 1458665 - DNA, 25 bp, Homo sapien
ggccagggttgagctatttcccttc

SEQ ID NO: 1458666 - DNA, 25 bp, Homo sapien
gaagaatgagtctctccagacccct

SEQ ID NO: 1458667 - DNA, 25 bp, Homo sapien
tcaaagtcagaggtgcgctgtctcg

SEQ ID NO: 1458668 - DNA, 25 bp, Homo sapien
ttaatgctaggaatggcggacaggc

SEQ ID NO: 1458669 - DNA, 25 bp, Homo sapien
agacatcttctaggtgcccagccag

SEQ ID NO: 1458670 - DNA, 25 bp, Homo sapien
gcctgcacaatagtgtccaacatta

SEQ ID NO: 1458671 - DNA, 25 bp, Homo sapien
tatcttcttagcactcagaggccca

SEQ ID NO: 1458672 - DNA, 25 bp, Homo sapien
aaggaggcagccattgcctgcacaa

SEQ ID NO: 1458673 - DNA, 25 bp, Homo sapien
tgacactccaaggatagtatcgctt

SEQ ID NO: 1458674 - DNA, 25 bp, Homo sapien
gctataaactgcctgccgtcagcgg

SEQ ID NO: 1458675 - DNA, 25 bp, Homo sapien
gctccccagctgttttcgccgatgg

SEQ ID NO: 1458676 - DNA, 25 bp, Homo sapien
ggtaacttttgttgccaccgctcaa

SEQ ID NO: 1458677 - DNA, 25 bp, Homo sapien
agacccctgatttgattcggctgga

SEQ ID NO: 1458678 - DNA, 25 bp, Homo sapien
tgggagactttcagcaaggtgacca

SEQ ID NO: 1458679 - DNA, 25 bp, Homo sapien
aatgggagactttcagcaaggtgac

SEQ ID NO: 1458680 - DNA, 25 bp, Homo sapien
agaatgggagactttcagcaaggtg

SEQ ID NO: 1458681 - DNA, 25 bp, Homo sapien
gggagactttcagcaaggtgaccat

SEQ ID NO: 1458682 - DNA, 25 bp, Homo sapien
caccatgaaggctatttgaaaaacc

SEQ ID NO: 1458683 - DNA, 25 bp, Homo sapien
tgagtttttgaatccagtcctttcc

SEQ ID NO: 1458684 - DNA, 25 bp, Homo sapien
atctgggccaagaagaattctcttc

SEQ ID NO: 1458685 - DNA, 25 bp, Homo sapien
ctctgttacagagccacaatctggg

SEQ ID NO: 1458686 - DNA, 25 bp, Homo sapien
gaagcgctggactattgttattatc

SEQ ID NO: 1458687 - DNA, 25 bp, Homo sapien
ttcggaagcgctggactattgttat

SEQ ID NO: 1458688 - DNA, 25 bp, Homo sapien
cggaagcgctggactattgttatta

SEQ ID NO: 1458689 - DNA, 25 bp, Homo sapien
atttcggaagcgctggactattgtt

SEQ ID NO: 1458690 - DNA, 25 bp, Homo sapien
gacaatgaccaggacctaagctgcg

SEQ ID NO: 1458691 - DNA, 25 bp, Homo sapien
cctctgctgggataaccactggtga

SEQ ID NO: 1458692 - DNA, 25 bp, Homo sapien
tgcgtccttcctttttgattgacac

SEQ ID NO: 1458693 - DNA, 25 bp, Homo sapien
tgattgacacttgaaacgcagcgcg

SEQ ID NO: 1458694 - DNA, 25 bp, Homo sapien
attctattgttccttttgaattcca

SEQ ID NO: 1458695 - DNA, 25 bp, Homo sapien
aatccaattctattgttccttttga

SEQ ID NO: 1458696 - DNA, 25 bp, Homo sapien
ttccagtttagagtttccttgagaa

SEQ ID NO: 1458697 - DNA, 25 bp, Homo sapien
aattccagtttagagtttccttgag

SEQ ID NO: 1458698 - DNA, 25 bp, Homo sapien
cagagttagaggcacaatggagtac

SEQ ID NO: 1458699 - DNA, 25 bp, Homo sapien
catcattggtgagtagggcataaga

SEQ ID NO: 1458700 - DNA, 25 bp, Homo sapien
gagagagcctacagtcaacagtatg

SEQ ID NO: 1458701 - DNA, 25 bp, Homo sapien
tgttcttagggaacatgcagtcaga

SEQ ID NO: 1458702 - DNA, 25 bp, Homo sapien
gacgttaatacctccctgtgcacag

SEQ ID NO: 1458703 - DNA, 25 bp, Homo sapien
ctgcacatagtacgccatgttcagg

SEQ ID NO: 1458704 - DNA, 25 bp, Homo sapien
ggctctgctgtctaataactgcaca

SEQ ID NO: 1458705 - DNA, 25 bp, Homo sapien
tgtcggccaaccctgacgttaatac

SEQ ID NO: 1458706 - DNA, 25 bp, Homo sapien
tcaaaatgagtatggaccttctctc

SEQ ID NO: 1458707 - DNA, 25 bp, Homo sapien
agctcaaaatgagtatggaccttct

SEQ ID NO: 1458708 - DNA, 25 bp, Homo sapien
gagctcaaaatgagtatggaccttc

SEQ ID NO: 1458709 - DNA, 25 bp, Homo sapien
gctcaaaatgagtatggaccttctc

SEQ ID NO: 1458710 - DNA, 25 bp, Homo sapien
tcgtctcttagcttctctcgttctc

SEQ ID NO: 1458711 - DNA, 25 bp, Homo sapien
tggtttcgtctcttagcttctctcg

SEQ ID NO: 1458712 - DNA, 25 bp, Homo sapien
tctgccccgctggtttcgtctctta

SEQ ID NO: 1458713 - DNA, 25 bp, Homo sapien
tcttgtgcttatgccccaaattctc

SEQ ID NO: 1458714 - DNA, 25 bp, Homo sapien
tctgggttcctcaatagactgtaca

SEQ ID NO: 1458715 - DNA, 25 bp, Homo sapien
aagaaggtgtcttctaagaagttca

SEQ ID NO: 1458716 - DNA, 25 bp, Homo sapien
ctgtacaacaaagccgtggtgaaag

SEQ ID NO: 1458717 - DNA, 25 bp, Homo sapien
caaagccgtggtgaaagaaggtgtc

SEQ ID NO: 1458718 - DNA, 25 bp, Homo sapien
caaagtaggttgtcttgtcttcagc

SEQ ID NO: 1458719 - DNA, 25 bp, Homo sapien
catgacattacggtgactcgctaac

SEQ ID NO: 1458720 - DNA, 25 bp, Homo sapien
tatctctgttgataccccggtacca

SEQ ID NO: 1458721 - DNA, 25 bp, Homo sapien
cccaagttcacagcggtccatgaca

SEQ ID NO: 1458722 - DNA, 25 bp, Homo sapien
catttcctggatgaaataatgtgcc

SEQ ID NO: 1458723 - DNA, 25 bp, Homo sapien
gaaagtatcacaacagtcacaggcg

SEQ ID NO: 1458724 - DNA, 25 bp, Homo sapien
caggcgaatcttgtggacgtgaaca

SEQ ID NO: 1458725 - DNA, 25 bp, Homo sapien
cttttggccccacgagcctgaaagt

SEQ ID NO: 1458726 - DNA, 25 bp, Homo sapien
gctgggcatcatccaactgagaagg

SEQ ID NO: 1458727 - DNA, 25 bp, Homo sapien
tatcctttgctacctgagtcctttg

SEQ ID NO: 1458728 - DNA, 25 bp, Homo sapien
tgggcgaagcctaaatgaccaacgg

SEQ ID NO: 1458729 - DNA, 25 bp, Homo sapien
tgaccaacgggagcagtaaacctct

SEQ ID NO: 1458730 - DNA, 25 bp, Homo sapien
cctgaagctccatcttcttatcagt

SEQ ID NO: 1458731 - DNA, 25 bp, Homo sapien
tgaagctccatcttcttatcagtaa

SEQ ID NO: 1458732 - DNA, 25 bp, Homo sapien
aagctccatcttcttatcagtaaaa

SEQ ID NO: 1458733 - DNA, 25 bp, Homo sapien
tccctgaagctccatcttcttatca

SEQ ID NO: 1458734 - DNA, 25 bp, Homo sapien
tttcgaagaccaccaacaagctcac

SEQ ID NO: 1458735 - DNA, 25 bp, Homo sapien
tgtttcgaagaccaccaacaagctc

SEQ ID NO: 1458736 - DNA, 25 bp, Homo sapien
gtttcgaagaccaccaacaagctca

SEQ ID NO: 1458737 - DNA, 25 bp, Homo sapien
tgtgtttcgaagaccaccaacaagc

SEQ ID NO: 1458738 - DNA, 25 bp, Homo sapien
tgcccttaagagttgaagagtcagc

SEQ ID NO: 1458739 - DNA, 25 bp, Homo sapien
cattttgcccttaagagttgaagag

SEQ ID NO: 1458740 - DNA, 25 bp, Homo sapien
ttttgcccttaagagttgaagagtc

SEQ ID NO: 1458741 - DNA, 25 bp, Homo sapien
ccattttgcccttaagagttgaaga

SEQ ID NO: 1458742 - DNA, 25 bp, Homo sapien
caatccagtggtcagatgacacaga

SEQ ID NO: 1458743 - DNA, 25 bp, Homo sapien
gaggactcctgcctcgccacactga

SEQ ID NO: 1458744 - DNA, 25 bp, Homo sapien
gcccaggttacaatccagtggtcag

SEQ ID NO: 1458745 - DNA, 25 bp, Homo sapien
ttctttcagcccaggttacaatcca

SEQ ID NO: 1458746 - DNA, 25 bp, Homo sapien
ggtacctgggccgctcgtgggtaga

SEQ ID NO: 1458747 - DNA, 25 bp, Homo sapien
gtacctgggccgctcgtgggtagat

SEQ ID NO: 1458748 - DNA, 25 bp, Homo sapien
catactacctagagtgcaccaggca

SEQ ID NO: 1458749 - DNA, 25 bp, Homo sapien
aatgcccgatggtgactgatccctc

SEQ ID NO: 1458750 - DNA, 25 bp, Homo sapien
taagtcacttacagggctgtctgcc

SEQ ID NO: 1458751 - DNA, 25 bp, Homo sapien
tgtgaacccagcaatcagcaatttc

SEQ ID NO: 1458752 - DNA, 25 bp, Homo sapien
tgaaggtatgtgtaaccctgcagca

SEQ ID NO: 1458753 - DNA, 25 bp, Homo sapien
tctaacggcatgtgctcgcttcttg

SEQ ID NO: 1458754 - DNA, 25 bp, Homo sapien
cacaatatctgcgtaattctcacaa

SEQ ID NO: 1458755 - DNA, 25 bp, Homo sapien
tgttatggcaatctatgaccaggaa

SEQ ID NO: 1458756 - DNA, 25 bp, Homo sapien
caccaacatatgacagcaaacttaa

SEQ ID NO: 1458757 - DNA, 25 bp, Homo sapien
cacaataatattgaattaggccagt

SEQ ID NO: 1458758 - DNA, 25 bp, Homo sapien
actgcaccaacatatgacagcaaac

SEQ ID NO: 1458759 - DNA, 25 bp, Homo sapien
caataatattgaattaggccagtta

SEQ ID NO: 1458760 - DNA, 25 bp, Homo sapien
tagcggtctggataaaacatcaaac

SEQ ID NO: 1458761 - DNA, 25 bp, Homo sapien
ccaaggctagagatgattaagctca

SEQ ID NO: 1458762 - DNA, 25 bp, Homo sapien
cccgctgtatttccaaggtatgtct

SEQ ID NO: 1458763 - DNA, 25 bp, Homo sapien
gcctaatccaaaaaattcgtgtgac

SEQ ID NO: 1458764 - DNA, 25 bp, Homo sapien
tcagtccttattagcacgacagctg

SEQ ID NO: 1458765 - DNA, 25 bp, Homo sapien
gagcttgagaccttatcatttggag

SEQ ID NO: 1458766 - DNA, 25 bp, Homo sapien
tagcagaccctgattaatggcagga

SEQ ID NO: 1458767 - DNA, 25 bp, Homo sapien
ggaatttgttctctaactagcagac

SEQ ID NO: 1458768 - DNA, 25 bp, Homo sapien
catctctgagtgcaagggcatcccg

SEQ ID NO: 1458769 - DNA, 25 bp, Homo sapien
aagaaggtatagacctcatcgccag

SEQ ID NO: 1458770 - DNA, 25 bp, Homo sapien
gcttcctcctagttatcctccattt

SEQ ID NO: 1458771 - DNA, 25 bp, Homo sapien
agacctcatcgccagccatgaacag

SEQ ID NO: 1458772 - DNA, 25 bp, Homo sapien
agctggcccggagactgccctagga

SEQ ID NO: 1458773 - DNA, 25 bp, Homo sapien
ggagactgccctaggactgccttct

SEQ ID NO: 1458774 - DNA, 25 bp, Homo sapien
tggcccggagactgccctaggactg

SEQ ID NO: 1458775 - DNA, 25 bp, Homo sapien
ccggagactgccctaggactgcctt

SEQ ID NO: 1458776 - DNA, 25 bp, Homo sapien
gaatttggcaaaaagcccaggtgag

SEQ ID NO: 1458777 - DNA, 25 bp, Homo sapien
caataacaggtgaggcagacacggg

SEQ ID NO: 1458778 - DNA, 25 bp, Homo sapien
tggagaaggcccagaaatactcttg

SEQ ID NO: 1458779 - DNA, 25 bp, Homo sapien
tgagagccaaccactccggagagtt

SEQ ID NO: 1458780 - DNA, 25 bp, Homo sapien
acagtgtaactaatcactctgtcac

SEQ ID NO: 1458781 - DNA, 25 bp, Homo sapien
tttccagctgttccctccagggcag

SEQ ID NO: 1458782 - DNA, 25 bp, Homo sapien
cttgatcccctgcaaagatgccttc

SEQ ID NO: 1458783 - DNA, 25 bp, Homo sapien
cccacacgtcttcaccatctacttt

SEQ ID NO: 1458784 - DNA, 25 bp, Homo sapien
ttcccccccacacgtcttcaccatc

SEQ ID NO: 1458785 - DNA, 25 bp, Homo sapien
ttctttatgattcatctcccaagag

SEQ ID NO: 1458786 - DNA, 25 bp, Homo sapien
tttactcaaagcgaggagctgggag

SEQ ID NO: 1458787 - DNA, 25 bp, Homo sapien
gaaatgaccaggatcaagaaatgca

SEQ ID NO: 1458788 - DNA, 25 bp, Homo sapien
cagacaagacaggagttggcagaaa

SEQ ID NO: 1458789 - DNA, 25 bp, Homo sapien
gataccaaagtcctgtgagcccctt

SEQ ID NO: 1458790 - DNA, 25 bp, Homo sapien
gagtaatgtagagctcagaccttga

SEQ ID NO: 1458791 - DNA, 25 bp, Homo sapien
gctcaggagcctttgacacactaca

SEQ ID NO: 1458792 - DNA, 25 bp, Homo sapien
gaaagtgcccctgttggtctgacag

SEQ ID NO: 1458793 - DNA, 25 bp, Homo sapien
tcctcccttgttagcttagctccat

SEQ ID NO: 1458794 - DNA, 25 bp, Homo sapien
ctcatcctcccttgttagcttagct

SEQ ID NO: 1458795 - DNA, 25 bp, Homo sapien
tcctggtgcccccagttctcaaccc

SEQ ID NO: 1458796 - DNA, 25 bp, Homo sapien
tcccttgttagcttagctccatctg

SEQ ID NO: 1458797 - DNA, 25 bp, Homo sapien
tgagaggtagcacctaaagcaaaag

SEQ ID NO: 1458798 - DNA, 25 bp, Homo sapien
ctgagaggtagcacctaaagcaaaa

SEQ ID NO: 1458799 - DNA, 25 bp, Homo sapien
ctaaggctctgggtgaaaatggctc

SEQ ID NO: 1458800 - DNA, 25 bp, Homo sapien
ggctctgggtgaaaatggctcagac

SEQ ID NO: 1458801 - DNA, 25 bp, Homo sapien
tctgggtgaaaatggctcagaccaa

SEQ ID NO: 1458802 - DNA, 25 bp, Homo sapien
ggtgaaaatggctcagaccaagaag

SEQ ID NO: 1458803 - DNA, 25 bp, Homo sapien
taacttttagctcacggctgtggcc

SEQ ID NO: 1458804 - DNA, 25 bp, Homo sapien
ttccatttcgtgctggaaggatggg

SEQ ID NO: 1458805 - DNA, 25 bp, Homo sapien
cagactccaataagcctggttccat

SEQ ID NO: 1458806 - DNA, 25 bp, Homo sapien
tgggcttgcctgcaacaaccttaac

SEQ ID NO: 1458807 - DNA, 25 bp, Homo sapien
gctaggcactccaccctcgccatag

SEQ ID NO: 1458808 - DNA, 25 bp, Homo sapien
ctaggcactccaccctcgccataga

SEQ ID NO: 1458809 - DNA, 25 bp, Homo sapien
aggcactccaccctcgccatagagg

SEQ ID NO: 1458810 - DNA, 25 bp, Homo sapien
taggcactccaccctcgccatagag

SEQ ID NO: 1458811 - DNA, 25 bp, Homo sapien
cttttgcatcgctgatacaagtctc

SEQ ID NO: 1458812 - DNA, 25 bp, Homo sapien
catgcatcttttgcatcgctgatac

SEQ ID NO: 1458813 - DNA, 25 bp, Homo sapien
atcttttgcatcgctgatacaagtc

SEQ ID NO: 1458814 - DNA, 25 bp, Homo sapien
ttcatgcatcttttgcatcgctgat

SEQ ID NO: 1458815 - DNA, 25 bp, Homo sapien
ttgcccctccaccttcaacggccat

SEQ ID NO: 1458816 - DNA, 25 bp, Homo sapien
gttcttgtcctgtatactcctctgc

SEQ ID NO: 1458817 - DNA, 25 bp, Homo sapien
tatgttctaggttgccatcagcaca

SEQ ID NO: 1458818 - DNA, 25 bp, Homo sapien
tcatgttgtccattttcccgagacc

SEQ ID NO: 1458819 - DNA, 25 bp, Homo sapien
ttcccgagaccatcaagttcttgtc

SEQ ID NO: 1458820 - DNA, 25 bp, Homo sapien
catccagacttcagttatgtccaac

SEQ ID NO: 1458821 - DNA, 25 bp, Homo sapien
caaggcccaaacaacaagttggaat

SEQ ID NO: 1458822 - DNA, 25 bp, Homo sapien
caagttggaatgtacaaacttgagc

SEQ ID NO: 1458823 - DNA, 25 bp, Homo sapien
tttatccaattttcaccctgccatc

SEQ ID NO: 1458824 - DNA, 25 bp, Homo sapien
tgaggactcctttagtgatattcag

SEQ ID NO: 1458825 - DNA, 25 bp, Homo sapien
ctaatggctgttgttgaggactcct

SEQ ID NO: 1458826 - DNA, 25 bp, Homo sapien
gctgttgttgaggactcctttagtg

SEQ ID NO: 1458827 - DNA, 25 bp, Homo sapien
ttgttgaggactcctttagtgatat

SEQ ID NO: 1458828 - DNA, 25 bp, Homo sapien
cacctctgggtgctaaaactgctgt

SEQ ID NO: 1458829 - DNA, 25 bp, Homo sapien
cctttcaaagcagagcccgaggcaa

SEQ ID NO: 1458830 - DNA, 25 bp, Homo sapien
catgtcattactgggctggccacaa

SEQ ID NO: 1458831 - DNA, 25 bp, Homo sapien
ttgggtttcatggactcagctgggt

SEQ ID NO: 1458832 - DNA, 25 bp, Homo sapien
ggcctgccgcttaggactcagctgc

SEQ ID NO: 1458833 - DNA, 25 bp, Homo sapien
gcctgccgcttaggactcagctgct

SEQ ID NO: 1458834 - DNA, 25 bp, Homo sapien
tggcctgccgcttaggactcagctg

SEQ ID NO: 1458835 - DNA, 25 bp, Homo sapien
actggcctgccgcttaggactcagc

SEQ ID NO: 1458836 - DNA, 25 bp, Homo sapien
ccatggagcccttcgaattttcaac

SEQ ID NO: 1458837 - DNA, 25 bp, Homo sapien
cctcaaggaagtgagtaggtacagg

SEQ ID NO: 1458838 - DNA, 25 bp, Homo sapien
ggtgagaattcccattcctaaaatc

SEQ ID NO: 1458839 - DNA, 25 bp, Homo sapien
cttcactgagaaaaccaaggtgaga

SEQ ID NO: 1458840 - DNA, 25 bp, Homo sapien
aactctcttattgccacacgtgaca

SEQ ID NO: 1458841 - DNA, 25 bp, Homo sapien
agcctgtcttcgctccttgagttct

SEQ ID NO: 1458842 - DNA, 25 bp, Homo sapien
cagacactcaaaccagcgtgggagc

SEQ ID NO: 1458843 - DNA, 25 bp, Homo sapien
tgcacatccagtcaatgcctccatt

SEQ ID NO: 1458844 - DNA, 25 bp, Homo sapien
ttaaaacacttgtctgccctgatct

SEQ ID NO: 1458845 - DNA, 25 bp, Homo sapien
gaacataatcatcaacggagacctt

SEQ ID NO: 1458846 - DNA, 25 bp, Homo sapien
gaactcctggtatagcctctgtgct

SEQ ID NO: 1458847 - DNA, 25 bp, Homo sapien
ctgatcttgaccttgtcaaacattc

SEQ ID NO: 1458848 - DNA, 25 bp, Homo sapien
gaccatgagcgcctgaggaatctat

SEQ ID NO: 1458849 - DNA, 25 bp, Homo sapien
taagcactctgttaagcattaggaa

SEQ ID NO: 1458850 - DNA, 25 bp, Homo sapien
ggaagttccccatggactcagtcca

SEQ ID NO: 1458851 - DNA, 25 bp, Homo sapien
caagagtctcaaagtgtgcgtgaca

SEQ ID NO: 1458852 - DNA, 25 bp, Homo sapien
gggattgctgcctctagcaggaact

SEQ ID NO: 1458853 - DNA, 25 bp, Homo sapien
gattccccacgaatctctgagactg

SEQ ID NO: 1458854 - DNA, 25 bp, Homo sapien
tagcaggaactggattccccacgaa

SEQ ID NO: 1458855 - DNA, 25 bp, Homo sapien
tctgagactgtagcagtcgactcat

SEQ ID NO: 1458856 - DNA, 25 bp, Homo sapien
caggggcagcctttactcctttctt

SEQ ID NO: 1458857 - DNA, 25 bp, Homo sapien
tcaggggcagcctttactcctttct

SEQ ID NO: 1458858 - DNA, 25 bp, Homo sapien
ccggtgtttgacacccgagtctgaa

SEQ ID NO: 1458859 - DNA, 25 bp, Homo sapien
cattccctagtcctgcctttttgct

SEQ ID NO: 1458860 - DNA, 25 bp, Homo sapien
acccgagtctgaagctggcacctca

SEQ ID NO: 1458861 - DNA, 25 bp, Homo sapien
tcctttcagatctgccctgccggtg

SEQ ID NO: 1458862 - DNA, 25 bp, Homo sapien
tcagcagaggaaaagccgtaggccc

SEQ ID NO: 1458863 - DNA, 25 bp, Homo sapien
gagggtcacattgggtctcagcaga

SEQ ID NO: 1458864 - DNA, 25 bp, Homo sapien
cagcagaggaaaagccgtaggccct

SEQ ID NO: 1458865 - DNA, 25 bp, Homo sapien
ttcctctctgccgatggtccggagg

SEQ ID NO: 1458866 - DNA, 25 bp, Homo sapien
ccagctagtctaaggggagaggaga

SEQ ID NO: 1458867 - DNA, 25 bp, Homo sapien
cagaagcaccagagcacgtgattta

SEQ ID NO: 1458868 - DNA, 25 bp, Homo sapien
gagcacgtgatttatttctggtcat

SEQ ID NO: 1458869 - DNA, 25 bp, Homo sapien
gaagcaccagagcacgtgatttatt

SEQ ID NO: 1458870 - DNA, 25 bp, Homo sapien
tcaacactcttcttgactagccctc

SEQ ID NO: 1458871 - DNA, 25 bp, Homo sapien
tcttcttgactagccctctctagca

SEQ ID NO: 1458872 - DNA, 25 bp, Homo sapien
aacactcttcttgactagccctctc

SEQ ID NO: 1458873 - DNA, 25 bp, Homo sapien
actcttcttgactagccctctctag

SEQ ID NO: 1458874 - DNA, 25 bp, Homo sapien
tcctgatatcgtgcctgtgacgggc

SEQ ID NO: 1458875 - DNA, 25 bp, Homo sapien
gtatctcctgtcacctgtacgctga

SEQ ID NO: 1458876 - DNA, 25 bp, Homo sapien
tacgctgacgccattccatggagtg

SEQ ID NO: 1458877 - DNA, 25 bp, Homo sapien
tcatcatccttgtcgaatacatagg

SEQ ID NO: 1458878 - DNA, 25 bp, Homo sapien
cctggagtagccagagagccctgca

SEQ ID NO: 1458879 - DNA, 25 bp, Homo sapien
tgttctcttagcctgcagcgcaggg

SEQ ID NO: 1458880 - DNA, 25 bp, Homo sapien
gttacagatgtgcaccgggagatac

SEQ ID NO: 1458881 - DNA, 25 bp, Homo sapien
tgcagtggaatcaatctcttccaaa

SEQ ID NO: 1458882 - DNA, 25 bp, Homo sapien
caagagttgttgttgtgaatggctc

SEQ ID NO: 1458883 - DNA, 25 bp, Homo sapien
actgagtgactccagctcaccccca

SEQ ID NO: 1458884 - DNA, 25 bp, Homo sapien
cccatcagtactaatcctgcacaag

SEQ ID NO: 1458885 - DNA, 25 bp, Homo sapien
gcacaagcctccacactcagactct

SEQ ID NO: 1458886 - DNA, 25 bp, Homo sapien
aagcctccacactcagactctgcta

SEQ ID NO: 1458887 - DNA, 25 bp, Homo sapien
ccatcagtactaatcctgcacaagc

SEQ ID NO: 1458888 - DNA, 25 bp, Homo sapien
tcctggcagtttgcacttctggagt

SEQ ID NO: 1458889 - DNA, 25 bp, Homo sapien
tggcagtttgcacttctggagtagt

SEQ ID NO: 1458890 - DNA, 25 bp, Homo sapien
cctggcagtttgcacttctggagta

SEQ ID NO: 1458891 - DNA, 25 bp, Homo sapien
ttcctggcagtttgcacttctggag

SEQ ID NO: 1458892 - DNA, 25 bp, Homo sapien
ccttacgcagcagagcatggttgga

SEQ ID NO: 1458893 - DNA, 25 bp, Homo sapien
ggaccctgttctgctgtgctgggac

SEQ ID NO: 1458894 - DNA, 25 bp, Homo sapien
cacgtccttacgcagcagagcatgg

SEQ ID NO: 1458895 - DNA, 25 bp, Homo sapien
tgtgctgggaccacgtccttacgca

SEQ ID NO: 1458896 - DNA, 25 bp, Homo sapien
cagagggtcgtgatccaattggaag

SEQ ID NO: 1458897 - DNA, 25 bp, Homo sapien
ttaagctgagcacacagagggtcgt

SEQ ID NO: 1458898 - DNA, 25 bp, Homo sapien
tcatttctcttaccctgtggatttg

SEQ ID NO: 1458899 - DNA, 25 bp, Homo sapien
ttttatttacactgtcagcttgagc

SEQ ID NO: 1458900 - DNA, 25 bp, Homo sapien
gatagatcaagagtcactgctatga

SEQ ID NO: 1458901 - DNA, 25 bp, Homo sapien
cttcatggtctccttaggtgccact

SEQ ID NO: 1458902 - DNA, 25 bp, Homo sapien
caagagtcactgctatgatgaagct

SEQ ID NO: 1458903 - DNA, 25 bp, Homo sapien
ccttaggtgccactgatagatcaag

SEQ ID NO: 1458904 - DNA, 25 bp, Homo sapien
tggtcagtgcttaatctactatccg

SEQ ID NO: 1458905 - DNA, 25 bp, Homo sapien
tgttcccttaggctgagcacctctg

SEQ ID NO: 1458906 - DNA, 25 bp, Homo sapien
cctctgaaggatagggatcaaatcc

SEQ ID NO: 1458907 - DNA, 25 bp, Homo sapien
aatctactatccgtgttcccttagg

SEQ ID NO: 1458908 - DNA, 25 bp, Homo sapien
gacaccttcactgggtgcccctcct

SEQ ID NO: 1458909 - DNA, 25 bp, Homo sapien
ggtgtgggttagataagacaccttc

SEQ ID NO: 1458910 - DNA, 25 bp, Homo sapien
catgaagatatggtgtgggttagat

SEQ ID NO: 1458911 - DNA, 25 bp, Homo sapien
tccaggatccttccattatgtggct

SEQ ID NO: 1458912 - DNA, 25 bp, Homo sapien
gatcaatgtccaggatatctgggtg

SEQ ID NO: 1458913 - DNA, 25 bp, Homo sapien
gtacaccctaagtcccatttagtca

SEQ ID NO: 1458914 - DNA, 25 bp, Homo sapien
gtcaccacctccagatcaatgtcca

SEQ ID NO: 1458915 - DNA, 25 bp, Homo sapien
cctccagatcaatgtccaggatatc

SEQ ID NO: 1458916 - DNA, 25 bp, Homo sapien
tggaaccagaagctcgcaaatactc

SEQ ID NO: 1458917 - DNA, 25 bp, Homo sapien
gccatgaaatagagtttctggcttc

SEQ ID NO: 1458918 - DNA, 25 bp, Homo sapien
ctggctcaggtagttgcctaggtgc

SEQ ID NO: 1458919 - DNA, 25 bp, Homo sapien
cttggtacacatggaaccagaagct

SEQ ID NO: 1458920 - DNA, 25 bp, Homo sapien
taccagcgacgttgggaaactcaat

SEQ ID NO: 1458921 - DNA, 25 bp, Homo sapien
cactacttcctaaagctccaggaca

SEQ ID NO: 1458922 - DNA, 25 bp, Homo sapien
tagtactatgacaagagttacagcc

SEQ ID NO: 1458923 - DNA, 25 bp, Homo sapien
tgacaacgaagcatctgcactactt

SEQ ID NO: 1458924 - DNA, 25 bp, Homo sapien
cttgtgtggccagcccactctccct

SEQ ID NO: 1458925 - DNA, 25 bp, Homo sapien
gtgtggccagcccactctccctgag

SEQ ID NO: 1458926 - DNA, 25 bp, Homo sapien
ctatgcttgtgtggccagcccactc

SEQ ID NO: 1458927 - DNA, 25 bp, Homo sapien
tgcttgtgtggccagcccactctcc

SEQ ID NO: 1458928 - DNA, 25 bp, Homo sapien
gggtggcgacgcactgctggcatgg

SEQ ID NO: 1458929 - DNA, 25 bp, Homo sapien
tgtgcagttgagcacacggccaagc

SEQ ID NO: 1458930 - DNA, 25 bp, Homo sapien
tgcagccccggggatgtcagaagcc

SEQ ID NO: 1458931 - DNA, 25 bp, Homo sapien
atgtcagaagccattgtgcagttga

SEQ ID NO: 1458932 - DNA, 25 bp, Homo sapien
ttccaatggcccggccggcattgct

SEQ ID NO: 1458933 - DNA, 25 bp, Homo sapien
acgctctcctttccaatggcccggc

SEQ ID NO: 1458934 - DNA, 25 bp, Homo sapien
agcagccgagagtgagaacttcccc

SEQ ID NO: 1458935 - DNA, 25 bp, Homo sapien
agagtgagaacttccccttgccaga

SEQ ID NO: 1458936 - DNA, 25 bp, Homo sapien
gaggctctcagttaaaaacccaaca

SEQ ID NO: 1458937 - DNA, 25 bp, Homo sapien
aaggaagggatgagaaatgccacat

SEQ ID NO: 1458938 - DNA, 25 bp, Homo sapien
aaaaaggaagggatgagaaatgcca

SEQ ID NO: 1458939 - DNA, 25 bp, Homo sapien
aaaggaagggatgagaaatgccaca

SEQ ID NO: 1458940 - DNA, 25 bp, Homo sapien
ttgaaaaaggaagggatgagaaatg

SEQ ID NO: 1458941 - DNA, 25 bp, Homo sapien
atgaaaagagggttcagcaacaggc

SEQ ID NO: 1458942 - DNA, 25 bp, Homo sapien
aggcagtaacgaagacatccaggca

SEQ ID NO: 1458943 - DNA, 25 bp, Homo sapien
ctgcagctgtcggtgtggaagcaat

SEQ ID NO: 1458944 - DNA, 25 bp, Homo sapien
caatggaagacggaacagaaggatg

SEQ ID NO: 1458945 - DNA, 25 bp, Homo sapien
ggagctgttgctttccgtagagatt

SEQ ID NO: 1458946 - DNA, 25 bp, Homo sapien
gctttccgtagagatttgccacaca

SEQ ID NO: 1458947 - DNA, 25 bp, Homo sapien
ctgttgctttccgtagagatttgcc

SEQ ID NO: 1458948 - DNA, 25 bp, Homo sapien
gttgctttccgtagagatttgccac

SEQ ID NO: 1458949 - DNA, 25 bp, Homo sapien
ttaagtagccaggccactcctaagg

SEQ ID NO: 1458950 - DNA, 25 bp, Homo sapien
cttaagtagccaggccactcctaag

SEQ ID NO: 1458951 - DNA, 25 bp, Homo sapien
tacctaccaagtacataagaatatg

SEQ ID NO: 1458952 - DNA, 25 bp, Homo sapien
caagtacataagaatatgctaggct

SEQ ID NO: 1458953 - DNA, 25 bp, Homo sapien
taccaagtacataagaatatgctag

SEQ ID NO: 1458954 - DNA, 25 bp, Homo sapien
cctaccaagtacataagaatatgct

SEQ ID NO: 1458955 - DNA, 25 bp, Homo sapien
ggacaggcatcccaggtatgtacgg

SEQ ID NO: 1458956 - DNA, 25 bp, Homo sapien
cacaaccaaagtgaatattcagttc

SEQ ID NO: 1458957 - DNA, 25 bp, Homo sapien
gattggccagtgtccttgtgaacca

SEQ ID NO: 1458958 - DNA, 25 bp, Homo sapien
tacggccatcgactattctgattgg

SEQ ID NO: 1458959 - DNA, 25 bp, Homo sapien
tgatgggtactcaaggcaaacttgg

SEQ ID NO: 1458960 - DNA, 25 bp, Homo sapien
caaggagctcacactagagttagaa

SEQ ID NO: 1458961 - DNA, 25 bp, Homo sapien
caggattagaacactcaaggagctc

SEQ ID NO: 1458962 - DNA, 25 bp, Homo sapien
tcaaagtatctagcctgtgaccact

SEQ ID NO: 1458963 - DNA, 25 bp, Homo sapien
caccacattggagactaaaggagtt

SEQ ID NO: 1458964 - DNA, 25 bp, Homo sapien
cacattggagactaaaggagtttca

SEQ ID NO: 1458965 - DNA, 25 bp, Homo sapien
tgtaagatctctgccccaattgtgc

SEQ ID NO: 1458966 - DNA, 25 bp, Homo sapien
gagactaaaggagtttcaatgtaag

SEQ ID NO: 1458967 - DNA, 25 bp, Homo sapien
ggctccgctcctgattttccacaat

SEQ ID NO: 1458968 - DNA, 25 bp, Homo sapien
catggtggtccaacacccgaacaaa

SEQ ID NO: 1458969 - DNA, 25 bp, Homo sapien
ggttacactcgaagaacagatgaca

SEQ ID NO: 1458970 - DNA, 25 bp, Homo sapien
caaatggcccatggaagaaaagttg

SEQ ID NO: 1458971 - DNA, 25 bp, Homo sapien
tgacgaaggaaaggcaaaaggagac

SEQ ID NO: 1458972 - DNA, 25 bp, Homo sapien
cttgccagtcgccaggcaggtccgc

SEQ ID NO: 1458973 - DNA, 25 bp, Homo sapien
aggtccgcgtctgcgcccctttatg

SEQ ID NO: 1458974 - DNA, 25 bp, Homo sapien
aaaataactggacgtttgtctgctg

SEQ ID NO: 1458975 - DNA, 25 bp, Homo sapien
tttttctccaacatttgtcagccct

SEQ ID NO: 1458976 - DNA, 25 bp, Homo sapien
ttctccaacatttgtcagccctcat

SEQ ID NO: 1458977 - DNA, 25 bp, Homo sapien
ttttctccaacatttgtcagccctc

SEQ ID NO: 1458978 - DNA, 25 bp, Homo sapien
tttctccaacatttgtcagccctca

SEQ ID NO: 1458979 - DNA, 25 bp, Homo sapien
aggtacaaagcatttgctcagtgaa

SEQ ID NO: 1458980 - DNA, 25 bp, Homo sapien
ggtacaaagcatttgctcagtgaag

SEQ ID NO: 1458981 - DNA, 25 bp, Homo sapien
gggagctcctgatccttggaaagag

SEQ ID NO: 1458982 - DNA, 25 bp, Homo sapien
ggccatgcaaaattccacaaagtac

SEQ ID NO: 1458983 - DNA, 25 bp, Homo sapien
aagtacccttctttgtccattgtag

SEQ ID NO: 1458984 - DNA, 25 bp, Homo sapien
cagagtccatctgttaagtttttta

SEQ ID NO: 1458985 - DNA, 25 bp, Homo sapien
caactgagcaacagcgtgtggatac

SEQ ID NO: 1458986 - DNA, 25 bp, Homo sapien
tgacacaagtaatgtaacatcaatg

SEQ ID NO: 1458987 - DNA, 25 bp, Homo sapien
ggatacttcatgaaagtttaaaaga

SEQ ID NO: 1458988 - DNA, 25 bp, Homo sapien
caagtggggactacatgtaaattca

SEQ ID NO: 1458989 - DNA, 25 bp, Homo sapien
gaagtcatacgaccacactcttcac

SEQ ID NO: 1458990 - DNA, 25 bp, Homo sapien
ggaaagaagtcatacgaccacactc

SEQ ID NO: 1458991 - DNA, 25 bp, Homo sapien
taggaaagaagtcatacgaccacac

SEQ ID NO: 1458992 - DNA, 25 bp, Homo sapien
aagaagtcatacgaccacactcttc

SEQ ID NO: 1458993 - DNA, 25 bp, Homo sapien
aaggcatcttccgtcacctttgcct

SEQ ID NO: 1458994 - DNA, 25 bp, Homo sapien
gctactactgcgaaagcaaaggcat

SEQ ID NO: 1458995 - DNA, 25 bp, Homo sapien
tttccaagcaactaggtctatcggg

SEQ ID NO: 1458996 - DNA, 25 bp, Homo sapien
ctgtttttgctactactgcgaaagc

SEQ ID NO: 1458997 - DNA, 25 bp, Homo sapien
tgaggcattcaaacagagcagttta

SEQ ID NO: 1458998 - DNA, 25 bp, Homo sapien
gatgttagcagggagattaatactg

SEQ ID NO: 1458999 - DNA, 25 bp, Homo sapien
tactgaatgggtcgaaatgaatggc

SEQ ID NO: 1459000 - DNA, 25 bp, Homo sapien
cacatagaacaggaaagatgttagc

SEQ ID NO: 1459001 - DNA, 25 bp, Homo sapien
gacttaacggatcagggatggagcc

SEQ ID NO: 1459002 - DNA, 25 bp, Homo sapien
tatgctctagcccagtagttcccag

SEQ ID NO: 1459003 - DNA, 25 bp, Homo sapien
tagctatatattagagtcacctggg

SEQ ID NO: 1459004 - DNA, 25 bp, Homo sapien
tcttaatgggacagcaaaaatctcc

SEQ ID NO: 1459005 - DNA, 25 bp, Homo sapien
gactcctgatttgagcagccaacca

SEQ ID NO: 1459006 - DNA, 25 bp, Homo sapien
ccagactgcatttggtataggtcat

SEQ ID NO: 1459007 - DNA, 25 bp, Homo sapien
tgaggatcttgatacagtaccaggt

SEQ ID NO: 1459008 - DNA, 25 bp, Homo sapien
tgtatatgaacacttgactcctgat

SEQ ID NO: 1459009 - DNA, 25 bp, Homo sapien
caagcctgaccaatccacagtctgt

SEQ ID NO: 1459010 - DNA, 25 bp, Homo sapien
tggtagagtcccttggcctagccaa

SEQ ID NO: 1459011 - DNA, 25 bp, Homo sapien
catcctctgcaggtttgtcttttcc

SEQ ID NO: 1459012 - DNA, 25 bp, Homo sapien
tctgtgagcgcacttgcaatagtcc

SEQ ID NO: 1459013 - DNA, 25 bp, Homo sapien
aaatcggaggatcatctttccatat

SEQ ID NO: 1459014 - DNA, 25 bp, Homo sapien
cttcaaatcggaggatcatctttcc

SEQ ID NO: 1459015 - DNA, 25 bp, Homo sapien
caaatcggaggatcatctttccata

SEQ ID NO: 1459016 - DNA, 25 bp, Homo sapien
ttcaaatcggaggatcatctttcca

SEQ ID NO: 1459017 - DNA, 25 bp, Homo sapien
cacttggtcttcaccaaaaggccaa

SEQ ID NO: 1459018 - DNA, 25 bp, Homo sapien
acagatactacacttggtcttcacc

SEQ ID NO: 1459019 - DNA, 25 bp, Homo sapien
ttggtcttcaccaaaaggccaagaa

SEQ ID NO: 1459020 - DNA, 25 bp, Homo sapien
cagatactacacttggtcttcacca

SEQ ID NO: 1459021 - DNA, 25 bp, Homo sapien
tcactaaatgattgggagtattcac

SEQ ID NO: 1459022 - DNA, 25 bp, Homo sapien
tttatcttgacatcactaaatgatt

SEQ ID NO: 1459023 - DNA, 25 bp, Homo sapien
gacatcactaaatgattgggagtat

SEQ ID NO: 1459024 - DNA, 25 bp, Homo sapien
tcttgacatcactaaatgattggga

SEQ ID NO: 1459025 - DNA, 25 bp, Homo sapien
tacaaatggctttgaagtcttccac

SEQ ID NO: 1459026 - DNA, 25 bp, Homo sapien
ttacaagtatttggatacttcccca

SEQ ID NO: 1459027 - DNA, 25 bp, Homo sapien
agtatttggatacttccccaccaag

SEQ ID NO: 1459028 - DNA, 25 bp, Homo sapien
ctgttacaagtatttggatacttcc

SEQ ID NO: 1459029 - DNA, 25 bp, Homo sapien
caagtatttggatacttccccacca

SEQ ID NO: 1459030 - DNA, 25 bp, Homo sapien
cctacggctagtccccgagagagta

SEQ ID NO: 1459031 - DNA, 25 bp, Homo sapien
ttgaatctcctccctacggctagtc

SEQ ID NO: 1459032 - DNA, 25 bp, Homo sapien
gcaaagctgtggcttcaaagtcaca

SEQ ID NO: 1459033 - DNA, 25 bp, Homo sapien
ccgagagagtatttgggcacagcaa

SEQ ID NO: 1459034 - DNA, 25 bp, Homo sapien
cagattggaaatccaggcgctggag

SEQ ID NO: 1459035 - DNA, 25 bp, Homo sapien
catcaagctgagtgccagattggaa

SEQ ID NO: 1459036 - DNA, 25 bp, Homo sapien
gcaggaaaagggaacgtctgatact

SEQ ID NO: 1459037 - DNA, 25 bp, Homo sapien
cccagcagagccgttcttcaaaggg

SEQ ID NO: 1459038 - DNA, 25 bp, Homo sapien
gaggattgaaaatgtttcctggtgg

SEQ ID NO: 1459039 - DNA, 25 bp, Homo sapien
cttggacaagttgggaagctcctca

SEQ ID NO: 1459040 - DNA, 25 bp, Homo sapien
taattcacgatatttggaggattga

SEQ ID NO: 1459041 - DNA, 25 bp, Homo sapien
gccaaaataattcacgatatttgga

SEQ ID NO: 1459042 - DNA, 25 bp, Homo sapien
tataatcttccattgagaggtgctc

SEQ ID NO: 1459043 - DNA, 25 bp, Homo sapien
gaggtgctcttgcaatcactggaaa

SEQ ID NO: 1459044 - DNA, 25 bp, Homo sapien
gctacaggcgggtttgtgacacact

SEQ ID NO: 1459045 - DNA, 25 bp, Homo sapien
caaggactgaaagcctggaaactac

SEQ ID NO: 1459046 - DNA, 25 bp, Homo sapien
tatccaggtgttcattgatgggcat

SEQ ID NO: 1459047 - DNA, 25 bp, Homo sapien
taatccttcttattttatagattaa

SEQ ID NO: 1459048 - DNA, 25 bp, Homo sapien
tgtttcgttttctgttcttgcctta

SEQ ID NO: 1459049 - DNA, 25 bp, Homo sapien
attttctttatccaggtgttcattg

SEQ ID NO: 1459050 - DNA, 25 bp, Homo sapien
tcaagaagatacagctcttaaatat

SEQ ID NO: 1459051 - DNA, 25 bp, Homo sapien
gtcaagaagatacagctcttaaata

SEQ ID NO: 1459052 - DNA, 25 bp, Homo sapien
aagtcaagaagatacagctcttaaa

SEQ ID NO: 1459053 - DNA, 25 bp, Homo sapien
gtaagtcaagaagatacagctctta

SEQ ID NO: 1459054 - DNA, 25 bp, Homo sapien
aaagatgatgggagttggacaaagt

SEQ ID NO: 1459055 - DNA, 25 bp, Homo sapien
ggagttggacaaagtcaattagcag

SEQ ID NO: 1459056 - DNA, 25 bp, Homo sapien
cttgtggaaatgaatcatagcaata

SEQ ID NO: 1459057 - DNA, 25 bp, Homo sapien
gatgggagttggacaaagtcaatta

SEQ ID NO: 1459058 - DNA, 25 bp, Homo sapien
taacagcatcatgaacctatttgct

SEQ ID NO: 1459059 - DNA, 25 bp, Homo sapien
tatttgctacccatggagataaaaa

SEQ ID NO: 1459060 - DNA, 25 bp, Homo sapien
cacacaactagccattagcaggatg

SEQ ID NO: 1459061 - DNA, 25 bp, Homo sapien
taagttacaggatcacacaactagc

SEQ ID NO: 1459062 - DNA, 25 bp, Homo sapien
gatgatgtctgcgtatcctcagaac

SEQ ID NO: 1459063 - DNA, 25 bp, Homo sapien
ttacaaagctctggcccaacctctg

SEQ ID NO: 1459064 - DNA, 25 bp, Homo sapien
tgatctgcttacatggtcagaacca

SEQ ID NO: 1459065 - DNA, 25 bp, Homo sapien
gcatccagtgccaaggagctcttct

SEQ ID NO: 1459066 - DNA, 25 bp, Homo sapien
ctattgaaagcagagaatggttctc

SEQ ID NO: 1459067 - DNA, 25 bp, Homo sapien
tattgaaagcagagaatggttctct

SEQ ID NO: 1459068 - DNA, 25 bp, Homo sapien
ttcttaaaggttttgtgacatcatc

SEQ ID NO: 1459069 - DNA, 25 bp, Homo sapien
tgctggacctgtgcccaactcagca

SEQ ID NO: 1459070 - DNA, 25 bp, Homo sapien
aagcattcttaaaggttttgtgaca

SEQ ID NO: 1459071 - DNA, 25 bp, Homo sapien
ggcagaaagaattgtgtttgctgga

SEQ ID NO: 1459072 - DNA, 25 bp, Homo sapien
gccaggtccacgtgacaagtgtcca

SEQ ID NO: 1459073 - DNA, 25 bp, Homo sapien
ctcaagagcaccgaaaatgagaggg

SEQ ID NO: 1459074 - DNA, 25 bp, Homo sapien
aaggcgtgggagtcctcaagagcac

SEQ ID NO: 1459075 - DNA, 25 bp, Homo sapien
cagaggcttagagaaatgtgccttt

SEQ ID NO: 1459076 - DNA, 25 bp, Homo sapien
ataatctacgacattttggaatcaa

SEQ ID NO: 1459077 - DNA, 25 bp, Homo sapien
taatctacgacattttggaatcaag

SEQ ID NO: 1459078 - DNA, 25 bp, Homo sapien
tataatctacgacattttggaatca

SEQ ID NO: 1459079 - DNA, 25 bp, Homo sapien
ttataatctacgacattttggaatc

SEQ ID NO: 1459080 - DNA, 25 bp, Homo sapien
tgtcccagtcctgaggcgtagcagt

SEQ ID NO: 1459081 - DNA, 25 bp, Homo sapien
ttgccgcattcccacggaaagatca

SEQ ID NO: 1459082 - DNA, 25 bp, Homo sapien
gggagtatccatcgccgcccatttt

SEQ ID NO: 1459083 - DNA, 25 bp, Homo sapien
agcaagtgctgggagtatccatcgc

SEQ ID NO: 1459084 - DNA, 25 bp, Homo sapien
ctctttccactaggagggtgcttgg

SEQ ID NO: 1459085 - DNA, 25 bp, Homo sapien
tacaagtgtagggaatagagctctt

SEQ ID NO: 1459086 - DNA, 25 bp, Homo sapien
aacaccctttgcctctcggcctttg

SEQ ID NO: 1459087 - DNA, 25 bp, Homo sapien
tttgtacagtttgaccccaaatatg

SEQ ID NO: 1459088 - DNA, 25 bp, Homo sapien
ttcattggtctgaccagcggtttct

SEQ ID NO: 1459089 - DNA, 25 bp, Homo sapien
tgttgttcccttttgaagagaactc

SEQ ID NO: 1459090 - DNA, 25 bp, Homo sapien
cctgtggtttcattggtctgaccag

SEQ ID NO: 1459091 - DNA, 25 bp, Homo sapien
ctgaccagcggtttctttaggagat

SEQ ID NO: 1459092 - DNA, 25 bp, Homo sapien
cagtcctatcaccaaagcccctgaa

SEQ ID NO: 1459093 - DNA, 25 bp, Homo sapien
aatggagcacccccgaattcacatc

SEQ ID NO: 1459094 - DNA, 25 bp, Homo sapien
aaaagcttctggtaagatggacaat

SEQ ID NO: 1459095 - DNA, 25 bp, Homo sapien
gacaatatggaaaacttcagtccta

SEQ ID NO: 1459096 - DNA, 25 bp, Homo sapien
ggaagctgggagtaacggccaaaca

SEQ ID NO: 1459097 - DNA, 25 bp, Homo sapien
gaagctgggagtaacggccaaacat

SEQ ID NO: 1459098 - DNA, 25 bp, Homo sapien
aagctgggagtaacggccaaacatc

SEQ ID NO: 1459099 - DNA, 25 bp, Homo sapien
caggattcggcggtcccgagtcgca

SEQ ID NO: 1459100 - DNA, 25 bp, Homo sapien
gaggctcgggaagcacacgtgccct

SEQ ID NO: 1459101 - DNA, 25 bp, Homo sapien
gcaggcgtattcctcgcaggattcg

SEQ ID NO: 1459102 - DNA, 25 bp, Homo sapien
cacgtgccctggcacactggaggag

SEQ ID NO: 1459103 - DNA, 25 bp, Homo sapien
cagaggctttgcgtaactttgccca

SEQ ID NO: 1459104 - DNA, 25 bp, Homo sapien
tgtgtaaattccactcgcgggaacc

SEQ ID NO: 1459105 - DNA, 25 bp, Homo sapien
ggatcgagcgcttaaaaccctgcca

SEQ ID NO: 1459106 - DNA, 25 bp, Homo sapien
cagcttggaagtgtagcggtgccca

SEQ ID NO: 1459107 - DNA, 25 bp, Homo sapien
aaggcaagttatgtcagggagcacc

SEQ ID NO: 1459108 - DNA, 25 bp, Homo sapien
tttaaatcacggcctctccaaatgc

SEQ ID NO: 1459109 - DNA, 25 bp, Homo sapien
ttatgtaagtagcagccctccatgt

SEQ ID NO: 1459110 - DNA, 25 bp, Homo sapien
tgctaaccctcaaaacgatgggtgg

SEQ ID NO: 1459111 - DNA, 25 bp, Homo sapien
catctgttaatatcttggtattgga

SEQ ID NO: 1459112 - DNA, 25 bp, Homo sapien
atcttggtattggaaagttcggtgc

SEQ ID NO: 1459113 - DNA, 25 bp, Homo sapien
caccatctgttaatatcttggtatt

SEQ ID NO: 1459114 - DNA, 25 bp, Homo sapien
taatatcttggtattggaaagttcg

SEQ ID NO: 1459115 - DNA, 25 bp, Homo sapien
ccagggcagggaatgtacttccctt

SEQ ID NO: 1459116 - DNA, 25 bp, Homo sapien
gtagtgtgtcccttcaatcactgac

SEQ ID NO: 1459117 - DNA, 25 bp, Homo sapien
ataaaatcaagtagtagtgtgtccc

SEQ ID NO: 1459118 - DNA, 25 bp, Homo sapien
caaagccagggttggcggcgaagag

SEQ ID NO: 1459119 - DNA, 25 bp, Homo sapien
gcgtggcgcgcgctcctatttcaag

SEQ ID NO: 1459120 - DNA, 25 bp, Homo sapien
tggcgcgcgctcctatttcaagtcg

SEQ ID NO: 1459121 - DNA, 25 bp, Homo sapien
gatctcgctcgcctagcgtggcgcg

SEQ ID NO: 1459122 - DNA, 25 bp, Homo sapien
gagctgggctgcgaaccgatctcgc

SEQ ID NO: 1459123 - DNA, 25 bp, Homo sapien
ccgcggcagagcgtcgcgagccggg

SEQ ID NO: 1459124 - DNA, 25 bp, Homo sapien
ctgcgaaccgccgcggcagagcgtc

SEQ ID NO: 1459125 - DNA, 25 bp, Homo sapien
gcagagcgtcgcgagccgggagcct

SEQ ID NO: 1459126 - DNA, 25 bp, Homo sapien
aaccgccgcggcagagcgtcgcgag

SEQ ID NO: 1459127 - DNA, 25 bp, Homo sapien
ctcgaagggacccaaccaatagaag

SEQ ID NO: 1459128 - DNA, 25 bp, Homo sapien
tcgaagggacccaaccaatagaagc

SEQ ID NO: 1459129 - DNA, 25 bp, Homo sapien
cgaagggacccaaccaatagaagca

SEQ ID NO: 1459130 - DNA, 25 bp, Homo sapien
cctgtatctaatgggcatgttgatt

SEQ ID NO: 1459131 - DNA, 25 bp, Homo sapien
tattccgtcctgtatctaatgggca

SEQ ID NO: 1459132 - DNA, 25 bp, Homo sapien
ttccgtcctgtatctaatgggcatg

SEQ ID NO: 1459133 - DNA, 25 bp, Homo sapien
cgtcctgtatctaatgggcatgttg

SEQ ID NO: 1459134 - DNA, 25 bp, Homo sapien
gactcggacatactaacatcgctat

SEQ ID NO: 1459135 - DNA, 25 bp, Homo sapien
tgttgtcacgacacagcatgattca

SEQ ID NO: 1459136 - DNA, 25 bp, Homo sapien
ttgagggacacacgaagactacttg

SEQ ID NO: 1459137 - DNA, 25 bp, Homo sapien
tttcctgccgggatagactcggaca

SEQ ID NO: 1459138 - DNA, 25 bp, Homo sapien
caactaatgtcagaggtaaccaagg

SEQ ID NO: 1459139 - DNA, 25 bp, Homo sapien
tggagataaactgggactcagccaa

SEQ ID NO: 1459140 - DNA, 25 bp, Homo sapien
tcgtctaataacagatgcagcggac

SEQ ID NO: 1459141 - DNA, 25 bp, Homo sapien
tgcagcggacccgatgtgaaacctc

SEQ ID NO: 1459142 - DNA, 25 bp, Homo sapien
atccgaaggcgcctcgcgattgggt

SEQ ID NO: 1459143 - DNA, 25 bp, Homo sapien
taaatcttgttgtggagcggagccc

SEQ ID NO: 1459144 - DNA, 25 bp, Homo sapien
gagggagcgctctgaaataatacac

SEQ ID NO: 1459145 - DNA, 25 bp, Homo sapien
gccgggtacgtcagatagactgtga

SEQ ID NO: 1459146 - DNA, 25 bp, Homo sapien
cgcaagatatcaccgtgtgtgcact

SEQ ID NO: 1459147 - DNA, 25 bp, Homo sapien
tcatcacccgcaagatatcaccgtg

SEQ ID NO: 1459148 - DNA, 25 bp, Homo sapien
tgtgcactcgcgtgttttcctctct

SEQ ID NO: 1459149 - DNA, 25 bp, Homo sapien
gtccaattatcatattcatcacccg

SEQ ID NO: 1459150 - DNA, 25 bp, Homo sapien
tcgaagccgaattgtggaaatccgg

SEQ ID NO: 1459151 - DNA, 25 bp, Homo sapien
tcgcttttttgttcgtggagatccc

SEQ ID NO: 1459152 - DNA, 25 bp, Homo sapien
attgggacaccagcacgaggaggac

SEQ ID NO: 1459153 - DNA, 25 bp, Homo sapien
cgtctcaaaacgctgtcgaagccga

SEQ ID NO: 1459154 - DNA, 25 bp, Homo sapien
gggagccgttccagacactctgcat

SEQ ID NO: 1459155 - DNA, 25 bp, Homo sapien
tctttaaagctagccacagatgcag

SEQ ID NO: 1459156 - DNA, 25 bp, Homo sapien
tttacaggtgaaccgaaagagatgg

SEQ ID NO: 1459157 - DNA, 25 bp, Homo sapien
tgcagtcctagggagcacgtagatg

SEQ ID NO: 1459158 - DNA, 25 bp, Homo sapien
caagccgaagcgagaaggcaacaac

SEQ ID NO: 1459159 - DNA, 25 bp, Homo sapien
gaaagagaccatgggccaaactcct

SEQ ID NO: 1459160 - DNA, 25 bp, Homo sapien
tcaaagtcttttcggccaagccctc

SEQ ID NO: 1459161 - DNA, 25 bp, Homo sapien
acagtttattgaccgagctcgagcc

SEQ ID NO: 1459162 - DNA, 25 bp, Homo sapien
cctggacacctttggcaatgtgcag

SEQ ID NO: 1459163 - DNA, 25 bp, Homo sapien
aaccccctggacacctttggcaatg

SEQ ID NO: 1459164 - DNA, 25 bp, Homo sapien
ggacacctttggcaatgtgcagatg

SEQ ID NO: 1459165 - DNA, 25 bp, Homo sapien
cccctggacacctttggcaatgtgc

SEQ ID NO: 1459166 - DNA, 25 bp, Homo sapien
ccatcacgtaaatgtctggataaga

SEQ ID NO: 1459167 - DNA, 25 bp, Homo sapien
aagtggaaggcttgttttctccttg

SEQ ID NO: 1459168 - DNA, 25 bp, Homo sapien
ggcagggaaagtccatcacgtaaat

SEQ ID NO: 1459169 - DNA, 25 bp, Homo sapien
gcaccagcaaactgggcaagatggg

SEQ ID NO: 1459170 - DNA, 25 bp, Homo sapien
aacacagccacctggagggtgggaa

SEQ ID NO: 1459171 - DNA, 25 bp, Homo sapien
caccacggaaacacagccacctgga

SEQ ID NO: 1459172 - DNA, 25 bp, Homo sapien
acagccacctggagggtgggaaaca

SEQ ID NO: 1459173 - DNA, 25 bp, Homo sapien
ccaccacggaaacacagccacctgg

SEQ ID NO: 1459174 - DNA, 25 bp, Homo sapien
tggcctgtgtttgataagtgctctt

SEQ ID NO: 1459175 - DNA, 25 bp, Homo sapien
tctggatgttctcatggcctgtgtt

SEQ ID NO: 1459176 - DNA, 25 bp, Homo sapien
ttgatgaatgtacatctttttctgg

SEQ ID NO: 1459177 - DNA, 25 bp, Homo sapien
tcatcttgttggagtctggatgttc

SEQ ID NO: 1459178 - DNA, 25 bp, Homo sapien
gagctgtctataaccagagactgtg

SEQ ID NO: 1459179 - DNA, 25 bp, Homo sapien
tgtgagctgtacagggctctgaaca

SEQ ID NO: 1459180 - DNA, 25 bp, Homo sapien
ggtcaccagtactgaagagctgtct

SEQ ID NO: 1459181 - DNA, 25 bp, Homo sapien
tcagatggagaagtacgcacgtcaa

SEQ ID NO: 1459182 - DNA, 25 bp, Homo sapien
ataatcctaatatcacgaaatcgtt

SEQ ID NO: 1459183 - DNA, 25 bp, Homo sapien
atgcacacacgcgtaccgaccacca

SEQ ID NO: 1459184 - DNA, 25 bp, Homo sapien
cctaatatcacgaaatcgtttttct

SEQ ID NO: 1459185 - DNA, 25 bp, Homo sapien
cacgcgtaccgaccaccacacataa

SEQ ID NO: 1459186 - DNA, 25 bp, Homo sapien
agcagccgtcgtgggccatgggagg

SEQ ID NO: 1459187 - DNA, 25 bp, Homo sapien
taggtgggtagtcctgcctgcatcc

SEQ ID NO: 1459188 - DNA, 25 bp, Homo sapien
agggcagcagccgtcgtgggccatg

SEQ ID NO: 1459189 - DNA, 25 bp, Homo sapien
ctgtgtgcgcattacaggcctcccc

SEQ ID NO: 1459190 - DNA, 25 bp, Homo sapien
aatgcttcattagccctgctgccgg

SEQ ID NO: 1459191 - DNA, 25 bp, Homo sapien
tgtgtacagtctggtctgtgacact

SEQ ID NO: 1459192 - DNA, 25 bp, Homo sapien
tctttgttgcgttggcaaatgtccc

SEQ ID NO: 1459193 - DNA, 25 bp, Homo sapien
caaatcccggcttctttttgctccg

SEQ ID NO: 1459194 - DNA, 25 bp, Homo sapien
catttcctgctgaccctaaatagga

SEQ ID NO: 1459195 - DNA, 25 bp, Homo sapien
taaacaaacgggcaatgagggagct

SEQ ID NO: 1459196 - DNA, 25 bp, Homo sapien
tctgaatgtggctgaaaaggcgaca

SEQ ID NO: 1459197 - DNA, 25 bp, Homo sapien
gagggagctctcatcagaattggaa

SEQ ID NO: 1459198 - DNA, 25 bp, Homo sapien
aaggtcatggtttcaaggccactgt

SEQ ID NO: 1459199 - DNA, 25 bp, Homo sapien
gtagaagaagctgaaaggtcatggt

SEQ ID NO: 1459200 - DNA, 25 bp, Homo sapien
gaagaagctgaaaggtcatggtttc

SEQ ID NO: 1459201 - DNA, 25 bp, Homo sapien
tagaagaagctgaaaggtcatggtt

SEQ ID NO: 1459202 - DNA, 25 bp, Homo sapien
aatctgtgtagatacctgaaactgc

SEQ ID NO: 1459203 - DNA, 25 bp, Homo sapien
gataatctgtgtagatacctgaaac

SEQ ID NO: 1459204 - DNA, 25 bp, Homo sapien
ataatctgtgtagatacctgaaact

SEQ ID NO: 1459205 - DNA, 25 bp, Homo sapien
taatctgtgtagatacctgaaactg

SEQ ID NO: 1459206 - DNA, 25 bp, Homo sapien
gggtaggagtctagtggacttccaa

SEQ ID NO: 1459207 - DNA, 25 bp, Homo sapien
agtcccattgggtaggagtctagtg

SEQ ID NO: 1459208 - DNA, 25 bp, Homo sapien
cccattgggtaggagtctagtggac

SEQ ID NO: 1459209 - DNA, 25 bp, Homo sapien
ctcaagtcccattgggtaggagtct

SEQ ID NO: 1459210 - DNA, 25 bp, Homo sapien
gaaagcctttagtcctaagcccaga

SEQ ID NO: 1459211 - DNA, 25 bp, Homo sapien
agacagccttgaactatagccactt

SEQ ID NO: 1459212 - DNA, 25 bp, Homo sapien
caaactgcatgggtattagacgaat

SEQ ID NO: 1459213 - DNA, 25 bp, Homo sapien
aacatgtaactagaaagtgggccca

SEQ ID NO: 1459214 - DNA, 25 bp, Homo sapien
taccgttaaggagctaatgatgcag

SEQ ID NO: 1459215 - DNA, 25 bp, Homo sapien
tccacggtgtgaaaattgagagagc

SEQ ID NO: 1459216 - DNA, 25 bp, Homo sapien
cagatgcagtttttctaacccagca

SEQ ID NO: 1459217 - DNA, 25 bp, Homo sapien
gcactgttctttcgagttccctgaa

SEQ ID NO: 1459218 - DNA, 25 bp, Homo sapien
gattagttctacaatacccgtaaca

SEQ ID NO: 1459219 - DNA, 25 bp, Homo sapien
catgtgatgttaggaggtgacaaaa

SEQ ID NO: 1459220 - DNA, 25 bp, Homo sapien
caaaacagttaaagtatgctgctgg

SEQ ID NO: 1459221 - DNA, 25 bp, Homo sapien
cacagtagaacagccacagcggatt

SEQ ID NO: 1459222 - DNA, 25 bp, Homo sapien
tactaggcaggattgtactttccca

SEQ ID NO: 1459223 - DNA, 25 bp, Homo sapien
tacaggcaagcagtcagcagatgca

SEQ ID NO: 1459224 - DNA, 25 bp, Homo sapien
caaggcgagcagtgaagagtatcca

SEQ ID NO: 1459225 - DNA, 25 bp, Homo sapien
gaataactctctctccaaggcgagc

SEQ ID NO: 1459226 - DNA, 25 bp, Homo sapien
gtttgggccagcgagcacacttcca

SEQ ID NO: 1459227 - DNA, 25 bp, Homo sapien
ccagtgaccgctaaccttggtatgt

SEQ ID NO: 1459228 - DNA, 25 bp, Homo sapien
cattcattcagctgccaagagcgtt

SEQ ID NO: 1459229 - DNA, 25 bp, Homo sapien
tatgtcctgacacttatgatgagta

SEQ ID NO: 1459230 - DNA, 25 bp, Homo sapien
aaagcagctcccacaatagcctcag

SEQ ID NO: 1459231 - DNA, 25 bp, Homo sapien
tctggggtgacgttcctatattggg

SEQ ID NO: 1459232 - DNA, 25 bp, Homo sapien
tagcctcagagttccagccaaagac

SEQ ID NO: 1459233 - DNA, 25 bp, Homo sapien
tgaggaacgctgggcaaagcagctc

SEQ ID NO: 1459234 - DNA, 25 bp, Homo sapien
tctgacagtcttgaacaatgcctgc

SEQ ID NO: 1459235 - DNA, 25 bp, Homo sapien
tctcctctgacagtcttgaacaatg

SEQ ID NO: 1459236 - DNA, 25 bp, Homo sapien
tcctctgacagtcttgaacaatgcc

SEQ ID NO: 1459237 - DNA, 25 bp, Homo sapien
tgacagtcttgaacaatgcctgccc

SEQ ID NO: 1459238 - DNA, 25 bp, Homo sapien
gacttattgcaaatggcggttggct

SEQ ID NO: 1459239 - DNA, 25 bp, Homo sapien
ggaaaacccatgacacagcacaact

SEQ ID NO: 1459240 - DNA, 25 bp, Homo sapien
tgttaacgatgcatccacttgattg

SEQ ID NO: 1459241 - DNA, 25 bp, Homo sapien
aatgttggcgtgtgtaaagtctcta

SEQ ID NO: 1459242 - DNA, 25 bp, Homo sapien
tatatgtgtgcgcagatgtgtgaac

SEQ ID NO: 1459243 - DNA, 25 bp, Homo sapien
tacgcttgaggttatagtctgtgcc

SEQ ID NO: 1459244 - DNA, 25 bp, Homo sapien
cctagacctaaaatgcaccagcggg

SEQ ID NO: 1459245 - DNA, 25 bp, Homo sapien
caattgttcttgtgccttctgtggc

SEQ ID NO: 1459246 - DNA, 25 bp, Homo sapien
catgaagacatttagtaagtaacac

SEQ ID NO: 1459247 - DNA, 25 bp, Homo sapien
caagggcaagggtaatgcagtttct

SEQ ID NO: 1459248 - DNA, 25 bp, Homo sapien
tcttttatcagatgtcaagggcaag

SEQ ID NO: 1459249 - DNA, 25 bp, Homo sapien
aataactacattctcacgacatctg

SEQ ID NO: 1459250 - DNA, 25 bp, Homo sapien
ttgtgaaaacgtattcattctgtat

SEQ ID NO: 1459251 - DNA, 25 bp, Homo sapien
tcttttgtgaaaacgtattcattct

SEQ ID NO: 1459252 - DNA, 25 bp, Homo sapien
cttcttttgtgaaaacgtattcatt

SEQ ID NO: 1459253 - DNA, 25 bp, Homo sapien
cttttgtgaaaacgtattcattctg

SEQ ID NO: 1459254 - DNA, 25 bp, Homo sapien
tggtctcagcgctacctagaagaat

SEQ ID NO: 1459255 - DNA, 25 bp, Homo sapien
gtataaaccgtgacaaaacactgcc

SEQ ID NO: 1459256 - DNA, 25 bp, Homo sapien
tcatggcttccctcaatattgtccc

SEQ ID NO: 1459257 - DNA, 25 bp, Homo sapien
ctagaagaatcaaaggtcatggctt

SEQ ID NO: 1459258 - DNA, 25 bp, Homo sapien
ctgttgcagactgagtcttcatcat

SEQ ID NO: 1459259 - DNA, 25 bp, Homo sapien
tgtgtctgtacatgctgttgcagac

SEQ ID NO: 1459260 - DNA, 25 bp, Homo sapien
tgctttccccttaatgatgaaaact

SEQ ID NO: 1459261 - DNA, 25 bp, Homo sapien
agtgcagcaggaactaaaaacttct

SEQ ID NO: 1459262 - DNA, 25 bp, Homo sapien
gtcagtggttttagttactttgcca

SEQ ID NO: 1459263 - DNA, 25 bp, Homo sapien
actaaaaacttctgccccactcttg

SEQ ID NO: 1459264 - DNA, 25 bp, Homo sapien
cacacccattccaacttcccaggac

SEQ ID NO: 1459265 - DNA, 25 bp, Homo sapien
atttgacatagtggaacaaggccag

SEQ ID NO: 1459266 - DNA, 25 bp, Homo sapien
ggccagtaatgcttgaggggatacc

SEQ ID NO: 1459267 - DNA, 25 bp, Homo sapien
cttccgctcagccactccagctgct

SEQ ID NO: 1459268 - DNA, 25 bp, Homo sapien
ccagctgctggtgtatcccctttct

SEQ ID NO: 1459269 - DNA, 25 bp, Homo sapien
ataaaacccagaggccataaagaag

SEQ ID NO: 1459270 - DNA, 25 bp, Homo sapien
gactatcaagtcttaatacattact

SEQ ID NO: 1459271 - DNA, 25 bp, Homo sapien
taaagttagattcgcatctcatgac

SEQ ID NO: 1459272 - DNA, 25 bp, Homo sapien
gttgaaaacgtatattcaaacacac

SEQ ID NO: 1459273 - DNA, 25 bp, Homo sapien
cttgcttatgcactgagaggaccca

SEQ ID NO: 1459274 - DNA, 25 bp, Homo sapien
tctgcctgggaagagtgaagacata

SEQ ID NO: 1459275 - DNA, 25 bp, Homo sapien
ctctcgggaggataaggacgctgtt

SEQ ID NO: 1459276 - DNA, 25 bp, Homo sapien
gaagtaaaaccatgagagctctcgg

SEQ ID NO: 1459277 - DNA, 25 bp, Homo sapien
ttctttttccgaggacatcgtggca

SEQ ID NO: 1459278 - DNA, 25 bp, Homo sapien
tcgtggcagtaagtgccattgctct

SEQ ID NO: 1459279 - DNA, 25 bp, Homo sapien
gacatcgtggcagtaagtgccattg

SEQ ID NO: 1459280 - DNA, 25 bp, Homo sapien
ccgaggacatcgtggcagtaagtgc

SEQ ID NO: 1459281 - DNA, 25 bp, Homo sapien
gatgggctgttcaccaattttggcc

SEQ ID NO: 1459282 - DNA, 25 bp, Homo sapien
tttgaaagccattcaggcctgctca

SEQ ID NO: 1459283 - DNA, 25 bp, Homo sapien
gtctagctgaagatatgtccaggac

SEQ ID NO: 1459284 - DNA, 25 bp, Homo sapien
tgtccaggacagaatccaacacaat

SEQ ID NO: 1459285 - DNA, 25 bp, Homo sapien
gagatcatgaatcacccagcaaagg

SEQ ID NO: 1459286 - DNA, 25 bp, Homo sapien
aatagccacgagatcatgaatcacc

SEQ ID NO: 1459287 - DNA, 25 bp, Homo sapien
cacgagatcatgaatcacccagcaa

SEQ ID NO: 1459288 - DNA, 25 bp, Homo sapien
catgaatcacccagcaaagggagaa

SEQ ID NO: 1459289 - DNA, 25 bp, Homo sapien
tagttatttgggagaagagctcgcc

SEQ ID NO: 1459290 - DNA, 25 bp, Homo sapien
cagtgaacatcaaggaaccagtgtg

SEQ ID NO: 1459291 - DNA, 25 bp, Homo sapien
tcttttaggatggtcagggacgccc

SEQ ID NO: 1459292 - DNA, 25 bp, Homo sapien
tgagcagagaccttgaaagaatggg

SEQ ID NO: 1459293 - DNA, 25 bp, Homo sapien
gggcagcgttgagtctattacagca

SEQ ID NO: 1459294 - DNA, 25 bp, Homo sapien
gacagaaatctttacgggcagcgtt

SEQ ID NO: 1459295 - DNA, 25 bp, Homo sapien
acgggtgttagcacagatgaaggct

SEQ ID NO: 1459296 - DNA, 25 bp, Homo sapien
cctaagattcctggaggttgacggg

SEQ ID NO: 1459297 - DNA, 25 bp, Homo sapien
ccccatgtggactgaaagggcctct

SEQ ID NO: 1459298 - DNA, 25 bp, Homo sapien
gttaaattactggaccccatgtgga

SEQ ID NO: 1459299 - DNA, 25 bp, Homo sapien
tatagttcacggttaaattactgga

SEQ ID NO: 1459300 - DNA, 25 bp, Homo sapien
cagccattaatatagttcacggtta

SEQ ID NO: 1459301 - DNA, 25 bp, Homo sapien
agcttcctggaacatacaggctgac

SEQ ID NO: 1459302 - DNA, 25 bp, Homo sapien
gcttcctggaacatacaggctgaca

SEQ ID NO: 1459303 - DNA, 25 bp, Homo sapien
aggacaccacccatagcttgagctt

SEQ ID NO: 1459304 - DNA, 25 bp, Homo sapien
atccaggacaccacccatagcttga

SEQ ID NO: 1459305 - DNA, 25 bp, Homo sapien
tctgaggttccgacttagcctgcca

SEQ ID NO: 1459306 - DNA, 25 bp, Homo sapien
ggacacgtctgaggttccgacttag

SEQ ID NO: 1459307 - DNA, 25 bp, Homo sapien
ttccgacttagcctgccatcagcaa

SEQ ID NO: 1459308 - DNA, 25 bp, Homo sapien
actctgcaggacacgtctgaggttc

SEQ ID NO: 1459309 - DNA, 25 bp, Homo sapien
ttagccaaagccacaacggtctggc

SEQ ID NO: 1459310 - DNA, 25 bp, Homo sapien
aaagccacaacggtctggcttagat

SEQ ID NO: 1459311 - DNA, 25 bp, Homo sapien
gccacaacggtctggcttagatctt

SEQ ID NO: 1459312 - DNA, 25 bp, Homo sapien
gccaaagccacaacggtctggctta

SEQ ID NO: 1459313 - DNA, 25 bp, Homo sapien
taagcctgaacctctgtggcaggtg

SEQ ID NO: 1459314 - DNA, 25 bp, Homo sapien
ctaagcctgaacctctgtggcaggt

SEQ ID NO: 1459315 - DNA, 25 bp, Homo sapien
gctgtgaccagggtagctgttagca

SEQ ID NO: 1459316 - DNA, 25 bp, Homo sapien
agctgttagcataaataacagccac

SEQ ID NO: 1459317 - DNA, 25 bp, Homo sapien
ccagggtagctgttagcataaataa

SEQ ID NO: 1459318 - DNA, 25 bp, Homo sapien
tgaccagggtagctgttagcataaa

SEQ ID NO: 1459319 - DNA, 25 bp, Homo sapien
gctgggaatcacttctggcactgaa

SEQ ID NO: 1459320 - DNA, 25 bp, Homo sapien
tcctgctgcgaagtagaaactgaga

SEQ ID NO: 1459321 - DNA, 25 bp, Homo sapien
tgctggccttcgcagctggaatgtg

SEQ ID NO: 1459322 - DNA, 25 bp, Homo sapien
aaaaggttaattgtctcctgctgcg

SEQ ID NO: 1459323 - DNA, 25 bp, Homo sapien
ccagccgaggggttgcatcagcgtc

SEQ ID NO: 1459324 - DNA, 25 bp, Homo sapien
ccgaggggttgcatcagcgtccatg

SEQ ID NO: 1459325 - DNA, 25 bp, Homo sapien
catgccagccgaggggttgcatcag

SEQ ID NO: 1459326 - DNA, 25 bp, Homo sapien
tcatgccagccgaggggttgcatca

SEQ ID NO: 1459327 - DNA, 25 bp, Homo sapien
gattagctggccagattccaactga

SEQ ID NO: 1459328 - DNA, 25 bp, Homo sapien
tgctccttgaactggagctctgaga

SEQ ID NO: 1459329 - DNA, 25 bp, Homo sapien
tgacaggcagcattgggaagcccca

SEQ ID NO: 1459330 - DNA, 25 bp, Homo sapien
caaacatgtagtgtttccttgctag

SEQ ID NO: 1459331 - DNA, 25 bp, Homo sapien
cacacctttgggaggcagactacct

SEQ ID NO: 1459332 - DNA, 25 bp, Homo sapien
tctggaggcaaggagaacagaatcc

SEQ ID NO: 1459333 - DNA, 25 bp, Homo sapien
cacagtagccttcactcagggaaaa

SEQ ID NO: 1459334 - DNA, 25 bp, Homo sapien
ttacagatgcccagagattaaggct

SEQ ID NO: 1459335 - DNA, 25 bp, Homo sapien
tctttggcacgccaggccggaagct

SEQ ID NO: 1459336 - DNA, 25 bp, Homo sapien
tttggcacgccaggccggaagcttc

SEQ ID NO: 1459337 - DNA, 25 bp, Homo sapien
ctggctctttggcacgccaggccgg

SEQ ID NO: 1459338 - DNA, 25 bp, Homo sapien
cgccaggccggaagcttcaaagttg

SEQ ID NO: 1459339 - DNA, 25 bp, Homo sapien
attctttgcacaagcagttttgttt

SEQ ID NO: 1459340 - DNA, 25 bp, Homo sapien
tgattctttgcacaagcagttttgt

SEQ ID NO: 1459341 - DNA, 25 bp, Homo sapien
gattctttgcacaagcagttttgtt

SEQ ID NO: 1459342 - DNA, 25 bp, Homo sapien
ttggttccccttaatgagtacacag

SEQ ID NO: 1459343 - DNA, 25 bp, Homo sapien
acagcactgacatagcccggtggct

SEQ ID NO: 1459344 - DNA, 25 bp, Homo sapien
tgctgctgtgaaggaacgttcttgg

SEQ ID NO: 1459345 - DNA, 25 bp, Homo sapien
tggctccgcagccatgccgggaagc

SEQ ID NO: 1459346 - DNA, 25 bp, Homo sapien
taattctgcgatcccctgacgctgg

SEQ ID NO: 1459347 - DNA, 25 bp, Homo sapien
gaaacacactctggaaacgctgtgg

SEQ ID NO: 1459348 - DNA, 25 bp, Homo sapien
cagctaattgcctaatcggagtggg

SEQ ID NO: 1459349 - DNA, 25 bp, Homo sapien
tatcaaagtcggagaacgtgcctct

SEQ ID NO: 1459350 - DNA, 25 bp, Homo sapien
actgcctccgagagttcccaggcca

SEQ ID NO: 1459351 - DNA, 25 bp, Homo sapien
tcagggagagcagagcgacttctac

SEQ ID NO: 1459352 - DNA, 25 bp, Homo sapien
agcagagcgacttctacgaacccca

SEQ ID NO: 1459353 - DNA, 25 bp, Homo sapien
tctccactgcctccgagagttccca

SEQ ID NO: 1459354 - DNA, 25 bp, Homo sapien
caatgcttttgcctccctggctggg

SEQ ID NO: 1459355 - DNA, 25 bp, Homo sapien
cgcaatgcttttgcctccctggctg

SEQ ID NO: 1459356 - DNA, 25 bp, Homo sapien
gcaatgcttttgcctccctggctgg

SEQ ID NO: 1459357 - DNA, 25 bp, Homo sapien
tgcctccctggctggggttttccca

SEQ ID NO: 1459358 - DNA, 25 bp, Homo sapien
cagtgcctcgcccagagtagatgct

SEQ ID NO: 1459359 - DNA, 25 bp, Homo sapien
aagtcgccgccatttctcttttgta

SEQ ID NO: 1459360 - DNA, 25 bp, Homo sapien
gaattgcttgaaagtcgccgccatt

SEQ ID NO: 1459361 - DNA, 25 bp, Homo sapien
actcccctcatgaggaacaatccag

SEQ ID NO: 1459362 - DNA, 25 bp, Homo sapien
tgggctaagcctcacaatcctagga

SEQ ID NO: 1459363 - DNA, 25 bp, Homo sapien
ggttacttggccagtcaagggcaga

SEQ ID NO: 1459364 - DNA, 25 bp, Homo sapien
aactgaggcttatatagtggactgc

SEQ ID NO: 1459365 - DNA, 25 bp, Homo sapien
cagagccggattcaaaccagggtga

SEQ ID NO: 1459366 - DNA, 25 bp, Homo sapien
cctccttgggctaggcactgcatca

SEQ ID NO: 1459367 - DNA, 25 bp, Homo sapien
caagtctcaactaaacatggaccca

SEQ ID NO: 1459368 - DNA, 25 bp, Homo sapien
cacgtggcgcaatgctgaaggctct

SEQ ID NO: 1459369 - DNA, 25 bp, Homo sapien
gaagttaccgtcagccaagtctcaa

SEQ ID NO: 1459370 - DNA, 25 bp, Homo sapien
aatattccccagtccgtgctgtgca

SEQ ID NO: 1459371 - DNA, 25 bp, Homo sapien
ccagtccgtgctgtgcactgatctg

SEQ ID NO: 1459372 - DNA, 25 bp, Homo sapien
gtccgtgctgtgcactgatctgtca

SEQ ID NO: 1459373 - DNA, 25 bp, Homo sapien
cccagttgaatattccccagtccgt

SEQ ID NO: 1459374 - DNA, 25 bp, Homo sapien
gagtatcttacacacggttagccac

SEQ ID NO: 1459375 - DNA, 25 bp, Homo sapien
gaagattgtatggaaatctgcctgt

SEQ ID NO: 1459376 - DNA, 25 bp, Homo sapien
tctcgagcggggtaattcagacggt

SEQ ID NO: 1459377 - DNA, 25 bp, Homo sapien
taattcagacggtgagtagggaaga

SEQ ID NO: 1459378 - DNA, 25 bp, Homo sapien
ggctacagaagctacgtgagtaaga

SEQ ID NO: 1459379 - DNA, 25 bp, Homo sapien
gagaagctccaaaaaacgtctggag

SEQ ID NO: 1459380 - DNA, 25 bp, Homo sapien
tcctgggtgaccttatctgtgtgac

SEQ ID NO: 1459381 - DNA, 25 bp, Homo sapien
cgtgagtaagaccttccactctcat

SEQ ID NO: 1459382 - DNA, 25 bp, Homo sapien
gaccagaagggtcaagcatgctgcc

SEQ ID NO: 1459383 - DNA, 25 bp, Homo sapien
atgaccagaagggtcaagcatgctg

SEQ ID NO: 1459384 - DNA, 25 bp, Homo sapien
gtcctctcctctccgacctgtcagt

SEQ ID NO: 1459385 - DNA, 25 bp, Homo sapien
ccagaagggtcaagcatgctgcctt

SEQ ID NO: 1459386 - DNA, 25 bp, Homo sapien
tctgtggctttgtttgagcgagagc

SEQ ID NO: 1459387 - DNA, 25 bp, Homo sapien
taccaacctcgtcctctttcaagaa

SEQ ID NO: 1459388 - DNA, 25 bp, Homo sapien
gatggtttccactgtcggagcgtct

SEQ ID NO: 1459389 - DNA, 25 bp, Homo sapien
gagcgagagcttcaaatccaaagct

SEQ ID NO: 1459390 - DNA, 25 bp, Homo sapien
caaagtcccatgaaccatagaagca

SEQ ID NO: 1459391 - DNA, 25 bp, Homo sapien
ttttccaccagtaataggcagcttg

SEQ ID NO: 1459392 - DNA, 25 bp, Homo sapien
catgtcagcgaggtttgggtcagcc

SEQ ID NO: 1459393 - DNA, 25 bp, Homo sapien
ggcagcttgaacgttaaaattgggc

SEQ ID NO: 1459394 - DNA, 25 bp, Homo sapien
gttcattggaaagtaaagtatgtgc

SEQ ID NO: 1459395 - DNA, 25 bp, Homo sapien
agataaacattttaaaagctttcat

SEQ ID NO: 1459396 - DNA, 25 bp, Homo sapien
cagagataaacattttaaaagcttt

SEQ ID NO: 1459397 - DNA, 25 bp, Homo sapien
gagataaacattttaaaagctttca

SEQ ID NO: 1459398 - DNA, 25 bp, Homo sapien
actggccccttcctcctgatgagtg

SEQ ID NO: 1459399 - DNA, 25 bp, Homo sapien
cttcctcctgatgagtggcctgttc

SEQ ID NO: 1459400 - DNA, 25 bp, Homo sapien
cactcagcgtttttctgtggctgtg

SEQ ID NO: 1459401 - DNA, 25 bp, Homo sapien
gcgtttttctgtggctgtgtcaggg

SEQ ID NO: 1459402 - DNA, 25 bp, Homo sapien
cttgaactttgtaaggcttcagcag

SEQ ID NO: 1459403 - DNA, 25 bp, Homo sapien
tgctgtataaaaggcaggaagattt

SEQ ID NO: 1459404 - DNA, 25 bp, Homo sapien
gttccttgaactttgtaaggcttca

SEQ ID NO: 1459405 - DNA, 25 bp, Homo sapien
ttcttctggtcatccaggtatgtca

SEQ ID NO: 1459406 - DNA, 25 bp, Homo sapien
gcttcacatagatacgtaattggta

SEQ ID NO: 1459407 - DNA, 25 bp, Homo sapien
agttgtgatgtgcaatcagaagcca

SEQ ID NO: 1459408 - DNA, 25 bp, Homo sapien
tacccttctcagttaaatgcggatg

SEQ ID NO: 1459409 - DNA, 25 bp, Homo sapien
gcttctgaattcagtgtgtcatgtt

SEQ ID NO: 1459410 - DNA, 25 bp, Homo sapien
ccatgtgatggaaggttacataacc

SEQ ID NO: 1459411 - DNA, 25 bp, Homo sapien
taagttacgtttcacgactgtctaa

SEQ ID NO: 1459412 - DNA, 25 bp, Homo sapien
cacagttgtcttccgagttgtggaa

SEQ ID NO: 1459413 - DNA, 25 bp, Homo sapien
ccagtagtgggagtttggttacata

SEQ ID NO: 1459414 - DNA, 25 bp, Homo sapien
tcatcccaaggagacaggttgaggt

SEQ ID NO: 1459415 - DNA, 25 bp, Homo sapien
tccatccagggccatatccatagta

SEQ ID NO: 1459416 - DNA, 25 bp, Homo sapien
taactcaggctagttttgagaagcc

SEQ ID NO: 1459417 - DNA, 25 bp, Homo sapien
aattacagccccagtttgcaaatgg

SEQ ID NO: 1459418 - DNA, 25 bp, Homo sapien
tttcaaattgcacacgtcactccag

SEQ ID NO: 1459419 - DNA, 25 bp, Homo sapien
tgtccataattcagcaagctcaagt

SEQ ID NO: 1459420 - DNA, 25 bp, Homo sapien
tggagtgaaagtgacacctgctgtc

SEQ ID NO: 1459421 - DNA, 25 bp, Homo sapien
tgcacatgccgtactttgaggttag

SEQ ID NO: 1459422 - DNA, 25 bp, Homo sapien
caaccaacgctgtgttgttgagtaa

SEQ ID NO: 1459423 - DNA, 25 bp, Homo sapien
tgttgagtaaacactgatctctacc

SEQ ID NO: 1459424 - DNA, 25 bp, Homo sapien
gagtaaacactgatctctacccaca

SEQ ID NO: 1459425 - DNA, 25 bp, Homo sapien
taaacactgatctctacccacacag

SEQ ID NO: 1459426 - DNA, 25 bp, Homo sapien
agaacagctgtaaatctggtacatt

SEQ ID NO: 1459427 - DNA, 25 bp, Homo sapien
cagctgtaaatctggtacattttcc

SEQ ID NO: 1459428 - DNA, 25 bp, Homo sapien
atggtccgaaaacagctagaacagc

SEQ ID NO: 1459429 - DNA, 25 bp, Homo sapien
tcatagtcatggtccgaaaacagct

SEQ ID NO: 1459430 - DNA, 25 bp, Homo sapien
acctcatagtgccttttatccagtc

SEQ ID NO: 1459431 - DNA, 25 bp, Homo sapien
aacatacctcatagtgccttttatc

SEQ ID NO: 1459432 - DNA, 25 bp, Homo sapien
gagtcctctgtcaacccagacatgt

SEQ ID NO: 1459433 - DNA, 25 bp, Homo sapien
gagcagtgagtcctctgtcaaccca

SEQ ID NO: 1459434 - DNA, 25 bp, Homo sapien
ataaagcatctacccacatatgagg

SEQ ID NO: 1459435 - DNA, 25 bp, Homo sapien
aagcatctacccacatatgaggggt

SEQ ID NO: 1459436 - DNA, 25 bp, Homo sapien
cataaagcatctacccacatatgag

SEQ ID NO: 1459437 - DNA, 25 bp, Homo sapien
taaagcatctacccacatatgaggg

SEQ ID NO: 1459438 - DNA, 25 bp, Homo sapien
ctttaaacctggacacaagttgagc

SEQ ID NO: 1459439 - DNA, 25 bp, Homo sapien
gtgctatggtggttactggctgaaa

SEQ ID NO: 1459440 - DNA, 25 bp, Homo sapien
ggacacaagttgagctgttataaag

SEQ ID NO: 1459441 - DNA, 25 bp, Homo sapien
tgtgctatggtggttactggctgaa

SEQ ID NO: 1459442 - DNA, 25 bp, Homo sapien
gattttagcaaaaggctccgcccca

SEQ ID NO: 1459443 - DNA, 25 bp, Homo sapien
gataaaaatcactccccagcttagg

SEQ ID NO: 1459444 - DNA, 25 bp, Homo sapien
tatgggctgacgcaagaaccttaag

SEQ ID NO: 1459445 - DNA, 25 bp, Homo sapien
ggcgaatgtgctctcaggatcccaa

SEQ ID NO: 1459446 - DNA, 25 bp, Homo sapien
ggtgcttttgatcagcaaatccagg

SEQ ID NO: 1459447 - DNA, 25 bp, Homo sapien
gcatgtacatcccagttttgtggcc

SEQ ID NO: 1459448 - DNA, 25 bp, Homo sapien
gctgctaactctgggagccacatgg

SEQ ID NO: 1459449 - DNA, 25 bp, Homo sapien
gcagaccctaagtgaacaaggtgct

SEQ ID NO: 1459450 - DNA, 25 bp, Homo sapien
tatagggccaactagtgtgccaacc

SEQ ID NO: 1459451 - DNA, 25 bp, Homo sapien
tatgagctagggtgaaatagactcc

SEQ ID NO: 1459452 - DNA, 25 bp, Homo sapien
caaagctgcaaacggtaggaactga

SEQ ID NO: 1459453 - DNA, 25 bp, Homo sapien
gaaagaatgatcctgatggcccaaa

SEQ ID NO: 1459454 - DNA, 25 bp, Homo sapien
taagccatggtcaagtcctacaagg

SEQ ID NO: 1459455 - DNA, 25 bp, Homo sapien
cacgttcgtgaaaagagctgggcca

SEQ ID NO: 1459456 - DNA, 25 bp, Homo sapien
gatcactatgagcagggcagcacgt

SEQ ID NO: 1459457 - DNA, 25 bp, Homo sapien
cacgtaacaagtaggctgaggtcag

SEQ ID NO: 1459458 - DNA, 25 bp, Homo sapien
taaacaaggatgaatacctcgggtc

SEQ ID NO: 1459459 - DNA, 25 bp, Homo sapien
gaatattcccgtagcatacggcagg

SEQ ID NO: 1459460 - DNA, 25 bp, Homo sapien
ggatgaatttcagggaagcccatga

SEQ ID NO: 1459461 - DNA, 25 bp, Homo sapien
tatgcagatgccaccgaaaggactt

SEQ ID NO: 1459462 - DNA, 25 bp, Homo sapien
agggtctctccgtagcccagcctgg

SEQ ID NO: 1459463 - DNA, 25 bp, Homo sapien
ctcgaattcttagaatcaggtgatc

SEQ ID NO: 1459464 - DNA, 25 bp, Homo sapien
ctttgaactgaccactgtgggcatt

SEQ ID NO: 1459465 - DNA, 25 bp, Homo sapien
actgaccactgtgggcattccatgc

SEQ ID NO: 1459466 - DNA, 25 bp, Homo sapien
agagcacgcctgtgacttcccatca

SEQ ID NO: 1459467 - DNA, 25 bp, Homo sapien
tcaaattaactagaaagagcacgcc

SEQ ID NO: 1459468 - DNA, 25 bp, Homo sapien
caggtgcatatcaaagctgtactca

SEQ ID NO: 1459469 - DNA, 25 bp, Homo sapien
ggtagacatagaatgataaatcccc

SEQ ID NO: 1459470 - DNA, 25 bp, Homo sapien
taattctgatcttgcagaccaaagc

SEQ ID NO: 1459471 - DNA, 25 bp, Homo sapien
tcaagtggccccaagtttggactat

SEQ ID NO: 1459472 - DNA, 25 bp, Homo sapien
cataggaagaaactaagaactgggc

SEQ ID NO: 1459473 - DNA, 25 bp, Homo sapien
tgaagataactgaccagcgagtgga

SEQ ID NO: 1459474 - DNA, 25 bp, Homo sapien
aatacccaaggtacagtcgccagca

SEQ ID NO: 1459475 - DNA, 25 bp, Homo sapien
acagagcttgtctttcggccccaaa

SEQ ID NO: 1459476 - DNA, 25 bp, Homo sapien
ggtagagccttaactgcacagatgg

SEQ ID NO: 1459477 - DNA, 25 bp, Homo sapien
cagacagggtcctactgagcaaaca

SEQ ID NO: 1459478 - DNA, 25 bp, Homo sapien
ggttacaaatctggctgcaacttca

SEQ ID NO: 1459479 - DNA, 25 bp, Homo sapien
gagatgtgctccctcatgcctctgt

SEQ ID NO: 1459480 - DNA, 25 bp, Homo sapien
tcaaaatgatccagcaggcaacctt

SEQ ID NO: 1459481 - DNA, 25 bp, Homo sapien
cagatcagtcaagatgtggttcaaa

SEQ ID NO: 1459482 - DNA, 25 bp, Homo sapien
agagagcctgtttgctgccagccac

SEQ ID NO: 1459483 - DNA, 25 bp, Homo sapien
tcagagagcctgtttgctgccagcc

SEQ ID NO: 1459484 - DNA, 25 bp, Homo sapien
cagagagcctgtttgctgccagcca

SEQ ID NO: 1459485 - DNA, 25 bp, Homo sapien
ctctcctccagcgcgatggagctgg

SEQ ID NO: 1459486 - DNA, 25 bp, Homo sapien
cctccagcgcgatggagctgggtcc

SEQ ID NO: 1459487 - DNA, 25 bp, Homo sapien
gatgttgtctggaggtgactctcct

SEQ ID NO: 1459488 - DNA, 25 bp, Homo sapien
gttgtctggaggtgactctcctcca

SEQ ID NO: 1459489 - DNA, 25 bp, Homo sapien
aactggatgaggacttggtagacaa

SEQ ID NO: 1459490 - DNA, 25 bp, Homo sapien
ggatcatgaacatcctctgctccct

SEQ ID NO: 1459491 - DNA, 25 bp, Homo sapien
cttggtagacaaacttgtactgagc

SEQ ID NO: 1459492 - DNA, 25 bp, Homo sapien
cttgtactgagcgatagtctggatc

SEQ ID NO: 1459493 - DNA, 25 bp, Homo sapien
gcttccctttgagcattcctcattc

SEQ ID NO: 1459494 - DNA, 25 bp, Homo sapien
ggcttccctttgagcattcctcatt

SEQ ID NO: 1459495 - DNA, 25 bp, Homo sapien
cttccctttgagcattcctcattcc

SEQ ID NO: 1459496 - DNA, 25 bp, Homo sapien
cctggccgagaacacctattttgag

SEQ ID NO: 1459497 - DNA, 25 bp, Homo sapien
ggccgagaacacctattttgagaca

SEQ ID NO: 1459498 - DNA, 25 bp, Homo sapien
gcgcctggccgagaacacctatttt

SEQ ID NO: 1459499 - DNA, 25 bp, Homo sapien
tgcgcctggccgagaacacctattt

SEQ ID NO: 1459500 - DNA, 25 bp, Homo sapien
ggactagccaggacacatacggctg

SEQ ID NO: 1459501 - DNA, 25 bp, Homo sapien
cacatacggctggagcacccctgag

SEQ ID NO: 1459502 - DNA, 25 bp, Homo sapien
ttcaccatgtccatcctcctggact

SEQ ID NO: 1459503 - DNA, 25 bp, Homo sapien
tgtccatcctcctggactagccagg

SEQ ID NO: 1459504 - DNA, 25 bp, Homo sapien
tactccaaactgttccggatttgat

SEQ ID NO: 1459505 - DNA, 25 bp, Homo sapien
catagagcatttaaccaccctgagc

SEQ ID NO: 1459506 - DNA, 25 bp, Homo sapien
gccacactggccgaatcccttactc

SEQ ID NO: 1459507 - DNA, 25 bp, Homo sapien
tagagcatttaaccaccctgagcct

SEQ ID NO: 1459508 - DNA, 25 bp, Homo sapien
ttgtgtgcacaggctcagcagcacc

SEQ ID NO: 1459509 - DNA, 25 bp, Homo sapien
gtgtgcacaggctcagcagcacccc

SEQ ID NO: 1459510 - DNA, 25 bp, Homo sapien
tgtgtgcacaggctcagcagcaccc

SEQ ID NO: 1459511 - DNA, 25 bp, Homo sapien
gtgcacaggctcagcagcaccccac

SEQ ID NO: 1459512 - DNA, 25 bp, Homo sapien
cacgatgggcgggtgccggttcttg

SEQ ID NO: 1459513 - DNA, 25 bp, Homo sapien
cagtagatcatcagctcagaaagaa

SEQ ID NO: 1459514 - DNA, 25 bp, Homo sapien
tatggcgacggaccgactggatctc

SEQ ID NO: 1459515 - DNA, 25 bp, Homo sapien
tatgttccaagcagtagatcatcag

SEQ ID NO: 1459516 - DNA, 25 bp, Homo sapien
tgaacctagtttgggccagtatcgg

SEQ ID NO: 1459517 - DNA, 25 bp, Homo sapien
ttcttgcccagacaaaaggtgcttg

SEQ ID NO: 1459518 - DNA, 25 bp, Homo sapien
tcaagcccgtggttgcatagcaaac

SEQ ID NO: 1459519 - DNA, 25 bp, Homo sapien
tcgaaacttcgtggtgaccttgaac

SEQ ID NO: 1459520 - DNA, 25 bp, Homo sapien
gagttgggcgtctatgtcgatttgc

SEQ ID NO: 1459521 - DNA, 25 bp, Homo sapien
tgggcgtctatgtcgatttgcccag

SEQ ID NO: 1459522 - DNA, 25 bp, Homo sapien
gtgcctggagttgggcgtctatgtc

SEQ ID NO: 1459523 - DNA, 25 bp, Homo sapien
ctatgtcgatttgcccagagcagcc

SEQ ID NO: 1459524 - DNA, 25 bp, Homo sapien
atgtagtgccattctgccccgccaa

SEQ ID NO: 1459525 - DNA, 25 bp, Homo sapien
catctgccagaagtcgtggcacgtg

SEQ ID NO: 1459526 - DNA, 25 bp, Homo sapien
aagtcgtggcacgtgtgtggcaggg

SEQ ID NO: 1459527 - DNA, 25 bp, Homo sapien
ggtggctatgtagtgccattctgcc

SEQ ID NO: 1459528 - DNA, 25 bp, Homo sapien
tgcgctcggcgttttctggcagagc

SEQ ID NO: 1459529 - DNA, 25 bp, Homo sapien
gatgtgggaggcattaatgtatcct

SEQ ID NO: 1459530 - DNA, 25 bp, Homo sapien
gctctactcgattctcctcataggg

SEQ ID NO: 1459531 - DNA, 25 bp, Homo sapien
gacaacttcacggattcggctgcgc

SEQ ID NO: 1459532 - DNA, 25 bp, Homo sapien
ccgggtggcatcaactcgattctct

SEQ ID NO: 1459533 - DNA, 25 bp, Homo sapien
gagagcccattcaatgctgccaaca

SEQ ID NO: 1459534 - DNA, 25 bp, Homo sapien
tcgtccatgggaacccgggtggcat

SEQ ID NO: 1459535 - DNA, 25 bp, Homo sapien
aacatcagcggcctcttctgtgcct

SEQ ID NO: 1459536 - DNA, 25 bp, Homo sapien
tgaaaaatgggtcctgagctcctct

SEQ ID NO: 1459537 - DNA, 25 bp, Homo sapien
caaagttttgagaaggcaatagtcc

SEQ ID NO: 1459538 - DNA, 25 bp, Homo sapien
tcttcaaggaagcagtaggagccag

SEQ ID NO: 1459539 - DNA, 25 bp, Homo sapien
tcaccctatcagcttgttaccagag

SEQ ID NO: 1459540 - DNA, 25 bp, Homo sapien
ctgacaacttaactgtctccccaaa

SEQ ID NO: 1459541 - DNA, 25 bp, Homo sapien
gattcacttcgttgttctatatgtg

SEQ ID NO: 1459542 - DNA, 25 bp, Homo sapien
gcatagtcctgttctgacaacttaa

SEQ ID NO: 1459543 - DNA, 25 bp, Homo sapien
tgttctatatgtgcctgcatagtcc

SEQ ID NO: 1459544 - DNA, 25 bp, Homo sapien
tagtactaggatggatcttcaagtg

SEQ ID NO: 1459545 - DNA, 25 bp, Homo sapien
gagctattcatgtctagtactagga

SEQ ID NO: 1459546 - DNA, 25 bp, Homo sapien
agaagagctattcatgtctagtact

SEQ ID NO: 1459547 - DNA, 25 bp, Homo sapien
gtctagtactaggatggatcttcaa

SEQ ID NO: 1459548 - DNA, 25 bp, Homo sapien
atctgaaagggcaaaaactcaacat

SEQ ID NO: 1459549 - DNA, 25 bp, Homo sapien
gatttatctgaaagggcaaaaactc

SEQ ID NO: 1459550 - DNA, 25 bp, Homo sapien
cacgttccctgcataagccctgccc

SEQ ID NO: 1459551 - DNA, 25 bp, Homo sapien
atgctcaatgattccttaaaaacct

SEQ ID NO: 1459552 - DNA, 25 bp, Homo sapien
gcctgaagcatgtgctttcacactg

SEQ ID NO: 1459553 - DNA, 25 bp, Homo sapien
tcagtgcctgaagcatgtgctttca

SEQ ID NO: 1459554 - DNA, 25 bp, Homo sapien
gactgatgaaccaccggagagctgt

SEQ ID NO: 1459555 - DNA, 25 bp, Homo sapien
gaacgctacacacgctgccattggt

SEQ ID NO: 1459556 - DNA, 25 bp, Homo sapien
tgtacgagggcacgatgatcgcgct

SEQ ID NO: 1459557 - DNA, 25 bp, Homo sapien
tggaaggtcttcaccgagagctgca

SEQ ID NO: 1459558 - DNA, 25 bp, Homo sapien
gaggcaggatgtacggctgctgcct

SEQ ID NO: 1459559 - DNA, 25 bp, Homo sapien
cttgcgaggtgtgcgtttccgagta

SEQ ID NO: 1459560 - DNA, 25 bp, Homo sapien
cgggaggcaggatgtacggctgctg

SEQ ID NO: 1459561 - DNA, 25 bp, Homo sapien
gtgcgtttccgagtagtgctcacca

SEQ ID NO: 1459562 - DNA, 25 bp, Homo sapien
ccgccacgttgtaagggaggctcgt

SEQ ID NO: 1459563 - DNA, 25 bp, Homo sapien
cctgggcagacacggctggtgactc

SEQ ID NO: 1459564 - DNA, 25 bp, Homo sapien
cggcagtcccgccacgttgtaaggg

SEQ ID NO: 1459565 - DNA, 25 bp, Homo sapien
tcccatctcatcactaagtttggaa

SEQ ID NO: 1459566 - DNA, 25 bp, Homo sapien
tgggctggcgtctgatggggggtgg

SEQ ID NO: 1459567 - DNA, 25 bp, Homo sapien
gggctggcgtctgatggggggtgga

SEQ ID NO: 1459568 - DNA, 25 bp, Homo sapien
gctggcgtctgatggggggtggaga

SEQ ID NO: 1459569 - DNA, 25 bp, Homo sapien
aaaaccatctgctgagctgtggtta

SEQ ID NO: 1459570 - DNA, 25 bp, Homo sapien
agagtaaaatccagttctcagtttt

SEQ ID NO: 1459571 - DNA, 25 bp, Homo sapien
gtaaaaccatctgctgagctgtggt

SEQ ID NO: 1459572 - DNA, 25 bp, Homo sapien
aagacaagagtaaaatccagttctc

SEQ ID NO: 1459573 - DNA, 25 bp, Homo sapien
ggcaacagcagagtagaaatacaca

SEQ ID NO: 1459574 - DNA, 25 bp, Homo sapien
ttcatgtcaaagacacccccagaag

SEQ ID NO: 1459575 - DNA, 25 bp, Homo sapien
aagtcaaggatagcattcttgttca

SEQ ID NO: 1459576 - DNA, 25 bp, Homo sapien
atgtcaaagacacccccagaagtca

SEQ ID NO: 1459577 - DNA, 25 bp, Homo sapien
tgcggcacatgcgagaatgtgtcta

SEQ ID NO: 1459578 - DNA, 25 bp, Homo sapien
ggcacatgcgagaatgtgtctagaa

SEQ ID NO: 1459579 - DNA, 25 bp, Homo sapien
ggtgcggcacatgcgagaatgtgtc

SEQ ID NO: 1459580 - DNA, 25 bp, Homo sapien
tgtggtgcggcacatgcgagaatgt

SEQ ID NO: 1459581 - DNA, 25 bp, Homo sapien
ggtaggcctaatactgtcagacata

SEQ ID NO: 1459582 - DNA, 25 bp, Homo sapien
aagcaggtaggcctaatactgtcag

SEQ ID NO: 1459583 - DNA, 25 bp, Homo sapien
ttcacttgccactccccgatcaggc

SEQ ID NO: 1459584 - DNA, 25 bp, Homo sapien
ttgcaaaccaagcaggtaggcctaa

SEQ ID NO: 1459585 - DNA, 25 bp, Homo sapien
gaccaattgcagtgactggcttgaa

SEQ ID NO: 1459586 - DNA, 25 bp, Homo sapien
tttcagaccccgacagtgaccaatt

SEQ ID NO: 1459587 - DNA, 25 bp, Homo sapien
tgcagtgactggcttgaaagagcct

SEQ ID NO: 1459588 - DNA, 25 bp, Homo sapien
agcctccacggtgtggagaaaaaag

SEQ ID NO: 1459589 - DNA, 25 bp, Homo sapien
tgctctaggacaatactctacatac

SEQ ID NO: 1459590 - DNA, 25 bp, Homo sapien
taaagcagccgcgttcttcagcagg

SEQ ID NO: 1459591 - DNA, 25 bp, Homo sapien
ctctacatactctcggatgtgtcca

SEQ ID NO: 1459592 - DNA, 25 bp, Homo sapien
gcgttcttcagcaggaactgctcta

SEQ ID NO: 1459593 - DNA, 25 bp, Homo sapien
ttaatttaatctgacaaagccatca

SEQ ID NO: 1459594 - DNA, 25 bp, Homo sapien
taatctgacaaagccatcaagtcgg

SEQ ID NO: 1459595 - DNA, 25 bp, Homo sapien
caaagccatcaagtcgggggggatt

SEQ ID NO: 1459596 - DNA, 25 bp, Homo sapien
acaaagccatcaagtcgggggggat

SEQ ID NO: 1459597 - DNA, 25 bp, Homo sapien
gtaaaacttgtgtcgtgtggcaaac

SEQ ID NO: 1459598 - DNA, 25 bp, Homo sapien
acttgtgtcgtgtggcaaacaaccg

SEQ ID NO: 1459599 - DNA, 25 bp, Homo sapien
tatacttggcattttcgatatcatc

SEQ ID NO: 1459600 - DNA, 25 bp, Homo sapien
caaacaaccgagaaatatacttggc

SEQ ID NO: 1459601 - DNA, 25 bp, Homo sapien
cactagaatggtcgacttgttatga

SEQ ID NO: 1459602 - DNA, 25 bp, Homo sapien
gacttgttatgagtgatattcccca

SEQ ID NO: 1459603 - DNA, 25 bp, Homo sapien
gttgatgagctccactagaatggtc

SEQ ID NO: 1459604 - DNA, 25 bp, Homo sapien
tgtgaaagagggcagtctcttcttt

SEQ ID NO: 1459605 - DNA, 25 bp, Homo sapien
tacgtctagacatcgctatttataa

SEQ ID NO: 1459606 - DNA, 25 bp, Homo sapien
gtctagacatcgctatttataaact

SEQ ID NO: 1459607 - DNA, 25 bp, Homo sapien
tagacatcgctatttataaactata

SEQ ID NO: 1459608 - DNA, 25 bp, Homo sapien
aaatacgtctagacatcgctattta

SEQ ID NO: 1459609 - DNA, 25 bp, Homo sapien
gaccttatctaaaaggagatacacc

SEQ ID NO: 1459610 - DNA, 25 bp, Homo sapien
tgtcttcatggagaccttatctaaa

SEQ ID NO: 1459611 - DNA, 25 bp, Homo sapien
tacaccaaaataagcaccagatgag

SEQ ID NO: 1459612 - DNA, 25 bp, Homo sapien
gctactgcttcccatcctacttgga

SEQ ID NO: 1459613 - DNA, 25 bp, Homo sapien
ggtttccagcctttcctccagtcat

SEQ ID NO: 1459614 - DNA, 25 bp, Homo sapien
gggtttccagcctttcctccagtca

SEQ ID NO: 1459615 - DNA, 25 bp, Homo sapien
ctggggtttccagcctttcctccag

SEQ ID NO: 1459616 - DNA, 25 bp, Homo sapien
acctgtgagtggcttatgctcatga

SEQ ID NO: 1459617 - DNA, 25 bp, Homo sapien
aatcctagatatactcggagccccg

SEQ ID NO: 1459618 - DNA, 25 bp, Homo sapien
cttcagtagctggtgtgcaagactt

SEQ ID NO: 1459619 - DNA, 25 bp, Homo sapien
taaggaaactaagcaaaacctgtga

SEQ ID NO: 1459620 - DNA, 25 bp, Homo sapien
ggctgcatctctacactggtgccat

SEQ ID NO: 1459621 - DNA, 25 bp, Homo sapien
gggagatggctgcatctctacactg

SEQ ID NO: 1459622 - DNA, 25 bp, Homo sapien
gctgcatctctacactggtgccatt

SEQ ID NO: 1459623 - DNA, 25 bp, Homo sapien
gatggctgcatctctacactggtgc

SEQ ID NO: 1459624 - DNA, 25 bp, Homo sapien
tgccaaggtgtacacagtttccatg

SEQ ID NO: 1459625 - DNA, 25 bp, Homo sapien
tgttcctcacgaaaatccccataaa

SEQ ID NO: 1459626 - DNA, 25 bp, Homo sapien
tattaccgcttgtcttccaattctg

SEQ ID NO: 1459627 - DNA, 25 bp, Homo sapien
gaaaatccccataaagaaaatgcca

SEQ ID NO: 1459628 - DNA, 25 bp, Homo sapien
tgagtagaataaatcatagacaaca

SEQ ID NO: 1459629 - DNA, 25 bp, Homo sapien
tagccactccacaatatacacgtta

SEQ ID NO: 1459630 - DNA, 25 bp, Homo sapien
cgttatttcaaaacccacaggcatc

SEQ ID NO: 1459631 - DNA, 25 bp, Homo sapien
gtaacgcatatgttaactggtttga

SEQ ID NO: 1459632 - DNA, 25 bp, Homo sapien
gaagcgcctatcttccaactcagag

SEQ ID NO: 1459633 - DNA, 25 bp, Homo sapien
aatcatgcggtctataggtggtcac

SEQ ID NO: 1459634 - DNA, 25 bp, Homo sapien
tcagttacccgagcttggcaataag

SEQ ID NO: 1459635 - DNA, 25 bp, Homo sapien
taagaacctgtaccaatcaaaagag

SEQ ID NO: 1459636 - DNA, 25 bp, Homo sapien
cattctggcccactgctatcaacaa

SEQ ID NO: 1459637 - DNA, 25 bp, Homo sapien
ggcccactgctatcaacaatggttt

SEQ ID NO: 1459638 - DNA, 25 bp, Homo sapien
ggctgcatagcaaaaagaaggccaa

SEQ ID NO: 1459639 - DNA, 25 bp, Homo sapien
catagcaaaaagaaggccaagccat

SEQ ID NO: 1459640 - DNA, 25 bp, Homo sapien
tcattgatgtacatcagttcagctt

SEQ ID NO: 1459641 - DNA, 25 bp, Homo sapien
tcctgtccaaatccatccaaacgtt

SEQ ID NO: 1459642 - DNA, 25 bp, Homo sapien
ccaaacgttcaacttcattgatgta

SEQ ID NO: 1459643 - DNA, 25 bp, Homo sapien
aaatccatccaaacgttcaacttca

SEQ ID NO: 1459644 - DNA, 25 bp, Homo sapien
tgtgttcttgggctaccttctgggt

SEQ ID NO: 1459645 - DNA, 25 bp, Homo sapien
gtgttcttgggctaccttctgggtc

SEQ ID NO: 1459646 - DNA, 25 bp, Homo sapien
tgttcttgggctaccttctgggtca

SEQ ID NO: 1459647 - DNA, 25 bp, Homo sapien
ttgtgttcttgggctaccttctggg

SEQ ID NO: 1459648 - DNA, 25 bp, Homo sapien
agggtgagataaggatccaaattca

SEQ ID NO: 1459649 - DNA, 25 bp, Homo sapien
caaagggtgagataaggatccaaat

SEQ ID NO: 1459650 - DNA, 25 bp, Homo sapien
aggatccaaattcagtcctctgcat

SEQ ID NO: 1459651 - DNA, 25 bp, Homo sapien
tacaaagggtgagataaggatccaa

SEQ ID NO: 1459652 - DNA, 25 bp, Homo sapien
cttgagaatcaaactgattatagtc

SEQ ID NO: 1459653 - DNA, 25 bp, Homo sapien
gagaatcaaactgattatagtctcc

SEQ ID NO: 1459654 - DNA, 25 bp, Homo sapien
aatcttgagaatcaaactgattata

SEQ ID NO: 1459655 - DNA, 25 bp, Homo sapien
gaatcaaactgattatagtctccaa

SEQ ID NO: 1459656 - DNA, 25 bp, Homo sapien
tcttttttgacttgcaggtaatact

SEQ ID NO: 1459657 - DNA, 25 bp, Homo sapien
tgtacatcgtaatcgcccttcaagc

SEQ ID NO: 1459658 - DNA, 25 bp, Homo sapien
cttgcacagctaggccggctagccg

SEQ ID NO: 1459659 - DNA, 25 bp, Homo sapien
ggctagccgaatcacctggtccaat

SEQ ID NO: 1459660 - DNA, 25 bp, Homo sapien
caacagtgtgcgttcctgaatgcat

SEQ ID NO: 1459661 - DNA, 25 bp, Homo sapien
cacgacaacacgactgccaaagcta

SEQ ID NO: 1459662 - DNA, 25 bp, Homo sapien
tgccaaagctacactcaacagtgtg

SEQ ID NO: 1459663 - DNA, 25 bp, Homo sapien
tggagacccacgacaacacgactgc

SEQ ID NO: 1459664 - DNA, 25 bp, Homo sapien
gcagatcacaaacaggccaaataat

SEQ ID NO: 1459665 - DNA, 25 bp, Homo sapien
tcaaactcaaaagttcggtaaggca

SEQ ID NO: 1459666 - DNA, 25 bp, Homo sapien
tagaaacacatcacctttcaaactc

SEQ ID NO: 1459667 - DNA, 25 bp, Homo sapien
caaaagttcggtaaggcagatcaca

SEQ ID NO: 1459668 - DNA, 25 bp, Homo sapien
caaggatgaatcacagtcagggacc

SEQ ID NO: 1459669 - DNA, 25 bp, Homo sapien
gacttaaactgatctctgagccacc

SEQ ID NO: 1459670 - DNA, 25 bp, Homo sapien
aactctgtcgtgatcagtacctggc

SEQ ID NO: 1459671 - DNA, 25 bp, Homo sapien
tgcggtgctccccaatagttgccat

SEQ ID NO: 1459672 - DNA, 25 bp, Homo sapien
tgctggatgactttaatttccatag

SEQ ID NO: 1459673 - DNA, 25 bp, Homo sapien
taattcggagatcctgctggatgac

SEQ ID NO: 1459674 - DNA, 25 bp, Homo sapien
tcagaagtcagcaatatgagagata

SEQ ID NO: 1459675 - DNA, 25 bp, Homo sapien
tatgagagataattcggagatcctg

SEQ ID NO: 1459676 - DNA, 25 bp, Homo sapien
caaatagtcgtcatcaccactctga

SEQ ID NO: 1459677 - DNA, 25 bp, Homo sapien
tgagccagagtattgtgggtagaga

SEQ ID NO: 1459678 - DNA, 25 bp, Homo sapien
tgattcctacaaggattgattgagc

SEQ ID NO: 1459679 - DNA, 25 bp, Homo sapien
agatgattgacaaatagtcgtcatc

SEQ ID NO: 1459680 - DNA, 25 bp, Homo sapien
tacttctagttggtagttgaaatca

SEQ ID NO: 1459681 - DNA, 25 bp, Homo sapien
tcatgaaccagtgccagaaataata

SEQ ID NO: 1459682 - DNA, 25 bp, Homo sapien
tagggtcctagagtagtataattca

SEQ ID NO: 1459683 - DNA, 25 bp, Homo sapien
caatctgtaacttcaaagcctgcag

SEQ ID NO: 1459684 - DNA, 25 bp, Homo sapien
cctggcccgtcctgtggcagccaac

SEQ ID NO: 1459685 - DNA, 25 bp, Homo sapien
agcctggcccgtcctgtggcagcca

SEQ ID NO: 1459686 - DNA, 25 bp, Homo sapien
attgggtcagcctggcccgtcctgt

SEQ ID NO: 1459687 - DNA, 25 bp, Homo sapien
gtcagcctggcccgtcctgtggcag

SEQ ID NO: 1459688 - DNA, 25 bp, Homo sapien
tcctacactcggcacaggacaaagc

SEQ ID NO: 1459689 - DNA, 25 bp, Homo sapien
ggccgcgtcctctgcagcagatctg

SEQ ID NO: 1459690 - DNA, 25 bp, Homo sapien
aggcaaggcccgctttatcctgtct

SEQ ID NO: 1459691 - DNA, 25 bp, Homo sapien
tgtctccttgctcgggcctgataac

SEQ ID NO: 1459692 - DNA, 25 bp, Homo sapien
tatttcaaggatccaaattaccgac

SEQ ID NO: 1459693 - DNA, 25 bp, Homo sapien
ggaccatgtgtctaactcgcatttc

SEQ ID NO: 1459694 - DNA, 25 bp, Homo sapien
gagctctagcagatacataacttgc

SEQ ID NO: 1459695 - DNA, 25 bp, Homo sapien
tagttagacctatgggtttctcaca

SEQ ID NO: 1459696 - DNA, 25 bp, Homo sapien
cattatttgagtcacacctggtaac

SEQ ID NO: 1459697 - DNA, 25 bp, Homo sapien
gattgacgagctgaccttgagagtt

SEQ ID NO: 1459698 - DNA, 25 bp, Homo sapien
taggaggctgtaaaccgaaacatgt

SEQ ID NO: 1459699 - DNA, 25 bp, Homo sapien
cagctgcaagcacaagattgacgag

SEQ ID NO: 1459700 - DNA, 25 bp, Homo sapien
gcctaactgcatatctttcacacca

SEQ ID NO: 1459701 - DNA, 25 bp, Homo sapien
gaagcaacttcatgtatttggacaa

SEQ ID NO: 1459702 - DNA, 25 bp, Homo sapien
tatttggacaacttgtactatgaag

SEQ ID NO: 1459703 - DNA, 25 bp, Homo sapien
gcccagcctaactgcatatctttca

SEQ ID NO: 1459704 - DNA, 25 bp, Homo sapien
gggatacccatagctgctgagaagc

SEQ ID NO: 1459705 - DNA, 25 bp, Homo sapien
cgaaaacagacatagcatccaccag

SEQ ID NO: 1459706 - DNA, 25 bp, Homo sapien
ccagatagagggtacttggaacagg

SEQ ID NO: 1459707 - DNA, 25 bp, Homo sapien
aactgggagatgtacaatagatcac

SEQ ID NO: 1459708 - DNA, 25 bp, Homo sapien
ctgccagatgtacgacagtgtacta

SEQ ID NO: 1459709 - DNA, 25 bp, Homo sapien
gccagatgtacgacagtgtactaaa

SEQ ID NO: 1459710 - DNA, 25 bp, Homo sapien
cagatgtacgacagtgtactaaaat

SEQ ID NO: 1459711 - DNA, 25 bp, Homo sapien
gatgtacgacagtgtactaaaatca

SEQ ID NO: 1459712 - DNA, 25 bp, Homo sapien
cagaatgacaaggtccgggtaaaag

SEQ ID NO: 1459713 - DNA, 25 bp, Homo sapien
tccttcttcaaagcatgttcccgca

SEQ ID NO: 1459714 - DNA, 25 bp, Homo sapien
cttcttcaaagcatgttcccgcatt

SEQ ID NO: 1459715 - DNA, 25 bp, Homo sapien
gcattcagaatgacaaggtccgggt

SEQ ID NO: 1459716 - DNA, 25 bp, Homo sapien
tactaccttaccagcattacagaaa

SEQ ID NO: 1459717 - DNA, 25 bp, Homo sapien
atgaatatttccacgctgctagaga

SEQ ID NO: 1459718 - DNA, 25 bp, Homo sapien
tgcatgcctattttacccacagtct

SEQ ID NO: 1459719 - DNA, 25 bp, Homo sapien
ggattcaaccaaaactctaaagctg

SEQ ID NO: 1459720 - DNA, 25 bp, Homo sapien
cacccatcgtgcttgctggctcttg

SEQ ID NO: 1459721 - DNA, 25 bp, Homo sapien
ggctcattagcgaatttgtccagat

SEQ ID NO: 1459722 - DNA, 25 bp, Homo sapien
tgctgaagccatgacacatttggca

SEQ ID NO: 1459723 - DNA, 25 bp, Homo sapien
ggcacatagaacatgactccaaaga

SEQ ID NO: 1459724 - DNA, 25 bp, Homo sapien
agaaaccaaaggccaaagtagtgcg

SEQ ID NO: 1459725 - DNA, 25 bp, Homo sapien
gagaaaccaaaggccaaagtagtgc

SEQ ID NO: 1459726 - DNA, 25 bp, Homo sapien
ctgagaaaccaaaggccaaagtagt

SEQ ID NO: 1459727 - DNA, 25 bp, Homo sapien
tgagaaaccaaaggccaaagtagtg

SEQ ID NO: 1459728 - DNA, 25 bp, Homo sapien
tatccagatgcagtatccctactca

SEQ ID NO: 1459729 - DNA, 25 bp, Homo sapien
cattactactgtttgtgcttgcaga

SEQ ID NO: 1459730 - DNA, 25 bp, Homo sapien
tggagtatccagatgcagtatccct

SEQ ID NO: 1459731 - DNA, 25 bp, Homo sapien
ccaaagcgcccatgtgaggtaaggg

SEQ ID NO: 1459732 - DNA, 25 bp, Homo sapien
aagccaaatatccaccataatctag

SEQ ID NO: 1459733 - DNA, 25 bp, Homo sapien
ttccaagacttcataaaggctaaac

SEQ ID NO: 1459734 - DNA, 25 bp, Homo sapien
ataaaggctaaacatattaccctga

SEQ ID NO: 1459735 - DNA, 25 bp, Homo sapien
ttatgatatacctaaactacttcta

SEQ ID NO: 1459736 - DNA, 25 bp, Homo sapien
gtgttcaagtctccccatccaatga

SEQ ID NO: 1459737 - DNA, 25 bp, Homo sapien
catcgtcgcttaggccaaaaaacac

SEQ ID NO: 1459738 - DNA, 25 bp, Homo sapien
cacagccgtgctaagaataacagga

SEQ ID NO: 1459739 - DNA, 25 bp, Homo sapien
ggctggtcccttcggtgagttctcc

SEQ ID NO: 1459740 - DNA, 25 bp, Homo sapien
ggcggagcttcagaccaaaaggcat

SEQ ID NO: 1459741 - DNA, 25 bp, Homo sapien
gacagcgtgcactcgataacattgc

SEQ ID NO: 1459742 - DNA, 25 bp, Homo sapien
gcagttcttgctcaggacgttgtag

SEQ ID NO: 1459743 - DNA, 25 bp, Homo sapien
tccagcaggcgaatccgtgtgacaa

SEQ ID NO: 1459744 - DNA, 25 bp, Homo sapien
atgtggtcctcggacgccgcccgcc

SEQ ID NO: 1459745 - DNA, 25 bp, Homo sapien
ctatgtggtcctcggacgccgcccg

SEQ ID NO: 1459746 - DNA, 25 bp, Homo sapien
gtggtcctcggacgccgcccgccta

SEQ ID NO: 1459747 - DNA, 25 bp, Homo sapien
ggctatgtggtcctcggacgccgcc

SEQ ID NO: 1459748 - DNA, 25 bp, Homo sapien
ctgagatggccttagcagtttcgtg

SEQ ID NO: 1459749 - DNA, 25 bp, Homo sapien
tgagatggccttagcagtttcgtga

SEQ ID NO: 1459750 - DNA, 25 bp, Homo sapien
ggaaaattacactatcacctgtgct

SEQ ID NO: 1459751 - DNA, 25 bp, Homo sapien
aaaattacactatcacctgtgctcc

SEQ ID NO: 1459752 - DNA, 25 bp, Homo sapien
ctggaaaattacactatcacctgtg

SEQ ID NO: 1459753 - DNA, 25 bp, Homo sapien
aattacactatcacctgtgctcctc

SEQ ID NO: 1459754 - DNA, 25 bp, Homo sapien
aacaagacttactgacaccctgatg

SEQ ID NO: 1459755 - DNA, 25 bp, Homo sapien
taacttgattccctaactcaggcag

SEQ ID NO: 1459756 - DNA, 25 bp, Homo sapien
tttacactcttcatccatctgccga

SEQ ID NO: 1459757 - DNA, 25 bp, Homo sapien
cttgatgcaaaagtcctgtaaccaa

SEQ ID NO: 1459758 - DNA, 25 bp, Homo sapien
ggtctttgatacttgccgtgggcac

SEQ ID NO: 1459759 - DNA, 25 bp, Homo sapien
acatatgctagaaactctggcttgg

SEQ ID NO: 1459760 - DNA, 25 bp, Homo sapien
caggttataaccctgcaacatagca

SEQ ID NO: 1459761 - DNA, 25 bp, Homo sapien
tgccagtactcatgcctcatggagg

SEQ ID NO: 1459762 - DNA, 25 bp, Homo sapien
ggaaagtgcagtaaaccctggactc

SEQ ID NO: 1459763 - DNA, 25 bp, Homo sapien
tactcactcgactgaagttgagctg

SEQ ID NO: 1459764 - DNA, 25 bp, Homo sapien
gactcttcaacttctagggtctttg

SEQ ID NO: 1459765 - DNA, 25 bp, Homo sapien
ggaaaaatactcactcgactgaagt

SEQ ID NO: 1459766 - DNA, 25 bp, Homo sapien
tggttctctatcttgtacatctcta

SEQ ID NO: 1459767 - DNA, 25 bp, Homo sapien
aaagcctccataacccggaagcact

SEQ ID NO: 1459768 - DNA, 25 bp, Homo sapien
aagaggtggttctctatcttgtaca

SEQ ID NO: 1459769 - DNA, 25 bp, Homo sapien
aagcctccataacccggaagcactt

SEQ ID NO: 1459770 - DNA, 25 bp, Homo sapien
cttcgctcttttccggagaggtgcg

SEQ ID NO: 1459771 - DNA, 25 bp, Homo sapien
cttgcttcgctcttttccggagagg

SEQ ID NO: 1459772 - DNA, 25 bp, Homo sapien
cttgagcttgcttcgctcttttccg

SEQ ID NO: 1459773 - DNA, 25 bp, Homo sapien
gagcttgcttcgctcttttccggag

SEQ ID NO: 1459774 - DNA, 25 bp, Homo sapien
aagtagccaagaaagaagggctctc

SEQ ID NO: 1459775 - DNA, 25 bp, Homo sapien
gtagccaagaaagaagggctctcct

SEQ ID NO: 1459776 - DNA, 25 bp, Homo sapien
tgttgcttgtgacctccctcagcaa

SEQ ID NO: 1459777 - DNA, 25 bp, Homo sapien
ccatgcctgagtgagttccctcaac

SEQ ID NO: 1459778 - DNA, 25 bp, Homo sapien
ttaaataacaattgtgtgacaaata

SEQ ID NO: 1459779 - DNA, 25 bp, Homo sapien
taaataacaattgtgtgacaaatag

SEQ ID NO: 1459780 - DNA, 25 bp, Homo sapien
atgggcacccgaatgcagtttagaa

SEQ ID NO: 1459781 - DNA, 25 bp, Homo sapien
agaggcatgccgtagatgggcaccc

SEQ ID NO: 1459782 - DNA, 25 bp, Homo sapien
gagccgcggcttcccgtggttgttg

SEQ ID NO: 1459783 - DNA, 25 bp, Homo sapien
ccgcggcttcccgtggttgttgaag

SEQ ID NO: 1459784 - DNA, 25 bp, Homo sapien
gcggcttcccgtggttgttgaagat

SEQ ID NO: 1459785 - DNA, 25 bp, Homo sapien
cgcggcttcccgtggttgttgaaga

SEQ ID NO: 1459786 - DNA, 25 bp, Homo sapien
caagcctcgcctagtaatcttgcct

SEQ ID NO: 1459787 - DNA, 25 bp, Homo sapien
ggagcgggcgcacaagcctcgccta

SEQ ID NO: 1459788 - DNA, 25 bp, Homo sapien
gggcgcacaagcctcgcctagtaat

SEQ ID NO: 1459789 - DNA, 25 bp, Homo sapien
gcgcacaagcctcgcctagtaatct

SEQ ID NO: 1459790 - DNA, 25 bp, Homo sapien
gttacaaacctgtagagacacacat

SEQ ID NO: 1459791 - DNA, 25 bp, Homo sapien
tatcacttaggagataagatggccc

SEQ ID NO: 1459792 - DNA, 25 bp, Homo sapien
tagctttgcatgaccctaaggagaa

SEQ ID NO: 1459793 - DNA, 25 bp, Homo sapien
gatggcccctaggaaaatcagtttg

SEQ ID NO: 1459794 - DNA, 25 bp, Homo sapien
gactgcctacgaggttctgactggg

SEQ ID NO: 1459795 - DNA, 25 bp, Homo sapien
tcggaggtcagaaggcccaaattgg

SEQ ID NO: 1459796 - DNA, 25 bp, Homo sapien
agtgggaaagcaagacatgttcgga

SEQ ID NO: 1459797 - DNA, 25 bp, Homo sapien
ggaagcctcagaacggactgcctac

SEQ ID NO: 1459798 - DNA, 25 bp, Homo sapien
tcaatcaccacatagccagatagga

SEQ ID NO: 1459799 - DNA, 25 bp, Homo sapien
atcaccacatagccagataggaaac

SEQ ID NO: 1459800 - DNA, 25 bp, Homo sapien
aatcaccacatagccagataggaaa

SEQ ID NO: 1459801 - DNA, 25 bp, Homo sapien
caatcaccacatagccagataggaa

SEQ ID NO: 1459802 - DNA, 25 bp, Homo sapien
aagcaccgggcaatgggcagctgcc

SEQ ID NO: 1459803 - DNA, 25 bp, Homo sapien
tggttgcatccaagcacatggcaag

SEQ ID NO: 1459804 - DNA, 25 bp, Homo sapien
agcacatggcaagcaccgggcaatg

SEQ ID NO: 1459805 - DNA, 25 bp, Homo sapien
cttttagccatggttgcatccaagc

SEQ ID NO: 1459806 - DNA, 25 bp, Homo sapien
ctcaatcattttcccgtagctgtca

SEQ ID NO: 1459807 - DNA, 25 bp, Homo sapien
caggtacttctgatgcattattctc

SEQ ID NO: 1459808 - DNA, 25 bp, Homo sapien
gtagctgtcatgtccaacttgacgc

SEQ ID NO: 1459809 - DNA, 25 bp, Homo sapien
ctcctgatcttacagcaaagccctg

SEQ ID NO: 1459810 - DNA, 25 bp, Homo sapien
gaaggaccacctgagttgcagagtt

SEQ ID NO: 1459811 - DNA, 25 bp, Homo sapien
cagaatgttttttaagtaggcaaga

SEQ ID NO: 1459812 - DNA, 25 bp, Homo sapien
tggatgtgacaaacggtaaaagtga

SEQ ID NO: 1459813 - DNA, 25 bp, Homo sapien
gaaactgtatcttcgtggtagtggg

SEQ ID NO: 1459814 - DNA, 25 bp, Homo sapien
caaagattaggtgtatctctggcat

SEQ ID NO: 1459815 - DNA, 25 bp, Homo sapien
tatattgtctctacacagctgtgtt

SEQ ID NO: 1459816 - DNA, 25 bp, Homo sapien
tctggcatgttgcagggattaacca

SEQ ID NO: 1459817 - DNA, 25 bp, Homo sapien
ggattaaccattaacccactggcta

SEQ ID NO: 1459818 - DNA, 25 bp, Homo sapien
tcatcagtagaaatcaaagccacag

SEQ ID NO: 1459819 - DNA, 25 bp, Homo sapien
ggctgaatggataaccttttgcctc

SEQ ID NO: 1459820 - DNA, 25 bp, Homo sapien
gcttagcaacactaatcatcagtag

SEQ ID NO: 1459821 - DNA, 25 bp, Homo sapien
gccactgctagttgctgattcttta

SEQ ID NO: 1459822 - DNA, 25 bp, Homo sapien
caaatttgccatatagacttagagc

SEQ ID NO: 1459823 - DNA, 25 bp, Homo sapien
ccaccatcccgtagatgcagcattt

SEQ ID NO: 1459824 - DNA, 25 bp, Homo sapien
tccaaatttgccatatagacttaga

SEQ ID NO: 1459825 - DNA, 25 bp, Homo sapien
tgcagcatttgagggaagattttcc

SEQ ID NO: 1459826 - DNA, 25 bp, Homo sapien
taagcagaactttgttcggtcgcct

SEQ ID NO: 1459827 - DNA, 25 bp, Homo sapien
agctcccctcctgtagccgacaata

SEQ ID NO: 1459828 - DNA, 25 bp, Homo sapien
cctcctgtagccgacaataaacaag

SEQ ID NO: 1459829 - DNA, 25 bp, Homo sapien
actttgttcggtcgcctggcagctc

SEQ ID NO: 1459830 - DNA, 25 bp, Homo sapien
atgaaactcacccataaccactgca

SEQ ID NO: 1459831 - DNA, 25 bp, Homo sapien
ctcatgaaactcacccataaccact

SEQ ID NO: 1459832 - DNA, 25 bp, Homo sapien
aactcacccataaccactgcactga

SEQ ID NO: 1459833 - DNA, 25 bp, Homo sapien
tcacccataaccactgcactgatgg

SEQ ID NO: 1459834 - DNA, 25 bp, Homo sapien
tatggaaacctacggcaagtttgga

SEQ ID NO: 1459835 - DNA, 25 bp, Homo sapien
tatgagagatttcataccagtcatg

SEQ ID NO: 1459836 - DNA, 25 bp, Homo sapien
taaggatcaaaagtagcttcaatgg

SEQ ID NO: 1459837 - DNA, 25 bp, Homo sapien
cagtcatgtagcatcttaaggatca

SEQ ID NO: 1459838 - DNA, 25 bp, Homo sapien
tctacaaggacaggtcagatccatc

SEQ ID NO: 1459839 - DNA, 25 bp, Homo sapien
tcctaaccaagaatgaacccagagc

SEQ ID NO: 1459840 - DNA, 25 bp, Homo sapien
tccatctttatagaggcagtgccct

SEQ ID NO: 1459841 - DNA, 25 bp, Homo sapien
tcagaagcagggaaacactaaatcg

SEQ ID NO: 1459842 - DNA, 25 bp, Homo sapien
gacaccattatttctgagcagacgc

SEQ ID NO: 1459843 - DNA, 25 bp, Homo sapien
gagaccaaggtcttcaaagcagcag

SEQ ID NO: 1459844 - DNA, 25 bp, Homo sapien
tacccatcaggttaggccataagca

SEQ ID NO: 1459845 - DNA, 25 bp, Homo sapien
taagcagatttcactagtaggccaa

SEQ ID NO: 1459846 - DNA, 25 bp, Homo sapien
tcagagcctttaatgtcaacacaca

SEQ ID NO: 1459847 - DNA, 25 bp, Homo sapien
ggagatagcctaattgccccatgga

SEQ ID NO: 1459848 - DNA, 25 bp, Homo sapien
tactgagctcagtcactattatagt

SEQ ID NO: 1459849 - DNA, 25 bp, Homo sapien
gaaataggtggtctttgcacttctg

SEQ ID NO: 1459850 - DNA, 25 bp, Homo sapien
aaaggctgtccttcgcggcggcgga

SEQ ID NO: 1459851 - DNA, 25 bp, Homo sapien
gagtcccgcgcggaaaggctgtcct

SEQ ID NO: 1459852 - DNA, 25 bp, Homo sapien
tacatggcccccgtggcgccccgga

SEQ ID NO: 1459853 - DNA, 25 bp, Homo sapien
tcccgcgcggaaaggctgtccttcg

SEQ ID NO: 1459854 - DNA, 25 bp, Homo sapien
atcccggcgcgagagtccgagcaga

SEQ ID NO: 1459855 - DNA, 25 bp, Homo sapien
gatgtctgtctagggctccccgagg

SEQ ID NO: 1459856 - DNA, 25 bp, Homo sapien
ggctgagcccggagaagcacagcaa

SEQ ID NO: 1459857 - DNA, 25 bp, Homo sapien
gaaggagcgccagtggccacttgat

SEQ ID NO: 1459858 - DNA, 25 bp, Homo sapien
gatctctccctagaatctctgggta

SEQ ID NO: 1459859 - DNA, 25 bp, Homo sapien
cccgtaggaatgataaaaagcagcc

SEQ ID NO: 1459860 - DNA, 25 bp, Homo sapien
tactggacccggtgtcttagccttc

SEQ ID NO: 1459861 - DNA, 25 bp, Homo sapien
caagtaggcaatctcagagatctct

SEQ ID NO: 1459862 - DNA, 25 bp, Homo sapien
catgtctgagtaactcccacagacc

SEQ ID NO: 1459863 - DNA, 25 bp, Homo sapien
gaccactgaggattgaaagatactt

SEQ ID NO: 1459864 - DNA, 25 bp, Homo sapien
gggactggtttggaatgaccactga

SEQ ID NO: 1459865 - DNA, 25 bp, Homo sapien
ttcaaacatgtctgagtaactccca

SEQ ID NO: 1459866 - DNA, 25 bp, Homo sapien
gagcacagcctgaagatccatcttc

SEQ ID NO: 1459867 - DNA, 25 bp, Homo sapien
ggatttctgcggtttgttgctgagc

SEQ ID NO: 1459868 - DNA, 25 bp, Homo sapien
cccaaggatttctgcggtttgttgc

SEQ ID NO: 1459869 - DNA, 25 bp, Homo sapien
tgagcacagcctgaagatccatctt

SEQ ID NO: 1459870 - DNA, 25 bp, Homo sapien
taataagcccctcctgtttgctaaa

SEQ ID NO: 1459871 - DNA, 25 bp, Homo sapien
tttaataagcccctcctgtttgcta

SEQ ID NO: 1459872 - DNA, 25 bp, Homo sapien
tagaccgaagcaggtctttgtcatc

SEQ ID NO: 1459873 - DNA, 25 bp, Homo sapien
taaaacatcttccatatttagaccg

SEQ ID NO: 1459874 - DNA, 25 bp, Homo sapien
tcagatgccatctgtatactatgac

SEQ ID NO: 1459875 - DNA, 25 bp, Homo sapien
tgagctccactatcaaaactgaaca

SEQ ID NO: 1459876 - DNA, 25 bp, Homo sapien
gacttagacctctttcctgaagcac

SEQ ID NO: 1459877 - DNA, 25 bp, Homo sapien
tcattacctagggttcagtcctgag

SEQ ID NO: 1459878 - DNA, 25 bp, Homo sapien
tcagtaaaaaccaaatatgggccta

SEQ ID NO: 1459879 - DNA, 25 bp, Homo sapien
cagattgagaagttgaaataacata

SEQ ID NO: 1459880 - DNA, 25 bp, Homo sapien
atattgcctggacgcaacagctgtg

SEQ ID NO: 1459881 - DNA, 25 bp, Homo sapien
taggttgacgtgcaacagattgaga

SEQ ID NO: 1459882 - DNA, 25 bp, Homo sapien
ctttcctttgttgggctgtgacggc

SEQ ID NO: 1459883 - DNA, 25 bp, Homo sapien
taaaagcatatggaggtaccccagt

SEQ ID NO: 1459884 - DNA, 25 bp, Homo sapien
taccagcaagtctagtttctcatga

SEQ ID NO: 1459885 - DNA, 25 bp, Homo sapien
gacggctgcatttgcttgctcactg

SEQ ID NO: 1459886 - DNA, 25 bp, Homo sapien
aaggaaaggagtgcgtagctctgtt

SEQ ID NO: 1459887 - DNA, 25 bp, Homo sapien
aaaaggaaaggagtgcgtagctctg

SEQ ID NO: 1459888 - DNA, 25 bp, Homo sapien
tccaaaaggaaaggagtgcgtagct

SEQ ID NO: 1459889 - DNA, 25 bp, Homo sapien
ccaaaaggaaaggagtgcgtagctc

SEQ ID NO: 1459890 - DNA, 25 bp, Homo sapien
agcggctccaccgccttggggcagc

SEQ ID NO: 1459891 - DNA, 25 bp, Homo sapien
gcggctccaccgccttggggcagcg

SEQ ID NO: 1459892 - DNA, 25 bp, Homo sapien
agcgccagcccgtgcgagaagtcga

SEQ ID NO: 1459893 - DNA, 25 bp, Homo sapien
cgtagagcgccagcccgtgcgagaa

SEQ ID NO: 1459894 - DNA, 25 bp, Homo sapien
ccagcccgtgcgagaagtcgatcac

SEQ ID NO: 1459895 - DNA, 25 bp, Homo sapien
ctcgtagagcgccagcccgtgcgag

SEQ ID NO: 1459896 - DNA, 25 bp, Homo sapien
gtcctccgtgccgtggatgatgagc

SEQ ID NO: 1459897 - DNA, 25 bp, Homo sapien
tcctccgtgccgtggatgatgagca

SEQ ID NO: 1459898 - DNA, 25 bp, Homo sapien
ctcgtcctccgtgccgtggatgatg

SEQ ID NO: 1459899 - DNA, 25 bp, Homo sapien
tgatgagcacgggcgacgtgatctt

SEQ ID NO: 1459900 - DNA, 25 bp, Homo sapien
agcagtaggtcttcttggtgtcggg

SEQ ID NO: 1459901 - DNA, 25 bp, Homo sapien
tcttcttggtgtcggggaaggcgac

SEQ ID NO: 1459902 - DNA, 25 bp, Homo sapien
ctcgatgttagggaaggcgtcgaag

SEQ ID NO: 1459903 - DNA, 25 bp, Homo sapien
ggcgtcgaagcagtaggtcttcttg

SEQ ID NO: 1459904 - DNA, 25 bp, Homo sapien
cccgaggtgagcggcgaatgcagca

SEQ ID NO: 1459905 - DNA, 25 bp, Homo sapien
gcgcatgcccgaggtgagcggcgaa

SEQ ID NO: 1459906 - DNA, 25 bp, Homo sapien
catgcccgaggtgagcggcgaatgc

SEQ ID NO: 1459907 - DNA, 25 bp, Homo sapien
tgcccgaggtgagcggcgaatgcag

SEQ ID NO: 1459908 - DNA, 25 bp, Homo sapien
agtcaccaaggaataggtggcctcc

SEQ ID NO: 1459909 - DNA, 25 bp, Homo sapien
tcagtcaccaaggaataggtggcct

SEQ ID NO: 1459910 - DNA, 25 bp, Homo sapien
tcgggctcagtcaccaaggaatagg

SEQ ID NO: 1459911 - DNA, 25 bp, Homo sapien
ggctcagtcaccaaggaataggtgg

SEQ ID NO: 1459912 - DNA, 25 bp, Homo sapien
aaggctgtatacttgattttcgtaa

SEQ ID NO: 1459913 - DNA, 25 bp, Homo sapien
gctgtatacttgattttcgtaaatc

SEQ ID NO: 1459914 - DNA, 25 bp, Homo sapien
taaggctgtatacttgattttcgta

SEQ ID NO: 1459915 - DNA, 25 bp, Homo sapien
tttaaggctgtatacttgattttcg

SEQ ID NO: 1459916 - DNA, 25 bp, Homo sapien
cttttactcctgatcctgtggtgac

SEQ ID NO: 1459917 - DNA, 25 bp, Homo sapien
ttcgagagacttttactcctgatcc

SEQ ID NO: 1459918 - DNA, 25 bp, Homo sapien
gttcttccatcagttggaaacttcg

SEQ ID NO: 1459919 - DNA, 25 bp, Homo sapien
cagttggaaacttcgagagactttt

SEQ ID NO: 1459920 - DNA, 25 bp, Homo sapien
ggcacctgtggtttacacccgaatc

SEQ ID NO: 1459921 - DNA, 25 bp, Homo sapien
tgtggtttacacccgaatccccaca

SEQ ID NO: 1459922 - DNA, 25 bp, Homo sapien
gcacctgtggtttacacccgaatcc

SEQ ID NO: 1459923 - DNA, 25 bp, Homo sapien
ggtttagataagctgctcgtccact

SEQ ID NO: 1459924 - DNA, 25 bp, Homo sapien
taagctgctcgtccactatccagtg

SEQ ID NO: 1459925 - DNA, 25 bp, Homo sapien
caaagtgaatggagggtttagataa

SEQ ID NO: 1459926 - DNA, 25 bp, Homo sapien
ctggaaatgtgatttaatggcccaa

SEQ ID NO: 1459927 - DNA, 25 bp, Homo sapien
tcatagccatagcattataagcctg

SEQ ID NO: 1459928 - DNA, 25 bp, Homo sapien
ttaagtggctgtagcctcgtggaaa

SEQ ID NO: 1459929 - DNA, 25 bp, Homo sapien
gcctcgtggaaaactaattgctgat

SEQ ID NO: 1459930 - DNA, 25 bp, Homo sapien
aactaattgctgatggatggcagct

SEQ ID NO: 1459931 - DNA, 25 bp, Homo sapien
tccaacacagtattgccacggccat

SEQ ID NO: 1459932 - DNA, 25 bp, Homo sapien
tacccatctgctggtagtaaccaga

SEQ ID NO: 1459933 - DNA, 25 bp, Homo sapien
atttggctttgctacatcggtaccc

SEQ ID NO: 1459934 - DNA, 25 bp, Homo sapien
aaccagactgataattgaaggcagc

SEQ ID NO: 1459935 - DNA, 25 bp, Homo sapien
gagatcagaaaccttcacaacgtgt

SEQ ID NO: 1459936 - DNA, 25 bp, Homo sapien
gaccggtgttaccaagacttgcatg

SEQ ID NO: 1459937 - DNA, 25 bp, Homo sapien
tacaacgagagagtaagaacgctgg

SEQ ID NO: 1459938 - DNA, 25 bp, Homo sapien
gcatgccgaatatgagagcctcagg

SEQ ID NO: 1459939 - DNA, 25 bp, Homo sapien
aatcatgactttaaaggaagaacaa

SEQ ID NO: 1459940 - DNA, 25 bp, Homo sapien
gaatgaacagctgatgaaggtaatg

SEQ ID NO: 1459941 - DNA, 25 bp, Homo sapien
aagttaatgacttattacaagagaa

SEQ ID NO: 1459942 - DNA, 25 bp, Homo sapien
ttaatgacttattacaagagaatga

SEQ ID NO: 1459943 - DNA, 25 bp, Homo sapien
aacgcgagcgggagaatgattcact

SEQ ID NO: 1459944 - DNA, 25 bp, Homo sapien
ccaggagctagtgattcttgatgcc

SEQ ID NO: 1459945 - DNA, 25 bp, Homo sapien
gaggctgagctcaacacaggaggaa

SEQ ID NO: 1459946 - DNA, 25 bp, Homo sapien
aaactgagagttcgcattgaggccg

SEQ ID NO: 1459947 - DNA, 25 bp, Homo sapien
ctgtctttgcattatctgggaagaa

SEQ ID NO: 1459948 - DNA, 25 bp, Homo sapien
gaattcttatcacattaacttttaa

SEQ ID NO: 1459949 - DNA, 25 bp, Homo sapien
gtctttgcattatctgggaagaaca

SEQ ID NO: 1459950 - DNA, 25 bp, Homo sapien
tgataaataagatcaagaggaattc

SEQ ID NO: 1459951 - DNA, 25 bp, Homo sapien
aggccacaccatagagattggtccg

SEQ ID NO: 1459952 - DNA, 25 bp, Homo sapien
cacaccatagagattggtccgtttc

SEQ ID NO: 1459953 - DNA, 25 bp, Homo sapien
accatagagattggtccgtttcaca

SEQ ID NO: 1459954 - DNA, 25 bp, Homo sapien
gccttggattccattcaagttgctt

SEQ ID NO: 1459955 - DNA, 25 bp, Homo sapien
ctcgcctgtgtgaaaatgcaactct

SEQ ID NO: 1459956 - DNA, 25 bp, Homo sapien
aacgctgccccttagcctggctgag

SEQ ID NO: 1459957 - DNA, 25 bp, Homo sapien
caggggtgtccactttccctgaacg

SEQ ID NO: 1459958 - DNA, 25 bp, Homo sapien
ctccatcctcgcctgtgtgaaaatg

SEQ ID NO: 1459959 - DNA, 25 bp, Homo sapien
tagtctggttagagtcttgctgctg

SEQ ID NO: 1459960 - DNA, 25 bp, Homo sapien
tctggttagagtcttgctgctggct

SEQ ID NO: 1459961 - DNA, 25 bp, Homo sapien
atgaatagtctggttagagtcttgc

SEQ ID NO: 1459962 - DNA, 25 bp, Homo sapien
aatagtctggttagagtcttgctgc

SEQ ID NO: 1459963 - DNA, 25 bp, Homo sapien
gatgtgttgtcagaccctccttttg

SEQ ID NO: 1459964 - DNA, 25 bp, Homo sapien
tcagcaaacatgcaaccagggatgt

SEQ ID NO: 1459965 - DNA, 25 bp, Homo sapien
aacccaaagctctatgattggttct

SEQ ID NO: 1459966 - DNA, 25 bp, Homo sapien
ctccttttgcaaaacccaaagctct

SEQ ID NO: 1459967 - DNA, 25 bp, Homo sapien
cagccaggttcggttttaggtcagc

SEQ ID NO: 1459968 - DNA, 25 bp, Homo sapien
ttcggttttaggtcagctcctgtca

SEQ ID NO: 1459969 - DNA, 25 bp, Homo sapien
caggttcggttttaggtcagctcct

SEQ ID NO: 1459970 - DNA, 25 bp, Homo sapien
ggttttaggtcagctcctgtcagca

SEQ ID NO: 1459971 - DNA, 25 bp, Homo sapien
gcattatccacaagtttctttccaa

SEQ ID NO: 1459972 - DNA, 25 bp, Homo sapien
ccaatattgaatgcggctctggttg

SEQ ID NO: 1459973 - DNA, 25 bp, Homo sapien
tgaatgcggctctggttgtaaggga

SEQ ID NO: 1459974 - DNA, 25 bp, Homo sapien
tctttccaatattgaatgcggctct

SEQ ID NO: 1459975 - DNA, 25 bp, Homo sapien
tgaatgggcgcacatctggaaaaca

SEQ ID NO: 1459976 - DNA, 25 bp, Homo sapien
ggcttgtgctggatgccacatatcc

SEQ ID NO: 1459977 - DNA, 25 bp, Homo sapien
cgtgatgcacgtgtaaacttccaaa

SEQ ID NO: 1459978 - DNA, 25 bp, Homo sapien
agcagcagcactggcacgcagtgaa

SEQ ID NO: 1459979 - DNA, 25 bp, Homo sapien
tcccacagctgctgttttttggcta

SEQ ID NO: 1459980 - DNA, 25 bp, Homo sapien
cacagctgctgttttttggctaaag

SEQ ID NO: 1459981 - DNA, 25 bp, Homo sapien
aagttttaattgcttcctttctcat

SEQ ID NO: 1459982 - DNA, 25 bp, Homo sapien
cagctgctgttttttggctaaagtt

SEQ ID NO: 1459983 - DNA, 25 bp, Homo sapien
tatatgctgttgttcttccatgctc

SEQ ID NO: 1459984 - DNA, 25 bp, Homo sapien
atgctgttgttcttccatgctctca

SEQ ID NO: 1459985 - DNA, 25 bp, Homo sapien
cattatatgctgttgttcttccatg

SEQ ID NO: 1459986 - DNA, 25 bp, Homo sapien
cttgcattatatgctgttgttcttc

SEQ ID NO: 1459987 - DNA, 25 bp, Homo sapien
ccaggagtaagagcccatcacaatc

SEQ ID NO: 1459988 - DNA, 25 bp, Homo sapien
gctgattatgttgtggaatccacca

SEQ ID NO: 1459989 - DNA, 25 bp, Homo sapien
gcatccctaagacaccatggttaaa

SEQ ID NO: 1459990 - DNA, 25 bp, Homo sapien
cactatcaaggctaagaacaggaag

SEQ ID NO: 1459991 - DNA, 25 bp, Homo sapien
gctgattccccctgttcatgatggt

SEQ ID NO: 1459992 - DNA, 25 bp, Homo sapien
tgattccccctgttcatgatggtca

SEQ ID NO: 1459993 - DNA, 25 bp, Homo sapien
ttgctgattccccctgttcatgatg

SEQ ID NO: 1459994 - DNA, 25 bp, Homo sapien
ctttgctgattccccctgttcatga

SEQ ID NO: 1459995 - DNA, 25 bp, Homo sapien
cagtttctgacagttggacaccact

SEQ ID NO: 1459996 - DNA, 25 bp, Homo sapien
tcacagtttctgacagttggacacc

SEQ ID NO: 1459997 - DNA, 25 bp, Homo sapien
cacagtttctgacagttggacacca

SEQ ID NO: 1459998 - DNA, 25 bp, Homo sapien
tttctgacagttggacaccactgac

SEQ ID NO: 1459999 - DNA, 25 bp, Homo sapien
tagagagcagagcagtacacattgt

SEQ ID NO: 1460000 - DNA, 25 bp, Homo sapien
gagcagagcagtacacattgtctcc

SEQ ID NO: 1460001 - DNA, 25 bp, Homo sapien
gagagcagagcagtacacattgtct

SEQ ID NO: 1460002 - DNA, 25 bp, Homo sapien
agcagagcagtacacattgtctcca

SEQ ID NO: 1460003 - DNA, 25 bp, Homo sapien
cctgtctggttagcttgcattttgt

SEQ ID NO: 1460004 - DNA, 25 bp, Homo sapien
tcaagggagacctgtctggttagct

SEQ ID NO: 1460005 - DNA, 25 bp, Homo sapien
tgtctggttagcttgcattttgtac

SEQ ID NO: 1460006 - DNA, 25 bp, Homo sapien
ggagacctgtctggttagcttgcat

SEQ ID NO: 1460007 - DNA, 25 bp, Homo sapien
agcaccgatgagctgattttggtcc

SEQ ID NO: 1460008 - DNA, 25 bp, Homo sapien
gaagaccacgtttaaagcaccgatg

SEQ ID NO: 1460009 - DNA, 25 bp, Homo sapien
tctctcaagaattcctaagaagacc

SEQ ID NO: 1460010 - DNA, 25 bp, Homo sapien
ctgattttggtcctggttcaggaac

SEQ ID NO: 1460011 - DNA, 25 bp, Homo sapien
tcagtggtctggagacagtagagta

SEQ ID NO: 1460012 - DNA, 25 bp, Homo sapien
tcagcgtaggtctttctcactactc

SEQ ID NO: 1460013 - DNA, 25 bp, Homo sapien
aggcaatgtctacgtgactgtgaac

SEQ ID NO: 1460014 - DNA, 25 bp, Homo sapien
tgactgtgaacagcacgctccttcc

SEQ ID NO: 1460015 - DNA, 25 bp, Homo sapien
caaaacaataccaatacatgacaga

SEQ ID NO: 1460016 - DNA, 25 bp, Homo sapien
taccaatacatgacagagccagtgg

SEQ ID NO: 1460017 - DNA, 25 bp, Homo sapien
tcagcatcccttgccccttgtttat

SEQ ID NO: 1460018 - DNA, 25 bp, Homo sapien
gcatataagttaccggtataggaaa

SEQ ID NO: 1460019 - DNA, 25 bp, Homo sapien
ctttccagaaaggaaaatggccaat

SEQ ID NO: 1460020 - DNA, 25 bp, Homo sapien
agggagttttccctgttctctgagg

SEQ ID NO: 1460021 - DNA, 25 bp, Homo sapien
ctcattaaattcagcagggagtttt

SEQ ID NO: 1460022 - DNA, 25 bp, Homo sapien
tttccctgttctctgaggtttgcta

SEQ ID NO: 1460023 - DNA, 25 bp, Homo sapien
tgttctctgaggtttgctactattc

SEQ ID NO: 1460024 - DNA, 25 bp, Homo sapien
agattgagtcgaactcccgtctcca

SEQ ID NO: 1460025 - DNA, 25 bp, Homo sapien
cagttgcagattgagtcgaactccc

SEQ ID NO: 1460026 - DNA, 25 bp, Homo sapien
catgtggcaagttgtgcaacatcct

SEQ ID NO: 1460027 - DNA, 25 bp, Homo sapien
ttgcagattgagtcgaactcccgtc

SEQ ID NO: 1460028 - DNA, 25 bp, Homo sapien
gagatgtagacagtccctgtggctt

SEQ ID NO: 1460029 - DNA, 25 bp, Homo sapien
ccctgtggctttactgaaatagttt

SEQ ID NO: 1460030 - DNA, 25 bp, Homo sapien
gtagttgtgcctctggagatgtaga

SEQ ID NO: 1460031 - DNA, 25 bp, Homo sapien
tagttgtgcctctggagatgtagac

SEQ ID NO: 1460032 - DNA, 25 bp, Homo sapien
ccctggagttaatgttgtactcaga

SEQ ID NO: 1460033 - DNA, 25 bp, Homo sapien
cagaaggccatgcaaatggaggaga

SEQ ID NO: 1460034 - DNA, 25 bp, Homo sapien
tgttgtactcagaaggccatgcaaa

SEQ ID NO: 1460035 - DNA, 25 bp, Homo sapien
agttaatgttgtactcagaaggcca

SEQ ID NO: 1460036 - DNA, 25 bp, Homo sapien
tgaagggctgaaggcatttttggct

SEQ ID NO: 1460037 - DNA, 25 bp, Homo sapien
catttaattgaagggctgaaggcat

SEQ ID NO: 1460038 - DNA, 25 bp, Homo sapien
acaaacatttaattgaagggctgaa

SEQ ID NO: 1460039 - DNA, 25 bp, Homo sapien
taattgaagggctgaaggcattttt

SEQ ID NO: 1460040 - DNA, 25 bp, Homo sapien
ccagctgacacctggcactatccat

SEQ ID NO: 1460041 - DNA, 25 bp, Homo sapien
ggcttcaaacaagtccttgttgaaa

SEQ ID NO: 1460042 - DNA, 25 bp, Homo sapien
ttcaaacaagtccttgttgaaatct

SEQ ID NO: 1460043 - DNA, 25 bp, Homo sapien
gcttcaaacaagtccttgttgaaat

SEQ ID NO: 1460044 - DNA, 25 bp, Homo sapien
aacaagtccttgttgaaatctcatc

SEQ ID NO: 1460045 - DNA, 25 bp, Homo sapien
ggccttgctttcactacgatgcgat

SEQ ID NO: 1460046 - DNA, 25 bp, Homo sapien
cccggctggatatgaaagttggcct

SEQ ID NO: 1460047 - DNA, 25 bp, Homo sapien
tagagtcagttgcagtgacaggaac

SEQ ID NO: 1460048 - DNA, 25 bp, Homo sapien
gttttaagcttctatctgacagctg

SEQ ID NO: 1460049 - DNA, 25 bp, Homo sapien
ttttttgtcatgtgttcttgggaag

SEQ ID NO: 1460050 - DNA, 25 bp, Homo sapien
acaccagcacgaattttttgtcatg

SEQ ID NO: 1460051 - DNA, 25 bp, Homo sapien
aatcttgccaaatgtaattaactcc

SEQ ID NO: 1460052 - DNA, 25 bp, Homo sapien
caaatgtaattaactcctccctcat

SEQ ID NO: 1460053 - DNA, 25 bp, Homo sapien
ttgccaaatgtaattaactcctccc

SEQ ID NO: 1460054 - DNA, 25 bp, Homo sapien
gccaaatgtaattaactcctccctc

SEQ ID NO: 1460055 - DNA, 25 bp, Homo sapien
ttcacacagtgcgtggatgcttcgt

SEQ ID NO: 1460056 - DNA, 25 bp, Homo sapien
tgtgagaataagtgacgctggcaac

SEQ ID NO: 1460057 - DNA, 25 bp, Homo sapien
gcttcgtgtgtaaatgcttgagcca

SEQ ID NO: 1460058 - DNA, 25 bp, Homo sapien
ttctctggaacaactgggatatagt

SEQ ID NO: 1460059 - DNA, 25 bp, Homo sapien
aaaacaccaggaacatctaatctgc

SEQ ID NO: 1460060 - DNA, 25 bp, Homo sapien
tttcccaaaacaccaggaacatcta

SEQ ID NO: 1460061 - DNA, 25 bp, Homo sapien
cttcttttccagcccagctaatctt

SEQ ID NO: 1460062 - DNA, 25 bp, Homo sapien
tcttcttttccagcccagctaatct

SEQ ID NO: 1460063 - DNA, 25 bp, Homo sapien
taaggtggcatgaacttcctaaggc

SEQ ID NO: 1460064 - DNA, 25 bp, Homo sapien
ccaggaaaatccagcagggtgcaga

SEQ ID NO: 1460065 - DNA, 25 bp, Homo sapien
tgacacctgacaccctgtggactca

SEQ ID NO: 1460066 - DNA, 25 bp, Homo sapien
cctaaggcaggtatagggatctgag

SEQ ID NO: 1460067 - DNA, 25 bp, Homo sapien
gaactaccagatgttccataggcat

SEQ ID NO: 1460068 - DNA, 25 bp, Homo sapien
ggaactaccagatgttccataggca

SEQ ID NO: 1460069 - DNA, 25 bp, Homo sapien
tggaactaccagatgttccataggc

SEQ ID NO: 1460070 - DNA, 25 bp, Homo sapien
cttccctatggtagtcctcattcat

SEQ ID NO: 1460071 - DNA, 25 bp, Homo sapien
tcccctccagggctttaagaatctc

SEQ ID NO: 1460072 - DNA, 25 bp, Homo sapien
agtaagccttccctatggtagtcct

SEQ ID NO: 1460073 - DNA, 25 bp, Homo sapien
ccctccagggctttaagaatctcag

SEQ ID NO: 1460074 - DNA, 25 bp, Homo sapien
gggaaagaggtgctgaatgtattct

SEQ ID NO: 1460075 - DNA, 25 bp, Homo sapien
tgctgaatgtattctggaatctaga

SEQ ID NO: 1460076 - DNA, 25 bp, Homo sapien
cctacaattacgtctatatttttca

SEQ ID NO: 1460077 - DNA, 25 bp, Homo sapien
tatcattgacggtaacagttttgca

SEQ ID NO: 1460078 - DNA, 25 bp, Homo sapien
gaaacggattgaagttccactacat

SEQ ID NO: 1460079 - DNA, 25 bp, Homo sapien
gattcccgctgagaaagtgggaagg

SEQ ID NO: 1460080 - DNA, 25 bp, Homo sapien
tggaggtcatcaggggattcccgct

SEQ ID NO: 1460081 - DNA, 25 bp, Homo sapien
ggaagagagtttagaaacggattga

SEQ ID NO: 1460082 - DNA, 25 bp, Homo sapien
cccaccgcgcttagaaacctatgtt

SEQ ID NO: 1460083 - DNA, 25 bp, Homo sapien
ctgtcgctgcgagtttggctgtccc

SEQ ID NO: 1460084 - DNA, 25 bp, Homo sapien
gagcgctaagttcaggctggagtct

SEQ ID NO: 1460085 - DNA, 25 bp, Homo sapien
gggtctggtacctgccaaatacgga

SEQ ID NO: 1460086 - DNA, 25 bp, Homo sapien
ggcgagctggtgactccttaaccct

SEQ ID NO: 1460087 - DNA, 25 bp, Homo sapien
cagacagcgagagtgaggattttgc

SEQ ID NO: 1460088 - DNA, 25 bp, Homo sapien
tcggtcccggacgttctgcagatta

SEQ ID NO: 1460089 - DNA, 25 bp, Homo sapien
gattatagcgcccagctcatgtcca

SEQ ID NO: 1460090 - DNA, 25 bp, Homo sapien
taatcaaatgtaacacagagcaggg

SEQ ID NO: 1460091 - DNA, 25 bp, Homo sapien
tctcatttgggagacaacatttcca

SEQ ID NO: 1460092 - DNA, 25 bp, Homo sapien
catttccacgtatgaaatgactgaa

SEQ ID NO: 1460093 - DNA, 25 bp, Homo sapien
gacgtagtccctgcttgcaatctca

SEQ ID NO: 1460094 - DNA, 25 bp, Homo sapien
tgttgtatgcccaagttctttagca

SEQ ID NO: 1460095 - DNA, 25 bp, Homo sapien
tagcatcgaagagggccgatggctg

SEQ ID NO: 1460096 - DNA, 25 bp, Homo sapien
taactaagaggggatgttgtatgcc

SEQ ID NO: 1460097 - DNA, 25 bp, Homo sapien
tcgaagagggccgatggctgggaac

SEQ ID NO: 1460098 - DNA, 25 bp, Homo sapien
atggggcttccctgtcaatttgttc

SEQ ID NO: 1460099 - DNA, 25 bp, Homo sapien
tcatggggcttccctgtcaatttgt

SEQ ID NO: 1460100 - DNA, 25 bp, Homo sapien
catggggcttccctgtcaatttgtt

SEQ ID NO: 1460101 - DNA, 25 bp, Homo sapien
tggggcttccctgtcaatttgttct

SEQ ID NO: 1460102 - DNA, 25 bp, Homo sapien
attgtttacttttaagactatgaag

SEQ ID NO: 1460103 - DNA, 25 bp, Homo sapien
gctgtcctgagcatgattggagatt

SEQ ID NO: 1460104 - DNA, 25 bp, Homo sapien
tctggacttctataagcctgtcgtg

SEQ ID NO: 1460105 - DNA, 25 bp, Homo sapien
ccaggtggatccgatattgaatatc

SEQ ID NO: 1460106 - DNA, 25 bp, Homo sapien
gcctgtcgtgtggttctggatcctt

SEQ ID NO: 1460107 - DNA, 25 bp, Homo sapien
attctgggtagcatgtactttctgg

SEQ ID NO: 1460108 - DNA, 25 bp, Homo sapien
ggtagcatgtactttctggtgattg

SEQ ID NO: 1460109 - DNA, 25 bp, Homo sapien
gattgcatctgtcgaaagctcccat

SEQ ID NO: 1460110 - DNA, 25 bp, Homo sapien
cacacatcttttggcatgtacctaa

SEQ ID NO: 1460111 - DNA, 25 bp, Homo sapien
cacaatatttccattgtcccttatt

SEQ ID NO: 1460112 - DNA, 25 bp, Homo sapien
caatatttccattgtcccttatttt

SEQ ID NO: 1460113 - DNA, 25 bp, Homo sapien
tccacaatatttccattgtccctta

SEQ ID NO: 1460114 - DNA, 25 bp, Homo sapien
ctccacaatatttccattgtccctt

SEQ ID NO: 1460115 - DNA, 25 bp, Homo sapien
tcatgccatagccattatccttggg

SEQ ID NO: 1460116 - DNA, 25 bp, Homo sapien
aaaacaatgtgtgtactataagacc

SEQ ID NO: 1460117 - DNA, 25 bp, Homo sapien
ggagtgctaggtggctgatataaac

SEQ ID NO: 1460118 - DNA, 25 bp, Homo sapien
cacattagcaaaggtgtaggtacaa

SEQ ID NO: 1460119 - DNA, 25 bp, Homo sapien
aatggtgatgaaggctgctaggaca

SEQ ID NO: 1460120 - DNA, 25 bp, Homo sapien
gacagatattcttgggtgaacctga

SEQ ID NO: 1460121 - DNA, 25 bp, Homo sapien
cctgatagttgagtgttgaaagaac

SEQ ID NO: 1460122 - DNA, 25 bp, Homo sapien
gaacctcagacactttgttcggtgg

SEQ ID NO: 1460123 - DNA, 25 bp, Homo sapien
tgcaacaacagaatagaaggcagct

SEQ ID NO: 1460124 - DNA, 25 bp, Homo sapien
gagcccattgcaacaacagaataga

SEQ ID NO: 1460125 - DNA, 25 bp, Homo sapien
tgcagatggaaactatcaagagccc

SEQ ID NO: 1460126 - DNA, 25 bp, Homo sapien
gcagctgtattatgcagttgaccat

SEQ ID NO: 1460127 - DNA, 25 bp, Homo sapien
tgctccgggatacttgctggtccat

SEQ ID NO: 1460128 - DNA, 25 bp, Homo sapien
tttgtaatatgaatcttgaactttc

SEQ ID NO: 1460129 - DNA, 25 bp, Homo sapien
cgaatgctccgggatacttgctggt

SEQ ID NO: 1460130 - DNA, 25 bp, Homo sapien
tgtgatgtcgaatgctccgggatac

SEQ ID NO: 1460131 - DNA, 25 bp, Homo sapien
gactggctctggatcttaaaagcaa

SEQ ID NO: 1460132 - DNA, 25 bp, Homo sapien
gaaacagactgtaactatagctcct

SEQ ID NO: 1460133 - DNA, 25 bp, Homo sapien
catacctctctctgtgattcgtgct

SEQ ID NO: 1460134 - DNA, 25 bp, Homo sapien
tcgtgctacacagggaaagttcttt

SEQ ID NO: 1460135 - DNA, 25 bp, Homo sapien
gacttccagtggccactggctccat

SEQ ID NO: 1460136 - DNA, 25 bp, Homo sapien
cactgacttccagtggccactggct

SEQ ID NO: 1460137 - DNA, 25 bp, Homo sapien
tccactgacttccagtggccactgg

SEQ ID NO: 1460138 - DNA, 25 bp, Homo sapien
cctccactgacttccagtggccact

SEQ ID NO: 1460139 - DNA, 25 bp, Homo sapien
gacaggacacatgtggacttagcac

SEQ ID NO: 1460140 - DNA, 25 bp, Homo sapien
gcataagacaggacacatgtggact

SEQ ID NO: 1460141 - DNA, 25 bp, Homo sapien
atgtggacttagcaccaccactcag

SEQ ID NO: 1460142 - DNA, 25 bp, Homo sapien
gggcgcataagacaggacacatgtg

SEQ ID NO: 1460143 - DNA, 25 bp, Homo sapien
gctgattctgctcctggtcataggt

SEQ ID NO: 1460144 - DNA, 25 bp, Homo sapien
tacaggtgatgctgattctgctcct

SEQ ID NO: 1460145 - DNA, 25 bp, Homo sapien
ttacaggtgatgctgattctgctcc

SEQ ID NO: 1460146 - DNA, 25 bp, Homo sapien
tctgctcctggtcataggttggcac

SEQ ID NO: 1460147 - DNA, 25 bp, Homo sapien
caggtatgagcatctgggtatggct

SEQ ID NO: 1460148 - DNA, 25 bp, Homo sapien
tcccaggtaactgacgctttttcat

SEQ ID NO: 1460149 - DNA, 25 bp, Homo sapien
tacacagaaactcttctcgtttttg

SEQ ID NO: 1460150 - DNA, 25 bp, Homo sapien
atcttgctgcaggtatgagcatctg

SEQ ID NO: 1460151 - DNA, 25 bp, Homo sapien
tcacaccattcgaatgttagcaaat

SEQ ID NO: 1460152 - DNA, 25 bp, Homo sapien
tactcctgccgcaccaaacactgct

SEQ ID NO: 1460153 - DNA, 25 bp, Homo sapien
gtactcctgccgcaccaaacactgc

SEQ ID NO: 1460154 - DNA, 25 bp, Homo sapien
tcgtactcctgccgcaccaaacact

SEQ ID NO: 1460155 - DNA, 25 bp, Homo sapien
cgtactcctgccgcaccaaacactg

SEQ ID NO: 1460156 - DNA, 25 bp, Homo sapien
tctttcagttccataggacttttcc

SEQ ID NO: 1460157 - DNA, 25 bp, Homo sapien
taaatagcccattctcatggttaca

SEQ ID NO: 1460158 - DNA, 25 bp, Homo sapien
ttcccatggctgtatctcaagttcc

SEQ ID NO: 1460159 - DNA, 25 bp, Homo sapien
ttctcatctccaggccatttaaata

SEQ ID NO: 1460160 - DNA, 25 bp, Homo sapien
tcagcagacaaccttgctccttgct

SEQ ID NO: 1460161 - DNA, 25 bp, Homo sapien
gagacatcatactacttggaattac

SEQ ID NO: 1460162 - DNA, 25 bp, Homo sapien
ccaaacttcctcttggcaaatattc

SEQ ID NO: 1460163 - DNA, 25 bp, Homo sapien
tcaggagaccggattgagaatctga

SEQ ID NO: 1460164 - DNA, 25 bp, Homo sapien
gcagaaatataagcctctattgtaa

SEQ ID NO: 1460165 - DNA, 25 bp, Homo sapien
agcagaaatataagcctctattgta

SEQ ID NO: 1460166 - DNA, 25 bp, Homo sapien
agaaatataagcctctattgtaacc

SEQ ID NO: 1460167 - DNA, 25 bp, Homo sapien
aaatataagcctctattgtaaccat

SEQ ID NO: 1460168 - DNA, 25 bp, Homo sapien
tccgtggtgagtatgatgtagtgac

SEQ ID NO: 1460169 - DNA, 25 bp, Homo sapien
gaaatccgtggtgagtatgatgtag

SEQ ID NO: 1460170 - DNA, 25 bp, Homo sapien
actggaaatccgtggtgagtatgat

SEQ ID NO: 1460171 - DNA, 25 bp, Homo sapien
ggtgagtatgatgtagtgactttgc

SEQ ID NO: 1460172 - DNA, 25 bp, Homo sapien
cgggaagcagaaagtatgtacgtca

SEQ ID NO: 1460173 - DNA, 25 bp, Homo sapien
ccgggaagcagaaagtatgtacgtc

SEQ ID NO: 1460174 - DNA, 25 bp, Homo sapien
ggaagcagaaagtatgtacgtcagg

SEQ ID NO: 1460175 - DNA, 25 bp, Homo sapien
agccgggaagcagaaagtatgtacg

SEQ ID NO: 1460176 - DNA, 25 bp, Homo sapien
aagaagggtggcaatgagatatagc

SEQ ID NO: 1460177 - DNA, 25 bp, Homo sapien
cagataatttaaagtgtcttaagcc

SEQ ID NO: 1460178 - DNA, 25 bp, Homo sapien
gcgggacgggatattggcgttgagt

SEQ ID NO: 1460179 - DNA, 25 bp, Homo sapien
gctgcgggacgggatattggcgttg

SEQ ID NO: 1460180 - DNA, 25 bp, Homo sapien
tcaactttctggcagtcctgttggc

SEQ ID NO: 1460181 - DNA, 25 bp, Homo sapien
tcctctccattcttgtagtcctggt

SEQ ID NO: 1460182 - DNA, 25 bp, Homo sapien
tcaacctcagtattccaggaacttc

SEQ ID NO: 1460183 - DNA, 25 bp, Homo sapien
tgccacccacggtcttggcacagac

SEQ ID NO: 1460184 - DNA, 25 bp, Homo sapien
aacattcagatgtgttgtctgcccc

SEQ ID NO: 1460185 - DNA, 25 bp, Homo sapien
cattcttgtttcagctgtcgtttct

SEQ ID NO: 1460186 - DNA, 25 bp, Homo sapien
gcattcttgtttcagctgtcgtttc

SEQ ID NO: 1460187 - DNA, 25 bp, Homo sapien
attcttgtttcagctgtcgtttctc

SEQ ID NO: 1460188 - DNA, 25 bp, Homo sapien
gagtagtgctcactgtgatgcttca

SEQ ID NO: 1460189 - DNA, 25 bp, Homo sapien
cgtaatctgttatctctttccattg

SEQ ID NO: 1460190 - DNA, 25 bp, Homo sapien
cttgcctcgtaatctgttatctctt

SEQ ID NO: 1460191 - DNA, 25 bp, Homo sapien
tcaggtaccttacgggaaatctgta

SEQ ID NO: 1460192 - DNA, 25 bp, Homo sapien
gtgctctttgaaagctgattgggag

SEQ ID NO: 1460193 - DNA, 25 bp, Homo sapien
tgtgctctttgaaagctgattggga

SEQ ID NO: 1460194 - DNA, 25 bp, Homo sapien
ctaccttttccctccaacttcatgt

SEQ ID NO: 1460195 - DNA, 25 bp, Homo sapien
ttttccctccaacttcatgtctcac

SEQ ID NO: 1460196 - DNA, 25 bp, Homo sapien
accttttccctccaacttcatgtct

SEQ ID NO: 1460197 - DNA, 25 bp, Homo sapien
cttttccctccaacttcatgtctca

SEQ ID NO: 1460198 - DNA, 25 bp, Homo sapien
ccctcctccatcaggggatatgtct

SEQ ID NO: 1460199 - DNA, 25 bp, Homo sapien
aggagtttctctttagcatccaaag

SEQ ID NO: 1460200 - DNA, 25 bp, Homo sapien
ggggatatgtcttcagtttgaataa

SEQ ID NO: 1460201 - DNA, 25 bp, Homo sapien
tgagccaggagtttctctttagcat

SEQ ID NO: 1460202 - DNA, 25 bp, Homo sapien
gacagacaggttgttcagtggaaat

SEQ ID NO: 1460203 - DNA, 25 bp, Homo sapien
ggttgttcagtggaaatatgcttga

SEQ ID NO: 1460204 - DNA, 25 bp, Homo sapien
gacaggttgttcagtggaaatatgc

SEQ ID NO: 1460205 - DNA, 25 bp, Homo sapien
caatccggacagacaggttgttcag

SEQ ID NO: 1460206 - DNA, 25 bp, Homo sapien
gaatcagcttcctcgttttagaaaa

SEQ ID NO: 1460207 - DNA, 25 bp, Homo sapien
ccaatccatgttgacaaagtgggtc

SEQ ID NO: 1460208 - DNA, 25 bp, Homo sapien
cgtagatcgtttgcccagatctgcc

SEQ ID NO: 1460209 - DNA, 25 bp, Homo sapien
caaagtgggtcataaagatccgtag

SEQ ID NO: 1460210 - DNA, 25 bp, Homo sapien
aacgtcgggcggattttggagctgg

SEQ ID NO: 1460211 - DNA, 25 bp, Homo sapien
cctccaggcggcaagaacgtcgggc

SEQ ID NO: 1460212 - DNA, 25 bp, Homo sapien
cgagatcgtccaactgaacgtaggg

SEQ ID NO: 1460213 - DNA, 25 bp, Homo sapien
ccgagagtcgcaggaacgagggcga

SEQ ID NO: 1460214 - DNA, 25 bp, Homo sapien
caacatccgactccatattctaaga

SEQ ID NO: 1460215 - DNA, 25 bp, Homo sapien
aacttgagcttatcaggttctaatt

SEQ ID NO: 1460216 - DNA, 25 bp, Homo sapien
tatggcccgtagaaaacaacatccg

SEQ ID NO: 1460217 - DNA, 25 bp, Homo sapien
gtacatatattactggtttgaacag

SEQ ID NO: 1460218 - DNA, 25 bp, Homo sapien
cctttagatcatgggaaccagcaga

SEQ ID NO: 1460219 - DNA, 25 bp, Homo sapien
gaataccagataccactatgtagta

SEQ ID NO: 1460220 - DNA, 25 bp, Homo sapien
tggtgcccatataggtgagcatccc

SEQ ID NO: 1460221 - DNA, 25 bp, Homo sapien
tggaacttggtctcccaacacttat

SEQ ID NO: 1460222 - DNA, 25 bp, Homo sapien
taatgtatatatccccattccaaga

SEQ ID NO: 1460223 - DNA, 25 bp, Homo sapien
taccggtgtgttcatggatgccagc

SEQ ID NO: 1460224 - DNA, 25 bp, Homo sapien
taatccaactagagcaggtgacaga

SEQ ID NO: 1460225 - DNA, 25 bp, Homo sapien
tgagccaaggagcatagtccctgtg

SEQ ID NO: 1460226 - DNA, 25 bp, Homo sapien
tgtcgacctggtgcaaagtttggga

SEQ ID NO: 1460227 - DNA, 25 bp, Homo sapien
tccttgatggcgttcatcaggtcct

SEQ ID NO: 1460228 - DNA, 25 bp, Homo sapien
gaaatccttgatggcgttcatcagg

SEQ ID NO: 1460229 - DNA, 25 bp, Homo sapien
tacaggtgggtgtctgtgaatgtgg

SEQ ID NO: 1460230 - DNA, 25 bp, Homo sapien
gatggcgttcatcaggtcctcttca

SEQ ID NO: 1460231 - DNA, 25 bp, Homo sapien
ttttgactcgggatgcgcaggacac

SEQ ID NO: 1460232 - DNA, 25 bp, Homo sapien
tgacgctgcggtgaagagaaccctg

SEQ ID NO: 1460233 - DNA, 25 bp, Homo sapien
ttgctgcggatactcacaggtgtcc

SEQ ID NO: 1460234 - DNA, 25 bp, Homo sapien
tgaatgtccatgagctggctgacgc

SEQ ID NO: 1460235 - DNA, 25 bp, Homo sapien
gcacctagagagctcatgcactggt

SEQ ID NO: 1460236 - DNA, 25 bp, Homo sapien
caaggcagacggatgatgggtgaac

SEQ ID NO: 1460237 - DNA, 25 bp, Homo sapien
acggatgatgggtgaacaaggtatc

SEQ ID NO: 1460238 - DNA, 25 bp, Homo sapien
ctcaagttaggtggccagtgttttc

SEQ ID NO: 1460239 - DNA, 25 bp, Homo sapien
gctttccaaggaatggatatatgga

SEQ ID NO: 1460240 - DNA, 25 bp, Homo sapien
ttcactcatgttgttcagctttcca

SEQ ID NO: 1460241 - DNA, 25 bp, Homo sapien
ccaaggaatggatatatggaagtca

SEQ ID NO: 1460242 - DNA, 25 bp, Homo sapien
cactcatgttgttcagctttccaag

SEQ ID NO: 1460243 - DNA, 25 bp, Homo sapien
ctcaaagtgcatggtgtaacttttt

SEQ ID NO: 1460244 - DNA, 25 bp, Homo sapien
ctttttagggtgacattgcttgaca

SEQ ID NO: 1460245 - DNA, 25 bp, Homo sapien
catcagatatatcagccacagagtc

SEQ ID NO: 1460246 - DNA, 25 bp, Homo sapien
gggtgacattgcttgacacatcaga

SEQ ID NO: 1460247 - DNA, 25 bp, Homo sapien
tccattcagagtatagcctaaaatc

SEQ ID NO: 1460248 - DNA, 25 bp, Homo sapien
tctccattcagagtatagcctaaaa

SEQ ID NO: 1460249 - DNA, 25 bp, Homo sapien
tgccagtttgggtctgatgttcaaa

SEQ ID NO: 1460250 - DNA, 25 bp, Homo sapien
tttgccagtttgggtctgatgttca

SEQ ID NO: 1460251 - DNA, 25 bp, Homo sapien
agattcttccccttgactggattct

SEQ ID NO: 1460252 - DNA, 25 bp, Homo sapien
ctattcagattcttccccttgactg

SEQ ID NO: 1460253 - DNA, 25 bp, Homo sapien
tcagattcttccccttgactggatt

SEQ ID NO: 1460254 - DNA, 25 bp, Homo sapien
ttccccttgactggattctttccca

SEQ ID NO: 1460255 - DNA, 25 bp, Homo sapien
tctgatatatggctctttgtggatt

SEQ ID NO: 1460256 - DNA, 25 bp, Homo sapien
tcaatggagacatcctcttctgaag

SEQ ID NO: 1460257 - DNA, 25 bp, Homo sapien
gcccagcatcgccattaacactatg

SEQ ID NO: 1460258 - DNA, 25 bp, Homo sapien
tctttgtagtatcagggacagaaaa

SEQ ID NO: 1460259 - DNA, 25 bp, Homo sapien
tgtgcttttgctccgcgatcccttc

SEQ ID NO: 1460260 - DNA, 25 bp, Homo sapien
ttcccaggagttgttaggaccaagc

SEQ ID NO: 1460261 - DNA, 25 bp, Homo sapien
ctctgtgcttttgctccgcgatccc

SEQ ID NO: 1460262 - DNA, 25 bp, Homo sapien
cttttgctccgcgatcccttctttt

SEQ ID NO: 1460263 - DNA, 25 bp, Homo sapien
gccttgctgacacttctggcgctgc

SEQ ID NO: 1460264 - DNA, 25 bp, Homo sapien
ccttgctgacacttctggcgctgct

SEQ ID NO: 1460265 - DNA, 25 bp, Homo sapien
ggccttgctgacacttctggcgctg

SEQ ID NO: 1460266 - DNA, 25 bp, Homo sapien
ttttcaacacctctagaactccatg

SEQ ID NO: 1460267 - DNA, 25 bp, Homo sapien
gcctgcgtggtacttcacactcaca

SEQ ID NO: 1460268 - DNA, 25 bp, Homo sapien
ccatgggcctgcgtggtacttcaca

SEQ ID NO: 1460269 - DNA, 25 bp, Homo sapien
tctagaactccatgggcctgcgtgg

SEQ ID NO: 1460270 - DNA, 25 bp, Homo sapien
aagaaaaccgaaaccacagccagtg

SEQ ID NO: 1460271 - DNA, 25 bp, Homo sapien
cagccagtgtcagagtaaatccgtc

SEQ ID NO: 1460272 - DNA, 25 bp, Homo sapien
taaatccgtctctgttgatggcctg

SEQ ID NO: 1460273 - DNA, 25 bp, Homo sapien
catcacatgggaggttcactgtcag

SEQ ID NO: 1460274 - DNA, 25 bp, Homo sapien
tcccattcaccaaggaaactagact

SEQ ID NO: 1460275 - DNA, 25 bp, Homo sapien
gcagggcttagaaggcgagcaacct

SEQ ID NO: 1460276 - DNA, 25 bp, Homo sapien
gcgagcaaccttggttttccggcat

SEQ ID NO: 1460277 - DNA, 25 bp, Homo sapien
ccattcaccaaggaaactagactgg

SEQ ID NO: 1460278 - DNA, 25 bp, Homo sapien
ctacgccaagtataatatgagttgt

SEQ ID NO: 1460279 - DNA, 25 bp, Homo sapien
tacgccaagtataatatgagttgtt

SEQ ID NO: 1460280 - DNA, 25 bp, Homo sapien
cgtcagtcgtgcagatgacctggaa

SEQ ID NO: 1460281 - DNA, 25 bp, Homo sapien
aacacttccttcgtcagtcgtgcag

SEQ ID NO: 1460282 - DNA, 25 bp, Homo sapien
caagtccagtagaggtatcatattg

SEQ ID NO: 1460283 - DNA, 25 bp, Homo sapien
gatcaacggcgtcttaacacttcct

SEQ ID NO: 1460284 - DNA, 25 bp, Homo sapien
ctttcagatttagcatcccgtaaag

SEQ ID NO: 1460285 - DNA, 25 bp, Homo sapien
gctttcagatttagcatcccgtaaa

SEQ ID NO: 1460286 - DNA, 25 bp, Homo sapien
tcagctttcagatttagcatcccgt

SEQ ID NO: 1460287 - DNA, 25 bp, Homo sapien
cagctttcagatttagcatcccgta

SEQ ID NO: 1460288 - DNA, 25 bp, Homo sapien
tactccttcagttggccgttcagga

SEQ ID NO: 1460289 - DNA, 25 bp, Homo sapien
caaattgctgtccaccgaaaatggg

SEQ ID NO: 1460290 - DNA, 25 bp, Homo sapien
tgtccgccgttctcggtatgtagag

SEQ ID NO: 1460291 - DNA, 25 bp, Homo sapien
agggtggtgtccaagccgctgtaca

SEQ ID NO: 1460292 - DNA, 25 bp, Homo sapien
agggtaacctctttgaaggagtgca

SEQ ID NO: 1460293 - DNA, 25 bp, Homo sapien
taacctctttgaaggagtgcaggtg

SEQ ID NO: 1460294 - DNA, 25 bp, Homo sapien
ctctttgaaggagtgcaggtgtgca

SEQ ID NO: 1460295 - DNA, 25 bp, Homo sapien
ctgtggggagaaagttgtatgttct

SEQ ID NO: 1460296 - DNA, 25 bp, Homo sapien
tttttgggtggtgaaactgatccac

SEQ ID NO: 1460297 - DNA, 25 bp, Homo sapien
ccagccccgtgtactttgtttctat

SEQ ID NO: 1460298 - DNA, 25 bp, Homo sapien
gccgtactgcccacctcgttgtgtg

SEQ ID NO: 1460299 - DNA, 25 bp, Homo sapien
tctcagcttgtatgtggtgtagggc

SEQ ID NO: 1460300 - DNA, 25 bp, Homo sapien
ggcaagccacgtggaattggagttc

SEQ ID NO: 1460301 - DNA, 25 bp, Homo sapien
caagccacgtggaattggagttcat

SEQ ID NO: 1460302 - DNA, 25 bp, Homo sapien
gctgagtcaggagggcaagccacgt

SEQ ID NO: 1460303 - DNA, 25 bp, Homo sapien
agccacgtggaattggagttcatag

SEQ ID NO: 1460304 - DNA, 25 bp, Homo sapien
gcttgaaggccatggagagtctgct

SEQ ID NO: 1460305 - DNA, 25 bp, Homo sapien
tgctgggtggccatgccttcggata

SEQ ID NO: 1460306 - DNA, 25 bp, Homo sapien
tgaggccagcgtcccgatttgtgga

SEQ ID NO: 1460307 - DNA, 25 bp, Homo sapien
cagctgtcggtcctttgctgcaaca

SEQ ID NO: 1460308 - DNA, 25 bp, Homo sapien
tgtagagactgacgatcccgttggg

SEQ ID NO: 1460309 - DNA, 25 bp, Homo sapien
gcctgtagagactgacgatcccgtt

SEQ ID NO: 1460310 - DNA, 25 bp, Homo sapien
gagactgacgatcccgttgggcttc

SEQ ID NO: 1460311 - DNA, 25 bp, Homo sapien
tagagactgacgatcccgttgggct

SEQ ID NO: 1460312 - DNA, 25 bp, Homo sapien
ggctggcccggttctgcaccatgtc

SEQ ID NO: 1460313 - DNA, 25 bp, Homo sapien
gctggcccggttctgcaccatgtcc

SEQ ID NO: 1460314 - DNA, 25 bp, Homo sapien
ccatgtccagctactgggggctttt

SEQ ID NO: 1460315 - DNA, 25 bp, Homo sapien
tgtccagctactgggggcttttcct

SEQ ID NO: 1460316 - DNA, 25 bp, Homo sapien
taatgtgctgaaaagctctaggagc

SEQ ID NO: 1460317 - DNA, 25 bp, Homo sapien
tacagatatagtcccgttttccagg

SEQ ID NO: 1460318 - DNA, 25 bp, Homo sapien
gaaatcttctttgctggaatcgcgg

SEQ ID NO: 1460319 - DNA, 25 bp, Homo sapien
ttatttcatgagtagccctgcaggc

SEQ ID NO: 1460320 - DNA, 25 bp, Homo sapien
tttggagccatttaatacttgtgaa

SEQ ID NO: 1460321 - DNA, 25 bp, Homo sapien
cttccacatgggtgggttgctgtcc

SEQ ID NO: 1460322 - DNA, 25 bp, Homo sapien
gagccctgcgtggactggctttttc

SEQ ID NO: 1460323 - DNA, 25 bp, Homo sapien
tcatagagccctgcgtggactggct

SEQ ID NO: 1460324 - DNA, 25 bp, Homo sapien
cctgggcttttcatagagccctgcg

SEQ ID NO: 1460325 - DNA, 25 bp, Homo sapien
agacaggggaaactatcacaaacaa

SEQ ID NO: 1460326 - DNA, 25 bp, Homo sapien
gggaaactatcacaaacaacgtgac

SEQ ID NO: 1460327 - DNA, 25 bp, Homo sapien
gaaactatcacaaacaacgtgacat

SEQ ID NO: 1460328 - DNA, 25 bp, Homo sapien
ctatcacaaacaacgtgacatccat

SEQ ID NO: 1460329 - DNA, 25 bp, Homo sapien
gctcaaatatccagaagtagtgaga

SEQ ID NO: 1460330 - DNA, 25 bp, Homo sapien
gaaggagtagaagatgttggccttt

SEQ ID NO: 1460331 - DNA, 25 bp, Homo sapien
tagtgagagaaggagtagaagatgt

SEQ ID NO: 1460332 - DNA, 25 bp, Homo sapien
ccaaagaggttaatgtgctcaaata

SEQ ID NO: 1460333 - DNA, 25 bp, Homo sapien
ctaactcatcgccaacgatttggta

SEQ ID NO: 1460334 - DNA, 25 bp, Homo sapien
tcatcgccaacgatttggtagccta

SEQ ID NO: 1460335 - DNA, 25 bp, Homo sapien
caacgatttggtagcctatggtggg

SEQ ID NO: 1460336 - DNA, 25 bp, Homo sapien
tcgccaacgatttggtagcctatgg

SEQ ID NO: 1460337 - DNA, 25 bp, Homo sapien
ggcagtgttggtctgttagaaagca

SEQ ID NO: 1460338 - DNA, 25 bp, Homo sapien
tggtctgttagaaagcagcagactg

SEQ ID NO: 1460339 - DNA, 25 bp, Homo sapien
aacagtgaggatccccttctgtgtc

SEQ ID NO: 1460340 - DNA, 25 bp, Homo sapien
ctgccactggcagcaacagtgagga

SEQ ID NO: 1460341 - DNA, 25 bp, Homo sapien
gggctgagcggctcatgtgcccacc

SEQ ID NO: 1460342 - DNA, 25 bp, Homo sapien
gatcaagccccaggcaaatctgagg

SEQ ID NO: 1460343 - DNA, 25 bp, Homo sapien
actctgctgaagatcaagccccagg

SEQ ID NO: 1460344 - DNA, 25 bp, Homo sapien
agcggctcatgtgcccaccacttgg

SEQ ID NO: 1460345 - DNA, 25 bp, Homo sapien
taagtcctacatttctttaagtgcc

SEQ ID NO: 1460346 - DNA, 25 bp, Homo sapien
aacaatcagctcgaattgtttataa

SEQ ID NO: 1460347 - DNA, 25 bp, Homo sapien
aggtgctgacgggtgcaaacaatca

SEQ ID NO: 1460348 - DNA, 25 bp, Homo sapien
accatttttacaggcaggtgctgac

SEQ ID NO: 1460349 - DNA, 25 bp, Homo sapien
ctaggctgagttgctatttgtcttc

SEQ ID NO: 1460350 - DNA, 25 bp, Homo sapien
gcttccgttatagattaggactgga

SEQ ID NO: 1460351 - DNA, 25 bp, Homo sapien
actggattggattttctaggctgag

SEQ ID NO: 1460352 - DNA, 25 bp, Homo sapien
tactctgtgaaaggcaatagttcgg

SEQ ID NO: 1460353 - DNA, 25 bp, Homo sapien
gggtctgtatgaatgtccagtcact

SEQ ID NO: 1460354 - DNA, 25 bp, Homo sapien
ccatttgtacctccagatgtggagg

SEQ ID NO: 1460355 - DNA, 25 bp, Homo sapien
agaaacagttggctggaatcctcct

SEQ ID NO: 1460356 - DNA, 25 bp, Homo sapien
cacttgatgcacatcccagggtggt

SEQ ID NO: 1460357 - DNA, 25 bp, Homo sapien
agctggtttactatatatgactgca

SEQ ID NO: 1460358 - DNA, 25 bp, Homo sapien
gcttcagctggtttactatatatga

SEQ ID NO: 1460359 - DNA, 25 bp, Homo sapien
tgaaatggcttcagctggtttacta

SEQ ID NO: 1460360 - DNA, 25 bp, Homo sapien
tggtttactatatatgactgcatac

SEQ ID NO: 1460361 - DNA, 25 bp, Homo sapien
cagttactgtgtagctatactccac

SEQ ID NO: 1460362 - DNA, 25 bp, Homo sapien
acgatagcgtgtttccaagcctgta

SEQ ID NO: 1460363 - DNA, 25 bp, Homo sapien
tggagggtcccagttcactaagatc

SEQ ID NO: 1460364 - DNA, 25 bp, Homo sapien
ttgacaagaggactcaaaatacccc

SEQ ID NO: 1460365 - DNA, 25 bp, Homo sapien
gattttgacacactagctgtgcaac

SEQ ID NO: 1460366 - DNA, 25 bp, Homo sapien
gcaacctccattcgtgcaggctaca

SEQ ID NO: 1460367 - DNA, 25 bp, Homo sapien
agggagaagttatactgagagtaag

SEQ ID NO: 1460368 - DNA, 25 bp, Homo sapien
tccaggcagattttgacacactagc

SEQ ID NO: 1460369 - DNA, 25 bp, Homo sapien
cagcaagggactctttattatcata

SEQ ID NO: 1460370 - DNA, 25 bp, Homo sapien
caagggactctttattatcatatct

SEQ ID NO: 1460371 - DNA, 25 bp, Homo sapien
gcactgtgggcggtgaccaacatac

SEQ ID NO: 1460372 - DNA, 25 bp, Homo sapien
ttttgcactgtgggcggtgaccaac

SEQ ID NO: 1460373 - DNA, 25 bp, Homo sapien
tcatttgagtggcactgacggccca

SEQ ID NO: 1460374 - DNA, 25 bp, Homo sapien
tgacggcccaaagatctggagggct

SEQ ID NO: 1460375 - DNA, 25 bp, Homo sapien
cttggagtgcatagctataggtgga

SEQ ID NO: 1460376 - DNA, 25 bp, Homo sapien
cagtgtaattgaaagtcacaggatc

SEQ ID NO: 1460377 - DNA, 25 bp, Homo sapien
gaaacataggatatcacaggtggag

SEQ ID NO: 1460378 - DNA, 25 bp, Homo sapien
tctggaggtgcttgcaatgtcctca

SEQ ID NO: 1460379 - DNA, 25 bp, Homo sapien
tatcacaggtggagagagaccttct

SEQ ID NO: 1460380 - DNA, 25 bp, Homo sapien
gggattcatagaaacataggatatc

SEQ ID NO: 1460381 - DNA, 25 bp, Homo sapien
tcacactgcgtccatggttgcaaac

SEQ ID NO: 1460382 - DNA, 25 bp, Homo sapien
ccaagagctacaggtatgcccagct

SEQ ID NO: 1460383 - DNA, 25 bp, Homo sapien
tatattcacactgcgtccatggttg

SEQ ID NO: 1460384 - DNA, 25 bp, Homo sapien
gcccagctgaattccaagtgtagat

SEQ ID NO: 1460385 - DNA, 25 bp, Homo sapien
gcggcggaagagaaactgacgattc

SEQ ID NO: 1460386 - DNA, 25 bp, Homo sapien
aaacaattttctcgtcggcctggat

SEQ ID NO: 1460387 - DNA, 25 bp, Homo sapien
tgacgattcaaaccagagtactcca

SEQ ID NO: 1460388 - DNA, 25 bp, Homo sapien
ccatttgggttaacaggctcagacc

SEQ ID NO: 1460389 - DNA, 25 bp, Homo sapien
ctgtagtagcaatgcccggccattc

SEQ ID NO: 1460390 - DNA, 25 bp, Homo sapien
tgaatggttctaacccgtacaggtg

SEQ ID NO: 1460391 - DNA, 25 bp, Homo sapien
tataaagtttctcagtccacttggg

SEQ ID NO: 1460392 - DNA, 25 bp, Homo sapien
taaggtttgaatcagagtccaaggg

SEQ ID NO: 1460393 - DNA, 25 bp, Homo sapien
actacttggagtcttcagcagtctg

SEQ ID NO: 1460394 - DNA, 25 bp, Homo sapien
gggacatatgcaactacttggagtc

SEQ ID NO: 1460395 - DNA, 25 bp, Homo sapien
gtctgacaattttacaccatctcct

SEQ ID NO: 1460396 - DNA, 25 bp, Homo sapien
gctcctggggacatatgcaactact

SEQ ID NO: 1460397 - DNA, 25 bp, Homo sapien
cactatcagaaccatgccttcctga

SEQ ID NO: 1460398 - DNA, 25 bp, Homo sapien
ccactatcagaaccatgccttcctg

SEQ ID NO: 1460399 - DNA, 25 bp, Homo sapien
tatttggaccatatggctcaatttg

SEQ ID NO: 1460400 - DNA, 25 bp, Homo sapien
catcattagagccatggttaaactg

SEQ ID NO: 1460401 - DNA, 25 bp, Homo sapien
attgcctggcaattttcttgctgaa

SEQ ID NO: 1460402 - DNA, 25 bp, Homo sapien
aaccttaatttctgcacccttcagg

SEQ ID NO: 1460403 - DNA, 25 bp, Homo sapien
agctatgcgtcttgacggatttggg

SEQ ID NO: 1460404 - DNA, 25 bp, Homo sapien
tgtttcataatgagctatgcgtctt

SEQ ID NO: 1460405 - DNA, 25 bp, Homo sapien
tccccattcagtccacttatagaaa

SEQ ID NO: 1460406 - DNA, 25 bp, Homo sapien
tttctatccccattcagtccactta

SEQ ID NO: 1460407 - DNA, 25 bp, Homo sapien
tagaaaggtctacggaatcatccag

SEQ ID NO: 1460408 - DNA, 25 bp, Homo sapien
gattcaggagtatgggctagagtct

SEQ ID NO: 1460409 - DNA, 25 bp, Homo sapien
tgtggttccatagaatgagtgctgg

SEQ ID NO: 1460410 - DNA, 25 bp, Homo sapien
gctagagtcttcctaggttcttgta

SEQ ID NO: 1460411 - DNA, 25 bp, Homo sapien
ttacagtggtcacttgtcctgaaca

SEQ ID NO: 1460412 - DNA, 25 bp, Homo sapien
ttatattacagctgttacagtggtc

SEQ ID NO: 1460413 - DNA, 25 bp, Homo sapien
cagctgttacagtggtcacttgtcc

SEQ ID NO: 1460414 - DNA, 25 bp, Homo sapien
tattacagctgttacagtggtcact

SEQ ID NO: 1460415 - DNA, 25 bp, Homo sapien
catctgtgtatgatttccccctcac

SEQ ID NO: 1460416 - DNA, 25 bp, Homo sapien
tcatctgtgtatgatttccccctca

SEQ ID NO: 1460417 - DNA, 25 bp, Homo sapien
ctcttggctgtaatagggtacttcg

SEQ ID NO: 1460418 - DNA, 25 bp, Homo sapien
aatagggtacttcggggcagccatc

SEQ ID NO: 1460419 - DNA, 25 bp, Homo sapien
gcagccatcttgtctcaggtagtgg

SEQ ID NO: 1460420 - DNA, 25 bp, Homo sapien
cataagcccttgcagagctaaggat

SEQ ID NO: 1460421 - DNA, 25 bp, Homo sapien
ggagtgttccctgtaaataccacca

SEQ ID NO: 1460422 - DNA, 25 bp, Homo sapien
gaactcctgcatgccaagcaaggct

SEQ ID NO: 1460423 - DNA, 25 bp, Homo sapien
caaatggtggtagcaatatcgccaa

SEQ ID NO: 1460424 - DNA, 25 bp, Homo sapien
tgacaccgcacaattcatcacagag

SEQ ID NO: 1460425 - DNA, 25 bp, Homo sapien
tgaactgcaatcctacagttgtggg

SEQ ID NO: 1460426 - DNA, 25 bp, Homo sapien
gggatggactctgtgcctcattaat

SEQ ID NO: 1460427 - DNA, 25 bp, Homo sapien
gactctgtgcctcattaatggagaa

SEQ ID NO: 1460428 - DNA, 25 bp, Homo sapien
ctcttgcgagtttgtggactgaact

SEQ ID NO: 1460429 - DNA, 25 bp, Homo sapien
gaacccttggagttacaggctctga

SEQ ID NO: 1460430 - DNA, 25 bp, Homo sapien
tcctggtagaccacacggtaatggg

SEQ ID NO: 1460431 - DNA, 25 bp, Homo sapien
taaatgtaggatcgtcgggtctctc

SEQ ID NO: 1460432 - DNA, 25 bp, Homo sapien
gaatgagcactcgtggcttgagccc

SEQ ID NO: 1460433 - DNA, 25 bp, Homo sapien
cttaatctctatgcaagctgacccc

SEQ ID NO: 1460434 - DNA, 25 bp, Homo sapien
ttttcaggtggcatccacttaatct

SEQ ID NO: 1460435 - DNA, 25 bp, Homo sapien
tctctatgcaagctgaccccagtgc

SEQ ID NO: 1460436 - DNA, 25 bp, Homo sapien
gtaaataaagtagttgatgatgatt

SEQ ID NO: 1460437 - DNA, 25 bp, Homo sapien
aacaggagaattaagatccattggg

SEQ ID NO: 1460438 - DNA, 25 bp, Homo sapien
agaacaggagaattaagatccattg

SEQ ID NO: 1460439 - DNA, 25 bp, Homo sapien
taagaacaggagaattaagatccat

SEQ ID NO: 1460440 - DNA, 25 bp, Homo sapien
cttaagaacaggagaattaagatcc

SEQ ID NO: 1460441 - DNA, 25 bp, Homo sapien
gaggtgttacacttccatcattgag

SEQ ID NO: 1460442 - DNA, 25 bp, Homo sapien
gacatgcttgtatccttatctcata

SEQ ID NO: 1460443 - DNA, 25 bp, Homo sapien
tgatgatgaccaacggagaaggcca

SEQ ID NO: 1460444 - DNA, 25 bp, Homo sapien
cattgtactccacaggaatttcggg

SEQ ID NO: 1460445 - DNA, 25 bp, Homo sapien
ggtggtatccaagctacaaatatag

SEQ ID NO: 1460446 - DNA, 25 bp, Homo sapien
taaggcccaattactgtgatattat

SEQ ID NO: 1460447 - DNA, 25 bp, Homo sapien
tgttgacataggtgtttgaacaatg

SEQ ID NO: 1460448 - DNA, 25 bp, Homo sapien
tatatggaggatagatttcttctgg

SEQ ID NO: 1460449 - DNA, 25 bp, Homo sapien
gataatgtgtcgaggtgtcacccaa

SEQ ID NO: 1460450 - DNA, 25 bp, Homo sapien
gagaaacgaggccattgggcttttc

SEQ ID NO: 1460451 - DNA, 25 bp, Homo sapien
gctattgggctccaggtttttatca

SEQ ID NO: 1460452 - DNA, 25 bp, Homo sapien
gaaaagcaagtttccattacgactc

SEQ ID NO: 1460453 - DNA, 25 bp, Homo sapien
aaaggctcgcttgaagtgcacccag

SEQ ID NO: 1460454 - DNA, 25 bp, Homo sapien
cccagcagatgtacaagctgtaaga

SEQ ID NO: 1460455 - DNA, 25 bp, Homo sapien
taagagtgaagctgtagttggtgta

SEQ ID NO: 1460456 - DNA, 25 bp, Homo sapien
tgcctgcagtgtctgacctagaaaa

SEQ ID NO: 1460457 - DNA, 25 bp, Homo sapien
aatttgagaaggcaggtgtttaggc

SEQ ID NO: 1460458 - DNA, 25 bp, Homo sapien
caagccaatttcctcccccccattg

SEQ ID NO: 1460459 - DNA, 25 bp, Homo sapien
tttcctcccccccattgagcagcat

SEQ ID NO: 1460460 - DNA, 25 bp, Homo sapien
gttgctacctcatatgaactgaaca

SEQ ID NO: 1460461 - DNA, 25 bp, Homo sapien
tgtattcatgctttatgaattcagt

SEQ ID NO: 1460462 - DNA, 25 bp, Homo sapien
gagtttcattatctgtgctatcaac

SEQ ID NO: 1460463 - DNA, 25 bp, Homo sapien
tcacatttttccaaggcctttctgc

SEQ ID NO: 1460464 - DNA, 25 bp, Homo sapien
tcattatctgtgctatcaacacccc

SEQ ID NO: 1460465 - DNA, 25 bp, Homo sapien
acatttttccaaggcctttctgcac

SEQ ID NO: 1460466 - DNA, 25 bp, Homo sapien
tctgaagttatctgctgttgtggcg

SEQ ID NO: 1460467 - DNA, 25 bp, Homo sapien
tatgtcaagagaacacgtcctttcg

SEQ ID NO: 1460468 - DNA, 25 bp, Homo sapien
aagtgggacctgaccatatgtcaag

SEQ ID NO: 1460469 - DNA, 25 bp, Homo sapien
tctattagcatggataagtgggacc

SEQ ID NO: 1460470 - DNA, 25 bp, Homo sapien
gatctggtactctttaatgacgccg

SEQ ID NO: 1460471 - DNA, 25 bp, Homo sapien
tggtggcaggatgctctccggaact

SEQ ID NO: 1460472 - DNA, 25 bp, Homo sapien
tgtcagtgtggatgagacctttccc

SEQ ID NO: 1460473 - DNA, 25 bp, Homo sapien
gaactccttgggtagtagctgcaac

SEQ ID NO: 1460474 - DNA, 25 bp, Homo sapien
cgttcaattccatttcgaagaagga

SEQ ID NO: 1460475 - DNA, 25 bp, Homo sapien
tattcctgaaatggttgaattccct

SEQ ID NO: 1460476 - DNA, 25 bp, Homo sapien
tcagagaagctcagtgatgttcccc

SEQ ID NO: 1460477 - DNA, 25 bp, Homo sapien
gccagcaaccgtgcaagctttcagc

SEQ ID NO: 1460478 - DNA, 25 bp, Homo sapien
atttgattgtataggttttctccag

SEQ ID NO: 1460479 - DNA, 25 bp, Homo sapien
catttgattgtataggttttctcca

SEQ ID NO: 1460480 - DNA, 25 bp, Homo sapien
tagggggactcactccttgaggcac

SEQ ID NO: 1460481 - DNA, 25 bp, Homo sapien
acagctttgctgagtcctcgcccat

SEQ ID NO: 1460482 - DNA, 25 bp, Homo sapien
ccacgtagggggactcactccttga

SEQ ID NO: 1460483 - DNA, 25 bp, Homo sapien
agtcctcgcccatagctgttccagg

SEQ ID NO: 1460484 - DNA, 25 bp, Homo sapien
tgtggaattgtgagaccctcttatc

SEQ ID NO: 1460485 - DNA, 25 bp, Homo sapien
taagagtacgtgtttacactccctg

SEQ ID NO: 1460486 - DNA, 25 bp, Homo sapien
tcaattgatgccttccctgtggaat

SEQ ID NO: 1460487 - DNA, 25 bp, Homo sapien
gaatggtttcttcggcagatgaaca

SEQ ID NO: 1460488 - DNA, 25 bp, Homo sapien
gtggcttccatagatgctgggcaga

SEQ ID NO: 1460489 - DNA, 25 bp, Homo sapien
agatgctgggcagaggatcctgcac

SEQ ID NO: 1460490 - DNA, 25 bp, Homo sapien
ttttctctctgggaacatgggatgt

SEQ ID NO: 1460491 - DNA, 25 bp, Homo sapien
gatgaatgtggcagagacaatgcaa

SEQ ID NO: 1460492 - DNA, 25 bp, Homo sapien
aatgcaatgtgctcagtgatgtcca

SEQ ID NO: 1460493 - DNA, 25 bp, Homo sapien
tgctcagtgatgtccatgtttccct

SEQ ID NO: 1460494 - DNA, 25 bp, Homo sapien
tcagcgcctccgagagcttttctat

SEQ ID NO: 1460495 - DNA, 25 bp, Homo sapien
tcaaatcagcgcctccgagagcttt

SEQ ID NO: 1460496 - DNA, 25 bp, Homo sapien
ctccgagagcttttctatcaattac

SEQ ID NO: 1460497 - DNA, 25 bp, Homo sapien
ttccattgtcaaatcagcgcctccg

SEQ ID NO: 1460498 - DNA, 25 bp, Homo sapien
ccagttgaaatcttgtcagagcaaa

SEQ ID NO: 1460499 - DNA, 25 bp, Homo sapien
gctgagcagcatatggtatctgaca

SEQ ID NO: 1460500 - DNA, 25 bp, Homo sapien
tcacagcattttactggcaccgggt

SEQ ID NO: 1460501 - DNA, 25 bp, Homo sapien
ggaataagttcagtctcacagcatt

SEQ ID NO: 1460502 - DNA, 25 bp, Homo sapien
aacccgattgtgctgttcatctgga

SEQ ID NO: 1460503 - DNA, 25 bp, Homo sapien
agcaaatctggtttcctgaggtgga

SEQ ID NO: 1460504 - DNA, 25 bp, Homo sapien
tggaaggcgattgtacaccactcct

SEQ ID NO: 1460505 - DNA, 25 bp, Homo sapien
gagtacggcattctgccacagcagg

SEQ ID NO: 1460506 - DNA, 25 bp, Homo sapien
gtctcagcggtacacatatcaaata

SEQ ID NO: 1460507 - DNA, 25 bp, Homo sapien
ggtggtagcaccagctaattacctg

SEQ ID NO: 1460508 - DNA, 25 bp, Homo sapien
cagatgtgggattcatacaggatgc

SEQ ID NO: 1460509 - DNA, 25 bp, Homo sapien
ccactttgtaaatgagataccagca

SEQ ID NO: 1460510 - DNA, 25 bp, Homo sapien
ttctagcgtaatacccagagcagca

SEQ ID NO: 1460511 - DNA, 25 bp, Homo sapien
ggccaccacaacaaactccagtaga

SEQ ID NO: 1460512 - DNA, 25 bp, Homo sapien
gggttatagagcactccgttacaac

SEQ ID NO: 1460513 - DNA, 25 bp, Homo sapien
tggttgtgcctcctgtattcggcca

SEQ ID NO: 1460514 - DNA, 25 bp, Homo sapien
tgtgtccacagatagattcaggttt

SEQ ID NO: 1460515 - DNA, 25 bp, Homo sapien
atgtgtccacagatagattcaggtt

SEQ ID NO: 1460516 - DNA, 25 bp, Homo sapien
tctgatcctgcactaacttttgagt

SEQ ID NO: 1460517 - DNA, 25 bp, Homo sapien
tgagttttagcgcatggataccatg

SEQ ID NO: 1460518 - DNA, 25 bp, Homo sapien
catgttttccataggagatcatatc

SEQ ID NO: 1460519 - DNA, 25 bp, Homo sapien
catttggcttccgtggagacaccca

SEQ ID NO: 1460520 - DNA, 25 bp, Homo sapien
tctttccgctaaacatgatgtctac

SEQ ID NO: 1460521 - DNA, 25 bp, Homo sapien
tgatgtctacaacttcagcaatcat

SEQ ID NO: 1460522 - DNA, 25 bp, Homo sapien
tctttctttccgctaaacatgatgt

SEQ ID NO: 1460523 - DNA, 25 bp, Homo sapien
tttctctttctttccgctaaacatg

SEQ ID NO: 1460524 - DNA, 25 bp, Homo sapien
caaaggctacttcagcgaccgagct

SEQ ID NO: 1460525 - DNA, 25 bp, Homo sapien
aaggcactcaaaggctacttcagcg

SEQ ID NO: 1460526 - DNA, 25 bp, Homo sapien
agcgaccgagctgtttctatgggag

SEQ ID NO: 1460527 - DNA, 25 bp, Homo sapien
ttgctgaaaggcactcaaaggctac

SEQ ID NO: 1460528 - DNA, 25 bp, Homo sapien
ccattgcttttcacgcaggcatata

SEQ ID NO: 1460529 - DNA, 25 bp, Homo sapien
tcttccacagtggtaatttgggttc

SEQ ID NO: 1460530 - DNA, 25 bp, Homo sapien
tatatcacttggagtgtcttccaca

SEQ ID NO: 1460531 - DNA, 25 bp, Homo sapien
caggcatatattgtgcagacttcaa

SEQ ID NO: 1460532 - DNA, 25 bp, Homo sapien
tcagaataaacgacccaggcacatt

SEQ ID NO: 1460533 - DNA, 25 bp, Homo sapien
cagctgtactgttgatgatgacaac

SEQ ID NO: 1460534 - DNA, 25 bp, Homo sapien
tgtccagatgacacgtacagctgta

SEQ ID NO: 1460535 - DNA, 25 bp, Homo sapien
catttgggtttgaaggagatgtcca

SEQ ID NO: 1460536 - DNA, 25 bp, Homo sapien
aagaaactgaataaactccagctgt

SEQ ID NO: 1460537 - DNA, 25 bp, Homo sapien
tgtgtttggctgtcgttttgaaaaa

SEQ ID NO: 1460538 - DNA, 25 bp, Homo sapien
ggctctcactgtgtttggctgtcgt

SEQ ID NO: 1460539 - DNA, 25 bp, Homo sapien
tttgaaaaacgtactgcttctgagg

SEQ ID NO: 1460540 - DNA, 25 bp, Homo sapien
gctgtcgttttgaaaaacgtactgc

SEQ ID NO: 1460541 - DNA, 25 bp, Homo sapien
caagtggttgcatgaagtcctgcac

SEQ ID NO: 1460542 - DNA, 25 bp, Homo sapien
gctttaggtggccaatgacatgaga

SEQ ID NO: 1460543 - DNA, 25 bp, Homo sapien
catgagagtttacatctggcaagat

SEQ ID NO: 1460544 - DNA, 25 bp, Homo sapien
gtcgtttgaggtagcagaactccaa

SEQ ID NO: 1460545 - DNA, 25 bp, Homo sapien
acaataaatgcaggacatggtgaat

SEQ ID NO: 1460546 - DNA, 25 bp, Homo sapien
caataaatgcaggacatggtgaatg

SEQ ID NO: 1460547 - DNA, 25 bp, Homo sapien
ttctcggctcggtgtaaaacccaca

SEQ ID NO: 1460548 - DNA, 25 bp, Homo sapien
gacactcgcagtgagattggctcct

SEQ ID NO: 1460549 - DNA, 25 bp, Homo sapien
ggtttagcccacctcacgtcgatgg

SEQ ID NO: 1460550 - DNA, 25 bp, Homo sapien
gaagaccagctaacgttgtcacagt

SEQ ID NO: 1460551 - DNA, 25 bp, Homo sapien
cgaagagcatatattcataggttgt

SEQ ID NO: 1460552 - DNA, 25 bp, Homo sapien
ctgttgtgtacgaagagcatatatt

SEQ ID NO: 1460553 - DNA, 25 bp, Homo sapien
agagcatatattcataggttgtaaa

SEQ ID NO: 1460554 - DNA, 25 bp, Homo sapien
tgtacgaagagcatatattcatagg

SEQ ID NO: 1460555 - DNA, 25 bp, Homo sapien
tcataaagccactgagttcctgaat

SEQ ID NO: 1460556 - DNA, 25 bp, Homo sapien
ggctgctggattttacgtctcagaa

SEQ ID NO: 1460557 - DNA, 25 bp, Homo sapien
gtgccaccgatttaaatcttctggg

SEQ ID NO: 1460558 - DNA, 25 bp, Homo sapien
tgctaagacccttatcttcataaag

SEQ ID NO: 1460559 - DNA, 25 bp, Homo sapien
tgtgcaccctccaaggtacccatta

SEQ ID NO: 1460560 - DNA, 25 bp, Homo sapien
taggtaggtaaactctctgtgcacc

SEQ ID NO: 1460561 - DNA, 25 bp, Homo sapien
cccctgagcaagcaacaatggtgac

SEQ ID NO: 1460562 - DNA, 25 bp, Homo sapien
cactgcggaagtcacattggttaaa

SEQ ID NO: 1460563 - DNA, 25 bp, Homo sapien
gtgaatctcatagctaagtatgtct

SEQ ID NO: 1460564 - DNA, 25 bp, Homo sapien
tatgtctccgttctggatgagtggg

SEQ ID NO: 1460565 - DNA, 25 bp, Homo sapien
ctaagtatgtctccgttctggatga

SEQ ID NO: 1460566 - DNA, 25 bp, Homo sapien
catagctaagtatgtctccgttctg

SEQ ID NO: 1460567 - DNA, 25 bp, Homo sapien
gagttctcaagtatagacggccatg

SEQ ID NO: 1460568 - DNA, 25 bp, Homo sapien
tgtccatgggctaagagcagaagtc

SEQ ID NO: 1460569 - DNA, 25 bp, Homo sapien
tgaagagtgctcatcagtacccgat

SEQ ID NO: 1460570 - DNA, 25 bp, Homo sapien
taggatgctgccaggtgaccaacat

SEQ ID NO: 1460571 - DNA, 25 bp, Homo sapien
ctgtcttgaaatgtcacactaaaaa

SEQ ID NO: 1460572 - DNA, 25 bp, Homo sapien
tttggcactggaaagctgtgaggct

SEQ ID NO: 1460573 - DNA, 25 bp, Homo sapien
ttggtgacccattttggcactggaa

SEQ ID NO: 1460574 - DNA, 25 bp, Homo sapien
attgccattggtgacccattttggc

SEQ ID NO: 1460575 - DNA, 25 bp, Homo sapien
tgtgcactgccaaatccattggagg

SEQ ID NO: 1460576 - DNA, 25 bp, Homo sapien
tcctctgcggtcatgaatggaatcc

SEQ ID NO: 1460577 - DNA, 25 bp, Homo sapien
tggaggcaaccaaccgaaacatata

SEQ ID NO: 1460578 - DNA, 25 bp, Homo sapien
tctgtgtacggttggagatcactca

SEQ ID NO: 1460579 - DNA, 25 bp, Homo sapien
gcgttattacgagctggtgtagacc

SEQ ID NO: 1460580 - DNA, 25 bp, Homo sapien
agagccaggagcgttattacgagct

SEQ ID NO: 1460581 - DNA, 25 bp, Homo sapien
gacctcatctggagttggtatctgg

SEQ ID NO: 1460582 - DNA, 25 bp, Homo sapien
tctagaaatccatgggtggagtcgc

SEQ ID NO: 1460583 - DNA, 25 bp, Homo sapien
ctgggaggcagcacgccatctggag

SEQ ID NO: 1460584 - DNA, 25 bp, Homo sapien
gaatcgaaatgctccatatactgga

SEQ ID NO: 1460585 - DNA, 25 bp, Homo sapien
aaaacacagatgaattagagcagag

SEQ ID NO: 1460586 - DNA, 25 bp, Homo sapien
tgtggagaacatatgctggatggaa

SEQ ID NO: 1460587 - DNA, 25 bp, Homo sapien
gttcctcaggatcaacaacaatgtt

SEQ ID NO: 1460588 - DNA, 25 bp, Homo sapien
caaacgtagttggtggctaccaagt

SEQ ID NO: 1460589 - DNA, 25 bp, Homo sapien
ttacaaacgtagttggtggctacca

SEQ ID NO: 1460590 - DNA, 25 bp, Homo sapien
gctttacaaacgtagttggtggcta

SEQ ID NO: 1460591 - DNA, 25 bp, Homo sapien
agaggctttacaaacgtagttggtg

SEQ ID NO: 1460592 - DNA, 25 bp, Homo sapien
actccttgtgtgtttgggccacagc

SEQ ID NO: 1460593 - DNA, 25 bp, Homo sapien
tcctttcttcaagtgatgctgctga

SEQ ID NO: 1460594 - DNA, 25 bp, Homo sapien
tttgggccacagcccaacacaggaa

SEQ ID NO: 1460595 - DNA, 25 bp, Homo sapien
acacaggaaggcactgactttcctt

SEQ ID NO: 1460596 - DNA, 25 bp, Homo sapien
aattttggcctgcttaatattggag

SEQ ID NO: 1460597 - DNA, 25 bp, Homo sapien
tggcctgcttaatattggagttcat

SEQ ID NO: 1460598 - DNA, 25 bp, Homo sapien
tttggcctgcttaatattggagttc

SEQ ID NO: 1460599 - DNA, 25 bp, Homo sapien
ttaattttggcctgcttaatattgg

SEQ ID NO: 1460600 - DNA, 25 bp, Homo sapien
aattaagggacatcaccaatgtcaa

SEQ ID NO: 1460601 - DNA, 25 bp, Homo sapien
ggacatcaccaatgtcaaccactta

SEQ ID NO: 1460602 - DNA, 25 bp, Homo sapien
tgatcaattgccaatccatacaggt

SEQ ID NO: 1460603 - DNA, 25 bp, Homo sapien
gccaatccatacaggtttgactgat

SEQ ID NO: 1460604 - DNA, 25 bp, Homo sapien
tcactggacaaaggcatggaagatt

SEQ ID NO: 1460605 - DNA, 25 bp, Homo sapien
taactctcagtactaatttaattct

SEQ ID NO: 1460606 - DNA, 25 bp, Homo sapien
tcaggataatatgttttcagatcat

SEQ ID NO: 1460607 - DNA, 25 bp, Homo sapien
catattctagtgaatgccacatgct

SEQ ID NO: 1460608 - DNA, 25 bp, Homo sapien
acatgcagaaatccagatatatata

SEQ ID NO: 1460609 - DNA, 25 bp, Homo sapien
atgcagaaatccagatatatatatg

SEQ ID NO: 1460610 - DNA, 25 bp, Homo sapien
taacatgcagaaatccagatatata

SEQ ID NO: 1460611 - DNA, 25 bp, Homo sapien
taaaagatcgtcaattaaagaatct

SEQ ID NO: 1460612 - DNA, 25 bp, Homo sapien
ataaaagatcgtcaattaaagaatc

SEQ ID NO: 1460613 - DNA, 25 bp, Homo sapien
caataaaagatcgtcaattaaagaa

SEQ ID NO: 1460614 - DNA, 25 bp, Homo sapien
aataaaagatcgtcaattaaagaat

SEQ ID NO: 1460615 - DNA, 25 bp, Homo sapien
aattgagcctctaagttctaaaata

SEQ ID NO: 1460616 - DNA, 25 bp, Homo sapien
caattgagcctctaagttctaaaat

SEQ ID NO: 1460617 - DNA, 25 bp, Homo sapien
attgagcctctaagttctaaaataa

SEQ ID NO: 1460618 - DNA, 25 bp, Homo sapien
tacaattgagcctctaagttctaaa

SEQ ID NO: 1460619 - DNA, 25 bp, Homo sapien
gatagccaacatttgcatagactta

SEQ ID NO: 1460620 - DNA, 25 bp, Homo sapien
tataaaattagatagccaacatttg

SEQ ID NO: 1460621 - DNA, 25 bp, Homo sapien
aattagatagccaacatttgcatag

SEQ ID NO: 1460622 - DNA, 25 bp, Homo sapien
tcaatggaaacttaattctagggca

SEQ ID NO: 1460623 - DNA, 25 bp, Homo sapien
ggtaaaaggaaccagcccatcgatg

SEQ ID NO: 1460624 - DNA, 25 bp, Homo sapien
gatcagttatcaagctgccttggct

SEQ ID NO: 1460625 - DNA, 25 bp, Homo sapien
ccatcgatgagcacccaaaggtttg

SEQ ID NO: 1460626 - DNA, 25 bp, Homo sapien
gaggcattgcaattgttataggatc

SEQ ID NO: 1460627 - DNA, 25 bp, Homo sapien
gtgacattcagaagggtgtagttat

SEQ ID NO: 1460628 - DNA, 25 bp, Homo sapien
gacattcagaagggtgtagttatta

SEQ ID NO: 1460629 - DNA, 25 bp, Homo sapien
tgacattcagaagggtgtagttatt

SEQ ID NO: 1460630 - DNA, 25 bp, Homo sapien
acattcagaagggtgtagttattac

SEQ ID NO: 1460631 - DNA, 25 bp, Homo sapien
ggtcccaacaccactgtccttccaa

SEQ ID NO: 1460632 - DNA, 25 bp, Homo sapien
tcccaacaccactgtccttccaaag

SEQ ID NO: 1460633 - DNA, 25 bp, Homo sapien
cctggtcccaacaccactgtccttc

SEQ ID NO: 1460634 - DNA, 25 bp, Homo sapien
cccaacaccactgtccttccaaagc

SEQ ID NO: 1460635 - DNA, 25 bp, Homo sapien
gacgggattccaagttacaagctgt

SEQ ID NO: 1460636 - DNA, 25 bp, Homo sapien
aagctgtactgcatcactggaacaa

SEQ ID NO: 1460637 - DNA, 25 bp, Homo sapien
tactgcatgggttgcaagcacagct

SEQ ID NO: 1460638 - DNA, 25 bp, Homo sapien
tcccactgactgacaagcaactaca

SEQ ID NO: 1460639 - DNA, 25 bp, Homo sapien
cacccggatctcctccttggagcca

SEQ ID NO: 1460640 - DNA, 25 bp, Homo sapien
gatctcctccttggagccagaagca

SEQ ID NO: 1460641 - DNA, 25 bp, Homo sapien
tctcctccttggagccagaagcacc

SEQ ID NO: 1460642 - DNA, 25 bp, Homo sapien
tcctccttggagccagaagcaccat

SEQ ID NO: 1460643 - DNA, 25 bp, Homo sapien
catgaaccgataaattccagcagat

SEQ ID NO: 1460644 - DNA, 25 bp, Homo sapien
tctacaagggctgttcggtaaatgg

SEQ ID NO: 1460645 - DNA, 25 bp, Homo sapien
gccgcgcagctttgcaacatttaat

SEQ ID NO: 1460646 - DNA, 25 bp, Homo sapien
tttgaaagttctcttgccgcgcagc

SEQ ID NO: 1460647 - DNA, 25 bp, Homo sapien
atatcccagtgaaaaggactgagtg

SEQ ID NO: 1460648 - DNA, 25 bp, Homo sapien
gactgagtgtgttaagagtccatta

SEQ ID NO: 1460649 - DNA, 25 bp, Homo sapien
cattagggcgaaaaggtgcttccca

SEQ ID NO: 1460650 - DNA, 25 bp, Homo sapien
aagagtccattagggcgaaaaggtg

SEQ ID NO: 1460651 - DNA, 25 bp, Homo sapien
gaggagcttctagagttcgattttc

SEQ ID NO: 1460652 - DNA, 25 bp, Homo sapien
tcacgtgggctttccgggatccctg

SEQ ID NO: 1460653 - DNA, 25 bp, Homo sapien
ccttcaggaggagcttctagagttc

SEQ ID NO: 1460654 - DNA, 25 bp, Homo sapien
tccgggatccctgtgttttgacaaa

SEQ ID NO: 1460655 - DNA, 25 bp, Homo sapien
caacctttggccgtgcatgcttgga

SEQ ID NO: 1460656 - DNA, 25 bp, Homo sapien
ggagcaaatccgtaagcacgatagc

SEQ ID NO: 1460657 - DNA, 25 bp, Homo sapien
gcacgatagctgagttctgaggaat

SEQ ID NO: 1460658 - DNA, 25 bp, Homo sapien
agtgggcccagagcacaacctttgg

SEQ ID NO: 1460659 - DNA, 25 bp, Homo sapien
cttcggtagtggaatgttgttggca

SEQ ID NO: 1460660 - DNA, 25 bp, Homo sapien
cctcttcggtagtggaatgttgttg

SEQ ID NO: 1460661 - DNA, 25 bp, Homo sapien
ggtagtggaatgttgttggcatttc

SEQ ID NO: 1460662 - DNA, 25 bp, Homo sapien
tttctgcctcttcggtagtggaatg

SEQ ID NO: 1460663 - DNA, 25 bp, Homo sapien
caggagacattaaaggagtcaggtg

SEQ ID NO: 1460664 - DNA, 25 bp, Homo sapien
ggctggcacgccttcgggtatgtcc

SEQ ID NO: 1460665 - DNA, 25 bp, Homo sapien
cattaaaggagtcaggtgaatatga

SEQ ID NO: 1460666 - DNA, 25 bp, Homo sapien
tcctcgtcagttagggcctcactgg

SEQ ID NO: 1460667 - DNA, 25 bp, Homo sapien
aacgtattgtagcatatgatcctgg

SEQ ID NO: 1460668 - DNA, 25 bp, Homo sapien
tgagatatttattaccaggtaaaac

SEQ ID NO: 1460669 - DNA, 25 bp, Homo sapien
taaaacgtattgtagcatatgatcc

SEQ ID NO: 1460670 - DNA, 25 bp, Homo sapien
ttaccaggtaaaacgtattgtagca

SEQ ID NO: 1460671 - DNA, 25 bp, Homo sapien
tatagttctagaatccaggacagtc

SEQ ID NO: 1460672 - DNA, 25 bp, Homo sapien
catgcacttagtagaaactggtggg

SEQ ID NO: 1460673 - DNA, 25 bp, Homo sapien
actgtttgtacagcccacatgtgtg

SEQ ID NO: 1460674 - DNA, 25 bp, Homo sapien
gacagtcagaactggggaatccacg

SEQ ID NO: 1460675 - DNA, 25 bp, Homo sapien
tgacgaggaatatctaaggtggccc

SEQ ID NO: 1460676 - DNA, 25 bp, Homo sapien
gacgaggaatatctaaggtggcccc

SEQ ID NO: 1460677 - DNA, 25 bp, Homo sapien
gctccttatgcccatagatgatggt

SEQ ID NO: 1460678 - DNA, 25 bp, Homo sapien
atggtgtttatccagagaagggaca

SEQ ID NO: 1460679 - DNA, 25 bp, Homo sapien
tggtgtttatccagagaagggacat

SEQ ID NO: 1460680 - DNA, 25 bp, Homo sapien
gaatagcagtgctccttatgcccat

SEQ ID NO: 1460681 - DNA, 25 bp, Homo sapien
gtggagtaaccgtggcacttagcca

SEQ ID NO: 1460682 - DNA, 25 bp, Homo sapien
gatgcccagtggagtaaccgtggca

SEQ ID NO: 1460683 - DNA, 25 bp, Homo sapien
gcacttagccaattggtgtccagct

SEQ ID NO: 1460684 - DNA, 25 bp, Homo sapien
gtaaccgtggcacttagccaattgg

SEQ ID NO: 1460685 - DNA, 25 bp, Homo sapien
tatacacatatgctgatccatgtct

SEQ ID NO: 1460686 - DNA, 25 bp, Homo sapien
tatttattgttctcctactatacac

SEQ ID NO: 1460687 - DNA, 25 bp, Homo sapien
gttcctgccctcaaagtactcatga

SEQ ID NO: 1460688 - DNA, 25 bp, Homo sapien
agttcctgccctcaaagtactcatg

SEQ ID NO: 1460689 - DNA, 25 bp, Homo sapien
agttgcttatgaaatgccaagaaag

SEQ ID NO: 1460690 - DNA, 25 bp, Homo sapien
gaaagcaacaaggaacatagttgct

SEQ ID NO: 1460691 - DNA, 25 bp, Homo sapien
tccttgaccagcattgcagtcccaa

SEQ ID NO: 1460692 - DNA, 25 bp, Homo sapien
tatgcttcatatcttaaactatttg

SEQ ID NO: 1460693 - DNA, 25 bp, Homo sapien
gatgatgtcattgatccaactggac

SEQ ID NO: 1460694 - DNA, 25 bp, Homo sapien
ttatttgatgatgtcattgatccaa

SEQ ID NO: 1460695 - DNA, 25 bp, Homo sapien
ttgatgatgtcattgatccaactgg

SEQ ID NO: 1460696 - DNA, 25 bp, Homo sapien
tgatgtcattgatccaactggacac

SEQ ID NO: 1460697 - DNA, 25 bp, Homo sapien
gcttagcacatttgtgcatttccag

SEQ ID NO: 1460698 - DNA, 25 bp, Homo sapien
cagagaagtcatgtgctgagctctt

SEQ ID NO: 1460699 - DNA, 25 bp, Homo sapien
ggctcccaatttcaatccttgtggt

SEQ ID NO: 1460700 - DNA, 25 bp, Homo sapien
tcaatccttgtggtctgctgaagtc

SEQ ID NO: 1460701 - DNA, 25 bp, Homo sapien
ctatagaagagaacacacagtagga

SEQ ID NO: 1460702 - DNA, 25 bp, Homo sapien
gaagagaacacacagtaggacagcc

SEQ ID NO: 1460703 - DNA, 25 bp, Homo sapien
tagaagagaacacacagtaggacag

SEQ ID NO: 1460704 - DNA, 25 bp, Homo sapien
tatagaagagaacacacagtaggac

SEQ ID NO: 1460705 - DNA, 25 bp, Homo sapien
tgcctgaatagatcagcctcccatc

SEQ ID NO: 1460706 - DNA, 25 bp, Homo sapien
gatttggctactggtggctgaacct

SEQ ID NO: 1460707 - DNA, 25 bp, Homo sapien
tactgagttataataccatttgcct

SEQ ID NO: 1460708 - DNA, 25 bp, Homo sapien
tactggtggctgaacctcttgtggg

SEQ ID NO: 1460709 - DNA, 25 bp, Homo sapien
gagatgttcaatgcatgtgagctct

SEQ ID NO: 1460710 - DNA, 25 bp, Homo sapien
gaagggtagcaagcctgtcaatatg

SEQ ID NO: 1460711 - DNA, 25 bp, Homo sapien
agtgcaagcagttagggttactgca

SEQ ID NO: 1460712 - DNA, 25 bp, Homo sapien
ctcagtacagccagccaaagtgcaa

SEQ ID NO: 1460713 - DNA, 25 bp, Homo sapien
aggtgtttggccggcatccactgta

SEQ ID NO: 1460714 - DNA, 25 bp, Homo sapien
caaggtgtttggccggcatccactg

SEQ ID NO: 1460715 - DNA, 25 bp, Homo sapien
cagctgccaaccaaggtgtttggcc

SEQ ID NO: 1460716 - DNA, 25 bp, Homo sapien
gtgtttggccggcatccactgtaat

SEQ ID NO: 1460717 - DNA, 25 bp, Homo sapien
gggaaacgccagtcctgtctctctg

SEQ ID NO: 1460718 - DNA, 25 bp, Homo sapien
gaagtcagtttctgagcagtcctca

SEQ ID NO: 1460719 - DNA, 25 bp, Homo sapien
cagtcctcagtttgaggggaaacgc

SEQ ID NO: 1460720 - DNA, 25 bp, Homo sapien
gctgcagctttgcatgttaacaggg

SEQ ID NO: 1460721 - DNA, 25 bp, Homo sapien
gacgggtgctgtcctcactataggc

SEQ ID NO: 1460722 - DNA, 25 bp, Homo sapien
cctctgacaacaggttcatcccagg

SEQ ID NO: 1460723 - DNA, 25 bp, Homo sapien
gctgtatccatttaagctgcggact

SEQ ID NO: 1460724 - DNA, 25 bp, Homo sapien
ccaggtcacctcaatgctgtatcca

SEQ ID NO: 1460725 - DNA, 25 bp, Homo sapien
ctgctcctgttgtacgtcctcgact

SEQ ID NO: 1460726 - DNA, 25 bp, Homo sapien
gactccaatcactatatactgaacc

SEQ ID NO: 1460727 - DNA, 25 bp, Homo sapien
ttcatgcgaggctatcactcgatac

SEQ ID NO: 1460728 - DNA, 25 bp, Homo sapien
tatactgaacctccttcatgcgagg

SEQ ID NO: 1460729 - DNA, 25 bp, Homo sapien
aacactctgctcttttccctggtaa

SEQ ID NO: 1460730 - DNA, 25 bp, Homo sapien
taaaccaggatggagtcatttcccc

SEQ ID NO: 1460731 - DNA, 25 bp, Homo sapien
caagttaacgacagcaccccgtgta

SEQ ID NO: 1460732 - DNA, 25 bp, Homo sapien
agattgactctgacagcaccgctgg

SEQ ID NO: 1460733 - DNA, 25 bp, Homo sapien
taaactggtgaattcaccaccagtg

SEQ ID NO: 1460734 - DNA, 25 bp, Homo sapien
ggactccgatgcatgcttcatcagt

SEQ ID NO: 1460735 - DNA, 25 bp, Homo sapien
ggctggtctccggactccgatgcat

SEQ ID NO: 1460736 - DNA, 25 bp, Homo sapien
tcctcccacataaactggtgaattc

SEQ ID NO: 1460737 - DNA, 25 bp, Homo sapien
gactttattccactttccattacaa

SEQ ID NO: 1460738 - DNA, 25 bp, Homo sapien
tacaataggatagccccagcaatag

SEQ ID NO: 1460739 - DNA, 25 bp, Homo sapien
tccattacaataggatagccccagc

SEQ ID NO: 1460740 - DNA, 25 bp, Homo sapien
tagatccacttgtgtaaaggcaaga

SEQ ID NO: 1460741 - DNA, 25 bp, Homo sapien
caggtccatctttgttataaacgaa

SEQ ID NO: 1460742 - DNA, 25 bp, Homo sapien
aattggtcagttctgaacttaaagg

SEQ ID NO: 1460743 - DNA, 25 bp, Homo sapien
catgaaacatatatggatgaagttc

SEQ ID NO: 1460744 - DNA, 25 bp, Homo sapien
aatctcaaagttcattccaccatga

SEQ ID NO: 1460745 - DNA, 25 bp, Homo sapien
cttgagacagcccacaaaacctttt

SEQ ID NO: 1460746 - DNA, 25 bp, Homo sapien
ccaaatagctgacggattgtaattc

SEQ ID NO: 1460747 - DNA, 25 bp, Homo sapien
cctcatttaatgaagcgggacatcc

SEQ ID NO: 1460748 - DNA, 25 bp, Homo sapien
tccctcccagctgttatacacgttg

SEQ ID NO: 1460749 - DNA, 25 bp, Homo sapien
tacctatttactgcaagcctcttaa

SEQ ID NO: 1460750 - DNA, 25 bp, Homo sapien
gaaataggcactagctctcactacc

SEQ ID NO: 1460751 - DNA, 25 bp, Homo sapien
taatgtttagtgctggttcaaaccc

SEQ ID NO: 1460752 - DNA, 25 bp, Homo sapien
taatgattcatgtaaacaccacacc

SEQ ID NO: 1460753 - DNA, 25 bp, Homo sapien
caggatccttcctgaggatggtata

SEQ ID NO: 1460754 - DNA, 25 bp, Homo sapien
aagactcctgtgttatctccaataa

SEQ ID NO: 1460755 - DNA, 25 bp, Homo sapien
tcgcgggagccctcccagaaagact

SEQ ID NO: 1460756 - DNA, 25 bp, Homo sapien
cagtactaccattcaggatggcaga

SEQ ID NO: 1460757 - DNA, 25 bp, Homo sapien
gatgcctaatagcaattatttcatg

SEQ ID NO: 1460758 - DNA, 25 bp, Homo sapien
cccatccagagtgatttggccaaaa

SEQ ID NO: 1460759 - DNA, 25 bp, Homo sapien
ctgtatatatcccatccagagtgat

SEQ ID NO: 1460760 - DNA, 25 bp, Homo sapien
ttggccaaaagcctgatgcctaata

SEQ ID NO: 1460761 - DNA, 25 bp, Homo sapien
tttgccatgatcattagttgtagtt

SEQ ID NO: 1460762 - DNA, 25 bp, Homo sapien
cattagttgtagttacttccactgg

SEQ ID NO: 1460763 - DNA, 25 bp, Homo sapien
gatcattagttgtagttacttccac

SEQ ID NO: 1460764 - DNA, 25 bp, Homo sapien
ttgtagttacttccactggtgaccc

SEQ ID NO: 1460765 - DNA, 25 bp, Homo sapien
gacaatatcccaacttttacagaca

SEQ ID NO: 1460766 - DNA, 25 bp, Homo sapien
ctccatcagctagaaacatgaccat

SEQ ID NO: 1460767 - DNA, 25 bp, Homo sapien
tggacaatatcccaacttttacaga

SEQ ID NO: 1460768 - DNA, 25 bp, Homo sapien
acagacaactccatcagctagaaac

SEQ ID NO: 1460769 - DNA, 25 bp, Homo sapien
gctggcatcctttaagaagctgcat

SEQ ID NO: 1460770 - DNA, 25 bp, Homo sapien
tgctggcatcctttaagaagctgca

SEQ ID NO: 1460771 - DNA, 25 bp, Homo sapien
ctgctggcatcctttaagaagctgc

SEQ ID NO: 1460772 - DNA, 25 bp, Homo sapien
caaaatactcttcctgattgccagg

SEQ ID NO: 1460773 - DNA, 25 bp, Homo sapien
tcaggcacttttgttcgaaagctgg

SEQ ID NO: 1460774 - DNA, 25 bp, Homo sapien
aaagacaatcaaaccttcaggcact

SEQ ID NO: 1460775 - DNA, 25 bp, Homo sapien
aataaagacgtcccttcttcaactg

SEQ ID NO: 1460776 - DNA, 25 bp, Homo sapien
ctatgaatgatgccttcgccctacc

SEQ ID NO: 1460777 - DNA, 25 bp, Homo sapien
cctatgaatgatgccttcgccctac

SEQ ID NO: 1460778 - DNA, 25 bp, Homo sapien
cctatgaatgatgccttccccctac

SEQ ID NO: 1460779 - DNA, 25 bp, Homo sapien
ctccagtcctatgaatgatgccttc

SEQ ID NO: 1460780 - DNA, 25 bp, Homo sapien
tcctatgaatgatgccttcccccta

SEQ ID NO: 1460781 - DNA, 25 bp, Homo sapien
cagtcctatgaatgatgccttcccc

SEQ ID NO: 1460782 - DNA, 25 bp, Homo sapien
cattgtgatcgttgactgctgatca

SEQ ID NO: 1460783 - DNA, 25 bp, Homo sapien
gtgcgtagctccctcattgtgatcg

SEQ ID NO: 1460784 - DNA, 25 bp, Homo sapien
aggatgtgtgcgtagctccctcatt

SEQ ID NO: 1460785 - DNA, 25 bp, Homo sapien
tagctccctcattgtgatcgttgac

SEQ ID NO: 1460786 - DNA, 25 bp, Homo sapien
cacagaattgtggatttatggaaca

SEQ ID NO: 1460787 - DNA, 25 bp, Homo sapien
gactaattctgaatgatgataatca

SEQ ID NO: 1460788 - DNA, 25 bp, Homo sapien
cttttttagtaaactcactgatagc

SEQ ID NO: 1460789 - DNA, 25 bp, Homo sapien
catgtatatgtctgactaattctga

SEQ ID NO: 1460790 - DNA, 25 bp, Homo sapien
gactgctcaatatgcttgatgataa

SEQ ID NO: 1460791 - DNA, 25 bp, Homo sapien
agattgactgctcaatatgcttgat

SEQ ID NO: 1460792 - DNA, 25 bp, Homo sapien
ttgactgctcaatatgcttgatgat

SEQ ID NO: 1460793 - DNA, 25 bp, Homo sapien
tgctcaatatgcttgatgataacac

SEQ ID NO: 1460794 - DNA, 25 bp, Homo sapien
tttagctgaactgtcaaacttgctt

SEQ ID NO: 1460795 - DNA, 25 bp, Homo sapien
caaacttgcttaatatttgattttc

SEQ ID NO: 1460796 - DNA, 25 bp, Homo sapien
taatatttgattttccaggaccaaa

SEQ ID NO: 1460797 - DNA, 25 bp, Homo sapien
cttatggaatttagctgaactgtca

SEQ ID NO: 1460798 - DNA, 25 bp, Homo sapien
catccctgagagtagtaatctgtac

SEQ ID NO: 1460799 - DNA, 25 bp, Homo sapien
tattgtcaaggttttagcgtagtgc

SEQ ID NO: 1460800 - DNA, 25 bp, Homo sapien
gagccagggatattttccaatcgga

SEQ ID NO: 1460801 - DNA, 25 bp, Homo sapien
ttaaaacacatctaggaccacatag

SEQ ID NO: 1460802 - DNA, 25 bp, Homo sapien
ggaatcattcttgtgttgctcagta

SEQ ID NO: 1460803 - DNA, 25 bp, Homo sapien
cattcttgtgttgctcagtatcctt

SEQ ID NO: 1460804 - DNA, 25 bp, Homo sapien
ttaagctccctaaggttaggaatca

SEQ ID NO: 1460805 - DNA, 25 bp, Homo sapien
ccctaaggttaggaatcattcttgt

SEQ ID NO: 1460806 - DNA, 25 bp, Homo sapien
tgtccttgaaatagaattcaatcag

SEQ ID NO: 1460807 - DNA, 25 bp, Homo sapien
ctccattgtccttgaaatagaattc

SEQ ID NO: 1460808 - DNA, 25 bp, Homo sapien
ccttgaaatagaattcaatcagcat

SEQ ID NO: 1460809 - DNA, 25 bp, Homo sapien
ccattgtccttgaaatagaattcaa

SEQ ID NO: 1460810 - DNA, 25 bp, Homo sapien
gctgtggcacaatgggcaagtcact

SEQ ID NO: 1460811 - DNA, 25 bp, Homo sapien
cactacttgctgtttgtgagctgaa

SEQ ID NO: 1460812 - DNA, 25 bp, Homo sapien
aacctgatgcctacatgtctttggg

SEQ ID NO: 1460813 - DNA, 25 bp, Homo sapien
caccctgtagcagagaccttgcctt

SEQ ID NO: 1460814 - DNA, 25 bp, Homo sapien
gatagcgaggatgaccaaatttatt

SEQ ID NO: 1460815 - DNA, 25 bp, Homo sapien
tattaacggtggacgggccattcta

SEQ ID NO: 1460816 - DNA, 25 bp, Homo sapien
ggtggacgggccattctatctttca

SEQ ID NO: 1460817 - DNA, 25 bp, Homo sapien
ggccagcaagggagatagcgaggat

SEQ ID NO: 1460818 - DNA, 25 bp, Homo sapien
tcacagaggtcatgggacttccaaa

SEQ ID NO: 1460819 - DNA, 25 bp, Homo sapien
gagaatctccaatagcatgagggca

SEQ ID NO: 1460820 - DNA, 25 bp, Homo sapien
tattgcggtactagtaaggccagga

SEQ ID NO: 1460821 - DNA, 25 bp, Homo sapien
cattaccaaggtgcatcagcagcca

SEQ ID NO: 1460822 - DNA, 25 bp, Homo sapien
tagtatttctctaagtaggtataat

SEQ ID NO: 1460823 - DNA, 25 bp, Homo sapien
acaatcaggcaaaagctatcaaagg

SEQ ID NO: 1460824 - DNA, 25 bp, Homo sapien
ttggagcttcgtgtctcctaaataa

SEQ ID NO: 1460825 - DNA, 25 bp, Homo sapien
atagaaaacattttggagcttcgtg

SEQ ID NO: 1460826 - DNA, 25 bp, Homo sapien
cccatttcctatgaaacggattcct

SEQ ID NO: 1460827 - DNA, 25 bp, Homo sapien
gtggagctgggaaatttacaatacc

SEQ ID NO: 1460828 - DNA, 25 bp, Homo sapien
aatacccatttcctatgaaacggat

SEQ ID NO: 1460829 - DNA, 25 bp, Homo sapien
tctgtattgactgggtgagtggagc

SEQ ID NO: 1460830 - DNA, 25 bp, Homo sapien
cagctgatatataggagagggtcca

SEQ ID NO: 1460831 - DNA, 25 bp, Homo sapien
ttcagttcttcaggtggaaaccacc

SEQ ID NO: 1460832 - DNA, 25 bp, Homo sapien
ttcctttaaccagaggtggcctcag

SEQ ID NO: 1460833 - DNA, 25 bp, Homo sapien
catcgtggtcatcagagctggtaga

SEQ ID NO: 1460834 - DNA, 25 bp, Homo sapien
gcttctctgacagcaaagtatcgat

SEQ ID NO: 1460835 - DNA, 25 bp, Homo sapien
tctctgacagcaaagtatcgatttc

SEQ ID NO: 1460836 - DNA, 25 bp, Homo sapien
tgacagcaaagtatcgatttcttca

SEQ ID NO: 1460837 - DNA, 25 bp, Homo sapien
ttgcttctctgacagcaaagtatcg

SEQ ID NO: 1460838 - DNA, 25 bp, Homo sapien
gatcgagtgtgccaacaagcaccga

SEQ ID NO: 1460839 - DNA, 25 bp, Homo sapien
caaagctgggcattcctgaacttct

SEQ ID NO: 1460840 - DNA, 25 bp, Homo sapien
tggttcttataatgcctccagcgat

SEQ ID NO: 1460841 - DNA, 25 bp, Homo sapien
tttgttttgccccagcctgaaggat

SEQ ID NO: 1460842 - DNA, 25 bp, Homo sapien
taaaggagatagagtcctcctctgc

SEQ ID NO: 1460843 - DNA, 25 bp, Homo sapien
tggccacgtgcttgggatccctatg

SEQ ID NO: 1460844 - DNA, 25 bp, Homo sapien
tacatgttttgcaaccctgagagga

SEQ ID NO: 1460845 - DNA, 25 bp, Homo sapien
gattccagttttgcatggccacgtg

SEQ ID NO: 1460846 - DNA, 25 bp, Homo sapien
ggttggtagttaagccctggagtca

SEQ ID NO: 1460847 - DNA, 25 bp, Homo sapien
tgagggaagaggtatcctaacgtcc

SEQ ID NO: 1460848 - DNA, 25 bp, Homo sapien
tcaggacactgctaggacacaggtt

SEQ ID NO: 1460849 - DNA, 25 bp, Homo sapien
ccatggatcaggagtgagtagagcc

SEQ ID NO: 1460850 - DNA, 25 bp, Homo sapien
taactcgtagctcctaggtacctct

SEQ ID NO: 1460851 - DNA, 25 bp, Homo sapien
tatgacacagctgtaactcgtagct

SEQ ID NO: 1460852 - DNA, 25 bp, Homo sapien
acagctgtaactcgtagctcctagg

SEQ ID NO: 1460853 - DNA, 25 bp, Homo sapien
gctgtaactcgtagctcctaggtac

SEQ ID NO: 1460854 - DNA, 25 bp, Homo sapien
agtctcaagtagagaaggtgttgaa

SEQ ID NO: 1460855 - DNA, 25 bp, Homo sapien
tagagaaggtgttgaatattataag

SEQ ID NO: 1460856 - DNA, 25 bp, Homo sapien
ctgttgaggtaagaagcaatcagag

SEQ ID NO: 1460857 - DNA, 25 bp, Homo sapien
tgttgaggtaagaagcaatcagagt

SEQ ID NO: 1460858 - DNA, 25 bp, Homo sapien
ctcccgaagcactggtcacacaacc

SEQ ID NO: 1460859 - DNA, 25 bp, Homo sapien
gctcccgaagcactggtcacacaac

SEQ ID NO: 1460860 - DNA, 25 bp, Homo sapien
tcccgaagcactggtcacacaacca

SEQ ID NO: 1460861 - DNA, 25 bp, Homo sapien
cccgaagcactggtcacacaaccaa

SEQ ID NO: 1460862 - DNA, 25 bp, Homo sapien
tgaattgcagagagtaatagtaaac

SEQ ID NO: 1460863 - DNA, 25 bp, Homo sapien
ttgcagagagtaatagtaaactcat

SEQ ID NO: 1460864 - DNA, 25 bp, Homo sapien
ctgaattgcagagagtaatagtaaa

SEQ ID NO: 1460865 - DNA, 25 bp, Homo sapien
aattgcagagagtaatagtaaactc

SEQ ID NO: 1460866 - DNA, 25 bp, Homo sapien
tcttgggatttagcagtgtgcaaca

SEQ ID NO: 1460867 - DNA, 25 bp, Homo sapien
taagatagttcttgggatttagcag

SEQ ID NO: 1460868 - DNA, 25 bp, Homo sapien
agttcttgggatttagcagtgtgca

SEQ ID NO: 1460869 - DNA, 25 bp, Homo sapien
ctacagtgtaagatagttcttggga

SEQ ID NO: 1460870 - DNA, 25 bp, Homo sapien
caagttattgcctcataaagcagca

SEQ ID NO: 1460871 - DNA, 25 bp, Homo sapien
tgtacaatcacactgttttatgagg

SEQ ID NO: 1460872 - DNA, 25 bp, Homo sapien
gtaacccagagcagtaatacccaag

SEQ ID NO: 1460873 - DNA, 25 bp, Homo sapien
cagcatggtggtatggttattgtca

SEQ ID NO: 1460874 - DNA, 25 bp, Homo sapien
gactgttgaggtgattgttcagaaa

SEQ ID NO: 1460875 - DNA, 25 bp, Homo sapien
tgtgaaaacgccatgggaatagact

SEQ ID NO: 1460876 - DNA, 25 bp, Homo sapien
tggcttctcccaggagatattgaga

SEQ ID NO: 1460877 - DNA, 25 bp, Homo sapien
tgttcagaaagcatattgatgtcat

SEQ ID NO: 1460878 - DNA, 25 bp, Homo sapien
gaaggagggatcatgaatacaggtg

SEQ ID NO: 1460879 - DNA, 25 bp, Homo sapien
tgaaggagggatcatgaatacaggt

SEQ ID NO: 1460880 - DNA, 25 bp, Homo sapien
ctgaaggagggatcatgaatacagg

SEQ ID NO: 1460881 - DNA, 25 bp, Homo sapien
agaagacacacttccagccatattc

SEQ ID NO: 1460882 - DNA, 25 bp, Homo sapien
gaagacacacttccagccatattca

SEQ ID NO: 1460883 - DNA, 25 bp, Homo sapien
tccagccatattcacagctaagact

SEQ ID NO: 1460884 - DNA, 25 bp, Homo sapien
tacttggtgtatggctccaagccag

SEQ ID NO: 1460885 - DNA, 25 bp, Homo sapien
tccaagccagtgatggttgtcattg

SEQ ID NO: 1460886 - DNA, 25 bp, Homo sapien
ggctccaagccagtgatggttgtca

SEQ ID NO: 1460887 - DNA, 25 bp, Homo sapien
actcatacttggtgtatggctccaa

SEQ ID NO: 1460888 - DNA, 25 bp, Homo sapien
ggtttctttagtagatctcagtctt

SEQ ID NO: 1460889 - DNA, 25 bp, Homo sapien
cagtcttctcatgtatagttcatat

SEQ ID NO: 1460890 - DNA, 25 bp, Homo sapien
aaactcgactttcctcagatgtggt

SEQ ID NO: 1460891 - DNA, 25 bp, Homo sapien
aatgaggactgagccaaccactgct

SEQ ID NO: 1460892 - DNA, 25 bp, Homo sapien
gaaccagattccagatggtagctga

SEQ ID NO: 1460893 - DNA, 25 bp, Homo sapien
tgaccttcgtaggaaacacatggct

SEQ ID NO: 1460894 - DNA, 25 bp, Homo sapien
cacagagtctgagccaataggaatg

SEQ ID NO: 1460895 - DNA, 25 bp, Homo sapien
taatgggcaagctgtgtaaacagcc

SEQ ID NO: 1460896 - DNA, 25 bp, Homo sapien
gcatcatgaagttcagagtttccat

SEQ ID NO: 1460897 - DNA, 25 bp, Homo sapien
acattctagtagcaggttttcagga

SEQ ID NO: 1460898 - DNA, 25 bp, Homo sapien
gccaacatggcagatgtagacagat

SEQ ID NO: 1460899 - DNA, 25 bp, Homo sapien
catgaagttcagagtttccattaac

SEQ ID NO: 1460900 - DNA, 25 bp, Homo sapien
gcatttggagaatcaggtggactcc

SEQ ID NO: 1460901 - DNA, 25 bp, Homo sapien
tgtgtagatttcaaaaccatccctg

SEQ ID NO: 1460902 - DNA, 25 bp, Homo sapien
aaactgtaagtaagccagtgggcat

SEQ ID NO: 1460903 - DNA, 25 bp, Homo sapien
gactccaggagagattgatagcaga

SEQ ID NO: 1460904 - DNA, 25 bp, Homo sapien
tcaggcacataagaaataagaacat

SEQ ID NO: 1460905 - DNA, 25 bp, Homo sapien
ggcacataagaaataagaacattca

SEQ ID NO: 1460906 - DNA, 25 bp, Homo sapien
atacaattgcttatcaggcacataa

SEQ ID NO: 1460907 - DNA, 25 bp, Homo sapien
ctgttagaggtgtttttaagatgta

SEQ ID NO: 1460908 - DNA, 25 bp, Homo sapien
ggcttgcactgggaacacaagcatc

SEQ ID NO: 1460909 - DNA, 25 bp, Homo sapien
aagcatcacactttgagccagtgac

SEQ ID NO: 1460910 - DNA, 25 bp, Homo sapien
tttgctgcaacccaatagattgttg

SEQ ID NO: 1460911 - DNA, 25 bp, Homo sapien
ttgacatccaagtggcttgcactgg

SEQ ID NO: 1460912 - DNA, 25 bp, Homo sapien
gagatgacaattacaaggctgacat

SEQ ID NO: 1460913 - DNA, 25 bp, Homo sapien
gagagatgacaattacaaggctgac

SEQ ID NO: 1460914 - DNA, 25 bp, Homo sapien
tgagagatgacaattacaaggctga

SEQ ID NO: 1460915 - DNA, 25 bp, Homo sapien
ctgagagatgacaattacaaggctg

SEQ ID NO: 1460916 - DNA, 25 bp, Homo sapien
gctgaacggatggagttacttttcc

SEQ ID NO: 1460917 - DNA, 25 bp, Homo sapien
ataaagatgctgaacggatggagtt

SEQ ID NO: 1460918 - DNA, 25 bp, Homo sapien
aaagatgctgaacggatggagttac

SEQ ID NO: 1460919 - DNA, 25 bp, Homo sapien
gatgctgaacggatggagttacttt

SEQ ID NO: 1460920 - DNA, 25 bp, Homo sapien
gccagagcttctcccgcaatctgtt

SEQ ID NO: 1460921 - DNA, 25 bp, Homo sapien
ccagagcttctcccgcaatctgttt

SEQ ID NO: 1460922 - DNA, 25 bp, Homo sapien
agccagagcttctcccgcaatctgt

SEQ ID NO: 1460923 - DNA, 25 bp, Homo sapien
cagccagagcttctcccgcaatctg

SEQ ID NO: 1460924 - DNA, 25 bp, Homo sapien
caggtactcaaaagggtcataatta

SEQ ID NO: 1460925 - DNA, 25 bp, Homo sapien
tcagcataggcacatgatctttccc

SEQ ID NO: 1460926 - DNA, 25 bp, Homo sapien
cccacagtacagcagaagggagccc

SEQ ID NO: 1460927 - DNA, 25 bp, Homo sapien
tagggtgatcgtctctggagctgac

SEQ ID NO: 1460928 - DNA, 25 bp, Homo sapien
acaacgttgcccagcaatggaagca

SEQ ID NO: 1460929 - DNA, 25 bp, Homo sapien
gaccagtcaggctattacagatgtg

SEQ ID NO: 1460930 - DNA, 25 bp, Homo sapien
gcaatggaagcatcttggcaaacac

SEQ ID NO: 1460931 - DNA, 25 bp, Homo sapien
ccagttgtatggcatgagcatggca

SEQ ID NO: 1460932 - DNA, 25 bp, Homo sapien
ccttctctggcaagcaaatcacact

SEQ ID NO: 1460933 - DNA, 25 bp, Homo sapien
tataactcagagctaatattggctg

SEQ ID NO: 1460934 - DNA, 25 bp, Homo sapien
gctgacaggacaacaattagcacag

SEQ ID NO: 1460935 - DNA, 25 bp, Homo sapien
tttatagacccatataactcagagc

SEQ ID NO: 1460936 - DNA, 25 bp, Homo sapien
tccttgacgattaggcacacacagg

SEQ ID NO: 1460937 - DNA, 25 bp, Homo sapien
gaagacctgttacccctaatttgca

SEQ ID NO: 1460938 - DNA, 25 bp, Homo sapien
tggtcccaggtaatgtccccaagga

SEQ ID NO: 1460939 - DNA, 25 bp, Homo sapien
tcaacattgggcttgcagatgcact

SEQ ID NO: 1460940 - DNA, 25 bp, Homo sapien
tggaggttacactggcagggctcac

SEQ ID NO: 1460941 - DNA, 25 bp, Homo sapien
agaatttgttcactgagccatggag

SEQ ID NO: 1460942 - DNA, 25 bp, Homo sapien
catggaggttacactggcagggctc

SEQ ID NO: 1460943 - DNA, 25 bp, Homo sapien
cccagagtgaggattgcagaatttg

SEQ ID NO: 1460944 - DNA, 25 bp, Homo sapien
ccaacatcattaaagcttcggagaa

SEQ ID NO: 1460945 - DNA, 25 bp, Homo sapien
atccaacatcattaaagcttcggag

SEQ ID NO: 1460946 - DNA, 25 bp, Homo sapien
catcattaaagcttcggagaaattt

SEQ ID NO: 1460947 - DNA, 25 bp, Homo sapien
caacatcattaaagcttcggagaaa

SEQ ID NO: 1460948 - DNA, 25 bp, Homo sapien
ctgtcccagaggtattgcagttaca

SEQ ID NO: 1460949 - DNA, 25 bp, Homo sapien
caactcttgtagattgtagaatcca

SEQ ID NO: 1460950 - DNA, 25 bp, Homo sapien
aattttggtgacaggtaatatctcc

SEQ ID NO: 1460951 - DNA, 25 bp, Homo sapien
tcaggatccaactcttgtagattgt

SEQ ID NO: 1460952 - DNA, 25 bp, Homo sapien
tgcactgcctgccagacacgtgtct

SEQ ID NO: 1460953 - DNA, 25 bp, Homo sapien
tcttacaattacactgtcctccaat

SEQ ID NO: 1460954 - DNA, 25 bp, Homo sapien
cagacacgtgtctcttacaattaca

SEQ ID NO: 1460955 - DNA, 25 bp, Homo sapien
gcctgccagacacgtgtctcttaca

SEQ ID NO: 1460956 - DNA, 25 bp, Homo sapien
gaaaatccaataggcgtgtgggtac

SEQ ID NO: 1460957 - DNA, 25 bp, Homo sapien
aatccaataggcgtgtgggtacata

SEQ ID NO: 1460958 - DNA, 25 bp, Homo sapien
catgaaaatccaataggcgtgtggg

SEQ ID NO: 1460959 - DNA, 25 bp, Homo sapien
atccaataggcgtgtgggtacatac

SEQ ID NO: 1460960 - DNA, 25 bp, Homo sapien
ccttaaggcattggacatatgtgat

SEQ ID NO: 1460961 - DNA, 25 bp, Homo sapien
catcaacccataactcaggcctgag

SEQ ID NO: 1460962 - DNA, 25 bp, Homo sapien
tgctggtactttacaggatcagtcc

SEQ ID NO: 1460963 - DNA, 25 bp, Homo sapien
ttctccaaagagatagtaaacacct

SEQ ID NO: 1460964 - DNA, 25 bp, Homo sapien
ttcctgttaagcagccaaaattgga

SEQ ID NO: 1460965 - DNA, 25 bp, Homo sapien
tgttcctgttaagcagccaaaattg

SEQ ID NO: 1460966 - DNA, 25 bp, Homo sapien
aactgttcctgttaagcagccaaaa

SEQ ID NO: 1460967 - DNA, 25 bp, Homo sapien
tcaactgttcctgttaagcagccaa

SEQ ID NO: 1460968 - DNA, 25 bp, Homo sapien
cttgattcttggagtgtccttgcct

SEQ ID NO: 1460969 - DNA, 25 bp, Homo sapien
gcagaagctgagacaacgtccagtc

SEQ ID NO: 1460970 - DNA, 25 bp, Homo sapien
caggagaataatagaaagcctcatc

SEQ ID NO: 1460971 - DNA, 25 bp, Homo sapien
agaagctgagacaacgtccagtcca

SEQ ID NO: 1460972 - DNA, 25 bp, Homo sapien
gaggtggctatagcagggactctgg

SEQ ID NO: 1460973 - DNA, 25 bp, Homo sapien
acctgtggaggtggctatagcaggg

SEQ ID NO: 1460974 - DNA, 25 bp, Homo sapien
tggaggtggctatagcagggactct

SEQ ID NO: 1460975 - DNA, 25 bp, Homo sapien
ggtggctatagcagggactctgggg

SEQ ID NO: 1460976 - DNA, 25 bp, Homo sapien
taatccttgcacagctcacagttcc

SEQ ID NO: 1460977 - DNA, 25 bp, Homo sapien
agaatgctaccatttctagtgccaa

SEQ ID NO: 1460978 - DNA, 25 bp, Homo sapien
tatggccgaaggatctgcaccaact

SEQ ID NO: 1460979 - DNA, 25 bp, Homo sapien
tgcaccaacttgtcggaaaaagtaa

SEQ ID NO: 1460980 - DNA, 25 bp, Homo sapien
ttgacaaggtttacaattgaaagcg

SEQ ID NO: 1460981 - DNA, 25 bp, Homo sapien
tgtcattataaagaggcaagcagcg

SEQ ID NO: 1460982 - DNA, 25 bp, Homo sapien
ctacagagatgttgtaatggcagct

SEQ ID NO: 1460983 - DNA, 25 bp, Homo sapien
gcgtaaacttgatcaccttggcgga

SEQ ID NO: 1460984 - DNA, 25 bp, Homo sapien
tcaactccctcttgaataccattaa

SEQ ID NO: 1460985 - DNA, 25 bp, Homo sapien
tttagaccattgacactcaaagtag

SEQ ID NO: 1460986 - DNA, 25 bp, Homo sapien
gaataagatttctaatccttcctct

SEQ ID NO: 1460987 - DNA, 25 bp, Homo sapien
caaagtagttactggcatagttgga

SEQ ID NO: 1460988 - DNA, 25 bp, Homo sapien
tcggagttcctggtcaaagagtgca

SEQ ID NO: 1460989 - DNA, 25 bp, Homo sapien
aaagtcaaggccttaaaattgccag

SEQ ID NO: 1460990 - DNA, 25 bp, Homo sapien
catgggacaaattggtagagtacac

SEQ ID NO: 1460991 - DNA, 25 bp, Homo sapien
gaatcagtgaggctccccaaggtaa

SEQ ID NO: 1460992 - DNA, 25 bp, Homo sapien
ttatcggcatgaccatggcactgac

SEQ ID NO: 1460993 - DNA, 25 bp, Homo sapien
tatatggctggcttgttgtgtcgca

SEQ ID NO: 1460994 - DNA, 25 bp, Homo sapien
cttgttgtgtcgcagttatcggcat

SEQ ID NO: 1460995 - DNA, 25 bp, Homo sapien
agcagaggcatctatatggctggct

SEQ ID NO: 1460996 - DNA, 25 bp, Homo sapien
tgtgtctgaggttaacagcagtctc

SEQ ID NO: 1460997 - DNA, 25 bp, Homo sapien
gaaaatgaaaccttatttgcgtggc

SEQ ID NO: 1460998 - DNA, 25 bp, Homo sapien
gcgtggcttttacgaactcttgaag

SEQ ID NO: 1460999 - DNA, 25 bp, Homo sapien
gacgataatttggtccaggtgtcag

SEQ ID NO: 1461000 - DNA, 25 bp, Homo sapien
ccgttggttgtggactaaagaactg

SEQ ID NO: 1461001 - DNA, 25 bp, Homo sapien
tggcaaaatattgccagtcctccca

SEQ ID NO: 1461002 - DNA, 25 bp, Homo sapien
gctgaagacagttgacagaatcagg

SEQ ID NO: 1461003 - DNA, 25 bp, Homo sapien
gccagtcctcccaatctaaactatt

SEQ ID NO: 1461004 - DNA, 25 bp, Homo sapien
taaggtcctacatgttgtcttttag

SEQ ID NO: 1461005 - DNA, 25 bp, Homo sapien
caaacataaggtcctacatgttgtc

SEQ ID NO: 1461006 - DNA, 25 bp, Homo sapien
ttgatacaaatctcaaacataaggt

SEQ ID NO: 1461007 - DNA, 25 bp, Homo sapien
aatctcaaacataaggtcctacatg

SEQ ID NO: 1461008 - DNA, 25 bp, Homo sapien
accaggagctgcaaatggcaaggag

SEQ ID NO: 1461009 - DNA, 25 bp, Homo sapien
catcctgggtctaatagggtgggcc

SEQ ID NO: 1461010 - DNA, 25 bp, Homo sapien
gaaaagggataattgatgctcacag

SEQ ID NO: 1461011 - DNA, 25 bp, Homo sapien
tactgtccaaacctgtaaatgtgac

SEQ ID NO: 1461012 - DNA, 25 bp, Homo sapien
tcaaccgtgacactctattatcagc

SEQ ID NO: 1461013 - DNA, 25 bp, Homo sapien
catcattaggaatgcagtaccgctg

SEQ ID NO: 1461014 - DNA, 25 bp, Homo sapien
tagtcactccttgattaagctgtgt

SEQ ID NO: 1461015 - DNA, 25 bp, Homo sapien
cccatgaagtaccaacatcattatc

SEQ ID NO: 1461016 - DNA, 25 bp, Homo sapien
ctgccagggcaacggcaatgtgatt

SEQ ID NO: 1461017 - DNA, 25 bp, Homo sapien
tgagaagatctccagagaagacttc

SEQ ID NO: 1461018 - DNA, 25 bp, Homo sapien
caacggcaatgtgattgggcatgca

SEQ ID NO: 1461019 - DNA, 25 bp, Homo sapien
gggcatgcaatctgagaagatctcc

SEQ ID NO: 1461020 - DNA, 25 bp, Homo sapien
cattcttccgacaaactgctctaaa

SEQ ID NO: 1461021 - DNA, 25 bp, Homo sapien
tcttgcattcttccgacaaactgct

SEQ ID NO: 1461022 - DNA, 25 bp, Homo sapien
tgtaagtgccacttggtataatcga

SEQ ID NO: 1461023 - DNA, 25 bp, Homo sapien
cttggtataatcgaaaatcttgcat

SEQ ID NO: 1461024 - DNA, 25 bp, Homo sapien
gtgatgttgctaaagcctgaaccat

SEQ ID NO: 1461025 - DNA, 25 bp, Homo sapien
acgtcgatgcctgaattctaccaaa

SEQ ID NO: 1461026 - DNA, 25 bp, Homo sapien
gaggaggtaattaaaacgtcgatgc

SEQ ID NO: 1461027 - DNA, 25 bp, Homo sapien
tctttggggccaagtaatatgcacc

SEQ ID NO: 1461028 - DNA, 25 bp, Homo sapien
ttttgttcagagtcagtgaccagcc

SEQ ID NO: 1461029 - DNA, 25 bp, Homo sapien
gaaaggtgtatgatccttctccacg

SEQ ID NO: 1461030 - DNA, 25 bp, Homo sapien
tctccacgccattgataaagaagct

SEQ ID NO: 1461031 - DNA, 25 bp, Homo sapien
gatgcaaaatctgtaattgaaccac

SEQ ID NO: 1461032 - DNA, 25 bp, Homo sapien
cacttagagttcttgcattgaaagg

SEQ ID NO: 1461033 - DNA, 25 bp, Homo sapien
cataagattaaatcttccttggttt

SEQ ID NO: 1461034 - DNA, 25 bp, Homo sapien
gcttagtagaagaattcagtgtcac

SEQ ID NO: 1461035 - DNA, 25 bp, Homo sapien
atcacatatttgcttagtagaagaa

SEQ ID NO: 1461036 - DNA, 25 bp, Homo sapien
tatttgcttagtagaagaattcagt

SEQ ID NO: 1461037 - DNA, 25 bp, Homo sapien
atttacatcttgcttctgaactgtc

SEQ ID NO: 1461038 - DNA, 25 bp, Homo sapien
cttctgaactgtcagtacatttact

SEQ ID NO: 1461039 - DNA, 25 bp, Homo sapien
ttacatcttgcttctgaactgtcag

SEQ ID NO: 1461040 - DNA, 25 bp, Homo sapien
tctgaactgtcagtacatttactag

SEQ ID NO: 1461041 - DNA, 25 bp, Homo sapien
tgacgtcccctttgtgtatcatttc

SEQ ID NO: 1461042 - DNA, 25 bp, Homo sapien
tcaaccctagttgtgtatgaaaact

SEQ ID NO: 1461043 - DNA, 25 bp, Homo sapien
ttgacgtcagacatgacgtcccctt

SEQ ID NO: 1461044 - DNA, 25 bp, Homo sapien
gacccctgccaatcacatttgctaa

SEQ ID NO: 1461045 - DNA, 25 bp, Homo sapien
ttgaacacaatctgcccatctactg

SEQ ID NO: 1461046 - DNA, 25 bp, Homo sapien
gtcattacttttattggaggttgca

SEQ ID NO: 1461047 - DNA, 25 bp, Homo sapien
ttactgtgcgataataaaacatggt

SEQ ID NO: 1461048 - DNA, 25 bp, Homo sapien
tattgtaagtttgaacacaatctgc

SEQ ID NO: 1461049 - DNA, 25 bp, Homo sapien
gaccgtacagtccaactgaggtact

SEQ ID NO: 1461050 - DNA, 25 bp, Homo sapien
tctccatgaccgtacagtccaactg

SEQ ID NO: 1461051 - DNA, 25 bp, Homo sapien
actgaggtactgagatcatgttaaa

SEQ ID NO: 1461052 - DNA, 25 bp, Homo sapien
taaatatctgaggtgaaaggtcctt

SEQ ID NO: 1461053 - DNA, 25 bp, Homo sapien
gaagatctgtatgggcaatcctgaa

SEQ ID NO: 1461054 - DNA, 25 bp, Homo sapien
caaaaagtgcttcggtctgggagtc

SEQ ID NO: 1461055 - DNA, 25 bp, Homo sapien
tacaaaaccgctgggtacagaactg

SEQ ID NO: 1461056 - DNA, 25 bp, Homo sapien
ccttgggaaaagacctcgtgactca

SEQ ID NO: 1461057 - DNA, 25 bp, Homo sapien
aagccagagcccaatgaaagaactg

SEQ ID NO: 1461058 - DNA, 25 bp, Homo sapien
gaagccagagcccaatgaaagaact

SEQ ID NO: 1461059 - DNA, 25 bp, Homo sapien
agaagccagagcccaatgaaagaac

SEQ ID NO: 1461060 - DNA, 25 bp, Homo sapien
agccagagcccaatgaaagaactgg

SEQ ID NO: 1461061 - DNA, 25 bp, Homo sapien
tagcaatggcgaagacatgagtagc

SEQ ID NO: 1461062 - DNA, 25 bp, Homo sapien
taccaacgacgttcttagcaatggc

SEQ ID NO: 1461063 - DNA, 25 bp, Homo sapien
gatgttgcgatactccattttctgg

SEQ ID NO: 1461064 - DNA, 25 bp, Homo sapien
cacgttctcagagtaaggtaatacc

SEQ ID NO: 1461065 - DNA, 25 bp, Homo sapien
aggaccgctgtccctcgttgcctgg

SEQ ID NO: 1461066 - DNA, 25 bp, Homo sapien
gcaacgctgctgtaacccctggtta

SEQ ID NO: 1461067 - DNA, 25 bp, Homo sapien
aaatggctcttcaacaggaccgctg

SEQ ID NO: 1461068 - DNA, 25 bp, Homo sapien
ggttactcagcaaataggctgtagc

SEQ ID NO: 1461069 - DNA, 25 bp, Homo sapien
cttgggtgcccaggtaaagtattct

SEQ ID NO: 1461070 - DNA, 25 bp, Homo sapien
ggtgcccaggtaaagtattctgcag

SEQ ID NO: 1461071 - DNA, 25 bp, Homo sapien
agacttgggtgcccaggtaaagtat

SEQ ID NO: 1461072 - DNA, 25 bp, Homo sapien
tgggtgcccaggtaaagtattctgc

SEQ ID NO: 1461073 - DNA, 25 bp, Homo sapien
tggtggccctcttggaactgagctg

SEQ ID NO: 1461074 - DNA, 25 bp, Homo sapien
gtggccctcttggaactgagctgcc

SEQ ID NO: 1461075 - DNA, 25 bp, Homo sapien
gctttccgctggtacctcaagcagt

SEQ ID NO: 1461076 - DNA, 25 bp, Homo sapien
ccgctggtacctcaagcagtgggag

SEQ ID NO: 1461077 - DNA, 25 bp, Homo sapien
tttcacccaggataacctctccata

SEQ ID NO: 1461078 - DNA, 25 bp, Homo sapien
cccaggataacctctccataataca

SEQ ID NO: 1461079 - DNA, 25 bp, Homo sapien
ccaggataacctctccataatacat

SEQ ID NO: 1461080 - DNA, 25 bp, Homo sapien
tcacccaggataacctctccataat

SEQ ID NO: 1461081 - DNA, 25 bp, Homo sapien
gggatcactgggcaaaaccatcgtc

SEQ ID NO: 1461082 - DNA, 25 bp, Homo sapien
cagcagcacctagagctaggtacct

SEQ ID NO: 1461083 - DNA, 25 bp, Homo sapien
ccccgcacagtccatttctctgttt

SEQ ID NO: 1461084 - DNA, 25 bp, Homo sapien
agagctaggtacctagttacactgg

SEQ ID NO: 1461085 - DNA, 25 bp, Homo sapien
ggtactacggtacccattgctgatg

SEQ ID NO: 1461086 - DNA, 25 bp, Homo sapien
gatgcttgtagactgaaggtgttcc

SEQ ID NO: 1461087 - DNA, 25 bp, Homo sapien
cacacggtaatgatttgggacttct

SEQ ID NO: 1461088 - DNA, 25 bp, Homo sapien
tctaatcagtgaaaaggtactacgg

SEQ ID NO: 1461089 - DNA, 25 bp, Homo sapien
catcgctgttactgggagttgaaag

SEQ ID NO: 1461090 - DNA, 25 bp, Homo sapien
ggcaaagcatcgctgttactgggag

SEQ ID NO: 1461091 - DNA, 25 bp, Homo sapien
ctgttactgggagttgaaagaacca

SEQ ID NO: 1461092 - DNA, 25 bp, Homo sapien
aagcatcgctgttactgggagttga

SEQ ID NO: 1461093 - DNA, 25 bp, Homo sapien
ctctgcaatcatcctgataaaactg

SEQ ID NO: 1461094 - DNA, 25 bp, Homo sapien
gtctggaccccagagagagataagt

SEQ ID NO: 1461095 - DNA, 25 bp, Homo sapien
tcatcctgataaaactgtcttctga

SEQ ID NO: 1461096 - DNA, 25 bp, Homo sapien
tcagcagtctggaccccagagagag

SEQ ID NO: 1461097 - DNA, 25 bp, Homo sapien
cacaagtgtaactacaaggagtcac

SEQ ID NO: 1461098 - DNA, 25 bp, Homo sapien
tttcctaggcaggtaaacagagacg

SEQ ID NO: 1461099 - DNA, 25 bp, Homo sapien
tacgatctttgcacataagactgcc

SEQ ID NO: 1461100 - DNA, 25 bp, Homo sapien
ggagcacacagtatggtacacatca

SEQ ID NO: 1461101 - DNA, 25 bp, Homo sapien
catttaccctaaagcccgtgcagtt

SEQ ID NO: 1461102 - DNA, 25 bp, Homo sapien
tagttttggaaacgaatctgcacca

SEQ ID NO: 1461103 - DNA, 25 bp, Homo sapien
tgcttgaaacttgagaagacttccc

SEQ ID NO: 1461104 - DNA, 25 bp, Homo sapien
gttttgcaacaacacagagcgagtt

SEQ ID NO: 1461105 - DNA, 25 bp, Homo sapien
catcaggaacctatggaggaatctg

SEQ ID NO: 1461106 - DNA, 25 bp, Homo sapien
gttgtctaattagaggctgctccca

SEQ ID NO: 1461107 - DNA, 25 bp, Homo sapien
cagggagcagctactaacactggtc

SEQ ID NO: 1461108 - DNA, 25 bp, Homo sapien
ggtgcactcctgacaattctacgga

SEQ ID NO: 1461109 - DNA, 25 bp, Homo sapien
tcaggagtggcagtgtcatcagcat

SEQ ID NO: 1461110 - DNA, 25 bp, Homo sapien
ccagctcgacgagggtcttccatgt

SEQ ID NO: 1461111 - DNA, 25 bp, Homo sapien
tgttgtagaaatgctgcacggcctt

SEQ ID NO: 1461112 - DNA, 25 bp, Homo sapien
cacggccttggtagaggtctgcctc

SEQ ID NO: 1461113 - DNA, 25 bp, Homo sapien
gctccagctctaaagcagacactta

SEQ ID NO: 1461114 - DNA, 25 bp, Homo sapien
agataaccagtagcatgtcttaaaa

SEQ ID NO: 1461115 - DNA, 25 bp, Homo sapien
cattaggtagtttaatgacacctct

SEQ ID NO: 1461116 - DNA, 25 bp, Homo sapien
catatcactggtgaactgaccacta

SEQ ID NO: 1461117 - DNA, 25 bp, Homo sapien
tccccaagccctagaagacacgtgg

SEQ ID NO: 1461118 - DNA, 25 bp, Homo sapien
gtcagacacaggtttaaattcagga

SEQ ID NO: 1461119 - DNA, 25 bp, Homo sapien
cacgtggcactggtaatatgtgtca

SEQ ID NO: 1461120 - DNA, 25 bp, Homo sapien
taatgctgctagaatgtagaacact

SEQ ID NO: 1461121 - DNA, 25 bp, Homo sapien
caggccatttaagggatattagaca

SEQ ID NO: 1461122 - DNA, 25 bp, Homo sapien
taagcgatgtattctcaaaggaggt

SEQ ID NO: 1461123 - DNA, 25 bp, Homo sapien
aatggattggactcacctggcttca

SEQ ID NO: 1461124 - DNA, 25 bp, Homo sapien
tgtccttaagaacaacagaatgctg

SEQ ID NO: 1461125 - DNA, 25 bp, Homo sapien
ggcaatttgggcagaaggtctcatc

SEQ ID NO: 1461126 - DNA, 25 bp, Homo sapien
caaagtcgtcatccacaagtaagca

SEQ ID NO: 1461127 - DNA, 25 bp, Homo sapien
ggaccgcgccaaatcacaaagtcgt

SEQ ID NO: 1461128 - DNA, 25 bp, Homo sapien
tgatcgtcacatatggccccagaaa

SEQ ID NO: 1461129 - DNA, 25 bp, Homo sapien
atttgaacaaatagccgtccgccca

SEQ ID NO: 1461130 - DNA, 25 bp, Homo sapien
gtccgcccattcaagccactcattg

SEQ ID NO: 1461131 - DNA, 25 bp, Homo sapien
ttcaagccactcattgcatcccatt

SEQ ID NO: 1461132 - DNA, 25 bp, Homo sapien
acaaatagccgtccgcccattcaag

SEQ ID NO: 1461133 - DNA, 25 bp, Homo sapien
aagatagggtcaaaacaaaagcaga

SEQ ID NO: 1461134 - DNA, 25 bp, Homo sapien
gataaagttcaaagatagggtcaaa

SEQ ID NO: 1461135 - DNA, 25 bp, Homo sapien
ggccggcaaccaagataaagttcaa

SEQ ID NO: 1461136 - DNA, 25 bp, Homo sapien
ctggccggcaaccaagataaagttc

SEQ ID NO: 1461137 - DNA, 25 bp, Homo sapien
caagaaggcctgctaatttggactg

SEQ ID NO: 1461138 - DNA, 25 bp, Homo sapien
tcatcctcaaacgaaagagaccggt

SEQ ID NO: 1461139 - DNA, 25 bp, Homo sapien
gagaccggtatacgacaccaaggat

SEQ ID NO: 1461140 - DNA, 25 bp, Homo sapien
aaggctcatctggtccgccagggac

SEQ ID NO: 1461141 - DNA, 25 bp, Homo sapien
tgacctcaagtttacttcttttgtc

SEQ ID NO: 1461142 - DNA, 25 bp, Homo sapien
ttgtcagaagtacttgcaacactac

SEQ ID NO: 1461143 - DNA, 25 bp, Homo sapien
tgtcagaagtacttgcaacactaca

SEQ ID NO: 1461144 - DNA, 25 bp, Homo sapien
gtcattgcagcaccaagggagtaag

SEQ ID NO: 1461145 - DNA, 25 bp, Homo sapien
cagcaccaagggagtaagggccctt

SEQ ID NO: 1461146 - DNA, 25 bp, Homo sapien
taaagtgaccgctaaacagagctgc

SEQ ID NO: 1461147 - DNA, 25 bp, Homo sapien
caagccgctgcttggtatcccagag

SEQ ID NO: 1461148 - DNA, 25 bp, Homo sapien
tatcccagagctgcactaaagtgac

SEQ ID NO: 1461149 - DNA, 25 bp, Homo sapien
cagatggagggatattaaatgccgc

SEQ ID NO: 1461150 - DNA, 25 bp, Homo sapien
tattgccgacgcagcaaggggtagt

SEQ ID NO: 1461151 - DNA, 25 bp, Homo sapien
gccgacgcagcaaggggtagtggaa

SEQ ID NO: 1461152 - DNA, 25 bp, Homo sapien
gcagcaaggggtagtggaatgacat

SEQ ID NO: 1461153 - DNA, 25 bp, Homo sapien
acgcagcaaggggtagtggaatgac

SEQ ID NO: 1461154 - DNA, 25 bp, Homo sapien
caatggcttttaggcactaggctcc

SEQ ID NO: 1461155 - DNA, 25 bp, Homo sapien
tccaggcgaggcagctataatagct

SEQ ID NO: 1461156 - DNA, 25 bp, Homo sapien
tatcaaggctgatggctcgtaattc

SEQ ID NO: 1461157 - DNA, 25 bp, Homo sapien
tacagacagatctatcaggcccaaa

SEQ ID NO: 1461158 - DNA, 25 bp, Homo sapien
cgtttcacgaatgcgaccagatagc

SEQ ID NO: 1461159 - DNA, 25 bp, Homo sapien
catctaggaggttcgtttgacaacc

SEQ ID NO: 1461160 - DNA, 25 bp, Homo sapien
gagctgatgccctcggtccttttga

SEQ ID NO: 1461161 - DNA, 25 bp, Homo sapien
gcaatgtggcttatcccaaaggaaa

SEQ ID NO: 1461162 - DNA, 25 bp, Homo sapien
ccaagagcttaagatgagggacata

SEQ ID NO: 1461163 - DNA, 25 bp, Homo sapien
ttcattctggccatacttcgggagc

SEQ ID NO: 1461164 - DNA, 25 bp, Homo sapien
gcatccctgagagtgatcacacaga

SEQ ID NO: 1461165 - DNA, 25 bp, Homo sapien
gagcccaagacgttccctggtaatg

SEQ ID NO: 1461166 - DNA, 25 bp, Homo sapien
tattttttcatgcaggctcccttac

SEQ ID NO: 1461167 - DNA, 25 bp, Homo sapien
ttttaattgctgtccgtggaattcc

SEQ ID NO: 1461168 - DNA, 25 bp, Homo sapien
tgcaggctcccttacttttaattgc

SEQ ID NO: 1461169 - DNA, 25 bp, Homo sapien
tttttggtgcttaatctgcgtttca

SEQ ID NO: 1461170 - DNA, 25 bp, Homo sapien
gataaaatgtactgctcggtcacag

SEQ ID NO: 1461171 - DNA, 25 bp, Homo sapien
tctgtgcagcatttttggaaaccta

SEQ ID NO: 1461172 - DNA, 25 bp, Homo sapien
gaaaatataccctgtctgctctgcc

SEQ ID NO: 1461173 - DNA, 25 bp, Homo sapien
gctatttagcggcagctctggcctc

SEQ ID NO: 1461174 - DNA, 25 bp, Homo sapien
tttttgtacacattagtagcaggag

SEQ ID NO: 1461175 - DNA, 25 bp, Homo sapien
taggttgcacgtagcactgccaatt

SEQ ID NO: 1461176 - DNA, 25 bp, Homo sapien
tagcaggagtacaccaataacgcag

SEQ ID NO: 1461177 - DNA, 25 bp, Homo sapien
tttagccggcaaacattgagatcag

SEQ ID NO: 1461178 - DNA, 25 bp, Homo sapien
tgaatcactactccacagtgaactc

SEQ ID NO: 1461179 - DNA, 25 bp, Homo sapien
cagagctgtgaatcactactccaca

SEQ ID NO: 1461180 - DNA, 25 bp, Homo sapien
aaaatcagagctgtgaatcactact

SEQ ID NO: 1461181 - DNA, 25 bp, Homo sapien
tcaggtatcacgaaaatcagagctg

SEQ ID NO: 1461182 - DNA, 25 bp, Homo sapien
tgggaaagggacttccatcaatttg

SEQ ID NO: 1461183 - DNA, 25 bp, Homo sapien
tggcgtatcatgaccaataaattgg

SEQ ID NO: 1461184 - DNA, 25 bp, Homo sapien
ttagcaacatagctggcgtatcatg

SEQ ID NO: 1461185 - DNA, 25 bp, Homo sapien
gaaattactgtagcattcaaagcat

SEQ ID NO: 1461186 - DNA, 25 bp, Homo sapien
accaccaactctcggtcggccaagt

SEQ ID NO: 1461187 - DNA, 25 bp, Homo sapien
tgcttcgcccatccaatgataacca

SEQ ID NO: 1461188 - DNA, 25 bp, Homo sapien
ctggaatatgcttcgcccatccaat

SEQ ID NO: 1461189 - DNA, 25 bp, Homo sapien
atatgcttcgcccatccaatgataa

SEQ ID NO: 1461190 - DNA, 25 bp, Homo sapien
ggttcagccaccaacaaatgtgaga

SEQ ID NO: 1461191 - DNA, 25 bp, Homo sapien
tccggttcagccaccaacaaatgtg

SEQ ID NO: 1461192 - DNA, 25 bp, Homo sapien
agatcttctccggttcagccaccaa

SEQ ID NO: 1461193 - DNA, 25 bp, Homo sapien
catggcatagatcttctccggttca

SEQ ID NO: 1461194 - DNA, 25 bp, Homo sapien
ttctgccgacctccacgtactctgt

SEQ ID NO: 1461195 - DNA, 25 bp, Homo sapien
atctatcctgcgcttgtacttctgc

SEQ ID NO: 1461196 - DNA, 25 bp, Homo sapien
gctggctgaaccagctgagggttca

SEQ ID NO: 1461197 - DNA, 25 bp, Homo sapien
aggtatgggctgttctccgcatcta

SEQ ID NO: 1461198 - DNA, 25 bp, Homo sapien
tttgttcttgatgataataaagcaa

SEQ ID NO: 1461199 - DNA, 25 bp, Homo sapien
cttggccaaatgcatttccttttgt

SEQ ID NO: 1461200 - DNA, 25 bp, Homo sapien
ttccttttgttcttgatgataataa

SEQ ID NO: 1461201 - DNA, 25 bp, Homo sapien
gataataaagcaaataaagtgccca

SEQ ID NO: 1461202 - DNA, 25 bp, Homo sapien
ctcctaaagaatttcttgctaagct

SEQ ID NO: 1461203 - DNA, 25 bp, Homo sapien
ccctcctaaagaatttcttgctaag

SEQ ID NO: 1461204 - DNA, 25 bp, Homo sapien
tctggtctccactggtagttatagc

SEQ ID NO: 1461205 - DNA, 25 bp, Homo sapien
tggtagttatagcaggtggcaacaa

SEQ ID NO: 1461206 - DNA, 25 bp, Homo sapien
tatattgctattatgtctcttgttc

SEQ ID NO: 1461207 - DNA, 25 bp, Homo sapien
aaattatattgctattatgtctctt

SEQ ID NO: 1461208 - DNA, 25 bp, Homo sapien
attatattgctattatgtctcttgt

SEQ ID NO: 1461209 - DNA, 25 bp, Homo sapien
atattgctattatgtctcttgttcc

SEQ ID NO: 1461210 - DNA, 25 bp, Homo sapien
agaaagagctgcttcggcgttcctc

SEQ ID NO: 1461211 - DNA, 25 bp, Homo sapien
ctccccggttctctgcctggattgg

SEQ ID NO: 1461212 - DNA, 25 bp, Homo sapien
ttgctgaggccctcgcggaggccta

SEQ ID NO: 1461213 - DNA, 25 bp, Homo sapien
cctggattgggctcccgtgggttgc

SEQ ID NO: 1461214 - DNA, 25 bp, Homo sapien
tagctttagcgtgataagaccatct

SEQ ID NO: 1461215 - DNA, 25 bp, Homo sapien
acgctgagctgagaaaaatataggc

SEQ ID NO: 1461216 - DNA, 25 bp, Homo sapien
cattgttggcaggataacgctgagc

SEQ ID NO: 1461217 - DNA, 25 bp, Homo sapien
ccttaataggctaagtccatgcagc

SEQ ID NO: 1461218 - DNA, 25 bp, Homo sapien
cactgagctgatctcactttcctcc

SEQ ID NO: 1461219 - DNA, 25 bp, Homo sapien
tagattctccattagacacaggaga

SEQ ID NO: 1461220 - DNA, 25 bp, Homo sapien
tgatgtagattctccattagacaca

SEQ ID NO: 1461221 - DNA, 25 bp, Homo sapien
ttataggccgccacaaaccactgag

SEQ ID NO: 1461222 - DNA, 25 bp, Homo sapien
tctaagatacactaagccaatatgg

SEQ ID NO: 1461223 - DNA, 25 bp, Homo sapien
gatacactaagccaatatggttccc

SEQ ID NO: 1461224 - DNA, 25 bp, Homo sapien
ttttcctctaagatacactaagcca

SEQ ID NO: 1461225 - DNA, 25 bp, Homo sapien
tcctctaagatacactaagccaata

SEQ ID NO: 1461226 - DNA, 25 bp, Homo sapien
tctccacctcactgatgcaactggt

SEQ ID NO: 1461227 - DNA, 25 bp, Homo sapien
tagagacgagccagtgcagaatagc

SEQ ID NO: 1461228 - DNA, 25 bp, Homo sapien
cagactttacaattctccctagaga

SEQ ID NO: 1461229 - DNA, 25 bp, Homo sapien
gaatagctggacaggcagtgcgtcc

SEQ ID NO: 1461230 - DNA, 25 bp, Homo sapien
gatataagtgccacacagaatcctg

SEQ ID NO: 1461231 - DNA, 25 bp, Homo sapien
tacccgcagctttgaacccaagttg

SEQ ID NO: 1461232 - DNA, 25 bp, Homo sapien
tgtagtacaggcacaaaaccagcat

SEQ ID NO: 1461233 - DNA, 25 bp, Homo sapien
tcacaggttctaagctacccgcagc

SEQ ID NO: 1461234 - DNA, 25 bp, Homo sapien
agggaatttggctagcaccgggcac

SEQ ID NO: 1461235 - DNA, 25 bp, Homo sapien
tggtttgccagcaagcccaaggatg

SEQ ID NO: 1461236 - DNA, 25 bp, Homo sapien
ttctagtagccacaaagccgcactg

SEQ ID NO: 1461237 - DNA, 25 bp, Homo sapien
cactagtaccatcaggctcagggaa

SEQ ID NO: 1461238 - DNA, 25 bp, Homo sapien
gaaggcagtaggagcccaaatttcc

SEQ ID NO: 1461239 - DNA, 25 bp, Homo sapien
aggcagtaggagcccaaatttccct

SEQ ID NO: 1461240 - DNA, 25 bp, Homo sapien
gcagtaggagcccaaatttccctac

SEQ ID NO: 1461241 - DNA, 25 bp, Homo sapien
ggcagtaggagcccaaatttcccta

SEQ ID NO: 1461242 - DNA, 25 bp, Homo sapien
ttatccatagctatcaaaccagagc

SEQ ID NO: 1461243 - DNA, 25 bp, Homo sapien
ccagagctcctatggtagttccagc

SEQ ID NO: 1461244 - DNA, 25 bp, Homo sapien
tacctattaattgctctactgtgcc

SEQ ID NO: 1461245 - DNA, 25 bp, Homo sapien
gtgccttcaactctcacgtctgtta

SEQ ID NO: 1461246 - DNA, 25 bp, Homo sapien
aagaatataatgtgcgtgaatgtga

SEQ ID NO: 1461247 - DNA, 25 bp, Homo sapien
agaatataatgtgcgtgaatgtgag

SEQ ID NO: 1461248 - DNA, 25 bp, Homo sapien
taaagaatataatgtgcgtgaatgt

SEQ ID NO: 1461249 - DNA, 25 bp, Homo sapien
ctaaagaatataatgtgcgtgaatg

SEQ ID NO: 1461250 - DNA, 25 bp, Homo sapien
tctacaatggatttggccagttgaa

SEQ ID NO: 1461251 - DNA, 25 bp, Homo sapien
aatggatttggccagttgaataaaa

SEQ ID NO: 1461252 - DNA, 25 bp, Homo sapien
ctcatttccttcaggcaacacttta

SEQ ID NO: 1461253 - DNA, 25 bp, Homo sapien
tcatttccttcaggcaacactttat

SEQ ID NO: 1461254 - DNA, 25 bp, Homo sapien
tcagcctgtatggactgctgtggtc

SEQ ID NO: 1461255 - DNA, 25 bp, Homo sapien
cacgggggttgtagcagcaaatttt

SEQ ID NO: 1461256 - DNA, 25 bp, Homo sapien
tcaacacgggggttgtagcagcaaa

SEQ ID NO: 1461257 - DNA, 25 bp, Homo sapien
tatggactgctgtggtcaacacggg

SEQ ID NO: 1461258 - DNA, 25 bp, Homo sapien
aaactgtgtttatttcaaactctgg

SEQ ID NO: 1461259 - DNA, 25 bp, Homo sapien
tgtttatttcaaactctggtgaatt

SEQ ID NO: 1461260 - DNA, 25 bp, Homo sapien
actgtgtttatttcaaactctggtg

SEQ ID NO: 1461261 - DNA, 25 bp, Homo sapien
tgtgtttatttcaaactctggtgaa

SEQ ID NO: 1461262 - DNA, 25 bp, Homo sapien
tggtgtgtttcgctgtacatcagat

SEQ ID NO: 1461263 - DNA, 25 bp, Homo sapien
ggtgtgtttcgctgtacatcagatc

SEQ ID NO: 1461264 - DNA, 25 bp, Homo sapien
tacgtctgcgctttgtgatttcaca

SEQ ID NO: 1461265 - DNA, 25 bp, Homo sapien
ttcagcatgcccacttttaaacact

SEQ ID NO: 1461266 - DNA, 25 bp, Homo sapien
aaacacttcatgaagcggcaagcct

SEQ ID NO: 1461267 - DNA, 25 bp, Homo sapien
aagcctggcaggatttacgtctgcg

SEQ ID NO: 1461268 - DNA, 25 bp, Homo sapien
acacaagtttgaagaaaagttgtca

SEQ ID NO: 1461269 - DNA, 25 bp, Homo sapien
cacaagtttgaagaaaagttgtcat

SEQ ID NO: 1461270 - DNA, 25 bp, Homo sapien
gtccaagtcccctgaaacatgcgca

SEQ ID NO: 1461271 - DNA, 25 bp, Homo sapien
cattctgtttattgccctcttggga

SEQ ID NO: 1461272 - DNA, 25 bp, Homo sapien
ttctcatcagagacggtccgagcat

SEQ ID NO: 1461273 - DNA, 25 bp, Homo sapien
gggaggtcatcacaccaaatgcata

SEQ ID NO: 1461274 - DNA, 25 bp, Homo sapien
ttccacagaaaccaaacagagcatg

SEQ ID NO: 1461275 - DNA, 25 bp, Homo sapien
caaagcaacaggtgtcaggttgtac

SEQ ID NO: 1461276 - DNA, 25 bp, Homo sapien
gaaatcccttaacttgtctctgtac

SEQ ID NO: 1461277 - DNA, 25 bp, Homo sapien
tctgtaccagtatggttggtggctg

SEQ ID NO: 1461278 - DNA, 25 bp, Homo sapien
tcaccaagtgctgcgcagctgccag

SEQ ID NO: 1461279 - DNA, 25 bp, Homo sapien
gcaccacagtgtgatgtctgatgat

SEQ ID NO: 1461280 - DNA, 25 bp, Homo sapien
gggctaagtgagcaccacagtgtga

SEQ ID NO: 1461281 - DNA, 25 bp, Homo sapien
gatgatgtagctagcagggtagcct

SEQ ID NO: 1461282 - DNA, 25 bp, Homo sapien
cgagtcaagtccgttctgatggcca

SEQ ID NO: 1461283 - DNA, 25 bp, Homo sapien
tagtggtacccagaagcgatgtcac

SEQ ID NO: 1461284 - DNA, 25 bp, Homo sapien
tcacatgatgctaccccatagtggt

SEQ ID NO: 1461285 - DNA, 25 bp, Homo sapien
cagtctcttgggcatcgagttgagc

SEQ ID NO: 1461286 - DNA, 25 bp, Homo sapien
tttagccattgtgcaaaacctcgtt

SEQ ID NO: 1461287 - DNA, 25 bp, Homo sapien
caagtgaccgaatttctggaaaggt

SEQ ID NO: 1461288 - DNA, 25 bp, Homo sapien
aatgtctaagaagcttctgagagcc

SEQ ID NO: 1461289 - DNA, 25 bp, Homo sapien
tctttgttgttctcacaagtgaccg

SEQ ID NO: 1461290 - DNA, 25 bp, Homo sapien
caaatgcatgttgttaaagtccctg

SEQ ID NO: 1461291 - DNA, 25 bp, Homo sapien
ggatcagttatttgctaagccatca

SEQ ID NO: 1461292 - DNA, 25 bp, Homo sapien
tctcagtccataacttggcaatagg

SEQ ID NO: 1461293 - DNA, 25 bp, Homo sapien
tccagcaagttgtctcatcgaaaat

SEQ ID NO: 1461294 - DNA, 25 bp, Homo sapien
agtttgaattcccacatgcacgtgc

SEQ ID NO: 1461295 - DNA, 25 bp, Homo sapien
catccaggtaaatgtgtgatcgtga

SEQ ID NO: 1461296 - DNA, 25 bp, Homo sapien
tgtgtgatcgtgaatgaaccgtcag

SEQ ID NO: 1461297 - DNA, 25 bp, Homo sapien
cgtgctgatgttcaaagtggtctgc

SEQ ID NO: 1461298 - DNA, 25 bp, Homo sapien
gaagctcagccagtgcttgtatttg

SEQ ID NO: 1461299 - DNA, 25 bp, Homo sapien
aaggtctgaagctcagccagtgctt

SEQ ID NO: 1461300 - DNA, 25 bp, Homo sapien
gctcagccagtgcttgtatttgtta

SEQ ID NO: 1461301 - DNA, 25 bp, Homo sapien
ggtctgaagctcagccagtgcttgt

SEQ ID NO: 1461302 - DNA, 25 bp, Homo sapien
gagaactcgacacagaaggggactg

SEQ ID NO: 1461303 - DNA, 25 bp, Homo sapien
caaagagaactcgacacagaagggg

SEQ ID NO: 1461304 - DNA, 25 bp, Homo sapien
agagaactcgacacagaaggggact

SEQ ID NO: 1461305 - DNA, 25 bp, Homo sapien
tatcaagtgcacgaacgagagacag

SEQ ID NO: 1461306 - DNA, 25 bp, Homo sapien
agtggagcgggaaagccatgtcttt

SEQ ID NO: 1461307 - DNA, 25 bp, Homo sapien
tgctgtcgcttccattcgcaaagaa

SEQ ID NO: 1461308 - DNA, 25 bp, Homo sapien
aatttcattaagagaaagcaggcga

SEQ ID NO: 1461309 - DNA, 25 bp, Homo sapien
caggatctaaatgcacaattcctaa

SEQ ID NO: 1461310 - DNA, 25 bp, Homo sapien
gatcagacttgactgctccaagacc

SEQ ID NO: 1461311 - DNA, 25 bp, Homo sapien
aattcctaattacattcatgatggg

SEQ ID NO: 1461312 - DNA, 25 bp, Homo sapien
tcgccacattcaggatctaaatgca

SEQ ID NO: 1461313 - DNA, 25 bp, Homo sapien
accacagcggtgcacagatttcatg

SEQ ID NO: 1461314 - DNA, 25 bp, Homo sapien
ggaaagctcctattggccactgcag

SEQ ID NO: 1461315 - DNA, 25 bp, Homo sapien
aataaagcatcctcggctccactgc

SEQ ID NO: 1461316 - DNA, 25 bp, Homo sapien
tatcgaccgagccaatttccttcct

SEQ ID NO: 1461317 - DNA, 25 bp, Homo sapien
gcacactcaaaagcacccctcctat

SEQ ID NO: 1461318 - DNA, 25 bp, Homo sapien
catattcacctgtaatttcatcaag

SEQ ID NO: 1461319 - DNA, 25 bp, Homo sapien
ttcatcaaggtaataaatccctcta

SEQ ID NO: 1461320 - DNA, 25 bp, Homo sapien
tttatcaacatattcacctgtaatt

SEQ ID NO: 1461321 - DNA, 25 bp, Homo sapien
aaaaccctcataaatgctctagaca

SEQ ID NO: 1461322 - DNA, 25 bp, Homo sapien
tggtgaccacattctcaggatagat

SEQ ID NO: 1461323 - DNA, 25 bp, Homo sapien
gattttccaatcattaaaaccctca

SEQ ID NO: 1461324 - DNA, 25 bp, Homo sapien
aaagcaaggctgtcacatatggtga

SEQ ID NO: 1461325 - DNA, 25 bp, Homo sapien
gagccttcctttagatgtgtagagc

SEQ ID NO: 1461326 - DNA, 25 bp, Homo sapien
tatgatcccatgactgatgaggcag

SEQ ID NO: 1461327 - DNA, 25 bp, Homo sapien
gagcccaactcctgatgctgtctag

SEQ ID NO: 1461328 - DNA, 25 bp, Homo sapien
tgtagagcaataagatgaattagcc

SEQ ID NO: 1461329 - DNA, 25 bp, Homo sapien
catgaacagttggttacgggtatga

SEQ ID NO: 1461330 - DNA, 25 bp, Homo sapien
tctgatctgttttaatggattaatg

SEQ ID NO: 1461331 - DNA, 25 bp, Homo sapien
tacgggtatgatattcctcctcaaa

SEQ ID NO: 1461332 - DNA, 25 bp, Homo sapien
tttggtcatgaacagttggttacgg

SEQ ID NO: 1461333 - DNA, 25 bp, Homo sapien
gaaggcaaagttctaccgaatccat

SEQ ID NO: 1461334 - DNA, 25 bp, Homo sapien
caggaaggcaaagttctaccgaatc

SEQ ID NO: 1461335 - DNA, 25 bp, Homo sapien
ggaaggcaaagttctaccgaatcca

SEQ ID NO: 1461336 - DNA, 25 bp, Homo sapien
tcaggaaggcaaagttctaccgaat

SEQ ID NO: 1461337 - DNA, 25 bp, Homo sapien
tgtgcaccccagctataaatcaaag

SEQ ID NO: 1461338 - DNA, 25 bp, Homo sapien
cctataggcacagccagttgggacc

SEQ ID NO: 1461339 - DNA, 25 bp, Homo sapien
gtgcgaccggcaaccattatttgtg

SEQ ID NO: 1461340 - DNA, 25 bp, Homo sapien
gttgggaccaaagctctcacactct

SEQ ID NO: 1461341 - DNA, 25 bp, Homo sapien
gttgtgagcagtgaattaaaagagc

SEQ ID NO: 1461342 - DNA, 25 bp, Homo sapien
tgtgagcagtgaattaaaagagctt

SEQ ID NO: 1461343 - DNA, 25 bp, Homo sapien
aaatttggttgtgagcagtgaatta

SEQ ID NO: 1461344 - DNA, 25 bp, Homo sapien
ttggttgtgagcagtgaattaaaag

SEQ ID NO: 1461345 - DNA, 25 bp, Homo sapien
ctggagtccagcagttcaaggcatc

SEQ ID NO: 1461346 - DNA, 25 bp, Homo sapien
tgccctactagtgaaaatgtacaat

SEQ ID NO: 1461347 - DNA, 25 bp, Homo sapien
ggagtccagcagttcaaggcatcag

SEQ ID NO: 1461348 - DNA, 25 bp, Homo sapien
agctgatctgccctactagtgaaaa

SEQ ID NO: 1461349 - DNA, 25 bp, Homo sapien
cattcctcattaagacagaagcaac

SEQ ID NO: 1461350 - DNA, 25 bp, Homo sapien
catacaaccacagcaaaattctagg

SEQ ID NO: 1461351 - DNA, 25 bp, Homo sapien
ttttactctggttaggcatagctcc

SEQ ID NO: 1461352 - DNA, 25 bp, Homo sapien
tctgagctaaggaaccaagagactt

SEQ ID NO: 1461353 - DNA, 25 bp, Homo sapien
aactggtctctgtggcaaactgctg

SEQ ID NO: 1461354 - DNA, 25 bp, Homo sapien
taactggtctctgtggcaaactgct

SEQ ID NO: 1461355 - DNA, 25 bp, Homo sapien
actggtctctgtggcaaactgctgt

SEQ ID NO: 1461356 - DNA, 25 bp, Homo sapien
ttaactggtctctgtggcaaactgc

SEQ ID NO: 1461357 - DNA, 25 bp, Homo sapien
accaatgaccaatgctccccatggt

SEQ ID NO: 1461358 - DNA, 25 bp, Homo sapien
tccccatggtttgtcgtgtctctca

SEQ ID NO: 1461359 - DNA, 25 bp, Homo sapien
tgcgctgggcaaactgacaccaatg

SEQ ID NO: 1461360 - DNA, 25 bp, Homo sapien
ctggtgccatccagtgcgctgggca

SEQ ID NO: 1461361 - DNA, 25 bp, Homo sapien
gagcccagtgtttggcaacaagcgc

SEQ ID NO: 1461362 - DNA, 25 bp, Homo sapien
tctgactgaatacaaagtgattaga

SEQ ID NO: 1461363 - DNA, 25 bp, Homo sapien
ctgaatacaaagtgattagagagcc

SEQ ID NO: 1461364 - DNA, 25 bp, Homo sapien
gggaatacgctgtgtgtgggtccac

SEQ ID NO: 1461365 - DNA, 25 bp, Homo sapien
accccatgcagggagcgccctgcta

SEQ ID NO: 1461366 - DNA, 25 bp, Homo sapien
ggagcgccctgctagattccctgtg

SEQ ID NO: 1461367 - DNA, 25 bp, Homo sapien
aaccccatgcagggagcgccctgct

SEQ ID NO: 1461368 - DNA, 25 bp, Homo sapien
ctgtggagatcaaaatggtctcttt

SEQ ID NO: 1461369 - DNA, 25 bp, Homo sapien
caacagcgcctttgattagaaggct

SEQ ID NO: 1461370 - DNA, 25 bp, Homo sapien
tacttcaaggcgtccttagccacag

SEQ ID NO: 1461371 - DNA, 25 bp, Homo sapien
tcattatgtagaatgggctctgcca

SEQ ID NO: 1461372 - DNA, 25 bp, Homo sapien
tctacacgataaaggccatcatcct

SEQ ID NO: 1461373 - DNA, 25 bp, Homo sapien
aaagaaaggtagatgcagaaccacc

SEQ ID NO: 1461374 - DNA, 25 bp, Homo sapien
tttagaacagtagagtgtagtggac

SEQ ID NO: 1461375 - DNA, 25 bp, Homo sapien
catgcctcttattagctctctggtc

SEQ ID NO: 1461376 - DNA, 25 bp, Homo sapien
actacttcattggactgttgggaga

SEQ ID NO: 1461377 - DNA, 25 bp, Homo sapien
tcagagcaggaataaaatcagtcac

SEQ ID NO: 1461378 - DNA, 25 bp, Homo sapien
ctacattttcttcagagcaggaata

SEQ ID NO: 1461379 - DNA, 25 bp, Homo sapien
cattttcttcagagcaggaataaaa

SEQ ID NO: 1461380 - DNA, 25 bp, Homo sapien
tcttcagagcaggaataaaatcagt

SEQ ID NO: 1461381 - DNA, 25 bp, Homo sapien
cagtgttatcaactctgtgtggcat

SEQ ID NO: 1461382 - DNA, 25 bp, Homo sapien
tcagctgtgactccactcagtgtta

SEQ ID NO: 1461383 - DNA, 25 bp, Homo sapien
tgtgtggcatttggttatcctacca

SEQ ID NO: 1461384 - DNA, 25 bp, Homo sapien
caacataaagttggacttcctgggc

SEQ ID NO: 1461385 - DNA, 25 bp, Homo sapien
taatctagttgcgtgttgcgtaaaa

SEQ ID NO: 1461386 - DNA, 25 bp, Homo sapien
tatctaagtcagtacaaccaggcaa

SEQ ID NO: 1461387 - DNA, 25 bp, Homo sapien
cccagagtggtagcaaattacatga

SEQ ID NO: 1461388 - DNA, 25 bp, Homo sapien
tataggttccaaagcaattcatgat

SEQ ID NO: 1461389 - DNA, 25 bp, Homo sapien
tcctttgttcatatcggctccatct

SEQ ID NO: 1461390 - DNA, 25 bp, Homo sapien
tgttcatatcggctccatctagcag

SEQ ID NO: 1461391 - DNA, 25 bp, Homo sapien
tatcggctccatctagcagccccaa

SEQ ID NO: 1461392 - DNA, 25 bp, Homo sapien
tcagtctcctttgttcatatcggct

SEQ ID NO: 1461393 - DNA, 25 bp, Homo sapien
aggctgtgctttctgtattaggctt

SEQ ID NO: 1461394 - DNA, 25 bp, Homo sapien
ggctgtgctttctgtattaggctta

SEQ ID NO: 1461395 - DNA, 25 bp, Homo sapien
aaaggctgtgctttctgtattaggc

SEQ ID NO: 1461396 - DNA, 25 bp, Homo sapien
aaggctgtgctttctgtattaggct

SEQ ID NO: 1461397 - DNA, 25 bp, Homo sapien
tttcatgctttacaccctgagggtg

SEQ ID NO: 1461398 - DNA, 25 bp, Homo sapien
tgactctcaagtactacgataatgg

SEQ ID NO: 1461399 - DNA, 25 bp, Homo sapien
ggtatacaacttggagctgtccagc

SEQ ID NO: 1461400 - DNA, 25 bp, Homo sapien
cctgagggtgtatatatagttctcc

SEQ ID NO: 1461401 - DNA, 25 bp, Homo sapien
gaacatgctgttcctataacgtggg

SEQ ID NO: 1461402 - DNA, 25 bp, Homo sapien
taatccccggactttagctgaactc

SEQ ID NO: 1461403 - DNA, 25 bp, Homo sapien
tataacgtgggtactgagctaatcc

SEQ ID NO: 1461404 - DNA, 25 bp, Homo sapien
gaactcgacatgctgaggttgaaga

SEQ ID NO: 1461405 - DNA, 25 bp, Homo sapien
aatggagtattacggatccctggtt

SEQ ID NO: 1461406 - DNA, 25 bp, Homo sapien
atggagtattacggatccctggttc

SEQ ID NO: 1461407 - DNA, 25 bp, Homo sapien
aaatggagtattacggatccctggt

SEQ ID NO: 1461408 - DNA, 25 bp, Homo sapien
tggagtattacggatccctggttct

SEQ ID NO: 1461409 - DNA, 25 bp, Homo sapien
aaatgtagcactaaatccacactct

SEQ ID NO: 1461410 - DNA, 25 bp, Homo sapien
tgtagcactaaatccacactctgat

SEQ ID NO: 1461411 - DNA, 25 bp, Homo sapien
ctctgattaaaagcgtgtgaaaact

SEQ ID NO: 1461412 - DNA, 25 bp, Homo sapien
aactgtgactgtgtacgaacagagt

SEQ ID NO: 1461413 - DNA, 25 bp, Homo sapien
tgtaaatccctataatagctccctg

SEQ ID NO: 1461414 - DNA, 25 bp, Homo sapien
ggtctggcctgagcctacatttaga

SEQ ID NO: 1461415 - DNA, 25 bp, Homo sapien
tcaggacttttcctcgcctcaaagg

SEQ ID NO: 1461416 - DNA, 25 bp, Homo sapien
tacaaggtgctttttggtctggcct

SEQ ID NO: 1461417 - DNA, 25 bp, Homo sapien
cagaagtgggctccctgtgaccctg

SEQ ID NO: 1461418 - DNA, 25 bp, Homo sapien
aggaagtagtcaacaggccccaaca

SEQ ID NO: 1461419 - DNA, 25 bp, Homo sapien
gaagtagtcaacaggccccaacaga

SEQ ID NO: 1461420 - DNA, 25 bp, Homo sapien
ggctccctgtgaccctgaagtactt

SEQ ID NO: 1461421 - DNA, 25 bp, Homo sapien
atgactgagtaagtctctcatggca

SEQ ID NO: 1461422 - DNA, 25 bp, Homo sapien
gtctctcatggcattgccacctgtg

SEQ ID NO: 1461423 - DNA, 25 bp, Homo sapien
gatgactgagtaagtctctcatggc

SEQ ID NO: 1461424 - DNA, 25 bp, Homo sapien
ctctcatggcattgccacctgtgag

SEQ ID NO: 1461425 - DNA, 25 bp, Homo sapien
tagaacaacacatttaccaggaggg

SEQ ID NO: 1461426 - DNA, 25 bp, Homo sapien
taggaccctttcttggaccgtgaca

SEQ ID NO: 1461427 - DNA, 25 bp, Homo sapien
tgacaactaccacacatgcgagatg

SEQ ID NO: 1461428 - DNA, 25 bp, Homo sapien
gactcttccgacgttttcaaggctg

SEQ ID NO: 1461429 - DNA, 25 bp, Homo sapien
agcatggcaacaaatcataacattt

SEQ ID NO: 1461430 - DNA, 25 bp, Homo sapien
aaactgtttgtcagccgtagttaag

SEQ ID NO: 1461431 - DNA, 25 bp, Homo sapien
tgtttgtcagccgtagttaagttga

SEQ ID NO: 1461432 - DNA, 25 bp, Homo sapien
tgtcagccgtagttaagttgacact

SEQ ID NO: 1461433 - DNA, 25 bp, Homo sapien
agcagccttattgctcacatggaga

SEQ ID NO: 1461434 - DNA, 25 bp, Homo sapien
ctcttcaatttccggaaggctgaga

SEQ ID NO: 1461435 - DNA, 25 bp, Homo sapien
gttctaacacaggttaatctgccag

SEQ ID NO: 1461436 - DNA, 25 bp, Homo sapien
caagcaagcagtacttcccttgatc

SEQ ID NO: 1461437 - DNA, 25 bp, Homo sapien
ttgagtagataatagggcaaagcct

SEQ ID NO: 1461438 - DNA, 25 bp, Homo sapien
ggtataccctctcacaccaagcaag

SEQ ID NO: 1461439 - DNA, 25 bp, Homo sapien
ttctttgaatcgagatgtggtggca

SEQ ID NO: 1461440 - DNA, 25 bp, Homo sapien
gagttagctagcaatattccgatgc

SEQ ID NO: 1461441 - DNA, 25 bp, Homo sapien
tgaatcggtacacacacaacagtcc

SEQ ID NO: 1461442 - DNA, 25 bp, Homo sapien
aacagtcccctgatttgcacatttg

SEQ ID NO: 1461443 - DNA, 25 bp, Homo sapien
catgtgctgttgtcataaatatcac

SEQ ID NO: 1461444 - DNA, 25 bp, Homo sapien
aagtccaggcgggtcacaagtgaaa

SEQ ID NO: 1461445 - DNA, 25 bp, Homo sapien
gaaattcccttcgttgccaattgag

SEQ ID NO: 1461446 - DNA, 25 bp, Homo sapien
gccaattgagattgacatgtgctgt

SEQ ID NO: 1461447 - DNA, 25 bp, Homo sapien
gttgctgcaagccaattaccttatg

SEQ ID NO: 1461448 - DNA, 25 bp, Homo sapien
tctaattaatgtgaaacaatgagct

SEQ ID NO: 1461449 - DNA, 25 bp, Homo sapien
tagagtcacggtcaacagaatacat

SEQ ID NO: 1461450 - DNA, 25 bp, Homo sapien
caatgagctgtgttaccacttatca

SEQ ID NO: 1461451 - DNA, 25 bp, Homo sapien
tctccttttggggctctgtgccacc

SEQ ID NO: 1461452 - DNA, 25 bp, Homo sapien
tctctccttttggggctctgtgcca

SEQ ID NO: 1461453 - DNA, 25 bp, Homo sapien
ccttttggggctctgtgccacctgc

SEQ ID NO: 1461454 - DNA, 25 bp, Homo sapien
aaaatttccagaatagtggcccaga

SEQ ID NO: 1461455 - DNA, 25 bp, Homo sapien
gagggaggctcagatttccgccgca

SEQ ID NO: 1461456 - DNA, 25 bp, Homo sapien
tctgccaactgaacccgagacattt

SEQ ID NO: 1461457 - DNA, 25 bp, Homo sapien
gagacatttgtgttcggttcagcgc

SEQ ID NO: 1461458 - DNA, 25 bp, Homo sapien
acatactgcagttgcgacacaacag

SEQ ID NO: 1461459 - DNA, 25 bp, Homo sapien
gccctgtcacaggaccattacgaaa

SEQ ID NO: 1461460 - DNA, 25 bp, Homo sapien
tgtcacaggaccattacgaaagcac

SEQ ID NO: 1461461 - DNA, 25 bp, Homo sapien
tcacaggaccattacgaaagcacat

SEQ ID NO: 1461462 - DNA, 25 bp, Homo sapien
cctgtcacaggaccattacgaaagc

SEQ ID NO: 1461463 - DNA, 25 bp, Homo sapien
gacttgcacagatgctaaagaaata

SEQ ID NO: 1461464 - DNA, 25 bp, Homo sapien
gccaacttgaacttgacttgcacag

SEQ ID NO: 1461465 - DNA, 25 bp, Homo sapien
aacctggtgtctgtaggaaaagcca

SEQ ID NO: 1461466 - DNA, 25 bp, Homo sapien
taggaaaagccaacttgaacttgac

SEQ ID NO: 1461467 - DNA, 25 bp, Homo sapien
cctcacacctcaaatgaaacaatag

SEQ ID NO: 1461468 - DNA, 25 bp, Homo sapien
gcctatcaggcattattcaatattg

SEQ ID NO: 1461469 - DNA, 25 bp, Homo sapien
caccaacaatgacagggttagcaca

SEQ ID NO: 1461470 - DNA, 25 bp, Homo sapien
aatactgagaagagctaaggttggc

SEQ ID NO: 1461471 - DNA, 25 bp, Homo sapien
cacagctttgtagaacaatggaaat

SEQ ID NO: 1461472 - DNA, 25 bp, Homo sapien
cctaagcagagggatgtaacaccat

SEQ ID NO: 1461473 - DNA, 25 bp, Homo sapien
tggagcagaccaaaacaatacaact

SEQ ID NO: 1461474 - DNA, 25 bp, Homo sapien
tagacaattctaccagttgtggaca

SEQ ID NO: 1461475 - DNA, 25 bp, Homo sapien
tgggaagtaacgaaccatgaaccac

SEQ ID NO: 1461476 - DNA, 25 bp, Homo sapien
tgtagtcttaggcacagatcctgca

SEQ ID NO: 1461477 - DNA, 25 bp, Homo sapien
cctgccttgccttactaggtgaaga

SEQ ID NO: 1461478 - DNA, 25 bp, Homo sapien
cctagagtttatgaagtggtaagcc

SEQ ID NO: 1461479 - DNA, 25 bp, Homo sapien
gatgcaggtccgtagggcatttcat

SEQ ID NO: 1461480 - DNA, 25 bp, Homo sapien
ttctagggaggtccgatgcaggtcc

SEQ ID NO: 1461481 - DNA, 25 bp, Homo sapien
ccctggttcgtagttcagaaagaca

SEQ ID NO: 1461482 - DNA, 25 bp, Homo sapien
ccatcctgtgcttgcgtggcactca

SEQ ID NO: 1461483 - DNA, 25 bp, Homo sapien
ctttcctggaagagtgatacaccct

SEQ ID NO: 1461484 - DNA, 25 bp, Homo sapien
ggacttaaaaagcatcagctggcaa

SEQ ID NO: 1461485 - DNA, 25 bp, Homo sapien
gatacaccctccactcaggatgtct

SEQ ID NO: 1461486 - DNA, 25 bp, Homo sapien
caataataatgaacaggaccccact

SEQ ID NO: 1461487 - DNA, 25 bp, Homo sapien
tcacttcttagggcaggagaaatga

SEQ ID NO: 1461488 - DNA, 25 bp, Homo sapien
ctttcacttcttagggcaggagaaa

SEQ ID NO: 1461489 - DNA, 25 bp, Homo sapien
ccactttcacttcttagggcaggag

SEQ ID NO: 1461490 - DNA, 25 bp, Homo sapien
cactttcacttcttagggcaggaga

SEQ ID NO: 1461491 - DNA, 25 bp, Homo sapien
ccaaaagggcgtgatgattcccagc

SEQ ID NO: 1461492 - DNA, 25 bp, Homo sapien
ctaaggagatgcttcccagaggccc

SEQ ID NO: 1461493 - DNA, 25 bp, Homo sapien
gcatagattgttgggtccgatgccc

SEQ ID NO: 1461494 - DNA, 25 bp, Homo sapien
tagtgcttcacccaaaacagaggtt

SEQ ID NO: 1461495 - DNA, 25 bp, Homo sapien
aaagttgaattctctgactaggaag

SEQ ID NO: 1461496 - DNA, 25 bp, Homo sapien
agttgaattctctgactaggaaggt

SEQ ID NO: 1461497 - DNA, 25 bp, Homo sapien
tgactaggaaggtttcttataagaa

SEQ ID NO: 1461498 - DNA, 25 bp, Homo sapien
ctgactaggaaggtttcttataaga

SEQ ID NO: 1461499 - DNA, 25 bp, Homo sapien
tggacagtgtagtaagtgaccacag

SEQ ID NO: 1461500 - DNA, 25 bp, Homo sapien
taacgctttatagtagtgccaacaa

SEQ ID NO: 1461501 - DNA, 25 bp, Homo sapien
caagcatgtacattagtttctacgg

SEQ ID NO: 1461502 - DNA, 25 bp, Homo sapien
tgtacaagttccagagtcttaacgc

SEQ ID NO: 1461503 - DNA, 25 bp, Homo sapien
tgaaactttgtgatactggtgctct

SEQ ID NO: 1461504 - DNA, 25 bp, Homo sapien
tgtgggtccctgttaatttgaaagc

SEQ ID NO: 1461505 - DNA, 25 bp, Homo sapien
cacgtggcctttcttacagtcttca

SEQ ID NO: 1461506 - DNA, 25 bp, Homo sapien
tatgcaacgtgcatgctgacatggt

SEQ ID NO: 1461507 - DNA, 25 bp, Homo sapien
ttgagactggtctctcactcagcat

SEQ ID NO: 1461508 - DNA, 25 bp, Homo sapien
tactagcaatccctttataggccaa

SEQ ID NO: 1461509 - DNA, 25 bp, Homo sapien
ctttttgtgaatgtcataaaatggg

SEQ ID NO: 1461510 - DNA, 25 bp, Homo sapien
aaaatgggatactacagtatgtcac

SEQ ID NO: 1461511 - DNA, 25 bp, Homo sapien
caaatagcgctggtataaataatta

SEQ ID NO: 1461512 - DNA, 25 bp, Homo sapien
tgtttacagttttggacagttacaa

SEQ ID NO: 1461513 - DNA, 25 bp, Homo sapien
gtgtttcattggatggatgcaccac

SEQ ID NO: 1461514 - DNA, 25 bp, Homo sapien
tttcattggatggatgcaccacagt

SEQ ID NO: 1461515 - DNA, 25 bp, Homo sapien
cagtctcatcagcactaggtatagt

SEQ ID NO: 1461516 - DNA, 25 bp, Homo sapien
acagtctcatcagcactaggtatag

SEQ ID NO: 1461517 - DNA, 25 bp, Homo sapien
tgtgtgcaagtttcagttgctctac

SEQ ID NO: 1461518 - DNA, 25 bp, Homo sapien
agtctcatcagcactaggtatagtc

SEQ ID NO: 1461519 - DNA, 25 bp, Homo sapien
aaatcagttcagttatgctagctcc

SEQ ID NO: 1461520 - DNA, 25 bp, Homo sapien
tcctctcagcaagagaattgtcctc

SEQ ID NO: 1461521 - DNA, 25 bp, Homo sapien
tatgagagctttgtcggctatgtgc

SEQ ID NO: 1461522 - DNA, 25 bp, Homo sapien
tatgtccacaagaacatccgcctag

SEQ ID NO: 1461523 - DNA, 25 bp, Homo sapien
tacaagggttactctttggaggcca

SEQ ID NO: 1461524 - DNA, 25 bp, Homo sapien
tctggcctcgtaaaatgaactggga

SEQ ID NO: 1461525 - DNA, 25 bp, Homo sapien
gatatctaatatcgagacagccttg

SEQ ID NO: 1461526 - DNA, 25 bp, Homo sapien
tacaccaatgaaactacctgggcct

SEQ ID NO: 1461527 - DNA, 25 bp, Homo sapien
gtccttttccattaggtatgtcttc

SEQ ID NO: 1461528 - DNA, 25 bp, Homo sapien
agtccttttccattaggtatgtctt

SEQ ID NO: 1461529 - DNA, 25 bp, Homo sapien
ccttttccattaggtatgtcttcct

SEQ ID NO: 1461530 - DNA, 25 bp, Homo sapien
tccttttccattaggtatgtcttcc

SEQ ID NO: 1461531 - DNA, 25 bp, Homo sapien
gactttgtattctgctaatcctctc

SEQ ID NO: 1461532 - DNA, 25 bp, Homo sapien
tcaaatgactttgtattctgctaat

SEQ ID NO: 1461533 - DNA, 25 bp, Homo sapien
tttgtattctgctaatcctctcctc

SEQ ID NO: 1461534 - DNA, 25 bp, Homo sapien
aaatgactttgtattctgctaatcc

SEQ ID NO: 1461535 - DNA, 25 bp, Homo sapien
aaagcgtttacgttctcagggctag

SEQ ID NO: 1461536 - DNA, 25 bp, Homo sapien
aacacttgcccctcaaaggaacagc

SEQ ID NO: 1461537 - DNA, 25 bp, Homo sapien
tcagggctagagttcactgtgtttc

SEQ ID NO: 1461538 - DNA, 25 bp, Homo sapien
caatatccccaatgccaaatgagtg

SEQ ID NO: 1461539 - DNA, 25 bp, Homo sapien
ttctccagaacctcaaatagaaaat

SEQ ID NO: 1461540 - DNA, 25 bp, Homo sapien
tccagaacctcaaatagaaaatcct

SEQ ID NO: 1461541 - DNA, 25 bp, Homo sapien
ctccagaacctcaaatagaaaatcc

SEQ ID NO: 1461542 - DNA, 25 bp, Homo sapien
ttttctccagaacctcaaatagaaa

SEQ ID NO: 1461543 - DNA, 25 bp, Homo sapien
gcgtttatatactacctctcctggg

SEQ ID NO: 1461544 - DNA, 25 bp, Homo sapien
tgaaggttccctacagcgtttatat

SEQ ID NO: 1461545 - DNA, 25 bp, Homo sapien
tgtgccccttatggcattcagataa

SEQ ID NO: 1461546 - DNA, 25 bp, Homo sapien
tcaggcatgcctaccaagaaggaga

SEQ ID NO: 1461547 - DNA, 25 bp, Homo sapien
tctggaaacagtcttagagtcaact

SEQ ID NO: 1461548 - DNA, 25 bp, Homo sapien
ttcctctgaaggatacaaatgttct

SEQ ID NO: 1461549 - DNA, 25 bp, Homo sapien
cattttatcaggatggtggaaaaac

SEQ ID NO: 1461550 - DNA, 25 bp, Homo sapien
tccaataaactaaagggacttatca

SEQ ID NO: 1461551 - DNA, 25 bp, Homo sapien
taccaagggtaagagtatacaaatg

SEQ ID NO: 1461552 - DNA, 25 bp, Homo sapien
ctaccaagtccaagtgtaaacactg

SEQ ID NO: 1461553 - DNA, 25 bp, Homo sapien
ttgcagtgagttcaaatggaaatca

SEQ ID NO: 1461554 - DNA, 25 bp, Homo sapien
tgcaaacctttactcatatctggaa

SEQ ID NO: 1461555 - DNA, 25 bp, Homo sapien
aaaggctttgaagcagtctcaaagg

SEQ ID NO: 1461556 - DNA, 25 bp, Homo sapien
tttgaagcagtctcaaaggcattgg

SEQ ID NO: 1461557 - DNA, 25 bp, Homo sapien
tactcttcatccactaattttagcc

SEQ ID NO: 1461558 - DNA, 25 bp, Homo sapien
tctcaaaggcattgggtcgtctgct

SEQ ID NO: 1461559 - DNA, 25 bp, Homo sapien
cctgggccgacaacttgcaaatctg

SEQ ID NO: 1461560 - DNA, 25 bp, Homo sapien
tatatgctatccaaagctgcttaag

SEQ ID NO: 1461561 - DNA, 25 bp, Homo sapien
aactacagactttcatggtcaggag

SEQ ID NO: 1461562 - DNA, 25 bp, Homo sapien
tctcaaataatgtgccagggctcct

SEQ ID NO: 1461563 - DNA, 25 bp, Homo sapien
aagcatggaggaagatatcgcccac

SEQ ID NO: 1461564 - DNA, 25 bp, Homo sapien
agaagcatggaggaagatatcgccc

SEQ ID NO: 1461565 - DNA, 25 bp, Homo sapien
gcatggaggaagatatcgcccactc

SEQ ID NO: 1461566 - DNA, 25 bp, Homo sapien
gaagcatggaggaagatatcgccca

SEQ ID NO: 1461567 - DNA, 25 bp, Homo sapien
tcaagcagtaatgggaacactccct

SEQ ID NO: 1461568 - DNA, 25 bp, Homo sapien
ggctgctgacactggaaagctccca

SEQ ID NO: 1461569 - DNA, 25 bp, Homo sapien
cctgaagcacttagagaattgagca

SEQ ID NO: 1461570 - DNA, 25 bp, Homo sapien
tatatctggtgtgtggatgcaagag

SEQ ID NO: 1461571 - DNA, 25 bp, Homo sapien
ctttctaatgtttacctgcattctc

SEQ ID NO: 1461572 - DNA, 25 bp, Homo sapien
ctctttggcactacagctgtattct

SEQ ID NO: 1461573 - DNA, 25 bp, Homo sapien
ttctctttggcactacagctgtatt

SEQ ID NO: 1461574 - DNA, 25 bp, Homo sapien
catctttctaatgtttacctgcatt

SEQ ID NO: 1461575 - DNA, 25 bp, Homo sapien
gcacaaagcttatactaggcaccca

SEQ ID NO: 1461576 - DNA, 25 bp, Homo sapien
gatagtaaccagttcccatcaggta

SEQ ID NO: 1461577 - DNA, 25 bp, Homo sapien
catcaggtaacactaggccagaaag

SEQ ID NO: 1461578 - DNA, 25 bp, Homo sapien
gccctcccctgtctatgaaagtaag

SEQ ID NO: 1461579 - DNA, 25 bp, Homo sapien
tttaggattttactatacgccgcta

SEQ ID NO: 1461580 - DNA, 25 bp, Homo sapien
cacatggcttgattccaaagcaaac

SEQ ID NO: 1461581 - DNA, 25 bp, Homo sapien
tacgccgctaattgaaagtgttcag

SEQ ID NO: 1461582 - DNA, 25 bp, Homo sapien
cacacacgcatacattgtgggtttt

SEQ ID NO: 1461583 - DNA, 25 bp, Homo sapien
taaaccttgaggaagcctgagaaat

SEQ ID NO: 1461584 - DNA, 25 bp, Homo sapien
accttgaggaagcctgagaaattag

SEQ ID NO: 1461585 - DNA, 25 bp, Homo sapien
tataaaccttgaggaagcctgagaa

SEQ ID NO: 1461586 - DNA, 25 bp, Homo sapien
aaaccttgaggaagcctgagaaatt

SEQ ID NO: 1461587 - DNA, 25 bp, Homo sapien
gcagtgctgaccatttgcatgaggt

SEQ ID NO: 1461588 - DNA, 25 bp, Homo sapien
gatgctcaacataataatctggcag

SEQ ID NO: 1461589 - DNA, 25 bp, Homo sapien
tctgccaagccagtagcgtacctga

SEQ ID NO: 1461590 - DNA, 25 bp, Homo sapien
gtagcgtacctgatgccagtgttcc

SEQ ID NO: 1461591 - DNA, 25 bp, Homo sapien
tctcccatcctaatgcagtctatga

SEQ ID NO: 1461592 - DNA, 25 bp, Homo sapien
catcctaatgcagtctatgaagcac

SEQ ID NO: 1461593 - DNA, 25 bp, Homo sapien
atgcagtctatgaagcactggccac

SEQ ID NO: 1461594 - DNA, 25 bp, Homo sapien
cctaatgcagtctatgaagcactgg

SEQ ID NO: 1461595 - DNA, 25 bp, Homo sapien
atgctgcccctgtttcaaatctttt

SEQ ID NO: 1461596 - DNA, 25 bp, Homo sapien
ccatttgtttcatgtcaccgttcat

SEQ ID NO: 1461597 - DNA, 25 bp, Homo sapien
tgcatgctgcccctgtttcaaatct

SEQ ID NO: 1461598 - DNA, 25 bp, Homo sapien
cttttgatcaccatttgtttcatgt

SEQ ID NO: 1461599 - DNA, 25 bp, Homo sapien
cagtctagtggttaaagtgaatccc

SEQ ID NO: 1461600 - DNA, 25 bp, Homo sapien
tactggtggttgctcatgtggctgc

SEQ ID NO: 1461601 - DNA, 25 bp, Homo sapien
taatgcttaggtctggaactggaac

SEQ ID NO: 1461602 - DNA, 25 bp, Homo sapien
tgctcaggagtccataatctgggcg

SEQ ID NO: 1461603 - DNA, 25 bp, Homo sapien
gattagaaatgagaaccatggtgcc

SEQ ID NO: 1461604 - DNA, 25 bp, Homo sapien
catttcaagggtctcaaagcgctga

SEQ ID NO: 1461605 - DNA, 25 bp, Homo sapien
catagttctgcatgggcattctagc

SEQ ID NO: 1461606 - DNA, 25 bp, Homo sapien
gagactgtgtcattcgttaagcaag

SEQ ID NO: 1461607 - DNA, 25 bp, Homo sapien
tcaccagagataatgggaactcatg

SEQ ID NO: 1461608 - DNA, 25 bp, Homo sapien
ttctcatatgaggatccttgtccct

SEQ ID NO: 1461609 - DNA, 25 bp, Homo sapien
taaagatgacatgcacgtttctcct

SEQ ID NO: 1461610 - DNA, 25 bp, Homo sapien
actgtctggtcccaaagcatctagg

SEQ ID NO: 1461611 - DNA, 25 bp, Homo sapien
ttgaaataacatcataattaacttt

SEQ ID NO: 1461612 - DNA, 25 bp, Homo sapien
tttgaaataacatcataattaactt

SEQ ID NO: 1461613 - DNA, 25 bp, Homo sapien
ctttcaaactgcgacagtgttagcg

SEQ ID NO: 1461614 - DNA, 25 bp, Homo sapien
ctgcgacagtgttagcgtaggattt

SEQ ID NO: 1461615 - DNA, 25 bp, Homo sapien
aaactgcgacagtgttagcgtagga

SEQ ID NO: 1461616 - DNA, 25 bp, Homo sapien
gacagtgttagcgtaggattttttc

SEQ ID NO: 1461617 - DNA, 25 bp, Homo sapien
atcaccctctaccatcaccagcagc

SEQ ID NO: 1461618 - DNA, 25 bp, Homo sapien
ctctacattaaccacatggccacta

SEQ ID NO: 1461619 - DNA, 25 bp, Homo sapien
tgtttcctctacattaaccacatgg

SEQ ID NO: 1461620 - DNA, 25 bp, Homo sapien
tgggttgttttgaccagccacatcc

SEQ ID NO: 1461621 - DNA, 25 bp, Homo sapien
ctgggttgttttgaccagccacatc

SEQ ID NO: 1461622 - DNA, 25 bp, Homo sapien
tgcttctttgaacattgcctcacaa

SEQ ID NO: 1461623 - DNA, 25 bp, Homo sapien
tctttgaacattgcctcacaatcac

SEQ ID NO: 1461624 - DNA, 25 bp, Homo sapien
cacttccacgaattcaactgcttct

SEQ ID NO: 1461625 - DNA, 25 bp, Homo sapien
acaatcactcacattgggccacttc

SEQ ID NO: 1461626 - DNA, 25 bp, Homo sapien
gcacaccaaaccacagaggcacatt

SEQ ID NO: 1461627 - DNA, 25 bp, Homo sapien
tttctgacagccagtcgaaatggta

SEQ ID NO: 1461628 - DNA, 25 bp, Homo sapien
tggctgcttcgagcttttctgacag

SEQ ID NO: 1461629 - DNA, 25 bp, Homo sapien
tatgtatgtgggagtatgcacacca

SEQ ID NO: 1461630 - DNA, 25 bp, Homo sapien
caggagtaagctctgattgtggcac

SEQ ID NO: 1461631 - DNA, 25 bp, Homo sapien
gagtaagctctgattgtggcactgc

SEQ ID NO: 1461632 - DNA, 25 bp, Homo sapien
aaggcaggagtaagctctgattgtg

SEQ ID NO: 1461633 - DNA, 25 bp, Homo sapien
gagttcaaggcaggagtaagctctg

SEQ ID NO: 1461634 - DNA, 25 bp, Homo sapien
gaatgtcctttcaattgcttagata

SEQ ID NO: 1461635 - DNA, 25 bp, Homo sapien
cccctttgaagttcacaaatatttg

SEQ ID NO: 1461636 - DNA, 25 bp, Homo sapien
ctcttctcaaaatcagggcagaggt

SEQ ID NO: 1461637 - DNA, 25 bp, Homo sapien
ggagccaaaattgtggattccaaac

SEQ ID NO: 1461638 - DNA, 25 bp, Homo sapien
ttataaaatagtgtagaagaacatt

SEQ ID NO: 1461639 - DNA, 25 bp, Homo sapien
tcattccaatagttatctgctccat

SEQ ID NO: 1461640 - DNA, 25 bp, Homo sapien
ttcaggtgacaggacattctcttgg

SEQ ID NO: 1461641 - DNA, 25 bp, Homo sapien
tctcttgggtgtatagcagtgaccc

SEQ ID NO: 1461642 - DNA, 25 bp, Homo sapien
gataccggcctaatgagcctacaca

SEQ ID NO: 1461643 - DNA, 25 bp, Homo sapien
cagctgctgggatgatccttcaaaa

SEQ ID NO: 1461644 - DNA, 25 bp, Homo sapien
ctctccatgaggaacttcagcccag

SEQ ID NO: 1461645 - DNA, 25 bp, Homo sapien
tggagtccaaaccactgtgtgtcct

SEQ ID NO: 1461646 - DNA, 25 bp, Homo sapien
aaagctcagcaggaaatggtcttga

SEQ ID NO: 1461647 - DNA, 25 bp, Homo sapien
catgcatgtgctggttccctgtggg

SEQ ID NO: 1461648 - DNA, 25 bp, Homo sapien
tggtcttgacccatgacaaagattt

SEQ ID NO: 1461649 - DNA, 25 bp, Homo sapien
taggcaactggtcaaataacccgga

SEQ ID NO: 1461650 - DNA, 25 bp, Homo sapien
ctctcttccatcccccattccacac

SEQ ID NO: 1461651 - DNA, 25 bp, Homo sapien
tatctctcttccatcccccattcca

SEQ ID NO: 1461652 - DNA, 25 bp, Homo sapien
ttatctctcttccatcccccattcc

SEQ ID NO: 1461653 - DNA, 25 bp, Homo sapien
atctctcttccatcccccattccac

SEQ ID NO: 1461654 - DNA, 25 bp, Homo sapien
tgatcatggccaagattcttagatt

SEQ ID NO: 1461655 - DNA, 25 bp, Homo sapien
ttgatcatggccaagattcttagat

SEQ ID NO: 1461656 - DNA, 25 bp, Homo sapien
caacaaacccctggcaccctgttct

SEQ ID NO: 1461657 - DNA, 25 bp, Homo sapien
cttacaacaaacccctggcaccctg

SEQ ID NO: 1461658 - DNA, 25 bp, Homo sapien
acaaacccctggcaccctgttctca

SEQ ID NO: 1461659 - DNA, 25 bp, Homo sapien
caaacccctggcaccctgttctcac

SEQ ID NO: 1461660 - DNA, 25 bp, Homo sapien
catggcctgtgatgacttagtgtct

SEQ ID NO: 1461661 - DNA, 25 bp, Homo sapien
caagcatgaccaagcgattagcggg

SEQ ID NO: 1461662 - DNA, 25 bp, Homo sapien
tgtgcatctcgacagtaatgggagc

SEQ ID NO: 1461663 - DNA, 25 bp, Homo sapien
tgccatgtattgaagcctgagcgct

SEQ ID NO: 1461664 - DNA, 25 bp, Homo sapien
tttacatcaagtgtgtaacagctta

SEQ ID NO: 1461665 - DNA, 25 bp, Homo sapien
aacagcttagctgcactcagtgcca

SEQ ID NO: 1461666 - DNA, 25 bp, Homo sapien
tgtaacagcttagctgcactcagtg

SEQ ID NO: 1461667 - DNA, 25 bp, Homo sapien
caagtgtgtaacagcttagctgcac

SEQ ID NO: 1461668 - DNA, 25 bp, Homo sapien
tagaattagtataccaagacagtgg

SEQ ID NO: 1461669 - DNA, 25 bp, Homo sapien
tgtaaagtgggaatgctactacata

SEQ ID NO: 1461670 - DNA, 25 bp, Homo sapien
tgggaatgctactacatacctgatg

SEQ ID NO: 1461671 - DNA, 25 bp, Homo sapien
actacatacctgatgtgtaacatac

SEQ ID NO: 1461672 - DNA, 25 bp, Homo sapien
cagatctaaatatagggtcatggtg

SEQ ID NO: 1461673 - DNA, 25 bp, Homo sapien
cagaagatgacgcttcagatctaaa

SEQ ID NO: 1461674 - DNA, 25 bp, Homo sapien
gtggtcacagaagatgacgcttcag

SEQ ID NO: 1461675 - DNA, 25 bp, Homo sapien
tgacgcttcagatctaaatataggg

SEQ ID NO: 1461676 - DNA, 25 bp, Homo sapien
aacaccacaggaaagaacctctggt

SEQ ID NO: 1461677 - DNA, 25 bp, Homo sapien
agccagaagatgtgcctttcccaac

SEQ ID NO: 1461678 - DNA, 25 bp, Homo sapien
cacaggaaagaacctctggtaaagg

SEQ ID NO: 1461679 - DNA, 25 bp, Homo sapien
tggtaaaggaattctttagccagaa

SEQ ID NO: 1461680 - DNA, 25 bp, Homo sapien
aagaggtgagccattacaactcgga

SEQ ID NO: 1461681 - DNA, 25 bp, Homo sapien
tacaactcggagtagcatgctggaa

SEQ ID NO: 1461682 - DNA, 25 bp, Homo sapien
gagtagcatgctggaagctttaccc

SEQ ID NO: 1461683 - DNA, 25 bp, Homo sapien
gctggaagctttaccctccaatcca

SEQ ID NO: 1461684 - DNA, 25 bp, Homo sapien
tggtcaagtcttgcttgaaggccat

SEQ ID NO: 1461685 - DNA, 25 bp, Homo sapien
ttggtcaagtcttgcttgaaggcca

SEQ ID NO: 1461686 - DNA, 25 bp, Homo sapien
attgtgtaagacaatgttggtcaag

SEQ ID NO: 1461687 - DNA, 25 bp, Homo sapien
gtgtaagacaatgttggtcaagtct

SEQ ID NO: 1461688 - DNA, 25 bp, Homo sapien
atatgggttggctgccaaggtagat

SEQ ID NO: 1461689 - DNA, 25 bp, Homo sapien
gaggttggatatgggttggctgcca

SEQ ID NO: 1461690 - DNA, 25 bp, Homo sapien
cagaagactgaggttggatatgggt

SEQ ID NO: 1461691 - DNA, 25 bp, Homo sapien
agactgaggttggatatgggttggc

SEQ ID NO: 1461692 - DNA, 25 bp, Homo sapien
cctagctgctacatgggtctccttc

SEQ ID NO: 1461693 - DNA, 25 bp, Homo sapien
tcctagctgctacatgggtctcctt

SEQ ID NO: 1461694 - DNA, 25 bp, Homo sapien
ttcctagctgctacatgggtctcct

SEQ ID NO: 1461695 - DNA, 25 bp, Homo sapien
tcttccaaacctgtttctcctgatt

SEQ ID NO: 1461696 - DNA, 25 bp, Homo sapien
cagtcttccaaacctgtttctcctg

SEQ ID NO: 1461697 - DNA, 25 bp, Homo sapien
tccaaacctgtttctcctgatttta

SEQ ID NO: 1461698 - DNA, 25 bp, Homo sapien
caaacctgtttctcctgattttagg

SEQ ID NO: 1461699 - DNA, 25 bp, Homo sapien
tccccttcttatggctgatttcagg

SEQ ID NO: 1461700 - DNA, 25 bp, Homo sapien
cccttcttatggctgatttcaggag

SEQ ID NO: 1461701 - DNA, 25 bp, Homo sapien
ccttcttatggctgatttcaggagt

SEQ ID NO: 1461702 - DNA, 25 bp, Homo sapien
cttccccttcttatggctgatttca

SEQ ID NO: 1461703 - DNA, 25 bp, Homo sapien
tcaataccacgtaaaccaataaggc

SEQ ID NO: 1461704 - DNA, 25 bp, Homo sapien
gcaatcgtacatcaataccacgtaa

SEQ ID NO: 1461705 - DNA, 25 bp, Homo sapien
ggaatcagctgcaatcgtacatcaa

SEQ ID NO: 1461706 - DNA, 25 bp, Homo sapien
gtacatcaataccacgtaaaccaat

SEQ ID NO: 1461707 - DNA, 25 bp, Homo sapien
agtaggtgttgccagaagatgctcc

SEQ ID NO: 1461708 - DNA, 25 bp, Homo sapien
gatatttgatgccaagttcagaggg

SEQ ID NO: 1461709 - DNA, 25 bp, Homo sapien
actgagagaacccacattggagaca

SEQ ID NO: 1461710 - DNA, 25 bp, Homo sapien
gcctgagcttttcctgttaggtgaa

SEQ ID NO: 1461711 - DNA, 25 bp, Homo sapien
gcatcttataagacttttggccatg

SEQ ID NO: 1461712 - DNA, 25 bp, Homo sapien
tcttataagacttttggccatgact

SEQ ID NO: 1461713 - DNA, 25 bp, Homo sapien
tataagacttttggccatgacttac

SEQ ID NO: 1461714 - DNA, 25 bp, Homo sapien
catcttataagacttttggccatga

SEQ ID NO: 1461715 - DNA, 25 bp, Homo sapien
aagaaaaacttgaatgactcaccag

SEQ ID NO: 1461716 - DNA, 25 bp, Homo sapien
aaacttgaatgactcaccaggaaac

SEQ ID NO: 1461717 - DNA, 25 bp, Homo sapien
cttgaatgactcaccaggaaactga

SEQ ID NO: 1461718 - DNA, 25 bp, Homo sapien
tagctcagaaaccgaccgtaaggga

SEQ ID NO: 1461719 - DNA, 25 bp, Homo sapien
ggcagcgttggtccacgctcctgct

SEQ ID NO: 1461720 - DNA, 25 bp, Homo sapien
gcaggtagggcagcgttggtccacg

SEQ ID NO: 1461721 - DNA, 25 bp, Homo sapien
agggcagcgttggtccacgctcctg

SEQ ID NO: 1461722 - DNA, 25 bp, Homo sapien
gtagggcagcgttggtccacgctcc

SEQ ID NO: 1461723 - DNA, 25 bp, Homo sapien
cactctaataggtgggcttgctcta

SEQ ID NO: 1461724 - DNA, 25 bp, Homo sapien
tcaaagcaatgcacccagtaggttc

SEQ ID NO: 1461725 - DNA, 25 bp, Homo sapien
tgcttatcccaagaaaccagtaggg

SEQ ID NO: 1461726 - DNA, 25 bp, Homo sapien
tgagtaccatgtgagggctctgtca

SEQ ID NO: 1461727 - DNA, 25 bp, Homo sapien
aggttattggtggagaagccaagcc

SEQ ID NO: 1461728 - DNA, 25 bp, Homo sapien
tggtggagaagccaagcctctcctc

SEQ ID NO: 1461729 - DNA, 25 bp, Homo sapien
tggaggttattggtggagaagccaa

SEQ ID NO: 1461730 - DNA, 25 bp, Homo sapien
tattggtggagaagccaagcctctc

SEQ ID NO: 1461731 - DNA, 25 bp, Homo sapien
gactgaacattgctagacttccaaa

SEQ ID NO: 1461732 - DNA, 25 bp, Homo sapien
ccttaagtggtttctccgaggcagt

SEQ ID NO: 1461733 - DNA, 25 bp, Homo sapien
gacttccaaagggacaactgctagt

SEQ ID NO: 1461734 - DNA, 25 bp, Homo sapien
caacagcagggcattccttaagtgg

SEQ ID NO: 1461735 - DNA, 25 bp, Homo sapien
taatcttgctaagttcactcagctg

SEQ ID NO: 1461736 - DNA, 25 bp, Homo sapien
gagctggtcacatgaccttctgaag

SEQ ID NO: 1461737 - DNA, 25 bp, Homo sapien
ggtgaaatcaacctagatctagatg

SEQ ID NO: 1461738 - DNA, 25 bp, Homo sapien
aacaagccgtgtcactctgaacaag

SEQ ID NO: 1461739 - DNA, 25 bp, Homo sapien
acactttgcccagaatcacattggc

SEQ ID NO: 1461740 - DNA, 25 bp, Homo sapien
aatcacattggccgcccttctccat

SEQ ID NO: 1461741 - DNA, 25 bp, Homo sapien
tttgcccagaatcacattggccgcc

SEQ ID NO: 1461742 - DNA, 25 bp, Homo sapien
ccacaagtcaccacactttgcccag

SEQ ID NO: 1461743 - DNA, 25 bp, Homo sapien
aagcctacttactctactgggatgg

SEQ ID NO: 1461744 - DNA, 25 bp, Homo sapien
caaaagcacagtacctagaaggcag

SEQ ID NO: 1461745 - DNA, 25 bp, Homo sapien
taaagcttgctccatcacaaagtcc

SEQ ID NO: 1461746 - DNA, 25 bp, Homo sapien
tcctttgcacaagaagtcccggtac

SEQ ID NO: 1461747 - DNA, 25 bp, Homo sapien
tcacagttttgcagtcatggtaagg

SEQ ID NO: 1461748 - DNA, 25 bp, Homo sapien
gttttgcagtcatggtaaggcaagt

SEQ ID NO: 1461749 - DNA, 25 bp, Homo sapien
tctgtgtctccagcacacacgctca

SEQ ID NO: 1461750 - DNA, 25 bp, Homo sapien
cagcacacacgctcacagttttgca

SEQ ID NO: 1461751 - DNA, 25 bp, Homo sapien
caaaacccccatgcaggaacattgc

SEQ ID NO: 1461752 - DNA, 25 bp, Homo sapien
tcaggtgagtcgtcggggattttaa

SEQ ID NO: 1461753 - DNA, 25 bp, Homo sapien
agccgaagccggtttctttggctat

SEQ ID NO: 1461754 - DNA, 25 bp, Homo sapien
tggctatgaaagtctacaaaacccc

SEQ ID NO: 1461755 - DNA, 25 bp, Homo sapien
ggggcgcccacggctagccggagcg

SEQ ID NO: 1461756 - DNA, 25 bp, Homo sapien
tggtatgtgcacgattctgtttgca

SEQ ID NO: 1461757 - DNA, 25 bp, Homo sapien
caggttctcctcgggtggttacgtg

SEQ ID NO: 1461758 - DNA, 25 bp, Homo sapien
tctcctcgggtggttacgtggtatg

SEQ ID NO: 1461759 - DNA, 25 bp, Homo sapien
tggttacgtggtatgtgcacgattc

SEQ ID NO: 1461760 - DNA, 25 bp, Homo sapien
cataattgacgcctctgggtgtgta

SEQ ID NO: 1461761 - DNA, 25 bp, Homo sapien
ttgcataattgacgcctctgggtgt

SEQ ID NO: 1461762 - DNA, 25 bp, Homo sapien
ttgattgcattattgcgtttgcata

SEQ ID NO: 1461763 - DNA, 25 bp, Homo sapien
cattattgcgtttgcataattgacg

SEQ ID NO: 1461764 - DNA, 25 bp, Homo sapien
tcagggtgacattcagtgccaactg

SEQ ID NO: 1461765 - DNA, 25 bp, Homo sapien
agaatcggcaccaagacagcgagga

SEQ ID NO: 1461766 - DNA, 25 bp, Homo sapien
gggcccaggcagagaatcggcacca

SEQ ID NO: 1461767 - DNA, 25 bp, Homo sapien
gaatcggcaccaagacagcgaggag

SEQ ID NO: 1461768 - DNA, 25 bp, Homo sapien
cattcgcaaattccacagggaagat

SEQ ID NO: 1461769 - DNA, 25 bp, Homo sapien
tgtaattatgcagagaccagatgat

SEQ ID NO: 1461770 - DNA, 25 bp, Homo sapien
cacagggaagatattgtaattatgc

SEQ ID NO: 1461771 - DNA, 25 bp, Homo sapien
gtccaagaatcattcgcaaattcca

SEQ ID NO: 1461772 - DNA, 25 bp, Homo sapien
ataaagtgagaataacaacaattag

SEQ ID NO: 1461773 - DNA, 25 bp, Homo sapien
gaaaaataaagtgagaataacaaca

SEQ ID NO: 1461774 - DNA, 25 bp, Homo sapien
aaagtgagaataacaacaattagac

SEQ ID NO: 1461775 - DNA, 25 bp, Homo sapien
aaataaagtgagaataacaacaatt

SEQ ID NO: 1461776 - DNA, 25 bp, Homo sapien
tttgagcttgcttgcagggagtgga

SEQ ID NO: 1461777 - DNA, 25 bp, Homo sapien
cagggagtggaagttgatcgagagt

SEQ ID NO: 1461778 - DNA, 25 bp, Homo sapien
atggaagcctcctccgtcagtcaac

SEQ ID NO: 1461779 - DNA, 25 bp, Homo sapien
aaccttggtactaccactggtactg

SEQ ID NO: 1461780 - DNA, 25 bp, Homo sapien
ctgtaggagcgcctgcctgtctcca

SEQ ID NO: 1461781 - DNA, 25 bp, Homo sapien
cccgatgctgatgctgactcctgta

SEQ ID NO: 1461782 - DNA, 25 bp, Homo sapien
tgatgctgactcctgtaggagcgcc

SEQ ID NO: 1461783 - DNA, 25 bp, Homo sapien
cacttgctggatttccccgatgctg

SEQ ID NO: 1461784 - DNA, 25 bp, Homo sapien
ggtaacagatcctgcatactattct

SEQ ID NO: 1461785 - DNA, 25 bp, Homo sapien
taacagatcctgcatactattctcc

SEQ ID NO: 1461786 - DNA, 25 bp, Homo sapien
tattctcctagttagattttcttcc

SEQ ID NO: 1461787 - DNA, 25 bp, Homo sapien
acagatcctgcatactattctccta

SEQ ID NO: 1461788 - DNA, 25 bp, Homo sapien
ttcctcattgatgactctgctgact

SEQ ID NO: 1461789 - DNA, 25 bp, Homo sapien
ttttctcccacatttggctgctttc

SEQ ID NO: 1461790 - DNA, 25 bp, Homo sapien
acagtgtgggcaaagtttgggctct

SEQ ID NO: 1461791 - DNA, 25 bp, Homo sapien
ttgaataccttcctcattgatgact

SEQ ID NO: 1461792 - DNA, 25 bp, Homo sapien
gaatactggaaccattcttgacacc

SEQ ID NO: 1461793 - DNA, 25 bp, Homo sapien
tcttagatttctccaaggcacccca

SEQ ID NO: 1461794 - DNA, 25 bp, Homo sapien
cattgctgggcaaatattgtgtaca

SEQ ID NO: 1461795 - DNA, 25 bp, Homo sapien
gaccacctttgccatacatccagga

SEQ ID NO: 1461796 - DNA, 25 bp, Homo sapien
gcaataactttacatactccctgat

SEQ ID NO: 1461797 - DNA, 25 bp, Homo sapien
ctcaggacttcttcgaagaaaaagg

SEQ ID NO: 1461798 - DNA, 25 bp, Homo sapien
agacaccttatctgaataactcagg

SEQ ID NO: 1461799 - DNA, 25 bp, Homo sapien
ttcttgaacagcaataactttacat

SEQ ID NO: 1461800 - DNA, 25 bp, Homo sapien
ttgagaatctgggcagctccgggcc

SEQ ID NO: 1461801 - DNA, 25 bp, Homo sapien
ctgctgctgcaatgtgagctcggga

SEQ ID NO: 1461802 - DNA, 25 bp, Homo sapien
atgcgagctgggaacagaccgcgct

SEQ ID NO: 1461803 - DNA, 25 bp, Homo sapien
tgacggggaacttcgggcgcacaca

SEQ ID NO: 1461804 - DNA, 25 bp, Homo sapien
gcaccgacacagactggcgctggat

SEQ ID NO: 1461805 - DNA, 25 bp, Homo sapien
ggagtaggtctcctccaaatggcac

SEQ ID NO: 1461806 - DNA, 25 bp, Homo sapien
caaagaccgcctgggcacttttggg

SEQ ID NO: 1461807 - DNA, 25 bp, Homo sapien
tctccctgctaatctatccgcaaag

SEQ ID NO: 1461808 - DNA, 25 bp, Homo sapien
tgctgtggtcccgtccccttgacgt

SEQ ID NO: 1461809 - DNA, 25 bp, Homo sapien
tttctaaaaccgcatagtctgcggc

SEQ ID NO: 1461810 - DNA, 25 bp, Homo sapien
tttggcgcggctacgtttctcttgc

SEQ ID NO: 1461811 - DNA, 25 bp, Homo sapien
gctcttccccgcgtgtttggcgcgg

SEQ ID NO: 1461812 - DNA, 25 bp, Homo sapien
tctgtccccgcaccgcagagggatg

SEQ ID NO: 1461813 - DNA, 25 bp, Homo sapien
gaccctgactctatttccggctagt

SEQ ID NO: 1461814 - DNA, 25 bp, Homo sapien
tttccgcccagggcggttctgagat

SEQ ID NO: 1461815 - DNA, 25 bp, Homo sapien
gatggtgccaaatggccaggcttcc

SEQ ID NO: 1461816 - DNA, 25 bp, Homo sapien
caaaacaaatcacgggacacgacgg

SEQ ID NO: 1461817 - DNA, 25 bp, Homo sapien
ctcactttgcactcggaagcgggcg

SEQ ID NO: 1461818 - DNA, 25 bp, Homo sapien
tttgccactaccagagggtgtttcg

SEQ ID NO: 1461819 - DNA, 25 bp, Homo sapien
tgcttgccgcgtgagagcagaaata

SEQ ID NO: 1461820 - DNA, 25 bp, Homo sapien
tccgcagatgcagggacgttgctct

SEQ ID NO: 1461821 - DNA, 25 bp, Homo sapien
gagtcaagcccgtcccgtgggccta

SEQ ID NO: 1461822 - DNA, 25 bp, Homo sapien
tgtcaggcctgcgaaatgggagtca

SEQ ID NO: 1461823 - DNA, 25 bp, Homo sapien
ctcctctttggacgttctctgcctc

SEQ ID NO: 1461824 - DNA, 25 bp, Homo sapien
ccgctccaattgctgacccgtttag

SEQ ID NO: 1461825 - DNA, 25 bp, Homo sapien
tgctgacccgtttagggagcccggc

SEQ ID NO: 1461826 - DNA, 25 bp, Homo sapien
tccaattgctgacccgtttagggag

SEQ ID NO: 1461827 - DNA, 25 bp, Homo sapien
ggccttcccgctccaattgctgacc

SEQ ID NO: 1461828 - DNA, 25 bp, Homo sapien
tcgccgtatccctgcttggagcacg

SEQ ID NO: 1461829 - DNA, 25 bp, Homo sapien
gaggctctccgaggctaagccacaa

SEQ ID NO: 1461830 - DNA, 25 bp, Homo sapien
aaggagagaacgagccactgattgc

SEQ ID NO: 1461831 - DNA, 25 bp, Homo sapien
taagccacaaactctagggctccgg

SEQ ID NO: 1461832 - DNA, 25 bp, Homo sapien
caagagttggtaactccagttgatt

SEQ ID NO: 1461833 - DNA, 25 bp, Homo sapien
agttggtaactccagttgattcttc

SEQ ID NO: 1461834 - DNA, 25 bp, Homo sapien
aaacaagagttggtaactccagttg

SEQ ID NO: 1461835 - DNA, 25 bp, Homo sapien
cctggtaagatgtatgctggagtgt

SEQ ID NO: 1461836 - DNA, 25 bp, Homo sapien
gtaatacatttgaaggaaggtagct

SEQ ID NO: 1461837 - DNA, 25 bp, Homo sapien
ttgatacttgatggaggtaatacat

SEQ ID NO: 1461838 - DNA, 25 bp, Homo sapien
ttttgatacttgatggaggtaatac

SEQ ID NO: 1461839 - DNA, 25 bp, Homo sapien
acatttgaaggaaggtagctaagac

SEQ ID NO: 1461840 - DNA, 25 bp, Homo sapien
ggaagatgtttgctttcccagacat

SEQ ID NO: 1461841 - DNA, 25 bp, Homo sapien
tgatgtcagagagcacaacagcagt

SEQ ID NO: 1461842 - DNA, 25 bp, Homo sapien
gcatgtcggcatgtagtgatgatgt

SEQ ID NO: 1461843 - DNA, 25 bp, Homo sapien
cacagcaattgtctgccctgaatcc

SEQ ID NO: 1461844 - DNA, 25 bp, Homo sapien
gcatgcatacagctgtctatatttg

SEQ ID NO: 1461845 - DNA, 25 bp, Homo sapien
acatgcatgcatacagctgtctata

SEQ ID NO: 1461846 - DNA, 25 bp, Homo sapien
catacagctgtctatatttggaaag

SEQ ID NO: 1461847 - DNA, 25 bp, Homo sapien
tgcatacagctgtctatatttggaa

SEQ ID NO: 1461848 - DNA, 25 bp, Homo sapien
tctgcagtcccggttcattttccat

SEQ ID NO: 1461849 - DNA, 25 bp, Homo sapien
ctgcagtcccggttcattttccata

SEQ ID NO: 1461850 - DNA, 25 bp, Homo sapien
ttaatttccacttctgctttcatca

SEQ ID NO: 1461851 - DNA, 25 bp, Homo sapien
acttctgctttcatcacagcccttg

SEQ ID NO: 1461852 - DNA, 25 bp, Homo sapien
ctgctttcatcacagcccttgaaga

SEQ ID NO: 1461853 - DNA, 25 bp, Homo sapien
tttccacttctgctttcatcacagc

SEQ ID NO: 1461854 - DNA, 25 bp, Homo sapien
tcaacagaaagaaacattattgtgg

SEQ ID NO: 1461855 - DNA, 25 bp, Homo sapien
gaaacattattgtgggaatagtgga

SEQ ID NO: 1461856 - DNA, 25 bp, Homo sapien
cattattgtgggaatagtggacttg

SEQ ID NO: 1461857 - DNA, 25 bp, Homo sapien
cagaaagaaacattattgtgggaat

SEQ ID NO: 1461858 - DNA, 25 bp, Homo sapien
gggtcgttatccaaaggatcaaatc

SEQ ID NO: 1461859 - DNA, 25 bp, Homo sapien
tccaaaggagtgtagcaaattcagt

SEQ ID NO: 1461860 - DNA, 25 bp, Homo sapien
cagttctttcagagggtcgttatcc

SEQ ID NO: 1461861 - DNA, 25 bp, Homo sapien
caaatctggtgcaagggttggcatc

SEQ ID NO: 1461862 - DNA, 25 bp, Homo sapien
ctgtaatgagtatggttccaaaatc

SEQ ID NO: 1461863 - DNA, 25 bp, Homo sapien
tgtaatgagtatggttccaaaatca

SEQ ID NO: 1461864 - DNA, 25 bp, Homo sapien
gtaatgagtatggttccaaaatcat

SEQ ID NO: 1461865 - DNA, 25 bp, Homo sapien
catttctaatgtagaccatagagcc

SEQ ID NO: 1461866 - DNA, 25 bp, Homo sapien
agttggagatgtgttataaggcttg

SEQ ID NO: 1461867 - DNA, 25 bp, Homo sapien
agatgtgttataaggcttgaggaga

SEQ ID NO: 1461868 - DNA, 25 bp, Homo sapien
gccactagcaaatcatggtgaagga

SEQ ID NO: 1461869 - DNA, 25 bp, Homo sapien
cgtgtccaggacaaattcttcaggg

SEQ ID NO: 1461870 - DNA, 25 bp, Homo sapien
gaagagttgagccacgtgtccagga

SEQ ID NO: 1461871 - DNA, 25 bp, Homo sapien
gagccacgtgtccaggacaaattct

SEQ ID NO: 1461872 - DNA, 25 bp, Homo sapien
gagttgagccacgtgtccaggacaa

SEQ ID NO: 1461873 - DNA, 25 bp, Homo sapien
tcatggtttagcagtatactcactg

SEQ ID NO: 1461874 - DNA, 25 bp, Homo sapien
tgttatattttgtactccacctcct

SEQ ID NO: 1461875 - DNA, 25 bp, Homo sapien
tttagcagtatactcactggagcca

SEQ ID NO: 1461876 - DNA, 25 bp, Homo sapien
agccacgaaagggacaagatgttat

SEQ ID NO: 1461877 - DNA, 25 bp, Homo sapien
atctttgtgtcgtaaggtctctgca

SEQ ID NO: 1461878 - DNA, 25 bp, Homo sapien
tcgtaaggtctctgcaaatatactt

SEQ ID NO: 1461879 - DNA, 25 bp, Homo sapien
aactcttgtgcacaatcataaaaga

SEQ ID NO: 1461880 - DNA, 25 bp, Homo sapien
ggaacaaaaactcttgtgcacaatc

SEQ ID NO: 1461881 - DNA, 25 bp, Homo sapien
gcactgggaaatctgccctctggcc

SEQ ID NO: 1461882 - DNA, 25 bp, Homo sapien
ccctctggccagacgtaggctgtaa

SEQ ID NO: 1461883 - DNA, 25 bp, Homo sapien
actgcctgggttctacaaatgttgc

SEQ ID NO: 1461884 - DNA, 25 bp, Homo sapien
tgcactttggttcggtgaactccac

SEQ ID NO: 1461885 - DNA, 25 bp, Homo sapien
tcaaattccccagcagacagtttgg

SEQ ID NO: 1461886 - DNA, 25 bp, Homo sapien
tataatcagttcagctaagcaagcc

SEQ ID NO: 1461887 - DNA, 25 bp, Homo sapien
gcagcttgctcataagagacccaga

SEQ ID NO: 1461888 - DNA, 25 bp, Homo sapien
aataatgtccaggttcggtctcaag

SEQ ID NO: 1461889 - DNA, 25 bp, Homo sapien
acgtagctgacaacggacttctcat

SEQ ID NO: 1461890 - DNA, 25 bp, Homo sapien
cacacgtagctgacaacggacttct

SEQ ID NO: 1461891 - DNA, 25 bp, Homo sapien
tggcacacgtagctgacaacggact

SEQ ID NO: 1461892 - DNA, 25 bp, Homo sapien
agctgacaacggacttctcattcat

SEQ ID NO: 1461893 - DNA, 25 bp, Homo sapien
ttccccaggagctgcaatttctcca

SEQ ID NO: 1461894 - DNA, 25 bp, Homo sapien
ttttccccaggagctgcaatttctc

SEQ ID NO: 1461895 - DNA, 25 bp, Homo sapien
ttttttccccaggagctgcaatttc

SEQ ID NO: 1461896 - DNA, 25 bp, Homo sapien
tagcatatttcctgtacttatcttt

SEQ ID NO: 1461897 - DNA, 25 bp, Homo sapien
ccacaggttctgtccgtgtgaaggg

SEQ ID NO: 1461898 - DNA, 25 bp, Homo sapien
cagattggtgagttttagatgagaa

SEQ ID NO: 1461899 - DNA, 25 bp, Homo sapien
gaggacttgatagcgttatctcttt

SEQ ID NO: 1461900 - DNA, 25 bp, Homo sapien
tctgtgccattgtgtttaccgccac

SEQ ID NO: 1461901 - DNA, 25 bp, Homo sapien
ggttgttctttccttctccttgcat

SEQ ID NO: 1461902 - DNA, 25 bp, Homo sapien
ctggttgttctttccttctccttgc

SEQ ID NO: 1461903 - DNA, 25 bp, Homo sapien
tggttgttctttccttctccttgca

SEQ ID NO: 1461904 - DNA, 25 bp, Homo sapien
gaagtgttattatacatcagcaata

SEQ ID NO: 1461905 - DNA, 25 bp, Homo sapien
ttttagagttgaagtgttattatac

SEQ ID NO: 1461906 - DNA, 25 bp, Homo sapien
gcaataaattcaggtaatacatgtc

SEQ ID NO: 1461907 - DNA, 25 bp, Homo sapien
taatacatgtcaacacattttgacc

SEQ ID NO: 1461908 - DNA, 25 bp, Homo sapien
agttcatgctctcctaaggtttggg

SEQ ID NO: 1461909 - DNA, 25 bp, Homo sapien
cactgccctgtgagttggtgatata

SEQ ID NO: 1461910 - DNA, 25 bp, Homo sapien
gatataacagccagcaagtagccaa

SEQ ID NO: 1461911 - DNA, 25 bp, Homo sapien
gcatttgcaaatccatacaggttgg

SEQ ID NO: 1461912 - DNA, 25 bp, Homo sapien
gcactgcctcccttctctggtccat

SEQ ID NO: 1461913 - DNA, 25 bp, Homo sapien
gcagctcagcactgcctcccttctc

SEQ ID NO: 1461914 - DNA, 25 bp, Homo sapien
cagctcagcactgcctcccttctct

SEQ ID NO: 1461915 - DNA, 25 bp, Homo sapien
tcagcactgcctcccttctctggtc

SEQ ID NO: 1461916 - DNA, 25 bp, Homo sapien
tattatgggttcagtaaggatcaga

SEQ ID NO: 1461917 - DNA, 25 bp, Homo sapien
ctttggaaagatttacgacatcggg

SEQ ID NO: 1461918 - DNA, 25 bp, Homo sapien
ccttctggtgttttgcgggtctggc

SEQ ID NO: 1461919 - DNA, 25 bp, Homo sapien
tcgggaagagcaacattacacaatg

SEQ ID NO: 1461920 - DNA, 25 bp, Homo sapien
ttctggtccacctcaaatcttgcct

SEQ ID NO: 1461921 - DNA, 25 bp, Homo sapien
cgtagcttttcaccggtaacttgct

SEQ ID NO: 1461922 - DNA, 25 bp, Homo sapien
gccatccgtgcacagccaagtctgt

SEQ ID NO: 1461923 - DNA, 25 bp, Homo sapien
cctgtatttgcggttgtatccgtag

SEQ ID NO: 1461924 - DNA, 25 bp, Homo sapien
tctcccttttgaaggaatccctcat

SEQ ID NO: 1461925 - DNA, 25 bp, Homo sapien
tccctcattgcatatggtcttggtg

SEQ ID NO: 1461926 - DNA, 25 bp, Homo sapien
tggaatctaaagggaccacattccc

SEQ ID NO: 1461927 - DNA, 25 bp, Homo sapien
gaaggaatccctcattgcatatggt

SEQ ID NO: 1461928 - DNA, 25 bp, Homo sapien
tagatgactgactggatggagacag

SEQ ID NO: 1461929 - DNA, 25 bp, Homo sapien
gtaagccatccatcagttctagaag

SEQ ID NO: 1461930 - DNA, 25 bp, Homo sapien
tatagcccttcaacagaatcccatt

SEQ ID NO: 1461931 - DNA, 25 bp, Homo sapien
tgcagtcaggagacactataggaga

SEQ ID NO: 1461932 - DNA, 25 bp, Homo sapien
tggaataagaagtccctattagggc

SEQ ID NO: 1461933 - DNA, 25 bp, Homo sapien
tggcatgtgaggacatcagctctgc

SEQ ID NO: 1461934 - DNA, 25 bp, Homo sapien
ttagggcagtatctaggagtggcat

SEQ ID NO: 1461935 - DNA, 25 bp, Homo sapien
agtggcatgtgaggacatcagctct

SEQ ID NO: 1461936 - DNA, 25 bp, Homo sapien
tcttcactggttctgcctttagtga

SEQ ID NO: 1461937 - DNA, 25 bp, Homo sapien
tctcaacaatcttcactggttctgc

SEQ ID NO: 1461938 - DNA, 25 bp, Homo sapien
tcaacaatcttcactggttctgcct

SEQ ID NO: 1461939 - DNA, 25 bp, Homo sapien
caatcttcactggttctgcctttag

SEQ ID NO: 1461940 - DNA, 25 bp, Homo sapien
gaattccaacttcacccaggattgt

SEQ ID NO: 1461941 - DNA, 25 bp, Homo sapien
ggcattgcccaatccagtcctaact

SEQ ID NO: 1461942 - DNA, 25 bp, Homo sapien
ccaggattgtggctctgacttgctc

SEQ ID NO: 1461943 - DNA, 25 bp, Homo sapien
gtagccaagccaccttcctaatgaa

SEQ ID NO: 1461944 - DNA, 25 bp, Homo sapien
tctgagcagcttggataaaagctgt

SEQ ID NO: 1461945 - DNA, 25 bp, Homo sapien
ctgagcagcttggataaaagctgtg

SEQ ID NO: 1461946 - DNA, 25 bp, Homo sapien
ttctgagcagcttggataaaagctg

SEQ ID NO: 1461947 - DNA, 25 bp, Homo sapien
tgagcagcttggataaaagctgtga

SEQ ID NO: 1461948 - DNA, 25 bp, Homo sapien
gccatgaatgagtacagcaaacaaa

SEQ ID NO: 1461949 - DNA, 25 bp, Homo sapien
gccagccatgaatgagtacagcaaa

SEQ ID NO: 1461950 - DNA, 25 bp, Homo sapien
cagcgggcaacactgtacagcagag

SEQ ID NO: 1461951 - DNA, 25 bp, Homo sapien
agccacagcgggcaacactgtacag

SEQ ID NO: 1461952 - DNA, 25 bp, Homo sapien
gtttgtttgcttcccgatatcctcc

SEQ ID NO: 1461953 - DNA, 25 bp, Homo sapien
gcttttcatgatcagctaaacttcc

SEQ ID NO: 1461954 - DNA, 25 bp, Homo sapien
tttactataactggcttgggaatgg

SEQ ID NO: 1461955 - DNA, 25 bp, Homo sapien
agcagagactcattactttccacac

SEQ ID NO: 1461956 - DNA, 25 bp, Homo sapien
ccccttgttcctgtgcatctctgag

SEQ ID NO: 1461957 - DNA, 25 bp, Homo sapien
caaggtggaagtcttttggcacact

SEQ ID NO: 1461958 - DNA, 25 bp, Homo sapien
gagcttcaaaaaattgggcgattcc

SEQ ID NO: 1461959 - DNA, 25 bp, Homo sapien
gcacactgaatcttttggtccaccg

SEQ ID NO: 1461960 - DNA, 25 bp, Homo sapien
ttaaggccaaccgatccccagaaca

SEQ ID NO: 1461961 - DNA, 25 bp, Homo sapien
aatttctggatgtaagtgagtcctg

SEQ ID NO: 1461962 - DNA, 25 bp, Homo sapien
ccaccaatttctggatgtaagtgag

SEQ ID NO: 1461963 - DNA, 25 bp, Homo sapien
gaatgcagatgaggccgactaacga

SEQ ID NO: 1461964 - DNA, 25 bp, Homo sapien
gactaacgaaagctttcagtgcagg

SEQ ID NO: 1461965 - DNA, 25 bp, Homo sapien
caagcagctttatgagaggcacaac

SEQ ID NO: 1461966 - DNA, 25 bp, Homo sapien
cagagagagcgtgtgtaccttgtta

SEQ ID NO: 1461967 - DNA, 25 bp, Homo sapien
ttcgctgaacttaactgcactatta

SEQ ID NO: 1461968 - DNA, 25 bp, Homo sapien
gtagagcagctcacaatcggctatg

SEQ ID NO: 1461969 - DNA, 25 bp, Homo sapien
tatgtctgtatactgcacacaggca

SEQ ID NO: 1461970 - DNA, 25 bp, Homo sapien
gtttgatagccacagtatgagttat

SEQ ID NO: 1461971 - DNA, 25 bp, Homo sapien
tacaatgccaacttagatcactttt

SEQ ID NO: 1461972 - DNA, 25 bp, Homo sapien
ctcttttcggaaatatctgctcaaa

SEQ ID NO: 1461973 - DNA, 25 bp, Homo sapien
tcaggtacaaccagaacatcaggtc

SEQ ID NO: 1461974 - DNA, 25 bp, Homo sapien
ggttctatggacgttgtaactggca

SEQ ID NO: 1461975 - DNA, 25 bp, Homo sapien
caaattagtgggcttcagatggtga

SEQ ID NO: 1461976 - DNA, 25 bp, Homo sapien
gcgtctctaggctattgcaggtaat

SEQ ID NO: 1461977 - DNA, 25 bp, Homo sapien
gaagctaagttaacatcccacagaa

SEQ ID NO: 1461978 - DNA, 25 bp, Homo sapien
aaattttgaatagaccccagagcac

SEQ ID NO: 1461979 - DNA, 25 bp, Homo sapien
tgtggaaccaggctaacaatgacct

SEQ ID NO: 1461980 - DNA, 25 bp, Homo sapien
gaagatttgtacctgtccagaacag

SEQ ID NO: 1461981 - DNA, 25 bp, Homo sapien
aagaacatctcttctggtcgtccat

SEQ ID NO: 1461982 - DNA, 25 bp, Homo sapien
cttcaaaagaacatctcttctggtc

SEQ ID NO: 1461983 - DNA, 25 bp, Homo sapien
catggggttactttatccagtaaga

SEQ ID NO: 1461984 - DNA, 25 bp, Homo sapien
tatccagtaagaatgcttcaaaaga

SEQ ID NO: 1461985 - DNA, 25 bp, Homo sapien
tcaaatagcaggttggacttcccct

SEQ ID NO: 1461986 - DNA, 25 bp, Homo sapien
ggtctgttacgtgcataaacctcct

SEQ ID NO: 1461987 - DNA, 25 bp, Homo sapien
taaccaacctgtcctctaggtacaa

SEQ ID NO: 1461988 - DNA, 25 bp, Homo sapien
gaaatgtacatttggcaaaccgtga

SEQ ID NO: 1461989 - DNA, 25 bp, Homo sapien
tttactcaaccagcaaaggccatta

SEQ ID NO: 1461990 - DNA, 25 bp, Homo sapien
ctgagttctgggagagccatttaac

SEQ ID NO: 1461991 - DNA, 25 bp, Homo sapien
taacatcttgggtcctagaaagggc

SEQ ID NO: 1461992 - DNA, 25 bp, Homo sapien
tactaggcacgtaatacaaacgacc

SEQ ID NO: 1461993 - DNA, 25 bp, Homo sapien
tcactgatgcgatggtaggtctttt

SEQ ID NO: 1461994 - DNA, 25 bp, Homo sapien
ccattttagaaactggtgggtgtgc

SEQ ID NO: 1461995 - DNA, 25 bp, Homo sapien
cactatggcaggactgtatgcagta

SEQ ID NO: 1461996 - DNA, 25 bp, Homo sapien
tcacgtttgtctgggcattgcagca

SEQ ID NO: 1461997 - DNA, 25 bp, Homo sapien
ttattttctaggattggctgggcat

SEQ ID NO: 1461998 - DNA, 25 bp, Homo sapien
tgaattggctcagagatccccttgc

SEQ ID NO: 1461999 - DNA, 25 bp, Homo sapien
ttctaggattggctgggcattttca

SEQ ID NO: 1462000 - DNA, 25 bp, Homo sapien
attttcctgcattgggggtagtagt

SEQ ID NO: 1462001 - DNA, 25 bp, Homo sapien
ttatgaaagatctgaattgcaagac

SEQ ID NO: 1462002 - DNA, 25 bp, Homo sapien
tgtttcatccaaaatgtggctacat

SEQ ID NO: 1462003 - DNA, 25 bp, Homo sapien
gaattgcaagactgatgacatgtgt

SEQ ID NO: 1462004 - DNA, 25 bp, Homo sapien
aagactgatgacatgtgtttcatcc

SEQ ID NO: 1462005 - DNA, 25 bp, Homo sapien
cttttcttctccgtttgatatctcc

SEQ ID NO: 1462006 - DNA, 25 bp, Homo sapien
tatctcccgtgcataaggatcctaa

SEQ ID NO: 1462007 - DNA, 25 bp, Homo sapien
cgtttgatatctcccgtgcataagg

SEQ ID NO: 1462008 - DNA, 25 bp, Homo sapien
tcccgtgcataaggatcctaaatgc

SEQ ID NO: 1462009 - DNA, 25 bp, Homo sapien
caatcttgtttatatcgaaacataa

SEQ ID NO: 1462010 - DNA, 25 bp, Homo sapien
aattacatttgttgacaagcgttca

SEQ ID NO: 1462011 - DNA, 25 bp, Homo sapien
gttgacaagcgttcagcagctaaat

SEQ ID NO: 1462012 - DNA, 25 bp, Homo sapien
catttgttgacaagcgttcagcagc

SEQ ID NO: 1462013 - DNA, 25 bp, Homo sapien
taggtttgccatagttcagacactc

SEQ ID NO: 1462014 - DNA, 25 bp, Homo sapien
taaagtagaccagatgcatggatgc

SEQ ID NO: 1462015 - DNA, 25 bp, Homo sapien
tagccagggcacgtttcttaagaaa

SEQ ID NO: 1462016 - DNA, 25 bp, Homo sapien
tagagagctcgagttggacacggtt

SEQ ID NO: 1462017 - DNA, 25 bp, Homo sapien
gagagtccccactcattcaagagag

SEQ ID NO: 1462018 - DNA, 25 bp, Homo sapien
cattcagatgtgcacgtgacgtgcc

SEQ ID NO: 1462019 - DNA, 25 bp, Homo sapien
gtgtcgctctgtaggcaactcagta

SEQ ID NO: 1462020 - DNA, 25 bp, Homo sapien
tgacgtgccatagctgtgtcgctct

SEQ ID NO: 1462021 - DNA, 25 bp, Homo sapien
tatggtaatgataatgtaacagttc

SEQ ID NO: 1462022 - DNA, 25 bp, Homo sapien
gtcccatgactttgcttgtcgtgca

SEQ ID NO: 1462023 - DNA, 25 bp, Homo sapien
tatatgctataatgtacattttctg

SEQ ID NO: 1462024 - DNA, 25 bp, Homo sapien
gattttctgcaacgtgtcccatgac

SEQ ID NO: 1462025 - DNA, 25 bp, Homo sapien
tttctggccagaatgtaagttcctg

SEQ ID NO: 1462026 - DNA, 25 bp, Homo sapien
tatatactcagaataaaaggcactt

SEQ ID NO: 1462027 - DNA, 25 bp, Homo sapien
gacagaatccaggtttttctggcca

SEQ ID NO: 1462028 - DNA, 25 bp, Homo sapien
tgggttccacacatatcacctagcc

SEQ ID NO: 1462029 - DNA, 25 bp, Homo sapien
ttaagcatatgttcagcatttaact

SEQ ID NO: 1462030 - DNA, 25 bp, Homo sapien
gcatatgttcagcatttaactctaa

SEQ ID NO: 1462031 - DNA, 25 bp, Homo sapien
taagcatatgttcagcatttaactc

SEQ ID NO: 1462032 - DNA, 25 bp, Homo sapien
aagcatatgttcagcatttaactct

SEQ ID NO: 1462033 - DNA, 25 bp, Homo sapien
aaataaggcacgagggaccatcctg

SEQ ID NO: 1462034 - DNA, 25 bp, Homo sapien
gataattctcccagatcttgtccga

SEQ ID NO: 1462035 - DNA, 25 bp, Homo sapien
tgtccgagactatcaaggcaatacc

SEQ ID NO: 1462036 - DNA, 25 bp, Homo sapien
ttgggatgccgcctaaagcagatac

SEQ ID NO: 1462037 - DNA, 25 bp, Homo sapien
tgtcatatatgtgatccgtcactga

SEQ ID NO: 1462038 - DNA, 25 bp, Homo sapien
ggtgcatgactgtaccagactgtct

SEQ ID NO: 1462039 - DNA, 25 bp, Homo sapien
ccatgaacaaggtgtatctctccag

SEQ ID NO: 1462040 - DNA, 25 bp, Homo sapien
tccagttatgcagatcttaagacct

SEQ ID NO: 1462041 - DNA, 25 bp, Homo sapien
gtgtgggcctcttcgagcagccaac

SEQ ID NO: 1462042 - DNA, 25 bp, Homo sapien
ctgtggcttaacaggtgtgggcctc

SEQ ID NO: 1462043 - DNA, 25 bp, Homo sapien
gacatgcaccgccatagactattta

SEQ ID NO: 1462044 - DNA, 25 bp, Homo sapien
cttgtctcaagtaatctcaaagtgc

SEQ ID NO: 1462045 - DNA, 25 bp, Homo sapien
aataaaaagcgattttgaattgctt

SEQ ID NO: 1462046 - DNA, 25 bp, Homo sapien
taaaaagcgattttgaattgcttac

SEQ ID NO: 1462047 - DNA, 25 bp, Homo sapien
tgaataaaaagcgattttgaattgc

SEQ ID NO: 1462048 - DNA, 25 bp, Homo sapien
cattacattcttataggcatagaaa

SEQ ID NO: 1462049 - DNA, 25 bp, Homo sapien
tcagctcgattatctctcagaagct

SEQ ID NO: 1462050 - DNA, 25 bp, Homo sapien
gtcctctttcagctcgattatctct

SEQ ID NO: 1462051 - DNA, 25 bp, Homo sapien
gctcgattatctctcagaagctgat

SEQ ID NO: 1462052 - DNA, 25 bp, Homo sapien
tctttcagctcgattatctctcaga

SEQ ID NO: 1462053 - DNA, 25 bp, Homo sapien
cagctgggccagtaactaaaaagtc

SEQ ID NO: 1462054 - DNA, 25 bp, Homo sapien
taatgcaacctctcttgtcaacggc

SEQ ID NO: 1462055 - DNA, 25 bp, Homo sapien
tcagtgagagttagcaatcgagttc

SEQ ID NO: 1462056 - DNA, 25 bp, Homo sapien
taagatgtagcctggagatggaagc

SEQ ID NO: 1462057 - DNA, 25 bp, Homo sapien
aattaatgggactagctctcagtag

SEQ ID NO: 1462058 - DNA, 25 bp, Homo sapien
caggaacgtctgaactaaataagta

SEQ ID NO: 1462059 - DNA, 25 bp, Homo sapien
tctacctgtaaagctactgtgagta

SEQ ID NO: 1462060 - DNA, 25 bp, Homo sapien
tatggttaggctcattctttcagga

SEQ ID NO: 1462061 - DNA, 25 bp, Homo sapien
gaatatggtgcgaagtgcttcttac

SEQ ID NO: 1462062 - DNA, 25 bp, Homo sapien
caagtgaggttgctttctggattct

SEQ ID NO: 1462063 - DNA, 25 bp, Homo sapien
gactcaataatgtcaactctgatca

SEQ ID NO: 1462064 - DNA, 25 bp, Homo sapien
cttgtgaatatggtgcgaagtgctt

SEQ ID NO: 1462065 - DNA, 25 bp, Homo sapien
cgaagatacaatccccttattagtg

SEQ ID NO: 1462066 - DNA, 25 bp, Homo sapien
taggccaaacgaagatacaatcccc

SEQ ID NO: 1462067 - DNA, 25 bp, Homo sapien
ctggacttaggccaaacgaagatac

SEQ ID NO: 1462068 - DNA, 25 bp, Homo sapien
ttcagattgctggacttaggccaaa

SEQ ID NO: 1462069 - DNA, 25 bp, Homo sapien
aataactcatataagaattacatta

SEQ ID NO: 1462070 - DNA, 25 bp, Homo sapien
aaataactcatataagaattacatt

SEQ ID NO: 1462071 - DNA, 25 bp, Homo sapien
aaaataactcatataagaattacat

SEQ ID NO: 1462072 - DNA, 25 bp, Homo sapien
aaagtctcacatcccaagaggaaag

SEQ ID NO: 1462073 - DNA, 25 bp, Homo sapien
gaagacagtggcagtaaaggaaaga

SEQ ID NO: 1462074 - DNA, 25 bp, Homo sapien
tcacaagtatgactgaagacagtgg

SEQ ID NO: 1462075 - DNA, 25 bp, Homo sapien
cagagtctttccatggaggtcacaa

SEQ ID NO: 1462076 - DNA, 25 bp, Homo sapien
tagtgaggtcctacaaatgagtgag

SEQ ID NO: 1462077 - DNA, 25 bp, Homo sapien
tcacgcatttatttggtcagtgtat

SEQ ID NO: 1462078 - DNA, 25 bp, Homo sapien
ggatcacgcatttatttggtcagtg

SEQ ID NO: 1462079 - DNA, 25 bp, Homo sapien
ttaaggatcacgcatttatttggtc

SEQ ID NO: 1462080 - DNA, 25 bp, Homo sapien
aaggatcacgcatttatttggtcag

SEQ ID NO: 1462081 - DNA, 25 bp, Homo sapien
tttctcataaagctgatctactctc

SEQ ID NO: 1462082 - DNA, 25 bp, Homo sapien
ttaatcgttgacataattaacacct

SEQ ID NO: 1462083 - DNA, 25 bp, Homo sapien
tttttctcataaagctgatctactc

SEQ ID NO: 1462084 - DNA, 25 bp, Homo sapien
tcgttgacataattaacacctttta

SEQ ID NO: 1462085 - DNA, 25 bp, Homo sapien
aaagaggctgagtaacttccttttg

SEQ ID NO: 1462086 - DNA, 25 bp, Homo sapien
tccttttggattacaatggtcctta

SEQ ID NO: 1462087 - DNA, 25 bp, Homo sapien
agggagacagttaaatacttgaaag

SEQ ID NO: 1462088 - DNA, 25 bp, Homo sapien
ggctgagtaacttccttttggatta

SEQ ID NO: 1462089 - DNA, 25 bp, Homo sapien
cctagccccagggctaaaccaatgg

SEQ ID NO: 1462090 - DNA, 25 bp, Homo sapien
cattatgaccctttgattgttggag

SEQ ID NO: 1462091 - DNA, 25 bp, Homo sapien
aactgtaaaagtgctcataacctgg

SEQ ID NO: 1462092 - DNA, 25 bp, Homo sapien
ggaacctaactaaaagcacgtgctc

SEQ ID NO: 1462093 - DNA, 25 bp, Homo sapien
gatcgagccgcatgtgctttaagaa

SEQ ID NO: 1462094 - DNA, 25 bp, Homo sapien
tcaactgtaaagaatggctaggctc

SEQ ID NO: 1462095 - DNA, 25 bp, Homo sapien
tacactggagccaaggttccacacg

SEQ ID NO: 1462096 - DNA, 25 bp, Homo sapien
tagagcagttgtggttggtaaccct

SEQ ID NO: 1462097 - DNA, 25 bp, Homo sapien
gaagtagcatccttgaaagtcagag

SEQ ID NO: 1462098 - DNA, 25 bp, Homo sapien
tattaccaaatgcttggcagtagca

SEQ ID NO: 1462099 - DNA, 25 bp, Homo sapien
gaattaacccctggaaattcaagca

SEQ ID NO: 1462100 - DNA, 25 bp, Homo sapien
taccaaagtcaaagctacaactact

SEQ ID NO: 1462101 - DNA, 25 bp, Homo sapien
gatgtatttacagaacgaattaacc

SEQ ID NO: 1462102 - DNA, 25 bp, Homo sapien
tactcttcattttagtattttagaa

SEQ ID NO: 1462103 - DNA, 25 bp, Homo sapien
actcttcattttagtattttagaag

SEQ ID NO: 1462104 - DNA, 25 bp, Homo sapien
ctcttcattttagtattttagaagg

SEQ ID NO: 1462105 - DNA, 25 bp, Homo sapien
ttactcttcattttagtattttaga

SEQ ID NO: 1462106 - DNA, 25 bp, Homo sapien
agtagaatactccaataaggttata

SEQ ID NO: 1462107 - DNA, 25 bp, Homo sapien
tgatgctactcaatgtaatgaaaat

SEQ ID NO: 1462108 - DNA, 25 bp, Homo sapien
taatttcccaaaagagctaagtaga

SEQ ID NO: 1462109 - DNA, 25 bp, Homo sapien
gttgttcttacattattatcaatgg

SEQ ID NO: 1462110 - DNA, 25 bp, Homo sapien
cattctcttgttacccactgggcca

SEQ ID NO: 1462111 - DNA, 25 bp, Homo sapien
tcatggtgatgagaatccggggaaa

SEQ ID NO: 1462112 - DNA, 25 bp, Homo sapien
aaatgaaccattctcttgttaccca

SEQ ID NO: 1462113 - DNA, 25 bp, Homo sapien
tgagaatccggggaaaaatgaacca

SEQ ID NO: 1462114 - DNA, 25 bp, Homo sapien
tcttttactatgcaacctagctatg

SEQ ID NO: 1462115 - DNA, 25 bp, Homo sapien
ttataagtacaacactctggcaaac

SEQ ID NO: 1462116 - DNA, 25 bp, Homo sapien
tctggcaaacaagaggcatacatgc

SEQ ID NO: 1462117 - DNA, 25 bp, Homo sapien
tgtgcctcaataatctcagccataa

SEQ ID NO: 1462118 - DNA, 25 bp, Homo sapien
aaacaactcatccttcttcggacct

SEQ ID NO: 1462119 - DNA, 25 bp, Homo sapien
tcttgtccagctcttgagctagctc

SEQ ID NO: 1462120 - DNA, 25 bp, Homo sapien
atgggaccaactggacgcttcagcg

SEQ ID NO: 1462121 - DNA, 25 bp, Homo sapien
gctagctccagctgataatgatgaa

SEQ ID NO: 1462122 - DNA, 25 bp, Homo sapien
tgtagactacatgcatccaactgat

SEQ ID NO: 1462123 - DNA, 25 bp, Homo sapien
ggcaaaagcctagaagtcatccctg

SEQ ID NO: 1462124 - DNA, 25 bp, Homo sapien
gcaacaaatcaagtgggtctaccat

SEQ ID NO: 1462125 - DNA, 25 bp, Homo sapien
tggaatcaaacacggaaggtacaaa

SEQ ID NO: 1462126 - DNA, 25 bp, Homo sapien
tcttttgcacaagtggcagatctgt

SEQ ID NO: 1462127 - DNA, 25 bp, Homo sapien
caaaattaaccccactatcacagtg

SEQ ID NO: 1462128 - DNA, 25 bp, Homo sapien
caatgtaagacatttgaagagggtc

SEQ ID NO: 1462129 - DNA, 25 bp, Homo sapien
ggctctttgtgcactcaaaattaac

SEQ ID NO: 1462130 - DNA, 25 bp, Homo sapien
caaatatctgtgtaaagacctgctc

SEQ ID NO: 1462131 - DNA, 25 bp, Homo sapien
caccgtgagtgcaatgggtcctttt

SEQ ID NO: 1462132 - DNA, 25 bp, Homo sapien
tattactgtccaagacaccgtgagt

SEQ ID NO: 1462133 - DNA, 25 bp, Homo sapien
tggcagtaccagaaacctattagta

SEQ ID NO: 1462134 - DNA, 25 bp, Homo sapien
gattatgcaactgttcactctcccc

SEQ ID NO: 1462135 - DNA, 25 bp, Homo sapien
catagaaacaactagcctgaattgg

SEQ ID NO: 1462136 - DNA, 25 bp, Homo sapien
gggaattattacttgattatgcaac

SEQ ID NO: 1462137 - DNA, 25 bp, Homo sapien
tcttttcgtctatacacttctgtca

SEQ ID NO: 1462138 - DNA, 25 bp, Homo sapien
caggaaaacagctcaaaatgcaacc

SEQ ID NO: 1462139 - DNA, 25 bp, Homo sapien
ttttttaaacctcctgcttgctgat

SEQ ID NO: 1462140 - DNA, 25 bp, Homo sapien
tgcccggccctgtaccatgtctttt

SEQ ID NO: 1462141 - DNA, 25 bp, Homo sapien
gtgcccggccctgtaccatgtcttt

SEQ ID NO: 1462142 - DNA, 25 bp, Homo sapien
tatagctctagctgaaaatatggaa

SEQ ID NO: 1462143 - DNA, 25 bp, Homo sapien
taatgtaggtaactctttgaaaatc

SEQ ID NO: 1462144 - DNA, 25 bp, Homo sapien
acccggccgatccttcttaatgtag

SEQ ID NO: 1462145 - DNA, 25 bp, Homo sapien
gacaggcaacattgaaaaattcaca

SEQ ID NO: 1462146 - DNA, 25 bp, Homo sapien
gcttgatggttaagtccttgggaaa

SEQ ID NO: 1462147 - DNA, 25 bp, Homo sapien
gaatctctccgccattttttcgaag

SEQ ID NO: 1462148 - DNA, 25 bp, Homo sapien
gaaattggccacagggtagcgttaa

SEQ ID NO: 1462149 - DNA, 25 bp, Homo sapien
cctggtctataagatggagaggaga

SEQ ID NO: 1462150 - DNA, 25 bp, Homo sapien
taaactgtctatgaccaaatatgag

SEQ ID NO: 1462151 - DNA, 25 bp, Homo sapien
cctggaatacttcagtagtaaactg

SEQ ID NO: 1462152 - DNA, 25 bp, Homo sapien
aaacactcctgcaagttcagaattg

SEQ ID NO: 1462153 - DNA, 25 bp, Homo sapien
tcagaattgtatggacctggaatac

SEQ ID NO: 1462154 - DNA, 25 bp, Homo sapien
gcaaggttccatatttctgaagcat

SEQ ID NO: 1462155 - DNA, 25 bp, Homo sapien
catagtaagtaagcatcattgtgtc

SEQ ID NO: 1462156 - DNA, 25 bp, Homo sapien
tcaagccaattcgaagactaagtta

SEQ ID NO: 1462157 - DNA, 25 bp, Homo sapien
tataaatagcctgtagaaaagtgtc

SEQ ID NO: 1462158 - DNA, 25 bp, Homo sapien
ggcagaataaccaccaataccagca

SEQ ID NO: 1462159 - DNA, 25 bp, Homo sapien
gctgaatctcctggataatagcctc

SEQ ID NO: 1462160 - DNA, 25 bp, Homo sapien
tgaatgcggattttcagtagaccaa

SEQ ID NO: 1462161 - DNA, 25 bp, Homo sapien
actgtacagaaaagtggactgaggc

SEQ ID NO: 1462162 - DNA, 25 bp, Homo sapien
gttgagttgcccgacatacacgtgc

SEQ ID NO: 1462163 - DNA, 25 bp, Homo sapien
ccatatttttaagtcggcctgcctg

SEQ ID NO: 1462164 - DNA, 25 bp, Homo sapien
cctaccagaggtcagtcaggtgact

SEQ ID NO: 1462165 - DNA, 25 bp, Homo sapien
taaatagccccttgtatagtgctga

SEQ ID NO: 1462166 - DNA, 25 bp, Homo sapien
ccccagttggtgaaaatgagctcat

SEQ ID NO: 1462167 - DNA, 25 bp, Homo sapien
gcaaagttcataggccaaggtttta

SEQ ID NO: 1462168 - DNA, 25 bp, Homo sapien
tagaaaatgggctacaaatcccagc

SEQ ID NO: 1462169 - DNA, 25 bp, Homo sapien
caataccatgaagctagcctatcag

SEQ ID NO: 1462170 - DNA, 25 bp, Homo sapien
tcaggttcacttctgactaaaagga

SEQ ID NO: 1462171 - DNA, 25 bp, Homo sapien
tccagcaaaaacagccccatctttt

SEQ ID NO: 1462172 - DNA, 25 bp, Homo sapien
tacagtagtttctatccaccctggg

SEQ ID NO: 1462173 - DNA, 25 bp, Homo sapien
taaggaatacttgtcgatctggaag

SEQ ID NO: 1462174 - DNA, 25 bp, Homo sapien
aatgtcattccccagatgttcaaaa

SEQ ID NO: 1462175 - DNA, 25 bp, Homo sapien
cattccccagatgttcaaaacgtaa

SEQ ID NO: 1462176 - DNA, 25 bp, Homo sapien
tgtcattccccagatgttcaaaacg

SEQ ID NO: 1462177 - DNA, 25 bp, Homo sapien
aggttccctcgaatgtcattcccca

SEQ ID NO: 1462178 - DNA, 25 bp, Homo sapien
taatttattagcattagaagatttg

SEQ ID NO: 1462179 - DNA, 25 bp, Homo sapien
atttattagcattagaagatttggt

SEQ ID NO: 1462180 - DNA, 25 bp, Homo sapien
aatttattagcattagaagatttgg

SEQ ID NO: 1462181 - DNA, 25 bp, Homo sapien
ctaatttattagcattagaagattt

SEQ ID NO: 1462182 - DNA, 25 bp, Homo sapien
gtggctttttattccatagaaatgg

SEQ ID NO: 1462183 - DNA, 25 bp, Homo sapien
gatgaggatgtggctttttattcca

SEQ ID NO: 1462184 - DNA, 25 bp, Homo sapien
ggatgaggatgtggctttttattcc

SEQ ID NO: 1462185 - DNA, 25 bp, Homo sapien
ggctttttattccatagaaatggaa

SEQ ID NO: 1462186 - DNA, 25 bp, Homo sapien
aaggcgactgagtctagcttggaaa

SEQ ID NO: 1462187 - DNA, 25 bp, Homo sapien
aggcgactgagtctagcttggaaac

SEQ ID NO: 1462188 - DNA, 25 bp, Homo sapien
gtgataccacatgctccacctgatt

SEQ ID NO: 1462189 - DNA, 25 bp, Homo sapien
tttgtctagctcagtaggatcttcc

SEQ ID NO: 1462190 - DNA, 25 bp, Homo sapien
ccttttcgtagaaccagtcactctg

SEQ ID NO: 1462191 - DNA, 25 bp, Homo sapien
caccagggcacaactccagtgatac

SEQ ID NO: 1462192 - DNA, 25 bp, Homo sapien
cagcatcagtgctgctgagactgct

SEQ ID NO: 1462193 - DNA, 25 bp, Homo sapien
agcatcagtgctgctgagactgctg

SEQ ID NO: 1462194 - DNA, 25 bp, Homo sapien
gcatcagtgctgctgagactgctgg

SEQ ID NO: 1462195 - DNA, 25 bp, Homo sapien
cacgatcttggatgtctgtaatctc

SEQ ID NO: 1462196 - DNA, 25 bp, Homo sapien
gcacgatcttggatgtctgtaatct

SEQ ID NO: 1462197 - DNA, 25 bp, Homo sapien
gctgaaaattgagtcattataatac

SEQ ID NO: 1462198 - DNA, 25 bp, Homo sapien
aaaacattcaaccacaaacactgga

SEQ ID NO: 1462199 - DNA, 25 bp, Homo sapien
ttgtagctgaaaattgagtcattat

SEQ ID NO: 1462200 - DNA, 25 bp, Homo sapien
acattcaaccacaaacactggagat

SEQ ID NO: 1462201 - DNA, 25 bp, Homo sapien
ttccattttgtccttattggtctgg

SEQ ID NO: 1462202 - DNA, 25 bp, Homo sapien
acattccattttgtccttattggtc

SEQ ID NO: 1462203 - DNA, 25 bp, Homo sapien
cttattggtctggttcgtttcctca

SEQ ID NO: 1462204 - DNA, 25 bp, Homo sapien
tgagactttttgctcttcacattcc

SEQ ID NO: 1462205 - DNA, 25 bp, Homo sapien
ggtaggctctatcactgtccatgtc

SEQ ID NO: 1462206 - DNA, 25 bp, Homo sapien
tgatgcacattatacgacctccgtt

SEQ ID NO: 1462207 - DNA, 25 bp, Homo sapien
tatttaagtttgatgacggcctgcg

SEQ ID NO: 1462208 - DNA, 25 bp, Homo sapien
cgtttcagagggcaagatatacttc

SEQ ID NO: 1462209 - DNA, 25 bp, Homo sapien
tccacgattgaacttccagaactct

SEQ ID NO: 1462210 - DNA, 25 bp, Homo sapien
tatcttccaaaagacttggtataat

SEQ ID NO: 1462211 - DNA, 25 bp, Homo sapien
gtgatgtgttttccacgattgaact

SEQ ID NO: 1462212 - DNA, 25 bp, Homo sapien
cttggtataatctggtaaatattga

SEQ ID NO: 1462213 - DNA, 25 bp, Homo sapien
agctgttcccggctgctggagctcc

SEQ ID NO: 1462214 - DNA, 25 bp, Homo sapien
ccggctgctggagctccgatcggtt

SEQ ID NO: 1462215 - DNA, 25 bp, Homo sapien
gctccgatcggttggcgcccggcgg

SEQ ID NO: 1462216 - DNA, 25 bp, Homo sapien
ctggagctccgatcggttggcgccc

SEQ ID NO: 1462217 - DNA, 25 bp, Homo sapien
cgggagcctggcctcgaagctcagg

SEQ ID NO: 1462218 - DNA, 25 bp, Homo sapien
aagctcaggcccgtgaacagactcc

SEQ ID NO: 1462219 - DNA, 25 bp, Homo sapien
ggagcctggcctcgaagctcaggcc

SEQ ID NO: 1462220 - DNA, 25 bp, Homo sapien
gctcaggcccgtgaacagactccaa

SEQ ID NO: 1462221 - DNA, 25 bp, Homo sapien
tacaacagcaccggcgacttccaaa

SEQ ID NO: 1462222 - DNA, 25 bp, Homo sapien
agcaccggcgacttccaaagagcag

SEQ ID NO: 1462223 - DNA, 25 bp, Homo sapien
gcaccggcgacttccaaagagcagt

SEQ ID NO: 1462224 - DNA, 25 bp, Homo sapien
aacagcaccggcgacttccaaagag

SEQ ID NO: 1462225 - DNA, 25 bp, Homo sapien
gcattttgagatgagcttccggaag

SEQ ID NO: 1462226 - DNA, 25 bp, Homo sapien
cgacaggcggcggaaaccggatgcc

SEQ ID NO: 1462227 - DNA, 25 bp, Homo sapien
ttccggaagccgacaggcggcggaa

SEQ ID NO: 1462228 - DNA, 25 bp, Homo sapien
gcggaaaccggatgcccggagcaac

SEQ ID NO: 1462229 - DNA, 25 bp, Homo sapien
ggaagtccaatgtggaaacgagaag

SEQ ID NO: 1462230 - DNA, 25 bp, Homo sapien
tgagcagcaaatacaggaggagatt

SEQ ID NO: 1462231 - DNA, 25 bp, Homo sapien
gagaagctcctctgcctaacaaaga

SEQ ID NO: 1462232 - DNA, 25 bp, Homo sapien
ttagtatctgagtcctgtgaggcct

SEQ ID NO: 1462233 - DNA, 25 bp, Homo sapien
cttctcttagacccagtgcgggctc

SEQ ID NO: 1462234 - DNA, 25 bp, Homo sapien
tctcttagacccagtgcgggctcta

SEQ ID NO: 1462235 - DNA, 25 bp, Homo sapien
ctcttagacccagtgcgggctctac

SEQ ID NO: 1462236 - DNA, 25 bp, Homo sapien
ttctcttagacccagtgcgggctct

SEQ ID NO: 1462237 - DNA, 25 bp, Homo sapien
tcttgggctctgattctctatactg

SEQ ID NO: 1462238 - DNA, 25 bp, Homo sapien
ctcctcatgctgaaccatcgcctcc

SEQ ID NO: 1462239 - DNA, 25 bp, Homo sapien
ggctaccttcatgtgcagattcttt

SEQ ID NO: 1462240 - DNA, 25 bp, Homo sapien
tcgcctccccaccaacttggatgtt

SEQ ID NO: 1462241 - DNA, 25 bp, Homo sapien
tgcagtctgggcttaaaacagtagg

SEQ ID NO: 1462242 - DNA, 25 bp, Homo sapien
aaacagtaggtggaacagtcaaagt

SEQ ID NO: 1462243 - DNA, 25 bp, Homo sapien
caacgtctggagcatgttttgagaa

SEQ ID NO: 1462244 - DNA, 25 bp, Homo sapien
cctccagggctttacggagaagaat

SEQ ID NO: 1462245 - DNA, 25 bp, Homo sapien
tgacttaggtatggtctctcagacc

SEQ ID NO: 1462246 - DNA, 25 bp, Homo sapien
gatgaaacccaatggactggtgctt

SEQ ID NO: 1462247 - DNA, 25 bp, Homo sapien
caaactgtgccaaaatcgggaagac

SEQ ID NO: 1462248 - DNA, 25 bp, Homo sapien
gacgtgtgttctcttagcctagcaa

SEQ ID NO: 1462249 - DNA, 25 bp, Homo sapien
tttttgcatttatcatctgcttttt

SEQ ID NO: 1462250 - DNA, 25 bp, Homo sapien
tgcttttttcattgcttccttctcc

SEQ ID NO: 1462251 - DNA, 25 bp, Homo sapien
tctgcttttttcattgcttccttct

SEQ ID NO: 1462252 - DNA, 25 bp, Homo sapien
cttttttcattgcttccttctccat

SEQ ID NO: 1462253 - DNA, 25 bp, Homo sapien
tttgcaatcctgctgaaagcggaag

SEQ ID NO: 1462254 - DNA, 25 bp, Homo sapien
gaatttgaaaaatgcacggactttg

SEQ ID NO: 1462255 - DNA, 25 bp, Homo sapien
gattcttgagaacagctaatttgca

SEQ ID NO: 1462256 - DNA, 25 bp, Homo sapien
tattgggaatctctttgtgacctaa

SEQ ID NO: 1462257 - DNA, 25 bp, Homo sapien
aggatgttgaccttgatacaagcca

SEQ ID NO: 1462258 - DNA, 25 bp, Homo sapien
gacgtgcagtttcatgtatctccca

SEQ ID NO: 1462259 - DNA, 25 bp, Homo sapien
catcagtcttattcgggttttccca

SEQ ID NO: 1462260 - DNA, 25 bp, Homo sapien
ggtctatgctagtttatgacgtgca

SEQ ID NO: 1462261 - DNA, 25 bp, Homo sapien
tctgtgctttcagcattatctgttc

SEQ ID NO: 1462262 - DNA, 25 bp, Homo sapien
gtgctttcagcattatctgttcttt

SEQ ID NO: 1462263 - DNA, 25 bp, Homo sapien
actctttcgtttccgtttcatcttg

SEQ ID NO: 1462264 - DNA, 25 bp, Homo sapien
tatactctttcgtttccgtttcatc

SEQ ID NO: 1462265 - DNA, 25 bp, Homo sapien
ttctatgatgactgtatttttcaat

SEQ ID NO: 1462266 - DNA, 25 bp, Homo sapien
tcaattgtgactttagttctatcat

SEQ ID NO: 1462267 - DNA, 25 bp, Homo sapien
ctgtatttttcaattgtgactttag

SEQ ID NO: 1462268 - DNA, 25 bp, Homo sapien
tttttcaattgtgactttagttcta

SEQ ID NO: 1462269 - DNA, 25 bp, Homo sapien
aatagagttacagagggctcagcag

SEQ ID NO: 1462270 - DNA, 25 bp, Homo sapien
tcagaaagcagaatcgacctcaggt

SEQ ID NO: 1462271 - DNA, 25 bp, Homo sapien
cactcggaaggtgttcctactggca

SEQ ID NO: 1462272 - DNA, 25 bp, Homo sapien
aacagtcagagccaagacgttcact

SEQ ID NO: 1462273 - DNA, 25 bp, Homo sapien
tcagtgcttgcagtaactccagctg

SEQ ID NO: 1462274 - DNA, 25 bp, Homo sapien
cactcagtgcttgcagtaactccag

SEQ ID NO: 1462275 - DNA, 25 bp, Homo sapien
cttcactcagtgcttgcagtaactc

SEQ ID NO: 1462276 - DNA, 25 bp, Homo sapien
gtgcttgcagtaactccagctgtgt

SEQ ID NO: 1462277 - DNA, 25 bp, Homo sapien
ttagaacaacgctacaggcctttgg

SEQ ID NO: 1462278 - DNA, 25 bp, Homo sapien
caatcgatgagttaaagttggccag

SEQ ID NO: 1462279 - DNA, 25 bp, Homo sapien
gggcccttccgagatatcaccgaag

SEQ ID NO: 1462280 - DNA, 25 bp, Homo sapien
caacgttgcgggtggcagaaccaat

SEQ ID NO: 1462281 - DNA, 25 bp, Homo sapien
tggtggtttgctattaatctttatg

SEQ ID NO: 1462282 - DNA, 25 bp, Homo sapien
tgctattaatctttatgtttttcag

SEQ ID NO: 1462283 - DNA, 25 bp, Homo sapien
taatgtggcacatcgttgtctgcag

SEQ ID NO: 1462284 - DNA, 25 bp, Homo sapien
gctgtctacggcttttggaatggag

SEQ ID NO: 1462285 - DNA, 25 bp, Homo sapien
gaatggagtgggatgtagaacacat

SEQ ID NO: 1462286 - DNA, 25 bp, Homo sapien
tgcttgcccattgcacccggtgatt

SEQ ID NO: 1462287 - DNA, 25 bp, Homo sapien
gcatttatgtgtttcggggtctgca

SEQ ID NO: 1462288 - DNA, 25 bp, Homo sapien
tacttaagtcattgcatttatgtgt

SEQ ID NO: 1462289 - DNA, 25 bp, Homo sapien
gtctgcattgttgatgtagtctgta

SEQ ID NO: 1462290 - DNA, 25 bp, Homo sapien
tgtttcggggtctgcattgttgatg

SEQ ID NO: 1462291 - DNA, 25 bp, Homo sapien
agaattgcttctgcccggtgcttgg

SEQ ID NO: 1462292 - DNA, 25 bp, Homo sapien
tctaacaaattgaaacaccaggcta

SEQ ID NO: 1462293 - DNA, 25 bp, Homo sapien
tgaggaaaattgtccccaccagttc

SEQ ID NO: 1462294 - DNA, 25 bp, Homo sapien
tcttctgaagtctgagggaccctgt

SEQ ID NO: 1462295 - DNA, 25 bp, Homo sapien
tcatttcttctagagccttactgag

SEQ ID NO: 1462296 - DNA, 25 bp, Homo sapien
cgtttcctgaggtttgctaatattg

SEQ ID NO: 1462297 - DNA, 25 bp, Homo sapien
ccgtttcctgaggtttgctaatatt

SEQ ID NO: 1462298 - DNA, 25 bp, Homo sapien
gagccttactgagttttgatatcat

SEQ ID NO: 1462299 - DNA, 25 bp, Homo sapien
acatctcagacgctggaccaggtac

SEQ ID NO: 1462300 - DNA, 25 bp, Homo sapien
atctcagacgctggaccaggtacag

SEQ ID NO: 1462301 - DNA, 25 bp, Homo sapien
ctaacagccacatctcagacgctgg

SEQ ID NO: 1462302 - DNA, 25 bp, Homo sapien
agccacatctcagacgctggaccag

SEQ ID NO: 1462303 - DNA, 25 bp, Homo sapien
agtcagaaagagtacagcctcttct

SEQ ID NO: 1462304 - DNA, 25 bp, Homo sapien
ggtgtcactgggctccacttcaagg

SEQ ID NO: 1462305 - DNA, 25 bp, Homo sapien
ggtcttgccagtcagggtcttcacg

SEQ ID NO: 1462306 - DNA, 25 bp, Homo sapien
gggctccacttcaagggtgatggtc

SEQ ID NO: 1462307 - DNA, 25 bp, Homo sapien
gtcttgccagtcagggtcttcacga

SEQ ID NO: 1462308 - DNA, 25 bp, Homo sapien
cattgctgtattctcactgcctaga

SEQ ID NO: 1462309 - DNA, 25 bp, Homo sapien
catgaagtcaggaatttttgcatga

SEQ ID NO: 1462310 - DNA, 25 bp, Homo sapien
tttgcatgactggttcattgctgta

SEQ ID NO: 1462311 - DNA, 25 bp, Homo sapien
cactggagatttaagttccatgaag

SEQ ID NO: 1462312 - DNA, 25 bp, Homo sapien
ccaaatgttccctttagtgccagtt

SEQ ID NO: 1462313 - DNA, 25 bp, Homo sapien
tcccacagattaactacatgcaagc

SEQ ID NO: 1462314 - DNA, 25 bp, Homo sapien
taggatgctacaatctcagtttcaa

SEQ ID NO: 1462315 - DNA, 25 bp, Homo sapien
tactgtctctgaacgtttttgcagc

SEQ ID NO: 1462316 - DNA, 25 bp, Homo sapien
cccatatcatttgcctctcactgaa

SEQ ID NO: 1462317 - DNA, 25 bp, Homo sapien
gatgtctaaactctatatgctcaaa

SEQ ID NO: 1462318 - DNA, 25 bp, Homo sapien
tgtcacttgcattgttgcaaatatg

SEQ ID NO: 1462319 - DNA, 25 bp, Homo sapien
gctcaaatttaagagtgatatgaac

SEQ ID NO: 1462320 - DNA, 25 bp, Homo sapien
agagtgtctgggactacagtcagtg

SEQ ID NO: 1462321 - DNA, 25 bp, Homo sapien
gtgccaccacacctggctaattttt

SEQ ID NO: 1462322 - DNA, 25 bp, Homo sapien
agatgaggtttcaccatgatggcca

SEQ ID NO: 1462323 - DNA, 25 bp, Homo sapien
ccagagtgtctgggactacagtcag

SEQ ID NO: 1462324 - DNA, 25 bp, Homo sapien
catcacttcactataattcacccga

SEQ ID NO: 1462325 - DNA, 25 bp, Homo sapien
gattgcttcagctccaaggtagttc

SEQ ID NO: 1462326 - DNA, 25 bp, Homo sapien
cagtccgattagaaatagtgatgcc

SEQ ID NO: 1462327 - DNA, 25 bp, Homo sapien
aattcacccgacatcgccttttaca

SEQ ID NO: 1462328 - DNA, 25 bp, Homo sapien
ctctcgttttgtaattcaaagcttt

SEQ ID NO: 1462329 - DNA, 25 bp, Homo sapien
cttccagggcaaccaattggtttca

SEQ ID NO: 1462330 - DNA, 25 bp, Homo sapien
tatggcacaaataatcgtgataagt

SEQ ID NO: 1462331 - DNA, 25 bp, Homo sapien
caaggaccgttagttcaagtatatc

SEQ ID NO: 1462332 - DNA, 25 bp, Homo sapien
tcattttggcaaggaccgttagttc

SEQ ID NO: 1462333 - DNA, 25 bp, Homo sapien
ttacgactgtccctccattttccaa

SEQ ID NO: 1462334 - DNA, 25 bp, Homo sapien
ccaacccacacttgtcctgctgctc

SEQ ID NO: 1462335 - DNA, 25 bp, Homo sapien
ttccaaccaacccacacttgtcctg

SEQ ID NO: 1462336 - DNA, 25 bp, Homo sapien
tttacgactgtccctccattttcca

SEQ ID NO: 1462337 - DNA, 25 bp, Homo sapien
gggtcttctctagttgatttcttct

SEQ ID NO: 1462338 - DNA, 25 bp, Homo sapien
ttgggtcttctctagttgatttctt

SEQ ID NO: 1462339 - DNA, 25 bp, Homo sapien
tctcctcctgtacctggttaactgc

SEQ ID NO: 1462340 - DNA, 25 bp, Homo sapien
tggttaactgcagtgcctgatcctt

SEQ ID NO: 1462341 - DNA, 25 bp, Homo sapien
tttcatgctgagtggtgctaagccc

SEQ ID NO: 1462342 - DNA, 25 bp, Homo sapien
ggtgctaagccctcttcaagggata

SEQ ID NO: 1462343 - DNA, 25 bp, Homo sapien
cttctttcatgctgagtggtgctaa

SEQ ID NO: 1462344 - DNA, 25 bp, Homo sapien
tcaagggataacaacgctaagaggc

SEQ ID NO: 1462345 - DNA, 25 bp, Homo sapien
aattaaacttacaacatgtcatgag

SEQ ID NO: 1462346 - DNA, 25 bp, Homo sapien
catgagtttcttctggcagaattca

SEQ ID NO: 1462347 - DNA, 25 bp, Homo sapien
aagtgattctggctgtgtcaataaa

SEQ ID NO: 1462348 - DNA, 25 bp, Homo sapien
cagctctaattgtgttaatgaattg

SEQ ID NO: 1462349 - DNA, 25 bp, Homo sapien
ttagctatttcctgagagtgcaaag

SEQ ID NO: 1462350 - DNA, 25 bp, Homo sapien
tagctatttcctgagagtgcaaagc

SEQ ID NO: 1462351 - DNA, 25 bp, Homo sapien
tcttcctccttctgcagcttgtcac

SEQ ID NO: 1462352 - DNA, 25 bp, Homo sapien
gagcagtttgccagggctcttccac

SEQ ID NO: 1462353 - DNA, 25 bp, Homo sapien
tctgaagagcagtttgccagggctc

SEQ ID NO: 1462354 - DNA, 25 bp, Homo sapien
tcttccactgggaaagcactgtgag

SEQ ID NO: 1462355 - DNA, 25 bp, Homo sapien
gcactgtgagtttcaggcaggccag

SEQ ID NO: 1462356 - DNA, 25 bp, Homo sapien
aagcagggtatgttggaccgaactc

SEQ ID NO: 1462357 - DNA, 25 bp, Homo sapien
tcctgcactagacccaccctgagaa

SEQ ID NO: 1462358 - DNA, 25 bp, Homo sapien
tatgttggaccgaactcagggacct

SEQ ID NO: 1462359 - DNA, 25 bp, Homo sapien
cagggacctccgtgcattgagagat

SEQ ID NO: 1462360 - DNA, 25 bp, Homo sapien
cgctaactggttatgtatgcaaact

SEQ ID NO: 1462361 - DNA, 25 bp, Homo sapien
tacactctataagttggcaaggata

SEQ ID NO: 1462362 - DNA, 25 bp, Homo sapien
tgactgtaggtgctagtgtggcaca

SEQ ID NO: 1462363 - DNA, 25 bp, Homo sapien
tcttgctggtgactgttgactgtag

SEQ ID NO: 1462364 - DNA, 25 bp, Homo sapien
ttcaacatattcaaggagggaatac

SEQ ID NO: 1462365 - DNA, 25 bp, Homo sapien
attcaacatattcaaggagggaata

SEQ ID NO: 1462366 - DNA, 25 bp, Homo sapien
gctcccaaatgttcctggtgattgc

SEQ ID NO: 1462367 - DNA, 25 bp, Homo sapien
cctggtgattgcatctctgtattct

SEQ ID NO: 1462368 - DNA, 25 bp, Homo sapien
tcttgaagagccttgccggacaact

SEQ ID NO: 1462369 - DNA, 25 bp, Homo sapien
ctgtgaatgtgctggcagtgtgctc

SEQ ID NO: 1462370 - DNA, 25 bp, Homo sapien
ttctttttctgcgaatgagagctgg

SEQ ID NO: 1462371 - DNA, 25 bp, Homo sapien
ctttttctgcgaatgagagctgggc

SEQ ID NO: 1462372 - DNA, 25 bp, Homo sapien
aagtttctttttctgcgaatgagag

SEQ ID NO: 1462373 - DNA, 25 bp, Homo sapien
tttctgcgaatgagagctgggctgt

SEQ ID NO: 1462374 - DNA, 25 bp, Homo sapien
cttcgttcaggcatcctgcactctc

SEQ ID NO: 1462375 - DNA, 25 bp, Homo sapien
gagggattggcagatttgtgacaaa

SEQ ID NO: 1462376 - DNA, 25 bp, Homo sapien
agggattggcagatttgtgacaaac

SEQ ID NO: 1462377 - DNA, 25 bp, Homo sapien
gggattggcagatttgtgacaaaca

SEQ ID NO: 1462378 - DNA, 25 bp, Homo sapien
ggattggcagatttgtgacaaacac

SEQ ID NO: 1462379 - DNA, 25 bp, Homo sapien
gtgctctcctcgaggctgcgagtga

SEQ ID NO: 1462380 - DNA, 25 bp, Homo sapien
tgctctcctcgaggctgcgagtgat

SEQ ID NO: 1462381 - DNA, 25 bp, Homo sapien
tggtgctctcctcgaggctgcgagt

SEQ ID NO: 1462382 - DNA, 25 bp, Homo sapien
tctcctcgaggctgcgagtgatgga

SEQ ID NO: 1462383 - DNA, 25 bp, Homo sapien
gagcagggagactgctggagcagca

SEQ ID NO: 1462384 - DNA, 25 bp, Homo sapien
ctggcggggagagagcagggagact

SEQ ID NO: 1462385 - DNA, 25 bp, Homo sapien
gagagagcagggagactgctggagc

SEQ ID NO: 1462386 - DNA, 25 bp, Homo sapien
ggggagagagcagggagactgctgg

SEQ ID NO: 1462387 - DNA, 25 bp, Homo sapien
cttgcctgctaagtcgcctttgaga

SEQ ID NO: 1462388 - DNA, 25 bp, Homo sapien
tagtctggggcagtaacctggtctc

SEQ ID NO: 1462389 - DNA, 25 bp, Homo sapien
gctaagtcgcctttgagaatcttca

SEQ ID NO: 1462390 - DNA, 25 bp, Homo sapien
tttgagaatcttcatctagtctggg

SEQ ID NO: 1462391 - DNA, 25 bp, Homo sapien
attccagcctggctgcggaagcgcc

SEQ ID NO: 1462392 - DNA, 25 bp, Homo sapien
agcgcccactagttccctttgtctg

SEQ ID NO: 1462393 - DNA, 25 bp, Homo sapien
tagttccctttgtctgctgctctgc

SEQ ID NO: 1462394 - DNA, 25 bp, Homo sapien
tgcggaagcgcccactagttccctt

SEQ ID NO: 1462395 - DNA, 25 bp, Homo sapien
gagtcttgctctggctgatgtaggg

SEQ ID NO: 1462396 - DNA, 25 bp, Homo sapien
gtcttgctctggctgatgtagggag

SEQ ID NO: 1462397 - DNA, 25 bp, Homo sapien
agtcttgctctggctgatgtaggga

SEQ ID NO: 1462398 - DNA, 25 bp, Homo sapien
tctctcatgctgcaggcaaagaact

SEQ ID NO: 1462399 - DNA, 25 bp, Homo sapien
tcatgctgcaggcaaagaactcttc

SEQ ID NO: 1462400 - DNA, 25 bp, Homo sapien
ctctctcatgctgcaggcaaagaac

SEQ ID NO: 1462401 - DNA, 25 bp, Homo sapien
tctcatgctgcaggcaaagaactct

SEQ ID NO: 1462402 - DNA, 25 bp, Homo sapien
gagcgcgctgagtcagccgcggctc

SEQ ID NO: 1462403 - DNA, 25 bp, Homo sapien
agggctccgttctcgccttcacttg

SEQ ID NO: 1462404 - DNA, 25 bp, Homo sapien
cttgctgctccggagcgcgctgagt

SEQ ID NO: 1462405 - DNA, 25 bp, Homo sapien
gctgcgctccgcgacccctccgtgt

SEQ ID NO: 1462406 - DNA, 25 bp, Homo sapien
tactgtcaagcttcccgcggtcttt

SEQ ID NO: 1462407 - DNA, 25 bp, Homo sapien
tcagtgggactaaagcgctagcaag

SEQ ID NO: 1462408 - DNA, 25 bp, Homo sapien
tgaactttcgatgatctagttagcg

SEQ ID NO: 1462409 - DNA, 25 bp, Homo sapien
gccagcttcagtgggactaaagcgc

SEQ ID NO: 1462410 - DNA, 25 bp, Homo sapien
aattccttaatgttaactcaagcct

SEQ ID NO: 1462411 - DNA, 25 bp, Homo sapien
aaatgtttggctgagtccatgaagt

SEQ ID NO: 1462412 - DNA, 25 bp, Homo sapien
ccttaatgttaactcaagcctcttt

SEQ ID NO: 1462413 - DNA, 25 bp, Homo sapien
gtttggctgagtccatgaagtacaa

SEQ ID NO: 1462414 - DNA, 25 bp, Homo sapien
tcaagtcaatttcagtggatatccc

SEQ ID NO: 1462415 - DNA, 25 bp, Homo sapien
aacagacgccactccttcagacttg

SEQ ID NO: 1462416 - DNA, 25 bp, Homo sapien
tccctgacaggataatcaagatgac

SEQ ID NO: 1462417 - DNA, 25 bp, Homo sapien
caaaagtaagagtgatggtcaagtc

SEQ ID NO: 1462418 - DNA, 25 bp, Homo sapien
tatcctagtctgaatccatttgttc

SEQ ID NO: 1462419 - DNA, 25 bp, Homo sapien
ttgctgacaaattggtgataaagtg

SEQ ID NO: 1462420 - DNA, 25 bp, Homo sapien
gaggagcaatcatcagcgtttacac

SEQ ID NO: 1462421 - DNA, 25 bp, Homo sapien
taattaaattgccttcaaacagctc

SEQ ID NO: 1462422 - DNA, 25 bp, Homo sapien
tccacacattcgatgtatttgggtc

SEQ ID NO: 1462423 - DNA, 25 bp, Homo sapien
ttacacagttcacagtgttgaatcc

SEQ ID NO: 1462424 - DNA, 25 bp, Homo sapien
ctgaaaggggtttacacagttcaca

SEQ ID NO: 1462425 - DNA, 25 bp, Homo sapien
cgatgtatttgggtcgaggtatcca

SEQ ID NO: 1462426 - DNA, 25 bp, Homo sapien
ttatccatatcgtttgagttggagc

SEQ ID NO: 1462427 - DNA, 25 bp, Homo sapien
gtttgagttggagctccttcatgta

SEQ ID NO: 1462428 - DNA, 25 bp, Homo sapien
gaccttgcctgagggacttccccat

SEQ ID NO: 1462429 - DNA, 25 bp, Homo sapien
catgtatttcgtgtgttcatcccga

SEQ ID NO: 1462430 - DNA, 25 bp, Homo sapien
ctggtggtgaattatgtatggtgct

SEQ ID NO: 1462431 - DNA, 25 bp, Homo sapien
tttagccttcttgctaagttctggg

SEQ ID NO: 1462432 - DNA, 25 bp, Homo sapien
catttaaatagggactgctgtgctc

SEQ ID NO: 1462433 - DNA, 25 bp, Homo sapien
cacacgggtttaccagagctttcaa

SEQ ID NO: 1462434 - DNA, 25 bp, Homo sapien
aagctgatagattcctcttaaagac

SEQ ID NO: 1462435 - DNA, 25 bp, Homo sapien
ccgagagccaaaccaaagctgatag

SEQ ID NO: 1462436 - DNA, 25 bp, Homo sapien
caaaccaaagctgatagattcctct

SEQ ID NO: 1462437 - DNA, 25 bp, Homo sapien
tccaccgagagccaaaccaaagctg

SEQ ID NO: 1462438 - DNA, 25 bp, Homo sapien
ttgctgaaatgccactagacttctg

SEQ ID NO: 1462439 - DNA, 25 bp, Homo sapien
aagtaaatacccaaaaatgttgctg

SEQ ID NO: 1462440 - DNA, 25 bp, Homo sapien
agctttttcaactcccgggtcgatg

SEQ ID NO: 1462441 - DNA, 25 bp, Homo sapien
aaagctcccatcttcagcttggctg

SEQ ID NO: 1462442 - DNA, 25 bp, Homo sapien
catttagtcaatgctctttacatca

SEQ ID NO: 1462443 - DNA, 25 bp, Homo sapien
gtagttttctaatatcatttagtca

SEQ ID NO: 1462444 - DNA, 25 bp, Homo sapien
tacatcatccatggtgccactaatg

SEQ ID NO: 1462445 - DNA, 25 bp, Homo sapien
cacctcacccggactgtttctgtag

SEQ ID NO: 1462446 - DNA, 25 bp, Homo sapien
tatgatatcatacaggagatgtggc

SEQ ID NO: 1462447 - DNA, 25 bp, Homo sapien
tatcatacaggagatgtggcgaaaa

SEQ ID NO: 1462448 - DNA, 25 bp, Homo sapien
tacaggagatgtggcgaaaaggcaa

SEQ ID NO: 1462449 - DNA, 25 bp, Homo sapien
tggtattatgatatcatacaggaga

SEQ ID NO: 1462450 - DNA, 25 bp, Homo sapien
ccacactactgaaagaagacttctt

SEQ ID NO: 1462451 - DNA, 25 bp, Homo sapien
tgaggactcaactgttgttttaaag

SEQ ID NO: 1462452 - DNA, 25 bp, Homo sapien
ggaacatgcttgcaggagtcccaca

SEQ ID NO: 1462453 - DNA, 25 bp, Homo sapien
tgaaatgacctgcatggtaggaaca

SEQ ID NO: 1462454 - DNA, 25 bp, Homo sapien
caagtctcacaatcaggcatccctg

SEQ ID NO: 1462455 - DNA, 25 bp, Homo sapien
tctttggttatgaggacttgaagta

SEQ ID NO: 1462456 - DNA, 25 bp, Homo sapien
acattggcaatggataaggctcttc

SEQ ID NO: 1462457 - DNA, 25 bp, Homo sapien
ttctctgcacattggcaatggataa

SEQ ID NO: 1462458 - DNA, 25 bp, Homo sapien
attacaaaagtcaccacatttgctg

SEQ ID NO: 1462459 - DNA, 25 bp, Homo sapien
ttacaaaagtcaccacatttgctga

SEQ ID NO: 1462460 - DNA, 25 bp, Homo sapien
tactgaaactttcctctcagactgt

SEQ ID NO: 1462461 - DNA, 25 bp, Homo sapien
tgtaagcatgctactaccctttccc

SEQ ID NO: 1462462 - DNA, 25 bp, Homo sapien
agctttccaaaatgatctgcaggca

SEQ ID NO: 1462463 - DNA, 25 bp, Homo sapien
agccttctcctagtatctcccattt

SEQ ID NO: 1462464 - DNA, 25 bp, Homo sapien
aagcctgagtgggaacatgatctgc

SEQ ID NO: 1462465 - DNA, 25 bp, Homo sapien
gagagtgaccatatcaggctcctca

SEQ ID NO: 1462466 - DNA, 25 bp, Homo sapien
ggcaaagcctactgctggacacctg

SEQ ID NO: 1462467 - DNA, 25 bp, Homo sapien
gatactgaggtagttccaaatgcct

SEQ ID NO: 1462468 - DNA, 25 bp, Homo sapien
aatgtaaatctgtgacaagggtatc

SEQ ID NO: 1462469 - DNA, 25 bp, Homo sapien
tataatattaatggtgccgaggagg

SEQ ID NO: 1462470 - DNA, 25 bp, Homo sapien
cttcacactcccgtcctgattttgg

SEQ ID NO: 1462471 - DNA, 25 bp, Homo sapien
gcttgccaagaaaggagtgatctga

SEQ ID NO: 1462472 - DNA, 25 bp, Homo sapien
gagttttcgaagcagtcaatatgga

SEQ ID NO: 1462473 - DNA, 25 bp, Homo sapien
tgcgagaacaattgaaaagctgtcc

SEQ ID NO: 1462474 - DNA, 25 bp, Homo sapien
cagttgcagtataagttgggaaaca

SEQ ID NO: 1462475 - DNA, 25 bp, Homo sapien
tggtaatcaattggaatgcgagaac

SEQ ID NO: 1462476 - DNA, 25 bp, Homo sapien
ttggcgcaaaggtcgcgaggtcacc

SEQ ID NO: 1462477 - DNA, 25 bp, Homo sapien
gaggtcaccgtaagctccttaatgg

SEQ ID NO: 1462478 - DNA, 25 bp, Homo sapien
ttaatagccatacccaagaagcaga

SEQ ID NO: 1462479 - DNA, 25 bp, Homo sapien
tttcccgggcccattgtcaagtcag

SEQ ID NO: 1462480 - DNA, 25 bp, Homo sapien
gcccagaaaattaaggcacgcctca

SEQ ID NO: 1462481 - DNA, 25 bp, Homo sapien
caagcttgctgtcgacaaaattgca

SEQ ID NO: 1462482 - DNA, 25 bp, Homo sapien
taaggcacgcctcatcaggatccaa

SEQ ID NO: 1462483 - DNA, 25 bp, Homo sapien
aattgcaagggactagttgagttgc

SEQ ID NO: 1462484 - DNA, 25 bp, Homo sapien
ttaaatgcgcattataagaggggac

SEQ ID NO: 1462485 - DNA, 25 bp, Homo sapien
gcaagcccacaagagaagaagaggc

SEQ ID NO: 1462486 - DNA, 25 bp, Homo sapien
caagcccacaagagaagaagaggca

SEQ ID NO: 1462487 - DNA, 25 bp, Homo sapien
tgcgcattataagaggggacagctg

SEQ ID NO: 1462488 - DNA, 25 bp, Homo sapien
ctccagcatgtcctccaagtggcag

SEQ ID NO: 1462489 - DNA, 25 bp, Homo sapien
agtggcagctgacccccttcagaca

SEQ ID NO: 1462490 - DNA, 25 bp, Homo sapien
ttgcaccaagttcccttcagctcca

SEQ ID NO: 1462491 - DNA, 25 bp, Homo sapien
acttgcaccaagttcccttcagctc

SEQ ID NO: 1462492 - DNA, 25 bp, Homo sapien
atttgcaggcatgatagcttgtagt

SEQ ID NO: 1462493 - DNA, 25 bp, Homo sapien
tgcaggcatgatagcttgtagtttt

SEQ ID NO: 1462494 - DNA, 25 bp, Homo sapien
tttgcaggcatgatagcttgtagtt

SEQ ID NO: 1462495 - DNA, 25 bp, Homo sapien
ttgcaggcatgatagcttgtagttt

SEQ ID NO: 1462496 - DNA, 25 bp, Homo sapien
tttttcccaagaaggcgctgcgctg

SEQ ID NO: 1462497 - DNA, 25 bp, Homo sapien
gacaggcctgggtcataaactccct

SEQ ID NO: 1462498 - DNA, 25 bp, Homo sapien
gatttaggagagcttgcacaggaca

SEQ ID NO: 1462499 - DNA, 25 bp, Homo sapien
tgagagcctaggatcagagtcagcc

SEQ ID NO: 1462500 - DNA, 25 bp, Homo sapien
tcagactctaaaataagtgacactg

SEQ ID NO: 1462501 - DNA, 25 bp, Homo sapien
cacttaaccctttcagtcacaaatc

SEQ ID NO: 1462502 - DNA, 25 bp, Homo sapien
cagttactaggcctgcgaggtacat

SEQ ID NO: 1462503 - DNA, 25 bp, Homo sapien
tcttgcacccggaggcaaagaaggc

SEQ ID NO: 1462504 - DNA, 25 bp, Homo sapien
taacctgccaaattcacctcttgtc

SEQ ID NO: 1462505 - DNA, 25 bp, Homo sapien
tccaggataacctgccaaattcacc

SEQ ID NO: 1462506 - DNA, 25 bp, Homo sapien
ctccaggataacctgccaaattcac

SEQ ID NO: 1462507 - DNA, 25 bp, Homo sapien
ggataacctgccaaattcacctctt

SEQ ID NO: 1462508 - DNA, 25 bp, Homo sapien
agtatcacacttccctgcgttcttg

SEQ ID NO: 1462509 - DNA, 25 bp, Homo sapien
gacactactgtatcttctcagaaac

SEQ ID NO: 1462510 - DNA, 25 bp, Homo sapien
tcagaaacctgttgagaccctctag

SEQ ID NO: 1462511 - DNA, 25 bp, Homo sapien
gaccctctagctgtgaggcgagctg

SEQ ID NO: 1462512 - DNA, 25 bp, Homo sapien
gatatgttgtgctgaccatacgtgg

SEQ ID NO: 1462513 - DNA, 25 bp, Homo sapien
tcagttaaggtaaagcttcaagcct

SEQ ID NO: 1462514 - DNA, 25 bp, Homo sapien
aggtaaagcttcaagccttgcttga

SEQ ID NO: 1462515 - DNA, 25 bp, Homo sapien
tgatatgttgtgctgaccatacgtg

SEQ ID NO: 1462516 - DNA, 25 bp, Homo sapien
cccgctgaacggagcagccaggctg

SEQ ID NO: 1462517 - DNA, 25 bp, Homo sapien
tgacactcgtccccgctgaacggag

SEQ ID NO: 1462518 - DNA, 25 bp, Homo sapien
cacctgcagcaacctgacactcgtc

SEQ ID NO: 1462519 - DNA, 25 bp, Homo sapien
agcaacctgacactcgtccccgctg

SEQ ID NO: 1462520 - DNA, 25 bp, Homo sapien
cagacacgtcccgtttatttcattg

SEQ ID NO: 1462521 - DNA, 25 bp, Homo sapien
ctaggacaatcggatttcaccgggt

SEQ ID NO: 1462522 - DNA, 25 bp, Homo sapien
gatttcaccgggtaacgtatatgca

SEQ ID NO: 1462523 - DNA, 25 bp, Homo sapien
gtatatgcaaacagacacgtcccgt

SEQ ID NO: 1462524 - DNA, 25 bp, Homo sapien
caaacggggggtgtctcctccatca

SEQ ID NO: 1462525 - DNA, 25 bp, Homo sapien
gctcgcgcagcgccggacccctccc

SEQ ID NO: 1462526 - DNA, 25 bp, Homo sapien
ctgccgcggcttcccagtcggagtc

SEQ ID NO: 1462527 - DNA, 25 bp, Homo sapien
ccgcggcttcccagtcggagtcgcg

SEQ ID NO: 1462528 - DNA, 25 bp, Homo sapien
gctgcccttgaagtgatttgtcagg

SEQ ID NO: 1462529 - DNA, 25 bp, Homo sapien
atttgtcaggcggcccacgggtgac

SEQ ID NO: 1462530 - DNA, 25 bp, Homo sapien
gggaggatgtgcagcggggagcggg

SEQ ID NO: 1462531 - DNA, 25 bp, Homo sapien
gtccttcaaagttcggctgcccttg

SEQ ID NO: 1462532 - DNA, 25 bp, Homo sapien
acatagtttcagcagtccataggga

SEQ ID NO: 1462533 - DNA, 25 bp, Homo sapien
atatgattaaactcccgctgttgtg

SEQ ID NO: 1462534 - DNA, 25 bp, Homo sapien
tattttgtcttttacaccattgaat

SEQ ID NO: 1462535 - DNA, 25 bp, Homo sapien
gatgtagtgacgtggcctgagaaac

SEQ ID NO: 1462536 - DNA, 25 bp, Homo sapien
gcttaacacattggctaaaatgatc

SEQ ID NO: 1462537 - DNA, 25 bp, Homo sapien
aacttcatcatgtaaccaagtatac

SEQ ID NO: 1462538 - DNA, 25 bp, Homo sapien
catctgccagggtcagctactgaga

SEQ ID NO: 1462539 - DNA, 25 bp, Homo sapien
cagctactgagagtttagtaacttc

SEQ ID NO: 1462540 - DNA, 25 bp, Homo sapien
cacgggtttgaactctgcatctcca

SEQ ID NO: 1462541 - DNA, 25 bp, Homo sapien
aggaggccatcccagtacacgggtt

SEQ ID NO: 1462542 - DNA, 25 bp, Homo sapien
ttgatacttgactgactgatctggg

SEQ ID NO: 1462543 - DNA, 25 bp, Homo sapien
gcttagtgcccccactttctgatga

SEQ ID NO: 1462544 - DNA, 25 bp, Homo sapien
catgcaaaatctggatccaaacatc

SEQ ID NO: 1462545 - DNA, 25 bp, Homo sapien
ttcccccagaagatcgttctttgag

SEQ ID NO: 1462546 - DNA, 25 bp, Homo sapien
gcaggtagtaatggccaagttttca

SEQ ID NO: 1462547 - DNA, 25 bp, Homo sapien
ttcacatttatacccagctcttccc

SEQ ID NO: 1462548 - DNA, 25 bp, Homo sapien
tcaaatgcagctggtttcaggctgc

SEQ ID NO: 1462549 - DNA, 25 bp, Homo sapien
cacagtggacagtagctgcacatga

SEQ ID NO: 1462550 - DNA, 25 bp, Homo sapien
tgagtctgagcatactgagtgtttc

SEQ ID NO: 1462551 - DNA, 25 bp, Homo sapien
tgcacatgagtctgagcatactgag

SEQ ID NO: 1462552 - DNA, 25 bp, Homo sapien
agtggacagtagctgcacatgagtc

SEQ ID NO: 1462553 - DNA, 25 bp, Homo sapien
aatgcgcttcagatcaagctgctcc

SEQ ID NO: 1462554 - DNA, 25 bp, Homo sapien
tttggaatgcgcttcagatcaagct

SEQ ID NO: 1462555 - DNA, 25 bp, Homo sapien
tggaatgcgcttcagatcaagctgc

SEQ ID NO: 1462556 - DNA, 25 bp, Homo sapien
tgcgcttcagatcaagctgctcctt

SEQ ID NO: 1462557 - DNA, 25 bp, Homo sapien
attttcacacgctgaagtccctggc

SEQ ID NO: 1462558 - DNA, 25 bp, Homo sapien
gtggagttctattttcacacgctga

SEQ ID NO: 1462559 - DNA, 25 bp, Homo sapien
gggaaggttcgttcttcacttgcat

SEQ ID NO: 1462560 - DNA, 25 bp, Homo sapien
cctggctgtctttagggaaggttcg

SEQ ID NO: 1462561 - DNA, 25 bp, Homo sapien
cttgctctgtggccccggatggaat

SEQ ID NO: 1462562 - DNA, 25 bp, Homo sapien
taaataatataaataatgacagatt

SEQ ID NO: 1462563 - DNA, 25 bp, Homo sapien
tgcgcccggcccagatttcaacttt

SEQ ID NO: 1462564 - DNA, 25 bp, Homo sapien
ttgctctgtggccccggatggaatg

SEQ ID NO: 1462565 - DNA, 25 bp, Homo sapien
tgtatttagttgtaggaccttagag

SEQ ID NO: 1462566 - DNA, 25 bp, Homo sapien
tgggtttatgatgcaccaaaaggac

SEQ ID NO: 1462567 - DNA, 25 bp, Homo sapien
gaactgccggagcaacagataccac

SEQ ID NO: 1462568 - DNA, 25 bp, Homo sapien
tctagaggcctacttatttaggagg

SEQ ID NO: 1462569 - DNA, 25 bp, Homo sapien
ggtttgggagtacattcaacagagt

SEQ ID NO: 1462570 - DNA, 25 bp, Homo sapien
cagtgctctactaataacctaggcc

SEQ ID NO: 1462571 - DNA, 25 bp, Homo sapien
tctggtcagtatggctgcagagtca

SEQ ID NO: 1462572 - DNA, 25 bp, Homo sapien
acctaggccccatacacaactgaag

SEQ ID NO: 1462573 - DNA, 25 bp, Homo sapien
cctccccggcaagatcgtgatgtta

SEQ ID NO: 1462574 - DNA, 25 bp, Homo sapien
tctaagtaacgagaggacttctgac

SEQ ID NO: 1462575 - DNA, 25 bp, Homo sapien
tggcagcagaaggttcgctccgagc

SEQ ID NO: 1462576 - DNA, 25 bp, Homo sapien
taatcctagcacgtcactttgttga

SEQ ID NO: 1462577 - DNA, 25 bp, Homo sapien
cagcagagcgagagcgcaagtgaaa

SEQ ID NO: 1462578 - DNA, 25 bp, Homo sapien
ggatggagaatattagcctgacggt

SEQ ID NO: 1462579 - DNA, 25 bp, Homo sapien
cagagaggatctattttagggtggc

SEQ ID NO: 1462580 - DNA, 25 bp, Homo sapien
gcctgacggtctagggagtcatcca

SEQ ID NO: 1462581 - DNA, 25 bp, Homo sapien
gaacgcaaccgcgacggctgatcgt

SEQ ID NO: 1462582 - DNA, 25 bp, Homo sapien
accgagtaccgagcgccctgcgaag

SEQ ID NO: 1462583 - DNA, 25 bp, Homo sapien
cctaagcgagcaattccacgttggg

SEQ ID NO: 1462584 - DNA, 25 bp, Homo sapien
caacgtggagtaaccaagcgggtca

SEQ ID NO: 1462585 - DNA, 25 bp, Homo sapien
gatatggaccagttcatgcgcaaga

SEQ ID NO: 1462586 - DNA, 25 bp, Homo sapien
cagaagactatcctgagcccgagga

SEQ ID NO: 1462587 - DNA, 25 bp, Homo sapien
tacctgcagcacactcgatatggac

SEQ ID NO: 1462588 - DNA, 25 bp, Homo sapien
gatccgcgggcagatcctgagcaag

SEQ ID NO: 1462589 - DNA, 25 bp, Homo sapien
cgccgaactggtgcacgaagggtta

SEQ ID NO: 1462590 - DNA, 25 bp, Homo sapien
tgaagttctttagtcggccaccagc

SEQ ID NO: 1462591 - DNA, 25 bp, Homo sapien
ttcagttgtatgcttgaggccatca

SEQ ID NO: 1462592 - DNA, 25 bp, Homo sapien
cccctgaggtttagctctgcccgga

SEQ ID NO: 1462593 - DNA, 25 bp, Homo sapien
gatgtgcttgctctatttaggcagc

SEQ ID NO: 1462594 - DNA, 25 bp, Homo sapien
gcatttccggtactgatgggctccc

SEQ ID NO: 1462595 - DNA, 25 bp, Homo sapien
gcttctgctcaagggtggattccat

SEQ ID NO: 1462596 - DNA, 25 bp, Homo sapien
gattctgcacagcttgatgaaatgt

SEQ ID NO: 1462597 - DNA, 25 bp, Homo sapien
ctgcccgagataaacaaatgcccat

SEQ ID NO: 1462598 - DNA, 25 bp, Homo sapien
cttggtggtcttgactctgaatgaa

SEQ ID NO: 1462599 - DNA, 25 bp, Homo sapien
ggcttggtggtcttgactctgaatg

SEQ ID NO: 1462600 - DNA, 25 bp, Homo sapien
cttcattgtgatggaatgtctgcat

SEQ ID NO: 1462601 - DNA, 25 bp, Homo sapien
ccttcattgtgatggaatgtctgca

SEQ ID NO: 1462602 - DNA, 25 bp, Homo sapien
gcaggaggttccaccttcagatgga

SEQ ID NO: 1462603 - DNA, 25 bp, Homo sapien
gaactgccatgattccacctactaa

SEQ ID NO: 1462604 - DNA, 25 bp, Homo sapien
gccatgacctcaggctctgaagcag

SEQ ID NO: 1462605 - DNA, 25 bp, Homo sapien
tacctggaagtagccaagcagaagc

SEQ ID NO: 1462606 - DNA, 25 bp, Homo sapien
gtcaaatgaggttctgtaaaaggcc

SEQ ID NO: 1462607 - DNA, 25 bp, Homo sapien
taaggcggccaggtgatccttgtgc

SEQ ID NO: 1462608 - DNA, 25 bp, Homo sapien
taaggcataataacctgtaccaggg

SEQ ID NO: 1462609 - DNA, 25 bp, Homo sapien
aaacctgcatcttgataaggcggcc

SEQ ID NO: 1462610 - DNA, 25 bp, Homo sapien
caactggacctgtgagcttgccact

SEQ ID NO: 1462611 - DNA, 25 bp, Homo sapien
aaatggatcgtcatgggtcaggccc

SEQ ID NO: 1462612 - DNA, 25 bp, Homo sapien
ttagccctgaccctcggagcaggtg

SEQ ID NO: 1462613 - DNA, 25 bp, Homo sapien
gcttgccacttgctcaaaccactta

SEQ ID NO: 1462614 - DNA, 25 bp, Homo sapien
tgaggagcagccagttctgcagcct

SEQ ID NO: 1462615 - DNA, 25 bp, Homo sapien
gcagccagttctgcagccttctgtg

SEQ ID NO: 1462616 - DNA, 25 bp, Homo sapien
ttctgtgtgtgaaaataaccccttg

SEQ ID NO: 1462617 - DNA, 25 bp, Homo sapien
ctgtgtgtgaaaataaccccttggg

SEQ ID NO: 1462618 - DNA, 25 bp, Homo sapien
tgtattttggaggcttacaaagctt

SEQ ID NO: 1462619 - DNA, 25 bp, Homo sapien
actgtgtggctgtgtctagatatcc

SEQ ID NO: 1462620 - DNA, 25 bp, Homo sapien
tttgagtgaatttctgcatgaagaa

SEQ ID NO: 1462621 - DNA, 25 bp, Homo sapien
gcaactggagttgagaacctgtatt

SEQ ID NO: 1462622 - DNA, 25 bp, Homo sapien
cacgtattgctaaggacttcttggg

SEQ ID NO: 1462623 - DNA, 25 bp, Homo sapien
ttttagtcaattgctatgctcccag

SEQ ID NO: 1462624 - DNA, 25 bp, Homo sapien
tgtaccataacagaaatagcacccc

SEQ ID NO: 1462625 - DNA, 25 bp, Homo sapien
caactcctaattgcctaccagaagc

SEQ ID NO: 1462626 - DNA, 25 bp, Homo sapien
gcagcacagcttgcttccggctgaa

SEQ ID NO: 1462627 - DNA, 25 bp, Homo sapien
gaagaacattctcaagtgtttaaga

SEQ ID NO: 1462628 - DNA, 25 bp, Homo sapien
taatccagtgctacagtcagacagc

SEQ ID NO: 1462629 - DNA, 25 bp, Homo sapien
cagtgatctctaatccagtgctaca

SEQ ID NO: 1462630 - DNA, 25 bp, Homo sapien
ctgcccgtagacttggctgtgtccc

SEQ ID NO: 1462631 - DNA, 25 bp, Homo sapien
gagcccctgcccgtagacttggctg

SEQ ID NO: 1462632 - DNA, 25 bp, Homo sapien
gcccctgcccgtagacttggctgtg

SEQ ID NO: 1462633 - DNA, 25 bp, Homo sapien
tgcctgtacaggtccagagcccctg

SEQ ID NO: 1462634 - DNA, 25 bp, Homo sapien
aaaatcaggacttaaatcaaataag

SEQ ID NO: 1462635 - DNA, 25 bp, Homo sapien
ttaaaatcaggacttaaatcaaata

SEQ ID NO: 1462636 - DNA, 25 bp, Homo sapien
tcaggacttaaatcaaataagtata

SEQ ID NO: 1462637 - DNA, 25 bp, Homo sapien
aatcaggacttaaatcaaataagta

SEQ ID NO: 1462638 - DNA, 25 bp, Homo sapien
cacaaacgtgggtgcagccatactc

SEQ ID NO: 1462639 - DNA, 25 bp, Homo sapien
ctgcccacaaacgtgggtgcagcca

SEQ ID NO: 1462640 - DNA, 25 bp, Homo sapien
caaacgtgggtgcagccatactctt

SEQ ID NO: 1462641 - DNA, 25 bp, Homo sapien
gcccacaaacgtgggtgcagccata

SEQ ID NO: 1462642 - DNA, 25 bp, Homo sapien
cacactctcgtatgctggagcagga

SEQ ID NO: 1462643 - DNA, 25 bp, Homo sapien
cctcccggcctggtcgcttcaccat

SEQ ID NO: 1462644 - DNA, 25 bp, Homo sapien
aggcagggaaggctaccggctcctc

SEQ ID NO: 1462645 - DNA, 25 bp, Homo sapien
ggagtacaggcagggaaggctaccg

SEQ ID NO: 1462646 - DNA, 25 bp, Homo sapien
gaagcatgggcacgttcactgtcac

SEQ ID NO: 1462647 - DNA, 25 bp, Homo sapien
gaacggcccaagatggaagctttta

SEQ ID NO: 1462648 - DNA, 25 bp, Homo sapien
catgatgtgcatggcttagagtccc

SEQ ID NO: 1462649 - DNA, 25 bp, Homo sapien
tcccacgcttgaaagaggaacggcc

SEQ ID NO: 1462650 - DNA, 25 bp, Homo sapien
tccttcaaggggattctgattttcc

SEQ ID NO: 1462651 - DNA, 25 bp, Homo sapien
cactccaccaggtttggaatccctg

SEQ ID NO: 1462652 - DNA, 25 bp, Homo sapien
agactaaccacagtttccttcaagg

SEQ ID NO: 1462653 - DNA, 25 bp, Homo sapien
atgtgagcataggcactccaccagg

SEQ ID NO: 1462654 - DNA, 25 bp, Homo sapien
cataagctacctgggtccacttgtc

SEQ ID NO: 1462655 - DNA, 25 bp, Homo sapien
taaagcccctatagtttgacttgca

SEQ ID NO: 1462656 - DNA, 25 bp, Homo sapien
tcattactaaccaagtcagacgtta

SEQ ID NO: 1462657 - DNA, 25 bp, Homo sapien
caaagaggacacttcataggaaaca

SEQ ID NO: 1462658 - DNA, 25 bp, Homo sapien
gaaaagcaagagatgggatgccata

SEQ ID NO: 1462659 - DNA, 25 bp, Homo sapien
tcctctcagataggatgacattttg

SEQ ID NO: 1462660 - DNA, 25 bp, Homo sapien
taacccaatcccagatttgagtgtg

SEQ ID NO: 1462661 - DNA, 25 bp, Homo sapien
cagcccttgtgttggatgtaaccca

SEQ ID NO: 1462662 - DNA, 25 bp, Homo sapien
ccagatataacaagagccacgtgct

SEQ ID NO: 1462663 - DNA, 25 bp, Homo sapien
gacagtatcccctgtagccccataa

SEQ ID NO: 1462664 - DNA, 25 bp, Homo sapien
ggttctatgttctgccaacgccagg

SEQ ID NO: 1462665 - DNA, 25 bp, Homo sapien
aacttggatagttgctgagccagcc

SEQ ID NO: 1462666 - DNA, 25 bp, Homo sapien
caagtggcagttgttcatttagtaa

SEQ ID NO: 1462667 - DNA, 25 bp, Homo sapien
gggagaatgttaaatcaagtggcag

SEQ ID NO: 1462668 - DNA, 25 bp, Homo sapien
tgtcctcaagcatgggcgtaacact

SEQ ID NO: 1462669 - DNA, 25 bp, Homo sapien
aactctaccgaaaactgggagaatg

SEQ ID NO: 1462670 - DNA, 25 bp, Homo sapien
ctgccctggctacaactgtgccaga

SEQ ID NO: 1462671 - DNA, 25 bp, Homo sapien
agctgccctggctacaactgtgcca

SEQ ID NO: 1462672 - DNA, 25 bp, Homo sapien
cctggctacaactgtgccagagcac

SEQ ID NO: 1462673 - DNA, 25 bp, Homo sapien
aaagctgccctggctacaactgtgc

SEQ ID NO: 1462674 - DNA, 25 bp, Homo sapien
cttggaggaaggaaggcatctgcat

SEQ ID NO: 1462675 - DNA, 25 bp, Homo sapien
aaataactctcctttggaaccattg

SEQ ID NO: 1462676 - DNA, 25 bp, Homo sapien
tatctgtatcctgggttttcccatt

SEQ ID NO: 1462677 - DNA, 25 bp, Homo sapien
cctttggaaccattgttgtttatct

SEQ ID NO: 1462678 - DNA, 25 bp, Homo sapien
caggtctaaaaataactctcctttg

SEQ ID NO: 1462679 - DNA, 25 bp, Homo sapien
cattcagccctaacatcccatgata

SEQ ID NO: 1462680 - DNA, 25 bp, Homo sapien
cctaacatcccatgatatgtgactg

SEQ ID NO: 1462681 - DNA, 25 bp, Homo sapien
tcagagctggctcattcagccctaa

SEQ ID NO: 1462682 - DNA, 25 bp, Homo sapien
tcccatgatatgtgactgtgaactt

SEQ ID NO: 1462683 - DNA, 25 bp, Homo sapien
catggtgaacatctgtagatccacg

SEQ ID NO: 1462684 - DNA, 25 bp, Homo sapien
gcaactctattatttcatggtgaac

SEQ ID NO: 1462685 - DNA, 25 bp, Homo sapien
ggaaattctttaacgcagtgatgca

SEQ ID NO: 1462686 - DNA, 25 bp, Homo sapien
ctgaagtacacactgtgatgcaaga

SEQ ID NO: 1462687 - DNA, 25 bp, Homo sapien
caaggcctaagatatatttatccat

SEQ ID NO: 1462688 - DNA, 25 bp, Homo sapien
ctggtgtgatttgtcctgtctgctc

SEQ ID NO: 1462689 - DNA, 25 bp, Homo sapien
tctggtcttggtcttcacacttgga

SEQ ID NO: 1462690 - DNA, 25 bp, Homo sapien
cagtgtcaaaggcatcctaggatga

SEQ ID NO: 1462691 - DNA, 25 bp, Homo sapien
caagcatcctcgtaaatttcctcct

SEQ ID NO: 1462692 - DNA, 25 bp, Homo sapien
ttcctttgaagttgattggatggtt

SEQ ID NO: 1462693 - DNA, 25 bp, Homo sapien
cctttgaagttgattggatggttac

SEQ ID NO: 1462694 - DNA, 25 bp, Homo sapien
tgaagttgattggatggttacattt

SEQ ID NO: 1462695 - DNA, 25 bp, Homo sapien
ctttgaagttgattggatggttaca

SEQ ID NO: 1462696 - DNA, 25 bp, Homo sapien
gacccacagtccattttccttgtgt

SEQ ID NO: 1462697 - DNA, 25 bp, Homo sapien
ctgacccacagtccattttccttgt

SEQ ID NO: 1462698 - DNA, 25 bp, Homo sapien
cccacagtccattttccttgtgttg

SEQ ID NO: 1462699 - DNA, 25 bp, Homo sapien
ccacagtccattttccttgtgttgg

SEQ ID NO: 1462700 - DNA, 25 bp, Homo sapien
tgggacatgttggaatctgttggaa

SEQ ID NO: 1462701 - DNA, 25 bp, Homo sapien
cagacagcccagtaagaatactgca

SEQ ID NO: 1462702 - DNA, 25 bp, Homo sapien
gccaatctgataatttactcttctg

SEQ ID NO: 1462703 - DNA, 25 bp, Homo sapien
gggctggttacactgccctttcctc

SEQ ID NO: 1462704 - DNA, 25 bp, Homo sapien
ctcctgtgtggaaaacatctatcgg

SEQ ID NO: 1462705 - DNA, 25 bp, Homo sapien
gaaaacatctatcggctggaagccc

SEQ ID NO: 1462706 - DNA, 25 bp, Homo sapien
acatctatcggctggaagccctgag

SEQ ID NO: 1462707 - DNA, 25 bp, Homo sapien
tgtgtggaaaacatctatcggctgg

SEQ ID NO: 1462708 - DNA, 25 bp, Homo sapien
gaggtagcaccaagagccggcctca

SEQ ID NO: 1462709 - DNA, 25 bp, Homo sapien
gaatgatcatccgtggcaatggcag

SEQ ID NO: 1462710 - DNA, 25 bp, Homo sapien
gaatgctacaccctcttttcatggt

SEQ ID NO: 1462711 - DNA, 25 bp, Homo sapien
cctcacacgcaggagagaatgctac

SEQ ID NO: 1462712 - DNA, 25 bp, Homo sapien
caagggtccctgcagcatcagaaaa

SEQ ID NO: 1462713 - DNA, 25 bp, Homo sapien
gacctgcgctgtatgaagtgtggac

SEQ ID NO: 1462714 - DNA, 25 bp, Homo sapien
aagtgtggacacctcaaggatgcgg

SEQ ID NO: 1462715 - DNA, 25 bp, Homo sapien
gagctgcagtcacgtattgggaaca

SEQ ID NO: 1462716 - DNA, 25 bp, Homo sapien
agccactgccctcttaactgctgat

SEQ ID NO: 1462717 - DNA, 25 bp, Homo sapien
cttggctggcctctggattgtgctg

SEQ ID NO: 1462718 - DNA, 25 bp, Homo sapien
cctctggattgtgctggggcagcca

SEQ ID NO: 1462719 - DNA, 25 bp, Homo sapien
cctcttaactgctgatggcaggcag

SEQ ID NO: 1462720 - DNA, 25 bp, Homo sapien
ttgcttcaggtctgtcagcccacat

SEQ ID NO: 1462721 - DNA, 25 bp, Homo sapien
agcggcagcattagcgtaaggtcat

SEQ ID NO: 1462722 - DNA, 25 bp, Homo sapien
gcagcattagcgtaaggtcatttcc

SEQ ID NO: 1462723 - DNA, 25 bp, Homo sapien
gtaaggtcatttcctctcgtgcccc

SEQ ID NO: 1462724 - DNA, 25 bp, Homo sapien
agtcccagagcattttcttcaaaca

SEQ ID NO: 1462725 - DNA, 25 bp, Homo sapien
gagtcccagagcattttcttcaaac

SEQ ID NO: 1462726 - DNA, 25 bp, Homo sapien
gtcccagagcattttcttcaaacat

SEQ ID NO: 1462727 - DNA, 25 bp, Homo sapien
ctccttctgctgcttttggacctgc

SEQ ID NO: 1462728 - DNA, 25 bp, Homo sapien
ccttctgctgcttttggacctgcat

SEQ ID NO: 1462729 - DNA, 25 bp, Homo sapien
tccttctgctgcttttggacctgca

SEQ ID NO: 1462730 - DNA, 25 bp, Homo sapien
ggtatgacctactttccaggctctg

SEQ ID NO: 1462731 - DNA, 25 bp, Homo sapien
cacctttgctcattccatagctgat

SEQ ID NO: 1462732 - DNA, 25 bp, Homo sapien
gaggtcccgattttgctcatgcagg

SEQ ID NO: 1462733 - DNA, 25 bp, Homo sapien
tcagactctggctggtagagaaaca

SEQ ID NO: 1462734 - DNA, 25 bp, Homo sapien
ctgtttgatttcgacaggagctggg

SEQ ID NO: 1462735 - DNA, 25 bp, Homo sapien
ttctgaggttcatagagtcttgaag

SEQ ID NO: 1462736 - DNA, 25 bp, Homo sapien
tcttctgtttgatttcgacaggagc

SEQ ID NO: 1462737 - DNA, 25 bp, Homo sapien
tgaagaagagatctgacactttctt

SEQ ID NO: 1462738 - DNA, 25 bp, Homo sapien
gaatcattctggtctcgttcagctt

SEQ ID NO: 1462739 - DNA, 25 bp, Homo sapien
ccaaggactagtgaatccagctttt

SEQ ID NO: 1462740 - DNA, 25 bp, Homo sapien
tcagctttccaaggactagtgaatc

SEQ ID NO: 1462741 - DNA, 25 bp, Homo sapien
ttttcctcttgagaatcattctggt

SEQ ID NO: 1462742 - DNA, 25 bp, Homo sapien
atttgacacccccttggcttggatt

SEQ ID NO: 1462743 - DNA, 25 bp, Homo sapien
ttgacacccccttggcttggattcc

SEQ ID NO: 1462744 - DNA, 25 bp, Homo sapien
ccttggcttggattccacgctctcc

SEQ ID NO: 1462745 - DNA, 25 bp, Homo sapien
ccccttggcttggattccacgctct

SEQ ID NO: 1462746 - DNA, 25 bp, Homo sapien
taaggcttcagaacttccccgatag

SEQ ID NO: 1462747 - DNA, 25 bp, Homo sapien
catggtgaacctgtgaagtccttcc

SEQ ID NO: 1462748 - DNA, 25 bp, Homo sapien
tggccagccttaatggaaagaagcc

SEQ ID NO: 1462749 - DNA, 25 bp, Homo sapien
tagtctctgatgttctggccagcct

SEQ ID NO: 1462750 - DNA, 25 bp, Homo sapien
cactgagaccgaaatagcctttgta

SEQ ID NO: 1462751 - DNA, 25 bp, Homo sapien
ctgttggtggctgaccatgacagcc

SEQ ID NO: 1462752 - DNA, 25 bp, Homo sapien
cgaaatagcctttgtaggtggtcat

SEQ ID NO: 1462753 - DNA, 25 bp, Homo sapien
gaccatgacagccactgagaccgaa

SEQ ID NO: 1462754 - DNA, 25 bp, Homo sapien
tttatacaatgcgagaacgaccaaa

SEQ ID NO: 1462755 - DNA, 25 bp, Homo sapien
aaattactaggtcttgagtatttct

SEQ ID NO: 1462756 - DNA, 25 bp, Homo sapien
tgcgagaacgaccaaatacacatga

SEQ ID NO: 1462757 - DNA, 25 bp, Homo sapien
ttcgccttctgccactagtaaaagc

SEQ ID NO: 1462758 - DNA, 25 bp, Homo sapien
gatgaagacggcactagcctcaagg

SEQ ID NO: 1462759 - DNA, 25 bp, Homo sapien
tcaaaaaggcccaagggtcacatct

SEQ ID NO: 1462760 - DNA, 25 bp, Homo sapien
aggattaactgcactgccctacaag

SEQ ID NO: 1462761 - DNA, 25 bp, Homo sapien
tacagtgatgtaagaacccagtacc

SEQ ID NO: 1462762 - DNA, 25 bp, Homo sapien
taagaacagctagacctcgagcaca

SEQ ID NO: 1462763 - DNA, 25 bp, Homo sapien
gttaagaacagctagacctcgagca

SEQ ID NO: 1462764 - DNA, 25 bp, Homo sapien
ttaagaacagctagacctcgagcac

SEQ ID NO: 1462765 - DNA, 25 bp, Homo sapien
agaacagctagacctcgagcacagc

SEQ ID NO: 1462766 - DNA, 25 bp, Homo sapien
gaagaatgccgttaaggctcccaga

SEQ ID NO: 1462767 - DNA, 25 bp, Homo sapien
cctgggtccctcaaattatctctca

SEQ ID NO: 1462768 - DNA, 25 bp, Homo sapien
aactgaggcaccaacttgcagaata

SEQ ID NO: 1462769 - DNA, 25 bp, Homo sapien
gcagaatagaagaccaaacaaaacc

SEQ ID NO: 1462770 - DNA, 25 bp, Homo sapien
gaatctttctcagtcattgagaacc

SEQ ID NO: 1462771 - DNA, 25 bp, Homo sapien
tttttgagaacatgcccagctcctg

SEQ ID NO: 1462772 - DNA, 25 bp, Homo sapien
agctcctgatcccttgtcttcatct

SEQ ID NO: 1462773 - DNA, 25 bp, Homo sapien
agcttggccatcactccagacgaaa

SEQ ID NO: 1462774 - DNA, 25 bp, Homo sapien
gtagaaaatggcagtgtcatgggag

SEQ ID NO: 1462775 - DNA, 25 bp, Homo sapien
tagaaaatggcagtgtcatgggaga

SEQ ID NO: 1462776 - DNA, 25 bp, Homo sapien
agaaaatggcagtgtcatgggagag

SEQ ID NO: 1462777 - DNA, 25 bp, Homo sapien
tgtagaaaatggcagtgtcatggga

SEQ ID NO: 1462778 - DNA, 25 bp, Homo sapien
cgtgctgataccagagtcagagcaa

SEQ ID NO: 1462779 - DNA, 25 bp, Homo sapien
caacagctctaagccgaggtctatc

SEQ ID NO: 1462780 - DNA, 25 bp, Homo sapien
ttcgcctccatgtagctgtcaccag

SEQ ID NO: 1462781 - DNA, 25 bp, Homo sapien
gcaagagccctgatccattggtcct

SEQ ID NO: 1462782 - DNA, 25 bp, Homo sapien
cctccccagatacaaaaaatggaag

SEQ ID NO: 1462783 - DNA, 25 bp, Homo sapien
ctccccagatacaaaaaatggaagt

SEQ ID NO: 1462784 - DNA, 25 bp, Homo sapien
ctcctccaagatgacacttggtgga

SEQ ID NO: 1462785 - DNA, 25 bp, Homo sapien
gctcctccaagatgacacttggtgg

SEQ ID NO: 1462786 - DNA, 25 bp, Homo sapien
tcctccaagatgacacttggtggat

SEQ ID NO: 1462787 - DNA, 25 bp, Homo sapien
tacctttacaaatcgaaccattgca

SEQ ID NO: 1462788 - DNA, 25 bp, Homo sapien
tgttagcgggaatctagccataagt

SEQ ID NO: 1462789 - DNA, 25 bp, Homo sapien
tagagagaggactggagtattgcat

SEQ ID NO: 1462790 - DNA, 25 bp, Homo sapien
gtattgcattagtagatgtttcacc

SEQ ID NO: 1462791 - DNA, 25 bp, Homo sapien
gatcctcttagtagggcctggttct

SEQ ID NO: 1462792 - DNA, 25 bp, Homo sapien
tgagatcctcttagtagggcctggt

SEQ ID NO: 1462793 - DNA, 25 bp, Homo sapien
tgccaaattgtgtgagctgaaattc

SEQ ID NO: 1462794 - DNA, 25 bp, Homo sapien
gttctgcaatgccaaattgtgtgag

SEQ ID NO: 1462795 - DNA, 25 bp, Homo sapien
gcacctagagccttcttctatggct

SEQ ID NO: 1462796 - DNA, 25 bp, Homo sapien
tgcaggatggtaaagatgtagcagt

SEQ ID NO: 1462797 - DNA, 25 bp, Homo sapien
ggatggtaaagatgtagcagtaact

SEQ ID NO: 1462798 - DNA, 25 bp, Homo sapien
tagcagtaactgagcacctagagcc

SEQ ID NO: 1462799 - DNA, 25 bp, Homo sapien
aaacactttcattaaattttgctgc

SEQ ID NO: 1462800 - DNA, 25 bp, Homo sapien
aattttgctgctgtaggataaccat

SEQ ID NO: 1462801 - DNA, 25 bp, Homo sapien
ttaaattttgctgctgtaggataac

SEQ ID NO: 1462802 - DNA, 25 bp, Homo sapien
ggaaggtttctgagattcttgaaac

SEQ ID NO: 1462803 - DNA, 25 bp, Homo sapien
cttcctcggctggtttctcacacat

SEQ ID NO: 1462804 - DNA, 25 bp, Homo sapien
attcccacaagatgcaaatctttct

SEQ ID NO: 1462805 - DNA, 25 bp, Homo sapien
tgcaaatctttcttcctcggctggt

SEQ ID NO: 1462806 - DNA, 25 bp, Homo sapien
ttcccacaagatgcaaatctttctt

SEQ ID NO: 1462807 - DNA, 25 bp, Homo sapien
aatgcagaagccgtactccactttt

SEQ ID NO: 1462808 - DNA, 25 bp, Homo sapien
cttaatgttgtatagaaatgcagaa

SEQ ID NO: 1462809 - DNA, 25 bp, Homo sapien
agaagccgtactccacttttcaagc

SEQ ID NO: 1462810 - DNA, 25 bp, Homo sapien
atgttgtatagaaatgcagaagccg

SEQ ID NO: 1462811 - DNA, 25 bp, Homo sapien
caccattaggttcatggctgagact

SEQ ID NO: 1462812 - DNA, 25 bp, Homo sapien
accattaggttcatggctgagactc

SEQ ID NO: 1462813 - DNA, 25 bp, Homo sapien
ccaccattaggttcatggctgagac

SEQ ID NO: 1462814 - DNA, 25 bp, Homo sapien
gatggttggttgatttgccaattca

SEQ ID NO: 1462815 - DNA, 25 bp, Homo sapien
aatatgcattttgataagcttgagc

SEQ ID NO: 1462816 - DNA, 25 bp, Homo sapien
gatgctgggtttaggttccagagca

SEQ ID NO: 1462817 - DNA, 25 bp, Homo sapien
tgcattcagacctgttgtttctctg

SEQ ID NO: 1462818 - DNA, 25 bp, Homo sapien
gagtccttgataacccagggcactg

SEQ ID NO: 1462819 - DNA, 25 bp, Homo sapien
cagagtccttgataacccagggcac

SEQ ID NO: 1462820 - DNA, 25 bp, Homo sapien
agtccttgataacccagggcactga

SEQ ID NO: 1462821 - DNA, 25 bp, Homo sapien
agagtccttgataacccagggcact

SEQ ID NO: 1462822 - DNA, 25 bp, Homo sapien
caggttgtcccaaagagtgtccagc

SEQ ID NO: 1462823 - DNA, 25 bp, Homo sapien
ggagacctctagtccgtagcttcta

SEQ ID NO: 1462824 - DNA, 25 bp, Homo sapien
cagacaggagcttcattgaggaaca

SEQ ID NO: 1462825 - DNA, 25 bp, Homo sapien
tgccaagggctagcaggcacaaagt

SEQ ID NO: 1462826 - DNA, 25 bp, Homo sapien
tacaaatatacagtgtttagctttc

SEQ ID NO: 1462827 - DNA, 25 bp, Homo sapien
gatgtacatatcacgtttttaaaaa

SEQ ID NO: 1462828 - DNA, 25 bp, Homo sapien
catgatgtacatatcacgtttttaa

SEQ ID NO: 1462829 - DNA, 25 bp, Homo sapien
tattcatctgtcgttggacacatag

SEQ ID NO: 1462830 - DNA, 25 bp, Homo sapien
cacagcttcctgtttgcaatccttt

SEQ ID NO: 1462831 - DNA, 25 bp, Homo sapien
ctttccctaagatcttttgagatga

SEQ ID NO: 1462832 - DNA, 25 bp, Homo sapien
actgatttccacagcttcctgtttg

SEQ ID NO: 1462833 - DNA, 25 bp, Homo sapien
cctctttccctaagatcttttgaga

SEQ ID NO: 1462834 - DNA, 25 bp, Homo sapien
tctcatgagaacagatgctcttgta

SEQ ID NO: 1462835 - DNA, 25 bp, Homo sapien
aatttttacatgcattaagtctgaa

SEQ ID NO: 1462836 - DNA, 25 bp, Homo sapien
cctttaatttgtgattcaagcctga

SEQ ID NO: 1462837 - DNA, 25 bp, Homo sapien
tgaactttactcgaactatccaaac

SEQ ID NO: 1462838 - DNA, 25 bp, Homo sapien
cactctgcataggaggtagccagta

SEQ ID NO: 1462839 - DNA, 25 bp, Homo sapien
gaagtttgcacccatagagaccacg

SEQ ID NO: 1462840 - DNA, 25 bp, Homo sapien
ccacgataggtaggctgcagttcag

SEQ ID NO: 1462841 - DNA, 25 bp, Homo sapien
aagatgcggcattggagaaagaaga

SEQ ID NO: 1462842 - DNA, 25 bp, Homo sapien
tgagccgcctgcacatcactggtta

SEQ ID NO: 1462843 - DNA, 25 bp, Homo sapien
actgagtactgttgagccgcctgca

SEQ ID NO: 1462844 - DNA, 25 bp, Homo sapien
cagaagcagccctctgaactgctgg

SEQ ID NO: 1462845 - DNA, 25 bp, Homo sapien
gagtactgttgagccgcctgcacat

SEQ ID NO: 1462846 - DNA, 25 bp, Homo sapien
cagctttgttgcaaaaatgtcagca

SEQ ID NO: 1462847 - DNA, 25 bp, Homo sapien
gaagggtactctttgtttgactgaa

SEQ ID NO: 1462848 - DNA, 25 bp, Homo sapien
caaggtctgctcagggaagggtact

SEQ ID NO: 1462849 - DNA, 25 bp, Homo sapien
cagcattgtcttgtacttgggatgg

SEQ ID NO: 1462850 - DNA, 25 bp, Homo sapien
tttttcacactcatctacacagcca

SEQ ID NO: 1462851 - DNA, 25 bp, Homo sapien
ttcccacaatcattcttatctcttc

SEQ ID NO: 1462852 - DNA, 25 bp, Homo sapien
tctttttcacactcatctacacagc

SEQ ID NO: 1462853 - DNA, 25 bp, Homo sapien
tttcacactcatctacacagccata

SEQ ID NO: 1462854 - DNA, 25 bp, Homo sapien
tctttattcagctggtggcaaatcc

SEQ ID NO: 1462855 - DNA, 25 bp, Homo sapien
tactgagacaagtactgcctggcta

SEQ ID NO: 1462856 - DNA, 25 bp, Homo sapien
tctgtcttcaaagaagtgggctccc

SEQ ID NO: 1462857 - DNA, 25 bp, Homo sapien
tatggctgagctggcaatcaagtgc

SEQ ID NO: 1462858 - DNA, 25 bp, Homo sapien
acctgatacccaagatgcaagacaa

SEQ ID NO: 1462859 - DNA, 25 bp, Homo sapien
aggagtctctctgcgtggccaccac

SEQ ID NO: 1462860 - DNA, 25 bp, Homo sapien
agcaggagtctctctgcgtggccac

SEQ ID NO: 1462861 - DNA, 25 bp, Homo sapien
cccaagatgcaagacaaactcgtct

SEQ ID NO: 1462862 - DNA, 25 bp, Homo sapien
gagtacttccttgttaccactcatg

SEQ ID NO: 1462863 - DNA, 25 bp, Homo sapien
aaccaacacagcattgggtgtcacc

SEQ ID NO: 1462864 - DNA, 25 bp, Homo sapien
caggtgatgtatcctgcaagtacag

SEQ ID NO: 1462865 - DNA, 25 bp, Homo sapien
agggtctttcccttcaatgcagagg

SEQ ID NO: 1462866 - DNA, 25 bp, Homo sapien
agatgaatgcaacagtcagtgctta

SEQ ID NO: 1462867 - DNA, 25 bp, Homo sapien
atttcacttaagtttggatgtacca

SEQ ID NO: 1462868 - DNA, 25 bp, Homo sapien
ctatggcacaggaaatcatcacaat

SEQ ID NO: 1462869 - DNA, 25 bp, Homo sapien
agtgcttatctaggtcacttctccc

SEQ ID NO: 1462870 - DNA, 25 bp, Homo sapien
aaatcagacagagacatcaaaataa

SEQ ID NO: 1462871 - DNA, 25 bp, Homo sapien
tgataccaaaatcagacagagacat

SEQ ID NO: 1462872 - DNA, 25 bp, Homo sapien
taccaaaatcagacagagacatcaa

SEQ ID NO: 1462873 - DNA, 25 bp, Homo sapien
aaaatcagacagagacatcaaaata

SEQ ID NO: 1462874 - DNA, 25 bp, Homo sapien
tacgtattgcaggtcagtagagaaa

SEQ ID NO: 1462875 - DNA, 25 bp, Homo sapien
tatgttcagcaaaagatatgtcagt

SEQ ID NO: 1462876 - DNA, 25 bp, Homo sapien
tatgattgtcattatccagaaagga

SEQ ID NO: 1462877 - DNA, 25 bp, Homo sapien
tctaggtaggtaagaaattcaatgt

SEQ ID NO: 1462878 - DNA, 25 bp, Homo sapien
taaaacctgagttcgcattttctga

SEQ ID NO: 1462879 - DNA, 25 bp, Homo sapien
tatgagttaaatccaagtcgcaaat

SEQ ID NO: 1462880 - DNA, 25 bp, Homo sapien
tgagggctcttcctgtagagcattt

SEQ ID NO: 1462881 - DNA, 25 bp, Homo sapien
gagcatgctctttgataagtaaaac

SEQ ID NO: 1462882 - DNA, 25 bp, Homo sapien
tgcatccttggatctacttgagctc

SEQ ID NO: 1462883 - DNA, 25 bp, Homo sapien
tcaattgcatccttggatctacttg

SEQ ID NO: 1462884 - DNA, 25 bp, Homo sapien
aatttcaattgcatccttggatcta

SEQ ID NO: 1462885 - DNA, 25 bp, Homo sapien
attgcatccttggatctacttgagc

SEQ ID NO: 1462886 - DNA, 25 bp, Homo sapien
tcagatcccaggttccttgcggttt

SEQ ID NO: 1462887 - DNA, 25 bp, Homo sapien
agatcccaggttccttgcggtttct

SEQ ID NO: 1462888 - DNA, 25 bp, Homo sapien
cagatcccaggttccttgcggtttc

SEQ ID NO: 1462889 - DNA, 25 bp, Homo sapien
taatctgcttatattgatatctact

SEQ ID NO: 1462890 - DNA, 25 bp, Homo sapien
tatattgatatctacttttccctcc

SEQ ID NO: 1462891 - DNA, 25 bp, Homo sapien
cacccactcccactacctccttcat

SEQ ID NO: 1462892 - DNA, 25 bp, Homo sapien
agagataatctgcttatattgatat

SEQ ID NO: 1462893 - DNA, 25 bp, Homo sapien
taccagactccaagccttccctgtt

SEQ ID NO: 1462894 - DNA, 25 bp, Homo sapien
cagactccaagccttccctgttact

SEQ ID NO: 1462895 - DNA, 25 bp, Homo sapien
accagactccaagccttccctgtta

SEQ ID NO: 1462896 - DNA, 25 bp, Homo sapien
agactccaagccttccctgttactt

SEQ ID NO: 1462897 - DNA, 25 bp, Homo sapien
tccacgtaattataaaaccgcatgc

SEQ ID NO: 1462898 - DNA, 25 bp, Homo sapien
tgctcttaaaagacacgttctagtt

SEQ ID NO: 1462899 - DNA, 25 bp, Homo sapien
caagaggcttttttcccttgcgtag

SEQ ID NO: 1462900 - DNA, 25 bp, Homo sapien
tgcgtagcatacttccacgtaatta

SEQ ID NO: 1462901 - DNA, 25 bp, Homo sapien
cctttctagtgttagaggcagcaca

SEQ ID NO: 1462902 - DNA, 25 bp, Homo sapien
ttccctttctagtgttagaggcagc

SEQ ID NO: 1462903 - DNA, 25 bp, Homo sapien
tttctagtgttagaggcagcacagc

SEQ ID NO: 1462904 - DNA, 25 bp, Homo sapien
ttcttccctttctagtgttagaggc

SEQ ID NO: 1462905 - DNA, 25 bp, Homo sapien
tctgcagcgctgtatcgtgtcgccg

SEQ ID NO: 1462906 - DNA, 25 bp, Homo sapien
tattgaaagctcctcagagagcggg

SEQ ID NO: 1462907 - DNA, 25 bp, Homo sapien
gcaaacatcctgtgcgagtcccaaa

SEQ ID NO: 1462908 - DNA, 25 bp, Homo sapien
tcattacagaagtccacacgaggct

SEQ ID NO: 1462909 - DNA, 25 bp, Homo sapien
ggcatgccaagggataaggattatc

SEQ ID NO: 1462910 - DNA, 25 bp, Homo sapien
actataggcacttttgtcactggct

SEQ ID NO: 1462911 - DNA, 25 bp, Homo sapien
tcatcattacgtgaggagaaagcag

SEQ ID NO: 1462912 - DNA, 25 bp, Homo sapien
caactcttccgtttttcatatttgg

SEQ ID NO: 1462913 - DNA, 25 bp, Homo sapien
aaatagcaaatttcactggcctcac

SEQ ID NO: 1462914 - DNA, 25 bp, Homo sapien
ggaaaatagcaaatttcactggcct

SEQ ID NO: 1462915 - DNA, 25 bp, Homo sapien
aggaaaatagcaaatttcactggcc

SEQ ID NO: 1462916 - DNA, 25 bp, Homo sapien
gcctcccatgacagtggaacatata

SEQ ID NO: 1462917 - DNA, 25 bp, Homo sapien
tatatcctgtccctgaaactcttct

SEQ ID NO: 1462918 - DNA, 25 bp, Homo sapien
cccatgacagtggaacatatatcct

SEQ ID NO: 1462919 - DNA, 25 bp, Homo sapien
tatcctgtccctgaaactcttctac

SEQ ID NO: 1462920 - DNA, 25 bp, Homo sapien
ttcttcactaccatttgtagctcca

SEQ ID NO: 1462921 - DNA, 25 bp, Homo sapien
gaggcagactggttataattgagca

SEQ ID NO: 1462922 - DNA, 25 bp, Homo sapien
cagtgaccatcagtagtaaggaaat

SEQ ID NO: 1462923 - DNA, 25 bp, Homo sapien
gagcacagaattagcaaagccatgt

SEQ ID NO: 1462924 - DNA, 25 bp, Homo sapien
tacaagttaccaactatttcaggaa

SEQ ID NO: 1462925 - DNA, 25 bp, Homo sapien
caaagttctgaggtgtttcactgcc

SEQ ID NO: 1462926 - DNA, 25 bp, Homo sapien
tactagatataaaagcatgggccca

SEQ ID NO: 1462927 - DNA, 25 bp, Homo sapien
gctgaggtggaccaagcttttccca

SEQ ID NO: 1462928 - DNA, 25 bp, Homo sapien
aacatgaggatcttggagggacaca

SEQ ID NO: 1462929 - DNA, 25 bp, Homo sapien
gtttctggtgagatttaatataaag

SEQ ID NO: 1462930 - DNA, 25 bp, Homo sapien
gcccaggacagaagttgagttactg

SEQ ID NO: 1462931 - DNA, 25 bp, Homo sapien
ttttgtggttcatcctggaacctgc

SEQ ID NO: 1462932 - DNA, 25 bp, Homo sapien
attatgtcagcatctattcatcccc

SEQ ID NO: 1462933 - DNA, 25 bp, Homo sapien
cattttcatacaactggcctttgga

SEQ ID NO: 1462934 - DNA, 25 bp, Homo sapien
ggcctttggatttcaggagacatgt

SEQ ID NO: 1462935 - DNA, 25 bp, Homo sapien
tataactcaacagtaatgcccgagc

SEQ ID NO: 1462936 - DNA, 25 bp, Homo sapien
gctcagatagactcagtgcagttca

SEQ ID NO: 1462937 - DNA, 25 bp, Homo sapien
tgcctatgccttgaaaaaacatgcc

SEQ ID NO: 1462938 - DNA, 25 bp, Homo sapien
aaagcaggcaagatctcggagagaa

SEQ ID NO: 1462939 - DNA, 25 bp, Homo sapien
ccctcagagggaccataatcagaaa

SEQ ID NO: 1462940 - DNA, 25 bp, Homo sapien
tggaaaaccaatgctcaaagactga

SEQ ID NO: 1462941 - DNA, 25 bp, Homo sapien
tcatgttatccaatcggctttatta

SEQ ID NO: 1462942 - DNA, 25 bp, Homo sapien
tatccaatcggctttattagtacta

SEQ ID NO: 1462943 - DNA, 25 bp, Homo sapien
ccaatcggctttattagtactaaag

SEQ ID NO: 1462944 - DNA, 25 bp, Homo sapien
ctttatctaggtctgatttctcaaa

SEQ ID NO: 1462945 - DNA, 25 bp, Homo sapien
tatcacaagtctcccggccttctat

SEQ ID NO: 1462946 - DNA, 25 bp, Homo sapien
tccactatcacaagtctcccggcct

SEQ ID NO: 1462947 - DNA, 25 bp, Homo sapien
ttttccctccactatcacaagtctc

SEQ ID NO: 1462948 - DNA, 25 bp, Homo sapien
tccctccactatcacaagtctcccg

SEQ ID NO: 1462949 - DNA, 25 bp, Homo sapien
gccggtcaaggcagtcacctgctct

SEQ ID NO: 1462950 - DNA, 25 bp, Homo sapien
ctctaagtctgtgacaagccatggc

SEQ ID NO: 1462951 - DNA, 25 bp, Homo sapien
gctgattgtcaaaggtgatgtagcc

SEQ ID NO: 1462952 - DNA, 25 bp, Homo sapien
taagtctgtgacaagccatggccag

SEQ ID NO: 1462953 - DNA, 25 bp, Homo sapien
gggctcatgatatgctgctgaactt

SEQ ID NO: 1462954 - DNA, 25 bp, Homo sapien
gctgaacttctgttccaacgtactg

SEQ ID NO: 1462955 - DNA, 25 bp, Homo sapien
tctgttccaacgtactgttcctttc

SEQ ID NO: 1462956 - DNA, 25 bp, Homo sapien
tttgggctcatgatatgctgctgaa

SEQ ID NO: 1462957 - DNA, 25 bp, Homo sapien
gctgtaaggacattggatgaaaaca

SEQ ID NO: 1462958 - DNA, 25 bp, Homo sapien
gaataatgttgctttgacgtgaagc

SEQ ID NO: 1462959 - DNA, 25 bp, Homo sapien
gacgtgaagctgtaaggacattgga

SEQ ID NO: 1462960 - DNA, 25 bp, Homo sapien
tgttgctttgacgtgaagctgtaag

SEQ ID NO: 1462961 - DNA, 25 bp, Homo sapien
tatccatccttttcttggtggggct

SEQ ID NO: 1462962 - DNA, 25 bp, Homo sapien
ttatccatccttttcttggtggggc

SEQ ID NO: 1462963 - DNA, 25 bp, Homo sapien
gagttccagggatgcagactctccc

SEQ ID NO: 1462964 - DNA, 25 bp, Homo sapien
ctagagttccagggatgcagactct

SEQ ID NO: 1462965 - DNA, 25 bp, Homo sapien
agttccagggatgcagactctccca

SEQ ID NO: 1462966 - DNA, 25 bp, Homo sapien
tagagttccagggatgcagactctc

SEQ ID NO: 1462967 - DNA, 25 bp, Homo sapien
tcctctgtatggtgacagttgcaac

SEQ ID NO: 1462968 - DNA, 25 bp, Homo sapien
tccataagatttgcctgttctcctc

SEQ ID NO: 1462969 - DNA, 25 bp, Homo sapien
cagttgcaactcatgatcttgattt

SEQ ID NO: 1462970 - DNA, 25 bp, Homo sapien
tcagctccacaaaaacagcctttgg

SEQ ID NO: 1462971 - DNA, 25 bp, Homo sapien
tctggtctccgcaaaccatacagag

SEQ ID NO: 1462972 - DNA, 25 bp, Homo sapien
gcacttccttagcagatgagccaga

SEQ ID NO: 1462973 - DNA, 25 bp, Homo sapien
tcagtctccgagtttacatctggga

SEQ ID NO: 1462974 - DNA, 25 bp, Homo sapien
gatgggatagcttgcaggagccttt

SEQ ID NO: 1462975 - DNA, 25 bp, Homo sapien
ccctcctcctcaactttccattcca

SEQ ID NO: 1462976 - DNA, 25 bp, Homo sapien
tccattccatcctctccacagatgc

SEQ ID NO: 1462977 - DNA, 25 bp, Homo sapien
cctcctcaactttccattccatcct

SEQ ID NO: 1462978 - DNA, 25 bp, Homo sapien
tcctctccacagatgcctgatgcat

SEQ ID NO: 1462979 - DNA, 25 bp, Homo sapien
tgtggcatccaagagcaacttgagc

SEQ ID NO: 1462980 - DNA, 25 bp, Homo sapien
aagctcccaactgtggcatccaaga

SEQ ID NO: 1462981 - DNA, 25 bp, Homo sapien
gaagctcccaactgtggcatccaag

SEQ ID NO: 1462982 - DNA, 25 bp, Homo sapien
cagaagctcccaactgtggcatcca

SEQ ID NO: 1462983 - DNA, 25 bp, Homo sapien
gataaccagtcggaagcagccaatg

SEQ ID NO: 1462984 - DNA, 25 bp, Homo sapien
gaagactggagccacatgtgcaaaa

SEQ ID NO: 1462985 - DNA, 25 bp, Homo sapien
caatgtgggactcaacctaccaggg

SEQ ID NO: 1462986 - DNA, 25 bp, Homo sapien
cctaccagggtgagcaaacactgtt

SEQ ID NO: 1462987 - DNA, 25 bp, Homo sapien
cacttgccaagctgctgtaaaagga

SEQ ID NO: 1462988 - DNA, 25 bp, Homo sapien
tgctttcccaagtttggtgccttgg

SEQ ID NO: 1462989 - DNA, 25 bp, Homo sapien
ctttctgagcacttgccaagctgct

SEQ ID NO: 1462990 - DNA, 25 bp, Homo sapien
gtgctttcccaagtttggtgccttg

SEQ ID NO: 1462991 - DNA, 25 bp, Homo sapien
tttaaggttatagcttttatcctca

SEQ ID NO: 1462992 - DNA, 25 bp, Homo sapien
tgttggtgactttgcactcacaaga

SEQ ID NO: 1462993 - DNA, 25 bp, Homo sapien
ttggtgactttgcactcacaagaca

SEQ ID NO: 1462994 - DNA, 25 bp, Homo sapien
aaggttatagcttttatcctcatgt

SEQ ID NO: 1462995 - DNA, 25 bp, Homo sapien
gaaggagaggacccctaatgtgtcc

SEQ ID NO: 1462996 - DNA, 25 bp, Homo sapien
aagaggaaggagaggacccctaatg

SEQ ID NO: 1462997 - DNA, 25 bp, Homo sapien
agaggaaggagaggacccctaatgt

SEQ ID NO: 1462998 - DNA, 25 bp, Homo sapien
aggaaggagaggacccctaatgtgt

SEQ ID NO: 1462999 - DNA, 25 bp, Homo sapien
aattaaaagggatgtaggagctgca

SEQ ID NO: 1463000 - DNA, 25 bp, Homo sapien
gctgcagcagtgtgattaatatact

SEQ ID NO: 1463001 - DNA, 25 bp, Homo sapien
cagttgataaatgtatccacactaa

SEQ ID NO: 1463002 - DNA, 25 bp, Homo sapien
tggcttgcacagataaacatggtgt

SEQ ID NO: 1463003 - DNA, 25 bp, Homo sapien
ttggcagatcatcaaagctcccagg

SEQ ID NO: 1463004 - DNA, 25 bp, Homo sapien
tacccagtctaaatgtgcgtttctc

SEQ ID NO: 1463005 - DNA, 25 bp, Homo sapien
gaacatggtaactgactagtaagcc

SEQ ID NO: 1463006 - DNA, 25 bp, Homo sapien
tctctctggtactgttcccaaatgg

SEQ ID NO: 1463007 - DNA, 25 bp, Homo sapien
ttcctctggataccaaacaggttgc

SEQ ID NO: 1463008 - DNA, 25 bp, Homo sapien
tctggataccaaacaggttgcggca

SEQ ID NO: 1463009 - DNA, 25 bp, Homo sapien
gataccaaacaggttgcggcatggg

SEQ ID NO: 1463010 - DNA, 25 bp, Homo sapien
taccaaacaggttgcggcatgggat

SEQ ID NO: 1463011 - DNA, 25 bp, Homo sapien
ctctaacccagaccaacttgaactt

SEQ ID NO: 1463012 - DNA, 25 bp, Homo sapien
tgaggaaacatacctcttgttggct

SEQ ID NO: 1463013 - DNA, 25 bp, Homo sapien
ctgacatctgggttggcgatacttc

SEQ ID NO: 1463014 - DNA, 25 bp, Homo sapien
acttccggtttctcactcatgcaca

SEQ ID NO: 1463015 - DNA, 25 bp, Homo sapien
agctgtgagaaggattcttgatgcc

SEQ ID NO: 1463016 - DNA, 25 bp, Homo sapien
ctgtgagaaggattcttgatgcctc

SEQ ID NO: 1463017 - DNA, 25 bp, Homo sapien
gctgtgagaaggattcttgatgcct

SEQ ID NO: 1463018 - DNA, 25 bp, Homo sapien
gtgaagtgagaacaccggccaacgt

SEQ ID NO: 1463019 - DNA, 25 bp, Homo sapien
tatgtagaagtcaggcaaaccccac

SEQ ID NO: 1463020 - DNA, 25 bp, Homo sapien
tctgctcaggttgtgtgtattgccc

SEQ ID NO: 1463021 - DNA, 25 bp, Homo sapien
caacgtgggagcaaagtagcaagcc

SEQ ID NO: 1463022 - DNA, 25 bp, Homo sapien
tgagcttgatccatcttctggcatt

SEQ ID NO: 1463023 - DNA, 25 bp, Homo sapien
aaagggatgagcttgatccatcttc

SEQ ID NO: 1463024 - DNA, 25 bp, Homo sapien
ctaagtggggtgaaagggatgagct

SEQ ID NO: 1463025 - DNA, 25 bp, Homo sapien
ctgaaaccaattcctggcagggctt

SEQ ID NO: 1463026 - DNA, 25 bp, Homo sapien
aagagggtgaggagcccagtgggtc

SEQ ID NO: 1463027 - DNA, 25 bp, Homo sapien
tgggtcaggggccattttctgaagt

SEQ ID NO: 1463028 - DNA, 25 bp, Homo sapien
ctgcaagagggtgaggagcccagtg

SEQ ID NO: 1463029 - DNA, 25 bp, Homo sapien
ttctgaagtatttgttcatcttgct

SEQ ID NO: 1463030 - DNA, 25 bp, Homo sapien
cccctcaaggtagctgcatgttcat

SEQ ID NO: 1463031 - DNA, 25 bp, Homo sapien
ccaggaacgatttaataggcatacc

SEQ ID NO: 1463032 - DNA, 25 bp, Homo sapien
gttcattgcatcaccactagcccag

SEQ ID NO: 1463033 - DNA, 25 bp, Homo sapien
gtttggcttactactccctggatgg

SEQ ID NO: 1463034 - DNA, 25 bp, Homo sapien
tgaaagcggagtatagggaacaatg

SEQ ID NO: 1463035 - DNA, 25 bp, Homo sapien
ggcaagtagttagatttggaccaaa

SEQ ID NO: 1463036 - DNA, 25 bp, Homo sapien
atgaaagcggagtatagggaacaat

SEQ ID NO: 1463037 - DNA, 25 bp, Homo sapien
aagtagttagatttggaccaaatga

SEQ ID NO: 1463038 - DNA, 25 bp, Homo sapien
gactcaggtaggataatgctgtgca

SEQ ID NO: 1463039 - DNA, 25 bp, Homo sapien
tgctagggatacaaacatgaccaag

SEQ ID NO: 1463040 - DNA, 25 bp, Homo sapien
tactctgtgcaatatgtcctggtca

SEQ ID NO: 1463041 - DNA, 25 bp, Homo sapien
tggtcatatgcaccatgtaaggcac

SEQ ID NO: 1463042 - DNA, 25 bp, Homo sapien
tctcaaaggaccatcttctgaaaca

SEQ ID NO: 1463043 - DNA, 25 bp, Homo sapien
ctataacttgacaccatgttttaga

SEQ ID NO: 1463044 - DNA, 25 bp, Homo sapien
tgttttagatattacccaataaatg

SEQ ID NO: 1463045 - DNA, 25 bp, Homo sapien
aaagtttcccagaacagcgcattac

SEQ ID NO: 1463046 - DNA, 25 bp, Homo sapien
gctgggaagcccaccattaagaccc

SEQ ID NO: 1463047 - DNA, 25 bp, Homo sapien
gatggagtcttatcatctctcccaa

SEQ ID NO: 1463048 - DNA, 25 bp, Homo sapien
tagagggactccttaagcagatgga

SEQ ID NO: 1463049 - DNA, 25 bp, Homo sapien
gtatagcaaactaccctagactggg

SEQ ID NO: 1463050 - DNA, 25 bp, Homo sapien
ttttgacgaacacccagcaagcagt

SEQ ID NO: 1463051 - DNA, 25 bp, Homo sapien
taactctttagaaggctcacattgg

SEQ ID NO: 1463052 - DNA, 25 bp, Homo sapien
gatgggtctcttcaaatggttcttc

SEQ ID NO: 1463053 - DNA, 25 bp, Homo sapien
tgtggtttctccaagacgtgaggct

SEQ ID NO: 1463054 - DNA, 25 bp, Homo sapien
gggacagactccagaaacgccacct

SEQ ID NO: 1463055 - DNA, 25 bp, Homo sapien
ttcatatgggcttttcggactgcca

SEQ ID NO: 1463056 - DNA, 25 bp, Homo sapien
ctatgctatcctaaaatggtagcca

SEQ ID NO: 1463057 - DNA, 25 bp, Homo sapien
tcttctttcatatgggcttttcgga

SEQ ID NO: 1463058 - DNA, 25 bp, Homo sapien
gctatcctaaaatggtagccatctt

SEQ ID NO: 1463059 - DNA, 25 bp, Homo sapien
taacacatgtcctgatgacatcctc

SEQ ID NO: 1463060 - DNA, 25 bp, Homo sapien
ataacacatgtcctgatgacatcct

SEQ ID NO: 1463061 - DNA, 25 bp, Homo sapien
aataacacatgtcctgatgacatcc

SEQ ID NO: 1463062 - DNA, 25 bp, Homo sapien
ttcctgctttgtccagcaggaccac

SEQ ID NO: 1463063 - DNA, 25 bp, Homo sapien
tctccatctcatcacggccctttct

SEQ ID NO: 1463064 - DNA, 25 bp, Homo sapien
atcatccctccattcattgcagcag

SEQ ID NO: 1463065 - DNA, 25 bp, Homo sapien
tccctccattcattgcagcagaggc

SEQ ID NO: 1463066 - DNA, 25 bp, Homo sapien
gtcaggttcagtcatatttgaaaca

SEQ ID NO: 1463067 - DNA, 25 bp, Homo sapien
ggttcagtcatatttgaaacatgga

SEQ ID NO: 1463068 - DNA, 25 bp, Homo sapien
cttatatatgtcaggttcagtcata

SEQ ID NO: 1463069 - DNA, 25 bp, Homo sapien
tgaaacatggaaaacatgaataggt

SEQ ID NO: 1463070 - DNA, 25 bp, Homo sapien
gaattaatgagactggtcctttgcc

SEQ ID NO: 1463071 - DNA, 25 bp, Homo sapien
tcagcaacagcgtagctcatcagtt

SEQ ID NO: 1463072 - DNA, 25 bp, Homo sapien
gaaaagtgccctttcatcaccacca

SEQ ID NO: 1463073 - DNA, 25 bp, Homo sapien
gcagcttacaatcctgtagtggctc

SEQ ID NO: 1463074 - DNA, 25 bp, Homo sapien
caccaaactctttggtaagagaatg

SEQ ID NO: 1463075 - DNA, 25 bp, Homo sapien
ccagattgtccatcaaacttttcat

SEQ ID NO: 1463076 - DNA, 25 bp, Homo sapien
tgtgagagcgtatttcttgtgttgc

SEQ ID NO: 1463077 - DNA, 25 bp, Homo sapien
tgtgttgcttagtgggactcttcca

SEQ ID NO: 1463078 - DNA, 25 bp, Homo sapien
tgcaattagagagttacttgaaaac

SEQ ID NO: 1463079 - DNA, 25 bp, Homo sapien
caatgttgaagcagggtctggacaa

SEQ ID NO: 1463080 - DNA, 25 bp, Homo sapien
tgaatgctacctggacaccgatttg

SEQ ID NO: 1463081 - DNA, 25 bp, Homo sapien
catgttttcagaggatacgaactcc

SEQ ID NO: 1463082 - DNA, 25 bp, Homo sapien
ttgacaatttcttagcaatccataa

SEQ ID NO: 1463083 - DNA, 25 bp, Homo sapien
aatttctttgatgtccctagccact

SEQ ID NO: 1463084 - DNA, 25 bp, Homo sapien
gaacatctttcagcatattatttgc

SEQ ID NO: 1463085 - DNA, 25 bp, Homo sapien
cctagccacttccaatgaacatctt

SEQ ID NO: 1463086 - DNA, 25 bp, Homo sapien
gatgtccctagccacttccaatgaa

SEQ ID NO: 1463087 - DNA, 25 bp, Homo sapien
ggtagttattcagactccctgagag

SEQ ID NO: 1463088 - DNA, 25 bp, Homo sapien
tagctacatgggtgtcagcctagat

SEQ ID NO: 1463089 - DNA, 25 bp, Homo sapien
aacacagtatcacaaggcagggcca

SEQ ID NO: 1463090 - DNA, 25 bp, Homo sapien
tacatcagatattacacgttggcat

SEQ ID NO: 1463091 - DNA, 25 bp, Homo sapien
tgaaactttctacttcagtggcttt

SEQ ID NO: 1463092 - DNA, 25 bp, Homo sapien
cagtcatgccactaaggacccagaa

SEQ ID NO: 1463093 - DNA, 25 bp, Homo sapien
gatgccagagataaatacttccact

SEQ ID NO: 1463094 - DNA, 25 bp, Homo sapien
ttccaacagtggtccagcgactcag

SEQ ID NO: 1463095 - DNA, 25 bp, Homo sapien
cagagtggactaggtgtttagtgtt

SEQ ID NO: 1463096 - DNA, 25 bp, Homo sapien
ctctagtgtatacagagtggactag

SEQ ID NO: 1463097 - DNA, 25 bp, Homo sapien
tactttaagcttctcagtacttctc

SEQ ID NO: 1463098 - DNA, 25 bp, Homo sapien
tatacagagtggactaggtgtttag

SEQ ID NO: 1463099 - DNA, 25 bp, Homo sapien
cattaataactaggacatcctgttt

SEQ ID NO: 1463100 - DNA, 25 bp, Homo sapien
ttaataactaggacatcctgttttc

SEQ ID NO: 1463101 - DNA, 25 bp, Homo sapien
attaataactaggacatcctgtttt

SEQ ID NO: 1463102 - DNA, 25 bp, Homo sapien
cagcagcctctggagtgtcaggtgg

SEQ ID NO: 1463103 - DNA, 25 bp, Homo sapien
cccaggatgaaacagccctgcattt

SEQ ID NO: 1463104 - DNA, 25 bp, Homo sapien
tccagcagcctctggagtgtcaggt

SEQ ID NO: 1463105 - DNA, 25 bp, Homo sapien
caggatgaaacagccctgcatttcc

SEQ ID NO: 1463106 - DNA, 25 bp, Homo sapien
gaaagagcattcctggatcaatgga

SEQ ID NO: 1463107 - DNA, 25 bp, Homo sapien
caatgatgggcaacctaaaatttac

SEQ ID NO: 1463108 - DNA, 25 bp, Homo sapien
aattggtttgctggaaaggactgag

SEQ ID NO: 1463109 - DNA, 25 bp, Homo sapien
gggaagacctgttcctatactgtaa

SEQ ID NO: 1463110 - DNA, 25 bp, Homo sapien
aacaaccctaggaggctaagtactg

SEQ ID NO: 1463111 - DNA, 25 bp, Homo sapien
cctgctgcataactctgacatgctg

SEQ ID NO: 1463112 - DNA, 25 bp, Homo sapien
catttacccgttgtattccctggct

SEQ ID NO: 1463113 - DNA, 25 bp, Homo sapien
taaacatgagcaatgtttgcgccta

SEQ ID NO: 1463114 - DNA, 25 bp, Homo sapien
tacacgagtcgctgttcacatccag

SEQ ID NO: 1463115 - DNA, 25 bp, Homo sapien
gctgttcacatccagcgttaaaaca

SEQ ID NO: 1463116 - DNA, 25 bp, Homo sapien
gacatcctggccaaagttctctgac

SEQ ID NO: 1463117 - DNA, 25 bp, Homo sapien
tcatgtcgtgtaggcttcatctggg

SEQ ID NO: 1463118 - DNA, 25 bp, Homo sapien
ggacctgtgtcagcgtaagaggaca

SEQ ID NO: 1463119 - DNA, 25 bp, Homo sapien
accccaacttagaaacagctgtgtc

SEQ ID NO: 1463120 - DNA, 25 bp, Homo sapien
cataagctccaacttatctgtggcc

SEQ ID NO: 1463121 - DNA, 25 bp, Homo sapien
tctgtggccatatgagaatgtaggg

SEQ ID NO: 1463122 - DNA, 25 bp, Homo sapien
ctccacacaatctgtcccgaaagtc

SEQ ID NO: 1463123 - DNA, 25 bp, Homo sapien
caatgtcacgaggagaatgacagcc

SEQ ID NO: 1463124 - DNA, 25 bp, Homo sapien
cacagcaatgtcacgaggagaatga

SEQ ID NO: 1463125 - DNA, 25 bp, Homo sapien
tgtcacgaggagaatgacagcctcc

SEQ ID NO: 1463126 - DNA, 25 bp, Homo sapien
aaggcattatctgttgtgtgtattc

SEQ ID NO: 1463127 - DNA, 25 bp, Homo sapien
gcattatctgttgtgtgtattcact

SEQ ID NO: 1463128 - DNA, 25 bp, Homo sapien
cataaggcattatctgttgtgtgta

SEQ ID NO: 1463129 - DNA, 25 bp, Homo sapien
ccataaggcattatctgttgtgtgt

SEQ ID NO: 1463130 - DNA, 25 bp, Homo sapien
atttgttggactaattcctcatttt

SEQ ID NO: 1463131 - DNA, 25 bp, Homo sapien
catttgttggactaattcctcattt

SEQ ID NO: 1463132 - DNA, 25 bp, Homo sapien
cctctgagcatctcgacatgctgga

SEQ ID NO: 1463133 - DNA, 25 bp, Homo sapien
tggaaacccttgaatgctccttctg

SEQ ID NO: 1463134 - DNA, 25 bp, Homo sapien
gaggactggactctactctcaagaa

SEQ ID NO: 1463135 - DNA, 25 bp, Homo sapien
caactgggcatcatgaagaggaatg

SEQ ID NO: 1463136 - DNA, 25 bp, Homo sapien
caactgtgcactgtaacatatccca

SEQ ID NO: 1463137 - DNA, 25 bp, Homo sapien
cctcctggagaataaggctgtgcaa

SEQ ID NO: 1463138 - DNA, 25 bp, Homo sapien
ggcttgtgtcttccacatagacaag

SEQ ID NO: 1463139 - DNA, 25 bp, Homo sapien
gctttttcaggccacactcagttgc

SEQ ID NO: 1463140 - DNA, 25 bp, Homo sapien
tttaatgcccagagacagctaaaat

SEQ ID NO: 1463141 - DNA, 25 bp, Homo sapien
taatgcccagagacagctaaaatca

SEQ ID NO: 1463142 - DNA, 25 bp, Homo sapien
ccagagacagctaaaatcagcagct

SEQ ID NO: 1463143 - DNA, 25 bp, Homo sapien
aatgcccagagacagctaaaatcag

SEQ ID NO: 1463144 - DNA, 25 bp, Homo sapien
tgctagtaagcaggcataatgtgcc

SEQ ID NO: 1463145 - DNA, 25 bp, Homo sapien
cattctgcatctacacagtcctgga

SEQ ID NO: 1463146 - DNA, 25 bp, Homo sapien
taatgtgccagtaagaaggcaacct

SEQ ID NO: 1463147 - DNA, 25 bp, Homo sapien
taacaagagaaattagccagagcac

SEQ ID NO: 1463148 - DNA, 25 bp, Homo sapien
ctaatcgtcctgctttatatcttta

SEQ ID NO: 1463149 - DNA, 25 bp, Homo sapien
ttatatctttactcagtgctggcat

SEQ ID NO: 1463150 - DNA, 25 bp, Homo sapien
tctctccatcatgttttatgtcttt

SEQ ID NO: 1463151 - DNA, 25 bp, Homo sapien
tttctctccatcatgttttatgtct

SEQ ID NO: 1463152 - DNA, 25 bp, Homo sapien
caagtgacactgataggaaatttca

SEQ ID NO: 1463153 - DNA, 25 bp, Homo sapien
taatgatgctgagcaggactgacaa

SEQ ID NO: 1463154 - DNA, 25 bp, Homo sapien
gaggtcagccctcttcctaatgatg

SEQ ID NO: 1463155 - DNA, 25 bp, Homo sapien
tcacagcaaagttcccggaggtcag

SEQ ID NO: 1463156 - DNA, 25 bp, Homo sapien
gcatgaaccccacaatcagcccaga

SEQ ID NO: 1463157 - DNA, 25 bp, Homo sapien
tccaggccatggccccgtgaggtgg

SEQ ID NO: 1463158 - DNA, 25 bp, Homo sapien
catgaaccccacaatcagcccagag

SEQ ID NO: 1463159 - DNA, 25 bp, Homo sapien
gaggtggtggaaaactgggctcaca

SEQ ID NO: 1463160 - DNA, 25 bp, Homo sapien
ctccaaaacgaagtacagtagtaag

SEQ ID NO: 1463161 - DNA, 25 bp, Homo sapien
acagtagtaagggtaggagatcgaa

SEQ ID NO: 1463162 - DNA, 25 bp, Homo sapien
ttttggatgggactttgttcggcac

SEQ ID NO: 1463163 - DNA, 25 bp, Homo sapien
gccacttgccaaggaaccaaagcca

SEQ ID NO: 1463164 - DNA, 25 bp, Homo sapien
gatgctcccggagaagcgctggagc

SEQ ID NO: 1463165 - DNA, 25 bp, Homo sapien
tccttggatgctcccggagaagcgc

SEQ ID NO: 1463166 - DNA, 25 bp, Homo sapien
tgtctctccttggatgctcccggag

SEQ ID NO: 1463167 - DNA, 25 bp, Homo sapien
tctctccttggatgctcccggagaa

SEQ ID NO: 1463168 - DNA, 25 bp, Homo sapien
tctgccttggccttactgacaatca

SEQ ID NO: 1463169 - DNA, 25 bp, Homo sapien
ccctgggctagacctgcagttaaaa

SEQ ID NO: 1463170 - DNA, 25 bp, Homo sapien
caatcagagggaaccaaaacagggt

SEQ ID NO: 1463171 - DNA, 25 bp, Homo sapien
tctaggctgacaaagaaggtctgaa

SEQ ID NO: 1463172 - DNA, 25 bp, Homo sapien
ggggtacgtatacaccagcagcaca

SEQ ID NO: 1463173 - DNA, 25 bp, Homo sapien
tcacacttaggggtacgtatacacc

SEQ ID NO: 1463174 - DNA, 25 bp, Homo sapien
ttaggggtacgtatacaccagcagc

SEQ ID NO: 1463175 - DNA, 25 bp, Homo sapien
ctcatcacacttaggggtacgtata

SEQ ID NO: 1463176 - DNA, 25 bp, Homo sapien
tgaaggtgaaccgtgctttccgcat

SEQ ID NO: 1463177 - DNA, 25 bp, Homo sapien
tccgcatttcatctggttcctctct

SEQ ID NO: 1463178 - DNA, 25 bp, Homo sapien
cctctctctgtggatacgtctggat

SEQ ID NO: 1463179 - DNA, 25 bp, Homo sapien
gtggatacgtctggataattagatc

SEQ ID NO: 1463180 - DNA, 25 bp, Homo sapien
tcaaataatgcggaacacgaaacat

SEQ ID NO: 1463181 - DNA, 25 bp, Homo sapien
atgcggaacacgaaacattgactaa

SEQ ID NO: 1463182 - DNA, 25 bp, Homo sapien
tctgtaagggcaaatggttcaaata

SEQ ID NO: 1463183 - DNA, 25 bp, Homo sapien
atggttcaaataatgcggaacacga

SEQ ID NO: 1463184 - DNA, 25 bp, Homo sapien
tgttaattcaatgccagcaaggagg

SEQ ID NO: 1463185 - DNA, 25 bp, Homo sapien
cagcagaagcatcaagatcaggtcc

SEQ ID NO: 1463186 - DNA, 25 bp, Homo sapien
tctgaccccaaggaatccaggacac

SEQ ID NO: 1463187 - DNA, 25 bp, Homo sapien
catataatgaatccagggaatccca

SEQ ID NO: 1463188 - DNA, 25 bp, Homo sapien
tgaggaagggccagacacctccggg

SEQ ID NO: 1463189 - DNA, 25 bp, Homo sapien
ggcgagttttcatgctcatttggga

SEQ ID NO: 1463190 - DNA, 25 bp, Homo sapien
caatttgcctcctgaaatctcccat

SEQ ID NO: 1463191 - DNA, 25 bp, Homo sapien
ttcaggcacagtgactgatttgtcc

SEQ ID NO: 1463192 - DNA, 25 bp, Homo sapien
gggggatgacacaactttaaccaca

SEQ ID NO: 1463193 - DNA, 25 bp, Homo sapien
gtgcatctccactgccttacgtttt

SEQ ID NO: 1463194 - DNA, 25 bp, Homo sapien
ggagctgagtggcttcacagcggca

SEQ ID NO: 1463195 - DNA, 25 bp, Homo sapien
catctccactgccttacgttttggg

SEQ ID NO: 1463196 - DNA, 25 bp, Homo sapien
ccttctgggatgactttgtgggaag

SEQ ID NO: 1463197 - DNA, 25 bp, Homo sapien
cttctgggatgactttgtgggaagc

SEQ ID NO: 1463198 - DNA, 25 bp, Homo sapien
tctgtagcttccattctaacacggc

SEQ ID NO: 1463199 - DNA, 25 bp, Homo sapien
taacacggctcagaaaatcaacttc

SEQ ID NO: 1463200 - DNA, 25 bp, Homo sapien
tgcatgcgcgtctctctcatgatct

SEQ ID NO: 1463201 - DNA, 25 bp, Homo sapien
tcaactgaagcctctgtagcttcca

SEQ ID NO: 1463202 - DNA, 25 bp, Homo sapien
tttagtttgcgattccccatgtttc

SEQ ID NO: 1463203 - DNA, 25 bp, Homo sapien
tgagtttagtttgcgattccccatg

SEQ ID NO: 1463204 - DNA, 25 bp, Homo sapien
tttgcgattccccatgtttctgact

SEQ ID NO: 1463205 - DNA, 25 bp, Homo sapien
cgattccccatgtttctgactggct

SEQ ID NO: 1463206 - DNA, 25 bp, Homo sapien
cccagtgtctcagtaaggcccaatc

SEQ ID NO: 1463207 - DNA, 25 bp, Homo sapien
aactttatctgttgcgtcctcatta

SEQ ID NO: 1463208 - DNA, 25 bp, Homo sapien
gtgtctcagtaaggcccaatctaac

SEQ ID NO: 1463209 - DNA, 25 bp, Homo sapien
gtttccccagtgtctcagtaaggcc

SEQ ID NO: 1463210 - DNA, 25 bp, Homo sapien
cttgtttggtggagagagttactgt

SEQ ID NO: 1463211 - DNA, 25 bp, Homo sapien
ttggtggagagagttactgtcctca

SEQ ID NO: 1463212 - DNA, 25 bp, Homo sapien
tttggtggagagagttactgtcctc

SEQ ID NO: 1463213 - DNA, 25 bp, Homo sapien
tgtttggtggagagagttactgtcc

SEQ ID NO: 1463214 - DNA, 25 bp, Homo sapien
ggctcagggtggagtaaaagactgg

SEQ ID NO: 1463215 - DNA, 25 bp, Homo sapien
gctcagggtggagtaaaagactgga

SEQ ID NO: 1463216 - DNA, 25 bp, Homo sapien
tttattccaaaatgcaaacattcac

SEQ ID NO: 1463217 - DNA, 25 bp, Homo sapien
cttgctcctcagatttttccttcat

SEQ ID NO: 1463218 - DNA, 25 bp, Homo sapien
ctttgacttaatttcctcaagagtt

SEQ ID NO: 1463219 - DNA, 25 bp, Homo sapien
ttctttgacttaatttcctcaagag

SEQ ID NO: 1463220 - DNA, 25 bp, Homo sapien
tcactcgtaatccattgtgaacttc

SEQ ID NO: 1463221 - DNA, 25 bp, Homo sapien
gacagaagtcactcgtaatccattg

SEQ ID NO: 1463222 - DNA, 25 bp, Homo sapien
ggtttccggacagaagtcactcgta

SEQ ID NO: 1463223 - DNA, 25 bp, Homo sapien
tgactgcaggtttccggacagaagt

SEQ ID NO: 1463224 - DNA, 25 bp, Homo sapien
cttcatcatcatctgcagcattaat

SEQ ID NO: 1463225 - DNA, 25 bp, Homo sapien
tcatcatcatctgcagcattaatta

SEQ ID NO: 1463226 - DNA, 25 bp, Homo sapien
catcatcatctgcagcattaattac

SEQ ID NO: 1463227 - DNA, 25 bp, Homo sapien
tcttcatcatcatctgcagcattaa

SEQ ID NO: 1463228 - DNA, 25 bp, Homo sapien
aactggtggatgcttggggctagga

SEQ ID NO: 1463229 - DNA, 25 bp, Homo sapien
ggatgcttggggctaggaacatttt

SEQ ID NO: 1463230 - DNA, 25 bp, Homo sapien
tggtggatgcttggggctaggaaca

SEQ ID NO: 1463231 - DNA, 25 bp, Homo sapien
gcttggggctaggaacattttcgga

SEQ ID NO: 1463232 - DNA, 25 bp, Homo sapien
ttcctcttctggtgactcaggcaca

SEQ ID NO: 1463233 - DNA, 25 bp, Homo sapien
aactgaaagttggctagccttcact

SEQ ID NO: 1463234 - DNA, 25 bp, Homo sapien
gaaagttggctagccttcacttcct

SEQ ID NO: 1463235 - DNA, 25 bp, Homo sapien
tgaaagttggctagccttcacttcc

SEQ ID NO: 1463236 - DNA, 25 bp, Homo sapien
cgaaaacagcgcccttcttgccata

SEQ ID NO: 1463237 - DNA, 25 bp, Homo sapien
tcccaataacaaggaatttcactgc

SEQ ID NO: 1463238 - DNA, 25 bp, Homo sapien
tgacatcctgttggctgattttccc

SEQ ID NO: 1463239 - DNA, 25 bp, Homo sapien
caatctccatgtgccgaaacctgca

SEQ ID NO: 1463240 - DNA, 25 bp, Homo sapien
tagcagtcttctccttgattaggca

SEQ ID NO: 1463241 - DNA, 25 bp, Homo sapien
aatagcagtcttctccttgattagg

SEQ ID NO: 1463242 - DNA, 25 bp, Homo sapien
atagcagtcttctccttgattaggc

SEQ ID NO: 1463243 - DNA, 25 bp, Homo sapien
gctgggtagattcttagatcagaag

SEQ ID NO: 1463244 - DNA, 25 bp, Homo sapien
caggctccaagtcctcgtgaaatgg

SEQ ID NO: 1463245 - DNA, 25 bp, Homo sapien
tgggtttaatcttccaaatgacaac

SEQ ID NO: 1463246 - DNA, 25 bp, Homo sapien
gtcttcactgagttccaatctatta

SEQ ID NO: 1463247 - DNA, 25 bp, Homo sapien
acttaatactagtcaattttccagg

SEQ ID NO: 1463248 - DNA, 25 bp, Homo sapien
atactagtcaattttccaggaattt

SEQ ID NO: 1463249 - DNA, 25 bp, Homo sapien
tttgggcagggaatatccccaaatc

SEQ ID NO: 1463250 - DNA, 25 bp, Homo sapien
caggaattttttgggcagggaatat

SEQ ID NO: 1463251 - DNA, 25 bp, Homo sapien
aggtccagaaccttgagatggcctg

SEQ ID NO: 1463252 - DNA, 25 bp, Homo sapien
aaggtccagaaccttgagatggcct

SEQ ID NO: 1463253 - DNA, 25 bp, Homo sapien
tcaaggtccagaaccttgagatggc

SEQ ID NO: 1463254 - DNA, 25 bp, Homo sapien
caaggtccagaaccttgagatggcc

SEQ ID NO: 1463255 - DNA, 25 bp, Homo sapien
atgggagtttaggggtgttcttcat

SEQ ID NO: 1463256 - DNA, 25 bp, Homo sapien
tatgggagtttaggggtgttcttca

SEQ ID NO: 1463257 - DNA, 25 bp, Homo sapien
ctgttgctcttgactcccatgctga

SEQ ID NO: 1463258 - DNA, 25 bp, Homo sapien
agtacggaagtgtccctgttgctct

SEQ ID NO: 1463259 - DNA, 25 bp, Homo sapien
ttgctcttgactcccatgctgaggg

SEQ ID NO: 1463260 - DNA, 25 bp, Homo sapien
ggtttcaccaatcctacaaggagta

SEQ ID NO: 1463261 - DNA, 25 bp, Homo sapien
caagctccaaagtagtgggacccga

SEQ ID NO: 1463262 - DNA, 25 bp, Homo sapien
acaagctccaaagtagtgggacccg

SEQ ID NO: 1463263 - DNA, 25 bp, Homo sapien
tgtaagatcactgcgggaagttggt

SEQ ID NO: 1463264 - DNA, 25 bp, Homo sapien
caagctgtgaatgtgtatagagtat

SEQ ID NO: 1463265 - DNA, 25 bp, Homo sapien
aaaagaaggcaggtattctggtctg

SEQ ID NO: 1463266 - DNA, 25 bp, Homo sapien
ttctggtctggctgagtgtaagatc

SEQ ID NO: 1463267 - DNA, 25 bp, Homo sapien
tttcaggttcagtttttagattctc

SEQ ID NO: 1463268 - DNA, 25 bp, Homo sapien
caggttcagtttttagattctcctt

SEQ ID NO: 1463269 - DNA, 25 bp, Homo sapien
gaaggactcttcctttcaggttcag

SEQ ID NO: 1463270 - DNA, 25 bp, Homo sapien
agaaagaaggactcttcctttcagg

SEQ ID NO: 1463271 - DNA, 25 bp, Homo sapien
ccccagtgcattcgagtgcagctgt

SEQ ID NO: 1463272 - DNA, 25 bp, Homo sapien
gcattcgagtgcagctgtttcagtg

SEQ ID NO: 1463273 - DNA, 25 bp, Homo sapien
tcgagtgcagctgtttcagtgccat

SEQ ID NO: 1463274 - DNA, 25 bp, Homo sapien
agtgcattcgagtgcagctgtttca

SEQ ID NO: 1463275 - DNA, 25 bp, Homo sapien
catgtactgtgccaatattaagggt

SEQ ID NO: 1463276 - DNA, 25 bp, Homo sapien
tattaagggtgaaccaacatgagca

SEQ ID NO: 1463277 - DNA, 25 bp, Homo sapien
tttcatgaatcagcatgtactgtgc

SEQ ID NO: 1463278 - DNA, 25 bp, Homo sapien
gggtgaaccaacatgagcactagat

SEQ ID NO: 1463279 - DNA, 25 bp, Homo sapien
ccacattccacacccagtaaaaatg

SEQ ID NO: 1463280 - DNA, 25 bp, Homo sapien
gtcatcaacagtaccaatgtcccca

SEQ ID NO: 1463281 - DNA, 25 bp, Homo sapien
caaggtcatcaacagtaccaatgtc

SEQ ID NO: 1463282 - DNA, 25 bp, Homo sapien
tcaacagtaccaatgtccccacatt

SEQ ID NO: 1463283 - DNA, 25 bp, Homo sapien
ccacattccacacccagtaaaaatg

SEQ ID NO: 1463284 - DNA, 25 bp, Homo sapien
gtcatcaacagtaccaatgtcccca

SEQ ID NO: 1463285 - DNA, 25 bp, Homo sapien
caaggtcatcaacagtaccaatgtc

SEQ ID NO: 1463286 - DNA, 25 bp, Homo sapien
tcaacagtaccaatgtccccacatt

SEQ ID NO: 1463287 - DNA, 25 bp, Homo sapien
catcaagatccccacctttagtgat

SEQ ID NO: 1463288 - DNA, 25 bp, Homo sapien
actgagatcctccaaaagctttggg

SEQ ID NO: 1463289 - DNA, 25 bp, Homo sapien
cagcttcatagtaccttctcttgca

SEQ ID NO: 1463290 - DNA, 25 bp, Homo sapien
cattgtgaatccattggatcactga

SEQ ID NO: 1463291 - DNA, 25 bp, Homo sapien
agtcctctacgtaagccccactagg

SEQ ID NO: 1463292 - DNA, 25 bp, Homo sapien
aaaccttggaatcatttttcacagt

SEQ ID NO: 1463293 - DNA, 25 bp, Homo sapien
gggtacaaaagagtagtagccatgg

SEQ ID NO: 1463294 - DNA, 25 bp, Homo sapien
cacaagtatagaaaacaaggctcct

SEQ ID NO: 1463295 - DNA, 25 bp, Homo sapien
tcagggttacttgtggattgttgtt

SEQ ID NO: 1463296 - DNA, 25 bp, Homo sapien
cgagagcaaattggagacttctaac

SEQ ID NO: 1463297 - DNA, 25 bp, Homo sapien
gtggattgttgttgtcgagagcaaa

SEQ ID NO: 1463298 - DNA, 25 bp, Homo sapien
tgttgttgtcgagagcaaattggag

SEQ ID NO: 1463299 - DNA, 25 bp, Homo sapien
ttgttttgcatcaaggagacagaac

SEQ ID NO: 1463300 - DNA, 25 bp, Homo sapien
gggaataagtctcaaataactcatc

SEQ ID NO: 1463301 - DNA, 25 bp, Homo sapien
caactggttgattgttagatgtttc

SEQ ID NO: 1463302 - DNA, 25 bp, Homo sapien
catgagcattttgatgtgagtctct

SEQ ID NO: 1463303 - DNA, 25 bp, Homo sapien
atctatggaccccaggaagtaggat

SEQ ID NO: 1463304 - DNA, 25 bp, Homo sapien
gtctctgtcagtatgtttggctgca

SEQ ID NO: 1463305 - DNA, 25 bp, Homo sapien
ctggtctctgtcagtatgtttggct

SEQ ID NO: 1463306 - DNA, 25 bp, Homo sapien
ggtctctgtcagtatgtttggctgc

SEQ ID NO: 1463307 - DNA, 25 bp, Homo sapien
tctctgtcagtatgtttggctgcat

SEQ ID NO: 1463308 - DNA, 25 bp, Homo sapien
tacacaacccatagcctgtggccag

SEQ ID NO: 1463309 - DNA, 25 bp, Homo sapien
tctgatataacgcagcagctacaca

SEQ ID NO: 1463310 - DNA, 25 bp, Homo sapien
tccccatcacgctgctgaaaggagc

SEQ ID NO: 1463311 - DNA, 25 bp, Homo sapien
aggagagctccaggcttgacccatt

SEQ ID NO: 1463312 - DNA, 25 bp, Homo sapien
tgatggtgcccagccgaactgataa

SEQ ID NO: 1463313 - DNA, 25 bp, Homo sapien
ggtgcccagccgaactgataaagag

SEQ ID NO: 1463314 - DNA, 25 bp, Homo sapien
gatggtgcccagccgaactgataaa

SEQ ID NO: 1463315 - DNA, 25 bp, Homo sapien
tggtgcccagccgaactgataaaga

SEQ ID NO: 1463316 - DNA, 25 bp, Homo sapien
cttcccccagtctcccactccctga

SEQ ID NO: 1463317 - DNA, 25 bp, Homo sapien
cccagtctcccactccctgacaggc

SEQ ID NO: 1463318 - DNA, 25 bp, Homo sapien
ccagtctcccactccctgacaggcc

SEQ ID NO: 1463319 - DNA, 25 bp, Homo sapien
cccccagtctcccactccctgacag

SEQ ID NO: 1463320 - DNA, 25 bp, Homo sapien
taactccagtctgtacacagttctt

SEQ ID NO: 1463321 - DNA, 25 bp, Homo sapien
tcctaactccagtctgtacacagtt

SEQ ID NO: 1463322 - DNA, 25 bp, Homo sapien
ctgctgaagtccatgatgacccagg

SEQ ID NO: 1463323 - DNA, 25 bp, Homo sapien
aagtccatgatgacccaggtgtaaa

SEQ ID NO: 1463324 - DNA, 25 bp, Homo sapien
aataactaagtgctgaaaacttttg

SEQ ID NO: 1463325 - DNA, 25 bp, Homo sapien
gaaaacttttgagatgtttcatgta

SEQ ID NO: 1463326 - DNA, 25 bp, Homo sapien
cattttgcctaaggctttttcccat

SEQ ID NO: 1463327 - DNA, 25 bp, Homo sapien
cccatgagaggtgataataactaag

SEQ ID NO: 1463328 - DNA, 25 bp, Homo sapien
attagctaacaaatgaatacgaccc

SEQ ID NO: 1463329 - DNA, 25 bp, Homo sapien
caaatgaatacgaccctgagaatac

SEQ ID NO: 1463330 - DNA, 25 bp, Homo sapien
cagggttggtgaagtgaaagtctga

SEQ ID NO: 1463331 - DNA, 25 bp, Homo sapien
tacgaccctgagaatacacttctgt

SEQ ID NO: 1463332 - DNA, 25 bp, Homo sapien
ccaagagttcctgtaattggcattc

SEQ ID NO: 1463333 - DNA, 25 bp, Homo sapien
tatataggtaggataggccaagagt

SEQ ID NO: 1463334 - DNA, 25 bp, Homo sapien
ttggcattcttttgacctcttatta

SEQ ID NO: 1463335 - DNA, 25 bp, Homo sapien
ctcttattatcccagtggttggatc

SEQ ID NO: 1463336 - DNA, 25 bp, Homo sapien
ccctccttccgacaactgatgttga

SEQ ID NO: 1463337 - DNA, 25 bp, Homo sapien
cagcactctgaagagggtgaaatcc

SEQ ID NO: 1463338 - DNA, 25 bp, Homo sapien
tggtggctcattggcaatcttactc

SEQ ID NO: 1463339 - DNA, 25 bp, Homo sapien
catagagctctgtagttggtggctc

SEQ ID NO: 1463340 - DNA, 25 bp, Homo sapien
ctccttcctgccaatccacgtccat

SEQ ID NO: 1463341 - DNA, 25 bp, Homo sapien
tctccttcctgccaatccacgtcca

SEQ ID NO: 1463342 - DNA, 25 bp, Homo sapien
ctctccttcctgccaatccacgtcc

SEQ ID NO: 1463343 - DNA, 25 bp, Homo sapien
tccaggcacaatgaggagggtcccc

SEQ ID NO: 1463344 - DNA, 25 bp, Homo sapien
ctcattaacctggaatgaaaagtca

SEQ ID NO: 1463345 - DNA, 25 bp, Homo sapien
acctaaggggacatcagagtgagaa

SEQ ID NO: 1463346 - DNA, 25 bp, Homo sapien
tggagtccaggcacaatgaggaggg

SEQ ID NO: 1463347 - DNA, 25 bp, Homo sapien
cttctcgatccctctgtgctgctgg

SEQ ID NO: 1463348 - DNA, 25 bp, Homo sapien
tcagtcttctcgatccctctgtgct

SEQ ID NO: 1463349 - DNA, 25 bp, Homo sapien
ggtttctctaataagtaagtagatc

SEQ ID NO: 1463350 - DNA, 25 bp, Homo sapien
taagtaagtagatctttgggaatgt

SEQ ID NO: 1463351 - DNA, 25 bp, Homo sapien
tggaatgcagaagaaatgttttcct

SEQ ID NO: 1463352 - DNA, 25 bp, Homo sapien
tatgtggaatgcagaagaaatgttt

SEQ ID NO: 1463353 - DNA, 25 bp, Homo sapien
gaatgcagaagaaatgttttccttt

SEQ ID NO: 1463354 - DNA, 25 bp, Homo sapien
tgtggaatgcagaagaaatgttttc

SEQ ID NO: 1463355 - DNA, 25 bp, Homo sapien
taaacattggccacatcacagagct

SEQ ID NO: 1463356 - DNA, 25 bp, Homo sapien
gctggtatgttattgcagagcagag

SEQ ID NO: 1463357 - DNA, 25 bp, Homo sapien
acagagctggtatgttattgcagag

SEQ ID NO: 1463358 - DNA, 25 bp, Homo sapien
caactaggtaaacattggccacatc

SEQ ID NO: 1463359 - DNA, 25 bp, Homo sapien
aaacactgtgtacacgtgtcagaat

SEQ ID NO: 1463360 - DNA, 25 bp, Homo sapien
tgtcagaatgccaactgcaatggca

SEQ ID NO: 1463361 - DNA, 25 bp, Homo sapien
tgtgtacacgtgtcagaatgccaac

SEQ ID NO: 1463362 - DNA, 25 bp, Homo sapien
tacacgtgtcagaatgccaactgca

SEQ ID NO: 1463363 - DNA, 25 bp, Homo sapien
gattgctacagtgacgaggatttga

SEQ ID NO: 1463364 - DNA, 25 bp, Homo sapien
acactgtattcttggaggttccagc

SEQ ID NO: 1463365 - DNA, 25 bp, Homo sapien
caacaggtcgacttttgaacagtgc

SEQ ID NO: 1463366 - DNA, 25 bp, Homo sapien
tcctggctgagatcaaacactgtat

SEQ ID NO: 1463367 - DNA, 25 bp, Homo sapien
tattctcattgcacccaggtttcaa

SEQ ID NO: 1463368 - DNA, 25 bp, Homo sapien
gagctaatgcagttgcactccaagg

SEQ ID NO: 1463369 - DNA, 25 bp, Homo sapien
tgtcacagggatcaatcagtcaagg

SEQ ID NO: 1463370 - DNA, 25 bp, Homo sapien
gacgttgtgaaatgcaccattgagc

SEQ ID NO: 1463371 - DNA, 25 bp, Homo sapien
gcccattatgatgagtcaggtctac

SEQ ID NO: 1463372 - DNA, 25 bp, Homo sapien
gccattctgtggatagcatttgttt

SEQ ID NO: 1463373 - DNA, 25 bp, Homo sapien
aaggagacaatctggctctcatttc

SEQ ID NO: 1463374 - DNA, 25 bp, Homo sapien
gctgccaaggagacaatctggctct

SEQ ID NO: 1463375 - DNA, 25 bp, Homo sapien
gttttacagtaaaccctgcatccag

SEQ ID NO: 1463376 - DNA, 25 bp, Homo sapien
agttttacagtaaaccctgcatcca

SEQ ID NO: 1463377 - DNA, 25 bp, Homo sapien
tgtaggttaaggagccctaatccca

SEQ ID NO: 1463378 - DNA, 25 bp, Homo sapien
aatcttccaggtgtaggttaaggag

SEQ ID NO: 1463379 - DNA, 25 bp, Homo sapien
caggtgtaggttaaggagccctaat

SEQ ID NO: 1463380 - DNA, 25 bp, Homo sapien
taggacaagattggtgcccccaaca

SEQ ID NO: 1463381 - DNA, 25 bp, Homo sapien
tgaagtaggacaagattggtgcccc

SEQ ID NO: 1463382 - DNA, 25 bp, Homo sapien
gacaagattggtgcccccaacatca

SEQ ID NO: 1463383 - DNA, 25 bp, Homo sapien
gattggtgcccccaacatcattctc

SEQ ID NO: 1463384 - DNA, 25 bp, Homo sapien
tgccttgtgaatggggtgcccctca

SEQ ID NO: 1463385 - DNA, 25 bp, Homo sapien
atctggtatccgctgccttgtgaat

SEQ ID NO: 1463386 - DNA, 25 bp, Homo sapien
gcaggaagggttagagctagggtaa

SEQ ID NO: 1463387 - DNA, 25 bp, Homo sapien
tagggtaagtgtgtagggagtaagc

SEQ ID NO: 1463388 - DNA, 25 bp, Homo sapien
tccacctagactattgtgaccatct

SEQ ID NO: 1463389 - DNA, 25 bp, Homo sapien
tatctccacctagactattgtgacc

SEQ ID NO: 1463390 - DNA, 25 bp, Homo sapien
tctccacctagactattgtgaccat

SEQ ID NO: 1463391 - DNA, 25 bp, Homo sapien
ctatctccacctagactattgtgac

SEQ ID NO: 1463392 - DNA, 25 bp, Homo sapien
cagcattccacaggagtcaggggtg

SEQ ID NO: 1463393 - DNA, 25 bp, Homo sapien
tagcggtgtcagctgtttgtggtaa

SEQ ID NO: 1463394 - DNA, 25 bp, Homo sapien
catgatagatgctggtagcggtgtc

SEQ ID NO: 1463395 - DNA, 25 bp, Homo sapien
aaaggaatagtaatgatcagacagc

SEQ ID NO: 1463396 - DNA, 25 bp, Homo sapien
tcttttgtgcatccataggcctttc

SEQ ID NO: 1463397 - DNA, 25 bp, Homo sapien
tgctgggaagccaacaatggcctcc

SEQ ID NO: 1463398 - DNA, 25 bp, Homo sapien
tagccagtagatggttttgcccctc

SEQ ID NO: 1463399 - DNA, 25 bp, Homo sapien
cccattagcctcaagttgctgatgc

SEQ ID NO: 1463400 - DNA, 25 bp, Homo sapien
ctttaacatctccttcactctgaat

SEQ ID NO: 1463401 - DNA, 25 bp, Homo sapien
actctgaattcatgttctacttgtt

SEQ ID NO: 1463402 - DNA, 25 bp, Homo sapien
tcactctgaattcatgttctacttg

SEQ ID NO: 1463403 - DNA, 25 bp, Homo sapien
ttaacatctccttcactctgaattc

SEQ ID NO: 1463404 - DNA, 25 bp, Homo sapien
atgtcctcagcaagcatcccatagg

SEQ ID NO: 1463405 - DNA, 25 bp, Homo sapien
tgtgtttaatgtcctcagcaagcat

SEQ ID NO: 1463406 - DNA, 25 bp, Homo sapien
gaaatgaccgcttgtttcagtcaaa

SEQ ID NO: 1463407 - DNA, 25 bp, Homo sapien
taggacatgaaatgaccgcttgttt

SEQ ID NO: 1463408 - DNA, 25 bp, Homo sapien
tagcaactgggttggagataagatg

SEQ ID NO: 1463409 - DNA, 25 bp, Homo sapien
tttagcaactgggttggagataaga

SEQ ID NO: 1463410 - DNA, 25 bp, Homo sapien
aactgggttggagataagatgacca

SEQ ID NO: 1463411 - DNA, 25 bp, Homo sapien
gcaactgggttggagataagatgac

SEQ ID NO: 1463412 - DNA, 25 bp, Homo sapien
cagatctccaaaggtcagagtgccc

SEQ ID NO: 1463413 - DNA, 25 bp, Homo sapien
cacgcagtgccactcaaagccttgg

SEQ ID NO: 1463414 - DNA, 25 bp, Homo sapien
cactcaaagccttggtctgcatacc

SEQ ID NO: 1463415 - DNA, 25 bp, Homo sapien
cagggctccgtccttgattctcttc

SEQ ID NO: 1463416 - DNA, 25 bp, Homo sapien
catggctttgtactaagaggtgaca

SEQ ID NO: 1463417 - DNA, 25 bp, Homo sapien
cataacctcagatctccaggaagag

SEQ ID NO: 1463418 - DNA, 25 bp, Homo sapien
tctcattagagtgcagagtaggtgc

SEQ ID NO: 1463419 - DNA, 25 bp, Homo sapien
caaatgtgaggattgcaactctagc

SEQ ID NO: 1463420 - DNA, 25 bp, Homo sapien
cggcatttatgcatagcggtcaggg

SEQ ID NO: 1463421 - DNA, 25 bp, Homo sapien
ctaagatgagctgcttaccaggaac

SEQ ID NO: 1463422 - DNA, 25 bp, Homo sapien
aaaagctcttatgacctcacagggc

SEQ ID NO: 1463423 - DNA, 25 bp, Homo sapien
gaacccctggagtaagcctcacaaa

SEQ ID NO: 1463424 - DNA, 25 bp, Homo sapien
caaagtgcctcgtctatatggtctg

SEQ ID NO: 1463425 - DNA, 25 bp, Homo sapien
gctgcaagtctagtctgggcctaca

SEQ ID NO: 1463426 - DNA, 25 bp, Homo sapien
tgtatccgcagctattgagccccag

SEQ ID NO: 1463427 - DNA, 25 bp, Homo sapien
gaaacattctatagctgcagttcag

SEQ ID NO: 1463428 - DNA, 25 bp, Homo sapien
tcctgagttttgttaagactttgtc

SEQ ID NO: 1463429 - DNA, 25 bp, Homo sapien
gacataacattggtcctcctgagtt

SEQ ID NO: 1463430 - DNA, 25 bp, Homo sapien
cgtggtcactcagacagctatccaa

SEQ ID NO: 1463431 - DNA, 25 bp, Homo sapien
taaaaatgcgttctgttgacataac

SEQ ID NO: 1463432 - DNA, 25 bp, Homo sapien
ccgtatgtgtctagagagggcccac

SEQ ID NO: 1463433 - DNA, 25 bp, Homo sapien
acttccgtatgtgtctagagagggc

SEQ ID NO: 1463434 - DNA, 25 bp, Homo sapien
caatagccacttctcttgcgtctct

SEQ ID NO: 1463435 - DNA, 25 bp, Homo sapien
tctactgaggccatcacttccgtat

SEQ ID NO: 1463436 - DNA, 25 bp, Homo sapien
cacattttcaaactggatggtcaca

SEQ ID NO: 1463437 - DNA, 25 bp, Homo sapien
tggtcacattgtggattcccgcatg

SEQ ID NO: 1463438 - DNA, 25 bp, Homo sapien
tgtgcagggtggcaataatctttcc

SEQ ID NO: 1463439 - DNA, 25 bp, Homo sapien
gctgcttagcacagcccttggagat

SEQ ID NO: 1463440 - DNA, 25 bp, Homo sapien
tttgggaccatctgtagcagaatgg

SEQ ID NO: 1463441 - DNA, 25 bp, Homo sapien
taagcgggaaggcagatgacaaaat

SEQ ID NO: 1463442 - DNA, 25 bp, Homo sapien
ttacacgggtcctcactcttcaggg

SEQ ID NO: 1463443 - DNA, 25 bp, Homo sapien
cagcggtctccttgataagcgggaa

SEQ ID NO: 1463444 - DNA, 25 bp, Homo sapien
tctggaagccacgtgacactcactg

SEQ ID NO: 1463445 - DNA, 25 bp, Homo sapien
caggaagagcgactgtgccgtctca

SEQ ID NO: 1463446 - DNA, 25 bp, Homo sapien
gagtaccttggaagagcaacagcct

SEQ ID NO: 1463447 - DNA, 25 bp, Homo sapien
taatggcaactacttcttaggaaac

SEQ ID NO: 1463448 - DNA, 25 bp, Homo sapien
gagtctcctgtgatgagacatctca

SEQ ID NO: 1463449 - DNA, 25 bp, Homo sapien
aggtaggtaatttgggcaggactct

SEQ ID NO: 1463450 - DNA, 25 bp, Homo sapien
gattctgagataaatacatcgataa

SEQ ID NO: 1463451 - DNA, 25 bp, Homo sapien
tcaggaaagtcttgttgagaggtag

SEQ ID NO: 1463452 - DNA, 25 bp, Homo sapien
gaactcatttgtttgccaggcacgg

SEQ ID NO: 1463453 - DNA, 25 bp, Homo sapien
ccaaggctttgagcagactccgatg

SEQ ID NO: 1463454 - DNA, 25 bp, Homo sapien
caagggatgtcaagatggctattca

SEQ ID NO: 1463455 - DNA, 25 bp, Homo sapien
gaaaggagtattggcaccggaacag

SEQ ID NO: 1463456 - DNA, 25 bp, Homo sapien
gctaaaggtgcactggtgtcagtcc

SEQ ID NO: 1463457 - DNA, 25 bp, Homo sapien
tatcagaagctaaaggtgcactggt

SEQ ID NO: 1463458 - DNA, 25 bp, Homo sapien
gaagctaaaggtgcactggtgtcag

SEQ ID NO: 1463459 - DNA, 25 bp, Homo sapien
ctctatcagaagctaaaggtgcact

SEQ ID NO: 1463460 - DNA, 25 bp, Homo sapien
tcagagagcaaattcccctgttgcc

SEQ ID NO: 1463461 - DNA, 25 bp, Homo sapien
ccacaggaaagtagagggttgctta

SEQ ID NO: 1463462 - DNA, 25 bp, Homo sapien
ccccttctgggatcactctgaagca

SEQ ID NO: 1463463 - DNA, 25 bp, Homo sapien
gattttccctataggttcactctga

SEQ ID NO: 1463464 - DNA, 25 bp, Homo sapien
tttattagcaatatccacggaccag

SEQ ID NO: 1463465 - DNA, 25 bp, Homo sapien
caatagggtcactcagcaatgcgag

SEQ ID NO: 1463466 - DNA, 25 bp, Homo sapien
ggcataaccttggatagcagctcac

SEQ ID NO: 1463467 - DNA, 25 bp, Homo sapien
ttttagtgagccaacggtcccttca

SEQ ID NO: 1463468 - DNA, 25 bp, Homo sapien
cacagtccatgtgtgtcatagaaag

SEQ ID NO: 1463469 - DNA, 25 bp, Homo sapien
cagtccatgtgtgtcatagaaaggg

SEQ ID NO: 1463470 - DNA, 25 bp, Homo sapien
aaacaacacagtccatgtgtgtcat

SEQ ID NO: 1463471 - DNA, 25 bp, Homo sapien
aacacagtccatgtgtgtcatagaa

SEQ ID NO: 1463472 - DNA, 25 bp, Homo sapien
gtcttctggctcattctgggtgttg

SEQ ID NO: 1463473 - DNA, 25 bp, Homo sapien
cttctggctcattctgggtgttgaa

SEQ ID NO: 1463474 - DNA, 25 bp, Homo sapien
tctggctcattctgggtgttgaagg

SEQ ID NO: 1463475 - DNA, 25 bp, Homo sapien
tcttctggctcattctgggtgttga

SEQ ID NO: 1463476 - DNA, 25 bp, Homo sapien
gaagaaaccttgtgttgtgtataag

SEQ ID NO: 1463477 - DNA, 25 bp, Homo sapien
cctgttgcccaataatagtgaccga

SEQ ID NO: 1463478 - DNA, 25 bp, Homo sapien
gggccaagcggtccaaaggatgcaa

SEQ ID NO: 1463479 - DNA, 25 bp, Homo sapien
gggctacccgaggatccaggagaaa

SEQ ID NO: 1463480 - DNA, 25 bp, Homo sapien
tctactagcttaagggagacccttc

SEQ ID NO: 1463481 - DNA, 25 bp, Homo sapien
aaggcgacggtgagcaccagcatga

SEQ ID NO: 1463482 - DNA, 25 bp, Homo sapien
cggcctccacgaagatggtgaagca

SEQ ID NO: 1463483 - DNA, 25 bp, Homo sapien
aggcccacgcacagcgagatcaggt

SEQ ID NO: 1463484 - DNA, 25 bp, Homo sapien
acgtcttgccagagtagcggcccat

SEQ ID NO: 1463485 - DNA, 25 bp, Homo sapien
cgctttttataacgcgaggccgagc

SEQ ID NO: 1463486 - DNA, 25 bp, Homo sapien
cacgtccagagtctaaaggagtggc

SEQ ID NO: 1463487 - DNA, 25 bp, Homo sapien
ggcgcggatccgtgaggcccggtac

SEQ ID NO: 1463488 - DNA, 25 bp, Homo sapien
ggcagtatctgaacagcccgtgcac

SEQ ID NO: 1463489 - DNA, 25 bp, Homo sapien
tcatccatatcttatgttatcaatt

SEQ ID NO: 1463490 - DNA, 25 bp, Homo sapien
catccatatcttatgttatcaattg

SEQ ID NO: 1463491 - DNA, 25 bp, Homo sapien
atccatatcttatgttatcaattgc

SEQ ID NO: 1463492 - DNA, 25 bp, Homo sapien
tggtgtagccatagcatagggtctc

SEQ ID NO: 1463493 - DNA, 25 bp, Homo sapien
gtagtaattttcacgatgattggtg

SEQ ID NO: 1463494 - DNA, 25 bp, Homo sapien
tagcatagggtctcaagttaacaat

SEQ ID NO: 1463495 - DNA, 25 bp, Homo sapien
catgatctggaagctctagtagtaa

SEQ ID NO: 1463496 - DNA, 25 bp, Homo sapien
ttaaagaagactgccacatccaccg

SEQ ID NO: 1463497 - DNA, 25 bp, Homo sapien
catccaccgtctttccaatcgctct

SEQ ID NO: 1463498 - DNA, 25 bp, Homo sapien
tacgattagtgcctttacttcctct

SEQ ID NO: 1463499 - DNA, 25 bp, Homo sapien
tctctgcgtgcctgaagacactttt

SEQ ID NO: 1463500 - DNA, 25 bp, Homo sapien
cacatgaggattaaacggaagcttc

SEQ ID NO: 1463501 - DNA, 25 bp, Homo sapien
tctgcccgaagaaagccgtaagtgc

SEQ ID NO: 1463502 - DNA, 25 bp, Homo sapien
gggagttgccaacgtaagcgatcac

SEQ ID NO: 1463503 - DNA, 25 bp, Homo sapien
gaggatgctaacgacgcacatgagg

SEQ ID NO: 1463504 - DNA, 25 bp, Homo sapien
taactggcggttcagggtctgagac

SEQ ID NO: 1463505 - DNA, 25 bp, Homo sapien
gaaagtgcttcgagacctatcagtg

SEQ ID NO: 1463506 - DNA, 25 bp, Homo sapien
gtctgagacatgttgggagtgctta

SEQ ID NO: 1463507 - DNA, 25 bp, Homo sapien
tatcagtgtagggtataactggcgg

SEQ ID NO: 1463508 - DNA, 25 bp, Homo sapien
tgtcctgtgtgacttcattttagaa

SEQ ID NO: 1463509 - DNA, 25 bp, Homo sapien
cataaaacggtctgtatctgagaag

SEQ ID NO: 1463510 - DNA, 25 bp, Homo sapien
aacttaggcataagaataattgtcc

SEQ ID NO: 1463511 - DNA, 25 bp, Homo sapien
tgagaagatactaatatcaatgctt

SEQ ID NO: 1463512 - DNA, 25 bp, Homo sapien
agctgcgaccaaataaggtgtagta

SEQ ID NO: 1463513 - DNA, 25 bp, Homo sapien
taaggtgtagtacttggcagggttc

SEQ ID NO: 1463514 - DNA, 25 bp, Homo sapien
aggctgcagttcacagagtggtttg

SEQ ID NO: 1463515 - DNA, 25 bp, Homo sapien
ggctgcagttcacagagtggtttga

SEQ ID NO: 1463516 - DNA, 25 bp, Homo sapien
cactcatttatgctgcaaattgcta

SEQ ID NO: 1463517 - DNA, 25 bp, Homo sapien
actcatttatgctgcaaattgctat

SEQ ID NO: 1463518 - DNA, 25 bp, Homo sapien
ctcatttatgctgcaaattgctatt

SEQ ID NO: 1463519 - DNA, 25 bp, Homo sapien
tcatttatgctgcaaattgctattc

SEQ ID NO: 1463520 - DNA, 25 bp, Homo sapien
tcctcacagtcaatttccccacaga

SEQ ID NO: 1463521 - DNA, 25 bp, Homo sapien
agtcctcacagtcaatttccccaca

SEQ ID NO: 1463522 - DNA, 25 bp, Homo sapien
gtcctcacagtcaatttccccacag

SEQ ID NO: 1463523 - DNA, 25 bp, Homo sapien
taaactggcaagcaaaaaggatagg

SEQ ID NO: 1463524 - DNA, 25 bp, Homo sapien
tcagtatttataactccttcaattc

SEQ ID NO: 1463525 - DNA, 25 bp, Homo sapien
ggaacatttgagttctatattaaac

SEQ ID NO: 1463526 - DNA, 25 bp, Homo sapien
tataactccttcaattctattctgc

SEQ ID NO: 1463527 - DNA, 25 bp, Homo sapien
caataacccaataaggatagaaggc

SEQ ID NO: 1463528 - DNA, 25 bp, Homo sapien
tgcattaaacctagtcagaagagtg

SEQ ID NO: 1463529 - DNA, 25 bp, Homo sapien
gccaggtagcccctcattatgaaaa

SEQ ID NO: 1463530 - DNA, 25 bp, Homo sapien
taggaaagcctatggagttctaagg

SEQ ID NO: 1463531 - DNA, 25 bp, Homo sapien
caaccatatgagtcttaaggtcttc

SEQ ID NO: 1463532 - DNA, 25 bp, Homo sapien
ccatatgagtcttaaggtcttcaga

SEQ ID NO: 1463533 - DNA, 25 bp, Homo sapien
tagccacaaccatatgagtcttaag

SEQ ID NO: 1463534 - DNA, 25 bp, Homo sapien
cattgtattagccacaaccatatga

SEQ ID NO: 1463535 - DNA, 25 bp, Homo sapien
caacttcaagtctaatgggaactcc

SEQ ID NO: 1463536 - DNA, 25 bp, Homo sapien
gtctgacggctacaaactgacagct

SEQ ID NO: 1463537 - DNA, 25 bp, Homo sapien
tttctccagtatctcgtctgacggc

SEQ ID NO: 1463538 - DNA, 25 bp, Homo sapien
tcttccaaaatagcttgaagtttag

SEQ ID NO: 1463539 - DNA, 25 bp, Homo sapien
gctgacactgctggtcctaggacca

SEQ ID NO: 1463540 - DNA, 25 bp, Homo sapien
gtacttggccaagagtttgtatttc

SEQ ID NO: 1463541 - DNA, 25 bp, Homo sapien
cacagtttaagaaccactcccctat

SEQ ID NO: 1463542 - DNA, 25 bp, Homo sapien
agccaccgtacttggccaagagttt

SEQ ID NO: 1463543 - DNA, 25 bp, Homo sapien
cagaaagtgcattggtaatgccaca

SEQ ID NO: 1463544 - DNA, 25 bp, Homo sapien
ttaacactgagtaatcgccttcgat

SEQ ID NO: 1463545 - DNA, 25 bp, Homo sapien
gcattttgcaatcagcgcttctttg

SEQ ID NO: 1463546 - DNA, 25 bp, Homo sapien
gctctaacgcggatgttaacactga

SEQ ID NO: 1463547 - DNA, 25 bp, Homo sapien
caggccccaggagttttgataggca

SEQ ID NO: 1463548 - DNA, 25 bp, Homo sapien
aatagttcgagttgtcaggccccag

SEQ ID NO: 1463549 - DNA, 25 bp, Homo sapien
tgccctaaatgatgtgatgttcctc

SEQ ID NO: 1463550 - DNA, 25 bp, Homo sapien
taatactaaacccatgttgtcccca

SEQ ID NO: 1463551 - DNA, 25 bp, Homo sapien
catataagtcaagtatctgcaagac

SEQ ID NO: 1463552 - DNA, 25 bp, Homo sapien
ttccactagcagatataaatgcttc

SEQ ID NO: 1463553 - DNA, 25 bp, Homo sapien
ttgtagttgtatagtctcctcctgc

SEQ ID NO: 1463554 - DNA, 25 bp, Homo sapien
aacaacaggaattgccaggagttct

SEQ ID NO: 1463555 - DNA, 25 bp, Homo sapien
ccaaagaaattcacgagtacgtagg

SEQ ID NO: 1463556 - DNA, 25 bp, Homo sapien
tcacgagtacgtaggaaaggctgag

SEQ ID NO: 1463557 - DNA, 25 bp, Homo sapien
ggaaaggctgaggatgcttgaattc

SEQ ID NO: 1463558 - DNA, 25 bp, Homo sapien
aaaggctgaggatgcttgaattccc

SEQ ID NO: 1463559 - DNA, 25 bp, Homo sapien
ccactgattgagcttgatgggcagg

SEQ ID NO: 1463560 - DNA, 25 bp, Homo sapien
cattttgcatatgcaggatacatta

SEQ ID NO: 1463561 - DNA, 25 bp, Homo sapien
attgcaccactgattgagcttgatg

SEQ ID NO: 1463562 - DNA, 25 bp, Homo sapien
caccactgattgagcttgatgggca

SEQ ID NO: 1463563 - DNA, 25 bp, Homo sapien
tcgtcaacagagattatagctatca

SEQ ID NO: 1463564 - DNA, 25 bp, Homo sapien
tcatgaaatgttatatcgtcaacag

SEQ ID NO: 1463565 - DNA, 25 bp, Homo sapien
tttaatgataaggagctctacaatg

SEQ ID NO: 1463566 - DNA, 25 bp, Homo sapien
ggctgtctctaacgttcagtgagca

SEQ ID NO: 1463567 - DNA, 25 bp, Homo sapien
ctgtttcactagtaggacgaatggc

SEQ ID NO: 1463568 - DNA, 25 bp, Homo sapien
gacgaatggcaattggttctgccag

SEQ ID NO: 1463569 - DNA, 25 bp, Homo sapien
gcaattggttctgccagctcggttt

SEQ ID NO: 1463570 - DNA, 25 bp, Homo sapien
cggttttgccagatcttgtaaccca

SEQ ID NO: 1463571 - DNA, 25 bp, Homo sapien
accaagtttcttgatctcagcatca

SEQ ID NO: 1463572 - DNA, 25 bp, Homo sapien
tataacagccacttatgtcatggta

SEQ ID NO: 1463573 - DNA, 25 bp, Homo sapien
taggcccagggacgaagaatataac

SEQ ID NO: 1463574 - DNA, 25 bp, Homo sapien
taatgcactttgagacacaaacatg

SEQ ID NO: 1463575 - DNA, 25 bp, Homo sapien
tgagaataccaatcagcaagatttt

SEQ ID NO: 1463576 - DNA, 25 bp, Homo sapien
ctgagaataccaatcagcaagattt

SEQ ID NO: 1463577 - DNA, 25 bp, Homo sapien
agaataccaatcagcaagattttct

SEQ ID NO: 1463578 - DNA, 25 bp, Homo sapien
gagaataccaatcagcaagattttc

SEQ ID NO: 1463579 - DNA, 25 bp, Homo sapien
tgtaaaataaactaggtctccaata

SEQ ID NO: 1463580 - DNA, 25 bp, Homo sapien
gatagagatggtctctttttggagt

SEQ ID NO: 1463581 - DNA, 25 bp, Homo sapien
ccattgtttcactatgacatacctc

SEQ ID NO: 1463582 - DNA, 25 bp, Homo sapien
tatcaacaattattcaggatagaga

SEQ ID NO: 1463583 - DNA, 25 bp, Homo sapien
tccagtggccgacacaggcttatac

SEQ ID NO: 1463584 - DNA, 25 bp, Homo sapien
tgctccacttgatgagagcccacct

SEQ ID NO: 1463585 - DNA, 25 bp, Homo sapien
tggtctgtttcttaggcccctgccc

SEQ ID NO: 1463586 - DNA, 25 bp, Homo sapien
tagaagggtctttcctttggccatc

SEQ ID NO: 1463587 - DNA, 25 bp, Homo sapien
acacggggaatgtgcccaggtggtg

SEQ ID NO: 1463588 - DNA, 25 bp, Homo sapien
tcacacggggaatgtgcccaggtgg

SEQ ID NO: 1463589 - DNA, 25 bp, Homo sapien
tatcacacggggaatgtgcccaggt

SEQ ID NO: 1463590 - DNA, 25 bp, Homo sapien
gtgcccaggtggtgataaggtttga

SEQ ID NO: 1463591 - DNA, 25 bp, Homo sapien
tcagggacagtaagcattctacagc

SEQ ID NO: 1463592 - DNA, 25 bp, Homo sapien
ggctgaccaggtatgtactccttcc

SEQ ID NO: 1463593 - DNA, 25 bp, Homo sapien
ttccccttgagaagctactttgtca

SEQ ID NO: 1463594 - DNA, 25 bp, Homo sapien
ttgggcttgaatccgaactttgaga

SEQ ID NO: 1463595 - DNA, 25 bp, Homo sapien
ttcttccatggagggatcagcaaac

SEQ ID NO: 1463596 - DNA, 25 bp, Homo sapien
caactctaactgtagcatgaaagca

SEQ ID NO: 1463597 - DNA, 25 bp, Homo sapien
tttagactatgtgagtcttggttgc

SEQ ID NO: 1463598 - DNA, 25 bp, Homo sapien
gtgagtcttggttgcaactattcaa

SEQ ID NO: 1463599 - DNA, 25 bp, Homo sapien
ctttcatagaagcatctatctgatc

SEQ ID NO: 1463600 - DNA, 25 bp, Homo sapien
ttttgcttatactttgcctttacac

SEQ ID NO: 1463601 - DNA, 25 bp, Homo sapien
tgcttatactttgcctttacactta

SEQ ID NO: 1463602 - DNA, 25 bp, Homo sapien
gcttatactttgcctttacacttaa

SEQ ID NO: 1463603 - DNA, 25 bp, Homo sapien
gtgcagcaacttcatcatacagaga

SEQ ID NO: 1463604 - DNA, 25 bp, Homo sapien
tctattgtaaaggaccaaggaatcc

SEQ ID NO: 1463605 - DNA, 25 bp, Homo sapien
ttaattcacgaaccacatctccttg

SEQ ID NO: 1463606 - DNA, 25 bp, Homo sapien
tctgtcctatttcagcaggagggtt

SEQ ID NO: 1463607 - DNA, 25 bp, Homo sapien
cggggcttccttgcaactatatggg

SEQ ID NO: 1463608 - DNA, 25 bp, Homo sapien
gatgttggcatttcctttgtgtgcc

SEQ ID NO: 1463609 - DNA, 25 bp, Homo sapien
tatatcaaaacacacggggcttcct

SEQ ID NO: 1463610 - DNA, 25 bp, Homo sapien
tgcccatcaggaatgtatatcaaaa

SEQ ID NO: 1463611 - DNA, 25 bp, Homo sapien
tatccaaaacagcattgccaaggtt

SEQ ID NO: 1463612 - DNA, 25 bp, Homo sapien
ggagggcttagcaactattaggcac

SEQ ID NO: 1463613 - DNA, 25 bp, Homo sapien
cattactaaatacttaaggagggct

SEQ ID NO: 1463614 - DNA, 25 bp, Homo sapien
gcatgcgtgagcttatgtgactaaa

SEQ ID NO: 1463615 - DNA, 25 bp, Homo sapien
cagggatcccctagcattagctctt

SEQ ID NO: 1463616 - DNA, 25 bp, Homo sapien
cttctctggagttgtataatatctc

SEQ ID NO: 1463617 - DNA, 25 bp, Homo sapien
ttttcaaatccttaaggcagggatc

SEQ ID NO: 1463618 - DNA, 25 bp, Homo sapien
ctaacaggttcataaggttgatcac

SEQ ID NO: 1463619 - DNA, 25 bp, Homo sapien
tatccattttatctgaggatccgaa

SEQ ID NO: 1463620 - DNA, 25 bp, Homo sapien
tcttatccattttatctgaggatcc

SEQ ID NO: 1463621 - DNA, 25 bp, Homo sapien
ccattttatctgaggatccgaaata

SEQ ID NO: 1463622 - DNA, 25 bp, Homo sapien
ccatgctcggccaacttacatcatt

SEQ ID NO: 1463623 - DNA, 25 bp, Homo sapien
tgacatactgcttaaagtcctcgtc

SEQ ID NO: 1463624 - DNA, 25 bp, Homo sapien
tctgcaagccaagtgaccttagtgg

SEQ ID NO: 1463625 - DNA, 25 bp, Homo sapien
gattactggaataggaagagcatgt

SEQ ID NO: 1463626 - DNA, 25 bp, Homo sapien
gatcaagtgctcataagtgacacag

SEQ ID NO: 1463627 - DNA, 25 bp, Homo sapien
gtaatgttgaggttgccccaattta

SEQ ID NO: 1463628 - DNA, 25 bp, Homo sapien
tatttttgtaatgttgaggttgccc

SEQ ID NO: 1463629 - DNA, 25 bp, Homo sapien
caatttataaatgtaaccatctcac

SEQ ID NO: 1463630 - DNA, 25 bp, Homo sapien
gaggttgccccaatttataaatgta

SEQ ID NO: 1463631 - DNA, 25 bp, Homo sapien
tccgaaaaagtctctgcatcagcac

SEQ ID NO: 1463632 - DNA, 25 bp, Homo sapien
gggactataccacacaggcttcaag

SEQ ID NO: 1463633 - DNA, 25 bp, Homo sapien
cctccgaaaaagtctctgcatcagc

SEQ ID NO: 1463634 - DNA, 25 bp, Homo sapien
tgaaaactttgggactataccacac

SEQ ID NO: 1463635 - DNA, 25 bp, Homo sapien
tcttcagtaatgcaacatatcgtgg

SEQ ID NO: 1463636 - DNA, 25 bp, Homo sapien
aatgcaacatatcgtggagccactg

SEQ ID NO: 1463637 - DNA, 25 bp, Homo sapien
tcagtaatgcaacatatcgtggagc

SEQ ID NO: 1463638 - DNA, 25 bp, Homo sapien
tctttcttcagtaatgcaacatatc

SEQ ID NO: 1463639 - DNA, 25 bp, Homo sapien
gcaacaaatacatcctcatgttaaa

SEQ ID NO: 1463640 - DNA, 25 bp, Homo sapien
aatacatcctcatgttaaaacactg

SEQ ID NO: 1463641 - DNA, 25 bp, Homo sapien
tcctcatgttaaaacactgcgatat

SEQ ID NO: 1463642 - DNA, 25 bp, Homo sapien
tacatcctcatgttaaaacactgcg

SEQ ID NO: 1463643 - DNA, 25 bp, Homo sapien
ggttcatagagattgacaacagctc

SEQ ID NO: 1463644 - DNA, 25 bp, Homo sapien
ggatattgagataactaatcacccc

SEQ ID NO: 1463645 - DNA, 25 bp, Homo sapien
taaagcagtcaataagggttcatag

SEQ ID NO: 1463646 - DNA, 25 bp, Homo sapien
caaggatcacggtattgtcgaaggg

SEQ ID NO: 1463647 - DNA, 25 bp, Homo sapien
cacatgttcttccaatgatgcggat

SEQ ID NO: 1463648 - DNA, 25 bp, Homo sapien
gatgcggatgaaaacagaccctcac

SEQ ID NO: 1463649 - DNA, 25 bp, Homo sapien
catcctccccttgtcagggagctgg

SEQ ID NO: 1463650 - DNA, 25 bp, Homo sapien
gactgagtctccaaagaatgacgta

SEQ ID NO: 1463651 - DNA, 25 bp, Homo sapien
tgttaaacgcccagattttgtccca

SEQ ID NO: 1463652 - DNA, 25 bp, Homo sapien
taaacgcccagattttgtcccactc

SEQ ID NO: 1463653 - DNA, 25 bp, Homo sapien
ttttgtcccactccatgttcacgac

SEQ ID NO: 1463654 - DNA, 25 bp, Homo sapien
tgttcacgactgaacgtgaggagcc

SEQ ID NO: 1463655 - DNA, 25 bp, Homo sapien
gcaataaactgtttcagtccttcaa

SEQ ID NO: 1463656 - DNA, 25 bp, Homo sapien
gaaccgtaggaaatcttgggtcatc

SEQ ID NO: 1463657 - DNA, 25 bp, Homo sapien
tcttctcagtacaccacgaaccgta

SEQ ID NO: 1463658 - DNA, 25 bp, Homo sapien
aactgtcatccctcttctcagtaca

SEQ ID NO: 1463659 - DNA, 25 bp, Homo sapien
ccttcattgacaaaccatgtgagtt

SEQ ID NO: 1463660 - DNA, 25 bp, Homo sapien
gggcaggcaaaatcatatgttggat

SEQ ID NO: 1463661 - DNA, 25 bp, Homo sapien
caccttcgatgctgtcaactatggg

SEQ ID NO: 1463662 - DNA, 25 bp, Homo sapien
gagatttagccgactatattcccaa

SEQ ID NO: 1463663 - DNA, 25 bp, Homo sapien
aattttgcagcgataaagggttgga

SEQ ID NO: 1463664 - DNA, 25 bp, Homo sapien
ggatctctcatgcatccattgttac

SEQ ID NO: 1463665 - DNA, 25 bp, Homo sapien
cacatttgtagattcttctcaatag

SEQ ID NO: 1463666 - DNA, 25 bp, Homo sapien
tttgctcgcaaacaacaggactgac

SEQ ID NO: 1463667 - DNA, 25 bp, Homo sapien
tttctatgtttagagtctatcctct

SEQ ID NO: 1463668 - DNA, 25 bp, Homo sapien
ttctatgtttagagtctatcctctg

SEQ ID NO: 1463669 - DNA, 25 bp, Homo sapien
tctatgtttagagtctatcctctgc

SEQ ID NO: 1463670 - DNA, 25 bp, Homo sapien
tcatctgttcagcaggagtatcatc

SEQ ID NO: 1463671 - DNA, 25 bp, Homo sapien
tctggtttgatatgcaacattgcaa

SEQ ID NO: 1463672 - DNA, 25 bp, Homo sapien
tccgaagtataagtaaattgatctg

SEQ ID NO: 1463673 - DNA, 25 bp, Homo sapien
tatagtttcaaaatgatccgaagta

SEQ ID NO: 1463674 - DNA, 25 bp, Homo sapien
ctttaaagttaacctggtagtgctg

SEQ ID NO: 1463675 - DNA, 25 bp, Homo sapien
acctggtagtgctggttcagaagag

SEQ ID NO: 1463676 - DNA, 25 bp, Homo sapien
aagttaacctggtagtgctggttca

SEQ ID NO: 1463677 - DNA, 25 bp, Homo sapien
tcaaatctcatgatcagtttccctt

SEQ ID NO: 1463678 - DNA, 25 bp, Homo sapien
gtaacctttcccatctccgcacctg

SEQ ID NO: 1463679 - DNA, 25 bp, Homo sapien
ggcctctggaggaaatctgacggta

SEQ ID NO: 1463680 - DNA, 25 bp, Homo sapien
ctggaggaaatctgacggtaacctt

SEQ ID NO: 1463681 - DNA, 25 bp, Homo sapien
ccatctccgcacctggaagctcaac

SEQ ID NO: 1463682 - DNA, 25 bp, Homo sapien
ccaacgttttacatgaactggagct

SEQ ID NO: 1463683 - DNA, 25 bp, Homo sapien
cttggtacctactgactggaaggcc

SEQ ID NO: 1463684 - DNA, 25 bp, Homo sapien
caaaccaacgttttacatgaactgg

SEQ ID NO: 1463685 - DNA, 25 bp, Homo sapien
gttgaaacatcccacttggtaccta

SEQ ID NO: 1463686 - DNA, 25 bp, Homo sapien
taattgagatggcttaaagttgtgc

SEQ ID NO: 1463687 - DNA, 25 bp, Homo sapien
aaatatctggatatacactgaactg

SEQ ID NO: 1463688 - DNA, 25 bp, Homo sapien
tccagttgtgactaattgaagtaat

SEQ ID NO: 1463689 - DNA, 25 bp, Homo sapien
taaaacagttagctctctgtgtcca

SEQ ID NO: 1463690 - DNA, 25 bp, Homo sapien
gggtggtggatatatttattatctt

SEQ ID NO: 1463691 - DNA, 25 bp, Homo sapien
ccaactgaagacgaaaaatatgcaa

SEQ ID NO: 1463692 - DNA, 25 bp, Homo sapien
gtaaccatagttccacagctgtgtg

SEQ ID NO: 1463693 - DNA, 25 bp, Homo sapien
ctggtttcttgggacctggtgaggg

SEQ ID NO: 1463694 - DNA, 25 bp, Homo sapien
tcaaggagtttccaactaagtatgt

SEQ ID NO: 1463695 - DNA, 25 bp, Homo sapien
ttagggtggcccaaacacataaatc

SEQ ID NO: 1463696 - DNA, 25 bp, Homo sapien
taagtatgttctcagagacaggcaa

SEQ ID NO: 1463697 - DNA, 25 bp, Homo sapien
tgtagcactgaactccaaccagtga

SEQ ID NO: 1463698 - DNA, 25 bp, Homo sapien
ggatggtacctagccaaacagattc

SEQ ID NO: 1463699 - DNA, 25 bp, Homo sapien
gagtattgtaacttgccagtatagg

SEQ ID NO: 1463700 - DNA, 25 bp, Homo sapien
taagccaacctgaatgaaccgaagg

SEQ ID NO: 1463701 - DNA, 25 bp, Homo sapien
ttaggaaggttagagcagaatacaa

SEQ ID NO: 1463702 - DNA, 25 bp, Homo sapien
ccaagtagcgaagtatagaattcac

SEQ ID NO: 1463703 - DNA, 25 bp, Homo sapien
tagttgcaactctagccaagtagcg

SEQ ID NO: 1463704 - DNA, 25 bp, Homo sapien
gattagagccatataacccagctgt

SEQ ID NO: 1463705 - DNA, 25 bp, Homo sapien
gaattcacatctgtgaatatcacat

SEQ ID NO: 1463706 - DNA, 25 bp, Homo sapien
aaaagccaatcagtactgaaaataa

SEQ ID NO: 1463707 - DNA, 25 bp, Homo sapien
aaaaagccaatcagtactgaaaata

SEQ ID NO: 1463708 - DNA, 25 bp, Homo sapien
gaaaaagccaatcagtactgaaaat

SEQ ID NO: 1463709 - DNA, 25 bp, Homo sapien
aaagccaatcagtactgaaaataaa

SEQ ID NO: 1463710 - DNA, 25 bp, Homo sapien
cggaaatgctgacatcgtctttcac

SEQ ID NO: 1463711 - DNA, 25 bp, Homo sapien
cgtctttcacgtgttctactgccag

SEQ ID NO: 1463712 - DNA, 25 bp, Homo sapien
gacatcgtctttcacgtgttctact

SEQ ID NO: 1463713 - DNA, 25 bp, Homo sapien
acgtgttctactgccagcaaagctc

SEQ ID NO: 1463714 - DNA, 25 bp, Homo sapien
tgcaccactgcgttcctgcctgaat

SEQ ID NO: 1463715 - DNA, 25 bp, Homo sapien
gcaccactgcgttcctgcctgaatg

SEQ ID NO: 1463716 - DNA, 25 bp, Homo sapien
caccactgcgttcctgcctgaatga

SEQ ID NO: 1463717 - DNA, 25 bp, Homo sapien
ttatttcttctgaactcgataaaac

SEQ ID NO: 1463718 - DNA, 25 bp, Homo sapien
tgggttatttcttctgaactcgata

SEQ ID NO: 1463719 - DNA, 25 bp, Homo sapien
ggttatttcttctgaactcgataaa

SEQ ID NO: 1463720 - DNA, 25 bp, Homo sapien
ctcgtctgggttatttcttctgaac

SEQ ID NO: 1463721 - DNA, 25 bp, Homo sapien
tcacggtcagagagagcgtcgccat

SEQ ID NO: 1463722 - DNA, 25 bp, Homo sapien
ctagcggagggtctcctgaattcac

SEQ ID NO: 1463723 - DNA, 25 bp, Homo sapien
ggagggtctcctgaattcacggtca

SEQ ID NO: 1463724 - DNA, 25 bp, Homo sapien
cctgaattcacggtcagagagagcg

SEQ ID NO: 1463725 - DNA, 25 bp, Homo sapien
gctggtccacctgtcagtacgcctg

SEQ ID NO: 1463726 - DNA, 25 bp, Homo sapien
tggctcgtgccagaactacggagga

SEQ ID NO: 1463727 - DNA, 25 bp, Homo sapien
gaagatgcaacgtgtgcgcgtaccc

SEQ ID NO: 1463728 - DNA, 25 bp, Homo sapien
gaccccgcgaaaggaagaagatgca

SEQ ID NO: 1463729 - DNA, 25 bp, Homo sapien
aagcaatggacagagacctaaaaat

SEQ ID NO: 1463730 - DNA, 25 bp, Homo sapien
aaaagcaatggacagagacctaaaa

SEQ ID NO: 1463731 - DNA, 25 bp, Homo sapien
caatggacagagacctaaaaataaa

SEQ ID NO: 1463732 - DNA, 25 bp, Homo sapien
ttaaaagcaatggacagagacctaa

SEQ ID NO: 1463733 - DNA, 25 bp, Homo sapien
tttccacaattaagccttataatga

SEQ ID NO: 1463734 - DNA, 25 bp, Homo sapien
aaagctggtgaataacaaagagcta

SEQ ID NO: 1463735 - DNA, 25 bp, Homo sapien
cattggaaggaatagaagcaagtac

SEQ ID NO: 1463736 - DNA, 25 bp, Homo sapien
tccccaaagtcgagaatgtataatt

SEQ ID NO: 1463737 - DNA, 25 bp, Homo sapien
tgtgaaaaacaagagtgagattcca

SEQ ID NO: 1463738 - DNA, 25 bp, Homo sapien
aaaacaagagtgagattccagaaaa

SEQ ID NO: 1463739 - DNA, 25 bp, Homo sapien
tatattcttaattggagtagaaacg

SEQ ID NO: 1463740 - DNA, 25 bp, Homo sapien
tccagaaaaaattgtgccctaaaga

SEQ ID NO: 1463741 - DNA, 25 bp, Homo sapien
tgacaggcgcatgacaggatgccca

SEQ ID NO: 1463742 - DNA, 25 bp, Homo sapien
tcattgaacattgacctgaactgtc

SEQ ID NO: 1463743 - DNA, 25 bp, Homo sapien
tgaactgtcaattggaactaaagct

SEQ ID NO: 1463744 - DNA, 25 bp, Homo sapien
taagttctccagacgtcaaaattgg

SEQ ID NO: 1463745 - DNA, 25 bp, Homo sapien
ctggaactcggcttgcatagtagtc

SEQ ID NO: 1463746 - DNA, 25 bp, Homo sapien
gccaggactcctgcagagttcatat

SEQ ID NO: 1463747 - DNA, 25 bp, Homo sapien
tagattctggaactcggcttgcata

SEQ ID NO: 1463748 - DNA, 25 bp, Homo sapien
gtagtcataattcctcagtgtggcc

SEQ ID NO: 1463749 - DNA, 25 bp, Homo sapien
atccttgtggtactgaagaacattc

SEQ ID NO: 1463750 - DNA, 25 bp, Homo sapien
tccttgtggtactgaagaacattcc

SEQ ID NO: 1463751 - DNA, 25 bp, Homo sapien
tgtaaaataacttctggagcacaag

SEQ ID NO: 1463752 - DNA, 25 bp, Homo sapien
gaggctttgccttcaatcagctgaa

SEQ ID NO: 1463753 - DNA, 25 bp, Homo sapien
ttgcaaatacataagcagaggcttt

SEQ ID NO: 1463754 - DNA, 25 bp, Homo sapien
tatcccacttcttacaaccaggact

SEQ ID NO: 1463755 - DNA, 25 bp, Homo sapien
cagtaaccaacttgttgctatggga

SEQ ID NO: 1463756 - DNA, 25 bp, Homo sapien
tactcgcagcacagcatcggggttc

SEQ ID NO: 1463757 - DNA, 25 bp, Homo sapien
gctatgggatcgagtagttgtgata

SEQ ID NO: 1463758 - DNA, 25 bp, Homo sapien
gggttcatagcagcaacacagtcag

SEQ ID NO: 1463759 - DNA, 25 bp, Homo sapien
attgtcctccccaacacagcatctg

SEQ ID NO: 1463760 - DNA, 25 bp, Homo sapien
gattgtcctccccaacacagcatct

SEQ ID NO: 1463761 - DNA, 25 bp, Homo sapien
tctccattggtagggcaatcccaga

SEQ ID NO: 1463762 - DNA, 25 bp, Homo sapien
gaagtgcgcttggtatcaacacctg

SEQ ID NO: 1463763 - DNA, 25 bp, Homo sapien
gaaatatacttaggtcgcaggttgg

SEQ ID NO: 1463764 - DNA, 25 bp, Homo sapien
tacaatagcctttcagggtagtccc

SEQ ID NO: 1463765 - DNA, 25 bp, Homo sapien
aatcccatgatgcagctggcttgcc

SEQ ID NO: 1463766 - DNA, 25 bp, Homo sapien
tcttggtgtggtaaatgcaatccca

SEQ ID NO: 1463767 - DNA, 25 bp, Homo sapien
cagtggacacgaatattttgggccc

SEQ ID NO: 1463768 - DNA, 25 bp, Homo sapien
tttgggccctacaaggtcatattgc

SEQ ID NO: 1463769 - DNA, 25 bp, Homo sapien
gatacatttgaaacccttgaacctg

SEQ ID NO: 1463770 - DNA, 25 bp, Homo sapien
gaacctggcagcatacagtaaactc

SEQ ID NO: 1463771 - DNA, 25 bp, Homo sapien
tgtgggatgtacaatgaccacctgg

SEQ ID NO: 1463772 - DNA, 25 bp, Homo sapien
gaccacaggaaagttaattgcctca

SEQ ID NO: 1463773 - DNA, 25 bp, Homo sapien
tgttcccttaactgctgtttttcat

SEQ ID NO: 1463774 - DNA, 25 bp, Homo sapien
ttcctgtgttcccttaactgctgtt

SEQ ID NO: 1463775 - DNA, 25 bp, Homo sapien
ttgcttcattcctgtgttcccttaa

SEQ ID NO: 1463776 - DNA, 25 bp, Homo sapien
cctgtgttcccttaactgctgtttt

SEQ ID NO: 1463777 - DNA, 25 bp, Homo sapien
gaatgcaagagcatagtacgttctg

SEQ ID NO: 1463778 - DNA, 25 bp, Homo sapien
tagtcccttgcttctatggaaggca

SEQ ID NO: 1463779 - DNA, 25 bp, Homo sapien
gctttgaaattacactagtcccttg

SEQ ID NO: 1463780 - DNA, 25 bp, Homo sapien
tacgttctgttaccaacactgactg

SEQ ID NO: 1463781 - DNA, 25 bp, Homo sapien
taccaatgcccccagcgattttgat

SEQ ID NO: 1463782 - DNA, 25 bp, Homo sapien
aggtttctcatcagttaatagcata

SEQ ID NO: 1463783 - DNA, 25 bp, Homo sapien
cagtaccaatgcccccagcgatttt

SEQ ID NO: 1463784 - DNA, 25 bp, Homo sapien
tgcccccagcgattttgattcagta

SEQ ID NO: 1463785 - DNA, 25 bp, Homo sapien
ctcatagttgtaatatggctggtta

SEQ ID NO: 1463786 - DNA, 25 bp, Homo sapien
ggttaataactcctgctatggcttt

SEQ ID NO: 1463787 - DNA, 25 bp, Homo sapien
tagttgtaatatggctggttaataa

SEQ ID NO: 1463788 - DNA, 25 bp, Homo sapien
taataactcctgctatggcttttcc

SEQ ID NO: 1463789 - DNA, 25 bp, Homo sapien
tattgtactgtgtttcaaaacccac

SEQ ID NO: 1463790 - DNA, 25 bp, Homo sapien
agataaggagaaatattgtactgtg

SEQ ID NO: 1463791 - DNA, 25 bp, Homo sapien
atcttagataaggagaaatattgta

SEQ ID NO: 1463792 - DNA, 25 bp, Homo sapien
atattgtactgtgtttcaaaaccca

SEQ ID NO: 1463793 - DNA, 25 bp, Homo sapien
gctacacagttgtactcgttatcgt

SEQ ID NO: 1463794 - DNA, 25 bp, Homo sapien
ggctatgaaatgtgaaagcagttca

SEQ ID NO: 1463795 - DNA, 25 bp, Homo sapien
aagcagttcacagattaggggagag

SEQ ID NO: 1463796 - DNA, 25 bp, Homo sapien
tggtggcagagcaagagctacacag

SEQ ID NO: 1463797 - DNA, 25 bp, Homo sapien
tcattttggtaacactggtttaata

SEQ ID NO: 1463798 - DNA, 25 bp, Homo sapien
tcagtatagtcattttggtaacact

SEQ ID NO: 1463799 - DNA, 25 bp, Homo sapien
taaagctgggttcagtatagtcatt

SEQ ID NO: 1463800 - DNA, 25 bp, Homo sapien
aataaagctgggttcagtatagtca

SEQ ID NO: 1463801 - DNA, 25 bp, Homo sapien
ttggttccatccagaggatcaaccc

SEQ ID NO: 1463802 - DNA, 25 bp, Homo sapien
cttggttccatccagaggatcaacc

SEQ ID NO: 1463803 - DNA, 25 bp, Homo sapien
ccactgactgtcttcaatcagctct

SEQ ID NO: 1463804 - DNA, 25 bp, Homo sapien
tttaatagcactgtactgcgatggg

SEQ ID NO: 1463805 - DNA, 25 bp, Homo sapien
actgtactgcgatgggcatggttgc

SEQ ID NO: 1463806 - DNA, 25 bp, Homo sapien
cagctcttgatccacttcctcagaa

SEQ ID NO: 1463807 - DNA, 25 bp, Homo sapien
tcttcccctataattgtgagtttgg

SEQ ID NO: 1463808 - DNA, 25 bp, Homo sapien
caatcggtcagctttggtctgcagg

SEQ ID NO: 1463809 - DNA, 25 bp, Homo sapien
tttccgggccaatgaagaacatatg

SEQ ID NO: 1463810 - DNA, 25 bp, Homo sapien
tatgctcatctgtgccaatcggtca

SEQ ID NO: 1463811 - DNA, 25 bp, Homo sapien
tccttcagcaataacacgtctgact

SEQ ID NO: 1463812 - DNA, 25 bp, Homo sapien
aggtctccttcagcaataacacgtc

SEQ ID NO: 1463813 - DNA, 25 bp, Homo sapien
tctccttcagcaataacacgtctga

SEQ ID NO: 1463814 - DNA, 25 bp, Homo sapien
cagcaataacacgtctgactatcat

SEQ ID NO: 1463815 - DNA, 25 bp, Homo sapien
gctaccaaccgcatcaacacagtgt

SEQ ID NO: 1463816 - DNA, 25 bp, Homo sapien
tagaatatgcggaggctaccaaccg

SEQ ID NO: 1463817 - DNA, 25 bp, Homo sapien
tgagcaatagaatatgcggaggcta

SEQ ID NO: 1463818 - DNA, 25 bp, Homo sapien
atcaacacagtgttactggaagcca

SEQ ID NO: 1463819 - DNA, 25 bp, Homo sapien
gctataaaaaccttccggatcacga

SEQ ID NO: 1463820 - DNA, 25 bp, Homo sapien
tatcgacactcaagagtccaagtcg

SEQ ID NO: 1463821 - DNA, 25 bp, Homo sapien
tccaagtcggaagttagaatatctg

SEQ ID NO: 1463822 - DNA, 25 bp, Homo sapien
gaagcaatctgattcacataaacct

SEQ ID NO: 1463823 - DNA, 25 bp, Homo sapien
tgaccggccggagagaaacggtgac

SEQ ID NO: 1463824 - DNA, 25 bp, Homo sapien
gaccggccggagagaaacggtgaca

SEQ ID NO: 1463825 - DNA, 25 bp, Homo sapien
cttgccctgaccggccggagagaaa

SEQ ID NO: 1463826 - DNA, 25 bp, Homo sapien
ggctcttgccctgaccggccggaga

SEQ ID NO: 1463827 - DNA, 25 bp, Homo sapien
cgcgttatcgtagacccaggtccct

SEQ ID NO: 1463828 - DNA, 25 bp, Homo sapien
aacgttggaccaaagacacttcagg

SEQ ID NO: 1463829 - DNA, 25 bp, Homo sapien
ccaggtccctcgttgtgtccagtac

SEQ ID NO: 1463830 - DNA, 25 bp, Homo sapien
caggaggagcaaaagcgcgttatcg

SEQ ID NO: 1463831 - DNA, 25 bp, Homo sapien
ccattgcgttggttgcgtggtgtta

SEQ ID NO: 1463832 - DNA, 25 bp, Homo sapien
cttctgtgtacctgccattgcgttg

SEQ ID NO: 1463833 - DNA, 25 bp, Homo sapien
tgcgtggtgttagtcgatttctgat

SEQ ID NO: 1463834 - DNA, 25 bp, Homo sapien
tgtacctgccattgcgttggttgcg

SEQ ID NO: 1463835 - DNA, 25 bp, Homo sapien
ggcctaaagaaatgacagacaaact

SEQ ID NO: 1463836 - DNA, 25 bp, Homo sapien
aagaaatgacagacaaactcagcta

SEQ ID NO: 1463837 - DNA, 25 bp, Homo sapien
caaactcagctatattgtctgtcaa

SEQ ID NO: 1463838 - DNA, 25 bp, Homo sapien
gctatattgtctgtcaattcatagg

SEQ ID NO: 1463839 - DNA, 25 bp, Homo sapien
cttccattattggatctttttggtg

SEQ ID NO: 1463840 - DNA, 25 bp, Homo sapien
gactttaatcctcttccattattgg

SEQ ID NO: 1463841 - DNA, 25 bp, Homo sapien
tcttccattattggatctttttggt

SEQ ID NO: 1463842 - DNA, 25 bp, Homo sapien
ggagttgctgttacacttgataaca

SEQ ID NO: 1463843 - DNA, 25 bp, Homo sapien
ctggaaattggtacacagtccacat

SEQ ID NO: 1463844 - DNA, 25 bp, Homo sapien
tcaaaagtaacagcatctccactgg

SEQ ID NO: 1463845 - DNA, 25 bp, Homo sapien
ccatcaaaagtaacagcatctccac

SEQ ID NO: 1463846 - DNA, 25 bp, Homo sapien
gaaaagttgtcttaataatcttcaa

SEQ ID NO: 1463847 - DNA, 25 bp, Homo sapien
cattcttcttccagtaagttacaga

SEQ ID NO: 1463848 - DNA, 25 bp, Homo sapien
cttccagtaagttacagaagaaaag

SEQ ID NO: 1463849 - DNA, 25 bp, Homo sapien
gatgacagcagtcgtttctttgttg

SEQ ID NO: 1463850 - DNA, 25 bp, Homo sapien
tttttgtgtcaaacttagatactct

SEQ ID NO: 1463851 - DNA, 25 bp, Homo sapien
cacccagccgaatttgacttttaag

SEQ ID NO: 1463852 - DNA, 25 bp, Homo sapien
tctttttaagctgtacctaatcttc

SEQ ID NO: 1463853 - DNA, 25 bp, Homo sapien
ggtcaggcgtaggtaggagaatccc

SEQ ID NO: 1463854 - DNA, 25 bp, Homo sapien
tgaggcgttatcctcagcctgtcag

SEQ ID NO: 1463855 - DNA, 25 bp, Homo sapien
gcaggtgacggtcctaccttcatgg

SEQ ID NO: 1463856 - DNA, 25 bp, Homo sapien
caaggaccttgcacatagggattat

SEQ ID NO: 1463857 - DNA, 25 bp, Homo sapien
catggtaatgagtccagtctgaggc

SEQ ID NO: 1463858 - DNA, 25 bp, Homo sapien
tattcatagtcctttaatacagtag

SEQ ID NO: 1463859 - DNA, 25 bp, Homo sapien
gactctagttgtcatccacctgaga

SEQ ID NO: 1463860 - DNA, 25 bp, Homo sapien
agaaacagaatgagatagcgtagcc

SEQ ID NO: 1463861 - DNA, 25 bp, Homo sapien
cctttaatacagtagtctagactct

SEQ ID NO: 1463862 - DNA, 25 bp, Homo sapien
ccaggattttccctcctgtgtgttt

SEQ ID NO: 1463863 - DNA, 25 bp, Homo sapien
aagaatcccaggattttccctcctg

SEQ ID NO: 1463864 - DNA, 25 bp, Homo sapien
atcccaggattttccctcctgtgtg

SEQ ID NO: 1463865 - DNA, 25 bp, Homo sapien
agaatcccaggattttccctcctgt

SEQ ID NO: 1463866 - DNA, 25 bp, Homo sapien
tgatgccagctgaggttgtcagtac

SEQ ID NO: 1463867 - DNA, 25 bp, Homo sapien
ccatgatgccagctgaggttgtcag

SEQ ID NO: 1463868 - DNA, 25 bp, Homo sapien
tcatcttgcttcttcatggtccatg

SEQ ID NO: 1463869 - DNA, 25 bp, Homo sapien
atcttgcttcttcatggtccatgat

SEQ ID NO: 1463870 - DNA, 25 bp, Homo sapien
tcatcatcacggtgagaaacaggat

SEQ ID NO: 1463871 - DNA, 25 bp, Homo sapien
tgacagtactggctagaagtttgga

SEQ ID NO: 1463872 - DNA, 25 bp, Homo sapien
tgtcttcaaatacggccaagcagaa

SEQ ID NO: 1463873 - DNA, 25 bp, Homo sapien
aatagtattaacagctcactcgagc

SEQ ID NO: 1463874 - DNA, 25 bp, Homo sapien
catagtggacttattcagaacatag

SEQ ID NO: 1463875 - DNA, 25 bp, Homo sapien
tacagaatttcactacttacagtac

SEQ ID NO: 1463876 - DNA, 25 bp, Homo sapien
gaaaatagcagtatatacagaattt

SEQ ID NO: 1463877 - DNA, 25 bp, Homo sapien
tacataagaagttcacaacaatgaa

SEQ ID NO: 1463878 - DNA, 25 bp, Homo sapien
cattttataaacagttcagtattgg

SEQ ID NO: 1463879 - DNA, 25 bp, Homo sapien
taggaaaacactactggttactggc

SEQ ID NO: 1463880 - DNA, 25 bp, Homo sapien
tcagcgtacttggaaaaatcacagg

SEQ ID NO: 1463881 - DNA, 25 bp, Homo sapien
gctctaggcactatagggtacaaaa

SEQ ID NO: 1463882 - DNA, 25 bp, Homo sapien
gacctgatgtggatacaactttgca

SEQ ID NO: 1463883 - DNA, 25 bp, Homo sapien
tgggatttggagcatgacaacaaag

SEQ ID NO: 1463884 - DNA, 25 bp, Homo sapien
ctttcggtatccagaactcccaggt

SEQ ID NO: 1463885 - DNA, 25 bp, Homo sapien
gggtgttctatacgctactgatggg

SEQ ID NO: 1463886 - DNA, 25 bp, Homo sapien
tcaacatttactaaaggagagtggg

SEQ ID NO: 1463887 - DNA, 25 bp, Homo sapien
tggaatttagccagggttgcacttt

SEQ ID NO: 1463888 - DNA, 25 bp, Homo sapien
gctacttaagtgtttgaattagaaa

SEQ ID NO: 1463889 - DNA, 25 bp, Homo sapien
taattataacagagttgacatttgt

SEQ ID NO: 1463890 - DNA, 25 bp, Homo sapien
ttatcttcagtattaaccaaaggag

SEQ ID NO: 1463891 - DNA, 25 bp, Homo sapien
agctcaattactttatttactagtt

SEQ ID NO: 1463892 - DNA, 25 bp, Homo sapien
tactagtttagctgttgttgcaatt

SEQ ID NO: 1463893 - DNA, 25 bp, Homo sapien
tctggtaaaagctcaattactttat

SEQ ID NO: 1463894 - DNA, 25 bp, Homo sapien
aggaagagatatggcttccacagct

SEQ ID NO: 1463895 - DNA, 25 bp, Homo sapien
ctgttattaaccaggcactcaagaa

SEQ ID NO: 1463896 - DNA, 25 bp, Homo sapien
taaccaggcactcaagaaaacatcc

SEQ ID NO: 1463897 - DNA, 25 bp, Homo sapien
tgttattgacttaagagttattaca

SEQ ID NO: 1463898 - DNA, 25 bp, Homo sapien
gcctgatctcgttctattgtactga

SEQ ID NO: 1463899 - DNA, 25 bp, Homo sapien
gcagctgagaggcaaggacctcttt

SEQ ID NO: 1463900 - DNA, 25 bp, Homo sapien
gagaagcgcatgagccagcctttgc

SEQ ID NO: 1463901 - DNA, 25 bp, Homo sapien
tggagaagcgcatgagccagccttt

SEQ ID NO: 1463902 - DNA, 25 bp, Homo sapien
gctttcagccaagtacacagtgtgg

SEQ ID NO: 1463903 - DNA, 25 bp, Homo sapien
agtccatgatgaaggaaccttgtct

SEQ ID NO: 1463904 - DNA, 25 bp, Homo sapien
ttaacattcaaagggtcatgattac

SEQ ID NO: 1463905 - DNA, 25 bp, Homo sapien
ctatatccctgtgcgtagggcaggc

SEQ ID NO: 1463906 - DNA, 25 bp, Homo sapien
taccagcagactatcaagtccatga

SEQ ID NO: 1463907 - DNA, 25 bp, Homo sapien
ggctaaatccacagctagagctggc

SEQ ID NO: 1463908 - DNA, 25 bp, Homo sapien
gacctttgtggctgaatgttgggcc

SEQ ID NO: 1463909 - DNA, 25 bp, Homo sapien
ttctcctaagtggtcaactccatag

SEQ ID NO: 1463910 - DNA, 25 bp, Homo sapien
tagagctggccaatcttggtctttc

SEQ ID NO: 1463911 - DNA, 25 bp, Homo sapien
tagagcaatgcattgttactgtttc

SEQ ID NO: 1463912 - DNA, 25 bp, Homo sapien
cttttctgtcacttatagtggcttt

SEQ ID NO: 1463913 - DNA, 25 bp, Homo sapien
ggaacacatcatttaaacaactagc

SEQ ID NO: 1463914 - DNA, 25 bp, Homo sapien
aactagctctcaagaatactttgaa

SEQ ID NO: 1463915 - DNA, 25 bp, Homo sapien
ttggatccatttccccactaggtaa

SEQ ID NO: 1463916 - DNA, 25 bp, Homo sapien
taactgaattgaagttaggtctttg

SEQ ID NO: 1463917 - DNA, 25 bp, Homo sapien
actgaattgaagttaggtctttgaa

SEQ ID NO: 1463918 - DNA, 25 bp, Homo sapien
tccccactaggtaataactgaattg

SEQ ID NO: 1463919 - DNA, 25 bp, Homo sapien
tccaagaccacgttccaaaagactg

SEQ ID NO: 1463920 - DNA, 25 bp, Homo sapien
caacagaagcaggtagaggtgatac

SEQ ID NO: 1463921 - DNA, 25 bp, Homo sapien
gattactgacccacaacaactgtga

SEQ ID NO: 1463922 - DNA, 25 bp, Homo sapien
tcagatgcagcaccttaactacagc

SEQ ID NO: 1463923 - DNA, 25 bp, Homo sapien
tagttagcaaatggtagcaccggga

SEQ ID NO: 1463924 - DNA, 25 bp, Homo sapien
gctctctgcagatgagtgtcaccca

SEQ ID NO: 1463925 - DNA, 25 bp, Homo sapien
tactcgatagttcccacctggtggt

SEQ ID NO: 1463926 - DNA, 25 bp, Homo sapien
gcaccgggattgttttcactagcca

SEQ ID NO: 1463927 - DNA, 25 bp, Homo sapien
ggaatgagggagttggaacctcaca

SEQ ID NO: 1463928 - DNA, 25 bp, Homo sapien
tccaaaatagctctgaaatcctgtg

SEQ ID NO: 1463929 - DNA, 25 bp, Homo sapien
aaatccatgtgtctgctaagcctgc

SEQ ID NO: 1463930 - DNA, 25 bp, Homo sapien
gtcacaaaagtactggacagcttct

SEQ ID NO: 1463931 - DNA, 25 bp, Homo sapien
gcatcctcagtatccagcacaggca

SEQ ID NO: 1463932 - DNA, 25 bp, Homo sapien
ggatgtgcttctgttcaagggccag

SEQ ID NO: 1463933 - DNA, 25 bp, Homo sapien
tcatgactgcatacaagatggagca

SEQ ID NO: 1463934 - DNA, 25 bp, Homo sapien
tatggagattggtccttccacggag

SEQ ID NO: 1463935 - DNA, 25 bp, Homo sapien
gcaaattcatattgcacactgtccc

SEQ ID NO: 1463936 - DNA, 25 bp, Homo sapien
aaacacaaagtctaatttcaataag

SEQ ID NO: 1463937 - DNA, 25 bp, Homo sapien
cccaatgagtttattagcagcaaag

SEQ ID NO: 1463938 - DNA, 25 bp, Homo sapien
ataatagcttacaaatatcccaatg

SEQ ID NO: 1463939 - DNA, 25 bp, Homo sapien
aacaggagccgaggaaagatgtcat

SEQ ID NO: 1463940 - DNA, 25 bp, Homo sapien
acaggagccgaggaaagatgtcatt

SEQ ID NO: 1463941 - DNA, 25 bp, Homo sapien
aaacaggagccgaggaaagatgtca

SEQ ID NO: 1463942 - DNA, 25 bp, Homo sapien
ggaacgtaattaggccctgcaggaa

SEQ ID NO: 1463943 - DNA, 25 bp, Homo sapien
tgctatagttactgtcagccaaaca

SEQ ID NO: 1463944 - DNA, 25 bp, Homo sapien
cagccaaacaagaaccaggatacaa

SEQ ID NO: 1463945 - DNA, 25 bp, Homo sapien
caggatacaatacactggttcagct

SEQ ID NO: 1463946 - DNA, 25 bp, Homo sapien
gggcttgtccaagggaccactgcat

SEQ ID NO: 1463947 - DNA, 25 bp, Homo sapien
tttcttgggtcaaatacaagtccca

SEQ ID NO: 1463948 - DNA, 25 bp, Homo sapien
gtctaatcggaatatgcagcaatgg

SEQ ID NO: 1463949 - DNA, 25 bp, Homo sapien
tggtagcatgttaacctgttcacag

SEQ ID NO: 1463950 - DNA, 25 bp, Homo sapien
cggcataacctatcttttggtgatt

SEQ ID NO: 1463951 - DNA, 25 bp, Homo sapien
tcggcataacctatcttttggtgat

SEQ ID NO: 1463952 - DNA, 25 bp, Homo sapien
ttcggcataacctatcttttggtga

SEQ ID NO: 1463953 - DNA, 25 bp, Homo sapien
ccttcggcataacctatcttttggt

SEQ ID NO: 1463954 - DNA, 25 bp, Homo sapien
ccattaagtatgtagcagcagaaaa

SEQ ID NO: 1463955 - DNA, 25 bp, Homo sapien
actaagaacgtattccacatcatca

SEQ ID NO: 1463956 - DNA, 25 bp, Homo sapien
gtattccacatcatcagtgcaatgc

SEQ ID NO: 1463957 - DNA, 25 bp, Homo sapien
cttatccattaagtatgtagcagca

SEQ ID NO: 1463958 - DNA, 25 bp, Homo sapien
aattgccactaagcatgaagaaaag

SEQ ID NO: 1463959 - DNA, 25 bp, Homo sapien
tagtaaatagaatgcttatatagtc

SEQ ID NO: 1463960 - DNA, 25 bp, Homo sapien
ttaataaaaatcagaactaggctgt

SEQ ID NO: 1463961 - DNA, 25 bp, Homo sapien
gtcacatcattagttatgagagaaa

SEQ ID NO: 1463962 - DNA, 25 bp, Homo sapien
tcaggaagcctcttttagatcaaac

SEQ ID NO: 1463963 - DNA, 25 bp, Homo sapien
tagatcaaacagtgatgtttctaac

SEQ ID NO: 1463964 - DNA, 25 bp, Homo sapien
gcacctcagccaatacacagtaata

SEQ ID NO: 1463965 - DNA, 25 bp, Homo sapien
cacagtaatatgttaggctgcagga

SEQ ID NO: 1463966 - DNA, 25 bp, Homo sapien
caagtgttctattgacctaacaaaa

SEQ ID NO: 1463967 - DNA, 25 bp, Homo sapien
cattttgaacatgtgcattaaatat

SEQ ID NO: 1463968 - DNA, 25 bp, Homo sapien
ttcaagtgttctattgacctaacaa

SEQ ID NO: 1463969 - DNA, 25 bp, Homo sapien
attttgaacatgtgcattaaatatt

SEQ ID NO: 1463970 - DNA, 25 bp, Homo sapien
caatggagacttcttacataaattt

SEQ ID NO: 1463971 - DNA, 25 bp, Homo sapien
ttaccattatcaatggagacttctt

SEQ ID NO: 1463972 - DNA, 25 bp, Homo sapien
tatcaatggagacttcttacataaa

SEQ ID NO: 1463973 - DNA, 25 bp, Homo sapien
gagacttcttacataaatttctgca

SEQ ID NO: 1463974 - DNA, 25 bp, Homo sapien
tacaagctctatgcagcaaccatgg

SEQ ID NO: 1463975 - DNA, 25 bp, Homo sapien
cattgaaacgaagagttcagaaacc

SEQ ID NO: 1463976 - DNA, 25 bp, Homo sapien
tcagaaaccgtgtgctatgaggatt

SEQ ID NO: 1463977 - DNA, 25 bp, Homo sapien
gccctcattttaggagaacattgaa

SEQ ID NO: 1463978 - DNA, 25 bp, Homo sapien
gctgggatccaaatcactgccttct

SEQ ID NO: 1463979 - DNA, 25 bp, Homo sapien
cagagattcagtggccctcttgagc

SEQ ID NO: 1463980 - DNA, 25 bp, Homo sapien
gaatgtcctggtagaaacagtggct

SEQ ID NO: 1463981 - DNA, 25 bp, Homo sapien
taccagggaactgactaaggaggtc

SEQ ID NO: 1463982 - DNA, 25 bp, Homo sapien
gctcaaggctacaaggaaactgctc

SEQ ID NO: 1463983 - DNA, 25 bp, Homo sapien
ggaaactgctcataggctaaatgca

SEQ ID NO: 1463984 - DNA, 25 bp, Homo sapien
ctgaacaacgtactcccagcagcaa

SEQ ID NO: 1463985 - DNA, 25 bp, Homo sapien
catgcaagacatcgagctcaaggct

SEQ ID NO: 1463986 - DNA, 25 bp, Homo sapien
cttggccacatctttccaatttgga

SEQ ID NO: 1463987 - DNA, 25 bp, Homo sapien
cagaagaaagcagtgatgttatttt

SEQ ID NO: 1463988 - DNA, 25 bp, Homo sapien
tttttccttaatgaacacttggcca

SEQ ID NO: 1463989 - DNA, 25 bp, Homo sapien
ctgaaagtcagaagaaagcagtgat

SEQ ID NO: 1463990 - DNA, 25 bp, Homo sapien
cttggctacactgtctgcaatgcca

SEQ ID NO: 1463991 - DNA, 25 bp, Homo sapien
gctgaagtcctgtttaaatatccac

SEQ ID NO: 1463992 - DNA, 25 bp, Homo sapien
ccacttggctacactgtctgcaatg

SEQ ID NO: 1463993 - DNA, 25 bp, Homo sapien
tttaatacttcagggctgaagtcct

SEQ ID NO: 1463994 - DNA, 25 bp, Homo sapien
cactttggaggtctgagtgttccct

SEQ ID NO: 1463995 - DNA, 25 bp, Homo sapien
tggctcagcctgcagtgatgacact

SEQ ID NO: 1463996 - DNA, 25 bp, Homo sapien
tgttccctttgctgtgaagcagagt

SEQ ID NO: 1463997 - DNA, 25 bp, Homo sapien
cagaaagccttggaagtggctcagc

SEQ ID NO: 1463998 - DNA, 25 bp, Homo sapien
gaaagtgcctcccaggaatcagtga

SEQ ID NO: 1463999 - DNA, 25 bp, Homo sapien
tgaatcagcacccaaaactgtttgg

SEQ ID NO: 1464000 - DNA, 25 bp, Homo sapien
gtttccagtactcagtgtcaagaga

SEQ ID NO: 1464001 - DNA, 25 bp, Homo sapien
gaaggagtttccagtactcagtgtc

SEQ ID NO: 1464002 - DNA, 25 bp, Homo sapien
aagcaacacatacatgctatttcac

SEQ ID NO: 1464003 - DNA, 25 bp, Homo sapien
ggatactgaggatacatcacaaagc

SEQ ID NO: 1464004 - DNA, 25 bp, Homo sapien
tgatggatactgaggatacatcaca

SEQ ID NO: 1464005 - DNA, 25 bp, Homo sapien
atgagcttttaacttgaaagctgat

SEQ ID NO: 1464006 - DNA, 25 bp, Homo sapien
gaatgcccaacatgcgcagacaaca

SEQ ID NO: 1464007 - DNA, 25 bp, Homo sapien
gaatcccaggtctcatcgatggcca

SEQ ID NO: 1464008 - DNA, 25 bp, Homo sapien
gcagacaacagagcggctccattgt

SEQ ID NO: 1464009 - DNA, 25 bp, Homo sapien
gaatacaggctgtgcgcatctgctg

SEQ ID NO: 1464010 - DNA, 25 bp, Homo sapien
tgaagacagcagattgactgtggtt

SEQ ID NO: 1464011 - DNA, 25 bp, Homo sapien
agggacagcatggtatgaagacagc

SEQ ID NO: 1464012 - DNA, 25 bp, Homo sapien
gacagcatggtatgaagacagcaga

SEQ ID NO: 1464013 - DNA, 25 bp, Homo sapien
cagcagattgactgtggtttatcca

SEQ ID NO: 1464014 - DNA, 25 bp, Homo sapien
tttgaaagccaaacactcaggagca

SEQ ID NO: 1464015 - DNA, 25 bp, Homo sapien
aaagccaaacactcaggagcagaga

SEQ ID NO: 1464016 - DNA, 25 bp, Homo sapien
ctttgaaagccaaacactcaggagc

SEQ ID NO: 1464017 - DNA, 25 bp, Homo sapien
tgaaagccaaacactcaggagcaga

SEQ ID NO: 1464018 - DNA, 25 bp, Homo sapien
aaagtgtgacacatatcctcagtgg

SEQ ID NO: 1464019 - DNA, 25 bp, Homo sapien
caacaacagctgagggctaagacca

SEQ ID NO: 1464020 - DNA, 25 bp, Homo sapien
tgagggctaagaccagccgactcca

SEQ ID NO: 1464021 - DNA, 25 bp, Homo sapien
tgacacatatcctcagtggagcttt

SEQ ID NO: 1464022 - DNA, 25 bp, Homo sapien
ccaagaatgtttttacaggcaacac

SEQ ID NO: 1464023 - DNA, 25 bp, Homo sapien
gaaaatcgaacatttgtcctggtgt

SEQ ID NO: 1464024 - DNA, 25 bp, Homo sapien
tgcttatatttctctagtaatgcct

SEQ ID NO: 1464025 - DNA, 25 bp, Homo sapien
tctagtaatgcctggagcttaagca

SEQ ID NO: 1464026 - DNA, 25 bp, Homo sapien
gtcaaacgcaactcttactattctg

SEQ ID NO: 1464027 - DNA, 25 bp, Homo sapien
aagggtgtcaaacgcaactcttact

SEQ ID NO: 1464028 - DNA, 25 bp, Homo sapien
tgccttggcaaatgctagaatttta

SEQ ID NO: 1464029 - DNA, 25 bp, Homo sapien
ggtgtcaaacgcaactcttactatt

SEQ ID NO: 1464030 - DNA, 25 bp, Homo sapien
ttggcacaaaactgtagcaatcctt

SEQ ID NO: 1464031 - DNA, 25 bp, Homo sapien
tgacagactcatagagttgcagcag

SEQ ID NO: 1464032 - DNA, 25 bp, Homo sapien
gcaatccttcatcaacagactcaag

SEQ ID NO: 1464033 - DNA, 25 bp, Homo sapien
gttgcagcagttttagtttattggc

SEQ ID NO: 1464034 - DNA, 25 bp, Homo sapien
gaaaatggtaaacgttcacttgcca

SEQ ID NO: 1464035 - DNA, 25 bp, Homo sapien
tggtaaacgttcacttgccaaaatg

SEQ ID NO: 1464036 - DNA, 25 bp, Homo sapien
gtccattaaagtctgagtgatgttt

SEQ ID NO: 1464037 - DNA, 25 bp, Homo sapien
gtctgagtgatgtttctaaggcaag

SEQ ID NO: 1464038 - DNA, 25 bp, Homo sapien
ggttgcagggtatttaatatcaaga

SEQ ID NO: 1464039 - DNA, 25 bp, Homo sapien
tttggttgcagggtatttaatatca

SEQ ID NO: 1464040 - DNA, 25 bp, Homo sapien
tggttgcagggtatttaatatcaag

SEQ ID NO: 1464041 - DNA, 25 bp, Homo sapien
ttgcagggtatttaatatcaagaat

SEQ ID NO: 1464042 - DNA, 25 bp, Homo sapien
ccttggctcgttcactcttcttatc

SEQ ID NO: 1464043 - DNA, 25 bp, Homo sapien
tcagtaaggctgctagtttcttcac

SEQ ID NO: 1464044 - DNA, 25 bp, Homo sapien
taggtgcatatccttggctcgttca

SEQ ID NO: 1464045 - DNA, 25 bp, Homo sapien
tagtttcttcactaggtgcatatcc

SEQ ID NO: 1464046 - DNA, 25 bp, Homo sapien
gctgccaactctgactggtaacatt

SEQ ID NO: 1464047 - DNA, 25 bp, Homo sapien
tcaaccagacagatctgataagtct

SEQ ID NO: 1464048 - DNA, 25 bp, Homo sapien
acttccagacactggatcaaccaga

SEQ ID NO: 1464049 - DNA, 25 bp, Homo sapien
tgctaaatggaagggaacgttcact

SEQ ID NO: 1464050 - DNA, 25 bp, Homo sapien
gagctactcgacttggaccctgaga

SEQ ID NO: 1464051 - DNA, 25 bp, Homo sapien
aaaattccccttcttggcgcataga

SEQ ID NO: 1464052 - DNA, 25 bp, Homo sapien
catccaatttgtgcgtcgcggtacc

SEQ ID NO: 1464053 - DNA, 25 bp, Homo sapien
cacattgaaagctcctactctaggt

SEQ ID NO: 1464054 - DNA, 25 bp, Homo sapien
tagatgaggccatgtcactaagtcc

SEQ ID NO: 1464055 - DNA, 25 bp, Homo sapien
tttacaggatagacaagattgcacc

SEQ ID NO: 1464056 - DNA, 25 bp, Homo sapien
gatagtggcttcaatctggtccaga

SEQ ID NO: 1464057 - DNA, 25 bp, Homo sapien
cttcccggaatgcagataagagggc

SEQ ID NO: 1464058 - DNA, 25 bp, Homo sapien
ccagtgtgttacatggagacagaca

SEQ ID NO: 1464059 - DNA, 25 bp, Homo sapien
tcaccatggcgtctagaatctggaa

SEQ ID NO: 1464060 - DNA, 25 bp, Homo sapien
gaaatcatctgttactgctgccagt

SEQ ID NO: 1464061 - DNA, 25 bp, Homo sapien
gacagacatatgctttcaccatggc

SEQ ID NO: 1464062 - DNA, 25 bp, Homo sapien
ctaaaatttgggaagcatgacagac

SEQ ID NO: 1464063 - DNA, 25 bp, Homo sapien
aaaggactaaaatttgggaagcatg

SEQ ID NO: 1464064 - DNA, 25 bp, Homo sapien
actaaaatttgggaagcatgacaga

SEQ ID NO: 1464065 - DNA, 25 bp, Homo sapien
ggactaaaatttgggaagcatgaca

SEQ ID NO: 1464066 - DNA, 25 bp, Homo sapien
ctggctcaaccttcggcttttgctt

SEQ ID NO: 1464067 - DNA, 25 bp, Homo sapien
gctggctcaaccttcggcttttgct

SEQ ID NO: 1464068 - DNA, 25 bp, Homo sapien
tggctcaaccttcggcttttgcttt

SEQ ID NO: 1464069 - DNA, 25 bp, Homo sapien
caactgctagtgcaacatgggataa

SEQ ID NO: 1464070 - DNA, 25 bp, Homo sapien
gggataataatggttgtgtgcttcc

SEQ ID NO: 1464071 - DNA, 25 bp, Homo sapien
catgggataataatggttgtgtgct

SEQ ID NO: 1464072 - DNA, 25 bp, Homo sapien
ataaagcagaagtgagtttacttgc

SEQ ID NO: 1464073 - DNA, 25 bp, Homo sapien
tgaaaaacagaacatttgaaagaga

SEQ ID NO: 1464074 - DNA, 25 bp, Homo sapien
ctgaaaaacagaacatttgaaagag

SEQ ID NO: 1464075 - DNA, 25 bp, Homo sapien
ttaaatccacctatattggaggcag

SEQ ID NO: 1464076 - DNA, 25 bp, Homo sapien
gaagccagtaaatggattggaccct

SEQ ID NO: 1464077 - DNA, 25 bp, Homo sapien
ccacctatattggaggcagtcttca

SEQ ID NO: 1464078 - DNA, 25 bp, Homo sapien
cagtgatatactgagacatggcagg

SEQ ID NO: 1464079 - DNA, 25 bp, Homo sapien
ccagccaatataggcgtgtgctgct

SEQ ID NO: 1464080 - DNA, 25 bp, Homo sapien
tgtgcctgaccttactaaatttcat

SEQ ID NO: 1464081 - DNA, 25 bp, Homo sapien
caaaaaatgcattcgtccttaagac

SEQ ID NO: 1464082 - DNA, 25 bp, Homo sapien
tgcccagccaatataggcgtgtgct

SEQ ID NO: 1464083 - DNA, 25 bp, Homo sapien
aatagtttctatccaatcattttcc

SEQ ID NO: 1464084 - DNA, 25 bp, Homo sapien
gaagctaccctgaactgaacttaac

SEQ ID NO: 1464085 - DNA, 25 bp, Homo sapien
taatagtttctatccaatcattttc

SEQ ID NO: 1464086 - DNA, 25 bp, Homo sapien
agggaagctaccctgaactgaactt

SEQ ID NO: 1464087 - DNA, 25 bp, Homo sapien
ggtggttgtatgttctcattgcctg

SEQ ID NO: 1464088 - DNA, 25 bp, Homo sapien
caatatcttgtagaccccatttctt

SEQ ID NO: 1464089 - DNA, 25 bp, Homo sapien
taatagtgtcaatatcttgtagacc

SEQ ID NO: 1464090 - DNA, 25 bp, Homo sapien
caacactagcatgatcaataatagt

SEQ ID NO: 1464091 - DNA, 25 bp, Homo sapien
cagctggatataagatactcaactc

SEQ ID NO: 1464092 - DNA, 25 bp, Homo sapien
ccatcaatagtcacaatggcagctg

SEQ ID NO: 1464093 - DNA, 25 bp, Homo sapien
gagattgaaaaaggctaaatccatc

SEQ ID NO: 1464094 - DNA, 25 bp, Homo sapien
ttgctacctgatttcgacaagcacg

SEQ ID NO: 1464095 - DNA, 25 bp, Homo sapien
gactaagcatgcatggcccagtgat

SEQ ID NO: 1464096 - DNA, 25 bp, Homo sapien
tcctctcctgaaacgaatgacctgc

SEQ ID NO: 1464097 - DNA, 25 bp, Homo sapien
taaattgacgtgtcagatccagagc

SEQ ID NO: 1464098 - DNA, 25 bp, Homo sapien
taaaaagcttcgtcatccagtcaat

SEQ ID NO: 1464099 - DNA, 25 bp, Homo sapien
tacaccatattagtcctggctccca

SEQ ID NO: 1464100 - DNA, 25 bp, Homo sapien
agataactagcctccctaattccag

SEQ ID NO: 1464101 - DNA, 25 bp, Homo sapien
tttatgcaaaatttggccactctgc

SEQ ID NO: 1464102 - DNA, 25 bp, Homo sapien
agttctacattcgaatcttctctca

SEQ ID NO: 1464103 - DNA, 25 bp, Homo sapien
gatagcagagctaactaactgtgcc

SEQ ID NO: 1464104 - DNA, 25 bp, Homo sapien
tacaaggcacctaagaagttagagc

SEQ ID NO: 1464105 - DNA, 25 bp, Homo sapien
taactgtgccacaagacaaagatct

SEQ ID NO: 1464106 - DNA, 25 bp, Homo sapien
ggtagtatcactagtaacaaggcca

SEQ ID NO: 1464107 - DNA, 25 bp, Homo sapien
cataggttctgcatttaagttgaag

SEQ ID NO: 1464108 - DNA, 25 bp, Homo sapien
cagtcacgccgggatgtcgtggtat

SEQ ID NO: 1464109 - DNA, 25 bp, Homo sapien
gaagtactgggtcctcattcaaaag

SEQ ID NO: 1464110 - DNA, 25 bp, Homo sapien
cgccgggatgtcgtggtatttcata

SEQ ID NO: 1464111 - DNA, 25 bp, Homo sapien
ctaggaggaagcacagagaagggcc

SEQ ID NO: 1464112 - DNA, 25 bp, Homo sapien
tgaagtaaaacccaccacaatgcag

SEQ ID NO: 1464113 - DNA, 25 bp, Homo sapien
cacaatgcaggtccagtcaggacgc

SEQ ID NO: 1464114 - DNA, 25 bp, Homo sapien
ctcagtgtagaagcgtacataacct

SEQ ID NO: 1464115 - DNA, 25 bp, Homo sapien
tagaagcgtacataacctgaagtaa

SEQ ID NO: 1464116 - DNA, 25 bp, Homo sapien
gctagtgggatacatagagcactgg

SEQ ID NO: 1464117 - DNA, 25 bp, Homo sapien
gggatacatagagcactggttacac

SEQ ID NO: 1464118 - DNA, 25 bp, Homo sapien
tttggcttgctagtgggatacatag

SEQ ID NO: 1464119 - DNA, 25 bp, Homo sapien
acatagagcactggttacacattcc

SEQ ID NO: 1464120 - DNA, 25 bp, Homo sapien
tagattcacctacaagtcaaataat

SEQ ID NO: 1464121 - DNA, 25 bp, Homo sapien
taatagattcacctacaagtcaaat

SEQ ID NO: 1464122 - DNA, 25 bp, Homo sapien
tttaatagattcacctacaagtcaa

SEQ ID NO: 1464123 - DNA, 25 bp, Homo sapien
ttttaatagattcacctacaagtca

SEQ ID NO: 1464124 - DNA, 25 bp, Homo sapien
ttcgacatttaaggaaccactccag

SEQ ID NO: 1464125 - DNA, 25 bp, Homo sapien
cttcgacatttaaggaaccactcca

SEQ ID NO: 1464126 - DNA, 25 bp, Homo sapien
tcttcgacatttaaggaaccactcc

SEQ ID NO: 1464127 - DNA, 25 bp, Homo sapien
cttcttcgacatttaaggaaccact

SEQ ID NO: 1464128 - DNA, 25 bp, Homo sapien
aataaaggtcgctgaaaataatagg

SEQ ID NO: 1464129 - DNA, 25 bp, Homo sapien
tatcaaaataaaggtcgctgaaaat

SEQ ID NO: 1464130 - DNA, 25 bp, Homo sapien
tcgctgaaaataataggatactcac

SEQ ID NO: 1464131 - DNA, 25 bp, Homo sapien
atgtatcaaaataaaggtcgctgaa

SEQ ID NO: 1464132 - DNA, 25 bp, Homo sapien
gctttttgctctcgagctatcacca

SEQ ID NO: 1464133 - DNA, 25 bp, Homo sapien
ggttggagataaggataaaacacaa

SEQ ID NO: 1464134 - DNA, 25 bp, Homo sapien
tcttggagccaggaagttttttgtg

SEQ ID NO: 1464135 - DNA, 25 bp, Homo sapien
cgagctatcaccataagatcattgg

SEQ ID NO: 1464136 - DNA, 25 bp, Homo sapien
cagccatagaattagtgtcagagcc

SEQ ID NO: 1464137 - DNA, 25 bp, Homo sapien
taatgccactaacaaggattagatc

SEQ ID NO: 1464138 - DNA, 25 bp, Homo sapien
gattagatctgatgtttatgtgcac

SEQ ID NO: 1464139 - DNA, 25 bp, Homo sapien
aagacatttagaggccaactggtcc

SEQ ID NO: 1464140 - DNA, 25 bp, Homo sapien
tgtctgtacagatcaacaatctcct

SEQ ID NO: 1464141 - DNA, 25 bp, Homo sapien
aacagaaggaactacagggatcatt

SEQ ID NO: 1464142 - DNA, 25 bp, Homo sapien
taagtggattttcactaaccatgcc

SEQ ID NO: 1464143 - DNA, 25 bp, Homo sapien
taatcctcttgaagccaactgacag

SEQ ID NO: 1464144 - DNA, 25 bp, Homo sapien
ggaactctggtccttcacttctaaa

SEQ ID NO: 1464145 - DNA, 25 bp, Homo sapien
tggacaatttacagaggaactctgg

SEQ ID NO: 1464146 - DNA, 25 bp, Homo sapien
caatttacagaggaactctggtcct

SEQ ID NO: 1464147 - DNA, 25 bp, Homo sapien
acagtccctggacaatttacagagg

SEQ ID NO: 1464148 - DNA, 25 bp, Homo sapien
gaagggctgcagaaatacaaaccaa

SEQ ID NO: 1464149 - DNA, 25 bp, Homo sapien
ttaatgtatcctgtacaacactgcc

SEQ ID NO: 1464150 - DNA, 25 bp, Homo sapien
gaatccatgagaaagactagaccct

SEQ ID NO: 1464151 - DNA, 25 bp, Homo sapien
caagaataaagagtgtgagtccatc

SEQ ID NO: 1464152 - DNA, 25 bp, Homo sapien
gttgtggtggctgcgctaagctcca

SEQ ID NO: 1464153 - DNA, 25 bp, Homo sapien
catcgtcgttgtggtggctgcgcta

SEQ ID NO: 1464154 - DNA, 25 bp, Homo sapien
gtctcccccatcatcgtcgttgtgg

SEQ ID NO: 1464155 - DNA, 25 bp, Homo sapien
ccccatcatcgtcgttgtggtggct

SEQ ID NO: 1464156 - DNA, 25 bp, Homo sapien
ctagattttgccagctgccaatcat

SEQ ID NO: 1464157 - DNA, 25 bp, Homo sapien
cttcactagattttgccagctgcca

SEQ ID NO: 1464158 - DNA, 25 bp, Homo sapien
tcactagattttgccagctgccaat

SEQ ID NO: 1464159 - DNA, 25 bp, Homo sapien
tgcttcactagattttgccagctgc

SEQ ID NO: 1464160 - DNA, 25 bp, Homo sapien
caaaggaattctcacaaataaatta

SEQ ID NO: 1464161 - DNA, 25 bp, Homo sapien
cctagagctctctcacacatagcat

SEQ ID NO: 1464162 - DNA, 25 bp, Homo sapien
acagcacctctgtagaaccctagag

SEQ ID NO: 1464163 - DNA, 25 bp, Homo sapien
gaaatagataaaagcacaaatgagg

SEQ ID NO: 1464164 - DNA, 25 bp, Homo sapien
cagtgtcatagatgtacacttcctt

SEQ ID NO: 1464165 - DNA, 25 bp, Homo sapien
atgctccccaaccatcatcttccca

SEQ ID NO: 1464166 - DNA, 25 bp, Homo sapien
tttcttcccatgctccccaaccatc

SEQ ID NO: 1464167 - DNA, 25 bp, Homo sapien
ttcccatgctccccaaccatcatct

SEQ ID NO: 1464168 - DNA, 25 bp, Homo sapien
tcatcttcccagtctgttgatttac

SEQ ID NO: 1464169 - DNA, 25 bp, Homo sapien
tttttaaaaagatgaacaatgcttg

SEQ ID NO: 1464170 - DNA, 25 bp, Homo sapien
ttttaaaaagatgaacaatgcttgc

SEQ ID NO: 1464171 - DNA, 25 bp, Homo sapien
ctgtttttaaaaagatgaacaatgc

SEQ ID NO: 1464172 - DNA, 25 bp, Homo sapien
ttaaaaagatgaacaatgcttgcat

SEQ ID NO: 1464173 - DNA, 25 bp, Homo sapien
catgggggaggttctcatcatagtg

SEQ ID NO: 1464174 - DNA, 25 bp, Homo sapien
aatgtataagaataaccctaagact

SEQ ID NO: 1464175 - DNA, 25 bp, Homo sapien
cagccaggctcaactgagtcagtta

SEQ ID NO: 1464176 - DNA, 25 bp, Homo sapien
aaaagtagtgatatggcttgtgtcc

SEQ ID NO: 1464177 - DNA, 25 bp, Homo sapien
gaagtccaagctgaggtgttctcgg

SEQ ID NO: 1464178 - DNA, 25 bp, Homo sapien
cccctgccctagaggttggtggaat

SEQ ID NO: 1464179 - DNA, 25 bp, Homo sapien
aggtgttctcggaaggagatgacaa

SEQ ID NO: 1464180 - DNA, 25 bp, Homo sapien
ccaagctgaggtgttctcggaagga

SEQ ID NO: 1464181 - DNA, 25 bp, Homo sapien
cgtctgacgcggagttgggtggggt

SEQ ID NO: 1464182 - DNA, 25 bp, Homo sapien
cgcgtctgacgcggagttgggtggg

SEQ ID NO: 1464183 - DNA, 25 bp, Homo sapien
ctgacgcggagttgggtggggtaga

SEQ ID NO: 1464184 - DNA, 25 bp, Homo sapien
ggcgcgtctgacgcggagttgggtg

SEQ ID NO: 1464185 - DNA, 25 bp, Homo sapien
tacaagaaatctcgtggaaacacag

SEQ ID NO: 1464186 - DNA, 25 bp, Homo sapien
cctaaattccaggagggtgagcgag

SEQ ID NO: 1464187 - DNA, 25 bp, Homo sapien
accgtggcttgttgatgactgggac

SEQ ID NO: 1464188 - DNA, 25 bp, Homo sapien
gattcctgaatagctaaaaccgtgg

SEQ ID NO: 1464189 - DNA, 25 bp, Homo sapien
taacaacaaactttggtgagctaaa

SEQ ID NO: 1464190 - DNA, 25 bp, Homo sapien
gaaagaatcaatacaaaagcactga

SEQ ID NO: 1464191 - DNA, 25 bp, Homo sapien
caaactttggtgagctaaaggagca

SEQ ID NO: 1464192 - DNA, 25 bp, Homo sapien
gaagctaagaatcatgatcaaacaa

SEQ ID NO: 1464193 - DNA, 25 bp, Homo sapien
gaccacagaacaatcgaattagaat

SEQ ID NO: 1464194 - DNA, 25 bp, Homo sapien
ggtcatctgtatatcatccttgaag

SEQ ID NO: 1464195 - DNA, 25 bp, Homo sapien
tacaccttgaagtgatattgctgga

SEQ ID NO: 1464196 - DNA, 25 bp, Homo sapien
tttaagcttagtgtagccccatttg

SEQ ID NO: 1464197 - DNA, 25 bp, Homo sapien
tctgtatatcatccttgaagaaatg

SEQ ID NO: 1464198 - DNA, 25 bp, Homo sapien
gaatgaccttcaaattttttgttca

SEQ ID NO: 1464199 - DNA, 25 bp, Homo sapien
tacttatcagctatctattccattc

SEQ ID NO: 1464200 - DNA, 25 bp, Homo sapien
tgtacgctattatgccaacaaaaaa

SEQ ID NO: 1464201 - DNA, 25 bp, Homo sapien
cagtttgggttattacagctttgca

SEQ ID NO: 1464202 - DNA, 25 bp, Homo sapien
caaatatagaagagagtggtatcac

SEQ ID NO: 1464203 - DNA, 25 bp, Homo sapien
ggtatcactatatctctagcagctg

SEQ ID NO: 1464204 - DNA, 25 bp, Homo sapien
caaaatttaacagttgtcattaatg

SEQ ID NO: 1464205 - DNA, 25 bp, Homo sapien
taacagttgtcattaatgtaaacat

SEQ ID NO: 1464206 - DNA, 25 bp, Homo sapien
gccaacccaataagttacacactca

SEQ ID NO: 1464207 - DNA, 25 bp, Homo sapien
acagctccttaaccgatcgagtcag

SEQ ID NO: 1464208 - DNA, 25 bp, Homo sapien
cctgagaggttatacagcagccctg

SEQ ID NO: 1464209 - DNA, 25 bp, Homo sapien
cctaagaatacttgctagttgattc

SEQ ID NO: 1464210 - DNA, 25 bp, Homo sapien
taaaataaattttggtagcatgttc

SEQ ID NO: 1464211 - DNA, 25 bp, Homo sapien
gcacgattcctaagaatacttgcta

SEQ ID NO: 1464212 - DNA, 25 bp, Homo sapien
gatattcttttgtaggtctcttggt

SEQ ID NO: 1464213 - DNA, 25 bp, Homo sapien
atattcttttgtaggtctcttggta

SEQ ID NO: 1464214 - DNA, 25 bp, Homo sapien
taagttctctggcttaatgtctcta

SEQ ID NO: 1464215 - DNA, 25 bp, Homo sapien
gcagttctctgctcatcaaactttg

SEQ ID NO: 1464216 - DNA, 25 bp, Homo sapien
tattccagaattaggtagactctgg

SEQ ID NO: 1464217 - DNA, 25 bp, Homo sapien
tccaagaagtaagttctctggctta

SEQ ID NO: 1464218 - DNA, 25 bp, Homo sapien
ctgattatattaggatgttggaggt

SEQ ID NO: 1464219 - DNA, 25 bp, Homo sapien
tgattatattaggatgttggaggtg

SEQ ID NO: 1464220 - DNA, 25 bp, Homo sapien
gattatattaggatgttggaggtgg

SEQ ID NO: 1464221 - DNA, 25 bp, Homo sapien
tcttgccaaataaacattaccaaac

SEQ ID NO: 1464222 - DNA, 25 bp, Homo sapien
ctcttgccaaataaacattaccaaa

SEQ ID NO: 1464223 - DNA, 25 bp, Homo sapien
tctcttgccaaataaacattaccaa

SEQ ID NO: 1464224 - DNA, 25 bp, Homo sapien
tacactggttgcctgcaattgcttc

SEQ ID NO: 1464225 - DNA, 25 bp, Homo sapien
gatgaggtacactggttgcctgcaa

SEQ ID NO: 1464226 - DNA, 25 bp, Homo sapien
ttctgttttgatgccagttcctcct

SEQ ID NO: 1464227 - DNA, 25 bp, Homo sapien
ttttctgttttgatgccagttcctc

SEQ ID NO: 1464228 - DNA, 25 bp, Homo sapien
ggagttttagcctcaacaggccctg

SEQ ID NO: 1464229 - DNA, 25 bp, Homo sapien
gagttttagcctcaacaggccctga

SEQ ID NO: 1464230 - DNA, 25 bp, Homo sapien
tggagttttagcctcaacaggccct

SEQ ID NO: 1464231 - DNA, 25 bp, Homo sapien
agcagggtccaccaaccttatttgg

SEQ ID NO: 1464232 - DNA, 25 bp, Homo sapien
gaagttaatgatttgtctgtaaacc

SEQ ID NO: 1464233 - DNA, 25 bp, Homo sapien
tcagtcacactgaatggaagttaat

SEQ ID NO: 1464234 - DNA, 25 bp, Homo sapien
ggtttgtagcaccaatgactggcac

SEQ ID NO: 1464235 - DNA, 25 bp, Homo sapien
taccagagtggagcgctgacatgtg

SEQ ID NO: 1464236 - DNA, 25 bp, Homo sapien
cactttcggaatgggaggtagcaga

SEQ ID NO: 1464237 - DNA, 25 bp, Homo sapien
gatgcgatcacggagcaggcaacat

SEQ ID NO: 1464238 - DNA, 25 bp, Homo sapien
caggcaacatgaaacagggaacgac

SEQ ID NO: 1464239 - DNA, 25 bp, Homo sapien
aggagactcgaacccgtgagcagag

SEQ ID NO: 1464240 - DNA, 25 bp, Homo sapien
aacaagacgcagtttttagccaggg

SEQ ID NO: 1464241 - DNA, 25 bp, Homo sapien
gaggtgggcagggtgtcatcccgga

SEQ ID NO: 1464242 - DNA, 25 bp, Homo sapien
cgcagagcgagtaggagactcgaac

SEQ ID NO: 1464243 - DNA, 25 bp, Homo sapien
gtccctccgcaaggcgccgctgagg

SEQ ID NO: 1464244 - DNA, 25 bp, Homo sapien
gggtccctccgcaaggcgccgctga

SEQ ID NO: 1464245 - DNA, 25 bp, Homo sapien
gcaaggcgccgctgaggatctcctc

SEQ ID NO: 1464246 - DNA, 25 bp, Homo sapien
ctccgcaaggcgccgctgaggatct

SEQ ID NO: 1464247 - DNA, 25 bp, Homo sapien
gagattagccccgtcaaggctggct

SEQ ID NO: 1464248 - DNA, 25 bp, Homo sapien
tcgttttaaactagtggcaggccag

SEQ ID NO: 1464249 - DNA, 25 bp, Homo sapien
ggagaaaccaaaccggaagctgtca

SEQ ID NO: 1464250 - DNA, 25 bp, Homo sapien
cagttgtgtgtctacgccgaggcat

SEQ ID NO: 1464251 - DNA, 25 bp, Homo sapien
taaggcctgcatggtgagtatacag

SEQ ID NO: 1464252 - DNA, 25 bp, Homo sapien
tcctctcactgttgtatcaatggag

SEQ ID NO: 1464253 - DNA, 25 bp, Homo sapien
taggatgattaggacgaagaggaac

SEQ ID NO: 1464254 - DNA, 25 bp, Homo sapien
tagagctagagccacatggaggaat

SEQ ID NO: 1464255 - DNA, 25 bp, Homo sapien
ctttcctcagggctaccacgatggc

SEQ ID NO: 1464256 - DNA, 25 bp, Homo sapien
tgctttcctcagggctaccacgatg

SEQ ID NO: 1464257 - DNA, 25 bp, Homo sapien
ctcagggctaccacgatggctgggt

SEQ ID NO: 1464258 - DNA, 25 bp, Homo sapien
ttcctcagggctaccacgatggctg

SEQ ID NO: 1464259 - DNA, 25 bp, Homo sapien
ggagcaatggtcaactggaccctga

SEQ ID NO: 1464260 - DNA, 25 bp, Homo sapien
gggtgatccagtagagctcagtgtt

SEQ ID NO: 1464261 - DNA, 25 bp, Homo sapien
gcagatgcatttgagttgctccgaa

SEQ ID NO: 1464262 - DNA, 25 bp, Homo sapien
gatccactgactgtctgatgccctc

SEQ ID NO: 1464263 - DNA, 25 bp, Homo sapien
aatgatgtaatgtttccgggcgtgc

SEQ ID NO: 1464264 - DNA, 25 bp, Homo sapien
aatctgagcagtcaaatcacaaggg

SEQ ID NO: 1464265 - DNA, 25 bp, Homo sapien
cactagcaactttaccgggcagaca

SEQ ID NO: 1464266 - DNA, 25 bp, Homo sapien
ggaaaaccaaagctacgtgccagct

SEQ ID NO: 1464267 - DNA, 25 bp, Homo sapien
ctgcatactgtgtcttcaaacactc

SEQ ID NO: 1464268 - DNA, 25 bp, Homo sapien
tgcatactgtgtcttcaaacactca

SEQ ID NO: 1464269 - DNA, 25 bp, Homo sapien
agttccttaaacttatccaccagtg

SEQ ID NO: 1464270 - DNA, 25 bp, Homo sapien
gtaatctggtgggtagagaagttcc

SEQ ID NO: 1464271 - DNA, 25 bp, Homo sapien
cacggcaaacttgcccagcatgctg

SEQ ID NO: 1464272 - DNA, 25 bp, Homo sapien
ataccccagcaggtctctttcagca

SEQ ID NO: 1464273 - DNA, 25 bp, Homo sapien
tgaacaatagccttcaccttgtccc

SEQ ID NO: 1464274 - DNA, 25 bp, Homo sapien
gaacaatagccttcaccttgtcccc

SEQ ID NO: 1464275 - DNA, 25 bp, Homo sapien
tatcagcataacataaaaagaccag

SEQ ID NO: 1464276 - DNA, 25 bp, Homo sapien
ctttattatcagcataacataaaaa

SEQ ID NO: 1464277 - DNA, 25 bp, Homo sapien
ttatcagcataacataaaaagacca

SEQ ID NO: 1464278 - DNA, 25 bp, Homo sapien
tattatcagcataacataaaaagac

SEQ ID NO: 1464279 - DNA, 25 bp, Homo sapien
tgaattttctgatcatccaactcct

SEQ ID NO: 1464280 - DNA, 25 bp, Homo sapien
aattttctgatcatccaactcctct

SEQ ID NO: 1464281 - DNA, 25 bp, Homo sapien
ttttctgatcatccaactcctcttc

SEQ ID NO: 1464282 - DNA, 25 bp, Homo sapien
ctgaattttctgatcatccaactcc

SEQ ID NO: 1464283 - DNA, 25 bp, Homo sapien
ttcctgcagggtgtgtatctgcaca

SEQ ID NO: 1464284 - DNA, 25 bp, Homo sapien
ctccagacacttgatgagtagagca

SEQ ID NO: 1464285 - DNA, 25 bp, Homo sapien
gggggatgttcctgcagggtgtgta

SEQ ID NO: 1464286 - DNA, 25 bp, Homo sapien
acaatgctgtgacctccttctccag

SEQ ID NO: 1464287 - DNA, 25 bp, Homo sapien
tcatctatttctcgatagggcttta

SEQ ID NO: 1464288 - DNA, 25 bp, Homo sapien
tctatttctcgatagggctttattg

SEQ ID NO: 1464289 - DNA, 25 bp, Homo sapien
tatttctcgatagggctttattgga

SEQ ID NO: 1464290 - DNA, 25 bp, Homo sapien
attcatctatttctcgatagggctt

SEQ ID NO: 1464291 - DNA, 25 bp, Homo sapien
cgttttgcccctggattatccaact

SEQ ID NO: 1464292 - DNA, 25 bp, Homo sapien
attatccaactcctggatgctcatg

SEQ ID NO: 1464293 - DNA, 25 bp, Homo sapien
tagaattcgttttgcccctggatta

SEQ ID NO: 1464294 - DNA, 25 bp, Homo sapien
caagctctagaattcgttttgcccc

SEQ ID NO: 1464295 - DNA, 25 bp, Homo sapien
cttcaaccttagttggggtagcagc

SEQ ID NO: 1464296 - DNA, 25 bp, Homo sapien
gcttcaaccttagttggggtagcag

SEQ ID NO: 1464297 - DNA, 25 bp, Homo sapien
tggcttcaaccttagttggggtagc

SEQ ID NO: 1464298 - DNA, 25 bp, Homo sapien
ttcaaccttagttggggtagcagca

SEQ ID NO: 1464299 - DNA, 25 bp, Homo sapien
tcaatctccacagacaaagccagga

SEQ ID NO: 1464300 - DNA, 25 bp, Homo sapien
cagacaaagccaggactcgtttgta

SEQ ID NO: 1464301 - DNA, 25 bp, Homo sapien
agacaaagccaggactcgtttgtac

SEQ ID NO: 1464302 - DNA, 25 bp, Homo sapien
ccacagacaaagccaggactcgttt

SEQ ID NO: 1464303 - DNA, 25 bp, Homo sapien
acagttgggtagccaatctgcaaac

SEQ ID NO: 1464304 - DNA, 25 bp, Homo sapien
gttgggtagccaatctgcaaacaga

SEQ ID NO: 1464305 - DNA, 25 bp, Homo sapien
ttgggtagccaatctgcaaacagac

SEQ ID NO: 1464306 - DNA, 25 bp, Homo sapien
cattgatgatagaatggggtactga

SEQ ID NO: 1464307 - DNA, 25 bp, Homo sapien
cagaaagtgagaatgcagtttcctc

SEQ ID NO: 1464308 - DNA, 25 bp, Homo sapien
gaaagtgagaatgcagtttcctctg

SEQ ID NO: 1464309 - DNA, 25 bp, Homo sapien
tccagaaagtgagaatgcagtttcc

SEQ ID NO: 1464310 - DNA, 25 bp, Homo sapien
ctccagaaagtgagaatgcagtttc

SEQ ID NO: 1464311 - DNA, 25 bp, Homo sapien
gctgaatgaccagcccaaagaaggg

SEQ ID NO: 1464312 - DNA, 25 bp, Homo sapien
agaagggagagatgttcagcagtgt

SEQ ID NO: 1464313 - DNA, 25 bp, Homo sapien
tcagtggcgcccctggagattttag

SEQ ID NO: 1464314 - DNA, 25 bp, Homo sapien
agatgttcagcagtgtggcttcgct

SEQ ID NO: 1464315 - DNA, 25 bp, Homo sapien
ctggagaaacgaggtcttcttgggc

SEQ ID NO: 1464316 - DNA, 25 bp, Homo sapien
tggagaaacgaggtcttcttgggcc

SEQ ID NO: 1464317 - DNA, 25 bp, Homo sapien
gggcaatggaaccagcatgagccac

SEQ ID NO: 1464318 - DNA, 25 bp, Homo sapien
acttcacaggggcaatggaaccagc

SEQ ID NO: 1464319 - DNA, 25 bp, Homo sapien
cacaggggcaatggaaccagcatga

SEQ ID NO: 1464320 - DNA, 25 bp, Homo sapien
gcaatggaaccagcatgagccacag

SEQ ID NO: 1464321 - DNA, 25 bp, Homo sapien
gcagcaggtccctgatctcagtgag

SEQ ID NO: 1464322 - DNA, 25 bp, Homo sapien
ttgatgaacacaaagcccacattcc

SEQ ID NO: 1464323 - DNA, 25 bp, Homo sapien
tgttggccagcagcaggtccctgat

SEQ ID NO: 1464324 - DNA, 25 bp, Homo sapien
gaggtcctccttgatgaacacaaag

SEQ ID NO: 1464325 - DNA, 25 bp, Homo sapien
atatgaggcaacagtttctctagag

SEQ ID NO: 1464326 - DNA, 25 bp, Homo sapien
tgaatatgaggcaacagtttctcta

SEQ ID NO: 1464327 - DNA, 25 bp, Homo sapien
gaatatgaggcaacagtttctctag

SEQ ID NO: 1464328 - DNA, 25 bp, Homo sapien
ctgaatatgaggcaacagtttctct

SEQ ID NO: 1464329 - DNA, 25 bp, Homo sapien
catcgtggtgttcttgcctagcagc

SEQ ID NO: 1464330 - DNA, 25 bp, Homo sapien
agagcccatattgtctgctcccatg

SEQ ID NO: 1464331 - DNA, 25 bp, Homo sapien
tcctgcagagggatatgcggatctg

SEQ ID NO: 1464332 - DNA, 25 bp, Homo sapien
cttcctgcagagggatatgcggatc

SEQ ID NO: 1464333 - DNA, 25 bp, Homo sapien
tagagcccatattgtctgctcccat

SEQ ID NO: 1464334 - DNA, 25 bp, Homo sapien
gcctgacagatgttcaatcagcatt

SEQ ID NO: 1464335 - DNA, 25 bp, Homo sapien
catttccagcaggctgagtaaggag

SEQ ID NO: 1464336 - DNA, 25 bp, Homo sapien
taaggagcttgtgctgagaaatggc

SEQ ID NO: 1464337 - DNA, 25 bp, Homo sapien
tttgtgatacttgtggacgctgcct

SEQ ID NO: 1464338 - DNA, 25 bp, Homo sapien
cagaagcaggaatgatgtttgctct

SEQ ID NO: 1464339 - DNA, 25 bp, Homo sapien
gccttacattctgagactcctggaa

SEQ ID NO: 1464340 - DNA, 25 bp, Homo sapien
tcttctgcagaacagagctcgaatg

SEQ ID NO: 1464341 - DNA, 25 bp, Homo sapien
caggccatgggaagtctgccgacat

SEQ ID NO: 1464342 - DNA, 25 bp, Homo sapien
gcagagatgctaaaccctctccttg

SEQ ID NO: 1464343 - DNA, 25 bp, Homo sapien
cccacgtggatgtggtgtagggtgg

SEQ ID NO: 1464344 - DNA, 25 bp, Homo sapien
tcagctggacattagtggaatcttc

SEQ ID NO: 1464345 - DNA, 25 bp, Homo sapien
gagtgagtcaatactaccccatcag

SEQ ID NO: 1464346 - DNA, 25 bp, Homo sapien
gaacttagcctttgtcttggcccac

SEQ ID NO: 1464347 - DNA, 25 bp, Homo sapien
tcaggtccagatcagcctgatttca

SEQ ID NO: 1464348 - DNA, 25 bp, Homo sapien
aatggagctcatctagaaggttgaa

SEQ ID NO: 1464349 - DNA, 25 bp, Homo sapien
cagcctgatttcactggtcttccag

SEQ ID NO: 1464350 - DNA, 25 bp, Homo sapien
ttgaagagatcatacaagttctcct

SEQ ID NO: 1464351 - DNA, 25 bp, Homo sapien
ttgcagccagagcaatctttaaaaa

SEQ ID NO: 1464352 - DNA, 25 bp, Homo sapien
attgcagccagagcaatctttaaaa

SEQ ID NO: 1464353 - DNA, 25 bp, Homo sapien
cctgatggagaagacttcatgtcac

SEQ ID NO: 1464354 - DNA, 25 bp, Homo sapien
ggagctgcatcaggacctgatggag

SEQ ID NO: 1464355 - DNA, 25 bp, Homo sapien
gctgatcttggggtcatggctgaat

SEQ ID NO: 1464356 - DNA, 25 bp, Homo sapien
gacctgatggagaagacttcatgtc

SEQ ID NO: 1464357 - DNA, 25 bp, Homo sapien
tgagatgaatacaaagactgctgag

SEQ ID NO: 1464358 - DNA, 25 bp, Homo sapien
cttgagatgaatacaaagactgctg

SEQ ID NO: 1464359 - DNA, 25 bp, Homo sapien
tttcttctctcttgtagggaagagg

SEQ ID NO: 1464360 - DNA, 25 bp, Homo sapien
tcttctctcttgtagggaagaggaa

SEQ ID NO: 1464361 - DNA, 25 bp, Homo sapien
cttcttctagggttcgagctttctc

SEQ ID NO: 1464362 - DNA, 25 bp, Homo sapien
cctcagctcttgaatagcccctgtg

SEQ ID NO: 1464363 - DNA, 25 bp, Homo sapien
tagggttcgagctttctcaatcttt

SEQ ID NO: 1464364 - DNA, 25 bp, Homo sapien
tcttctagggttcgagctttctcaa

SEQ ID NO: 1464365 - DNA, 25 bp, Homo sapien
tttgttatgcttctccatgtctcag

SEQ ID NO: 1464366 - DNA, 25 bp, Homo sapien
ttcctttgttatgcttctccatgtc

SEQ ID NO: 1464367 - DNA, 25 bp, Homo sapien
cagaggaaagcgaagagtactttcc

SEQ ID NO: 1464368 - DNA, 25 bp, Homo sapien
agccagaggaaagcgaagagtactt

SEQ ID NO: 1464369 - DNA, 25 bp, Homo sapien
aacagtttccacagcaactcgagta

SEQ ID NO: 1464370 - DNA, 25 bp, Homo sapien
aactcgagtaacacctccagtctgc

SEQ ID NO: 1464371 - DNA, 25 bp, Homo sapien
tcaacactagcttctgatgaacagt

SEQ ID NO: 1464372 - DNA, 25 bp, Homo sapien
cctgttgcccgggtcttcaacacta

SEQ ID NO: 1464373 - DNA, 25 bp, Homo sapien
caggttcggtcttggaggctctttc

SEQ ID NO: 1464374 - DNA, 25 bp, Homo sapien
atgactcagtattgatgacacccag

SEQ ID NO: 1464375 - DNA, 25 bp, Homo sapien
aacttgaaggccaatgaccgttgta

SEQ ID NO: 1464376 - DNA, 25 bp, Homo sapien
gaccgttgtaatgcaggtctgatga

SEQ ID NO: 1464377 - DNA, 25 bp, Homo sapien
gtggttgaagcctgcccagtcttct

SEQ ID NO: 1464378 - DNA, 25 bp, Homo sapien
ctgtttaggatcccctttgtttgct

SEQ ID NO: 1464379 - DNA, 25 bp, Homo sapien
tctgtttaggatcccctttgtttgc

SEQ ID NO: 1464380 - DNA, 25 bp, Homo sapien
ggttgaagcctgcccagtcttctgt

SEQ ID NO: 1464381 - DNA, 25 bp, Homo sapien
tgatatgatgagatccgctgtcact

SEQ ID NO: 1464382 - DNA, 25 bp, Homo sapien
gctgaagaacttgctaccaaactgg

SEQ ID NO: 1464383 - DNA, 25 bp, Homo sapien
aatgactgatatgatgagatccgct

SEQ ID NO: 1464384 - DNA, 25 bp, Homo sapien
ggctgaagaacttgctaccaaactg

SEQ ID NO: 1464385 - DNA, 25 bp, Homo sapien
gatgtgatggcggcccggaagaggc

SEQ ID NO: 1464386 - DNA, 25 bp, Homo sapien
tgtgatggcggcccggaagaggcgc

SEQ ID NO: 1464387 - DNA, 25 bp, Homo sapien
caaaaaaatacgaaagccagtcagg

SEQ ID NO: 1464388 - DNA, 25 bp, Homo sapien
ttcctagatgtgatggcggcccgga

SEQ ID NO: 1464389 - DNA, 25 bp, Homo sapien
gagcacgtctttgaccacccatagg

SEQ ID NO: 1464390 - DNA, 25 bp, Homo sapien
gcagcaaaaaccaaaacatgtgtgt

SEQ ID NO: 1464391 - DNA, 25 bp, Homo sapien
ccctatgagcccaagtgtggttgga

SEQ ID NO: 1464392 - DNA, 25 bp, Homo sapien
tgaagtctcttattggtgcagcaaa

SEQ ID NO: 1464393 - DNA, 25 bp, Homo sapien
ggaatgccagtgaagacctagccca

SEQ ID NO: 1464394 - DNA, 25 bp, Homo sapien
gattcccagctcagtttaccaattg

SEQ ID NO: 1464395 - DNA, 25 bp, Homo sapien
catctgtggatctcaaagcgcttct

SEQ ID NO: 1464396 - DNA, 25 bp, Homo sapien
cagctattagcctttggagttacaa

SEQ ID NO: 1464397 - DNA, 25 bp, Homo sapien
gatagcccatatatctgaggcagca

SEQ ID NO: 1464398 - DNA, 25 bp, Homo sapien
tgaggcagcagactcgaataggtcc

SEQ ID NO: 1464399 - DNA, 25 bp, Homo sapien
cagaggttgacctctataggtgagc

SEQ ID NO: 1464400 - DNA, 25 bp, Homo sapien
tgactcacgaactgcagaaggcaaa

SEQ ID NO: 1464401 - DNA, 25 bp, Homo sapien
gacaagaggattcaagccgggacag

SEQ ID NO: 1464402 - DNA, 25 bp, Homo sapien
tgaaagtctgaaaccccgcgtaatg

SEQ ID NO: 1464403 - DNA, 25 bp, Homo sapien
tggaaacttaatggagatggccctg

SEQ ID NO: 1464404 - DNA, 25 bp, Homo sapien
taatgaacaagctactgagagccca

SEQ ID NO: 1464405 - DNA, 25 bp, Homo sapien
aaaagtggctgtgaggaagtaaaca

SEQ ID NO: 1464406 - DNA, 25 bp, Homo sapien
agtaaaagtggctgtgaggaagtaa

SEQ ID NO: 1464407 - DNA, 25 bp, Homo sapien
ctagaagtaaaagtggctgtgagga

SEQ ID NO: 1464408 - DNA, 25 bp, Homo sapien
tagaagtaaaagtggctgtgaggaa

SEQ ID NO: 1464409 - DNA, 25 bp, Homo sapien
gcgagacgtcttccgccggccccat

SEQ ID NO: 1464410 - DNA, 25 bp, Homo sapien
agagcgagacgtcttccgccggccc

SEQ ID NO: 1464411 - DNA, 25 bp, Homo sapien
ggcgcccagagcgagacgtcttccg

SEQ ID NO: 1464412 - DNA, 25 bp, Homo sapien
cccagagcgagacgtcttccgccgg

SEQ ID NO: 1464413 - DNA, 25 bp, Homo sapien
cgtggatgcggctgggtcgggcggc

SEQ ID NO: 1464414 - DNA, 25 bp, Homo sapien
gcggcggtggctgtgaccgcgcgga

SEQ ID NO: 1464415 - DNA, 25 bp, Homo sapien
accgagccgagacattcgcgccggg

SEQ ID NO: 1464416 - DNA, 25 bp, Homo sapien
tgaccgcgcggaccgagccgagaca

SEQ ID NO: 1464417 - DNA, 25 bp, Homo sapien
tgtcagggccgcggttcctgacgcc

SEQ ID NO: 1464418 - DNA, 25 bp, Homo sapien
gcggcgcgggtgacgctgtcagggc

SEQ ID NO: 1464419 - DNA, 25 bp, Homo sapien
gcagtgatttgaggcaccggcttca

SEQ ID NO: 1464420 - DNA, 25 bp, Homo sapien
ccaggacgagccaggcagtgatttg

SEQ ID NO: 1464421 - DNA, 25 bp, Homo sapien
agcgccgggcaaccgcctcgcccga

SEQ ID NO: 1464422 - DNA, 25 bp, Homo sapien
ccggagagcctagcggggctcgcca

SEQ ID NO: 1464423 - DNA, 25 bp, Homo sapien
agccctccctcgttactgtccgcat

SEQ ID NO: 1464424 - DNA, 25 bp, Homo sapien
cctcgttactgtccgcataccccgg

SEQ ID NO: 1464425 - DNA, 25 bp, Homo sapien
tcttgggcgtggtacgtgatccttc

SEQ ID NO: 1464426 - DNA, 25 bp, Homo sapien
tctggtcttgggcttatcgttgttg

SEQ ID NO: 1464427 - DNA, 25 bp, Homo sapien
tgtgccatcctcgtatcctagggat

SEQ ID NO: 1464428 - DNA, 25 bp, Homo sapien
ctaatgtgccgttgaaattgaattg

SEQ ID NO: 1464429 - DNA, 25 bp, Homo sapien
ggcttgaaagataagtactccttca

SEQ ID NO: 1464430 - DNA, 25 bp, Homo sapien
aagataagtactccttcaccaagtg

SEQ ID NO: 1464431 - DNA, 25 bp, Homo sapien
gaaatgaggcttgaaagataagtac

SEQ ID NO: 1464432 - DNA, 25 bp, Homo sapien
tgcatttgcacaaagtccctgagtg

SEQ ID NO: 1464433 - DNA, 25 bp, Homo sapien
ttatggctcttactggtacatctca

SEQ ID NO: 1464434 - DNA, 25 bp, Homo sapien
tatggctcttactggtacatctcat

SEQ ID NO: 1464435 - DNA, 25 bp, Homo sapien
actgttgatcagcacgggtgttttt

SEQ ID NO: 1464436 - DNA, 25 bp, Homo sapien
gttgatcagcacgggtgtttttacc

SEQ ID NO: 1464437 - DNA, 25 bp, Homo sapien
tgttgatcagcacgggtgtttttac

SEQ ID NO: 1464438 - DNA, 25 bp, Homo sapien
ctgttgatcagcacgggtgttttta

SEQ ID NO: 1464439 - DNA, 25 bp, Homo sapien
tgaaattagtggtcagcaaaatgct

SEQ ID NO: 1464440 - DNA, 25 bp, Homo sapien
gaaattagtggtcagcaaaatgctt

SEQ ID NO: 1464441 - DNA, 25 bp, Homo sapien
gaacatctagtggttctgcagtacc

SEQ ID NO: 1464442 - DNA, 25 bp, Homo sapien
gactttgaccaacctatttgtcaag

SEQ ID NO: 1464443 - DNA, 25 bp, Homo sapien
cctgcctagttttgaattcatgact

SEQ ID NO: 1464444 - DNA, 25 bp, Homo sapien
tcattagaaccttctgtattttggg

SEQ ID NO: 1464445 - DNA, 25 bp, Homo sapien
gatatatgcgatgtaaaaccactag

SEQ ID NO: 1464446 - DNA, 25 bp, Homo sapien
cttgagctaactaggaagtaccggg

SEQ ID NO: 1464447 - DNA, 25 bp, Homo sapien
cacctcaggaattaactggcattgg

SEQ ID NO: 1464448 - DNA, 25 bp, Homo sapien
tcacgtaggtttgctgccttcagaa

SEQ ID NO: 1464449 - DNA, 25 bp, Homo sapien
tccttcgtgcgctaatgggagctgc

SEQ ID NO: 1464450 - DNA, 25 bp, Homo sapien
ctaacactagaatgtcgggaaggtc

SEQ ID NO: 1464451 - DNA, 25 bp, Homo sapien
tggtcatcggcctgcaaggcttcgc

SEQ ID NO: 1464452 - DNA, 25 bp, Homo sapien
tcatcaaaggatgccgctacgtggt

SEQ ID NO: 1464453 - DNA, 25 bp, Homo sapien
taaagccagagccttcacgtgaagg

SEQ ID NO: 1464454 - DNA, 25 bp, Homo sapien
gacccagtggtcaatcctgcagaga

SEQ ID NO: 1464455 - DNA, 25 bp, Homo sapien
tgaacacacagcatatttggaagag

SEQ ID NO: 1464456 - DNA, 25 bp, Homo sapien
tattctcctgaaaggtcgtaggctg

SEQ ID NO: 1464457 - DNA, 25 bp, Homo sapien
cctgtgcctctaggtagggacaagg

SEQ ID NO: 1464458 - DNA, 25 bp, Homo sapien
tgtgctgcctggtttgatctcatct

SEQ ID NO: 1464459 - DNA, 25 bp, Homo sapien
ggctggtgcttaaaacccctgaggc

SEQ ID NO: 1464460 - DNA, 25 bp, Homo sapien
ccctgaggccatgagctcattggct

SEQ ID NO: 1464461 - DNA, 25 bp, Homo sapien
aggatgacctgtggactgccatcgg

SEQ ID NO: 1464462 - DNA, 25 bp, Homo sapien
ggcatgggtcttgggcctgacaccc

SEQ ID NO: 1464463 - DNA, 25 bp, Homo sapien
ccaccaaggatgacctgtggactgc

SEQ ID NO: 1464464 - DNA, 25 bp, Homo sapien
tcaaagggtaaggtgggcatgggtc

SEQ ID NO: 1464465 - DNA, 25 bp, Homo sapien
gaacagtctgcaggaccagtgacag

SEQ ID NO: 1464466 - DNA, 25 bp, Homo sapien
aatccaaaggggctgttgctgaaca

SEQ ID NO: 1464467 - DNA, 25 bp, Homo sapien
gtaggccactgttctgactttgttt

SEQ ID NO: 1464468 - DNA, 25 bp, Homo sapien
aacagggagatgaaaggaggtcctc

SEQ ID NO: 1464469 - DNA, 25 bp, Homo sapien
caatccctggagtgtaagcatttgg

SEQ ID NO: 1464470 - DNA, 25 bp, Homo sapien
agtgcccacaccttactgagtattg

SEQ ID NO: 1464471 - DNA, 25 bp, Homo sapien
gctttcgcttgatgtgcttgaccaa

SEQ ID NO: 1464472 - DNA, 25 bp, Homo sapien
aacctgagccgtcattctctgtggc

SEQ ID NO: 1464473 - DNA, 25 bp, Homo sapien
agaggagtggtcctggtagccatca

SEQ ID NO: 1464474 - DNA, 25 bp, Homo sapien
tgtgtcatgccagagaagtcccgac

SEQ ID NO: 1464475 - DNA, 25 bp, Homo sapien
cactgtgtcttcagccaccttggag

SEQ ID NO: 1464476 - DNA, 25 bp, Homo sapien
caacctgctgttaggcttacagcaa

SEQ ID NO: 1464477 - DNA, 25 bp, Homo sapien
acagtgcacaagcaaccaggggcat

SEQ ID NO: 1464478 - DNA, 25 bp, Homo sapien
tgctctgcacctgtcactaggctgg

SEQ ID NO: 1464479 - DNA, 25 bp, Homo sapien
taggctgggacagtgcacaagcaac

SEQ ID NO: 1464480 - DNA, 25 bp, Homo sapien
cacctgtcactaggctgggacagtg

SEQ ID NO: 1464481 - DNA, 25 bp, Homo sapien
ttgctcacgcttggacaacaactga

SEQ ID NO: 1464482 - DNA, 25 bp, Homo sapien
tatttcccgatatgctaccttagcg

SEQ ID NO: 1464483 - DNA, 25 bp, Homo sapien
tggagcccttttgagctcttagccg

SEQ ID NO: 1464484 - DNA, 25 bp, Homo sapien
tactagcatctagcgtatagcaggg

SEQ ID NO: 1464485 - DNA, 25 bp, Homo sapien
tcatttgtgcatagcagaatgggcg

SEQ ID NO: 1464486 - DNA, 25 bp, Homo sapien
tataagccacgctagagttcctcgt

SEQ ID NO: 1464487 - DNA, 25 bp, Homo sapien
ccatcgggtgttggctagaataaac

SEQ ID NO: 1464488 - DNA, 25 bp, Homo sapien
cagtattaatgacgggcagctgtgc

SEQ ID NO: 1464489 - DNA, 25 bp, Homo sapien
gaaggcggattaacaggagacctgc

SEQ ID NO: 1464490 - DNA, 25 bp, Homo sapien
gtgagtaagcgagacacccctggaa

SEQ ID NO: 1464491 - DNA, 25 bp, Homo sapien
gccaaggactacaggactttcgcct

SEQ ID NO: 1464492 - DNA, 25 bp, Homo sapien
gcggacagccttaaacaacactggt

SEQ ID NO: 1464493 - DNA, 25 bp, Homo sapien
tgggactgaaattcaccaccattcc

SEQ ID NO: 1464494 - DNA, 25 bp, Homo sapien
tcctagtggtcagtgaggagtggct

SEQ ID NO: 1464495 - DNA, 25 bp, Homo sapien
tgcaggcacacaggtggcctgtctg

SEQ ID NO: 1464496 - DNA, 25 bp, Homo sapien
gccagtgtccgcaaggggccttcct

SEQ ID NO: 1464497 - DNA, 25 bp, Homo sapien
tgcctttccgaggaggatcaagtcg

SEQ ID NO: 1464498 - DNA, 25 bp, Homo sapien
ccggaactgcctttccgaggaggat

SEQ ID NO: 1464499 - DNA, 25 bp, Homo sapien
tttccgaggaggatcaagtcgtgcc

SEQ ID NO: 1464500 - DNA, 25 bp, Homo sapien
ggatcaagtcgtgcctcctgctgag

SEQ ID NO: 1464501 - DNA, 25 bp, Homo sapien
ccagcctttgggctcggggccaaag

SEQ ID NO: 1464502 - DNA, 25 bp, Homo sapien
tgctctgattggcccggaagggttc

SEQ ID NO: 1464503 - DNA, 25 bp, Homo sapien
ggcccggaagggttcaggagctgcc

SEQ ID NO: 1464504 - DNA, 25 bp, Homo sapien
tgcccagcctttgggctcggggcca

SEQ ID NO: 1464505 - DNA, 25 bp, Homo sapien
ggcgcgctttgtcctcctcgcgcaa

SEQ ID NO: 1464506 - DNA, 25 bp, Homo sapien
gcagctctggatctaccctgtgaaa

SEQ ID NO: 1464507 - DNA, 25 bp, Homo sapien
cctgtgaaatcctgcaagggggtgc

SEQ ID NO: 1464508 - DNA, 25 bp, Homo sapien
agcgaggcggagtgcacggccatgg

SEQ ID NO: 1464509 - DNA, 25 bp, Homo sapien
tgtggtatcgctcccaggtgtctgc

SEQ ID NO: 1464510 - DNA, 25 bp, Homo sapien
ggtgtctgccagtgagcaaacttct

SEQ ID NO: 1464511 - DNA, 25 bp, Homo sapien
tctttggcgtcatgtgctcctgctg

SEQ ID NO: 1464512 - DNA, 25 bp, Homo sapien
cctgctgaggtgtggtatcgctccc

SEQ ID NO: 1464513 - DNA, 25 bp, Homo sapien
gtgacacgtgccagggtgccagcat

SEQ ID NO: 1464514 - DNA, 25 bp, Homo sapien
gactagactaaacagaggttgtgac

SEQ ID NO: 1464515 - DNA, 25 bp, Homo sapien
caacactggcttacagtcctaggtt

SEQ ID NO: 1464516 - DNA, 25 bp, Homo sapien
ccagaaagtgtgatcaaaagaagcc

SEQ ID NO: 1464517 - DNA, 25 bp, Homo sapien
aagtgaccgtacaagcctggacagg

SEQ ID NO: 1464518 - DNA, 25 bp, Homo sapien
acaggtcaccaaactcgccgaggca

SEQ ID NO: 1464519 - DNA, 25 bp, Homo sapien
taaaacacgggcagtttcaatgact

SEQ ID NO: 1464520 - DNA, 25 bp, Homo sapien
ttcaatgactccctcgcctgatggg

SEQ ID NO: 1464521 - DNA, 25 bp, Homo sapien
agctttttccctatgatcgacttta

SEQ ID NO: 1464522 - DNA, 25 bp, Homo sapien
cccctgtgtgatttgtgcaccgagg

SEQ ID NO: 1464523 - DNA, 25 bp, Homo sapien
gtgtgatttgtgcaccgagggtcat

SEQ ID NO: 1464524 - DNA, 25 bp, Homo sapien
tccctatgatcgactttaagctttc

SEQ ID NO: 1464525 - DNA, 25 bp, Homo sapien
tccttggtgatcacactgtctcctg

SEQ ID NO: 1464526 - DNA, 25 bp, Homo sapien
cctgcagcatcgccctctgtcacct

SEQ ID NO: 1464527 - DNA, 25 bp, Homo sapien
ccttggtgatcacactgtctcctgc

SEQ ID NO: 1464528 - DNA, 25 bp, Homo sapien
tttgcgagccattcctgtcgtctgg

SEQ ID NO: 1464529 - DNA, 25 bp, Homo sapien
tctggatgccataacattggaggaa

SEQ ID NO: 1464530 - DNA, 25 bp, Homo sapien
gccagagttgccaagaccaaggctg

SEQ ID NO: 1464531 - DNA, 25 bp, Homo sapien
aatgatgatcgtttcttggaggttc

SEQ ID NO: 1464532 - DNA, 25 bp, Homo sapien
taaagattgtgaggtgctggagcca

SEQ ID NO: 1464533 - DNA, 25 bp, Homo sapien
cttagtgagctggtactgtgggcca

SEQ ID NO: 1464534 - DNA, 25 bp, Homo sapien
ctcagtttggagacgtgacttgcca

SEQ ID NO: 1464535 - DNA, 25 bp, Homo sapien
aatacggaagcctgggataagcaac

SEQ ID NO: 1464536 - DNA, 25 bp, Homo sapien
ccctcaatgggctggatgatgccta

SEQ ID NO: 1464537 - DNA, 25 bp, Homo sapien
cccagagatattgttttcccagcta

SEQ ID NO: 1464538 - DNA, 25 bp, Homo sapien
gaagatgtcccagctccggaagaca

SEQ ID NO: 1464539 - DNA, 25 bp, Homo sapien
caaaggcataagatcaaggagaact

SEQ ID NO: 1464540 - DNA, 25 bp, Homo sapien
tcctcggccggcccaggcggctgct

SEQ ID NO: 1464541 - DNA, 25 bp, Homo sapien
tgctcctcggccggcccaggcggct

SEQ ID NO: 1464542 - DNA, 25 bp, Homo sapien
ctcctcggccggcccaggcggctgc

SEQ ID NO: 1464543 - DNA, 25 bp, Homo sapien
cctcggccggcccaggcggctgctc

SEQ ID NO: 1464544 - DNA, 25 bp, Homo sapien
gcccgccggggtgcacctctcaggc

SEQ ID NO: 1464545 - DNA, 25 bp, Homo sapien
ctcggccggccagttcttcgcatct

SEQ ID NO: 1464546 - DNA, 25 bp, Homo sapien
ctgctaaccggtgggcggcccgccg

SEQ ID NO: 1464547 - DNA, 25 bp, Homo sapien
agccctcggccggccagttcttcgc

SEQ ID NO: 1464548 - DNA, 25 bp, Homo sapien
tagtgggttccctaggccaggattc

SEQ ID NO: 1464549 - DNA, 25 bp, Homo sapien
gcaaacctgggtctcatctcggtgt

SEQ ID NO: 1464550 - DNA, 25 bp, Homo sapien
tgtctggtccttggtagagtcgcca

SEQ ID NO: 1464551 - DNA, 25 bp, Homo sapien
cgcgagtcggataggagcaaacctg

SEQ ID NO: 1464552 - DNA, 25 bp, Homo sapien
ttctctccggaagcaggctggttcg

SEQ ID NO: 1464553 - DNA, 25 bp, Homo sapien
tgcttactgtatgttggcgacttgg

SEQ ID NO: 1464554 - DNA, 25 bp, Homo sapien
cagaggtcgtggctcaaaggcactt

SEQ ID NO: 1464555 - DNA, 25 bp, Homo sapien
tgtttctctgactcgccccagaggt

SEQ ID NO: 1464556 - DNA, 25 bp, Homo sapien
taatcactatgtggacgcgaagcgc

SEQ ID NO: 1464557 - DNA, 25 bp, Homo sapien
agctgtaatcactatgtggacgcga

SEQ ID NO: 1464558 - DNA, 25 bp, Homo sapien
tgtaatcactatgtggacgcgaagc

SEQ ID NO: 1464559 - DNA, 25 bp, Homo sapien
atcactatgtggacgcgaagcgcgg

SEQ ID NO: 1464560 - DNA, 25 bp, Homo sapien
cttggccagagtgggaaagttctca

SEQ ID NO: 1464561 - DNA, 25 bp, Homo sapien
gaggcagcagattgagccttcttac

SEQ ID NO: 1464562 - DNA, 25 bp, Homo sapien
tgcttatctcctccacttttagaca

SEQ ID NO: 1464563 - DNA, 25 bp, Homo sapien
ctgttctcgacttttccatccaggg

SEQ ID NO: 1464564 - DNA, 25 bp, Homo sapien
ttaaggagaataacgcgtcggcacg

SEQ ID NO: 1464565 - DNA, 25 bp, Homo sapien
tcggcacgcacacttagctgaggag

SEQ ID NO: 1464566 - DNA, 25 bp, Homo sapien
gaagcaggatatcccaagcacatcg

SEQ ID NO: 1464567 - DNA, 25 bp, Homo sapien
gaattttgaggtgcttcaatccagc

SEQ ID NO: 1464568 - DNA, 25 bp, Homo sapien
gaaaatcatcatcggggaatgtcat

SEQ ID NO: 1464569 - DNA, 25 bp, Homo sapien
acccagaccgtaggtccacgccctg

SEQ ID NO: 1464570 - DNA, 25 bp, Homo sapien
aacgtgaagaaaatcatcatcgggg

SEQ ID NO: 1464571 - DNA, 25 bp, Homo sapien
gccctggaggtttccgctaccgcca

SEQ ID NO: 1464572 - DNA, 25 bp, Homo sapien
tcaggtcattataccagccagggag

SEQ ID NO: 1464573 - DNA, 25 bp, Homo sapien
tgtcagaagccgaagaaacaggaga

SEQ ID NO: 1464574 - DNA, 25 bp, Homo sapien
gagcgcctaggcttcttttcaaggt

SEQ ID NO: 1464575 - DNA, 25 bp, Homo sapien
tcagaggcaaccataaaggaactcc

SEQ ID NO: 1464576 - DNA, 25 bp, Homo sapien
cagggtaggtagcattataaacaca

SEQ ID NO: 1464577 - DNA, 25 bp, Homo sapien
gctgtgcaacacgacccagaagtac

SEQ ID NO: 1464578 - DNA, 25 bp, Homo sapien
tataaacacagtaggaggctgtgca

SEQ ID NO: 1464579 - DNA, 25 bp, Homo sapien
ttatttatagcatcgcagggtaggt

SEQ ID NO: 1464580 - DNA, 25 bp, Homo sapien
tgcgaatcatctggtcgaggaccca

SEQ ID NO: 1464581 - DNA, 25 bp, Homo sapien
tcacaagcaggactcgatgcaggcg

SEQ ID NO: 1464582 - DNA, 25 bp, Homo sapien
ggacccattaggatccccgatgcta

SEQ ID NO: 1464583 - DNA, 25 bp, Homo sapien
agagaggcaagagaacgcgttcaca

SEQ ID NO: 1464584 - DNA, 25 bp, Homo sapien
ccgtccttgcaagggcccagatttg

SEQ ID NO: 1464585 - DNA, 25 bp, Homo sapien
gatttgattccggttcgtcgaggcg

SEQ ID NO: 1464586 - DNA, 25 bp, Homo sapien
gcgccgcttcctactgggcttactt

SEQ ID NO: 1464587 - DNA, 25 bp, Homo sapien
tacttcgggatctagacttcggcct

SEQ ID NO: 1464588 - DNA, 25 bp, Homo sapien
ccttcggtgccagaggaagcgagaa

SEQ ID NO: 1464589 - DNA, 25 bp, Homo sapien
gaccctgtgggccttcggtgccaga

SEQ ID NO: 1464590 - DNA, 25 bp, Homo sapien
cattaaaaagctggaccctgtgggc

SEQ ID NO: 1464591 - DNA, 25 bp, Homo sapien
ccattaaaaagctggaccctgtggg

SEQ ID NO: 1464592 - DNA, 25 bp, Homo sapien
cctcgggtcagtttacccactcgca

SEQ ID NO: 1464593 - DNA, 25 bp, Homo sapien
ccactcgcagaccttctcccgaggg

SEQ ID NO: 1464594 - DNA, 25 bp, Homo sapien
tgactcgagcatcaggcgtcccgca

SEQ ID NO: 1464595 - DNA, 25 bp, Homo sapien
gcgacagtgggcagaattcccaaag

SEQ ID NO: 1464596 - DNA, 25 bp, Homo sapien
taaacacgggccatttagcaattac

SEQ ID NO: 1464597 - DNA, 25 bp, Homo sapien
aggtggccgagtccataaacacggg

SEQ ID NO: 1464598 - DNA, 25 bp, Homo sapien
gccgagtccataaacacgggccatt

SEQ ID NO: 1464599 - DNA, 25 bp, Homo sapien
gagtccataaacacgggccatttag

SEQ ID NO: 1464600 - DNA, 25 bp, Homo sapien
tctaactgggaacgtccagagactt

SEQ ID NO: 1464601 - DNA, 25 bp, Homo sapien
tgtgacactggcttctcgccgtctg

SEQ ID NO: 1464602 - DNA, 25 bp, Homo sapien
ccccagggcgtgataattgcgctgg

SEQ ID NO: 1464603 - DNA, 25 bp, Homo sapien
tctcgcggtctttaccctgcatggg

SEQ ID NO: 1464604 - DNA, 25 bp, Homo sapien
ccttatcatgaagctgtatgctgca

SEQ ID NO: 1464605 - DNA, 25 bp, Homo sapien
ttttgtcaccttatcatgaagctgt

SEQ ID NO: 1464606 - DNA, 25 bp, Homo sapien
atgctgcatgggcactggagacagt

SEQ ID NO: 1464607 - DNA, 25 bp, Homo sapien
tcatgaagctgtatgctgcatgggc

SEQ ID NO: 1464608 - DNA, 25 bp, Homo sapien
ttaacactattgctcttgtgaacaa

SEQ ID NO: 1464609 - DNA, 25 bp, Homo sapien
gaagagcacacaattggagacatct

SEQ ID NO: 1464610 - DNA, 25 bp, Homo sapien
cactattgctcttgtgaacaacccc

SEQ ID NO: 1464611 - DNA, 25 bp, Homo sapien
tttttcacatcattaacactattgc

SEQ ID NO: 1464612 - DNA, 25 bp, Homo sapien
gagttggctgctcggtacacagaca

SEQ ID NO: 1464613 - DNA, 25 bp, Homo sapien
gaccactgtcgagctgtgggcatga

SEQ ID NO: 1464614 - DNA, 25 bp, Homo sapien
tacacagacacatgctccagagttt

SEQ ID NO: 1464615 - DNA, 25 bp, Homo sapien
ttttcatggcatcttgggtctgggc

SEQ ID NO: 1464616 - DNA, 25 bp, Homo sapien
tgcctccaacacctgtccattaaag

SEQ ID NO: 1464617 - DNA, 25 bp, Homo sapien
ctgcctccaacacctgtccattaaa

SEQ ID NO: 1464618 - DNA, 25 bp, Homo sapien
ctccaacacctgtccattaaagcaa

SEQ ID NO: 1464619 - DNA, 25 bp, Homo sapien
caacacctgtccattaaagcaagcc

SEQ ID NO: 1464620 - DNA, 25 bp, Homo sapien
ttcttctgtgattaaagaccctaaa

SEQ ID NO: 1464621 - DNA, 25 bp, Homo sapien
ttctgtgattaaagaccctaaaggc

SEQ ID NO: 1464622 - DNA, 25 bp, Homo sapien
tgtgattaaagaccctaaaggctta

SEQ ID NO: 1464623 - DNA, 25 bp, Homo sapien
tctgtgattaaagaccctaaaggct

SEQ ID NO: 1464624 - DNA, 25 bp, Homo sapien
cttatgcagttttgagacccgtaca

SEQ ID NO: 1464625 - DNA, 25 bp, Homo sapien
tttgagacccgtacaccaggtggtg

SEQ ID NO: 1464626 - DNA, 25 bp, Homo sapien
gagacccgtacaccaggtggtggta

SEQ ID NO: 1464627 - DNA, 25 bp, Homo sapien
tgcagttttgagacccgtacaccag

SEQ ID NO: 1464628 - DNA, 25 bp, Homo sapien
tagccacctatctgcagcttatatg

SEQ ID NO: 1464629 - DNA, 25 bp, Homo sapien
tatctgcagcttatatgaagtaacg

SEQ ID NO: 1464630 - DNA, 25 bp, Homo sapien
cagtgaaagctgcaatgtaaacatc

SEQ ID NO: 1464631 - DNA, 25 bp, Homo sapien
agtaacgatgagtttaataagctcc

SEQ ID NO: 1464632 - DNA, 25 bp, Homo sapien
tggtttcacacctttgcaactgtga

SEQ ID NO: 1464633 - DNA, 25 bp, Homo sapien
tccatagagtgtagtaactattcac

SEQ ID NO: 1464634 - DNA, 25 bp, Homo sapien
aactattcacattcccgccagcagt

SEQ ID NO: 1464635 - DNA, 25 bp, Homo sapien
ctttttactaacgaccatttgtcat

SEQ ID NO: 1464636 - DNA, 25 bp, Homo sapien
cttgcatgaacctgtgctggccttg

SEQ ID NO: 1464637 - DNA, 25 bp, Homo sapien
tcagcaggtttgtggatgcttcttc

SEQ ID NO: 1464638 - DNA, 25 bp, Homo sapien
tatcaggcagaatcagagaacttgc

SEQ ID NO: 1464639 - DNA, 25 bp, Homo sapien
aggtttgtggatgcttcttcctgaa

SEQ ID NO: 1464640 - DNA, 25 bp, Homo sapien
ttgacccagtctctaaggaccctcg

SEQ ID NO: 1464641 - DNA, 25 bp, Homo sapien
agatgcagtccagatgtcttgaccc

SEQ ID NO: 1464642 - DNA, 25 bp, Homo sapien
cagtccagatgtcttgacccagtct

SEQ ID NO: 1464643 - DNA, 25 bp, Homo sapien
gatgtcttgacccagtctctaagga

SEQ ID NO: 1464644 - DNA, 25 bp, Homo sapien
tatggtcagtagaatagcctcctgg

SEQ ID NO: 1464645 - DNA, 25 bp, Homo sapien
cctcctggtgggttgattactgctg

SEQ ID NO: 1464646 - DNA, 25 bp, Homo sapien
cattcaatggcaaagtatggtcagt

SEQ ID NO: 1464647 - DNA, 25 bp, Homo sapien
gtagtcgtagagtttgatgatccca

SEQ ID NO: 1464648 - DNA, 25 bp, Homo sapien
gtttctattgttcgagcctggctca

SEQ ID NO: 1464649 - DNA, 25 bp, Homo sapien
cagtggccttctttggccagatcca

SEQ ID NO: 1464650 - DNA, 25 bp, Homo sapien
tttggcaagcttggtctcagggcgt

SEQ ID NO: 1464651 - DNA, 25 bp, Homo sapien
cctggctcatgtacccaagaggaca

SEQ ID NO: 1464652 - DNA, 25 bp, Homo sapien
ctgacatgttcacacagctccagga

SEQ ID NO: 1464653 - DNA, 25 bp, Homo sapien
gaatcatctcctcatacctgctctg

SEQ ID NO: 1464654 - DNA, 25 bp, Homo sapien
ggagatcaatctcacccccttgcat

SEQ ID NO: 1464655 - DNA, 25 bp, Homo sapien
cattgggccccgaggcccagaatca

SEQ ID NO: 1464656 - DNA, 25 bp, Homo sapien
tatttggtctgatagcaccaggagc

SEQ ID NO: 1464657 - DNA, 25 bp, Homo sapien
ccttgatttaagaatttggatggcc

SEQ ID NO: 1464658 - DNA, 25 bp, Homo sapien
tctgacctatgcttggaggattcca

SEQ ID NO: 1464659 - DNA, 25 bp, Homo sapien
taggaggtttgcataactcggtacc

SEQ ID NO: 1464660 - DNA, 25 bp, Homo sapien
tgctgagggtccacctgagaattgt

SEQ ID NO: 1464661 - DNA, 25 bp, Homo sapien
tcatcatcagcaggatccagcctgg

SEQ ID NO: 1464662 - DNA, 25 bp, Homo sapien
taatagcagaccgagagagaacctc

SEQ ID NO: 1464663 - DNA, 25 bp, Homo sapien
cacagtccagaggtatgcagtaagt

SEQ ID NO: 1464664 - DNA, 25 bp, Homo sapien
tatcagtagccaggatggacagttc

SEQ ID NO: 1464665 - DNA, 25 bp, Homo sapien
ggagagtcccttgcataagacagac

SEQ ID NO: 1464666 - DNA, 25 bp, Homo sapien
caatcctgtctgtccggagagtccc

SEQ ID NO: 1464667 - DNA, 25 bp, Homo sapien
gatctagacttctccttaagcaggg

SEQ ID NO: 1464668 - DNA, 25 bp, Homo sapien
gcagcagagcgccttcttgtttagg

SEQ ID NO: 1464669 - DNA, 25 bp, Homo sapien
ccttaatgcttttacaggctttgga

SEQ ID NO: 1464670 - DNA, 25 bp, Homo sapien
gaggtcaggaggcttgttgaaatat

SEQ ID NO: 1464671 - DNA, 25 bp, Homo sapien
aaatatggccgctgggtactgacgc

SEQ ID NO: 1464672 - DNA, 25 bp, Homo sapien
tatagcccaactcccttaagttgtc

SEQ ID NO: 1464673 - DNA, 25 bp, Homo sapien
tcccttaagttgtctcttcctgtga

SEQ ID NO: 1464674 - DNA, 25 bp, Homo sapien
cttcctgtgattaattcttgttctc

SEQ ID NO: 1464675 - DNA, 25 bp, Homo sapien
attccattttatagcccaactccct

SEQ ID NO: 1464676 - DNA, 25 bp, Homo sapien
gataacaacgttgcagatgcctttg

SEQ ID NO: 1464677 - DNA, 25 bp, Homo sapien
catccagggtcaagtaaatcatttg

SEQ ID NO: 1464678 - DNA, 25 bp, Homo sapien
gactccacgttcaatgataacaacg

SEQ ID NO: 1464679 - DNA, 25 bp, Homo sapien
tgaaatacggcatcaccgacactct

SEQ ID NO: 1464680 - DNA, 25 bp, Homo sapien
tggtgttcttggctgaagacttgag

SEQ ID NO: 1464681 - DNA, 25 bp, Homo sapien
ggtgttcttggctgaagacttgagt

SEQ ID NO: 1464682 - DNA, 25 bp, Homo sapien
ttggacaaactaaagctggttggga

SEQ ID NO: 1464683 - DNA, 25 bp, Homo sapien
caaactaaagctggttgggaagagg

SEQ ID NO: 1464684 - DNA, 25 bp, Homo sapien
gtcagatcacgtgcagagaactggt

SEQ ID NO: 1464685 - DNA, 25 bp, Homo sapien
tgctgtcagatcacgtgcagagaac

SEQ ID NO: 1464686 - DNA, 25 bp, Homo sapien
cctgctgtcagatcacgtgcagaga

SEQ ID NO: 1464687 - DNA, 25 bp, Homo sapien
ctgtcagatcacgtgcagagaactg

SEQ ID NO: 1464688 - DNA, 25 bp, Homo sapien
tgatcccaggattgagactctccag

SEQ ID NO: 1464689 - DNA, 25 bp, Homo sapien
cccaggattgagactctccagattt

SEQ ID NO: 1464690 - DNA, 25 bp, Homo sapien
ttgagtgccaagtcccagatcagca

SEQ ID NO: 1464691 - DNA, 25 bp, Homo sapien
ctccagatttgagtgccaagtccca

SEQ ID NO: 1464692 - DNA, 25 bp, Homo sapien
atcatttccatagtggtgctgtggg

SEQ ID NO: 1464693 - DNA, 25 bp, Homo sapien
tgctgtgggaaatctcttataacct

SEQ ID NO: 1464694 - DNA, 25 bp, Homo sapien
tccatagtggtgctgtgggaaatct

SEQ ID NO: 1464695 - DNA, 25 bp, Homo sapien
tagtggtgctgtgggaaatctctta

SEQ ID NO: 1464696 - DNA, 25 bp, Homo sapien
attctctgcaactcctttcctggaa

SEQ ID NO: 1464697 - DNA, 25 bp, Homo sapien
ctctgcaactcctttcctggaagct

SEQ ID NO: 1464698 - DNA, 25 bp, Homo sapien
tgcattctctgcaactcctttcctg

SEQ ID NO: 1464699 - DNA, 25 bp, Homo sapien
gcattctctgcaactcctttcctgg

SEQ ID NO: 1464700 - DNA, 25 bp, Homo sapien
tgttctatagggatatctgttctgc

SEQ ID NO: 1464701 - DNA, 25 bp, Homo sapien
cctgagagagaacttagaaatcgga

SEQ ID NO: 1464702 - DNA, 25 bp, Homo sapien
tcagtgtcatggttgggtccctgtt

SEQ ID NO: 1464703 - DNA, 25 bp, Homo sapien
agtgcccgacttgtaatccgctcag

SEQ ID NO: 1464704 - DNA, 25 bp, Homo sapien
cattcttatggtcaaaccagtgagt

SEQ ID NO: 1464705 - DNA, 25 bp, Homo sapien
gaatctgagaggctatgtgaggcca

SEQ ID NO: 1464706 - DNA, 25 bp, Homo sapien
tgggtgtgaggctcaagtatttctg

SEQ ID NO: 1464707 - DNA, 25 bp, Homo sapien
tcttggagggtaccagaatctgaga

SEQ ID NO: 1464708 - DNA, 25 bp, Homo sapien
tcttatgaatgtctgcagacactca

SEQ ID NO: 1464709 - DNA, 25 bp, Homo sapien
gtcttatgaatgtctgcagacactc

SEQ ID NO: 1464710 - DNA, 25 bp, Homo sapien
ggtcttatgaatgtctgcagacact

SEQ ID NO: 1464711 - DNA, 25 bp, Homo sapien
gccttctcacagatgtcttaacttg

SEQ ID NO: 1464712 - DNA, 25 bp, Homo sapien
ccttctcacagatgtcttaacttgc

SEQ ID NO: 1464713 - DNA, 25 bp, Homo sapien
cacagatgtcttaacttgctgtgat

SEQ ID NO: 1464714 - DNA, 25 bp, Homo sapien
tctcacagatgtcttaacttgctgt

SEQ ID NO: 1464715 - DNA, 25 bp, Homo sapien
cttgtatcatctggccttgtctccc

SEQ ID NO: 1464716 - DNA, 25 bp, Homo sapien
catgtcaccttgattcttgtatcat

SEQ ID NO: 1464717 - DNA, 25 bp, Homo sapien
ttgattcttgtatcatctggccttg

SEQ ID NO: 1464718 - DNA, 25 bp, Homo sapien
tcatgcccacgtccatgtcaccttg

SEQ ID NO: 1464719 - DNA, 25 bp, Homo sapien
tcatcgggtttgagttgaggtgagt

SEQ ID NO: 1464720 - DNA, 25 bp, Homo sapien
caggggctgtgttttcaccatggga

SEQ ID NO: 1464721 - DNA, 25 bp, Homo sapien
acggcaggaaatgtgactgagaaga

SEQ ID NO: 1464722 - DNA, 25 bp, Homo sapien
tttgagttgaggtgagtgaacggca

SEQ ID NO: 1464723 - DNA, 25 bp, Homo sapien
acaatactcgggtcctgatgagcag

SEQ ID NO: 1464724 - DNA, 25 bp, Homo sapien
cgatgcctgccctagaggatgctgg

SEQ ID NO: 1464725 - DNA, 25 bp, Homo sapien
tgcctgtggtgaaagcgatgcctgc

SEQ ID NO: 1464726 - DNA, 25 bp, Homo sapien
gaaaggccacacaatactcgggtcc

SEQ ID NO: 1464727 - DNA, 25 bp, Homo sapien
aggctgctggttttaaccatagtgc

SEQ ID NO: 1464728 - DNA, 25 bp, Homo sapien
tatgggtaatgttacccccagaatc

SEQ ID NO: 1464729 - DNA, 25 bp, Homo sapien
gttcttgtctgtgttatgggtaatg

SEQ ID NO: 1464730 - DNA, 25 bp, Homo sapien
taaccatagtgccaatattggtggg

SEQ ID NO: 1464731 - DNA, 25 bp, Homo sapien
caattgtcacttggccatccctggc

SEQ ID NO: 1464732 - DNA, 25 bp, Homo sapien
ctgtctgttatcttgagactgattg

SEQ ID NO: 1464733 - DNA, 25 bp, Homo sapien
tcaattgtcacttggccatccctgg

SEQ ID NO: 1464734 - DNA, 25 bp, Homo sapien
tctgaactgtctgttatcttgagac

SEQ ID NO: 1464735 - DNA, 25 bp, Homo sapien
catttcaggtattgctgatactccc

SEQ ID NO: 1464736 - DNA, 25 bp, Homo sapien
ctcaacaattagaggggacccagga

SEQ ID NO: 1464737 - DNA, 25 bp, Homo sapien
tcaacaattagaggggacccaggag

SEQ ID NO: 1464738 - DNA, 25 bp, Homo sapien
atttcaggtattgctgatactccct

SEQ ID NO: 1464739 - DNA, 25 bp, Homo sapien
agttggaacagctttggaagtgtca

SEQ ID NO: 1464740 - DNA, 25 bp, Homo sapien
tgtgaatctactagcaaacatctct

SEQ ID NO: 1464741 - DNA, 25 bp, Homo sapien
aacatctcttcaaaagttggaacag

SEQ ID NO: 1464742 - DNA, 25 bp, Homo sapien
ttcaaaagttggaacagctttggaa

SEQ ID NO: 1464743 - DNA, 25 bp, Homo sapien
tgttgttaatggtgggctctactca

SEQ ID NO: 1464744 - DNA, 25 bp, Homo sapien
gagggctgagtaagtctttgataaa

SEQ ID NO: 1464745 - DNA, 25 bp, Homo sapien
tcattagttagagcgagtggactgc

SEQ ID NO: 1464746 - DNA, 25 bp, Homo sapien
tcttctagaggtgagatgaactgaa

SEQ ID NO: 1464747 - DNA, 25 bp, Homo sapien
tccaacaaggatgatgccctcttct

SEQ ID NO: 1464748 - DNA, 25 bp, Homo sapien
ctctaacctgtgtaggaagatttct

SEQ ID NO: 1464749 - DNA, 25 bp, Homo sapien
tctctaacctgtgtaggaagatttc

SEQ ID NO: 1464750 - DNA, 25 bp, Homo sapien
ctctctaacctgtgtaggaagattt

SEQ ID NO: 1464751 - DNA, 25 bp, Homo sapien
cagggtagctggtatcctcacggga

SEQ ID NO: 1464752 - DNA, 25 bp, Homo sapien
ttaaactgggcagggtagctggtat

SEQ ID NO: 1464753 - DNA, 25 bp, Homo sapien
aatgaccagacatctaaggggtaca

SEQ ID NO: 1464754 - DNA, 25 bp, Homo sapien
gtagctggtatcctcacgggaagac

SEQ ID NO: 1464755 - DNA, 25 bp, Homo sapien
cactcttttcctactggactagaag

SEQ ID NO: 1464756 - DNA, 25 bp, Homo sapien
gggagttggctgttctgttattgct

SEQ ID NO: 1464757 - DNA, 25 bp, Homo sapien
ctggactagaagctagctttgatcc

SEQ ID NO: 1464758 - DNA, 25 bp, Homo sapien
gaagctagctttgatcctggggtga

SEQ ID NO: 1464759 - DNA, 25 bp, Homo sapien
catttgcataaaagtttgtattcac

SEQ ID NO: 1464760 - DNA, 25 bp, Homo sapien
gcactaatgaggttcacgtactgtt

SEQ ID NO: 1464761 - DNA, 25 bp, Homo sapien
tgctagtcccttaacgacatttgca

SEQ ID NO: 1464762 - DNA, 25 bp, Homo sapien
tcaaacaatggtagtctagagaagc

SEQ ID NO: 1464763 - DNA, 25 bp, Homo sapien
cctgttcgcatggagcaggattcag

SEQ ID NO: 1464764 - DNA, 25 bp, Homo sapien
gagcaggattcagaataaagcagta

SEQ ID NO: 1464765 - DNA, 25 bp, Homo sapien
aggatttgacttcctgttcgcatgg

SEQ ID NO: 1464766 - DNA, 25 bp, Homo sapien
tgacttcctgttcgcatggagcagg

SEQ ID NO: 1464767 - DNA, 25 bp, Homo sapien
tggattcatgtttcacttgtaagga

SEQ ID NO: 1464768 - DNA, 25 bp, Homo sapien
tctccaactagatggtaacgtcctt

SEQ ID NO: 1464769 - DNA, 25 bp, Homo sapien
cctgtgctttggtctctccaactag

SEQ ID NO: 1464770 - DNA, 25 bp, Homo sapien
tgtggcacaatccaagcttctagtg

SEQ ID NO: 1464771 - DNA, 25 bp, Homo sapien
aagcattctgaaaggtgacccagtc

SEQ ID NO: 1464772 - DNA, 25 bp, Homo sapien
aacacaggggactcccatgactgtg

SEQ ID NO: 1464773 - DNA, 25 bp, Homo sapien
cccagtcatagtagggaagaggaac

SEQ ID NO: 1464774 - DNA, 25 bp, Homo sapien
gtgacccagtcatagtagggaagag

SEQ ID NO: 1464775 - DNA, 25 bp, Homo sapien
tagaacagttgagggtacagccgat

SEQ ID NO: 1464776 - DNA, 25 bp, Homo sapien
gaatcattaacttgggcacagagct

SEQ ID NO: 1464777 - DNA, 25 bp, Homo sapien
gacgtaactgggcattctgaccacc

SEQ ID NO: 1464778 - DNA, 25 bp, Homo sapien
ctaaatcaagatacagcagggacgt

SEQ ID NO: 1464779 - DNA, 25 bp, Homo sapien
taacagctcgtatggagtcaaaacc

SEQ ID NO: 1464780 - DNA, 25 bp, Homo sapien
tgtgtccaagtctctaacagctcgt

SEQ ID NO: 1464781 - DNA, 25 bp, Homo sapien
tgatcttgggcaagggtttcttgga

SEQ ID NO: 1464782 - DNA, 25 bp, Homo sapien
cctctgattgtcaggagcacccact

SEQ ID NO: 1464783 - DNA, 25 bp, Homo sapien
tgggaagaaaatggttttcatctgc

SEQ ID NO: 1464784 - DNA, 25 bp, Homo sapien
ctgggaagaaaatggttttcatctg

SEQ ID NO: 1464785 - DNA, 25 bp, Homo sapien
tttctccttgtttctggatcttcag

SEQ ID NO: 1464786 - DNA, 25 bp, Homo sapien
tcttcagtcgcagaagtaagccagc

SEQ ID NO: 1464787 - DNA, 25 bp, Homo sapien
ttcacttcctctgttactactgccc

SEQ ID NO: 1464788 - DNA, 25 bp, Homo sapien
tcatgcaactttcaccctttctcct

SEQ ID NO: 1464789 - DNA, 25 bp, Homo sapien
tggaactgcccaaaatgttgactga

SEQ ID NO: 1464790 - DNA, 25 bp, Homo sapien
ttatctggaactgcccaaaatgttg

SEQ ID NO: 1464791 - DNA, 25 bp, Homo sapien
tctggaactgcccaaaatgttgact

SEQ ID NO: 1464792 - DNA, 25 bp, Homo sapien
cttatctggaactgcccaaaatgtt

SEQ ID NO: 1464793 - DNA, 25 bp, Homo sapien
taacaaagataacatggtgagtccc

SEQ ID NO: 1464794 - DNA, 25 bp, Homo sapien
gggtttaacaaagataacatggtga

SEQ ID NO: 1464795 - DNA, 25 bp, Homo sapien
tttaacaaagataacatggtgagtc

SEQ ID NO: 1464796 - DNA, 25 bp, Homo sapien
aaagataacatggtgagtcccaaac

SEQ ID NO: 1464797 - DNA, 25 bp, Homo sapien
tagagcccacaaagattgtcgcagc

SEQ ID NO: 1464798 - DNA, 25 bp, Homo sapien
cagttgatcagtgcttagagcccac

SEQ ID NO: 1464799 - DNA, 25 bp, Homo sapien
tgtgagctcgtcaatcccagaggct

SEQ ID NO: 1464800 - DNA, 25 bp, Homo sapien
tgtgataaaccgagagcagcttccc

SEQ ID NO: 1464801 - DNA, 25 bp, Homo sapien
tgaggcagctttgtcagccacgcac

SEQ ID NO: 1464802 - DNA, 25 bp, Homo sapien
tggaagtttgctgggttgtagaatc

SEQ ID NO: 1464803 - DNA, 25 bp, Homo sapien
ctttgtcagccacgcacacttggat

SEQ ID NO: 1464804 - DNA, 25 bp, Homo sapien
gataaactcttctgggtaattgctt

SEQ ID NO: 1464805 - DNA, 25 bp, Homo sapien
tagcattgttgcagccacatacgcg

SEQ ID NO: 1464806 - DNA, 25 bp, Homo sapien
cacggagcagactgacaaattgact

SEQ ID NO: 1464807 - DNA, 25 bp, Homo sapien
gactgaaagggtagagcatctggat

SEQ ID NO: 1464808 - DNA, 25 bp, Homo sapien
ccctcggcagggaggctttgatgat

SEQ ID NO: 1464809 - DNA, 25 bp, Homo sapien
cagctctggcgtctcgtcgtgtagg

SEQ ID NO: 1464810 - DNA, 25 bp, Homo sapien
agagggacttatttggcagctgttt

SEQ ID NO: 1464811 - DNA, 25 bp, Homo sapien
tctcgtcgtgtaggaggtgctgtca

SEQ ID NO: 1464812 - DNA, 25 bp, Homo sapien
cgagtacactttgcagctctggcgt

SEQ ID NO: 1464813 - DNA, 25 bp, Homo sapien
gagagtcctgcgctggaaaaggcct

SEQ ID NO: 1464814 - DNA, 25 bp, Homo sapien
gaaccggtaagcctgagcacagatg

SEQ ID NO: 1464815 - DNA, 25 bp, Homo sapien
catcatgcacatggcaattgaaagg

SEQ ID NO: 1464816 - DNA, 25 bp, Homo sapien
cacagatgggcaatatactggtatc

SEQ ID NO: 1464817 - DNA, 25 bp, Homo sapien
caatggttgtatttaagtactgatg

SEQ ID NO: 1464818 - DNA, 25 bp, Homo sapien
tggaaactgaatccataacttttat

SEQ ID NO: 1464819 - DNA, 25 bp, Homo sapien
gacaaatagttgaatgggatagctt

SEQ ID NO: 1464820 - DNA, 25 bp, Homo sapien
aaatgtttctaatgggagttgacaa

SEQ ID NO: 1464821 - DNA, 25 bp, Homo sapien
ttatgtcaaatccatcccattcttc

SEQ ID NO: 1464822 - DNA, 25 bp, Homo sapien
tttccttgtagctcccagtggactt

SEQ ID NO: 1464823 - DNA, 25 bp, Homo sapien
agagcacttaaaagtacttatgtca

SEQ ID NO: 1464824 - DNA, 25 bp, Homo sapien
tttgctgttaaaccacagggaggag

SEQ ID NO: 1464825 - DNA, 25 bp, Homo sapien
cacaaaggcaagaatctctatccaa

SEQ ID NO: 1464826 - DNA, 25 bp, Homo sapien
aaaggcaagaatctctatccaagaa

SEQ ID NO: 1464827 - DNA, 25 bp, Homo sapien
ccccataaagggctccaccactctg

SEQ ID NO: 1464828 - DNA, 25 bp, Homo sapien
gatgaccccataaagggctccacca

SEQ ID NO: 1464829 - DNA, 25 bp, Homo sapien
acagccttctcccttgatgtcgagg

SEQ ID NO: 1464830 - DNA, 25 bp, Homo sapien
tctgtttctctcctatgaggcaagt

SEQ ID NO: 1464831 - DNA, 25 bp, Homo sapien
taacttccaagtatctggacagcct

SEQ ID NO: 1464832 - DNA, 25 bp, Homo sapien
ggaggacctttgacagagagtgtaa

SEQ ID NO: 1464833 - DNA, 25 bp, Homo sapien
gcaaagaggtcagaataatgatgat

SEQ ID NO: 1464834 - DNA, 25 bp, Homo sapien
actcagtgtgataatcaaggccctg

SEQ ID NO: 1464835 - DNA, 25 bp, Homo sapien
taatcaaggccctgaatcatgtctc

SEQ ID NO: 1464836 - DNA, 25 bp, Homo sapien
gaatcatgtctccaagtggattata

SEQ ID NO: 1464837 - DNA, 25 bp, Homo sapien
cagccccggcatactgattttagag

SEQ ID NO: 1464838 - DNA, 25 bp, Homo sapien
tcatgtgttccaatagggcttatcc

SEQ ID NO: 1464839 - DNA, 25 bp, Homo sapien
taacattagtacatggaagcagcag

SEQ ID NO: 1464840 - DNA, 25 bp, Homo sapien
ggaatttctcccatgaacgctgaaa

SEQ ID NO: 1464841 - DNA, 25 bp, Homo sapien
catgctccgtgacctgatcaagggt

SEQ ID NO: 1464842 - DNA, 25 bp, Homo sapien
gctccgtgacctgatcaagggttaa

SEQ ID NO: 1464843 - DNA, 25 bp, Homo sapien
tccgtgacctgatcaagggttaaag

SEQ ID NO: 1464844 - DNA, 25 bp, Homo sapien
tgctccgtgacctgatcaagggtta

SEQ ID NO: 1464845 - DNA, 25 bp, Homo sapien
actgagggttaattcttggtatgtt

SEQ ID NO: 1464846 - DNA, 25 bp, Homo sapien
gactgagggttaattcttggtatgt

SEQ ID NO: 1464847 - DNA, 25 bp, Homo sapien
tgagggttaattcttggtatgtttc

SEQ ID NO: 1464848 - DNA, 25 bp, Homo sapien
tcaagtaggatgcttcagagaagga

SEQ ID NO: 1464849 - DNA, 25 bp, Homo sapien
ctgggtcctgtaccagatcggttga

SEQ ID NO: 1464850 - DNA, 25 bp, Homo sapien
tgggtcctgtaccagatcggttgac

SEQ ID NO: 1464851 - DNA, 25 bp, Homo sapien
ggtcctgtaccagatcggttgacgt

SEQ ID NO: 1464852 - DNA, 25 bp, Homo sapien
gggtcctgtaccagatcggttgacg

SEQ ID NO: 1464853 - DNA, 25 bp, Homo sapien
gtcagtgttcggctctaagggctga

SEQ ID NO: 1464854 - DNA, 25 bp, Homo sapien
tgtaaaatgggtcagtgttcggctc

SEQ ID NO: 1464855 - DNA, 25 bp, Homo sapien
tgttcggctctaagggctgattgtt

SEQ ID NO: 1464856 - DNA, 25 bp, Homo sapien
aatgggtcagtgttcggctctaagg

SEQ ID NO: 1464857 - DNA, 25 bp, Homo sapien
tgggctgtcattagccatgcttatg

SEQ ID NO: 1464858 - DNA, 25 bp, Homo sapien
cataaaataatggatctgtaaactg

SEQ ID NO: 1464859 - DNA, 25 bp, Homo sapien
tgctcctggattgaaagtgggctgt

SEQ ID NO: 1464860 - DNA, 25 bp, Homo sapien
tctgggcaattatagtgctcctgga

SEQ ID NO: 1464861 - DNA, 25 bp, Homo sapien
cagtttcatttaacttggagtgttg

SEQ ID NO: 1464862 - DNA, 25 bp, Homo sapien
ggaacttgtttacaacgttctgatg

SEQ ID NO: 1464863 - DNA, 25 bp, Homo sapien
ccaattcctggttcgtccctcagaa

SEQ ID NO: 1464864 - DNA, 25 bp, Homo sapien
gaataatggcatagtttgtatatca

SEQ ID NO: 1464865 - DNA, 25 bp, Homo sapien
ggcaggccaccccatcgtaatctta

SEQ ID NO: 1464866 - DNA, 25 bp, Homo sapien
ggtaagcacggcacattcaaagagc

SEQ ID NO: 1464867 - DNA, 25 bp, Homo sapien
cagagcaggatagcacaagatttca

SEQ ID NO: 1464868 - DNA, 25 bp, Homo sapien
aaatacccgggttcattgtcttgca

SEQ ID NO: 1464869 - DNA, 25 bp, Homo sapien
tgcaaatgcatgtaaaacccctggg

SEQ ID NO: 1464870 - DNA, 25 bp, Homo sapien
cattcgcctgtgcaagcttctagct

SEQ ID NO: 1464871 - DNA, 25 bp, Homo sapien
ctagatggcaacctctttgatggca

SEQ ID NO: 1464872 - DNA, 25 bp, Homo sapien
cattaaagttgtgactcaggtgact

SEQ ID NO: 1464873 - DNA, 25 bp, Homo sapien
tcttgcgtgtggaggatcctttgcc

SEQ ID NO: 1464874 - DNA, 25 bp, Homo sapien
tcacttgtcctaagggacagcaccc

SEQ ID NO: 1464875 - DNA, 25 bp, Homo sapien
tagacctgcagtatccacaaagaaa

SEQ ID NO: 1464876 - DNA, 25 bp, Homo sapien
gaaaagatgatctgggacgtcctct

SEQ ID NO: 1464877 - DNA, 25 bp, Homo sapien
cgtgagtccacaagtggccccagga

SEQ ID NO: 1464878 - DNA, 25 bp, Homo sapien
gtccacaagtggccccaggagactt

SEQ ID NO: 1464879 - DNA, 25 bp, Homo sapien
ccacaagtggccccaggagacttgc

SEQ ID NO: 1464880 - DNA, 25 bp, Homo sapien
gagtccacaagtggccccaggagac

SEQ ID NO: 1464881 - DNA, 25 bp, Homo sapien
ttcttgttggcaaaatccagttcgg

SEQ ID NO: 1464882 - DNA, 25 bp, Homo sapien
tctgcgcaggactgtgaggcatctc

SEQ ID NO: 1464883 - DNA, 25 bp, Homo sapien
caagtgtttgttcataggctgagac

SEQ ID NO: 1464884 - DNA, 25 bp, Homo sapien
gggtgtataaggagtaatgatccta

SEQ ID NO: 1464885 - DNA, 25 bp, Homo sapien
gaaactattttgagctgggatcagg

SEQ ID NO: 1464886 - DNA, 25 bp, Homo sapien
cactcactaattaagcacatggaca

SEQ ID NO: 1464887 - DNA, 25 bp, Homo sapien
tcagcagaccaggttactgccactg

SEQ ID NO: 1464888 - DNA, 25 bp, Homo sapien
gaaaagcctccgaagcaactggcag

SEQ ID NO: 1464889 - DNA, 25 bp, Homo sapien
gtgatcccatcttgagtgctcagtg

SEQ ID NO: 1464890 - DNA, 25 bp, Homo sapien
cccatcttgagtgctcagtggaagt

SEQ ID NO: 1464891 - DNA, 25 bp, Homo sapien
catcttgagtgctcagtggaagtaa

SEQ ID NO: 1464892 - DNA, 25 bp, Homo sapien
gtgtgatcccatcttgagtgctcag

SEQ ID NO: 1464893 - DNA, 25 bp, Homo sapien
gaaaaggctgactctaaataaggtg

SEQ ID NO: 1464894 - DNA, 25 bp, Homo sapien
taaataaggtgcatgtttccaaact

SEQ ID NO: 1464895 - DNA, 25 bp, Homo sapien
gcatgtttccaaactattggtgcct

SEQ ID NO: 1464896 - DNA, 25 bp, Homo sapien
tttatactcagatactggaagtgaa

SEQ ID NO: 1464897 - DNA, 25 bp, Homo sapien
taagtctccaaagtttctgtgaatg

SEQ ID NO: 1464898 - DNA, 25 bp, Homo sapien
cacaaaagagtggagaattgggaca

SEQ ID NO: 1464899 - DNA, 25 bp, Homo sapien
gggcaaaagtcttactgcggcttta

SEQ ID NO: 1464900 - DNA, 25 bp, Homo sapien
tggaagcggtgcttagagaaccagc

SEQ ID NO: 1464901 - DNA, 25 bp, Homo sapien
gactcaatgtctggttcaggcccct

SEQ ID NO: 1464902 - DNA, 25 bp, Homo sapien
ggcaaagtggtttgccttgcccaag

SEQ ID NO: 1464903 - DNA, 25 bp, Homo sapien
gccagaagtcagaggatagatttgt

SEQ ID NO: 1464904 - DNA, 25 bp, Homo sapien
tgtaacatagtatcatagactgggt

SEQ ID NO: 1464905 - DNA, 25 bp, Homo sapien
gcagtaacttcaggatgacctgaat

SEQ ID NO: 1464906 - DNA, 25 bp, Homo sapien
aatcagggacttcaggtggtggtat

SEQ ID NO: 1464907 - DNA, 25 bp, Homo sapien
taattagcagtaacttcaggatgac

SEQ ID NO: 1464908 - DNA, 25 bp, Homo sapien
aacttcaggatgacctgaatcaggg

SEQ ID NO: 1464909 - DNA, 25 bp, Homo sapien
ccagggacctgattttcgtccttga

SEQ ID NO: 1464910 - DNA, 25 bp, Homo sapien
cagacccgagccagaggcttagtct

SEQ ID NO: 1464911 - DNA, 25 bp, Homo sapien
tttcgtccttgacagcagacccgag

SEQ ID NO: 1464912 - DNA, 25 bp, Homo sapien
ggcctctgtctacagacttcaaaca

SEQ ID NO: 1464913 - DNA, 25 bp, Homo sapien
ggatacttcaacagcttttagactt

SEQ ID NO: 1464914 - DNA, 25 bp, Homo sapien
tgagttgagctacatcccctgggat

SEQ ID NO: 1464915 - DNA, 25 bp, Homo sapien
ttagacttgactttaggttgagttg

SEQ ID NO: 1464916 - DNA, 25 bp, Homo sapien
gctacatcccctgggatgctagcca

SEQ ID NO: 1464917 - DNA, 25 bp, Homo sapien
cacgagtctggctattgttcaaagc

SEQ ID NO: 1464918 - DNA, 25 bp, Homo sapien
ggcagctctaacagacataatagtg

SEQ ID NO: 1464919 - DNA, 25 bp, Homo sapien
catattttgctaaggtggcagctct

SEQ ID NO: 1464920 - DNA, 25 bp, Homo sapien
cataatagtgtatgacgtagcacga

SEQ ID NO: 1464921 - DNA, 25 bp, Homo sapien
atctatccctggtgccactgagcgg

SEQ ID NO: 1464922 - DNA, 25 bp, Homo sapien
cactgagcggtaaggatttgaacaa

SEQ ID NO: 1464923 - DNA, 25 bp, Homo sapien
ccaagtcactgttgataccaaagaa

SEQ ID NO: 1464924 - DNA, 25 bp, Homo sapien
ccattggcgcttgtaagaacacttc

SEQ ID NO: 1464925 - DNA, 25 bp, Homo sapien
ctgtgatctttgtgccattgcggac

SEQ ID NO: 1464926 - DNA, 25 bp, Homo sapien
cctccaaatctggcatggatgcttc

SEQ ID NO: 1464927 - DNA, 25 bp, Homo sapien
ctccaaatctggcatggatgcttct

SEQ ID NO: 1464928 - DNA, 25 bp, Homo sapien
gatctttgtgccattgcggacctcc

SEQ ID NO: 1464929 - DNA, 25 bp, Homo sapien
tatgcaaataatttccttttataag

SEQ ID NO: 1464930 - DNA, 25 bp, Homo sapien
atgcaaataatttccttttataagt

SEQ ID NO: 1464931 - DNA, 25 bp, Homo sapien
gaaaggatggttgattttgataagt

SEQ ID NO: 1464932 - DNA, 25 bp, Homo sapien
aagaagaaaggatggttgattttga

SEQ ID NO: 1464933 - DNA, 25 bp, Homo sapien
gaggtatatgggaagaagaaaggat

SEQ ID NO: 1464934 - DNA, 25 bp, Homo sapien
aaggatggttgattttgataagtca

SEQ ID NO: 1464935 - DNA, 25 bp, Homo sapien
tcttgattctttgagctgggaaaag

SEQ ID NO: 1464936 - DNA, 25 bp, Homo sapien
tcccagaaatcctgtaacatcaatc

SEQ ID NO: 1464937 - DNA, 25 bp, Homo sapien
tttggtccatccaaactctccatag

SEQ ID NO: 1464938 - DNA, 25 bp, Homo sapien
aaaagatgtctttggtccatccaaa

SEQ ID NO: 1464939 - DNA, 25 bp, Homo sapien
tgaggccagaacaggaactctagga

SEQ ID NO: 1464940 - DNA, 25 bp, Homo sapien
taggagattaagagagggaatcccc

SEQ ID NO: 1464941 - DNA, 25 bp, Homo sapien
tgcagtcacccatatcattcctgtg

SEQ ID NO: 1464942 - DNA, 25 bp, Homo sapien
ctaggatatgctggtgctgcagtca

SEQ ID NO: 1464943 - DNA, 25 bp, Homo sapien
ctgcaatggccaggacgatggagca

SEQ ID NO: 1464944 - DNA, 25 bp, Homo sapien
gacttaaattgctggctgagtccat

SEQ ID NO: 1464945 - DNA, 25 bp, Homo sapien
tgccagcctctatttgctcctagac

SEQ ID NO: 1464946 - DNA, 25 bp, Homo sapien
ggagcagctacatgccagcctctat

SEQ ID NO: 1464947 - DNA, 25 bp, Homo sapien
gggcagttacatagtcctggcatgc

SEQ ID NO: 1464948 - DNA, 25 bp, Homo sapien
gtcctggcatgcatccaaaaatggc

SEQ ID NO: 1464949 - DNA, 25 bp, Homo sapien
cctggcatgcatccaaaaatggcat

SEQ ID NO: 1464950 - DNA, 25 bp, Homo sapien
tctccatgggcagttacatagtcct

SEQ ID NO: 1464951 - DNA, 25 bp, Homo sapien
cttctgatatgatacgggagacatt

SEQ ID NO: 1464952 - DNA, 25 bp, Homo sapien
agacattttccacccaaagttcttg

SEQ ID NO: 1464953 - DNA, 25 bp, Homo sapien
tctgatatgatacgggagacatttt

SEQ ID NO: 1464954 - DNA, 25 bp, Homo sapien
tctggggactttcttctgatatgat

SEQ ID NO: 1464955 - DNA, 25 bp, Homo sapien
ttcttcatcaacctggacatgttcc

SEQ ID NO: 1464956 - DNA, 25 bp, Homo sapien
gagatgtttcttcatcaacctggac

SEQ ID NO: 1464957 - DNA, 25 bp, Homo sapien
aaatatagtcttggtagttgtggca

SEQ ID NO: 1464958 - DNA, 25 bp, Homo sapien
ttttcaggtaccagatgtgcctgct

SEQ ID NO: 1464959 - DNA, 25 bp, Homo sapien
ccaccacagtctggtgtgaattcat

SEQ ID NO: 1464960 - DNA, 25 bp, Homo sapien
aggtcacccaccacagtctggtgtg

SEQ ID NO: 1464961 - DNA, 25 bp, Homo sapien
tttcctcatatgtgaggtaaaggtc

SEQ ID NO: 1464962 - DNA, 25 bp, Homo sapien
gtaaaggtcacccaccacagtctgg

SEQ ID NO: 1464963 - DNA, 25 bp, Homo sapien
cagaggacgatgcatatttgatgac

SEQ ID NO: 1464964 - DNA, 25 bp, Homo sapien
tccatgtgagctgcagactcattca

SEQ ID NO: 1464965 - DNA, 25 bp, Homo sapien
gacttctgccatagtgtttgttctg

SEQ ID NO: 1464966 - DNA, 25 bp, Homo sapien
gaagcagcagtacagactttagagc

SEQ ID NO: 1464967 - DNA, 25 bp, Homo sapien
cattcttagcaccacttgtcattat

SEQ ID NO: 1464968 - DNA, 25 bp, Homo sapien
attcttagcaccacttgtcattatg

SEQ ID NO: 1464969 - DNA, 25 bp, Homo sapien
cttactgctagtccagccccatggt

SEQ ID NO: 1464970 - DNA, 25 bp, Homo sapien
aattatctgagaacgagtgtccgga

SEQ ID NO: 1464971 - DNA, 25 bp, Homo sapien
aattagcgttcggtgtaaggctgac

SEQ ID NO: 1464972 - DNA, 25 bp, Homo sapien
cccggcttcagagtgctgcaggtca

SEQ ID NO: 1464973 - DNA, 25 bp, Homo sapien
cgaatgcaatgtcccggtaaacccg

SEQ ID NO: 1464974 - DNA, 25 bp, Homo sapien
ggtaaacccgttcacacacttgaca

SEQ ID NO: 1464975 - DNA, 25 bp, Homo sapien
tcaggccttggttactaaactggaa

SEQ ID NO: 1464976 - DNA, 25 bp, Homo sapien
caactggctcagtgaacaaggatga

SEQ ID NO: 1464977 - DNA, 25 bp, Homo sapien
catgtgggcctttcagacagacact

SEQ ID NO: 1464978 - DNA, 25 bp, Homo sapien
atgtgggcctttcagacagacactg

SEQ ID NO: 1464979 - DNA, 25 bp, Homo sapien
gttcatcaacagtagcgccgctctc

SEQ ID NO: 1464980 - DNA, 25 bp, Homo sapien
tgatgctgtgccataactgactgac

SEQ ID NO: 1464981 - DNA, 25 bp, Homo sapien
tctagaggtgttatttggtcctgct

SEQ ID NO: 1464982 - DNA, 25 bp, Homo sapien
ggttggactgcactgatgctgtgcc

SEQ ID NO: 1464983 - DNA, 25 bp, Homo sapien
tgttcactattgtatgacatgcctt

SEQ ID NO: 1464984 - DNA, 25 bp, Homo sapien
aagctctgttaggagttgttcacta

SEQ ID NO: 1464985 - DNA, 25 bp, Homo sapien
ctataacacaacaggtcttctaagc

SEQ ID NO: 1464986 - DNA, 25 bp, Homo sapien
cactgcaagttccttaaaagcagga

SEQ ID NO: 1464987 - DNA, 25 bp, Homo sapien
ttgtactccagataagcgggccacc

SEQ ID NO: 1464988 - DNA, 25 bp, Homo sapien
tgatggtgagtggtactttcatact

SEQ ID NO: 1464989 - DNA, 25 bp, Homo sapien
ccctgttaaagctgccatggtaact

SEQ ID NO: 1464990 - DNA, 25 bp, Homo sapien
tgccactgacccctgaagaagtgtg

SEQ ID NO: 1464991 - DNA, 25 bp, Homo sapien
cagaactgtcaggattagaatgggt

SEQ ID NO: 1464992 - DNA, 25 bp, Homo sapien
tttctgtaagaagacccgtaagatc

SEQ ID NO: 1464993 - DNA, 25 bp, Homo sapien
aatgtgtgtcactcttcttagcaga

SEQ ID NO: 1464994 - DNA, 25 bp, Homo sapien
gagccttccagtatagattataatg

SEQ ID NO: 1464995 - DNA, 25 bp, Homo sapien
cacccagctctcaaatataggatgt

SEQ ID NO: 1464996 - DNA, 25 bp, Homo sapien
ataggatgtcttaaattattcaccc

SEQ ID NO: 1464997 - DNA, 25 bp, Homo sapien
tataggatgtcttaaattattcacc

SEQ ID NO: 1464998 - DNA, 25 bp, Homo sapien
gctctcaaatataggatgtcttaaa

SEQ ID NO: 1464999 - DNA, 25 bp, Homo sapien
ctcccatgtggaataatgccgatgc

SEQ ID NO: 1465000 - DNA, 25 bp, Homo sapien
cgatgcccaaatctttagctctcac

SEQ ID NO: 1465001 - DNA, 25 bp, Homo sapien
catgtggaataatgccgatgcccaa

SEQ ID NO: 1465002 - DNA, 25 bp, Homo sapien
tgtggaataatgccgatgcccaaat

SEQ ID NO: 1465003 - DNA, 25 bp, Homo sapien
gaccagccaaatgctgattaatgat

SEQ ID NO: 1465004 - DNA, 25 bp, Homo sapien
cagccaaatgctgattaatgatttc

SEQ ID NO: 1465005 - DNA, 25 bp, Homo sapien
cctcagtactcgctggggtgccaga

SEQ ID NO: 1465006 - DNA, 25 bp, Homo sapien
gtactcgctggggtgccagacctgt

SEQ ID NO: 1465007 - DNA, 25 bp, Homo sapien
attgtgtccagaaataaattaatca

SEQ ID NO: 1465008 - DNA, 25 bp, Homo sapien
tattgtgtccagaaataaattaatc

SEQ ID NO: 1465009 - DNA, 25 bp, Homo sapien
ctattgtgtccagaaataaattaat

SEQ ID NO: 1465010 - DNA, 25 bp, Homo sapien
ttgtgtccagaaataaattaatcat

SEQ ID NO: 1465011 - DNA, 25 bp, Homo sapien
catgtctaatgatcagggttgcttc

SEQ ID NO: 1465012 - DNA, 25 bp, Homo sapien
ctaatgatcagggttgcttctggtt

SEQ ID NO: 1465013 - DNA, 25 bp, Homo sapien
tgaatatcatgtctaatgatcaggg

SEQ ID NO: 1465014 - DNA, 25 bp, Homo sapien
aagcatctgaatatcatgtctaatg

SEQ ID NO: 1465015 - DNA, 25 bp, Homo sapien
cagactccaggtacccattcattat

SEQ ID NO: 1465016 - DNA, 25 bp, Homo sapien
cttgagcctgaaaagtggagcttac

SEQ ID NO: 1465017 - DNA, 25 bp, Homo sapien
aagctccaaatgaagctcagccata

SEQ ID NO: 1465018 - DNA, 25 bp, Homo sapien
tatttgcatcaacaattgaacttgt

SEQ ID NO: 1465019 - DNA, 25 bp, Homo sapien
ggtatctggcacaaggtctcctggc

SEQ ID NO: 1465020 - DNA, 25 bp, Homo sapien
tctcctggcttgatgcaatgtgaag

SEQ ID NO: 1465021 - DNA, 25 bp, Homo sapien
catctgagtcctcgtagtgaaggct

SEQ ID NO: 1465022 - DNA, 25 bp, Homo sapien
gaaggcttgaagtgactcttccagg

SEQ ID NO: 1465023 - DNA, 25 bp, Homo sapien
tggtttctgcccacactggataagg

SEQ ID NO: 1465024 - DNA, 25 bp, Homo sapien
tattggtgcttgatagtgctgcagc

SEQ ID NO: 1465025 - DNA, 25 bp, Homo sapien
tatttcagatagctgcaccataggc

SEQ ID NO: 1465026 - DNA, 25 bp, Homo sapien
tgatgaagtgtacctagtgacccag

SEQ ID NO: 1465027 - DNA, 25 bp, Homo sapien
gaaggaaggttgtgatataagctat

SEQ ID NO: 1465028 - DNA, 25 bp, Homo sapien
gtcactggtgaattcgtatgtgtag

SEQ ID NO: 1465029 - DNA, 25 bp, Homo sapien
gaaggttgtgatataagctatagac

SEQ ID NO: 1465030 - DNA, 25 bp, Homo sapien
ttcgtatgtgtaggcagatgcagaa

SEQ ID NO: 1465031 - DNA, 25 bp, Homo sapien
tattatggtcatatatacagggtct

SEQ ID NO: 1465032 - DNA, 25 bp, Homo sapien
gtcatatatacagggtctgacttac

SEQ ID NO: 1465033 - DNA, 25 bp, Homo sapien
gtttattatggtcatatatacaggg

SEQ ID NO: 1465034 - DNA, 25 bp, Homo sapien
tatggtcatatatacagggtctgac

SEQ ID NO: 1465035 - DNA, 25 bp, Homo sapien
cacaatcacgtctgtcagggtagca

SEQ ID NO: 1465036 - DNA, 25 bp, Homo sapien
gctgcagcattagcgcttacttggg

SEQ ID NO: 1465037 - DNA, 25 bp, Homo sapien
tgattacataagcatcctgccagcc

SEQ ID NO: 1465038 - DNA, 25 bp, Homo sapien
gacaagtgtgtatatcagtggctcc

SEQ ID NO: 1465039 - DNA, 25 bp, Homo sapien
tgggtgtccaggaatgaaaggtcac

SEQ ID NO: 1465040 - DNA, 25 bp, Homo sapien
aacacatccactcaggcggagaaag

SEQ ID NO: 1465041 - DNA, 25 bp, Homo sapien
ttctcagtggagcaagaacagactg

SEQ ID NO: 1465042 - DNA, 25 bp, Homo sapien
aaagcccagacagcctgtgacctga

SEQ ID NO: 1465043 - DNA, 25 bp, Homo sapien
ccatctagcaaggattggacgtgga

SEQ ID NO: 1465044 - DNA, 25 bp, Homo sapien
gattggacgtggacgagggtcttca

SEQ ID NO: 1465045 - DNA, 25 bp, Homo sapien
cactgataagaccatctagcaagga

SEQ ID NO: 1465046 - DNA, 25 bp, Homo sapien
taagaccatctagcaaggattggac

SEQ ID NO: 1465047 - DNA, 25 bp, Homo sapien
tttcaatagctccacaaactcttgg

SEQ ID NO: 1465048 - DNA, 25 bp, Homo sapien
gctcctcccttactcccatttcaat

SEQ ID NO: 1465049 - DNA, 25 bp, Homo sapien
ggccagtttgcgtactcttcctcct

SEQ ID NO: 1465050 - DNA, 25 bp, Homo sapien
catttcaatagctccacaaactctt

SEQ ID NO: 1465051 - DNA, 25 bp, Homo sapien
aatgcgtgcgcgtgctcagacatcg

SEQ ID NO: 1465052 - DNA, 25 bp, Homo sapien
tctcagcaattgcttgccaagccca

SEQ ID NO: 1465053 - DNA, 25 bp, Homo sapien
cacgcatggccgattactgtctttc

SEQ ID NO: 1465054 - DNA, 25 bp, Homo sapien
ctagcgtcacggtgtcacagtgagg

SEQ ID NO: 1465055 - DNA, 25 bp, Homo sapien
gagatggagttattgtactgtaccc

SEQ ID NO: 1465056 - DNA, 25 bp, Homo sapien
tacccataatttctgtggtcatcca

SEQ ID NO: 1465057 - DNA, 25 bp, Homo sapien
tgtactgtacccataatttctgtgg

SEQ ID NO: 1465058 - DNA, 25 bp, Homo sapien
tctgcaatacaaggagatggagtta

SEQ ID NO: 1465059 - DNA, 25 bp, Homo sapien
gaatccacaaggctgctccggcttg

SEQ ID NO: 1465060 - DNA, 25 bp, Homo sapien
gacagtgggctctaattgctccagg

SEQ ID NO: 1465061 - DNA, 25 bp, Homo sapien
tgaaatccatgttgacagaagtcct

SEQ ID NO: 1465062 - DNA, 25 bp, Homo sapien
gaaacatggctgaggctctttactc

SEQ ID NO: 1465063 - DNA, 25 bp, Homo sapien
tggtccttggattggcagctttggt

SEQ ID NO: 1465064 - DNA, 25 bp, Homo sapien
gtggtccttggattggcagctttgg

SEQ ID NO: 1465065 - DNA, 25 bp, Homo sapien
tccttggattggcagctttggtctc

SEQ ID NO: 1465066 - DNA, 25 bp, Homo sapien
ggtccttggattggcagctttggtc

SEQ ID NO: 1465067 - DNA, 25 bp, Homo sapien
agaggtccatgtggagaggatccaa

SEQ ID NO: 1465068 - DNA, 25 bp, Homo sapien
tgttcttggaaactagctgccatgt

SEQ ID NO: 1465069 - DNA, 25 bp, Homo sapien
ggaagcccaagcatccctatgaaga

SEQ ID NO: 1465070 - DNA, 25 bp, Homo sapien
ccttgttcttggaaactagctgcca

SEQ ID NO: 1465071 - DNA, 25 bp, Homo sapien
ggaacccagctatgcattaacccag

SEQ ID NO: 1465072 - DNA, 25 bp, Homo sapien
catcaacagtgaattgggaacccag

SEQ ID NO: 1465073 - DNA, 25 bp, Homo sapien
caatttgctgcaacgcattacatgg

SEQ ID NO: 1465074 - DNA, 25 bp, Homo sapien
gtacacatgtatggagctgagtttc

SEQ ID NO: 1465075 - DNA, 25 bp, Homo sapien
tcatattattgcacaagaagccagt

SEQ ID NO: 1465076 - DNA, 25 bp, Homo sapien
ttagaccacttaagctgccctgatc

SEQ ID NO: 1465077 - DNA, 25 bp, Homo sapien
tatttgtctatcattcagctgccag

SEQ ID NO: 1465078 - DNA, 25 bp, Homo sapien
tttgcaccagtgagcacaacagggc

SEQ ID NO: 1465079 - DNA, 25 bp, Homo sapien
cctcattgtctcctaatggagagca

SEQ ID NO: 1465080 - DNA, 25 bp, Homo sapien
tcacaaacttactcccaactacaaa

SEQ ID NO: 1465081 - DNA, 25 bp, Homo sapien
tctcctaatggagagcagcaatcct

SEQ ID NO: 1465082 - DNA, 25 bp, Homo sapien
tcagtttgtgggaggtgaatctcaa

SEQ ID NO: 1465083 - DNA, 25 bp, Homo sapien
tgtaaggattctcggtgtcacaccg

SEQ ID NO: 1465084 - DNA, 25 bp, Homo sapien
taggtcttcctcgaactctagcaac

SEQ ID NO: 1465085 - DNA, 25 bp, Homo sapien
tcagtcatggtcatccgagtgtgct

SEQ ID NO: 1465086 - DNA, 25 bp, Homo sapien
tgtcacaccgttgtttaggtcttcc

SEQ ID NO: 1465087 - DNA, 25 bp, Homo sapien
tcatctcaactttgcaatgccttat

SEQ ID NO: 1465088 - DNA, 25 bp, Homo sapien
tccactagttcattacgtatactta

SEQ ID NO: 1465089 - DNA, 25 bp, Homo sapien
gagaggcacggagagagaaactttc

SEQ ID NO: 1465090 - DNA, 25 bp, Homo sapien
tttaaagccaagtataatccactag

SEQ ID NO: 1465091 - DNA, 25 bp, Homo sapien
gcgcccggcgatattttgagtctta

SEQ ID NO: 1465092 - DNA, 25 bp, Homo sapien
tgaataaggcttagtagggtgaccg

SEQ ID NO: 1465093 - DNA, 25 bp, Homo sapien
gaactactccgtctacacaacctga

SEQ ID NO: 1465094 - DNA, 25 bp, Homo sapien
gggcagactgtcaaaggaaacctag

SEQ ID NO: 1465095 - DNA, 25 bp, Homo sapien
tggtgacgttgatgacgtagccgat

SEQ ID NO: 1465096 - DNA, 25 bp, Homo sapien
caggcctttctcatagtggtagagg

SEQ ID NO: 1465097 - DNA, 25 bp, Homo sapien
gcagccgcttgtagttgaacaggcc

SEQ ID NO: 1465098 - DNA, 25 bp, Homo sapien
acgtagccgatgttcagccgctgca

SEQ ID NO: 1465099 - DNA, 25 bp, Homo sapien
gagcatcctgctcattgccaaggaa

SEQ ID NO: 1465100 - DNA, 25 bp, Homo sapien
gagttgtcacagaggttttcatggt

SEQ ID NO: 1465101 - DNA, 25 bp, Homo sapien
gagctcagcgttctcgatgtcaggg

SEQ ID NO: 1465102 - DNA, 25 bp, Homo sapien
acctcccggcactcttggagctgga

SEQ ID NO: 1465103 - DNA, 25 bp, Homo sapien
agaatgccacctccccattagaatg

SEQ ID NO: 1465104 - DNA, 25 bp, Homo sapien
ttgacaaaccacagcgggaaactcc

SEQ ID NO: 1465105 - DNA, 25 bp, Homo sapien
ttttcacaaccaatggacccggagc

SEQ ID NO: 1465106 - DNA, 25 bp, Homo sapien
tatctgtccactagcctctgagcct

SEQ ID NO: 1465107 - DNA, 25 bp, Homo sapien
gtcctattagctgaaagccaccaga

SEQ ID NO: 1465108 - DNA, 25 bp, Homo sapien
agaagtctgcaggaaggattgtttt

SEQ ID NO: 1465109 - DNA, 25 bp, Homo sapien
cagagaagtctgcaggaaggattgt

SEQ ID NO: 1465110 - DNA, 25 bp, Homo sapien
tccagagaagtctgcaggaaggatt

SEQ ID NO: 1465111 - DNA, 25 bp, Homo sapien
tctcttggggaagggttgaaattga

SEQ ID NO: 1465112 - DNA, 25 bp, Homo sapien
tcctgttgctgttttggcgactgca

SEQ ID NO: 1465113 - DNA, 25 bp, Homo sapien
ggtcagttcagtgacagtcctactg

SEQ ID NO: 1465114 - DNA, 25 bp, Homo sapien
tagatgcatttcagctcctgttgct

SEQ ID NO: 1465115 - DNA, 25 bp, Homo sapien
caatggattctagttttagtgggaa

SEQ ID NO: 1465116 - DNA, 25 bp, Homo sapien
caatatggataaaatgctacatgag

SEQ ID NO: 1465117 - DNA, 25 bp, Homo sapien
tcagtttacatatctgtgacttgta

SEQ ID NO: 1465118 - DNA, 25 bp, Homo sapien
agagctctcaatatggataaaatgc

SEQ ID NO: 1465119 - DNA, 25 bp, Homo sapien
agcaagttattgatgtctctgcatc

SEQ ID NO: 1465120 - DNA, 25 bp, Homo sapien
caaaggtttcagtaagaaccacctg

SEQ ID NO: 1465121 - DNA, 25 bp, Homo sapien
ggtgcctaccaagatccagtctggg

SEQ ID NO: 1465122 - DNA, 25 bp, Homo sapien
tttgggcttcaatcaagtgaatggc

SEQ ID NO: 1465123 - DNA, 25 bp, Homo sapien
tgaatggctaagaagggtgcctacc

SEQ ID NO: 1465124 - DNA, 25 bp, Homo sapien
tggtggttccagttgtcccctccat

SEQ ID NO: 1465125 - DNA, 25 bp, Homo sapien
tgagctttgacaggtccacctgaag

SEQ ID NO: 1465126 - DNA, 25 bp, Homo sapien
tttgacaggtccacctgaagcaagg

SEQ ID NO: 1465127 - DNA, 25 bp, Homo sapien
gacaggtccacctgaagcaaggtga

SEQ ID NO: 1465128 - DNA, 25 bp, Homo sapien
ggctgagctttgacaggtccacctg

SEQ ID NO: 1465129 - DNA, 25 bp, Homo sapien
gatgcatcccgtatctggcaccatc

SEQ ID NO: 1465130 - DNA, 25 bp, Homo sapien
cagactttcgaccatttcccctgaa

SEQ ID NO: 1465131 - DNA, 25 bp, Homo sapien
ctgggatgcatcccgtatctggcac

SEQ ID NO: 1465132 - DNA, 25 bp, Homo sapien
gggatgcatcccgtatctggcacca

SEQ ID NO: 1465133 - DNA, 25 bp, Homo sapien
aaaactgatgccaagatcttgctct

SEQ ID NO: 1465134 - DNA, 25 bp, Homo sapien
tgctcttgggttatggatgaaaaca

SEQ ID NO: 1465135 - DNA, 25 bp, Homo sapien
tgaaattcaggctacaggtcatact

SEQ ID NO: 1465136 - DNA, 25 bp, Homo sapien
tacattcgtgaatatagagtctaca

SEQ ID NO: 1465137 - DNA, 25 bp, Homo sapien
caatgtatggtgctcaattctaagg

SEQ ID NO: 1465138 - DNA, 25 bp, Homo sapien
tttatagtataaaggcctaactgcc

SEQ ID NO: 1465139 - DNA, 25 bp, Homo sapien
gatttctgagcctagccatccactt

SEQ ID NO: 1465140 - DNA, 25 bp, Homo sapien
ccagtaaaggcctttggtacagagc

SEQ ID NO: 1465141 - DNA, 25 bp, Homo sapien
acacaatcttatcaccaagggaggg

SEQ ID NO: 1465142 - DNA, 25 bp, Homo sapien
caagttgaaaggataacgaagggca

SEQ ID NO: 1465143 - DNA, 25 bp, Homo sapien
tcaagaatctgagagaagtctgctg

SEQ ID NO: 1465144 - DNA, 25 bp, Homo sapien
gaccagaatggtctgcttgacccac

SEQ ID NO: 1465145 - DNA, 25 bp, Homo sapien
caaaatagagagtagggtctgcaac

SEQ ID NO: 1465146 - DNA, 25 bp, Homo sapien
gaggcaatcttactctgacactgag

SEQ ID NO: 1465147 - DNA, 25 bp, Homo sapien
tctcaatgactgatgggtcacccct

SEQ ID NO: 1465148 - DNA, 25 bp, Homo sapien
atcttccaagtcgactgccgcggtg

SEQ ID NO: 1465149 - DNA, 25 bp, Homo sapien
cttgtagttcaccatagttgctcct

SEQ ID NO: 1465150 - DNA, 25 bp, Homo sapien
tgtagttcaccatagttgctccttc

SEQ ID NO: 1465151 - DNA, 25 bp, Homo sapien
ttacttgtagttcaccatagttgct

SEQ ID NO: 1465152 - DNA, 25 bp, Homo sapien
tctgttccatcaacattggttaagt

SEQ ID NO: 1465153 - DNA, 25 bp, Homo sapien
tgcatccacaattcagcgagcgggc

SEQ ID NO: 1465154 - DNA, 25 bp, Homo sapien
gagggcatatacgtcagattcgcag

SEQ ID NO: 1465155 - DNA, 25 bp, Homo sapien
ccacttgatggacttagagagcctg

SEQ ID NO: 1465156 - DNA, 25 bp, Homo sapien
tcttcagggactcgaggactatgtg

SEQ ID NO: 1465157 - DNA, 25 bp, Homo sapien
gatagtgccactactaccctgtcgt

SEQ ID NO: 1465158 - DNA, 25 bp, Homo sapien
tggcagagccaaggtaactagagtc

SEQ ID NO: 1465159 - DNA, 25 bp, Homo sapien
aactagagtctaaacaaaggttgag

SEQ ID NO: 1465160 - DNA, 25 bp, Homo sapien
tgagatcctgaggtcggacgggcct

SEQ ID NO: 1465161 - DNA, 25 bp, Homo sapien
caattcaagaagaactcaagacagt

SEQ ID NO: 1465162 - DNA, 25 bp, Homo sapien
tggcaattcaagaagaactcaagac

SEQ ID NO: 1465163 - DNA, 25 bp, Homo sapien
actggcaattcaagaagaactcaag

SEQ ID NO: 1465164 - DNA, 25 bp, Homo sapien
gaaaactggcaattcaagaagaact

SEQ ID NO: 1465165 - DNA, 25 bp, Homo sapien
gacacgtccaggatcaacataccat

SEQ ID NO: 1465166 - DNA, 25 bp, Homo sapien
gaagagcgagttctattccagaagc

SEQ ID NO: 1465167 - DNA, 25 bp, Homo sapien
cggttggaccaagcggtgaaagtct

SEQ ID NO: 1465168 - DNA, 25 bp, Homo sapien
tgtgttacctggtaggacacgtcca

SEQ ID NO: 1465169 - DNA, 25 bp, Homo sapien
gagaaatactgagctatcccctctc

SEQ ID NO: 1465170 - DNA, 25 bp, Homo sapien
agagggtcgggcgtacatactgccc

SEQ ID NO: 1465171 - DNA, 25 bp, Homo sapien
ggcgtacatactgcccgtgaaacca

SEQ ID NO: 1465172 - DNA, 25 bp, Homo sapien
actgcccgtgaaaccatccagtctg

SEQ ID NO: 1465173 - DNA, 25 bp, Homo sapien
cagcagcaacatagttactttctct

SEQ ID NO: 1465174 - DNA, 25 bp, Homo sapien
cagctatggactcgcacattcagcc

SEQ ID NO: 1465175 - DNA, 25 bp, Homo sapien
actcggcttcattgatctccagcag

SEQ ID NO: 1465176 - DNA, 25 bp, Homo sapien
taaataagtgtattcctccaccatc

SEQ ID NO: 1465177 - DNA, 25 bp, Homo sapien
ggagaaagccgaccgctacctcaca

SEQ ID NO: 1465178 - DNA, 25 bp, Homo sapien
ggttgggccaataagaatccggaga

SEQ ID NO: 1465179 - DNA, 25 bp, Homo sapien
agaatccggagaaagccgaccgcta

SEQ ID NO: 1465180 - DNA, 25 bp, Homo sapien
acagagccccgcgaccaatgggcag

SEQ ID NO: 1465181 - DNA, 25 bp, Homo sapien
gaggaggaggcttgagtcgacgcca

SEQ ID NO: 1465182 - DNA, 25 bp, Homo sapien
gggctcgacccagagcactaaggcg

SEQ ID NO: 1465183 - DNA, 25 bp, Homo sapien
cttgagtcgacgccagaggcggcaa

SEQ ID NO: 1465184 - DNA, 25 bp, Homo sapien
taaggcggcgccactgagggctgct

SEQ ID NO: 1465185 - DNA, 25 bp, Homo sapien
ccgccccacatgcctcggccgccac

SEQ ID NO: 1465186 - DNA, 25 bp, Homo sapien
tcccctgactttggccggcgccagg

SEQ ID NO: 1465187 - DNA, 25 bp, Homo sapien
gccgagtgcaaatagctagattgaa

SEQ ID NO: 1465188 - DNA, 25 bp, Homo sapien
agccagagccgagtgcaaatagcta

SEQ ID NO: 1465189 - DNA, 25 bp, Homo sapien
gccggcgccaggtagctggccgcag

SEQ ID NO: 1465190 - DNA, 25 bp, Homo sapien
aaatattctcattagggaaactgca

SEQ ID NO: 1465191 - DNA, 25 bp, Homo sapien
tgcctagtccggaaaatattctcat

SEQ ID NO: 1465192 - DNA, 25 bp, Homo sapien
aatattctcattagggaaactgcag

SEQ ID NO: 1465193 - DNA, 25 bp, Homo sapien
ggcaagccgccccttgcctagtccg

SEQ ID NO: 1465194 - DNA, 25 bp, Homo sapien
ttcagactccaagcctagtagtata

SEQ ID NO: 1465195 - DNA, 25 bp, Homo sapien
tacttcagactccaagcctagtagt

SEQ ID NO: 1465196 - DNA, 25 bp, Homo sapien
cctagtagtatactgagtagcaggg

SEQ ID NO: 1465197 - DNA, 25 bp, Homo sapien
ggtctacttcagactccaagcctag

SEQ ID NO: 1465198 - DNA, 25 bp, Homo sapien
attcatgtaattgttttcagggcag

SEQ ID NO: 1465199 - DNA, 25 bp, Homo sapien
tcatgtaattgttttcagggcagat

SEQ ID NO: 1465200 - DNA, 25 bp, Homo sapien
ttcatgtaattgttttcagggcaga

SEQ ID NO: 1465201 - DNA, 25 bp, Homo sapien
caggaggatgaaggtatcttccttt

SEQ ID NO: 1465202 - DNA, 25 bp, Homo sapien
catgcatttcctggtgtttatctcc

SEQ ID NO: 1465203 - DNA, 25 bp, Homo sapien
gctctttgcaattatgattgtcttc

SEQ ID NO: 1465204 - DNA, 25 bp, Homo sapien
cttcttgtaattctcaaaggcatgc

SEQ ID NO: 1465205 - DNA, 25 bp, Homo sapien
gacagacggattgtccagtgtttat

SEQ ID NO: 1465206 - DNA, 25 bp, Homo sapien
ctgacagacggattgtccagtgttt

SEQ ID NO: 1465207 - DNA, 25 bp, Homo sapien
tgacagacggattgtccagtgttta

SEQ ID NO: 1465208 - DNA, 25 bp, Homo sapien
acagacggattgtccagtgtttatt

SEQ ID NO: 1465209 - DNA, 25 bp, Homo sapien
gtgactgatgccaataaatagcttt

SEQ ID NO: 1465210 - DNA, 25 bp, Homo sapien
ttgtgtccatcttcacagatgctcc

SEQ ID NO: 1465211 - DNA, 25 bp, Homo sapien
tcttcacagatgctcctcctgcttg

SEQ ID NO: 1465212 - DNA, 25 bp, Homo sapien
gtgtccatcttcacagatgctcctc

SEQ ID NO: 1465213 - DNA, 25 bp, Homo sapien
catcttcacagatgctcctcctgct

SEQ ID NO: 1465214 - DNA, 25 bp, Homo sapien
gccatctccttcttgcggagtatga

SEQ ID NO: 1465215 - DNA, 25 bp, Homo sapien
gagtatgaacaagcaggcctccagc

SEQ ID NO: 1465216 - DNA, 25 bp, Homo sapien
gatgcatcagatccttcctaccatg

SEQ ID NO: 1465217 - DNA, 25 bp, Homo sapien
tggtcgctgccacctaggacagcct

SEQ ID NO: 1465218 - DNA, 25 bp, Homo sapien
tgctcgacctcaagtatctctgttc

SEQ ID NO: 1465219 - DNA, 25 bp, Homo sapien
ctccgacatctccagcactgctcga

SEQ ID NO: 1465220 - DNA, 25 bp, Homo sapien
gctgctacttgataagactcctttt

SEQ ID NO: 1465221 - DNA, 25 bp, Homo sapien
gcagctgctacttgataagactcct

SEQ ID NO: 1465222 - DNA, 25 bp, Homo sapien
agcagggccctgaaacagcacagca

SEQ ID NO: 1465223 - DNA, 25 bp, Homo sapien
cttggatcatcaagcagggccctga

SEQ ID NO: 1465224 - DNA, 25 bp, Homo sapien
gaagaccccacatccgcttggatca

SEQ ID NO: 1465225 - DNA, 25 bp, Homo sapien
agcagccatggctagttgataggtg

SEQ ID NO: 1465226 - DNA, 25 bp, Homo sapien
tgttactgcaggtacgagcctgaga

SEQ ID NO: 1465227 - DNA, 25 bp, Homo sapien
gaattcttctgaggttccgaactca

SEQ ID NO: 1465228 - DNA, 25 bp, Homo sapien
ggcgctttccggaactgctgtgtga

SEQ ID NO: 1465229 - DNA, 25 bp, Homo sapien
tcaaagcctataggccctgttactg

SEQ ID NO: 1465230 - DNA, 25 bp, Homo sapien
agacttcagacctccttcacaaagt

SEQ ID NO: 1465231 - DNA, 25 bp, Homo sapien
gacttcagacctccttcacaaagtg

SEQ ID NO: 1465232 - DNA, 25 bp, Homo sapien
cttcagacctccttcacaaagtgat

SEQ ID NO: 1465233 - DNA, 25 bp, Homo sapien
ttcagacctccttcacaaagtgata

SEQ ID NO: 1465234 - DNA, 25 bp, Homo sapien
tacactgagctctaaccagagtgcc

SEQ ID NO: 1465235 - DNA, 25 bp, Homo sapien
gtgtgcacatctgtctacactgagc

SEQ ID NO: 1465236 - DNA, 25 bp, Homo sapien
gggtcatgacctggctcattcagca

SEQ ID NO: 1465237 - DNA, 25 bp, Homo sapien
acactcccaaaccttctgtgcccag

SEQ ID NO: 1465238 - DNA, 25 bp, Homo sapien
ttatggcctttttccctcaatacac

SEQ ID NO: 1465239 - DNA, 25 bp, Homo sapien
gtccctccaggttgcacagttgcag

SEQ ID NO: 1465240 - DNA, 25 bp, Homo sapien
gaagtgaaactgcatgatatcatct

SEQ ID NO: 1465241 - DNA, 25 bp, Homo sapien
tcatctggccgttgcccaactgcaa

SEQ ID NO: 1465242 - DNA, 25 bp, Homo sapien
gattgtcacctgatgcagctggacc

SEQ ID NO: 1465243 - DNA, 25 bp, Homo sapien
ccacctctagcctcttctccagaac

SEQ ID NO: 1465244 - DNA, 25 bp, Homo sapien
ctagcctcttctccagaaccggttt

SEQ ID NO: 1465245 - DNA, 25 bp, Homo sapien
caacctgccccacctctagcctctt

SEQ ID NO: 1465246 - DNA, 25 bp, Homo sapien
tgccccacctctagcctcttctcca

SEQ ID NO: 1465247 - DNA, 25 bp, Homo sapien
cctgaggacaacgtggtcctcaata

SEQ ID NO: 1465248 - DNA, 25 bp, Homo sapien
cactcctctttgaaaaacagtgtca

SEQ ID NO: 1465249 - DNA, 25 bp, Homo sapien
cagaaatgtggagctacattccagg

SEQ ID NO: 1465250 - DNA, 25 bp, Homo sapien
ctacattccaggaaacctctgagag

SEQ ID NO: 1465251 - DNA, 25 bp, Homo sapien
cattccaggaaacctctgagaggcc

SEQ ID NO: 1465252 - DNA, 25 bp, Homo sapien
ccttttcaataactgggatagattt

SEQ ID NO: 1465253 - DNA, 25 bp, Homo sapien
cagcatagtgatagtggatcatggc

SEQ ID NO: 1465254 - DNA, 25 bp, Homo sapien
tctccttttcaataactgggataga

SEQ ID NO: 1465255 - DNA, 25 bp, Homo sapien
tcttgctgtatttacggtgcatgtg

SEQ ID NO: 1465256 - DNA, 25 bp, Homo sapien
gttacatcatttctccacatgtctg

SEQ ID NO: 1465257 - DNA, 25 bp, Homo sapien
tggtccatgtttacatatctaaaag

SEQ ID NO: 1465258 - DNA, 25 bp, Homo sapien
tctttatattcaagagtgagtcact

SEQ ID NO: 1465259 - DNA, 25 bp, Homo sapien
tatatgatacaataatggtccatgt

SEQ ID NO: 1465260 - DNA, 25 bp, Homo sapien
tgtattcacctgacctagctaggag

SEQ ID NO: 1465261 - DNA, 25 bp, Homo sapien
gcttcaagggtttggcaaggcaact

SEQ ID NO: 1465262 - DNA, 25 bp, Homo sapien
tgtctcacataagaagcttcaaggg

SEQ ID NO: 1465263 - DNA, 25 bp, Homo sapien
gcaacttaatgctaacttggtgaag

SEQ ID NO: 1465264 - DNA, 25 bp, Homo sapien
tgaaggtaatgacctccctaaagga

SEQ ID NO: 1465265 - DNA, 25 bp, Homo sapien
aacacccattctcagaagtccagga

SEQ ID NO: 1465266 - DNA, 25 bp, Homo sapien
tcatttgaaggtaatgacctcccta

SEQ ID NO: 1465267 - DNA, 25 bp, Homo sapien
ggatcagcaggtattacttctccaa

SEQ ID NO: 1465268 - DNA, 25 bp, Homo sapien
tctttttgaccccaggcatagcctc

SEQ ID NO: 1465269 - DNA, 25 bp, Homo sapien
taaagctcacaagattactctaagc

SEQ ID NO: 1465270 - DNA, 25 bp, Homo sapien
cagtcagctgatttaagcctaaagc

SEQ ID NO: 1465271 - DNA, 25 bp, Homo sapien
gcctcatcctgaacagtggaagaga

SEQ ID NO: 1465272 - DNA, 25 bp, Homo sapien
gatgaatgtgggtccacatgattct

SEQ ID NO: 1465273 - DNA, 25 bp, Homo sapien
caggaaaaacatccaaagttaatga

SEQ ID NO: 1465274 - DNA, 25 bp, Homo sapien
tccaaagttaatgacagttggtcac

SEQ ID NO: 1465275 - DNA, 25 bp, Homo sapien
tgtcccaggtactgtttttctggtg

SEQ ID NO: 1465276 - DNA, 25 bp, Homo sapien
tacagtaagtagtggtgtctgcttc

SEQ ID NO: 1465277 - DNA, 25 bp, Homo sapien
tgcaacttgagttctactatcccct

SEQ ID NO: 1465278 - DNA, 25 bp, Homo sapien
tctaggtcccagataagagaggctt

SEQ ID NO: 1465279 - DNA, 25 bp, Homo sapien
ctgcttcttcagtttgtgatttgca

SEQ ID NO: 1465280 - DNA, 25 bp, Homo sapien
acacaggtagcacagtgcatctgtt

SEQ ID NO: 1465281 - DNA, 25 bp, Homo sapien
tagagcctctcttatctgtttgaag

SEQ ID NO: 1465282 - DNA, 25 bp, Homo sapien
gcatctgttggtagagcctctctta

SEQ ID NO: 1465283 - DNA, 25 bp, Homo sapien
ggtagcacagtgcatctgttggtag

SEQ ID NO: 1465284 - DNA, 25 bp, Homo sapien
atatcagtacatcttgagttctttg

SEQ ID NO: 1465285 - DNA, 25 bp, Homo sapien
tatcagtacatcttgagttctttgg

SEQ ID NO: 1465286 - DNA, 25 bp, Homo sapien
aaatatcagtacatcttgagttctt

SEQ ID NO: 1465287 - DNA, 25 bp, Homo sapien
aatatcagtacatcttgagttcttt

SEQ ID NO: 1465288 - DNA, 25 bp, Homo sapien
gagctatggcaaacaggaaggaaaa

SEQ ID NO: 1465289 - DNA, 25 bp, Homo sapien
tggagctatggcaaacaggaaggaa

SEQ ID NO: 1465290 - DNA, 25 bp, Homo sapien
ctggagctatggcaaacaggaagga

SEQ ID NO: 1465291 - DNA, 25 bp, Homo sapien
ggagctatggcaaacaggaaggaaa

SEQ ID NO: 1465292 - DNA, 25 bp, Homo sapien
atcattcccattttagcatatgtac

SEQ ID NO: 1465293 - DNA, 25 bp, Homo sapien
cattcccattttagcatatgtactg

SEQ ID NO: 1465294 - DNA, 25 bp, Homo sapien
attcccattttagcatatgtactgc

SEQ ID NO: 1465295 - DNA, 25 bp, Homo sapien
tcccattttagcatatgtactgctg

SEQ ID NO: 1465296 - DNA, 25 bp, Homo sapien
ccatcagttgggtgattcccaaagt

SEQ ID NO: 1465297 - DNA, 25 bp, Homo sapien
gcacaagtgaggagttttcattcat

SEQ ID NO: 1465298 - DNA, 25 bp, Homo sapien
aacaccaccagagcacaagtgagga

SEQ ID NO: 1465299 - DNA, 25 bp, Homo sapien
tttcattcatcaaattgggtgttct

SEQ ID NO: 1465300 - DNA, 25 bp, Homo sapien
ttaagtatttgtgggcagggtccca

SEQ ID NO: 1465301 - DNA, 25 bp, Homo sapien
cgtgtatcttaagtatttgtgggca

SEQ ID NO: 1465302 - DNA, 25 bp, Homo sapien
acagaacaaggatccacccagctca

SEQ ID NO: 1465303 - DNA, 25 bp, Homo sapien
ggcaggactgtaacatgtcagcata

SEQ ID NO: 1465304 - DNA, 25 bp, Homo sapien
aatccaacacccagtttctctactg

SEQ ID NO: 1465305 - DNA, 25 bp, Homo sapien
gagagctctgaggactgtgcgacac

SEQ ID NO: 1465306 - DNA, 25 bp, Homo sapien
gtgataaccaaagtcagggctgcac

SEQ ID NO: 1465307 - DNA, 25 bp, Homo sapien
tgtgcgacactcacagctaatccaa

SEQ ID NO: 1465308 - DNA, 25 bp, Homo sapien
acaccgaagactgcacaagcccagg

SEQ ID NO: 1465309 - DNA, 25 bp, Homo sapien
tctgccacaaagatggtgaactcca

SEQ ID NO: 1465310 - DNA, 25 bp, Homo sapien
gccatgtgctcctctgccacaaaga

SEQ ID NO: 1465311 - DNA, 25 bp, Homo sapien
aagactgcacaagcccaggccaggc

SEQ ID NO: 1465312 - DNA, 25 bp, Homo sapien
tttcaaatcttgcaagcaatacttt

SEQ ID NO: 1465313 - DNA, 25 bp, Homo sapien
aaatgcaaaagcattgttcttgact

SEQ ID NO: 1465314 - DNA, 25 bp, Homo sapien
tcctccggattatagtcactttggg

SEQ ID NO: 1465315 - DNA, 25 bp, Homo sapien
cagtggccacgacaagcacaaagct

SEQ ID NO: 1465316 - DNA, 25 bp, Homo sapien
ctggtgtcttgcctgctctgaaggg

SEQ ID NO: 1465317 - DNA, 25 bp, Homo sapien
ctagagtaaggggcaatcaatgggt

SEQ ID NO: 1465318 - DNA, 25 bp, Homo sapien
gtaaggggcaatcaatgggtgcttc

SEQ ID NO: 1465319 - DNA, 25 bp, Homo sapien
gagtaaggggcaatcaatgggtgct

SEQ ID NO: 1465320 - DNA, 25 bp, Homo sapien
taaggggcaatcaatgggtgcttca

SEQ ID NO: 1465321 - DNA, 25 bp, Homo sapien
gctaagaagtcccacagtgtgccat

SEQ ID NO: 1465322 - DNA, 25 bp, Homo sapien
gctggtgatgtaattcagtcttaga

SEQ ID NO: 1465323 - DNA, 25 bp, Homo sapien
ttctgcaggctaagaagtcccacag

SEQ ID NO: 1465324 - DNA, 25 bp, Homo sapien
gtgatgtaattcagtcttagaaggc

SEQ ID NO: 1465325 - DNA, 25 bp, Homo sapien
tcatcctgcatcttaaggattgctc

SEQ ID NO: 1465326 - DNA, 25 bp, Homo sapien
ctgcatcttaaggattgctctgtct

SEQ ID NO: 1465327 - DNA, 25 bp, Homo sapien
catcctgcatcttaaggattgctct

SEQ ID NO: 1465328 - DNA, 25 bp, Homo sapien
tgcatcttaaggattgctctgtctg

SEQ ID NO: 1465329 - DNA, 25 bp, Homo sapien
ctgtctccatcagagaattccgcat

SEQ ID NO: 1465330 - DNA, 25 bp, Homo sapien
ggtctccagagcaccctggatctgt

SEQ ID NO: 1465331 - DNA, 25 bp, Homo sapien
agcaccctggatctgtctccatcag

SEQ ID NO: 1465332 - DNA, 25 bp, Homo sapien
ctagcttgacgagccccttctctgg

SEQ ID NO: 1465333 - DNA, 25 bp, Homo sapien
tttggcattcacagaaacgaccttc

SEQ ID NO: 1465334 - DNA, 25 bp, Homo sapien
tcgagatgtttgtaactccgcactg

SEQ ID NO: 1465335 - DNA, 25 bp, Homo sapien
ttacgtgaacaatcgcgatatcgag

SEQ ID NO: 1465336 - DNA, 25 bp, Homo sapien
agaaatttgaaagttttggcattca

SEQ ID NO: 1465337 - DNA, 25 bp, Homo sapien
gaaaaaattcaggtagatggtatta

SEQ ID NO: 1465338 - DNA, 25 bp, Homo sapien
actgcagacatttaatcttgtgcaa

SEQ ID NO: 1465339 - DNA, 25 bp, Homo sapien
acaatgatctctgttagaagccact

SEQ ID NO: 1465340 - DNA, 25 bp, Homo sapien
aaacaatgatctctgttagaagcca

SEQ ID NO: 1465341 - DNA, 25 bp, Homo sapien
tttgtaccaggaaaagacgtagtca

SEQ ID NO: 1465342 - DNA, 25 bp, Homo sapien
aagacgtagtcagcatacctgtgtg

SEQ ID NO: 1465343 - DNA, 25 bp, Homo sapien
gtagtcagcatacctgtgtgattca

SEQ ID NO: 1465344 - DNA, 25 bp, Homo sapien
cccccatgatggtttgtaccaggaa

SEQ ID NO: 1465345 - DNA, 25 bp, Homo sapien
ctctatcgaggcctaagaggaaacc

SEQ ID NO: 1465346 - DNA, 25 bp, Homo sapien
tagaaagcccggtgaaaggtctctc

SEQ ID NO: 1465347 - DNA, 25 bp, Homo sapien
aggaaaccagctatggagagaattc

SEQ ID NO: 1465348 - DNA, 25 bp, Homo sapien
tctctcaggagtgcgaaggccattt

SEQ ID NO: 1465349 - DNA, 25 bp, Homo sapien
gtgagtcggcttgcaccactgcatt

SEQ ID NO: 1465350 - DNA, 25 bp, Homo sapien
ttccagccaggatgacagtgcgaga

SEQ ID NO: 1465351 - DNA, 25 bp, Homo sapien
gcattccagccaggatgacagtgcg

SEQ ID NO: 1465352 - DNA, 25 bp, Homo sapien
agtgagtcggcttgcaccactgcat

SEQ ID NO: 1465353 - DNA, 25 bp, Homo sapien
tgcctgcacaactaaaccttgttct

SEQ ID NO: 1465354 - DNA, 25 bp, Homo sapien
gacagagatattaatgtcatctttg

SEQ ID NO: 1465355 - DNA, 25 bp, Homo sapien
caggtttgcattcacttgctccagg

SEQ ID NO: 1465356 - DNA, 25 bp, Homo sapien
tccaggatgatcactttctttgcct

SEQ ID NO: 1465357 - DNA, 25 bp, Homo sapien
tgtcccattaaggccaccctttcat

SEQ ID NO: 1465358 - DNA, 25 bp, Homo sapien
ctttcatctccccagggatagatga

SEQ ID NO: 1465359 - DNA, 25 bp, Homo sapien
ccccagggatagatgatgcttttgc

SEQ ID NO: 1465360 - DNA, 25 bp, Homo sapien
catgtgcccagactccttagtggga

SEQ ID NO: 1465361 - DNA, 25 bp, Homo sapien
gcagctgtcctcttcaaccttccca

SEQ ID NO: 1465362 - DNA, 25 bp, Homo sapien
cctcttcaaccttcccatagcacag

SEQ ID NO: 1465363 - DNA, 25 bp, Homo sapien
cttcaaccttcccatagcacagcct

SEQ ID NO: 1465364 - DNA, 25 bp, Homo sapien
tcaaccttcccatagcacagccttc

SEQ ID NO: 1465365 - DNA, 25 bp, Homo sapien
gattgccacttagccttggtccagt

SEQ ID NO: 1465366 - DNA, 25 bp, Homo sapien
ctggtggtgactgatgtcataaacc

SEQ ID NO: 1465367 - DNA, 25 bp, Homo sapien
cactacgagagctagttgcttcccc

SEQ ID NO: 1465368 - DNA, 25 bp, Homo sapien
tgttgtcaaccagattgccacttag

SEQ ID NO: 1465369 - DNA, 25 bp, Homo sapien
tctgagatgtcttacgtccaagcgt

SEQ ID NO: 1465370 - DNA, 25 bp, Homo sapien
agctgagggcatagtaagggttcat

SEQ ID NO: 1465371 - DNA, 25 bp, Homo sapien
tcctcacactcggttcagcttacag

SEQ ID NO: 1465372 - DNA, 25 bp, Homo sapien
tttcattccatgactagctctcgcc

SEQ ID NO: 1465373 - DNA, 25 bp, Homo sapien
ttctcacggagcaaagaacaggagt

SEQ ID NO: 1465374 - DNA, 25 bp, Homo sapien
ctcacggagcaaagaacaggagtac

SEQ ID NO: 1465375 - DNA, 25 bp, Homo sapien
tctgaggacctgagggtcataggtg

SEQ ID NO: 1465376 - DNA, 25 bp, Homo sapien
ctgagggtcataggtggatctttct

SEQ ID NO: 1465377 - DNA, 25 bp, Homo sapien
tctcaggacataaggttggaagaca

SEQ ID NO: 1465378 - DNA, 25 bp, Homo sapien
tggaagacaggtaactccaaatgtt

SEQ ID NO: 1465379 - DNA, 25 bp, Homo sapien
aaatgttctagatgctcttctgggc

SEQ ID NO: 1465380 - DNA, 25 bp, Homo sapien
aggcagtctcaggacataaggttgg

SEQ ID NO: 1465381 - DNA, 25 bp, Homo sapien
ggcttaaatccaggtagcccactgt

SEQ ID NO: 1465382 - DNA, 25 bp, Homo sapien
gagtcaggaaagctgtagggacaaa

SEQ ID NO: 1465383 - DNA, 25 bp, Homo sapien
agtcatgatgctcaggagagtttcc

SEQ ID NO: 1465384 - DNA, 25 bp, Homo sapien
tggtttgagtcatgatgctcaggag

SEQ ID NO: 1465385 - DNA, 25 bp, Homo sapien
cttgggtcaagagtggctcagccag

SEQ ID NO: 1465386 - DNA, 25 bp, Homo sapien
catgtcgctgggctttgatgtacaa

SEQ ID NO: 1465387 - DNA, 25 bp, Homo sapien
gagtaatttgcatgtcgctgggctt

SEQ ID NO: 1465388 - DNA, 25 bp, Homo sapien
aattcacttagatcatggcctctag

SEQ ID NO: 1465389 - DNA, 25 bp, Homo sapien
cccaggtattgagccaataggcagt

SEQ ID NO: 1465390 - DNA, 25 bp, Homo sapien
gtgcatatggcagtcctcagctggc

SEQ ID NO: 1465391 - DNA, 25 bp, Homo sapien
tgagattaccagttagagcacctgc

SEQ ID NO: 1465392 - DNA, 25 bp, Homo sapien
cttccgccgcagtcaattggtcaag

SEQ ID NO: 1465393 - DNA, 25 bp, Homo sapien
ttctggatagtcgaaggcagcatca

SEQ ID NO: 1465394 - DNA, 25 bp, Homo sapien
gaagccacacaacaagggtctggtg

SEQ ID NO: 1465395 - DNA, 25 bp, Homo sapien
gaaatccttggtaagtccagaagcc

SEQ ID NO: 1465396 - DNA, 25 bp, Homo sapien
gatgtctgccatcagggtgatatcc

SEQ ID NO: 1465397 - DNA, 25 bp, Homo sapien
tcttgaagctgggtactgcacagaa

SEQ ID NO: 1465398 - DNA, 25 bp, Homo sapien
tgccaaagattcttctaggtactgg

SEQ ID NO: 1465399 - DNA, 25 bp, Homo sapien
taaggaagtaacaaatgggcaagat

SEQ ID NO: 1465400 - DNA, 25 bp, Homo sapien
taaaatctccaaatagggtctccca

SEQ ID NO: 1465401 - DNA, 25 bp, Homo sapien
taatgaatgacacagatacggccca

SEQ ID NO: 1465402 - DNA, 25 bp, Homo sapien
tttatttgacttgctcatatacttg

SEQ ID NO: 1465403 - DNA, 25 bp, Homo sapien
tatttgacttgctcatatacttgaa

SEQ ID NO: 1465404 - DNA, 25 bp, Homo sapien
tttttatttgacttgctcatatact

SEQ ID NO: 1465405 - DNA, 25 bp, Homo sapien
tttttttatttgacttgctcatata

SEQ ID NO: 1465406 - DNA, 25 bp, Homo sapien
tgtcagaccccgacaaagagtgcgc

SEQ ID NO: 1465407 - DNA, 25 bp, Homo sapien
tgagcactgaccatgacaacacagg

SEQ ID NO: 1465408 - DNA, 25 bp, Homo sapien
tatacgatgcaacggtgtcagaccc

SEQ ID NO: 1465409 - DNA, 25 bp, Homo sapien
tgcgcacacgggcatgagtggctct

SEQ ID NO: 1465410 - DNA, 25 bp, Homo sapien
gacaccaacaagggagcgctttatc

SEQ ID NO: 1465411 - DNA, 25 bp, Homo sapien
ggacaccaacaagggagcgctttat

SEQ ID NO: 1465412 - DNA, 25 bp, Homo sapien
gggacaccaacaagggagcgcttta

SEQ ID NO: 1465413 - DNA, 25 bp, Homo sapien
aatttggcagcctatgtgccctggc

SEQ ID NO: 1465414 - DNA, 25 bp, Homo sapien
gcattctgggacagcttaggagtgt

SEQ ID NO: 1465415 - DNA, 25 bp, Homo sapien
caactactattggacccacctgggc

SEQ ID NO: 1465416 - DNA, 25 bp, Homo sapien
ccaagcaccacattatcaactacta

SEQ ID NO: 1465417 - DNA, 25 bp, Homo sapien
cccagaagcctttgagagtgaacac

SEQ ID NO: 1465418 - DNA, 25 bp, Homo sapien
gaagcctttgagagtgaacactgtt

SEQ ID NO: 1465419 - DNA, 25 bp, Homo sapien
cagaagcctttgagagtgaacactg

SEQ ID NO: 1465420 - DNA, 25 bp, Homo sapien
aggcccagaagcctttgagagtgaa

SEQ ID NO: 1465421 - DNA, 25 bp, Homo sapien
gggagatgatggtgttaggcagctt

SEQ ID NO: 1465422 - DNA, 25 bp, Homo sapien
gagatgatggtgttaggcagcttac

SEQ ID NO: 1465423 - DNA, 25 bp, Homo sapien
ctaagggggagatgatggtgttagg

SEQ ID NO: 1465424 - DNA, 25 bp, Homo sapien
gggggagatgatggtgttaggcagc

SEQ ID NO: 1465425 - DNA, 25 bp, Homo sapien
ccactagagcagaaagcatcacagc

SEQ ID NO: 1465426 - DNA, 25 bp, Homo sapien
tcaaggaccagatgtaggccacgtt

SEQ ID NO: 1465427 - DNA, 25 bp, Homo sapien
ggctaacgagaagatatgtgaccac

SEQ ID NO: 1465428 - DNA, 25 bp, Homo sapien
taagatgatgcactcagagtgttca

SEQ ID NO: 1465429 - DNA, 25 bp, Homo sapien
caccatcaataaagagaaactcacc

SEQ ID NO: 1465430 - DNA, 25 bp, Homo sapien
acagcacaagtgctcgcagaccaca

SEQ ID NO: 1465431 - DNA, 25 bp, Homo sapien
tagaaaaggacacatatcacaagca

SEQ ID NO: 1465432 - DNA, 25 bp, Homo sapien
aaactcaccagcaaccgagttgcct

SEQ ID NO: 1465433 - DNA, 25 bp, Homo sapien
ggaaggacacagaccccttcacgtc

SEQ ID NO: 1465434 - DNA, 25 bp, Homo sapien
tgcttcagtgtctcgctcctgctgt

SEQ ID NO: 1465435 - DNA, 25 bp, Homo sapien
actagtttgagctccttcaggccaa

SEQ ID NO: 1465436 - DNA, 25 bp, Homo sapien
gacatttggctccatgttaagggaa

SEQ ID NO: 1465437 - DNA, 25 bp, Homo sapien
atcacaaatgcgagggcctccctgc

SEQ ID NO: 1465438 - DNA, 25 bp, Homo sapien
atctgccagcatccgtccatcacaa

SEQ ID NO: 1465439 - DNA, 25 bp, Homo sapien
ctccctgccaagtgggccactctct

SEQ ID NO: 1465440 - DNA, 25 bp, Homo sapien
gcctccctgccaagtgggccactct

SEQ ID NO: 1465441 - DNA, 25 bp, Homo sapien
tggtatagggaaagattcaaagttg

SEQ ID NO: 1465442 - DNA, 25 bp, Homo sapien
ctggtatagggaaagattcaaagtt

SEQ ID NO: 1465443 - DNA, 25 bp, Homo sapien
agtcctgagagccataagtttgaaa

SEQ ID NO: 1465444 - DNA, 25 bp, Homo sapien
tccctcctaacttgtggtggctgca

SEQ ID NO: 1465445 - DNA, 25 bp, Homo sapien
cgttcgttctagatcctctgagaga

SEQ ID NO: 1465446 - DNA, 25 bp, Homo sapien
gaaaatctattctgtgcatccctcc

SEQ ID NO: 1465447 - DNA, 25 bp, Homo sapien
gggtatagaccaacaacatgaccca

SEQ ID NO: 1465448 - DNA, 25 bp, Homo sapien
tagaccaacaacatgacccacaagg

SEQ ID NO: 1465449 - DNA, 25 bp, Homo sapien
cagaagcaaggggtatagaccaaca

SEQ ID NO: 1465450 - DNA, 25 bp, Homo sapien
atgacccacaaggaccacatctggt

SEQ ID NO: 1465451 - DNA, 25 bp, Homo sapien
gcccctccagcaggccaagtcccat

SEQ ID NO: 1465452 - DNA, 25 bp, Homo sapien
agggcccctccagcaggccaagtcc

SEQ ID NO: 1465453 - DNA, 25 bp, Homo sapien
aagtcccatatccacctgctggctg

SEQ ID NO: 1465454 - DNA, 25 bp, Homo sapien
gccaagtcccatatccacctgctgg

SEQ ID NO: 1465455 - DNA, 25 bp, Homo sapien
caaagaatataattgtcaacagagt

SEQ ID NO: 1465456 - DNA, 25 bp, Homo sapien
caacagagttcatgagttatccagc

SEQ ID NO: 1465457 - DNA, 25 bp, Homo sapien
cagcttcaggtagtgtgtatttcaa

SEQ ID NO: 1465458 - DNA, 25 bp, Homo sapien
tcttaggcttaggtcctcaggacac

SEQ ID NO: 1465459 - DNA, 25 bp, Homo sapien
accctcatgttgtgtgagtgaattc

SEQ ID NO: 1465460 - DNA, 25 bp, Homo sapien
ctgtgcaaagtaccctcatgttgtg

SEQ ID NO: 1465461 - DNA, 25 bp, Homo sapien
cactttgtgacctcttccggcaagg

SEQ ID NO: 1465462 - DNA, 25 bp, Homo sapien
ccaaaaccatgtggagtgtagaagt

SEQ ID NO: 1465463 - DNA, 25 bp, Homo sapien
caagtaacggggagaccaagtgctg

SEQ ID NO: 1465464 - DNA, 25 bp, Homo sapien
gctgaggtcaaggagagtgacaagg

SEQ ID NO: 1465465 - DNA, 25 bp, Homo sapien
ccaagtgctggggagccatcacaca

SEQ ID NO: 1465466 - DNA, 25 bp, Homo sapien
gcagttttgttgcaagtaacgggga

SEQ ID NO: 1465467 - DNA, 25 bp, Homo sapien
tttcacaaacatcattttctccaac

SEQ ID NO: 1465468 - DNA, 25 bp, Homo sapien
atcattttctccaactgattccttt

SEQ ID NO: 1465469 - DNA, 25 bp, Homo sapien
aacatcattttctccaactgattcc

SEQ ID NO: 1465470 - DNA, 25 bp, Homo sapien
ttcacaaacatcattttctccaact

SEQ ID NO: 1465471 - DNA, 25 bp, Homo sapien
tatgcagggactcatctgctggcac

SEQ ID NO: 1465472 - DNA, 25 bp, Homo sapien
ccttcctgtcacctatagggagaag

SEQ ID NO: 1465473 - DNA, 25 bp, Homo sapien
tgtttaataaccatttccatatgca

SEQ ID NO: 1465474 - DNA, 25 bp, Homo sapien
cctgtcacctatagggagaagcaga

SEQ ID NO: 1465475 - DNA, 25 bp, Homo sapien
tgtgtgttatccaattccaaagtca

SEQ ID NO: 1465476 - DNA, 25 bp, Homo sapien
gagagttccacacttttctatattt

SEQ ID NO: 1465477 - DNA, 25 bp, Homo sapien
aaacctctgtgcctgtaatgacagg

SEQ ID NO: 1465478 - DNA, 25 bp, Homo sapien
cttctgcagcctgtttgaatctctc

SEQ ID NO: 1465479 - DNA, 25 bp, Homo sapien
cagattagattctcaagccacaggt

SEQ ID NO: 1465480 - DNA, 25 bp, Homo sapien
tcaggactagctgtcaggtgagacc

SEQ ID NO: 1465481 - DNA, 25 bp, Homo sapien
tttgccacggtgcacacagattaga

SEQ ID NO: 1465482 - DNA, 25 bp, Homo sapien
gagcacagccgtttctaacatgcag

SEQ ID NO: 1465483 - DNA, 25 bp, Homo sapien
gatgagtcagagtgttgcaaggcca

SEQ ID NO: 1465484 - DNA, 25 bp, Homo sapien
gctgcacagcaagggtccatagggt

SEQ ID NO: 1465485 - DNA, 25 bp, Homo sapien
ggcaaggacctttgttagaacacca

SEQ ID NO: 1465486 - DNA, 25 bp, Homo sapien
caaatgcatgcaagggcgggactgt

SEQ ID NO: 1465487 - DNA, 25 bp, Homo sapien
cccttgtctgggtaatctggaacag

SEQ ID NO: 1465488 - DNA, 25 bp, Homo sapien
tgtcccggtgctggtctgagagcct

SEQ ID NO: 1465489 - DNA, 25 bp, Homo sapien
tgcagggaatcactcaggacatgcc

SEQ ID NO: 1465490 - DNA, 25 bp, Homo sapien
tgcagactcctcgattgtcccggtg

SEQ ID NO: 1465491 - DNA, 25 bp, Homo sapien
caatcagctgaattaccttccagaa

SEQ ID NO: 1465492 - DNA, 25 bp, Homo sapien
catcttgtatgaggcagtcttctat

SEQ ID NO: 1465493 - DNA, 25 bp, Homo sapien
agacattccacaaagacatcttgta

SEQ ID NO: 1465494 - DNA, 25 bp, Homo sapien
tcaatcagctgaattaccttccaga

SEQ ID NO: 1465495 - DNA, 25 bp, Homo sapien
gttgtagcagctattaacatccgaa

SEQ ID NO: 1465496 - DNA, 25 bp, Homo sapien
tacactatgaagcaaaggattcttg

SEQ ID NO: 1465497 - DNA, 25 bp, Homo sapien
aactcagtggcagtgctttgtacac

SEQ ID NO: 1465498 - DNA, 25 bp, Homo sapien
taattggtggccctcacaaccgtac

SEQ ID NO: 1465499 - DNA, 25 bp, Homo sapien
tttacccaggagcttaggatcctcc

SEQ ID NO: 1465500 - DNA, 25 bp, Homo sapien
gatacaagtgttgggtcacctccag

SEQ ID NO: 1465501 - DNA, 25 bp, Homo sapien
gtaggacacatcagcaagggccact

SEQ ID NO: 1465502 - DNA, 25 bp, Homo sapien
gatatcctcgaccatctactgttga

SEQ ID NO: 1465503 - DNA, 25 bp, Homo sapien
gatggaaatgcttggaccactggac

SEQ ID NO: 1465504 - DNA, 25 bp, Homo sapien
catgaatttccccacatcggacaag

SEQ ID NO: 1465505 - DNA, 25 bp, Homo sapien
gaagttttccaagaccccgacatga

SEQ ID NO: 1465506 - DNA, 25 bp, Homo sapien
tcggacaagatcaaaacaaggtggt

SEQ ID NO: 1465507 - DNA, 25 bp, Homo sapien
aaataacccagctgaacatctgctt

SEQ ID NO: 1465508 - DNA, 25 bp, Homo sapien
aaaataacccagctgaacatctgct

SEQ ID NO: 1465509 - DNA, 25 bp, Homo sapien
tgaaaggttaagctttcctccaggc

SEQ ID NO: 1465510 - DNA, 25 bp, Homo sapien
gctttgtgtgaaaggttaagctttc

SEQ ID NO: 1465511 - DNA, 25 bp, Homo sapien
aacctggtgtcttccctggtttctg

SEQ ID NO: 1465512 - DNA, 25 bp, Homo sapien
taatagcctgcagaagactagctat

SEQ ID NO: 1465513 - DNA, 25 bp, Homo sapien
tgcagaagactagctatgttggttt

SEQ ID NO: 1465514 - DNA, 25 bp, Homo sapien
gcctgcagaagactagctatgttgg

SEQ ID NO: 1465515 - DNA, 25 bp, Homo sapien
tcacaactgtgcagattattctttc

SEQ ID NO: 1465516 - DNA, 25 bp, Homo sapien
tgtcagagccatcactataactaca

SEQ ID NO: 1465517 - DNA, 25 bp, Homo sapien
atcatgcataccacagtcacatggg

SEQ ID NO: 1465518 - DNA, 25 bp, Homo sapien
tggtagctgtctagcaactcttcca

SEQ ID NO: 1465519 - DNA, 25 bp, Homo sapien
tttagccttgtacagggtggtgata

SEQ ID NO: 1465520 - DNA, 25 bp, Homo sapien
ctacttgaggccatcatcttccccc

SEQ ID NO: 1465521 - DNA, 25 bp, Homo sapien
tagccttgtacagggtggtgatatt

SEQ ID NO: 1465522 - DNA, 25 bp, Homo sapien
tacttgaggccatcatcttccccca

SEQ ID NO: 1465523 - DNA, 25 bp, Homo sapien
tgccaaccaaatcctaaattagcct

SEQ ID NO: 1465524 - DNA, 25 bp, Homo sapien
agcctttcccttgccaaatgtcact

SEQ ID NO: 1465525 - DNA, 25 bp, Homo sapien
aattagcctttcccttgccaaatgt

SEQ ID NO: 1465526 - DNA, 25 bp, Homo sapien
ttagcctttcccttgccaaatgtca

SEQ ID NO: 1465527 - DNA, 25 bp, Homo sapien
tcttgcgctgtgatacctgctctcc

SEQ ID NO: 1465528 - DNA, 25 bp, Homo sapien
tttcttgcgctgtgatacctgctct

SEQ ID NO: 1465529 - DNA, 25 bp, Homo sapien
ttcttgcgctgtgatacctgctctc

SEQ ID NO: 1465530 - DNA, 25 bp, Homo sapien
tattgattgcaatacctggtccaga

SEQ ID NO: 1465531 - DNA, 25 bp, Homo sapien
tacgttccaggtacactgggcttgt

SEQ ID NO: 1465532 - DNA, 25 bp, Homo sapien
cttactaagcataaccttgagctgg

SEQ ID NO: 1465533 - DNA, 25 bp, Homo sapien
catatgtttgattccccaccagagc

SEQ ID NO: 1465534 - DNA, 25 bp, Homo sapien
cagaggacacccttaggtggagtta

SEQ ID NO: 1465535 - DNA, 25 bp, Homo sapien
gaaatcttcaaccaatcagtgctat

SEQ ID NO: 1465536 - DNA, 25 bp, Homo sapien
tgtgacatctcatattccagaggac

SEQ ID NO: 1465537 - DNA, 25 bp, Homo sapien
gcatctaactagttctggtccctta

SEQ ID NO: 1465538 - DNA, 25 bp, Homo sapien
aaagtgcaacaggaatactcactgt

SEQ ID NO: 1465539 - DNA, 25 bp, Homo sapien
atcattatcaatgaggtatctcacc

SEQ ID NO: 1465540 - DNA, 25 bp, Homo sapien
tcaatgaggtatctcaccttctgtg

SEQ ID NO: 1465541 - DNA, 25 bp, Homo sapien
aagtgcaacaggaatactcactgtt

SEQ ID NO: 1465542 - DNA, 25 bp, Homo sapien
ccaacacaactgctgcatcatccac

SEQ ID NO: 1465543 - DNA, 25 bp, Homo sapien
acacaactgctgcatcatccacaca

SEQ ID NO: 1465544 - DNA, 25 bp, Homo sapien
aactgctgcatcatccacacatctg

SEQ ID NO: 1465545 - DNA, 25 bp, Homo sapien
acaactgctgcatcatccacacatc

SEQ ID NO: 1465546 - DNA, 25 bp, Homo sapien
gggaatgagaccatgacgggaaagt

SEQ ID NO: 1465547 - DNA, 25 bp, Homo sapien
gatccatcaaattcaccaggggaat

SEQ ID NO: 1465548 - DNA, 25 bp, Homo sapien
accatgacgggaaagtaagccatag

SEQ ID NO: 1465549 - DNA, 25 bp, Homo sapien
ggcagatccatcaaattcaccaggg

SEQ ID NO: 1465550 - DNA, 25 bp, Homo sapien
tagttttatgcactcgagcccacaa

SEQ ID NO: 1465551 - DNA, 25 bp, Homo sapien
gataacggataacactagtcagcct

SEQ ID NO: 1465552 - DNA, 25 bp, Homo sapien
cattgttggacgcttgggtggattc

SEQ ID NO: 1465553 - DNA, 25 bp, Homo sapien
tacaggctcaagtataggtgcatag

SEQ ID NO: 1465554 - DNA, 25 bp, Homo sapien
acagacagcacaggcatgtctgagt

SEQ ID NO: 1465555 - DNA, 25 bp, Homo sapien
gaaccctgcacaggtcttatgtcca

SEQ ID NO: 1465556 - DNA, 25 bp, Homo sapien
gatgacaccactttccacactggag

SEQ ID NO: 1465557 - DNA, 25 bp, Homo sapien
gacctgcaatgggcctgtcacaagt

SEQ ID NO: 1465558 - DNA, 25 bp, Homo sapien
taattggtccaagagaaggctctcc

SEQ ID NO: 1465559 - DNA, 25 bp, Homo sapien
tgtgtagccagtatcttagcccttg

SEQ ID NO: 1465560 - DNA, 25 bp, Homo sapien
agcatgtgacatcctgactgagcct

SEQ ID NO: 1465561 - DNA, 25 bp, Homo sapien
ttttagggcctgctacatggcagcg

SEQ ID NO: 1465562 - DNA, 25 bp, Homo sapien
tcagtaagaccaaggcttcagcttg

SEQ ID NO: 1465563 - DNA, 25 bp, Homo sapien
tctttatggcgcatgcaatcagtaa

SEQ ID NO: 1465564 - DNA, 25 bp, Homo sapien
gcatgcaatcagtaagaccaaggct

SEQ ID NO: 1465565 - DNA, 25 bp, Homo sapien
agggccctgttctttatggcgcatg

SEQ ID NO: 1465566 - DNA, 25 bp, Homo sapien
tctgccttggatatgctctctgacc

SEQ ID NO: 1465567 - DNA, 25 bp, Homo sapien
aactctgccttggatatgctctctg

SEQ ID NO: 1465568 - DNA, 25 bp, Homo sapien
ctgtctccatagtgatggctcaaac

SEQ ID NO: 1465569 - DNA, 25 bp, Homo sapien
tctccatagtgatggctcaaactct

SEQ ID NO: 1465570 - DNA, 25 bp, Homo sapien
gaaaggatgcaagcccaacagggac

SEQ ID NO: 1465571 - DNA, 25 bp, Homo sapien
aggatgcaagcccaacagggacaag

SEQ ID NO: 1465572 - DNA, 25 bp, Homo sapien
gctggaaaggatgcaagcccaacag

SEQ ID NO: 1465573 - DNA, 25 bp, Homo sapien
tgcaagcccaacagggacaaggacc

SEQ ID NO: 1465574 - DNA, 25 bp, Homo sapien
cccagggcactcagcagaaccagca

SEQ ID NO: 1465575 - DNA, 25 bp, Homo sapien
cagcccagggcactcagcagaacca

SEQ ID NO: 1465576 - DNA, 25 bp, Homo sapien
agcccagggcactcagcagaaccag

SEQ ID NO: 1465577 - DNA, 25 bp, Homo sapien
ccagggcactcagcagaaccagcat

SEQ ID NO: 1465578 - DNA, 25 bp, Homo sapien
gttatggccacaaagccccgcagcg

SEQ ID NO: 1465579 - DNA, 25 bp, Homo sapien
atggtcccacagggcaccgttatgg

SEQ ID NO: 1465580 - DNA, 25 bp, Homo sapien
gtcccacagggcaccgttatggcca

SEQ ID NO: 1465581 - DNA, 25 bp, Homo sapien
cagggcaccgttatggccacaaagc

SEQ ID NO: 1465582 - DNA, 25 bp, Homo sapien
gctcttggcactcactttcttagaa

SEQ ID NO: 1465583 - DNA, 25 bp, Homo sapien
cttggcactcactttcttagaattg

SEQ ID NO: 1465584 - DNA, 25 bp, Homo sapien
tttcttagaattgacaacgctgata

SEQ ID NO: 1465585 - DNA, 25 bp, Homo sapien
gaattgacaacgctgataggttctc

SEQ ID NO: 1465586 - DNA, 25 bp, Homo sapien
tgattttttacaccctttggctgca

SEQ ID NO: 1465587 - DNA, 25 bp, Homo sapien
ggctgcactgagtgacctctcccaa

SEQ ID NO: 1465588 - DNA, 25 bp, Homo sapien
agcctgggcttgatttgtggccctg

SEQ ID NO: 1465589 - DNA, 25 bp, Homo sapien
ccaactgcatatgctttcaaactgg

SEQ ID NO: 1465590 - DNA, 25 bp, Homo sapien
acatggcggccattggaacctccac

SEQ ID NO: 1465591 - DNA, 25 bp, Homo sapien
aacatggcggccattggaacctcca

SEQ ID NO: 1465592 - DNA, 25 bp, Homo sapien
atggcggccattggaacctccacag

SEQ ID NO: 1465593 - DNA, 25 bp, Homo sapien
ggcggccattggaacctccacagcg

SEQ ID NO: 1465594 - DNA, 25 bp, Homo sapien
gggagtcacagtccacctcattcac

SEQ ID NO: 1465595 - DNA, 25 bp, Homo sapien
ttttccagcccacgagttctcctcc

SEQ ID NO: 1465596 - DNA, 25 bp, Homo sapien
accacttctccctgtgcccgcttct

SEQ ID NO: 1465597 - DNA, 25 bp, Homo sapien
caagttgtagttttggggagtcaca

SEQ ID NO: 1465598 - DNA, 25 bp, Homo sapien
tgcaaagggcacctatctttctctt

SEQ ID NO: 1465599 - DNA, 25 bp, Homo sapien
catacagcacaggacttgcaaaggg

SEQ ID NO: 1465600 - DNA, 25 bp, Homo sapien
tttcccctcatacagcacaggactt

SEQ ID NO: 1465601 - DNA, 25 bp, Homo sapien
tctttcacctcagacactctttcta

SEQ ID NO: 1465602 - DNA, 25 bp, Homo sapien
cagccataaatctgagaggtggggc

SEQ ID NO: 1465603 - DNA, 25 bp, Homo sapien
tgtagacaaatctttccagctctcc

SEQ ID NO: 1465604 - DNA, 25 bp, Homo sapien
attttcacaaccctccatgtagaca

SEQ ID NO: 1465605 - DNA, 25 bp, Homo sapien
tcagcagcagattgcagccataaat

SEQ ID NO: 1465606 - DNA, 25 bp, Homo sapien
catcttctaccttactaaaagacaa

SEQ ID NO: 1465607 - DNA, 25 bp, Homo sapien
cacaacatcttctaccttactaaaa

SEQ ID NO: 1465608 - DNA, 25 bp, Homo sapien
tactaaaagacaaagtggttgccat

SEQ ID NO: 1465609 - DNA, 25 bp, Homo sapien
gaccttcacaacatcttctacctta

SEQ ID NO: 1465610 - DNA, 25 bp, Homo sapien
gatgaactcaagattcgagttcaga

SEQ ID NO: 1465611 - DNA, 25 bp, Homo sapien
cccattctaacatatgtgaaagaaa

SEQ ID NO: 1465612 - DNA, 25 bp, Homo sapien
tgtgaaagaaactcccacgatgatg

SEQ ID NO: 1465613 - DNA, 25 bp, Homo sapien
aactcaagattcgagttcagagctc

SEQ ID NO: 1465614 - DNA, 25 bp, Homo sapien
aggggcattgtcagtcaatacagag

SEQ ID NO: 1465615 - DNA, 25 bp, Homo sapien
ggggcattgtcagtcaatacagagg

SEQ ID NO: 1465616 - DNA, 25 bp, Homo sapien
tctcccaacagtcgatgacattcac

SEQ ID NO: 1465617 - DNA, 25 bp, Homo sapien
tgccctctctcccaacagtcgatga

SEQ ID NO: 1465618 - DNA, 25 bp, Homo sapien
ccccttccaacaatggctgtggctg

SEQ ID NO: 1465619 - DNA, 25 bp, Homo sapien
aacagtcgatgacattcacaccacc

SEQ ID NO: 1465620 - DNA, 25 bp, Homo sapien
ctagatattgacagcttggaagaga

SEQ ID NO: 1465621 - DNA, 25 bp, Homo sapien
tgggatagagctggtattcagaccc

SEQ ID NO: 1465622 - DNA, 25 bp, Homo sapien
tctgcaacctgaagctgggatagag

SEQ ID NO: 1465623 - DNA, 25 bp, Homo sapien
aactcgacatattgcagtgtgggtc

SEQ ID NO: 1465624 - DNA, 25 bp, Homo sapien
ggaagaagtaaagatcctgccaccc

SEQ ID NO: 1465625 - DNA, 25 bp, Homo sapien
atccctgccgatattcctcggcact

SEQ ID NO: 1465626 - DNA, 25 bp, Homo sapien
gccgatattcctcggcacttgcttc

SEQ ID NO: 1465627 - DNA, 25 bp, Homo sapien
ctgccgatattcctcggcacttgct

SEQ ID NO: 1465628 - DNA, 25 bp, Homo sapien
gatattcctcggcacttgcttctct

SEQ ID NO: 1465629 - DNA, 25 bp, Homo sapien
cacacttaatcctgctgctaggtca

SEQ ID NO: 1465630 - DNA, 25 bp, Homo sapien
tcctgctgctaggtcagatgcacag

SEQ ID NO: 1465631 - DNA, 25 bp, Homo sapien
ttaatcctgctgctaggtcagatgc

SEQ ID NO: 1465632 - DNA, 25 bp, Homo sapien
ctgctaggtcagatgcacagcacac

SEQ ID NO: 1465633 - DNA, 25 bp, Homo sapien
gcagcctcccaatgccatctccagc

SEQ ID NO: 1465634 - DNA, 25 bp, Homo sapien
ccagcaatagcctgtgctcccctgg

SEQ ID NO: 1465635 - DNA, 25 bp, Homo sapien
agctgcccagcaatagcctgtgctc

SEQ ID NO: 1465636 - DNA, 25 bp, Homo sapien
tgcccagcaatagcctgtgctcccc

SEQ ID NO: 1465637 - DNA, 25 bp, Homo sapien
gccgggcccatgcaggcctttgaga

SEQ ID NO: 1465638 - DNA, 25 bp, Homo sapien
aggcccactggaggtcaagttctgg

SEQ ID NO: 1465639 - DNA, 25 bp, Homo sapien
ccactggaggtcaagttctgggcct

SEQ ID NO: 1465640 - DNA, 25 bp, Homo sapien
gaaggccgttgtgaggaatgagctg

SEQ ID NO: 1465641 - DNA, 25 bp, Homo sapien
tgtttggggcctgcagatgccatcg

SEQ ID NO: 1465642 - DNA, 25 bp, Homo sapien
cgacttgggcctacagaggctgcca

SEQ ID NO: 1465643 - DNA, 25 bp, Homo sapien
gcctgcagatgccatcggagagcag

SEQ ID NO: 1465644 - DNA, 25 bp, Homo sapien
cggaggctgtttggggcctgcagat

SEQ ID NO: 1465645 - DNA, 25 bp, Homo sapien
gagctgggcctgcggagcttggctt

SEQ ID NO: 1465646 - DNA, 25 bp, Homo sapien
gctgggcctgcggagcttggctttg

SEQ ID NO: 1465647 - DNA, 25 bp, Homo sapien
gggcctgcggagcttggctttggga

SEQ ID NO: 1465648 - DNA, 25 bp, Homo sapien
ctgggcctgcggagcttggctttgg

SEQ ID NO: 1465649 - DNA, 25 bp, Homo sapien
tcgggcctggagacacagcagggaa

SEQ ID NO: 1465650 - DNA, 25 bp, Homo sapien
agacgttgttgggaggccagagtcg

SEQ ID NO: 1465651 - DNA, 25 bp, Homo sapien
gacgttgttgggaggccagagtcgg

SEQ ID NO: 1465652 - DNA, 25 bp, Homo sapien
tggagacacagcagggaagaagagc

SEQ ID NO: 1465653 - DNA, 25 bp, Homo sapien
aggaatgagccccatgggcctgaag

SEQ ID NO: 1465654 - DNA, 25 bp, Homo sapien
tggagaggacgccaggaggctgcaa

SEQ ID NO: 1465655 - DNA, 25 bp, Homo sapien
ctgggcctggaaaggttgttgtgag

SEQ ID NO: 1465656 - DNA, 25 bp, Homo sapien
ctggagaggacgccaggaggctgca

SEQ ID NO: 1465657 - DNA, 25 bp, Homo sapien
gaggcccaagcttggcatggaggag

SEQ ID NO: 1465658 - DNA, 25 bp, Homo sapien
agcttggcatggaggagcccaccga

SEQ ID NO: 1465659 - DNA, 25 bp, Homo sapien
aggcccaagcttggcatggaggagc

SEQ ID NO: 1465660 - DNA, 25 bp, Homo sapien
ccaagcttggcatggaggagcccac

SEQ ID NO: 1465661 - DNA, 25 bp, Homo sapien
gccgttgtgaggaatgagccccatg

SEQ ID NO: 1465662 - DNA, 25 bp, Homo sapien
tccggagaggacgcccggagggtgc

SEQ ID NO: 1465663 - DNA, 25 bp, Homo sapien
ctgggcccggagaggccaccggaag

SEQ ID NO: 1465664 - DNA, 25 bp, Homo sapien
gggcctggagacgcagccgtgagga

SEQ ID NO: 1465665 - DNA, 25 bp, Homo sapien
agaggccactggcaggcaggagctg

SEQ ID NO: 1465666 - DNA, 25 bp, Homo sapien
ggccactggcaggcaggagctgggc

SEQ ID NO: 1465667 - DNA, 25 bp, Homo sapien
aagaggccactggcaggcaggagct

SEQ ID NO: 1465668 - DNA, 25 bp, Homo sapien
ctgaagaggccactggcaggcagga

SEQ ID NO: 1465669 - DNA, 25 bp, Homo sapien
aggcaggagctgacacttcggcacg

SEQ ID NO: 1465670 - DNA, 25 bp, Homo sapien
ggcaggagctgacacttcggcacgt

SEQ ID NO: 1465671 - DNA, 25 bp, Homo sapien
gcaggagctgacacttcggcacgtt

SEQ ID NO: 1465672 - DNA, 25 bp, Homo sapien
tggagatgctgagttaaggacattc

SEQ ID NO: 1465673 - DNA, 25 bp, Homo sapien
tgggaggatgagctcgtcctggaga

SEQ ID NO: 1465674 - DNA, 25 bp, Homo sapien
agatgctgagttaaggacattctgg

SEQ ID NO: 1465675 - DNA, 25 bp, Homo sapien
aggatgagctcgtcctggagatgct

SEQ ID NO: 1465676 - DNA, 25 bp, Homo sapien
tgcaaaaggcaaaagctgtgcctgg

SEQ ID NO: 1465677 - DNA, 25 bp, Homo sapien
agctgtgcctggaaaagtcgccatg

SEQ ID NO: 1465678 - DNA, 25 bp, Homo sapien
ctgtgcctggaaaagtcgccatggg

SEQ ID NO: 1465679 - DNA, 25 bp, Homo sapien
gaaaagtcgccatggggcatgagct

SEQ ID NO: 1465680 - DNA, 25 bp, Homo sapien
tccgacagtagacagaagttgggca

SEQ ID NO: 1465681 - DNA, 25 bp, Homo sapien
tgggcttcaagagtcagccacgagg

SEQ ID NO: 1465682 - DNA, 25 bp, Homo sapien
gcttcaagagtcagccacgaggcag

SEQ ID NO: 1465683 - DNA, 25 bp, Homo sapien
gttttgggcttcaagagtcagccac

SEQ ID NO: 1465684 - DNA, 25 bp, Homo sapien
catgagttgggactaaatgggccac

SEQ ID NO: 1465685 - DNA, 25 bp, Homo sapien
tcatgagttgggactaaatgggcca

SEQ ID NO: 1465686 - DNA, 25 bp, Homo sapien
ctcgggcagctgccatgaggcaaga

SEQ ID NO: 1465687 - DNA, 25 bp, Homo sapien
aagcagaaatttggcctcgggcagc

SEQ ID NO: 1465688 - DNA, 25 bp, Homo sapien
gcaagcagaaatttggcctcgggca

SEQ ID NO: 1465689 - DNA, 25 bp, Homo sapien
aggcaagcagaaatttggcctcggg

SEQ ID NO: 1465690 - DNA, 25 bp, Homo sapien
aactgggccaaaaaaggctgttgtg

SEQ ID NO: 1465691 - DNA, 25 bp, Homo sapien
actgggccaaaaaaggctgttgtga

SEQ ID NO: 1465692 - DNA, 25 bp, Homo sapien
gagcttggtctgtagaggctgactg

SEQ ID NO: 1465693 - DNA, 25 bp, Homo sapien
cttggtctgtagaggctgactggag

SEQ ID NO: 1465694 - DNA, 25 bp, Homo sapien
tctgtagaggctgactggagaaagt

SEQ ID NO: 1465695 - DNA, 25 bp, Homo sapien
gtctgtagaggctgactggagaaag

SEQ ID NO: 1465696 - DNA, 25 bp, Homo sapien
gaatcagtgggcatgttaagcttgt

SEQ ID NO: 1465697 - DNA, 25 bp, Homo sapien
atcagtgggcatgttaagcttgttt

SEQ ID NO: 1465698 - DNA, 25 bp, Homo sapien
gtgggcatgttaagcttgttttcct

SEQ ID NO: 1465699 - DNA, 25 bp, Homo sapien
cagtgggcatgttaagcttgttttc

SEQ ID NO: 1465700 - DNA, 25 bp, Homo sapien
tcctgccgtgtggctccttacagct

SEQ ID NO: 1465701 - DNA, 25 bp, Homo sapien
ctcctgccgtgtggctccttacagc

SEQ ID NO: 1465702 - DNA, 25 bp, Homo sapien
ctgccgtgtggctccttacagctcc

SEQ ID NO: 1465703 - DNA, 25 bp, Homo sapien
gccgtgtggctccttacagctccat

SEQ ID NO: 1465704 - DNA, 25 bp, Homo sapien
tccacgtatacgaaaattccaaata

SEQ ID NO: 1465705 - DNA, 25 bp, Homo sapien
gcagtcagctgcgatagcactacta

SEQ ID NO: 1465706 - DNA, 25 bp, Homo sapien
cctctggaatccacgtatacgaaaa

SEQ ID NO: 1465707 - DNA, 25 bp, Homo sapien
acccctctggaatccacgtatacga

SEQ ID NO: 1465708 - DNA, 25 bp, Homo sapien
gaaatcctgttgactgtcttcgaca

SEQ ID NO: 1465709 - DNA, 25 bp, Homo sapien
gagccactgcaatgagcctgaagag

SEQ ID NO: 1465710 - DNA, 25 bp, Homo sapien
aatctagcatcccatacttggtagg

SEQ ID NO: 1465711 - DNA, 25 bp, Homo sapien
gacatgtactaaagatccccaccca

SEQ ID NO: 1465712 - DNA, 25 bp, Homo sapien
cagaagtctttcatggtagatccag

SEQ ID NO: 1465713 - DNA, 25 bp, Homo sapien
ttcagaagtctttcatggtagatcc

SEQ ID NO: 1465714 - DNA, 25 bp, Homo sapien
gtctctcttcctggattcagaagtc

SEQ ID NO: 1465715 - DNA, 25 bp, Homo sapien
ctggattcagaagtctttcatggta

SEQ ID NO: 1465716 - DNA, 25 bp, Homo sapien
tgccttctctacagcagcctgagcc

SEQ ID NO: 1465717 - DNA, 25 bp, Homo sapien
tccctggtgccttctctacagcagc

SEQ ID NO: 1465718 - DNA, 25 bp, Homo sapien
cattgagccatctgctctccctggt

SEQ ID NO: 1465719 - DNA, 25 bp, Homo sapien
ccattgagccatctgctctccctgg

SEQ ID NO: 1465720 - DNA, 25 bp, Homo sapien
acttaagtatgtgtgctactgaggc

SEQ ID NO: 1465721 - DNA, 25 bp, Homo sapien
taagtatgtgtgctactgaggcaag

SEQ ID NO: 1465722 - DNA, 25 bp, Homo sapien
tcacagaggccgtgccaatctctct

SEQ ID NO: 1465723 - DNA, 25 bp, Homo sapien
aagtatgtgtgctactgaggcaagc

SEQ ID NO: 1465724 - DNA, 25 bp, Homo sapien
agaccttcggcttttacagctcgag

SEQ ID NO: 1465725 - DNA, 25 bp, Homo sapien
cagaccttcggcttttacagctcga

SEQ ID NO: 1465726 - DNA, 25 bp, Homo sapien
ttcacctgttgaattcataagttca

SEQ ID NO: 1465727 - DNA, 25 bp, Homo sapien
cacctgttgaattcataagttcatg

SEQ ID NO: 1465728 - DNA, 25 bp, Homo sapien
ctcacaaagctgatttatcaagttg

SEQ ID NO: 1465729 - DNA, 25 bp, Homo sapien
atcttcacctgttgaattcataagt

SEQ ID NO: 1465730 - DNA, 25 bp, Homo sapien
tccattgtgtaaacacccatgaaca

SEQ ID NO: 1465731 - DNA, 25 bp, Homo sapien
acccatgaacataagattacaggac

SEQ ID NO: 1465732 - DNA, 25 bp, Homo sapien
acacccatgaacataagattacagg

SEQ ID NO: 1465733 - DNA, 25 bp, Homo sapien
attgtgtaaacacccatgaacataa

SEQ ID NO: 1465734 - DNA, 25 bp, Homo sapien
gtagatcagcgatacgatgattcca

SEQ ID NO: 1465735 - DNA, 25 bp, Homo sapien
acgtagatcagcgatacgatgattc

SEQ ID NO: 1465736 - DNA, 25 bp, Homo sapien
gtttacgtagatcagcgatacgatg

SEQ ID NO: 1465737 - DNA, 25 bp, Homo sapien
ttacgtagatcagcgatacgatgat

SEQ ID NO: 1465738 - DNA, 25 bp, Homo sapien
ctgaaaatcaagcaaaagttgcttc

SEQ ID NO: 1465739 - DNA, 25 bp, Homo sapien
aaagttgcttctcaataatacgtcc

SEQ ID NO: 1465740 - DNA, 25 bp, Homo sapien
gaaaatcaagcaaaagttgcttctc

SEQ ID NO: 1465741 - DNA, 25 bp, Homo sapien
caagcaaaagttgcttctcaataat

SEQ ID NO: 1465742 - DNA, 25 bp, Homo sapien
aatacaaaacagcagggcatggtgg

SEQ ID NO: 1465743 - DNA, 25 bp, Homo sapien
ggaggcacacattgcagtgagccaa

SEQ ID NO: 1465744 - DNA, 25 bp, Homo sapien
cctgaacccaggaggcacacattgc

SEQ ID NO: 1465745 - DNA, 25 bp, Homo sapien
cgggcgcctgtagtcccagctactc

SEQ ID NO: 1465746 - DNA, 25 bp, Homo sapien
gagagggtgggaggtgtagtgacag

SEQ ID NO: 1465747 - DNA, 25 bp, Homo sapien
tcggatccttaaaagagcagagcag

SEQ ID NO: 1465748 - DNA, 25 bp, Homo sapien
tgatggagagggtgggaggtgtagt

SEQ ID NO: 1465749 - DNA, 25 bp, Homo sapien
agcagagcaggtgatggagagggtg

SEQ ID NO: 1465750 - DNA, 25 bp, Homo sapien
ctgagatgacccacagtcctcagct

SEQ ID NO: 1465751 - DNA, 25 bp, Homo sapien
ggactgtgaaatcgccctgagatga

SEQ ID NO: 1465752 - DNA, 25 bp, Homo sapien
gcatgtggggactgtgaaatcgccc

SEQ ID NO: 1465753 - DNA, 25 bp, Homo sapien
cctgagatgacccacagtcctcagc

SEQ ID NO: 1465754 - DNA, 25 bp, Homo sapien
taccgaagtaaccagtaggcattcc

SEQ ID NO: 1465755 - DNA, 25 bp, Homo sapien
agtgaaggtcctcacaccaagatat

SEQ ID NO: 1465756 - DNA, 25 bp, Homo sapien
ttaccgaagtaaccagtaggcattc

SEQ ID NO: 1465757 - DNA, 25 bp, Homo sapien
taggcattcccagatacagtgaagg

SEQ ID NO: 1465758 - DNA, 25 bp, Homo sapien
gatgagtttcgtctcctccactgga

SEQ ID NO: 1465759 - DNA, 25 bp, Homo sapien
agatgcacctggcatgaggcgtgcc

SEQ ID NO: 1465760 - DNA, 25 bp, Homo sapien
aggagcatggcccctgtccacagat

SEQ ID NO: 1465761 - DNA, 25 bp, Homo sapien
acagaggcagatgagtttcgtctcc

SEQ ID NO: 1465762 - DNA, 25 bp, Homo sapien
actggtggctgtggtggctcgctgg

SEQ ID NO: 1465763 - DNA, 25 bp, Homo sapien
attttccgttccccagcattggcgg

SEQ ID NO: 1465764 - DNA, 25 bp, Homo sapien
ctccctcattttccgttccccagca

SEQ ID NO: 1465765 - DNA, 25 bp, Homo sapien
ggactggtggctgtggtggctcgct

SEQ ID NO: 1465766 - DNA, 25 bp, Homo sapien
gacatccagtgtgattccaagcagg

SEQ ID NO: 1465767 - DNA, 25 bp, Homo sapien
ggactagtgcttaccataacccagg

SEQ ID NO: 1465768 - DNA, 25 bp, Homo sapien
tacaagacaaaacggagacatccag

SEQ ID NO: 1465769 - DNA, 25 bp, Homo sapien
tccaagcaggctcatggactagtgc

SEQ ID NO: 1465770 - DNA, 25 bp, Homo sapien
agacttctgccagctcgcttctgct

SEQ ID NO: 1465771 - DNA, 25 bp, Homo sapien
acttctgccagctcgcttctgctct

SEQ ID NO: 1465772 - DNA, 25 bp, Homo sapien
tctgccagctcgcttctgctctgct

SEQ ID NO: 1465773 - DNA, 25 bp, Homo sapien
gagacttctgccagctcgcttctgc

SEQ ID NO: 1465774 - DNA, 25 bp, Homo sapien
ctcctcttgccctggcggacgtggg

SEQ ID NO: 1465775 - DNA, 25 bp, Homo sapien
caggccctcgcaatgtattcttgct

SEQ ID NO: 1465776 - DNA, 25 bp, Homo sapien
gaagctaaggttgcactggaagatt

SEQ ID NO: 1465777 - DNA, 25 bp, Homo sapien
ttctcagacaaaccctgggctgggc

SEQ ID NO: 1465778 - DNA, 25 bp, Homo sapien
ctggaagattttctagcagctttct

SEQ ID NO: 1465779 - DNA, 25 bp, Homo sapien
acgggatccgcttactcttggttct

SEQ ID NO: 1465780 - DNA, 25 bp, Homo sapien
tctgaacgggatccgcttactcttg

SEQ ID NO: 1465781 - DNA, 25 bp, Homo sapien
cgagtggtctgaacgggatccgctt

SEQ ID NO: 1465782 - DNA, 25 bp, Homo sapien
ccgcttactcttggttctcacgggc

SEQ ID NO: 1465783 - DNA, 25 bp, Homo sapien
aaacagaaagcatgaggacgcaaga

SEQ ID NO: 1465784 - DNA, 25 bp, Homo sapien
aacagaaagcatgaggacgcaagac

SEQ ID NO: 1465785 - DNA, 25 bp, Homo sapien
acagaaagcatgaggacgcaagact

SEQ ID NO: 1465786 - DNA, 25 bp, Homo sapien
ctgcttctgatggtggtgctggtga

SEQ ID NO: 1465787 - DNA, 25 bp, Homo sapien
ttaaactgcttgtccccgggtgcat

SEQ ID NO: 1465788 - DNA, 25 bp, Homo sapien
agcttctctgcctagtaacacacac

SEQ ID NO: 1465789 - DNA, 25 bp, Homo sapien
aaggcacagccctcaggcgatgcca

SEQ ID NO: 1465790 - DNA, 25 bp, Homo sapien
aaaaggtgaataagtaaggatgtct

SEQ ID NO: 1465791 - DNA, 25 bp, Homo sapien
gaggatgttaacctgcctggttgga

SEQ ID NO: 1465792 - DNA, 25 bp, Homo sapien
tagagtgaggatgttaacctgcctg

SEQ ID NO: 1465793 - DNA, 25 bp, Homo sapien
tgttaacctgcctggttggaattct

SEQ ID NO: 1465794 - DNA, 25 bp, Homo sapien
cacgtggtgcataggcacttgggta

SEQ ID NO: 1465795 - DNA, 25 bp, Homo sapien
taagaggtcgccaggaaatacagct

SEQ ID NO: 1465796 - DNA, 25 bp, Homo sapien
caaacttgtaaatagatccacgtgg

SEQ ID NO: 1465797 - DNA, 25 bp, Homo sapien
cacttgggtaagaggtcgccaggaa

SEQ ID NO: 1465798 - DNA, 25 bp, Homo sapien
tttgtttgccagatgtaccatgact

SEQ ID NO: 1465799 - DNA, 25 bp, Homo sapien
tctacggtgagaagtctgcaagcac

SEQ ID NO: 1465800 - DNA, 25 bp, Homo sapien
aacacgttggcaagtctaccccatg

SEQ ID NO: 1465801 - DNA, 25 bp, Homo sapien
tgtctgttttctacggtgagaagtc

SEQ ID NO: 1465802 - DNA, 25 bp, Homo sapien
aaggcacaggacgtggtgctgccca

SEQ ID NO: 1465803 - DNA, 25 bp, Homo sapien
ttcatcttcagcaaaggagatgatg

SEQ ID NO: 1465804 - DNA, 25 bp, Homo sapien
gtgctgcccaggcaaagatcctgct

SEQ ID NO: 1465805 - DNA, 25 bp, Homo sapien
aacttgctatgggtgctgatcagcc

SEQ ID NO: 1465806 - DNA, 25 bp, Homo sapien
gggattcacaaccacgatagacata

SEQ ID NO: 1465807 - DNA, 25 bp, Homo sapien
gatagacataacctccagtgactga

SEQ ID NO: 1465808 - DNA, 25 bp, Homo sapien
tgcatggccataagcatagattggc

SEQ ID NO: 1465809 - DNA, 25 bp, Homo sapien
gatatacaggccattgagatttggg

SEQ ID NO: 1465810 - DNA, 25 bp, Homo sapien
agtgagtgtcgtggcctaaaattga

SEQ ID NO: 1465811 - DNA, 25 bp, Homo sapien
aagagagtgagtgtcgtggcctaaa

SEQ ID NO: 1465812 - DNA, 25 bp, Homo sapien
aaagagagtgagtgtcgtggcctaa

SEQ ID NO: 1465813 - DNA, 25 bp, Homo sapien
gagagtgagtgtcgtggcctaaaat

SEQ ID NO: 1465814 - DNA, 25 bp, Homo sapien
acttcctacttaactgctatctgca

SEQ ID NO: 1465815 - DNA, 25 bp, Homo sapien
aggcaagcaagtgaatcatgtttat

SEQ ID NO: 1465816 - DNA, 25 bp, Homo sapien
caataggccatccacaatatttgca

SEQ ID NO: 1465817 - DNA, 25 bp, Homo sapien
ccatctatgaggcagtgacctggaa

SEQ ID NO: 1465818 - DNA, 25 bp, Homo sapien
tctccagccatagtttccacctttc

SEQ ID NO: 1465819 - DNA, 25 bp, Homo sapien
tccagccatagtttccacctttcaa

SEQ ID NO: 1465820 - DNA, 25 bp, Homo sapien
ctccagccatagtttccacctttca

SEQ ID NO: 1465821 - DNA, 25 bp, Homo sapien
ctctccagccatagtttccaccttt

SEQ ID NO: 1465822 - DNA, 25 bp, Homo sapien
cacgtccccacagaatatccggcct

SEQ ID NO: 1465823 - DNA, 25 bp, Homo sapien
ggcctcggccctggcgcgtgatggg

SEQ ID NO: 1465824 - DNA, 25 bp, Homo sapien
ggccctggcgcgtgatggggtcccc

SEQ ID NO: 1465825 - DNA, 25 bp, Homo sapien
ctggcgcgtgatggggtcccctcgg

SEQ ID NO: 1465826 - DNA, 25 bp, Homo sapien
cagaaacaaatggattgtccgaggg

SEQ ID NO: 1465827 - DNA, 25 bp, Homo sapien
tgatcccataggcatagatggcggg

SEQ ID NO: 1465828 - DNA, 25 bp, Homo sapien
gccctgttcacatcgatccttaaaa

SEQ ID NO: 1465829 - DNA, 25 bp, Homo sapien
gggactcggtaccgcttgccatgtg

SEQ ID NO: 1465830 - DNA, 25 bp, Homo sapien
tgtacatatagccatccaggccaaa

SEQ ID NO: 1465831 - DNA, 25 bp, Homo sapien
ttgtccgccattatggtttgaggct

SEQ ID NO: 1465832 - DNA, 25 bp, Homo sapien
tctgagcatttccaaacaggccaaa

SEQ ID NO: 1465833 - DNA, 25 bp, Homo sapien
gaggctggttcttcaatctccaaga

SEQ ID NO: 1465834 - DNA, 25 bp, Homo sapien
ggatcagcccgagaaaccttcatct

SEQ ID NO: 1465835 - DNA, 25 bp, Homo sapien
tcttgtccaggcacgaataataaat

SEQ ID NO: 1465836 - DNA, 25 bp, Homo sapien
tcaggtcagctttgttaggatcagc

SEQ ID NO: 1465837 - DNA, 25 bp, Homo sapien
ctcactaattcggatcttttctacc

SEQ ID NO: 1465838 - DNA, 25 bp, Homo sapien
ctcccatcagggaggtagacccaca

SEQ ID NO: 1465839 - DNA, 25 bp, Homo sapien
aacaaagaagcgatgggtgccgtcc

SEQ ID NO: 1465840 - DNA, 25 bp, Homo sapien
gggtggtcaacacgatgttcttgag

SEQ ID NO: 1465841 - DNA, 25 bp, Homo sapien
ccaggaagggttgctccaggcgact

SEQ ID NO: 1465842 - DNA, 25 bp, Homo sapien
tgacagttagaatggaaggcagagc

SEQ ID NO: 1465843 - DNA, 25 bp, Homo sapien
tggcggttgagatagtcgttcctca

SEQ ID NO: 1465844 - DNA, 25 bp, Homo sapien
tcctcaggacattagggaagcaata

SEQ ID NO: 1465845 - DNA, 25 bp, Homo sapien
gggtaccgtcccttccatgagactc

SEQ ID NO: 1465846 - DNA, 25 bp, Homo sapien
ggctgagctcaatcaaaacgatgcc

SEQ ID NO: 1465847 - DNA, 25 bp, Homo sapien
ctctgtgagtcactgctactcagca

SEQ ID NO: 1465848 - DNA, 25 bp, Homo sapien
gagtcactgctactcagcagcttgc

SEQ ID NO: 1465849 - DNA, 25 bp, Homo sapien
tttcaggctgagctcaatcaaaacg

SEQ ID NO: 1465850 - DNA, 25 bp, Homo sapien
cagccgaaggactcatagtcagagc

SEQ ID NO: 1465851 - DNA, 25 bp, Homo sapien
tccatgatgtcccagtaccgggcag

SEQ ID NO: 1465852 - DNA, 25 bp, Homo sapien
tagtcagagcaaaactcaaggtgca

SEQ ID NO: 1465853 - DNA, 25 bp, Homo sapien
tgcggcggtccttgtgctgatcaca

SEQ ID NO: 1465854 - DNA, 25 bp, Homo sapien
tgcagaccaccacacagattaggag

SEQ ID NO: 1465855 - DNA, 25 bp, Homo sapien
gattaggagtggacgttctcagcat

SEQ ID NO: 1465856 - DNA, 25 bp, Homo sapien
cagggggcccggcaatgcagaccac

SEQ ID NO: 1465857 - DNA, 25 bp, Homo sapien
cacagattaggagtggacgttctca

SEQ ID NO: 1465858 - DNA, 25 bp, Homo sapien
ttgggaacactcgggctgctgtgtt

SEQ ID NO: 1465859 - DNA, 25 bp, Homo sapien
ttggccttgggaacactcgggctgc

SEQ ID NO: 1465860 - DNA, 25 bp, Homo sapien
tgtttgctcaggttggcttccctgc

SEQ ID NO: 1465861 - DNA, 25 bp, Homo sapien
gtgtttgctcaggttggcttccctg

SEQ ID NO: 1465862 - DNA, 25 bp, Homo sapien
ccaggtaggacctgagagtattttc

SEQ ID NO: 1465863 - DNA, 25 bp, Homo sapien
gatttcccctttgtcgtgaacaata

SEQ ID NO: 1465864 - DNA, 25 bp, Homo sapien
gagtgcattatctcatccaggtagg

SEQ ID NO: 1465865 - DNA, 25 bp, Homo sapien
tcaaaccctgggatatggaagaatg

SEQ ID NO: 1465866 - DNA, 25 bp, Homo sapien
tcaaaccaggagatacagcctcaca

SEQ ID NO: 1465867 - DNA, 25 bp, Homo sapien
ccagtcacgacggaaatgctaatca

SEQ ID NO: 1465868 - DNA, 25 bp, Homo sapien
cacacctggtagaatgaatcgtatc

SEQ ID NO: 1465869 - DNA, 25 bp, Homo sapien
gaagaggaagcgcttgtatgctgct

SEQ ID NO: 1465870 - DNA, 25 bp, Homo sapien
tggtgccaacacctatgagctgtga

SEQ ID NO: 1465871 - DNA, 25 bp, Homo sapien
tagtaaccatataagcaagcagtcc

SEQ ID NO: 1465872 - DNA, 25 bp, Homo sapien
tccagagagttgcatgtcgtcacag

SEQ ID NO: 1465873 - DNA, 25 bp, Homo sapien
gaagcagcttaaacatcagtggacc

SEQ ID NO: 1465874 - DNA, 25 bp, Homo sapien
gtgtccagtcaaataccgctgcatc

SEQ ID NO: 1465875 - DNA, 25 bp, Homo sapien
tgtccagtcaaataccgctgcatcc

SEQ ID NO: 1465876 - DNA, 25 bp, Homo sapien
gtccagtcaaataccgctgcatcct

SEQ ID NO: 1465877 - DNA, 25 bp, Homo sapien
cagccagcccactctactgctatga

SEQ ID NO: 1465878 - DNA, 25 bp, Homo sapien
aattagtcctctagagtcaaaggtc

SEQ ID NO: 1465879 - DNA, 25 bp, Homo sapien
caggaggttattttgccccaaactg

SEQ ID NO: 1465880 - DNA, 25 bp, Homo sapien
gtcatgtctttatactgaaagagtc

SEQ ID NO: 1465881 - DNA, 25 bp, Homo sapien
attcctcaatagaactcatcaccaa

SEQ ID NO: 1465882 - DNA, 25 bp, Homo sapien
tggattaattagaatataaaagtag

SEQ ID NO: 1465883 - DNA, 25 bp, Homo sapien
ctaaaatggattaattagaatataa

SEQ ID NO: 1465884 - DNA, 25 bp, Homo sapien
aaatggattaattagaatataaaag

SEQ ID NO: 1465885 - DNA, 25 bp, Homo sapien
ggattaattagaatataaaagtaga

SEQ ID NO: 1465886 - DNA, 25 bp, Homo sapien
tgtagtaatataagcttcttaatac

SEQ ID NO: 1465887 - DNA, 25 bp, Homo sapien
tgtaattagtttgtcatttgaagaa

SEQ ID NO: 1465888 - DNA, 25 bp, Homo sapien
ttgcaaacaataactgctgtagagc

SEQ ID NO: 1465889 - DNA, 25 bp, Homo sapien
aaggcagtaatattgtttctctagc

SEQ ID NO: 1465890 - DNA, 25 bp, Homo sapien
aactgtgaaataactaaaattcagt

SEQ ID NO: 1465891 - DNA, 25 bp, Homo sapien
gtagctacaactgtgaaataactaa

SEQ ID NO: 1465892 - DNA, 25 bp, Homo sapien
actgtgaaataactaaaattcagta

SEQ ID NO: 1465893 - DNA, 25 bp, Homo sapien
tgtgtagctacaactgtgaaataac

SEQ ID NO: 1465894 - DNA, 25 bp, Homo sapien
tgctttaaaatataccggaaatatc

SEQ ID NO: 1465895 - DNA, 25 bp, Homo sapien
agatctcttcatccgcttaattttc

SEQ ID NO: 1465896 - DNA, 25 bp, Homo sapien
tcttcatccgcttaattttcttccc

SEQ ID NO: 1465897 - DNA, 25 bp, Homo sapien
ttcctaacagtaaaccagccacaaa

SEQ ID NO: 1465898 - DNA, 25 bp, Homo sapien
tttcctaacagtaaaccagccacaa

SEQ ID NO: 1465899 - DNA, 25 bp, Homo sapien
ttttcctaacagtaaaccagccaca

SEQ ID NO: 1465900 - DNA, 25 bp, Homo sapien
ccactcttcttgaacccacgcaagg

SEQ ID NO: 1465901 - DNA, 25 bp, Homo sapien
ttttgcccaaaagtagctgaaatga

SEQ ID NO: 1465902 - DNA, 25 bp, Homo sapien
cttcttgaacccacgcaaggtggtt

SEQ ID NO: 1465903 - DNA, 25 bp, Homo sapien
actcttcttgaacccacgcaaggtg

SEQ ID NO: 1465904 - DNA, 25 bp, Homo sapien
gttatattcttagtgcatccggcaa

SEQ ID NO: 1465905 - DNA, 25 bp, Homo sapien
gagatggtacaatctgatacaaaat

SEQ ID NO: 1465906 - DNA, 25 bp, Homo sapien
atgagatggtacaatctgatacaaa

SEQ ID NO: 1465907 - DNA, 25 bp, Homo sapien
caacatcaatttatgagatggtaca

SEQ ID NO: 1465908 - DNA, 25 bp, Homo sapien
ttccaacatcaatttatgagatggt

SEQ ID NO: 1465909 - DNA, 25 bp, Homo sapien
ccatgaaacacttagggacaaattt

SEQ ID NO: 1465910 - DNA, 25 bp, Homo sapien
catgatatgattccaagacttgcta

SEQ ID NO: 1465911 - DNA, 25 bp, Homo sapien
tggcaataactcacatttagaagac

SEQ ID NO: 1465912 - DNA, 25 bp, Homo sapien
tagattcaaaatctcagcaagacct

SEQ ID NO: 1465913 - DNA, 25 bp, Homo sapien
ttactactcttaggcagcaactcct

SEQ ID NO: 1465914 - DNA, 25 bp, Homo sapien
tgaatgtcgatggtacagtcacttc

SEQ ID NO: 1465915 - DNA, 25 bp, Homo sapien
tctcaggtagctacccaagaaacat

SEQ ID NO: 1465916 - DNA, 25 bp, Homo sapien
catgggacacccacaagaggctatt

SEQ ID NO: 1465917 - DNA, 25 bp, Homo sapien
tagtgtggatgatacatacatggag

SEQ ID NO: 1465918 - DNA, 25 bp, Homo sapien
aatatcagtgcagagtattccaacc

SEQ ID NO: 1465919 - DNA, 25 bp, Homo sapien
cagtgcagagtattccaaccagggt

SEQ ID NO: 1465920 - DNA, 25 bp, Homo sapien
tgtttatctcagtgtactgtacatt

SEQ ID NO: 1465921 - DNA, 25 bp, Homo sapien
aaccctggtcaaacatcgagataaa

SEQ ID NO: 1465922 - DNA, 25 bp, Homo sapien
ggcctaagaatgttttaatgtagat

SEQ ID NO: 1465923 - DNA, 25 bp, Homo sapien
aatggcctaagaatgttttaatgta

SEQ ID NO: 1465924 - DNA, 25 bp, Homo sapien
aaagttagaaagcaatggcctaaga

SEQ ID NO: 1465925 - DNA, 25 bp, Homo sapien
aaagttgtataagtagatatgggca

SEQ ID NO: 1465926 - DNA, 25 bp, Homo sapien
catatgcataattggtgagtacctc

SEQ ID NO: 1465927 - DNA, 25 bp, Homo sapien
catttggatttgatggaaacttttc

SEQ ID NO: 1465928 - DNA, 25 bp, Homo sapien
tgggctccatctcgatccccataga

SEQ ID NO: 1465929 - DNA, 25 bp, Homo sapien
cagctgtggttgaacacatcctggg

SEQ ID NO: 1465930 - DNA, 25 bp, Homo sapien
cataactcttcacaaaagggtccca

SEQ ID NO: 1465931 - DNA, 25 bp, Homo sapien
ctacataactcttcacaaaagggtc

SEQ ID NO: 1465932 - DNA, 25 bp, Homo sapien
gggctactgcattgtaagcataatc

SEQ ID NO: 1465933 - DNA, 25 bp, Homo sapien
ctgtaaaagccctttataggcctga

SEQ ID NO: 1465934 - DNA, 25 bp, Homo sapien
gaaggtataatgcatgttgtaagga

SEQ ID NO: 1465935 - DNA, 25 bp, Homo sapien
cccgggaagacgtattttcaccatg

SEQ ID NO: 1465936 - DNA, 25 bp, Homo sapien
tagcatctttaagcattccatgatg

SEQ ID NO: 1465937 - DNA, 25 bp, Homo sapien
taaataattcatgacgccaatattt

SEQ ID NO: 1465938 - DNA, 25 bp, Homo sapien
ccaatatttttcatccggttagcaa

SEQ ID NO: 1465939 - DNA, 25 bp, Homo sapien
taattcatgacgccaatatttttca

SEQ ID NO: 1465940 - DNA, 25 bp, Homo sapien
caatatttttcatccggttagcaaa

SEQ ID NO: 1465941 - DNA, 25 bp, Homo sapien
tttcacttccgagcttccaaataat

SEQ ID NO: 1465942 - DNA, 25 bp, Homo sapien
atttcacttccgagcttccaaataa

SEQ ID NO: 1465943 - DNA, 25 bp, Homo sapien
cattcagaaagtgcaggttgcagtt

SEQ ID NO: 1465944 - DNA, 25 bp, Homo sapien
tccaagaactggttaaggcaaaggc

SEQ ID NO: 1465945 - DNA, 25 bp, Homo sapien
caggacaaggagatcaggagtgcca

SEQ ID NO: 1465946 - DNA, 25 bp, Homo sapien
tcaaagtaggcctcaatgaaaaggg

SEQ ID NO: 1465947 - DNA, 25 bp, Homo sapien
aaacaagcacttgttgtctgagcaa

SEQ ID NO: 1465948 - DNA, 25 bp, Homo sapien
aataactgtacatgtattctgcagc

SEQ ID NO: 1465949 - DNA, 25 bp, Homo sapien
tgttgtctgagcaaaatccttcctc

SEQ ID NO: 1465950 - DNA, 25 bp, Homo sapien
tgcttcagcagagcttcttggataa

SEQ ID NO: 1465951 - DNA, 25 bp, Homo sapien
ggaaaatgcattcctgcaccactga

SEQ ID NO: 1465952 - DNA, 25 bp, Homo sapien
caggcccttttaattcttcactgaa

SEQ ID NO: 1465953 - DNA, 25 bp, Homo sapien
tgcattcctgcaccactgagcacag

SEQ ID NO: 1465954 - DNA, 25 bp, Homo sapien
cacagtttctacgtatgtttgaagc

SEQ ID NO: 1465955 - DNA, 25 bp, Homo sapien
taggagagctttatatgagcaggcg

SEQ ID NO: 1465956 - DNA, 25 bp, Homo sapien
gtaaagctaaactcagtctccgact

SEQ ID NO: 1465957 - DNA, 25 bp, Homo sapien
caccggaagacgagttaggagagct

SEQ ID NO: 1465958 - DNA, 25 bp, Homo sapien
cacgtgaagaaattcccaccggaag

SEQ ID NO: 1465959 - DNA, 25 bp, Homo sapien
cattcaaaagcggagaatgtcactt

SEQ ID NO: 1465960 - DNA, 25 bp, Homo sapien
tggcggctgggcgaagggagcattc

SEQ ID NO: 1465961 - DNA, 25 bp, Homo sapien
ctgggcgaagggagcattcaaaagc

SEQ ID NO: 1465962 - DNA, 25 bp, Homo sapien
cgaagggagcattcaaaagcggaga

SEQ ID NO: 1465963 - DNA, 25 bp, Homo sapien
ctagtggctgtgatgagataaatcc

SEQ ID NO: 1465964 - DNA, 25 bp, Homo sapien
ccgagaaattcactacgatgggcca

SEQ ID NO: 1465965 - DNA, 25 bp, Homo sapien
gatgggccattggtttctgctcggc

SEQ ID NO: 1465966 - DNA, 25 bp, Homo sapien
caatttgggcgagaatttcctttgc

SEQ ID NO: 1465967 - DNA, 25 bp, Homo sapien
ctgcggacccgtctgggtcaacttt

SEQ ID NO: 1465968 - DNA, 25 bp, Homo sapien
tgcggacccgtctgggtcaactttc

SEQ ID NO: 1465969 - DNA, 25 bp, Homo sapien
gggtcaactttcatgagggacattg

SEQ ID NO: 1465970 - DNA, 25 bp, Homo sapien
tctgggtcaactttcatgagggaca

SEQ ID NO: 1465971 - DNA, 25 bp, Homo sapien
catcttaattcctctgttggcttta

SEQ ID NO: 1465972 - DNA, 25 bp, Homo sapien
gcattattgctttacagtgtttctg

SEQ ID NO: 1465973 - DNA, 25 bp, Homo sapien
tcacagccttagagttaaaattatg

SEQ ID NO: 1465974 - DNA, 25 bp, Homo sapien
aatgtgcttctcttatagacaacag

SEQ ID NO: 1465975 - DNA, 25 bp, Homo sapien
tatatcatatctatgcacattgtta

SEQ ID NO: 1465976 - DNA, 25 bp, Homo sapien
gtcatatatatcatatctatgcaca

SEQ ID NO: 1465977 - DNA, 25 bp, Homo sapien
atatatatcatatctatgcacattg

SEQ ID NO: 1465978 - DNA, 25 bp, Homo sapien
ctttgttgtcatatatatcatatct

SEQ ID NO: 1465979 - DNA, 25 bp, Homo sapien
gagagaagtaactggtattagcaag

SEQ ID NO: 1465980 - DNA, 25 bp, Homo sapien
gagaagtaactggtattagcaagag

SEQ ID NO: 1465981 - DNA, 25 bp, Homo sapien
tgagagaagtaactggtattagcaa

SEQ ID NO: 1465982 - DNA, 25 bp, Homo sapien
agagaagtaactggtattagcaaga

SEQ ID NO: 1465983 - DNA, 25 bp, Homo sapien
tgccaagttcttcaaccagggctgg

SEQ ID NO: 1465984 - DNA, 25 bp, Homo sapien
gagcattgtagccactcttctctgg

SEQ ID NO: 1465985 - DNA, 25 bp, Homo sapien
tgagtaaccttagagattgcaatga

SEQ ID NO: 1465986 - DNA, 25 bp, Homo sapien
ggagagcattgtagccactcttctg

SEQ ID NO: 1465987 - DNA, 25 bp, Homo sapien
taggacctactactctaaggtgcga

SEQ ID NO: 1465988 - DNA, 25 bp, Homo sapien
taatcaaagagcaccacgggatggt

SEQ ID NO: 1465989 - DNA, 25 bp, Homo sapien
tttctatcaacgaccaagcaggcca

SEQ ID NO: 1465990 - DNA, 25 bp, Homo sapien
gaatctcaagatctcagcccaagga

SEQ ID NO: 1465991 - DNA, 25 bp, Homo sapien
gaaatgactctagacttgaaaacca

SEQ ID NO: 1465992 - DNA, 25 bp, Homo sapien
ccagcaatagttctcaggtctcaaa

SEQ ID NO: 1465993 - DNA, 25 bp, Homo sapien
tgatgatgagacaaccagactcgtt

SEQ ID NO: 1465994 - DNA, 25 bp, Homo sapien
caaagtctggcgttgagaaatatcc

SEQ ID NO: 1465995 - DNA, 25 bp, Homo sapien
tctcgctcagcatgttcagacagtc

SEQ ID NO: 1465996 - DNA, 25 bp, Homo sapien
catatattaaactcgtcagtgggag

SEQ ID NO: 1465997 - DNA, 25 bp, Homo sapien
gctctgggctgctgaatcgtctggc

SEQ ID NO: 1465998 - DNA, 25 bp, Homo sapien
tatctgcttggttaggaagtctgtc

SEQ ID NO: 1465999 - DNA, 25 bp, Homo sapien
caatagctcaaagctcgtgctgcag

SEQ ID NO: 1466000 - DNA, 25 bp, Homo sapien
cgtgctgcagaaagagctatagctg

SEQ ID NO: 1466001 - DNA, 25 bp, Homo sapien
gaattacagaagacagagcggtcat

SEQ ID NO: 1466002 - DNA, 25 bp, Homo sapien
cagatcgctacccatgagaagaaag

SEQ ID NO: 1466003 - DNA, 25 bp, Homo sapien
cccttatctttcaattaaagttctg

SEQ ID NO: 1466004 - DNA, 25 bp, Homo sapien
tgtaagcccttatctttcaattaaa

SEQ ID NO: 1466005 - DNA, 25 bp, Homo sapien
gaagtgtaagcccttatctttcaat

SEQ ID NO: 1466006 - DNA, 25 bp, Homo sapien
ttttactctgaagtgtaagccctta

SEQ ID NO: 1466007 - DNA, 25 bp, Homo sapien
tataccatagtttggagtgtgcagc

SEQ ID NO: 1466008 - DNA, 25 bp, Homo sapien
tgtgagtatccgcttaaaacaccgt

SEQ ID NO: 1466009 - DNA, 25 bp, Homo sapien
cagcagcagtcatttcagtcagacg

SEQ ID NO: 1466010 - DNA, 25 bp, Homo sapien
ttgcacaagcacagatgtacatgac

SEQ ID NO: 1466011 - DNA, 25 bp, Homo sapien
gaaccagagccattaatgtgcaggg

SEQ ID NO: 1466012 - DNA, 25 bp, Homo sapien
tcaaggatcagtggacgggcctcta

SEQ ID NO: 1466013 - DNA, 25 bp, Homo sapien
caaagagtctaaaaccatgcaggaa

SEQ ID NO: 1466014 - DNA, 25 bp, Homo sapien
gacttgaaccctgatctgtccacaa

SEQ ID NO: 1466015 - DNA, 25 bp, Homo sapien
ccctaccagggtactcgatgaaggc

SEQ ID NO: 1466016 - DNA, 25 bp, Homo sapien
ggtacagctaccatgatgaacagca

SEQ ID NO: 1466017 - DNA, 25 bp, Homo sapien
gatgaaggcaaggtaaatgcaccca

SEQ ID NO: 1466018 - DNA, 25 bp, Homo sapien
gaataagtctacatcagttctctgg

SEQ ID NO: 1466019 - DNA, 25 bp, Homo sapien
aaatctaatactctctgcgcctgtg

SEQ ID NO: 1466020 - DNA, 25 bp, Homo sapien
taattacccgttgagccagttccca

SEQ ID NO: 1466021 - DNA, 25 bp, Homo sapien
gagcagcttggataagacccgagac

SEQ ID NO: 1466022 - DNA, 25 bp, Homo sapien
gaacgtggccttggagtcaaacctg

SEQ ID NO: 1466023 - DNA, 25 bp, Homo sapien
tatgtagggcctacagaaggtactc

SEQ ID NO: 1466024 - DNA, 25 bp, Homo sapien
taatatatgtagggcctacagaagg

SEQ ID NO: 1466025 - DNA, 25 bp, Homo sapien
tatatgtagggcctacagaaggtac

SEQ ID NO: 1466026 - DNA, 25 bp, Homo sapien
tgtagggcctacagaaggtactctg

SEQ ID NO: 1466027 - DNA, 25 bp, Homo sapien
tcagctctgcggaccttttgggcct

SEQ ID NO: 1466028 - DNA, 25 bp, Homo sapien
tctttggacaagtgcctgacatctg

SEQ ID NO: 1466029 - DNA, 25 bp, Homo sapien
tactctgcaggttaatatggctcca

SEQ ID NO: 1466030 - DNA, 25 bp, Homo sapien
tgacctccatttataacctgtgcgt

SEQ ID NO: 1466031 - DNA, 25 bp, Homo sapien
taagagaatttgcaccaggcgttcc

SEQ ID NO: 1466032 - DNA, 25 bp, Homo sapien
tagtgtacaccagctgaatacggag

SEQ ID NO: 1466033 - DNA, 25 bp, Homo sapien
tgtaagagacttactgccgtcaggc

SEQ ID NO: 1466034 - DNA, 25 bp, Homo sapien
gacacgcaccatttagacctttagg

SEQ ID NO: 1466035 - DNA, 25 bp, Homo sapien
tctatttgagaatggttttctgaga

SEQ ID NO: 1466036 - DNA, 25 bp, Homo sapien
caagagttgtttgacctgatgttcc

SEQ ID NO: 1466037 - DNA, 25 bp, Homo sapien
tcacatgctttctttacgatcctca

SEQ ID NO: 1466038 - DNA, 25 bp, Homo sapien
gagtgagtttacattagtagcaaga

SEQ ID NO: 1466039 - DNA, 25 bp, Homo sapien
tgaaacctagtgtatgtcttgtcac

SEQ ID NO: 1466040 - DNA, 25 bp, Homo sapien
cgtttctaagaacgaacttcagaca

SEQ ID NO: 1466041 - DNA, 25 bp, Homo sapien
tggaattgcaccatacttaaagtct

SEQ ID NO: 1466042 - DNA, 25 bp, Homo sapien
aaaaggagcaaaagcttcaatgtga

SEQ ID NO: 1466043 - DNA, 25 bp, Homo sapien
tccacagaagagcataggccacttt

SEQ ID NO: 1466044 - DNA, 25 bp, Homo sapien
cataattgagaaactggtaagctgt

SEQ ID NO: 1466045 - DNA, 25 bp, Homo sapien
aagattccagtgtagcttctctgag

SEQ ID NO: 1466046 - DNA, 25 bp, Homo sapien
tgagaagttgtgagccagtccataa

SEQ ID NO: 1466047 - DNA, 25 bp, Homo sapien
ttgtagttatatcgccaatggctga

SEQ ID NO: 1466048 - DNA, 25 bp, Homo sapien
gaagcagcaatattcagcctgaaag

SEQ ID NO: 1466049 - DNA, 25 bp, Homo sapien
gtcatctccaactaattgtgtctgg

SEQ ID NO: 1466050 - DNA, 25 bp, Homo sapien
taaaattgtcttatttatgaagcag

SEQ ID NO: 1466051 - DNA, 25 bp, Homo sapien
catataaactatacttatgtgaagg

SEQ ID NO: 1466052 - DNA, 25 bp, Homo sapien
atcttatggtttatgagaaaagaga

SEQ ID NO: 1466053 - DNA, 25 bp, Homo sapien
tgaaggatagcagatgcttcatata

SEQ ID NO: 1466054 - DNA, 25 bp, Homo sapien
gaaaggtatttgtagttcatataaa

SEQ ID NO: 1466055 - DNA, 25 bp, Homo sapien
taatccaatcaagatgagagacaag

SEQ ID NO: 1466056 - DNA, 25 bp, Homo sapien
tacagtctagggatttgacaactca

SEQ ID NO: 1466057 - DNA, 25 bp, Homo sapien
cccctagagctattgtggactgaat

SEQ ID NO: 1466058 - DNA, 25 bp, Homo sapien
tcagcaacatcaaacaaaaggtact

SEQ ID NO: 1466059 - DNA, 25 bp, Homo sapien
cacaacagtattgttccaggaagca

SEQ ID NO: 1466060 - DNA, 25 bp, Homo sapien
gaaaaacaatctggtcatctggaaa

SEQ ID NO: 1466061 - DNA, 25 bp, Homo sapien
cagacagaccttcttaggcagcaga

SEQ ID NO: 1466062 - DNA, 25 bp, Homo sapien
gggatactgatctggccaaggcaca

SEQ ID NO: 1466063 - DNA, 25 bp, Homo sapien
tccggcctactggtctgggtacggc

SEQ ID NO: 1466064 - DNA, 25 bp, Homo sapien
gtacggcttgcttcctgcctgttga

SEQ ID NO: 1466065 - DNA, 25 bp, Homo sapien
gcctactggtctgggtacggcttgc

SEQ ID NO: 1466066 - DNA, 25 bp, Homo sapien
ctggtctgggtacggcttgcttcct

SEQ ID NO: 1466067 - DNA, 25 bp, Homo sapien
atgaagataaagtggtttcttggtc

SEQ ID NO: 1466068 - DNA, 25 bp, Homo sapien
aaagtttgatgtagatgaagataaa

SEQ ID NO: 1466069 - DNA, 25 bp, Homo sapien
tggtttcttggtcaataattgcaat

SEQ ID NO: 1466070 - DNA, 25 bp, Homo sapien
tcattccttgtgcaaagtttgatgt

SEQ ID NO: 1466071 - DNA, 25 bp, Homo sapien
catctccatgaaagcaaaacacttg

SEQ ID NO: 1466072 - DNA, 25 bp, Homo sapien
tatcttgcacaggagttaagtctat

SEQ ID NO: 1466073 - DNA, 25 bp, Homo sapien
tttcaacatgcttctggagctcaat

SEQ ID NO: 1466074 - DNA, 25 bp, Homo sapien
taatttttcaacatgcttctggagc

SEQ ID NO: 1466075 - DNA, 25 bp, Homo sapien
tttttcaacatgcttctggagctca

SEQ ID NO: 1466076 - DNA, 25 bp, Homo sapien
attctgatagtgagtaatgtcattc

SEQ ID NO: 1466077 - DNA, 25 bp, Homo sapien
ttcttatactagtacactggccaga

SEQ ID NO: 1466078 - DNA, 25 bp, Homo sapien
tcataacatctgcaaataaagggac

SEQ ID NO: 1466079 - DNA, 25 bp, Homo sapien
aaatagttaacaggaggcacccttg

SEQ ID NO: 1466080 - DNA, 25 bp, Homo sapien
tcattaaatatgactgaggcgctaa

SEQ ID NO: 1466081 - DNA, 25 bp, Homo sapien
gagtctcagttctggctagattacc

SEQ ID NO: 1466082 - DNA, 25 bp, Homo sapien
tcagttcttccctaattcaaggtag

SEQ ID NO: 1466083 - DNA, 25 bp, Homo sapien
tatctttactaaggaacagctgaag

SEQ ID NO: 1466084 - DNA, 25 bp, Homo sapien
tacatggtgagcatcctgaaagacg

SEQ ID NO: 1466085 - DNA, 25 bp, Homo sapien
gaactctagcaggaaaagaatcagg

SEQ ID NO: 1466086 - DNA, 25 bp, Homo sapien
actctagcaggaaaagaatcaggag

SEQ ID NO: 1466087 - DNA, 25 bp, Homo sapien
ggaactctagcaggaaaagaatcag

SEQ ID NO: 1466088 - DNA, 25 bp, Homo sapien
cgggaactctagcaggaaaagaatc

SEQ ID NO: 1466089 - DNA, 25 bp, Homo sapien
attctcttcttcaccaggtgccaaa

SEQ ID NO: 1466090 - DNA, 25 bp, Homo sapien
ttcttcaccaggtgccaaaattctt

SEQ ID NO: 1466091 - DNA, 25 bp, Homo sapien
tctcttcttcaccaggtgccaaaat

SEQ ID NO: 1466092 - DNA, 25 bp, Homo sapien
aaattctcttcttcaccaggtgcca

SEQ ID NO: 1466093 - DNA, 25 bp, Homo sapien
actcgtttcccaggcaagatgctga

SEQ ID NO: 1466094 - DNA, 25 bp, Homo sapien
gtttcccaggcaagatgctgatata

SEQ ID NO: 1466095 - DNA, 25 bp, Homo sapien
cgtttcccaggcaagatgctgatat

SEQ ID NO: 1466096 - DNA, 25 bp, Homo sapien
tcgtttcccaggcaagatgctgata

SEQ ID NO: 1466097 - DNA, 25 bp, Homo sapien
taagaaaacccagaactatctgaaa

SEQ ID NO: 1466098 - DNA, 25 bp, Homo sapien
gctgatatactgttatcattgttga

SEQ ID NO: 1466099 - DNA, 25 bp, Homo sapien
tgatatcaataataccaaagttgat

SEQ ID NO: 1466100 - DNA, 25 bp, Homo sapien
tgatgtcaatgatatcaataatacc

SEQ ID NO: 1466101 - DNA, 25 bp, Homo sapien
gctgaacatcaaatgggaattcttt

SEQ ID NO: 1466102 - DNA, 25 bp, Homo sapien
cttaatgggacaggctgaacatcaa

SEQ ID NO: 1466103 - DNA, 25 bp, Homo sapien
tgggacaggctgaacatcaaatggg

SEQ ID NO: 1466104 - DNA, 25 bp, Homo sapien
caggctgaacatcaaatgggaattc

SEQ ID NO: 1466105 - DNA, 25 bp, Homo sapien
gaagataaagaaacatgaattcttc

SEQ ID NO: 1466106 - DNA, 25 bp, Homo sapien
aaagaaacatgaattcttccatgaa

SEQ ID NO: 1466107 - DNA, 25 bp, Homo sapien
ctagaataagaagataaagaaacat

SEQ ID NO: 1466108 - DNA, 25 bp, Homo sapien
tagaataagaagataaagaaacatg

SEQ ID NO: 1466109 - DNA, 25 bp, Homo sapien
cttcttcaggtcctccagtttaaat

SEQ ID NO: 1466110 - DNA, 25 bp, Homo sapien
ttggttctagcttcttcaggtcctc

SEQ ID NO: 1466111 - DNA, 25 bp, Homo sapien
cttcaggtcctccagtttaaattct

SEQ ID NO: 1466112 - DNA, 25 bp, Homo sapien
agcttcttcaggtcctccagtttaa

SEQ ID NO: 1466113 - DNA, 25 bp, Homo sapien
gcatgttgcaattttgcctatggtt

SEQ ID NO: 1466114 - DNA, 25 bp, Homo sapien
catgttgcaattttgcctatggttt

SEQ ID NO: 1466115 - DNA, 25 bp, Homo sapien
agcatgttgcaattttgcctatggt

SEQ ID NO: 1466116 - DNA, 25 bp, Homo sapien
aagcatgttgcaattttgcctatgg

SEQ ID NO: 1466117 - DNA, 25 bp, Homo sapien
gagatcatacaagattgggagcatt

SEQ ID NO: 1466118 - DNA, 25 bp, Homo sapien
atccaagtattaatcaggaccaacc

SEQ ID NO: 1466119 - DNA, 25 bp, Homo sapien
caagtattaatcaggaccaaccctg

SEQ ID NO: 1466120 - DNA, 25 bp, Homo sapien
tctgagatcatacaagattgggagc

SEQ ID NO: 1466121 - DNA, 25 bp, Homo sapien
tctgtgaattcagaattattgtgtt

SEQ ID NO: 1466122 - DNA, 25 bp, Homo sapien
tgaattcagaattattgtgttgagc

SEQ ID NO: 1466123 - DNA, 25 bp, Homo sapien
ttcagaattattgtgttgagcttgg

SEQ ID NO: 1466124 - DNA, 25 bp, Homo sapien
aattattgtgttgagcttgggcctc

SEQ ID NO: 1466125 - DNA, 25 bp, Homo sapien
caattttaaacagggtggccagaga

SEQ ID NO: 1466126 - DNA, 25 bp, Homo sapien
atacttccgtaattgcaacacccag

SEQ ID NO: 1466127 - DNA, 25 bp, Homo sapien
gagccctaaggcagaactatgttcc

SEQ ID NO: 1466128 - DNA, 25 bp, Homo sapien
tccaggaaatagcaaggaatgtggg

SEQ ID NO: 1466129 - DNA, 25 bp, Homo sapien
tggtcttaggttgctcaaggaaact

SEQ ID NO: 1466130 - DNA, 25 bp, Homo sapien
aattggtcttaggttgctcaaggaa

SEQ ID NO: 1466131 - DNA, 25 bp, Homo sapien
taagacaaccctgaagttttctgtg

SEQ ID NO: 1466132 - DNA, 25 bp, Homo sapien
agaaattggtcttaggttgctcaag

SEQ ID NO: 1466133 - DNA, 25 bp, Homo sapien
gtaccctgcggctatacattatata

SEQ ID NO: 1466134 - DNA, 25 bp, Homo sapien
gagctcctgtgcgtggtccattaat

SEQ ID NO: 1466135 - DNA, 25 bp, Homo sapien
ttcggttcacatcctgcgcggactc

SEQ ID NO: 1466136 - DNA, 25 bp, Homo sapien
cattttgctctcttcggttcacatc

SEQ ID NO: 1466137 - DNA, 25 bp, Homo sapien
cagaaaccgaaacgaaatcgaggtg

SEQ ID NO: 1466138 - DNA, 25 bp, Homo sapien
tcccctcaatcgcaaacagttccct

SEQ ID NO: 1466139 - DNA, 25 bp, Homo sapien
tttggcagaagaggtatccctggcc

SEQ ID NO: 1466140 - DNA, 25 bp, Homo sapien
gaaggagcgcgagaggagacccttc

SEQ ID NO: 1466141 - DNA, 25 bp, Homo sapien
aaaacacggctcaccagaaagaggg

SEQ ID NO: 1466142 - DNA, 25 bp, Homo sapien
gagcaaggccactcatccttggaac

SEQ ID NO: 1466143 - DNA, 25 bp, Homo sapien
cgtgggcggagaacacacaagtatt

SEQ ID NO: 1466144 - DNA, 25 bp, Homo sapien
aaggaaatcgaggaaaagcaacctg

SEQ ID NO: 1466145 - DNA, 25 bp, Homo sapien
gaaactgactgccaagtgggggacc

SEQ ID NO: 1466146 - DNA, 25 bp, Homo sapien
ccagtgcctgcggagccccaccctg

SEQ ID NO: 1466147 - DNA, 25 bp, Homo sapien
agagcggagccgttgtccctagagc

SEQ ID NO: 1466148 - DNA, 25 bp, Homo sapien
ccctagagcagcctcgctggggctg

SEQ ID NO: 1466149 - DNA, 25 bp, Homo sapien
gggctggtggcgagggatctcagcc

SEQ ID NO: 1466150 - DNA, 25 bp, Homo sapien
ctgcagatacggtgatgagagacac

SEQ ID NO: 1466151 - DNA, 25 bp, Homo sapien
cctgctcccgcggttagtcactcac

SEQ ID NO: 1466152 - DNA, 25 bp, Homo sapien
cgcacgactggagccggtctggcct

SEQ ID NO: 1466153 - DNA, 25 bp, Homo sapien
gagacaccgacagaaacaagggaga

SEQ ID NO: 1466154 - DNA, 25 bp, Homo sapien
gcctctcctaaaactggcgccccag

SEQ ID NO: 1466155 - DNA, 25 bp, Homo sapien
gcgcctctcctaaaactggcgcccc

SEQ ID NO: 1466156 - DNA, 25 bp, Homo sapien
ggcgcctctcctaaaactggcgccc

SEQ ID NO: 1466157 - DNA, 25 bp, Homo sapien
cgcctctcctaaaactggcgcccca

SEQ ID NO: 1466158 - DNA, 25 bp, Homo sapien
tcggtagctatcatggccgccgggt

SEQ ID NO: 1466159 - DNA, 25 bp, Homo sapien
aagaactgctgaaccgactctgaga

SEQ ID NO: 1466160 - DNA, 25 bp, Homo sapien
cccggagtctcaagcaataggatca

SEQ ID NO: 1466161 - DNA, 25 bp, Homo sapien
tacattagtctccatagacccctgg

SEQ ID NO: 1466162 - DNA, 25 bp, Homo sapien
agctagatccgctgaatccccttgc

SEQ ID NO: 1466163 - DNA, 25 bp, Homo sapien
ccattggtcattggagagcttataa

SEQ ID NO: 1466164 - DNA, 25 bp, Homo sapien
tattggtcaccacaaatcagtggca

SEQ ID NO: 1466165 - DNA, 25 bp, Homo sapien
gggttgacagtatcggctttccaca

SEQ ID NO: 1466166 - DNA, 25 bp, Homo sapien
gaagtattgatggttcttacctacc

SEQ ID NO: 1466167 - DNA, 25 bp, Homo sapien
cctcctagaggccagtgttgatttt

SEQ ID NO: 1466168 - DNA, 25 bp, Homo sapien
tatagtgattagaaagctctgatcc

SEQ ID NO: 1466169 - DNA, 25 bp, Homo sapien
aagtatgttattgatgagtgcagcc

SEQ ID NO: 1466170 - DNA, 25 bp, Homo sapien
tgcggaaaaaggaagagatttagag

SEQ ID NO: 1466171 - DNA, 25 bp, Homo sapien
gaagagatttagagtcacgactcat

SEQ ID NO: 1466172 - DNA, 25 bp, Homo sapien
aaaggaagagatttagagtcacgac

SEQ ID NO: 1466173 - DNA, 25 bp, Homo sapien
ggaagagatttagagtcacgactca

SEQ ID NO: 1466174 - DNA, 25 bp, Homo sapien
gattagctggtaatttgctgatgat

SEQ ID NO: 1466175 - DNA, 25 bp, Homo sapien
tatgattagctggtaatttgctgat

SEQ ID NO: 1466176 - DNA, 25 bp, Homo sapien
tagctggtaatttgctgatgattta

SEQ ID NO: 1466177 - DNA, 25 bp, Homo sapien
gctggtaatttgctgatgatttatt

SEQ ID NO: 1466178 - DNA, 25 bp, Homo sapien
acatgctcctggactaattgctgca

SEQ ID NO: 1466179 - DNA, 25 bp, Homo sapien
ttgctcgagcaattgaactaaaaca

SEQ ID NO: 1466180 - DNA, 25 bp, Homo sapien
aaacatgctcctggactaattgctg

SEQ ID NO: 1466181 - DNA, 25 bp, Homo sapien
gcaattgaactaaaacatgctcctg

SEQ ID NO: 1466182 - DNA, 25 bp, Homo sapien
taggaaccttaacaagctgggcatg

SEQ ID NO: 1466183 - DNA, 25 bp, Homo sapien
agattgggcgtagaacacagctcct

SEQ ID NO: 1466184 - DNA, 25 bp, Homo sapien
gaagcaatcaggtctctccaagaag

SEQ ID NO: 1466185 - DNA, 25 bp, Homo sapien
taagacatcacagcggcgaattagg

SEQ ID NO: 1466186 - DNA, 25 bp, Homo sapien
cattgtgttaatcagagcgcagact

SEQ ID NO: 1466187 - DNA, 25 bp, Homo sapien
tttctccattgtgttaatcagagcg

SEQ ID NO: 1466188 - DNA, 25 bp, Homo sapien
gagcgcagacttacattctcagtca

SEQ ID NO: 1466189 - DNA, 25 bp, Homo sapien
tccgtttctccattgtgttaatcag

SEQ ID NO: 1466190 - DNA, 25 bp, Homo sapien
tactttaacagaagtcacacatctg

SEQ ID NO: 1466191 - DNA, 25 bp, Homo sapien
gacagattgactcacttaatataaa

SEQ ID NO: 1466192 - DNA, 25 bp, Homo sapien
taatttgggaaatagtggatgcata

SEQ ID NO: 1466193 - DNA, 25 bp, Homo sapien
cctgaggcattagatagtttttcta

SEQ ID NO: 1466194 - DNA, 25 bp, Homo sapien
taagccattgaatccacacagcagc

SEQ ID NO: 1466195 - DNA, 25 bp, Homo sapien
gataagccattgaatccacacagca

SEQ ID NO: 1466196 - DNA, 25 bp, Homo sapien
atagataagccattgaatccacaca

SEQ ID NO: 1466197 - DNA, 25 bp, Homo sapien
aagccattgaatccacacagcagcc

SEQ ID NO: 1466198 - DNA, 25 bp, Homo sapien
taatattgatattggaagctgcagt

SEQ ID NO: 1466199 - DNA, 25 bp, Homo sapien
taacatacagaagtactaaatactg

SEQ ID NO: 1466200 - DNA, 25 bp, Homo sapien
taagtggagtaataactaaacagac

SEQ ID NO: 1466201 - DNA, 25 bp, Homo sapien
gcctatctgaatcaatattgcattc

SEQ ID NO: 1466202 - DNA, 25 bp, Homo sapien
tcagtaggcatctttgacatgagca

SEQ ID NO: 1466203 - DNA, 25 bp, Homo sapien
catgaaggttatagagaggtgtaac

SEQ ID NO: 1466204 - DNA, 25 bp, Homo sapien
tctgtaaaatgcagcaatactggta

SEQ ID NO: 1466205 - DNA, 25 bp, Homo sapien
ggatttcatactaggcagtgacaac

SEQ ID NO: 1466206 - DNA, 25 bp, Homo sapien
taagatgtgcatcaagcctggtaca

SEQ ID NO: 1466207 - DNA, 25 bp, Homo sapien
ctgtttgggaaagctattattaggt

SEQ ID NO: 1466208 - DNA, 25 bp, Homo sapien
taatgtcctgtcttctaagatgtgc

SEQ ID NO: 1466209 - DNA, 25 bp, Homo sapien
gtgtgaagtttttgactgttaataa

SEQ ID NO: 1466210 - DNA, 25 bp, Homo sapien
tctccgtgtgatagctcagtgttgc

SEQ ID NO: 1466211 - DNA, 25 bp, Homo sapien
tttctcttgagaagtccactgtcag

SEQ ID NO: 1466212 - DNA, 25 bp, Homo sapien
ctccatactgtgatgtgctctcggg

SEQ ID NO: 1466213 - DNA, 25 bp, Homo sapien
gcttcccagacaggtgttctccgtg

SEQ ID NO: 1466214 - DNA, 25 bp, Homo sapien
gatgagcaccatccaatccactgag

SEQ ID NO: 1466215 - DNA, 25 bp, Homo sapien
ccactgagggcttgaatgaaacaaa

SEQ ID NO: 1466216 - DNA, 25 bp, Homo sapien
attgcttgagcttggatatctcatc

SEQ ID NO: 1466217 - DNA, 25 bp, Homo sapien
catggactgggatttactaccttgg

SEQ ID NO: 1466218 - DNA, 25 bp, Homo sapien
tcctttatggtgtctctgaaactca

SEQ ID NO: 1466219 - DNA, 25 bp, Homo sapien
gactcttggccatcaatctgtccat

SEQ ID NO: 1466220 - DNA, 25 bp, Homo sapien
tccgggctttactgatggacctgtg

SEQ ID NO: 1466221 - DNA, 25 bp, Homo sapien
gctaaatcctgacaattcatccttt

SEQ ID NO: 1466222 - DNA, 25 bp, Homo sapien
catcaatcccttggttgccctagtc

SEQ ID NO: 1466223 - DNA, 25 bp, Homo sapien
atcaatcccttggttgccctagtcc

SEQ ID NO: 1466224 - DNA, 25 bp, Homo sapien
caatcccttggttgccctagtccgg

SEQ ID NO: 1466225 - DNA, 25 bp, Homo sapien
tcaatcccttggttgccctagtccg

SEQ ID NO: 1466226 - DNA, 25 bp, Homo sapien
tcaagttgaagcagtatctcaaagc

SEQ ID NO: 1466227 - DNA, 25 bp, Homo sapien
cccaaaagctcaagttgaagcagta

SEQ ID NO: 1466228 - DNA, 25 bp, Homo sapien
aagctcaagttgaagcagtatctca

SEQ ID NO: 1466229 - DNA, 25 bp, Homo sapien
tgaagcagtatctcaaagcccaggg

SEQ ID NO: 1466230 - DNA, 25 bp, Homo sapien
aatagttaaagtcatctaacccatg

SEQ ID NO: 1466231 - DNA, 25 bp, Homo sapien
tagttaaagtcatctaacccatggt

SEQ ID NO: 1466232 - DNA, 25 bp, Homo sapien
gttaaagtcatctaacccatggtaa

SEQ ID NO: 1466233 - DNA, 25 bp, Homo sapien
ttaatagttaaagtcatctaaccca

SEQ ID NO: 1466234 - DNA, 25 bp, Homo sapien
gactttctacacgatatccattcct

SEQ ID NO: 1466235 - DNA, 25 bp, Homo sapien
cacttagagttgatgttatgccctc

SEQ ID NO: 1466236 - DNA, 25 bp, Homo sapien
gatgttatgccctctaagtacagac

SEQ ID NO: 1466237 - DNA, 25 bp, Homo sapien
gcgtgaccttttacttcacttagag

SEQ ID NO: 1466238 - DNA, 25 bp, Homo sapien
cgtgtcccgggtcctggcggattga

SEQ ID NO: 1466239 - DNA, 25 bp, Homo sapien
tgagactggaggttgcggatgacac

SEQ ID NO: 1466240 - DNA, 25 bp, Homo sapien
tgacacggggcagagttgcatctcg

SEQ ID NO: 1466241 - DNA, 25 bp, Homo sapien
tctcggaggaaagtagtcattcgtg

SEQ ID NO: 1466242 - DNA, 25 bp, Homo sapien
gaggatggcaggagatggcaaaggt

SEQ ID NO: 1466243 - DNA, 25 bp, Homo sapien
gatggcaggagatggcaaaggttgg

SEQ ID NO: 1466244 - DNA, 25 bp, Homo sapien
ctgagaggatggcaggagatggcaa

SEQ ID NO: 1466245 - DNA, 25 bp, Homo sapien
agaggatggcaggagatggcaaagg

SEQ ID NO: 1466246 - DNA, 25 bp, Homo sapien
gagggtcgtaggtgagaaggacgtc

SEQ ID NO: 1466247 - DNA, 25 bp, Homo sapien
tcgtaggtgagaaggacgtcttgac

SEQ ID NO: 1466248 - DNA, 25 bp, Homo sapien
ccttctctgagggtcgtaggtgaga

SEQ ID NO: 1466249 - DNA, 25 bp, Homo sapien
tctgagggtcgtaggtgagaaggac

SEQ ID NO: 1466250 - DNA, 25 bp, Homo sapien
taaactattttgacagatgccagct

SEQ ID NO: 1466251 - DNA, 25 bp, Homo sapien
aagcaggtgcatgtctctggccata

SEQ ID NO: 1466252 - DNA, 25 bp, Homo sapien
gaatgaacaatgcaccttttggctg

SEQ ID NO: 1466253 - DNA, 25 bp, Homo sapien
agaaatatgcttatccatcccacgg

SEQ ID NO: 1466254 - DNA, 25 bp, Homo sapien
aactgggttctgtcaacgttgagaa

SEQ ID NO: 1466255 - DNA, 25 bp, Homo sapien
ggttctgtcaacgttgagaatttca

SEQ ID NO: 1466256 - DNA, 25 bp, Homo sapien
cgttgagaatttcagcaccattatc

SEQ ID NO: 1466257 - DNA, 25 bp, Homo sapien
tgtcaacgttgagaatttcagcacc

SEQ ID NO: 1466258 - DNA, 25 bp, Homo sapien
tcaaaatcgattcttcatccgttca

SEQ ID NO: 1466259 - DNA, 25 bp, Homo sapien
ttggaattgatgtgttcttcagaca

SEQ ID NO: 1466260 - DNA, 25 bp, Homo sapien
cttagcctgtaagttctcttgtcta

SEQ ID NO: 1466261 - DNA, 25 bp, Homo sapien
accaggtagcttggaatacttagcc

SEQ ID NO: 1466262 - DNA, 25 bp, Homo sapien
cttgtctattttgtggtgacttcct

SEQ ID NO: 1466263 - DNA, 25 bp, Homo sapien
aacgactctgtaggagtcctctcat

SEQ ID NO: 1466264 - DNA, 25 bp, Homo sapien
aaacgactctgtaggagtcctctca

SEQ ID NO: 1466265 - DNA, 25 bp, Homo sapien
gaaacgactctgtaggagtcctctc

SEQ ID NO: 1466266 - DNA, 25 bp, Homo sapien
agaaacgactctgtaggagtcctct

SEQ ID NO: 1466267 - DNA, 25 bp, Homo sapien
cttacatgtaagtctttaatgcatc

SEQ ID NO: 1466268 - DNA, 25 bp, Homo sapien
tcttacatgtaagtctttaatgcat

SEQ ID NO: 1466269 - DNA, 25 bp, Homo sapien
gagcctctcttgacctttgaaaggg

SEQ ID NO: 1466270 - DNA, 25 bp, Homo sapien
ttagatagaaaatagcatcagaaag

SEQ ID NO: 1466271 - DNA, 25 bp, Homo sapien
tatatgtagggaaccagagcctctc

SEQ ID NO: 1466272 - DNA, 25 bp, Homo sapien
aattattgtgactcttattttggct

SEQ ID NO: 1466273 - DNA, 25 bp, Homo sapien
tctttgtctggttcttcgtttcttc

SEQ ID NO: 1466274 - DNA, 25 bp, Homo sapien
ctttggagcagttagagagtctgtc

SEQ ID NO: 1466275 - DNA, 25 bp, Homo sapien
tctttggagcagttagagagtctgt

SEQ ID NO: 1466276 - DNA, 25 bp, Homo sapien
ttatttggcagcttggttctttgtc

SEQ ID NO: 1466277 - DNA, 25 bp, Homo sapien
cagcaaggccatgagaaaaccaagg

SEQ ID NO: 1466278 - DNA, 25 bp, Homo sapien
aaaccaaggctcacagaaattatgt

SEQ ID NO: 1466279 - DNA, 25 bp, Homo sapien
ctttttgattcctacagcaaggcca

SEQ ID NO: 1466280 - DNA, 25 bp, Homo sapien
tgtttaatacagtctttccatgtca

SEQ ID NO: 1466281 - DNA, 25 bp, Homo sapien
gtcaaacttgtaatgtgccaacata

SEQ ID NO: 1466282 - DNA, 25 bp, Homo sapien
cttgtaatgtgccaacatagtaaca

SEQ ID NO: 1466283 - DNA, 25 bp, Homo sapien
acatcagcatgaaaaccaaatcatg

SEQ ID NO: 1466284 - DNA, 25 bp, Homo sapien
accaaatcatgttgcttatgaacta

SEQ ID NO: 1466285 - DNA, 25 bp, Homo sapien
cagtgtatcagtatcaacaggaacc

SEQ ID NO: 1466286 - DNA, 25 bp, Homo sapien
aatacagtcagagattgggaaaagc

SEQ ID NO: 1466287 - DNA, 25 bp, Homo sapien
tcctggacactgtctgagtcgctgt

SEQ ID NO: 1466288 - DNA, 25 bp, Homo sapien
aacaggaaccatcattgcaaataca

SEQ ID NO: 1466289 - DNA, 25 bp, Homo sapien
gccaatcaattgtaatgagttttgt

SEQ ID NO: 1466290 - DNA, 25 bp, Homo sapien
gcatgccaatcaattgtaatgagtt

SEQ ID NO: 1466291 - DNA, 25 bp, Homo sapien
tgtggagcatgccaatcaattgtaa

SEQ ID NO: 1466292 - DNA, 25 bp, Homo sapien
caattgtaatgagttttgtttcagt

SEQ ID NO: 1466293 - DNA, 25 bp, Homo sapien
tcacagccgcattataagccctctg

SEQ ID NO: 1466294 - DNA, 25 bp, Homo sapien
cagccgcattataagccctctggag

SEQ ID NO: 1466295 - DNA, 25 bp, Homo sapien
gccgcattataagccctctggagtt

SEQ ID NO: 1466296 - DNA, 25 bp, Homo sapien
acagccgcattataagccctctgga

SEQ ID NO: 1466297 - DNA, 25 bp, Homo sapien
gactgggacctttgatttcttaaga

SEQ ID NO: 1466298 - DNA, 25 bp, Homo sapien
gggctggaagcaagagatctctccc

SEQ ID NO: 1466299 - DNA, 25 bp, Homo sapien
tcagccctgaacgatggactttcat

SEQ ID NO: 1466300 - DNA, 25 bp, Homo sapien
tttgtctcggtgtcaacaggcgtga

SEQ ID NO: 1466301 - DNA, 25 bp, Homo sapien
tcttccttatctgccgggacggagc

SEQ ID NO: 1466302 - DNA, 25 bp, Homo sapien
tcacaagctgaagagcctgtggcct

SEQ ID NO: 1466303 - DNA, 25 bp, Homo sapien
gattatcaagatggtctcatccagg

SEQ ID NO: 1466304 - DNA, 25 bp, Homo sapien
gggtaaacaggaggctgtcccagca

SEQ ID NO: 1466305 - DNA, 25 bp, Homo sapien
cggaagaaatgactgccatggcctt

SEQ ID NO: 1466306 - DNA, 25 bp, Homo sapien
atggaatgacagaaggagaaaaatg

SEQ ID NO: 1466307 - DNA, 25 bp, Homo sapien
agtgtagtccagtcctttttggtgg

SEQ ID NO: 1466308 - DNA, 25 bp, Homo sapien
tgtagcctgcagcattccgaggaca

SEQ ID NO: 1466309 - DNA, 25 bp, Homo sapien
tggcagccgctgcacgcagacatga

SEQ ID NO: 1466310 - DNA, 25 bp, Homo sapien
tatatgcattaggtatgaggaagaa

SEQ ID NO: 1466311 - DNA, 25 bp, Homo sapien
aaagtattaaagcagtggcagccgc

SEQ ID NO: 1466312 - DNA, 25 bp, Homo sapien
gaacaacggtaattgtgggagactc

SEQ ID NO: 1466313 - DNA, 25 bp, Homo sapien
gtattgaggacaaaagagtgtatgg

SEQ ID NO: 1466314 - DNA, 25 bp, Homo sapien
catctttaagatcaggcacggaata

SEQ ID NO: 1466315 - DNA, 25 bp, Homo sapien
gagtgtatggggttgggcaccacag

SEQ ID NO: 1466316 - DNA, 25 bp, Homo sapien
gagacgggcttaccttccactgtga

SEQ ID NO: 1466317 - DNA, 25 bp, Homo sapien
agcaagggaggtcccccgatccgag

SEQ ID NO: 1466318 - DNA, 25 bp, Homo sapien
ggaggacgggggattgatctagcaa

SEQ ID NO: 1466319 - DNA, 25 bp, Homo sapien
aggacgggggattgatctagcaagg

SEQ ID NO: 1466320 - DNA, 25 bp, Homo sapien
gacgggggattgatctagcaaggga

SEQ ID NO: 1466321 - DNA, 25 bp, Homo sapien
ttccattcctggtgccgacgatggt

SEQ ID NO: 1466322 - DNA, 25 bp, Homo sapien
cctggtgccgacgatggtgttcacg

SEQ ID NO: 1466323 - DNA, 25 bp, Homo sapien
gaagggtgtggatgtatcctcagct

SEQ ID NO: 1466324 - DNA, 25 bp, Homo sapien
tgtggatgtatcctcagcttggaca

SEQ ID NO: 1466325 - DNA, 25 bp, Homo sapien
cccactttggaccagcagggctagg

SEQ ID NO: 1466326 - DNA, 25 bp, Homo sapien
tgcaacggcgacaggaatgggccca

SEQ ID NO: 1466327 - DNA, 25 bp, Homo sapien
ctgtcagcaagaagttgcgtgcaac

SEQ ID NO: 1466328 - DNA, 25 bp, Homo sapien
gcagggctaggcgtgcttccccttc

SEQ ID NO: 1466329 - DNA, 25 bp, Homo sapien
gacccaggagttctgttggcctcac

SEQ ID NO: 1466330 - DNA, 25 bp, Homo sapien
tctgctggtgtatgggctctgaagt

SEQ ID NO: 1466331 - DNA, 25 bp, Homo sapien
gggcccaggaattcatgccatccaa

SEQ ID NO: 1466332 - DNA, 25 bp, Homo sapien
tcaggagccggtggtgaggaatccc

SEQ ID NO: 1466333 - DNA, 25 bp, Homo sapien
ttacctcctgtctgcgctgtgccag

SEQ ID NO: 1466334 - DNA, 25 bp, Homo sapien
gcgtccacatctcatcattcctgga

SEQ ID NO: 1466335 - DNA, 25 bp, Homo sapien
ttggtgactttacctcctgtctgcg

SEQ ID NO: 1466336 - DNA, 25 bp, Homo sapien
cattcctggactgttgagattggcc

SEQ ID NO: 1466337 - DNA, 25 bp, Homo sapien
cgctctgggcatggttgggctcggg

SEQ ID NO: 1466338 - DNA, 25 bp, Homo sapien
agaacagctcttgctcagggagggc

SEQ ID NO: 1466339 - DNA, 25 bp, Homo sapien
gcatggttgggctccacgcctgagt

SEQ ID NO: 1466340 - DNA, 25 bp, Homo sapien
gggtagaacagctcttgctcaggga

SEQ ID NO: 1466341 - DNA, 25 bp, Homo sapien
ttagtacagaccacgcagggaacac

SEQ ID NO: 1466342 - DNA, 25 bp, Homo sapien
cagggaacacgggaatccagatggc

SEQ ID NO: 1466343 - DNA, 25 bp, Homo sapien
caagatctcagggtcagatgaagca

SEQ ID NO: 1466344 - DNA, 25 bp, Homo sapien
tcaagtccaggttgcttagtacaga

SEQ ID NO: 1466345 - DNA, 25 bp, Homo sapien
gcagatgaaagcatcagtgcttggt

SEQ ID NO: 1466346 - DNA, 25 bp, Homo sapien
gatgaaagcatcagtgcttggtctg

SEQ ID NO: 1466347 - DNA, 25 bp, Homo sapien
tggcagcagatgaaagcatcagtgc

SEQ ID NO: 1466348 - DNA, 25 bp, Homo sapien
tcacttggcagcagatgaaagcatc

SEQ ID NO: 1466349 - DNA, 25 bp, Homo sapien
cacgaaaaagtttctgagttccttg

SEQ ID NO: 1466350 - DNA, 25 bp, Homo sapien
aagtttctgagttccttggaagccg

SEQ ID NO: 1466351 - DNA, 25 bp, Homo sapien
ccgctttgtgctcccacgaaaaagt

SEQ ID NO: 1466352 - DNA, 25 bp, Homo sapien
actgggatccttcccgctttgtgct

SEQ ID NO: 1466353 - DNA, 25 bp, Homo sapien
ccaatgacagagacagttgcacatt

SEQ ID NO: 1466354 - DNA, 25 bp, Homo sapien
cagttgcacattaggggctattaag

SEQ ID NO: 1466355 - DNA, 25 bp, Homo sapien
gacagttgcacattaggggctatta

SEQ ID NO: 1466356 - DNA, 25 bp, Homo sapien
cttccaatgacagagacagttgcac

SEQ ID NO: 1466357 - DNA, 25 bp, Homo sapien
accactcctaggagaaggtccaggt

SEQ ID NO: 1466358 - DNA, 25 bp, Homo sapien
actcctaggagaaggtccaggtggt

SEQ ID NO: 1466359 - DNA, 25 bp, Homo sapien
tcctaggagaaggtccaggtggtct

SEQ ID NO: 1466360 - DNA, 25 bp, Homo sapien
taggagaaggtccaggtggtctccc

SEQ ID NO: 1466361 - DNA, 25 bp, Homo sapien
tcagaacctaacgagctcagggact

SEQ ID NO: 1466362 - DNA, 25 bp, Homo sapien
tgtcttgaaaatcagccctgggaat

SEQ ID NO: 1466363 - DNA, 25 bp, Homo sapien
ctgagtatggagaacccgtgggact

SEQ ID NO: 1466364 - DNA, 25 bp, Homo sapien
caagcattatagcagcactgactac

SEQ ID NO: 1466365 - DNA, 25 bp, Homo sapien
ctgatgcatacccatgtctgagaac

SEQ ID NO: 1466366 - DNA, 25 bp, Homo sapien
tgtcgcagaaaccatgcgccaggca

SEQ ID NO: 1466367 - DNA, 25 bp, Homo sapien
gccatgtggtcagcacgacttctcc

SEQ ID NO: 1466368 - DNA, 25 bp, Homo sapien
tgacggctgggctcctgtcgcagaa

SEQ ID NO: 1466369 - DNA, 25 bp, Homo sapien
taaatgtgcagtgtccgatacgcca

SEQ ID NO: 1466370 - DNA, 25 bp, Homo sapien
ttcagttcctgagactataggaatc

SEQ ID NO: 1466371 - DNA, 25 bp, Homo sapien
gtgaatcaggagaaaggactttttg

SEQ ID NO: 1466372 - DNA, 25 bp, Homo sapien
tatgttcttattctaggggcagagg

SEQ ID NO: 1466373 - DNA, 25 bp, Homo sapien
cagaagggacttctagtatgttctt

SEQ ID NO: 1466374 - DNA, 25 bp, Homo sapien
aaacagcagcaagcaaaggcgctga

SEQ ID NO: 1466375 - DNA, 25 bp, Homo sapien
agcagcaagcaaaggcgctgatact

SEQ ID NO: 1466376 - DNA, 25 bp, Homo sapien
cagcagcaagcaaaggcgctgatac

SEQ ID NO: 1466377 - DNA, 25 bp, Homo sapien
aaaaacagcagcaagcaaaggcgct

SEQ ID NO: 1466378 - DNA, 25 bp, Homo sapien
ccctggatgctaaatcctgtgtatt

SEQ ID NO: 1466379 - DNA, 25 bp, Homo sapien
cctggatgctaaatcctgtgtattg

SEQ ID NO: 1466380 - DNA, 25 bp, Homo sapien
ctgtagccagctccctagtcattgg

SEQ ID NO: 1466381 - DNA, 25 bp, Homo sapien
tcagaaccctaccaggaatagcctg

SEQ ID NO: 1466382 - DNA, 25 bp, Homo sapien
gggcaggtatatgtcagaaccctac

SEQ ID NO: 1466383 - DNA, 25 bp, Homo sapien
agtcattggtccagggcaggtatat

SEQ ID NO: 1466384 - DNA, 25 bp, Homo sapien
taagagatctgaaattgtgacacag

SEQ ID NO: 1466385 - DNA, 25 bp, Homo sapien
gtgacacaacctggggtgatttcta

SEQ ID NO: 1466386 - DNA, 25 bp, Homo sapien
gctggccagatgagatgaaggctct

SEQ ID NO: 1466387 - DNA, 25 bp, Homo sapien
cttggcaatgcataagagatctgaa

SEQ ID NO: 1466388 - DNA, 25 bp, Homo sapien
gaagccacgttgtcagtagcatcag

SEQ ID NO: 1466389 - DNA, 25 bp, Homo sapien
tcagtagcatcaggagtatgaatct

SEQ ID NO: 1466390 - DNA, 25 bp, Homo sapien
ttgtagtagtgtcaggaacatgaac

SEQ ID NO: 1466391 - DNA, 25 bp, Homo sapien
gagtatgaatcttgtagtagtgtca

SEQ ID NO: 1466392 - DNA, 25 bp, Homo sapien
ttagattatttttggcccagcacag

SEQ ID NO: 1466393 - DNA, 25 bp, Homo sapien
taattagggtcatacgcacaggcat

SEQ ID NO: 1466394 - DNA, 25 bp, Homo sapien
ggcatggtcatgctgattgttgaaa

SEQ ID NO: 1466395 - DNA, 25 bp, Homo sapien
tcagtcagactgataattagggtca

SEQ ID NO: 1466396 - DNA, 25 bp, Homo sapien
tcagccgagattgtgtcactgcagt

SEQ ID NO: 1466397 - DNA, 25 bp, Homo sapien
accctggaggcagtggttgcagtca

SEQ ID NO: 1466398 - DNA, 25 bp, Homo sapien
tggaggcagtggttgcagtcagccg

SEQ ID NO: 1466399 - DNA, 25 bp, Homo sapien
agtccagcctgggcggcagagtgag

SEQ ID NO: 1466400 - DNA, 25 bp, Homo sapien
gcctccccgcgccgcctgcgccacg

SEQ ID NO: 1466401 - DNA, 25 bp, Homo sapien
ggacgcctccccgcgccgcctgcgc

SEQ ID NO: 1466402 - DNA, 25 bp, Homo sapien
ctctgggacgcctccccgcgccgcc

SEQ ID NO: 1466403 - DNA, 25 bp, Homo sapien
acgcctccccgcgccgcctgcgcca

SEQ ID NO: 1466404 - DNA, 25 bp, Homo sapien
gtctgctgagctgctgattgagctt

SEQ ID NO: 1466405 - DNA, 25 bp, Homo sapien
tcaagtctgctgagctgctgattga

SEQ ID NO: 1466406 - DNA, 25 bp, Homo sapien
caagtctgctgagctgctgattgag

SEQ ID NO: 1466407 - DNA, 25 bp, Homo sapien
tgctgagctgctgattgagcttgcc

SEQ ID NO: 1466408 - DNA, 25 bp, Homo sapien
tgggagctgtaggtgccaggtgact

SEQ ID NO: 1466409 - DNA, 25 bp, Homo sapien
ctgggagctgtaggtgccaggtgac

SEQ ID NO: 1466410 - DNA, 25 bp, Homo sapien
ggagctgtaggtgccaggtgacttt

SEQ ID NO: 1466411 - DNA, 25 bp, Homo sapien
gcctgggagctgtaggtgccaggtg

SEQ ID NO: 1466412 - DNA, 25 bp, Homo sapien
catggtccactggaatccttggact

SEQ ID NO: 1466413 - DNA, 25 bp, Homo sapien
gactttctgtcttggaaggttcctc

SEQ ID NO: 1466414 - DNA, 25 bp, Homo sapien
aggttcctctctgccgaagtccaga

SEQ ID NO: 1466415 - DNA, 25 bp, Homo sapien
tgttccctggcctgttggttgctgt

SEQ ID NO: 1466416 - DNA, 25 bp, Homo sapien
gtgtcagaggcaagttaaacttgct

SEQ ID NO: 1466417 - DNA, 25 bp, Homo sapien
tgtcagaggcaagttaaacttgctc

SEQ ID NO: 1466418 - DNA, 25 bp, Homo sapien
cagaggcaagttaaacttgctcagg

SEQ ID NO: 1466419 - DNA, 25 bp, Homo sapien
gaggcaagttaaacttgctcagggc

SEQ ID NO: 1466420 - DNA, 25 bp, Homo sapien
tggtcacagacagtcagaatgtgct

SEQ ID NO: 1466421 - DNA, 25 bp, Homo sapien
catggtcacagacagtcagaatgtg

SEQ ID NO: 1466422 - DNA, 25 bp, Homo sapien
atggtcacagacagtcagaatgtgc

SEQ ID NO: 1466423 - DNA, 25 bp, Homo sapien
tcatggtcacagacagtcagaatgt

SEQ ID NO: 1466424 - DNA, 25 bp, Homo sapien
tatacctgtcggcatcttgccttgt

SEQ ID NO: 1466425 - DNA, 25 bp, Homo sapien
ttcatcctctggatagatccctctt

SEQ ID NO: 1466426 - DNA, 25 bp, Homo sapien
tggtgaggccatcagcttcaagcag

SEQ ID NO: 1466427 - DNA, 25 bp, Homo sapien
ttgtctgcacctttcatcctctgga

SEQ ID NO: 1466428 - DNA, 25 bp, Homo sapien
ctatagcccctcatcagccccctgc

SEQ ID NO: 1466429 - DNA, 25 bp, Homo sapien
ggcatttccggaacaagctgtgcag

SEQ ID NO: 1466430 - DNA, 25 bp, Homo sapien
ctggcgtcagttcacagactccgct

SEQ ID NO: 1466431 - DNA, 25 bp, Homo sapien
tctgtgtcccctggcgtcagttcac

SEQ ID NO: 1466432 - DNA, 25 bp, Homo sapien
gagagcttggtcagtctgttcatgc

SEQ ID NO: 1466433 - DNA, 25 bp, Homo sapien
tgctgctcccggtgagatggtgcat

SEQ ID NO: 1466434 - DNA, 25 bp, Homo sapien
aggtgctgctcccggtgagatggtg

SEQ ID NO: 1466435 - DNA, 25 bp, Homo sapien
gtgctgctcccggtgagatggtgca

SEQ ID NO: 1466436 - DNA, 25 bp, Homo sapien
ggtgctgctcccggtgagatggtgc

SEQ ID NO: 1466437 - DNA, 25 bp, Homo sapien
cctcggtagtttgaaaacgtgcatc

SEQ ID NO: 1466438 - DNA, 25 bp, Homo sapien
aactattattgatcctctgctgcca

SEQ ID NO: 1466439 - DNA, 25 bp, Homo sapien
tcagctatgtgagctcctgatcagc

SEQ ID NO: 1466440 - DNA, 25 bp, Homo sapien
ttcctgtaaacatggttggccctag

SEQ ID NO: 1466441 - DNA, 25 bp, Homo sapien
gacagagtggctatgggacctggtc

SEQ ID NO: 1466442 - DNA, 25 bp, Homo sapien
gctatgggacctggtcgtgatgacc

SEQ ID NO: 1466443 - DNA, 25 bp, Homo sapien
gacctggtcgtgatgacctctgagt

SEQ ID NO: 1466444 - DNA, 25 bp, Homo sapien
tatgggacctggtcgtgatgacctc

SEQ ID NO: 1466445 - DNA, 25 bp, Homo sapien
tcttagttcaggctacaaagtacca

SEQ ID NO: 1466446 - DNA, 25 bp, Homo sapien
gctggagtgccagcaccactgattt

SEQ ID NO: 1466447 - DNA, 25 bp, Homo sapien
gaggctccctagttgtcttagttca

SEQ ID NO: 1466448 - DNA, 25 bp, Homo sapien
ccagccagccctcaagtataatgca

SEQ ID NO: 1466449 - DNA, 25 bp, Homo sapien
catctgctggtgtttaggttccttt

SEQ ID NO: 1466450 - DNA, 25 bp, Homo sapien
tctgaacatgtggatgggatgaggc

SEQ ID NO: 1466451 - DNA, 25 bp, Homo sapien
gatgaggctctaagtaaggcaggtt

SEQ ID NO: 1466452 - DNA, 25 bp, Homo sapien
ggcaaccgcaatggctctgaacatg

SEQ ID NO: 1466453 - DNA, 25 bp, Homo sapien
gccagtcaggcagcttgatgttgct

SEQ ID NO: 1466454 - DNA, 25 bp, Homo sapien
tggtctgccagtcaggcagcttgat

SEQ ID NO: 1466455 - DNA, 25 bp, Homo sapien
gtcttcacaagtgctgcgggctgga

SEQ ID NO: 1466456 - DNA, 25 bp, Homo sapien
ctgtcttcacaagtgctgcgggctg

SEQ ID NO: 1466457 - DNA, 25 bp, Homo sapien
caattttaaggatcagagctttgtt

SEQ ID NO: 1466458 - DNA, 25 bp, Homo sapien
tttacatttgtctaaaaccaagaga

SEQ ID NO: 1466459 - DNA, 25 bp, Homo sapien
gacttgatcaagcttccagccctca

SEQ ID NO: 1466460 - DNA, 25 bp, Homo sapien
gaatcaactccacagatcaacatgt

SEQ ID NO: 1466461 - DNA, 25 bp, Homo sapien
ggaacaacacccagtgggcatgatg

SEQ ID NO: 1466462 - DNA, 25 bp, Homo sapien
tgccacaccatgaatacaaacactg

SEQ ID NO: 1466463 - DNA, 25 bp, Homo sapien
ccagatttacccaatgccatggatc

SEQ ID NO: 1466464 - DNA, 25 bp, Homo sapien
caattgtcaactagagagaggctca

SEQ ID NO: 1466465 - DNA, 25 bp, Homo sapien
gaaggtcggatatgtttacagaaac

SEQ ID NO: 1466466 - DNA, 25 bp, Homo sapien
ttagggatcttcttccattagagga

SEQ ID NO: 1466467 - DNA, 25 bp, Homo sapien
ggatcttcttccattagaggaatct

SEQ ID NO: 1466468 - DNA, 25 bp, Homo sapien
tagggatcttcttccattagaggaa

SEQ ID NO: 1466469 - DNA, 25 bp, Homo sapien
gggatcttcttccattagaggaatc

SEQ ID NO: 1466470 - DNA, 25 bp, Homo sapien
cacctgggaggtgaatacagacttt

SEQ ID NO: 1466471 - DNA, 25 bp, Homo sapien
atgcctgggctggtggatgccacct

SEQ ID NO: 1466472 - DNA, 25 bp, Homo sapien
ctgtgtccgtgtcccctgagccggg

SEQ ID NO: 1466473 - DNA, 25 bp, Homo sapien
ctcagaagagcctgagacgctgtca

SEQ ID NO: 1466474 - DNA, 25 bp, Homo sapien
tcataggacgggagcatgacgggca

SEQ ID NO: 1466475 - DNA, 25 bp, Homo sapien
tacccggggcctaaggcactcaagc

SEQ ID NO: 1466476 - DNA, 25 bp, Homo sapien
gccgtctaccaccacaaagtcaggg

SEQ ID NO: 1466477 - DNA, 25 bp, Homo sapien
gggtcactgctggaactccggggag

SEQ ID NO: 1466478 - DNA, 25 bp, Homo sapien
ggttgccgtgaacgccacaatcttc

SEQ ID NO: 1466479 - DNA, 25 bp, Homo sapien
cagcagcacactggttgccgtgaac

SEQ ID NO: 1466480 - DNA, 25 bp, Homo sapien
tctggaacatcctggccaggatgac

SEQ ID NO: 1466481 - DNA, 25 bp, Homo sapien
tggtctggaacatcctggccaggat

SEQ ID NO: 1466482 - DNA, 25 bp, Homo sapien
tgtagccaggatcgcagtaaaactc

SEQ ID NO: 1466483 - DNA, 25 bp, Homo sapien
cagacgaaatctccgtgactcacca

SEQ ID NO: 1466484 - DNA, 25 bp, Homo sapien
cagttccgtggttgtagcgctcaca

SEQ ID NO: 1466485 - DNA, 25 bp, Homo sapien
gacttgataagaaggaaaccactct

SEQ ID NO: 1466486 - DNA, 25 bp, Homo sapien
agtttcagaaccacaagctcacctt

SEQ ID NO: 1466487 - DNA, 25 bp, Homo sapien
cagtaggggagaataaaagtttcag

SEQ ID NO: 1466488 - DNA, 25 bp, Homo sapien
ccctgccggaggtgtcccgatgcgt

SEQ ID NO: 1466489 - DNA, 25 bp, Homo sapien
gggttggaggcacactacaggcact

SEQ ID NO: 1466490 - DNA, 25 bp, Homo sapien
tcaaacaacactgtagtgtagatct

SEQ ID NO: 1466491 - DNA, 25 bp, Homo sapien
tgtagatcttgttggttctttcaga

SEQ ID NO: 1466492 - DNA, 25 bp, Homo sapien
aggcctcagacacatggcaaacagc

SEQ ID NO: 1466493 - DNA, 25 bp, Homo sapien
caaacgtcctttattgcaggagaac

SEQ ID NO: 1466494 - DNA, 25 bp, Homo sapien
gagaggactttaacacagggcaaaa

SEQ ID NO: 1466495 - DNA, 25 bp, Homo sapien
gctgccaacctgatgtgtgggaaat

SEQ ID NO: 1466496 - DNA, 25 bp, Homo sapien
tgctagttgaggaacaggtaggtgc

SEQ ID NO: 1466497 - DNA, 25 bp, Homo sapien
gcctttgatcctgtgccaaatatca

SEQ ID NO: 1466498 - DNA, 25 bp, Homo sapien
gcaagttgggaagaacgaacatctg

SEQ ID NO: 1466499 - DNA, 25 bp, Homo sapien
gttagatttgtgtctaagcattcca

SEQ ID NO: 1466500 - DNA, 25 bp, Homo sapien
tgattaagactacattgaatctata

SEQ ID NO: 1466501 - DNA, 25 bp, Homo sapien
tatgatgctgaaacggagtgatgag

SEQ ID NO: 1466502 - DNA, 25 bp, Homo sapien
ctttatacggttgaggatgttgccc

SEQ ID NO: 1466503 - DNA, 25 bp, Homo sapien
tctcttcattaagcgtgatgttagc

SEQ ID NO: 1466504 - DNA, 25 bp, Homo sapien
cctggcatatctgggataaattcca

SEQ ID NO: 1466505 - DNA, 25 bp, Homo sapien
tacatctgggcctagtgctttctgt

SEQ ID NO: 1466506 - DNA, 25 bp, Homo sapien
tatagataattggtataatgtcttc

SEQ ID NO: 1466507 - DNA, 25 bp, Homo sapien
tgcttctatcctccaaaagagatta

SEQ ID NO: 1466508 - DNA, 25 bp, Homo sapien
gaattcaccagcaaatacatctggg

SEQ ID NO: 1466509 - DNA, 25 bp, Homo sapien
caaatgttgacaagttgtgttttca

SEQ ID NO: 1466510 - DNA, 25 bp, Homo sapien
ttagaagtacattgtctgcattttg

SEQ ID NO: 1466511 - DNA, 25 bp, Homo sapien
agaagtacattgtctgcattttgag

SEQ ID NO: 1466512 - DNA, 25 bp, Homo sapien
tctggtgttgatttctgtttaatta

SEQ ID NO: 1466513 - DNA, 25 bp, Homo sapien
gcaaggcctactggcaacaaacttt

SEQ ID NO: 1466514 - DNA, 25 bp, Homo sapien
tgttatccactagatcaatcaagaa

SEQ ID NO: 1466515 - DNA, 25 bp, Homo sapien
cacttcacaggtagtatgagtacct

SEQ ID NO: 1466516 - DNA, 25 bp, Homo sapien
tttatgtagacccaactttctgacc

SEQ ID NO: 1466517 - DNA, 25 bp, Homo sapien
tctgagtcactacgttaggatgtcc

SEQ ID NO: 1466518 - DNA, 25 bp, Homo sapien
ctctgagtcactacgttaggatgtc

SEQ ID NO: 1466519 - DNA, 25 bp, Homo sapien
tctctgagtcactacgttaggatgt

SEQ ID NO: 1466520 - DNA, 25 bp, Homo sapien
catctctgagtcactacgttaggat

SEQ ID NO: 1466521 - DNA, 25 bp, Homo sapien
ttgcatttccctctaataaaacacc

SEQ ID NO: 1466522 - DNA, 25 bp, Homo sapien
ctattttgcatttccctctaataaa

SEQ ID NO: 1466523 - DNA, 25 bp, Homo sapien
gcatttccctctaataaaacaccca

SEQ ID NO: 1466524 - DNA, 25 bp, Homo sapien
ttttgcatttccctctaataaaaca

SEQ ID NO: 1466525 - DNA, 25 bp, Homo sapien
agggtcacaggcaaggtgatagtaa

SEQ ID NO: 1466526 - DNA, 25 bp, Homo sapien
tcacaggcaaggtgatagtaacacg

SEQ ID NO: 1466527 - DNA, 25 bp, Homo sapien
caaggtgatagtaacacgaacagca

SEQ ID NO: 1466528 - DNA, 25 bp, Homo sapien
agtaacacgaacagcaccagacaca

SEQ ID NO: 1466529 - DNA, 25 bp, Homo sapien
taatacctggagttgtctagaggct

SEQ ID NO: 1466530 - DNA, 25 bp, Homo sapien
tcccacggaaggcagtgcagtacag

SEQ ID NO: 1466531 - DNA, 25 bp, Homo sapien
tcagggctggtttagaatcttggct

SEQ ID NO: 1466532 - DNA, 25 bp, Homo sapien
tggctctgcagcctactccctaagg

SEQ ID NO: 1466533 - DNA, 25 bp, Homo sapien
gcagatcctacagtgatgtattccc

SEQ ID NO: 1466534 - DNA, 25 bp, Homo sapien
ctgcagatcctacagtgatgtattc

SEQ ID NO: 1466535 - DNA, 25 bp, Homo sapien
tgcagatcctacagtgatgtattcc

SEQ ID NO: 1466536 - DNA, 25 bp, Homo sapien
tgtaaatatggcttcacggcagctg

SEQ ID NO: 1466537 - DNA, 25 bp, Homo sapien
catctaattgtaaatatggcttcac

SEQ ID NO: 1466538 - DNA, 25 bp, Homo sapien
gctctcctctttaagcctaaggatg

SEQ ID NO: 1466539 - DNA, 25 bp, Homo sapien
aatatggcttcacggcagctgatct

SEQ ID NO: 1466540 - DNA, 25 bp, Homo sapien
taagcactcaagatacgcagaccca

SEQ ID NO: 1466541 - DNA, 25 bp, Homo sapien
ttaaatccgggaaagcagcgatagg

SEQ ID NO: 1466542 - DNA, 25 bp, Homo sapien
tgggctggacgaccagataaggttt

SEQ ID NO: 1466543 - DNA, 25 bp, Homo sapien
cagcgataggagatcacagtcccca

SEQ ID NO: 1466544 - DNA, 25 bp, Homo sapien
cacgttccatcatcgcgacataatg

SEQ ID NO: 1466545 - DNA, 25 bp, Homo sapien
gatgggcagattattccacgttcca

SEQ ID NO: 1466546 - DNA, 25 bp, Homo sapien
aatgaaaccatattgtgtaggtcgg

SEQ ID NO: 1466547 - DNA, 25 bp, Homo sapien
gacaagtgatgattagcttctctcc

SEQ ID NO: 1466548 - DNA, 25 bp, Homo sapien
ctgcaattttgtaaaaggtacacat

SEQ ID NO: 1466549 - DNA, 25 bp, Homo sapien
cagatggaattatcacttgggatcc

SEQ ID NO: 1466550 - DNA, 25 bp, Homo sapien
acacagtctctttgtagcgcccttc

SEQ ID NO: 1466551 - DNA, 25 bp, Homo sapien
gggtcctgaagccattctcgggaat

SEQ ID NO: 1466552 - DNA, 25 bp, Homo sapien
gcttgaatccgtcttggcagtgaaa

SEQ ID NO: 1466553 - DNA, 25 bp, Homo sapien
ttactggcatcaccgtcactggcac

SEQ ID NO: 1466554 - DNA, 25 bp, Homo sapien
cattactggcatcaccgtcactggc

SEQ ID NO: 1466555 - DNA, 25 bp, Homo sapien
attactggcatcaccgtcactggca

SEQ ID NO: 1466556 - DNA, 25 bp, Homo sapien
tgggtggttgtgtccctccgcttct

SEQ ID NO: 1466557 - DNA, 25 bp, Homo sapien
gtccctccgcttctcggggtgttgc

SEQ ID NO: 1466558 - DNA, 25 bp, Homo sapien
ctgggtggttgtgtccctccgcttc

SEQ ID NO: 1466559 - DNA, 25 bp, Homo sapien
ccgcttctcggggtgttgcacagag

SEQ ID NO: 1466560 - DNA, 25 bp, Homo sapien
tcctgatactctgcgtggaagctgc

SEQ ID NO: 1466561 - DNA, 25 bp, Homo sapien
cttctaccatgttctttctgacgga

SEQ ID NO: 1466562 - DNA, 25 bp, Homo sapien
tctgacggaagaaatggccacctgc

SEQ ID NO: 1466563 - DNA, 25 bp, Homo sapien
catcctgggagtgccttgcaatggc

SEQ ID NO: 1466564 - DNA, 25 bp, Homo sapien
gctcctcctcctggctactagcttc

SEQ ID NO: 1466565 - DNA, 25 bp, Homo sapien
tcctcctcctggctactagcttcca

SEQ ID NO: 1466566 - DNA, 25 bp, Homo sapien
ggagctcctcctcctggctactagc

SEQ ID NO: 1466567 - DNA, 25 bp, Homo sapien
gagctcctcctcctggctactagct

SEQ ID NO: 1466568 - DNA, 25 bp, Homo sapien
aatcgaataatgtgagtgtctagca

SEQ ID NO: 1466569 - DNA, 25 bp, Homo sapien
tgcaattgatttttagtggccagca

SEQ ID NO: 1466570 - DNA, 25 bp, Homo sapien
tagcagtagtttgattagattagag

SEQ ID NO: 1466571 - DNA, 25 bp, Homo sapien
tagtggccagcagctgtaatcgaat

SEQ ID NO: 1466572 - DNA, 25 bp, Homo sapien
caggtttgtccaggggcagcttgct

SEQ ID NO: 1466573 - DNA, 25 bp, Homo sapien
tcaagtgggagcaggtttgtccagg

SEQ ID NO: 1466574 - DNA, 25 bp, Homo sapien
ggcagcttgctcagccaggtgccct

SEQ ID NO: 1466575 - DNA, 25 bp, Homo sapien
tgccctcagtccccactctgtccag

SEQ ID NO: 1466576 - DNA, 25 bp, Homo sapien
gaggaaagtcttgaccaatagaaga

SEQ ID NO: 1466577 - DNA, 25 bp, Homo sapien
gaagagattgctcctaatctggctt

SEQ ID NO: 1466578 - DNA, 25 bp, Homo sapien
ttttcatctacagcatacggttgag

SEQ ID NO: 1466579 - DNA, 25 bp, Homo sapien
tgtggaaccctaggacagcaatctc

SEQ ID NO: 1466580 - DNA, 25 bp, Homo sapien
caaatcagtgagtcagtcagaaagc

SEQ ID NO: 1466581 - DNA, 25 bp, Homo sapien
tgggtatgcagagagggccgctgga

SEQ ID NO: 1466582 - DNA, 25 bp, Homo sapien
tcaattcagctgcactaggaccatg

SEQ ID NO: 1466583 - DNA, 25 bp, Homo sapien
gcactacagcgacatgaaccaaatg

SEQ ID NO: 1466584 - DNA, 25 bp, Homo sapien
gtcacttgttgagcaaactcttggc

SEQ ID NO: 1466585 - DNA, 25 bp, Homo sapien
ggagtcacttgttgagcaaactctt

SEQ ID NO: 1466586 - DNA, 25 bp, Homo sapien
ggctctcttccttgaagcctggggg

SEQ ID NO: 1466587 - DNA, 25 bp, Homo sapien
cttaaaggagtcacttgttgagcaa

SEQ ID NO: 1466588 - DNA, 25 bp, Homo sapien
ggctctggatatttttgcctggcat

SEQ ID NO: 1466589 - DNA, 25 bp, Homo sapien
aaatccatctccattgctcgggttc

SEQ ID NO: 1466590 - DNA, 25 bp, Homo sapien
aagcacagcgccagctgaaaccaca

SEQ ID NO: 1466591 - DNA, 25 bp, Homo sapien
aggatcacggccaagagtctctggg

SEQ ID NO: 1466592 - DNA, 25 bp, Homo sapien
tgctcgggttcattccatgatacat

SEQ ID NO: 1466593 - DNA, 25 bp, Homo sapien
tccacagagggcatccagcttgcaa

SEQ ID NO: 1466594 - DNA, 25 bp, Homo sapien
cagagggcatccagcttgcaagagt

SEQ ID NO: 1466595 - DNA, 25 bp, Homo sapien
tcatccacagagggcatccagcttg

SEQ ID NO: 1466596 - DNA, 25 bp, Homo sapien
cacagagggcatccagcttgcaaga

SEQ ID NO: 1466597 - DNA, 25 bp, Homo sapien
ccgagccgggtgcactgagtaacag

SEQ ID NO: 1466598 - DNA, 25 bp, Homo sapien
aataagccagtctgtccgggctcgg

SEQ ID NO: 1466599 - DNA, 25 bp, Homo sapien
gaagcggaacaccacaataagccag

SEQ ID NO: 1466600 - DNA, 25 bp, Homo sapien
gccgtgggatgctgcgcgtgctggg

SEQ ID NO: 1466601 - DNA, 25 bp, Homo sapien
gtccccgggattcagcagctgtgcc

SEQ ID NO: 1466602 - DNA, 25 bp, Homo sapien
tgggcctatacatttcactctggga

SEQ ID NO: 1466603 - DNA, 25 bp, Homo sapien
atggaagacccttccgggactgtcg

SEQ ID NO: 1466604 - DNA, 25 bp, Homo sapien
tcgggattgggatcgatcctactgc

SEQ ID NO: 1466605 - DNA, 25 bp, Homo sapien
ctgtgggtctcatgcatgcagcttc

SEQ ID NO: 1466606 - DNA, 25 bp, Homo sapien
tgtgggtctcatgcatgcagcttcc

SEQ ID NO: 1466607 - DNA, 25 bp, Homo sapien
tgggtctcatgcatgcagcttcctt

SEQ ID NO: 1466608 - DNA, 25 bp, Homo sapien
ctccccccgccagtctaacccgcat

SEQ ID NO: 1466609 - DNA, 25 bp, Homo sapien
ctgtgcgcgacctctgctgccgccg

SEQ ID NO: 1466610 - DNA, 25 bp, Homo sapien
cgcgacctctgctgccgccgctgcg

SEQ ID NO: 1466611 - DNA, 25 bp, Homo sapien
acctctgctgccgccgctgcgcgag

SEQ ID NO: 1466612 - DNA, 25 bp, Homo sapien
gcgacctctgctgccgccgctgcgc

SEQ ID NO: 1466613 - DNA, 25 bp, Homo sapien
agcgggtgattggtgacacgcagaa

SEQ ID NO: 1466614 - DNA, 25 bp, Homo sapien
ccctgtccggtcttggagatgcgcg

SEQ ID NO: 1466615 - DNA, 25 bp, Homo sapien
tctgccagccgcaggtgttgcgagt

SEQ ID NO: 1466616 - DNA, 25 bp, Homo sapien
tggtgacacgcagaaggttgggtac

SEQ ID NO: 1466617 - DNA, 25 bp, Homo sapien
tcttaccattcgaggtaaggggcat

SEQ ID NO: 1466618 - DNA, 25 bp, Homo sapien
ttcttaccattcgaggtaaggggca

SEQ ID NO: 1466619 - DNA, 25 bp, Homo sapien
tgaagctggatcattggcatttctg

SEQ ID NO: 1466620 - DNA, 25 bp, Homo sapien
tcattcagggacctaggttccttct

SEQ ID NO: 1466621 - DNA, 25 bp, Homo sapien
ttcagggacctaggttccttctctc

SEQ ID NO: 1466622 - DNA, 25 bp, Homo sapien
ggtaagatgtctggggcatctctgc

SEQ ID NO: 1466623 - DNA, 25 bp, Homo sapien
gttacacaaattagctctctcacat

SEQ ID NO: 1466624 - DNA, 25 bp, Homo sapien
tcaaacggttcttgtggacagaagc

SEQ ID NO: 1466625 - DNA, 25 bp, Homo sapien
cagaggtatggccgtgcagagaccc

SEQ ID NO: 1466626 - DNA, 25 bp, Homo sapien
aggtatggccgtgcagagacccagg

SEQ ID NO: 1466627 - DNA, 25 bp, Homo sapien
aaacggttcttgtggacagaagcag

SEQ ID NO: 1466628 - DNA, 25 bp, Homo sapien
ctctccctggttcagagatggccat

SEQ ID NO: 1466629 - DNA, 25 bp, Homo sapien
ggatgagggattactctggggctcc

SEQ ID NO: 1466630 - DNA, 25 bp, Homo sapien
gtgaggatcctctccctggttcaga

SEQ ID NO: 1466631 - DNA, 25 bp, Homo sapien
tgtgtcctcgcgtgacagaagggat

SEQ ID NO: 1466632 - DNA, 25 bp, Homo sapien
tggaacgttccaggaagcaccggcc

SEQ ID NO: 1466633 - DNA, 25 bp, Homo sapien
caggcgcgggtgctcagattcactg

SEQ ID NO: 1466634 - DNA, 25 bp, Homo sapien
tggctgcacccgcactgttcgttca

SEQ ID NO: 1466635 - DNA, 25 bp, Homo sapien
cagccgaagcctgagcgatgtggcc

SEQ ID NO: 1466636 - DNA, 25 bp, Homo sapien
cacccaggtcctgaagagcaagctg

SEQ ID NO: 1466637 - DNA, 25 bp, Homo sapien
tggtgctgacccgtctcaagaaggc

SEQ ID NO: 1466638 - DNA, 25 bp, Homo sapien
caggttgagtcattagccagccggg

SEQ ID NO: 1466639 - DNA, 25 bp, Homo sapien
tgccactcggcagacatctaggtcg

SEQ ID NO: 1466640 - DNA, 25 bp, Homo sapien
accaaggcttatggcatgaagtgaa

SEQ ID NO: 1466641 - DNA, 25 bp, Homo sapien
aaaaattgaccatgggataggccat

SEQ ID NO: 1466642 - DNA, 25 bp, Homo sapien
taatgagctaagcaaccaacttaag

SEQ ID NO: 1466643 - DNA, 25 bp, Homo sapien
tcaatagcctatggaccaagttttc

SEQ ID NO: 1466644 - DNA, 25 bp, Homo sapien
caagggccaattctgtcgggatgag

SEQ ID NO: 1466645 - DNA, 25 bp, Homo sapien
caattctgtcgggatgaggagagca

SEQ ID NO: 1466646 - DNA, 25 bp, Homo sapien
ttgacaccacaagggccaattctgt

SEQ ID NO: 1466647 - DNA, 25 bp, Homo sapien
tcaatcgatgatcttgacaccacaa

SEQ ID NO: 1466648 - DNA, 25 bp, Homo sapien
taagctcttaggcccctgcaaggtt

SEQ ID NO: 1466649 - DNA, 25 bp, Homo sapien
ttcatgaactggatagtgagtgcag

SEQ ID NO: 1466650 - DNA, 25 bp, Homo sapien
gcaaggttgcccctggaagtacaca

SEQ ID NO: 1466651 - DNA, 25 bp, Homo sapien
catgttcatgaactggatagtgagt

SEQ ID NO: 1466652 - DNA, 25 bp, Homo sapien
tgacgatcccacaggaaggtgcaaa

SEQ ID NO: 1466653 - DNA, 25 bp, Homo sapien
acaggaaggtgcaaagagctgtgca

SEQ ID NO: 1466654 - DNA, 25 bp, Homo sapien
aaagctgaatgtgacgatcccacag

SEQ ID NO: 1466655 - DNA, 25 bp, Homo sapien
gaggataaagtaaagatcacaccgg

SEQ ID NO: 1466656 - DNA, 25 bp, Homo sapien
ctcttgtccgtttctgagcctgcat

SEQ ID NO: 1466657 - DNA, 25 bp, Homo sapien
gatcccttgtctgctgagctctgcc

SEQ ID NO: 1466658 - DNA, 25 bp, Homo sapien
ctttgacaggtgatcccttgtctgc

SEQ ID NO: 1466659 - DNA, 25 bp, Homo sapien
ggtggagactctttgacaggtgatc

SEQ ID NO: 1466660 - DNA, 25 bp, Homo sapien
gagactctttgacaggtgatccctt

SEQ ID NO: 1466661 - DNA, 25 bp, Homo sapien
ccagtgttttctcgggaggtgtaga

SEQ ID NO: 1466662 - DNA, 25 bp, Homo sapien
cacactggtgtctatcaatgtcata

SEQ ID NO: 1466663 - DNA, 25 bp, Homo sapien
cactatttgatcagcagagattcca

SEQ ID NO: 1466664 - DNA, 25 bp, Homo sapien
agcactgaccaatatcactatttga

SEQ ID NO: 1466665 - DNA, 25 bp, Homo sapien
atgagtttggcagaagagtcttggt

SEQ ID NO: 1466666 - DNA, 25 bp, Homo sapien
cttggtttggtcagttcagcccttc

SEQ ID NO: 1466667 - DNA, 25 bp, Homo sapien
agagtcttggtttggtcagttcagc

SEQ ID NO: 1466668 - DNA, 25 bp, Homo sapien
agtcttggtttggtcagttcagccc

SEQ ID NO: 1466669 - DNA, 25 bp, Homo sapien
cttttaagtactccacgtaccgcag

SEQ ID NO: 1466670 - DNA, 25 bp, Homo sapien
ccacgtaccgcagatgaagctgcca

SEQ ID NO: 1466671 - DNA, 25 bp, Homo sapien
agcacaggaaccgccgcagtctgtc

SEQ ID NO: 1466672 - DNA, 25 bp, Homo sapien
agttgccagcacgtcagcacaggaa

SEQ ID NO: 1466673 - DNA, 25 bp, Homo sapien
ccgttgcagacttcagggaaatggt

SEQ ID NO: 1466674 - DNA, 25 bp, Homo sapien
ttgcagacttcagggaaatggttcc

SEQ ID NO: 1466675 - DNA, 25 bp, Homo sapien
ccttgcccgttgcagacttcaggga

SEQ ID NO: 1466676 - DNA, 25 bp, Homo sapien
aaagccttgcccgttgcagacttca

SEQ ID NO: 1466677 - DNA, 25 bp, Homo sapien
tgagggttggcactcccttcttcac

SEQ ID NO: 1466678 - DNA, 25 bp, Homo sapien
accatagaggacaccacctggcctt

SEQ ID NO: 1466679 - DNA, 25 bp, Homo sapien
ccagggacatccaccatagaggaca

SEQ ID NO: 1466680 - DNA, 25 bp, Homo sapien
tcttcaccctcagcggtgaggatat

SEQ ID NO: 1466681 - DNA, 25 bp, Homo sapien
ctgctaggcagcagccatagaaggt

SEQ ID NO: 1466682 - DNA, 25 bp, Homo sapien
aaggtgctctgacccactgctaggc

SEQ ID NO: 1466683 - DNA, 25 bp, Homo sapien
caagccggctgcatatcaaggtgct

SEQ ID NO: 1466684 - DNA, 25 bp, Homo sapien
ttaccatgcaacctgaatcttgggg

SEQ ID NO: 1466685 - DNA, 25 bp, Homo sapien
catgcctgctgggtaaatccactgt

SEQ ID NO: 1466686 - DNA, 25 bp, Homo sapien
tacacaggataattttgactgcggg

SEQ ID NO: 1466687 - DNA, 25 bp, Homo sapien
ggttcccatttcaggtagccaggag

SEQ ID NO: 1466688 - DNA, 25 bp, Homo sapien
tcattagtatccatgaagttctgga

SEQ ID NO: 1466689 - DNA, 25 bp, Homo sapien
cttttagagtggatgatggcaagct

SEQ ID NO: 1466690 - DNA, 25 bp, Homo sapien
tactagaacatcgtcctccttttag

SEQ ID NO: 1466691 - DNA, 25 bp, Homo sapien
aacctggcacaccttactagaacat

SEQ ID NO: 1466692 - DNA, 25 bp, Homo sapien
tggatgatggcaagctaccagtgtt

SEQ ID NO: 1466693 - DNA, 25 bp, Homo sapien
catgatggaaattcctagatttctg

SEQ ID NO: 1466694 - DNA, 25 bp, Homo sapien
ctattttgtaagaatctgtaggtga

SEQ ID NO: 1466695 - DNA, 25 bp, Homo sapien
tattctctgcttatagagccatacc

SEQ ID NO: 1466696 - DNA, 25 bp, Homo sapien
tggccctgaccacggtataccatga

SEQ ID NO: 1466697 - DNA, 25 bp, Homo sapien
acgtgcataggccaaaatgcaaggg

SEQ ID NO: 1466698 - DNA, 25 bp, Homo sapien
tctgagacgtgcataggccaaaatg

SEQ ID NO: 1466699 - DNA, 25 bp, Homo sapien
caagatgctctgagacgtgcatagg

SEQ ID NO: 1466700 - DNA, 25 bp, Homo sapien
gagagactgtgctggaacgagcagt

SEQ ID NO: 1466701 - DNA, 25 bp, Homo sapien
gggcgaccctgagactccttccact

SEQ ID NO: 1466702 - DNA, 25 bp, Homo sapien
gggactgcacattataacttattcc

SEQ ID NO: 1466703 - DNA, 25 bp, Homo sapien
tgtgggtggcccttgctaggcctgg

SEQ ID NO: 1466704 - DNA, 25 bp, Homo sapien
accacatggggcgaccctgagactc

SEQ ID NO: 1466705 - DNA, 25 bp, Homo sapien
ctgacgctctgggttatagccttgg

SEQ ID NO: 1466706 - DNA, 25 bp, Homo sapien
tcctcttctactggcaaaggctcag

SEQ ID NO: 1466707 - DNA, 25 bp, Homo sapien
tagccttggcgctgtgaatctcctc

SEQ ID NO: 1466708 - DNA, 25 bp, Homo sapien
gcccctttccgctctgttcattaaa

SEQ ID NO: 1466709 - DNA, 25 bp, Homo sapien
catggtaacgctcaggccgcttttt

SEQ ID NO: 1466710 - DNA, 25 bp, Homo sapien
taacgctcaggccgctttttggaaa

SEQ ID NO: 1466711 - DNA, 25 bp, Homo sapien
ggtaacgctcaggccgctttttgga

SEQ ID NO: 1466712 - DNA, 25 bp, Homo sapien
tggtaacgctcaggccgctttttgg

SEQ ID NO: 1466713 - DNA, 25 bp, Homo sapien
accaacgataaactgagggctggga

SEQ ID NO: 1466714 - DNA, 25 bp, Homo sapien
gacaaatgtctgtgcgcgtggctcc

SEQ ID NO: 1466715 - DNA, 25 bp, Homo sapien
tggctccaccaacgataaactgagg

SEQ ID NO: 1466716 - DNA, 25 bp, Homo sapien
gtgcgcgtggctccaccaacgataa

SEQ ID NO: 1466717 - DNA, 25 bp, Homo sapien
ggattctgctgtgtgaggtggaacc

SEQ ID NO: 1466718 - DNA, 25 bp, Homo sapien
ccccatagcctctataaggtgctgg

SEQ ID NO: 1466719 - DNA, 25 bp, Homo sapien
gccccatagcctctataaggtgctg

SEQ ID NO: 1466720 - DNA, 25 bp, Homo sapien
gcagccccatagcctctataaggtg

SEQ ID NO: 1466721 - DNA, 25 bp, Homo sapien
tttttagaacccccagagatgctgc

SEQ ID NO: 1466722 - DNA, 25 bp, Homo sapien
tatagccacattgcttgacccagca

SEQ ID NO: 1466723 - DNA, 25 bp, Homo sapien
atcatcatcttcaagtatagccaca

SEQ ID NO: 1466724 - DNA, 25 bp, Homo sapien
caagtatagccacattgcttgaccc

SEQ ID NO: 1466725 - DNA, 25 bp, Homo sapien
catctgctttcccccaaagggcggt

SEQ ID NO: 1466726 - DNA, 25 bp, Homo sapien
ctcatctgctttcccccaaagggcg

SEQ ID NO: 1466727 - DNA, 25 bp, Homo sapien
cccatctcatctgctttcccccaaa

SEQ ID NO: 1466728 - DNA, 25 bp, Homo sapien
atctcatctgctttcccccaaaggg

SEQ ID NO: 1466729 - DNA, 25 bp, Homo sapien
ataccctgatctctttgcaaaccct

SEQ ID NO: 1466730 - DNA, 25 bp, Homo sapien
ggataccctgatctctttgcaaacc

SEQ ID NO: 1466731 - DNA, 25 bp, Homo sapien
gataccctgatctctttgcaaaccc

SEQ ID NO: 1466732 - DNA, 25 bp, Homo sapien
tgagtttgcggagagcctggtccaa

SEQ ID NO: 1466733 - DNA, 25 bp, Homo sapien
taggacccctgagtccaagcactgt

SEQ ID NO: 1466734 - DNA, 25 bp, Homo sapien
caaagcgttttggttggagccaaga

SEQ ID NO: 1466735 - DNA, 25 bp, Homo sapien
tgtagcccaaagctgatggacatgc

SEQ ID NO: 1466736 - DNA, 25 bp, Homo sapien
gcagggctgcactgtactctcagac

SEQ ID NO: 1466737 - DNA, 25 bp, Homo sapien
gcaaggtctacatagcactttcctg

SEQ ID NO: 1466738 - DNA, 25 bp, Homo sapien
aatagaatgcaaggtctacatagca

SEQ ID NO: 1466739 - DNA, 25 bp, Homo sapien
gaatgcaaggtctacatagcacttt

SEQ ID NO: 1466740 - DNA, 25 bp, Homo sapien
ggtctacatagcactttcctgccat

SEQ ID NO: 1466741 - DNA, 25 bp, Homo sapien
gcaatttctcaaggttcgtcccaaa

SEQ ID NO: 1466742 - DNA, 25 bp, Homo sapien
aaggttcgtcccaaaacactgctgc

SEQ ID NO: 1466743 - DNA, 25 bp, Homo sapien
ttcttgtaaccatcccttgagtcat

SEQ ID NO: 1466744 - DNA, 25 bp, Homo sapien
aacacatgtcctgtccagtctttct

SEQ ID NO: 1466745 - DNA, 25 bp, Homo sapien
atgagcccctccattgtgagcattc

SEQ ID NO: 1466746 - DNA, 25 bp, Homo sapien
ctcatagtgcctctgtggcttaatg

SEQ ID NO: 1466747 - DNA, 25 bp, Homo sapien
gagcccctccattgtgagcattctg

SEQ ID NO: 1466748 - DNA, 25 bp, Homo sapien
ctctgtggcttaatgtcatgagccc

SEQ ID NO: 1466749 - DNA, 25 bp, Homo sapien
ctacttgtaggcctctccaggatcc

SEQ ID NO: 1466750 - DNA, 25 bp, Homo sapien
gcaaatagtgtctggactgaatcga

SEQ ID NO: 1466751 - DNA, 25 bp, Homo sapien
gccaatgtgagccagtcccgcacat

SEQ ID NO: 1466752 - DNA, 25 bp, Homo sapien
caggatccaaccatcccacgtaggt

SEQ ID NO: 1466753 - DNA, 25 bp, Homo sapien
agccctgtgtgtcccggcacctgct

SEQ ID NO: 1466754 - DNA, 25 bp, Homo sapien
cttctctggccccatctcccatcac

SEQ ID NO: 1466755 - DNA, 25 bp, Homo sapien
ctctggccccatctcccatcaccat

SEQ ID NO: 1466756 - DNA, 25 bp, Homo sapien
tgtgtgtcccggcacctgctctctt

SEQ ID NO: 1466757 - DNA, 25 bp, Homo sapien
tcagagtggcactgcagtctatgga

SEQ ID NO: 1466758 - DNA, 25 bp, Homo sapien
aatgcagacttctattggcccagct

SEQ ID NO: 1466759 - DNA, 25 bp, Homo sapien
ggctggccatttctgcccaatgcag

SEQ ID NO: 1466760 - DNA, 25 bp, Homo sapien
cttgcatgtctaacttcgttttggc

SEQ ID NO: 1466761 - DNA, 25 bp, Homo sapien
tactttcaatatcactccctgttaa

SEQ ID NO: 1466762 - DNA, 25 bp, Homo sapien
tccctttcagcaagccagtgtcggc

SEQ ID NO: 1466763 - DNA, 25 bp, Homo sapien
cactacagtggtttggaatactttc

SEQ ID NO: 1466764 - DNA, 25 bp, Homo sapien
gttaacaagcctatccttggactgg

SEQ ID NO: 1466765 - DNA, 25 bp, Homo sapien
ccaatactcatgctacagctatgag

SEQ ID NO: 1466766 - DNA, 25 bp, Homo sapien
caatactcatgctacagctatgagg

SEQ ID NO: 1466767 - DNA, 25 bp, Homo sapien
tactcatgctacagctatgaggaaa

SEQ ID NO: 1466768 - DNA, 25 bp, Homo sapien
catgctacagctatgaggaaagaat

SEQ ID NO: 1466769 - DNA, 25 bp, Homo sapien
ttttttgcagccctgtggaattcat

SEQ ID NO: 1466770 - DNA, 25 bp, Homo sapien
atgaaaccgttttttgcagccctgt

SEQ ID NO: 1466771 - DNA, 25 bp, Homo sapien
accgttttttgcagccctgtggaat

SEQ ID NO: 1466772 - DNA, 25 bp, Homo sapien
tgaaaccgttttttgcagccctgtg

SEQ ID NO: 1466773 - DNA, 25 bp, Homo sapien
cagattgtgcctctgatgcatctca

SEQ ID NO: 1466774 - DNA, 25 bp, Homo sapien
aaaaatccagaacctgcagattgtg

SEQ ID NO: 1466775 - DNA, 25 bp, Homo sapien
tccattgccatggccctctgagaca

SEQ ID NO: 1466776 - DNA, 25 bp, Homo sapien
ttgccatggccctctgagacacaca

SEQ ID NO: 1466777 - DNA, 25 bp, Homo sapien
cccaggcagttctggataatcccag

SEQ ID NO: 1466778 - DNA, 25 bp, Homo sapien
cagacccaggcagttctggataatc

SEQ ID NO: 1466779 - DNA, 25 bp, Homo sapien
ggcccagacccaggcagttctggat

SEQ ID NO: 1466780 - DNA, 25 bp, Homo sapien
gcagttctggataatcccagctgtt

SEQ ID NO: 1466781 - DNA, 25 bp, Homo sapien
tcccgtgaaaaggattgtgtggtca

SEQ ID NO: 1466782 - DNA, 25 bp, Homo sapien
ctgggtcagtgagatagcatagtgt

SEQ ID NO: 1466783 - DNA, 25 bp, Homo sapien
gtctatgtccttgtgttcccgtgaa

SEQ ID NO: 1466784 - DNA, 25 bp, Homo sapien
caggaaggttttccaccatgaagtg

SEQ ID NO: 1466785 - DNA, 25 bp, Homo sapien
actctggaccgcgattcgcgagcct

SEQ ID NO: 1466786 - DNA, 25 bp, Homo sapien
tatcctagccttcttccctatgggc

SEQ ID NO: 1466787 - DNA, 25 bp, Homo sapien
ggagctgtccgcagatggcagcacc

SEQ ID NO: 1466788 - DNA, 25 bp, Homo sapien
ttccggacggccacaactatcctag

SEQ ID NO: 1466789 - DNA, 25 bp, Homo sapien
cgtcgttatatagatgagggcttcc

SEQ ID NO: 1466790 - DNA, 25 bp, Homo sapien
ggaggtgctcaaccgcttcaagctg

SEQ ID NO: 1466791 - DNA, 25 bp, Homo sapien
tcttcctgacgaatcgcgccaggga

SEQ ID NO: 1466792 - DNA, 25 bp, Homo sapien
atgaaaatgatacttgcctggaggc

SEQ ID NO: 1466793 - DNA, 25 bp, Homo sapien
aggagggcaggtctaaggcactggc

SEQ ID NO: 1466794 - DNA, 25 bp, Homo sapien
cgggcgaagtggctgacactgggtg

SEQ ID NO: 1466795 - DNA, 25 bp, Homo sapien
ggaaggccacagagggccgggcgaa

SEQ ID NO: 1466796 - DNA, 25 bp, Homo sapien
cctgtccgtgtaacagaggagtgaa

SEQ ID NO: 1466797 - DNA, 25 bp, Homo sapien
ctcgcttctcgtagtctttgcaagg

SEQ ID NO: 1466798 - DNA, 25 bp, Homo sapien
tctcgtagtctttgcaaggatgagc

SEQ ID NO: 1466799 - DNA, 25 bp, Homo sapien
tggagatcctcgcttctcgtagtct

SEQ ID NO: 1466800 - DNA, 25 bp, Homo sapien
cgtagtctttgcaaggatgagccat

SEQ ID NO: 1466801 - DNA, 25 bp, Homo sapien
tacaaagaccaaagggatcctgcgc

SEQ ID NO: 1466802 - DNA, 25 bp, Homo sapien
aatgagtcgcttaacccttgacaag

SEQ ID NO: 1466803 - DNA, 25 bp, Homo sapien
gaagactcacctctgtcgcttgggt

SEQ ID NO: 1466804 - DNA, 25 bp, Homo sapien
gagtcgctctcaaaggacacgaggc

SEQ ID NO: 1466805 - DNA, 25 bp, Homo sapien
cacttacattgaatcacttagctgg

SEQ ID NO: 1466806 - DNA, 25 bp, Homo sapien
tcccaacggcttgtgactattaaac

SEQ ID NO: 1466807 - DNA, 25 bp, Homo sapien
aaaactcttattacgatacatatac

SEQ ID NO: 1466808 - DNA, 25 bp, Homo sapien
tctttttcagctgggtatgatatcc

SEQ ID NO: 1466809 - DNA, 25 bp, Homo sapien
tcagagacagcgatgtgacggcact

SEQ ID NO: 1466810 - DNA, 25 bp, Homo sapien
agagagctgatttcccaactgccca

SEQ ID NO: 1466811 - DNA, 25 bp, Homo sapien
tacaagtgtgcagtgccttcgagcc

SEQ ID NO: 1466812 - DNA, 25 bp, Homo sapien
tatctgagtgctacacgggacacct

SEQ ID NO: 1466813 - DNA, 25 bp, Homo sapien
tgtcttggtttaattcttgggtaca

SEQ ID NO: 1466814 - DNA, 25 bp, Homo sapien
tcaggccaagctcctttgtcttggt

SEQ ID NO: 1466815 - DNA, 25 bp, Homo sapien
gccaagctcctttgtcttggtttaa

SEQ ID NO: 1466816 - DNA, 25 bp, Homo sapien
ctcctttgtcttggtttaattcttg

SEQ ID NO: 1466817 - DNA, 25 bp, Homo sapien
taaatcggctctatgtaaatcggct

SEQ ID NO: 1466818 - DNA, 25 bp, Homo sapien
cacaagggcccgtcaactgtgacaa

SEQ ID NO: 1466819 - DNA, 25 bp, Homo sapien
tgtgtgtggcacctagagctttacg

SEQ ID NO: 1466820 - DNA, 25 bp, Homo sapien
tagactcagcaggacgttcaaagat

SEQ ID NO: 1466821 - DNA, 25 bp, Homo sapien
gaaatgccacagattaaaagtctat

SEQ ID NO: 1466822 - DNA, 25 bp, Homo sapien
tgtgtcatgggacttcagactgtca

SEQ ID NO: 1466823 - DNA, 25 bp, Homo sapien
agtctataaatttaaggaagattag

SEQ ID NO: 1466824 - DNA, 25 bp, Homo sapien
cacaatggacatgacattgtgtcat

SEQ ID NO: 1466825 - DNA, 25 bp, Homo sapien
caaaagcagcccctcttgacaaaag

SEQ ID NO: 1466826 - DNA, 25 bp, Homo sapien
taaaactgaaaaactggtggatcca

SEQ ID NO: 1466827 - DNA, 25 bp, Homo sapien
gaagcataggctttaattacatccc

SEQ ID NO: 1466828 - DNA, 25 bp, Homo sapien
tcaactgacacaccaaacaaaagca

SEQ ID NO: 1466829 - DNA, 25 bp, Homo sapien
tgctcccgcacttggaaacatgcaa

SEQ ID NO: 1466830 - DNA, 25 bp, Homo sapien
aattttctagactgctatctgagcc

SEQ ID NO: 1466831 - DNA, 25 bp, Homo sapien
taagcgccacacacacgagagaaaa

SEQ ID NO: 1466832 - DNA, 25 bp, Homo sapien
tgttccccgtgtcattaaccacagg

SEQ ID NO: 1466833 - DNA, 25 bp, Homo sapien
caaagggcagtttggtgcactgtac

SEQ ID NO: 1466834 - DNA, 25 bp, Homo sapien
catacagcagtttttacaaagcccc

SEQ ID NO: 1466835 - DNA, 25 bp, Homo sapien
tctctggcacatatgaaaacaccgt

SEQ ID NO: 1466836 - DNA, 25 bp, Homo sapien
ttccatgtcttattaacaaagggca

SEQ ID NO: 1466837 - DNA, 25 bp, Homo sapien
aatcccaaagcgcataaatgactcc

SEQ ID NO: 1466838 - DNA, 25 bp, Homo sapien
tatccctccttatcattaaggcgcg

SEQ ID NO: 1466839 - DNA, 25 bp, Homo sapien
catcattctgaggttcataatccca

SEQ ID NO: 1466840 - DNA, 25 bp, Homo sapien
gcaagttacgtggaacatatccctc

SEQ ID NO: 1466841 - DNA, 25 bp, Homo sapien
taggtcagatgctgcaacactgtct

SEQ ID NO: 1466842 - DNA, 25 bp, Homo sapien
gcccaagactatggataacacaaga

SEQ ID NO: 1466843 - DNA, 25 bp, Homo sapien
tgaagaagtccctgacaatagctgt

SEQ ID NO: 1466844 - DNA, 25 bp, Homo sapien
caaagtcattaacaccactaggtca

SEQ ID NO: 1466845 - DNA, 25 bp, Homo sapien
cataaagaaattgggagcactgagt

SEQ ID NO: 1466846 - DNA, 25 bp, Homo sapien
cacttggacgttgttacatgaggca

SEQ ID NO: 1466847 - DNA, 25 bp, Homo sapien
tgtaggtcatggcaaacacagcggc

SEQ ID NO: 1466848 - DNA, 25 bp, Homo sapien
gcagtctgcatgtcactgtaggtca

SEQ ID NO: 1466849 - DNA, 25 bp, Homo sapien
acacacagcattgtgaagagccgtg

SEQ ID NO: 1466850 - DNA, 25 bp, Homo sapien
gaacttaacgatttctgtgtggcct

SEQ ID NO: 1466851 - DNA, 25 bp, Homo sapien
gcagcatttacatttacaccaaact

SEQ ID NO: 1466852 - DNA, 25 bp, Homo sapien
cattggggaggcttgggtcatcaac

SEQ ID NO: 1466853 - DNA, 25 bp, Homo sapien
gacgaatctagcagtaaagcaaggg

SEQ ID NO: 1466854 - DNA, 25 bp, Homo sapien
gagccagttttacgcaagtttgtcc

SEQ ID NO: 1466855 - DNA, 25 bp, Homo sapien
cctcattccatgagcgatacgctct

SEQ ID NO: 1466856 - DNA, 25 bp, Homo sapien
ttctccctccaaagacgaatctagc

SEQ ID NO: 1466857 - DNA, 25 bp, Homo sapien
tcagaagtggcaaataggctagcgt

SEQ ID NO: 1466858 - DNA, 25 bp, Homo sapien
ccaagactggtctttagactgccta

SEQ ID NO: 1466859 - DNA, 25 bp, Homo sapien
caaagtgaacaaataccatggagca

SEQ ID NO: 1466860 - DNA, 25 bp, Homo sapien
gacatgcagcgtaatgaactttcac

SEQ ID NO: 1466861 - DNA, 25 bp, Homo sapien
cctgcccggtgatttcaggcgggcg

SEQ ID NO: 1466862 - DNA, 25 bp, Homo sapien
cccggtgatttcaggcgggcgcatg

SEQ ID NO: 1466863 - DNA, 25 bp, Homo sapien
tgcccggtgatttcaggcgggcgca

SEQ ID NO: 1466864 - DNA, 25 bp, Homo sapien
ccggtgatttcaggcgggcgcatgc

SEQ ID NO: 1466865 - DNA, 25 bp, Homo sapien
cactgttctctgtactggcattccc

SEQ ID NO: 1466866 - DNA, 25 bp, Homo sapien
caatgattcaggaaccagagagacc

SEQ ID NO: 1466867 - DNA, 25 bp, Homo sapien
aagcacatgtggagcctctggattt

SEQ ID NO: 1466868 - DNA, 25 bp, Homo sapien
gactccctcaggctcataatcaagg

SEQ ID NO: 1466869 - DNA, 25 bp, Homo sapien
tagaggccttggtgcgttagacagt

SEQ ID NO: 1466870 - DNA, 25 bp, Homo sapien
catggccgctatggtggtcctctga

SEQ ID NO: 1466871 - DNA, 25 bp, Homo sapien
gaatatttggcccattaggaccctc

SEQ ID NO: 1466872 - DNA, 25 bp, Homo sapien
tctgggcagcagcaattacaggctt

SEQ ID NO: 1466873 - DNA, 25 bp, Homo sapien
tcttggccaaccgaaggtatgctgg

SEQ ID NO: 1466874 - DNA, 25 bp, Homo sapien
gagtcttggtcaacgcgctctgcac

SEQ ID NO: 1466875 - DNA, 25 bp, Homo sapien
tgttgacaactgctgagaacttccg

SEQ ID NO: 1466876 - DNA, 25 bp, Homo sapien
tattgaacttgctgccacggtctgg

SEQ ID NO: 1466877 - DNA, 25 bp, Homo sapien
gagaacggacgcactttcttctctt

SEQ ID NO: 1466878 - DNA, 25 bp, Homo sapien
tgagcatcccgcaagatatcttcac

SEQ ID NO: 1466879 - DNA, 25 bp, Homo sapien
ctgagcatcccgcaagatatcttca

SEQ ID NO: 1466880 - DNA, 25 bp, Homo sapien
atcaaacattgagaacggacgcact

SEQ ID NO: 1466881 - DNA, 25 bp, Homo sapien
cttgatccagagcattcccagtgct

SEQ ID NO: 1466882 - DNA, 25 bp, Homo sapien
agaactaggctgtgcaggacttttt

SEQ ID NO: 1466883 - DNA, 25 bp, Homo sapien
gtctcattacaccagcaaagaatat

SEQ ID NO: 1466884 - DNA, 25 bp, Homo sapien
tttttaaacgtctcattacaccagc

SEQ ID NO: 1466885 - DNA, 25 bp, Homo sapien
ggacaggaagaactaggctgtgcag

SEQ ID NO: 1466886 - DNA, 25 bp, Homo sapien
tctgtattttcatcggcccctctga

SEQ ID NO: 1466887 - DNA, 25 bp, Homo sapien
ctgaatgaccaaggaaccatccggc

SEQ ID NO: 1466888 - DNA, 25 bp, Homo sapien
gacgactggatatagggacctactg

SEQ ID NO: 1466889 - DNA, 25 bp, Homo sapien
ggcatccgaggcatagtagacgact

SEQ ID NO: 1466890 - DNA, 25 bp, Homo sapien
gaatctagccatagagtctacaaaa

SEQ ID NO: 1466891 - DNA, 25 bp, Homo sapien
aaagtaaaaaagcagcggattgtct

SEQ ID NO: 1466892 - DNA, 25 bp, Homo sapien
cagagctacacaggtaataacatta

SEQ ID NO: 1466893 - DNA, 25 bp, Homo sapien
tacaagtattagagacaaacagagc

SEQ ID NO: 1466894 - DNA, 25 bp, Homo sapien
ggtccctcagctcattaacacgctt

SEQ ID NO: 1466895 - DNA, 25 bp, Homo sapien
tctttttgctgtagagctgccttct

SEQ ID NO: 1466896 - DNA, 25 bp, Homo sapien
taacacgcttatccatgactgccac

SEQ ID NO: 1466897 - DNA, 25 bp, Homo sapien
tacgcttattcaaacactccctctg

SEQ ID NO: 1466898 - DNA, 25 bp, Homo sapien
tcatggtggctgtcgatcctgccgt

SEQ ID NO: 1466899 - DNA, 25 bp, Homo sapien
tgagcatctctagctgcctggtcag

SEQ ID NO: 1466900 - DNA, 25 bp, Homo sapien
tatagaggcgatcaagctcagccac

SEQ ID NO: 1466901 - DNA, 25 bp, Homo sapien
tctacttttgacacagccaggacga

SEQ ID NO: 1466902 - DNA, 25 bp, Homo sapien
aagtttcccattgcttagtctcttc

SEQ ID NO: 1466903 - DNA, 25 bp, Homo sapien
tcccattgcttagtctcttctgttc

SEQ ID NO: 1466904 - DNA, 25 bp, Homo sapien
caagtttcccattgcttagtctctt

SEQ ID NO: 1466905 - DNA, 25 bp, Homo sapien
cattgcttagtctcttctgttccac

SEQ ID NO: 1466906 - DNA, 25 bp, Homo sapien
cctgctcagcaacttgttgctgttg

SEQ ID NO: 1466907 - DNA, 25 bp, Homo sapien
tgtcgctgatcttgttgtttcaaaa

SEQ ID NO: 1466908 - DNA, 25 bp, Homo sapien
tggcctttaagtgctctcacttttt

SEQ ID NO: 1466909 - DNA, 25 bp, Homo sapien
gattctcagctatttcttttagcct

SEQ ID NO: 1466910 - DNA, 25 bp, Homo sapien
gctgctggcgagatgccatttcctg

SEQ ID NO: 1466911 - DNA, 25 bp, Homo sapien
tctcctttcttcgatattcaccagg

SEQ ID NO: 1466912 - DNA, 25 bp, Homo sapien
aacttggatcctgagatcttggtcc

SEQ ID NO: 1466913 - DNA, 25 bp, Homo sapien
gatattcaccaggaacttttacacc

SEQ ID NO: 1466914 - DNA, 25 bp, Homo sapien
acttggatcctgagatcttggtcca

SEQ ID NO: 1466915 - DNA, 25 bp, Homo sapien
taaatatctgtcacgattcacagag

SEQ ID NO: 1466916 - DNA, 25 bp, Homo sapien
aatatctgtcacgattcacagagca

SEQ ID NO: 1466917 - DNA, 25 bp, Homo sapien
gcttaaatatctgtcacgattcaca

SEQ ID NO: 1466918 - DNA, 25 bp, Homo sapien
tatctgtcacgattcacagagcact

SEQ ID NO: 1466919 - DNA, 25 bp, Homo sapien
cattcgctcattatccgcaactgga

SEQ ID NO: 1466920 - DNA, 25 bp, Homo sapien
tcatgacgaaggaagaagcgaactt

SEQ ID NO: 1466921 - DNA, 25 bp, Homo sapien
gttgaagaacatcaaacattcgctc

SEQ ID NO: 1466922 - DNA, 25 bp, Homo sapien
gcgaacttcgttcctctgacttcca

SEQ ID NO: 1466923 - DNA, 25 bp, Homo sapien
tttttaaacactagaggctgatcgt

SEQ ID NO: 1466924 - DNA, 25 bp, Homo sapien
aaacactagaggctgatcgtggtgg

SEQ ID NO: 1466925 - DNA, 25 bp, Homo sapien
cttttttaaacactagaggctgatc

SEQ ID NO: 1466926 - DNA, 25 bp, Homo sapien
tttaaacactagaggctgatcgtgg

SEQ ID NO: 1466927 - DNA, 25 bp, Homo sapien
aggaacactatttctgccggacgtg

SEQ ID NO: 1466928 - DNA, 25 bp, Homo sapien
aacactatttctgccggacgtgcta

SEQ ID NO: 1466929 - DNA, 25 bp, Homo sapien
ctatttctgccggacgtgctattct

SEQ ID NO: 1466930 - DNA, 25 bp, Homo sapien
ttctgccggacgtgctattctccag

SEQ ID NO: 1466931 - DNA, 25 bp, Homo sapien
ctgtgaagtgctgctcattgttact

SEQ ID NO: 1466932 - DNA, 25 bp, Homo sapien
gcatattgtttctggagtaactgga

SEQ ID NO: 1466933 - DNA, 25 bp, Homo sapien
atggcaatcactctcgccgggttct

SEQ ID NO: 1466934 - DNA, 25 bp, Homo sapien
tttgcacagatccaccacgtctctg

SEQ ID NO: 1466935 - DNA, 25 bp, Homo sapien
ctgatttattttcacggtcagtttt

SEQ ID NO: 1466936 - DNA, 25 bp, Homo sapien
ttcaggtactgctaaacggtatggc

SEQ ID NO: 1466937 - DNA, 25 bp, Homo sapien
caggtactgctaaacggtatggcat

SEQ ID NO: 1466938 - DNA, 25 bp, Homo sapien
gtttcaggtactgctaaacggtatg

SEQ ID NO: 1466939 - DNA, 25 bp, Homo sapien
caagggcactcatgagcttggctcc

SEQ ID NO: 1466940 - DNA, 25 bp, Homo sapien
gcacaccaagggcactcatgagctt

SEQ ID NO: 1466941 - DNA, 25 bp, Homo sapien
gagcttggctccctaattcagacat

SEQ ID NO: 1466942 - DNA, 25 bp, Homo sapien
ggcactcatgagcttggctccctaa

SEQ ID NO: 1466943 - DNA, 25 bp, Homo sapien
taggtcactcgctactttgtgtcag

SEQ ID NO: 1466944 - DNA, 25 bp, Homo sapien
cagagcactctggtcatgtggtcaa

SEQ ID NO: 1466945 - DNA, 25 bp, Homo sapien
cactgggctacacaataaagaaact

SEQ ID NO: 1466946 - DNA, 25 bp, Homo sapien
gcaaaacctaccagagaaagatcct

SEQ ID NO: 1466947 - DNA, 25 bp, Homo sapien
gggattagacgggatgaccaaccta

SEQ ID NO: 1466948 - DNA, 25 bp, Homo sapien
tataaattgttcactcccctgtgga

SEQ ID NO: 1466949 - DNA, 25 bp, Homo sapien
tgcaggcagacagttcgaatctcat

SEQ ID NO: 1466950 - DNA, 25 bp, Homo sapien
ccaggcacagtgtgaggcacagaaa

SEQ ID NO: 1466951 - DNA, 25 bp, Homo sapien
atggaagcgggtggccagactgcgg

SEQ ID NO: 1466952 - DNA, 25 bp, Homo sapien
ccctgacgcggctttgtctcttcga

SEQ ID NO: 1466953 - DNA, 25 bp, Homo sapien
atcttggacccgaaccgcatggaag

SEQ ID NO: 1466954 - DNA, 25 bp, Homo sapien
tgaggtgccccggagggtcgcggat

SEQ ID NO: 1466955 - DNA, 25 bp, Homo sapien
tgctgtaaggttaacaaacgtacac

SEQ ID NO: 1466956 - DNA, 25 bp, Homo sapien
cgtacaccgcaaactggataaaggg

SEQ ID NO: 1466957 - DNA, 25 bp, Homo sapien
ccgacaaaatggagttccccgtgtg

SEQ ID NO: 1466958 - DNA, 25 bp, Homo sapien
gctcctcagtgatccggctttcgga

SEQ ID NO: 1466959 - DNA, 25 bp, Homo sapien
gaaggctcatttttgttcaccagac

SEQ ID NO: 1466960 - DNA, 25 bp, Homo sapien
gacttatatgacaaggctcttacag

SEQ ID NO: 1466961 - DNA, 25 bp, Homo sapien
tcaaccttctagaacaacttagctg

SEQ ID NO: 1466962 - DNA, 25 bp, Homo sapien
gaaggtcctgtagtctcagtcctag

SEQ ID NO: 1466963 - DNA, 25 bp, Homo sapien
tggtggtgagcacctgttaactcag

SEQ ID NO: 1466964 - DNA, 25 bp, Homo sapien
ggtgagcacctgttaactcagctac

SEQ ID NO: 1466965 - DNA, 25 bp, Homo sapien
tgagcacctgttaactcagctactt

SEQ ID NO: 1466966 - DNA, 25 bp, Homo sapien
ggtggtgagcacctgttaactcagc

SEQ ID NO: 1466967 - DNA, 25 bp, Homo sapien
gagcaggtacgcgatgtcttccaca

SEQ ID NO: 1466968 - DNA, 25 bp, Homo sapien
cagcttcctgctcgattagaccgtc

SEQ ID NO: 1466969 - DNA, 25 bp, Homo sapien
tgccccgccagcagataggtgatgt

SEQ ID NO: 1466970 - DNA, 25 bp, Homo sapien
gtcagcccgcggaagtggaggccgt

SEQ ID NO: 1466971 - DNA, 25 bp, Homo sapien
gctcgctccgtaaggtcattgctta

SEQ ID NO: 1466972 - DNA, 25 bp, Homo sapien
tgctcgctccgtaaggtcattgctt

SEQ ID NO: 1466973 - DNA, 25 bp, Homo sapien
ctgctcgctccgtaaggtcattgct

SEQ ID NO: 1466974 - DNA, 25 bp, Homo sapien
ctcgctccgtaaggtcattgcttac

SEQ ID NO: 1466975 - DNA, 25 bp, Homo sapien
gctctccagcatcaaagcgagtcat

SEQ ID NO: 1466976 - DNA, 25 bp, Homo sapien
ttagctctccagcatcaaagcgagt

SEQ ID NO: 1466977 - DNA, 25 bp, Homo sapien
tccagcatcaaagcgagtcatcgct

SEQ ID NO: 1466978 - DNA, 25 bp, Homo sapien
agcatcaaagcgagtcatcgctgac

SEQ ID NO: 1466979 - DNA, 25 bp, Homo sapien
aggatgccggtcgtgatggacagca

SEQ ID NO: 1466980 - DNA, 25 bp, Homo sapien
gatgccggtcgtgatggacagcagc

SEQ ID NO: 1466981 - DNA, 25 bp, Homo sapien
gaggatgccggtcgtgatggacagc

SEQ ID NO: 1466982 - DNA, 25 bp, Homo sapien
ttgaggatgccggtcgtgatggaca

SEQ ID NO: 1466983 - DNA, 25 bp, Homo sapien
tgaagatgcgagaaactggctagca

SEQ ID NO: 1466984 - DNA, 25 bp, Homo sapien
aagatgcgagaaactggctagcaac

SEQ ID NO: 1466985 - DNA, 25 bp, Homo sapien
tggtgaagatgcgagaaactggcta

SEQ ID NO: 1466986 - DNA, 25 bp, Homo sapien
ctggtgaagatgcgagaaactggct

SEQ ID NO: 1466987 - DNA, 25 bp, Homo sapien
ctgtaagtctttgctgccggcgatg

SEQ ID NO: 1466988 - DNA, 25 bp, Homo sapien
gccggcgatgactggcactttacgt

SEQ ID NO: 1466989 - DNA, 25 bp, Homo sapien
tttgctgccggcgatgactggcact

SEQ ID NO: 1466990 - DNA, 25 bp, Homo sapien
taagtctttgctgccggcgatgact

SEQ ID NO: 1466991 - DNA, 25 bp, Homo sapien
gcttgaccctctcacatctgcttct

SEQ ID NO: 1466992 - DNA, 25 bp, Homo sapien
tttcttctgcttgaccctctcacat

SEQ ID NO: 1466993 - DNA, 25 bp, Homo sapien
ttctgcttgaccctctcacatctgc

SEQ ID NO: 1466994 - DNA, 25 bp, Homo sapien
ccctctcacatctgcttctactctg

SEQ ID NO: 1466995 - DNA, 25 bp, Homo sapien
gaggccaggatagaggtgccgatcc

SEQ ID NO: 1466996 - DNA, 25 bp, Homo sapien
tgtccgctatgcaggccagagtaca

SEQ ID NO: 1466997 - DNA, 25 bp, Homo sapien
gcatcctgtccgctatgcaggccag

SEQ ID NO: 1466998 - DNA, 25 bp, Homo sapien
ttctgcatcctgtccgctatgcagg

SEQ ID NO: 1466999 - DNA, 25 bp, Homo sapien
tatgcaggccagagtacacggtggt

SEQ ID NO: 1467000 - DNA, 25 bp, Homo sapien
gcagcagaactgctttgatgatgac

SEQ ID NO: 1467001 - DNA, 25 bp, Homo sapien
gagtgcctcagagcagcagaactgc

SEQ ID NO: 1467002 - DNA, 25 bp, Homo sapien
tcagagcagcagaactgctttgatg

SEQ ID NO: 1467003 - DNA, 25 bp, Homo sapien
ctggaagagtgcctcagagcagcag

SEQ ID NO: 1467004 - DNA, 25 bp, Homo sapien
catggctgccgtgttaaaggtctca

SEQ ID NO: 1467005 - DNA, 25 bp, Homo sapien
gtccagggcgatgtaacacggcttc

SEQ ID NO: 1467006 - DNA, 25 bp, Homo sapien
ggcgatgtaacacggcttctccttg

SEQ ID NO: 1467007 - DNA, 25 bp, Homo sapien
acgtacatggctgccgtgttaaagg

SEQ ID NO: 1467008 - DNA, 25 bp, Homo sapien
ccagttggtgacgatgccgtgctcg

SEQ ID NO: 1467009 - DNA, 25 bp, Homo sapien
agttggtgacgatgccgtgctcgat

SEQ ID NO: 1467010 - DNA, 25 bp, Homo sapien
cattgtggaagatgtggtgccagat

SEQ ID NO: 1467011 - DNA, 25 bp, Homo sapien
gcagctcattgtggaagatgtggtg

SEQ ID NO: 1467012 - DNA, 25 bp, Homo sapien
cataggaatccttctgacccatgct

SEQ ID NO: 1467013 - DNA, 25 bp, Homo sapien
taggaatccttctgacccatgctca

SEQ ID NO: 1467014 - DNA, 25 bp, Homo sapien
acataggaatccttctgacccatgc

SEQ ID NO: 1467015 - DNA, 25 bp, Homo sapien
ccacataggaatccttctgacccat

SEQ ID NO: 1467016 - DNA, 25 bp, Homo sapien
caatgacgagcgccgcgatatcatc

SEQ ID NO: 1467017 - DNA, 25 bp, Homo sapien
gtcaatgacgagcgccgcgatatca

SEQ ID NO: 1467018 - DNA, 25 bp, Homo sapien
gatggcccaggggtcatcatcccct

SEQ ID NO: 1467019 - DNA, 25 bp, Homo sapien
ggtcatcatcccctgtgaagccagc

SEQ ID NO: 1467020 - DNA, 25 bp, Homo sapien
gtgagctggcggcgggtgtggacag

SEQ ID NO: 1467021 - DNA, 25 bp, Homo sapien
ggtgagctggcggcgggtgtggaca

SEQ ID NO: 1467022 - DNA, 25 bp, Homo sapien
tgagctggcggcgggtgtggacagg

SEQ ID NO: 1467023 - DNA, 25 bp, Homo sapien
ggaacgcaggtgacgtataccctac

SEQ ID NO: 1467024 - DNA, 25 bp, Homo sapien
tacgggaacgcaggtgacgtatacc

SEQ ID NO: 1467025 - DNA, 25 bp, Homo sapien
cgggaacgcaggtgacgtataccct

SEQ ID NO: 1467026 - DNA, 25 bp, Homo sapien
ttacgggaacgcaggtgacgtatac

SEQ ID NO: 1467027 - DNA, 25 bp, Homo sapien
gagagcccgtccactagaaatgatg

SEQ ID NO: 1467028 - DNA, 25 bp, Homo sapien
tgatggcaatgttcctcctaagggc

SEQ ID NO: 1467029 - DNA, 25 bp, Homo sapien
attaatgatgcgtcacccgagagcc

SEQ ID NO: 1467030 - DNA, 25 bp, Homo sapien
tcctaagggcacagattggtgaccc

SEQ ID NO: 1467031 - DNA, 25 bp, Homo sapien
caggacccaaacttgagcactcagg

SEQ ID NO: 1467032 - DNA, 25 bp, Homo sapien
gcactcaggatctcaaccacagttg

SEQ ID NO: 1467033 - DNA, 25 bp, Homo sapien
accacagttgagatctcttcttcac

SEQ ID NO: 1467034 - DNA, 25 bp, Homo sapien
acatctctgcatcaggacccaaact

SEQ ID NO: 1467035 - DNA, 25 bp, Homo sapien
tcaggtgtctatccctggtccgatc

SEQ ID NO: 1467036 - DNA, 25 bp, Homo sapien
cttccctcctattggtagaatagct

SEQ ID NO: 1467037 - DNA, 25 bp, Homo sapien
tggtagaatagcttttccaagaagg

SEQ ID NO: 1467038 - DNA, 25 bp, Homo sapien
tgtgcccagggtagcacatcaggta

SEQ ID NO: 1467039 - DNA, 25 bp, Homo sapien
attcggagtcaagatccatgctcag

SEQ ID NO: 1467040 - DNA, 25 bp, Homo sapien
aagcgttcccccgattttgcatgcc

SEQ ID NO: 1467041 - DNA, 25 bp, Homo sapien
tttgcatgccccagccaattcggag

SEQ ID NO: 1467042 - DNA, 25 bp, Homo sapien
tgtctaggcagagcggagcctgggc

SEQ ID NO: 1467043 - DNA, 25 bp, Homo sapien
gcagacctagtgcatggctccacac

SEQ ID NO: 1467044 - DNA, 25 bp, Homo sapien
cagacctagtgcatggctccacact

SEQ ID NO: 1467045 - DNA, 25 bp, Homo sapien
gaggctacataactacatggctagg

SEQ ID NO: 1467046 - DNA, 25 bp, Homo sapien
tatcctgatttcttccatagcttgg

SEQ ID NO: 1467047 - DNA, 25 bp, Homo sapien
acttggctgctctagaaaattgaca

SEQ ID NO: 1467048 - DNA, 25 bp, Homo sapien
gcttggatcttgacctagagggaaa

SEQ ID NO: 1467049 - DNA, 25 bp, Homo sapien
tgatagtcagttcttcactgaatcc

SEQ ID NO: 1467050 - DNA, 25 bp, Homo sapien
tcaaaaatggcttaagtctgcaaca

SEQ ID NO: 1467051 - DNA, 25 bp, Homo sapien
acaaggtgatagtcagttcttcact

SEQ ID NO: 1467052 - DNA, 25 bp, Homo sapien
ggcttaagtctgcaacatgtttctg

SEQ ID NO: 1467053 - DNA, 25 bp, Homo sapien
tatcagtgctcagctgagtctgcag

SEQ ID NO: 1467054 - DNA, 25 bp, Homo sapien
tgtctttctttgtatcagtgctcag

SEQ ID NO: 1467055 - DNA, 25 bp, Homo sapien
ctttgtatcagtgctcagctgagtc

SEQ ID NO: 1467056 - DNA, 25 bp, Homo sapien
tttctttgtatcagtgctcagctga

SEQ ID NO: 1467057 - DNA, 25 bp, Homo sapien
actcccaacttgagctatacttttt

SEQ ID NO: 1467058 - DNA, 25 bp, Homo sapien
gcactcccaacttgagctatacttt

SEQ ID NO: 1467059 - DNA, 25 bp, Homo sapien
cactcccaacttgagctatactttt

SEQ ID NO: 1467060 - DNA, 25 bp, Homo sapien
tgcactcccaacttgagctatactt

SEQ ID NO: 1467061 - DNA, 25 bp, Homo sapien
ttgtagaggccgacgggaggcacag

SEQ ID NO: 1467062 - DNA, 25 bp, Homo sapien
gcagatgttgggattgtagaggccg

SEQ ID NO: 1467063 - DNA, 25 bp, Homo sapien
aattaccgaccaaaatatataatgg

SEQ ID NO: 1467064 - DNA, 25 bp, Homo sapien
aaattaccgaccaaaatatataatg

SEQ ID NO: 1467065 - DNA, 25 bp, Homo sapien
tagggtatgggcctaaataggccat

SEQ ID NO: 1467066 - DNA, 25 bp, Homo sapien
gtagggtatgggcctaaataggcca

SEQ ID NO: 1467067 - DNA, 25 bp, Homo sapien
agggtatgggcctaaataggccatt

SEQ ID NO: 1467068 - DNA, 25 bp, Homo sapien
gggtatgggcctaaataggccattg

SEQ ID NO: 1467069 - DNA, 25 bp, Homo sapien
ctgggccaaaagatttaagcacatt

SEQ ID NO: 1467070 - DNA, 25 bp, Homo sapien
ggccaaaagatttaagcacattcac

SEQ ID NO: 1467071 - DNA, 25 bp, Homo sapien
aagcacattcacatttattaggcac

SEQ ID NO: 1467072 - DNA, 25 bp, Homo sapien
ttattaggcacttcatttccattat

SEQ ID NO: 1467073 - DNA, 25 bp, Homo sapien
tagaatcagtgggcgtgttaagctt

SEQ ID NO: 1467074 - DNA, 25 bp, Homo sapien
gaatcagtgggcgtgttaagcttgt

SEQ ID NO: 1467075 - DNA, 25 bp, Homo sapien
ttttcctgcaactggatggtcccac

SEQ ID NO: 1467076 - DNA, 25 bp, Homo sapien
tgtagaatcagtgggcgtgttaagc

SEQ ID NO: 1467077 - DNA, 25 bp, Homo sapien
agactctcattaaggacagcgcaac

SEQ ID NO: 1467078 - DNA, 25 bp, Homo sapien
gtattagactctcattaaggacagc

SEQ ID NO: 1467079 - DNA, 25 bp, Homo sapien
ttagactctcattaaggacagcgca

SEQ ID NO: 1467080 - DNA, 25 bp, Homo sapien
tacagacgaagctttcctcactccc

SEQ ID NO: 1467081 - DNA, 25 bp, Homo sapien
atcagaaacgacccttcttcccaca

SEQ ID NO: 1467082 - DNA, 25 bp, Homo sapien
tgcatcagaaacgacccttcttccc

SEQ ID NO: 1467083 - DNA, 25 bp, Homo sapien
tcagaaacgacccttcttcccacac

SEQ ID NO: 1467084 - DNA, 25 bp, Homo sapien
gcatcagaaacgacccttcttccca

SEQ ID NO: 1467085 - DNA, 25 bp, Homo sapien
agagaccggtctggacaacacagtg

SEQ ID NO: 1467086 - DNA, 25 bp, Homo sapien
ctagagaccggtctggacaacacag

SEQ ID NO: 1467087 - DNA, 25 bp, Homo sapien
gctagagaccggtctggacaacaca

SEQ ID NO: 1467088 - DNA, 25 bp, Homo sapien
agctagagaccggtctggacaacac

SEQ ID NO: 1467089 - DNA, 25 bp, Homo sapien
tacagtcgttcctcagtatacagaa

SEQ ID NO: 1467090 - DNA, 25 bp, Homo sapien
catcaagggtaatgagaatgtccat

SEQ ID NO: 1467091 - DNA, 25 bp, Homo sapien
taaactatggtatcaataggcacct

SEQ ID NO: 1467092 - DNA, 25 bp, Homo sapien
tatgcaacagtatgtatcctacagc

SEQ ID NO: 1467093 - DNA, 25 bp, Homo sapien
atttcgctgtcacccctctggaatc

SEQ ID NO: 1467094 - DNA, 25 bp, Homo sapien
tccacgtatacgaaaattccaaata

SEQ ID NO: 1467095 - DNA, 25 bp, Homo sapien
cctctggaatccacgtatacgaaaa

SEQ ID NO: 1467096 - DNA, 25 bp, Homo sapien
acccctctggaatccacgtatacga

SEQ ID NO: 1467097 - DNA, 25 bp, Homo sapien
cagtcagctgtgatagcactactac

SEQ ID NO: 1467098 - DNA, 25 bp, Homo sapien
tcagctgtgatagcactactacact

SEQ ID NO: 1467099 - DNA, 25 bp, Homo sapien
tctcagccacgtgggaggttgagat

SEQ ID NO: 1467100 - DNA, 25 bp, Homo sapien
ggatcgcttcagcctagaaggttga

SEQ ID NO: 1467101 - DNA, 25 bp, Homo sapien
aggctcaggtaggaggatccttagc

SEQ ID NO: 1467102 - DNA, 25 bp, Homo sapien
gctcaggtaggaggatccttagccc

SEQ ID NO: 1467103 - DNA, 25 bp, Homo sapien
tgtgatagcactactgtactcaagc

SEQ ID NO: 1467104 - DNA, 25 bp, Homo sapien
tcaggtaggaggatccttagcccag

SEQ ID NO: 1467105 - DNA, 25 bp, Homo sapien
taacatgttgcccagtcagtctctc

SEQ ID NO: 1467106 - DNA, 25 bp, Homo sapien
cagaagtctttcatggtagatccag

SEQ ID NO: 1467107 - DNA, 25 bp, Homo sapien
ggattcagaagtctttcatggtaga

SEQ ID NO: 1467108 - DNA, 25 bp, Homo sapien
gtctctcttcctggattcagaagtc

SEQ ID NO: 1467109 - DNA, 25 bp, Homo sapien
aatcaacactatgtggcagcttgag

SEQ ID NO: 1467110 - DNA, 25 bp, Homo sapien
ttcacaatcaacactatgtggcagc

SEQ ID NO: 1467111 - DNA, 25 bp, Homo sapien
catttcacaatcaacactatgtggc

SEQ ID NO: 1467112 - DNA, 25 bp, Homo sapien
cacaatcaacactatgtggcagctt

SEQ ID NO: 1467113 - DNA, 25 bp, Homo sapien
gcattgcttgagcctggcaggtgga

SEQ ID NO: 1467114 - DNA, 25 bp, Homo sapien
agtgagcagaggttgtgccactgta

SEQ ID NO: 1467115 - DNA, 25 bp, Homo sapien
gagcattgcttgagcctggcaggtg

SEQ ID NO: 1467116 - DNA, 25 bp, Homo sapien
ggctgcagtgagcagaggttgtgcc

SEQ ID NO: 1467117 - DNA, 25 bp, Homo sapien
gctataatgagccatgataggacca

SEQ ID NO: 1467118 - DNA, 25 bp, Homo sapien
tgaggctataatgagccatgatagg

SEQ ID NO: 1467119 - DNA, 25 bp, Homo sapien
tgggaaggctgacatggtaggattg

SEQ ID NO: 1467120 - DNA, 25 bp, Homo sapien
taatgagccatgataggaccactga

SEQ ID NO: 1467121 - DNA, 25 bp, Homo sapien
gcaaatgttggtgaaggccgggcat

SEQ ID NO: 1467122 - DNA, 25 bp, Homo sapien
cacttgttcttatactgctttaagg

SEQ ID NO: 1467123 - DNA, 25 bp, Homo sapien
ggttgcagtggaccccatcactgca

SEQ ID NO: 1467124 - DNA, 25 bp, Homo sapien
caatgccctgggattatactgtttc

SEQ ID NO: 1467125 - DNA, 25 bp, Homo sapien
gcaactgtaacatgaggtcccagct

SEQ ID NO: 1467126 - DNA, 25 bp, Homo sapien
ggcgtgagcaactgtaacatgaggt

SEQ ID NO: 1467127 - DNA, 25 bp, Homo sapien
gtgagcaactgtaacatgaggtccc

SEQ ID NO: 1467128 - DNA, 25 bp, Homo sapien
gagcaactgtaacatgaggtcccag

SEQ ID NO: 1467129 - DNA, 25 bp, Homo sapien
tccaaagctcttataaagcccttcg

SEQ ID NO: 1467130 - DNA, 25 bp, Homo sapien
taaagcccttcgtgacagaggtaat

SEQ ID NO: 1467131 - DNA, 25 bp, Homo sapien
cccttcgtgacagaggtaataggag

SEQ ID NO: 1467132 - DNA, 25 bp, Homo sapien
tcttataaagcccttcgtgacagag

SEQ ID NO: 1467133 - DNA, 25 bp, Homo sapien
ccagtaattgaaaataaggtggcca

SEQ ID NO: 1467134 - DNA, 25 bp, Homo sapien
gagccagtaattgaaaataaggtgg

SEQ ID NO: 1467135 - DNA, 25 bp, Homo sapien
tacattgagccagtaattgaaaata

SEQ ID NO: 1467136 - DNA, 25 bp, Homo sapien
ctttcattggctgttcctgagatgg

SEQ ID NO: 1467137 - DNA, 25 bp, Homo sapien
ctgtcttttacagtcgtagataagg

SEQ ID NO: 1467138 - DNA, 25 bp, Homo sapien
gctgtcttttacagtcgtagataag

SEQ ID NO: 1467139 - DNA, 25 bp, Homo sapien
tgtcttttacagtcgtagataaggg

SEQ ID NO: 1467140 - DNA, 25 bp, Homo sapien
gcactattatttgatcatttttgag

SEQ ID NO: 1467141 - DNA, 25 bp, Homo sapien
ccgattgcacttgatgcatgcacta

SEQ ID NO: 1467142 - DNA, 25 bp, Homo sapien
ttccgattgcacttgatgcatgcac

SEQ ID NO: 1467143 - DNA, 25 bp, Homo sapien
gcttccgattgcacttgatgcatgc

SEQ ID NO: 1467144 - DNA, 25 bp, Homo sapien
tcagaagtctttcatggtaggtcca

SEQ ID NO: 1467145 - DNA, 25 bp, Homo sapien
tttctcttcctggattcagaagtct

SEQ ID NO: 1467146 - DNA, 25 bp, Homo sapien
gtcagtttctcttcctggattcaga

SEQ ID NO: 1467147 - DNA, 25 bp, Homo sapien
cagaagtctttcatggtaggtccag

SEQ ID NO: 1467148 - DNA, 25 bp, Homo sapien
caacttaagtatgtgtgctactgag

SEQ ID NO: 1467149 - DNA, 25 bp, Homo sapien
cttaagtatgtgtgctactgaggca

SEQ ID NO: 1467150 - DNA, 25 bp, Homo sapien
taagtatgtgtgctactgaggcaag

SEQ ID NO: 1467151 - DNA, 25 bp, Homo sapien
aagtatgtgtgctactgaggcaagc

SEQ ID NO: 1467152 - DNA, 25 bp, Homo sapien
ggacagtacttgttctcaagggaat

SEQ ID NO: 1467153 - DNA, 25 bp, Homo sapien
ttgatgtcaggagtcgaggcgggaa

SEQ ID NO: 1467154 - DNA, 25 bp, Homo sapien
tttccttcgaaagtaacatcctctc

SEQ ID NO: 1467155 - DNA, 25 bp, Homo sapien
tcgaaagtaacatcctctcaaggcc

SEQ ID NO: 1467156 - DNA, 25 bp, Homo sapien
ccttcgaaagtaacatcctctcaag

SEQ ID NO: 1467157 - DNA, 25 bp, Homo sapien
cagtgaccagcaaggttgcgccatt

SEQ ID NO: 1467158 - DNA, 25 bp, Homo sapien
cctgggcgataagagtgaaaactcc

SEQ ID NO: 1467159 - DNA, 25 bp, Homo sapien
gggcgataagagtgaaaactccatc

SEQ ID NO: 1467160 - DNA, 25 bp, Homo sapien
ggttgcagtgaccagcaaggttgcg

SEQ ID NO: 1467161 - DNA, 25 bp, Homo sapien
gggtatgggatcatcaccagacctt

SEQ ID NO: 1467162 - DNA, 25 bp, Homo sapien
tatgggatcatcaccagacctttgg

SEQ ID NO: 1467163 - DNA, 25 bp, Homo sapien
aagggtatgggatcatcaccagacc

SEQ ID NO: 1467164 - DNA, 25 bp, Homo sapien
aaaagggtatgggatcatcaccaga

SEQ ID NO: 1467165 - DNA, 25 bp, Homo sapien
tatcatggacatttgatgaatgctt

SEQ ID NO: 1467166 - DNA, 25 bp, Homo sapien
aaacttatgtcctgcatatcatgga

SEQ ID NO: 1467167 - DNA, 25 bp, Homo sapien
cagttgactggtgtagacttcaata

SEQ ID NO: 1467168 - DNA, 25 bp, Homo sapien
gataatatgcatggttccatactct

SEQ ID NO: 1467169 - DNA, 25 bp, Homo sapien
ttcacctgttgaattcataagttca

SEQ ID NO: 1467170 - DNA, 25 bp, Homo sapien
cacctgttgaattcataagttcatg

SEQ ID NO: 1467171 - DNA, 25 bp, Homo sapien
atcttcacctgttgaattcataagt

SEQ ID NO: 1467172 - DNA, 25 bp, Homo sapien
ctcacaaagttgatttatcaagttg

SEQ ID NO: 1467173 - DNA, 25 bp, Homo sapien
actccattgtgtaaacgcccatgaa

SEQ ID NO: 1467174 - DNA, 25 bp, Homo sapien
tgtgtaaacgcccatgaacataaga

SEQ ID NO: 1467175 - DNA, 25 bp, Homo sapien
tgtaaacgcccatgaacataagatt

SEQ ID NO: 1467176 - DNA, 25 bp, Homo sapien
cgcccatgaacataagattacagga

SEQ ID NO: 1467177 - DNA, 25 bp, Homo sapien
ttacgtagatcagcgatacgatgat

SEQ ID NO: 1467178 - DNA, 25 bp, Homo sapien
acgtagatcagcgatacgatgattc

SEQ ID NO: 1467179 - DNA, 25 bp, Homo sapien
gtagatcagcgatacgatgattcca

SEQ ID NO: 1467180 - DNA, 25 bp, Homo sapien
gtttacgtagatcagcgatacgatg

SEQ ID NO: 1467181 - DNA, 25 bp, Homo sapien
ctgaaaatcaagcaaaagttgcttc

SEQ ID NO: 1467182 - DNA, 25 bp, Homo sapien
caagcaaaagttgcttctcaataat

SEQ ID NO: 1467183 - DNA, 25 bp, Homo sapien
gaaaatcaagcaaaagttgcttctc

SEQ ID NO: 1467184 - DNA, 25 bp, Homo sapien
aaagttgcttctcaataatacgtcc

SEQ ID NO: 1467185 - DNA, 25 bp, Homo sapien
ctccctcattttccgttccccagca

SEQ ID NO: 1467186 - DNA, 25 bp, Homo sapien
ctcattttccgttccccagcattgg

SEQ ID NO: 1467187 - DNA, 25 bp, Homo sapien
cagagttgaactccctcattttccg

SEQ ID NO: 1467188 - DNA, 25 bp, Homo sapien
attttccgttccccagcattggcgg

SEQ ID NO: 1467189 - DNA, 25 bp, Homo sapien
cttagaaggtggggaataatcatca

SEQ ID NO: 1467190 - DNA, 25 bp, Homo sapien
ttagaaggtggggaataatcatcat

SEQ ID NO: 1467191 - DNA, 25 bp, Homo sapien
cgacaactctgatggccaaggtgag

SEQ ID NO: 1467192 - DNA, 25 bp, Homo sapien
gggattacagtagggcccagccagc

SEQ ID NO: 1467193 - DNA, 25 bp, Homo sapien
tgggattacagtagggcccagccag

SEQ ID NO: 1467194 - DNA, 25 bp, Homo sapien
ttctatttttgaccaacataaacac

SEQ ID NO: 1467195 - DNA, 25 bp, Homo sapien
tcagctacccttcttcagccggcaa

SEQ ID NO: 1467196 - DNA, 25 bp, Homo sapien
tacccttcttcagccggcaacacac

SEQ ID NO: 1467197 - DNA, 25 bp, Homo sapien
cttcttcagccggcaacacacagga

SEQ ID NO: 1467198 - DNA, 25 bp, Homo sapien
ttcttcagccggcaacacacaggac

SEQ ID NO: 1467199 - DNA, 25 bp, Homo sapien
gaaggcgcgctcttgtgacgtcgca

SEQ ID NO: 1467200 - DNA, 25 bp, Homo sapien
acggaaggcgcgctcttgtgacgtc

SEQ ID NO: 1467201 - DNA, 25 bp, Homo sapien
gtcgcagggaactaccactcacgca

SEQ ID NO: 1467202 - DNA, 25 bp, Homo sapien
gctcttgtgacgtcgcagggaacta

SEQ ID NO: 1467203 - DNA, 25 bp, Homo sapien
ccgggcgcagcaagggccagactct

SEQ ID NO: 1467204 - DNA, 25 bp, Homo sapien
gggccgggcgcagcaagggccagac

SEQ ID NO: 1467205 - DNA, 25 bp, Homo sapien
agcaagggccagactctgcgctagc

SEQ ID NO: 1467206 - DNA, 25 bp, Homo sapien
agggccagactctgcgctagcaggc

SEQ ID NO: 1467207 - DNA, 25 bp, Homo sapien
cagaaggtgcaaccgatcgcactgt

SEQ ID NO: 1467208 - DNA, 25 bp, Homo sapien
ctgtcgcagaaggtgcaaccgatcg

SEQ ID NO: 1467209 - DNA, 25 bp, Homo sapien
aaccgatcgcactgtcgcgcagaag

SEQ ID NO: 1467210 - DNA, 25 bp, Homo sapien
cactgtcgcgcagaagctcctcaat

SEQ ID NO: 1467211 - DNA, 25 bp, Homo sapien
gagcgtccccggctacctggcgccg

SEQ ID NO: 1467212 - DNA, 25 bp, Homo sapien
tccccggctacctggcgccgctcat

SEQ ID NO: 1467213 - DNA, 25 bp, Homo sapien
gagcctgggtacgtgcgccccacaa

SEQ ID NO: 1467214 - DNA, 25 bp, Homo sapien
ctgagcctgggtacgtgcgccccac

SEQ ID NO: 1467215 - DNA, 25 bp, Homo sapien
ctgggtagggtcggccccctctgag

SEQ ID NO: 1467216 - DNA, 25 bp, Homo sapien
gtagggtcggccccctctgaggctg

SEQ ID NO: 1467217 - DNA, 25 bp, Homo sapien
tagggtcggccccctctgaggctgc

SEQ ID NO: 1467218 - DNA, 25 bp, Homo sapien
gaaaattgcattggacagtgtagag

SEQ ID NO: 1467219 - DNA, 25 bp, Homo sapien
tttgctacgcattccaatcctgggt

SEQ ID NO: 1467220 - DNA, 25 bp, Homo sapien
tgtaaaactcccatgctatatgtga

SEQ ID NO: 1467221 - DNA, 25 bp, Homo sapien
ttctagtagttctgagatgggctgc

SEQ ID NO: 1467222 - DNA, 25 bp, Homo sapien
tcattgaggccgtgatgcttttagc

SEQ ID NO: 1467223 - DNA, 25 bp, Homo sapien
tatatcatactgcaagaccccaaag

SEQ ID NO: 1467224 - DNA, 25 bp, Homo sapien
cagagaggaggcacgtgaacagttc

SEQ ID NO: 1467225 - DNA, 25 bp, Homo sapien
taggtaatatgtaggacacgagcag

SEQ ID NO: 1467226 - DNA, 25 bp, Homo sapien
taagtggtgatgtgaggtacttcac

SEQ ID NO: 1467227 - DNA, 25 bp, Homo sapien
tgagcattgtgacaggcacgggctt

SEQ ID NO: 1467228 - DNA, 25 bp, Homo sapien
tcactgagcattgtgacaggcacgg

SEQ ID NO: 1467229 - DNA, 25 bp, Homo sapien
ttaagtggtgatgtgaggtacttca

SEQ ID NO: 1467230 - DNA, 25 bp, Homo sapien
attacagtagagtaaaccaattcct

SEQ ID NO: 1467231 - DNA, 25 bp, Homo sapien
tcgttagtgtgcagtgaagtgctcc

SEQ ID NO: 1467232 - DNA, 25 bp, Homo sapien
gctacattacagaagactgaactca

SEQ ID NO: 1467233 - DNA, 25 bp, Homo sapien
tcaggagagatgaggaataatcccc

SEQ ID NO: 1467234 - DNA, 25 bp, Homo sapien
tgccaaggtgtgagacatacagtcc

SEQ ID NO: 1467235 - DNA, 25 bp, Homo sapien
ttcttcctctgtgacacaagcctca

SEQ ID NO: 1467236 - DNA, 25 bp, Homo sapien
tcttcctctgtgacacaagcctcat

SEQ ID NO: 1467237 - DNA, 25 bp, Homo sapien
acttcttcctctgtgacacaagcct

SEQ ID NO: 1467238 - DNA, 25 bp, Homo sapien
ctacttcttcctctgtgacacaagc

SEQ ID NO: 1467239 - DNA, 25 bp, Homo sapien
gcatcttaaacgttgtacacttaca

SEQ ID NO: 1467240 - DNA, 25 bp, Homo sapien
tcgattaattcacagcaaacaggca

SEQ ID NO: 1467241 - DNA, 25 bp, Homo sapien
ttctcctgaacttgttcccttctgt

SEQ ID NO: 1467242 - DNA, 25 bp, Homo sapien
caccttcaagctgccaaaagcatct

SEQ ID NO: 1467243 - DNA, 25 bp, Homo sapien
tcttgaattgcacttgagaagtcta

SEQ ID NO: 1467244 - DNA, 25 bp, Homo sapien
tatcttgaattgcacttgagaagtc

SEQ ID NO: 1467245 - DNA, 25 bp, Homo sapien
ctcccaaggtgcaatagccatgcct

SEQ ID NO: 1467246 - DNA, 25 bp, Homo sapien
ttctcccaaggtgcaatagccatgc

SEQ ID NO: 1467247 - DNA, 25 bp, Homo sapien
ttatggacatagatacatttttcat

SEQ ID NO: 1467248 - DNA, 25 bp, Homo sapien
gacatagatacatttttcatgataa

SEQ ID NO: 1467249 - DNA, 25 bp, Homo sapien
ttctttatggacatagatacatttt

SEQ ID NO: 1467250 - DNA, 25 bp, Homo sapien
tggacatagatacatttttcatgat

SEQ ID NO: 1467251 - DNA, 25 bp, Homo sapien
gactcttaacacatccttcttacat

SEQ ID NO: 1467252 - DNA, 25 bp, Homo sapien
agagggcgacaagagcaccaaggcc

SEQ ID NO: 1467253 - DNA, 25 bp, Homo sapien
catccttcttacatgaagggagcag

SEQ ID NO: 1467254 - DNA, 25 bp, Homo sapien
cttcttacatgaagggagcagcaga

SEQ ID NO: 1467255 - DNA, 25 bp, Homo sapien
catctggagaggctagcaacaacaa

SEQ ID NO: 1467256 - DNA, 25 bp, Homo sapien
caacaacaacagatactaactggta

SEQ ID NO: 1467257 - DNA, 25 bp, Homo sapien
ctaactggtaatttagaagccgtgg

SEQ ID NO: 1467258 - DNA, 25 bp, Homo sapien
tgttgacaccaaaactaagtcccac

SEQ ID NO: 1467259 - DNA, 25 bp, Homo sapien
tctttagtagctacactgtcccggg

SEQ ID NO: 1467260 - DNA, 25 bp, Homo sapien
tgtcccggggagattctaagagagt

SEQ ID NO: 1467261 - DNA, 25 bp, Homo sapien
taagagagtaataactgctaaaacc

SEQ ID NO: 1467262 - DNA, 25 bp, Homo sapien
agatgttgctggactctttagtagc

SEQ ID NO: 1467263 - DNA, 25 bp, Homo sapien
gtacctgatacataaaaggtgctta

SEQ ID NO: 1467264 - DNA, 25 bp, Homo sapien
gtttagtcctctagtgtctatagca

SEQ ID NO: 1467265 - DNA, 25 bp, Homo sapien
tgaagtatgtaacaggccgggcaca

SEQ ID NO: 1467266 - DNA, 25 bp, Homo sapien
ttcctcagtcccaacatagtacctg

SEQ ID NO: 1467267 - DNA, 25 bp, Homo sapien
taaacgcttaacatcttccaccgca

SEQ ID NO: 1467268 - DNA, 25 bp, Homo sapien
tacttctccactttttagagcggcg

SEQ ID NO: 1467269 - DNA, 25 bp, Homo sapien
tggatgcatgcattgcctagtcaac

SEQ ID NO: 1467270 - DNA, 25 bp, Homo sapien
ggaacttacccagctgttatacatg

SEQ ID NO: 1467271 - DNA, 25 bp, Homo sapien
attaacctcaccaaatgaagctttt

SEQ ID NO: 1467272 - DNA, 25 bp, Homo sapien
tgtccttacataatattgtccttag

SEQ ID NO: 1467273 - DNA, 25 bp, Homo sapien
gtgacatggttatgcatcctttaga

SEQ ID NO: 1467274 - DNA, 25 bp, Homo sapien
tccctttccaggtgggagcttaaca

SEQ ID NO: 1467275 - DNA, 25 bp, Homo sapien
tccatgcagtaggagaataaagcac

SEQ ID NO: 1467276 - DNA, 25 bp, Homo sapien
gtatgcatcaaagggatacagcccc

SEQ ID NO: 1467277 - DNA, 25 bp, Homo sapien
tacagagtgtgatccgtatgcatca

SEQ ID NO: 1467278 - DNA, 25 bp, Homo sapien
ggatattgccttcaccacttgttag

SEQ ID NO: 1467279 - DNA, 25 bp, Homo sapien
ggtccattggcaaagtatattggtc

SEQ ID NO: 1467280 - DNA, 25 bp, Homo sapien
tcccggtcacacaacagggtacgta

SEQ ID NO: 1467281 - DNA, 25 bp, Homo sapien
gtctgtttacctatgcttatgagca

SEQ ID NO: 1467282 - DNA, 25 bp, Homo sapien
aagattcctttattgtggtaccatg

SEQ ID NO: 1467283 - DNA, 25 bp, Homo sapien
ctgatcaacagtttgttagaaaagc

SEQ ID NO: 1467284 - DNA, 25 bp, Homo sapien
acagaattgtctttgcatgaagccc

SEQ ID NO: 1467285 - DNA, 25 bp, Homo sapien
tctgagacagtagaagagtcaaagg

SEQ ID NO: 1467286 - DNA, 25 bp, Homo sapien
tataacaaggatggactgattttca

SEQ ID NO: 1467287 - DNA, 25 bp, Homo sapien
ttagggtctggcattcgtgtcctac

SEQ ID NO: 1467288 - DNA, 25 bp, Homo sapien
agggtctggcattcgtgtcctacag

SEQ ID NO: 1467289 - DNA, 25 bp, Homo sapien
tagggtctggcattcgtgtcctaca

SEQ ID NO: 1467290 - DNA, 25 bp, Homo sapien
agagggccgggagaggacgccggag

SEQ ID NO: 1467291 - DNA, 25 bp, Homo sapien
gatggtggccgagtcaccgaagctc

SEQ ID NO: 1467292 - DNA, 25 bp, Homo sapien
gcgggcactcgcaagaacgcggcat

SEQ ID NO: 1467293 - DNA, 25 bp, Homo sapien
gcaagaacgcggcatcctggatggt

SEQ ID NO: 1467294 - DNA, 25 bp, Homo sapien
gcgtcccagaatcgctgagagccgg

SEQ ID NO: 1467295 - DNA, 25 bp, Homo sapien
accgctgtcgccatggggagccgcg

SEQ ID NO: 1467296 - DNA, 25 bp, Homo sapien
agacttcgagtgggtctacaccgac

SEQ ID NO: 1467297 - DNA, 25 bp, Homo sapien
gggagccgcgtctcgcgggaagact

SEQ ID NO: 1467298 - DNA, 25 bp, Homo sapien
ctagtctgcaagccaccgctgtcgc

SEQ ID NO: 1467299 - DNA, 25 bp, Homo sapien
gccagcccgcgggtcagcgcgggag

SEQ ID NO: 1467300 - DNA, 25 bp, Homo sapien
ttatgtgcgtgcgtggcctcccggc

SEQ ID NO: 1467301 - DNA, 25 bp, Homo sapien
ccagcgggcgccccgttatgtgcgt

SEQ ID NO: 1467302 - DNA, 25 bp, Homo sapien
cggaggcccgttagcagcctgctcc

SEQ ID NO: 1467303 - DNA, 25 bp, Homo sapien
gggcgaagggtgtccccggctgtgc

SEQ ID NO: 1467304 - DNA, 25 bp, Homo sapien
cgaggtgagcgggtgccggccttgg

SEQ ID NO: 1467305 - DNA, 25 bp, Homo sapien
cttgagtagatcttttcgctagaag

SEQ ID NO: 1467306 - DNA, 25 bp, Homo sapien
ctgagtgctaggcagggtgtggtcc

SEQ ID NO: 1467307 - DNA, 25 bp, Homo sapien
ctcacgacaagcctgggacgtaaga

SEQ ID NO: 1467308 - DNA, 25 bp, Homo sapien
gtaagaacggcggattcgtaggcat

SEQ ID NO: 1467309 - DNA, 25 bp, Homo sapien
ggttcacgccgcttgtcccattgat

SEQ ID NO: 1467310 - DNA, 25 bp, Homo sapien
ttgatgggccctggtcggttcacgc

SEQ ID NO: 1467311 - DNA, 25 bp, Homo sapien
taagaacgcgtgactaaatgctagg

SEQ ID NO: 1467312 - DNA, 25 bp, Homo sapien
tggtcccctgacagctaattgagag

SEQ ID NO: 1467313 - DNA, 25 bp, Homo sapien
aaatatgtggcgtggcctgctggtc

SEQ ID NO: 1467314 - DNA, 25 bp, Homo sapien
gattcgggccttctgtgttacatag

SEQ ID NO: 1467315 - DNA, 25 bp, Homo sapien
tctttgaaagaacctagtaacactc

SEQ ID NO: 1467316 - DNA, 25 bp, Homo sapien
aataagtccctactcaagaatgaag

SEQ ID NO: 1467317 - DNA, 25 bp, Homo sapien
ggaggcaggtctcatggtttccctt

SEQ ID NO: 1467318 - DNA, 25 bp, Homo sapien
gtttgtgtcaaccattcatcagtca

SEQ ID NO: 1467319 - DNA, 25 bp, Homo sapien
gaggtgcatgttcaccgactcctgt

SEQ ID NO: 1467320 - DNA, 25 bp, Homo sapien
ttgctcgtggggacacttcggattg

SEQ ID NO: 1467321 - DNA, 25 bp, Homo sapien
tctttggttgaaggttgctcgtggg

SEQ ID NO: 1467322 - DNA, 25 bp, Homo sapien
taaagttcctcggagaggtgaggag

SEQ ID NO: 1467323 - DNA, 25 bp, Homo sapien
agacccacagaccacagtaaaaggt

SEQ ID NO: 1467324 - DNA, 25 bp, Homo sapien
tcatttatccaatcacagaccccaa

SEQ ID NO: 1467325 - DNA, 25 bp, Homo sapien
ccaagacccacagaccacagtaaaa

SEQ ID NO: 1467326 - DNA, 25 bp, Homo sapien
tttatccaatcacagaccccaagac

SEQ ID NO: 1467327 - DNA, 25 bp, Homo sapien
gagttctccagagtctgtctggggt

SEQ ID NO: 1467328 - DNA, 25 bp, Homo sapien
cagggcgtagtgtgagtgaggtgca

SEQ ID NO: 1467329 - DNA, 25 bp, Homo sapien
tggcttccacgtccccttgagttct

SEQ ID NO: 1467330 - DNA, 25 bp, Homo sapien
gagggcaatgatgctcccacggctc

SEQ ID NO: 1467331 - DNA, 25 bp, Homo sapien
tcagtccaggtcagcatagaaggca

SEQ ID NO: 1467332 - DNA, 25 bp, Homo sapien
ccaggtcagcatagaaggcagtctg

SEQ ID NO: 1467333 - DNA, 25 bp, Homo sapien
aggtcagcatagaaggcagtctgag

SEQ ID NO: 1467334 - DNA, 25 bp, Homo sapien
gtccaggtcagcatagaaggcagtc

SEQ ID NO: 1467335 - DNA, 25 bp, Homo sapien
cacctctaggaaagcgttctttgga

SEQ ID NO: 1467336 - DNA, 25 bp, Homo sapien
cggtcttggaagacagaatggctgt

SEQ ID NO: 1467337 - DNA, 25 bp, Homo sapien
tctcctccgctcaagggtaaggctt

SEQ ID NO: 1467338 - DNA, 25 bp, Homo sapien
tctcgcttgggtgatgaggaacaag

SEQ ID NO: 1467339 - DNA, 25 bp, Homo sapien
gataaccttgctggctgcatacata

SEQ ID NO: 1467340 - DNA, 25 bp, Homo sapien
cccagaaggcggcattcgtccagat

SEQ ID NO: 1467341 - DNA, 25 bp, Homo sapien
cacagtgtcaacatgctttctaagg

SEQ ID NO: 1467342 - DNA, 25 bp, Homo sapien
tttgaagcttatgtgcacaaatgga

SEQ ID NO: 1467343 - DNA, 25 bp, Homo sapien
ttgccttcaggattccgctgacaca

SEQ ID NO: 1467344 - DNA, 25 bp, Homo sapien
tgccttcaggattccgctgacacat

SEQ ID NO: 1467345 - DNA, 25 bp, Homo sapien
tttcacacaaggctggccagatggg

SEQ ID NO: 1467346 - DNA, 25 bp, Homo sapien
ataaaatgtttacatgaggccgcgc

SEQ ID NO: 1467347 - DNA, 25 bp, Homo sapien
aatgtttacatgaggccgcgcctgt

SEQ ID NO: 1467348 - DNA, 25 bp, Homo sapien
aaaatgtttacatgaggccgcgcct

SEQ ID NO: 1467349 - DNA, 25 bp, Homo sapien
cggcttgatgggctagctcctctaa

SEQ ID NO: 1467350 - DNA, 25 bp, Homo sapien
tgatgggctagctcctctaagccgg

SEQ ID NO: 1467351 - DNA, 25 bp, Homo sapien
attctctgccggcttgatgggctag

SEQ ID NO: 1467352 - DNA, 25 bp, Homo sapien
tagctcctctaagccggctgctgga

SEQ ID NO: 1467353 - DNA, 25 bp, Homo sapien
gagggactcctgcaaacgttcatac

SEQ ID NO: 1467354 - DNA, 25 bp, Homo sapien
gctgagggactcctgcaaacgttca

SEQ ID NO: 1467355 - DNA, 25 bp, Homo sapien
gcaaacgttcatacatgatttgatc

SEQ ID NO: 1467356 - DNA, 25 bp, Homo sapien
gactcctgcaaacgttcatacatga

SEQ ID NO: 1467357 - DNA, 25 bp, Homo sapien
aaaatgcttatgactaaccttgagt

SEQ ID NO: 1467358 - DNA, 25 bp, Homo sapien
tcaaaatgcttatgactaaccttga

SEQ ID NO: 1467359 - DNA, 25 bp, Homo sapien
aatgcttatgactaaccttgagttc

SEQ ID NO: 1467360 - DNA, 25 bp, Homo sapien
caaaatgcttatgactaaccttgag

SEQ ID NO: 1467361 - DNA, 25 bp, Homo sapien
tagcaaaagaatacgtttttccaga

SEQ ID NO: 1467362 - DNA, 25 bp, Homo sapien
cccagactcatgatgaagacagcga

SEQ ID NO: 1467363 - DNA, 25 bp, Homo sapien
gaagacagcgaatggatccatttgc

SEQ ID NO: 1467364 - DNA, 25 bp, Homo sapien
catgatgaagacagcgaatggatcc

SEQ ID NO: 1467365 - DNA, 25 bp, Homo sapien
gggcacagatagaagcttctcgtac

SEQ ID NO: 1467366 - DNA, 25 bp, Homo sapien
gaagcttctcgtaccaaagcagaga

SEQ ID NO: 1467367 - DNA, 25 bp, Homo sapien
gatagaagcttctcgtaccaaagca

SEQ ID NO: 1467368 - DNA, 25 bp, Homo sapien
tttccactcttctgtcttgccattt

SEQ ID NO: 1467369 - DNA, 25 bp, Homo sapien
tcacagcgaaggtcaccagcaattg

SEQ ID NO: 1467370 - DNA, 25 bp, Homo sapien
aatcacagcgaaggtcaccagcaat

SEQ ID NO: 1467371 - DNA, 25 bp, Homo sapien
tatagcaatcacagcgaaggtcacc

SEQ ID NO: 1467372 - DNA, 25 bp, Homo sapien
agcaatcacagcgaaggtcaccagc

SEQ ID NO: 1467373 - DNA, 25 bp, Homo sapien
aaatgatttttcattggagctttaa

SEQ ID NO: 1467374 - DNA, 25 bp, Homo sapien
gaaaaatgatttttcattggagctt

SEQ ID NO: 1467375 - DNA, 25 bp, Homo sapien
atgatttttcattggagctttaaag

SEQ ID NO: 1467376 - DNA, 25 bp, Homo sapien
gatttttcattggagctttaaagac

SEQ ID NO: 1467377 - DNA, 25 bp, Homo sapien
gggttcggcgacctggctgagagga

SEQ ID NO: 1467378 - DNA, 25 bp, Homo sapien
gagctgccggccttgtgcactagtt

SEQ ID NO: 1467379 - DNA, 25 bp, Homo sapien
tagtgtaaaacgtcagcctggcaaa

SEQ ID NO: 1467380 - DNA, 25 bp, Homo sapien
gtgaataaacacaagccattaagct

SEQ ID NO: 1467381 - DNA, 25 bp, Homo sapien
gaactggctttgtgtaataccctca

SEQ ID NO: 1467382 - DNA, 25 bp, Homo sapien
ccttgggttaagctggacctccaca

SEQ ID NO: 1467383 - DNA, 25 bp, Homo sapien
ggacactccgcgtgctgttagacaa

SEQ ID NO: 1467384 - DNA, 25 bp, Homo sapien
tgccacattatgtaggagcccttgt

SEQ ID NO: 1467385 - DNA, 25 bp, Homo sapien
catgagccattgaagtccagctaat

SEQ ID NO: 1467386 - DNA, 25 bp, Homo sapien
ggtcttgcggggtctggtgcggtgg

SEQ ID NO: 1467387 - DNA, 25 bp, Homo sapien
gagccaacgtgtttggcccacttat

SEQ ID NO: 1467388 - DNA, 25 bp, Homo sapien
tgtgagccaacgtgtttggcccact

SEQ ID NO: 1467389 - DNA, 25 bp, Homo sapien
cgggcgcaggattgcagggtcaatt

SEQ ID NO: 1467390 - DNA, 25 bp, Homo sapien
cagtgttttgtccaggcggcccggg

SEQ ID NO: 1467391 - DNA, 25 bp, Homo sapien
ttaagatggcaaggcgatctgcagg

SEQ ID NO: 1467392 - DNA, 25 bp, Homo sapien
ggcccgggcgcaggattgcagggtc

SEQ ID NO: 1467393 - DNA, 25 bp, Homo sapien
ttcagaataaccaaaggtggaatgg

SEQ ID NO: 1467394 - DNA, 25 bp, Homo sapien
tttaagatccaagtgctaagcacac

SEQ ID NO: 1467395 - DNA, 25 bp, Homo sapien
aagaagagggctgtcccagttcttc

SEQ ID NO: 1467396 - DNA, 25 bp, Homo sapien
gacatttaggagatcagtccaggag

SEQ ID NO: 1467397 - DNA, 25 bp, Homo sapien
gggtccctccctctatatgtcaaaa

SEQ ID NO: 1467398 - DNA, 25 bp, Homo sapien
aaccagtccagattagagccaggaa

SEQ ID NO: 1467399 - DNA, 25 bp, Homo sapien
caaaggagaacagtcaaggaagtcc

SEQ ID NO: 1467400 - DNA, 25 bp, Homo sapien
ggaaacctaatcagtgtcatgcttg

SEQ ID NO: 1467401 - DNA, 25 bp, Homo sapien
gctcagagtatcttttgtgtcaagg

SEQ ID NO: 1467402 - DNA, 25 bp, Homo sapien
ggaatacagaaagtttatagactgc

SEQ ID NO: 1467403 - DNA, 25 bp, Homo sapien
ccagctgatagtacgtggatccaag

SEQ ID NO: 1467404 - DNA, 25 bp, Homo sapien
taattatttggcagccgggttggga

SEQ ID NO: 1467405 - DNA, 25 bp, Homo sapien
tagtggccccacagatagcttcggg

SEQ ID NO: 1467406 - DNA, 25 bp, Homo sapien
gcaggggactgatcaccagaaagat

SEQ ID NO: 1467407 - DNA, 25 bp, Homo sapien
ccttgcaatttcctgagtgccagga

SEQ ID NO: 1467408 - DNA, 25 bp, Homo sapien
ctttcctggcatagatcttcaaaaa

SEQ ID NO: 1467409 - DNA, 25 bp, Homo sapien
taaaaacctgctggcgtgcttccag

SEQ ID NO: 1467410 - DNA, 25 bp, Homo sapien
gctggcgtgcttccagaccatccat

SEQ ID NO: 1467411 - DNA, 25 bp, Homo sapien
gctgattcaccactcggacacttgc

SEQ ID NO: 1467412 - DNA, 25 bp, Homo sapien
catccatctctgtaagtagctgatt

SEQ ID NO: 1467413 - DNA, 25 bp, Homo sapien
tttctagagatcctgttgctatatt

SEQ ID NO: 1467414 - DNA, 25 bp, Homo sapien
attttttctagagatcctgttgcta

SEQ ID NO: 1467415 - DNA, 25 bp, Homo sapien
ctgtagccgaggctagagtgtactg

SEQ ID NO: 1467416 - DNA, 25 bp, Homo sapien
tagagatcctgttgctatattgccc

SEQ ID NO: 1467417 - DNA, 25 bp, Homo sapien
cttaccccactgatttctctagaaa

SEQ ID NO: 1467418 - DNA, 25 bp, Homo sapien
gcgcccagcttaccccactgatttc

SEQ ID NO: 1467419 - DNA, 25 bp, Homo sapien
ggtatgaactaccgcgcccagctta

SEQ ID NO: 1467420 - DNA, 25 bp, Homo sapien
taccgcgcccagcttaccccactga

SEQ ID NO: 1467421 - DNA, 25 bp, Homo sapien
gacataaagcatccacttcatcaaa

SEQ ID NO: 1467422 - DNA, 25 bp, Homo sapien
ggctcgttgaaaaacttgtcgcaca

SEQ ID NO: 1467423 - DNA, 25 bp, Homo sapien
ttgtcgcacagcacgttcactctca

SEQ ID NO: 1467424 - DNA, 25 bp, Homo sapien
ctgagttcttggctcgttgaaaaac

SEQ ID NO: 1467425 - DNA, 25 bp, Homo sapien
aaagatctgagaacattttaccccg

SEQ ID NO: 1467426 - DNA, 25 bp, Homo sapien
gctctactgcttctagctgtgggaa

SEQ ID NO: 1467427 - DNA, 25 bp, Homo sapien
gaaagcatttatacacccaaagtgg

SEQ ID NO: 1467428 - DNA, 25 bp, Homo sapien
caaaaagtagatcaggagtcagaca

SEQ ID NO: 1467429 - DNA, 25 bp, Homo sapien
ttagtccggactcatttgcaacagc

SEQ ID NO: 1467430 - DNA, 25 bp, Homo sapien
catgtttagtaattcggggcccttg

SEQ ID NO: 1467431 - DNA, 25 bp, Homo sapien
gggcccttgacagatataaaattta

SEQ ID NO: 1467432 - DNA, 25 bp, Homo sapien
gatataaaatttagtccggactcat

SEQ ID NO: 1467433 - DNA, 25 bp, Homo sapien
agctggagtcaccaatccaagagct

SEQ ID NO: 1467434 - DNA, 25 bp, Homo sapien
actggtctgggttgcgtactggtgc

SEQ ID NO: 1467435 - DNA, 25 bp, Homo sapien
tggagtcaccaatccaagagctttg

SEQ ID NO: 1467436 - DNA, 25 bp, Homo sapien
tccaagagctttgaactggtctggg

SEQ ID NO: 1467437 - DNA, 25 bp, Homo sapien
caatgcacagtccttgcatctgctc

SEQ ID NO: 1467438 - DNA, 25 bp, Homo sapien
ggcaccaatatctgcccatgtcaca

SEQ ID NO: 1467439 - DNA, 25 bp, Homo sapien
agggttggactgaggatagagcaac

SEQ ID NO: 1467440 - DNA, 25 bp, Homo sapien
atgtcacattagggacagtgacaaa

SEQ ID NO: 1467441 - DNA, 25 bp, Homo sapien
tcctttagatggcaaatcttccatt

SEQ ID NO: 1467442 - DNA, 25 bp, Homo sapien
tgtgtttcagaagtgggctcagttc

SEQ ID NO: 1467443 - DNA, 25 bp, Homo sapien
acacattgctgcctctcggcacagt

SEQ ID NO: 1467444 - DNA, 25 bp, Homo sapien
cattaagactctattgactgcacac

SEQ ID NO: 1467445 - DNA, 25 bp, Homo sapien
tcaaaagcttgaggaagcctcagtt

SEQ ID NO: 1467446 - DNA, 25 bp, Homo sapien
cagaaatcaaaagcttgaggaagcc

SEQ ID NO: 1467447 - DNA, 25 bp, Homo sapien
aaagcttgaggaagcctcagttttc

SEQ ID NO: 1467448 - DNA, 25 bp, Homo sapien
aagtgacagaaatcaaaagcttgag

SEQ ID NO: 1467449 - DNA, 25 bp, Homo sapien
cccctgtactacatgtgtggaaaat

SEQ ID NO: 1467450 - DNA, 25 bp, Homo sapien
cccatttcatattaggacagttaca

SEQ ID NO: 1467451 - DNA, 25 bp, Homo sapien
tttgttcaacctaactggcaacatg

SEQ ID NO: 1467452 - DNA, 25 bp, Homo sapien
gaaaattatcttgccatatacttcc

SEQ ID NO: 1467453 - DNA, 25 bp, Homo sapien
gacttagtggcatacaaacttcatt

SEQ ID NO: 1467454 - DNA, 25 bp, Homo sapien
acttagtggcatacaaacttcattc

SEQ ID NO: 1467455 - DNA, 25 bp, Homo sapien
tgacttagtggcatacaaacttcat

SEQ ID NO: 1467456 - DNA, 25 bp, Homo sapien
gcttcatctgggatacctaggcata

SEQ ID NO: 1467457 - DNA, 25 bp, Homo sapien
caaagcagggtctaacgagtctggt

SEQ ID NO: 1467458 - DNA, 25 bp, Homo sapien
caataactaggacccgggctgtagc

SEQ ID NO: 1467459 - DNA, 25 bp, Homo sapien
gagtctggtcgattagtagctccaa

SEQ ID NO: 1467460 - DNA, 25 bp, Homo sapien
gagttgggctacaattcttcgttcc

SEQ ID NO: 1467461 - DNA, 25 bp, Homo sapien
caggttaggagttgggctacaattc

SEQ ID NO: 1467462 - DNA, 25 bp, Homo sapien
gggctacaattcttcgttccatatc

SEQ ID NO: 1467463 - DNA, 25 bp, Homo sapien
catgcaggttaggagttgggctaca

SEQ ID NO: 1467464 - DNA, 25 bp, Homo sapien
ccactttcaaaattggcaggtcaag

SEQ ID NO: 1467465 - DNA, 25 bp, Homo sapien
tctccggatactccagacacaatct

SEQ ID NO: 1467466 - DNA, 25 bp, Homo sapien
agccactttcaaaattggcaggtca

SEQ ID NO: 1467467 - DNA, 25 bp, Homo sapien
tgctcagactctccggatactccag

SEQ ID NO: 1467468 - DNA, 25 bp, Homo sapien
tggtggtacacctccgggtgacgca

SEQ ID NO: 1467469 - DNA, 25 bp, Homo sapien
tccgggtgacgcatgtgtatgagca

SEQ ID NO: 1467470 - DNA, 25 bp, Homo sapien
tgtgtatgagcatcttgcagacctc

SEQ ID NO: 1467471 - DNA, 25 bp, Homo sapien
agaactccacgagggggcacgacgc

SEQ ID NO: 1467472 - DNA, 25 bp, Homo sapien
ttaatgtcatatcattgcctcccac

SEQ ID NO: 1467473 - DNA, 25 bp, Homo sapien
ttttaatgtcatatcattgcctccc

SEQ ID NO: 1467474 - DNA, 25 bp, Homo sapien
taatgtcatatcattgcctcccaca

SEQ ID NO: 1467475 - DNA, 25 bp, Homo sapien
aatgtcatatcattgcctcccacat

SEQ ID NO: 1467476 - DNA, 25 bp, Homo sapien
tagcttgcctttccgtttcatatca

SEQ ID NO: 1467477 - DNA, 25 bp, Homo sapien
tgcctttccgtttcatatcactctc

SEQ ID NO: 1467478 - DNA, 25 bp, Homo sapien
ttagcttgcctttccgtttcatatc

SEQ ID NO: 1467479 - DNA, 25 bp, Homo sapien
gcttgcctttccgtttcatatcact

SEQ ID NO: 1467480 - DNA, 25 bp, Homo sapien
gtggggggatggcttatgcccaggg

SEQ ID NO: 1467481 - DNA, 25 bp, Homo sapien
gtttttaagtatgattcaggctgag

SEQ ID NO: 1467482 - DNA, 25 bp, Homo sapien
tgccactccaccatgtcagtctggg

SEQ ID NO: 1467483 - DNA, 25 bp, Homo sapien
gtctgagcaacatggccaaacgcca

SEQ ID NO: 1467484 - DNA, 25 bp, Homo sapien
ctcagttattggcttcttaggatta

SEQ ID NO: 1467485 - DNA, 25 bp, Homo sapien
tctcacatgacaggtccaagaaaaa

SEQ ID NO: 1467486 - DNA, 25 bp, Homo sapien
gcttcttaggattacttttctcaca

SEQ ID NO: 1467487 - DNA, 25 bp, Homo sapien
acttttctcacatgacaggtccaag

SEQ ID NO: 1467488 - DNA, 25 bp, Homo sapien
ggaatggagcctgttttggaactta

SEQ ID NO: 1467489 - DNA, 25 bp, Homo sapien
ccatctcaggagtatttgaaacaga

SEQ ID NO: 1467490 - DNA, 25 bp, Homo sapien
ggaacttatccgtggtgttgaagag

SEQ ID NO: 1467491 - DNA, 25 bp, Homo sapien
cctgttttggaacttatccgtggtg

SEQ ID NO: 1467492 - DNA, 25 bp, Homo sapien
cagcagggaactgttcatgtgattt

SEQ ID NO: 1467493 - DNA, 25 bp, Homo sapien
gacagcagggaactgttcatgtgat

SEQ ID NO: 1467494 - DNA, 25 bp, Homo sapien
aaagacagcagggaactgttcatgt

SEQ ID NO: 1467495 - DNA, 25 bp, Homo sapien
aagacagcagggaactgttcatgtg

SEQ ID NO: 1467496 - DNA, 25 bp, Homo sapien
tgttttaaagactttctctcccata

SEQ ID NO: 1467497 - DNA, 25 bp, Homo sapien
atgttttaaagactttctctcccat

SEQ ID NO: 1467498 - DNA, 25 bp, Homo sapien
ttttaaagactttctctcccatatc

SEQ ID NO: 1467499 - DNA, 25 bp, Homo sapien
ggtagaaagctttatatgaatgcaa

SEQ ID NO: 1467500 - DNA, 25 bp, Homo sapien
gggcctgggacgtcaagactgcggt

SEQ ID NO: 1467501 - DNA, 25 bp, Homo sapien
tgggcctgggacgtcaagactgcgg

SEQ ID NO: 1467502 - DNA, 25 bp, Homo sapien
ttgggcctgggacgtcaagactgcg

SEQ ID NO: 1467503 - DNA, 25 bp, Homo sapien
ggcctgggacgtcaagactgcggta

SEQ ID NO: 1467504 - DNA, 25 bp, Homo sapien
tcaccttgtcttgccctttttgcca

SEQ ID NO: 1467505 - DNA, 25 bp, Homo sapien
cttgtcttgccctttttgccaaatg

SEQ ID NO: 1467506 - DNA, 25 bp, Homo sapien
ccttctcactactaattatgctaaa

SEQ ID NO: 1467507 - DNA, 25 bp, Homo sapien
aagttccttctcactactaattatg

SEQ ID NO: 1467508 - DNA, 25 bp, Homo sapien
tttttctacctgaatcctaaaagca

SEQ ID NO: 1467509 - DNA, 25 bp, Homo sapien
ttctttttcttcgaccatagtctat

SEQ ID NO: 1467510 - DNA, 25 bp, Homo sapien
ttctacctgaatcctaaaagcattt

SEQ ID NO: 1467511 - DNA, 25 bp, Homo sapien
tctttttcttcgaccatagtctata

SEQ ID NO: 1467512 - DNA, 25 bp, Homo sapien
tttgtaaatcagacgctaagactcc

SEQ ID NO: 1467513 - DNA, 25 bp, Homo sapien
tcagacgctaagactccaatgtcca

SEQ ID NO: 1467514 - DNA, 25 bp, Homo sapien
cgctaagactccaatgtccacatat

SEQ ID NO: 1467515 - DNA, 25 bp, Homo sapien
cactctttgtaaatcagacgctaag

SEQ ID NO: 1467516 - DNA, 25 bp, Homo sapien
tgatctgcgctgaagacgaccagac

SEQ ID NO: 1467517 - DNA, 25 bp, Homo sapien
tccactctactgaatgatctgcgct

SEQ ID NO: 1467518 - DNA, 25 bp, Homo sapien
ctgagactccgcaccaacgtgggta

SEQ ID NO: 1467519 - DNA, 25 bp, Homo sapien
acttgggcagccctaccaagctgca

SEQ ID NO: 1467520 - DNA, 25 bp, Homo sapien
ctggatgactcgctgcttgagttta

SEQ ID NO: 1467521 - DNA, 25 bp, Homo sapien
gctgcttgagtttattatccacgaa

SEQ ID NO: 1467522 - DNA, 25 bp, Homo sapien
tgagtttattatccacgaaccctgc

SEQ ID NO: 1467523 - DNA, 25 bp, Homo sapien
tattatccacgaaccctgcaggtct

SEQ ID NO: 1467524 - DNA, 25 bp, Homo sapien
caagccacagctcggaccgccagct

SEQ ID NO: 1467525 - DNA, 25 bp, Homo sapien
ttccaagccacagctcggaccgcca

SEQ ID NO: 1467526 - DNA, 25 bp, Homo sapien
aagccacagctcggaccgccagctc

SEQ ID NO: 1467527 - DNA, 25 bp, Homo sapien
cttccaagccacagctcggaccgcc

SEQ ID NO: 1467528 - DNA, 25 bp, Homo sapien
gctttcccacgtagttatcttacat

SEQ ID NO: 1467529 - DNA, 25 bp, Homo sapien
cgtagttatcttacattttagaggc

SEQ ID NO: 1467530 - DNA, 25 bp, Homo sapien
tcttacattttagaggcccgacaaa

SEQ ID NO: 1467531 - DNA, 25 bp, Homo sapien
tgcttgctttcccacgtagttatct

SEQ ID NO: 1467532 - DNA, 25 bp, Homo sapien
gcgtcagaattagggccgtagagtt

SEQ ID NO: 1467533 - DNA, 25 bp, Homo sapien
tatggacttgtactaatgaactaca

SEQ ID NO: 1467534 - DNA, 25 bp, Homo sapien
ctctttgatatggacttgtactaat

SEQ ID NO: 1467535 - DNA, 25 bp, Homo sapien
tacaattcccagcatgcgtcagaat

SEQ ID NO: 1467536 - DNA, 25 bp, Homo sapien
acacgcctcagccagccccggcaag

SEQ ID NO: 1467537 - DNA, 25 bp, Homo sapien
caagggcctatcaggggtgggtcgg

SEQ ID NO: 1467538 - DNA, 25 bp, Homo sapien
gtcggggcatccgagcgggtttgac

SEQ ID NO: 1467539 - DNA, 25 bp, Homo sapien
cccggcaagggcctatcaggggtgg

SEQ ID NO: 1467540 - DNA, 25 bp, Homo sapien
gatggaggcggtggtgttcgtcttc

SEQ ID NO: 1467541 - DNA, 25 bp, Homo sapien
tcttcctctcggtctacttcgtatc

SEQ ID NO: 1467542 - DNA, 25 bp, Homo sapien
tcctcgattgttgcgcgctcatctt

SEQ ID NO: 1467543 - DNA, 25 bp, Homo sapien
cttctctctcctcgattgttgcgcg

SEQ ID NO: 1467544 - DNA, 25 bp, Homo sapien
caggcgaacgccttgccgggggaca

SEQ ID NO: 1467545 - DNA, 25 bp, Homo sapien
cctgaggcaggcgaacgccttgccg

SEQ ID NO: 1467546 - DNA, 25 bp, Homo sapien
cttgcctgaggcaggcgaacgcctt

SEQ ID NO: 1467547 - DNA, 25 bp, Homo sapien
tgcctgaggcaggcgaacgccttgc

SEQ ID NO: 1467548 - DNA, 25 bp, Homo sapien
tgaagccaggtcattttccatactt

SEQ ID NO: 1467549 - DNA, 25 bp, Homo sapien
ccttgtaactgggattgctttctga

SEQ ID NO: 1467550 - DNA, 25 bp, Homo sapien
cattggaaatttgatggaactgctg

SEQ ID NO: 1467551 - DNA, 25 bp, Homo sapien
aactaaatgttctggttgggtcaga

SEQ ID NO: 1467552 - DNA, 25 bp, Homo sapien
aagctggagaagccgtggttgaagt

SEQ ID NO: 1467553 - DNA, 25 bp, Homo sapien
atccttagaaccgtgaccatagcag

SEQ ID NO: 1467554 - DNA, 25 bp, Homo sapien
gagacttcttaaatcatccttagaa

SEQ ID NO: 1467555 - DNA, 25 bp, Homo sapien
taaatcatccttagaaccgtgacca

SEQ ID NO: 1467556 - DNA, 25 bp, Homo sapien
cacaagaatgtcaacagagaatggc

SEQ ID NO: 1467557 - DNA, 25 bp, Homo sapien
tttaaagatttatgagactgtcagc

SEQ ID NO: 1467558 - DNA, 25 bp, Homo sapien
gccattttccccaggtacaatgtag

SEQ ID NO: 1467559 - DNA, 25 bp, Homo sapien
gccagtctggttttcgtattgcagt

SEQ ID NO: 1467560 - DNA, 25 bp, Homo sapien
aagcaagggagccactaagccaaac

SEQ ID NO: 1467561 - DNA, 25 bp, Homo sapien
tagtgccctggcaacacacaaaagg

SEQ ID NO: 1467562 - DNA, 25 bp, Homo sapien
gagagataagctacttaaaggcggt

SEQ ID NO: 1467563 - DNA, 25 bp, Homo sapien
gctgttggagaacttaaatccttgc

SEQ ID NO: 1467564 - DNA, 25 bp, Homo sapien
actggcgcaatcgtggtacactgca

SEQ ID NO: 1467565 - DNA, 25 bp, Homo sapien
gcactggcgcaatcgtggtacactg

SEQ ID NO: 1467566 - DNA, 25 bp, Homo sapien
cactggcgcaatcgtggtacactgc

SEQ ID NO: 1467567 - DNA, 25 bp, Homo sapien
tgcactggcgcaatcgtggtacact

SEQ ID NO: 1467568 - DNA, 25 bp, Homo sapien
tcaaagttaatgtagtttcagttga

SEQ ID NO: 1467569 - DNA, 25 bp, Homo sapien
gactggttaagtgctgcgcactgac

SEQ ID NO: 1467570 - DNA, 25 bp, Homo sapien
taaagacgtttaatacattacacat

SEQ ID NO: 1467571 - DNA, 25 bp, Homo sapien
aaaatcccagtaaagcaaatcaaag

SEQ ID NO: 1467572 - DNA, 25 bp, Homo sapien
agttctagcacattgaccctgataa

SEQ ID NO: 1467573 - DNA, 25 bp, Homo sapien
gttaactagttccaccacaatgcca

SEQ ID NO: 1467574 - DNA, 25 bp, Homo sapien
ttcacatgtgcacgagactttcagt

SEQ ID NO: 1467575 - DNA, 25 bp, Homo sapien
aaatgacaagatcctagaacagctg

SEQ ID NO: 1467576 - DNA, 25 bp, Homo sapien
aattcacctcttcttaagttagcag

SEQ ID NO: 1467577 - DNA, 25 bp, Homo sapien
gttcttgtttgcaggaaccaacatc

SEQ ID NO: 1467578 - DNA, 25 bp, Homo sapien
cccaaaaggacagttgcgaaattat

SEQ ID NO: 1467579 - DNA, 25 bp, Homo sapien
tttttgtaactatagggcagctact

SEQ ID NO: 1467580 - DNA, 25 bp, Homo sapien
gggccaatttgtagggatatatgca

SEQ ID NO: 1467581 - DNA, 25 bp, Homo sapien
catttatctggccaataagagcaac

SEQ ID NO: 1467582 - DNA, 25 bp, Homo sapien
tcagtaatccccaagtccaacattt

SEQ ID NO: 1467583 - DNA, 25 bp, Homo sapien
tatgccactgtagaggcagaacact

SEQ ID NO: 1467584 - DNA, 25 bp, Homo sapien
ccagtatgtacaggaagctgccagt

SEQ ID NO: 1467585 - DNA, 25 bp, Homo sapien
gagtgttacaaatgcaccgtagcac

SEQ ID NO: 1467586 - DNA, 25 bp, Homo sapien
gaatctgagtgccaaattgcccctg

SEQ ID NO: 1467587 - DNA, 25 bp, Homo sapien
gatttcacctttcgagcacagtcac

SEQ ID NO: 1467588 - DNA, 25 bp, Homo sapien
tccacagcaccagtttagaatgagg

SEQ ID NO: 1467589 - DNA, 25 bp, Homo sapien
tatagacttggctacacctaaaggg

SEQ ID NO: 1467590 - DNA, 25 bp, Homo sapien
tctaagtggtggtctctgcaaaatg

SEQ ID NO: 1467591 - DNA, 25 bp, Homo sapien
tgataagagtctgctgaccacgatc

SEQ ID NO: 1467592 - DNA, 25 bp, Homo sapien
tcttcaagatcgggtactgatgttc

SEQ ID NO: 1467593 - DNA, 25 bp, Homo sapien
gaaatcttcaaagcattactctgaa

SEQ ID NO: 1467594 - DNA, 25 bp, Homo sapien
gaccatgtctcatgtggtattccag

SEQ ID NO: 1467595 - DNA, 25 bp, Homo sapien
atgtccttccaagcactgtttctga

SEQ ID NO: 1467596 - DNA, 25 bp, Homo sapien
ccagaagagcatcagttatactgtg

SEQ ID NO: 1467597 - DNA, 25 bp, Homo sapien
catgacgagcatgtctgtccagcta

SEQ ID NO: 1467598 - DNA, 25 bp, Homo sapien
tatatactgcgcaacgggcaaggct

SEQ ID NO: 1467599 - DNA, 25 bp, Homo sapien
catggtgtccaacaacgttctaacg

SEQ ID NO: 1467600 - DNA, 25 bp, Homo sapien
tggtatcctgccagacaaaagacag

SEQ ID NO: 1467601 - DNA, 25 bp, Homo sapien
tcaactatccatgctactgcattcc

SEQ ID NO: 1467602 - DNA, 25 bp, Homo sapien
caactatccatgctactgcattcct

SEQ ID NO: 1467603 - DNA, 25 bp, Homo sapien
tcatattctatacaaagcaaccatt

SEQ ID NO: 1467604 - DNA, 25 bp, Homo sapien
ccttgagatagttagcagaatagat

SEQ ID NO: 1467605 - DNA, 25 bp, Homo sapien
gtttgaaattctacagtatcatcct

SEQ ID NO: 1467606 - DNA, 25 bp, Homo sapien
tctggcagtctaaggtagaataacg

SEQ ID NO: 1467607 - DNA, 25 bp, Homo sapien
tattggctcttacactacttaaact

SEQ ID NO: 1467608 - DNA, 25 bp, Homo sapien
cattattggctcttacactacttaa

SEQ ID NO: 1467609 - DNA, 25 bp, Homo sapien
ggctcttacactacttaaactcatt

SEQ ID NO: 1467610 - DNA, 25 bp, Homo sapien
ttggctcttacactacttaaactca

SEQ ID NO: 1467611 - DNA, 25 bp, Homo sapien
gcagttcactacgtttgtgccagat

SEQ ID NO: 1467612 - DNA, 25 bp, Homo sapien
tggtctataaaaggtgctggtcccc

SEQ ID NO: 1467613 - DNA, 25 bp, Homo sapien
cagtttactgtacgtgtgtgccctg

SEQ ID NO: 1467614 - DNA, 25 bp, Homo sapien
tgtcagctccgcaattggcagttca

SEQ ID NO: 1467615 - DNA, 25 bp, Homo sapien
caaactgtcagtgggtgtactgcca

SEQ ID NO: 1467616 - DNA, 25 bp, Homo sapien
ctgactagctgagcaactttgggca

SEQ ID NO: 1467617 - DNA, 25 bp, Homo sapien
taaactgaagaggtccacaaggaga

SEQ ID NO: 1467618 - DNA, 25 bp, Homo sapien
cacaaggagaaggatcacagggtta

SEQ ID NO: 1467619 - DNA, 25 bp, Homo sapien
catctgacgctgattttcggtagaa

SEQ ID NO: 1467620 - DNA, 25 bp, Homo sapien
aaagagctgtaagggattctcaggc

SEQ ID NO: 1467621 - DNA, 25 bp, Homo sapien
ggcttaacatatttagaccacagga

SEQ ID NO: 1467622 - DNA, 25 bp, Homo sapien
gaagcaggattgaatagaccatgga

SEQ ID NO: 1467623 - DNA, 25 bp, Homo sapien
caaacacactgctacgtggtcagaa

SEQ ID NO: 1467624 - DNA, 25 bp, Homo sapien
ggagggcttaggtcattacagaaaa

SEQ ID NO: 1467625 - DNA, 25 bp, Homo sapien
gaataagcactgctaatccgtgaca

SEQ ID NO: 1467626 - DNA, 25 bp, Homo sapien
tttcttggagacatgactgccttca

SEQ ID NO: 1467627 - DNA, 25 bp, Homo sapien
tgaattgtataaaacccttgtgtaa

SEQ ID NO: 1467628 - DNA, 25 bp, Homo sapien
ccttgtgtaacaccttgatactttc

SEQ ID NO: 1467629 - DNA, 25 bp, Homo sapien
tgtcttgcaagtcccataaatgaac

SEQ ID NO: 1467630 - DNA, 25 bp, Homo sapien
tcactgccactagcgatgaagtctt

SEQ ID NO: 1467631 - DNA, 25 bp, Homo sapien
aagacataataggatgatcttcttg

SEQ ID NO: 1467632 - DNA, 25 bp, Homo sapien
aacaaagctaatcggccattttttg

SEQ ID NO: 1467633 - DNA, 25 bp, Homo sapien
ttgaaatagtaaaagacataatagg

SEQ ID NO: 1467634 - DNA, 25 bp, Homo sapien
ctgagttgctacatttaacaaagct

SEQ ID NO: 1467635 - DNA, 25 bp, Homo sapien
agttatagccccgaattcgctggtg

SEQ ID NO: 1467636 - DNA, 25 bp, Homo sapien
cccaggagtcaaggagattaccatc

SEQ ID NO: 1467637 - DNA, 25 bp, Homo sapien
tgttcctatctgtaaggtcctcgaa

SEQ ID NO: 1467638 - DNA, 25 bp, Homo sapien
tccatcactcaagcaccaaaggcat

SEQ ID NO: 1467639 - DNA, 25 bp, Homo sapien
aagcagagagacactttgtagctct

SEQ ID NO: 1467640 - DNA, 25 bp, Homo sapien
ttacaaccatacttaagggaaagca

SEQ ID NO: 1467641 - DNA, 25 bp, Homo sapien
ccaaatttgtaatgtgctctacaga

SEQ ID NO: 1467642 - DNA, 25 bp, Homo sapien
tctagaagtgtttttaaccatgaaa

SEQ ID NO: 1467643 - DNA, 25 bp, Homo sapien
tgtctacgacgacagcaaagtaggt

SEQ ID NO: 1467644 - DNA, 25 bp, Homo sapien
caaagtaggtgttcatagagtatat

SEQ ID NO: 1467645 - DNA, 25 bp, Homo sapien
cagcgcttgtctacgacgacagcaa

SEQ ID NO: 1467646 - DNA, 25 bp, Homo sapien
tattggacagcgcttgtctacgacg

SEQ ID NO: 1467647 - DNA, 25 bp, Homo sapien
caaactgtcttcatgagactggctc

SEQ ID NO: 1467648 - DNA, 25 bp, Homo sapien
gctgacctccagtcacaaagcgctt

SEQ ID NO: 1467649 - DNA, 25 bp, Homo sapien
aagcgcttcccatctggattccaag

SEQ ID NO: 1467650 - DNA, 25 bp, Homo sapien
cactgatagaactgcccacgctgac

SEQ ID NO: 1467651 - DNA, 25 bp, Homo sapien
tgagagataatagctgcccttggtg

SEQ ID NO: 1467652 - DNA, 25 bp, Homo sapien
catttaatctagtcttgattccatt

SEQ ID NO: 1467653 - DNA, 25 bp, Homo sapien
gatctgagagataatagctgccctt

SEQ ID NO: 1467654 - DNA, 25 bp, Homo sapien
tctgagagataatagctgcccttgg

SEQ ID NO: 1467655 - DNA, 25 bp, Homo sapien
agatagttgtcatctggactccatg

SEQ ID NO: 1467656 - DNA, 25 bp, Homo sapien
gactccatgcaatataagaaacgcc

SEQ ID NO: 1467657 - DNA, 25 bp, Homo sapien
taagcagttttagcaggtgtgtatc

SEQ ID NO: 1467658 - DNA, 25 bp, Homo sapien
tctgggccacaagcaacaagatagt

SEQ ID NO: 1467659 - DNA, 25 bp, Homo sapien
tctgcatttcccaagctaatctggc

SEQ ID NO: 1467660 - DNA, 25 bp, Homo sapien
ggactcactataatacagctatcta

SEQ ID NO: 1467661 - DNA, 25 bp, Homo sapien
acacctattaattctgcatacccat

SEQ ID NO: 1467662 - DNA, 25 bp, Homo sapien
tattggaatgtaagcattaactctg

SEQ ID NO: 1467663 - DNA, 25 bp, Homo sapien
tttccctagctttgctgttccagta

SEQ ID NO: 1467664 - DNA, 25 bp, Homo sapien
tctctttgatgagctcctgtagcac

SEQ ID NO: 1467665 - DNA, 25 bp, Homo sapien
ctttgatgagctcctgtagcaccca

SEQ ID NO: 1467666 - DNA, 25 bp, Homo sapien
tgctgttccagtaggctctctttga

SEQ ID NO: 1467667 - DNA, 25 bp, Homo sapien
tgttgtccacctgtgtgatgcgcag

SEQ ID NO: 1467668 - DNA, 25 bp, Homo sapien
taaacctgagatctacaagaatggg

SEQ ID NO: 1467669 - DNA, 25 bp, Homo sapien
gatgcgcagtaagactctcaagagg

SEQ ID NO: 1467670 - DNA, 25 bp, Homo sapien
caagaatgggtccagggatagaatc

SEQ ID NO: 1467671 - DNA, 25 bp, Homo sapien
ccttgagtgtgcagtatcaaggtca

SEQ ID NO: 1467672 - DNA, 25 bp, Homo sapien
cccagccttgagtgtgcagtatcaa

SEQ ID NO: 1467673 - DNA, 25 bp, Homo sapien
tagtgacagactctcctctatgttg

SEQ ID NO: 1467674 - DNA, 25 bp, Homo sapien
tttgtagtgacagactctcctctat

SEQ ID NO: 1467675 - DNA, 25 bp, Homo sapien
tgctgcgtataacatgggaactgcc

SEQ ID NO: 1467676 - DNA, 25 bp, Homo sapien
caatgctccgtaagtatctgctgcg

SEQ ID NO: 1467677 - DNA, 25 bp, Homo sapien
cattagagaatttacagaaccacac

SEQ ID NO: 1467678 - DNA, 25 bp, Homo sapien
tgatcctgttgctagtttagtgcca

SEQ ID NO: 1467679 - DNA, 25 bp, Homo sapien
ttagctagtacctcataaatggcag

SEQ ID NO: 1467680 - DNA, 25 bp, Homo sapien
gcaaagccttaagaatgggagcagt

SEQ ID NO: 1467681 - DNA, 25 bp, Homo sapien
aaacgttatttgagtaggctgggca

SEQ ID NO: 1467682 - DNA, 25 bp, Homo sapien
tatggtagccctcactacaagtggc

SEQ ID NO: 1467683 - DNA, 25 bp, Homo sapien
ctttaagtgtatcttgaaacacggt

SEQ ID NO: 1467684 - DNA, 25 bp, Homo sapien
ttgaaacacggtcttccttgcttct

SEQ ID NO: 1467685 - DNA, 25 bp, Homo sapien
cttttcccaatcaataatttagaat

SEQ ID NO: 1467686 - DNA, 25 bp, Homo sapien
gtgtatcttgaaacacggtcttcct

SEQ ID NO: 1467687 - DNA, 25 bp, Homo sapien
tagttccaatgctaaaatctagttt

SEQ ID NO: 1467688 - DNA, 25 bp, Homo sapien
gttccaatgctaaaatctagtttct

SEQ ID NO: 1467689 - DNA, 25 bp, Homo sapien
tctagttccaatgctaaaatctagt

SEQ ID NO: 1467690 - DNA, 25 bp, Homo sapien
tttctagttccaatgctaaaatcta

SEQ ID NO: 1467691 - DNA, 25 bp, Homo sapien
gatataggctggaaaatatccactg

SEQ ID NO: 1467692 - DNA, 25 bp, Homo sapien
cacccggcctggaacatgtatttct

SEQ ID NO: 1467693 - DNA, 25 bp, Homo sapien
tgaaagaggtattctcaccaacatc

SEQ ID NO: 1467694 - DNA, 25 bp, Homo sapien
ctaaggagtagccaggagttaaact

SEQ ID NO: 1467695 - DNA, 25 bp, Homo sapien
taaagtaaggccaatatctcaaaca

SEQ ID NO: 1467696 - DNA, 25 bp, Homo sapien
tcagaagttcctcgttattccaaag

SEQ ID NO: 1467697 - DNA, 25 bp, Homo sapien
ggagctatgaaccatgaaactatat

SEQ ID NO: 1467698 - DNA, 25 bp, Homo sapien
tctcaaatctgcgaatggagctatg

SEQ ID NO: 1467699 - DNA, 25 bp, Homo sapien
tactcgtgaacaaatgctaaatcag

SEQ ID NO: 1467700 - DNA, 25 bp, Homo sapien
tagataacgaaaaactggcttccca

SEQ ID NO: 1467701 - DNA, 25 bp, Homo sapien
ttcatagttccagctttactcgtga

SEQ ID NO: 1467702 - DNA, 25 bp, Homo sapien
tggcttcccaacttcagttctcaag

SEQ ID NO: 1467703 - DNA, 25 bp, Homo sapien
caaacatggtctataagcagagaca

SEQ ID NO: 1467704 - DNA, 25 bp, Homo sapien
gatccctttgtagttccaccgcctg

SEQ ID NO: 1467705 - DNA, 25 bp, Homo sapien
gagacacagaatctagattattatc

SEQ ID NO: 1467706 - DNA, 25 bp, Homo sapien
tggtattgtgatataggcaccgatc

SEQ ID NO: 1467707 - DNA, 25 bp, Homo sapien
tgcgatacgtgagctttacgaatat

SEQ ID NO: 1467708 - DNA, 25 bp, Homo sapien
gctgtacttgttcctaccccaatag

SEQ ID NO: 1467709 - DNA, 25 bp, Homo sapien
tacgaatatttgtcagcagcaatag

SEQ ID NO: 1467710 - DNA, 25 bp, Homo sapien
gagaagttctgcgttatgcgatacg

SEQ ID NO: 1467711 - DNA, 25 bp, Homo sapien
cactcaataaaagtatgtccagata

SEQ ID NO: 1467712 - DNA, 25 bp, Homo sapien
gggaacatcatcacataatacaaat

SEQ ID NO: 1467713 - DNA, 25 bp, Homo sapien
tgactcctgaggttagcttcttaga

SEQ ID NO: 1467714 - DNA, 25 bp, Homo sapien
tgctctggaaccagtgccctttcac

SEQ ID NO: 1467715 - DNA, 25 bp, Homo sapien
tgcttttgcacgtaggtcttctgca

SEQ ID NO: 1467716 - DNA, 25 bp, Homo sapien
tccaatagtttagatcgggaagctg

SEQ ID NO: 1467717 - DNA, 25 bp, Homo sapien
caatagtttagatcgggaagctgtc

SEQ ID NO: 1467718 - DNA, 25 bp, Homo sapien
ttttgcacgtaggtcttctgcatgg

SEQ ID NO: 1467719 - DNA, 25 bp, Homo sapien
gcgtcaattcacagcgtagaacttg

SEQ ID NO: 1467720 - DNA, 25 bp, Homo sapien
ccactaagaacatgaatgcgctctg

SEQ ID NO: 1467721 - DNA, 25 bp, Homo sapien
tgtattgtatttcagcggcgtcaat

SEQ ID NO: 1467722 - DNA, 25 bp, Homo sapien
tagaacttgaagtgcctccaggacc

SEQ ID NO: 1467723 - DNA, 25 bp, Homo sapien
aagttgatggaagtttcagaaaatg

SEQ ID NO: 1467724 - DNA, 25 bp, Homo sapien
ctgacatgacagaaagcagcagtca

SEQ ID NO: 1467725 - DNA, 25 bp, Homo sapien
gaaaaaagttgatggaagtttcaga

SEQ ID NO: 1467726 - DNA, 25 bp, Homo sapien
cagaaagcagcagtcaggggaaaaa

SEQ ID NO: 1467727 - DNA, 25 bp, Homo sapien
ctgctgtcacgaaatgctgtggaga

SEQ ID NO: 1467728 - DNA, 25 bp, Homo sapien
tgctgtcacgaaatgctgtggagaa

SEQ ID NO: 1467729 - DNA, 25 bp, Homo sapien
actgctgtcacgaaatgctgtggag

SEQ ID NO: 1467730 - DNA, 25 bp, Homo sapien
acactgctgtcacgaaatgctgtgg

SEQ ID NO: 1467731 - DNA, 25 bp, Homo sapien
gcaactaacatgctgctggccaagc

SEQ ID NO: 1467732 - DNA, 25 bp, Homo sapien
tatttgacacatacgataagggtgg

SEQ ID NO: 1467733 - DNA, 25 bp, Homo sapien
tcattttatccagatcaagaccaag

SEQ ID NO: 1467734 - DNA, 25 bp, Homo sapien
cctggtattgtgcatggcaactaac

SEQ ID NO: 1467735 - DNA, 25 bp, Homo sapien
agtttacatgctgcctctaatgaag

SEQ ID NO: 1467736 - DNA, 25 bp, Homo sapien
ggcgaagcttaaacaacctccaaga

SEQ ID NO: 1467737 - DNA, 25 bp, Homo sapien
tagtgctaacttgcccaatgggaaa

SEQ ID NO: 1467738 - DNA, 25 bp, Homo sapien
tagtctagactaagccatcaaatgt

SEQ ID NO: 1467739 - DNA, 25 bp, Homo sapien
gacactgtcaattcacacaactgga

SEQ ID NO: 1467740 - DNA, 25 bp, Homo sapien
ggccaaatggtcaaatctgcacaca

SEQ ID NO: 1467741 - DNA, 25 bp, Homo sapien
ggaaataaggccagtaagcagggcc

SEQ ID NO: 1467742 - DNA, 25 bp, Homo sapien
tatgaaagcggctaacaggttaaac

SEQ ID NO: 1467743 - DNA, 25 bp, Homo sapien
attcccaacaacgtttgagagattt

SEQ ID NO: 1467744 - DNA, 25 bp, Homo sapien
caacgtttgagagatttcaagtgcg

SEQ ID NO: 1467745 - DNA, 25 bp, Homo sapien
gtttgagagatttcaagtgcgcctc

SEQ ID NO: 1467746 - DNA, 25 bp, Homo sapien
gagagatttcaagtgcgcctcttac

SEQ ID NO: 1467747 - DNA, 25 bp, Homo sapien
aaggctttagttcattcaggtcatt

SEQ ID NO: 1467748 - DNA, 25 bp, Homo sapien
taaaggctttagttcattcaggtca

SEQ ID NO: 1467749 - DNA, 25 bp, Homo sapien
gcatgaggagaatgcactaaaggct

SEQ ID NO: 1467750 - DNA, 25 bp, Homo sapien
ggctttagttcattcaggtcatttt

SEQ ID NO: 1467751 - DNA, 25 bp, Homo sapien
ccatgacatgatttcggaatttggt

SEQ ID NO: 1467752 - DNA, 25 bp, Homo sapien
gaatttggtagcagaaggatgttct

SEQ ID NO: 1467753 - DNA, 25 bp, Homo sapien
gatgttctaaacgacatcctgactc

SEQ ID NO: 1467754 - DNA, 25 bp, Homo sapien
tctaaacgacatcctgactcttgca

SEQ ID NO: 1467755 - DNA, 25 bp, Homo sapien
tagctaaacagtgcaatgatctgcc

SEQ ID NO: 1467756 - DNA, 25 bp, Homo sapien
tgcaaaagtacacatcggctagcct

SEQ ID NO: 1467757 - DNA, 25 bp, Homo sapien
tgatctgcctgaaaaccgaaatact

SEQ ID NO: 1467758 - DNA, 25 bp, Homo sapien
aaatggttcaccagatcagatgtcc

SEQ ID NO: 1467759 - DNA, 25 bp, Homo sapien
cctattagcctaatgacatcctcat

SEQ ID NO: 1467760 - DNA, 25 bp, Homo sapien
aagtgctgtcctattagcctaatga

SEQ ID NO: 1467761 - DNA, 25 bp, Homo sapien
aatgacatcctcatctgactgggag

SEQ ID NO: 1467762 - DNA, 25 bp, Homo sapien
gcctaatgacatcctcatctgactg

SEQ ID NO: 1467763 - DNA, 25 bp, Homo sapien
cgggaaccccgttattgacattcag

SEQ ID NO: 1467764 - DNA, 25 bp, Homo sapien
agctgcgacggtggctgaggatgcg

SEQ ID NO: 1467765 - DNA, 25 bp, Homo sapien
ttgctattgttgctggcggcggagg

SEQ ID NO: 1467766 - DNA, 25 bp, Homo sapien
gtggcggaggcagctgcgacggtgg

SEQ ID NO: 1467767 - DNA, 25 bp, Homo sapien
agcaggcgagttccggggtctgtcc

SEQ ID NO: 1467768 - DNA, 25 bp, Homo sapien
ctgggccgacaagcaggcgagttcc

SEQ ID NO: 1467769 - DNA, 25 bp, Homo sapien
caggcgagttccggggtctgtccct

SEQ ID NO: 1467770 - DNA, 25 bp, Homo sapien
acaagcaggcgagttccggggtctg

SEQ ID NO: 1467771 - DNA, 25 bp, Homo sapien
ttccggtggcaggtatggaacctat

SEQ ID NO: 1467772 - DNA, 25 bp, Homo sapien
atggaacctatagggggcctgtcac

SEQ ID NO: 1467773 - DNA, 25 bp, Homo sapien
ccggtggcaggtatggaacctatag

SEQ ID NO: 1467774 - DNA, 25 bp, Homo sapien
caggtatggaacctatagggggcct

SEQ ID NO: 1467775 - DNA, 25 bp, Homo sapien
gaaaaacttgaatttccacagccaa

SEQ ID NO: 1467776 - DNA, 25 bp, Homo sapien
ggaaaaacttgaatttccacagcca

SEQ ID NO: 1467777 - DNA, 25 bp, Homo sapien
tagtctagaggagcatatcttatgg

SEQ ID NO: 1467778 - DNA, 25 bp, Homo sapien
cccgggagctgtgagataatgagcc

SEQ ID NO: 1467779 - DNA, 25 bp, Homo sapien
gggactctgctgttgaggcttcact

SEQ ID NO: 1467780 - DNA, 25 bp, Homo sapien
taatgagccggtgagactctgctcc

SEQ ID NO: 1467781 - DNA, 25 bp, Homo sapien
gttgatagcatctatactcaatatg

SEQ ID NO: 1467782 - DNA, 25 bp, Homo sapien
tattttcatgtatgtggttgatagc

SEQ ID NO: 1467783 - DNA, 25 bp, Homo sapien
atcttaatcattggcaaatggtgtg

SEQ ID NO: 1467784 - DNA, 25 bp, Homo sapien
cttaatcattggcaaatggtgtgca

SEQ ID NO: 1467785 - DNA, 25 bp, Homo sapien
gatgccagtcagtctttcaagactc

SEQ ID NO: 1467786 - DNA, 25 bp, Homo sapien
tctccttgagagtctttgactacac

SEQ ID NO: 1467787 - DNA, 25 bp, Homo sapien
agactcagctcatttcaaacctcct

SEQ ID NO: 1467788 - DNA, 25 bp, Homo sapien
tctactgtccgccaaatgtactggc

SEQ ID NO: 1467789 - DNA, 25 bp, Homo sapien
ccagattattgacaaatactgtggc

SEQ ID NO: 1467790 - DNA, 25 bp, Homo sapien
gccagagtgtcaacaacactgttct

SEQ ID NO: 1467791 - DNA, 25 bp, Homo sapien
tcacacataacagtagcctttctct

SEQ ID NO: 1467792 - DNA, 25 bp, Homo sapien
tcactgcacccaccttgaggtgggc

SEQ ID NO: 1467793 - DNA, 25 bp, Homo sapien
gcctgtagtagtctagatccctgga

SEQ ID NO: 1467794 - DNA, 25 bp, Homo sapien
gctacctagagaccttaccttggca

SEQ ID NO: 1467795 - DNA, 25 bp, Homo sapien
tagcataagcttaatatcgagggac

SEQ ID NO: 1467796 - DNA, 25 bp, Homo sapien
tagacaaagcaactgggctacctag

SEQ ID NO: 1467797 - DNA, 25 bp, Homo sapien
ggtgctcctgccagagtcatgatgt

SEQ ID NO: 1467798 - DNA, 25 bp, Homo sapien
aaagccatgtcctcgtgcacagtca

SEQ ID NO: 1467799 - DNA, 25 bp, Homo sapien
tacaaagctcatcgcaggtaggctg

SEQ ID NO: 1467800 - DNA, 25 bp, Homo sapien
tgaacttgtcaagcaagagccgtgg

SEQ ID NO: 1467801 - DNA, 25 bp, Homo sapien
tgtcaccacaatcaacagggggatc

SEQ ID NO: 1467802 - DNA, 25 bp, Homo sapien
gccatatgtttacatctgtgaaact

SEQ ID NO: 1467803 - DNA, 25 bp, Homo sapien
aggcatgatctacccctcctggttt

SEQ ID NO: 1467804 - DNA, 25 bp, Homo sapien
catgatctacccctcctggtttatc

SEQ ID NO: 1467805 - DNA, 25 bp, Homo sapien
ggagagattcgcatttttttgtgga

SEQ ID NO: 1467806 - DNA, 25 bp, Homo sapien
ctctaggagagattcgcattttttt

SEQ ID NO: 1467807 - DNA, 25 bp, Homo sapien
gcaaagctttagcacaccagtagct

SEQ ID NO: 1467808 - DNA, 25 bp, Homo sapien
gctgggaacccatgccaggactggc

SEQ ID NO: 1467809 - DNA, 25 bp, Homo sapien
cagagccctgcttatgcttcaaagc

SEQ ID NO: 1467810 - DNA, 25 bp, Homo sapien
gatcagagccctgcttatgcttcaa

SEQ ID NO: 1467811 - DNA, 25 bp, Homo sapien
tctgcttccactgatcagagccctg

SEQ ID NO: 1467812 - DNA, 25 bp, Homo sapien
atctgcttccactgatcagagccct

SEQ ID NO: 1467813 - DNA, 25 bp, Homo sapien
ctgctcagtggagttttagtctgca

SEQ ID NO: 1467814 - DNA, 25 bp, Homo sapien
ggatctgctggcagtccccgctgct

SEQ ID NO: 1467815 - DNA, 25 bp, Homo sapien
agtggagttttagtctgcatgttac

SEQ ID NO: 1467816 - DNA, 25 bp, Homo sapien
gcacattccgtttttactgtcttcc

SEQ ID NO: 1467817 - DNA, 25 bp, Homo sapien
tatcaagggtgtctgcaagcaaggg

SEQ ID NO: 1467818 - DNA, 25 bp, Homo sapien
gggtgtctgcaagcaaggggtacct

SEQ ID NO: 1467819 - DNA, 25 bp, Homo sapien
gtgtctgcaagcaaggggtacctgg

SEQ ID NO: 1467820 - DNA, 25 bp, Homo sapien
gttatcaagggtgtctgcaagcaag

SEQ ID NO: 1467821 - DNA, 25 bp, Homo sapien
agtgcccaatccatgcagccccttc

SEQ ID NO: 1467822 - DNA, 25 bp, Homo sapien
acaggtcaggctcttgctgtcctgt

SEQ ID NO: 1467823 - DNA, 25 bp, Homo sapien
tctgacctctgcctggatagtaagg

SEQ ID NO: 1467824 - DNA, 25 bp, Homo sapien
gaccctgccacaaaagactgttgaa

SEQ ID NO: 1467825 - DNA, 25 bp, Homo sapien
tcaaagtggctaagcgagcaccgtt

SEQ ID NO: 1467826 - DNA, 25 bp, Homo sapien
gttaagaaaacctgcaatgcgcgag

SEQ ID NO: 1467827 - DNA, 25 bp, Homo sapien
gagagaagagataatgcctttgcca

SEQ ID NO: 1467828 - DNA, 25 bp, Homo sapien
gcctctgaagaagggacccctacgc

SEQ ID NO: 1467829 - DNA, 25 bp, Homo sapien
ttgaagagattctgtctctgacggg

SEQ ID NO: 1467830 - DNA, 25 bp, Homo sapien
ttgtggaagagacaagtcctcagag

SEQ ID NO: 1467831 - DNA, 25 bp, Homo sapien
gcagcgtcaggaatctcttgcaaag

SEQ ID NO: 1467832 - DNA, 25 bp, Homo sapien
aagcaagcatggtgaacttccaaga

SEQ ID NO: 1467833 - DNA, 25 bp, Homo sapien
ggaatctcttgcaaagcaagcatgg

SEQ ID NO: 1467834 - DNA, 25 bp, Homo sapien
tctttcactgcagcgtcaggaatct

SEQ ID NO: 1467835 - DNA, 25 bp, Homo sapien
caataccaccgagccctcgttgctg

SEQ ID NO: 1467836 - DNA, 25 bp, Homo sapien
tgctgcctcttcagcgcagaatagc

SEQ ID NO: 1467837 - DNA, 25 bp, Homo sapien
cttgacaattccactaggaccaaca

SEQ ID NO: 1467838 - DNA, 25 bp, Homo sapien
gcagaatagcccaccaagtccacgt

SEQ ID NO: 1467839 - DNA, 25 bp, Homo sapien
cctcctccagacgcacgtgtttaaa

SEQ ID NO: 1467840 - DNA, 25 bp, Homo sapien
acctcctccagacgcacgtgtttaa

SEQ ID NO: 1467841 - DNA, 25 bp, Homo sapien
cacctcctccagacgcacgtgttta

SEQ ID NO: 1467842 - DNA, 25 bp, Homo sapien
tttcctccgagaggcgggcgtgcac

SEQ ID NO: 1467843 - DNA, 25 bp, Homo sapien
agtttcctccgagaggcgggcgtgc

SEQ ID NO: 1467844 - DNA, 25 bp, Homo sapien
cttcaagtttcctccgagaggcggg

SEQ ID NO: 1467845 - DNA, 25 bp, Homo sapien
caagtttcctccgagaggcgggcgt

SEQ ID NO: 1467846 - DNA, 25 bp, Homo sapien
agcggccaccaagcgcccggcggcg

SEQ ID NO: 1467847 - DNA, 25 bp, Homo sapien
cgcccggcggcgcttcgccacccac

SEQ ID NO: 1467848 - DNA, 25 bp, Homo sapien
ccggcggcgcttcgccacccacctt

SEQ ID NO: 1467849 - DNA, 25 bp, Homo sapien
agcgcccggcggcgcttcgccaccc

SEQ ID NO: 1467850 - DNA, 25 bp, Homo sapien
gccggctggccggagtcacggttgg

SEQ ID NO: 1467851 - DNA, 25 bp, Homo sapien
acttgggttgcggaggccggctggc

SEQ ID NO: 1467852 - DNA, 25 bp, Homo sapien
ggagttggcccgttgggtggagcca

SEQ ID NO: 1467853 - DNA, 25 bp, Homo sapien
tcacggttggggacgggcgcgcctc

SEQ ID NO: 1467854 - DNA, 25 bp, Homo sapien
ctcgagtcgcttcgctagctgtgcg

SEQ ID NO: 1467855 - DNA, 25 bp, Homo sapien
gcgactctcgacacacgttttcctg

SEQ ID NO: 1467856 - DNA, 25 bp, Homo sapien
tcttcttcgatttgcggacggttcc

SEQ ID NO: 1467857 - DNA, 25 bp, Homo sapien
gcttattcgctgaccctcgagtcgc

SEQ ID NO: 1467858 - DNA, 25 bp, Homo sapien
tggtgctgtgcgctgcgctcatctt

SEQ ID NO: 1467859 - DNA, 25 bp, Homo sapien
tcgccatctggcacgtgagtaacac

SEQ ID NO: 1467860 - DNA, 25 bp, Homo sapien
tttcgctgcgttctgctacatgctg

SEQ ID NO: 1467861 - DNA, 25 bp, Homo sapien
ggaaggttggaccttctgccgctcc

SEQ ID NO: 1467862 - DNA, 25 bp, Homo sapien
ctggtgcccaggtaggacaccctct

SEQ ID NO: 1467863 - DNA, 25 bp, Homo sapien
ggcaggaggcagttcgctgcatccc

SEQ ID NO: 1467864 - DNA, 25 bp, Homo sapien
gcgcgccttcggtgccctggctgga

SEQ ID NO: 1467865 - DNA, 25 bp, Homo sapien
ggagtggcggctacaaccacaacta

SEQ ID NO: 1467866 - DNA, 25 bp, Homo sapien
ctgcaggtggcgaacctccgctagg

SEQ ID NO: 1467867 - DNA, 25 bp, Homo sapien
cttggcgtctgaagtccgactcctg

SEQ ID NO: 1467868 - DNA, 25 bp, Homo sapien
caggcatcattaaggccatggagga

SEQ ID NO: 1467869 - DNA, 25 bp, Homo sapien
agagcgacgacggtgtcctccatct

SEQ ID NO: 1467870 - DNA, 25 bp, Homo sapien
ggccaaggccaaatgtttagaagga

SEQ ID NO: 1467871 - DNA, 25 bp, Homo sapien
caaatgtttagaaggagcaccccag

SEQ ID NO: 1467872 - DNA, 25 bp, Homo sapien
caaggccaaatgtttagaaggagca

SEQ ID NO: 1467873 - DNA, 25 bp, Homo sapien
tgtttagaaggagcaccccagtgca

SEQ ID NO: 1467874 - DNA, 25 bp, Homo sapien
gtgtcaggtaccagagagctccctc

SEQ ID NO: 1467875 - DNA, 25 bp, Homo sapien
gagagctccctcaaactcgagtctg

SEQ ID NO: 1467876 - DNA, 25 bp, Homo sapien
cgagtctggcttggagttctctgaa

SEQ ID NO: 1467877 - DNA, 25 bp, Homo sapien
tggattctagaaggccaactactcc

SEQ ID NO: 1467878 - DNA, 25 bp, Homo sapien
tctacttgtgatgcccctgtccgtt

SEQ ID NO: 1467879 - DNA, 25 bp, Homo sapien
ttctggcatctcactttcaggtggg

SEQ ID NO: 1467880 - DNA, 25 bp, Homo sapien
ccgttctggcatctcactttcaggt

SEQ ID NO: 1467881 - DNA, 25 bp, Homo sapien
tggcatctcactttcaggtgggatg

SEQ ID NO: 1467882 - DNA, 25 bp, Homo sapien
cacgtctggctaggatggtatgtct

SEQ ID NO: 1467883 - DNA, 25 bp, Homo sapien
ctgtgtacactagcagacccgtggg

SEQ ID NO: 1467884 - DNA, 25 bp, Homo sapien
tgctttctgccactgccacgatggg

SEQ ID NO: 1467885 - DNA, 25 bp, Homo sapien
ttggcactcctgcttgggacacggg

SEQ ID NO: 1467886 - DNA, 25 bp, Homo sapien
tctggttttgtgttcgcatggtcca

SEQ ID NO: 1467887 - DNA, 25 bp, Homo sapien
cgtctcaaaccgtgggctgacattt

SEQ ID NO: 1467888 - DNA, 25 bp, Homo sapien
ctgggaagtaagctgacaccacctc

SEQ ID NO: 1467889 - DNA, 25 bp, Homo sapien
tccagagcatcagtcttaggtatat

SEQ ID NO: 1467890 - DNA, 25 bp, Homo sapien
gattggagtcttcggcatggtagca

SEQ ID NO: 1467891 - DNA, 25 bp, Homo sapien
gctaagcctcctcggcatacatcgg

SEQ ID NO: 1467892 - DNA, 25 bp, Homo sapien
tataattgggatgtgaagacgctgt

SEQ ID NO: 1467893 - DNA, 25 bp, Homo sapien
tgtacagcaagaggtttagccccac

SEQ ID NO: 1467894 - DNA, 25 bp, Homo sapien
aggttttgcacactggtggtgctga

SEQ ID NO: 1467895 - DNA, 25 bp, Homo sapien
gaagacgcctccaagttcaaaggtc

SEQ ID NO: 1467896 - DNA, 25 bp, Homo sapien
aatgctcaaccgttgccactagagg

SEQ ID NO: 1467897 - DNA, 25 bp, Homo sapien
ctgactgctgtatgccaaacaattt

SEQ ID NO: 1467898 - DNA, 25 bp, Homo sapien
cgcgagagagacctggcttggcctc

SEQ ID NO: 1467899 - DNA, 25 bp, Homo sapien
ctgagccagcggtgccgagcgtttc

SEQ ID NO: 1467900 - DNA, 25 bp, Homo sapien
cctgcgcctctgttcagcgttgtac

SEQ ID NO: 1467901 - DNA, 25 bp, Homo sapien
tactggattgcacgcgtgttacaga

SEQ ID NO: 1467902 - DNA, 25 bp, Homo sapien
ctgagaccagatgttcatgatgaga

SEQ ID NO: 1467903 - DNA, 25 bp, Homo sapien
gatgaattctgtttcgggcatgttg

SEQ ID NO: 1467904 - DNA, 25 bp, Homo sapien
gaatttttggagacatatactgatg

SEQ ID NO: 1467905 - DNA, 25 bp, Homo sapien
aggaacctgggatggaaactggatc

SEQ ID NO: 1467906 - DNA, 25 bp, Homo sapien
ctgtttcgggcatgttgaggttctg

SEQ ID NO: 1467907 - DNA, 25 bp, Homo sapien
ggggagagagtgaagaaccagccat

SEQ ID NO: 1467908 - DNA, 25 bp, Homo sapien
tggggagagagtgaagaaccagcca

SEQ ID NO: 1467909 - DNA, 25 bp, Homo sapien
ctggggagagagtgaagaaccagcc

SEQ ID NO: 1467910 - DNA, 25 bp, Homo sapien
ttgtaaatccaaatcgaggagaatg

SEQ ID NO: 1467911 - DNA, 25 bp, Homo sapien
cactgcttgtataatctctctgttg

SEQ ID NO: 1467912 - DNA, 25 bp, Homo sapien
gctttgcatctagcttgctcttcac

SEQ ID NO: 1467913 - DNA, 25 bp, Homo sapien
tccaaatcgaggagaatgtgtgcaa

SEQ ID NO: 1467914 - DNA, 25 bp, Homo sapien
gttgctgtcattgcttaaccctttc

SEQ ID NO: 1467915 - DNA, 25 bp, Homo sapien
tcagggttgccggtgttagcaacct

SEQ ID NO: 1467916 - DNA, 25 bp, Homo sapien
tagcaacctggtgtatatccttcat

SEQ ID NO: 1467917 - DNA, 25 bp, Homo sapien
ccctccattctcagggttgccggtg

SEQ ID NO: 1467918 - DNA, 25 bp, Homo sapien
taagtgtgtgcattgaattcctggt

SEQ ID NO: 1467919 - DNA, 25 bp, Homo sapien
ttaagtgtgtgcattgaattcctgg

SEQ ID NO: 1467920 - DNA, 25 bp, Homo sapien
ttcagtagaagttgatacacatttg

SEQ ID NO: 1467921 - DNA, 25 bp, Homo sapien
tttcagtagaagttgatacacattt

SEQ ID NO: 1467922 - DNA, 25 bp, Homo sapien
tggaagagaatgagtcccctgtgac

SEQ ID NO: 1467923 - DNA, 25 bp, Homo sapien
caaatgatgtggaagagaatgagtc

SEQ ID NO: 1467924 - DNA, 25 bp, Homo sapien
tgatgtggaagagaatgagtcccct

SEQ ID NO: 1467925 - DNA, 25 bp, Homo sapien
tgtggaagagaatgagtcccctgtg

SEQ ID NO: 1467926 - DNA, 25 bp, Homo sapien
tcagtgccagtttctgatatgtcat

SEQ ID NO: 1467927 - DNA, 25 bp, Homo sapien
gatttttatcttggtgccacttcag

SEQ ID NO: 1467928 - DNA, 25 bp, Homo sapien
gtctcggctacttgtttgaattttc

SEQ ID NO: 1467929 - DNA, 25 bp, Homo sapien
tattctcaggatttttatcttggtg

SEQ ID NO: 1467930 - DNA, 25 bp, Homo sapien
tcgaggcacttgtaacctagtggga

SEQ ID NO: 1467931 - DNA, 25 bp, Homo sapien
tcctgcaatcctcgaggcacttgta

SEQ ID NO: 1467932 - DNA, 25 bp, Homo sapien
tggagcagtacctcctgcaatcctc

SEQ ID NO: 1467933 - DNA, 25 bp, Homo sapien
gtaacctagtgggattctttgtatg

SEQ ID NO: 1467934 - DNA, 25 bp, Homo sapien
gtttccacctgtaacaggatgggcc

SEQ ID NO: 1467935 - DNA, 25 bp, Homo sapien
tgtttccacctgtaacaggatgggc

SEQ ID NO: 1467936 - DNA, 25 bp, Homo sapien
gttcatgtttccacctgtaacagga

SEQ ID NO: 1467937 - DNA, 25 bp, Homo sapien
tcatgtttccacctgtaacaggatg

SEQ ID NO: 1467938 - DNA, 25 bp, Homo sapien
gagccctggacttgggagcatttcc

SEQ ID NO: 1467939 - DNA, 25 bp, Homo sapien
tccacaagttgctatgtcctggctg

SEQ ID NO: 1467940 - DNA, 25 bp, Homo sapien
taagcaatgccaggatggctcccca

SEQ ID NO: 1467941 - DNA, 25 bp, Homo sapien
tgtgtgtggagagaacaccttcctc

SEQ ID NO: 1467942 - DNA, 25 bp, Homo sapien
gggccaatcttacaaatcctaataa

SEQ ID NO: 1467943 - DNA, 25 bp, Homo sapien
tcttacaaatcctaataacctctta

SEQ ID NO: 1467944 - DNA, 25 bp, Homo sapien
aatcctaataacctcttattcttgg

SEQ ID NO: 1467945 - DNA, 25 bp, Homo sapien
taataacctcttattcttggttgca

SEQ ID NO: 1467946 - DNA, 25 bp, Homo sapien
cagtgacctagtgtctgtgcatccc

SEQ ID NO: 1467947 - DNA, 25 bp, Homo sapien
tgtgcatcccacgtgggcctgcact

SEQ ID NO: 1467948 - DNA, 25 bp, Homo sapien
gctggccaaggtagacgtgaccacc

SEQ ID NO: 1467949 - DNA, 25 bp, Homo sapien
cggaccagctgagccacgatgggca

SEQ ID NO: 1467950 - DNA, 25 bp, Homo sapien
ttgcaatacctagggacgggtgacc

SEQ ID NO: 1467951 - DNA, 25 bp, Homo sapien
agaacacccacttctgccactggag

SEQ ID NO: 1467952 - DNA, 25 bp, Homo sapien
tctggcagtgatgccgtaaagctcc

SEQ ID NO: 1467953 - DNA, 25 bp, Homo sapien
gctgcagagggttctttgcaatacc

SEQ ID NO: 1467954 - DNA, 25 bp, Homo sapien
accacgacagtggggagcagtagga

SEQ ID NO: 1467955 - DNA, 25 bp, Homo sapien
tctctcccgatctattgtaaggtct

SEQ ID NO: 1467956 - DNA, 25 bp, Homo sapien
gggcctcctgccatatttaatccag

SEQ ID NO: 1467957 - DNA, 25 bp, Homo sapien
gcttctccctatattcagccttgga

SEQ ID NO: 1467958 - DNA, 25 bp, Homo sapien
tgtaaggtctttgctgggcctcctg

SEQ ID NO: 1467959 - DNA, 25 bp, Homo sapien
agcctggagagttgagttgagtttg

SEQ ID NO: 1467960 - DNA, 25 bp, Homo sapien
caccctttgtgaccaactgtactca

SEQ ID NO: 1467961 - DNA, 25 bp, Homo sapien
gagagttgagttgagtttgaatttc

SEQ ID NO: 1467962 - DNA, 25 bp, Homo sapien
gtccacaccctttgtgaccaactgt

SEQ ID NO: 1467963 - DNA, 25 bp, Homo sapien
tgtaagggaccagccagcgctagag

SEQ ID NO: 1467964 - DNA, 25 bp, Homo sapien
agggaccagccagcgctagagcttc

SEQ ID NO: 1467965 - DNA, 25 bp, Homo sapien
taagggaccagccagcgctagagct

SEQ ID NO: 1467966 - DNA, 25 bp, Homo sapien
ctgtaagggaccagccagcgctaga

SEQ ID NO: 1467967 - DNA, 25 bp, Homo sapien
tgcctggaacattgtcaccaggctc

SEQ ID NO: 1467968 - DNA, 25 bp, Homo sapien
gtgagtgctggctgcggcatggtcc

SEQ ID NO: 1467969 - DNA, 25 bp, Homo sapien
agtgttcagctgtcggtctctccca

SEQ ID NO: 1467970 - DNA, 25 bp, Homo sapien
cagtgtttgacacctcatagtaggc

SEQ ID NO: 1467971 - DNA, 25 bp, Homo sapien
ttgttaagcagagttgggcttcctt

SEQ ID NO: 1467972 - DNA, 25 bp, Homo sapien
tttgttaagcagagttgggcttcct

SEQ ID NO: 1467973 - DNA, 25 bp, Homo sapien
tataaagtgtccattgagacaccag

SEQ ID NO: 1467974 - DNA, 25 bp, Homo sapien
agcttgtgaggctgaatgaagaggg

SEQ ID NO: 1467975 - DNA, 25 bp, Homo sapien
agatctataaagtgtccattgagac

SEQ ID NO: 1467976 - DNA, 25 bp, Homo sapien
aaggagcttgtgaggctgaatgaag

SEQ ID NO: 1467977 - DNA, 25 bp, Homo sapien
gcaaatgccggttgcccagacttga

SEQ ID NO: 1467978 - DNA, 25 bp, Homo sapien
cctttgactgcaaatgccggttgcc

SEQ ID NO: 1467979 - DNA, 25 bp, Homo sapien
acaactgcctttgactgcaaatgcc

SEQ ID NO: 1467980 - DNA, 25 bp, Homo sapien
cctcaggggtgctctcccacggggt

SEQ ID NO: 1467981 - DNA, 25 bp, Homo sapien
ggtgttgtgcatacgtgcttttcct

SEQ ID NO: 1467982 - DNA, 25 bp, Homo sapien
ttccccagtcgactggctgggatct

SEQ ID NO: 1467983 - DNA, 25 bp, Homo sapien
gatctgtaatttatgcaggatggtt

SEQ ID NO: 1467984 - DNA, 25 bp, Homo sapien
gagacctgtgaattccgatggaaga

SEQ ID NO: 1467985 - DNA, 25 bp, Homo sapien
tctacgttgctgcagggagggcctt

SEQ ID NO: 1467986 - DNA, 25 bp, Homo sapien
agaagcaggagtggcgttttcctcc

SEQ ID NO: 1467987 - DNA, 25 bp, Homo sapien
ggtgctgccagaatactccatccat

SEQ ID NO: 1467988 - DNA, 25 bp, Homo sapien
tttcctcctctaactcagggccgtg

SEQ ID NO: 1467989 - DNA, 25 bp, Homo sapien
gtcagactgggactggtatatcctt

SEQ ID NO: 1467990 - DNA, 25 bp, Homo sapien
aagtcagactgggactggtatatcc

SEQ ID NO: 1467991 - DNA, 25 bp, Homo sapien
gtaagtcagactgggactggtatat

SEQ ID NO: 1467992 - DNA, 25 bp, Homo sapien
agtcagactgggactggtatatcct

SEQ ID NO: 1467993 - DNA, 25 bp, Homo sapien
ttctgggacagttataatttcatag

SEQ ID NO: 1467994 - DNA, 25 bp, Homo sapien
attttctgggacagttataatttca

SEQ ID NO: 1467995 - DNA, 25 bp, Homo sapien
tttctgggacagttataatttcata

SEQ ID NO: 1467996 - DNA, 25 bp, Homo sapien
gattttctgggacagttataatttc

SEQ ID NO: 1467997 - DNA, 25 bp, Homo sapien
tttaagtaaaggcaatctgctctca

SEQ ID NO: 1467998 - DNA, 25 bp, Homo sapien
ttaagtaaaggcaatctgctctcat

SEQ ID NO: 1467999 - DNA, 25 bp, Homo sapien
ttctgcctccacttaatgaggtcac

SEQ ID NO: 1468000 - DNA, 25 bp, Homo sapien
tgcccttctgcctccacttaatgag

SEQ ID NO: 1468001 - DNA, 25 bp, Homo sapien
ccttctgcctccacttaatgaggtc

SEQ ID NO: 1468002 - DNA, 25 bp, Homo sapien
gcccttctgcctccacttaatgagg

SEQ ID NO: 1468003 - DNA, 25 bp, Homo sapien
tgacagataacgtcagtgcaattct

SEQ ID NO: 1468004 - DNA, 25 bp, Homo sapien
tgacagcaaatagcttttgagattg

SEQ ID NO: 1468005 - DNA, 25 bp, Homo sapien
ctggcagttgtcatcgaatctggct

SEQ ID NO: 1468006 - DNA, 25 bp, Homo sapien
gtcatcgaatctggcttgtgatttc

SEQ ID NO: 1468007 - DNA, 25 bp, Homo sapien
ctgtactttgttcttgggctccggc

SEQ ID NO: 1468008 - DNA, 25 bp, Homo sapien
tgagagattccagctgtactttgtt

SEQ ID NO: 1468009 - DNA, 25 bp, Homo sapien
agctgtactttgttcttgggctccg

SEQ ID NO: 1468010 - DNA, 25 bp, Homo sapien
gtactttgttcttgggctccggcag

SEQ ID NO: 1468011 - DNA, 25 bp, Homo sapien
aggtctcaccaagcctgacggctcc

SEQ ID NO: 1468012 - DNA, 25 bp, Homo sapien
ctgggggcagcgaccacttcccaag

SEQ ID NO: 1468013 - DNA, 25 bp, Homo sapien
gcgaccacttcccaagggactcagg

SEQ ID NO: 1468014 - DNA, 25 bp, Homo sapien
ggcagcgaccacttcccaagggact

SEQ ID NO: 1468015 - DNA, 25 bp, Homo sapien
gagccactcttcagcggtgcttcaa

SEQ ID NO: 1468016 - DNA, 25 bp, Homo sapien
taggcaacgccaggtgacacatttc

SEQ ID NO: 1468017 - DNA, 25 bp, Homo sapien
acttgtcctgagaggcggctcttcc

SEQ ID NO: 1468018 - DNA, 25 bp, Homo sapien
gggtgaaattgccatgatgccagtg

SEQ ID NO: 1468019 - DNA, 25 bp, Homo sapien
gcatcggaagggtttgcccaggtta

SEQ ID NO: 1468020 - DNA, 25 bp, Homo sapien
tgcatcggaagggtttgcccaggtt

SEQ ID NO: 1468021 - DNA, 25 bp, Homo sapien
gttacgccagaagtaccaggacctc

SEQ ID NO: 1468022 - DNA, 25 bp, Homo sapien
gtttgcccaggttacgccagaagta

SEQ ID NO: 1468023 - DNA, 25 bp, Homo sapien
ttcttctactacctttactggtgag

SEQ ID NO: 1468024 - DNA, 25 bp, Homo sapien
gaatgccgacactttgagttactgt

SEQ ID NO: 1468025 - DNA, 25 bp, Homo sapien
tggtgagtatctgcccctcctggtg

SEQ ID NO: 1468026 - DNA, 25 bp, Homo sapien
cctggtgtaagctggccttctatct

SEQ ID NO: 1468027 - DNA, 25 bp, Homo sapien
gtcgggatgttggactgcacgccac

SEQ ID NO: 1468028 - DNA, 25 bp, Homo sapien
cagggccatggtgatctccaaacct

SEQ ID NO: 1468029 - DNA, 25 bp, Homo sapien
caaacctcccggtgatgtctccaaa

SEQ ID NO: 1468030 - DNA, 25 bp, Homo sapien
catcattacctgtggcagggccatg

SEQ ID NO: 1468031 - DNA, 25 bp, Homo sapien
ctttggggctgcttaaaagactctg

SEQ ID NO: 1468032 - DNA, 25 bp, Homo sapien
tttctcccaccttaggagctgccag

SEQ ID NO: 1468033 - DNA, 25 bp, Homo sapien
cacccacattctttgttgaatctgg

SEQ ID NO: 1468034 - DNA, 25 bp, Homo sapien
tctttgttgaatctggccccttggt

SEQ ID NO: 1468035 - DNA, 25 bp, Homo sapien
ccctcctgcgtggttattctggatc

SEQ ID NO: 1468036 - DNA, 25 bp, Homo sapien
cctcctgcgtggttattctggatca

SEQ ID NO: 1468037 - DNA, 25 bp, Homo sapien
ctcctgcgtggttattctggatcat

SEQ ID NO: 1468038 - DNA, 25 bp, Homo sapien
accctcctgcgtggttattctggat

SEQ ID NO: 1468039 - DNA, 25 bp, Homo sapien
ctttccaagcatgcgtcaaggagag

SEQ ID NO: 1468040 - DNA, 25 bp, Homo sapien
ggcagagtcagctcctgaagatggt

SEQ ID NO: 1468041 - DNA, 25 bp, Homo sapien
catgcgtcaaggagagagcttccca

SEQ ID NO: 1468042 - DNA, 25 bp, Homo sapien
agtcagctcctgaagatggtgttgg

SEQ ID NO: 1468043 - DNA, 25 bp, Homo sapien
cttcctggacttgggctgttctgtt

SEQ ID NO: 1468044 - DNA, 25 bp, Homo sapien
gcagaaggcactactcactgtgggc

SEQ ID NO: 1468045 - DNA, 25 bp, Homo sapien
actactcactgtgggcgtttgaggg

SEQ ID NO: 1468046 - DNA, 25 bp, Homo sapien
tgccggtccaagctggacatcttgg

SEQ ID NO: 1468047 - DNA, 25 bp, Homo sapien
ctggctcaggtgtggtcccctctag

SEQ ID NO: 1468048 - DNA, 25 bp, Homo sapien
tggctcaggtgtggtcccctctagc

SEQ ID NO: 1468049 - DNA, 25 bp, Homo sapien
ggctcaggtgtggtcccctctagca

SEQ ID NO: 1468050 - DNA, 25 bp, Homo sapien
gactcgcaaattgcaactgaaccaa

SEQ ID NO: 1468051 - DNA, 25 bp, Homo sapien
tgcaactgaaccaagaagacctcat

SEQ ID NO: 1468052 - DNA, 25 bp, Homo sapien
gaaccaagaagacctcatttctggg

SEQ ID NO: 1468053 - DNA, 25 bp, Homo sapien
tagggtattggccagtgactcgcaa

SEQ ID NO: 1468054 - DNA, 25 bp, Homo sapien
cagccttaagttgtgccgtaacacc

SEQ ID NO: 1468055 - DNA, 25 bp, Homo sapien
agttgtgccgtaacacctctctcca

SEQ ID NO: 1468056 - DNA, 25 bp, Homo sapien
tctggtctttcattctcatacagcc

SEQ ID NO: 1468057 - DNA, 25 bp, Homo sapien
ttcattctcatacagccttaagttg

SEQ ID NO: 1468058 - DNA, 25 bp, Homo sapien
tagtgcccgtattccctgtccatat

SEQ ID NO: 1468059 - DNA, 25 bp, Homo sapien
gaagcagtccgataaatagtgcccg

SEQ ID NO: 1468060 - DNA, 25 bp, Homo sapien
tcctggatttcctaatgagaatggc

SEQ ID NO: 1468061 - DNA, 25 bp, Homo sapien
tgcctgcctctatgcactgatcttt

SEQ ID NO: 1468062 - DNA, 25 bp, Homo sapien
gcagcgggttgtgtccctggccttt

SEQ ID NO: 1468063 - DNA, 25 bp, Homo sapien
cagcgggttgtgtccctggcctttt

SEQ ID NO: 1468064 - DNA, 25 bp, Homo sapien
gatggttaaacgtggccatgcccag

SEQ ID NO: 1468065 - DNA, 25 bp, Homo sapien
cagctttctgatggttaaacgtggc

SEQ ID NO: 1468066 - DNA, 25 bp, Homo sapien
gaactatggctacggttccagcacc

SEQ ID NO: 1468067 - DNA, 25 bp, Homo sapien
ccctgagttgctccaaattgacttc

SEQ ID NO: 1468068 - DNA, 25 bp, Homo sapien
tgaccagcagcgtttggcttttggc

SEQ ID NO: 1468069 - DNA, 25 bp, Homo sapien
accagcagcgtttggcttttggctt

SEQ ID NO: 1468070 - DNA, 25 bp, Homo sapien
gaccagcagcgtttggcttttggct

SEQ ID NO: 1468071 - DNA, 25 bp, Homo sapien
tggcatcctttcccgctgaccagca

SEQ ID NO: 1468072 - DNA, 25 bp, Homo sapien
cattccggcttttagaggatgcaca

SEQ ID NO: 1468073 - DNA, 25 bp, Homo sapien
tccggcttttagaggatgcacagaa

SEQ ID NO: 1468074 - DNA, 25 bp, Homo sapien
ctaagtataggctcctttaatagtt

SEQ ID NO: 1468075 - DNA, 25 bp, Homo sapien
tccattccggcttttagaggatgca

SEQ ID NO: 1468076 - DNA, 25 bp, Homo sapien
ttgaggctaagaaacatagtatcac

SEQ ID NO: 1468077 - DNA, 25 bp, Homo sapien
tcaatttgaggctaagaaacatagt

SEQ ID NO: 1468078 - DNA, 25 bp, Homo sapien
atttgaggctaagaaacatagtatc

SEQ ID NO: 1468079 - DNA, 25 bp, Homo sapien
caatttgaggctaagaaacatagta

SEQ ID NO: 1468080 - DNA, 25 bp, Homo sapien
aggggactgtccctctactctgctc

SEQ ID NO: 1468081 - DNA, 25 bp, Homo sapien
ccgagcccacttggctatggccatg

SEQ ID NO: 1468082 - DNA, 25 bp, Homo sapien
gggactgtccctctactctgctccc

SEQ ID NO: 1468083 - DNA, 25 bp, Homo sapien
gctccccgagcccacttggctatgg

SEQ ID NO: 1468084 - DNA, 25 bp, Homo sapien
cagggaaagagacctgagttttgga

SEQ ID NO: 1468085 - DNA, 25 bp, Homo sapien
actctgggttcagcagggaaagaga

SEQ ID NO: 1468086 - DNA, 25 bp, Homo sapien
ttggagggagagtgtcttcatatct

SEQ ID NO: 1468087 - DNA, 25 bp, Homo sapien
agttttggagggagagtgtcttcat

SEQ ID NO: 1468088 - DNA, 25 bp, Homo sapien
cttgaaaaacactggtagtcaccac

SEQ ID NO: 1468089 - DNA, 25 bp, Homo sapien
tctgattcagggaatttggggtgta

SEQ ID NO: 1468090 - DNA, 25 bp, Homo sapien
cttgtcattggggagcttgaaaaac

SEQ ID NO: 1468091 - DNA, 25 bp, Homo sapien
gggtgtaataggtggttcttgtcat

SEQ ID NO: 1468092 - DNA, 25 bp, Homo sapien
tgaagacataaggacgtgtggcccc

SEQ ID NO: 1468093 - DNA, 25 bp, Homo sapien
gactctgcccctgttttgccatctg

SEQ ID NO: 1468094 - DNA, 25 bp, Homo sapien
gctctctgagttgagacagcttgcc

SEQ ID NO: 1468095 - DNA, 25 bp, Homo sapien
caggtgccacgcgatgccctgaagt

SEQ ID NO: 1468096 - DNA, 25 bp, Homo sapien
catatgttttctgacatgactcaca

SEQ ID NO: 1468097 - DNA, 25 bp, Homo sapien
ttaatccaacaatgggtagtgaccc

SEQ ID NO: 1468098 - DNA, 25 bp, Homo sapien
taaaccctagttcaagttctgctcc

SEQ ID NO: 1468099 - DNA, 25 bp, Homo sapien
catgctatgtactctggtccttcca

SEQ ID NO: 1468100 - DNA, 25 bp, Homo sapien
aggagtttaccttgttgaagaagtg

SEQ ID NO: 1468101 - DNA, 25 bp, Homo sapien
gaagaagtgacacaaacactgggag

SEQ ID NO: 1468102 - DNA, 25 bp, Homo sapien
gagtaatggcaccagacaagctaat

SEQ ID NO: 1468103 - DNA, 25 bp, Homo sapien
taatggcaccagacaagctaatcag

SEQ ID NO: 1468104 - DNA, 25 bp, Homo sapien
cacagggataacgactgaaggacag

SEQ ID NO: 1468105 - DNA, 25 bp, Homo sapien
ggacacagggataacgactgaagga

SEQ ID NO: 1468106 - DNA, 25 bp, Homo sapien
gacacagggataacgactgaaggac

SEQ ID NO: 1468107 - DNA, 25 bp, Homo sapien
cagggataacgactgaaggacagag

SEQ ID NO: 1468108 - DNA, 25 bp, Homo sapien
gtgggcaccccttgactttgagtga

SEQ ID NO: 1468109 - DNA, 25 bp, Homo sapien
cagcggcagggttcactggcttgac

SEQ ID NO: 1468110 - DNA, 25 bp, Homo sapien
agggttcactggcttgacaaagcac

SEQ ID NO: 1468111 - DNA, 25 bp, Homo sapien
tttgagtgagtccagtagtggcagc

SEQ ID NO: 1468112 - DNA, 25 bp, Homo sapien
ggccgagagtgtgaagtgcaaaaca

SEQ ID NO: 1468113 - DNA, 25 bp, Homo sapien
tggccgagagtgtgaagtgcaaaac

SEQ ID NO: 1468114 - DNA, 25 bp, Homo sapien
gccgagagtgtgaagtgcaaaacat

SEQ ID NO: 1468115 - DNA, 25 bp, Homo sapien
ctggctcctggtgaccgtgactgtg

SEQ ID NO: 1468116 - DNA, 25 bp, Homo sapien
gtgtaactatagagacactgcagtc

SEQ ID NO: 1468117 - DNA, 25 bp, Homo sapien
gcttggtgtaactatagagacactg

SEQ ID NO: 1468118 - DNA, 25 bp, Homo sapien
agctgtgcttggtgtaactatagag

SEQ ID NO: 1468119 - DNA, 25 bp, Homo sapien
ctgagccccttttggaacaagaagt

SEQ ID NO: 1468120 - DNA, 25 bp, Homo sapien
tgagccccttttggaacaagaagta

SEQ ID NO: 1468121 - DNA, 25 bp, Homo sapien
tgaggccgtaagcactaggttctgc

SEQ ID NO: 1468122 - DNA, 25 bp, Homo sapien
tatttccattcgctgtctcccaggt

SEQ ID NO: 1468123 - DNA, 25 bp, Homo sapien
ccaggtgaggccgtaagcactaggt

SEQ ID NO: 1468124 - DNA, 25 bp, Homo sapien
cgtaagcactaggttctgcttggct

SEQ ID NO: 1468125 - DNA, 25 bp, Homo sapien
tggaatgtgagaacactccactgga

SEQ ID NO: 1468126 - DNA, 25 bp, Homo sapien
tgtgacaagtggaatgtgagaacac

SEQ ID NO: 1468127 - DNA, 25 bp, Homo sapien
acaagtggaatgtgagaacactcca

SEQ ID NO: 1468128 - DNA, 25 bp, Homo sapien
gaatgtgagaacactccactggatt

SEQ ID NO: 1468129 - DNA, 25 bp, Homo sapien
tggtcgagtgcatttactttcatga

SEQ ID NO: 1468130 - DNA, 25 bp, Homo sapien
ttcaagcactggtcgagtgcattta

SEQ ID NO: 1468131 - DNA, 25 bp, Homo sapien
cactggtcgagtgcatttactttca

SEQ ID NO: 1468132 - DNA, 25 bp, Homo sapien
caagcactggtcgagtgcatttact

SEQ ID NO: 1468133 - DNA, 25 bp, Homo sapien
tgcgatgatgttgatgggcctcctc

SEQ ID NO: 1468134 - DNA, 25 bp, Homo sapien
ctgcgatgatgttgatgggcctcct

SEQ ID NO: 1468135 - DNA, 25 bp, Homo sapien
gcgatgatgttgatgggcctcctct

SEQ ID NO: 1468136 - DNA, 25 bp, Homo sapien
gagaagttggctgaaagcaccatcc

SEQ ID NO: 1468137 - DNA, 25 bp, Homo sapien
gcaccatcctcgtgctgtctaatgt

SEQ ID NO: 1468138 - DNA, 25 bp, Homo sapien
aagttggctgaaagcaccatcctcg

SEQ ID NO: 1468139 - DNA, 25 bp, Homo sapien
cgtgctgtctaatgtcagctcctgc

SEQ ID NO: 1468140 - DNA, 25 bp, Homo sapien
aagtgcactctggcccttagctggg

SEQ ID NO: 1468141 - DNA, 25 bp, Homo sapien
gggaccaaagcaaaggagtggagag

SEQ ID NO: 1468142 - DNA, 25 bp, Homo sapien
tattctaagttgatagaagtgcact

SEQ ID NO: 1468143 - DNA, 25 bp, Homo sapien
agggcagtagcaacacggggacacc

SEQ ID NO: 1468144 - DNA, 25 bp, Homo sapien
gatccgaaggcaggcactactttga

SEQ ID NO: 1468145 - DNA, 25 bp, Homo sapien
gaatacacctttgatggaagggctc

SEQ ID NO: 1468146 - DNA, 25 bp, Homo sapien
aggtgttctatgtttcctccacggg

SEQ ID NO: 1468147 - DNA, 25 bp, Homo sapien
tgcagactgtgctcgagaggctcgc

SEQ ID NO: 1468148 - DNA, 25 bp, Homo sapien
caccttggtctccactgcatctggg

SEQ ID NO: 1468149 - DNA, 25 bp, Homo sapien
tccagcatggtacggacagacggtg

SEQ ID NO: 1468150 - DNA, 25 bp, Homo sapien
tagtcagcagtagcacaccttggtc

SEQ ID NO: 1468151 - DNA, 25 bp, Homo sapien
tcagtgaggggcacaaaaggcaacc

SEQ ID NO: 1468152 - DNA, 25 bp, Homo sapien
tttgaacaacaagccagctgggatt

SEQ ID NO: 1468153 - DNA, 25 bp, Homo sapien
cagatgggactgcaacatcccatgg

SEQ ID NO: 1468154 - DNA, 25 bp, Homo sapien
cctaagttgtttgaacaacaagcca

SEQ ID NO: 1468155 - DNA, 25 bp, Homo sapien
tgggactgcaacatcccatgggcct

SEQ ID NO: 1468156 - DNA, 25 bp, Homo sapien
agctgtccccagcttctgtgaccat

SEQ ID NO: 1468157 - DNA, 25 bp, Homo sapien
agccagctgtccccagcttctgtga

SEQ ID NO: 1468158 - DNA, 25 bp, Homo sapien
ctgcagccagctgtccccagcttct

SEQ ID NO: 1468159 - DNA, 25 bp, Homo sapien
ccagcacttctgagcagccctggcc

SEQ ID NO: 1468160 - DNA, 25 bp, Homo sapien
cacctgtggctcctatgtggtcacc

SEQ ID NO: 1468161 - DNA, 25 bp, Homo sapien
cagacggtagcctttgaagttcaca

SEQ ID NO: 1468162 - DNA, 25 bp, Homo sapien
taagaattctccaagtgtgctctgg

SEQ ID NO: 1468163 - DNA, 25 bp, Homo sapien
cctgcagacgtagcctaagaattct

SEQ ID NO: 1468164 - DNA, 25 bp, Homo sapien
tatttggcctgccataccacatttc

SEQ ID NO: 1468165 - DNA, 25 bp, Homo sapien
catagtttctaggaatttagacatg

SEQ ID NO: 1468166 - DNA, 25 bp, Homo sapien
ccattatttggcctgccataccaca

SEQ ID NO: 1468167 - DNA, 25 bp, Homo sapien
tataatgtaacatagtcatagtttc

SEQ ID NO: 1468168 - DNA, 25 bp, Homo sapien
gccagtttgggtcaagcatccagcc

SEQ ID NO: 1468169 - DNA, 25 bp, Homo sapien
ggctgtctctcaatcccaattccaa

SEQ ID NO: 1468170 - DNA, 25 bp, Homo sapien
ctacattgtagcatacggccccaca

SEQ ID NO: 1468171 - DNA, 25 bp, Homo sapien
tacggccccacacagagattggctg

SEQ ID NO: 1468172 - DNA, 25 bp, Homo sapien
gggactgctgggcaagcaacaggcc

SEQ ID NO: 1468173 - DNA, 25 bp, Homo sapien
ctgggactgctgggcaagcaacagg

SEQ ID NO: 1468174 - DNA, 25 bp, Homo sapien
tgggactgctgggcaagcaacaggc

SEQ ID NO: 1468175 - DNA, 25 bp, Homo sapien
cttcagggataggagcccttcagag

SEQ ID NO: 1468176 - DNA, 25 bp, Homo sapien
caaaaacaagatggcgacaagcgtg

SEQ ID NO: 1468177 - DNA, 25 bp, Homo sapien
ctcccatgccattttgtcagaggag

SEQ ID NO: 1468178 - DNA, 25 bp, Homo sapien
ttttgtcagaggagttttaaccaga

SEQ ID NO: 1468179 - DNA, 25 bp, Homo sapien
aaacaagatggcgacaagcgtgacc

SEQ ID NO: 1468180 - DNA, 25 bp, Homo sapien
tcttccatcacggatactcttcctt

SEQ ID NO: 1468181 - DNA, 25 bp, Homo sapien
tgatcttccatcacggatactcttc

SEQ ID NO: 1468182 - DNA, 25 bp, Homo sapien
tccatcacggatactcttccttcca

SEQ ID NO: 1468183 - DNA, 25 bp, Homo sapien
gatcttccatcacggatactcttcc

SEQ ID NO: 1468184 - DNA, 25 bp, Homo sapien
gactctggaacaacgcaagggttag

SEQ ID NO: 1468185 - DNA, 25 bp, Homo sapien
taaatacaccctacagttgactctg

SEQ ID NO: 1468186 - DNA, 25 bp, Homo sapien
cccctacacagttgaaaatttgagt

SEQ ID NO: 1468187 - DNA, 25 bp, Homo sapien
gactctacccaaactttgctattaa

SEQ ID NO: 1468188 - DNA, 25 bp, Homo sapien
accgtgaccggccaatacaagtatt

SEQ ID NO: 1468189 - DNA, 25 bp, Homo sapien
ttttggtgatttgtgaacctgaaag

SEQ ID NO: 1468190 - DNA, 25 bp, Homo sapien
ggccaatacaagtattcttcaactg

SEQ ID NO: 1468191 - DNA, 25 bp, Homo sapien
tctaactggaacttagcattttctc

SEQ ID NO: 1468192 - DNA, 25 bp, Homo sapien
gagtttaaacaagagctgcctatca

SEQ ID NO: 1468193 - DNA, 25 bp, Homo sapien
aataggttgaaataccagatgggcc

SEQ ID NO: 1468194 - DNA, 25 bp, Homo sapien
tcattatagctctgggaaatccctg

SEQ ID NO: 1468195 - DNA, 25 bp, Homo sapien
cctaaaagcgatatggtaacacatc

SEQ ID NO: 1468196 - DNA, 25 bp, Homo sapien
gaataaatctaagtatagggctgac

SEQ ID NO: 1468197 - DNA, 25 bp, Homo sapien
tctgggtaagcagtacccctcacca

SEQ ID NO: 1468198 - DNA, 25 bp, Homo sapien
gaggccttttcatactcactctgac

SEQ ID NO: 1468199 - DNA, 25 bp, Homo sapien
taagaacttgggaaacacactatga

SEQ ID NO: 1468200 - DNA, 25 bp, Homo sapien
atcatttcttgcctatactgtttgt

SEQ ID NO: 1468201 - DNA, 25 bp, Homo sapien
cttgattatggcattctaacccaaa

SEQ ID NO: 1468202 - DNA, 25 bp, Homo sapien
tatggcattctaacccaaacctcca

SEQ ID NO: 1468203 - DNA, 25 bp, Homo sapien
catttcttgcctatactgtttgtaa

SEQ ID NO: 1468204 - DNA, 25 bp, Homo sapien
catgaaccggagtgcattccaacga

SEQ ID NO: 1468205 - DNA, 25 bp, Homo sapien
tggtgtccctagcacctgatacagg

SEQ ID NO: 1468206 - DNA, 25 bp, Homo sapien
gacttgatgactgaatgctggaacc

SEQ ID NO: 1468207 - DNA, 25 bp, Homo sapien
tcaacataaacgtccagcagcgaag

SEQ ID NO: 1468208 - DNA, 25 bp, Homo sapien
gagaaaacacctttcacactaggag

SEQ ID NO: 1468209 - DNA, 25 bp, Homo sapien
tgtttcaatgactggactaagcggg

SEQ ID NO: 1468210 - DNA, 25 bp, Homo sapien
aatgatgccgctgcaaagttgggca

SEQ ID NO: 1468211 - DNA, 25 bp, Homo sapien
gggagctgactccatcctgtggcag

SEQ ID NO: 1468212 - DNA, 25 bp, Homo sapien
aaacaaagtgtagctgatatccaga

SEQ ID NO: 1468213 - DNA, 25 bp, Homo sapien
aaaacaaagtgtagctgatatccag

SEQ ID NO: 1468214 - DNA, 25 bp, Homo sapien
aacaaagtgtagctgatatccagaa

SEQ ID NO: 1468215 - DNA, 25 bp, Homo sapien
taagacagcactcctttacagggag

SEQ ID NO: 1468216 - DNA, 25 bp, Homo sapien
cctgcaattgaggtagcaaagccaa

SEQ ID NO: 1468217 - DNA, 25 bp, Homo sapien
taaagactaccggatgctggagcaa

SEQ ID NO: 1468218 - DNA, 25 bp, Homo sapien
ggtgcaatccagtacagaaaacgcc

SEQ ID NO: 1468219 - DNA, 25 bp, Homo sapien
taaaagatcaactactcggctccat

SEQ ID NO: 1468220 - DNA, 25 bp, Homo sapien
tggtctcctttaagcagtgtctgct

SEQ ID NO: 1468221 - DNA, 25 bp, Homo sapien
aaaaagtacagaccctgtcagtgca

SEQ ID NO: 1468222 - DNA, 25 bp, Homo sapien
ggttaagccaactgctacaaatggt

SEQ ID NO: 1468223 - DNA, 25 bp, Homo sapien
atacggtagggcacacgctgacagt

SEQ ID NO: 1468224 - DNA, 25 bp, Homo sapien
tactcgtcacgagcttctcggtgga

SEQ ID NO: 1468225 - DNA, 25 bp, Homo sapien
aagccacgccgtatttcttcttaca

SEQ ID NO: 1468226 - DNA, 25 bp, Homo sapien
tctcggtggacaagcaacatggtga

SEQ ID NO: 1468227 - DNA, 25 bp, Homo sapien
catctgtcctcatagttaatacaca

SEQ ID NO: 1468228 - DNA, 25 bp, Homo sapien
tggcagaaggtcgtatctaaattag

SEQ ID NO: 1468229 - DNA, 25 bp, Homo sapien
aatggaaccacaaggtacttcattt

SEQ ID NO: 1468230 - DNA, 25 bp, Homo sapien
caagtctgtaaaatcccactggaaa

SEQ ID NO: 1468231 - DNA, 25 bp, Homo sapien
catgatgagatcacccaagtaattg

SEQ ID NO: 1468232 - DNA, 25 bp, Homo sapien
atgggagggaccacgccaaggccat

SEQ ID NO: 1468233 - DNA, 25 bp, Homo sapien
cacatgggagggaccacgccaaggc

SEQ ID NO: 1468234 - DNA, 25 bp, Homo sapien
caagtaattggggtggcgaacaaag

SEQ ID NO: 1468235 - DNA, 25 bp, Homo sapien
tggatcactgggatttttccggaat

SEQ ID NO: 1468236 - DNA, 25 bp, Homo sapien
taggaaacgctctgaaggcaaaaca

SEQ ID NO: 1468237 - DNA, 25 bp, Homo sapien
caaacactagcttagaatcagcacc

SEQ ID NO: 1468238 - DNA, 25 bp, Homo sapien
tacatgctgaatcccactttaagtc

SEQ ID NO: 1468239 - DNA, 25 bp, Homo sapien
gatggtaacccgtccgaaatctatc

SEQ ID NO: 1468240 - DNA, 25 bp, Homo sapien
tactgagaacccaagtacgaaccat

SEQ ID NO: 1468241 - DNA, 25 bp, Homo sapien
taatctgtttcaagtactactgaga

SEQ ID NO: 1468242 - DNA, 25 bp, Homo sapien
tcaagagaaaagacgtatggttacc

SEQ ID NO: 1468243 - DNA, 25 bp, Homo sapien
ggcataaaagcctcagtacataata

SEQ ID NO: 1468244 - DNA, 25 bp, Homo sapien
tggatgactgactaaataaaaggct

SEQ ID NO: 1468245 - DNA, 25 bp, Homo sapien
gccagcatgaatccaaatccatcgt

SEQ ID NO: 1468246 - DNA, 25 bp, Homo sapien
gatgtccatggtcgtcaacaacgct

SEQ ID NO: 1468247 - DNA, 25 bp, Homo sapien
gccattggccaagacacttcatttg

SEQ ID NO: 1468248 - DNA, 25 bp, Homo sapien
gaaggtctggcctaagggaatctct

SEQ ID NO: 1468249 - DNA, 25 bp, Homo sapien
gcttgctgaaggaataagatcacca

SEQ ID NO: 1468250 - DNA, 25 bp, Homo sapien
tggttagcatgagccagatcgcctc

SEQ ID NO: 1468251 - DNA, 25 bp, Homo sapien
tggcaacatggtgaactgacagctt

SEQ ID NO: 1468252 - DNA, 25 bp, Homo sapien
agagagcatccaccacatagagaag

SEQ ID NO: 1468253 - DNA, 25 bp, Homo sapien
gagaagctggaaactattaactaaa

SEQ ID NO: 1468254 - DNA, 25 bp, Homo sapien
tccaccacatagagaagctggaaac

SEQ ID NO: 1468255 - DNA, 25 bp, Homo sapien
tattaactaaaatcatggccaagga

SEQ ID NO: 1468256 - DNA, 25 bp, Homo sapien
aaaaatataccacccactgcttatt

SEQ ID NO: 1468257 - DNA, 25 bp, Homo sapien
ttctagcagttaattagacctattg

SEQ ID NO: 1468258 - DNA, 25 bp, Homo sapien
cagttaattagacctattgaattga

SEQ ID NO: 1468259 - DNA, 25 bp, Homo sapien
taattcatccacactatcactttcc

SEQ ID NO: 1468260 - DNA, 25 bp, Homo sapien
gagatcaaaagtaccaattcgaggg

SEQ ID NO: 1468261 - DNA, 25 bp, Homo sapien
caatccggggcgcaattcacaaaag

SEQ ID NO: 1468262 - DNA, 25 bp, Homo sapien
tcacaaaagtatttgagatcaaaag

SEQ ID NO: 1468263 - DNA, 25 bp, Homo sapien
tcgagggtttaattcacggccaatg

SEQ ID NO: 1468264 - DNA, 25 bp, Homo sapien
gtcttactgtcatcaagcaactgca

SEQ ID NO: 1468265 - DNA, 25 bp, Homo sapien
gaaatacttcaggtcagcatcaacc

SEQ ID NO: 1468266 - DNA, 25 bp, Homo sapien
agacgagcggaaccaggagatgcct

SEQ ID NO: 1468267 - DNA, 25 bp, Homo sapien
gatgcctgcccgactgaaaaggcag

SEQ ID NO: 1468268 - DNA, 25 bp, Homo sapien
tcaaagagcgcatgtagagatacac

SEQ ID NO: 1468269 - DNA, 25 bp, Homo sapien
cacacaaaaaacagtggccgcaagt

SEQ ID NO: 1468270 - DNA, 25 bp, Homo sapien
ggccgcaagtgcaaactgaagaaaa

SEQ ID NO: 1468271 - DNA, 25 bp, Homo sapien
tgtacacgtaatgaaactctacgcc

SEQ ID NO: 1468272 - DNA, 25 bp, Homo sapien
gaagagagatgttccgatgactgca

SEQ ID NO: 1468273 - DNA, 25 bp, Homo sapien
gagagatgttccgatgactgcagat

SEQ ID NO: 1468274 - DNA, 25 bp, Homo sapien
gatgttccgatgactgcagatgtca

SEQ ID NO: 1468275 - DNA, 25 bp, Homo sapien
cagatgtcaggataaaagcatagaa

SEQ ID NO: 1468276 - DNA, 25 bp, Homo sapien
caagttaaaaagcacccgccctgtg

SEQ ID NO: 1468277 - DNA, 25 bp, Homo sapien
caaagagctgtgatcctaaaaagtc

SEQ ID NO: 1468278 - DNA, 25 bp, Homo sapien
tattaacagagctgggccaaacaca

SEQ ID NO: 1468279 - DNA, 25 bp, Homo sapien
catgccacccgcagaaaagatgcca

SEQ ID NO: 1468280 - DNA, 25 bp, Homo sapien
cttgaaccagagtaattagatgagg

SEQ ID NO: 1468281 - DNA, 25 bp, Homo sapien
tagaaaagaattggtacctacagag

SEQ ID NO: 1468282 - DNA, 25 bp, Homo sapien
ggacctggcggcaaagtcaacaacc

SEQ ID NO: 1468283 - DNA, 25 bp, Homo sapien
caaaatgtcttaggaacctccttag

SEQ ID NO: 1468284 - DNA, 25 bp, Homo sapien
acccaccaggggtcagactctggag

SEQ ID NO: 1468285 - DNA, 25 bp, Homo sapien
tggtgtggtaagtgaaccaccagag

SEQ ID NO: 1468286 - DNA, 25 bp, Homo sapien
gtctaacaataccaatgataagtat

SEQ ID NO: 1468287 - DNA, 25 bp, Homo sapien
aataccaatgataagtattaagcac

SEQ ID NO: 1468288 - DNA, 25 bp, Homo sapien
ttaatctatacttgagtcttcttcc

SEQ ID NO: 1468289 - DNA, 25 bp, Homo sapien
catttaatctatacttgagtcttct

SEQ ID NO: 1468290 - DNA, 25 bp, Homo sapien
aatctatacttgagtcttcttccat

SEQ ID NO: 1468291 - DNA, 25 bp, Homo sapien
ctatacttgagtcttcttccatcaa

SEQ ID NO: 1468292 - DNA, 25 bp, Homo sapien
caggacttgaatcaaaaaccacagg

SEQ ID NO: 1468293 - DNA, 25 bp, Homo sapien
caattggcagtaggtagaacaggac

SEQ ID NO: 1468294 - DNA, 25 bp, Homo sapien
cacaggaggtagaccccaaatactc

SEQ ID NO: 1468295 - DNA, 25 bp, Homo sapien
tgtttacacatcaacagcaacagga

SEQ ID NO: 1468296 - DNA, 25 bp, Homo sapien
actgccagttcttttgcaacgtatt

SEQ ID NO: 1468297 - DNA, 25 bp, Homo sapien
actgtgttgctatgtaactgctttc

SEQ ID NO: 1468298 - DNA, 25 bp, Homo sapien
tctcttcttggacgaaggctatact

SEQ ID NO: 1468299 - DNA, 25 bp, Homo sapien
actccaagtcctttgcccggatggg

SEQ ID NO: 1468300 - DNA, 25 bp, Homo sapien
tttctctcaatatgctcaggctccc

SEQ ID NO: 1468301 - DNA, 25 bp, Homo sapien
tatttttatgaggtgcgtcatttct

SEQ ID NO: 1468302 - DNA, 25 bp, Homo sapien
atgaggtgcgtcatttctctcaata

SEQ ID NO: 1468303 - DNA, 25 bp, Homo sapien
cccattatatctgctgatgctattt

SEQ ID NO: 1468304 - DNA, 25 bp, Homo sapien
tgcttccttaatgtcggcctggtgg

SEQ ID NO: 1468305 - DNA, 25 bp, Homo sapien
ggaactggaagttgagccacctttc

SEQ ID NO: 1468306 - DNA, 25 bp, Homo sapien
gcgggcacttttaggtggtcgacca

SEQ ID NO: 1468307 - DNA, 25 bp, Homo sapien
tcgggagcgtgaccttgatcgactc

SEQ ID NO: 1468308 - DNA, 25 bp, Homo sapien
taactctaaaatcagcacgggaaat

SEQ ID NO: 1468309 - DNA, 25 bp, Homo sapien
tacagacagacccacactagaagag

SEQ ID NO: 1468310 - DNA, 25 bp, Homo sapien
aggcaggaactgctaccattaactc

SEQ ID NO: 1468311 - DNA, 25 bp, Homo sapien
ggcaaagagctttaccacaaatcat

SEQ ID NO: 1468312 - DNA, 25 bp, Homo sapien
taaagtgaactcccaggccatcgac

SEQ ID NO: 1468313 - DNA, 25 bp, Homo sapien
tcttaccacttcaccatcggcaaat

SEQ ID NO: 1468314 - DNA, 25 bp, Homo sapien
catcggcaaatttcctacttggcat

SEQ ID NO: 1468315 - DNA, 25 bp, Homo sapien
gaggtgctgtcgtggctcagaattt

SEQ ID NO: 1468316 - DNA, 25 bp, Homo sapien
acagtaatgccgctccatcggctga

SEQ ID NO: 1468317 - DNA, 25 bp, Homo sapien
ttccagctgccagacagtaatgccg

SEQ ID NO: 1468318 - DNA, 25 bp, Homo sapien
tatcaattgatagctgggtacttcc

SEQ ID NO: 1468319 - DNA, 25 bp, Homo sapien
gctgaccagcggaatcacatttcca

SEQ ID NO: 1468320 - DNA, 25 bp, Homo sapien
agtcaactggcactgcaatcctcac

SEQ ID NO: 1468321 - DNA, 25 bp, Homo sapien
agagtcaactggcactgcaatcctc

SEQ ID NO: 1468322 - DNA, 25 bp, Homo sapien
tcagagtcaactggcactgcaatcc

SEQ ID NO: 1468323 - DNA, 25 bp, Homo sapien
ttcagagtcaactggcactgcaatc

SEQ ID NO: 1468324 - DNA, 25 bp, Homo sapien
attccagctccggtatgttactgtt

SEQ ID NO: 1468325 - DNA, 25 bp, Homo sapien
cggtatgttactgtttgtgaacaca

SEQ ID NO: 1468326 - DNA, 25 bp, Homo sapien
tgtgaacacaacaattctctgctca

SEQ ID NO: 1468327 - DNA, 25 bp, Homo sapien
gaacacaacaattctctgctcatta

SEQ ID NO: 1468328 - DNA, 25 bp, Homo sapien
tcaacgcataggagcgagcagccat

SEQ ID NO: 1468329 - DNA, 25 bp, Homo sapien
tgtccgggcgaaggaattcaacgca

SEQ ID NO: 1468330 - DNA, 25 bp, Homo sapien
caacatggagggaaacgtccgcagt

SEQ ID NO: 1468331 - DNA, 25 bp, Homo sapien
tgctcatctgtcagacgggcgctcg

SEQ ID NO: 1468332 - DNA, 25 bp, Homo sapien
caggttccggcggtgacacggacgg

SEQ ID NO: 1468333 - DNA, 25 bp, Homo sapien
ggctcccggagaatagtcgcacagc

SEQ ID NO: 1468334 - DNA, 25 bp, Homo sapien
gcggcagatccacgcgcgcgacgct

SEQ ID NO: 1468335 - DNA, 25 bp, Homo sapien
gtcgcacagcaacccggcggcagat

SEQ ID NO: 1468336 - DNA, 25 bp, Homo sapien
ggttgttacccgagatgctgtcgag

SEQ ID NO: 1468337 - DNA, 25 bp, Homo sapien
ttgacctgcaacctacaagcctggt

SEQ ID NO: 1468338 - DNA, 25 bp, Homo sapien
gaagttttatgcgttacacaccgaa

SEQ ID NO: 1468339 - DNA, 25 bp, Homo sapien
ccgcggagcgtggaacaagaagttt

SEQ ID NO: 1468340 - DNA, 25 bp, Homo sapien
gtaaacagatgggttgcacatggac

SEQ ID NO: 1468341 - DNA, 25 bp, Homo sapien
tgggagggtaggagcctaacttcca

SEQ ID NO: 1468342 - DNA, 25 bp, Homo sapien
taagcaccagtaagtaaacagatgg

SEQ ID NO: 1468343 - DNA, 25 bp, Homo sapien
acagaccctcttgagcccctgctca

SEQ ID NO: 1468344 - DNA, 25 bp, Homo sapien
gaagacgtgactgacagattgcagg

SEQ ID NO: 1468345 - DNA, 25 bp, Homo sapien
tgaccgatgttcatgcacgcaggag

SEQ ID NO: 1468346 - DNA, 25 bp, Homo sapien
ttgaggacccatagctgaccgatgt

SEQ ID NO: 1468347 - DNA, 25 bp, Homo sapien
gctggtgcagatccccgtgaggaca

SEQ ID NO: 1468348 - DNA, 25 bp, Homo sapien
tatctatgggacctggcaggtagag

SEQ ID NO: 1468349 - DNA, 25 bp, Homo sapien
agaggaggttgcagcgggcacagag

SEQ ID NO: 1468350 - DNA, 25 bp, Homo sapien
caggtagaggggaaggcactcccta

SEQ ID NO: 1468351 - DNA, 25 bp, Homo sapien
gggaggacatccttatctatgggac

SEQ ID NO: 1468352 - DNA, 25 bp, Homo sapien
tattgtgtgacagggctagctagcg

SEQ ID NO: 1468353 - DNA, 25 bp, Homo sapien
gcactgtgacgggaacactgggcta

SEQ ID NO: 1468354 - DNA, 25 bp, Homo sapien
tattggccaaacacatatcttcggg

SEQ ID NO: 1468355 - DNA, 25 bp, Homo sapien
tatgcacgaagcagaggaagctcag

SEQ ID NO: 1468356 - DNA, 25 bp, Homo sapien
cactatttctgcaccccaagggcaa

SEQ ID NO: 1468357 - DNA, 25 bp, Homo sapien
tctgtgtcttacttggtgacccagg

SEQ ID NO: 1468358 - DNA, 25 bp, Homo sapien
ataaagctgaatgagggaaggaccc

SEQ ID NO: 1468359 - DNA, 25 bp, Homo sapien
cccagcaaagggtggaaagctgaga

SEQ ID NO: 1468360 - DNA, 25 bp, Homo sapien
cttcacacggacagaggcagttgtg

SEQ ID NO: 1468361 - DNA, 25 bp, Homo sapien
ggtaagataccctctgaacagctaa

SEQ ID NO: 1468362 - DNA, 25 bp, Homo sapien
cagttgtggtttggtaagataccct

SEQ ID NO: 1468363 - DNA, 25 bp, Homo sapien
ctaatgtgggtaaagaagcatctcc

SEQ ID NO: 1468364 - DNA, 25 bp, Homo sapien
tgtgggcaatggtagccatctgcag

SEQ ID NO: 1468365 - DNA, 25 bp, Homo sapien
tgggcaatggtagccatctgcaggc

SEQ ID NO: 1468366 - DNA, 25 bp, Homo sapien
gggcaatggtagccatctgcaggcc

SEQ ID NO: 1468367 - DNA, 25 bp, Homo sapien
ctgtgggcaatggtagccatctgca

SEQ ID NO: 1468368 - DNA, 25 bp, Homo sapien
gttcggcagtagtgcagaggcccct

SEQ ID NO: 1468369 - DNA, 25 bp, Homo sapien
accacaagaattggcgcttgcaggg

SEQ ID NO: 1468370 - DNA, 25 bp, Homo sapien
gggaactcgtgcaccacaagaattg

SEQ ID NO: 1468371 - DNA, 25 bp, Homo sapien
ctccgttcggcagtagtgcagaggc

SEQ ID NO: 1468372 - DNA, 25 bp, Homo sapien
acgggcagacaggtcaccctcagga

SEQ ID NO: 1468373 - DNA, 25 bp, Homo sapien
aattatggcgccttctcccgaccag

SEQ ID NO: 1468374 - DNA, 25 bp, Homo sapien
aaaggcagtggtgtagatatggcta

SEQ ID NO: 1468375 - DNA, 25 bp, Homo sapien
ggagggcacaggacatgaaaattat

SEQ ID NO: 1468376 - DNA, 25 bp, Homo sapien
tttccttaattaatacatagaacat

SEQ ID NO: 1468377 - DNA, 25 bp, Homo sapien
caggcacagtcagattatcccaggg

SEQ ID NO: 1468378 - DNA, 25 bp, Homo sapien
gacagggaggccgatctggattttc

SEQ ID NO: 1468379 - DNA, 25 bp, Homo sapien
ccagggggaggaacgaatgagggtg

SEQ ID NO: 1468380 - DNA, 25 bp, Homo sapien
aacaggcacagtcagattatcccag

SEQ ID NO: 1468381 - DNA, 25 bp, Homo sapien
ccccgggcctctgttggtgtctgtg

SEQ ID NO: 1468382 - DNA, 25 bp, Homo sapien
gagggagcatctccaagagtcctcg

SEQ ID NO: 1468383 - DNA, 25 bp, Homo sapien
gcagagggagcatctccaagagtcc

SEQ ID NO: 1468384 - DNA, 25 bp, Homo sapien
gagtcctcggcagctgcctctggta

SEQ ID NO: 1468385 - DNA, 25 bp, Homo sapien
taaaagcaagtgtggctctccccga

SEQ ID NO: 1468386 - DNA, 25 bp, Homo sapien
aaaagcaagtgtggctctccccgac

SEQ ID NO: 1468387 - DNA, 25 bp, Homo sapien
tgagtataagtaaaagcaagtgtgg

SEQ ID NO: 1468388 - DNA, 25 bp, Homo sapien
gtataagtaaaagcaagtgtggctc

SEQ ID NO: 1468389 - DNA, 25 bp, Homo sapien
gcctgtttgatgcaggacagcacag

SEQ ID NO: 1468390 - DNA, 25 bp, Homo sapien
ttggaaggatttggaggacctactc

SEQ ID NO: 1468391 - DNA, 25 bp, Homo sapien
ctcctgcctggagctagctggaagg

SEQ ID NO: 1468392 - DNA, 25 bp, Homo sapien
ggctgtggaggtaatttcatttctc

SEQ ID NO: 1468393 - DNA, 25 bp, Homo sapien
aaccctgaaggtccgaagatatatg

SEQ ID NO: 1468394 - DNA, 25 bp, Homo sapien
tatatgaaacaatcccctaaaaatg

SEQ ID NO: 1468395 - DNA, 25 bp, Homo sapien
actgcacagcttcaaacatattaaa

SEQ ID NO: 1468396 - DNA, 25 bp, Homo sapien
aggaccttgggcttcactgcacagc

SEQ ID NO: 1468397 - DNA, 25 bp, Homo sapien
tggcccgttggagacttctggcaaa

SEQ ID NO: 1468398 - DNA, 25 bp, Homo sapien
accagatggcccgttggagacttct

SEQ ID NO: 1468399 - DNA, 25 bp, Homo sapien
agacttctggcaaacgccccagctc

SEQ ID NO: 1468400 - DNA, 25 bp, Homo sapien
tgctctctgggaccagatggcccgt

SEQ ID NO: 1468401 - DNA, 25 bp, Homo sapien
caggttgcagtgtctcgagcctgct

SEQ ID NO: 1468402 - DNA, 25 bp, Homo sapien
tgcccacggccaggccaggttgcag

SEQ ID NO: 1468403 - DNA, 25 bp, Homo sapien
tctcgagcctgctgggctctcagac

SEQ ID NO: 1468404 - DNA, 25 bp, Homo sapien
gccaggccaggttgcagtgtctcga

SEQ ID NO: 1468405 - DNA, 25 bp, Homo sapien
ctagaagagtccaccgggtaaattg

SEQ ID NO: 1468406 - DNA, 25 bp, Homo sapien
agcccctttgtcaggactggtgagg

SEQ ID NO: 1468407 - DNA, 25 bp, Homo sapien
tgaaggagcagcacagcttcgtttt

SEQ ID NO: 1468408 - DNA, 25 bp, Homo sapien
taaaaccaggatacagaacggcctg

SEQ ID NO: 1468409 - DNA, 25 bp, Homo sapien
ggcttctgaggccacttgcactgca

SEQ ID NO: 1468410 - DNA, 25 bp, Homo sapien
cagaggaagcttgccggacaccagg

SEQ ID NO: 1468411 - DNA, 25 bp, Homo sapien
aagggctgcagggttcagctgcaga

SEQ ID NO: 1468412 - DNA, 25 bp, Homo sapien
gagtccgagcagaggaagcttgccg

SEQ ID NO: 1468413 - DNA, 25 bp, Homo sapien
ctgccacccggacagagctggccag

SEQ ID NO: 1468414 - DNA, 25 bp, Homo sapien
tgccacccggacagagctggccaga

SEQ ID NO: 1468415 - DNA, 25 bp, Homo sapien
gccacccggacagagctggccagag

SEQ ID NO: 1468416 - DNA, 25 bp, Homo sapien
cacccggacagagctggccagaggc

SEQ ID NO: 1468417 - DNA, 25 bp, Homo sapien
ctgtgtagcctctgtaagtgcttac

SEQ ID NO: 1468418 - DNA, 25 bp, Homo sapien
tgggtgtttggtgacacttccatct

SEQ ID NO: 1468419 - DNA, 25 bp, Homo sapien
cagagaagcaggagcacggcgatct

SEQ ID NO: 1468420 - DNA, 25 bp, Homo sapien
gatgcaggttagtggggccggttcc

SEQ ID NO: 1468421 - DNA, 25 bp, Homo sapien
ccggttccacggacatttggggctg

SEQ ID NO: 1468422 - DNA, 25 bp, Homo sapien
aggtgagaggaatgcgccttccccc

SEQ ID NO: 1468423 - DNA, 25 bp, Homo sapien
gatggctatgaaatgagctgtctgt

SEQ ID NO: 1468424 - DNA, 25 bp, Homo sapien
tgccagatggctatgaaatgagctg

SEQ ID NO: 1468425 - DNA, 25 bp, Homo sapien
ctgtctgtgcacaagaaacgaggtg

SEQ ID NO: 1468426 - DNA, 25 bp, Homo sapien
gatgggcttgggagctgattctctg

SEQ ID NO: 1468427 - DNA, 25 bp, Homo sapien
atgggcttgggagctgattctctgt

SEQ ID NO: 1468428 - DNA, 25 bp, Homo sapien
tgggcttgggagctgattctctgtg

SEQ ID NO: 1468429 - DNA, 25 bp, Homo sapien
gcctcctgcgcaggcagccagactg

SEQ ID NO: 1468430 - DNA, 25 bp, Homo sapien
cttgggcttggggtcctccgatagg

SEQ ID NO: 1468431 - DNA, 25 bp, Homo sapien
gtcctccgataggaaacgcctgcct

SEQ ID NO: 1468432 - DNA, 25 bp, Homo sapien
agactgcccacagcccgtggcgtgg

SEQ ID NO: 1468433 - DNA, 25 bp, Homo sapien
tcaagagccctgaaggggtccctgg

SEQ ID NO: 1468434 - DNA, 25 bp, Homo sapien
aaactgagacccatcggcggccggc

SEQ ID NO: 1468435 - DNA, 25 bp, Homo sapien
actgagacccatcggcggccggcct

SEQ ID NO: 1468436 - DNA, 25 bp, Homo sapien
gaaactgagacccatcggcggccgg

SEQ ID NO: 1468437 - DNA, 25 bp, Homo sapien
tgagacccatcggcggccggcctga

SEQ ID NO: 1468438 - DNA, 25 bp, Homo sapien
gagacccccaaaagaggaggatgga

SEQ ID NO: 1468439 - DNA, 25 bp, Homo sapien
tctctgatcaagtcccacgaccagg

SEQ ID NO: 1468440 - DNA, 25 bp, Homo sapien
aaagactggcagtgtctgtcccaga

SEQ ID NO: 1468441 - DNA, 25 bp, Homo sapien
tctccaagtcctgacaccgcggaga

SEQ ID NO: 1468442 - DNA, 25 bp, Homo sapien
gggcctgcagagtccgcatctctct

SEQ ID NO: 1468443 - DNA, 25 bp, Homo sapien
accagcccaggtggaggctctcggt

SEQ ID NO: 1468444 - DNA, 25 bp, Homo sapien
tggccggggaaattgaggtcacttc

SEQ ID NO: 1468445 - DNA, 25 bp, Homo sapien
ccggtgctccctgtgtctaggatga

SEQ ID NO: 1468446 - DNA, 25 bp, Homo sapien
aagagtgacaaggatgacgccccca

SEQ ID NO: 1468447 - DNA, 25 bp, Homo sapien
gaagagtgacaaggatgacgccccc

SEQ ID NO: 1468448 - DNA, 25 bp, Homo sapien
gagtgacaaggatgacgcccccacc

SEQ ID NO: 1468449 - DNA, 25 bp, Homo sapien
gtgacaaggatgacgcccccaccaa

SEQ ID NO: 1468450 - DNA, 25 bp, Homo sapien
tcaacaccagtaagtgggcggtccc

SEQ ID NO: 1468451 - DNA, 25 bp, Homo sapien
tgaaccgagagtgcacaggtggtca

SEQ ID NO: 1468452 - DNA, 25 bp, Homo sapien
gcttcagaggtaacccccgactgaa

SEQ ID NO: 1468453 - DNA, 25 bp, Homo sapien
cctcaggacagagtagtgagaggta

SEQ ID NO: 1468454 - DNA, 25 bp, Homo sapien
ctgcggccttgggacgtgccgcctt

SEQ ID NO: 1468455 - DNA, 25 bp, Homo sapien
gcgctgccgagcatgaccgccaggg

SEQ ID NO: 1468456 - DNA, 25 bp, Homo sapien
gcagaacccggctggccttaggcgc

SEQ ID NO: 1468457 - DNA, 25 bp, Homo sapien
ccttgggaggatccgagtggttgcc

SEQ ID NO: 1468458 - DNA, 25 bp, Homo sapien
aggatggatctgcattcctgagatc

SEQ ID NO: 1468459 - DNA, 25 bp, Homo sapien
tccactgaggcctacacgaaatggg

SEQ ID NO: 1468460 - DNA, 25 bp, Homo sapien
gctccactgaggcctacacgaaatg

SEQ ID NO: 1468461 - DNA, 25 bp, Homo sapien
cgaggatggatctgcattcctgaga

SEQ ID NO: 1468462 - DNA, 25 bp, Homo sapien
ggatccaaggtttagcacagaggcg

SEQ ID NO: 1468463 - DNA, 25 bp, Homo sapien
tccgctttccctagccttgctttgg

SEQ ID NO: 1468464 - DNA, 25 bp, Homo sapien
tgtggctttccagaactccgctttc

SEQ ID NO: 1468465 - DNA, 25 bp, Homo sapien
gttgatgcacatcagtgtggctttc

SEQ ID NO: 1468466 - DNA, 25 bp, Homo sapien
acagctcgtctgttaattccaggtg

SEQ ID NO: 1468467 - DNA, 25 bp, Homo sapien
caaactgctcgttgctctgccagaa

SEQ ID NO: 1468468 - DNA, 25 bp, Homo sapien
atcttccaaccttgcccatttacgg

SEQ ID NO: 1468469 - DNA, 25 bp, Homo sapien
attccaggtgaattgacttctccat

SEQ ID NO: 1468470 - DNA, 25 bp, Homo sapien
tctttcgttggattgttccctgtgc

SEQ ID NO: 1468471 - DNA, 25 bp, Homo sapien
tcgttggattgttccctgtgctgcc

SEQ ID NO: 1468472 - DNA, 25 bp, Homo sapien
gctgcccgtggggccattcacagaa

SEQ ID NO: 1468473 - DNA, 25 bp, Homo sapien
tgtccaaggcaggttcggttctttc

SEQ ID NO: 1468474 - DNA, 25 bp, Homo sapien
gggctagggtagcaatctcatgaca

SEQ ID NO: 1468475 - DNA, 25 bp, Homo sapien
gcccaggtgccacggtgtccttgcc

SEQ ID NO: 1468476 - DNA, 25 bp, Homo sapien
actgaggggcttcacaaatcttttc

SEQ ID NO: 1468477 - DNA, 25 bp, Homo sapien
caataagctccaaaagttactggga

SEQ ID NO: 1468478 - DNA, 25 bp, Homo sapien
tttccgctgtacaccaagggcttct

SEQ ID NO: 1468479 - DNA, 25 bp, Homo sapien
ggtcagctcatgactgcagtggcaa

SEQ ID NO: 1468480 - DNA, 25 bp, Homo sapien
aatgcattcccctacagcccctttc

SEQ ID NO: 1468481 - DNA, 25 bp, Homo sapien
aacagacattcagtctatttagaaa

SEQ ID NO: 1468482 - DNA, 25 bp, Homo sapien
tgaaaggcacctgcctctagggacc

SEQ ID NO: 1468483 - DNA, 25 bp, Homo sapien
caccctttacactaatgtgccagca

SEQ ID NO: 1468484 - DNA, 25 bp, Homo sapien
cacagactcccagatattcttagct

SEQ ID NO: 1468485 - DNA, 25 bp, Homo sapien
gaaaagtgtggccattaaaaggatc

SEQ ID NO: 1468486 - DNA, 25 bp, Homo sapien
cctccaatgaagaggtcaccaagct

SEQ ID NO: 1468487 - DNA, 25 bp, Homo sapien
tcactggctttggacgcctccaatg

SEQ ID NO: 1468488 - DNA, 25 bp, Homo sapien
gaaaggatggcggatcgcaaaacac

SEQ ID NO: 1468489 - DNA, 25 bp, Homo sapien
aagctttccgtcatagaggagcagc

SEQ ID NO: 1468490 - DNA, 25 bp, Homo sapien
gagttgcggaactagcctacagcta

SEQ ID NO: 1468491 - DNA, 25 bp, Homo sapien
catgctgtccagtgcaatagcgtct

SEQ ID NO: 1468492 - DNA, 25 bp, Homo sapien
tgatcaagcccaaagtacctctggg

SEQ ID NO: 1468493 - DNA, 25 bp, Homo sapien
taagacgaagcaaagactcagagcc

SEQ ID NO: 1468494 - DNA, 25 bp, Homo sapien
tgtgtcctacaccagaagcgtctac

SEQ ID NO: 1468495 - DNA, 25 bp, Homo sapien
tgttaatctgcaaatactcaaggcc

SEQ ID NO: 1468496 - DNA, 25 bp, Homo sapien
ccgtttagaaggttgtgtgcatcac

SEQ ID NO: 1468497 - DNA, 25 bp, Homo sapien
tatttaacatgcttcacagaacggg

SEQ ID NO: 1468498 - DNA, 25 bp, Homo sapien
gagaccttgtagcatacctttgcac

SEQ ID NO: 1468499 - DNA, 25 bp, Homo sapien
taagtacctgaacgtgttgcagaac

SEQ ID NO: 1468500 - DNA, 25 bp, Homo sapien
tgaatattgggaacacgcggtccac

SEQ ID NO: 1468501 - DNA, 25 bp, Homo sapien
tggccacacaggaattaaagagacc

SEQ ID NO: 1468502 - DNA, 25 bp, Homo sapien
ttcaatcgcacaaacgaagttagcg

SEQ ID NO: 1468503 - DNA, 25 bp, Homo sapien
aaaggatcccctaaactgtactcag

SEQ ID NO: 1468504 - DNA, 25 bp, Homo sapien
taagacatccaacgtacaagagcac

SEQ ID NO: 1468505 - DNA, 25 bp, Homo sapien
tagtacagacttgtcacaggtcaga

SEQ ID NO: 1468506 - DNA, 25 bp, Homo sapien
caaaagaggttgctgaccagattta

SEQ ID NO: 1468507 - DNA, 25 bp, Homo sapien
aatatggcacataacaactcaagca

SEQ ID NO: 1468508 - DNA, 25 bp, Homo sapien
tcttagtttggaccacttgtaccca

SEQ ID NO: 1468509 - DNA, 25 bp, Homo sapien
cttctttgtagtggtaaaggctgca

SEQ ID NO: 1468510 - DNA, 25 bp, Homo sapien
attcaggaacacgtatctaaacacc

SEQ ID NO: 1468511 - DNA, 25 bp, Homo sapien
tcaggaacacgtatctaaacacctg

SEQ ID NO: 1468512 - DNA, 25 bp, Homo sapien
acacgtatctaaacacctgtgtaac

SEQ ID NO: 1468513 - DNA, 25 bp, Homo sapien
aggaacacgtatctaaacacctgtg

SEQ ID NO: 1468514 - DNA, 25 bp, Homo sapien
ctaggtaataataactgccaaattc

SEQ ID NO: 1468515 - DNA, 25 bp, Homo sapien
tgtttcagaccattgaaattactgg

SEQ ID NO: 1468516 - DNA, 25 bp, Homo sapien
gatattatgtgaagctcagaatcat

SEQ ID NO: 1468517 - DNA, 25 bp, Homo sapien
tgatgtaaaagattaagtacttggt

SEQ ID NO: 1468518 - DNA, 25 bp, Homo sapien
cattgtaacaatttaggaaggcatc

SEQ ID NO: 1468519 - DNA, 25 bp, Homo sapien
gaccactggtttgtgttatgtagaa

SEQ ID NO: 1468520 - DNA, 25 bp, Homo sapien
tatttattcatgcaggtaactgaga

SEQ ID NO: 1468521 - DNA, 25 bp, Homo sapien
tgttttccctgggactaggccttga

SEQ ID NO: 1468522 - DNA, 25 bp, Homo sapien
gggaaagagcttatcaccagagtca

SEQ ID NO: 1468523 - DNA, 25 bp, Homo sapien
tatttcaatgcgtggtgatcttgcc

SEQ ID NO: 1468524 - DNA, 25 bp, Homo sapien
tcttaacttacatagggctgatctc

SEQ ID NO: 1468525 - DNA, 25 bp, Homo sapien
tgcatgaaggctaactcgagaaact

SEQ ID NO: 1468526 - DNA, 25 bp, Homo sapien
tgcagtatttgacttgctcagttcc

SEQ ID NO: 1468527 - DNA, 25 bp, Homo sapien
gcagtatttgacttgctcagttcct

SEQ ID NO: 1468528 - DNA, 25 bp, Homo sapien
cagtatttgacttgctcagttcctg

SEQ ID NO: 1468529 - DNA, 25 bp, Homo sapien
tggaaaagaacaagtattgaaaata

SEQ ID NO: 1468530 - DNA, 25 bp, Homo sapien
gatggaaaagaacaagtattgaaaa

SEQ ID NO: 1468531 - DNA, 25 bp, Homo sapien
ctggatggaaaagaacaagtattga

SEQ ID NO: 1468532 - DNA, 25 bp, Homo sapien
tggatggaaaagaacaagtattgaa

SEQ ID NO: 1468533 - DNA, 25 bp, Homo sapien
ctcttcttttagctttgttaattct

SEQ ID NO: 1468534 - DNA, 25 bp, Homo sapien
catcaatgagctcttcttttagctt

SEQ ID NO: 1468535 - DNA, 25 bp, Homo sapien
gagctcttcttttagctttgttaat

SEQ ID NO: 1468536 - DNA, 25 bp, Homo sapien
tttagctttgttaattcttttctca

SEQ ID NO: 1468537 - DNA, 25 bp, Homo sapien
cagggattgccctaatgggtaggca

SEQ ID NO: 1468538 - DNA, 25 bp, Homo sapien
tgctgtccaatacggcaggcacgaa

SEQ ID NO: 1468539 - DNA, 25 bp, Homo sapien
gcttttaatctagtcctctgggaac

SEQ ID NO: 1468540 - DNA, 25 bp, Homo sapien
cacgaatcatatgcagctgctgagc

SEQ ID NO: 1468541 - DNA, 25 bp, Homo sapien
tatacgtagcccacattatacttct

SEQ ID NO: 1468542 - DNA, 25 bp, Homo sapien
caagaactgcagatttggccaggtg

SEQ ID NO: 1468543 - DNA, 25 bp, Homo sapien
tgggccctccttcaagaactgcaga

SEQ ID NO: 1468544 - DNA, 25 bp, Homo sapien
taaaatatatacgtagcccacatta

SEQ ID NO: 1468545 - DNA, 25 bp, Homo sapien
caaggcttgattttcaatggccacg

SEQ ID NO: 1468546 - DNA, 25 bp, Homo sapien
gaactgaccatgttttgaagcgtgt

SEQ ID NO: 1468547 - DNA, 25 bp, Homo sapien
tcagtacacggcaaaacaaggcttg

SEQ ID NO: 1468548 - DNA, 25 bp, Homo sapien
caagaaagccatattcagtacacgg

SEQ ID NO: 1468549 - DNA, 25 bp, Homo sapien
ctgcttcagcctgtcatagtcaagt

SEQ ID NO: 1468550 - DNA, 25 bp, Homo sapien
gcctgtcatagtcaagtccttccgt

SEQ ID NO: 1468551 - DNA, 25 bp, Homo sapien
tcagcctgtcatagtcaagtccttc

SEQ ID NO: 1468552 - DNA, 25 bp, Homo sapien
catagtcaagtccttccgtctggac

SEQ ID NO: 1468553 - DNA, 25 bp, Homo sapien
ctgtgataagggtgtggattttggt

SEQ ID NO: 1468554 - DNA, 25 bp, Homo sapien
ctgtataaatgagatttccaggaca

SEQ ID NO: 1468555 - DNA, 25 bp, Homo sapien
aattgtagggctgattagaacataa

SEQ ID NO: 1468556 - DNA, 25 bp, Homo sapien
taattgcaaatttaccaacccaaca

SEQ ID NO: 1468557 - DNA, 25 bp, Homo sapien
tccaggacaggtaaacaacattctt

SEQ ID NO: 1468558 - DNA, 25 bp, Homo sapien
gagagcgttgcctttaaacatctgc

SEQ ID NO: 1468559 - DNA, 25 bp, Homo sapien
cctagaaaacaatctactcagggtg

SEQ ID NO: 1468560 - DNA, 25 bp, Homo sapien
gcctctaactcctatgcacaagata

SEQ ID NO: 1468561 - DNA, 25 bp, Homo sapien
taagtaactgaaaagcattgcagga

SEQ ID NO: 1468562 - DNA, 25 bp, Homo sapien
tcaaatcacaacgtcacagcaggat

SEQ ID NO: 1468563 - DNA, 25 bp, Homo sapien
agtctcaaatcacaacgtcacagca

SEQ ID NO: 1468564 - DNA, 25 bp, Homo sapien
tctcaaatcacaacgtcacagcagg

SEQ ID NO: 1468565 - DNA, 25 bp, Homo sapien
aatcacaacgtcacagcaggatgat

SEQ ID NO: 1468566 - DNA, 25 bp, Homo sapien
tgtaatgaatcataggacctgttgt

SEQ ID NO: 1468567 - DNA, 25 bp, Homo sapien
ctgtgtaatgaatcataggacctgt

SEQ ID NO: 1468568 - DNA, 25 bp, Homo sapien
taatgaatcataggacctgttgtca

SEQ ID NO: 1468569 - DNA, 25 bp, Homo sapien
gaatcataggacctgttgtcaaaaa

SEQ ID NO: 1468570 - DNA, 25 bp, Homo sapien
taaccacagatgaatgcaccaactt

SEQ ID NO: 1468571 - DNA, 25 bp, Homo sapien
ggcatgtaaaggactagttttccca

SEQ ID NO: 1468572 - DNA, 25 bp, Homo sapien
caaaattaactcttctcaggaggca

SEQ ID NO: 1468573 - DNA, 25 bp, Homo sapien
ggaaaaccattgaaagggatacaca

SEQ ID NO: 1468574 - DNA, 25 bp, Homo sapien
gtgacttgctgccattcattgtatt

SEQ ID NO: 1468575 - DNA, 25 bp, Homo sapien
taacaggtgacttgctgccattcat

SEQ ID NO: 1468576 - DNA, 25 bp, Homo sapien
ctggagataacaggtgacttgctgc

SEQ ID NO: 1468577 - DNA, 25 bp, Homo sapien
gagataacaggtgacttgctgccat

SEQ ID NO: 1468578 - DNA, 25 bp, Homo sapien
accgccacagtggtgtcaagttcca

SEQ ID NO: 1468579 - DNA, 25 bp, Homo sapien
agctaacacagcctctcaatgaccg

SEQ ID NO: 1468580 - DNA, 25 bp, Homo sapien
tgggacaggccgaatcagaaacata

SEQ ID NO: 1468581 - DNA, 25 bp, Homo sapien
caagttccacacttgaccaggaaga

SEQ ID NO: 1468582 - DNA, 25 bp, Homo sapien
gtgtacttgttgaagaggccttaga

SEQ ID NO: 1468583 - DNA, 25 bp, Homo sapien
caggtgtacttgttgaagaggcctt

SEQ ID NO: 1468584 - DNA, 25 bp, Homo sapien
ggtgtacttgttgaagaggccttag

SEQ ID NO: 1468585 - DNA, 25 bp, Homo sapien
aggtgtacttgttgaagaggcctta

SEQ ID NO: 1468586 - DNA, 25 bp, Homo sapien
gttgatcccttttcagcaattcttc

SEQ ID NO: 1468587 - DNA, 25 bp, Homo sapien
gttctgtttctattgttgatccctt

SEQ ID NO: 1468588 - DNA, 25 bp, Homo sapien
tctattgttgatcccttttcagcaa

SEQ ID NO: 1468589 - DNA, 25 bp, Homo sapien
tgttctgtttctattgttgatccct

SEQ ID NO: 1468590 - DNA, 25 bp, Homo sapien
gcactcatttcttccattaaaccac

SEQ ID NO: 1468591 - DNA, 25 bp, Homo sapien
ggcactcatttcttccattaaacca

SEQ ID NO: 1468592 - DNA, 25 bp, Homo sapien
gggcactcatttcttccattaaacc

SEQ ID NO: 1468593 - DNA, 25 bp, Homo sapien
cactcatttcttccattaaaccact

SEQ ID NO: 1468594 - DNA, 25 bp, Homo sapien
ccacttgggaaagaggtatcctcca

SEQ ID NO: 1468595 - DNA, 25 bp, Homo sapien
cacttgggaaagaggtatcctccat

SEQ ID NO: 1468596 - DNA, 25 bp, Homo sapien
tccacttgggaaagaggtatcctcc

SEQ ID NO: 1468597 - DNA, 25 bp, Homo sapien
gctccggcaattgcagctgcaagtc

SEQ ID NO: 1468598 - DNA, 25 bp, Homo sapien
ctccggcaattgcagctgcaagtcc

SEQ ID NO: 1468599 - DNA, 25 bp, Homo sapien
ggatgccaaaaagaatccagatgca

SEQ ID NO: 1468600 - DNA, 25 bp, Homo sapien
aaaaagaatccagatgcagggaggg

SEQ ID NO: 1468601 - DNA, 25 bp, Homo sapien
caaaaagaatccagatgcagggagg

SEQ ID NO: 1468602 - DNA, 25 bp, Homo sapien
tgccaaaaagaatccagatgcaggg

SEQ ID NO: 1468603 - DNA, 25 bp, Homo sapien
ggtggaggcccggtggatgggagtg

SEQ ID NO: 1468604 - DNA, 25 bp, Homo sapien
agggagggctactgaagcctgtgca

SEQ ID NO: 1468605 - DNA, 25 bp, Homo sapien
aggtgcaagtggtcccaagacaatg

SEQ ID NO: 1468606 - DNA, 25 bp, Homo sapien
tggaggtgcaagtggtcccaagaca

SEQ ID NO: 1468607 - DNA, 25 bp, Homo sapien
gagggtacagcaggtcactttgtca

SEQ ID NO: 1468608 - DNA, 25 bp, Homo sapien
tatgtgggaaggtacgcagaatgcc

SEQ ID NO: 1468609 - DNA, 25 bp, Homo sapien
ggaggagtaagtcccagcttcagca

SEQ ID NO: 1468610 - DNA, 25 bp, Homo sapien
taaattcaatggatagccaaggctg

SEQ ID NO: 1468611 - DNA, 25 bp, Homo sapien
ctgttagtagcaataatgaaagcct

SEQ ID NO: 1468612 - DNA, 25 bp, Homo sapien
gttagtagcaataatgaaagcctta

SEQ ID NO: 1468613 - DNA, 25 bp, Homo sapien
ttagctgttagtagcaataatgaaa

SEQ ID NO: 1468614 - DNA, 25 bp, Homo sapien
gctgttagtagcaataatgaaagcc

SEQ ID NO: 1468615 - DNA, 25 bp, Homo sapien
cctgttgggatggagtctcggccgg

SEQ ID NO: 1468616 - DNA, 25 bp, Homo sapien
gttgggatggagtctcggccggctg

SEQ ID NO: 1468617 - DNA, 25 bp, Homo sapien
gggatggagtctcggccggctgaga

SEQ ID NO: 1468618 - DNA, 25 bp, Homo sapien
tgcaagcctggctcagaagcagaag

SEQ ID NO: 1468619 - DNA, 25 bp, Homo sapien
ggagtctcaacagaggcaggggcag

SEQ ID NO: 1468620 - DNA, 25 bp, Homo sapien
aggagtctcaacagaggcaggggca

SEQ ID NO: 1468621 - DNA, 25 bp, Homo sapien
cagagggagaagggagaacactagg

SEQ ID NO: 1468622 - DNA, 25 bp, Homo sapien
gcagagggagaagggagaacactag

SEQ ID NO: 1468623 - DNA, 25 bp, Homo sapien
tgcagagggagaagggagaacacta

SEQ ID NO: 1468624 - DNA, 25 bp, Homo sapien
ctgcagagggagaagggagaacact

SEQ ID NO: 1468625 - DNA, 25 bp, Homo sapien
ggagaagcttgagatccacagtgtg

SEQ ID NO: 1468626 - DNA, 25 bp, Homo sapien
tgagagtgatgcgagggaaggcagt

SEQ ID NO: 1468627 - DNA, 25 bp, Homo sapien
tggccctgaggtaggcggtggagac

SEQ ID NO: 1468628 - DNA, 25 bp, Homo sapien
gagatccacagtgtgagagtgatgc

SEQ ID NO: 1468629 - DNA, 25 bp, Homo sapien
acaaacagggaggacaggccttgga

SEQ ID NO: 1468630 - DNA, 25 bp, Homo sapien
tacagagtcaaccagcccattgggt

SEQ ID NO: 1468631 - DNA, 25 bp, Homo sapien
ccaggcacagggcttcgtagctgga

SEQ ID NO: 1468632 - DNA, 25 bp, Homo sapien
ccttggaccagtagctttgcctggg

SEQ ID NO: 1468633 - DNA, 25 bp, Homo sapien
gaggctggcaactggaatactcagg

SEQ ID NO: 1468634 - DNA, 25 bp, Homo sapien
caaaacgtgtcgctgagtgtcgcag

SEQ ID NO: 1468635 - DNA, 25 bp, Homo sapien
tggagcgttatacagggagctgtct

SEQ ID NO: 1468636 - DNA, 25 bp, Homo sapien
gcagtcactacagcataatcaggag

SEQ ID NO: 1468637 - DNA, 25 bp, Homo sapien
gcattcagacacaatgtataaatgt

SEQ ID NO: 1468638 - DNA, 25 bp, Homo sapien
caaaaccagcattcagacacaatgt

SEQ ID NO: 1468639 - DNA, 25 bp, Homo sapien
ccagcattcagacacaatgtataaa

SEQ ID NO: 1468640 - DNA, 25 bp, Homo sapien
aaaccagcattcagacacaatgtat

SEQ ID NO: 1468641 - DNA, 25 bp, Homo sapien
caagctcagatacaagaacacagaa

SEQ ID NO: 1468642 - DNA, 25 bp, Homo sapien
catccaagctcagatacaagaacac

SEQ ID NO: 1468643 - DNA, 25 bp, Homo sapien
aatattttaacacatgactgcacaa

SEQ ID NO: 1468644 - DNA, 25 bp, Homo sapien
gctcagatacaagaacacagaagag

SEQ ID NO: 1468645 - DNA, 25 bp, Homo sapien
agcacttgatattctgcgctctctc

SEQ ID NO: 1468646 - DNA, 25 bp, Homo sapien
agctgttccctttctaactgctctt

SEQ ID NO: 1468647 - DNA, 25 bp, Homo sapien
cacttgatattctgcgctctctctc

SEQ ID NO: 1468648 - DNA, 25 bp, Homo sapien
gttccctttctaactgctcttgtcg

SEQ ID NO: 1468649 - DNA, 25 bp, Homo sapien
ctctcccgttccagtctctccagcc

SEQ ID NO: 1468650 - DNA, 25 bp, Homo sapien
ccctttcttgcctctcccgttccag

SEQ ID NO: 1468651 - DNA, 25 bp, Homo sapien
cagcctctctcgttcttgtctttct

SEQ ID NO: 1468652 - DNA, 25 bp, Homo sapien
ctccagcctctctcgttcttgtctt

SEQ ID NO: 1468653 - DNA, 25 bp, Homo sapien
tccagctgttcttgttccagtcgct

SEQ ID NO: 1468654 - DNA, 25 bp, Homo sapien
ctctccagctgttcttgttccagtc

SEQ ID NO: 1468655 - DNA, 25 bp, Homo sapien
gctgttcttgttccagtcgctccct

SEQ ID NO: 1468656 - DNA, 25 bp, Homo sapien
ctgccgttcccgttcttgtctctct

SEQ ID NO: 1468657 - DNA, 25 bp, Homo sapien
cctttctaacctctctctctccaac

SEQ ID NO: 1468658 - DNA, 25 bp, Homo sapien
cagcctttccctttctaacctctct

SEQ ID NO: 1468659 - DNA, 25 bp, Homo sapien
tccctttctaacctctctctctcca

SEQ ID NO: 1468660 - DNA, 25 bp, Homo sapien
tttccctttctaacctctctctctc

SEQ ID NO: 1468661 - DNA, 25 bp, Homo sapien
gctccttttgccgttgctgttcttg

SEQ ID NO: 1468662 - DNA, 25 bp, Homo sapien
ttgccgttgctgttcttgtagttgt

SEQ ID NO: 1468663 - DNA, 25 bp, Homo sapien
ccttttgccgttgctgttcttgtag

SEQ ID NO: 1468664 - DNA, 25 bp, Homo sapien
ccagctccttttgccgttgctgttc

SEQ ID NO: 1468665 - DNA, 25 bp, Homo sapien
cagtaagatctttccaaaaatctct

SEQ ID NO: 1468666 - DNA, 25 bp, Homo sapien
atctttccaaaaatctctctccttc

SEQ ID NO: 1468667 - DNA, 25 bp, Homo sapien
gtaagatctttccaaaaatctctct

SEQ ID NO: 1468668 - DNA, 25 bp, Homo sapien
ctttccaaaaatctctctccttcat

SEQ ID NO: 1468669 - DNA, 25 bp, Homo sapien
ccggcctccgaaggccaataggagg

SEQ ID NO: 1468670 - DNA, 25 bp, Homo sapien
aggcggtcaacttttggtccatccg

SEQ ID NO: 1468671 - DNA, 25 bp, Homo sapien
gtccatccggcctccgaaggccaat

SEQ ID NO: 1468672 - DNA, 25 bp, Homo sapien
gagaaggcggtcaacttttggtcca

SEQ ID NO: 1468673 - DNA, 25 bp, Homo sapien
tgcacttacataggtatctgcttgg

SEQ ID NO: 1468674 - DNA, 25 bp, Homo sapien
tactgagactgataagtaatggacg

SEQ ID NO: 1468675 - DNA, 25 bp, Homo sapien
ggcctctgcacagaatgcacttaca

SEQ ID NO: 1468676 - DNA, 25 bp, Homo sapien
cacggcctccttgttttcccatgta

SEQ ID NO: 1468677 - DNA, 25 bp, Homo sapien
tgaagacggtcaaagcagacatggg

SEQ ID NO: 1468678 - DNA, 25 bp, Homo sapien
caggtagttgtgagttttgtctagg

SEQ ID NO: 1468679 - DNA, 25 bp, Homo sapien
gagcaggtagttgtgagttttgtct

SEQ ID NO: 1468680 - DNA, 25 bp, Homo sapien
gcaggtagttgtgagttttgtctag

SEQ ID NO: 1468681 - DNA, 25 bp, Homo sapien
ttgagcaggtagttgtgagttttgt

SEQ ID NO: 1468682 - DNA, 25 bp, Homo sapien
aacaaaagttatggaaatgcgcaag

SEQ ID NO: 1468683 - DNA, 25 bp, Homo sapien
aaagttatggaaatgcgcaagtagc

SEQ ID NO: 1468684 - DNA, 25 bp, Homo sapien
gaaatgcgcaagtagcatgtaccac

SEQ ID NO: 1468685 - DNA, 25 bp, Homo sapien
gcgcaagtagcatgtaccacagctt

SEQ ID NO: 1468686 - DNA, 25 bp, Homo sapien
tgttagaagcttcgaaggacaacgg

SEQ ID NO: 1468687 - DNA, 25 bp, Homo sapien
gtagcagtaaccttgctctgggctg

SEQ ID NO: 1468688 - DNA, 25 bp, Homo sapien
agacaccttggtgttagaagcttcg

SEQ ID NO: 1468689 - DNA, 25 bp, Homo sapien
ctgggtagcagtaaccttgctctgg

SEQ ID NO: 1468690 - DNA, 25 bp, Homo sapien
cttctttgacagcaaagatactgcc

SEQ ID NO: 1468691 - DNA, 25 bp, Homo sapien
cagcaaagatactgccacatcccat

SEQ ID NO: 1468692 - DNA, 25 bp, Homo sapien
gatactgccacatcccattaccaat

SEQ ID NO: 1468693 - DNA, 25 bp, Homo sapien
tttgacagcaaagatactgccacat

SEQ ID NO: 1468694 - DNA, 25 bp, Homo sapien
tatgtgaagtaaagctcgataaagc

SEQ ID NO: 1468695 - DNA, 25 bp, Homo sapien
tagatggacagagctctaactggct

SEQ ID NO: 1468696 - DNA, 25 bp, Homo sapien
tcgataaagctgttacggaaaataa

SEQ ID NO: 1468697 - DNA, 25 bp, Homo sapien
taacaagagtggttctagatggaca

SEQ ID NO: 1468698 - DNA, 25 bp, Homo sapien
tggccctaatgagaatcagcctggc

SEQ ID NO: 1468699 - DNA, 25 bp, Homo sapien
gaagctagggctatagatgtacgcc

SEQ ID NO: 1468700 - DNA, 25 bp, Homo sapien
ttctttctaaaacctggactgaggc

SEQ ID NO: 1468701 - DNA, 25 bp, Homo sapien
gagagtctggccctaacacatccat

SEQ ID NO: 1468702 - DNA, 25 bp, Homo sapien
ataagattagttgtttcggaaagct

SEQ ID NO: 1468703 - DNA, 25 bp, Homo sapien
taagattagttgtttcggaaagcta

SEQ ID NO: 1468704 - DNA, 25 bp, Homo sapien
cagctgtagcccgactgtgacatca

SEQ ID NO: 1468705 - DNA, 25 bp, Homo sapien
cataaggaaggtatgacttttgacc

SEQ ID NO: 1468706 - DNA, 25 bp, Homo sapien
ttcatcttggctgagaacaaaagca

SEQ ID NO: 1468707 - DNA, 25 bp, Homo sapien
catactggaaggtatgtcaggccaa

SEQ ID NO: 1468708 - DNA, 25 bp, Homo sapien
gaactaaaagcttccttgccagtga

SEQ ID NO: 1468709 - DNA, 25 bp, Homo sapien
agaactaaaagcttccttgccagtg

SEQ ID NO: 1468710 - DNA, 25 bp, Homo sapien
actaaaagcttccttgccagtgact

SEQ ID NO: 1468711 - DNA, 25 bp, Homo sapien
tgactgatccacaataccaggaggc

SEQ ID NO: 1468712 - DNA, 25 bp, Homo sapien
aaaatcaaaagtcaatgacaagagg

SEQ ID NO: 1468713 - DNA, 25 bp, Homo sapien
agagaaacaatcctttccatttggc

SEQ ID NO: 1468714 - DNA, 25 bp, Homo sapien
gaaacaatcctttccatttggctaa

SEQ ID NO: 1468715 - DNA, 25 bp, Homo sapien
aaatcaaaagtcaatgacaagagga

SEQ ID NO: 1468716 - DNA, 25 bp, Homo sapien
tgtacttcaaccctttaggaatggc

SEQ ID NO: 1468717 - DNA, 25 bp, Homo sapien
gaatttaacacttctaaggcatgca

SEQ ID NO: 1468718 - DNA, 25 bp, Homo sapien
tgccaaagttgagaccatacacctg

SEQ ID NO: 1468719 - DNA, 25 bp, Homo sapien
catggcacttgcgaagacattggca

SEQ ID NO: 1468720 - DNA, 25 bp, Homo sapien
tgcccaccactctgaatgtgttgtt

SEQ ID NO: 1468721 - DNA, 25 bp, Homo sapien
ctctgctgaatccagttgagccacc

SEQ ID NO: 1468722 - DNA, 25 bp, Homo sapien
tgtgttgttgcctgtatggtgatag

SEQ ID NO: 1468723 - DNA, 25 bp, Homo sapien
tatggtgatagatatgaactctgct

SEQ ID NO: 1468724 - DNA, 25 bp, Homo sapien
cagcagctcttgcctgacagatact

SEQ ID NO: 1468725 - DNA, 25 bp, Homo sapien
acagcagctcttgcctgacagatac

SEQ ID NO: 1468726 - DNA, 25 bp, Homo sapien
cacagcagctcttgcctgacagata

SEQ ID NO: 1468727 - DNA, 25 bp, Homo sapien
accttacccttcctaagacagcaag

SEQ ID NO: 1468728 - DNA, 25 bp, Homo sapien
ccttacccttcctaagacagcaagg

SEQ ID NO: 1468729 - DNA, 25 bp, Homo sapien
ccaccttacccttcctaagacagca

SEQ ID NO: 1468730 - DNA, 25 bp, Homo sapien
cttacccttcctaagacagcaaggc

SEQ ID NO: 1468731 - DNA, 25 bp, Homo sapien
tatatatatggaatgtcacttccaa

SEQ ID NO: 1468732 - DNA, 25 bp, Homo sapien
tatatatggaatgtcacttccaagg

SEQ ID NO: 1468733 - DNA, 25 bp, Homo sapien
ctctactgaacagaatatgggaaaa

SEQ ID NO: 1468734 - DNA, 25 bp, Homo sapien
tatatatatatggaatgtcacttcc

SEQ ID NO: 1468735 - DNA, 25 bp, Homo sapien
cagcatgagagttcacaaaaagtac

SEQ ID NO: 1468736 - DNA, 25 bp, Homo sapien
attttcaaagatcaattcccagtgc

SEQ ID NO: 1468737 - DNA, 25 bp, Homo sapien
agtgcaccagcaaacctaaaccgtc

SEQ ID NO: 1468738 - DNA, 25 bp, Homo sapien
acctaaaccgtcattcacagcatga

SEQ ID NO: 1468739 - DNA, 25 bp, Homo sapien
catacttaggcaatagtgtgctgac

SEQ ID NO: 1468740 - DNA, 25 bp, Homo sapien
gtatcctcggaggaactggctgcag

SEQ ID NO: 1468741 - DNA, 25 bp, Homo sapien
agcttcagggaattttgccatcacc

SEQ ID NO: 1468742 - DNA, 25 bp, Homo sapien
gcccaggtatccatcgacaagacga

SEQ ID NO: 1468743 - DNA, 25 bp, Homo sapien
tcatgcccggaatcccagaactttg

SEQ ID NO: 1468744 - DNA, 25 bp, Homo sapien
gcgacaagagcgaaactacgtttaa

SEQ ID NO: 1468745 - DNA, 25 bp, Homo sapien
tgggcgacaagagcgaaactacgtt

SEQ ID NO: 1468746 - DNA, 25 bp, Homo sapien
tggctcatgcccggaatcccagaac

SEQ ID NO: 1468747 - DNA, 25 bp, Homo sapien
cacctctatctacaatattaatatc

SEQ ID NO: 1468748 - DNA, 25 bp, Homo sapien
caatattaatatctgaagcatattc

SEQ ID NO: 1468749 - DNA, 25 bp, Homo sapien
taatatctgaagcatattcaagcat

SEQ ID NO: 1468750 - DNA, 25 bp, Homo sapien
ctatctacaatattaatatctgaag

SEQ ID NO: 1468751 - DNA, 25 bp, Homo sapien
tccacttacaagaggattcctatcc

SEQ ID NO: 1468752 - DNA, 25 bp, Homo sapien
agttctatgcttctgtgttaccgga

SEQ ID NO: 1468753 - DNA, 25 bp, Homo sapien
ttcttcagagcacccagctggacct

SEQ ID NO: 1468754 - DNA, 25 bp, Homo sapien
ctcatgcatgtggtagagttcttcc

SEQ ID NO: 1468755 - DNA, 25 bp, Homo sapien
tctatgttttaagggcaaatggcta

SEQ ID NO: 1468756 - DNA, 25 bp, Homo sapien
tacagtccactgagtaattagagaa

SEQ ID NO: 1468757 - DNA, 25 bp, Homo sapien
aatcaacgggtgctaaatcactgag

SEQ ID NO: 1468758 - DNA, 25 bp, Homo sapien
gagagatctggtggacactacctta

SEQ ID NO: 1468759 - DNA, 25 bp, Homo sapien
cagaacaccaggaataagagaagat

SEQ ID NO: 1468760 - DNA, 25 bp, Homo sapien
agaacaccaggaataagagaagatc

SEQ ID NO: 1468761 - DNA, 25 bp, Homo sapien
tatctgggagcacaggcatgcgcca

SEQ ID NO: 1468762 - DNA, 25 bp, Homo sapien
gttcaagtggttctcatgcccagcc

SEQ ID NO: 1468763 - DNA, 25 bp, Homo sapien
gagtatctgggagcacaggcatgcg

SEQ ID NO: 1468764 - DNA, 25 bp, Homo sapien
tcctgagtatctgggagcacaggca

SEQ ID NO: 1468765 - DNA, 25 bp, Homo sapien
tatttggcccacatacacgctcaag

SEQ ID NO: 1468766 - DNA, 25 bp, Homo sapien
ggaattatttacaccaatggcgaca

SEQ ID NO: 1468767 - DNA, 25 bp, Homo sapien
ttcacatgagtacaaaagcaggcaa

SEQ ID NO: 1468768 - DNA, 25 bp, Homo sapien
gaatgatacagatgaacggcacaga

SEQ ID NO: 1468769 - DNA, 25 bp, Homo sapien
tgaaaggatcttagctgtacagtgc

SEQ ID NO: 1468770 - DNA, 25 bp, Homo sapien
caactggtcagaggtatgattcacg

SEQ ID NO: 1468771 - DNA, 25 bp, Homo sapien
tacagtgctaagtggacagtgtggt

SEQ ID NO: 1468772 - DNA, 25 bp, Homo sapien
cagtgtggtgacaggatggcaatta

SEQ ID NO: 1468773 - DNA, 25 bp, Homo sapien
catagtacccgacaagtagtgtttt

SEQ ID NO: 1468774 - DNA, 25 bp, Homo sapien
tgtgaacatagtacccgacaagtag

SEQ ID NO: 1468775 - DNA, 25 bp, Homo sapien
ccccaagttgtgaacatagtacccg

SEQ ID NO: 1468776 - DNA, 25 bp, Homo sapien
cctgccccccaagttgtgaacatag

SEQ ID NO: 1468777 - DNA, 25 bp, Homo sapien
cagctatgaggcctctggatcagta

SEQ ID NO: 1468778 - DNA, 25 bp, Homo sapien
tatctactgtatgactccagccaag

SEQ ID NO: 1468779 - DNA, 25 bp, Homo sapien
cagagatgctctggtctgtggcgaa

SEQ ID NO: 1468780 - DNA, 25 bp, Homo sapien
gaaggacttataccctgtggcatgc

SEQ ID NO: 1468781 - DNA, 25 bp, Homo sapien
cttgaaactgcttataaattgtggt

SEQ ID NO: 1468782 - DNA, 25 bp, Homo sapien
gtcagttccaatttataaatgagct

SEQ ID NO: 1468783 - DNA, 25 bp, Homo sapien
agtcagttccaatttataaatgagc

SEQ ID NO: 1468784 - DNA, 25 bp, Homo sapien
aaactgcttataaattgtggttggg

SEQ ID NO: 1468785 - DNA, 25 bp, Homo sapien
ccaactatgtactattatctctgaa

SEQ ID NO: 1468786 - DNA, 25 bp, Homo sapien
ggtcaattcatcctacaagatcttg

SEQ ID NO: 1468787 - DNA, 25 bp, Homo sapien
caaacagttatgtatgagagcttac

SEQ ID NO: 1468788 - DNA, 25 bp, Homo sapien
caagatcttgttcttacgccaatta

SEQ ID NO: 1468789 - DNA, 25 bp, Homo sapien
gcagagggatgggatagacacacca

SEQ ID NO: 1468790 - DNA, 25 bp, Homo sapien
tattgttaagtgagcgatgaggcag

SEQ ID NO: 1468791 - DNA, 25 bp, Homo sapien
catgttgtcatgaggaggctgctat

SEQ ID NO: 1468792 - DNA, 25 bp, Homo sapien
aacacacgaatgagtccaggtaaga

SEQ ID NO: 1468793 - DNA, 25 bp, Homo sapien
aatgtagttatcttctgctatagac

SEQ ID NO: 1468794 - DNA, 25 bp, Homo sapien
tcattgtaaaatagaaggttcccag

SEQ ID NO: 1468795 - DNA, 25 bp, Homo sapien
ccaaagttgtatgcactgacaaaaa

SEQ ID NO: 1468796 - DNA, 25 bp, Homo sapien
tctttggaaaagttgcctgttaata

SEQ ID NO: 1468797 - DNA, 25 bp, Homo sapien
acctggatcttctgacccttgattg

SEQ ID NO: 1468798 - DNA, 25 bp, Homo sapien
cttgattgtaccacactctgaaatg

SEQ ID NO: 1468799 - DNA, 25 bp, Homo sapien
caattaacaggtcagcatataaaac

SEQ ID NO: 1468800 - DNA, 25 bp, Homo sapien
ttaacaggtcagcatataaaacctg

SEQ ID NO: 1468801 - DNA, 25 bp, Homo sapien
agggaacagcttcctcacctataaa

SEQ ID NO: 1468802 - DNA, 25 bp, Homo sapien
aaataaggtcgcaaggtggagccca

SEQ ID NO: 1468803 - DNA, 25 bp, Homo sapien
ctaaataaggtcgcaaggtggagcc

SEQ ID NO: 1468804 - DNA, 25 bp, Homo sapien
gtcgcaaggtggagcccactgccca

SEQ ID NO: 1468805 - DNA, 25 bp, Homo sapien
aaggtcgcaaggtggagcccactgc

SEQ ID NO: 1468806 - DNA, 25 bp, Homo sapien
tacccaaatagtctaacatagaaat

SEQ ID NO: 1468807 - DNA, 25 bp, Homo sapien
cccaaatagtctaacatagaaatag

SEQ ID NO: 1468808 - DNA, 25 bp, Homo sapien
ttacccaaatagtctaacatagaaa

SEQ ID NO: 1468809 - DNA, 25 bp, Homo sapien
caaatagtctaacatagaaataggc

SEQ ID NO: 1468810 - DNA, 25 bp, Homo sapien
cactactcagttaagaattatctct

SEQ ID NO: 1468811 - DNA, 25 bp, Homo sapien
tcctcactactcagttaagaattat

SEQ ID NO: 1468812 - DNA, 25 bp, Homo sapien
aacataaatttaaggcttaccagtg

SEQ ID NO: 1468813 - DNA, 25 bp, Homo sapien
aggcttaccagtgtataaagtacct

SEQ ID NO: 1468814 - DNA, 25 bp, Homo sapien
ttaaacacgagagttcggaggcaaa

SEQ ID NO: 1468815 - DNA, 25 bp, Homo sapien
taattaaacacgagagttcggaggc

SEQ ID NO: 1468816 - DNA, 25 bp, Homo sapien
acgagagttcggaggcaaaagtgca

SEQ ID NO: 1468817 - DNA, 25 bp, Homo sapien
aacacgagagttcggaggcaaaagt

SEQ ID NO: 1468818 - DNA, 25 bp, Homo sapien
ggtggggagcagctcggagacggga

SEQ ID NO: 1468819 - DNA, 25 bp, Homo sapien
tgccggcggcgcagaggcttcccca

SEQ ID NO: 1468820 - DNA, 25 bp, Homo sapien
cccaccagccgggagacgcagaagg

SEQ ID NO: 1468821 - DNA, 25 bp, Homo sapien
gacgggagacaagtgtccggctcct

SEQ ID NO: 1468822 - DNA, 25 bp, Homo sapien
acaccatctcctcgcacaaagccga

SEQ ID NO: 1468823 - DNA, 25 bp, Homo sapien
caccatctcctcgcacaaagccgag

SEQ ID NO: 1468824 - DNA, 25 bp, Homo sapien
accatctcctcgcacaaagccgagg

SEQ ID NO: 1468825 - DNA, 25 bp, Homo sapien
cgccgaggccgtgtgcaaccggcag

SEQ ID NO: 1468826 - DNA, 25 bp, Homo sapien
ccgaggccgtgtgcaaccggcagct

SEQ ID NO: 1468827 - DNA, 25 bp, Homo sapien
gccgccgaggccgtgtgcaaccggc

SEQ ID NO: 1468828 - DNA, 25 bp, Homo sapien
gccgccctctgaggggtgcccgccg

SEQ ID NO: 1468829 - DNA, 25 bp, Homo sapien
tttccagcgtcattagcaaagaggg

SEQ ID NO: 1468830 - DNA, 25 bp, Homo sapien
agaagagaaacgcagccagtggagc

SEQ ID NO: 1468831 - DNA, 25 bp, Homo sapien
cacactaggtatagggatgacttca

SEQ ID NO: 1468832 - DNA, 25 bp, Homo sapien
tgctgcgccgatggaacgagttgat

SEQ ID NO: 1468833 - DNA, 25 bp, Homo sapien
tttattcaaggatctccaaccactg

SEQ ID NO: 1468834 - DNA, 25 bp, Homo sapien
tccaaccactggagagaaaacaaac

SEQ ID NO: 1468835 - DNA, 25 bp, Homo sapien
gccagtcaaatgttctagttgccat

SEQ ID NO: 1468836 - DNA, 25 bp, Homo sapien
agagaaaacaaacttgccagtcaaa

SEQ ID NO: 1468837 - DNA, 25 bp, Homo sapien
agatattgcaatgggtggcctgacc

SEQ ID NO: 1468838 - DNA, 25 bp, Homo sapien
gcagcctgccagctcacaagttggt

SEQ ID NO: 1468839 - DNA, 25 bp, Homo sapien
gcaaatgttccaatggtatgggcac

SEQ ID NO: 1468840 - DNA, 25 bp, Homo sapien
gggcaccaaattaagcaatccaagt

SEQ ID NO: 1468841 - DNA, 25 bp, Homo sapien
gaatctacaatgcagcagcaacagc

SEQ ID NO: 1468842 - DNA, 25 bp, Homo sapien
gaccttcctcagttaactttgctag

SEQ ID NO: 1468843 - DNA, 25 bp, Homo sapien
tgtagtggtctgagatctcacaact

SEQ ID NO: 1468844 - DNA, 25 bp, Homo sapien
tgctagcagatgtgatcgtgaagaa

SEQ ID NO: 1468845 - DNA, 25 bp, Homo sapien
tctcgggccggtgcttcggccctcc

SEQ ID NO: 1468846 - DNA, 25 bp, Homo sapien
gggccggtgcttcggccctccagac

SEQ ID NO: 1468847 - DNA, 25 bp, Homo sapien
cggtgcttcggccctccagactggg

SEQ ID NO: 1468848 - DNA, 25 bp, Homo sapien
tgccttctctcgggccggtgcttcg

SEQ ID NO: 1468849 - DNA, 25 bp, Homo sapien
gcagccacagccgcgctccgagggt

SEQ ID NO: 1468850 - DNA, 25 bp, Homo sapien
gccacagccgcgctccgagggttgg

SEQ ID NO: 1468851 - DNA, 25 bp, Homo sapien
agccacagccgcgctccgagggttg

SEQ ID NO: 1468852 - DNA, 25 bp, Homo sapien
ccacagccgcgctccgagggttggg

SEQ ID NO: 1468853 - DNA, 25 bp, Homo sapien
gggtaacggagcctgaatcgagcat

SEQ ID NO: 1468854 - DNA, 25 bp, Homo sapien
tctcagggtaacggagcctgaatcg

SEQ ID NO: 1468855 - DNA, 25 bp, Homo sapien
tcagggtaacggagcctgaatcgag

SEQ ID NO: 1468856 - DNA, 25 bp, Homo sapien
cagggtaacggagcctgaatcgagc

SEQ ID NO: 1468857 - DNA, 25 bp, Homo sapien
ccctactccgactccccagttgtgt

SEQ ID NO: 1468858 - DNA, 25 bp, Homo sapien
cccctactccgactccccagttgtg

SEQ ID NO: 1468859 - DNA, 25 bp, Homo sapien
cctactccgactccccagttgtgtc

SEQ ID NO: 1468860 - DNA, 25 bp, Homo sapien
tcagctcagaacagaacatattggg

SEQ ID NO: 1468861 - DNA, 25 bp, Homo sapien
gccatgatcactccatgcagtgggt

SEQ ID NO: 1468862 - DNA, 25 bp, Homo sapien
ttgataaggagcctaaaagcctgga

SEQ ID NO: 1468863 - DNA, 25 bp, Homo sapien
gaactcaagttacccaagtgtggca

SEQ ID NO: 1468864 - DNA, 25 bp, Homo sapien
ggccttttggtctttggatagttca

SEQ ID NO: 1468865 - DNA, 25 bp, Homo sapien
cactgaggctaagttagcagaagac

SEQ ID NO: 1468866 - DNA, 25 bp, Homo sapien
agactgttctcttaagaatggaggc

SEQ ID NO: 1468867 - DNA, 25 bp, Homo sapien
tctcaaagctttactagtggggcaa

SEQ ID NO: 1468868 - DNA, 25 bp, Homo sapien
gttgagtgaccgaaaatgtacatac

SEQ ID NO: 1468869 - DNA, 25 bp, Homo sapien
tagtggcaaccaatgactattagtg

SEQ ID NO: 1468870 - DNA, 25 bp, Homo sapien
cattaatcatgctccagatgttaca

SEQ ID NO: 1468871 - DNA, 25 bp, Homo sapien
aaagttcttaaacccctcacagcat

SEQ ID NO: 1468872 - DNA, 25 bp, Homo sapien
ggcagaaggagcatagcgacctctt

SEQ ID NO: 1468873 - DNA, 25 bp, Homo sapien
tcttgcgatagattagcagccccaa

SEQ ID NO: 1468874 - DNA, 25 bp, Homo sapien
gacaggactgtactagccagatggc

SEQ ID NO: 1468875 - DNA, 25 bp, Homo sapien
gaagtggacagaggccgagttctca

SEQ ID NO: 1468876 - DNA, 25 bp, Homo sapien
ttttccattatctctgtttgtttgt

SEQ ID NO: 1468877 - DNA, 25 bp, Homo sapien
ttgtttgtttgtttgagacaaggtc

SEQ ID NO: 1468878 - DNA, 25 bp, Homo sapien
cttttccattatctctgtttgtttg

SEQ ID NO: 1468879 - DNA, 25 bp, Homo sapien
tttgtttgagacaaggtcttgctca

SEQ ID NO: 1468880 - DNA, 25 bp, Homo sapien
aaagctgagtcaacctctcggcagg

SEQ ID NO: 1468881 - DNA, 25 bp, Homo sapien
ggagcttcgagagtcccaggcttgc

SEQ ID NO: 1468882 - DNA, 25 bp, Homo sapien
cacgaagtccttactacaagtcagg

SEQ ID NO: 1468883 - DNA, 25 bp, Homo sapien
ccttggcaaggcaagtcagggaatg

SEQ ID NO: 1468884 - DNA, 25 bp, Homo sapien
taatcctagccactccggaagctga

SEQ ID NO: 1468885 - DNA, 25 bp, Homo sapien
ggaaggtgaaggttgcagaagccaa

SEQ ID NO: 1468886 - DNA, 25 bp, Homo sapien
aatcctagccactccggaagctgag

SEQ ID NO: 1468887 - DNA, 25 bp, Homo sapien
ctgtaatcctagccactccggaagc

SEQ ID NO: 1468888 - DNA, 25 bp, Homo sapien
ggtctccttgtctgaacgcccctac

SEQ ID NO: 1468889 - DNA, 25 bp, Homo sapien
gagtccactaagtaatccaaaacaa

SEQ ID NO: 1468890 - DNA, 25 bp, Homo sapien
ccatgctgagtccactaagtaatcc

SEQ ID NO: 1468891 - DNA, 25 bp, Homo sapien
ttgtctgaacgcccctacctagctg

SEQ ID NO: 1468892 - DNA, 25 bp, Homo sapien
tgaagctcgaggctgtagcaagcca

SEQ ID NO: 1468893 - DNA, 25 bp, Homo sapien
tcctgaagctcgaggctgtagcaag

SEQ ID NO: 1468894 - DNA, 25 bp, Homo sapien
aagctcgaggctgtagcaagccatg

SEQ ID NO: 1468895 - DNA, 25 bp, Homo sapien
tgagtcctgaagctcgaggctgtag

SEQ ID NO: 1468896 - DNA, 25 bp, Homo sapien
aaatttacatacacttggccgggca

SEQ ID NO: 1468897 - DNA, 25 bp, Homo sapien
cttaccaaggagcaaatcaaggttg

SEQ ID NO: 1468898 - DNA, 25 bp, Homo sapien
tagtggactctaaactcaaattcag

SEQ ID NO: 1468899 - DNA, 25 bp, Homo sapien
tcctggttataaatgccagaatccc

SEQ ID NO: 1468900 - DNA, 25 bp, Homo sapien
tagtctaaagcagctacagtgctga

SEQ ID NO: 1468901 - DNA, 25 bp, Homo sapien
caagccagcagcacttcggactagt

SEQ ID NO: 1468902 - DNA, 25 bp, Homo sapien
caagcctcagggattagactgctcc

SEQ ID NO: 1468903 - DNA, 25 bp, Homo sapien
tgtttttagaagacaactgaggaaa

SEQ ID NO: 1468904 - DNA, 25 bp, Homo sapien
gatgagtgtagaggaagagcttaac

SEQ ID NO: 1468905 - DNA, 25 bp, Homo sapien
gaacaattacagcaacccatcaaag

SEQ ID NO: 1468906 - DNA, 25 bp, Homo sapien
ggttggtcttaaatccttgcctcag

SEQ ID NO: 1468907 - DNA, 25 bp, Homo sapien
gacccagatctttgaaccccaagtc

SEQ ID NO: 1468908 - DNA, 25 bp, Homo sapien
tggtctgtcagcctttttagttcct

SEQ ID NO: 1468909 - DNA, 25 bp, Homo sapien
taacctgttgattatacccagtatc

SEQ ID NO: 1468910 - DNA, 25 bp, Homo sapien
aattgaagatggcattaccactgga

SEQ ID NO: 1468911 - DNA, 25 bp, Homo sapien
ttctctccgcaacacatttaacctg

SEQ ID NO: 1468912 - DNA, 25 bp, Homo sapien
cctgacctcgtgagtgaactcctgc

SEQ ID NO: 1468913 - DNA, 25 bp, Homo sapien
ctcgtgagtgaactcctgccctccc

SEQ ID NO: 1468914 - DNA, 25 bp, Homo sapien
cgtgagtgaactcctgccctcccaa

SEQ ID NO: 1468915 - DNA, 25 bp, Homo sapien
gacctcgtgagtgaactcctgccct

SEQ ID NO: 1468916 - DNA, 25 bp, Homo sapien
tccagaattgtcttgaggcctctgg

SEQ ID NO: 1468917 - DNA, 25 bp, Homo sapien
aaatgcttgatgagttccctttcct

SEQ ID NO: 1468918 - DNA, 25 bp, Homo sapien
gctgtaggttgcagttccattagcc

SEQ ID NO: 1468919 - DNA, 25 bp, Homo sapien
ggcctctggtgctagattgtaacca

SEQ ID NO: 1468920 - DNA, 25 bp, Homo sapien
ccatctctttacctcatgatccacc

SEQ ID NO: 1468921 - DNA, 25 bp, Homo sapien
tcctttgcaatattgaatcccacct

SEQ ID NO: 1468922 - DNA, 25 bp, Homo sapien
aaacccaacttgaggattacttcat

SEQ ID NO: 1468923 - DNA, 25 bp, Homo sapien
ctgtgatgtgttaggcctcagtgct

SEQ ID NO: 1468924 - DNA, 25 bp, Homo sapien
gattgttactcccttgcttagaaac

SEQ ID NO: 1468925 - DNA, 25 bp, Homo sapien
tgtgattgtcacagagtggttaggt

SEQ ID NO: 1468926 - DNA, 25 bp, Homo sapien
tggttaggtatacttgctgaagaaa

SEQ ID NO: 1468927 - DNA, 25 bp, Homo sapien
tgggtgtgaaccactaagtacttct

SEQ ID NO: 1468928 - DNA, 25 bp, Homo sapien
tcttaaatcttgacattccacacag

SEQ ID NO: 1468929 - DNA, 25 bp, Homo sapien
ctggtttcgaactgctgacctggtg

SEQ ID NO: 1468930 - DNA, 25 bp, Homo sapien
cgaactgctgacctggtggtccgcc

SEQ ID NO: 1468931 - DNA, 25 bp, Homo sapien
tgcagccctcactcctgggttcaag

SEQ ID NO: 1468932 - DNA, 25 bp, Homo sapien
gtttcgaactgctgacctggtggtc

SEQ ID NO: 1468933 - DNA, 25 bp, Homo sapien
tctaatacctaattcgaaggaagaa

SEQ ID NO: 1468934 - DNA, 25 bp, Homo sapien
gaccatagcaggatttaacatttaa

SEQ ID NO: 1468935 - DNA, 25 bp, Homo sapien
ggtttatgtgttgaccagctataca

SEQ ID NO: 1468936 - DNA, 25 bp, Homo sapien
actcagttacttatggctgggagaa

SEQ ID NO: 1468937 - DNA, 25 bp, Homo sapien
cattttagcatggtaagttccctta

SEQ ID NO: 1468938 - DNA, 25 bp, Homo sapien
taactaagtgggctgttcagaagct

SEQ ID NO: 1468939 - DNA, 25 bp, Homo sapien
tcccttagctatatgaattttggca

SEQ ID NO: 1468940 - DNA, 25 bp, Homo sapien
gaacaagaaatgcatctgtcttaga

SEQ ID NO: 1468941 - DNA, 25 bp, Homo sapien
ttcctcacagcggttgggggtgccc

SEQ ID NO: 1468942 - DNA, 25 bp, Homo sapien
tgttctgagtgtctctgccacgggc

SEQ ID NO: 1468943 - DNA, 25 bp, Homo sapien
tcctgaagtctaggccgtgttctga

SEQ ID NO: 1468944 - DNA, 25 bp, Homo sapien
ccgcctggctggctttagtccagga

SEQ ID NO: 1468945 - DNA, 25 bp, Homo sapien
tgaatatactttcccacgttccagt

SEQ ID NO: 1468946 - DNA, 25 bp, Homo sapien
caggacctgtttgctgccaagttgt

SEQ ID NO: 1468947 - DNA, 25 bp, Homo sapien
gaaatgaatatactttcccacgttc

SEQ ID NO: 1468948 - DNA, 25 bp, Homo sapien
gctgtggcaggacctgtttgctgcc

SEQ ID NO: 1468949 - DNA, 25 bp, Homo sapien
cagcagtgggcccagcaaatgtagc

SEQ ID NO: 1468950 - DNA, 25 bp, Homo sapien
ccagcaaatgtagccaccaggtcgg

SEQ ID NO: 1468951 - DNA, 25 bp, Homo sapien
gtggaagaagcaaccctgccctctt

SEQ ID NO: 1468952 - DNA, 25 bp, Homo sapien
tgggcccagcaaatgtagccaccag

SEQ ID NO: 1468953 - DNA, 25 bp, Homo sapien
ggtcctcgggctgccctacaggaag

SEQ ID NO: 1468954 - DNA, 25 bp, Homo sapien
cagaactcggaccctggtcctcggg

SEQ ID NO: 1468955 - DNA, 25 bp, Homo sapien
ttcaccacgaccaaacaacccagaa

SEQ ID NO: 1468956 - DNA, 25 bp, Homo sapien
agacggcaggctcaggttcctccat

SEQ ID NO: 1468957 - DNA, 25 bp, Homo sapien
gaatctactgctcaggagaactgct

SEQ ID NO: 1468958 - DNA, 25 bp, Homo sapien
gtttagatgactgtactggactcca

SEQ ID NO: 1468959 - DNA, 25 bp, Homo sapien
atttatggaggcctgctgtgagcca

SEQ ID NO: 1468960 - DNA, 25 bp, Homo sapien
taatcctgtattgctggatacgtgg

SEQ ID NO: 1468961 - DNA, 25 bp, Homo sapien
tccggaaggtctgctaggtaactcc

SEQ ID NO: 1468962 - DNA, 25 bp, Homo sapien
tgtagcatcacgtcagtccggaagg

SEQ ID NO: 1468963 - DNA, 25 bp, Homo sapien
ggtaactccctagatcttgtccaga

SEQ ID NO: 1468964 - DNA, 25 bp, Homo sapien
ggtaccacgctctgacttctgactg

SEQ ID NO: 1468965 - DNA, 25 bp, Homo sapien
gaatcacagagtatatacccttgag

SEQ ID NO: 1468966 - DNA, 25 bp, Homo sapien
catttatgccattgtcccagcttta

SEQ ID NO: 1468967 - DNA, 25 bp, Homo sapien
tgtgagattcatttatgccattgtc

SEQ ID NO: 1468968 - DNA, 25 bp, Homo sapien
gaatagaatcacagagtatataccc

SEQ ID NO: 1468969 - DNA, 25 bp, Homo sapien
gaggcatgtgagcacccaggagtta

SEQ ID NO: 1468970 - DNA, 25 bp, Homo sapien
tacggaattccgatacctggaggat

SEQ ID NO: 1468971 - DNA, 25 bp, Homo sapien
ttaaggcaggcctgtgctcgaacgt

SEQ ID NO: 1468972 - DNA, 25 bp, Homo sapien
gcacatagactgaaaaaccccgcct

SEQ ID NO: 1468973 - DNA, 25 bp, Homo sapien
gaatgaatgcgcaaaggactgtgag

SEQ ID NO: 1468974 - DNA, 25 bp, Homo sapien
cagggtcacgtgactgcgtgttcca

SEQ ID NO: 1468975 - DNA, 25 bp, Homo sapien
gattctttgtctaagcggcagagag

SEQ ID NO: 1468976 - DNA, 25 bp, Homo sapien
gtgggagagcccagtacatagatgt

SEQ ID NO: 1468977 - DNA, 25 bp, Homo sapien
gcaagtcagcgtcaagagagtccct

SEQ ID NO: 1468978 - DNA, 25 bp, Homo sapien
gaccatgctgtcctttggctccgag

SEQ ID NO: 1468979 - DNA, 25 bp, Homo sapien
taaaagcggctggaactcagtgaca

SEQ ID NO: 1468980 - DNA, 25 bp, Homo sapien
gggctatgctgcaccagaccaatgg

SEQ ID NO: 1468981 - DNA, 25 bp, Homo sapien
tattctcccggactcatcagtttgg

SEQ ID NO: 1468982 - DNA, 25 bp, Homo sapien
tccaccacatggtcttggcgacaaa

SEQ ID NO: 1468983 - DNA, 25 bp, Homo sapien
agctggatgccagcgggacctcaga

SEQ ID NO: 1468984 - DNA, 25 bp, Homo sapien
cagcatctctttggttatcggttgt

SEQ ID NO: 1468985 - DNA, 25 bp, Homo sapien
gcagtcccaacgcattcccactcag

SEQ ID NO: 1468986 - DNA, 25 bp, Homo sapien
tgggcagtcccaacgcattcccact

SEQ ID NO: 1468987 - DNA, 25 bp, Homo sapien
agtcccaacgcattcccactcagcc

SEQ ID NO: 1468988 - DNA, 25 bp, Homo sapien
gctgggcagtcccaacgcattccca

SEQ ID NO: 1468989 - DNA, 25 bp, Homo sapien
gaacttgggagtcaggccgcttcac

SEQ ID NO: 1468990 - DNA, 25 bp, Homo sapien
acttgggagtcaggccgcttcacct

SEQ ID NO: 1468991 - DNA, 25 bp, Homo sapien
ggagtcaggccgcttcacctgtctt

SEQ ID NO: 1468992 - DNA, 25 bp, Homo sapien
agtcaggccgcttcacctgtcttct

SEQ ID NO: 1468993 - DNA, 25 bp, Homo sapien
tgctgctgcggagacagtgctgtcc

SEQ ID NO: 1468994 - DNA, 25 bp, Homo sapien
tgtggatggcaccataggtctgctg

SEQ ID NO: 1468995 - DNA, 25 bp, Homo sapien
cactgtccagggatagtcccgctga

SEQ ID NO: 1468996 - DNA, 25 bp, Homo sapien
cgttcagaatccgaggcacgtaggg

SEQ ID NO: 1468997 - DNA, 25 bp, Homo sapien
gaaacaccgacatccatttaggaca

SEQ ID NO: 1468998 - DNA, 25 bp, Homo sapien
ttaagaccgaaaatatgacacctgc

SEQ ID NO: 1468999 - DNA, 25 bp, Homo sapien
ctgcagaatttcctagcagccaggg

SEQ ID NO: 1469000 - DNA, 25 bp, Homo sapien
cagacagtggccataaaggacatat

SEQ ID NO: 1469001 - DNA, 25 bp, Homo sapien
gggatggccatgaatcgagacaaga

SEQ ID NO: 1469002 - DNA, 25 bp, Homo sapien
gatggccatgaatcgagacaagact

SEQ ID NO: 1469003 - DNA, 25 bp, Homo sapien
ccatgaatcgagacaagactctatc

SEQ ID NO: 1469004 - DNA, 25 bp, Homo sapien
tggccatgaatcgagacaagactct

SEQ ID NO: 1469005 - DNA, 25 bp, Homo sapien
tgtgaacggtgggggcatgtgggcc

SEQ ID NO: 1469006 - DNA, 25 bp, Homo sapien
atgtgggcctctgcctcacttcctt

SEQ ID NO: 1469007 - DNA, 25 bp, Homo sapien
gggcatgtgggcctctgcctcactt

SEQ ID NO: 1469008 - DNA, 25 bp, Homo sapien
acttcctttgtcacttgcaggctct

SEQ ID NO: 1469009 - DNA, 25 bp, Homo sapien
aaacttgcgatgataaacaaaactg

SEQ ID NO: 1469010 - DNA, 25 bp, Homo sapien
aaaacttgcgatgataaacaaaact

SEQ ID NO: 1469011 - DNA, 25 bp, Homo sapien
gaagcatccaaagcaggtgtgagcc

SEQ ID NO: 1469012 - DNA, 25 bp, Homo sapien
tttgtagttcagagggctgaggtgc

SEQ ID NO: 1469013 - DNA, 25 bp, Homo sapien
ggaaggtgaacagagtggcgggggc

SEQ ID NO: 1469014 - DNA, 25 bp, Homo sapien
gggctgaggtgcttgaagcatccaa

SEQ ID NO: 1469015 - DNA, 25 bp, Homo sapien
gcggcaaagtggatccccttctcca

SEQ ID NO: 1469016 - DNA, 25 bp, Homo sapien
atgtgcttgagcaggatgtagatga

SEQ ID NO: 1469017 - DNA, 25 bp, Homo sapien
ctgccaaggcctggttcacagcggc

SEQ ID NO: 1469018 - DNA, 25 bp, Homo sapien
gcttggctgggaggtagacgaagta
